United States Patent Application Publication US 2014/0057251 A1 - sequence listing, part 159

SEQ ID NO: 305181 - DNA, 2527 bp, Cannabis indica
tttcctatttatttgaaggaccgcataatattaatatgaaacaaatgtcaattatctaggaccatcattgcctcacccacccatgcatactattctgctcatcaaagtcttaagcatccaccatgtttctagtccttatataatgcatgtaaacatattttgactagaccgatcatgttcctcctcactagttagcacttccacaaaacaattacagactaacctgaacaaataacagattaaatccagaagctcatattgtcaaaaagtccttcttttttatggttcaatatttcatctttcatcaaatgaatatttcagaatctgttagaggaaaagaagggatcagcctgatattttaataaaggcaaacttgtaaagaagggtcacttctacaattatatctataattgaaaatgtttaaaagcaatgatataagaaaatatggaacttactaaggattggtcaccggagttaataatggtttgttttaaaaagaaagcctccagattggcaatcataactgaagcagccttctcaaaagactctggagtaagtacagcagcatgtggagaaagaactacattatccaattggaagagctcttcaggaacatttgaggcaatatcattttcaaacacatccaaaccagctcctctgatatcttctcctaccaaacacctcaccaattccttctcatcaataagagcaccacgcccaacgttaacaatcacaccctcctttcccaaagcagaaagaacttccttgttaaccatatgatgtgtttcatctgttaaactacagcacaagatgataacatcgttattttcagcaagttctttaacattagaataaaaagggtatgtaatggaaggttttttgctccttgagttgtaagagattgtgcaaccaaatgcctcaagccttttaccaacttcacagcctatgctccccaatccaacaattccaacacgctttcctcccaactgaaaattaacaaccctgattcttattattactattattattatcatttatttattttgcaatgacaaaaagaataatgaaaaacaacatacaaaaccaaaacctacaaaacctaaataagccgaaaaaaaaaagtgggattttatctaactaaacaagttgtctatgttattcttagctaagcaattgtaaatggtaaattgaattgacaatgtggagttagcaaaattcagtttgacaaatccttagtttttgttaaattacagctataaaatatatgggatattcttaactattgtatttttccctaaaaataaagtagtagtgcttaccttgtgagcaagaggaaaatcccctttgactttccagaacccatgtctgatgtagcgatcggaggccgaaactttcctaagcacatcaatcaataaacccacggccatatcagccacatcttccgagtaagcgttcccaacattggccaccgaaacccctcggcgacggcactcggccaagtcgacctgattgacgcccgcgctggaagtcaccaccaatcgcagcgctggaagcagttggagtaggccggcgttgacggaggtggcgtggctggcaatcatcgctcggactgagcttgcatttctcttcagaaactggtctagaggtagctccgactcccatgctttcaccaatcggaacttttgatcaaataatggcgacaaattagtgggtagcgtctttacaatcagtaggagttggggccgatcgtctggttggctttggagctcttccatttttggtgtataattgggaaagaggaattgaagaagatctgcaacaaaatttattaattttaaatttaattgaccaaaaccaaccacccataatattccattatcttttttttacagcatcatggagatcttttagttaaatgatacttgaatggtctttaacagctttactttaaagaattctggataatccgtaattttgaccatttttaataactacttacccattagaccatctctaaagaagtaaaagttgtaactatatttttactaaaaaatagttttgtaatattgtttcaaacttttatggttgtgatttaatatattattataaattttaatatgttatttaatacttatcttaattaattttttttttttgataaaatcttaataatttatttaaaatatatcaaataattatacataattaaataaaatttaataataataatataagttaaatgagcatattagctaaaatttaatgataaagtattaaaaatagcaaaataataaatataaaacatagcatttattagggaaatttacacagtttactgttttttcccattttctttcttttatactgttacacgcccaaaataacttttatactgtttttttttttcgaaattaacttttatactgttttttttttcggtactgccaacaattttatgttattgttttgtttttttttttttgattgattgggacatgggctaaagttatttatttaattttttatt

SEQ ID NO: 305182 - DNA, 2289 bp, Cannabis indica
aacaaaaatacggtcttttatgttgtattcttgttaatttgttgttgtatttttattattgtattgtttattttttgttgttatttgatgttatttcatactaatttatgttagttttttttttgttgtatttgtattatttttattaaaaacagtaaaaaaaaagtaaataatggtacataagtaattatttcaaccaaaacatattatatttattttagaaattatagtcctcttgctattttttttttttttttgaaggaagtcctcttgctatttattaatagagttttctctctcccgcacagactgacaaaacaaaccatatatatcagtgtagagatttatcgatcataaagacataaactaatcaacggataacaatggccgactctgtagacactttgcagttcctcaaactcgttcccagcccagacggcactcttactcgccccgctatcttccccaacgtccctgcatcagatgagccacacgatacagccgtcatctccaaagatttccctctcaattccgccaccggaaccttcctccgagctttcaagcccaacccccttccgacgagtcccaatcttcccgtcatcctctacttccacggcggcggcttcatcgccttcagcgccacctcgctcccttaccacaaatcatgcgccgactcagcggtccagcttcgcgcgcttgtcctatcactcgagtaccgtctcgctcccgaacaccgtctcccagccgcctacgacgacgccgtagaagctctccgctggatagccgccgtagcgggcggcgtctcagccgagccgtggcttagcgagtgtgccgatttcaccaagtgttttgtgatgggaagtagcgctggggggaatatggtgtaccacgcgggtttacgtgcgctcgatctggatctgtcacctatggtgatccgagggctgtggtttaaccaacctttcttcggtggggtccacaggacggaatcagagttgtgtcacgtcagcgatcatatattgcctttggcagccaccgacttgatgtggaacttggctttgcccgaaggcgctgaccgtaatcatgagtattctaatccaacggtcgccaattgtggtgttggtgatgagaggatcaaacggttgccgaggagtctggtaactggatacggtggggatccactcgttgataggcagaaggagtttgtggagttactcaagaagcgaggggtccacgtagagacccacttcgaagatggtggattccacgctgctgagctctttgaatctgccaaagctgagaagttaaacgacgtcgtcagccgtttcattcgaaagtcatgcctcgtgaatccatgatgatgccctcattttcccaattatatcaagttttatttttgatctttctattatgaatatgagacaaatgaaaaattatatatgaatctattaaataagaatatcaagttttatactttttgttctgaattatggatcccttgctctaccttttttggtgaaacaaaaggaaatatatagcttcacgtgctgcaaataattaaaacttttatgggtaaaggggaaattaatatcctttaaagctatcctttctcatttaatgccatttaccaaatgaaaaactttattgatgagctagacagctaccactacaagtggtatagatactattgatatatgtgggtttcatacagtagtaaatagaacaggttataatttttgtggtcaattttaattatattaaattattttacctgttaatttttttttttaaaattattgtgattattaaatttaaaaatatttatttaattactttaaattctattatttatgtatatttaaattttaatatctattaaaatatactctcatataacacattaaaacacatcaaaacacattaaaacactcttataataattaataatggcagctaaactttctactttgtatatactttcttatttaaaaacgttggtggcaagactttccaccttagaattgtaacactaataagacaataaatctgaaaaatatcaaaataaaacaacaacaaaaatataatattgaaataactacatatatagtaaatagtaatttcttattttcttcagttcaagaaaataatctataccattcaaaaaaatgaaaatgaaaataatctgtaactattatgaaaacaggaatggtagattttagaaaagcatacaataacctaccaaattaagcatttaatattgataagattgaaaaaataatggaatatacaaac

SEQ ID NO: 305183 - DNA, 2242 bp, Cannabis indica
tctctctctctctctctataacagaaaaggagactcattattattacatatatatatatttatatatgataccattataaaagaagatctacaagcagctaaggagtatctccttaagtttagaggccgcagccacgccactaattatggcaccttcgacattgggactaacacaaaaatcaccacatacggcaagcctctttttcctatcccaaagacatttctcctctctcgctatgctcgtagctggaaaggcgcttcccctgtgagcagaacaaaacaaacccagccaagagaaaaatattagcgctttacaacctcaactgccaaattatgcaactgatagatgatacaagataattgatgaattctcaatcaaagcaaacctatgagtgaatgttaaagtgcaccttgaaacttgagaaggcaatgatgataatatggaggtatgagaaatggaaatttccaaaagaaagcaacgcaagctcaagtgaaaaatgagtgtgataacaacagagtgcaaagtagcaaaaatagaagttacaagtacatgaaaaagattggtcaaaacacaattatgtatcacatgtgatccattgtatctgtatatatgagacaactaaatagttttgaaatcgaaccactttttcaccatgtaattttgcagtaatttcctaaaacggtaagtgcaattgtatatagtactaagtagtaagtaattagctggctccacttaaattatcgggcctatagttttgtgggttgaaaattaatgcatatctttctatgttatatgttactgtttacggataatcaagcctattggccttagtaaaaaaggtccaaatgggcaagctgaatcagtatttttctcttcctagttgttacatttgtgtattacaaaaaataagctaaaatttttagaggactagaatagtaaagactgaccatctatgagctttcatgaaaaagggctgagaaacatttattcctgtcatttgtagtgcttgaagtagctcttcagaaactcttttcaataatgcatcagaaggtttttgaagtccagtttgtgagattatactctgagcatactccgcagtagaatgcaatatccatcgttcactgcaattagaaaaatgaaaacaagatagtgtgtaagtactatactaccactagtaccagtaaattgctttcattttcctaaacaaaaaaaaaaatacctattagcagaacgcccaggtttgctgctgtcacagtgagcccagcttaaaacttcagaattttttattgagaagcctttcaagggtatctgaaacatagattaggcagagttaacccatctaggaactctgagcaataataggatgaaaatgtaatcgatcaaatacaggatacagtacataggcgtgattactatcttactgaagatagaggttctgcaaatgctagcatgagagcaaaacatgggtgaacaggataggaatgtcttgcagcttatctgctatctctggaaccaacttcaaatctatatagattaagaaaacaaaatcaaacttgagttatgtcatttttctgcaacaatccagtcccagttaacaaatgaaaaaatacacagtaaagagcaaaacatattatcttttggatgttcttaatataaaatacatgctccaccagcagatgaatatataaaaatcatagatcataccaagtggttgtggtcgtcctgttacacttgtaattggtggcaacaaaatatttttatctgatactactacaccattgaagtggccaagattctgtccatccaaggctgtcaccatccacagattttcattctgtagccaatccaatctcccaacgcttgtaccaaacctagcttccactcctaagaaaatattaaaaaactcactctgaaccttgaaaaattattcaaatgttcaatatagagaagcagtagatttatatacacaccaggctcacggcataatgctttgcaaatagaattcattcccggaacacccacatatcttttacatacttggtcctacaggatgtagtgatagaaagattcagaaagactataatctgacatgagataaaaataagaagcaaatgtgtgcatagaaaaagatttcacaacagattggttcgtttagttttagttttaattgcatgatggtagaatattcaaatgaaaaaaaaatctaatatggtatctcagtgtataactaatatactatat

SEQ ID NO: 305184 - DNA, 2730 bp, Cannabis indica
tttatatgatgtgtattatgattattgatattttacactgtcttgttggacttggctcatgggtgctctactgtgtaggaaagggtaaatcagtctctgatcagccatgagtgcgagagttgggcgatgtatgtacatgttcgggccacactagaccaagcgggttggggtctaccagtgatgtaatttggtaactctgattttactgcttaggtcggctagtgaaaggacttgtaatattttgtaaaagatttttgggatcccaaaatatgtaacttttgattgtaaagcttaaaattattacaagtttaattttcattctgtttagataaaagtttaaattttcctgcacttatttctctactaatcccagattaggggattagggtttcttaattagcttgggtaacgtgcctatttgttagggcattacatctctcttctgtctttaggtgttgcctagcctccgtagtaggaatttagtgagataaaatttgtcccatgtgcggctgacgggacagtgcatagtcatcactttatttgtttaggtaaatggattgtcagagtagtttggcttagtaatgatgttaatcttgtgccaaattagaaatatacagtgatccacattggaattcgtgttatgcaaacaattaagtcccgaagaatctctattttgggagttaatcgcctcccgaatggccaaagtaatgtgtggaccctttgttctggagatgggggacctgctcctagacgcgccttacaatcaacgagttcaagtgcaaaatcactctttaaggaatgttaatatccccacaaatggggcccctcagccacgtggaacttcatatgttcaccacgtattttggtaaaaaaaataggctcaacatttaccccccaagttctagctcaaaaacaactttaaggtgggacttgcattaattccctgactctttagttcgctcccagagggtgtgaggtatgacgtcagtggcaagtgaaaagcctccatccgtacacacaagccacgtgttatataggagttggcatgtcatcagcatgtctttttaccttggttttgatgatgctgatttgcttccttgacatcaagccctagagggtcataaatgcagggtgtcagccggatacttgagtacccaaacgtcctttcataaatgcgcttgttatgaatcgtccctaaccattgcattgaaaatgtgcttcttgagaaacgaggaacgtcgtaggatcatttaatgccctaaatcgtgactttgggcgataaatagccccctcgtcctcaaacttcacactttacattctgcttcaaatttttagaactttcacactagaggaatttccaagcaaatcaaactttcttatcctcttccttagacgctgccaagcttcttactatcgtcgttgctttatggttcctccacttgtgaatctttcacctctttgtaagagcttaactcttagaagtcttataatttaattttgatcgaacaagtgtttttccctttcattttttgaatgtgtgactgttgaaagtgtaacacagataacattaggacccattggtagggatttggtgctgacctagaatccacatgtctcttgtcgaaaacacagataatatttactccttaagcttccagaatgttgcgtatggtggaggcttgccccattccatcagtgtggacttatgattgatacagttggtagtattagacgcaatggactgcattgcttttaggttttagcattataaatttttgggaatgattatttcgctacaaaagtgctgacaaaaattttccatgcccataatccttttggttttgggtattttgttagtttcttttccattccccctcttgatgttttttatttcctatttggaacgaatgacccctgaaggttttcgtttacggatagtaagtctagtaggtacctctctaagaagtttatgggagaggactttctagctgcctttctatattaggtagtttgagttagcaagtttgggtagctaactgcttagtttttttatatatagaaattgtgtctaagaggatccaacaagaagaggttgaattggaagaggagattttagagcaagagaatgctctgagactggtgttgaatgatactccatgggagatggactagtatgtaaataaatttagaatatacaataaccttaggaagtacgagaccttgtgagggcttgagagtgttccgggactatatggaataggctctccgttcatggagagaagccaagcaaatgtgcaattgggagctttggcatatggagctgggcccatgtggagatgggtgcacaccttccgttaaggtattactttgccaacttatgtgtcgtagccggagtgacacctttcagttcatacctcaggtgcattgccttttatctgggtggtatatcctctatgcttagcataagaaagcagcactaacactggaggaaatcttgtacttctacaagattaagtctcatccaatgaggggccacaaggagaagataggcttctataggctggaacgctactctaagaaagcggtgttagttttattgtactaaattaggtacacaacgaaatagttttgtattatctgattatcattgtaccatagcctcttaggatctccagatgtctatacattaaatcaaaacaataaaaacaataagtttagattatacctctt

SEQ ID NO: 305185 - DNA, 960 bp, Cannabis indica
attataagaaacacgactcatgaaaaatcgggtcaacaatatataaagatgcgtagattaattttaacatcgcaaaatgtgattaatctattttatttattagatatgtctattttttacaatatttatattatagtacctgaaaagtggggaaaattaaattttccaatataaattttaaagacattcaaaataaaaatcgtcacaaatgataagtagggaaaattttagcaacgcattaagacgtaaaattaactttatatgcaacacattttaacatgggcgacaaatcttctaagacctttggctacaaactttataagtggcgccttcttatgacgcttaaactcatcgcaatcaatttagtgacataggtagcaaaacatggtgtggaaagtgtcgtttttggtagtgtacctcataatgattttacaagaaaatgttatctttaatactatcattataatttataataacaattaattagtccaagctgtatataagctatttgtgaagagaggctttggaattttctttggtgtaaactaataataatgtaataaattgatggccaaattgatacatattattttttttttcagaaaatgaaccaagacgtaatttgggtaaaaataaggcttaattggttgtttgttggtataaataaattccatgtccagattcaatgaactttggtatgtgttcaagttcctgtgttttgactttaacgccacgtttttgtggcgctcattaatatgagtatggtaccacaccacaccaaatcaaaccaaaccaaacccagttaactggttccagttaaaagttaaaaccacaaaccgtctacattcaatgaatcttatatattcctattatatttacttacctcttctcttcaaatttgggctttgcctttgcacatccataaatatatatatatatatatatatagatgattattat

SEQ ID NO: 305186 - DNA, 2506 bp, Cannabis indica
attatataaatatatacatacacctatttgtggttctctgtcataacagcagctaaaactaattataaatagcccaaacaaaggaatgacacaaccaaccagctacaattgcatcacaacacaaaagacataaaagaaaataatagagcatcaagaccccctacgactacttcaatgcatgatctaaaacaatgtcaaatttggtatagaacacaatatttgcaattgtgttccaatgcacaatagcattttaagatacaaattaatataaaaagaaaattatcattaattaaaatatttaaaaataactaatagcaatatggtaattaaaaagcggtgtatcttaattaaggaaactggtgctatttctaaatgaccgaaaaaccccttccaccattaaatagtttgtcgtcacacctaagccaacactcaatattccattattatgtaagctattatataaggatattagtaatgctcggacaaggagcaagtttttcattgtcagtaaggtttatcttgctccctgaacaagttatctgtaaggcattctgttctaagattcacatccatttcataaaaaaaagaacctacagaaagaagcagagagatcacgcacgaacctgtatgaccaatctaatataggattaactctcataaaaggaggccatcctactgaacttggggagaactgctcttggccaacctgcaagattaaagaaggccgttgggatacaactaacaatacagccgtaccaaactcttaacagaaacttaacagagcacagcaataataagtagcctatcagtaagataatgtttttatgaataataagataacacagttggctgtgatcatttattatagaattaataatgaaaataccgctgtaggatcaccaatcctgacaccaaggaaaatggctcgaattggattagcctttagtaatgcctccaaaccagatttgaaatcagtgcgaatgatatccatttgcaaaccatagctgcataaataaggacaagtcaaaacatttatcagctggtctaaagaagattttacaaacacattttggaaacaaaaataaattataacaaaaacaagggaagtatatcacactttgcagcagcatcataagtaaatgagttgatttcagggaatgcagatgagctttcaaaatatattgttcggatagggaaatcactaggacccccattggcacaattctgccctcctttgtgcaaaaagtagccagccctaagtaggtgcaggagaacctaccagttatgttaatggcatatcatcagtatcaatgaaataaaagtgccacacctaacaatgaatccacatgaagatttaccgttgaatcttttcctccattaaagctgaaagcaacttcttcgatcctgtataattaaaatactcaaaccatattagagctctataacaaggtataataattatagtactatgtaacgtcgtccataaattttcattgatcgtccctattactaccttccacaaccatcaactacccaatggagcatcaagtattgatgacactttacagaaacataattttgtatgaaattaaagaaaatgcccatgttcagagtgaataccgaatactcacatgaattttaagataaatgtggtcatttatatggactaattttataggttcactgaactccttatggggcgtttggtatgaggtttgacttgatgggaatgtaaaatttaaattaaatttgaatgacaagggatttgtgtttccaaataagtctcactttttaaattaaaatagtggtaatgttaatcctctcaaacgtgtttcatattccctccaagtctactccctccaactctactctctccaactcaaactcacataacaaacaccccattaggtggtgtttggttggaaggaatgaaaaacatagctagaataagaatggcattccaatattttaaaataagaccaaacaaaggaatataataaaagttgtttcctttccattccattccattttattccctccaaccaaacaccaccttaatgttttgaaaaacttggtaggttaaaagaatcaagcaaaaaatatgaggtcatatttccaaatgcacaaaacagatatgtagttatgtattgaacatcactgaaaaatattctagactgagtgaccaaaattccagcaaaaccgagaaacaatgtgtaaaaaatcataacaacattacaacaatagacaagtatgaacaaggaatagaaaagcaattgtccactgacaaaacgcatcgagcaaacacctgaatatggacagtcaaaataacatttacacatgtgtgagtggagattccatctattttttttttctttctataaactaaaaataacaagtcgaggaaataacttacaccatgttattgctaagaaataaccaaatacttcaatataaatgatagttgtcgttcattagctaaacatgttgcataaattgacataacaaa

SEQ ID NO: 305187 - DNA, 1455 bp, Cannabis indica
ttgataattttgtttttcatgtctctgttccaggtaatacattacgagcttccaaacaattcagaaatatttgttcatcgatcaggccgaacaggtcgtgcaggaaagaagggggctgctattctaatttacacgcatgaccagaacagggctgtcaggtttattgaacgtgacgtaggatgcaaatttacagaggtgacagtctttcctttactatggttctgttgtatttatttgtttggagctggttcagtttactatctcttcattattatttctcttgtttagcttattgaatgaaatattcaaagctaggttctggtattgggcaatttcattggctttttaatttgcatgattgtatatttaagggaaaacctatgatgcaccagcataatatgactgtatgtatagataagttttagcttattacgatatgatttatgtgatgtacgtaatttattcaggtgccatctgatactgatttatgcatgactatgcttctattttccaaatccttaatatgtgaaactgattgatctttacctgtgttatcagcttcctaagattgctggtgatagtacaagcgtagacatgttcggggacacgggatttggaggcatgagggatcgtcgacccggtggtccagggcgttctgggtttggtggccgtcctggatttggtggtcgttccagtggatatggtggtgattcttctcgtggatctagctctggtcgatttggtgactttggtgacttcggtcaatctggaggtggcttcggtggatctagcgcaaaacgttcaggaggatttggtggttctgattccagtcgttcaggtggttttggaaactttggctctagccgctctagtggatttggtggtgattccaatactagtcgttctgggggcttcggtaacgacaggagtggtggtagcaccggtcgaagatccttttgaatattttaaaatgtaagtttcttttttagtaaaaaactttggtcactcgtcatcctgtatttattggttgattagtagtcttctgcttgtgatctcttccgggcattgataaaattaattgataaagttgtctgtgatatttgatgtgagactcatgatggccttcatctggcttttgcactggcaggtaggaagaaagcaagtgaaattatcggaacaaggggcttatcttgaaagggtgatctgccttaggtattacaatgtaaaatggccggcagatgggttctgcacctttgcctggaagtgataatagttttgttctttctgaaacgtataagttttcagatcttctgctgttgatatgctaatggtacgaaatttatattttttactatatgaacgaaaataatatatcaaattttaaatctgaaaatgttcccatgtttgtaatttattcttttaagcaattttttttttattttattttacttacat

SEQ ID NO: 305188 - DNA, 1679 bp, Cannabis indica
aacttggtaaactccccgagtaatatcttactctaaacaattcacacaaagtatatcgatcctctcctaagactccatctaagaatttataggctaggctaacaaatactcttaactagccaaccaatagcaatctaagtaacaaccatcccagtcactaagaacttgacaactcagcctccaaaatcctatattgagactaatatcaagggcataacacataatcacttcaacttcaagagcttctgtgtttacaagttacaaatattcttgttattttttttagattttgggtgtttcagaaattaaagaatctttgctgaacaggaatgttgcatttagacagcatgaagacactgattatagaagtagagccatggagaaaatagaataatatctaagacgaagaattggagagaatccaaataatccatagcttcataaacatttcccccatatagaccatgtgcactactgtagatgttgagacaaaagaacccagaatagtgtgctgactgagcattgccaatggcatcattaccaactcggccaacccagagttccattgagaatttcaaaaatcttgataaatgcacaaagaactctatagaaacgtcagcattttctacaattacaagattgaaagttacgtactgagtgcttacattaattacaggtatactcaggaaagctaccatggtttaaagtagtagcagctaaaagcgaatgttcagcacatgagaagcatggtgaaaagattatgcattagaatagtgttagcagcagcatttttgtgggaaaagatttagtttctagcttctctttgggcatcaaaggcaaaataatttaagggttttcaacttttttaactcttggctgaaaaaaaaaactttgtttagcagtggttagttgtttttttcttgctagtttgaatccttctcttgagaattccttatcctcatttttaggtcattagaaaaggaaaatttagtttagcatgcttaaatgtaaagcataatctttaaatataccacccaactcaaaataagatacttatattttttaatatcttcttctaaaaaatatccttacatttacaaaaaagcctctctctaactctctcactctaactaagtcttgttgtctccacccaaatccccaaaattcatgagctcaaccacccaaacccccgaaatccctacccatgttggagctctcaacccgctcgtttttttttacgatgtcgcgaaacatcgctaaatgtcgctatatcgcaaaacatcgctaaatgtctctagttcacaacatcgctaaacacatcgctaaatgtcgcaaaatcacactcaagttttcaccatgattagcgatgtgttgtgcattttttagtctcatatcacaaatacatcgctaaatatgcaaaatattgccaaatatcgctaatcgtcattaaatttcatccctaacctcaaatttggtctatctttgcaaatacatcattaaatatcgcaaaaatcgctaaatatgcaaaatattgccaaatatcgctaatcgtcattaaatttcatccctaacctcaaatttggtctatctttgcaaatacatcattaaatatcgcaaaaatttggaaaaccaaaagaaaaaaaaatgcaacaaacgagaggtcgttagaagacaatgac

SEQ ID NO: 305189 - DNA, 2039 bp, Cannabis indica
aaaaactgaccatgacaccagcaatagaattaaatgtgtttataaacaagctactaatatattaaatataaaaaaacggtaatataataccgtaatatcaccaattttaaaattcacgttaatattggtattaaattaagaaaaacgtattgagatgtaaattttccaaaatagtatttaccctttttattactttaattaatataaaattatttaaattgatggtttcttctcatctttgggaggagggggttgggatattgatctcattattgatttgtttgataaaagagataggcatctaatcctcagtatccttgacaaatttctcatgtgaatgatgattacatttggactaagagaatttctggtacttatgtaatgaagagtgtatataatcttctcgaaagctcctaaagtagatggcataagaatgataaagagctggctagtttttggcaaaagaggtggaaattaatagttccttcaaaagttgaaaatctggtgcggaaggctggtatgaacagtttcccaaagatgatccaattacgtaccaagtatgtagaggggagtccaatgtgtcttgtttgccatgttactaaagagtacatccttcatgggttggtgacttgtcctgaggcacatttatgttagaatagaattggtattggtataaatataatgtcaggtgctacttttcttgattggtgcaaagcttcttttaaggcattggatacagggtatcgatgtgttttggtcaatgtttgttgggccattcggggagctccgaatgacttagtttggaataaaaatgtagtgagggttggtgacattattgtgtttgcaaaaaggtaacttgatcaattcagacatgctaaaacctctaagatagagtcgtcatagcctcgtgtgtacaggtggtaatggagttgagcattggattttaccacagactaatagtatcaaggtcaatgtaactttgtttaaggagaggcataactttctgtacaggaatgtgggttgcgatgccaatggtcttttacttgaagggcgtacctctcttttacaaggaattgtcgaactagaataggttgaactatggaagttcatgaaggtattagctggattaaagatcatcaatggaaaaataatgtaatttttattaaatgtgatgtatggtgtaatgttaaagtatatttggatgatattcttgaaagataagagtagagaattatgtttggagcggttcctatagtgcatagcaaaattggttgtactgatataggtacaacaattttcttttcccatataaatccaatatgtgtgaatccattaatatgtgatatgttaatcaaaatcatatgtatatacagatataaacgtgcatatatgcacacaaaaatatcaaagaattaccttctggaaccctatcaagtattattgaatcttttcgtataatcaacaatcttacaattcaaaatcgtgaagaaatcacaccaatatcttccaaagcattctctatgtcgaggccaatctctgattgttttcatccaattgaaatggatccaaaagagaaacgatctacattatttcaagagcctatacccgtaaagaaatggcttaacccaccatcaggacgcctcagatgtagaatggatgaagcaattgtgttatcaatttaagtaatcggtatttacaatatttgagagaaactctatgagagatatggtggatattacatgttcaaggctattctcaactacaagaaattaatgctctcacattcttttatttctaaagtggctggatatgcagtttcttttgatttcattcatataaaatttcttaaattagttgtttgagttttcttttattttaccatcttgtatccaatttccttaaggcacaatcatccatgttctttaatttgttaatactttttagtggatgttgattgaatttggttagaaaatttcctcctcaattctgttatgtataatgattttatatcaatacaacaatttttatctcaaaaaaaa

SEQ ID NO: 305190 - DNA, 1656 bp, Cannabis indica
aaagaagtgaggtcaactttttactatgacgattaagtataaatccactattaatatcattacctaattagtattttaaagagaagcaaaataaaatttggtaggcaggacgcggataaacaagacttaagctgagataaatatggataaataataataataaaaaattgtgtgtgcatgtcaaagctgaccagcttatataattaagttaactttcatagctataatattcctatgatcttcctataccaaattgttgttatttactgcctggtttttttcaaaggaacgatgatatcctacgttaatataccaaatcttggataaaagagcacaacagattcatgaggtataagagcacttacaataacaaatttaataatacaggatatcaatcataacttttcttcatgaacaacataattcagataacataaatgtatcgatcactttaacaaaaatagtaaactatatgtttatatttatttatttcttatacgaaattaacttaacatatttggaattttcactataaatttttctatacatttaaaataagaaatcatgcggtcttacaactagtgtagtatttcacacttcctcggtctcaaagacaaggtctaagttcaaattcctctcctcatatataaaaagagaattttacacttaatatattgagatttaaaaaaaaaattaaaatatggcggttttttattaggacactttttatggcattttatgctttttgagcttttttatgggaatcaatttcccaaatatttgtaaacagaaaaaggaaagctcattgttatctagtttttagcacattgacgtgacaggaggacgtctcacacctgagcgcaggtaaatatctctagcagcctatgcataattgattagcatctacaaatgtcgattacctgattagggtggaagacagaacatttgaccaggtacaagtgtgtgatgccgagctatttacaagaaattaattacttcagaattatcttgtaattcttagacacaacgacaatccctataatcatggtattgaatcagagaaatatgacaacccattgtagtttcctattttgtgtattgtaattatgtaatcaatgtaatttcttattttacgcattgtaagcaaaaggaaaatcatccctcatgcattgagtccttataaatagtggcttagcctcactatgaaagggatcgaaaagaatttcttcaaagagagattctatagagaaaataatgatctgagagaattactcagagatcaattgtaagagatttcaaagaggaaatactttgttgtttctcttgagttaatacaatacaaggggagtaggctattaccacgctcacggggccaaatctctttgaaatctggacttctttttactttgtcgtttttgttctcttttaattatattattaatcgcttattaattgactcacagccgttggctaaaagcaaggtcaacatttggtgctttcattaagagcaaaaatccaagtgttttgtcttaagttttggcaggcttacaggatggttgtacaaactcgtagaggtcttgctgatcagggtgacccgatcgtgacagatgacaacgtgcaaactcttagaaacacgagaggaccaccagggacaaa

SEQ ID NO: 305191 - DNA, 1856 bp, Cannabis indica
atatatatatatttatagtgaaaagatatatcgaaaaaagagtggacttggaactgtatatagaccaatggcggtacacgtacactcgtctcgtcacatgggtctcgttgttcccgatcctatttgcaaaagtttggttaatggatcgggtcgggtttgaaacggcccatctaaatttcatgcatgtaattgtaagaatgtatagtaaagaaaattttataatagtatgcatctttcaaaaatgggtgtattgattcaattttttgtattataatatttagatagttataatattaatttttatattatagttatttataatatttataatttttttgaaatttagaataattaatcgtactatattacatgtatgtctttttcattttatacgagtatgaaattattgtttaaaatatataattacaaaaacactgttattgaaaataaaaaacaaacgatattactaaatgaaatttctatattaaattacgaattaaattgttcttattaagatgtccgcggcattactcaaggatgtgcaagtattcaaaaaattatcagtttttcttagaataaaatagtccaatcatcgtataatatatcgaaatactactgcactcattagcaaaccgtcgaatacaccttaaataatattactgctcaaaataaatggaaataagaaaaaaaaaagctgtttgtaaaaataaatatctctttcttgttggctcttatataaagaaggctattctaagagaaattaaacagtaagaaagttggtttttttttctaatgagggagggtgaattggatcatgactgaatagactgctctgttgaacatttaattaaattaaataaataaaatattaaaaaaaaatgcacaccacaccaagactcagtccaccacaatatcttatctatatataaatattgttattaggtagtggtgtctaatactttctagatatattgtattacaattggatagtaatactctcttaaaattaaatattaaactatataaaatttaataaataatacatgttgtttatcatttctttttatatattgctacattaagcagttttggatgatttgttggacacttggcaggtttggaattgtattttgagtagtgatatatataacaacactacactcacctcttgaattttaataggatccacttgttttgctttctattaaccattaaaaataaattattaaaaagattacttgattaaatcacattaagccaagtcacatcgtgtctataataaataagatttataagtataagagtgaaatttgttacaaaagttttattttcatccacaaaattataaatttactttaatattaaaaaattcaacttaaattaattttaaataataaatcttaatatttttttttaattttctttttccaatttcttttgtattaatttcagtaattatttaaaaattttaatatattattttattttattttattttaataagatttcatagtattttaatttttttgtcttaatattgaagatatattttagttttaattttgtgtatgtatattttaaaaatatgagaaaaaagatttttttttaaaaaaaaaaaattaatataaattaaaaatatatattttatagaaataaaaataaaaataataaataagatacaaataaaactccccaatctttttattttattttttagttttccttaccaagaagcaattttgtattaactaagagtatttagatggtatatgattttttatataaaacaaaattgtaaagatttattttattttattttttacattagtttttgtttgaaaagtatgctacacagt

SEQ ID NO: 305192 - DNA, 701 bp, Cannabis indica
tcgctacaatgtgggtccacccctttactataaatcattttcaaaaagtgttcttcatcgtaaatgaaatagaactaatgaaatatttacttaaaaaataagaattaatcatataatatttattcttattcatttgtttattacatttctagtcgttttcttagtgtattaatgaaaaagttaaaatcttataaaatcaaaaaatgatatcagtttgaaggactctttttttaagattagtttgcaagacttaattcgtgtgtttcacgtataatttaactgattttttctttataaaactcgagttttttaggatttgttttgcaaacgcgatttttttttttaagatgcaaagatgaatatctaaaccacttttcttgctgtaaaataactagtgaaagtaacatcgcggttgttataataacaaattgaaaaatgaattaatttatggcttgttcggtaaccattttgttttttgtttttctttattcaacttaacaaaattttataatttgttcttagtttttgattaattaaacagaaaactgattttttaatggttaccgaacactaccttaatttatgattaagtttgtttatattgttagaccatccccgaccaatagaaggagatttgcaaatttattatacagtagaacctctattcaagaatacacttgggaccaagcaaattatattct

SEQ ID NO: 305193 - DNA, 894 bp, Cannabis indica
aaaaaaaatagagaaaaattagaatttcgttcaattataaaatcaaaagtaaaataatatatctaataagaaaactttatataaataactaacataaaatattaaaataaacaaaaaaaattaatattaatcctaaataattatttaacaaaaactagtcaaataagttcccttataaaattgtagggtcttaactttattctattccacaccttttgtgggggttgaagagtcatatatcgaacctttacctttccaatttatgtttcagttttcacaataataataataattgtttgtttttttaccacaaactttttattattcctgcgatatttccaaagtctatctatttttcttttaatattcttttttggcaatttcgaccaaggcaaagctataaaatggtcaccaaatttcctttttcttgtctgtttttcttcttatgaaaaaaaaccctttggttgacatgtgctattgaactttaattaattttttttctacatatatatatatataatataaaaatgtgatgcattgtatgttaaattatatcaacccacagaatctttaaatagatcttaagatcacttgatgacagtgacacagtgcacgctcctcggaagaggacaaaagatattagtacttaaaagtagattaacacttcaattttgaggccttaattatataataaaaaacacactcattcatttgtggacaaactcaataatctattattattattattattattattattattattagtcacaacacaacataataacatatacgttaagttatctaactcattgtttatatataaagggaaatttacatggtatattaatttttgttattttttttacaaaaatactgttaggcagaattttt

SEQ ID NO: 305194 - DNA, 1756 bp, Cannabis indica
ttgtattttactggtgttttacaaaaatacagtatttttgtaaagatttctgtgtgacagtatttttgtaaaagttaacccaaattccagtatttttgtaaatttctttttttttttcttttgaattggtttcaaacttacacttgaattagacaatctactagaatacaaaaatattataagcgtacatgtactaaactgtaatttaaatcaaaataattaattagaaaaataagtgagttaaaaatataaaataatcataaaaaaatattttattatgatgtttcataaattatatgcaaaaaaaattaagaataattttatttcatttacatgaataaaaaaagtaaatttgactaaattgtcattattaaaaaatataattattttttatttttagctttttgaagaacatatttatttttaatattttttaattaataaaataaaaataaaaataaagtagttagaaaagaaaaaaatattccttataaataaatttaaatgttccccactaacttataagcatgttgactacaaatgacctcataccatcctaatattaatttttcgaacaggtaagatcggaataagaaaaatgtgatgaaattaaactttcaatatgaaatgatacaaatatgaataatatcaagttcaatttaatttcatactatatattataatgactaacatctcatttttatttctttattttcactggtctgtttaacccaatgacaactatagaataaactatatcccgtattacataacatctccacatgacacactcatcaatttgatcatgtaccgccttgacagagggagagcttcagataatgttgaccgaaactgcagcaaactccccgggccaaagaaaagttatacattgtcgttttcagttggtttcattattggttaccagcctcatttccccaaacattgtcccaagcaccaggtgcagaagccttaggcccctcgatgtagttctggttctggttctggaactggttttggtgtccgggtggtcctggtagttgaagtgggcgtccatcaggacctagttggtgaacctttcttgactttactttgatccctagaatcctaaatacaaatctggcaagctctccatacaacatgccagagcgctcaaaaagctgcaatgaaattcgaggggaaaataaaagagacggtgagaatgagtgtgagtgtttaagcaaaagtattttcagaatgacaatagctataaccgaaaatatcttagtctagtagggaagtatcactgccacttaatcatgcagcaactacaatagatagagaaaatgttaataaagagaaatatacctgaagaaaagcagtcatgaacaagtgaaaagcttgtgtattctggtcaatgagaattgatatgcgaccgaaaaagcctacaacaccctgcatctgtagtaacaagaaaggccaaaaaaagcataagtagcaaaacaataaagatttaagttatcgcttcccttcaacaacaagatagtaaaaattcattacaccccacaagcatatacatatttaaacatcttctaatcccaacacaaatgagattgattatgtaatgtgcattaagctatgtaacacgtaccactcttagtactgacatccaaaatcctggaggagatgaaggagcaccatatggattatttggatcttcagctccataaggaccaccacccatgcccattccatagccacccatttgtcctcccatacc

SEQ ID NO: 305195 - DNA, 2128 bp, Cannabis indica
gggtgtgtacaatataaaagaaaaaaagtaaggtgttgacagtatttttgttaaaatttttgtgtgactaaaattgtaaaatgcccccaaaattcagtatttttgtaaaatctcctaattttagtcaatgtatttttttatattaaatgtggcaacttgttaggacttaattagtcataattttaattaggattttaaagtatttttaattagttttaattgtgttttgtacaattttatacttttggctattaatattttcaaggtttgcattagagaaaaatagagcgaatttgaaaaaaatatgtgcaaaaagaattaattaaaaaaagttttgttgatagagcaccaagaaaaataatctgagaaaaaaataaaaaacgttcggtgcgattggaccatctaatgttgaagaattggaaagtgaggtgtagcgcctcaatattggatttcagcgctagggcgctcgaacgtagaaatttggcagcaaggtcatggaaactgtaattcctctctgctaaaaaacgggcttcaagcgccgcatcaataccctgtagtactgcaacccgctatggaaaaatcataatggggtttgcatgcctagaagacacgggtcgtgacactccaagatcttatagtgttgcggcctgcctattttaaactataaaaaaataggttcttttagctatataaagacccctttttcaacacattaaaataggcgattaaggagtacaaaatgtgaggcagaaaacgactctggagactttcaacattattttttttgaagagttcttttttttttctatttttcttatgctcttaatcaattgttatgcgatgtttacaataactataagtagctaggcttttaaataaggttattaatagagattgtcttacactttattttagtttgatattatttattcttcctcaattttgtatgtgcatctatttcattcgtacttaatttcttttaattgcctaaccatcaattaactgtttatgatatcgatacaaaatttgagaagtgagcattggttatactatagtgaaatcgacatagtttttgatataggacaagaataccaatatggtttatgtagcgattaggatttttatacttaatgcctcccatgtgtttaaatttatcacgaatgtaaaaaatttgtatataggttgagatttacatgtcctagctaaatataaattttttagtaaatccgtcatcatacgaaattagaatttaaaaagtaaattatattaaactatatagagtaaattcaatcgaagttaatagccataaactttaaatcattgttaatttcgcatatttctttttcttgtttattttatttctgcattaaaaattaatcattcttccttaatttgtcaccaattagaacttaggaatttaactgtttagtaattaattggaattcttttcgggattgacctcactcttgtgagtctattacttgaaaacgatatgtatacttacgtgttgaaaaattcacaacactatctaatagaaattatttgtttaacgattttttttccgttaaagttaaaagttaaaactattaccgttaaatcaatcaatttattatctttttgtttttagaaaaaattagttttaaatatttaaatttaatttaaaagtatcaataaaattatataattttttataaatcttaatttaaatttgaattagactttaatttaattaattaatcatattttatatcaaatttattagttatattattcaaaatatctgaacttatataataatttattgttttataaaattaattagttatatttttttttgtaaaaaaattaaaactagatgaaattttatacatgtgaaaaaatataattgaatagtattagatttaattttattattattaaattaataattaggtaatagtaattttaataactttaaacaaacatgcattgcatggtattaatacatagtatatatattataagtatgattatactaaatgaaaatactaattaatttgattggatatttaattatatcaaaatttgggatatccatctaacaatacaattagatattcaaaaatacaatgagagagagagagagaga

SEQ ID NO: 305196 - DNA, 1923 bp, Cannabis indica
aaaggattgtaataagaagttgtaattaatactacctcaaaattataaatttcccctacataaaataaaaaatttggaaatcgaaccagtacatgtgtccatataccccaccttaattattttctcttaaaatatcaaatcaaacttttataactgcaaaaagttgtagtttccttttctcgacaaaagctataaagtgaatatctttagttgcaatcaataataaactagtatgaatttattcatgtcattttacattaaaatttaggaaaatttattggtttagctataaaggaaaataaatgtagcccaatatatttattgtcattataatttgcaggtcacctacttcaaatgtggaggagtatccattggtgtagccatggatcaccatgtagttgatggtttctcagcccttcattttttcaattcatggtcagaaatggctcgtggtattgatctcaaaacattaccatatatagatagaactatactatctcctcgtaacccacctaaacctacatatgatcacattgaatacaaacccactacaactcctcaatctttaactaacaacattattgatgttgctatttacaagttaaccaatgaggaagtgaagacattgaaagctaaatgttgtggtaacaaacttagttatagcacttttgagatattggcaagtcatgtttggaaatgtgcatgtaaagcaaggaaacttgggcatgatcaagagactaaattgcatgttgtggttgatggaagatctaggcttcaaccacctcttcctattggttactttggtaatgtgattttctctactacgccgataatcagggttggtgaattgatggaatcgaaattatggtacgttgcgaaccagattcagagtacaataaagaaagctgatgattcttatttgaaatcagcaattgattatttggaacttcagcctgatatatctgccctaactagaggggcacatactttcggaagccctaatcttgggattgttagctggactaagttacccttttatgatgctgattttggatggggtagaccgattttgtgggtcccgctgcgattctttttgatggtttggtttacattatgaataatccgaatgatgatgatgggagtttgtcggtcgcaatcggtctccaacatgaacacatgaaagaatttgagaggttgttatatgacatatgattattaacatgttgtgtgtgaattaagtgttttgaagcatataatgattttagttttttgagagctttaaaattttgtaatggtaatgttttggcttttgtttttataagtttttcaatgtttggtgtgcatgtgcttggctatttttctataagttgaagaaggtttgaattatgtcttgttgaatatttgtatattgatttagtctgtaaatatattagaatagtttcttacaatatgattaaataattaattaattaaatttgtttaactaattttgtcaaaaaaaaatgtttaactaataaataattaggttgcaaaacaaaaaaaatacttcaaatgttgtaattagtaggatatgtgtcgatcaagccacttggtaacttaatttgcgcaaaattgagagggattattttacaaatatataaaaataacaattgttttttatttttatagattctttttatatatacaaaatacagattattaatttcgaaagaaatattattttgactatgctgttacgagatagtaacatgatttattttacaacaatatagagtattatttttctattatttcaaaacaatattgttttgacgttactgctatagaaaaacaaagtgaaagtaatatttttcttgaaaaaaacaagtgaacaactaattaaaaaaaatctgtaaaaatgtaaataaaaaaaattcgtaaaaa

SEQ ID NO: 305197 - DNA, 1928 bp, Cannabis indica
tcaaatgatcagtatagaatagatacatacatatgtgtcctcatcacatatttgaaaggacattttttctgtctccttaaaatcacttatattccaatttattaataatttacaaaatttttctgtccaatttgatagcaaaaggttgattcaaaatgctcccaaagtgatgtggaagaacaatgttagagctaaaattgtactaacatgttggagctagctatatagtatataccgatctatttctattgagtggtgtttggtctcctccggtggccatactgccaactcaaaaaaatagatttttggtaaaaaagtagctcaatgagccttgatatttaaactagacaattatacaaggaacacaccaaacgatgggaattacacaagaaaatattttctcacacctttctaacaatattgcctaatcattagaagtaatgatgtgtcatactgataattaagctgcaaacactgaaaaatatataggattcataaaatggtaactaaatcattttctaacacatatatatttggacattattattgggtcacaatacatacataaggcctctagcttatataagataatactattgacatattaatcccatatatctaattgttatttaattaatatttatttatatatatttatgtatatataatgtattgagagtcaatatcattgttttgtcaagattttttgaccaaattaataagatgatcaagacattattatgtcttaaataatatataactatatctaaagataattaattaaccagctatttggttatttatattttatttttaaaagaatgaccttctttcatttctttatatgaattagttaattaattaagatatattatagtgatattttaattctagaatatacttttctatataattaaaaaaaaaatgaagttacagttaaataaaaacttgaattttcaaaacatgctgcatatatagggattagggtttattttaaatagtatctagaataattgatcatattattataattaaaagagtaataataaattattatcatatcgttcattataaaagatcggttccttttgcttttttccaactttttgtcaaaataactttttagtgagacaagttgatgcatagacaaaagggattggtccaactataataaccaattatatataacgacagattctctataaagccaacacaacaatataaaataaataataataataataattaatgagactctaaccaaatagatttttatttatataaatatacatattctatagggatattctatatgagtatctcaaagcatatacacccacacatacatgttacaaatttaattatatgacaaattaattataatattgttattgaatattagtattgcttactatttatttctttacgatagattaattatattaataactgtattatacttataagagattgctattagcatttctcaattaattaagtcacaaaatttcatagatttggaatccaatccaataatattaataagtatatatttcgtcactaacacatatatatctactaatcataaatataatgcttaattagcttctaataaaaaaaaaaaaaaacgcttaagttaggcttaataaagacacataaaaaagactttgttaagtaacatcaattttgctgaaaattattagatatattatacattataatttaaagaattagtaataatattattaataattgttgagctaacaccagttcgatcacaccagtaggtggatctttcttgcaccagaacagtctcaggttcaaaagctgaacctatcctaggaactcgaatccaattaagacagaattgtgagagaattaaagctttattactacttagcttttttacagaatggtacaaaataaag

SEQ ID NO: 305198 - DNA, 2487 bp, Cannabis indica
ttaaaaaaaaatgtaactgttacaataaaaatgtaaccattgaatagtcacccatatatttatacatacctttgttccattgggtacaatgttctgtaagattctcagtctttcatttatcctttctcttcttttctgcaaacatttaatcaataatgtcaaattaatataattaagagaaattatagagtatctgtacaataatagaatgaaaataataatctatatatgtgatgagctagcaaggatagggcttaattttattgattagtacgtacccttgcatagaggctttggggatcagtggctgaccctctagtggccctagtttttccgttcaagttaacggcgccagataaagatttaacgtgtgaaatctcatcgccgttagtaatattctcctgattagtaacattattgtcttcttctgagctgtaactagttgaactatcaacaccgttaataatattcatatttcttgtcttttccactttcccatttgtagtagtactgtccctcttctttgactccaaatttttcttacccttttgaacctgttcagtcttcacatatatctatataattttaacgtccacgtacatttaataaaactatataataataataacaacaataaatcttgttatgtaaacttacattatttcttgaagcacgggttttcttcttattcagcttaattttatcatcaggaacgacgtcgtacttccttttagccggtaataattccttaccagaaatgacagcagtactggtctcttgttggtttattttataatttttatcaccacagtcatcataatcatgaataatttgcttcttatcatcatcatccattagaaaagttgtcatggagagaacattattattattgcgatctatgctaacttgctgattgataatgttattatgatgataagaatcggtatagttataactattatttatcaacatcgaattataattgtcattactcccatggccttgatgagtactgctagaagtaatagtagtatcagttgtggtgtaacaactactctgatcttgagaaaggaattgaagggttgagttgagagaatctaaggtttgaaagagaaagctttcatgatcatgatcatgatcagtttgggacgtattttggtaaccaaataatgctccctcaacattaatattattagtgtcgacgtcgttattattggaaggaataaacgaacactgaccaagaaaatgaggtatgaactcaagatcttcatgatcttgatcttgaccaccatcaactaatgaaaaaatgctggaaaaagaggattcccagtctccatcggggaaagatccggcagactccatttttgctcttgtttaatttacagtacgtacgtactacttcatgtatgtgtcgagaataataatgtaaagtttagtttattggtatttatatttgtgatctattaataatatggcatgatctgaggatgtgctttaatgtttaagcttatttatagccgacattataatgattgcattttataatataactataatattaagtaagagaaatagttggaccaaataggcctcaagccgtgtaaaattaataatttgtaatctctttaattatgatgatgttaattcaaactacaatattatataattaggacatgtttgggggtatgtttggagtctcataatcatttaagtaggttaagtacgtagtttgagatttaaggagtttgacttagatttgaatatgtatgtatatatatatatatatatatttacagtggtgcatctgatgtttgttgataatgatgagtactaatccaaatatagactttgtttggttggatatgaattttaccaaagtaaaaaaattgagagaaaaagcaggcaaaatattcaagaaaatatttcctaaaattttctaagagattcaatatattaatattttcctcaattttatacataaaattataatattttttaaatttatatatagtgtgaggtgatggagggattaaggtggggaattggtggaaggtaatgaaattgaatggaatgaaaaataaacaacttttatttattcttttatttggcatgtttactttgttagaaaaggaatgaggtgtaaattattttccattgaattgtttactttcacttagtaatagaaaaatttagtgggacacaatatttttacatttttactatgttaagtttacaaaaatattatgttaaaatttcaaaattacaaaaatattgtgtttcaataaaataaaaaaacaactcaaaaacaaccttagaacaacttaacaaacaacatgaaaataacaaaaagataactataaagcaacaaaaaataataaaacaattgatataagtgcaataagcaaaataatattaactcctcaatatgtttttgtaattgctctttttttttttcattagaatttgttgtttacaactttattcttt

SEQ ID NO: 305199 - DNA, 1876 bp, Cannabis indica
gagtaaagatacaaatgtcactataatttctttggtgacatttgaaaaaatatcactaaaaataattcgaaaaatattttagaatattatttattttttaaattaaaaaaataattttaatataattttgaaaaatgtactagatgatattttagaaaatggattttttaaaaatttataattgtcgacaaattcataaaacaaaatttataaatattttcactatttaaatttaaacagattgatagtacaataaaatttcatatgtatacaaaacatcaccaacaaacacataaatttattatatttatgaagaaagactaaaaccaaatacattaaatgtattatacaaattttctttcttcttcaatttctttcatttcttcaaagaagtcttccaagctcttcaatttgttttgttatatagttcaaaatatatttgagtatgctctctcatctagccatgtatatctgaagatgttatccttgcatcactaaattgaaacaatgcttgcaagcctgcaaataataaatcaaaatgagatgcctacaaatccaatcaaaatgaggaacattgaagattatattcatacacgatagaaagatagatgctcttttacactttgagctatagctaagtcaacccaacatgttctatatcaattacctaactgtttcttcaacataatgcaatttcagaggactagtactggagctcctactatcaccatatcattttttcaagtaaaaaatctaatacaaataagtgtgctgatatacttttctctaaaatatgtataattagcttaagaatatttgcataagtcacaatagaagtaattaactcgtcatcagaaacaacatggttcactgagaataaagaattactactatattttctgtcatattttcttaactgttagttttgtttcttaacgttgctgcaggcatatcatgaagtattatctttcgtatttgtagttcacttttaaggtatatagatcaaaatagaagcatcaaagtaaggggcatatatgctttttaatttcagaaccaactcctattaacttttttattattagtatatcttgttttttccatctgtttgcttatgaagtttggtaaatattatcaaattatttcttaacatgagatctttgataagtacttttatgatcataagttaggaagatttatttactgttccaaatctatacaacatataaataattatgatattaattaatttcatcatcactttattaaactttcattccttaatctttatcttctatgctataatctctgattatatgtatatatacacatatatatataaaatgtatatccaaatatataaattgtggttattacgtaaattattgttagcaagaaattttattaattattacttgaagcaactattcaatactaacctttctagacactatactcatatctcattctcaaggtgatgctataaagtcgtgtatacaaagagaaagatagaaaaacaagaatgaattcaaatatgaaagttcattataaatgggaattaaagttagtattaatttatattaggattggagaactaactttcttcttcatatacgcagtgtgcaatgatatatgaggaattgcacgagttaataatagtaaggcaatggatgttgtaacatatatacaagggtaaatatggttctaaatgaccttacacttcagtactttcttatagaagtgttcatcgaatacatcactatttattgtggacaatgtcccacatggaataaatgatagagaattgagccatatataagaacatgggctactccattcattgccaattgattttgagatggaacccatgattctcaac

SEQ ID NO: 305200 - DNA, 1542 bp, Cannabis indica
aaaatagtatttacaaaaaaaaatacccaaaattggcaccctgacaaaatataaagaataaaatacactcagggtcgacttaaccataagacaacttaagcaatcgtttaaagtttacaaaatttaaggcctatattttaagggtaatatacattatttttttttataatatggatgatatacattaaaatatatatttcatatatttttaaaagaaaaaaaatcttcatttaattagtttgaatattaatattcactacgaacgttacaattcaattaattttaaatctaaatttccatagctattaattaataattaatgattttttaataagaaatcttatatataaaataaatttaatataatatcataatgttccattataattatatttattttattctaattagttttatgactattaatttattttttatttttataaataaattaaagtttgtgaagaaaaaaattagtcctccgataattattaataaaatatgtgaaaaataatagaaattaatataaaaaataaaaatcttaataaaattttaataaaccttgataaatcaaaaatgtctaatttatattttgccttaagccttacaagatggccctcaacctcaatagtcaatacacatacatagacccatttgcaagaaaataaaacattggggaccagatagcaagatacacaaaagataagacctttttcacaaaaaaaaaaaaaaggaactcattttgaagagtctcgtgggaaagaagtcaatcgaaatcgatagaaagaaagaaagaaagggcagagatcagagatcagattcagagattgaagaagaagaagaaatgggtattataaagagtgcctttacgttcatgtcggcgactgtattcggaatatacatagctcaaaactacaacgtccccaacatcaagaaactctcagacactgctctcttattcgccaaacacatcgaagaaaattaccgaaagcccaagaacaaaacagacgactacgaagacaattagttttcttttttccattttgtaatctaaagttattgtctttttgattttttctgttaaaggtataagtataaaaaccccaattcaatttcatattttgttccaaatgcaaagttagaaactttaaatgtatacacatttttgtcttttgagattaccacaaaacaacccttttaagatttatatatatattgttggaaatattgtgaatattttaacaaaatatataagtgtcttagtgtgtgtgagttggaaagagtcccacatgggatatgaaccctcattgacaagggtataaagagtgcaactttggcatttgggtttgggccccaaggggtacccagttttgtgcgaatgggtgaggacacacacacttgacccaccacacacgcgcgcgcgcgccgtccgtccgatccgagccgggttgggttggttggtgtggtgtgacacaatattattttttacagaaaaattatttaataaaataattatttttttatttattaatttaattaaga

SEQ ID NO: 305201 - DNA, 3557 bp, Cannabis indica
ataatgaaaaatatacaatgcctaatagccaatcttaaaaaatgatagtaactttaaaattcagtttcgaaattataaaatttatatcaatacttaataaccaaacttctaacatcattctctattttggttaatttttaatttgtttgctcaaaaatcagagttgatttaagcatacaatatggagcaaaaataacaaagagaattggaaactaaaacgagatagaaaaaagaaataaagaaaattaaagagacaaaaacacaataaaaaaatataaaataataacaaaaaaatagaagaggaagagaatcatatataaaaaataataaaaatagagatgggttaatactatacactctaataatcaaataataccccaagtaaatataaaatccactaaaaatcaaattattagcttaaatatatcactaaagacaaatatccttaaatggtaaaaagacccatttgccctcccatacactaaaggcaaacataccaccaaggggtattttggtcatttctaaaatctcgaatattcctaacattcccaatgtctatctaagttgccccgctactacaaaaatactaaaatgtgattctattggtgaaatgccgcgttccaaagtttctgggcacaaaacataaaaaacataaaatttcatatatggcataaataatacaccctgaattcaaataaacctccatatattcataaatcatatttaaaaatctaatttcataattaagccctaattatctactaaattccataataaaattaagcggtctttacaaccaagattctgaacacccttttgtttgcaatctgagcttcaatcactaatgaattgttgaaaatgcacatgattggcttcttcttccatgaatgtgattgggagattcatcatttaccgacaatgggcaggagtttgtaaaagagcacatgtttcttcttgatctaattcattgaggtatctcttctgagcatttcttgtacttctggcaatgtgtgagccttcagatatggttgcaacatgaccatctaccactggcaagtaacaccaggcgaatacggattaactggtttgagagttgggatgggcttaggtacctaggcatttggtaccctctaaaaaaggtctgcatgccaggagtttgagttcttggggcctgtattcccgaagcttgaagataacctactccctgatgaggatttatggttccttgttgtctaggagcaaatagttgcatgtgtgccactccctgcctaggatacataattaggatatgtaccaagttggataaatgaaaatttctggctaatccttctattttttctttcaaatagtcacactcattcgtggtatacccaacatcaccatagtattcacaccttttgttttggtaccatctgtgcctcccccttgtgcataggcggtgacttcttgtagtggatatattgcaagtatccctataaacattctcccaagtatccaccaaactggtatactcagaatatcttggttcgtgacttctccctttcattggagcttcacctcaacttggattcttaccactcctcttgttcctagaacgactcacattcaattccagaacttccatttgttaacttgcctgcctagaggcgacactacatccagtttgtgctaccctgtaattagaaaaattggtctgtgcgactgcctgacttgagacagtgggtctgtacacttttgaagttatgaatacacttttaggaggagtaatagttgaagcaaagaattgaagagctagagtcgatttgctgacatttgttgatattgtcagaggcactccataagcatggacataagcttcctctaagtttatgaaaccttgggcactaaataagaaattagacaaggtgtcagacatctttctttgtaattttccctacaatagcgatacgatagatatccctaaagttaaggttgccaacttcatgtcatcattgacctttgtcttggctgccgcttccatcattctggatatacttcttgagactctctcccagttgttgcttgatattaggtagtgaactgaaagtccatgtcataatacttcacaactatgaattattttttgaacattgtttgtagatctttccagttacaaatggatctaggagataatcttttccaccaatcttgacagattttaatagagttaatgaaaaatataggcactttgcatcatcactttccttcgccacttgcatcaatcgaatatatttagataggtgtgacaaagggtctgtcctgccttcatatagttccacatgaggcattctaaagtgttttagaaagggtgcctctattattcttcttacatatgattctggatctccttcttttgagtcagatacaaccccactttgcttttgggtgaggcgttctatgaacttggtcaattcagctatttagtcttccagacacttagtgttgttgtcttagaattcacgtccataaactctatcattaatgtggtttttgagatcgtttccacgataccttgccttctcgcctgcagctcgatctttcttttcatttaagcattcctggaggtccaatgttgatatattgtcttttggaattgggtgaactttgtctactccatcactctagttaacaaaaatactagggcagtttttctatccccaaacaataggcctttgtacttgaacactaggcctactgccctgcaaactctacctcacagatcaattgggaggccttgctctagagcattagcgaccttctttttctgcaaaggttggtttgcaatattgatgttgttccgtggagaagttgaagcagtcttttttgtaggttcttccacgacaccttatcctttgtccctcacgggatcagaagttctagaatatgtaggatttgttttctttgtagtaatattttaccgaggagcaggttcatcaggaatgttttcatcaggaaccacgttccctaattctattatggcctccaatcttgttaacgtttcttgcatttgacgagagaagtcttcttgttttgccaatttatttttggttttagcaagttctttggccatttgaataaattcgggatctagctcatagtaatacccttcctcttctttgtttgcaccatcatctccaggatcgtcatcctcaagatcatcatcttgatcttctagatcaccttcttcattgatgggattctgatcaacatatttctcattatgttgagttttcttggtaggatggctagttacttctgctgtatctcctacaacacatgcttgtagtaggagggttcatgccttccatgtgagcgtccctatcacgagcaccaaatttgttaataatggttcttgtggctaccattttcacagttcacaactttggtatcaactttttcttcagctttcaatgaaaacactaaaatatttactaagatttttgaagaccgaaataattacatcaaaccgctcaaaccactcaaaccgcccgcaccgcaccacaccgcaaaaaaaatgc

SEQ ID NO: 305202 - DNA, 1308 bp, Cannabis indica
ctggattaatccaatacctagtcattactcccactcaacagcaggtgtctggtctaatgcatattaaagcacatctgagacctctcactgttgatcttaatgaattctttcattgacctttatctttcctagaatagttgaaacttttctttagataaatgaaatttatatcaagaagtcgaaaaaattctatagatttagctactagaaaaaaaatgcttcagcatcttactaaattaatttgcttgcactagagtaagtaattaaattaccaggcataccacaagacatttgtttagataaattcaaacctttaatactaagaatgttggccatagttaaaaagtttataagaaaatattactaattattctaataaaaatattggtgaatagttatgtattatatatacacatataaccaaaatatgtatatatataattctgcatatcttatactactgtgtagcaggttaaagatcgaatcaaaaaccattccttatggatgaagctacctacaacatgcctttctagcgctactcagaatatgatgaattcatctcttaattccactcacaaaagaaggtctattatttttcctaattcccaccacgacctgtgactaattggcgtctcaatccataaaaagaaaagaaaaataaataattattctatttaaataattataataataattagtgagtaaaaagtgcagaaataaaaaaaaaaaaaaaaaaaaaaacaaaaaaaagaacaacttatgccttacgtcgttcatcaacctatccaaaattatttaaagaaatgacaaaattacaagaagtttgttccaactttttacattattaatttatttaagtattattattatatacacgagtttttgcattaataaagttgagagacaactgatgaattttaagaaaggtaataaaaaggtgacaaagatggataaaacttaatttggctatatatggattgttacggaattaaaatttagaagatgagtattattaaacacagctaactagtcttaacgatatacatataattaagacaacaaaataaagctatgacataaagaattacatataatagtgtagcacaacatgataataatccaagtcaaagtcataaagtgtattaagatatatatatatatatatatttatatatatatatataaatatagggatatgattttgtctcgttattgtactttcacgaattgtaatccgtgatgtacggcagccgtcagatgagagagttatttgatctgacggctgagattgatctaggggtaattagg

SEQ ID NO: 305203 - DNA, 583 bp, Cannabis indica
tattctattaattttttttctttagatatatattctattaattacagcaaaagaaaagacttaaatgaattgaaaaggacaactgatcaaaacatttgcattatatcttcaacacagctttaaatgggaagagtggtgattcttaaacttttggccattattcaatgactattaagtatgtactctacaaatcaatcaaatatcccatcatatatattttaaagggtttgctaataacaattacctagtttaagcatatttcttgggcaattagcaccgaaaagtatcttatattttatagattatataaaaaattttccttcacgttttgactgatcagggataaaagtacttaatattgtcccaacaaaaagtgaagaaggcccacataaaagtagtgcctcttgtcacctttccttcaattaacattccataatgctagcaatttattttgttggcctacttgcagtctcatattaagatttattaatatatattacttttatagatatgagagtagtattaagaaaatttaagtttttaagtttaatttttttatttaactaattttttttttattttt

SEQ ID NO: 305204 - DNA, 1538 bp, Cannabis indica
tccgtttttaattgatcttggtcccaactaacttagctgtcacttagttaagttgtatcttgaagccttatatattcaagaatgaggctagtgagtacagagaaagaaagagctggtttcttggggaggtttgcatggactagcttaactgtttgaaagggcttactcggatttagagagatttatataatatatatatatatataaatatatacgcacacacatctgactgggtgtttctctgtatagctcgactgtgactcttgtactaaagttgttctgattgggtaaaggaaagggatagtgactctagcactggatgtaggaacaacatcgcattgatgttgtgtccgaacaagcataattctgtgttgttttatatgcttttctttgatttaattcttgttccctaattgtttattttatgttcttaaactgagatagtttaattctgttattggatcttgaacattggttttcagtcttgaattttcttcaaagatattaacccaaagaaaaatcctcttatactaccacaccctacatactatctaatagtcctaataattacgcaagagctaaaatctttgcgaaaaatgataagaaaaaattaagcaagaactaaaagaaattcaaatctttgcaacagtgttagtaaccaaatgtggagaactatatggagaaatgttccgtacctctgagaccgctttcctccttgttttctactttcacaggagacttttcctcctcttcttcttctttcttaggcaccacactcaccttcttctcctcgacctcttccacctttctcctcttactctccttctccttctccttagcgacgcgagcaacagacaaaatctccttctccgcggtaactttatcgagaaaatcactatgttgagcgacaaattcgaaaactttgtccaagaaccctagcggattggagggattcaaagtggcagtaaaggacgccgtggctgatgatgatgaagaaggggatgcggagggcttgagattggggttgggcttaggtttggtctctttgtgctcttcctcgaactcggagattatcgccatagctgggtgtgaatcggatcagagaaatgaatgtgagctgagaatggtgatttgagagtagtgagtctgagtagggtttagacttagatttgaccaccaatcaagtacatacatatttatatagtctctgagttatctaagtttagagtgttctagaattacattcttacaaaataaaaggaaattgtccattttcaactaagacacgtgttgtctgatttttctaattttttcatattttgattttttgttcttccaataattatattaaggcaaattatgtaaaacctcatatactttttgaagaattgcatactactacctatcttagccgttggattccgaaaaaaatgaactttgctatgatctaagggatatgtgatgttaactaggggtgttcatcaaactgctcaaaccgctcgcactgtaccacaccgcaaaaaaaatacggtttaaaa

SEQ ID NO: 305205 - DNA, 4462 bp, Cannabis indica
cttttaccctacaccaacaagaagccttaatatcagtatcaaggtatcaatatcagtatctttgctcttcttcttctacattttccagatttgagaggctgctatgatgggggaggaggtgaacaacaccgagtgggattggctccaatgaagttcagtataagtgtactgcctagcagccacaatgttctttcctgaagtagcagcacaaccacaaacaatcacatccataccaatactcaattttcggtagtaatggagatgaatttgatttgactaattacattgatagtactgatctgttagctagtctcattgaacaagctcctacttcattcacattgcctgtgaactcacgacgcatccactttagtactgaggagatcccgtctttggcgatacatcagaatctcatttgagcaaatttacaacatttttgtggtactaatcataggatggtcaattggttctactgacaatcaacaatgacggttggatcagatatgttgacaatctagatatggctagaaattgactgttaaggatgaagcctaagatctggggtgggcctttgcattcttgattgttttttttttttatgtttacttggtttccattggcttccacagctatcaatgtgttcacgagttcccatgaaggtgatttattcttgagagtcagtctggagaaggaggctgtaagaaaatctggctcagattgtgcaagagcaaatatggaagctggctgaccaaaatttaagcttgattttaactcgagagattctgaaaatgctgcagtacgagtcaacacatgtataaacaaaaaaaaaagcgtcaacacatgttccattcatgaatttaatcaccattctttcaattctttcctaaaaatttagttacatttactacctacaatcagcatacaacttaatcagtacataaagtaaacttgtgctcaaatactacttccatttagcatccacaaaatatttttccaaggagtgaaagccatgagccacttgtcaaatgtacgtcgtaccctcgcgaaacaaagatacagagaggcacaaatgcacaaatgcagcctagttgttgaacaatgatattgatcaatatagcagacattgcttttacttctcagaatgtacagcatttttttcttggtcgggaaaggactcgaatttttttaatcttttacaagtacattagtttctgactagcattatatgcagtaaatggtatacaaaggtaaaagtcataaaagtctgattatatttactatattggcttgtagtgcaatgcaatttatcatgaataccaaacacactgcataaattgaagagaagcaatacctcaaacttcacagatccaaactcaagcctctcttccacttcctaatgaaaattaggccctgaacaaaatgaatgccacattcaattaaaaggaagaaaatgacatacgattggttctaagattggttctaaaattagcatccaagtccaaccaaatttctcaaaattgaaattcatcatgctaactggaaaaaggagaccgaaacattaaatttcctaaaaagttacaatttataaatatgcacaaagttacatacattattcttaagcattctcgagctgtaacattaaatccataaattaaggaaacgtgtagaaaaaggtgttttcattttagtcatattaagtttcgagagtttccattattacactatagacaataaggtgtcaaagttaacagcaacaacaccaacttgaagacaaaaaaaaaagtctattcaggaatcataccaaatgaaaaaagctcaaagaagtgacacaacagtggaagaatttgagctttcccacacttcaatgccttcaacatcttgtctgcaaagaaacaatctttgacctccaccttcaattttctcaatgacccctctctcagaatcctccactttatccatatagttccttctatacaatccttcacaaaccccactttctttttccatggctgcatttttacagttgggaactttggaccaaacctctaaaccaccatctcttccaacaaaaacttgcttgttataacagtgtagcacaatgttaccaagtgcagtagtagtcctcaagcttgggttgttgtcttgcaagtatatccatggatcctcttttaaactacgcaaatccgccattgccaaatctcccgacttggaacagaccttgaacaatgtcgaatcctctacatcgactcctacatcggcaaatgggtcaccaaacctcccgcttcgccccgaacctggctcgttcgtctcccaaaccacgttcccagacctcggatcccacaatctaatgtacccagaaaacccaaatgctccacaggttacagaacttgcaaagacaataccagtttccggcagccacgtcagctttccgggaaccaaattctttgccgagctaccggactgccgtccaagctcggactgtatttgaagagttgacttatcgatcacgaggattgagttctctttatgaggacaatggaaagaagcgaaaactgagctcggcgagttggcgattgcactcacgcgcgctttgaatatacgcggatcagtcgggtccctccagtggacggaaccgacgtttcggcctccggagaaatcgtagaaatggagtcccgcggcggtctcagaccctaacactgcgagttccgagtaaactcgggaaatcgaggtcacgtgttccaaatgcgttcgaattgttgccgtatggatcagattccaatcgtagctcgaaatctggccgccatgggcaatccaaagcgatccatcatcgactacagtggtaaaggctgatgcgataccctcggaagcgggacgcacagtggaaacgactgaagcatcgattccatctaagggagggggagacatggcagacttgagctgcgattcgattccgtaatagagagcttcatcggcgagttcctgtttggagaagcgacgagccgtagaaggtagacggttcgatcggagaagagagagtagaacggagaagatcgccgggtcgcggtcaatgaaaatgggattggggtcgggagttgggcggttggaaaggacagataagagagagtcttgttcaccggagcggagagtggaaacggtggtctcgaagagcttaccgccgacgttgagcttgatacggtcgttgaggaagtgggaagttgggtcttccattaagctctgaagtctctactaatggcggaaacagagtaagcgctcgttgtcgttggttggttcagctttagctccttcttcactcacttattaattattattatttttatttaatagcttttgaacttttttttatatagaaattaactttataataatttttttaaaacaaaaagaataaatatatatttcttcttatcttcttatcaatataaaatatatcttaaatattaagaaaaaaaaaagatgaaagctttttaaaaataatttattaaaacacaaaagtaacgtgaaagataaatttacaaaaatattaagagtctatttagaattaagtctaagttattttttaaaaaaaaaatattggagtgttcatctaattttttttttggatgcaaatagagtaattaattttaataaaatatatacatatagtttataaatctatttatgtgtaattaataattttattctaaattttaataaatgtatagatattatttacttaaaaataattttattaggatatagtattaaagattatttattgttattgttgttatatttatattttaagcaaatactattttagatcatgtattttgcaaaaaattatagattgtactctctattttattaaatgataaaatgaactccatattttctaaaattgtataaataaaacactgaacttaataataatctagcctagaggtgttatgacaaaactcgttaaattttctacacatgtccgtgttagaaattgtctttgttagttatattaaaaaaattgttaaaaattgagtttagaatctcatttatatcattttaaaaaatacaggatttattttgtcatttaataaaacagagaatccaatttataatttttgcaaaacacaaggtccaaaatattattgtctcttatatttttttgtgttttgattattttttaaaaaaaatttgcttagtaacaagtgtttttttttttacgtggtgaacaaagtcacacatgattaacaatgcagcacaccacaatcggcggtggagcccctcgaaccaggatagctcatcgtctaaccgaaagggcatgttttgccaaaccatgagctgcgaaaaacaaaacacaagccacatagaacaaaactgcccccggaaatatagacaataaagctataacgtatttgaacaatacctcatcaccttgaaaaacacattctctttattaatagttgtc

SEQ ID NO: 305206 - DNA, 2262 bp, Cannabis indica
accaacaaggttactctcacaaagcaacctgttatggtaacaaattgggaacccaaacacacaagagtagaaaaaagcccaaattccctttatcacaaacaaagcatatcaaaggggaaatatttaagaaactatggcgaacccaaaaatatttgacctaatcatctgaactagaaaaccccaaataaataacaggcatacgtcttaacccaaactgaagggaaagtaccttgatagagcctaagctcaaagagatactatctccaagtacatgcagaaaaattctagatgcaataaccctaattcctaaaatttaatcctacgcatgcaaagcaacaaatttcttcaaacacgaaactatattcacaatcaagtccaaaaaaaaaagagaatagtttatgtgggggaaatacttacttgtaagacagattaaaagaggagaggatggttgtacgtcgtcgttcagatttccactgactatttggtgacagggcctcgcctagctccaatagcagattaattgtttgggaaggtgatgaacgtcaaagaaacacatcgacggagtcaaaggagaatgtgttagactttggtttggagaggtgagtaggggcaaaggtttctgggaaaaaagttcatttgagagggttctctgggccaaaaattgctgctaaagtggagaaggaaaagtgacttcaatcgccaagactttcatttatatgggcgaaaacggttcaaacatttttgaaatgcacggtccagattgaattaatcagaagctacaccatccaacgattggagataagaaaggtttgcatttaatgcacctgaagaaaaagaataaattatttattactcatcattttgtggttgtatccccaacgtgttagaatcctagcatcttttcaagcccagtcgttactcccttcacacgacaaacacgcttaaattcagagtgtgggcttcacggcttcactaaataagtaccatgcttcaacaaatcaacaacaatattgtagaacatgataacccttcggatgcccaaggcaatgcggaagacttcttcgacattccaaatgcttggtcaacaaatcagagacgtgaggcaagcatctgggagaaagctggaagctcctagcactcctgagtcctggaagcttaggggataaatgttattcgtatccccagatgaaatgtagtggaaatcacagaaggatgccatgttagattactcattattaatgaacaacctccacttcttggagtcacaaaaattcctataataccagatcttacccgaaggctctccctgctagccaagatagaaaatactctatgattctcattaaaaaaaatgttaccaagagggaataaaagtcacacgtgctctaggatggtagcagattagtttggttcgggaaagccttagccaaacgttcctggacctctctatacctaatctagagctaaacctgatggttacataccttctaacactaaatcagattttgtcccttacgttaaaccttggtagtgtgcgtacatgctttgtagcttctttttgtccaatgacttgtctagacaccaacttttcaaggtaaaaactttgagcagcatgtgtcattagtaccacgagttgggttgcagcagttaagcaccacacgatgaagaagctcactacctacctacctacaattagatcaccatgttatatacgccagccatgaaaatgtgcttagtacgaaatcctaggtgggtgaggtatgccatcacccacacatgtgcctataaatacccttatttttcatgtgtaaagggtgaacaatcttttacttacagaacctctatgaaaattcctataagcttttttattctctaacagaaacaaacggaatatatagttagtattcatactgtaacacttgtagtacttaaacactcgtcagtcagacaaatacaatggactcgtggactagaaattattaacgcttgaaccacataaaaattatttgtctattatttattgttttatattttccttaagctctaattaatcttgttatcccaattttcgcactttgacgtggcatcacatgaatggtgacacatggagtccacttggaacatttgctcaggaagcattgtccgagcaggatgcctcgctggcatgcccagggcaagatattcagcaatccgcgcagagcgaccaacacttagcgaattcaactttcgcatcatgagtcatcagcacaatccctataactc

SEQ ID NO: 305207 - DNA, 1037 bp, Cannabis indica
aaacatttattttccatttaataaactcactaaaagacaaaacatcattactaagcgggctttacaattcatgtcgagttggtaccgcttcgagcacgtatatcacgttcattgattttcaccgcagtattgtagcattcggttgaattttcttgaacttctctcactaatcctacacctactggtgtagggaatttcattgtaagatggtagattatagtcactatctttatttctttcaaaatgggacaacctatcaatgcgttataagtgaaatgttgatcaactactgcaaactttgccatagattttgcagtagtaggtgtcgtccctaaagttatcatagtttaatcattcctttcaattcgattgtatctctagtaaacccgtagatgcttaaattcatcgacatcaaatctttctcatgtaacatttgctagaaggcttgtaaatttaagaggttaattgagctaccattgtcaacgagtatgccatggacgttgtcacctcctatattggcaactaccaccaaagcgtctacatgagggttgtgtacccatcttgcatcactttccatgaaagtgatatcatcgcactctttcttaaaaaactttgctagtttttcacttaatttttttacatttgttaacggcttctccttgacttcttttgcatagcgttcttgtgctttcttagaatctccactgacttgcagttcacctatgatggttaagttgttgcgagaggctctagaaccaatcgcatcctctgtattgttttccatatctttttagggattggcttctctaattttcttgtactaattaaaatgtcctcatcgaaccagttattcaatctcgtcctgtaagcaccatcattcgagtgttgtgtaacaccctaactaccataggcgtattacgtgatttttaaacgtactgtgcagctcgttgctaatcaacgaggtttatggaaaaacgtgattataaaattttgctttttaataacttataaaataacattacaaaagactcgggatc

SEQ ID NO: 305208 - DNA, 1737 bp, Cannabis indica
ttccctggtggaaagaagatcggaattgttggacgaacggggagtggtaaatccactttgattcaggcattatttcggctgcttgaaccagaatgtgggaagattataatagacggtattgatatttctaaaattggtctgcatgatcttcgtagtcgtcttggcatcataccccaggatcctaccttgtttgaagggactattaggaacaatctcgatccccttgaagaacattcagatcatgacatttggcaggtttgtaataccatgcacattccatattaatcttgttcttgtatatttttcaaattccttgtgtgatgactttgagattgaatatggtataggcgctcgacaaatcccagttaggagacataatccgtgagaaagagcataaactcgatacaccaggtatatttattgtatagtctattcctctagccatgtaagtagacaattttggtgactgatcatcaatgccaatacagtgctcgaaaatggagataactggagtgtaggacagcggcaactagtttccttaggccgtgctcttcttaaacaggcgaagatactggtgcttgatgaagcaacagcatcagttgacacagccaccgataatcttatccagaaaattttgcgaacagagtttaaggattgcaccgtctgcaccattgctcaccgtatcccaactgttatcgacagtgatcttgttctggttctcagtgatggtaaatttactttttctatttttattttactaaactggtctgacacttgcgttataacaatcgctgaatttgattttcaactcatttgtaggtcgagttgcagagtttgatactcctatcagactactagaagataagtcatccatgtttctgaaattggtaaccgaatattcatcacgttcgagtggcatgccagatttttaatagtaaatggtatgtcaaatagccaaacaatccgaaagccggggtttgagcagtgtaaaaccattcgttatcagacgtggctgctgcagcaacagcagctacattcggcaagttaaaagggagaaacatgggaagagaaggacaaaggtgtgtggtccttttccgaaaactaaaatcccattgaataattagtttctactttcgaaatgaaacaggggttaattcaaacccctagtagaaactttgagttcattcaaggttggtatactttttctttaattaaaaaaaaggtaaataagatgggttgggaataaagccacaagagagaagaagagagagttgttattatgttaaataatgtagtttttagattgaagcaagaagttagttattgagttaggagtacttgtattagggctgaattagtctaagaaaaaaactcatatggaataataaactttatggaataataaacttctttgtaatctcaattgtaaagagacttaattacagctgctcttaatccaaattcccatgctttctttcatggggaaatttttgtaggaacttgtctcaattatcttatatgttttcatttcatttcatcaaagtaaagaagaaacattaaattgggaatgctatttagtggagaatgatattctaaaggtgattgaaaactcacttatgttacacaacaacgttttgtttcttacttttccataaggtcaaattccctccaacaaaaacacaatatctttaagggtgcgtttggaagtaactatgtaattactaggtaaggtaatta

SEQ ID NO: 305209 - DNA, 1496 bp, Cannabis indica
tctgattatcaccacgtgtaaatggaataataaatagtaaaagtaacgtagacttatagaggttcaacccccttgtttagcaggtaatgattactctccttttagttatattcactcctgagataataccatgcagattatagggctagaccttgtaattctagctttggctctcttcagtattacaattgtgagagcaatgtgttacagataaagaacgggtgagattttatgaaaaaaacttaacttagtgtctaggaggcataaatggagtatgaggtttgagagagaggcttcacatgtgtgagaagcttcatggagcatgagagaggacttgtagagaccctttagtgcttgtggaatgacttatctcttaagagagtgatctaatgccctttatatagtgtagggcttacataagatcataattcaaataggttaagatatccctctaaaatagggacattaaaatcttttttatatattatttaaattacaaaaagaatcactaaatccttagagtataggactaatatctcaagagaatatccctatcttcgtagactgttggatttgtcctgcaattcgttcagtctgttcagagttgtttgcataagttggctacccaaccctatttttagggaatgaccagcctagggccttctatgggccgaccaggtatgttcctgacaacctttttcacatagctttgttgtttagcaactttccttgtaaaggtcagacctccttggttgaacaagcctctttagtttgacaaccacttttggatagccagcttgttctcaaggcctagcccgcctacaagctttccttgaccgacctgacatggtcagccaaggtcttgatgatctgcttaactccttttgcttattcttgcttgacaatttttcttgattattttagaacccttcacagttggcatgccatgtaaggtgactttatcctgttattgacaagttgcattccacgtgtccttagtcttcactatgtggatatgccacgtcaagtgtacaaaatttggaatagcaatgtgtccccgaaatcaacttcaaaccaactacctatgttcactacttatctgttctagcaagctcttataaattgacaaccaactaaagtatgaaagatagtctcaaattgagattcacaaattggacaggttgcttccgcagggacatgttatttctgcaattgaattcgtgtgggtaaacgacccgaaatagcgtgccaaacaaagttcttcactgtaggaggaatgcccaatttccaaaatttcctccaaaaactagtagaattattagtagaccgatcctccttaattgtcctatgtactctatatgcactttttactgtgtagtctcccgatggctcatgcttccatgaccaagtatcattattgtttgaaatattttaccaggatctagactttctaccatgtatgtttcattaacatcctgatatgaattctaaaacaa

SEQ ID NO: 305210 - DNA, 1739 bp, Cannabis indica
tatttctaaatattgggggtccacaataattaaattcataaataataataaaataacagaaattagtgttaattgtcattactaatccaaattactaaagagatcattacagcaataaagagatattataatctttatggttatgaaaacccaagccaccactatttttatgccgtgaaagacgacgtcaactcatccaactgatcccacgagaattattggatgaagaaccccaccaacacttagacaccagtcctttctagatgagaacatgtcttcataggcaagcaaaagactggcattgcataacttggaagggcttgggcaacagtttttagcagaatttcacgaccaactttagataagagacgaccctcccaactttgaatacgtttctgcattttgtccctaaggaatcctaatatagcatctttgttccttcccatagtgcaaggaagacccaaataagtgctatgttcatttgcaatttccattcctaaaataccacatattcttgtcttcaaagcagcaggggtgttaacactaaaaaagatagaggacttactaaaattaccttttatcctaagccatctcaaataaatgaagcagtcgcagcacattagaggtctccctctcagtagcccgacaataaacgtagctatcgtcagcgaataacatattctaagtttttagtttccttctttttgtttcactactcttcgttcaagttcaaccccatcttcttccatcctccactgtcaccatcccacctgccatgcctgcaaccttcacaccatccaacgaattgtcaaattccccaactcatattcaacatttcttcctttgaaacttaatcctcttcacctctcccaaatttctttttgtacttcttccaccggaatttgcctcgctgatagctccgttggaaatgcggaacttgatggtggagatccaccgcttatcggcgaggaaactatcgtcttcgacttggccaatcagaagttatcttcatgagtttactttgttgggattctggtaatagttttattcgtgctcgacgtttcttgactcaattattctactagttatgggaagccttcattaatgtcttttctggactctttgatagccacgagtttagtagaatttttttaattggctttgatatattagtctatttgatgattttctctctaaatttgtttaattttaattattggttttctttcgtcctttagtttctctgcaagaaatattgttcatgtaccaaagaatttttcaactctatcaaaaattcaaaaggtttcatttctgctgatgagtttatattaatttttgagtttgcaatgaatccactttctcgggtatcaaattataaaaactaaaattttacttgaaatttccaaacttaaaattccatgaatttaataatgataatacttattattaattgtggatggattgaacttcaaggattttgtagcttctttttatctgcatttagtataaactagttctcataaaattgaagtaagttaacataacatattgatgtttttcttcttcttcttataatatataggtgctactaaatagaaactacaccttttatctataagttatttttacggtatatgattatgaatctatgatgaaaatgggtgaatgtctttctatttattggatcacatccaatggatttggacccatctgatccaatccaattatttattggatat

SEQ ID NO: 305211 - DNA, 907 bp, Cannabis indica
ataattaatcataattaactgataatttccaaattaaactaagcgggctttacagatccactctaatggtattcaagaaagacacatggttatccaggttccaaactattttgtctatcctatcaagataatccatcattgggtacatacgcggatccaagtttaggaaataattgttaaaactcccttggtctctcactgacatcaaagacaggttgggggtgaaaattatgctgaaaggcattttacctcttctacaagtacttgccccaaaaaatttttggtctaggtatgaggcgaaaaaccttgcttgtatctcctcctccttagtgagggggtctagatgatgatttgcccacgtagctgcgagaagttcctcatcttttaccgctttgttaatcacaatagacaagtctaaagcaatttattctttaagatcattggcaatttgagttgagccttatcattgatgtcgtggatgctctagaaattttttatcaagccacactagcacatcaactcagtggtcaccgaatcctccacttttagttcttcctttgaaaaagcctcatagaaggttattcattgttttaattcttctattagcatggacctgtggttggattctataagaaacaaacagaagtcaggtacatagatgggaatatgttttaaactgtctgaaaaaagttacaaaaaaatgagtctcaaacctggaattttgaagtccactaaaagggctgggactcactttagagggaaaattgtcatgaacaactagtactcatgaagatctaggcaatgaaagaaggtgcttgtttggcagggagtttgcttgtacttctgaagatgatagtgttgggttttgtgccctaaataaaacccatttcaatataatcagatttac

SEQ ID NO: 305212 - DNA, 2478 bp, Cannabis indica
aataccttttatataatgaaggatatttaggtattcaaaagtaaaaaaggacatttgtttaattattttaaaaaagtgacattaactatcactaaagttagaaacagagttatttactaacatttctctttaattcaaggcacgacatggcacaggcataagctcatttgggatgtgctgggcttctttattttcactacgggcttgctcggtccgacccactaatttatacgggccaacacgccctaacccactttttttgaaggcacaaaaatgtgggccgtgtcgggccaggtcgacccaaatttacagctctaatcctagatgatgtaaccatctagataggggtgttcattagaaaataaatacttttagccctatctagatctgattcaattataagatggattttataaccgattcgatccaattaattttaatacatccaatccgatttgatctagtgaatgttggttttgatcgattctatgccatgaatgtattttatgaatatctattcgataagttaggatttatctaatattttaaatccaatatttttttttggatcggatcagatccatctaatgttttagatctagtacattttggattagattggattgatccaattatagttgtaaatacttgcgtgtcatgctagtctgacccatattttttcgtattttttaaaatataggttgtgttgtgctgggccataaaaaaatatagaccatgtcgtgccatgccataagaaatatgggtcgtgcaataattttatagggtaggcttgacaagacccgcaagtccgataattttgtactatgctcggattcgtgtagtgcttaaattttcttaaatatatcaacttatttttttacacgggctcaaattcgtgctctatatttttacatttttattacaatttatgatctaaatactaaaatatatgtgtattttatattttagttacttttataatgtttttgaataatagttacaaataatcatataaaaataattataataattataatttgaatattattatttattttaattgataaataaatatttgtaattttttatttttataaaattattagacattttaatgtgttgtgctttcgagctaatctattcatgcttatgtgccgtgctttcgggcttgtcgtgtcgtgacgtgcctaagcccatattttttcgtatcgtattgtgtttaagcccatatttttttttgtgtcatgcctaagcacatattttttcgtgtcgagtcgtgctcgtgccatgtcaaaaagctcgatccatatttacagcactaaatccaatcaacaaagaagaagaagaagaaaattttaatcctaaatttcaaatatacatgtatgttttaagtataataacgtaaaatctaattgctcatctaaactaaattaaaatactaattagttcaattgaataatggattatattagatttccagatacctaatccaacatccgttatgatccaatcggatattaagaaataacgtacaatccaatacaatcattattgaatattaaatgttaaagtaagcagttgtaattggatggaatcgctttatcttaaataagttaagcatctacatagaagaggttacatcctagattaatctagattgttacacatattacatagaatgacttacaatggatgacttacacatctttaatgggttaacttactgatggatgagttacacatttcagatgggttgactttaaagttgtacatttaggttgggtttatagcacgacacgaaactgctatgagcccgggtgcacgagcacgatacgtcacaaataaatatagatttagactcgacatgacacgaaaatataaatatattagcacaaagcacgaaacataagcatacaataaaagcataaaataaatctacaaataccaattttatttagtaattcatatataattttaataaaaatatttttttgtaaatatatatatatataatattttagaattatatatataatttttttcaaaatatttaaattatttttaaaacatatcctaaaactaattctgttatgcgtataaagagatttagttggctttaattatgccaaagtgatgaaaatggcatggctactatcactactactccaactgctcaaagatattgtagagagaggtgatatggcagtcttgaagattgtgtcaaaatataacctaaatgatctgtttataaagacactacctactatcttttatgggtcatgtaactaataagggattaagaaagatgcccaatttccttttagggcaagtgagagattgttaggatttatgcactgaaagtctgtaaaaatattttaattttaaatataagttgaacaatttgatatacatttaaatgttgaattatttattaataatttatatataaatatcaaaaaaattcttattcatatatga

SEQ ID NO: 305213 - DNA, 2404 bp, Cannabis indica
ttattttatatttaatttataattttacggtttaaaaattttaattacaaaaatacacttataaagttttaaaattataaaaatatattttgttcagccagagtgccctaaaatttttactgaaagatatttttatttacgaataaaaaaataaaaaataaaaataaatttttttctgtaatgtatttttgtatttttttttttcaatttttactatatcatataaatttttctaaaatgaaagcctaagtggttttttcttagtatatgaatctaatttacaaaataaataaatcaattaaaaatatactttaataatcataataaagttatctttaaaattaaaccaacaaaatttgactcatcaataaaatttttggtccattttcttgaagaaaaaaatccaaaccaacaaatttattaaatataaaataaaaatatattgggtgactagactagccccttggtaattttatataacgctaattagaaattttgttccctaaacttttacatgtaacaaattatgttccctgaatttgtcatgtcgttaaaattttttcccgaactattgaaattattaaatttaagaatttttgtctaatttcattcaattttactaatataacgattgtgcctttaaattttaatatctacagaatcatgttttctgaactttaacatgtaccaaattgtactcttaaaatttttatccaattcaaattttctttaataaaattgaacaaaagtttttaagtctaacaatctcaataatttgagagaaatttttaacaacgtacaaattttagaaaacatgatttgacctaaattaacctttatataatgtcaaaaaagagaaaaacctgagaacgaagtcgtttagatctaaaaagaatcttaaaccacaaaaaccccaaagcggcgtcgtttataagagtaaagaaaaaccaaaaacaacatcgtttataacaaaaagaaaccccaaaacggcgtcgttggaaaagaaagaaaaaccctaaacctaaaccctgagatcttctctgcacttccatctctgtagtttgagtctgagaaattgagttgagattaggttaggttaggttaatccatctgagcaaccatgttgcgtagaaatattcggttgaggagggagtacttgtacagaaaaagcttagaaggcaaagctcgaatcctctacgaaaagaagctcaaaatcaaagaaatccaagaaggtttcacttttttttttttttttttgatgaagaaataacaaaaacccccaattttctacatttttgtaatcgaatcacgcttaaatgaattttctttcttcttaattgcagagggaaaacaagttcccactgagcttaggaacgaagaggctgcccttcgtcatgaaattgatcttgaggacgaaagtactgctggtatggttttggttattgttttgctatttgaaaaaaaattaggtattgattgaagttaatatagcttgaattagggatttctttgatttatgttcttattcttattgttttggtttagtttatagatgggtttgtattgatattaggtgtcgtttggttggttggaatgaaaacatagaataggaacggaatggaatgaaattaaatttaaaatgcatgaaaaattattaaattttttgtcaaaatggaatagtcattctaccgaaacaattaaaaagtcattccattagaataatattcgaaatgcaaccaaacaaaggaatgaaatcaaaattagccgcatattaacttagccatgcagaagtgttctcttgcatatctgttctcttgtcagacaaactggtccagctgggatttttagccatacagaagtgttacaagttttcaaatatgttgtgccttactcagctcatattccttcctatgctgatacttggggttgggtcatggcttcggataagccttttgtgcttaatgctgatgagttggacataagaatcgagcagaaaatcaaaggagagaacagatattttgatggaaaaacatttacttctgcatctactttgagcaaagctgtttgaaaatttcttttcaatgaaactcacatttacactgaaggatcagctaagttcatatacggttatggaagttctgggaaatagagaagtgtatagagactttccttgcaaaaatcctaaaagaaaaaataaataaaacaaaccaaaaaaagagtactaagtattgtggtgactgacaaaagtttgtctgtttccttctaattactaaatgtatttccctttttattttgtttcttcttttatttgtgtagttataactagttatgaaagaaaatggttgtgcacaaaaaaaaaaaaacgaaataaaaattatttcctttccatttcattacctctaac

SEQ ID NO: 305214 - DNA, 3427 bp, Cannabis indica
aaagtacctttgagcctttggtcaaagcctaaaaaaagaagacggggaggacgcgtatatcctccctagatggacatggtgctagtagttcgacatcttggttggtatctacatattctaatgtgggcatacaacctcgtagtggtgttaaaagaaggaatgatggttatggtacgttagaagagagaagagtgaaaccaaatattttgccaggtgttagtccaatgggggttgatgatggaatggcacagtctgtggggcaaactcgccagccccaatgagtatcttatgatggaatgcctggcgggtggggaatcccgttgcagtaagtgctttgtggactcttatgcgcaagcattccccaagcttggtcttcctgtccgagactaagttttgtggtaattgggtagaaagtattcgaggacatattaattttgctggtagctttcatgtggatagtgtgggaactcctattattgtgaaatgatgactgggatgttattattataagctactctgctggacatattgatgctcttgtacgatgtccagagagtgagttatggcaattcatggggttttagggcaacccaaaaactcactttcgaaagagtcttggttacttctttgacgtataaagaagctttttaatgtaccatggatctgtgggggagatttcaatgagattttatctatgaatgaaaaaaagggtgggacggaacgcgatgtgatggtgatgagtaagtttcaaaaagctctcaacaattgtatgttagatgacctagggtacgaagggccgagtttcacttgggtaaatagaagacaaggtagttcacatgtccaagaaaggttagatcgttttgtgtgcaacgaagcttgggctgagttgtttcctttctgcacgagtgtctcatggtgattttcttcggtctgatcatcgtcctataattgctaaacttgagaatgttatcgtacaatgtcatgaacaagttaaacgacaattccgctttgaacctcattggctgaaagaagatgaatgtcaaaccattgtgatggaggcttggcaaagatgtatgctagatgtggccaaccttgttggactttggcactctcttgaatattgtgccaatcgcctatcatcttggaataagaaaagatttggcttgttatctaacaagttatggacacttagaaggaaatagataaacttttgcatgttcctgctctcaatgtgcgaatggatgaggttaaaactctagagcataacttggatgatcttatgaatagagaggaattgtattggaaacaaagattgagatcagagtggatgatggcaagtgatagaaacacgaaatacttccataacaaagcatcagtgcagaagaggaaaaatgctattattgaaattatgacaaaaaatcgccaaaagctatgtgttgaggaagatattattggtaaagtggagatgtatttcacggagattttccaaacgaccaatccgacttgtgagcaaatccagcgtggtacagatgtggttaattcacgtattttggcggctgataatgagcgtctaatggaaccattcacttagaaagatattcaccaggctattaaagtcattaaagccactaaagttccgggactagatggatatcatgctttatttttttagatatcctgggatattgtgggtgaaagggtcagccaattatgccttgaaattttatatgatggtgcttcggtgcgacagcttaataagtcaaacgtagtgttgataccaaaagtaaaaaaatcaaaattggttaaagagtatcgacctattgctttgtgtaatgtaatgtataaaattgttgcaaaagctttatcactgaggatgaaaagtgtccttggccccctcatctcatctttccaaagtgcatttttcccagggcgatcgatacatgacaatatcattgttagttttgagctctttcattcactatttaaaacaaagaacgggagaaggggagttatggcactaaagttggatatgagtaaagcatatgatcaggtggaatagagattcttagctagtataatgagacagtttggctttgttgagagttgggttcacgttatcatggactgtgtgacaaccgcggagtatacgttttaatcaatgtgcatcctaaaggctgagtgattccaacaagaggttacgatagggatgccctttatctcctttctatgtagaatcattgtcttcattgttctcccttgcagaggccagatctaaactgatagggtttaggtgttctagatcaggaccgcgtgttactcacttattctttgcagatgatagccttgtgtttgctagggctaaaggaggtgatactgaaactataaagcgtatccttcttacttatgaggctgcctttggtcaaaagattaattttgagaagtctgctatcacttttagtccgaatgtgcaacaagtggaccaagatggggttcttgagagtattggagttgacatcgtggctactcatgacaagtactttggattacctacagttattggtagaaataaaaatggagaatttgaaggaatttgtgagaaggttaggaagtgtgtgcaaggatggaagcgaaatttcttttcagctggtcgacgagaagtacttatcaaattcatttttcaagctattccagcttatatgatgagtgtctttaagttcccgacgaaaacttttgaaatattaaagtccattgtaagacaattctaagggggctcacctggtgatcaaaggaagattccttggttgaattgggaaatagttgtcagcctaaggcaatgggtgggttgggtttcgggatttcaattctttaatcaagctcttttggctaagcaggtatggaggctatatctatatccagattcattgcctgctcgaattttgaaacataaatatttcccaaattgctctatccttgaggcctcagaaaaagttggttcttctcatcgttggtcaagtttggtatggggaatgtagtggcttaaatgtgatcttgagaggtccattggagatcgaacacaagttagggctttcgtggatccttggctttcgcgtctaaggtcttatagccaatcataagttggattaatgatgactgttgggtgagtgaatttattcttccatcttgttattggaatgtggggaagcttcaacaaatgtttttgccaatggatgtggacatccttttatctattccattagtgaggcgtgaggcattagatggttggtgctgacactatgatagagatggggtttataatgtcaagagtagttattcattggtgtggccgcttcaggttgaggagggagtcgcagatttatccaagttatcttgttagtggaatggagtatggaatcttaatatgccacca

SEQ ID NO: 305215 - DNA, 863 bp, Cannabis indica
aaaaaaagtaaaattttaattatgtattttaaatgatagaataaaaaatctgttggaagtcctctaggcttaagcataaaaataaacaaagaagaaataatctacttaataaaggtataacactacatacaatgagtattgctgtatataaactctcggttacattaaaaaagtcaaatagattgtattacattaactttcacaacttttctgagcaaccaaacagtaaataaaaattgtgcacaaaattattatcaaaaaataattaaacaaaaaacgtgttcataagaatgattatacaccctgaataaaattattttacgcattcaatgcgattttatgttgaattcatcctacttcaaggctcatgacctttcgtctcttactttgttttatatttgaaaaacactcatatgtaaggagaatatgccaagtaaatgtttggtgtgattttatcaaatgttttgttttttttagaacaaagaccacttgaaaatacaagatcaaattttaatttatgagaagattttttgtcgaaaaaacagagaattggtcttgagaactattgctattttctattttatcaattaacataaaaatcaaatgttaattttgtttatatagaacacgttctaccattaattataaatatcaataatttttagtaaaaatatatatagaattatgtaggattcacgcttaggacccacccatattagagcatcactaatggtaaaactttagaagatgtttgatgatgtaaacatattatgtaacaaaacattgagatgctatactaatatactattgaagaaaagagaatatcattctaaagttttgcatggatgttatgttgtaacatt

SEQ ID NO: 305216 - DNA, 2624 bp, Cannabis indica
ttattctagccttttaaactgacgcaatagttaaaaaacacacatgactttgggtaagcgaattctctgctatttcgctaaccccatcgaagaccacaaatctgctaaatcaaacagtctgtcgacccttctctcttttcctctgttaatcgtggatggggacccttctctctccctctcttaattgcatggttcgccgaccctccacctaaaaaactcggagccaaatcctaatatttataacccattcagaccaccaccagtagctctgacagaccacccccaaactctgactccgataactcttcctgttggcgtcctcctctcagtggcaggtataattttgtatattttttatactttgatgagatactaccgacaccccaagtccggatctaaccccctaagatttttttcatattgtaagggctttgattttattccagttgggaaagtgagctataaattaatatacaaacaaggaaggtagaggaggccttaaactaggagtcatggcttctatgtcatgtggtgtttgccctgtcattagtgagtataggccctttatagtgttatctctcccaaaattaacgtgaattaatgactttccttatttattattattgttattattatgattattatgtaatggcttctatatgttgcttgtttggtctaggagagtgggattgggactattagttatcactcatggcttcactgtttcgcttgaagatttttaacctcacctttgttgtgctctgccccactcttttgttgatttttcatccaattacagctaccaatgttaaatattgtggtatttctcttttcaatcttcatttgtgtgtgtgataaccttcttgaatagaatagctatttttgtaaaacattcgataaatttgtatatttaattatttttcttcttggaattgtaatttaaaattgtagataataaaattgactaagctatttaggtccatggagtagagatttcccctgatcctgtggtactctctctttcttatcattatgttcaattatgttagaccgtgaaattagttacaatttaattaaatttggagatgatgaattaggttcttctgctaggactaggagggtatatgctggactgttattggatgctgggggtacccttttgtagctggcaaagccagtcgaagaggcttatgccacaattggtgccaaatatggtgagtttaattgttttatcattttgggacttcttcatttttctccaaaatattaaagttcgagttttttctgttatagtgggttctacatatggtcttttatttgagataggtttacaagttatatacaaaagtgtctgtattgatttgagatttaaagttaaataaactttggagttaatatatataatagtggccatatgtttttttttattcgtgttgttgagatttttaaccagattacaatgattttgtaatcaagttgaggtctttccattaaagtagtatcaagctcttcaattaaacttttgcttgtgacaatgtgtgtaaaaagactttgttttaaactactctttgatagtggattggtagcttcagtagttgttttgagtttattggatcatcttttttattattgtactaaggtataattctaatattaaaactatgttaacagtggttgattttgaagaaaacgttggaaaaaggattattgcctcaggaatatcatagctaatattttgttttgagtaaatattaatattttatgtttactttctaactctctgctttgaattaattgcaattagttgtcaaattcttcttaattaataacaatttttttctttttattagtaattgcaggaaatcagttgtgccaagcctgcaaatttgcctcctattgttggactatgttagtatctaaatcaaacaaactcaaattgtgttaacccaaagcactattataagtcagatttggtagtgcctacatataaaatttggtcaacaattcaagattcccccttactcccttaggtgctttagtgattcttttgttttttcttagtttactttttattagacttttacttgaagtttactttcttctatattgattattgtaaataattgagtatgactctgttaactaattttgctataagcatcatttttttataacgaacacctctaattgacttatttgatatgtatatttttcttttttaataaaacaaataattttttattttgtattgatattaggaatgttttagtacttaagcacaaagatatgaaaatgaaaatctcaaataaaataattgtgcaattgtagtataattttattatagattacaatttctctctaagagcatctccaagtgctattattgtgtgtatatgtgtttttttatccgtatccatatataagatcctatttatagataaaaatattgatctaattttttttttcacaaaaaaaaaaaggataatataagatcctatatatttcttatatatatttttaagtcagcattttattttacatactcattgaatttgtgttttgtttagtatatgaatattgatttttagtttatttttgaattatcttaagaacatattacagtt

SEQ ID NO: 305217 - DNA, 3099 bp, Cannabis indica
aaaatgggggccttgtgcaatggtccaagctgcccaatgcttgggccggccctgcacgaaggttttccaagggcggtttcctcttgtaacagctgaagttatggggattcgtgaggctctaagttggatcaaggtgcgataatggacgaatgtgacacttgaaatttcagtttcactacaagaattaactccattagcggcggaatcattagctagcgggggaccttaccatgcaaaaaaatatttaagttaatttgtgtcattaccatgcaaacgaggatttgtttatgaagccatgtttttgacaccatgaagaattataagcttgtgatacaggtgttatacaatttggacatgcaatatataataccattcgtcttttttcacaaatgtcaacaattgtagctttaacaataaatctcctgttgaaaatataattaagttaaagaaatgtatttagagcttaaaatgtaatgagtcgaaagaaatttaaaaaatcaactgtgaatggccttacctgaagaagctcaaccaatgtcgtcccctatttatttcttttcttcattttgagaattttcggttgtgatgataaattggacaaatttgattgtttttgcatcttcttaaaatctataaaagatataatatataagtgaagatttgatttgatataaaggttacaaagacaataatattatttttttttttagagtaaatagcaatttaagtacctaatgttttaaatttgtaactggtataaatttaatgtttactttttagcgggtgaagaatccaatatctctaaaagtgttatcctgtccatttttgtttgaataatctctatcactcacttaaactcgacacttatagggcccagactaatagaccttttaatattttaaaaaaagaaaaaattaagttatgaattaagagcattccaattagtttttctactctcccttaaaatacatcactaaattctacttttttatttttttttattttttttattttaccttaatttttttacattacaccatacataaattatattttttttttctctatatcatcaaaataatatattttaaaagggatattcggttcaagtttgggtcccaagttccaaattgggtccagatccaagtcccgatctaggtccaagtttaggttccagtgtcggtctagggctagatcccgattcgggtccttatcctggtctcagaccactctattgtcttgggatttaattagttaccaaagctttcatttagcggttctaccaagtagattttattgcatacgaccaaaattaaagaaaaaaaaattgatccacaagttaaacctaaagaagcctcgtttttttataaaaatgagagacaaaatgagtaatggagattggagagtttgaaatagttaatataatgatctttggatgaattaatttttctttcattatgtttatttattattttatttcttttaaaattggctgatcataatgattaatgaatacaatcctagctaattatacaaaaaatatatttgttaaaaaagacatatgtatataaattatatattttatgagtaaaattaataatatatgaaactctttgaacatactgcaataaaaaaaaatagctgcatattattggatcacgaattaaataattattatttatatattctatttttaattataaatctacaaattgcaatggaaaaattacattagtttttctttaattaaataaataaaagttttttaaaagaaaaatatatatatatatatataaaaaagtctttattaaaaaaatagaagtagttgattacatttttatatctatctttatattctcaatttccatatgcaaaatgttaggcaataaaattttgaatctaaaatgtaagtttgatttcattgtaactagacaaaacatggatgatacattttgcaagtcttttcttcttcttttaaagtaaatagaaatttcaaaccaacaaaataaaataaaatttaaaagatcaaacaattaaaaaaaaaattaaccagcaaaaatgctaccagagcaattgactaagatatcaatcttagtcaaaccttatcctagtaatagagtccctttaatgattcgaaataattaatttatgtaaaatcagcttattagactaaactgtcattactatttttttgtcaaatagcatattatatattaacatattgctagtaagagtaggtttcagcaagcaatttataataaaaggaagtaaaaacaaagcttttgtatttgcatgcagcttatacattcaataactgctttctatttcatatgtttggattataggtatctaattatcaaaacaaaatgcccaaagaaagtttaaatgtcaaaagcaacatgccaaacaatgattaaaaaaagaacaacgtacgtacgtagatgcagtgttttgaaaaacatggtttcttggaatcaacattatgctattcaccttctaattgtacactccatgcggtaatagccaatgaatctcttgcaatccgtgcatacccacctcttccccattctggtccccaagaactcctcacgatccagtagggcttttcttcattataaacgtggttttctaatcgcccatttcgcatcttttgtatctgatggattattatttccttcccgtacccaaccaaaagtagcccatgccctcgacattgtatttcttcataattcggagtgtaaatgttccagtctccaaccatagacccaatagatttgtcaaattttgccgcaataatcattggtcgattcctcagagttgtaatgatattttcttgattcacatttgagtactggtggatagtgtacaacttctgaaactgaaaatacaatatatatatatatgtattactgttaaaaataaattaaaattataacaaaaataaaaaattaaaggagttacttcaatacttgcttttgaaaaataaatttgttattattaaattattttttattaatagactctttgtgtgaggtagtgtatcttaacttttttctagtcttaactaaactttctatagtccccgcattcttactacta

SEQ ID NO: 305218 - DNA, 1378 bp, Cannabis indica
atgtaagcccaaataaaagtctaacattctcctacttgtgctacattaattttaaaatatatattatatatcaatataattttgtttgaaaaaaactcgtgggttgaacaacatgaaaatagttgtggccactattaaaataataattatttgataacatttcaacataccaatctaatgtaacttttgatattgagctatgacaattatattgtttttaaactaacaaaggggttgatgctggtgagtgggtacattgaaggtaaagataagttgcaaacgaaaaggggttttcgcttagataaaggtttggaaagagggaaggttataggtttaaccggagcttgtaagtagaatgccattgtagagattcaagattctaaagaattgacctttagtgttttagatggttacaaaagagtgatagttattacaatatgcttaaatcagaggagaatgtatctggccttccgtctgcaccaaagagcaaagagatgggaggaggtggttgggatggctaggatttaataattaatattacgtggactactaaaaattttccacgtatacactgtggcatgtcgtggcacttaacatagccttttggatggaagaggtaaatagctaacagaaagaaagtttgggtagttttgctactaaaaaatcgatttaggtagttaattttaagaaaaacaatataaagtataagtagttttgctgtcaatatcctttaaatttatctatttagtgaccacataattatgaagatattattgttcatttattttaatgagggatcctaatttaattactaatatttttaatataattataggagttattattgaaattctaaatatctattttgtaatataaattaaagctggataatttataaaccttgttttcttacaaaggtttaagagtgacatttgaccagctaaattatgaatattacatatagtccgggtagtaacaccttttagaaagataatattaattaatgtttgaagaagacttaaaataaataatattaattaatatttatatatttatatagctaaaattaacaaaatattgatatatatttaaaatattttattgaactaattaaaattatcgctttcaataagataaaaaatgcataataaatttaatttgtccttaatataagttttgtttaattaactttaattgagctaggttgaatgtatgtactttgatatacttcagctttcaataattagattaactcaatatcttaatcaattattgtaactagagacgaactcagtcatattaatgtggggtactaataaaaatattgctttttaaaaaattaaatgtaaattttttaatttgataattatagattaaa

SEQ ID NO: 305219 - DNA, 3488 bp, Cannabis indica
gcaaaaaaaaatataataaaaggattaggtgtataaaaattaaaacataacggtttcgtcgcaaattactcttttttatataacaatttgctaaaaaaaaaaaatataaatttctttaaacacattcatgataaattggaatatttgaatccctattgtcaataccctaaactattcataattttttaaaaaatttacgttacagtcttgatactgtaatgataatgaatacttctatgcttatattttttaaacaaaaattattaggggttgaaataggatgttcacgtcatcactcctcaaactaattaatgttaaaagatcaacatgaacattgaacaagccgaataatcactttccaaaacaaaaaggaagccaaataatgagggtaaaaataaacgataaaacgatcacaccatcttcataagtcataacaaacaaaagttcttccgcttcatcaatcccaggcaggtgttgttattcactataattaaaccaaacataaatatatatatttttataatcctaagtccaaagagtaattaattctacaaaaatatgcaaataaataagtttaaaaaacaaaattaaaattttatatattatcactgctcatggccatattaataatgatgaactggaggcggcggtggtgacggcggaggaggagaagggcttctacgtgggcagttagcgcctgccgcggcgcaatcaaccgggtatttatagaaagcggcacattcctctttcgaacgctgtaaaggcctataaggaatacagtttctccggtcatctttacttggcaacttcaggcaagttcccggctccgagcagaagaagttaccggagtaggtgaaattttccaacttgggcaaggcacaaatactcggtggaatatacccagaaagcttgttgttagccacgtccagttgctccaagcttttcatcttccccatcgagtccggcaacgaccccactagctggttagaactaacgtcgaagacagtcaatttgtcgagcaatccaatatctgagggcaaacagcctttgagaccactgttagtgatgattaactcgttaagagtattcttcatttttactaagctcgaaggaaaacaactgttgagattgttattagccataactatgaccgaaactggggagtttcctatgttttggggcaaattagagctgaacttgttattgtttataaacagagcatcgagtttcaaatcgaataaggcagagggaatgtcgcctttgaatgagttatatcttatgtccaagaatttgagtgaaggcaaggatagaacaacagttgggaatttgccggtgaaattgttgttacttatatcgaactcgaaaaggactttgagatatgaaaagcttttagggatatttccatagaagcgattggagttgatgtggaacagagctaagtcagttaactcaccaagctcttcgggtaatgtgccttgaatgttgccgtggttaaggtctataccggccactgtggtggtgttgtggggatcgtttggtgtgggtgcacagtacactccggtgtagttgcacacatcatgaccccaccaagtttgagtgatcttttttgggtcagaaatgatttgatgtttccatatttggagaacttcgaatgctttcatgagttttgggtttgggaagccgtactgcctgttggcttgttggtgagatggtttggaaaggattataatacagaaaattgaaaaaatggctaatttcaaatatgagttcttcatttttttttttttggagagaaaagagagattgattagtgatagatgtttgtgagaaatgagctgaggtgttgagatttataaatgataattttgtaaggtttggataacgcatatagtttgtgtgtgtatgagtgttttttattttaaataataatattgatttacaatataattactagtttatccttgacttgatcctatcatttcattttattttttaaattaaatattagaaatgaaaaaaggatcctaatgtaacaatgattattggagtacagagaggtgtgctttaaattttgattttgactattcactaatcgagttggtaaagcaaattaaataaaaacaaaattaaaaaattatttttatatgacttcttttctgttttaatatattcttccagggaaattaatagtgtaaatattaatattaaagcattaattgtgttacatgtttcttgtggaaggttggaaaaaattggtgactgatcttacttaccaacaacgcggttttaccatatattagcttaaattaaatacttggaattaatcaacaaagcatgtatatttatataaatctagtgggattataatattaaacaaacattaagactgactctatagttacagaactcaatctagctgcagacttgtgagtctaactgttaatttttttataccatgtgcatttatatatatattataaattaattaatgcaattttttttttcaaaggtacaattttcttctcatgtaacaattatagtctcgtgcagcttctcttttcaatttaattatatgacttattatgaagattttactatacttttataatctcatcatcattataacaaagttatatggttggaacatgaggagaatcatccgcgcggaccaaacaagctattggttcattatgaatttttcaatacaggaaaaagttatagaagtggggagcatatattatattgtaacttatatcagtttgtttgatcaataataattaaataattatttatttatttatttagtgggtccccataagatattgtcttttcttagcagtggtgaaaaaaatgcaaattagactagacaaaggaatagaatacatatttttacgcaaaatgtgtataaaaaggtgatgttttctttcaattactgtttttttgtgagtacttaacttctgtcaacatcttgtttaaatgttttggtgtgttttattgtgcccatgaaatcacctaattcagatttcaccaagccggcacgatggccccatgaatatatacacaaaatataattaattaagtaattaaatttattagctttggctatatatcaggcttacatattaattaattatcattatcaaagaagcaactttagttttcttctattatacttctactacttatttgtataaacaaaatatcaaatataacaacaagaataaggtaaggttaaggttaagcttaggtttgatatatatatttggagttagaaaagtttggtagcacagtcatctcaagcatgcatgattgagtcacaacttttcttagggttttccttttgcttgttttaggtgtgataaaaattcctataatttaaaccaacttgtaagtgggaactagtaattgaggatagaaaattattaaagtcaaatgccgtgagattatactagagagggggagagagagaggagagagagagagagaga

SEQ ID NO: 305220 - DNA, 2167 bp, Cannabis indica
ttctctcaagtggttaagagattttctcaatcgattattaaatatttagtttaaactaaatatttaaattcaaaataaatgcctataacagaatcagttataaatatttatttaaataattaaatattattattttaatatttgaaatataaatatttattttaataaaatctttattataattattttatgaattttattattatatcgatataatcttaaatctatatatacgtataattttgaaaacctaaataagttagtcaatcatcaaaagataacaccccaagaatatatgttgagattaaaccaagtacataatatacaatatatcatattagctcacactaatccttgtgtgtggtggaagatctagaagatcatggtgtgagttctccatcactattttaaggatacaaacaaaaaaaaaaattcaaggatactctgatacgcttcaagaagtaaataattatttttatctttttatttcaaatttaatatatatacatgtagagatctggctgcagattgatatccaattttgcatcaaagctgagtagagtttcttgtagttcttgctaggtaaatggtgttagattgttcttttttataattaatgagacagtggtgatgtattccacatccaaaccactcagtacatttaatactaaatgagattttggatatggatctccagctaatgcaagttgatctcaccaagaactttttagtctcagatatttagccattggagttgttcctttttgaattttttgaagcatggttcgaagatcatccatctttacctttgtgtgaacaccatacaagattccagagcagtactccacagagctctggctgtagtacattccatcacttcgatggctacgatttctatcattgatgaaaccatcaagtctgtgacctcgtataatggtagatacaattgttttccgtatagagtagttgttgctatcgagctttaaggcgaatggttgtgacaaagtattaccaaatggagagctagtaaaacctcctgattcacttgaagaacccatctgagagattccattgaagagctgtggcgagttagtttggtgggctacttgtttctgattcatctcttggtcattaacaactcttgtgcttacttcaggaggtgttaagtggtgactggtccctaacataatagcgtgaactttttatactctgataccaagtttgaaaagtgccaaatgcaccaaaaagggaaatttcaactcaaaatgagactgagcaaagacaattcattataaaggcaattgctacattaatataaagtaaagaaagaaggacaggtgacacaaagcctacacattggcatgcaccacactattagagaaccatacaaaaggataacaaaattgtagtagtgtgtgcacttgtactaaagttctaacagaatgattagcagcctaaattatgaagtttaattaatttatagcaagcttaaacaaaattactgttgattagtgctacatataagaaatatataagaaataggtacgagttgaaattgaaccaaaatatatgatcacacatgtattaatttttagattgacttgactaattagaatcactgatttgcatgacataaatatttatgaatataaatataacacaataacacaaattgttaattaatattaagatctaaattaatagagccataaattccacttctttattttaatttgatgaatgtgtgtctagtattattatttattatttatattttgagaagggatacgtacgtacgcgttgattacatatgaattagtttcttgagaattatataaatatatttatatatggaccatcatttatttttgaccatgtatattatgtcccattaattatttagaccatgtacgtaccaaaaaagagataaattttgatatttgtggtacttatatataataatgttaataatttattgtactaaaaatatcttgtggccttatttcattacgtacacatgaattatatataattatattaaatgtagctatagcaaaactatgttggtcgacatcaaaaatttgatatatatatatatatatagggatataattttgtcttgtaattgtactttcacagaatgcatttcgtgatgtacggtagccgt

SEQ ID NO: 305221 - DNA, 2425 bp, Cannabis indica
tcattcctcccaaccaaatgcctccttaaaagaatgtatttggatttcagattattcaatttactctaaaattttaattgatcatttcaaagttgaaagatagaaaacttacctgacaaactttcccttaacgttccatttggcatatgctcgtagaccaacatttgttctccttgttcaaaacagaaaccaagaaggccaacaagatttttgtgatgaactcgagaaagcagctcgatttcagtcttgaattcaagtccaccttgcattgatccctgctgagctcttttgatagccactatttgtccatcaggaagttgtcccctataaacctgttaagagaaacaaaagaagttgaagagcagaaacttgaagaaaagatcaaacgtgttgataaaaggcatgaatcttgaacttttaccttgccatagccgccagatccaatctcattacttgaagtaaaattaccagtgcacttcttaagttcatcatacgaaaaccatcttgctcccttgagttgtggtgcacctccactatctttcccacttggtgcccaggaagctggaacatagtgagattagttatgtatgttcaaattacaaagacaaacaatggctacataggatatttttattaccaaaaggtctacttaatccaatggccttctcagcgcgttttttctgtcgaatggcatatactgctacggctacaaggccaagcaccaaaactgcacaaccagctgctatcccagcaattgctccgatgcttattgaatttcctttatgtgaacctgaaataagttaatgtttttgttcttgtaagtcaaactaatatacaaacaaaaatcttaaattcctccaaaatatgtaatctcaattaccttgaaaggtatagggagctgcaatgaaataatatggtccaaattcatgtggtggcttgtaagtttggttactcaactgaaacccaattctctgaatctcagatctattaaaaaactccccagtggatggaaagagatccagctgaatttgaagatagtcatcaacattgaagaagggattttgaagagacactgaaccaggattaaggccaagttttgtccaaaggctcatttcgagttcatggaacttattgtcatcagtcaattgcctgaaggaaggtcctctaaaatataatgtcccctcgtaaggaaattgacattcacaactctgaggattgagctttttatccatagagcaagatttagttccacaagtggctaagctcgttgaatatggctttgaaggttgctgctgaagccgacagtaattagaatttgcaataccactagtctcacacactggatttcctagaagtctataaacataaaatttatatttaggaatgattatcataagagctggttaatatcatccaaaaaccaaagatgaatggcaataaatgatctcacattaatgtttccttgtaaaatccaactgttacggattgaatatcattgttttccaagtcaacaagctgcagttgtgagctaatgctgtcacccatgttcaatgtgtcattgaattttattatttttcagtttcctgcaaagagttgagcaaaagtgtgagtgaaaatatttccataaatttattaaaatgcgtcgagtcttcagtcctcatatatgtacttacacttgctgcaactgtgaagagctaaatagcttggctggaattcgcccttgcagtggtccgttttcaataatcctggagaccaagaaaaagtttcagaatttataattataggaatttttaatgaatgatgcaatgaaaaatctgtgtaacctctgaataacttacatagttgtgagggctggcaatgatgagaaccatactggaggttctgttgcctcaaatgtgttgttactaaggtccctgcagaaaacaagtaaaagatctcagaagaaaattacaaaataatagattataagaacataaaacttgaaatgataactcatggctattggcttacaaataatttagggtaaccattccagttaagtctggaaaagagcctttcagattgttgaaagctaaatttctgtcacgaaacatacaagtacaaaataattaagcaccagtcattatttgtatcagtttataaacaaaacttcatatacactatgatgattttgtagtactcacaattcattgatatttgtaaggttgttgagatttgatgggacttccccggatagttcatttctatcaagccggctgtagacaaattagaaaagacacttttagattcatcaactttgcagtgtcaacaagttacaaactagtaatattttgaaacataaatggagaagaaacatagataaagtcaagagggtgtacttacagaacctcaagagtggtaacatgtcctattgttgatgggatag

SEQ ID NO: 305222 - DNA, 2899 bp, Cannabis indica
ctaaaggtatatttaacacttaaaatcattaacgttagttgtaatatatttttcaaattttcgtttctagatgtaattttctctttttaaaaatatcccttattctttcacaaggcccaatatattttttcccatagcccaaaactcaggaccaatgctatccttcttctagattgattttgtgtaaataatatacaatatcatcactaatgtaaaattatttcaatagtataataaattaacagacaatataaagactaaaagacttttttttttgacgttttttaaaaaaaaaaaacgacaaataattgttactattatagaaaatatcagaagttataagaatcttgaccaaatcatgaaaaggttaaaaaaaacttaatatctctggtcatgaagtagagatattaaatatttagataacacctactactcattgatactatgacttgtatttattatgtatatttatatttattttccaaaaataacataaatagtgattcaatgtttgtgtatatttaacttctcttcttcaaatcaattacttttggtttgggcccaatatagaagatgtctccaagtattaacatataatttaatatgtggctaacaaagagtcctcaattacatgattattgaaatgaagattattaagatattataattgttaacctaactaatgttgaatttataatgaatattaggatatttgtttatgaaaattgctaagggcaccttaaggtgctaataggtctggtcctgagtataagtgagttaggtatgtacttagagcttacctatttaagagtcgaaaaaaaaaatattttaaaaatatatatttttcactgattttaaaaaatattacattttttttagataacggtctagtatttttgttatgacctattaaattttaaggccggtcttaagtactaagcaccacaaaatgtgtcaaattgctattgctgaaatttaatattagatttcatgtcttttaattttcatagtgtaacaatttactttaaacaaaatataagacaatataataaatatatgaaaagatttgtaagacaccgatattttgatagaccacttatatattgtcatctaaaaaaatttgtattcaattttttttcataatcgtgacgttgtcttctatttagaaatttttgaataatatactatgcagaatataatatttaaatagttatttaccatatttaagtcacatttataaaaaatatttaaattttattatggatattgtaaaatatatagaagtttttaaaaatttacaaaaaaaatatagagtattttttttaatattaaataaataagagatctaccgaggcaagtatggtaccatttacttactccaaaaatacactattcaattatataatgaataaaagaaagaacttttttccatgactagatcaatataatgtaatcctcttaaataattatattattattttataataattttcccattctagacagttctttacaatgatcacaattcacaagtccaaataggattataaaattataatttatctaattgtctcaactgcaattatgagtataaaaaaataataattattattattttgtaggttatatataatagtaaaatatagaaactaaaattaataatgaaaatgtgaaatagaattaagatggtaaaagacaaagaccacacactaaccaagataagagatagagaaaaaagtcccacttggtaggaggaaaagggtgtccaccatgtcgggtattatagttaatgtttgttttttgaaaatggctaaaagatagtgttggtgcttaatatactttttcattatattattagtataaataaatatcgggacatcaaataatttaataaaaataatttttttaaggtgctaactataaaaagtattgagtattattggtgtccaataataatactcattctcaaagagaaatgttaaaaggtatcagtggtacctagcacacttatacatgtcaatattgctattgatccaactaattatcaggtccatatagtttaatgtaataacttttaaagaatatcgctagccaattgcaatgcgatacatctagaaggtgctagacactactagtacccaatatcaatgctcattctcaaattatatgagattcaatacttaattacaccaatagtgatatcacaccaaggagaatgttagatactaatgtcttttagtatttctctaatgaattaagggctcgtttggtacgtttattatgtcgtattgtattgtattgtattgtattatattgaattgaattatatattatatatttaggtactcataccatatatagttttacataaaaatattgtatgaaatacaattcaatataatactatacaatacaatgcaatgtaatacggcgtaccaaatgaaccctaaatgtatatatgaggagtattattgtcaacctcctattataacctattagtcaatctctatgcctaaaatcacatgttgaaatattttttttcatagcggtattcgttatagttacaacatccttcttgtaattttttgagaaattctaaataacttacagtgtcgaaaatatatttgaagctctttgaacacacatggtaagctagaatatcataaatcctgttttctatattataagctatttgaaattttttaaaaatttactaggataatattgtaactataacgaatatcattataaaaaatatatcttaacatataatttcaggtttgaaaattaactaaagattataattaacactgatagtcctaattactacaagttcaatttgatgattcttaacagataaattctatgttatgaactagaaattaaaaacaatgaacac

SEQ ID NO: 305223 - DNA, 3716 bp, Cannabis indica
ccgaaaatatatgattaaccaatgtcattatccatataattaatgcaaattaatcatcaaacgaaaatgatgtcgataaagtctgctatttatcaattgccttctttgttataaagttgactcatgtagtaggttttacaatgtccatataatataattaattaggcaatataattgctctctagtattataataataaattagtatttattaatatattaatataataaatatagtaacttaaaaaataatttttagtgaaattatactatctaattacattatttattaaaacataaaaattttaagaaatttttttaagtctattcatcatattattaattattattattaagaagattaaaaagtttatgtattctattatttatttattaaattgtataataaaattttaaatttcttttttcaaataaataattaaataaggtagtttagaaaaaaaattagagtgttattattatttaagtaaacactcttccatataatgtactgtacctattatattatcatcactgtatctcattcgttgtcatcataatatattatcaattgtatcttatttgtagtcgctattattttctttcacaaatttcaatcttaatagtatattccatcccgaatttcaaatatttttattaacacaatatgaaaatctaaacatgactataataaataaaaatttaaacttatcacttgatgtatttaatacttttcttaaaattagaaacttaaactaattaaaaatatttatatattatacatattattttgttacaatatatatcatatcacttttttcaatatatactaaataatctataaatttaaattatataaatactcatactacaaaatatcactataaaaatataattaataattaataatattaaactaatatttaatttattaacgtaaaactcattaaaccaaataatgtttttgaaatgaactgtatatattaaaatattttagatattattattattattatttgaaaatatgagagatcttataatattttttttttgataaatatcaatcaaactcatatggcattacattttaaccgtataagattttattttaagaaattaattaaaatttaggaaagagaaatagtttagttggtttgtttttaagtttaaattgtttaagatattaattaaaaaaagtataagaaattaatattaatattattttacgattctcttttctatatctgacacaccaccactcttcttcttcgtcttcttctgtgaggggttgaagaacagtcgtctgagagaggttcggttcggatcaacgacgtcctccgtttgagatttttgttttcatttatttatttactattattagtttaattcgaattaatatttttatggcgttagaattataaggagttcatttcttaattaattttaatgttgtgatcgtatttatgtgttgaaactaatatagtttttcctattagtcttgtcttttgacataattctttagtcttttccttttaattttttctattattagtcttgtcttttgacatggttttttagtcttttctttttagttttttctagttcgagtcttgtcttttggcatgggttgtgtaactcaaaatcatcacgatgctatggtagaagcattcaagaagggaaagattggatgtgttcaacccgaaattgctgagattataagaagcattgagttggattgcaactcattcaagggatatagtcctgttggaaatagatagcttggtgtgtgtgtccaaacgattcagagtcgtatttttatgccttcccaattttttcttattattcaagatgttcaaaatttgcttttggctttatcttttgttgatttatattttgtaaaacgatctgcaaataagttggttcattgcttggcaagagactcttgtttctctacagatcgtgtgttttagttggatgactgttcctctgaagttcgttctattgttttgaaataatttattaattaataaattttatgatttttattcaaaaaaaaatattaattttagtttgttcacaaaaaataattatcttattttattataaatattgcatgtatattagatatagatatttataaattttaaaagaaaaatctaaaattaaagagataatagatatagatatttataaacaagttttatagttggataatgattgtatatggatagaagagatccctttttctattttctctgttgttgtaagagactatttaatttataataacagactttttttcaaaaaaaaaaagagataatagatataataaaaataaataactaaataaataaataaaataatagtttgtagagattttttataatattcaaataataattagacacttaatattggagtgaattaagaatgaaaccctaactctaaaattaaaaggtgaattttcttagaaaataatattaaatagaaaggtcttataatatagtgtatatgcatgatatatagatgaagacaaagttcagagatatggttattctaaaaacacaataaaagacattattcatcatgcataaaaatagtgaaaaattacttcaaacaccaattattcaatagacaatacttatataatattgaaataatatatcaattgataactattatagtaacattatatcctataagaataaaacaataatattcatcaacatattagtataaagtaaggagagaaaagaaattaccattaatgtattggtgataagcttatatcaataaaccttttctaccattatacttatcacatcgatcttctccatctcaaaaattgtcgatttaaataattgattgggttagatattttttaagaaataattttgaagatgtgctattttatttactttaaattttttaatgatgtggtgttatatatatttatattaaatattttttaattttataacttagaataattaaatagattagatatttttcaattattttttctttttgatgttgtcaagaggagagaataattaaaaaatatataaaaaaaagagagaattaagaagaaaataaataatgctattttaagagattttaaagtgtcatgtcaccacctcatatctctactttatatatatattcatctgcatcgctataacattatgatgcctaacaatttaatactaacaagaatttcgagtttcagctcaaaattaattgataatgagtggagtagtccatgttcctatatatgattccatacttttatatttaatctatgtgggataatattatccaatatctccccttcagatgatgactatttttttcttaccaatcttggatcaccttatcagtgtcatttgctcgcttattcatgttcagatctcaagcgcatctttgtactatctggatttcatgcgaatggctttactatagatatatgtatatatcaaaagcttgcaaggaatatgactctcataccaagataagaatcatgagattccaattagaatattttctaagtataaattattttattaatttatttacgtgtatgtgaataaataaatatttcatattcattacatttgatcacaattaattcactactacaaaaagaagaattcgcgacggttcaaaaaatgatttttttagggactatcgctaaaaaaattaagcaactgtttataa

SEQ ID NO: 305224 - DNA, 2724 bp, Cannabis indica
ttgaggcgcacgcctcttacgcctcaacgcctcacgcctcaattcagcgcctcacccattgaggcgtacgcctctcttctcctcaacaaggcgcacgccttggtgcaatctttaaacgcctcagcttgaggcgcgcctcaaggcgcgcctcaaaaacgcctttttaaacattggctcaaatctttgcttagcatcaagaataatttcaatatagatagatacaaacctgaaacaacagtaattggtccctgaaccgatggcagattatgtttagtataatgcttcactaatgattttatcaaaagagacttcccaacctacaaattccacaaccaataaataaaaatgcacaccaatagcaaaataactgtgtttgtgcaaccaagagctgaactcgatggctttttatgaaaaacagacaaattaaaccaatgtgatcagccgaactcaatggccttttatgaaaaacaccaagagctgtcttaatcattcaacttaaagtaaaactaatcttctttcgtatttgtattcgtaaactcacttaactacttctctagcttaaggaaagatatatataagcatatcagaaaatttatcaaggcaaatcatgtcatagtcttatcttttataaatagcatcaaataaagtatatacatatgctatcaattccaagaactataacacagatgacagaacatacacacacacacacatatatatgtatgtcaaataaagtattttgctaatttaacattttaaagttgttagtttggcaaattctctcaaaacccaataacaaaattcaaataccttaggaggtccctgaacgagaataacaaaaggaggcggttcaccatagctccgatcaatagtaggaacatgaagtctacgctgctctttctcaacagtacgcgattgcaatcgcttcgctttcaccgatgaattgaaagtaaatgcctaaacaggataatacatatatatatattcaaattaaccccaaaatacaaaataacagtgttgaatcgaagtaaaaagagaatcataggagataaccttagggttttgcttcctatcgttttcagaaacctcgcctttcttcttcccggactttccgcctttcttcttctttgccgaagcaccagcctgactagtcctgtgagacttgtgagactggtccgtggctccagcatcgatcgccattgttggcgtagaaagtggaaaccctaaaactgagagataaagtttgtgtctttggtggaagagtttgtctcaggtgagaggttttggggtttagggtttttggagacgaagctgccttattaaactttggtattttgcaattaaggtctcttaattatattattttgtaaaactggcttttataaaataaaaaatgacaatgaaggtacttaatttattattgataattttttaaaaaaaataataaaaaatttaaactttcattaatgagataaatcgtccatttcattagatattaaatttggagttgattacaatgaacgtaattaatttattattgtttaaattttttaaggcagttttatctaatgtgtttcataaaaataatattgcagtttatggtttggctaaatatgtttttaggctatataatctaattgttgaagtattctcacgaatatcttaatgtgatttagatcacgttattaaaaaaaattaagagttcaattttcactaaacatacaattggcatgaaaataagcaacttgaaccattattgttcgataatgagcagtattgttagagtgttttagaaattataacgaaaaatttaattttgttataatgtttttacaatcttgaataaaattattcttgtttttttttcgaaagagccaattaaattcacataagctacgaaaactcatcccaactaaatgttttaagtctatgcaaaatcatatgtttcatccatctacctataaatttcatattgtacagtttggcaaagctttgtgtaataattttgataaaaataaaatttattttctcgcatgaaataataatttactctcgtaccttaaattactttccttaattccttttcaagagccttaatatagttgtcctatttcactctattatactaggtaaacacaagtaagaacttcattcattaacgagaatccacacacaatatttcaattttaactcttgtatatttgaaactacaaaatatcgaagacttgcaaaattaatcttatggccaaaagcaatctcaaaaattataaacaagtacatttgttgctttcataagtatagtcttacaataaaacatacatgtcattgttattggcacccaatgatcttaataccatattcttttttcttaacttattaattaaagaagagaaaccttcatgagataagataaacacataaggtgaaaatagatccctttatctaatccatctactatgagagtaggatccataactttactatctctgtaaattactattagagtcgtatatggctagtaatatatatttgacccacttaataagttgcagacaatgttctcctaacaagctagttttactaggactaataactttttaaataggctaattagtaatttttccttacaactttgacatgtagtaaatcgtactccttaaacttttttagctgttaaaaattcctcccaaactattgagattgttaaatttaaggacttttgtc

SEQ ID NO: 305225 - DNA, 1296 bp, Cannabis indica
tctattttaccagtgcaatactaacttttttttgtgctggccaaagtgacatttcttgtagtgagttcttgggtagatctttgcaagctaaaataggaagggagttcaggttttttgaagcttaatcgttagaaccgtgcatctcttacaaagtatgtgtgggcaatggcaacaaaataagatattttttgggtaaaataggtcaataatgtttacttgaagaatagtaattggtggagttacaaagctactatgcaaagttagttgatattggagatagattatcaaggtcaaagagaagattaaacaggttttgtcttaacaataattgtctagctagctgcatatatttgattagccaaggatattaaactttgaatcctgttagtgagaatgtgagatggtatggacaagtatagggaagacttaatattcctcaacataaacctatttttttggcttgcgatcattgatagattacaaattaaagaaaggcttcatcattttaatatatgccaagacattgtatgattttcggattaggtgttgagaaggtcaagcatttattttttgaatgtcattttagaaatatttatttgtaggttatcaagatttggctatggttgctagtgtagagcttgagtttgatctctacattgtatgatctgtacattgtgtttctcttcttttcgcaagcaagtcttttcaatggctcttgttgcgattgtttactatgtgtggagaagtggaaacacaacactttggttgaaaaaacttccatctatttctacttctttatgttgtttaaaaaaggacataaaagatagagtgtttctagttttaccaaaaattttgaagaatcaagacagaatgtagtttgatcgattgagataatgtatagacattagtatatagatggtttttaggtcactttgagtggtgctaggttataaagaatttttatttggattaatatcattacacttactattttaaattttataaaaatttatagggattatattataactataactaatactattatataaaaaattttaaaaaaactattccaacatgtggttacaaacgtaaaaattgactaagagcaattaattagcagagcaattaattagcactccccttcatctatagtccaacaatttgtgtaaattaatgatgtatttataagaatcttaggttagttttagaagggatggtaatgtatttttcttttacttcataaaataatatgaattttttcattttttacatttcaaaattaatttttttttt

SEQ ID NO: 305226 - DNA, 1004 bp, Cannabis indica
agacagagagagagagaggaggctgctgaaagaaccgccaagtcgcagagaaagggttttagggttttgtgttttttagggtttaattaacaaccaataatctgtttttcagagtcagcaagaagaaattgggattgttacaaaaaaaaaaattgggaagagagtacaatttatcctaaattacaacaataccctttgtttaattaagtgtttattttattttttgaacaaaaattattacaactttctattataatctcttaatctcttagttaacattctgaaattaaatatcgaaatacatagcaatatttttatatttacaatataattcctataaatttttaaaaaatttaaaatagttacagtactgaaaataaaattcttgatattccagtttatcgtaagtgttcgaaaaacttcaaatatattttcagcactataacctattcaaaaatttttaaaaatttgtaactatgatattataactataacgaatactgtcattaaagttgactaaaaaatataataagaggttgacggaaatacttctctaaactatttgattatgtgttaactagttttttgttaaaaaaataaatgacattattttaagaaaattttatattaaaatttttgtacgtgttgacaaagcattttctttgtaaattattcagttttttcaatgtttttcaatgttgtattttattttgatagatttaaaaacaaatgattgatgcatatcaaaggataattgagaaattttattttagaaaaataaaacttataaatttttctctctctgactttttcttaaccttctttactctttagatccaatgaatcttagactgaatccaatcgatcattgattgaatttagttgataatattttaaaaaaaaaagtcaaaattttaactaagatttatttcataataaagtaatcatgaaaatgagtagaggtgacaaaacgtgttatcgtgtcgtgttcatgtcatatttta

SEQ ID NO: 305227 - DNA, 1885 bp, Cannabis indica
aaaaaaaaatcaaaatacatgagttcgaacttaagacgttgttattagttggcatgtgataccgttactttatactaaacaaaactaatttgaatgttatacgccatgcatgcatgttgccattataaaaattattttcgctagccatccaatttaatataaatatatatagtaacatatttacgtaaattgtaagtagaataaattattgtgtagagttgttctcatcgtaatacaaacaacaccaagtacaaatcgaatcacgtcaataagatttctcaatattattttaggaatttccctttgtctcagtcttgatgactttgcactataaaaccccacgaggcccgaaataataagcaacacatgaaaatgtgcatttattacttaaaacatatatcttaagtatatataattagtgctatactatatacatatatatctaatggcggcccaaagttgtcaatccgaaatcgagcaagtgattcaatattcatcatcgtcccctgtcacaatttccaccaataataatgatataaattatgatcaacaaagtttgccgaccactacgatgattatcttagtggatagattacttaattctttaagatctatagtaacaaaatttcatgcaggatatttcagaatcagtctttcactaggtggtcaagctttgctatggaaaaaatttatgggaccaagaacaactaatgctactcattctgttgtcctgatgatcaactcgacgtcgacttttcttgtcctgtggtcttttgctcttttcacactaatctttctttctcttatttacctcttgaaatgtttgtttaactttaagatggtcaaagccgagtttttgcaccacgtaggagtaaattaccttttcgtcccttggatctcttggctactcttgctccaaacggcaccgtttctcgcccctacaacacccacttatttgattctctggtggattttctcagtccctgtggttcttcttgacgtgaaaatatacggccaatggttcaccaaagggaagaggtacttgtccatggcggccaatcctacaagccagttgtcggtgatcgggaacttggtcggggcacaggctgcagctcggatggggtggagagagagcgcggtggggctgttttccctgggtatggtccattatttagtgctttttgtgacactttatcagcgtttagcgggaggtgaccggctaccggccatgctgaggcctgtcttcttcttgttcttcgcggcgccaagcatggccagcttggcttgggaatccattgttggtgatttcgatatggtgtccaaaatgttgtttttctctccctcttcctctttctctctctggtaagtaattaattaattttgatattaaaatattaattaattaaggcccataaaatacaatagaatagaaaattggtaattaattaagagcattgatattggacattagtaatacccagtacttcttgtaagtgacgcctcacgatttgttaacgatattagtatgatactgaaaaaaaatactagacaccaatattacaattctcattagttaattataacaatggttgatataataacgtggctaagtatgtgcatgcttttcttaatcataataatgataataaaaaattatgtgcatggttttagaaaaatactaatgggcattgctaaataccacaataaatattatatcattattggttcatgtgttaaggtataacaatatactcctgcttttattattgagtcaaacaatatatatgcatgcaaatagcttatttgcattcaaacgtttgaccttattttcaagtggtattcattataatatatacgtttatttattagtgtaattaattaacag

SEQ ID NO: 305228 - DNA, 5703 bp, Cannabis indica
tcaatttagtatgtaaatatctacttatttttatttattaattagggtttaagctctcctatgtaaagatccttaactcaatcctaaagatcctaagtctcattctaagaaactaagtccctaattcatttagccgtcaggctctaagtctgatagccttctctatcacacgcccactatagcatctctcaacacttgagatttgtcatcattgactcctactttataaccttaagagagctatatcaaatcccacctatagtgatctgaatagtgttatctctcggtatcaatacaactaaaagtggagtaggttattactcgctaactaagggggccgaaccattataaaatgcttgtgtttatttacttttgagttctaattatgtaacatgtggtaagcatcagtttaatatgaccccgctgtcagttcgctaatttttgaggtcaacacctactatagggtaggcgactaccttgtcttaattaagacaatgatggtgtcttttgtcttgacgaattttgttttaacaacttttgtcttgacacattttgccttaacaaattttgtcttttttctaaattaattttaaaaaaatatttattacaaaaataaataaatactatttttccaatttaaaatatatttttttaaataatattatacaactatttatccctacccttgacaatgtttcaaggtggcaatttggggaccatggacctataattctaagctccaataaactagattattcattgagtctcatcagccaaataattttgtttataattccatgattactccactataaatatgaaagtgaactcttggtaattatagaattatatatacggagttctactatagtgttcattgatataattaatttcagtgattacccctccttgtgttggtttgtaattagttttagtcaaattactattttacccttctaattatatctttatcttttagtaccattaattcactactggaagtataatttagatcgtatataaatttgcgcacaactttcaagttccacaattaacacataaagggaatcaacattcaattcgttaagaaagtcaagattccataattatagatcatgttcccagtcatcttctttgagaaactttaactagtgaatcaaagaaaccaataacatgaacaagagttcatgattactaaggagttaggtcaatctactattgatcatctttatgatagaaattaggtatttacagtaaacggtaagtttgataaagacatcattatacatatccgtccttgtcatatataatctctcttatagacatcacctttacttagatgtcttgatacgtcaataattcagattgagattacttgcaccgaataacgggcatcagtaaactatactagcaaccattgattaaagattcctaaacttaatatgttgctaactattttattcatggctaagtgatcttaattctccgtacaatataagtcacaacctcatgtatgaataaggatttttttgatatttatagataaattattcaatattaaatattaataatttaacattcatgcatatattaaaatgttcaactatttattaataatcataaatatctttacaaaaattttacggcataaacccaaacatatggatccttgataagaaacaccaaattcttcgaaacgagaccatagtgttggtcaaagtattttggagaaacaatgcagtggaggaagccgcctaggaattagagtctgacatgagggcttaatatctagagttattcaagttagatttttaggacaaaatccttttaacgggagataattgtaatgacctcttaactttattatgggaattagcagataattaaaaatttgtttgatcattatcattatatgcccttgtagataattagggcttattctcgaaaataggcattaaattattaatgttaactcagaaactttccttagtaatgtggacatcaatgtttgacacgtgacaagaacgataatatctcacaattgagtagtcccgagttaaagtaattgacctgggaggggtccctagccctgtgcccaggctaacttcgagaactctagaatgcaagttttgattctgataagtcttttacaactcattatctttcagtattctgtaccataaaaacatggaccaaccaagtgcacgccccatgagcggaaaatacacgaatcaacacctcaaaaatcaacctaggcacctagggtttcacccaacacctaggttgacaaccccaactaaggtttcaatttcagggttcttcttagtgcaaatgggttaaaatttttattgggatatgaactagacataccacaaacatatttgaggcattaaaatcaaattcagagaactttcatttttttagcacccgaacacccggtgcctgagcaccccagctcccaggttgacaatctatcaatttgggccacttccaagcatcagatcaaaattaggaaacaagtgtttcagggaagaaataacccatcttgggtgccagaataagggactagcgcccaggttgacattttgtcaacctgggccaattccaaggagtttttctaaaaaaaattctgggcatattctccattttcaacaaagattaagattcaactatttccagtgacacatgaagtgaactactataaattgttaggtctctctaacttatacttcattctcgccagtccaatgagcgggtgtggcttagaaatatgtgtccaagttttttagtcaacattttggtgcttccattaagagccacaactcaagggagtcacttacaagatggttgcaacacgctcctcaagtattgacagagtagcccaaacaactggccaacaaattaggggcacactagtcactgaagttggaactgggactactcttgcatctcaggtgcctgatggaggccctggaaccagctccatagctcattccctaaggccaccaaatgctcctagtactaaattgacgagcagattccacctggagagccacacgtagagttgaaagaccccgaagaggcagatccttgggttgaacagcttagccaaacggtggctgacctacaacaacagatgtgaaactctctcgacaaataacacgagcagtttcaaaacttgttcatggaaaactggcagaacattgagagccaacgagttgattaggaatagcagagagttaacttgtcttaacggattagagaagcctaacactctagacacgggactaccctccatagaggtctttccaagtttgtaagagagattccccatcgaccaactggtcatgtgggaactagtactcaaggggaaacccttaatgcacaaaacactaataccatgccaagtaaccgtgcaagtactaagaaagcaccaggttctgaggttccccggagggaagcaaactttgagcaagtgtttgaaaggactcacactcgtggatgccaaccaatgggccctccacctaatgtggagcaaccttagaataccgagaaagccaataggactcccccaccaagtcctactcaatgctctcatcagaccaggctctgagaccctacaaagggaaatggacctactactcaaaatgaaaggggaaatcgaaggctttacttcgaggtcagaggctatgagatccagtgagtgaggactcacgagctactccatactcaaaagtacttcctagatgagagaggtgagttatgtcgttactttgcccatggccttgatggccagcaatatgagtacttccctcaagtacatggtgaagagttaagcttgagtaactaattcaattctctctgcacttgtgattcagatggagactactttaagggaagtagccactataatgctctaaatgactgctccaacaacgcatcattccaagatgacctagagttcattccaaaaaaatcaccagtgttaccttcacaacctcgtcgttaggagacattaacaagacccaagtcaactggagtgcatgattggcttggaagaccaaaagacctgcatgacactctaactggaagatggttggtggaagcgaaagcttctgaccctaatcgggtaatagaagatccaactgggacgcagaccaccatccatggtgtgaatagaatagagtttgacaacctagcgaccctagtaaagggaatcatggccccaaagttgtcagagttcgaactcaacaaagagcgataatcaccactccctaattgaattaaagctctaccaatccctctgaagttcaagaacccatactggcatcaatactctgggaaggaagattcactatctcatatccattactttgaggtgcagactgatttgtagggagtaagagatgatgtcaggtgtagaatcttccttgctacactaacaggcctagctcagtggtggtacctcaagcttccccctggatcgatcaactcatggaaagatctagtggatgcttttggcaaccaatttgctccttaccgatagcgctgaattgagcccaatgatttcgtggatgtcaagcaacaggaacgtgaagccttcaaggactatatccattagtccttggaggtagttgctaaaacaaaaatacttagtgaggaagcaagggtaagggcactaatagctagactcaagtagatgagtcctcagtggtctgacattcgtcttaagtcagcctacacaatgaatgaatttcttgataagggtagatggctttatcaagctaagttttcacccaagttaaaggctaaaaaggaaacaaaaagaattcaccatgcttcccatcctctgacattgaagtgcagtgtaatgggaatagatgagacttgaatgcaagcaaaagagccaacaatggtggaatataaggcaactcccctgatggaagaaagccaagactgggggcaagcccatgcgagagtatgagccttgttttaccacctactccattctcttggccccaagagaagagatctatattgccacacaatcaacagtgtcgtaccgtaaacctcttcttttcaaagagttagggaagaaagacatgaatagattctattgttatcacaacaattatggtcatgatacaaatgagtgtaatcaattgcgagatgagatagaatttctcatctgatagaagcatgctgctcttcagcagtatgtatgacctaaagctccagtatgtatgattggaggccctaacctagctaggaattcaaagaaggccttagaaagatatgaaaggtctttgtgacatgagctgagagtcgaagtacttgaggttattgagcatcctcaatgctacaagtgtgatcccatcacagccggagactccgactcctatcatgtcagttaccctcacaacaatcccttgtttgttgaggtgtagatagccaacatgatggtggaaagggtgatgatcaatgacgaagcatcctcgaagatattattcaagcaaaccctaatctggatgggttcgtcacttgaagacttggagccatgcgaacaactaatgtatggttttaacggagccaacatagctccatgtggcaagatcaaactgttgggttttatgccctaaataaaactcatttcatataatcaaatttacttattaataaagatcagaaataacattttatgtt

SEQ ID NO: 305229 - DNA, 2052 bp, Cannabis indica
tttgagtctagaagtgaacctcctaatgtagttgccaagttaatgggccttgatgcattcccgagacaacaaccccatccatctctccaaagaagcaatacaaacaattattcgaaacctcctttcggtcattcagggaagcctttgggttcttgggaacaagaagatgggttctcagagaatagaatgcaatttgacgtccatcattgttcggaacgaaatgaatgtaaggatgtttatgaggtttggcaacagcctgagaacaagaactgtataaaagacaaatcacctcaaaaggaaaggcataataatgcaaatacaaatgataggaatatggcccttgttcgtcaaaagttcttggaagcaaaacggttggtcacagatgagaagcttcaacagtctaaggaatttcaagatgcattggaagtcttaagttccaatagagatttactcaccaagttttttcaggaatcaacttacacattttctcaacatctatatgaattacagtctacgcctccgcctcctgagactaagaggataactgttcttaggccttcaaagatagttgataatgaaagattttctggatcaaggcagaagagtgataaaccaacagataattttgtgcagttgggtcaaacggctgtattgaataaaaacaaccctggaaattctcctatgtttcctgatcagaaagttgatgaatataccatgcaaccaactcgaatagtggtattgaaacctagctctggcaaggctaatgacattagggctgtgactccacctatcacctcatcaaaaatgtttcaagatgaaaacatcttcgaggatcctgaagatgatgaggcgcgagaatcaagggaagtggcgaaagagatcacgaggcaggtgcgtgataatctcatgggtcatcggagggttgaaactctgctttcttctgtgttttccaacaattatactggtgatgagagttcattcaacaaatcagaaaatgagtatgttgcagaaaatctcagtgatcaagaagtcatgtcaccatcttctagacattcatgggattacatcaataggataggcagccccttttcttcctctttcagccgtgcatctgttcaccagagtcttctgtttgcagagaagctaaaaagagactttctgagagatgggccatgatggcatcaaatgggaatgggaactctcaggagttcagacatgtccggagaagctcgagtacattaggagaaatgcttgcactttcagatatgaagaagtcagttagacctgaggatgaaactaacaaggaacaagaaccaaggaaattagtttcatgcttgactagtgacttgatcaaagaggatgctacttgtgattctcccataaatcttctaagatcaaaatctttacctgggtcgtctacagtgtttggtgctagactaaatatgtcaatttcagatgctgtggctgacacggtaaatggtcccaaggaactgaccaaggcaaagagcactaagtcctcattgaaagggaaagtttcaagtttgtttttctctaggagcaaaaaatcaagcaaagaaaaatgtggtccatctggatccaacggcgaatctcaatatgcttctgctgaaaccccgaggtttccattgcctcagtcgagtaatgagaatggtctcgaagagcgtttgcctactactttttgtttgtcaggcataatttcacgagaggtaattaaatttgctttttttgtgatgatggttcgaattaatcatatttgcatttttctaacatccattttttgtttcctaaattcaatattttaagagttttctctaattttagcaggcagggttgtctctgatgaaaccaacggtgtctcggggtgtcggtgagaatcaagaccagcccagtccaatctcagttttagaaccccatttcgaagagtatgacaatttgactcgtgagacttctggctacttgaagctggatgttcaaggtagtttttctcttatagtagaaaacagttttcccatgggaagaacttcatcatgtttt

SEQ ID NO: 305230 - DNA, 1934 bp, Cannabis indica
aaattaaatacatttcactttttttaattgtaatgattaaaaaagtaaaaattaataaaaggtatgtatttttttaaaaaaaaataaaaagtcaagtaaaaaaataaaaagtatttagtttgtatttatttatcaattgtagccttaggcaaccccacgaaaagagggaaggaagaagaaattagaagtattaagaaaaagggaaagaaggaaaaaaaaatgagaattttcatttttatggttttttatgtataagtttgtaaaaatattattttttttctcgaaaagttattttataggaagattttaggaaaaaatgttaaaaaaaaattagaaaaaataatataaggcaactggttacctcctttttttaaaaaaaaaaaaaaagagaacctcagttaattaaacttaaaaaaggaaattaggattggcaggggtaatccatccctacacagatagagtcaacgactcccagcactagcttggacagctaggtcattcacaccaaaaatacaatcatgattaacatgtaaaaaagtgcaggcactaaaagactttgccaattcaagaactttgaagaaacctgcagccagcttccaatccggcaaacttctccccttcaaagcattaactgccaccaaacaatccgagaagagggtaattgaagaccatttcatgttgcccgcccattgcatcgctaaaagaattgccttaagttcagcatccaaagtcgataaaccttcagcactactgcaaatcgaatgccactccacgttgttcctatcgaacccaattgccgccatcccacaacgaccctctttaaaggatcccatcagagaacaaaacatttgaattgaggggggctccacttggaacctgttgcaccaaccgagggggcatcgtcagatcagatacaccagcagcaaccaattttgcaaatcggttgtgaacttcaaccaacaaactaggaatgtcacggcttcttccaccatacaaaatcgaatttctgtagtgccaaatcgtatcccagacaacatagccacataacgaaattctcaccatgtcttcctttctgaaattagatcaaagattcatgatcctcgtcttcacctcttctccttggatcaactcaactctgactggtaagtgggctccaaaccataaagccttagccaagttacactcaaaaaagcatgatgggaacttttgacatcgccatcgcaaagtatgcagttcaaattgtccccactgccgatcttgtcacgggttggcatggccccactgcacattctccaaaggaatatgctagctctcgggtgcagctccttagaccaaatcaacttccacgaatcatgagtacggccaaatttgtgctcatttccagccaataagcctccttaacagagaaaattcccttgggagatctcttccataccactatgtctttatcaagcccacaaacaatatcaatagcagtgatttgtctccccacggtttggccaaacagagagatcacataccccctgttccattggccttgatcatgaagaatcaaatctgagacagttctcaaattaagagctttaatcctgacttcctccatagtagcacggaattcctcacagcccctccaaggaatcaaaggttgccaccatatgttaatatctctcttgttcgcaataaccgtacacgacccttctaagataatcttccttgcatctaagaaagacttccaaatgctcggatcagtcgccttcttctccaccgccgaaaaattgtcccaataacaaaatttctcccggaaaatccttacctacaacttgtcatcatttgaagtcatctcccaagcgagtttagaaacaagggctttatttatgtcttcaaatttctgaaatcccagccctcccctaacctttaggcgtgacaaagggaaa

SEQ ID NO: 305231 - DNA, 2895 bp, Cannabis indica
aacaacccatgaaaaaaaaacggttggcaaaaaataatataaaattacaaacataccctttcaaattgggctgaatacacaatatgggatttaaaattgaatttacaaaaatgtggcaaagtaaataccatatataactttaaatttaaataaatgccatataagggtggtaaacttaaaaaagccatatttttcaaacttttttgtagaatcccatatttggtgtaattttcacaaaggaaaaagggtccatgtgggcctctaaacacttgtgaaatcttgagcattgacacctaccttggaatgtaaattctaacattggatcattattgatagctttgtaaacaaattaatttgactaagtcattttttaagaaaaactctaccatattcttttcaaataagagtttataatttgaatgtttattcataaaaataacaaagacaatttagataaaacattcttaaatttcaaaagggctatgtatcgaggtactgtactttaatgttataaatactacacacttaaattatgaaatacaaattagacaaaccactatattacacaagctaataatataaagtattaaattaaggttattctcaacctttgactacttgcactacatccaagaacaaccttgaaagatgtgagcttttggataccacttccaccagatgggacaccaataccaccgtcaagggagaagacaagcacatgtgaacactattacaaaaattaatcaatttttttttcgaagattaacgctattaaaattgactatcggtttaaaatcgttggcaattctaaccctctaaaactgtcggcaattctatagatttgccaatagtttttaaccgatactcgattttcctctttttctctctttcaaatggtaattatatataaccctaaacacgatttggattatttcttaacagatgaaatatttttcttaagattttagtattattgttgttgttgttgatatagtgtggatttgagactgtttgcattattgtcgtttgttggtatggatctaagatatatcttgtatctatataatttttttaatgtgtccgtcgacaattgtggcttactatagtcgatgtttcggcaaaggaattgtcgactgttataaattgttggctatagtgccagatattgctgatagttttaaacattcgagacataggcattctctactatcttttactgatgcctattccacttgcgacagtcgaataggcatcggtcatagagaccgatggtaataccatacttggctacttttaacaatcgaaaaatcctttttttagtagtgaaaattccatattgtataaataccaacttattaattaattaataaattaataaaatgtagaacaataaagttaatactgaaacaaatattctgtaattataggctgagattttgtaactacataccagaaaatacaaataaagagcaatagtgcagaaaaataaaaacatacaagattttttatatgtagtgtcaacaatcattggagaatgttaatagtctatgataccacacttagagataagattcattagtccaatttcaataaatataaagtaattgacttaaacaaaatttagactccctctaatgattttgtcacaattgatgtactcctatttgttgaattaatatcattaagccaccaaagtttgactcccttcaaattacctgctgataaatgtttgatttcctccaatataagacttatagaaatcttctctcgcagaaaataatacttgcttcttccaaatgcaagagttgaatgaacattctcaaggtttgcactttattcttctctttgttaaattgtttcaatcactaaaacaattacagagattcagtattactgaggtatagttgaaccactatcctccacacgagaaagactctttactatactagccaaattcatcttgcttcttgggatcttgtttgtactaagtgttatggaggcttcgggtttcgtgatagattaagtggaataaaatctcgattgctcggtttaatttgtgtgggctctaaccacgaagcaagatgttctttgggttaaatagattattccatctacttaaagcaccaagattaattcttggatgtgagagagaaaatgggatatgagttggtattagcgcaactttctcaatctcaggaacctgttctctcaggatgcaattttggaggttagaaaagggggaagattttgggtacgttagtaaactctataatattttgctcactctttatgcaaaggtggataattgtaaagtgatttggtgtaaattatccacattaaagcatagattttttctctgacaagcctctcataattattattaactagagaccacttcatgacaagaggtattcttattacgtgacaaagtgcgcgatataggtgatgactgtcatgccatgcatcttttctttgagtgtgatcatttctccaaaaaaaattatggagatggttcagtcttggcttggtgtggccatttggccaaataattactcagattggttggcgtagatttccacaaagagacagcatagtttactttttgatgttgcaacggctacttatgcggcaacagtttactttgtctggtggaatcaaaatacttttattttttaagagaaaatatttatgctttcctatattgatcgtttgattagaatgatcttaaaatctagattgttgcttgtttatagaaggaaaatctctaaaagagatcaatagttttataattttgtttgtaatatgtaagtgttcttagctttaattagtagtgtgtcgggtgtcggttgttgcaacatatgtgttgaccgagattttcggcaactattaaaatat

SEQ ID NO: 305232 - DNA, 984 bp, Cannabis indica
cttgagaaccaatggaagaaatttgaaaagaacaaaacgaagggccaagaagttaaatatccacactaaataagatagcaagggtacgggagattcctcccctaacatctcgtagagagttccccactagaccctacatccagatgcatgatcctcaggcatattgctccaggatgatcagatcaggaacatgtagaattagttgagaatttacaatttatccataaccataaggatctcggatagaggaattaaattcagccatacttgaatgcattttgctgaagtttggctattcaataggaaatttactaatagagacataatttcacaaaacctaataatgattatagatagtatatataaaaaaatgtccttattttgaagaatattcggaactactccaaaggcttaaatcgtactctttacctcttatggcagacatgcaagcataaaaaagaaataaaattggcagatatgctattatgaattattgtttgacctacccgaaatctaaacacgtttcaaaattacagaagtacaaaggttactcatgtgttgatggtagaaggtattggggaagggatttaaacatcgtgcgttggtcgtagggagggtcttgtggtgggtggctgatcaaggcgcacaataaaagattgaagagtgcgagtttgatttataagtttttccatctccgcttgaataccaaatggtttgatggcttcaaggaatcaatcgtgagaaatggaggtggtgcgcctagcttaaccgtgaacgaatttgaagcaaaagatgcagacactcattgcaataattggacattcactagaaataattttcatctgttctctctgttgggttttatgccctaaataaaaatctgtttcaatgtaatcaagattattcaatatcaataaaataacagaagtatttttcattcatttgtgtatgttttgatttcaccttatcaattatttatctatt

SEQ ID NO: 305233 - DNA, 2956 bp, Cannabis indica
atagattcctttttcaattttttcatgagattaatattcaaagagttctaacaggaagcccatggacgtatgatcgaaagcagttaattcttgagcaactgaaaaggggtgataatcctaggacaattgcactaaacaagcttgatatatgggtacaaatccatgatctccaatccggatttaaaactaaaagagcagtacaacaagcagggaattatatgggcgtatttcttgaattggatccaaaaaatttccaaggtgtttggcgtgaatacttgcgagttagagtccgtttgaatgttgatgttcccctcaagaggcgtatgaaattccgtaagaaaggtggtgaggcattttatgctaacttcaagtatgaaaaacttccaaccttttattttatttgtggtataatggatcattcagagcgcttttgtagtaagttatatgacactccgttggaggaaatagaaaagccttacaatatagccatgcgagccccaacgagaaaacaaaatttcctaacatcctctccatggctgcgatcaagtacagccgaagaaacacctaattctgtcgacaaaaatggtgctccgacgatcattactccgacaccatcaagaaaggctgatttggtgggatctcaacaactgcaaaataattcccacggtagtcaaggcaatataatatcatcatcccaagattctagggatgttggtcaaaggatagataatgccattaatgacccaacttttattgtgattgagaatgattccatgtttacctctgacgtggatatggatttggtggagttgaaaaggaaaagaatggaaagtgactcatataaagctaataatgtgtctaaacccaaggaagtggaccatgacgatgagcccaataatgttcttactaaagatatagtatttgcctttcaaaaaatgggagttcggtgggtcctggtttccaggcccagcaatcattatgagtatcatatgctgaaattatcgtgggcttgggaacccgcgggccttacaattccttgaagacatctgtgtcagtaagaaacccaaatttgtattcctttgtgagactatgtgtaaaaaggatattgtggaaagagtaaaaatcaaattgggctttgaaagttgtttcattattgaagcccaaggaaaaaaaggaggtcttgcactcttttggaaaatatcaagtgaggcccatctcttaggttactccaacaatcatatcaatattgagatttctagcactgggtacaataactggaggctgaccggattttatggtgaaccacaacgatttctccgcgcaacaacctggaacttgcttcgtgatcttgctgctgagtcgaccctcccatggtgtataattggagacttcaacaatattactgcccatggtgatgtgaaaggcggcccccttaccccgactcacttatcaacggcttcaaccttgccctctgcgattgccgattggatgaattgatactcggtgggtaccagtatacatgggagcgtggaagaggaggtcctgcacatgttgaaatcaggttagatagagcttttgctactcatgactggttctcaatttttcttgaagctaaactgtcaaattttgattacacctcctccgatcatacacccctgcttcttgaactcgaccctgctatgaattataaactagtaagattatttcgttatgagaatgcatgggctcgtgaacctttgtgtggccagctagttaaagattgctgggagattaataaaaatgtttctcttgctgaaaaaatccatctgtgcagctctattttaactgtatggggatatgaaattactggtaattttaagcagcggttaagtaaaagcaaaaaaatattgagtcacgtaaagtcagctactggctcttcttctactgatgatttctctgcagaacactgtaattattttgagattttagctcaacaagagatttattagaagcaacgatcgaaataattttggctccatgcgggtgacaaaaatagtaaatattttcatgctactgcaagtgctcgtaaatgcagtaatgaaattgttcaattgcaaaatcattctggagaatggaaggactggtctttgggtcttgatcatgttattgttgattatttatcttctttgtataatgccgaaggtaccgattgtgattatgttgtgagaggtatcaattgctctgtttctaatgaccataatgaggctcttttgcgaccgattacacctgaagagatgaagcaagcactcttcaaatgcatcctgacaaagctccaggtcctgatggtatgggtccagggttttttcagcagcattgggatgttgttggcactgatattgtgcaacttgttttgaatttctttgatacttaggagcttccacctggtataaatgacactcatctattgctgattccaaaaaagaaaaatttcactgctatgggtgatctgcgtcctattgccttgtgtaatgtctcttacaaaattgtggccaaagttcttgcaaataggatgagagacatgattgatcttattatctcttccacccaaagtgcctttatccctggtagactcatatctgacaacattatggttgcttttgaagtcatgcattatctaaaacgaaaaagaagaggtaaaaacggtttcatggccttgaaacttgacataagtaaggcatatgatcgagttgagtgggactatttgaaagctgtcatggctaaaatgggttttgctagcaaatggatcaatctcattatgaagtgtgtcacctctgtcagatactctgtggttcatagaggtcatattttgggtcccattactccttctcgtgggattcgtcagggtgatccactgtcaacatacttgtttatcatctgcgcagaaggcttttcagctttaatcaaaagttatgaggct

SEQ ID NO: 305234 - DNA, 2570 bp, Cannabis indica
catcgactaacccatcaccttccgaatgatgaggagaatcaccaccattgatactatctccatcttcaagtacagaacgtaaattgagcaaaacatcaagatccccttcttcttctgcttcttcttcttcttcttcaatgcacccaacattaccaactccacaatcacctcgagacttaatcagcttagactcaatcgaattacaagaaaccccccaattttattcaacaattcttctttctcaccgccattaacgaaaacttcgtcactaactttagggtttgtgaaatcaaaactagacggtatcgaatccaagctacaatccacaccatccaacgattcaaaaccctcgttctcctgaatccccaaatgcaaagaagaagaagaggctgcagagctcaattgcttaggtttcttccatggccgtggagtagtaaagcttgaagctttcaatggtttcttctgtgagagagtgagatttttgggagtaggggttgatcgggttaaagggacctggaaatcgtcgtcgtcgtcgacgacgaaagacatggcgattggcggtgaatgtggttgtgacgattgtcgtttttggtgagaagagaagaaaacgacaataatttcggtggggatttgattgtcgtttttggtgggaagagaataaaacgacaataatttgaatagggatttaattgtcgttttgaggggattgtggagtttgaattattgaaaatggcttttggaagaagataagaagtgaaattaggagggaaatgaattaaattcaatgccaattaaatgaggcgcgcaaactttttttttggtttgtttaaatgatgtgaaaacgacagcgttttacttctgtaaaatatcaaatgtgcttcagtgctttgtactttggcattaatattttggttattttgcaattttgccgctgaattattacaattactaaaccgtgttctctgatcttatttgttcgttaaaatttttccaaatgtgtaatttttcataaaagataatttaaaacttataaaatttattttcttactaaaaataactattttaaatctaaaattatataattaaaaaatatttaacaactaacagaattaattataaagtttataattaaaattacacatttaaaaataacaacaaccacaccaataaaatgtctgctacacaaaataaaacttaacaaaacttttttatcccaacattttgaataattcacgagaaagtaatatccggcaaaaaaattcaagggcataattcacacaaaagtaaaacatgtaaaattgtactttttttttacagttttatagactatattgtacttttttacattatttttcttaattatatttttacgaaatctcaaaaaaaaaaacaaaacatgaaatggttttattgtgccagtgttaacttctttttttttttcataatgataataagacttgtaaatactttgatgggcctggtaaaaaaaatgaaatattaatataaaaattgaaatattttttaaatttttttaaaaaataaaaaaagtatttagtaacttttttttaatttaagtgaggagagaatgtggtgagaaagaaatgaaataaatgttgaaaaaaaaaaaaaagtgtaactgtgattaaaaaagttatttaaacactttcaaaaaaaaaaaagtaatttaaataaattttgaaagcaaactattttataaaaaatttattctttatttgtaaaatgaaaaccttttatttttattttttatgacaaaaaaaaatattaccaacacatataaaattaatattccatcatctgtgtataaaataagacttcttgggtattttctaatcatttttgttaatgtgggaaattaccttttttcttagcctaattaaagttagtgatgtgtcatcagtcaaagtgtaccaaattacgtttaggttgacaaatgagtcaaacacgatataaattcacacaaaatgaataaatttaaatttttatttaaatgagtttggattatattctgatatcaacctgtttattaaacgagttattttctaattaacacgcttaacttaaaaataatacaataataatctaattaaatacaaatttagttttcatcaccattaagatcatgtttgactgacacgacatgaatataagttgtcaatataaattttcatctctagttacactacactttaataaaaacatgaattgaattttataactttaaaatttgtctaataatatatatttcttcataaatcatcaaataatttagtttggtaactaaccttcttaattttggccttgattgattgattgattagtggttgcaaatacattttatttaactaaatttgtatgtgattgtgttaaaaagctatatttctttgcacttgattctaaatccatgagacaaaattatgattagattcagtggcagaggcaacaaaaaatgttatagaggcataaaaaatctacaaagattgcctattaataaaaaaattattatttttataagaaaaaaatataaattttttggagatataaataaatat

SEQ ID NO: 305235 - DNA, 2536 bp, Cannabis indica
attttgtatattttgtatatgattaacctcaacataataaatttaatatgtggaagcccaaaataaaattgtcatagtagttattaataaaaaataaaaaaagcaattaatcaccacatattttatatatgattaacctcaacataataaattaaaggtgagaagtgagggctttttagtaatttaatatgtggaagcccaaaacaatattctcacttttatagtagttatagattatagaataaatatagatatattaatagattttgatattaattatttaatagatatctatttaattattattactgtagtagttgttgtgtataatagtagacaattatttactagagatgaaaagaaaagacaagaataagaatgaatacaataaaaattaaaaatggttaaaattatatatatattatttttttctatcgtattggaaataatattgttgatgttgaaaaacgatcaattccgtatcgtctgataagcgataacggaaaaaaaaaggtaaatattattctgaaccctttattttgtaaaagttacaaattgaatcatctattttgttaaatgacaaaatagactttatattttttaaaatagtaaaaataagactctgagcttaattttcgaaaactttattatttaatataaccaacttgaagacaatttctaaaatatacaaatacataacatctctagatcggactattattaagttttattttgagaaaaaatcagttcaggatcctatttgtaccattttagaaaatacaaagtatattttctcatttaatataatagaatgtccaattggtaacttttacaaaacacaaggtccaaaataacatttataagaaaaataagaactaaagagaaaaccataatttatagtagctcactccccatattgtgatagtaatggaactacgtctcctttgagcttatcacgaaaagcactcagcttagaagagaactggagaaaaataactaaagagagataacctctaaccttttacagagaattgagaatgtgaataacgagtcagatgagttctccttttatagagaataaggttcaattaaattacaataaaatagtgggaaaattgcatgaaatttgttaggtaaattgaggccgagctcgcagactgattttgaggccaaaaaatatcaaaatcgtgggaaggacattagacaagcttagatctatcttgaaaagaactttccaatgccacttgaacaacatcatttggataaaaattgagcgagttatggaaaaaatactgagctagtgtgcagttctaaaaaattgtcaagttggatgggcgaccagattgtacataaaacatcgacctgagcgcctaaaactctgcttcttgggctttaagcatgttttgagatgcatcagtgttgtgaaaacactccttagttcattctttgactccagtgcaccgtctcatggtaattatgcacggtgtgcgcaggagatgtccgggtgatcacacagtgacaactaggtgataaccgggtgatcactaatttgcattggtgttggtgggtttatgtgtgacacatgtacatgagatattgactttccaaagcacccaattcttattttggaggcaaaataagatcgatgtcggacaaaactgtcgtttgatggatggaacattaagctttgaatgttaacctggatgccagtgtggtgttagctgatgcttgggagttgatccaccacttcgatgatattctttcatgattcaagtctcatatgttattttgagggcaaaacaagaataatgctcgagacggaagcacattctatgtgacagaaccacaaatcacgtggaatatgtcaacctaggcacctcgggcacatgcaactagtgtgctaggcgcccaaattttcattcaggccttagatgatttagtttgctttctaaaagtagttgtaccttcattgttgataaaaataagaaaaatgcccgaaaggcttctccataaaggagaaccaaagcgctcccagttgagattcattcacctgggcaccatagtgttctgagagtctgcattgggggctcaagtgggggccaaggtcatcgaaagttgtctcattgatgtccaatctcttttttgtaaaaaatgttcactagattttaatttcatcaaattcacacagttgttacttggtaaagcataattggtgcccaggttacaatgtcaacctaggtgcccatgacttggaatatgctccttcaggatatctttgatgaatactcatgccctgtcattgttctttattggatttgaggaatcggtatctaaaaaagttcctgaaaacctaaacctagtcgtcgcgtcgcccatgctgactgaatgtcaacctgggcgcccaaatgcacctggtgtctctgaatggggttttgttcaaacttatctctaaggtctgaaacttgattgggacatgtctctcatgtatcctatattagaaaaattaataataaactcaagatcaatttgtatataa

SEQ ID NO: 305236 - DNA, 1597 bp, Cannabis indica
gggtcctatttgtactattttagaaaatacagggtctattttgtcatttaccaaaacacaaggtccaattgataacttttgtaaaacagagggtccaaaacgatatttactcatttttagcatttgaattatttttttgaaaatttgtaaatcatcttaaataaaatacataatataattataaagaagaagaataaactattttttaaataccaaaatatataaaagttttactataacattattttacatcattataaataagtcggtgtctatttttaacggactgaaaaacaaaataatgtatggattatagaccaaaaaacttaaataaacttgttactattttgacataatattttgagtatatagtttgcatatatggatgtgtcatgtgtgacaatgtgggacatgttataaataaataataataaaaataaagtgtgacatgtgtaatatgtttttttaaaaggatgacatgtgtatatgtttgtgtaagcaaagtagctcatactatggataatgatattttgtgaatatgtgaagataattctaaactatattgccccattagtcacaaatgacctcattttaaataaattaaatcctatccaactttataataccatttaaattaattatgtttttgcccaaattggtgtaccaccatcactacaaattaattattggataaatatatatacatttttttttaaaaaaattacatcatactagtattatttactatattttttattattattattaattgttgtctttttcttatatacataatatatactattttgatgtgtatgcaaagtggccatcaccctattaacattgataaattgaatcctatcaaactttataataacaattaaattatgttcgataattattatacaaagtgtcatatgaatgcgactaaatattaagttttgcatatttaaatttaataatgaacataaaaaattactaataattttgaatgtggtaatatagacaccattaatatgtgttaccttattgaaaagtaattattgacaaggaaaaaaataactttgtgaatctataatagattcactctcctttaggatttctcattttaaggattatccactcaagaaccaagaggagaacaagaaacttcattaaacataacaacaagaacaacatgagtccaagccaagcctagaaatagtactattagaacaagagttccaacaagagcacatataataacaaaacaaaacaataaaagaccataaacacataacaagaaagaaaaaagaaaaaaaaaatatcaagaagacaaaaaatatttagccgaaaatttccttgtattcatctaatagaagggtggaatataaaacaggtttaacactccactctttccaatttaagagtatgacgagcaatgttgtaagtcacaaatttggccttttctgttgatcttgtgaagcgtccagagtcgaccctaaaataaggcgagctaagcctgcacttagggtccactcatctttggagctcaaataaaataatatattttaaaaatatatataatttttaaaaatactatttattcttataataa

SEQ ID NO: 305237 - DNA, 936 bp, Cannabis indica
aaaatgccgttaaataggcacttttaatatataaagagatatatatatatatatataaatgcatataaaataaacagatatcaatggcgtgtatttttttgatatatgtgtatacatatatataaataacgacttttgatattgttggtgtatatgtataggtctgttaaggtgtggaaagagctgtaggcttcgttggataaattacttgaggcctgatattaaaagaggaaacttcagcaaagaagaggaagacaccatcatcaagctacatcacaatcttggaaataggtatatatatactctacttcttttttggcaatgaatattaattaagatctatatatactcttatatatgttatagttgctatgagattaattgattatgatatgtattaattataatatcagatggtcttctatagcgacccaattaccaggaagaacagacaacgaaataaaaaacttctggcacacccacttgaagaagaagatcaagaagaagttaataatgaaacaaagtagtaatagtgaaactgatcatcttgaccatgaagcaatattacaacccatgacgatgatgatgatggtcaataatgccagaactagtagtagtaatactactacagttgttaataataatgtccatcaccaacaacaccattattacaagcattctactaccaggacagtcttttttgatccaaaattacagatctcatcatcattattgttaaactctgatgatgtacatcactcattcatggatcataataacaattataatactgatgaggatgatgttatggaggaaggcattcacaacttttggtacaaacttcttgtgaagtcagcagagactgctactgctgctgcttcagtaccaccagctcttgcaaattttggataattattataattttcttttcatttt

SEQ ID NO: 305238 - DNA, 862 bp, Cannabis indica
aaaaaaaaaaaaaaacaaagccccttaaaaataatttgaaattttcaaataaaacctcacaaaaataaagactaataaacaattaagtgactaaaaattcactcactcactcactcactcaatcatcctctagcatggtgccaatgagacaaagaacactcagaatcaaagctcaaatcattattcatattcaccatcatcatctttctgcttgatttcacaggccctctaacccctttcatgcttggagatctttgatgaaagtaataatgatgatcaccaccaacaccaacaccaacaccattattactattgatagaagatatgagtgagagtttatttttgcatggtgagttaccatctaagctttctggccttagttttggtgagcttaaagatcttgatttggctctagccgattcggttgcagccatgtatgttggaacaattggtgatgatgagcttgtgaatgagttttcatcacctaatgaatattgttttttatgaattgattttcttggtacaaacattggtggtgagtccatgaattttcctcctcctcctccttctcctaatattccttcactattttgaagattttttatccttagtttttttgtgtttgataccaaatttgtgtccaaatcttcaagctctttgcttttggtgagttgggtatctacccattgttctaaccaatatctccatcttccatttactttgtttctatctgattctgctgaattctgttaccaaaaaggaaaaattagtaactagtaactaaaaaacataactcgggggattttcttttgaaggcatccctcgagacagaatgaatttttttagatggaagaaatctctc

SEQ ID NO: 305239 - DNA, 2946 bp, Cannabis indica
aggacttttgtctaattttaataaaaaaattctaacatggataaaagttcaagggacatgatatagtacatatcaaagttcgaggagcataattcggtagatatcaaagtttgaagagcatggtttattacataaataatcactgaaacagtaaaattgaatgaaattagataaaagtttttaaatctaacaatctcaatagttcaagaggaatttttaacggcaaaaaaggttcaaaaaataccatttggtatatgtaaaagtttaaagggaaaatttactaattaaccttatttcttttaaattatacgaaactgatatttaattagactaaagtgactaaaccttattttgagaatagagtaaagagtcattgtcctaaaagtccaatcttttctctttcactaataagggcgtatagggcaataatgtatgtgatgtagataataatggagaacttgaaaatgatcccaatgaggtttggtttgaatagaaaaacagtgtagtaagaaaagtctagaaacgtggaattgtgtatggccgtaagaggaggacggtgtcacggaacaataactagagtggggatggggccaaaagaattttattttctatctatatcattgcttttccaccaatcatattctatcaaaacatcaataaaaatctactttgaaaataaattatttttttaattttataattttttataatcaatttaaaattgagacttaataataaataataagaagaaaaaagtaaaaatttaggtaaaggaaacatcctaaaagagaaataccaagttatatcaaaaggtaattaaatataaaatctctcacattatttcatttaataattaaaatatatatcactaataacattaatactcatcctaaaatatgataagtatcattttagtaaagtattttttgaacaaaaataagataagcattgagtaagcatataaaccaaattaggattactataattgctaaaactagtttattatcatacagtcaaaactatttacattattatcaactaagtcctttaactttgaataatatccaattctacttgcttttactatcactattcactacagtccctgattttttcttctacactcatcacaattaatgactacaatctatttacaataaaaattaataattatttagcttggtcgaaaaaatggtgtcacctaaattgttattcgaaaattagagaaagacaaaataaatataattagtaattttaccctaactttaatcactatcaaaagggaaaaataaagacaaaatatgatagtgatattatgagatggtaaaattgataaattatttaagaaacattctcatattttcagtaactgaaaatatttaacatctctaacagttattagtaagaaagttaaacgtaaaaatagttatttacttacatttaaatttgtactaatgagttaaaactgacctgagtaatttccacatttgggtatttggcattgaaactcttgatagtctcctcaccaagcggcgcgccgccgcatccgagcagccgaagcgagctgaggtcgtacttcttagccagctccgagttaacaagagccaccacgagcggcggcgacaccggcatgtacgtcaccctatacttctccacggccctaagcatcgtttcaaaatcaaacctttccatcagaaccaacgtctcacccaaagtcaccgccctcgccagcatgaaaaatccgaacacgtggaacaacggcagcgtaaacagcgacaccggatgcggctccggctccggctcgctcggctcgtactttagctcgtggtaaccggcgattatggcgatcagattccgatgagtcaaggcaacacccttaactcgtccggtcgtgccggaggagtagagaatcgccgccgtgtcggtctgtgggaccggttcgaacgagtcccccgagtcgactcggtcgagcatggagagaaactcgggcgagtcgaggagtatggtggggagagaagggggaagcttgcgtgcggttgatgacgtggcgaatgcgattgcgggtcggacgagttgtacctggtgagtcacctcggagtcggatcctaccgggttggcgggcgaaacgacaacgcctagcgacattagagcgaagtaaacgacaggtacgtgtacggaggttggggagagaacgaaggcggtggtgccacctttggaggaggaggagagagaagggaattggtatttgagagagagagcgagtgagcgaatttgacggagcaaatgggagtaggacacgtggagtccggaggagtagtcgatgagggcaggtgtggtggcttgggtttcttgggttgtacatgagttgaggagagagagagcgtattgggagagagagaggggttgagagagaggtggtagagggaccggtggtcggagactatggaagattttgtttgtgggcagaaaccacttttgggatcgatccaacggctgtgattcatctcttccgccatggcagttttgtttatgaaaatgaaactgtgtcacaagtcacagtctcacttagtttttgacgaaactgtttcagttcagagtttcagacaattagtattaatagagagagagagagagttcgacgtggtgagtttatatatgtttttgacttttattaagtttgactaagccttatttattgactcctatattggatatttagtttttcatttttttaatggttaatttggagttcttttcaccaaaatacctatatttaaatatattctctgaattttttaaatttatctatttttattttggaaaatttaatctgaattaaagtttagtggacataatttggtacatgtgaaaatttaagggataatttagtaaatatcaaaatttgaggagcataatttaatatatggacaatcacaaaattaataa

SEQ ID NO: 305240 - DNA, 1356 bp, Cannabis indica
tgataatcttatgtcgcctcaaataccctcctctttagaggtgatacaatgtcgctcctaaattgatcgtccccaaaagccaaatttgttgtagtgctttataaaatcaaaggatttaaaattaagagaactaccttctcttctacaatcaagcttcaatacaccataatatcactttccactaacgtttaaacttcagaccagctccaaaccatcaaggtttttgaagaaaaggaaagatttttttttttgtttatggttagtttttcttgcggtgtgggtcgactaacctaagggaaaagacaagcatttagtcatataaaacttctaactaattctagtatatcacttgctatcaacaaaatgatagccaaaagactatgatgcctctaaataactaagtcttaaaataaaaactaaggatataattaccttttctataatatccaaaataaataaataatttctagttattcgcagctaatttccctatattgttaaactgttaaaataataccgctataaattttttcctaatccattgagttttcactattatcgatcataaacatattaaataaatatcatatacatatgtcacacatataatataaattttctatacataattattaaccttatatttacttattttctattaatatattaataagtatttactctaattacacatattattccacatttaactataatactagtttattattaattttccatatctatgtggtcattatagagtgagtccttttgtaaggccatttgtaattagttcttgagttgggaaatatcagacttcaatcttcttcaacggtactttgtctcgaataaagtggatattaagctcaaagctcaatatactttatgcgagcatgataaacagggtttgaggctaaggaatcgacactcatattgtctcactaaaccactggtattgatggcaaagtgaaatagatttcttaaagaagagattcgagccaagtgattttagcagctacctcagcatgagctcgatattcagattcagtactcgagcgagcaacaatggattgctttttagatggccaagtgttatccatatttttgaaagagggacacatataattctaagatccaaattcaatcaacacaggcctagttgcctactcaatctggataatggagtaagctcaataaaggagtcagaccattcgtgttccaaagtaaaatctcatccaggtgaaagaaaagtccaacaaagaagacatccgcatatcttgaagcgatgcttctaaaaaggtaattaatatgcagggtcgtgttgggttttatgacctaaataaaactctatttcaa

SEQ ID NO: 305241 - DNA, 1203 bp, Cannabis indica
ttgttttgtttaaatcctttcattggttttcattgcttgactgaaatacgtgggaaaatcattcgtaaattattctattaaaaataaaatatattgtgctgtttgttatgttaggtggatgctgtacctgatcttatagagcacatccacaagacaactgcaagactattacttcatattaatgggtaaaacttgaaagcttaattttcctttttttgcctctcttgtatttaattagctcaagtatggctacttgctttaattgtcatcgtgtttttctttgatgcatttagcctattaatagcaaatcccttttattaatgttgttgcagatatgttgatcggattactaatgcaaagtgggaagtaatagatcttgggcttgagcataatgggtaagttttctttaaagcaaattttgagttaactatctcgctgaatgttattatccataaacctagattcagcttgatcccatccctgtaaaatttggtcagatgtattttgttaaataatgcatattaattgattactctataatactttgtatctcgagtttagcatatccaacgatgaatcttagtcatttaagctaatttgctgcagttgtgagatgggtcataatcttttcaggggtgctctgttctctctctttgtttttttgctttattttgtgtgaattaaggatatctgctcctgaatttctgtacgcacaatttttcaagttgtctgacattagtttttgactaaataggtatgttgatttgctgttgggagagtttaagcactataagacgaggctcactcatggcggaattcgcaaggaggtaatatcttatgctgaattagattgggcatgtcatattgatacacgaatttttagatttggcttctcatgtgatatttatgcattaagaaatgaaatggttttttccaatcgcccaacgacttcatctctacacaaaagcgcctatagcaaaagcttatcgaataactgtttctgcaaatgtagcttcaagacctcctttcagaatatggaattgaaataatcgctgaaacactagttgaaggtctatcacgagtgaagagatgtactgatcaaggacgagctctaatgtcattggatcttcaggtgtcattcattaaaaccacatatcttttcaagttccttgtttacaacatagtattaagctttcattgttt

SEQ ID NO: 305242 - DNA, 1497 bp, Cannabis indica
gtaatgggttttatttagggcacaaaacccaacaggttgtccgaagctcagtcacgtcaagctagcttggtcaagaaggttgcacgtagtcctttctctcggccatctcctcccttgcgcgcgggggagtgtgtgcactttttttgtgatttttttcaagttttagaaatcgtttttcaatgaaatgaaattcaatttttggtagaattttgtgtagaatcttaattttcaaataaaaatctaattattagaataaaattaattttgattaatttaaattagttttagatattagtagcctttgaatttgaaaaaattatccctcatatgcgattcaaatcatccctaaaatcatttctggattgttcgggggattctcctaatgagtatgataattattacgactacggttggtgtggtctctactattcgccctatcatcattcctgtttgtgaaggattgaccactacatgactatgaacgacccgactattgtccgacaaaatgagtttgattataaacttgaacttgtccatcctgctgattaatagttataggcccacaaaattctccatttggttggttcggtatatctgtctgaggacagaagttatgttggtcttttcttccaagataatgggtttcttgctcgtctattgtgtggcccactggcctcagattagacagtccaccctcatgggtctcctaagtataattggtcggacattcctctggcccatactatagttcatttgggatataggggccttttcccctgttcggatctctttcaagtagattattttccacttgttactgtctagtctactgattaaaccgtttgatcagtttggttgcctgcctggattgattatcaatctttacctattgggctctcaaaatctcagttttttgatccatccactcctggaatagccatttttatagtacaaacaacaggttcatggctacccaggtatccttctaatcatggtggagggtgttagtatgattttacagttgccccaaggtatccctcatgttttgtaattcattatcatcgcccatcaccacttgtggttctctgatacatggctctcatgtacccaactcagtttctccagtgtaatgagtgctggtggttccaatttcttgcttgcctggagtgaaccctgccagaggggttgttgctccgagtcttgctggtggcagaactcatggaggcagatgagtgctcagataagggtccatcaccactagatctttttgattggaaggagcatgcacattcactactacaaattaggcttttagtgacactatattgtgacacgcataaaagtgtgggtcactaaaagattaggagtaggttttagtgacacacaccattagactctaaatatttggtgtttatcactcgaaatgtgggtcactaaaaaatatggagtgtcactaaatactaaaattcaaaatttataattttataaaaataaaaa

SEQ ID NO: 305243 - DNA, 3223 bp, Cannabis indica
aataattatttatgtggactaattaaattgtgtcatgtgtacactgtgtacacgtggacattccaacatggcacttaacactcaaaaatagatgaaaatgttaaactgctaacagaatacgggttttaggggttttaccactaaaattttagaattgggagttagttgcaataaactagacacttataagggttatgccgcaaattactcttataattaatgatcttttttacttttattcacaagtttcgttataattaaaagtaaaaaaaaaaattatagtgaaaattatccttcagtggaattatcttattactaagtgaataattttcttaattagacttgaaaaattaaaaaccccaatgaaaagttaccattcccatgaaaacattatattaattaaaagcgtatatgaaaataataataatataactaattagactataataacatttcgaatcttacaaatctataccttgaatatcatcttcaattaggtgagcctaataatacatttatatacttattttatagcatctgtcatcatgttcttctcttcctcatcacttcaaacatgaattcatttccttcttcccaagataagtattatacattattcatcaaaagaagttaaaataaagaacaaaaacccctccaaatagaaatcccataatattgttatgtatcatatttcaattgatcatctcctgtagaataattctactagaaatataagaaatctataaattcatggattattccatctcaagtacttcaagtacaaaaaataatcttttcgtctataaatcacgatacggtgtattagcagtggcaacagcggtgcccttggctatacttgggggtggcgcgtatttagcatttacttacttcaacagtggtgattggttgtggcgaaggaaaaaagctagaatacgagaaaggtcagttgccctagcaatcttgcaaggcggagaattcgccttgcagagattagttgactttgaacaagctcgatccaacaccactcgcacatttgcagcgattgagtgcttgttggatgtgttgcttgaaagagagtatgttgatcttccaatgatcaaggttaactattcttacatctctctaatgtttttatgattagtttaattagtctcaaataaatccactcttatgaattaaaatcattgagtttttataattttcttttcttattatgaattttttgaaatcgatcagattttattatcatcactagcttcattgtgtgtaattgaaggtaagaaacatgtagcaaaaagaagaatattgatatgtaattaatgaatagttacttttttttatatcataattattttatttatattaagttactaggtttcttaatttttcaaaaggatatatttatcttctaaataagcagaaattacacattgtatgagtttatatataattcttcaaaaaaattattttatagtaaaatcaagaaaaagtttaaaaaaaatatgagaaaaatattatttaggccaactagtaaccaataacctctttaaggtaaccaattaacttatactgtttttttttcctatatttttattttctacttttcttctaaaaaaacaaacaaactattctttttgcaaacttttaccataaaagtgaaaatttccctttaaacaatacaaactatatagatttagagttgcacatgatcaataaacataagggcatttattatcatatttgtacataaaataatatttttgcaaattgtgaaactttcactctagaaaatataactaagacttacaaaatttatatctagtctcattaatttgttttgtgttatatatatgtatgaaaattaaagagagtaattgcaaagtttgaaatgagtggaaatgaagctaaagcagtgcaaatacttcataaacatagattaaaggctcgtcacaccaaaaatttctataaagcttatgagatcgagatgttactcgtcgaaatgtacatttataagttacgttactactatttttggatactgttttttacaaaagttattgatcgatcggttcttttattttaattgataatttaaaaatatgtatttgtaaaaaagaatagaatgatagccataatttgatttttgtcaaaacgttttaaaagctaggattagattataaattcgaccacaattattagggttagagaataggaatttttaagtttagggttaaaaaacaagtttgattaaaattcgacttaaaatattattattattattattattattattatattttgtaaaatataaaatctcaattgttatttaataaaatagaaatattgtttaattattaataacacttatagaaacacgagaacaaaaattgtatttcattttaaataaaattatattgtgattaaaaatattattattttcatttgacacacttaaaatatgtaataaaaaattacaatttattattgctaaatatgtttctttgtggcaacgaatttcatcactatgaatttatttctttttgaaaaaaataaaggtgatattaataaatgaaatagtcaaatattagtatatatgaatttgagcagggtgactttgagaaagcttatttccagcttgaatgcttcacagaaaaacattcattggactcacgtcgacccttctttaaggtatgtatatgtaaatatatatacatatatattttatgggcttttatttcttcaaaaaaattattttatatataaaattaaaaatatggaaaaaaaatacttagggtaaccagttacctcttaatttgggtaacccaaaagagataaccagtgacatttttgggtaatcaaaaggagaaaccagctacttctttttttgggtaactaaaaggggtaatcagttactttaatcttttttttttttcatatttttaattttatttttaaatttttcttataaaataacttttttgtaaagaaaaaaaattaatttttgtaaatttgtaccataaaagtcataaaaataaaaattcctcctaaatatatagtatgataccaatgtttctagctctatgttaccaaatattagcatagcaaccaactccatagatgaattactaagcaaccaaaaaaaacctctatcgatatataatataacatagggaattttgagtttatatacttacaaaattaaaaaatttattattaaaccaaa

SEQ ID NO: 305244 - DNA, 689 bp, Cannabis indica
aatataacttacgtattattaccataaaaaattaaacttaaattttcatctgcaaccaaaaattattaaatttaaatatttatgaagacttaattattgttattgttatagaactcaaacacataattgttttgttagtgattaaataataaagtatttatgctaaaacttctgaaatttatttatttattgacacaatttatttattttggttttgcttgtgtatgcataggaaatttcagcctatatgggaaaaaagttgtatggacaaatttcatcaacttttgtgagaggaaatcttgtctacaaagaaggcattcatgctaacaatgcttgtggtgttacaatcctagcaagatagagattggaatatcattacttttatttacattttccaaaagaaaagaagaagaagaataagaatatgtttttataggcttattcaactttgtttgggaatattgattatggtaaaattgtatatatgagtttgtaaatatgtacaatatactttgtaagttcattagtttgaactttgatgcatgaaactaattaagttttgatgggatatttgtaatgttaggtgaggttttgtgaggtatatctattacaattttatttgggcttaacattaatttttattaatgttattaaaatttaagttaattggatagttctttgctgtgtta

SEQ ID NO: 305245 - DNA, 1543 bp, Cannabis indica
cctccccttgatacaaaatagcttgatcgctagagaatagcgtttttaaccacaccatccaccaaaaagttaaagctacggttaataaaaaagaaatcacaaaccaaaagttttcttgacatgttaacaatagaaaaataagtactagatgtcttccaatccggaggccttccattgactgcaagtgccttcacaacaatcaaagaatccgacaaaaaatggacttgcttccaacttttttctactgcccaggttatagccaaaagaatggctttgagttcagcttctaaggcagattgcgcaggagagttccgagcattaacgaaccagttcccagccattctatcaacgcaaattgcagcaacaccaccctctccattagaccaggacacatcagtaaagatgacatgtcgaacctcctccccacgcaggccaaagtctggagaccggttttcagcagctatagggccagatgaattatccccaaaacctccttcgatattcttacacaagctatttaactccaacacagctttgtcaatccttaatttagccagaaccggattggattggattgactattttatgaacacccctataatagatagtttaaatgctaaacactacatcaattatgtgatactttgtcagtaattagtaattttttatatatttattaaattaaaatatttggaagtcaatattaaattatatcaatagcgatatatcattttttgtggtgcttgacaccttaaaatttagtatatatgtcatatatcatgataaataacaaacttttttaattcattgtattctgttatttcttacagttgtacaggttgttagtttttatccacttgtactctgtcttaacagagtttgttatgtttctgttatcagcccttttctttgtaatgtttctctatataaatgaaaggttcagctcataaagatttcagagcttttacaattctttgtgtccaattctatattgttaccagttaggaattgtattgataagcatctctttcatggtatcaggaagcccttgacttgcgccatctatggatcctcgacaccctgagcacacttcagcaacaccttccgctaccactccaccaccacctgcaactctgcatcaatggaatccgttccaaaattcactcaatttgtctcttatttttcgtctcgatcgcacgaactaccttgcgtggaaatctcaggtgattcccacggtcatcgggcatggacttgatgatatactcctcaatggtgtggctcctgtacaacgcctcatcaacgaagaaattaacccagaattcacggcatgtaaacgaaaggatcaactccttcttagttggctccgctcctcaatgacagaaaccattcttggttccctagcgcaacatcaatcgtcttttgatgtctggcgtgcccttgctcaaagattttcaagtcagtccaaggctcgtcttcttcaaatcaagtctcagttatcaacaatccaaaagggtaatctctctatatctgattactatgataa

SEQ ID NO: 305246 - DNA, 3295 bp, Cannabis indica
gtatggataaaatccttgaactaaaaagatctagagaattcaattctagcctcaaatgcttgaaggctagcaactataaatacccatcaagggttccaaattgtaaccaacatccaaaagccaaaagtttcaaactatcaacaagagcttactactttacatacaattctctcttctaagccaaactagtttcatatactaaatcaacaactactcatcaacatcactacttcactacattaccacaacaaaccattaaccacatacctacctattctaaacaaaaccaatacaaatttattctcaatccttcaattgtagagaaacctctactgtgcacttgagttctgccatttctaaatcagtgacaccctcgttagcctcttctgaatagtaatctgaattaatatcttcattttcattagcgataattaccacatttatctatttttgttagcagcgatgtcttgaggaccatttatcatcgcaacgaaaacagaggcccttatctcgcttttattgaatccattgtcggtgtatttttgtgtttcggcggctggtttttggtatgtgtctcatatgcactgaggtagaggaagtatgaaatggtggtgtcgtagtgcggctgaaaccagaaacttttggtctgtagtgggtggatgcgttcgactcttcctcaatgtcttggacgattccattgcctcatcaatatttcttggtcgttgcacctgaagttttgcgcggatagtgggacgaaggccattaatgaaagtactaagttgtaagctgtattttaggtgagacattatccagaggagctaggagtcgaataaattgcctcttgaacttgagtaatgtactctctttctttatcgccacaaattgatcatataaagaaccaacctgtgtatctcggaaatgcctcaacaccaatcgtttcatctcctcccaactcaagattgcccgctttttattctcaaactgataccaaaggagtgcgtcacttgaaaaagagataaacgctgcctcgacctttttttcctcgctgtaatggcagcaagcaaaaaatcactttgcttgcgtaatccacttgtcgggattttccccttcaaaagttgcattttgagttttgggagtcgctgatcgtttcgatgatgggggttgtaataattctgttccattggggcatccattattatgggatttctactacaattgaacacgcaggaagcaccacgactctcgtcctcaaacgaatctcgagtgtcatatcggcggaaggcttctcccacatgttcttggacgcttcttgattgcccataatcatttcgtggttgttcttggacctttcttgattgttcttgagcctccaaaatgagctgtagctgttgttgcaattgttcgtgaagctggcgactcatttcacttaccgagtcattaataatcgtcttgagggaatttgtgatagtttccgtgaccaattccagaactgattcctggaccgattgcatcgttgacttcaaagccacctcttcaagtgtggacttcgattgactcttctccactagtttcttcgacattgtccacgctcaccgcaccaaattgatacaatttcttagattagaaatccgctatcaagtatttgaagacccataatgaaattcctcaaagaattgctgtttatttatgaataatgatcaaattacacttagctttcgagaggatagtctctccaagtacacaacctttcgagagggctgctctctccgaaagaattctctcaatacttaattatctaccccttatctgagttctaatctcctatttatagatactaagcctgccacatgagcagctttaattaaactcaagtgatcaattcgaaaagacaactcaacctctccttaaaacaatttaaataaaactcaactaaaagacataagcctggcctttaggccctctctttctatggtaaacaaatttgaccaggggcgtatcaacatatgaaaaacctcgtcaaactcagtcaccactgtagcaaactgctctgcaatctcaggtggtgtcgttgctgcaactgttgcttaatttagctcaactaaaattctagctccttcatggctttgggttattaaagactttcccagcaaaagatccccattgaaagtcgcttactgatccctcaattggagtttcattacttgtgtattccaatttgtatgggtcatgcccaatttcgacagccattgaatgcccaatatgacattagaacttcctaatgccaagcgcaaaaaatcttcgacaatggtgagttgctgaagttgcaatactacccgacaacacattccctcaaccttgaccgaatctcccgaacccattgtgaccccataagcttcagttttggaatcgagaactcctaattttcaaaccagcttagtagaaatgaagttgtgagtcactcttattagagtcaccacaggttgttcttgaataaaccccctgatttttatggtttttggagcagataatccagtcactgagtggagggaaacctctacagactcattgacttcaaccaagtctaaaacagcatcttcaaccaagtctaaagcagcatcgtcatcttcattttttgtagaatccccatcttgaacatttaagacattaatctctttgctcttatgcatatgtccacgataccacttgctatcacatttaaagcacattcctttgtccttcttggcttggtgttccgattcagtcaatcttttgtactcaccgacttgctttcttgaactactctcgtactattccaataattaccatagcttgtgttggtatgatgcccttgctgggatggagttccagcaacatgatataatgtagttcccttaaatttggactcaatactaagggcttacttcatagccagctccaaggaattcggccttcagaacctaacctcatcccatattgtcttcttcaacccgttggagaagctactgatcacaatctcattaaggacgttgtccaatggcgccaaatactcaattgaatttcttgaagtattctttaacaatgctttcttgtttaacgccgagaaattggtcatacaaatttccttcgtgggtgctatgaaaacgcctcaagattaacagcttcatctcttcccaatggttcataggacgcctcttattttccatttgataccgcagcaatgcatcaccctcaaacgaaatcacagccgcctccaacttctctccattggtcagtttttgcagagagaaatactgca

SEQ ID NO: 305247 - DNA, 1741 bp, Cannabis indica
aacatttattatacttatactttctaagcccaaacataaaattagagtatgaaaattaattttacattactaatgtatgataggtatgttttactttattacacttagtatcatatttttttcttttaaagaaaaaattaagtttcttaataacatcaatatttagttgcaatataatatctaattaattcaaataaatgatatatacaacaaaagtacttaaattgtaataaaattgtacttaagcatctttttatttttgttagcagcaaagctacaaaaatacataatatcaacattttagcattatttatgtatgaataactattttgatatataataataacaatccttatattatttatatgttcacacattataaggaaaactaaaaagaaacttaaaaatataaataaataaataaaaattaatgtacattcacttagtggccttaatgtagaagtaacataagctttacataaagagccatattaagaggaataggtaagaaatctttctttttccttttctttcaaatgagcattttggttgccatgtcacccctaaataaaagtgaaaaagcctcaaacccataatatagttaacttaatttggacacaaataataggtaaggattacaaggagtattgttattagggatatgtggtaccacagacaccactatgagatagcgctttgtaaattgttaatatattctataattattaaattaaaatatataagacttaatatttaatttgtattgatagtagtataaactctaatggtctaataatattggacacaactagtaccttaaacttttagcattttttcggtctagaaaaggctttggtggcctttattgattttcacaaccatgggtggatgtacttgataaggtggggtggccctagtcctccctcaatttgttaagaatttcatgtaatatatgcagtgtgtagttaatctcatattttccaactaaagaaaaagttaatctcatcttaagaaattatcaaaatattaacatatgagtaaacatattcctaagacatatataataaaattatcatgtactattatcatgatctttttgtgtgatatattagtgtaaatataacctatgaataataatgtttctaaatgtaattaaaaataaattatttaaataatatatttattttttatgaaaattataattttattttgtaatttctattataattacaaaattattttttattttttttataatcatgtatgttgtacttaatattattggtaaatttttagagaatcctaaataatttacaataacgaaaataagattcaaacaatgtttaccatacatgtaagaaaaaataattacgattgtaacaaaatatttatattttatttttgacactgtatttttttttaaaaaataaataaccggtaatcctaaataactgtaaacgtacacgattcatgaaaacaaaattgactaaaaattcttttggatgccgaaacagagagagaggtttaccaaaatgacctatttttagggtgtgtatattgtaaaaaacattttatatgtatgacatgttacaaagggtcatcttgatctatttttcatcatttattgcattcagaagagtttttaagtctaattttttatttcatgattatgtacgttgtatttttctagactcacatgtaaatttttaaaaaattcagaataatttataatgttaaaaat

SEQ ID NO: 305248 - DNA, 1804 bp, Cannabis indica
aacgggatctcagattatgtaaattattatgtttaattattaaagtaaatttatttaataaagttttaattattcatatttttcaataaattctttgattagcaaaggtgtgcacagtatttagaaaacaccgtaacatgcctaatctagtagggtgttacaatttttatttcagagccgcgaggttgttcttcgaagattgtcaagatatgtacacaatcattatcagagataagcttgactcatggttcggtaagtttttgcgtattttattagttttatttgttatgaatgattagaaaatatgatagaaagcattttagtagattgatagctaaataggagcatactaagttcccatgtaagcggtagttatatttcaattacaatcgctacctgatcgagctaactcatgaatgcacgagtttgtcctatagaatggaagcctggcaaaaatcatgcaatttggttaagatagatgatactggtggcagatggagaagaatgggatccccctttttcacagggctaagttaggaactggggaagaatctatagaggtaattacaaaaatccaccgtagggtccgttggaattggagcaaaggttcataaaatatggaagttagaattcaatagctagatagaggaggagattaggaaattaaagcagtatggacttcctattctgccttcatctcaagtactagttgtgttgattccagagttgccagcagaaaaatttatggctggtaaccaaatggaactatccggtggaaaatataggatgcaaggacctttagttaggttggaaaatctagaagtaataaataccccttaagtcgcatgtattatagagtttgttcaagaatctcgagggactttgggtatttgtagagatgttaactctcctacgaccaaccttggaagaggtggcactgattctttggatgatcagaaaagaaaagctctatctacatcagtgggcttgagccagaagaagaggtttcgtagtaaattgggtcagggtggccttgaaggtcattacagttttccagaatgctaagaagcatcatctgggagagtgtatctgtaagacttatttccaatgcgttttactagggtactttaagaggaatttgccactccatgtttgggtattggccattacccaaatcaaagttgaagatagtttttcagtgatgtcaggtcagtttcttatcaactgttctattggactttatgttaattgactttagaactacacattagcatgtggtagtcagggtgattaataaagtggataaaccttgagatagatatgaaatagggtttggaactctgttacctggcggagaatcagttatctccaaagggataacttaggtgttatagtgagatttctctcacctagaaactcgagaccagactcctccttaaaggacacgtgtattcagatttccaatgaaggctgaatgtccgtgagagacttctcgaaatttagacctcgctcaggataaaaccagcgagatactgcaagtgcgacttaagtcgcaccgcgtaaccgcaattctcatcgtgcagggtaggtccgactcgcatgtgtcagaacatgtgcgggtgtcccctctatatctccgcgataagtatagagaccaactccctacgatgcagtttggtcccaacgacccaatagccctgacagaccaatataaattcgcatgtccagactttactagctccaacatgcgatatctacaaggggcgattacctaaggacgcagacgttccaaacgtactggcga

SEQ ID NO: 305249 - DNA, 1211 bp, Cannabis indica
gtaactaacataatcctaacaatgaataaaaaaatcacaacttagctaacttggtcattattgtaaaataaatacaaaaaatgtatattattgaaaaataccctattatttttatattgtttggatgctattttcctattattttatgtgattttcttattttcgtgttctcttataaaatatcataaaaatgcaaaataaaacatttgaatgtaaaagtgtacaaattttaccaaaatactactttgtgtaaattttccaaattttatagcatatttgaatcaaacatttttatattgcctgccaaataggaaagtagaacgttttccaagtgtgatcaccaatttaatttaacattgtaatagtgctatgaaagtgaacgtttatttctatgattaacagcattcgattttctattaatggttttaaggtacaaaactttgcacgagtgaccaataatgggtcaaacgtctctaatataacttacaactacaactgcctaaacgtttgttactaatataagttaattgccaggtctagtatagcttctacttggcgaatggctcgttgtttctcttgttgcttcattttgtttgctactgattcaggatcaagtccttgtgcagtttctgtttctctctgttcggttctcacctctcgtagcagtgcatccacctctctcacaaagtcgactctcagaagggcatcatcagaatcgagtggtggtcgtagaggcccttgatgctgattgaagagggcagaaacaaaattcaaagaaacagatagttagctttcgatgtgactactttcaagatgagagctatgtttttcattacttccacaaataggactgaatatatatatatgttttagagcatgttgcgaacgggtaaataagcaaaacattaacagagttctgtagttttttgctttacttcataccgtatcgatgtcaaatcctgcaggaacaaggatgctaaatggatcctcttgtgggaaagtgtctgccatgagcttcttacattctttcaaccacacttcatcgtcaaacccatcatgcatatttaaaagatcgttgagcagtctcatggcaggagttgcctcccttttcaaaatttctgtctaaaataccaagtaacattcaaggttttaataccaagtaaaattcaaggtttttagttaaacagtaattagaagaaaacaaatcaaat

SEQ ID NO: 305250 - DNA, 4656 bp, Cannabis indica
aagtataccaaaacaacatttcatagatgtaaaagattttaataattaattcatcataattttattttagtttgaacaaccatttttttctactgttttttctttagtaaaaaaagaaaaagagagaaaagaaactatgaatgtttagaaagttcctttatgaagttgtgtccaattcattccaccacttatattttgttttttttttttcgtctcttctcatgttatgtcgctagacttttcagaccttttaataatttgtaaaatattaattcagattagtttccaaataaaagatgtacattctctatagatctcaattgtttattaattgaatcgacggttgagagaaactcttgcccagctggtgttcacggttctgcttaactgtacaacgaagagactgacaataaaagttgcctttaaaacttatcagaatcaaataaataataaataataaataatagaagtctttaaaatcagatgctaattaatttcatttaagtgggctgcttatcggataaaacaagataaaaggcacatctttaccaaaaagtacccattaaatgctactacgtagagggatcatagaaggcattttggtcatttacaaatgcatgagaatatgtcaatttttataatggacgaaaaactagagagcgcattgaagccgagaccttcgccgcggtccattctgctccatcaccatgtgaccctctgctctctctctcttatttaaaagaataattttttttttaaatatttcacggtttacaccatatgaatacacaaacactattaccgatctacttttctattgtgaaaccacaaaaaataatatatgtattttatgaggggttgcagaagaaaataatattcaaaacaatttttacattattataactcggtccaaactgtgtcctatcctttttttccaattgttcgaacgcttgttctttattttcattttaaaattgggttcctaaaacgaaaccccaacaaactccaatcccttttacttattttttacttaatccctataccaagaaccgaaagcccttctacaactactgctacttctaccaatttcttattcttcttcttgttcttggtatgattatgatgtcatagtttcaatctttttaaatgagacagtaagagatgttggagcaaataaaaagacaaaagaataacaacaggggtttctatgttaaaatgaaactctttcatcaccaccataaacatggaagaacacaagaaaagataaactcttgctgtttcttcagattctacaaatggcttctatggctttctttgaccctttacttctttagctcttatctcatcacaaacaacaaaaacacaccctctgataatagtaatatcaatattattaacaataaactctcgtctttgtccacaacccaagtcttatcttcttccaaatctaccatagtcgcctctcgagcgctcatagagcttaccgatagcgattcacataagcctcataactacaacaataacagtggtaggtttccgtatattttaacctgtatttatatataatatatatttattgtatctgaattagtatttaatacagtattaatctttcttgttggcttagcagaggtattgagagatctgaagatttacgtttacgatttgcctccgaattacaacgcggactggctctccaacgaacgctgtagcaaccacttattcgcctctgaggtcgccatccacagagctctattgaccagcgatgtacggacgtatgacccttacgaggcggacttcttcttcgtccctgtttacgtttcttgcaacttcagcaccgttaatggcttcccggccattggacatgcccgctctctcatttattccgccataaacgccatctcatccgaatactccttctggaatcgctctggaggttctgaccacgtcttcgtcgcttctcacgacttcggctcctgctttcacaccatggtacacataaaagttttcttttttttttttttttacacaatcccatccaattaaagacctaacttttcaatctttttttctttttcttaggagaacgtggcgattgcggatggagtaccgtcgttcttaaaaaactccataattttacagacatttggagtgaagaacaaccacccttgtcaagacgtggagaatgtggttattccgccgtttgtttcgccggaaagtgtacggagaacactcgagaaagccccggctaacggccgccgcgacatctttgcgtttttcagaggaaaaatggagattaaccccaaaaacgttagtgggcgttattacagcaagtaagttatcaccataattaatctcgagcccttaatttattatctcattgattttgctattaaacccctaagctatttttgccctttaattttgacccttgagtatcgtttattttcagaaaggtaaggacagcgatttggagaaaattcggtaatgacccgaggttttacttgcaaaggcaacgttttgccggttaccagtcagaaattgtacggtcagtgttctgcttgtgtccattggggtgggccccgtggagcccgaggcttgtggaatcggtcgtattaggttgcgtgccggtcgtaatcgccgataatattcggcttccgttccctgaggctgtccggtggccggagatatcattgacggtggcagaaaaggacgtggggaagttgggaagaattcttgaacacgtggccgcgaccaatatctctaccatacagaaaaacctcatggaccccacggtcaggcgggccctgctattcaacactcctatcgaacaaggggacgccacgtggcaagttctatccgctttggtgaccaagcttgaccggtcccatcgtcgaagtgtggcttcgtcccaataaggatccgccacgtcactgtttagtgggcctttcttttgaattggtaatgggaaaagactattggcagtggagaacagctggatttttattggactactcgttttaagtcagggcaagacagaattgtttatggcaggtttgggggtactgtgggacccagcggagcagccatttaaagatttttcctttgggtaagaacatgtgagcccttgctgagttggcgcaatctggttggctccttttgcggtgtcttcatcgaatattaatcattgtatatctatatataaacacacttctgtaacttgtacatgtggtagaacagttttgggcaacgggtggaaataattgaatttttgtagtatacgatactcatatcgaaattattattgttcataatttcagcaaagaaagatcataaaataaataaataaaatcttatattagaaggtaacacgtcgattcaatattcatttctattttcttaagccacttgggttatgatcattagtgtgtacacaagtgacaagtacattgttaagtgtcattgggaatatggaaactatactttttccttttcttttctttttgtaggaaaaagatgaagaatgtgttaatgaattggtatttgccatttggaaaaggttaagcttttagtgtgaaaatgtcaagacttgtataatagagggaggggtgtgccagctgctatttgtaggtatgctattcaatatagggaagtttaagttattattgcagactatgtatctcttttaatatttataaaggatttttagcttttaattttttttttaaatagtgtacaataacgaaaatgattattttttattaatttttggtaaataattgtttgaaacatatattctattaattttttaaaattttatgaaaatataaaaataatcctaaatataactataacctataaaatcataaaaaatgtcaataaaaactcatttaaatatcaaaataaataaaaaattgtatcaaaatacttcttactacatatatttttattctttttattagtaagggaattagggttttcaaaatttgaaattgataggttgaaaatgggaacaagattggtggttctgtgggtggtcacggataaatatagtattagtatgagcagtttgtactgaaaattaacagctacatccatgatgttctgtaatatgaaaatattgatcaaagtgttattgtctctaattgatataattcatgatatacaacatcttatgatattttcttgttatgtccaaaatatacaatagatctatataaatttattaatactcgctccaaagaaaatatctacaattacttgaacaaaaggtcaatgaccacaatgagtattgtaaatatttataatctgcattcatgagcaactatttattagccataaaaaattcagggttgcctttaacatcagggcaatcaagcaaacaatttgaattcaagtaagtaacttttacctgactagccaaatttaacaatttttgtttgttggacaatacttgtggagttgaaaatcaaccctaataaaattgacataataataggttctactgataatcgagtgagaaaataatatctcttatatataagaactaagaaataaataacacctcgggtacggttataattttttgggaaattaccccatatatttgtttttttaatttttttttttaaatttacggtttgagtttctaaagtg

SEQ ID NO: 305251 - DNA, 828 bp, Cannabis indica
gtatcgctagctaatcgcaacacaacatatcgagaaggtgctaggcatcactaggtgcctaatagcaatactttttttaataataggaattgggtgggagtcgaggagtgaaaggagattaagtgggagtgtttgaggttagtcaatccaccagagtcacgcatatcaacttggtcaacatctgatggggttgctatatgaaatccttgaagcaatgtggccagagtgaggtgaagaacttgaagggcaaaagagactgcagggcacattcttctaccactcccaaacggtatcaactcaaaattctgtcctcggacctccatctcatccattccttctctcagaaaccgttcgggcctgaactcgttgggctcggcccaaacttttggatctcgttgtagctttgaaaggttgaggaggaggcgtgtgccagctggaacgtggtacccactcacagtacagtcttcaaccgattggtgggggagtgcgagtggtgcggctgggtataagcgcattgtttctttgataacagcttggagataaaccagcttgtttatgtccgattgctttacttgtctttctctccccaccacttggtctaattcttcttgtgcttttctcaacgtgtcttggttgttgacaagtagagccaatgcccatgtcattgttactgttgttgtatcagtgccccctagaataagagcctgcacatttgaataagtcttgtcacactcacacaccttattgtttatttttttctttctcaaacatatagtttttagggtaattagtaattttttcattgaactttgacacgtagtaaatcgt

SEQ ID NO: 305252 - DNA, 1700 bp, Cannabis indica
ttttttattattatttttgttgtttttttctatttgttactagtttgttttattttttggtaaaatctagttttgctctagttttggtttattatgttgttcagactttaatctgtttttacctctgattctatattttttttccaaattttattgttcccaattttagaatgctccaatgtccttagtgctagattttcattgatgtatttgtatgtatcgttttgtataattgtgatcatgattgttgttttgtcaaagatttatggtctcgacaatgtattttttccaacaatagaatttctttgcaataaagtttgtcgaagatcttaggtgtaatttttggtgaataaagtttttattagtttcagcacactacaaaaaaatttatctctaacggcaataaaatttgtcactaaaataaaaacgtaattataaattatatttttatattgtcacaataaaaattataaattattgtgattaaatgtatttttatctttaaataagaattagcatatatggtcagcttttatttaatatcgatcattgtttatatgatattcatacatgattgcagagtggttgatatatgctaccaacaatgtgttcctttagtttgacttaattgtcctgtaaagtttagatttttctacgtataaaactttcaaaaagcttcagccattaccttttttttttcaccatatcagatattatatgctcacttttccccgtaataataattggaccacttttttatttaaaagtatcttactttcgtaaaattgagtcaacactttatcaatatatctacttttttttttttctttttctgaagagtataattcatctgtggtcttcttgtataaattataattcgtctgcgttgcatgttgcatgttctttttagtcctttagatgaaagttttgacttttgtgttgttactaactagcttaatattttttttatatcaatttgatcattttctagaggactttggttaagattctcttatataacaaatatgtctgcagggtggagggatccaagaaagactttatactgtcgttaactcaggtgtcttacttgtattatttgtgattatgattattgattgccacgtcaacatatttggggatttgaagtgtaagttttctttttttcatatttattaatgtcaatatataaccataatttattagtatatatcgtctaatttttgttgtgtgatacatatacttctcatgtattgctgaaaattaatgattatatataacaatagtttttctgtaggttacgttaaattaaaattatgaatgtgcattatatgtgatctttcactataatgtaatacttttactcctaatagctaggtgtatgcatatttcttgatgctcattacgtaggtttattaaaaccattaatcaattttaagaacaaaatgaaagaaaatgaaaaccaaaataaaatattcatcaacgaattaatattccatgaggtcttaaacaaaatctgaaaaatatctgtttgacaagcatccttccccacgtgtcaacgaaatatataaaaaaaaaaatagatatattactatacttctatatatatttgagagggcagattaagaaagagatatttggaattctattagattttatgctaattgaaattttaattttgatatgtactaaattatatttct

SEQ ID NO: 305253 - DNA, 2990 bp, Cannabis indica
aatgaaattagacaaaaaaaaatttaaatccaacaatctcatagttcataggtattttaataactttaaaagttcaaaaaaatatgatttgatgcatatcaaagttcagcgacaaaaattttaattaggctatattaaaatgcgtgactgtccacttctacgtgggactgggtgtgcctactatatagtttggtcaaaaagaaatgtcgtctacgatggtatatttagttgaagtttgtttgggggatgactttgactcgactccaccctaaaaaagtgttccatacactttccccacaattcatgaaatgcagcctcttcccatcaatcactaatgccaggaaaatacacgtacatatcaaaataaataaaattaataaatatgcaaatttcatattctaaagaagaagaagaaaaaaaaaaaacattttaattttagtacaattaataattcaataaaaattgaattagttagcaatggataatatatagtataatatatagtaaggtcaataaatatatttcttttaatgttacttatatatataagtatgatattgtttttcttattccttacatgtgtttcataaatttcatcgtggattaattctttagaattaggaactttctaattgatgatgatcaggtcttctttaaatatgttttgttgaatacttttttataactttagagactattttaagattagtgcagttattcatcatatttttttttttttgttttgtatcatatattttctaattttaaatttaaatattcaaggttattagatattaatttaagaatgtcaaaaaggcacaggaactcttgatgttattgtgtttagtcttattatattattttttattagttgaaattagtgtcgattcttgttatttcttttgtgttctatgcattaattacctctgttttttaggggatagttattaacaaatgtttatctctctaatttttaaattattctataatattttattttgtattttataaaataaagtactaaatagtattttaaattaatttattgttaaaataaaacttaataataactcaataaataagtaatataacaaaattggttacgttttctgcatctattcatatcaagaattgtcttcaagttgatcgattatattaaaaaaaaattgtccaaaattgaaatgagagtcttatttataccattatagaaaacacaaatctattttatcatttaacaagaacacaacctaaaatagtaattgtgatttctatttattgtttcaaaaataataaatgttgggcaaaagtttataattttactgtacggcggaattttttacaaaaatactatctttttataaaacaacaaaacataataattaaaacaacagtagaataaaaaaacaaccgtgaaaacttaatacagtacacaacataaacttaacactgttttttcttgccctactttacttatccttaacgatcataaaggtgtgtagcttcctagctaggcctctctccttatgtgaaatttgaagcttcaacacattttccctagctagaaggtactcctaattcaactccttatacctttataaaaaccaccctttccaactccaatttcgcttcatcacactactcttcctcctccactcatatcttaattaattattactttactacaacaataataggaatggtacaagagaagaagatcgtagaagatgtctctggctggctcagactctacgacgatggctcagtcgaccgtacatggacaggcccacccgaggtcaaattcatggtcgactccgttccacctcatgagcaatacatcgacggagtagccactagagacgtcctagccgacccgaattcgggtcttcgagtcagaatctatcttccagagaaaacaccggaagaagaagctgctaaactacctctcttacttcacttccatggcggcggcttttgcataagcgaagccgattggttcatgtactacgcaatctacacccgcttcgctcgccaagctcgagcaatcgtcgtctctgtctacctccgaaaagctccggagcaccgtcttccggcggcggccgacgacgctttctccgcgctcctctggctcagctcccaggcaaaatcttgcacggagccgtggctcgagggagccgatttcaacagggtttttctaattggagacagctccggtgggaatttagttcacgagacagctgtccgggcaggaaaggaggatctgagcccgcttcgggttgctggagcgatcccggtccacccgggatttgtccggcccgagcggagccgttcggagatggagcaacctgagtctcctttccttacgttagacatggtggacaagttcatagcattggctttgccggtgggatcgacgaaggacacccgatgacgtgtccgatggggcctgcagcccacctttggaggagctgaagcttccaccgatgcttctgtgccttgcggataaggatctgattcttgacactgagagagagtactacgaggctatgaagaaggcgaataaggagattgagattctgatgagctttggaatgagtcacagcttctatctcaacaagattgcagtcgataatgaccccaccacggcggctcagaccgacgccttcttcgctggggtcgtagagttcatcaagaagcattagtgaaagtgaaagtgaaattctgttataacatcatataaatataattaatacttattatttttcttagtcaataaattaaagaagtgaaagtgataagtgaatagctttcatcagaaagaaataaaagaaaaagagaaaaggaattgagtgaataacgtagcgggccctgttagtatagtagtacttcctttttatctttctattggaattgtacgtgttacacaaacttaatatatgcaccaatggcacgtgttatttttggatatttatatatttattagtttttttttt

SEQ ID NO: 305254 - DNA, 959 bp, Cannabis indica
agagagagagttctatgccttagtgattccaagcttttaggtgcatgaatgtccctttttacatagggttaaggccctttttataatgttagggcttacaagctattacatagaaatgcccatagaaaataagaaagttacatcgtatatttaaaattgaaatagattactaataacccctaaagaatagggttgtcatttatcgataaagaatccctattttcgtgggtagtttgaactgttctgaagttgtaggagtgctaaggacgatttggaaggcttatgggaaaaaacacaagtgttggagcatgacatgcacgcttggccggccagccatgtttgggggctactcgatgcatggggttgtcacccttggccgactagctagaggtccggccaggaccctgctagtgtttatatatttctgtctttgttgctgaccctgatatcaggatgcacttgcgtcaaaactttgaagatgtggatcttgataagtctccatgatcttcttgtttgagtacaccgtgaaaccatgggatcttgaaggatggaaggttgcacgacactaacctgaccgttagtgctgatctgtctccaatgcatcttctaatttttgccacatggaggtgccacgctaggtgggaaaatattgggataatcattgcccccaagtccatgtctaacgtctatccagatagggacttttgcattctgtctggtattgtgacaccctttaccgtgcagatctacatggccaaatattggtctcctcagcttacgtgattttatgacaatcattaactttacgtcgatcaatgtgggagatcgtgtgatggctgcacactttcccatgtttaaactcttcactttctctttcacatgctgtctatttttgtggtattaactcccccataaagtttttttttttttttttggggggggggggggggtaggggggg

SEQ ID NO: 305255 - DNA, 2046 bp, Cannabis indica
gagaagaagagagagagagagagaagtagtagtggaggttggtagtgtcgtaggagaagagagtggagtagtggaagtggtatagtagaagagatagatagagaaataagaagagagagagagagagagagtggtgtgtaagttcaatgatgacttaggtgtcaggggagcccaattatctcaatcatagcttttgccccccaaataatgccagcctaactctgctcctccttgtcctctctttctacttatgtccttttcccttttcaatttttttccaaacatatatatttcaattttaactatatcatatcactactgtttttccattcttaaatcataaaaaacctaaataaatagataaattgactttagtgcaaggtttatttatttattattattattattattattatttctttgtctttttattttttaagtgattatttttcttatatttgtaaatttaattttggtatactaaagtatataatttttaaatccttaaatagataggagatgtactaaaacagttctcttttaatttttcttatatcattaattatatttttatctattaaaaatactatttttgtagcaaaggataatgtagaaacaaaaaaggttacaagctcttctaaatttatattaaatgattaaactattgttccataaaaaatatatatattatcatgggtaaattcatttctcccaatcttatggtagagagattcaatatggtagttctttttgttagtagaagaatagtaccaatactacatatgccaaagaccatttctagtaattttattgtaagttactaatttatattagaatcccacaaagacaattacctagaggaattacggatatcatgataaacataatcattattattattacttagacacctataaatcctaccaatatatttgagaaaaataaaaataaaagaaaaaggttaagtcttaaatggagtattaattaaaaatgagcgccccatctgtttttctaggttacattaataataataaataggaatccaatgaaatatgttacaaaatatcacatcatcatcaatactgtttgttttgaaactgaacacctaatgaaaaattgatatgatcgtatcttatcacattcataggtatagaaacacactatattaatagtgttttttttttaaaaatagggtaaactattttgatagtgttttagacttcctataaagctcattttaatttgaattagtcacgcggtactttataatatttacaatgaatatgtgacaaaaatatgaacctcaaagtaaaaaaataaataaataataaaaaaaaagttattctttactatgtaaaaaaaatccactatttgctttttcagctatgttatgactttcttgcaccttttttacacacagggcatgattcatgttcccatgactgtgtttcatgtcttttactgtaccaaagaacaaaacaaaagcaatttagttctcttctctaattattatattattattgagattggattctttcttctgaacccaaaataattttataaaaaaaaaaggttaattctaataaatgggactttttcatttttcacctagtatatattacatatttattgtcatgttatacctacttcgagatcatctttctctatattcaccaagatttacatcatcaattatttcaatttcaaacggtattattttaggaatatatatcaaaaatttattcacaataatatatttattatttatttcaataacgcgaattaaaagtataggaaaattctacaatgcaccccttaaaatggatatattgatgcacctctatctgttttagcatctgaaataattttttagttcaaattttttctcatggtcatgtatgttatagttatttaagtacatcctgcaaaattttaagaaatttggaaaaagttaaacaccccgaaaattatgttcaaacagtatgttgcacgcgtgactatttattttatacgcgtgtaaaatagactgtttgaacattgtttact

SEQ ID NO: 305256 - DNA, 5569 bp, Cannabis indica
gttatttatttattttaaaaaatgatctttgtaattttttggtaaataatttttcgtatatttatgtgacaccttaaggtgctcaatatcacactaatgtgtggtactaattttcatattatttattaaattaaaatttataggagttgatattaaaatacattaataacggtatgttgttttttgtggtgcttggcaccttaatgtaactcttatattttcgttattaatatgtttatatcttcattaagcagtgtgctgccttttgtggtgcttagtatcttaatgtgacttttaacatgttcattattattatgtacatatctttattaacttcgattaaatttttaaatttatttctttaaggtgttcaataccatatatatatagtacccaataattaattattagttttctgaattatttattaaattaaaatttttatgagcaaatattgaaatgcacaaataacaatgctaccttttacaatgcttgacactttaacttaacatttctactattaatgtgtacatatctttattaactttgattcaaatttttttaattatacaaaagttttgcaagaacatctttagtgggagatgtaaaatcgtactggcaaaaaaaaaaaactttgttatgtatttgtattaatttttagcattgtgctccaatccaatgcttaatggtaatttgtaaaacttgatgctaaatataatatttttattgcaagtacaaaaataataactttatcattacatttttaatgtaaaataataaaaatagaaatataaatagttcataattaataactgttggtatttatactaataaaataataaaaataaataataaaattgtgcacttattatgatgtaaattttgtattataagcaatgtcgtgtcaaatttggcataatatttgttgtgctaaatttgcataaacttttggcacacgatgcaaattttaggatacaattggagcataatttttgctaaattagttatattttagctttgtatcacttattaatttgcatctctattgaaaatgctctaaggtttcctggttaaaaactttttaatttttagattttttatattgtttataattaattatttttattaatattctatttttattaatttatttagttagttttttttacagtatccatgtgtgagatatacataaatattttttaaatatgtatagtttataatttaattattctctattattaaaacttgaactaaatatattcattttgttgaaatgaattaagtaatttaattgattagataattataaattaaatttttttaaaaatcaaaagtaatttttatagtaaaatttaaatggaatgttgtatgacaatacataagtacaataatattttttaaaaaatattttatgtatacgttatattggattttaaatgtgaaaaaaaaaaaaattatgcataaattaaattttagatttttttttttactttttttcgaatttatagatttattaattttaattatttcaaaaaattttaaaaatatataattttatctttaaaataaataaacattgatacataaaatatttggttatcaaaattatgataactttctctgatacgatttcattcatagatgaacataatcatgacgtagaattggaggtgaaatatgagtggataccttcgatatgctagagtttttcggggataggacataacactgagttccataggaaggaagtgactaagaggagcaggggaaacaaattgggttcctaagcagaagaaggtggagaaggagaaacaagtaaatgctgaaggttttcaaaaggtagtgaaaggcaaaagagtggtgatggaaaaggaatagaggagactgcagtgaacaacaggtttgagtctttaggaactgagtagagaaatttggctaacattggagagggggagatcctctacttccaatggatagatttctttgctggaatgttagagggattaacaacctataaaaacacaacgaaatcaagcaattgatgtattcgaagggtgttggtttggttagtctcttcgaaactaaggtggaaaataagaatatggggcattgtgcactagtttgtttcaaggtttgtcttttttgaataataactcttggttagacaaagggagcataattgttgcttggcaacctaatgtctacaatatcgacatcagtttttgcacaagccaattaaatcagtgctatgttcattcgaagcaacatgttggaaaatttcatgtcacatttgtttatgggtttaacaatgaaaaaagaagagaagagctatggacattttttgaggggctagcacagaaaattaatgagccatggctgatgtagtatggaggacctgaaatattatgggccatttctcacatggaacaataaatagaagaagccggatgataggatttattccaaaatttatcgtgcaatgatcaatcctctttggatgaattccttcccatgctctaaagttgtttttctacctcaactgaattttgatcatagccctatcttggtgtctatataaaaggatatgagttttggcaaaaaaccttttagttactacaatatgtggaaattggctcctaaatatgaagaacaagttgtagattcttggagaggagatgctaggggtccaaaatgttcaaggtaattaccaatttagaaggctgaaagaaatactgaagaggataaataaggaaggattttttgagattcacaaggtagatctactagctaattctacacttgcagatgctcaactgaaattgaggagggatccattgaacctagaactcatgaagggggaacaagaagcatgtagccattaaactgaggtgcacaaggcttattctatgtttatctcaaaaaaagccaaggttaattgggcaagatatggagatgagaaatctgcattcttccatgcttctctgaaattgagaagaattcacaataagattttctcgattgaagatgggtttggtgtatggagagacaatcaatactgggtccaaaaagccttcctagattacaaccagagtcttttggggacagcaatgcctaacagaaggaaagtccacaaatcagtgattgaccttgggcttaaggttaatgacactcattgaaagattattcttgctaattattctcctaaagaggtgaaggatgctctgttttcaaaacctggtaacaaggcccctgggccagatggctctgagtgtgcctttttctaggataattggcagttagtaggatcagaagttgaagatgttctactgtccttccagaacactgggaaaattttaaaggaaataaacaccaatactatcacactcattcctaagacagtatgtccaaaaagtgtggttgattttagacctatatcatgctgcaatgttttatacaagatagcaaccaaggtgatttgacacagattaaggaaggtgttgcctgatctaattgtagaaaaccgaagttgttttgttcattggggatatattgcacacaatataatggtatgccaagatctggtaagattgtacgggaggaaaaattgcatgatcaagattgatctaaaaaaggcctatgataccattgaatgagactttttagaggatatgttgattgcttttgggttccctgacacgttcatacaacttgtaatgtgttgtatcaggactctaatgttttctcttctcctcaatggctccatgtgtgggttttttgagaccaagagggggctgaggcaaggggaccccatgtctcccctcctctttgttctaggcatggagtacctcactaggatctttaaaaagattgggtaatggcctggatttaaattccatgacagatgcacattgttgaagataaatcatatgtgttttcgtgatgacttactggttttcagcaatggagattttatatcagttatggtgctgctcaaaggactgaaattattcacttcaacatctggtctaactccaaatgctcagaagactgccatttactgttttgggatgctagagatggaagttaatagaatcatagaggcttctaacttctctagaagcttcttgccttttagatatcgtggaatccctacatgctcaaaataaatctctaaagaggaatgccaagggctacttgagaagattgttagcaaggttagaatgtggagctctagaaatttatcttatacggggagggtaacaataattaatttaatgctcttatccattacatacctactaatctcaaatcctaatcttgccaaagaaattgcttagagatattgagtccatatgcaggtcatcctatggaaaggagtttaggaggagctagtcccggtcttgtggcttgggaaaaagtttgcttgcccaaaggagctaggaggaatagggcttcgatgaatattctgaattggaatattgcagctattggtagatatgtatgggatatagctagcaagaagtattgtttatttgtgaaataaatgcacaatatgtatttaaaggatacacagtggtaggagtaaaaggctcctgctgattgtagttggtattggaagaaaatagttggtgtgaaaaatagattgaaacaataagctaatctttctggatttgtgcagcagcaatataaaatacataaagggtatcaacttctgttcaacaacaatgagaagattccatggtgcaaaagtgtttgggataggttaatcattcccaaatacaagtttatactattgctggtgcattgggaaaggttgaacactaaggaaagaattggaaaatatgaacacaacatagacatgacttgtctattgtgtgggaaagaaaatgaaacaatagagcacttgttctttgattgtgattacagcagagtctgcttggaagagattaaaacttgtttacaatggagatcgaaggcaatcaaatcgcagcagcttctgcagtgcatcaataagagcaaaacgctttcagcatctcgaaagagtatgctgaggacagtaatgccaggcttaatctaccatatgtggagggcaagaaatgatgtatattggaacaaatatttttgcaaaacaaggtgattgtgaaaagaatacaggaaaatagtaagctgagaattatgggagtactaccaagaaaaattaaagaggaggataagcaatggcttttacagatgtagaagagatactcatgatttgtaatttcattgattacatccttttttgatagaaaatgtaaaaagaatagtcagaggtaaataacttattttgagcaatacaaagattcttattcatcaaaaaaaaattatgataactctaaattttatatttattttcctatggtccttattgtaatgaccgctttagtaatttcgattagtaaaggcaattagcactaatttatgatatttttgtaattatttatgaatttgattatttgtgggccccattgttagaaatgggtattagagttataatttctatattccggagattttattaaactctagg

SEQ ID NO: 305257 - DNA, 542 bp, Cannabis indica
aaataaaaatgacatagtaacccgttttctgtgactttaaaatatattttttctgacacttgtattagttaacaagaaaaaaaataagaaaaaacttaaaacatggagagtgagaaaaaaagaaaaaaccaatgtaatacctggtacttccattttatcaatggacaaggttacaagtgtcaagtggttagagttggaccattgaatctaaggtttggaaactttaataaagagtttaaattgagtgaaatgtgtaattaaaaatatataaaaaaaaattgaagtgagaagcgctgaaaaattgaaagaggagaaggctagtagtatgggtgtgagtcaattctaaagtagttgaaaaaattgagattaagaaattttgtttaagttgacaaaaagggttttaaaatgtttcaatgttgagagcgtatagggaaaaaaagcaaggcattagaattatgagtccattatatacatgggagttttatttgataaatacacttcattattaaaaaaataaacataaataatttttaaaaattact

SEQ ID NO: 305258 - DNA, 2174 bp, Cannabis indica
tagttatatatatatatatataaatggaaatgtggcatgtgatgactgaactattttgtctcctggatagcttggaattaattttgaaattatacatatataattaacattttaagacaaaaaaaaataataataaatttgatagtgatatatatagggagctcaatgaaaaataaacctcgtgcattaacttttgcatgtgctgcaaattcatttttgcgtgtgaatacaaaccactaattcgtgttttattataccttttctttttggtctaaataaaacaattaatttaataaaaaaattaagtaattttaacctataaatatattgtaattattattaataaccactgcaccaagttaaatcttgacaatctgtaatttaatataaccaaatgaaagtaatatctcactttcaactctcaaaaagaaaatctcacattcagaaaaagcctttgattggctgataatatatacaatatataaaaaagcttagccgcaaagttaaagtggtgaatctcacacagcagcatatatataattatatatatattgagctttatataaatagccgcctagtgtcaaattacaaaatatatacatgcatatagattctgtaaagagggcacgcatgagaagtttttgtgtttgttagttaattaagttataataaatttcctttttcaggcatgttcaggtagctccaagtagtaaagtagtagctatatatatatatattcttgcaagttgctaagacaaaaggaatcaaactaaaatgaaatggcagagatcatatttctaatgagtcaaaacacactcccatgtgcacccgaattactcttttacttctttataatatcaagaagaaggacaataaataaatttatttattttccttctcaactatatatatcgtttttgtatatataaattatatattgatcataacttatatatatctctgttgcattattctattcagtttggacggtttattcatgtggttatatgctatagttacaatacaaagatgtatatattcaactaactcaaaattaactataatagaatttaatagcaatattaaatttacaaatattagttaagaattactagtattctcaaaattaaatttttagatgcgccatttttgcattggtaccatatagtttggggaaaaaaaataaagttaaagctaagtggcatacttttcttaatttttcatagtacccaagcctacacttattacctcataagttatattagtcattatcatcacataatgacaacagattgagagaatttttttttttttaaattatagtactgaacagctattaattaggtcttaccaaaccctcagactatatagaatttcattaaaataatatgtatttaaatatatgagtttcagagtttgctggctgtactatatatatatgtatatgacatttggtctagcttctagatatattttgttattaaaaagatttaaactagtggcaaagggttggcaaaaagctataaacacttgcaaaactccacttggttttgtcattcgataggacaaatactttgtgttgtgtatatattaaaaaatatatttaattatgtataatggaagaaacaaaaaacgtacgtacaccatattagcttggtcaagcctcaaattcatagtctaaagtaccaacttaattatcaaaaaaaaaaaaaagtaccaacttgatactatgaagaatatactaatatattcgcatcgatttgatcaccacaataaatatttataatattatcactcttgaaaaaattatgtatatcttaagaaagagaatggttaaaaggtacgatgattttcgtatttttcttgatgtcatattataattagtgtaattaagtattgagtctcatgtagtttaagaaaataaattttaaacaatatcgttaactaattatgaaacactacctataaaaattgttgagcaccagtactcaatgtactcaatagcaatggtcattaagaaatagtggcaatatttccaccacacatcggaataaaatctcctctttaaaaatggtgtcttagagcatctccaatgtagatgcaaataagtagtactgaaaagttaaaatatagcttatttaacaaaaattgtgcttcaatgatatgccaaaaaa

SEQ ID NO: 305259 - DNA, 2467 bp, Cannabis indica
gagccttctctctctctataccttggccgcccactctctctctctctctctcttcttccttaaatcctggtaaaataatttcccacatgtaacccttcaacaaatcttaaaaaaatcatgatattatgggccaaaagtctatttttaataaacacaccttgattactatcgactatagaagggagcacttctgacagtctagaacagatcatctttgagatgcatttatagactgtattacagcaggcaataggtctataatctttagcagaggaaggattaatcaccttttgaattaaagatatgactgtcttattcaggtcattaggaagtcggccactagcaaagaagtctaacaccgcagtggagacatcgtcactaattttgctctaaagacccttataaaagcctgaaccgaagactagggctctttgtagtatgaatactgaagagggccttcttgacatctcccttagtgaaaggccttatcaaattcacttgttgttccaagtacaaacaattaccaaactttatacaagcctcatcaatagtactactcccagtgctcttgctacccatagaggtttcaaaatgcttgacaaagtgattaactacttcctcaaaatcgtccacaattgtgtcccccgtagtgaaagtagtaatttcgttttccagtcttcttttcctcattactacatgaaagtagctcaaattctcatcactaaacttgatccaattgaccttgctttgctgactaagaacctcagccattctttcttttgctgtcacaaaaacctactgtttctctttgacctattgatgtaacacaacatcagtcgagttcaaggctgcttcttcttgcacattgcaatacatatcctttaccttcctataatcaattgcaacatcccccacttcatgcctactaaacacttttagcgcatgtttgactctatacatcctctgcattagactttcaagcccagtaccagtcacttttttattctagcagtccatcactctctgttcaaagccatggtaagttggccaatggttaccaaatctgaagggttttatccctacattatcgtgcacctgattccggattaaacaaaagcagtgatcagaaatgacctcccatttaaaacaagcatcaaaattcaaaaaatcattcaaccatatattgttcataaagactctatctagcttggaaaatattctatccccaacttcatgcttgtttgtccaagtgaaaaaggatctcgagctttaaaactcgtcaacttgacccaatgcgagctaagcttgagcatccacaatatctctattttggataggccttcctccccatctgtcttgaaagctaaacatggcattaaagtctccaaaaatcacccaaggctctttttgactacctagactcgctagtttatcccaaagatccttgtgagcctccatcatattgttaccatacactgtcgtaactaagaaactctttttttgcccacaaaccttcaccttacaatgcaccagctgtgaagattcattaagaatttccacttacacaaatttatcctgccaaactaacaatattcttccagagattacactactagaataagcattccaattaggaaagttatttaaaataatatcttgaactttttcatgtttcacttttgtctcaaacaaagcaccaaaacaaattttattcatcctacacacatcaagaatcgctttttgcttttttttttattcatgcctcccgcgttccaccctatcatattacttacttccatcaagagttaactttgtattgggagccataacatcatcagctgttgtagcttgtagtacaacatatccattgctagaattaacctcatttggagcttctttagtctactttaacctcattttatctcatagcttttttcttgagagtgattccatttactaccagcattgtccttttccaaacccctctctttatcctcttctgaacttcaactttcttttgattagtttctgctgtaggagtgttttctgtcatgcctcctattacatagtgatctttttcctgttcttttggagcctcattacctgccatcgatttcttcttccacacaactttcttcttcttgttacatttcactactgaatgccccaaacctgtacaaactacacatttagttgggagccattcatactctatcccttgttccaccaattgctttttatcattgataaatgaaattgtttttggcggttcatctgagatctcaatgtccactagaacacgggaaaatttcaccatagatctttcttgagtcaccttgtcaatcatatttggcttgccaattatgctaactaaggcactaagattgttcttttcccaatattgcagccctaccctattcaatctaatccatacaggaactgaagctgtgcagaagatggttagttt

SEQ ID NO: 305260 - DNA, 1456 bp, Cannabis indica
ggttttttcactaaaaaaataaaaaaaagtatataaaatcaaaacattagagagtttggtcgcaaataattcttctttttaatatttaagcttggcggggaacttcccctcgatcctccccagcacacatttcaagaaaaaaagtacaccccctcaactttaattttgaatccaccattacctcatatcaaccatgtaccatgcaaaatgaggcaacacttaatatttaccacctctaagtagttggactcctaaacataattgtgagggcttaggctatgtttcccacactatcctgcacaatgacagccgcaacagcatgcaattctctaaccattgcatcaacaaaaagagtatgagagtttcttctagttgtaattaatgccactaagagaataaagagagagcattgccttcctttatatagaaaaaatgaaaaagagaatctttggaaaagcaaattgttgtatatatgttaatagctaattattttcttgtgcagtttctttgcataaaaataaaggctcccatatgagagtttgctaattgtggcaaatattcagtaactagttttttttttttttttaaaaaaataaaactcttctaaaatggggtttggtaattctagtaaaattactttgttttatctaaaataaattaaatattaataaggaacttttttatttttctacttcaaaacaatttttttttttttgtattttaacggaattctacatagaaacccttaattagtgctgcaacttaaattgtaacaaaagattgtacaaaaacttctattgtaactagcgttacaaccattttaaaaactcaaaccgtaaatttaaaaaaaaaaaacaatatataaagtaattctccatagtaaaaaaatggaggctaatatatgtattttaaattttgtgttatgtttatatgaagctctaatttgttgctggtggtataaacaacaaattcaaactttttttttttcacaagaacaacaacaaatttaaactttgggttggaagacattgccaaaagacaaaagaagaaaaaaacattgacacgtttcataatttgaatggttgttgaccaaagattggtgtcttttattgggaaattaaacacgtggctataaacccaccgacactcattctctggctggacacttcagtggactggctcatatttattcaccttaaattcaaattatcatacattttctatttctattaacaacccaacaaatgattactgtaatgaacatgttttttttaagaagtattctatatcctatttttttattattatttttttaatttacgatttgagtttctaaagtagttgcagcgctaattgcaatagggatttttatacgattttttgttgcaatttgagttacagcactaattgcaataagaatttctacgtaaaattctgtaaaaatcaaaaaaaaaaa

SEQ ID NO: 305261 - DNA, 2417 bp, Cannabis indica
attataattaattatcaaataaaatggtcacttaacttatttattaattagatcttacaaagtctcttaattaacaaataaattctaaatcctcttttcttctcaaataagcccttccttggtgaaaattcacaaaaaagacatagtcttatttagaattctaattaattaattaaaaccaattaattgagactataaaataaaattataccagttagtgcagggactatggccctatgtaatcaagctttcaataagtagatatgaaatttaccaagtaaattttttaacttattaattcttcctgactctactttggatttggaattgaactcttaattacatagaacactttattgccaaaaaatagacgcaatttaaattacccattatttcgatccaaatagtcaaagatcgtctatagatgatctacatcgagtagggacaaatttaccattctacccttcaatgtattttatccttaaaacacttagctatttgtaaatgatatttctataaactaatataattattaaaatgaggcatcaatcatttatcgcgttaagccaagcttgaaggaaatcatcgtttcacttctagaagttataaaagctatatattccatatctatgattagcgctcccactcaattgtactaccatctttaacgaacaattaaagaacacaaatactgataaatcgtgagactacatttaatcacataattaatcttgattactctccactaagtagacaacacattaatcatgaataacaatgtgataatgatttagatgaatttataaataaaaaaataatcatgaaacaaatatgtgaaccaagcaatacattaagcaagtaatgaaataattttgtttctttaaagataaatgaatattcaagatttcattgaaatagagttttagttaaggtataaaacccaaaacgacctaccattctttggagtggagaaagtgtacacagaaagacaatttgagcaccacatggaaggactagatggcttggacaaatgcataagattgtacttgaaaaaaatcaattatgagaaatgttcaaggattcatagtgaaactgtgaggtattccatcgtgacctaaaacataacagaatcactaaactcggaaaatttagtagcaagggagcttccagttacaacattgctagaatgcatgagagcattagtgcaataatggacacgtaataataggacaaaagcacaaaatacatttactacattggcaccccctgcagaaaagatgctactggaaaactacacatactcattaaacctggaggttagatctagatttttgcactttaaattcttaaacgtaatcattttggggctattacagttttttaagcatttttgtagggttctcccactgttgttctctatgtttaataaatgttgatttcaaattacagaggttaaatcaaccattgattatatgtttgaggtaatcaaaataaaaaatcatggacagtaaacctcaaagaaagaacatgcacatgcaacaggttctaaattgatgaaatgccccgtgaacatgctgtggttgtgttgaaggagatgaacatagacccataaaagtactatttagattactacacaaagaacaattggctagcaacttatgaaggaataatatacccaataggacaccaaagtgagtgagatgtaccacaaaatgtgaaagatgtaatagtctttcctcccattgaaagggtgaaatctggaaggtaaaaaaagaaggatggaagctggttgggaaaagaaacaacataacaagtgtagaaaatgtggcaatatggggcacaacaagagaaaatgtagtaaaaggtaatcaaaattaaaaagcaaaaaacaactaaagaacatcagtggaacaacgacgggtatactagacatacatttgagcataggatactaatgaaaagaatttgaatacaagtttcattatttttctattactattaaaaagtgatggcaatgatatgcttacatgcattataagatttttaaacaattggatactatatggaattgaggtatgaatgatttggaagatgtgtttgttttttattaaatgatttcgtcaatatttaaaaaaggagcaaaaccagaatgttaaaaaaatgttataaatatatatgggaaaacaacaataaaacaactttaaaccagtcataaaataatgataaaataaacaagaaacaaatatatatattcaagcataaataatccaaaagaatcatgtttaacatgaagaacaagaaaataaaaatacaagaatcctacataatgtccaaaacacactaaaaaaaaaacgaaaaaaagaccaacaacatgttgggttttgtgccctaagtaaaacccattacaatctgattag

SEQ ID NO: 305262 - DNA, 1464 bp, Cannabis indica
agagagagagagagtataagagtgagtgtgtgtaccgctagcaactccaccactggctccatcacggaatgttgcatgataaattgctcttctagccaactctgaagcttcttcaattgacatatcatatcggtatctgagtgtggcaaaaggacaaaacaataaataaataaacaaacgttagagctagaatgtcaagtacgatgaataacaatcataacaataagaaaaaggtgaagcactaaaattacaaaataagtctccacacacatacacacgcacacacaaaacctaaacaaggaagagtacaattataaaagccatcaaaataaagtgttaacagctagaatttcttgcaatcattgcaggaaggtagtggattagtttctaattcatcaaaataagtttttgcaaattcaccacaccttattgcagatttcagatctataataatcttcaccaattatcttatccaggcattcattgcttataggttaggtgttacaagaatcatggataattgttactcaaaccatagcacttaattgaaatatacagtacttttgtttaataaagaaagttccaagccaagaagcttccacattcattaatgtattacggagcactgagaaaaaatagtagggggaaaagtacagacccatcatccagtacaccatacgcgtatggtgaaccagatccaactgaaaatcgtgtcccctttaaccttcctccttcactgtccacatagtatagcccgggaccctgcaagctcacaccaaataagttacacttgtcaaattaaaattgcaacatggatgtgttaagatatgcaagtaaaatggaatatcatcatgtgatattaacattgtcattaccgtttcatcccatccagcaatcatggttccaacagacagacccatcccacggtaagagtacagaatgttggctaacagcttagatgctcctgtgactgatattctccgcttgtttgccaattcgtgcagccggcactatggtgccaaacaatatgtctattagtgaaaatgggaagcacacaataacatatgaagatgcaataacagaaaaatgcaagaacgttagactatactgctaatagtccaccgccagagaaagttaggcagatagtagatactacacattagtgtaccaaccaataacatcggaaaacctaaatgaagtaataaagactatatccatctatatatattgttaaataagtagaagtcagtcaatgtacaaacccaaaataaaagataagaagataggcaaagcaatcactagctacggaatcagttaccagataggaattcagtaacattatattactaaacatactgctttttctataccaaaaagaaatatgataaatatagagctacaacctcaaacagcaatcagcaagcatacatgctacaacgtaagtttttaaggtttttttttttt

SEQ ID NO: 305263 - DNA, 3417 bp, Cannabis indica
atacgtttaattttccacgtaaatcttttggaaattgattagtagataaccatgcacatgcatgcagggagtaccgaatacgtagtaggacaatgataaatgtgacttttcataacactactaaaaagtattatgataaatgaaacaaaaatagatttggatcggcatccgatctaattcaatatttacgtcatttttattaggattgtgcatctgatctaatctgatctaaaagtataacactttccataggagtaatgtatagacaattttacgtcatttctattacggtgggccatctgattcaatccaatatttttcttctaatccaattcatttcaattaataattaaatttataaaatcatcatccagtccaatctaattactaactggatttttttctggtaaattggtaaaagtatattaatcacagtcagtctacaaagctataaaattacttacaaacccactctctatctttttctactcaatttctttaggttcattaatttgatctaacctattgcaaacaaaatgcataatccttctatgaaccacctgaactgtaggtaaagagtagtgatctcatacaactttatttctactatgacaaatgcaattaatcaaagcattaatgacacataaacttttttcccatgagaagctttacacttttgaatccatttcataacgtgtgacaactctattttgtcaataccagctagcattaatagggaaattataatcccaccaatcttggtgcttgagatacacttctttcacccatttgacccaaaagttttttttatggttacaactcgaacatgctttccgttaattgtactaaaattccaaaaagagcaatgtctttgaacctaaaaccaccatcttttcttggtttacaagtatctccccaagagacattaccaagaccatcacaagaatcaactcccttccacaaataagctcggcttagataattttttggatcacagcttttggaaaaataattatcttggaccaataaaagcttatagataaaatagttgaattgataagcacaatcctcccaccatatgaaaaatttctagaactctaagtacgaattcagctagtcatcttttcaacaaggttctcacaatcactcttggagattcttttggcacaaattttcatcccaagatacttgaaaggcagggtactcttttggaaaccagacatatcaacaattctatcaagagtaatagaatccatacctgctccataaactgctaacttcccatggttagttttgagaccagatcaagctagagaacaacttgaagcctcttaataaaagagtggctgacttgaagtctcttttacagaaaagtaacaagtcatctgcaaagcaaagatgtgttaggctcaaactttgacatctaaggtgaaatttgaaatccgacaacttctcaattttggctataatcctggagagatttcataccaataacaaagaggagagaggacattgggtcaccttgcctaagccccctttgagattgcaagtaaccatgtaaggttccattaatcataaaagagaaccgagaggtagtcacgcaaatcataatgagatccacaaacttttaaggggattttaaggcatctagcatttctcaaagaaattctcaatcaaaagtatcataagctttttgcaaatctattttcaacatacaagcaaaaactaagtagacttagcagtcttcctgtcataccctcttaccatatcctgacaaatcatgataatatgaataattttttgcctttagcaaaaccactttgattctttaagatgagatctggcaaaatttctttgagtctatttcatatcattttagtggaaattttataaattatattgcaacaagcaataggtctataatcactaacagattcaaggctaatcaacttaggaatcagaataatgatagttgaatttatttctttcaacaagtttccagtgtttaaaaaggacaaaatagcttcagagacatcctataatgacccaagtatctttgaagaaggcactgctgaaaccatctgacccagggactttgtcattcgaaatggaaaaaagggcaagcttcactttcactgtattgaactcttttagcaaccaaatgaactgttgatccgtaacaaccagactataatgcacaattttcttatttattggagtttcattaatcactcgagaccccgacaagttcttataaaaatcaatgaaggctttaaccactttatctttctcatcaacaccctacaactagccccatctttaatcaaatagattgtattcggcattttcctttttcgaatacttgcatgaaaaagcttagttttttaatcaccatcttttagtatgcaagcctggctttttgactcaaaaagaaaacgtagttcttgtgaatctcttgatatctcgcccgagaagcatgttcttgttgtaataacttaaaatttcctggatgtcgctttaaagaagtttaattactagtgagctccatgtaagtctcactatcttgaacttcaatattacctctacccttcatgttaaactctctaagggcaattttcatcctttttaatctatataccaacttgtacataggagtccctcacaagtattgggactaatttttaacaacatcctgaaatgatacaagttgcgccaaaaataaatatacatgaaaggtttcctggtattatttatcattggatgcaccgaaagcaacatgggagtatgatcaaagtctccctctggaagaaaagtgacttcagttgtttcaaatctagagatcaaaatattgtttgtaagaacacaatcaagttttgaaaattttatgccactgccaccttatttattactcgtagtgaaaattatcattgaacttaattaacatcctttagaccataaaagttaagacaattttgaaaaggcaccatttctttggcatttcctttataatttagcatctcctccattgataaagctgagttaaaatcgccacaaactatcaaaggatctttattatttgctgtcatattattcagatcatttcaaagtccttgccgactcttgttgtcattaaatgcatacacaacagtgacagcagaaccattcccttttttcaggttcacataacaatggatccattgacttgttcctcctttaatgtccacataaaaactgttaggactccaagcaattacgattctttcatttggatgatgagaaatgttggaagcaaaacaccaaccttgaaacatattaaggtataaagctctcaatttggagactttaacctttatttcgagaagaccaacaaaactaatattcttgtgatggatcattcacgtgacctttttgtttatt

SEQ ID NO: 305264 - DNA, 2334 bp, Cannabis indica
caggagcacccggggatttggaatctctgttattgcgggacatcaggtaagatagtagttagcacgtagaattatgtgcgatggcgcttatattgaaaatgatatttgtgagtaatcagtaactggaattagggttattatcctaacatgagcggtttaatttcctagggttattaccctagtgatatatgttgtatgaatgctatgccatgatatatatatgattatataaatatgtaagatttagggttatgtattcaaggcataactaggttagactcggtaattagaaccgagaggaaccgttctaaggccttattttaattagacatgtgagcgcaacacgtaggtttacgctacgtagatataaaacgacatgtgagcgtaacatgcaggtctgtgtcatacaggcatatgtgaatgggattactggttatatagtgtgataaatgtgtttatcattattttatactgtcttgttgggcttggctcacgggtgctctactgtgcaggaaagggtaaagctattcttgatcagccatgagtgtaggagctggatgaagaatgtacatgtccggccacactagaccaagcgggttggggtctaccagttatttgtttttgatacattgttttgtcgcttaggtcggctgaaagaaaaggacttttaataatgttttgtaaatatttttgggttcacgggttttgtaacttttggattataatgtttaaagtattagaagtttatttttattcaaattgttattacagtttaaattttgcgcccttttgttagtaatccaatttaggggattaggctttcttaagtatattgggtagcgtgcctaattatctagggcgttacatatatgttctgctcttaatagattttgtacacattaaaccataaacatgaaaactagatgtaaacataaatgacttctaatcttttattgataacaaatcagattagattgaaacgagttttatttagggcataaaatcccaacaggtatagcctccattaaggacattatccctgtctgccacagatgagaacctaattaagaagataccatacgagataaggttgaccttatctactttctctttccaaattctccttacaagaccttcgagaaacattagtggtggattggcacccaaaacataacatacaattgttgaattctagtaagatacttcttcctcaatgtcatccattattatcttcacattttctttctcaacattctgaaaacgatgaatttgaacttcaaactacagatcctgatctaagtataggaggaatagaggtattaccttgagtgatgtccctgctgcattgcttattagcgtctaggaagtgagcaaaattagatccaacatcagtctaacattgcagctcacaaagagctgatcaaggtgataaatcttgaaaagattcagtatcaagttgtggatcaagtgagttgtcctcctcgtccgtgaaattaataggctcaatttcaaggacaacatccatcgatttagttttcttgacatctttagaagaggacggtccacatttctttgaaggcttggatttctttcatgcagatggctgcttcccatgaatcttggacattgtttttgccattggacaaactcaaaaggtgagagagcaagaaatagaggaaacagaaaacttttaggatgaaattatcacattaagctttaatcactagctgccatgttattagctaatttaaaaggaaaattattttacttagctaagtgacaaacatggaaaggagatataggaacaaggattgttcaagagttgtgcataggtattttaagtcaattaggtagtgaaatatgagaagcaacaaggattgtatgaagggagcaaaaacatgttatatcaaaacaaacatggtgggtagccccactatcaactatccatgatagagattttgtagtgaggtttgatgccattgaagtgttggcatcagtagcatcttgagtttggtgaaccaattgagtgagttgtgctatcatatgctggagagaggccaccttgtcagacagcgaaggagaagcaagagggaaagcaaagttgaccgtaggtcccttggtaggttagcctcaaactgtagaacgcttggaggactgaccacgatctgaggtagtgcgttgtgttgagtcagtcttccatttatcaccataaccaggggaaaatccatgcagtttaaagcttttttccttcaaatggcttggcttctcacagtaggtgcaaagagaatgttgttgttgttggaattattttaccagaatcttagatctactcac

SEQ ID NO: 305265 - DNA, 4754 bp, Cannabis indica
ttgtccagatttaatgaatataaaatattcatttatcagaaaatcaattatttatttatttccttaaatagaaaatcatttccttaattagaaaataacttccatatataaaatattctaatagtcccaagttgtaattccctcaatttggaagttactgcttgtaaattcaagttgggtatatatgttgttggactgcaacttgaaaaacattctgaattacagaagttgctttgtctaactaaataaatccacactgacactgaactatgaacgaacatatatgatcataatcttcatacttatcctactttttaatttgtacttgcactcctacaatacgtccctctttcttcaaaagaattatttatttgcattgcaagttctcactgtctttctattttttcttcatttgagtaccttgtaacaccatactttgatggaaaacatggcttgagtgggatttgaactaagaagttcatgttcgctacaggtggatccaaatactggagtttcaatgtacgaatcagatgacataattaagtacttggctgagaaatatggtgtgcagtttcttgacctgctttaatcattatttcctttattttaattttcctttaatttcataatatattattgtctttatgtgcaggtgatggaagtgttccaataacattgtcacttggtttgttaacggttagtcttctggtcactagatagttcccgtttagtttgtattgttttgtttgcattttatcttctttttttccttgcagactataactgcaggccttgctttggttggtcggtcagggaaggttagattgtctttattcaattgagtctgcaaatgattcacattctttatgagtgactctttcctagtaggagctttatttgtatcagatataaatgttgagtaaccaagagttggatattacaataattttgtggcgcattcttacctgaaccatctcttttgttatgctcagggttctatttattctcctgcaaaactccacccaaccacttgaaatatgggcttagtgaggtgagtgtttacctatgatgtttgatagtcataaaaaaagcctagtggtattaaacagcatatttttcttggttttgtttggcctttgatttgattttttatttataatttcaatattgctttctgtagcttgaaatctgcttcttctctttcagggatctcccttttgcaaatacgtacgtgaagtgcttgtagagttagagctccctcacatacaacggaggtaaatatagtatatactaggaatctatttttatgtagtgaacagttggtttcgtgcaacatgtatgagatatatgtatatgtacaattaggtgtatttccttccatgtatgtacgtctttcttgactatgaactcaatgatactctgttagtagtattttacattgaaaattgcaactcactacactcccttacttcttgagtgcaaagtgctgtaaaattcttcacttaagcatatatttctatgttctttccagttgtgctcgtggcagcgccaagcggcagatactctacgaaaaagttggacattttcaggtattgaccaataattcctataataatttgcaataatgtcgtgttaatcatttgtaggtaggcttttaatcttgtgttagaggtgatcaattgttggaataacatactatggattatactataatggctgacaggttccttacttacaagatccaaacactggagtggaaatgtttgaaagcgcagaaattgtagaatatttaaaagcaacatatgctaaccaatgatcggtgccctcagaattttggcccctcctttttttaataggtttgtatataatctccctctcttagtgattaatattgagattattcttgggccaagctacaataaacatatgtatagatgcattcaaaagatggttggttctcaaggagttggagtgctttattctgctactctatgtgtatcaaaatctcaaagtcatatgctgtaagtttgacacatattagagcatctaatacttatgatattgaatgatgtgtgtgatagtagtgattctctaaagagataattctctctattccataaccgcccaaccctaacaaaggttgttttggactatgttctttgatgcgaagagctttccaaacttaaccattcggcatcttctctttctcaagttgaaaaataacattgatcgatctgaggatttattttgctgtcactatgactgtgatatgatttccaggcaatgtagcatctaaacaaaaagaccttttgtgtcactataaatttcagcctatgccctcatctcctcatatagtggaatggggggtttgaatccattttctgaacctcatatattgaggcttaatgaagctcaatcataaaccatacttttccttttagccacaagagcatccatagttgaccctatcactttgatgggagaatccctatctcttatttgaagctcataataaaagttaagtccaccagagttgctttcattatggtctttttttgtggctaaactgaatgttaggtacttttaagataaggaattaggaatacacctcttcttatcgtctttgtttttttgttctttacatttcaatgtagttttattatagtgcctgtaattgtaggaataagacttttaggcatctgattcctgcacttttatctgctttattattcaagcatgtttcttcaagattcgggatttcgcctttttcccgtttactttccactttgaaatgactaagatcagacgagtctcaatcattattccttaatcttaaaggttaatcatgttttacctttcattagtatctggtctatatgcttcttggcagaatttgttttgctgatatattgaagattaacaatccaaaatgggattacagttatacccttctaagattcttgagggccaaaatgatttaattttattaaattccttttaattagtagaatcttgtcaggggagagagaagaggaatttttcgatcacgttgttttgttttttctttttcagctaaataatgtttttattctgttttaatggcattagctggattataactcatgttagtttgttgcatcaatctaaagattctttgtgttttaggttcacgtgtggcaaataagccccagaggttttgaatcttattaacaacctttaaacaatggtgtgacaaaagataccacaattatggctcgtgatcccccaatttgagaaatatgatccatttaatttactttttgctcatgtgcttttgttcttgtttttgggattttgaccaaaaaaaaaaagatttagtcacagtacattattatttgtaggtagaagaagatagagcaagttacatatcaataagggtaaaagtagaataaaactaacaaaacacaaaatagagaaacaacaaaaaggccatttaatatttatatataggttaattaaattttttgctccctttatgtactaaattatgtctcgaattttttaggcggttaagaattctctaattattgagattgttggatttaatgacttttgtcaaattttgttcaattttattaatgtgactaatgaccttgtattaaattgtgttcctcgaattttgacatgtactaaattttgttctctgaatttttatttacgttgggcttctgtaagtaacattggacaaaagttccaacaatctcaatatttcaaattttttttttaatggtttgcaaaatttaagaggtatgattttgtatatgtcaaaacttggaagtaaaaatcatagtcatatatatatatttatatacattcctttgatctaactcttatctttactaaatctaaggagggaagtgcaagttctatttcttcgatctaattggctatgtttttagagagccatttcaaaaaataaaaaataaagttacaaaaaaataaaataaaatgttgttttctattttaaaatttaattaaatttttttaatgttttctctattttatcttacatgatgttgtctcatcactttctcttttctcatttttcctctagctactctctgtctctcctcattcattgtgtttcatattattttttcgggtgatgggagttgggggtcgaggttagggcttggtcaaggttacggtccaacttcaaagccgaggtcaggtcaaggttaagttctgactacgaggttgggtagacgtgacaattcgtgttcacgggtcgtgttcgtatcgtgttgagactcatgtgttacaggtatatgcttgacccgaatataaaccgtttaataatcctgttgaaaaatgaaactcaaacacgactcgtttataaacaggttgacacaagtacatgacccgtataactcatttataaataaaatttgtttaaacatgtcaacccactaatatattaatgatatgtttaagatgtttatgacatatttaatgcgtttatggtccatttatgacctattaaagtactaaaataactttaaataggtcattaacaagccagttttgtgttagttttgtcaactcgaatacgacccgaacccatttaagacaaacctaaaatcgttaactttcattgggtttcgagttgtattattgtgtttgacatgttttgtcgaccctagggttaggtcatggtcgtggttcatggtttggggtcgggtttggggcctggtcaaggtcggggtcgaagcaag

SEQ ID NO: 305266 - DNA, 3035 bp, Cannabis indica
gagatttaaaaagctaatatatatatggcatattaaataaagacctaaaaattaaaaaaaaaatactttaaaagtgtcatatttaacatataaaaaaaaaacctataacacccaatactctacctaatacatatatacatttggtaatatgatatataatcaacctctatgtgaaatatccactatatattgattttttcttcctatgttaaagagcttaaaattacaattggataacaattagtgttgaactactaaattaacgacaaacttaattagaagagaggttgaatgaatatatgtcattatcgcatatatcatcacttcacatgaaaaaatactacgaaacaagtttgaccgggaaaataatggctacactttatatccagatgagatcatatacaactagctacaagaaagatcctaaagcatattattttctagaaagagtcatcaaaattatcctccatataatttgtatagtacccaagattaattaattaattcatatcaactcttatatatatttatatatattaaatcatttccactctcataattatggccactacttctaatataaaaaatgtacgactctaattaatcttatgattaactcgtaatatgttaatggtttacagttgtgaattaagtaatgcctaacaaattatatttatataaaaataaaaaacaaactatttcaatggaataatttttggaaaacagtaagaaagatatttatgtttgggaaataataattcccattcttgtttttattttcattagttactttaagaatctttgatcacttatcatgaatggaaaaaagaagaatcaagttaatgcattgcatgcaatgcataaagccatttcgaagcaatccctatctaatttttccaagtagctagtagaagaataagtctagctagttgctgaggcttcatagtacttttcttttattattttattttctttatttcttaaactaatttagaacttgagtttaatctatttatttatatgtatattttatcattttgcgaaaatgatgattagtggtgcagaatttaatcaactaaattttaaataattaacaatgacaagattaacaaaatgcaaacaataatcagaagaaaaaataaggatgaacaaagtatgaacacccagaaatgattaaagcagtaaataataaaattaacaacaagatatatactggttcaagcccgattaattgatcgatgtgatctatggttctactttagttctagaacaccaccgaatcttttttattgattgaacaaaaacaggtacaatacagttgagaagagtctctaaagagttctatcaaagtattacaactctcacactctaacccaagaatcttcttcatctacaaaagattcttcatacaaaatccaaccccagtctctctctgttctctgtacctttgttttcatacaagtagtgatcatatgctgatggtttgaacctgatttgttgcatataactatcaaaatatttattctattccattggagactgtttcaagccatataaagatatattaagcttgcatgaaaattcatctcctttccctttcacctaaaacctaggtggttgcttcatgtagatcccttcatccaagaatccatttagaaaggcagtcttaacatcaagttgttcagcttcaagctccatttgtgctgccagagacaacatcaattttatcatcttgtactttaccacaagaagatttcactgtagtcctatttcttttacctaagtaaagcctttagccactaagtttgcttctacgaaccttgtcggagggtgaatctctctctagattctatcacacgccaattgataaacttccaaacccgtctatctgaatcattctaaaacctttatttggtcttaattatcttccgtctgagcattgtctttcgattccacactagcttctgtctgtgaaccttatattctaggagcttcattacgtaatccatttccatgcatgtagtgtttttgtttcttatttttctcgcatcacacggagacacactatcttttccgaatgtcaaatgagaatattttaactcattgaaaaccacatttctagtaattacaacctttggtctagccttcttagaaatatagattctatacaccttggtacctaaggcataacctaggaaagttctcttaacggatataggtttcaacttgtcaataaattggtgtgcatatgctgtacacccagatgtttttaatgtgataggttgggggttctattatatcacatttcataaggtatttttaagcctatagctctatttgggcttttatttataagataagttgcagtttttagagcttccctccaaaatagtttttctaatccagaactgaatagtaagcatctaactttgttcaacagggttcggtttatccttttagcaatactattttattttgggctcttcactacagttctatgcctactattttcaaattcttgacacaacttgtcaaatttggagtcaataaactccaacccattatccgccctaaggttcataattttaagatttgtttggttttccacctatgttttctaaattctaaattgttccagacactcatcattagtatctagcaaataggtccaaacacacctactatagtcatcaactattaaaagaaaatattgcttaccggagtgagtaggtactttgtatggcccttaaagatcaacatacacatattcgagtatcttcttagttgtgtgccttgctgaagtgaactttagcttatgttgtttccctaaaacataagctttcacaaaatatgaaggcacaagaatttagctttgcaattataccttgtttgtgtagttccttgaggtcttgtttcactgatatatccaagtctgtgatgccacagtttcatattttctactcctttcaccatggttgcttttttggatggtatagtttctccttagagtaacatataaattattgatcttttta

SEQ ID NO: 305267 - DNA, 3175 bp, Cannabis indica
atcaaattttcttaaaatatatataagtttatattttgaaaaaaattaacagccgcgcaaagcgcggttttgttaactagttattttatattttacgtatattttttaaaaaatccctttaattttcaataggcattttctctctaaaaaaaaatgaaagcgacatgttcttaaatcgtttcaacgatatgtgtttctgaagtcaaaaagtgacgtttttgcaccaaaagtgctaaacgcagaaaaacccttgcctgttacgattgtcgttttgggttagggttttctgaaacttctccactattctttctcagcctcagctctgtacgtccatggagttcgacggtggagacgcctctcaaattactcgcgaaatagaaactctcaaagccactaggaccgacatagacagtcgaatatcagccctggaaactcagcttcacgagattaatcttagtcatgagaagaacgccgtccttaacgatggctcttgtcccccgatttcgaccgttgtttcgggcttcggtcacgagttatcgtccgatatgatttatcgttacagtcggcaccttttgcttccttcgtttggagtccaaggttcttgtaaatatatacttcatatacataattcacatagatatatgtatacgtatgtactgcataacactttcattgatttgcttatctaatgttttagtctgacagtaaacacgctacgcagtgccgtctgtttgattaaaactgaaccttccaagtttcaatatttgatagagtaatgattggacactcgatataaattactaattcaagacaaattatatgtttttgttttaaaaaaaattgtaatatctcttaatgggtagttgtcaattttgttgtagggcagtcgaatctcttaaagtcatccattgtagtggttggagctggtgggttgggctcgcctgctctgctgtatcttgctgcttgtggtgttggtaagatttctatctctagtctagggagttgaaaagaagattagaatacccttttgattgatatacatcaattagcatttgttaccactgtaattgctgcaatttgaactattctgagttatcaagcactcatttctcttttggttattatttgtaggccgattgggaattgtcgatcatgatgtggttgagcttaataatatgcacaggcaggtacaaattggcaacctccacaactgttgggatgtttctaacttaaaatgcacttgttttgtctattttgtaagagagggtgatactctcaatacgggaatgatttcttgtttagatctttacattagtgaaaattttgtaattatcttttcagtgacattatttctttatgctactaaggaatgagcgcaattgtttgcgttcccttggatcgctaattgtaaaaagctaacttcagctttttttctttagattattcataccgaacagtatattggtcagccaaaagtaaaatcagctgctgctgcttgtcgatcgtatgtttttatgccttttttcaatgtttaatttccagaatttcttttctgagttcatggtatattttttcctttatactttctgacattttcttcattcagggtcaactcttctattaaaattgtggaacacacagaagctttacgcacctccaatgctttggagattcttggccagtatcccttatgttgttaggtgttactacttttaaaatcttaatctaatcagctgaaagttgtgatttccctaattaatgacatttctcagatatgatattgtagtagacgcaactgacaatgcacctagccgttacatgattagtgattgctgcgtggtattaaggaaggtaaatttaatctgacgatgaggaaatcaatgctttatttccttcactaggacctatggcttgaaggtccttaactgggagaggttccattggtccagctccaactttattgggatctttaattgtggttgtttggttcatattttgtatatagatggctattatgatctttacacccgaacttttacaactaccaaatcgtgctctcacaactcttttgccagttaaaaattcctctcaaactattataactaccaaatcgtgccttctcaactttttttcccattagaaattcctcccgaaatattggacttttgttaagttttatcccatgcggctaacaaaatgcttatgtggtagccatatgataaaatttaacaaaaatcttatatttcagcattgtgaatagtttgtaaggaattgttaacgagaaaaaaaattcaggcggcactattggtagcagtaatggtttgggggcatcctagatagccaataaagaatataatgttactaatatttgtagcaaacacaacttcacactcgaataactgaatttctctgttgcttcaaatatcaaaataactaataagtctgtcttccaaaatgcagaaactcaaatgttgttgtacaatttagcatcattgcattatctaaagcttgcttgtttttgtttttctagatgatttaactggtaagttgtttggatgcagcctcttgtatctggtgctgcactgggactggaaggtcaggtacctaatgcagcaggctttccactctgtcctaacactgaaaatattatttataaactaggattatgctttaaattgtaattatttttcatgcaaaattctcgaaatttccaacaacttgtccatatatattatgcagctcacagtgtacaattacaacggtggtccatgctaccgatgtttatttcccactccaccaccttcaacagcatgccaaagatgcgctgacagtggtgttttgggagttggtgagtcattgttgaaacacaatttcactggttcattattaattggttgaaagttgaaactagtgtaaagtaaatgagttcatgaaataaataagggtaggtatacaagtggatttttctaacaaccagcagaggaaaacatatttatgacatagtttccaaacttgttgcattagttcacaagtgatttttttttttgttttttttgagaaaaggtgcccaagtgattgagacatggaaattatgcacattttaacagctagaacatcatgcaaagtttttttgttaaatttaattctaatctttttcagatcctggagtcttact

SEQ ID NO: 305268 - DNA, 2517 bp, Cannabis indica
agaaattcgaaaaaatttaacacgtcaaaaacagggttcaaacagtgtatagcacgcgtgactattttattttatatgcgtgtgaaataaacagtttgaacactgttttctatattgtaaattattcagaatttctcaaaattttgtaagatatcttaaataattataacgtacacgaatatgaaacgaattagactaaaaaattctatcggatgccaaaatagataaataatgcattagtatattccttttgcagggctacattattctagaagtaccccttgttattttattgttatttgtgtattatttttatgttgttttaatgttatttgggtgttatttttgtataatatttttgttgtttttgtaaaacatatataaaaaatttgaactaaaagtgtaaaattttgacaaaaataatatttttttgtaatttttttttttaaaaaaatccaaatttccaataacaaatgattgctttcttttttcttggattccatttactctactttttttggctataataaagattaaagagtaatgattgtcacttataaatataaatgtaaagtcaatactttgtgatgtgatctgtactttataagtaagattagataatgtatctaacattacttaaaaattgattaaaatatatcttttctaaaattatcaaaattcaaaagtataaataaaataattaattgttcaaaataaaggtcgtccatatattagtttgatggacaatttttatttaagaaatgcaaaaattagacatttatttttgtccattcattttaaaagaagatggtcatccggaaatatcagcaatctttgctccattccaatcccaattccacttatacatagagaagaacaagtttcaaattttgatagtattgctcttcttcttaattattagactcatatatatatttatatttatgtaaatatacttgaatagcttgaagaagatggaagaatcgtttcctatgacaggaggagatggcccatacagctatgccaagaattcaaatcgacaggtatatgttgtttacatgttgttttcatgttactttatattagtaatatgttgtttacatgagattcataaaagtgttattaaaaaaattagtgaaattgtacaaaaaaaaaaaaatcattttaagcattttgtgtaaaaactaacataagagtatgtcctatttaatgaccatatggatttagttgaaattatttacattttgctacttgagttttcactattttgtgtgactaatgtatagaaagaagctgctgaaagcgctaaagcaatgttggtggcagccataactgaaaacctagagatcaacaaacataatatttgtcccatctcaaactcatttcggattgctgactttggttgctctactggcccgaacacctttatcgcagttgacactataatcgaagctgtttgtaaaacctaccatgagagtacttttgtgcataaccccgaattccatgcttttttagcgaccatgtctctaatgacttcaactttcttttcaccaaccttcctaaggatcggagttactttgcagccggtgtgcctggctccttccacaacaaactgtttcctagggcttcattaaacctcgcctactcgtcacatgcattgcagtggttgtcgaagactccagtggaagtcacaaaccctagctcacctgcatttaacaagggcaagattttttatgccaaggctacagagcaagtttgtgaggcatataagcgtcaacatgaagaagacttagcaagtttttttggtgctcgatcggaagagctcgctcctggtgggctagttgcgattctaatgtccggtagagaagatgagagttctccatctcaagtctcgcttggccctctttttgaaccgctcgaatctacccttatagaaatggctaacgaggtatgtatgagctcaagttctttatttattataaaatatgtgagatctgatattaaattattgtatattttcaaacaaattttaatgccatatatatcaacaaaagaaaattatcaaattttgctttcaagctatctctattctctatcaaccttctcatgataatcagtgatacaatttttttcatatttttcaaaaaatattttaaataattttctcatacaataacgttttttttaaaagtcaaattaatgatatatcatgtggaacttgctaacaaaaattatcattattttgtagggaataataagccaagaaaagcttgactcattcaacttgcccatttttagtccatcacctaaggagattaagaaaataatacaaaaaaatggatgttttgaaatagtaagattggaagttcaacctcgaacacttcatcctatgatcactttacaacaatgcagagctggatttgagaacattatcaccaaacattttgatgataataataataataatgttataatagatgtaacgcccgtacttttataaaaatattaattttattt

SEQ ID NO: 305269 - DNA, 2479 bp, Cannabis indica
ccaaaaagttcagggggcacgatttagtacatgtcaaagttcacggggaaacattacaaattagcctagaataaatatcttgtatttcatcatataaaattttaaatttttttgcacctttctttctatttctcttttttgattcttttttgaaaacagaaggttcattcgaaggttgaaaaatgataaagccctataaatgagacaaacaagacaacaaaaatagacttaaatatattaaataaattatttaaattatagacttaaatattgttttaggacaactaaaccccacacaatataaattgagtctgccgctcactgttgataagcaagggatcgaaagggaaatgccctagcagcaaattaattgcaccaaagcaaaaaattgcacttctttgaaaggtcttatactactaaaaaaattggtttttcccgatagcttaaacagtcaggtaaagtattaactgtcacatatttgatcgtcacaaaatgaatggaatcgaactgtcgcaaatcaaacattcctgacggtttaaaatcgtcgcctatagtataaccgatattttcaaaccttcgctaatagattccaataaaaaaacatcgtcttcatcctcctcgaaactacttcccgcatatgtcacagctgctccaaaaccttttcaagcttcatcctcctccaccatcattgtgctcgttttcatcctcctcaaagttttcttttacaagctttagattgcttttaacttgacgattctcgaaactttcttcggttgcaagcttcagatttattttgcacacacaaatatcaagatcaataaatcatgtcatgactgatagaaatttgaataataaataagaggaaattgcgcttacctttgtgttgtcacgggagagcaagggaaagggacagagcaagagagggtagaggagagggatggtgcggctagtggtcacggaggagagagagttgggaaatgaaataaaatttacaaatgactttaaaaataactttaaaaatatttttttttttttttggggtagagggtatatcttaagagacgtaaaatgaaatttgaaattcaagatgcaaggaaaatgaaattttagatttgaaacgaattaaatttaagtcgaaaaatcgttgcctatatacattgcctgacggttttaaaccatcatcaattcccactaaaaatacacatacaaatttttaacactaatatacagtaccacgtttgtatagtatgggatttcacttaaggtatcaaataataatgctcttttaacaaaattaacacgtgatttttacgttgtaactaaaaagtctgtaaatcttatagtatgagttttcacttaaggtatcaaatattatttttataaattatcattttttaatgttgtaactaaaaatcttataaatcttatagtatgagatttcaggtatcaaataaattaacgaggctcttttaacaaaattaacaggtgattttttggtctctcttgtagcttaatatttgtatctcaaccacatagtgtgataggatgggacccatttatatttactttgatgtgtaatatacaaccatatataattgtatggttgattaggactattctccctctcaatgtcccacaatatataaaaacgtgcatattattatattgtttttggaattttatgaaatgaattttagggtttttgctacacaaacaaaggatagaacaatggagataaagaaactgacaaaagggaaatagatttgagaaataattcaagaactataaaaaaaatcttataaattattatttttacgttgtaatttaaaaatttgtggctaaaaatattagttataaaaatcacaatttgtagtgactaaatatatttttagtcgcaatacttgttgtgattaaaattaaaatagtgacaatttatatctaaatactatgtttagttacaagtaacttttttattgtgactaaaaatcatattcaattaaaaaaaaattgttgtgactaaaagattattactaaaagtgactttttttttttctagaatgggaggaacacatactcaagttggtcttgaattttggagatttttcttgccattagaaggaagaagaataaagggtttcttcaatgtgtggctcaatggtttggtttagtatctttcatagggttcaatttatgccattctcgattgataataagtgtatagaatggtactcaagtcatgacaaaatacatgtgacatttatatcctttcatgtaaattaaccatatatgcatgggacacaagaaaagacacctgtaaatcgacctattcttcaacataaattaaagaaaattaaaaatatctatatatatttacatacgatgcatcctcttaaaatgaatgtactgatgcatccttaatttatttcggtatccaaaaaaaattttaatctaattttttttcatattcacgtacgttata

SEQ ID NO: 305270 - DNA, 2533 bp, Cannabis indica
tttccttaaatagaaaatcatttcctaattagaaaataatttccataaataaaatattctaatactttagagatagaggtactacaagatgaaccagtgtaatgagtcatggatgattatggagaatctcgaaaccattatatctaaagaaggaaaagtaagggtcgccttattaaggaatgtgacactcggcaccttcaatattctagagactagaggagtcgatctagggtaccataggctgattcatctaagaacacacaacaaagaacatcaaacaattactagaattgaaaatgtaatctaaaaccagcaataaacaataaagcaatcacatgaactgagtatgaaacttaaatggcaagaatgctaaaaatttaatgaacacctattttaacgagcttcgaacaccaagccaatgagacgtccctacatcctcgagaaacaacagttcatgaatctttattgatgaataaaagatggtgattacaaattgatctctcaagaacaagagagccccaatgacaaaggagacttgctcgtgaacactctcactcaatctaatctatctcaccctctctctctcaaatctatcatgttagttgttgtaaaacaaggacttaatcaattgtatatatagagctagaattgtcataggtcccctaaccaactaactccaaaaagagtaatagatccaagagtgccacatggcacattgtgacttatgttaaaaacattacaattatcctcctttttaatttaagttacatattcttgagtttgctacttcattgtacctctaaaggaggtatatcactacagagttgtgatgttgaccaagtttagacaatgtctaaactttgttagagttacacacttagtcatcacatcattaggtttatcatcaatccttatcttcttcacttgcacttcaccactcgtaataatttctctgatgtagtgaagtttgatgtcaatatgtttgcttctttcatgaaatattggattcttcattagatagagagcaccctgattgtcactgtatatgtctactgcattaacttttagttcatgactaaagcctttgagtcatactggttcctttatggcttttatggctaccatatattctgatgttgtggtagacagggcaacaatgtaggttcaatttctaacacacacatccacccaaaactataaaacaataacctgtaacactgcttctaatgtctatactcctagcatagtctagattcacatagcatgtcacctcacaaggtgagatgttgtctttgtgaaattttattccaatgtttaaggttcctttgacatatttgagaatccattttccaacatcccaatgttcagtgccaggattggcaatgaacctactcaccacactcatagcattggtcagatctggccttgtacataccattgaatacatgaggcttctaacacatgatgcataaggtatgctgctcatataccttatgtccatttcagtttgtggtgattgagcttgtgtgagtttgaagtgaggagcaatgggagttgttacctgtttggttgtgttcatgctgaacttatccaagactttctaaaggtaacttttttgagacaacatgatgtactctggtcttttcctaacaatgtcaatccccaagatcttgttcgctcttcccaagtctttcatttcgaattcactgttgatatcttgtctacttcagctcctaattttcttataatcaatatatcatcaacaaatagaagtagatatacacgatcattgagatagacacagggatcatacttgctcttgatgaaaccaattcgaatcataatctcatcaaaccttaaattttactgtgttggtgcttgctttaaaccatatagtaacttttgttgagtaaacaaaccttgtcttctagattgtccacttgaaatccttttgaaagtgtcatgtaaatttcctcatccaacatactatgcaaaaaggttgttttaacatccatttgatccacctcaaagtaaaattttgtagccagggccatcataattctgatggatgtttatttcacaataggggaaaaatatcattgtaatttataccttctttttgactaaacccctttgcaactgtagagaatggtgaatcgaattgtgtattgtatttcatagagtagtatacatttatatacaaagctaggagactaaatagaaaactactaaatacaaagaggaaactactaaatacaagttaccctaatttttacaactaatattctaacactctcccttaagctggagcatagatgttaatcatgtctagcttgttacatagataatcaacctacaccccattcaaagcctttgtaaaaatatctcttaattgttcttcggtcttcacatatcttgtggagatcagaccttactgaattttctcacaaacaaaatgacaatcaatttcaatgtgcttagtttgctcgtggaacacgagatttgaggcaatatgaagagcaacttgattatc

SEQ ID NO: 305271 - DNA, 1730 bp, Cannabis indica
aattataatactttttacattttttttttaaaaaaatcatattatatttaatattgtttcatatgaattaaatgtaagaatattgagtcatatataagaacatgtgctactccattaataactattagttttgaaatgaaactctataatttttgttatggtatcatagtcatattcctaatgagctttcgatccacgcatatatatccagatagtaaagtcagctgcacaagatcttgatattgtaaagacgattgagatctgaacaaaaataaaatgaacaaatagcactccttgtgataaagtgattcaagataagtgagcaaaaatagcacaatcttaaaagagatattagacaatattaagtctcaatatgaattaaatgtaaaaatatttacccatatataagaatatagattactctatttattaccaattaattttaatatgaaaccataattattgtcacatcatttctaaactagaaagaattagcttttggtgaggaattattaaaagaaatgttgtaataattatttatactaagttgaagcaacaatttataaaatttcctttaaacactaaagtaaaatcaatagaattatttctttatacccaaactcaatattaaacaacaattaatagtattagttaacctaaaaaaaagaaccatatacaaaaacagtttgtatccataaattaacaaaggataaccaacaatttttaagaagaaaaatttcgatccttgaaattctttaagagaaaagaaagaaaatatgaaaatcgacaacaaaatattcgagaagaactacatggaagatttcgttgaatcaatcgagaaagaagaatctcatagctaggttggaaatgccatattggaaacgagttaaagatgtggtactgattcttactaattactctaagttctttgaacgaaggactctcccacttagttgtacttagctctgttagggcaaacaaaaatgacatgtgaatggcactatgcactacttgcacaactagtaagaaatttgtcttaaactggacatcaagctaccctttcctttgtatccaatataaggcctctttcctcttaacgacctccataaaagaagctttagcccgcccataaaaactcattgaaaagacttccaaatgagtgccagaactatcacaagctactactcctacaccaaacttccaagctaactcgaaaagtactctgtcgacattaaccttttaatcttattcacatccagtttactccagtgctcaaatctattatcccacttcatcgtgtaagataacgaccccattctatattattcaacatgttgccattgattaagagctactcttgccaagagaacaacttttgctactgtagtcgtcttatcccgccataccacatcattacgagccttctaaattgcccacgctacaatagcaagttcttcacccataccagccacttgctgctaagtaacttgatcaaactagtcccaaaaatcagtcccaaccacttcgctgatgctaacaacaaatgacattcaacatgcacaagagaacgaacaagaaaccagcaaatgcagaaacgtttcatcctcatattgcaacattggacacaaaataggcaacgacacatgcttagactgttgggattttatgccctaaataaaatctattttaatataatctgatttgttatcaatagaaaattagaagtcatt

SEQ ID NO: 305272 - DNA, 1419 bp, Cannabis indica
tgtgaacaaagcatatggctaagccatgtatttatctttattgaaagtaaatatgattacattgaattaggttttattgagggcataaaattcaaaaagagacaagaacactcgttactttcattataaaacttccaattgaaaaaagaaaaatgttatatgaagtttatatgatgcgagtggtttgttacaaagtgacgtcgtttttattttaaatctagtggtggattatttcttaaccacttcaggccacagtagatcaaattggggaggttttataagatgtcccaaggaaaatcacgcttaaaattaatgttggtctaatagataatttcatagaggaagatatagtaggagcagttcaatccataaacccgattaatgctttgggtcttgacggtctttgggatattcttagatctgatgttgttaaagtttgtttaaaggttgtgaatgatgatctgtcagttcatcacattagtgatactacaatagcgttgttgcctacgattgacaagccatctcaggtggagaaattttgaccaataagtttgtgtaatgttattcataagattttttcataatgcctagcgaggtggttgaaatttttacttgatgtgattatcttagaaacacaaagtgtttttgtttcgtggagattgattcatgataataccatgattggctttgaagggatgcactatatgaaaaaggggaagtttgggaatgggagtaacatggcagtgctagacatgtttaaagcatacaactgagttgaatggaattttgtggaagctatgatggctaaactaggttatgatgggagatggattaaaaagattatgaattgtatcagtttagtgtcttatgattcttaattaattgaaaagttaaaggtgttgttaaccccaaaagaggtattcgacaaggtgatccccttacacatttcttatttcttttgtgtgatgaggctttatcattcatgatttaggcagttgaggattgggagggtcttcatgggttaaaattttagttggtgggcgttcatgtgtcacacctcttctttgctaacgatagcattgtatttcttaagaaaatttcaaagaaggtctttgtctcaaaatgattactgcaatatatgcggttgctacttggtaggttgttaacttttctaaatttgagatcaatcgtggcagtagagttcatgtctctactcataaacctctagcggatatatttggagtcaaggtcacttagaattttgatagatatttgagcatgacatggtttgttgggtaaacaaagaaatagctatttcaattaaggaccttatatggaataaatcgaatgggctattttcagtcgtgggtaaagaggtacttattacgagtgtgcataaatcgatccaatccaatgaca

SEQ ID NO: 305273 - DNA, 1606 bp, Cannabis indica
cgtccccaacctccttttgcatacttctggatttacaagttcacaactattgacttgtgagtatagcgaagacttacccacatgaccaatgaagacaacattcaaatgcctcttcttatttagttccatctgttcttcatcctcttctggggttggaatttctttctctttcattggaactgaaagtgaaacggttaagaatagaaatgagttccagaaagaatacacatacatgttgaaattaaacaaagagatacagtaaaatgcccataaagtacctttctgttcaacttcgattggctcaggctcactagtgtgtgtttggacctcttcctttgtgtctgacaacccaaatgaagaaaaatgtgtcattaattcagctaatattctctatatatctccaataattacaaatatcactaaaggtcaacaaaccaaattgcatggataaccaaagtaaattttaataaatatactaatactgaaacaaattctattcagtagaattcaaagtgctcttcaaagaatagagcaccaatacataatgttcaaaactatgtaggtggtatacaaaaattaaaatttcatcccattgaattcacactgtcaccaacatacagctaacaaggaactttgcaggagttattaagcattcaagttcagtatacacctttaaattacgtactctcaaacagagaaatcacaacagaaaatattagaccaacagaataaaatcaaatgactcaaatttactagtactaccataccaaccttcctccattctatcactttcctcaacttcttcagtctttggttcttcaggattaacaaccccattatcttctgctaaattcgaataaaaaaaaaaacaaaagaggccaaatagattcaaaaatcataaacaaacacaactagcagcaacaacaacaaaaatcacacattttaccgtacctgcagggtctgcagggtctagttgtaaagaccgaatctcctcctcaatatctacatcagctctcaaaattcaacaacaattcaatcaattttcttattttcgcttaaaatctatatatataataataagcaatataaaaaaagctcagttcattacaaaattatttttgctatttgcttaatcaatttaagataatccgtaatcaactctttatcatctctttcatagttaatcacataacaaaaaaaaggaaaagaaaaacgaaaattcacatctataatagtgccaccgattatcgaacataaaaccagcagatctacggataacttttagcagcaaaaaagaaagaaacggcattaatcgcgatttcatatgcatgtatagtgatgaaatagaataatcggaataacgtacccatggtttggatgctcatggaggatgaatcggaacttagggttttcagtaaagagagagagaaagagagagagaagtgatagattagagtgagaaaacggaggcgtgcgaagagagaagaagaattttgggtttattaaattttgcaaaataataaatagtaaaaaaaaaaaagacacaactaaatgagttttattttctataaaataaataaattaattaaaaagagatttctatttt

SEQ ID NO: 305274 - DNA, 841 bp, Cannabis indica
gacctaaacaaaatatttaataagaaatcgataattgcataaaatgttgctaattaaaaaagtaataagaaactcagtagggaaaattgttggatgtcagggggagatttgattttgatggtaagaaaggcagacagagagggagagctgagcctcttgacactgagatcgtttcaaagcggttccggagctggaacataggctcttcacagcctcgtactgttccggacaagccgtcgaaaccaggcactctgccagagccctgttcaggtgacggcaggccgagtcccgcgctcgccctaacggaatccgtcggtagcactcgctcagtgcccgctgaagccgctgacagccgtggatttcgaatgcttcttcgccgcctctttcttgtcgcgattcggccatcgacaggggcagtggtgggaccgacacgttggccaccacaacccacctaccatagaccgacggctgctactggaacgagggccggtgaaagcgatctatttatttatttatttattttatagataaatatttaatacatatatacatcttgttatattcttcgtctatgtgttttgggattgtaagatttcttttatgagaaaaaatataaggcatttgaaagtaatctatttgttttaaaaaaaaaaagttaattagatttttatcctccgaattttcacatgtatcatcttcttgaatttttaatttttaaggtcgttaaaaatatctctgaactattgagattattaaatttaagaatttttatctaattttagtaaacggtgagcaacggttagtttggtcggttttttatacaaaaaaaaataccaaaatt

SEQ ID NO: 305275 - DNA, 2742 bp, Cannabis indica
cataaaacccaacacacatacctttttccagcaatactagcaatttacatgggacccattaaattaatatgcatcagttctataactcaagaggtaagtagagcattgataggagggtgagaggacttgttttattttccttgttgataggaaccacacaaccgacctttcccaaacaaaattcagggactccacgagctgcttttatggtcacaattttctttagatctctgtagtttaggtgaccaagtctgtagttctataaatttggtttgtccagaaacactctatggaatttcacatgactagtcagaacataacagtgatcaaccgttctgttgcctgtgaggactgatttcccattagatgtaactaaatactgggacttagtgaaactaacatcataattagcttcgcaaagctgattgacgctaattagatttgcttttaatccttttacaagaaaaaatccagtcaaaggaaatacatctgagagatttaattctccttgccccattatctcccctttattcccatcaccaaagggacaaacccttctttagatgcatgaaaattgtgtaaagattcataggaaccagtcatatgccgtgaacacccactatcaaaatactagcaattatctttcatggaagataaagatgtatgagcaacggagcatgattgtcacttttgggtttcctcttcttagtagtctcacgttgtggagtgaaagtaaactttcttcgagccaatttattgttgataatgtttgtcaagtactttctaagcttgtagcatctaggcctgatgtgacctctcttgttacaaaagtgacaagttggggcaaaatgttctttctgtttgatattggatctctcattaactgaagctcttttatctgagttcatgttgggttcgactaagtgcatatctaactcttcgttcttgaaattagtagcagcatacacaaactttatcttatcactagaggatgatgtcgatttttcatcaatagtcagatcatgaccttgtttgtatagcaatttgtagccaattgatgttctgtcaccatttggcttatggctctgaaggatttgattcaaggcagcagttcccgagggtaagtgagagagtgattgcttggttctcacaaattctgctgtcaacttatatatttcactatcattggaacataattccaaagttagtttcttgagtttctcttcaaggtcagatttacaatcatcaagaaccttgttcaaatcctaaagctctttaaccctcttagccatgtagctccattttcttcataggctttattcttctcatcaataatggattcagagttagaagatgcatcatctccatctgatcattcagtgactgtttcacaagcaatgaaggcagttatagatttttcttccttaagctcgtcactagcctcttcttcttcactctcactccaagtgacagtgaaggctttctttttctttaaagtattggcacattctgcctgaatgtgaccaaaaccaacacattcatgacattgaattcctttcccccttttctcatgttgttgtgaatgcttgtttaaacgagagggtttcttgcttgatgaattttctttgtttccaaaattagatttcttgaaattacttttagaaactgagcataattcttggcttagagagcatgatttgcatatatgaaggtttcaaataagtcaacctccttcaaattttctttcatatggataaaggctacacccatgtctattttgccttttagaattcttagttttcttttcctttttcccatctctgaaagttagctcataattttgcaaggaaccaatcaactcatctaggtcaagggcttcaatatcacgactctcttctattgacgtcactttggacataaatctcttaggaagaaacccaagaactttcctaaccaatttcttgttggagtagacctttctaagaacatatgattcattagagatgtcacatagcttagcatgaacttcagaaatggactcatcttcctccatagataggttctcaaaagatttagctaaagctctcagtcaagcctttttaacagcttcagtaccttcattcttgatttttagcttttcccaatcatctttagcaacctcacagttagaaagcactttgagttgattcgtggaaacagcattaaaaagagcatgtagagctttggaattgaaattagctcgttccatctctacaacaaatcattcactggacttcttaatcttttcttcttcatcatcgagcacaataggtggggatcaacctttggctgctgccatccatagccttcaagagagctcttattttagtcttccaatagggtaattggatccttctaacatgggaggacgagaggtagatccaccttctctgaacatttccatttcctatcaatttgcacacaatagaacaagaaactacgttgcacaatgagatgaatctcgaagtggattagttttccagaaaaaaacttacaccaatatagatcagcgcaacccactcagaattgattaaatcgataaaaccaatcaaacttagctacataatcaaaatttctttacacgaaatagttggctataatagcaattgaaagttttaacatctcgaaacgctaagtaattggacttcaataatattatgaagaattaagactagaaagctaaatcaatgaacaccagattta

SEQ ID NO: 305276 - DNA, 1749 bp, Cannabis indica
attttttcagcaaaaaaaaaaatgtattaatttctacatatgtcaattttttttatatatgcatgcattacataaggtcttaaaattaaattgctgtaattgatcagccttgttgaagctaaggaatccatggtgtatagctacaccaagagcatcaatgcattcgctgccaagctttccagtgatgaagccaacaaattatctcgtatgtttaaaccaaactactattaatgtattttccccccctaattttctctcttatataatgaatgatcaaactttcaaaaacatacattaataattaatccatgtgaataacttatttgtaaatatatattttaattaatagagatggacgaagtactctctgtaattccaaaccagtaccggaagctacacacaacaagatcctgggacttcactggcttcccaataacatctagaagaaaattgaaatcagaaagtgatgttattgtcggtcttttggatacaggtttaattaatattttctatacttgtatatatatatatatcatatgtcattgcagttttcataatactaaattctttatatttgcgtgtgtgaatgaagggattactccaggatctgaaagtttcaaggatgatggatttgggcctatacccaagaaatggaaaggaagctgtgttcgtgccgctaatttctctggatgcaacaagtatatatttatttcaatgtcataaatatatgtatatatgcactataatttgttttctgtatggctagctaattacatattaattgtcattatattgtttccctatttttagcaagcttataggagccaagtacttcaaacttgacggaaataatgacccgtcggacatttcttcaccggtggatgctgatggtcacggtactcacacttcgtccacagcggtcggcaatgtcataccgaacgccagcctcttcggtcttgccaacgggacggcgcgtggtgcagtgccctcggctagggtggccatgtacaaggtgtgctgggcttccttcggctgtgctgacatggatattcttgctgcttttgaggctgctatcgaagacggtgtcgatgtcatatcagtctccattggtggggggtcggcggactttttgacggattctatagcggttggctcatttcacgcattgaagaagggaatcatcaccgttgcctcggctggaaatgatggcccggctctaggcatggtcactaataccgcgccgtggttgtttactatagctgctagtggtattgataggagtttcaagagccaaatccaacttggtaatgggaagagctttatggtaagtaataagttttattttattcaaatgctaaaataaagaaactagttataagctatagctattagaatttggaattgtatgatttgagaaagtaaaatttggtgagtgtgtatgataaattgcacgaggattctaacatctcttttaaaatggtgcttatttttgcacctttttactcacttaacatctcttttttattgtcaaaattttatttaactttgaagactatattaaaattgtaagatgtgcgcatgagttcctatcttaaaattaattgaaataaatgagagtcataactcataaatatataaagaatattactattaaatactagtggtgtctaacatgttgtcttatgattggttggcgatactccttaaaagttattacatcaaggcttattaggatttttgccccctgaa

SEQ ID NO: 305277 - DNA, 729 bp, Cannabis indica
tttagagcacaaaacccaacagtaacatgctttgttggaatgtaaggggaatgaataaaaaaaaaaattaaattgttattcttgaggtgtgtagattgaataaagttgaatttggtgctttatttgagactaaggtgaagcatgagaaaactcatgaaattatggcaaataattttcggaactggaacttttattctagtttagtaatttatgggagaatattgatgatttggcaagaaaaatttgtccaggttgagatcgtagatgatgataagcaactggttcattgcagagttaaaattgtggccaaaagtgcacttttttggcaacaagagtctatgggagcaattacatggaagatagaaaatttctttggcataagcttgaaagctatggtaagttacaggagccttggatcatttttggtgatttcaatgccatgttttccttccatggtagaagtggtggcagaccgattcagtcctaagaaattttggattctcaaacttggctttcttgtggccaggtggatgagttcaaatgttcgggagctttttcttggaacaattaacatgaggtgggtgaaaggatatattctaggcttgatagagtttttacgaatgataaatggctgagttattttcctaatactaaagcttgttttaaatgggagacaatatcagatcatagcttgtaacaccctaactaacataggcgtattacgtgatt

SEQ ID NO: 305278 - DNA, 2995 bp, Cannabis indica
gaagaaaggtcctacatccactgctaatgtgaggaaaatcaagacaatggaggaagtcttgggaatcgaacctatggagttctcaaaaaaggaggaagatgagacccctgttccaagatttgcagagttggtgtaggaagatttgtttcagcctccactatctcctaggtcttctctgcagcaaattaaacttcaggaggaaatcaaagctgatttcaaatttttcttgacagaaaaaccgtaggtgctctgctaacgttgcttaaggtaatttaataattccccctgtattgagatctagtagtgttgttaggaacttggagaattcttttaagaactcagagaaagaataaaagtaaaaataacaatggaagatgttgaagatgaagtagaattttggagttcttctattgtatgttatgtgttaggtgcaaatcctcctttatctatattggatggctttgttcaaagggtttggaaaggagcaatagacaaagttggaatgctagcctatggtgtgttttcggttcgtttcgattcaattaagacaagagacagaatactgaatggaggctatgtgtttttcaacaaacgacctgtgataatgaaggcatgggaccctaataccaatttcaagaaggaagatatcacaatagtgcccatttggattcaggttaaagagctagaactaaaatattgggggtgaaaaatcattgtttaaaatagttggtcaattggggacccctctacaagttgatgaagcaactaaagaaaggaacaaattatcctttccaagagtgcttattgaagtttctatccatcaagactttcctgaacaaatttcttttgaagatgagtatggttcaaatgttcttctctcgattacatatgaatggaaaccattaatatgtaaacattgtaaagggctgggccacttgacagaagaatgcagaaaaaaggaagagaaaaacaagcaatgggttgtgtaatatcccagaaaatatagtgatattttaattggacatatttttattgaatatgtgattaagtggatattacagtaggattataatcctacttaaactaattatgagttgattagggaaatatgaataaataaagtgtaacttattaattacggaagttatgttggaatatgtgggtatcgtagataccataattcgaataaaatatttttgggcctggaaattgtggaacctgacggggagattagaaatgttacgacaataaaagatgaattgaattggattttataccggctagtttagagatttgggttgtcagttttgcggattaactagaattacttaaatgcccttaagatttttaatggatttttattagaaaaaggcaatatggtctattctaatgttaatttattttgtcctttagtgtaaattaggttgggttctattttttacattaggtaaaatgttgaaatttttttagaataataattttggaattttgtattggcattttattagtgtgtgaatattctaaaaattatttaagtaaatgtgtggtatgataatgacagtttcgcccatggatgaagtatatgtgttatatggccctaggggtattattgtaattttgcctaattgagttatttttcaacaaaaagaaaatggtaagtaatgagataaatttattggagtgtttctcagcccctttgaactgacctccctctttctctctttactctttactttgaagcttttgttgtgaggaaatcacttggttttggtggtggttttggaagtggttcttgttgtactttgaaggcttggatttaaggtagttcttaccctctttacttgttaaatttgttgctggtatgaggattgaaaaacatgaattttgtgtttatatccttggaaatgcatgattgagaatttgtgtgaaatgattatagtcttgtttgatttttttgttgtttttaatcctagctatgttttggatgtttaagagcttaggttgagttttgaatatgacattatggtgattttatttcatatttccttgctgtggaattttggattatgaggctcaagtttgtggagtggtattttgtagatttgagttcttaacttaaatgttgttgctcatgatgaattgatgattttgatgcatgttttggtgttatttggagagtgaattaggtgtaattcttctctgtttatctgacttatgctaggtgaaagtttaatttgagtttgggttggtttagcatgaaagtttgtatttttgatgcattttcgaagctgaaaactgggtttctgggtttttaaaccctgtggtcgcgactatcataggtctggtcgcgaccatcacaatggcagtttattatttttttaggatttttgttttcgccataacttttgactcgggacttcgtttggaatgttctttatatcgttagaaagctcgttttgagctttatgtgtttatctgtaaattgaatgccaattttattttgtgaaaatggatttagggattaaccccagaaattgtgactaggattaccgacacttggtcaagagcacccggggatttggaatctccacgtttgcgggacatcaggtaagacagtagttagcacgtagagtatgcgcagtggcacctatattgaaaatgatatatgtggataattgggaaccaagattagggttatcaccctaacatgagcagtttaaaggtctaggattattaccctagtaattactaatgtgaatgtgttgtgccatattatatataagtgtatgttttgagatttaggattatccgttcaaggtataatcgtgttggactcgacaactagaaccgagatgaactgcgttctaaggccttattgtaaatagacgtgtgagcgtaacgcgtaggtctatgccacatagacataaataggcgtgtgggtgtaacatgcgggtctgtgtcatacagacaaatgtgaaatggcattaatatttat

SEQ ID NO: 305279 - DNA, 660 bp, Cannabis indica
ttagagaaaataatatgagcaagagaaagaagtaaaacaattagaaaatcaaaccatcaaaggcttggaaaattaaggaacatctaaaattccgagcaccttcatcaactcaaatgataaattcttatgatgatcaaataaaagcaatactattagttatcaatggtattcagtaccattggattagtctggtgccctttaaaattttcctttatataacataacaatcctccaatctaatttttcaaaggggatcattagcattgaaaaaataagtatgtggagcaaagagttttggctactcaagccacacattgcctagaatatcactatggttggttggtttgttgtgcataatgttatataatagttcataggaagctttcaacaattgttatagtgcctactcacttttaccatctttaagatcaaatgtcaaaaccataggactgagtaaattggtagtcaatataggagataggagacttcatcaaatctaaccaaattttcaatttctgattgtgtagattattacctgttggaaattattgttctaaccaacacacttaaagaagcaaaattgatatcatatgcaaattggtatcatcaaacaaaggttacacttttaatttacaactgtttgtatttctctctgttttt

SEQ ID NO: 305280 - DNA, 2667 bp, Cannabis indica
aaacaaaagaaaagaaaaaagaacaccacgtgtgatcagtttttttattattatgttttttttatattctaaatatttccatttcacttttgactatataaaaattccactgccccaaccaatgattatatatataaatacttatatggctttgtgttttacatgtacatagatttataattacatgattgtgtaattatttacatgtacgtacaaatatttataattagatgactttgtgttttacatgtacatatacgtacctatatataattacatgtatattgctgtgtatcccttctttttatatatatcctaaatatatagaagaattctctattttgactatataaaaattaaagtacgtaggtccactgccccaactttgaactttcttgactcggccaattagtgaccaatctttgactttgtgttttatctataattacatgacatcataataaaattaattaataatatatgggaagaaattgctacgacaaaatacaattgcatataattaattacatcactttatatatacacatcatgttctccatcatgtgatattattcataatcaaaaattatggtgtgttgcatgagattattgggttcagcatctccacattggcaaccttaatatccaagtgaaatttcaatcagaaagcttttcccatttgagacccaatttggataatggcagcatttgtactagctttggttacctatgttttgccacgggccacaaagactactaattcttgtattgaaagaatcagcctatcttgtttggagctctggctgccattttgcttttgtgcattatattttcatttgttgggtggttatgtcttctattttgggtactttataatttgtaaagacaagttatgatgtagttaattcttgttgtgagattatatgaatcatggaggtcaaggctgctccctgatgttggtcgcgacatcactactgccttatgttgaagttgtcgtatcattaatcgtgttgtattgtattgtgttatataatattgagttggattgtattgtattagttgtggtatagttcctctaaatgagaaggtctgcaatatcattcttgaaaattattttggaaatttattttttaaatttaagagtgtgaaaaatgatataaaaaaatataaattaaattaatataattttggatgatagaagagttttagtaccttatgttatcattgagatgctctaaatcaatatttaaaattaactatgatgtaattatttatttatatttaatgttataagacactgatatttaattaacaacaattaataatattaatattaatatatatatagagagagagagagagcactagttactggttactggttactggttagggttaattaactgtgtaaactcgtgatcagtagagataagcatcaatggcagacccatctctttccccaatcctctcttcacaatctccaaatgcctaggcttaatcctcttctccaaactaaaagcaaaatactgaggaaactccttaacctcttccaccttcctctccatttccccaaccaaatactccaatttcggcttcaaattattctcaatactgaaagtgaaaagactcggacacctcaccaccatacccaccgcttcctccttcgaaacctccaatctctcctccaagaatctcagcttcggaatcagagtcttctcaacgctcgaaaccagtaaaacggcgtcgttctcagccagagactccaaattcctaaaccctaacctctggaggtagaacagagcaggtttgagctggtctctggcgctggaagcgagaagtctagggcacttgttgatgaccttacggagattgtgaaaagggacttgaagatcttgagcgaggaaatcgaagattgggattagatcggcggcgatatctgaggttagtattttggggcacattccgaagatttttttgagatctttttgttggattcctttagatctgaggaaagagattgttgattggattgaatcgagtgttgtggtgtggagagaagggtttttggctagggctttgcctgaatcgatacccatgatttcgagacagactattttttctttgatttggagagagaggttggattgggttggggcgtagagtgggtgtttgtggagaaggcttttgttgggttttggtgggattaagggcatgttcggtagacaaaatgatgatgaagatgatgatgatgatgatgatgaagatgaagatgaaggtaagaggggtagagatgagtgaagtgttgtcattgttgttgttgatgatgtttgttgcagagatcaacaatggaggttggttggttggttggagtttggattgaatatagttgtggaagtttgacacgtggatattgtggttgaatttcattggttggttttggattatgttagattctgtaacgtaacgataaacgaactttttgtgttaaaaaaaaacggtgaaaaccaacattttttttgttaaaaaaaaataataataataaataatattaaaaagagtaaatattgttttagaccttgtattttgtaaccgttatagattggacattttatattactaaatgataaaatagactctgtattttttattaatttgacattttatttt

SEQ ID NO: 305281 - DNA, 1152 bp, Cannabis indica
ggtctaaaatggtatttaccctacaatatatatcaacttctttatattttttccacatcattcaaatataatatttatattaattgaagttaaggaaataaattaaaatataataaacaaatgctataatgaaagaaaagaagataattaagtacaaaagaaaatattaaaaaataaatagagaaatattaaagcttaactacatttagctaaaaaaatttaggagtttgaattgaggtatttcaactaaggattttaacctcttaactattttgttttagctcttagctattataaagcatctattagggatgctcttataaagagctatttttagaattttttttgctctaaatattcttcgtaaactatagaagttgttggaaatattcttcctacagttacattctgtttattttttttaagcaatttgttaatatagcactaatataatgttaatttgcttgccacgtattatggtaaaaaatatgtacaaaatttacccccaagttctaggtcacaattttttgagttgggacttgtatttatttgtgactatttcagatctctcccaaaggatttgaagtgtaactgcacatgtaggtgaaacacttctactcatacgcacgcgccacgttctttattgtgaatgactttcgcattagcgtgtcttttattcctcgattttgatgatgatggttcgcttccctgacattaatcctcaagaaagtcataaataaagggttagtcagatactcgagcacataaatgtccccttataaatgggtttgtttagggttctttccaatcgttggattggggtgtatttcttggaatttgaaaggagtcgtaggataattaagaggccagtatcatgccctgacggctataaatagcgacttcctcctcactcttcacactttgttttctgcttcatttcttcagagcttcaaactggaagaattcccaagcaagccagattttctcatatttttcctcagacgctgccaagcttcgtgttatcgccattgcctgttagtgaggtcaggaggcagggacggagggacttaggccataatgtaggcttaagccctcactcatatatatataaaaaagcttatacattatattatattagtttaatttatttaa

SEQ ID NO: 305282 - DNA, 2291 bp, Cannabis indica
tttttttttttttttcttgtcttggctatcttgtctggggtgcaaactgctttttctttttcttcaagttgataataagagagagaagtttgcaataaatatatttgagatataaaagatatttaattttgaaatttatttgtttgttaaaatccgggcaagaataaagtttataatttttctctcttttcattttgtttttttcacatatatatgtaaaaatattttctagatatatactagattggtagatctaatgatgatgaacttactaaatatatatatacaatgcatttaatcatgttacatagaaaaaatatcagtactatacgtaactaatcatgaaggtaattaagtgtttattattcgataccactactacttatagttattatattttcacattattactatacacatatacatatataatatgtacgtgtttgtacgtatatatatacttaattatatatattctctatatatatatagtgggggacttaataatatcgtacttgcttgtgcatttatggacatgcgaaactgcgttgtgggaaagaatctattctctcaaattggtaaaagtaataattaaagattaatattcttttttttttttttgaagggaaattaaagattaatattcaatgaacattaattatgtaataattatttacattagtattaatttataagggtaaatattaacttggtgtttgtgtttttttttttgttaaaaattattaattgaactatctgttttgtttaatgataaattagaatttattttgtctaaaatgatacaaatttaaatagaatatttttatcaaaataaaaattaataatataacatgatcttgaattgttatgataaaattagataaaatattatccgtttttgttagaaagtcaatttatattaaaaaaaaagttattaaaaattaaatttagagtactattttataatacaaagtcatcattttataaattagagagtctaatagtattttgcaatataaaagtcttaaatggtattagctaattaattaattactttagtttaattaattaattacgcatataaatcgtcatctaaacatggatttcagtgtggaaagttcattgtttattttcctttctttttccctaatgggatcaaaaaagggagtctagctaattaattttacctttacgttaattaatttttccccatgtcaaaaatattcacgtgtaactttcacgttaaatcaaactcggagacaaaaaaccaactgatatgataatataatttaattataaatatatagttcatgtccaattaataatcctataaataactataataaagatcaattaaccctatatgtttttttcttttcatatataatatataagataacaacattatttgaaaagtctatagctagctagaccttcatgatatacatatgtctataattcaatatatagaaatcatatgagatatatatatatatatacatatatatatatattaaggattggatttgatcatttttagttgcatggtctcgatgggatcttgtaataaattgatggggtcatatgcgctaattatggggggaaagcttatcttattatattatgattttttttaatttttggcttataataatttcttactttctctttagtgattttattttattattattttagttttctccattgatgacattgcagttttacgtgttttaatttttcttttttttattgtttttttaatgtttaagttcaattctccgttacagataaatgcttaagtttaatctttaataataataatatttaagttacatttctaaaatttttatagttgaacgttgtatcaaattattatcttattgatataattaaattaatttttaaataaaaaataaatatttcataacctagatcgaccaatcaaagactgtcatgtggccttaacttaacagttattattattgtcaaaatttaaacttaaatatttatttacaactaaaaattaaacttaaatatatatgtcacatttctttttatatatttaattttacataaagtaaaaatatttaggaactaaatttatcggtataatttataatttcatcaatattaataaattttaaaaatatatataaagaagaactactattatattcctcaacttattctattaatataattattttgcgacacatttcaaaacaatattattcactacaaaaaactgctacttttagtgacaattgtttagtcacaacataattttt

SEQ ID NO: 305283 - DNA, 1839 bp, Cannabis indica
aagtaactttttattgtgactaaaaatcacatttagtcataaaaaaatttatgtgattattaacaaattgtcacatttagcaaatagagaattagctcactaaatcagatgccacatcaactacttctattttttgggcaactacaataaagttttttttttttttttgagtgcagagtaatgatattttacaatcaattaatagcttaatagtatgggttcgaactcatgacttcttcctattagtattttccattctttcctcaccactaagctagccttagtggcttttgggcaacaaagttagttggctaattattcttttctcgaagaaactaacatcaaagcttataaatagaccacataattactcaaaactcagatacaacatcacctagatgaatttatctctatcttagacgaaactctagatcttcttagtctaattatgtccaagaaaatagagaggatggttgtaaatggaacacatgtgtgtttgattattttaagatcgagttgtaatttgagattgtaaaagtgatgattatattcaataaaaaatatcatttttcaccattaattcaagctaattaatttttcgtttttacacttttgttcactttgttatagtttggatttatgtcctcttgatcacatttttatggttgaacagtcacattaattatattggtctaatagtaactataacaaacattgtcatgcatcaaaataaaatattttgagcatgtattattaaacctaatatatatatacataattacatatatcaccttttgcaatcctaatgaggaataattgaggattgttgccttgtttttcagctaaaaccccatcaaacgtataaatccaccaaccaaagcacaaatcaatttgattacatatcaacattaccttctaactaatagcacctactacatgttaattaataaaggaaataataaaaaaaaaaagcatgaagaaaagattgtacttctagctttatttatttcattattttttaaaactaaactttaaacaaaaaattatgacaaaaataattgatttatttgtatcaatttgttttgcatatatagtattattaggattagttaattagacacgaaaataatcatactcaatttaaatctaatcatattcagataattattaaatatattatattaattaagtcacataaagttgtgttgttgatttgacaaataatacatgtttctttctatttggcatttacaataatatagtatctagttatttatattgctcaatatatggatagctagtagtaaatagtatatataggatattaatttctgtgtataggtatatattaattccaagctaatacaagcaattaaataaaggtaaatgcttgagttgaattgactgataaactgttagagaaatgatcataatgatggcctccatgattgttgatcagattgatgaattatatatacacaagaaaaaattggaaatgacttttttggtgggaacagaatttcttggccccagctctctatatgatttggaatttaggagtactgatattaataaaggtgaaagagagagttagcttgtgaagtgatgcacttggccaatgaaatggaaagaagaaaaaaaaagtaggtttgcatagaaagagaaataatattcaaacaattaggggatatataccctaccacttgtttcatgactcctcatatagttatagtgactagtgagagaggtgatattcaaggttccaattcatgccctctaaggatctcaacctttttattttgtagtagttttttttatacttttttttttcatgaattc

SEQ ID NO: 305284 - DNA, 1355 bp, Cannabis indica
gttgttgttgttgagtctgaattgatttagatcaattatcatcacagtaatatcatccaaactacccttgtttacagccaagttcacaagctccttacatgcagccacaagctccttactactcagctttgtgggagagtccatcttcgagtttactcgcttagccagagatattcttcgcgattttgatggagggctttcgctttcattggcaataaaatcatgttcactttgattcttcaagttcaagccattgttgcttgtcttcttatagcttggagacttggttatcatcaaccctttctttgcttgcttaacaagagagaccctgcgtaactttgatgagggctcacattaacaaggccatattcactatagtcattctctttaagataatctccggaagagggtcctaattttttctcaactgaacataatgattgtttaactgtatctatggcttcttggttgccaacctaggaagaaaaaaacaatcaatggaatgttaggatttatgcaatgaagattggatatcttagttttcatggaaaaatactatacaatagctgagaatgaatcttttgtaagtttggttataatatttatgtttagttagagttgttaatcagtattgtttcatggttgttataaagagcttatattttatttgaagtttaaactttgtattgatttcacctttaaattttgtatgaattgttaagcataaaaataaagacaaaacaccaaaattgcaccacataatacagttctagctagaaagaaaaatgactcaaatatataaaagttcaaaccgttcgcacaacaaacacccctaaaaatgagtagcctaatatcgttaaccttcatgtgccatatgctttttcttaggaaaaatgcaataaatataagatatagtgagacactatgataaaattcaaattacaaaaagaaacatagtgcatttttgcatcatcataactaaaaaggaaaattacggcgtaaatcttcaaaagattaactttgatgtcgagataagttcccacatttaaaattgacagtaatagtaatcaagtcacgtttttttgtaagtactgacaataatgtcacatgttgaaggtttattgctccaaatattaattttgattaaaaataatttatataaataaaaattttaggtgtcgtttagtaacatttttattttttaattttttaatcacaaaaaagaaagtagaatttttgttttaaaaattttgttcttgaaaaataaaaatgtgttctataaccacttttgttttataattttaaaaatagaaaacaaaagtatgttctgtgaaattcatttttattttattttt

SEQ ID NO: 305285 - DNA, 957 bp, Cannabis indica
caatgcacaagatcaaaaattttagcaagcaaatttaccattatttggaaatgggagtttcttttgcttagccattggacaaatataacaaggtgagtctttatgtaaagttgaagtaattacaatttagagcttaatttcctaaacaatttcaagtatttatcagacaaatgtcctagtctagcatgccaagtttcagcggtaacattgaagataggagaatcagtaggattttgatccaatatgtatagtcctatcctttgcaatcacctctgccaatcttcttcttgttggcaaggtcctgcaagataaaatcattagtagtaatcttaaccttgagataattatcattggttaagcaacatactgatataatattatacttgaaatcgggaacaaagagaacatccttcaggataatgtcttttgtgacagcaatggtgccactttggtgaacaaaaataaaattgccattagggagaagtaattgggtaggagcaacattgcatatgcattgaaacaaattgatgttagagcaaatatgtccagttgctcttgagtctaaaatccatgaattactaatgggaaatttaattatgtttgacatgatgataccttggttacctgtaccattattggtttctggtttgggaatgcttgcttgctgtccagctaacaaattgaggagttgctggtattgcagatcacttaattgaggtagcagagtttggccttctccttgattattgctggtttcattattggcttgcacttgattggcagcagcatctttggatttgtttttgttgtatccagggggatacctgtggatcttgtagcacctttcaatcgtacggctaagaatattgcagtgggtgcaaaagggcctatttcttttggaaggctgagacttgtttccttgagaatcaagtttgttgaacttgacttgtccccttg

SEQ ID NO: 305286 - DNA, 2144 bp, Cannabis indica
caaagaaggttagttacattttttttttacattttaaaaagtctagatttttttttatactaatattatgtttattaattagtatgatatttttttctttgacgacctccaagaaaatagtaagcaatgaaattgcaatactagtcagattacaacacaagaaattatcaataaaatttgtagaggttactttttgtttttttgatttgatttatatttaatatgtacacgtatttattataagtacagggtgttcaaatttctcaagatacatatatatgttgatggacaaattcaaagaattaattaggaacaactactatatacaagttaatgaacaagagagtgatcatattattggagatcttaatttgtctatgtgacctatgaagaattctatatatatagactataatgatgattatcattgttaaagaataaaagaattttatggtagaagcgttggttattatttgactatgaatttttaatttaagtttttttttttttgtagaataggtgtgcaagaattaatttttgttaacagacactgttattcttattaatttgagtaattttttatttttgtgtgtgcaatatattttcatgtttcactttttatattaatgtctttaagttgatcaattttttagatggctatttttggtgtgcttcttatatgattttataagaaaaaacatgaagtttgattttttttttatcaacgatataataataataaaaaaaaaaagatacagagtgaccaatattcaaagaaataaaatttaaaatgacatttaaattagctcttgtgtaatccaaagaaataataatttttgtttttatttaatttatttatattttataaataatgaattaattacgaaatataaggtgtatgtcttttatatatatatatatttatatatagtattatttataaatcatatgttactcattttttttcttctttaatatgtttaagaaaaaaagaaaagaaaagaaaaataggaaagagttaagaaagtaggatattttatataaatacaaataaataaaaagtaaaattaaattttctaaaaatgataacatgagatgtgtatgtgtgtaaaaatatggtgtaaattaaataaaagtatatctattattactccttactaatattaatcatttcggtctagtgtatacattagattaaagtgctataataaacataggataaaagataattaattagtaattgtgtagatggaggttttcttttcttgataattattaaataatagaggtgtgtaggttgcaaacgtggtgcaaatatagccatgcatgtgcatctactattattcatctaatcatcaagtttgattaccattttgtttttcactatagagaaaatgagaattaatgcctttgaggtatatgtatacatatacgatgtgattttatattaatgtctttagtagagaactcatgtctaaaattttataataataataataataaagacaagaatatataatgataagattggtagtaatggagaagagggtccagagagaggagcagcattgagtggtgaggtccatatgcgtttatttgtataatgatattgaaaggagacgcggggggtggttatgattaattatgaatgactgagtcaattaccacaaagaatatatatacatatatttaaatataagatgccttgtaactgtaaacttaaagtcagaccatcttcctctttctctgtttttcgacactggagaactcataatttataggataccctaaataattaatcttttttggtttcaaactctcaatcttacaatatatatttatgagcatatattgttattgggtgtttagtattttttataaattgtgctttataattggttagtaatattctataaaaactattttcttaaattatttttaccaataatacctttaacaattctctatatttatataaattaacattttaggccaattctaatgaaacattaaggtgtcgttttgtaacacttttgttttctaattttttaatcacaaaatgaaagtaacatttttgcttttaaaaattttgcttttgaaaaacaaaaatgcgttctgtaattacttttgtttttcaattttaa

SEQ ID NO: 305287 - DNA, 1649 bp, Cannabis indica
aaatatcaacttcattaaaatagcataacattctgagtacacaatattttaaaatatattcagctgaaataggaaagtcaaaaataatacaaccaatatgaaatacgaaagtgagaaatgttctccaatactatatcatagtattaagaacttatatactacaaagttaaactaatatcttgttgtttgtaacttatatatcgtatacgtagtgcaaaaaacttatatgccttgccgttaaattaatatagttattgtacttaactttaatattacacattggcattttgagagcatccccaatagtatatatatatataaattagtccatgttgataaaattacattctaatagtgatataatatgattcaatttgacacatactaaaaagtgtatcaaatttaacacaaaatataatatgagccaaattttatacaataataaataatattttttaatattattactactgcaattaatagtgtttatatttttatttatatatttaatataaattttatatacttttaataaaaatttaatatttttgttattattttacacattcctattaaaataaagtaaattttatctgtaatgtattggaacacaattatacaatttagaccaaatataatactaattacttattttaataagatttagcacaaaatttacaccatcaatcacaaatggtctaacataacaataaaacaaaaacaacaacataaaataataaaacaaaaataacaagaaaactacctgtatcaataaattaaataaaaaataaagttgttgttataaacctaactaaaaaaaaaagttgttgacataaagattattttgttcattagagtctcattgtcattgtgataaaaaaagtaaccatactttaaaagaaatttagattaatttaataaaaaaatgtttctttattaaattcaattacaaaaattactcttcaactcaaaataaacagaagactatgcccgaagaagaagaaagaaaggaagagaaaaaaaataaacttataattaataattaaaaaaatatcataatactaaaaaaattaaacaggctgacagagaatacacgtgctggagagattcacgttctagggtttcgtccttcgcttcaacccagccgcttagacgatctgataatgacggtacctccccattcgcagacgatagtggtgtaagctcttccccgtttgtagacgccgacggtgcacgatctcccaatcgcagatgacggtggagagttccttccctcccgcaaacatcaacgacggcagtgtgaaggttcctgggatttcatccattgttccgtgttgttgattaaagagagtaaaagattggttcaagctgtttccgttctgcgattcagtttcgtgttcttctgtgtcgttgatcaaagacagtaaaagattggttcaacctgttttcgtgagttacagtcaacgattggttggttttagttttctgttcccatgagttattagttggctatatttcttttgttcttttgttgaacaattggctttagtttattcttttcgtgagttacagtcaacaattggttgctttacagtgaacgattggtttttgttcttttgttttaaattactctttttttttagtttttt

SEQ ID NO: 305288 - DNA, 994 bp, Cannabis indica
ggcttcagttaactagaaaagcccacacttgtgcttcatttagactttacacagaaatgctaagcccattaactattcatcaccaacaatataggttaacacatcaaaaaactatccaatcaattcaagttttaataaaattaataaaaattaatgtaagtctaaataaaaaaacctaataccgcgtacaaaatattgtggcgattaaaatttaactgaatgtgaaaagtccataatgcgagattggtctctcaatcaaaaagtacttttaaataaaatgatatggtgactattttaatactattttggacattgtaggttatctagatttttcaaaaatttgtaagaatcatgctcctggtagagatgcctcaatgttatacacccttatataataaaactttttcacttgtcaaatgctcataataataggatcgatgcttttatctaaatataatttgagtataataatatgtgcattcaataccaaaatattaatgtggcatttctttttaaaataacgggtcccaatttaaaattaattaagcacacaaatgaggttgaatagggtaggacttattggacaataaatctcctcttcttcttccttcccacaactaaatttggtttttcaatatttctttcatcctattattagaaatagagggagagatagtgaagtcaatggacccatcacccgtgtatacattttcttctcaatataatattagacaggtaggatttcatttctttaatttcgaattcaaaaataaaattaaatgcataaaacttaaaagtattatacattggataataattatgccgattactataaaaaatattactacaacaataaaatttgtgactaaatatatgtaaataattgaattatattgtacaaaaattactatttacaatttacaggacaccaaactcagatttcacttaaagttttaaactactctctatcaatcatactaatttctcacttttt

SEQ ID NO: 305289 - DNA, 1793 bp, Cannabis indica
agaaccatgcaacaaaaaatgtatctgatctttattaattagtaaatttgattattatgaaatgagttttatttagggcacaaaacccaaaaattggttgttatatttattttacaatgttatttagattttcgatctgtgggttgtcagtatttttgttgatttttttttttgtgtgtgaattgttcttctttgaaaattttgcgtctttctaatttttggattttcttataagcttgatggttttttatattggtacgatagtggtccaatgagttttcagtttagagattaggggtgatgtcttgatgggggtccgatagggggacgataaaagcccaatattttttgggtgtgtagagtcaagataaatgacccgatcttgtttgatggtggaagataggagcctgatagttagcgttgtttattaagcatgatttaggcagatagttttttgatggtggtacgatagtcgtgtctataaatcaaaaccattccccatccagttttcaattatatgattataaaccatcttttaaaaaaaattagggtctgagatcacaggcaactccgagtttgtttggaatgcgaaggagttacagatcattgtgctttctaaattttatcgagtacttcacaaaattgcattgtcaaactagcaggcaaattcacacatctctacaatcaactataatacatctaggtttctctttgcattgggtactagtgtcagtattgatcttccaccactcatgtatgatcagatagtgagttttgccactgccaaaggggtcaaacacacacggccttatccaatcttgattaatcgtgtggtaaaaagaggttttcctactatctatgagcatgataagattttgcatgttcctactcttaagaaatctttcactcttgtgcatggtaagtctctgtcattattagttatggatgttctgctacaggtgaggccctggcatctaatgtcccttcttcctcgactgttctttcagctcttttggaagggtttagtcctgcatcttagccaagtcaattgttctcaaaggtgaatgagtttgttgacacttatgctcatgaccaactcaggcagcgtcagtttgaaaaagcagttattgatatattgtctgctatgactgaagtttaaaatcttttgaagcttgtcctgatgctcctgcccatgatgacttctccagttcctcaaatgatgttggtgccttttttgtgcattccgtagtgatttctccattgaatatgggtacagttccatctgttactgctggccatgctcctttcttccctgagtctaatgttcagccttcttctataggtgttgatcacggtccttcaggtagtgctattgtccaagagaagccagtttctactgatctccaaggggagcaagatattgctcatggtcaaaatgaatccactgctgctgatatccaaggaagcaagttcttgtatgtgatcataatgattcaacaacagttgttgatattgtgtctctctttctgtattttgtgcatggtcgttgatcataatttgccaatggggagattgtaagtgcaaggttttctgtatggcaaattatgtggatgttcatctgttaatgtaataccctagaattaagaaatggattagcaaaaccctaattagataattgtgaataattgaggaattgtattattatatagttcaatttatgtgaattaatatgatttattatatggtaagacctcgttggtgagccaggagtattttagtaattgtgacccgag

SEQ ID NO: 305290 - DNA, 1387 bp, Cannabis indica
aaaaatgatgtattgatgtactatctatctaaatttttgtggccattattttttcatattcatgtgcggtagttatttaaaatatactacataattttgagaaattcagaatatcttacaatatagaaaagtcacgcgtacaatataatatttgaactctgcttttggtatgctaaattttttcgaatttcttaaaagtttgcatgatgtcttaaataattaatgtatatgaccataaaaaaaaatttagctaaacaattatttcggacactaaaatagataaaaatacattgatacatttttttttttaaaagagtacattataaaatattcttaaatattataatattactaacatattatttgtatatatatatatttataggaaagaatgattgaaaaaatatttcctatcagtggctatactgtggttgtgagagaagaagatatcaagcattggctgaatattgctccaatgttgatagcaactgatttagataatgattttaattctttggtaagaaaaaagagaatatttatttatttgattattgttaatcaatttttgcaattttcttatataacttttataatgaatctaacatatttattgtttttaatgttttttaggtataattacagtccgaaatttcataccatggtactcatcggatgtgaaaaacatgaatggctttgccaaaacttcaatggacagaattatgacgaaaaaggatttgaaagattattaattggtcatgaaaagaatctcattaaagcatattctttacatcttccaaaaggttaatttaaaatttaatcatattttaaaataacttattttttatttaaaatttttaaaatgcatacaattaacttattgattttgtgtgcttctattaaatttagttattttgtatgtttgctaatctaaaattaaatcaatgacttaatagcaacttattaatttttggcgtgttaatttaatatttaaaattattgagctagaataaatctctatctgttaatatttatttgtttctttaacttgtattattattttttttcttcaacatgtattattatatagagtgcttttacaatgcacttctttaaaagaggtccaccgataatctctctatctgtttcgacatttgagaaaaatatttagtttaatttttgtatggtcgtctatgttgaaattattgaagacattctttaaaattttgagaaatttaaaaaaatttaacacgttgaaaactgggtagcacacgagactcttttattttatacgcgtgtgaaatagaatgtttgaactctattttcggcgtgaataattttttttttttgaattttcttaaaattttacaaaaatctcataaataactat

SEQ ID NO: 305291 - DNA, 954 bp, Cannabis indica
ttgattaatttaatttattaattatatgtgatgtacagaaaaaaaatgagtattccggctacagtgtctcgtgcgctgaaatacgtaccattgctacaagaagaagtggagggactggttcgaaaaagggatgagctattgtcaaggattcaatcaaaggagcaagggaattatactaagaatagtattgaaaaagtcgacaaaataaaagggacagctccaaaatcattatcttcaatttcagccactcaactcagtgagaaagaaatagcagttcaaatatccacatataaactccacaacaatctattatctcaaatgctatttaattttgagggagatggcctttcattactacatgcttcttcatttgagtcttttcgagggagggtcttccacaatttacatcttcatgtacgtatataatatattttataattatcattcacattcttaatttctctttcatatgtatatatatatatatatatatctatatataatatgtatgtttattaatttctataataattgtaatctaatgtatttgggttctgtgcaggtggaagtagactcttgtggggctttaagggagaagtttgtttatgcatatagccactagctatatactagaaaactatatatactgattactgattagacgatgcatactgtgttctcgtgttaaaaatagacacgtgaatatagatatagttgctatgaatagataattatgagttatgatcatgtcaaaaagtttttaatatatgtgataatttcataaagttgtgatgagatactgcaatatagtactgatcgaagtatgtgatcacaataactacttactatgcatttactaaaagattaattataaatgggttactgttactctggtaaaaagaaaaaaaaattatattgatgggtgaggaaagcaggttaattgaaacgtgtata

SEQ ID NO: 305292 - DNA, 1135 bp, Cannabis indica
agggcataaaacccaacagggcggttgttgacgatcatgatgtttgtattctcgcgtctactgcggttgctcttgaagttgttttgacaacctctatggcagaacctttggctatcctttatcgtcttctcttgtactctcgtctgggatttctaaatgtggacgtagaaagtgattgtcatcgtgtgatgttggctttgtccaacaacatgcccatgctctctgagtttggctctattctttttgatatctttgctatttcttctaaggttaatgttgttagctatttgcattgtaatagagtgaataatacgattgctcacaagcttgctcatttggctttgtcacttgagaatgctatggtagggtggtcaggtctaccggttggatatattaagttgtttctttggttattggcaattttcgtttaatgaaatttcatactttttttcaaaaaataaattatgttaattaattttatatatttattttatgtgtgttttatttcactcactaggtcattttgagatacaagaacttcaaaaaagataagttttattacaactctcattctcaaatttttactatatttacttgatatgattttttttttcttgtgtagatatgttaggagagaaacgcttcttagtgattttttttatgatattaaaattttattatttagttttacaaaagtatttctttttatggaagtcgcaatattaatattgtggctcatagattgattcagtgtacccttaaaatagagagcaaatttttttaaatggaaagaaagttttcacttttattgtgtaaacattacacacaatcacatcacattagtttttaaaacattagaacacaaaataaataaaatataacttttataaaattgacactgtaagatttaggaggtgtatatattaagtatacatatcactactctttattgaaacacagtacttaatatttttagacaaataatggtatgtttacaagaaacctaacaagtaactaactaataatcttgttatatctccaaacaatttgagaggagttatatattcgtattgttccatcgaaggacaaatatatcttttgaattatacttcaaattcaaacaacctaaaaatct

SEQ ID NO: 305293 - DNA, 4909 bp, Cannabis indica
aaaaaaaagataattgggtcctatattaaaaaaaatggtatttttaaaactactaaataatatgtatattttcaaaaatatatatttttttagcctcaacgttgggtgggccctttgcaatgactaggcccgccttagcacaagcttaactctaaaaatattcctttacaaattaatttttcattcatgcatggttaaaattattgttttgtgtgtagactcaattaatggatcttacttttaatctcaatgagctaaatgagctcttctttgtaaataaagtagttagaatcaaatagagggctatacatgtagtgtattgttttaattttaaaaaaataaaatttcagtggtggtgtaaaaagtgtatcaaatttcgacacatgctaaaaattaggccaaattcaacacaaaatatagttcgggccaaatttacactacaattaatattacattttttatttactcatttgccactaattaatgatttttactaattaaaatatttttatattgatttaaataatttttttatatatatagtttcaataaaaaaaaaaataatgatatgttgactttaaaataagttaatttaaatcttgtacattaaagtacaattgcaaaatttgagctaaatatagcgatattcaataataaatatagaaagcttctcatcatgatttcatgagtgagagaagagaaaaagaggaagaaaagataggagaaaaggaataaagagtgggaaattataattaggtctctaattaatcaagcacaaattataatttgtgataattcatgttttgttatttcccatacatatcatgcatgaaagatatgaatgttcatgaaaataagagttacaaccaattggctaaatagctatagctagctagccattatttaaaatagtttgttatttattgcacttattgctttcataatatttatggcacttcttttaaatggaaatgctgtatgggacacccttgtttgtgataccttcctctgaaaatggcttaagaaactcataaggcaaaattccagctccatgtctattcttaagattctcatcatcgttcctctcatcgataatatcttcaatttgcttgatcctttgttggaatttcttaaatgagtctaagatcttagaatcttccttccaagcagactcaacatgatgccctaaatattcctcatcgctcgcatgagtagacaacaagtctaatgcagccatattctttgctgcttgaagctgtgaagggaagcacttaagaattgtgtcttctggattcgccttaaaggctttccaaacctcgggttttgattctttttcttctgaaggcatgttggttcttgtgagcgaaggtcggtttgggaaataggctgaaaaagcatattgtccaaagttgacagcagcatggtgaccagatgcgatccatgctatgtttgtcacaatatctatgaggtcttcacgtgtctttaggtcaggccaaccctccttttatcagcatgaccgactgttcggatctccttccaccattcttgtagctcctcatcactctcaatctcgcttgagttggcatagtaatgtttaacatactcagtaacccattctttaatggcgtcccatattaggagaccatcgttggcgtaagggtagtcatcgattgttagtcttagaccatgctcacatgtctcatcctcaactgccatacctctacacattttgtaataatcattaatattagttaaacgatgtataataaatctcaaccctataattgcacatatatataaaaaagtaattttagtcacaacatagattttttgtgactgaatcgtgatttttagtcacaataaaaagttacttgtgactaaaacataatatttagatacaaattgtcatcaattcagttttagtcataataaattgtaatttttgtgactaatacttttagtcacaacacaagaatgatagtttacaattagtcacaattttttcactttcaatcacaagtttgttataattaaaagcaaaatttttgtagtaatacctgtggactaggtcagcaggtaagccttgtagatcgaatctccattgcttatcatagataacagaactaagctcaagacaatattttccaggtgcaaaagtactttcaataacaccgcctgcgttaatcaaagtatttcgagcaagagcattaatctccatcgtatacctcaaatgcggttgcaacaatctgttgatcgggtgcatcgcactaagttgtctatttgttgcaatcacataaggttcaacacaacaatgtgttcttagcctgcatgcaccatcaaattatcatctcattagcgaaaaacattggctaagttcacggcagtgtaatattaaacctaactctaatcgaaatattgtatattttacctgactaacgagttggtgaacaccggcatcatgagcaaggacatgagcttttgcaagtttccaaagccaaatatcagtagaatgccaattactatttggggtatagacttccttccattgtggcttaccatccatgggtggcctagttaactcaatagccataggcattaatgtcccatatggagttaagaaaaataaggttcttgatccatagagtgttcttttttccaatttccttactttactcacatatggtagtaacacatcatggtaatctaataagtacaacttcttctctcttctagcctgcaattatacatacataataattaaataattacttaatttaatcacaattttaattattatgctaaaaaaatcaataaaatatatgtacatcgagcagtgtatagtcataagctttaagttgttgctcaatgatttctgtagtgatttttgattcttggggaccataaatagaagggtcgagttcactctttagtggccattcctacaaagtcaaatagtaacaaattatattaatttggtaacaaattttttaatattgtaaaattaagttcaattattaacataattaataagaacataccgtcactaattgaagacaacaagggttgagaccagcaatagtttgtctagcaaattcttcatctctaaaccaaaagaacttgtccactatatttaattaacattaaaaaaatctagattagcatatatttaattaaatgtttggtaaattaaataacattattttttacaaaatcaactctttaaattaattgaccaaataatattttataaaaattaggctattttgataaataattcaatgaaataaaataatattaatttgtacttactatcagcagtgggtggttgtttaaacttaataacattatcaacaaggctttcagcaaccaaaacagatgagtagagtttagttccaacatgtaatgccaacatttctttgattgacttgtctcccgagatcgatttatcagtgatttcataaccttctttgaacattttgtcaatatctgtgaaatttgggaatttttcatcaaacatgttgctttctaagaatggaattaggcttttaatccctaatgctattctcctcgacgcgaaatcattttgttttacttcagcaaatgtttcatctcgaggaacatagaacgcagtcttactccttgactccgatgataaatctgtacatatatatacatgcattaattttatgaagctaataattaacaatcgtccaatcaatctaactattaattccacgatcacaaaatgagtgaaataatgtaaatgtcttatagaaaagagaaatactaaagggcaccagtggcgcgtagcaccttcctatatgtcagtatcgctattggtccaactaaatatcgcgtcccatatagtttaatataataatttttaggtggtattggtagccaatcgcaacgtcttgtcgacaaggtgctaagcaccattggtgccttatagcaatgctctataaaaaaaaaaaagttgttctggtatacttttattggttttgatctagtcatttagttttttttttcataatttgttgtgtacattaattatgttatttaagacaccacatctacattttttaaaaaaattgtgaatattttacagcatagtatcaaaaataaaatttaaatattttgttatatgtgtgatattattttaagcgttgttattgggcaccagtagtactcaacatcgtgtataggtggcgtctcacaattagttaatgatattccctaaatgttattttttttaagttataggagactcaatactcaatttactaataacaataaaacaccgagaaagatactagacatcattactactttttagtaattctttattattttttttataaatataattttttaaaaaactataaactatttagaattttcataaaacttataaacacacttaaatgactaaaaattctttactagaacaactcttttgaaagataatgagcttagtctaaaggattaagataagactttttcaaaaataatatgtgatatacatatatatatgtttgaaattatatataaattaattaccagttttagtttgaggacgaccagtcctacaacgtcttggataaggatgttgaggaccaccaagaactggtctactgagctctgaacttttatcaggaacaccaagatcattatacacatcataatcataaactctctcatactcctttctctctcctttcccatttcctctcaatcttttcagttcttcatttctcaattcctttagtccacttggtgtttgtgatggtaaatatgactgtaataatatatatattcacatacaaattagattttagtgtcctcacttttataaacatatgatttgaacctataatattttataatatgtcaataactcaaaccgact

SEQ ID NO: 305294 - DNA, 813 bp, Cannabis indica
attgtttttttttttgaaatttggctctcatgtttcgatgtgtttccttaattcttgaatatgaaagcacatggtcatttgtctcttgctacgattttgagatgtgagcggttattgtaggttggtcaaactggaaagatagttgcacctgaactatacatggctttcggggtatccggagccattcaacacttagcaggcatgaaagattccaaggtcattgttgcagtgaacaaagatgcagatgcacccatttttcaggtaattggttgaattttaacttaagacttctacagtgtattcttggggctaagtgatttgattttgatacatttctttgtttttctccttacatgacaatgagctttttaatacccatcggcaggttgctgattatggactcgtaggtgatctctttgaggtgataccagagttgctagagaagcttcctgagaaaaagtgaacattgtttgaattggcctgagattgaaaatgatgcaacttgctaatatcttctctactctgtacatgacatattctgatgctgttaataataataataatcacaattatataacctgccattttaatttatcatggttattttggtgaaatagataattctctgaatcaaagtatactagattaaatccttaagtattgcacatatctattatcatcactctaaaattaagtgtgctaatatttgtaatttgatctaatttctcaactagaattcatgtttataagtttttgtaacttttgttttgcactatattcgttcagattaagcattttctttttttttttttt

SEQ ID NO: 305295 - DNA, 2276 bp, Cannabis indica
aaaaaaaaaaaaatgctatattgctagataattaaatatagctattgtaatagtgtgggtacttaatatgcaagaccttaatcaaattgagataatgagaatggagattactgtatgtattttctttattcaatttcaaatcaacaaatattgtctaatttctaaccatatgtatatatatttactgttacaatcaagaagagttcttttgggatctgctgaataatttggctacatgtgttgcctcagtactcatattattgctcagatctgtactggcttattatatagccttttctttcatgtcactttcacacgtcgtggtcgagcttggatattggttaataatatatttatatatatatatatatatttatagattttggtcttaattaagttccaatttaaacactgaccatatctttattatccatcaatatattgttttttaagtactttaacaaataaaaatgcatatatagctgcttttttaataatgtaaaagcgagatgttattagttttgtccggactaaagctcattgcgaaagtgtacatagtttttgccggaccaagcatattttatatataatttcttttgtatattattggccaaaagcctaaaagacatagtaaatccaatttacacaacaggatcatattatgtagagaaatggtaaaagggtaaagggtaccagtagtgcataacacctttttaatgttatggtccaactaagtattgaatctcatataatttaatataatagtttttagggagtatcgctagtcaattacaacgcgatatatttaaaaagtgttaggcaccctggtgcttaatagcaatgccctattagagaatcatatattcattacttttaataacatgatccagcttaaacaattgtggttggttgaaatttacgtgttcaaatatcattactcaattctaatggcttctttcatggatagttagtaaatggcggagatccagttttttatttactagcatatccaaaatccaaattaaattagctaaattttgatcaatattaaagtagatgaactcataagtcataagcggattagggtgtctagggagagctaaaacccaccttgagatataaaaatatgttactatacaattgttgcttaaatatataaatagtagtcaaataaagcaattagttaagatcctttaaattttggaatctcttaccctcttttatttattaaaaaatacacaaatttgaacttattatcactaaaataagattagatgttgctaaactattatttcacttaaatttaaattgtcatttattgttttgaattttatttataaaatcctaggttcgatgaactagttatttaataattaatattaacttatttttttgatgaaaatttcattattgagcattgttgcccaatcatattgatgtgtatggtctacaatttataggatttgatggaatacacaaataattatatatattactattgttaccttggtggggttcggatatatagtactacctatgaatgaatcaaaaggtaattaggagaaataacgtagaaagaagtactttgtttggtgccaaacatagtgtttaaattaacaataaattttaacattatttggtggcctggttactctgcttgtgttggaatgaaactatattttggatgactccattattacttgattcctattccttccttggcctttgagtttggaaagttgtgttgttcgagattatttttctctatatatatttatataatttattcagatacccaaaacctaattaaactactatatagatacaaaagtcacactcttattataatttctcttaatttatatacatttctctcaattaatgtcaaattataatctaatgctgatacaaattttcatcaagatatattgacagtaactattttaaagtatacgaatgtatcaaaaatttgtcacgtacttcattagaaataatcttagaataattcaatctttgtaacaaatctcataatacattcatggcataatattaatgaaggtataatattgaaatattaagatggtaggcaaatatatagcttttactattagtaatatataataataacttaattaaccctaaaagtacgtataggtaggtaagaaagcaaccccgacaaaaccccaggtgttaatttgtttagatatgattaaacatttacttttgatttggagtttatatatatatatatatatatatatataataatatatata

SEQ ID NO: 305296 - DNA, 961 bp, Cannabis indica
tggctctgtttctgttttccaaatgcccaaattaaacccaaaaaagagcaaagttgatctttatcgaaactttcaaaacctcttaacataaattctttaatatcacaagtgaaggttgttctgccgttttgcaacaaccacaaggcaatctctttcattcaattcttcgctgactcacttccataaatgacattcctgcatccaatgaattattcattgattaataaggttgtaaaatccaatataagcaacacaagatagaaaaaccttctaacaataaactttgtaagatcacacaaccttgtaacaatataaagatattcattaattgtctaaaagatctctataattacctaccaatattaatagccaagtcaccgcgaatggttcgggggcacaatctgtaaggtttgttgctccaatgatctttctacctgtgattataacattcttaccctcccaaaccaaactaccaaaaagggcttggtaaagagatcaacatagtgcttcttgaaaaatgcaccatcagcatgaagaacttcaaacctaaaacaaaacaaaataaattaatcaagccctcaacttagaaaacagcaattacagttctcaaatgtatgtatgaattacaaacttggacagaaaaatgttttttttagtaaaaaaaaaaaaaaaaaagacatttttgatgatatggaaagcttacctctgaaagtgaatcccttcttctcaaatctgttaatgagttcaccaatctaagtaataataatttgcaaagattaatcaaatctcggtgaatttaatttcaaaatctctctagcaaattattaatttattttatcaaatccttaatttttgtcgtactatcaaaaattcaattcaaatacattgcgcgagtagtagaatttacgtggggtatgggttttttaaactttttatgataaatatggcataattgattatg

SEQ ID NO: 305297 - DNA, 1644 bp, Cannabis indica
taacattaggtatttttgcctccaaaaataaacattaggtatttaagtgtataaaatccgatacattaggtatttatgtcgcaatttacccaaaaataaaatgaagaaatatataagtatattttgtgttatttgttggaggggtaaggataaccgataagattaataaaatagccttttaaaataaatattacatccaaatataaatttagtattttatatttttttttaaattgctcatttggtattatctaacttataaaataatactgagtcgtagagtatgtaaattttaattacaaaatcgcataaaaagttcttcgtgtcttatttatatttagtaattataaatattttaattttatttataagacttcattatagttaactaattttcgtgttaacattttgaatttgaggtatatatatgattttgttcgttattgtactttcacagattgtaatccgtgatgtacggcagccgtcagctgaggaagttatttgatctgacggctgagattgatctaggaaatcatatcctcatatatatatatatatatatatatatacattggctcatctagttgatatgtaattttttaaattgtcagaataatcaaataagtagagaaaatctccaccacgtgatttttttttaaaaaaaaaataagaaggtggaatacacaattaattgatagaaaattgaagaactcaaacactagtaaccatatatataacaaccgattggttgtttaatgaaattctaattttcatttaaaactcaattaattgaatctaatttagctcttgaccatttagacttggcaagtgtgtatgacaaaattaattaaatgaataataattgtgatgaacaaaatatcacatatgttatatgaatgtgtcctttcgtctaaatactaggaacatgttaattaatatgatgattatacatactatctaactatacaataatattgtttatttgtatacgaataatatatagtgcaaaatcacatcactcgatcggcttgcaacttccgatttttctcttcaaggtacgtataagatattataggttgataatgctaagaaataagattgtattgaccaaattagccaaacctttaggtacataatgacaatatatactaacaaacaaaacaagtaaaagccataatcaaataatatatagccaaaccccatcaacaataatagtaccaaacccaaaaatggcttcaaacacacaaaaaagccataggcttataaatttaaacaaatttaagaagaaaacatatatatacataataggtactgatactgtacgtatcattgtttctctttttgaattagtagataaattatcttttctaattataatgtttagcaatatttaatttgtgttaatgttagtgcatatgcaccttagtttatgtatatgattagaaatttatatatatatgtaaatgaatttagggagcaactacaaagtttagttgaaatacttctaatacttttttttccataccttttctcataatcatcattgtggttatagatggccgtctgtaaattttttaaaatgtaaaggatgtttttggtaatatttttttaatcaattttttgtttttgaaattagaaaagtaa

SEQ ID NO: 305298 - DNA, 3424 bp, Cannabis indica
tttttttttttggcaaagtaattgtcaaaatattattcaatttattttgcatatttaaaaaaaataaaaaattgattttattttgtcaatcattaggtatggttgatttgtatttagttgatatttttttgcatagtagagaagaaattctttttatagaaagtttttttttttttgaatgattttatagaaagtttttaatattgctatatttggtcataattgattgacataaatcattaattgatattttcgatttttctatgtatatagcatatattgtgatatttttatggcaagtattagagccaaaattatggttgtgtagctataagaaaacaaagcttgatcctatttgatttgccacatcagtttgcgaatttgtcactgtagatttggtagattttaatgatgattgatttttatgtagggtagggaaagtttgtggcagttgtaagaacatatttgtggctgtctttagggtttctatgatctataaatagtaccaagagaacaaccaaacatttttatctcttctagtctcctatttcaatatcttaattttgtgagaagagtatttcttttgtaaaaacttagagtgtttaactagatttttgttttcttgtaatgatctcttgttgttcatataataagttgaagagaagatttgacaaatatggttctttgagagaagacttttctaagtctcatttcaggaggaagtgagcacatatcttcagaagaatatttttctaagacttgcttcaagggggagtgagcatgcatcaatagatgaaaggagttcactacttggtgtgttttggaatattagattagcaaggtagattaaaaggggttacgacaaattattagagggagtctaattttttttagtcaattatatttgtaatcattgatactttactaattgatattattatctagtcgtctccaagtcgactagtagtatttgaaagaatactgataccacgtataattctcattttgtgtcaagtttttagttttgcacaatttatttctatttttgtttctatttattgcaagtttgtactctacaataacaagtttccatcctgttagtgcaagtcgttacagttaagttttaattacagttattaaagaaataaattattatatacaaaaatacaatttttcaagagagcgaagaaaaacacggaaggaaaagagaagcaaagctcaaagaagaaaggattcgaaatagggctcgggaaatgaaagcatacacttaaatagctctagaaacaagaagaggaaagcacaaagagactttatctacgtggaccaatcaaaataggagaaaagaagggagccaatggtccttcatgcctataaatagaagactccctcattcaaaaaaaaaaaatggatgaattcttgctcacatcacactagtcaaaactttgttgggatacatcctcaagaacacttcaagcttggaaagaagatgaaccaaaaaaattaacagagattgtgtaaattgatagagattgtatttaattagacttaatatggtgtaaaaattcaaagtctgaatataatgtgttgttgagccaatttttggcataaacagatggtgccatccatgggaacaactacaacaaaaagctgaatacgaactaagatgagttgtaagaaagtatcagagaaggcaacaactccaagtgaaggagatacgtctaacccagttattgatctgactactgtagtggcattagaagtgaaagaaataaatcaaataataaagccaacatcttccaagggaaaggtggtcgtgctgaaatagatccacatgatcctaggatgcacggatccaacaatctaccaagaaaatatgactcgataggagaaataaactattggaatagtgaaaaggttgagagctcagcatcatgaagtcaatgattttcttcttgaagaaaaatatttttctatgactttgatcactttcaccgaggaagaccttagagaagtaaagttgccacatgatgatgctctcgtcattcgattataaatccaagatttccttctaagaagaatcttggtagatggaggaagcagtacagacatccgtttcacgaggcattagtaatatggggctagacgaaagcaaaatcagagctttaactctactagtgctttcctttgatagtaaccaagtatatcccatgggagcgattaagctcgatgtcaggactactggaaggacattaaaggttgattttattatagtcaaatctataattggttacaaggcagtattggggagaggatgggtgcatcgaatgcaaggagtacatctacactccatcaaatcttaagatttccatctcccaatgtaatgcatgtacttgacattaagggtgtcgaaagcaagcaaagaagtgttacacaatgatgaggaaagttaatgcattgatagaggagatcgttgcagaggaagaaaaatagcagacgaactcgaagaaattccacttgacccttctgaatcgaagaaaatggtaatggtaagagcttgaatgcatgaacatgaaagggaagagatgatgggcttcattaaatggagaaggaagacctttgcctgggaatcaaggggcatgccagggatcagccttgaggtgatgacacattaacttaacatagcagcccaaaggttccccaacagttgaaaaaactcaaaggtttgctccagatatcaatcaagtaattaacgatgaagtagagagactgctgaaagtttactttatcaaagaatgcctttattcaaactggatatcaaatccattagtagtaccaaagaaaaatggaaagaaatgagtgtgtatagatttcacaactctaaataaggcctatccaaaaggcatcttcccattaccaaatatttattagatgattgatgttactattggacatgagcagttgagcttgcaagattcacattcagggctgtactactataaggtcatttccttcggattaaagaatgtgtgggaaacttaccaatgattgatgaacaaggtgttttccaagcagctcagaaaaattatgaaagtttatattgatgatttgttggtgaaatttcaaaacaaggaaaatcatattcaacacctcaaagaatgcttcggtgtgctaaatttttatcaaatgaaacttaatcccaccaaatgtgctttcggagttacatcgagaaattttttaggatacattgtgagtcgaagggggattgaggctaactcggctcagttaaggactttctctggattaaatgagtctacaaacatgcaagaagtacatagagtaatcaggaagattgttgctatgggaaaaatgttaaaaatattttaccaggatctagatttactaacaagtatgtttcattaacatc

SEQ ID NO: 305299 - DNA, 2180 bp, Cannabis indica
cttcatatatatatatatatataaaaacacttttaaaaaaataacacttagtatttatatgtatacacacattatttaatcaattttaatagagaaaaattcattaaaatagtttaatttgatggtatgcttatggtggtgacaaagatagtagctcgctggtggaagaattgatatagaggataatgtgtatatgggttgtgatatatgtggaggataatgtgtatatgggttgtgatatatgtggaggtatattagacaatctccttactaaaatgggtataatttgaatgaatatagtttgcaaaaatttttagttaactgacaacaaaaagggatcttctttaagttatattacatgagaaatcaaaaaatacaaagatatgatataaatataaactattaattaaatatgttagataacatagtattaacgggagaattcacgcaagagaaatcctccgttatcgaaatttagaaagaagggatcaaaataaagtcggaagaggacaaagagtctcagggaccacgaggaggcccctgcgagaagcactttatgaggaggccccatgcgagaagcaccctacgaggaggccccctgcgagaagcaccttacgaggaggaccctgcaaggagggacctacggggacccctccctaggaggaccgcctgcggggactcctcctgtgcggactctttgtgttggggatacaccgacaatgaccaattgttaggacctcaatcgtttgttaattcagaatttcttttattatctccctaatctcagtgacgctcaaacgatctaactaccacgggcatggtttacttagtccatgacaaggaaatatgggaggcgagatgcccaactcacctaaatatgatggtacgaggatcccaaaacatttgagaaacttgggacctgcgaagaggggtccctatgaggaccccgagtgctgcaaggaggggtccctacgaggaccacaagacctgcgaagaggggtccctacaaggaccataagtgttgcgaataggggtcccattcaggatcacgagacctgtgaaaaaggatccttatggggaccccatgacctgcaagaaggggttcctatgaggacccccgtggacttgattcgtcattgattcttcttcaagagcacaaccatttggggatccctcattgccccctttgtcatgataatactcaagtagttcaactaatatgagtatagtttaaacacttggcccatggtaaaagagtatgtgagacaaggggtcgaacttggataagagtggtggtacgaaggtcccaagttcaggaccaccaagcatggaccacaacgtcaagtcacgcgtggagataagacctaaagcgggtagtgacatttccacctctctgtagcacatgctacacccgaccaacaacatcctgcaaccactactctgagtcctgctacctaaccaacgtattgtacattggtttgtccccattggggaccactagagaattaatatgtaaataagagccatgagagctaaccttaatagagattgatccctcattcatatggggttggaaactttgtgtaaccctagctaacaaactgataatacaatacaccaacttttctccactattgctctgcaagttttctttaagtttcaaaaaattcatatattttcttagaatgtgatattcacacatagagtttccagccattaacattgttaaaatcttctttccttttttatcgttaacagccaccattttaggagtagaagaagttagaccattaaaagccatatcatcaaattctttccccaatgaagcacgaggaaccaccattagagtagtcgccctcctactagccactggtctccaagcatctacgatcgacttcccttctgaaggaccaccatgaatattaggggtgggcatcatccaatctaatccaattgaatcgaaccgaagcgatccaatccaatccaattacaaaaagttggatatacaatcacaattggattggatgctaaaagttgaattctaattaaatcgaatcgattattggatgtcaatctcaaaatccaataaaaaaccgatccaatccaattacatttatatatgttaaaaaaattatttatataataaaaaatattgacaaatataatatatattaattata

SEQ ID NO: 305300 - DNA, 1057 bp, Cannabis indica
catgcttaaaatatgttttaacttaatgatacaaacatcttcaaggggtgacaaattttctgaagtagcaactcattattgttagtttattatggtctatttgaattactttactgcagtgtattccgaagaacttgtgggatgttaatttggctagtaatggaggtggactggttttatgtggtggatggagtagatttgctagggagaacaatttgcagcctggacattcttgtgtctttgaattggttaccaaagaaacccatacagataatagtgctttgttaaatgttaccatttctagaccaatttataatgctgctgttatatagattgtaactttgtaagtgctttaattagctaattatataggacttttaagtgcagtactgctttcatcttctttaattcccatgatgtttcttaatcaagacttgctttagcattgttcaattgtttcgtttggtatgtctttaacctaaaagagacttatattttgttttttatgttcacgattatgtatcatttatatttagattatatatatggggaactctaatttggttacatgagtagataagtgatgtacattgatgattaggtggttttctcttttcttttgtcggtgtgaattaatctcacaaaatgagggacttgatcgatacttatattgtttgaacatttgaggaatatttttgaagatattctaactttgtttattctggtcggtacatgcaaactgactgtagaatggatgttggtcgaacagtgtaatgtaccttgttcggatatcccagtttcttcttcaaatcagttgtttatgagtaataaatcaccttgaacagtacaatgtgaagtgtgctatccgtccaagttacgaaattttcttcacgtgtcacctcagatggatgccacatcaccttgtgcgaaaattgagataacaaaatgtgtttatgattacaaacaaacttactctagaaatgtaataaaacaataaagaacctagagtgattagcaagcacacttagaaaaaataaatacaaattttagttcaaag

SEQ ID NO: 305301 - DNA, 2058 bp, Cannabis indica
ccgtgaacatccatactaagtggacatcgaattacatttttcttcacaaaaagaaaaataataaataaaaaggcatttaagatgaaaatttcaactcacgagtaggcaagaaaatcttaatcaagatggtagctcaagcacttcctagttatgatatgagcatctttttattaccacttgagattactgaagaaatggagagcttaatggctaagttttggtagcaataatctggtaatactcacttgggtatccattggatgtcatagaagcgcatttgcaaagacaaaactaaaggcggaatgggcttctgcaatctacgtgactttaatttggcactcttgggtaagcaaggctggcggctccttgtcaaacctgattctcttgtggctcgtatcttcaaagcaagaaagcaagatatatcccaatggttcgtttctcacaacagttattagctcaaacccgagctttgtctggcgaagcatcttaaaagcacaatcctattaatgaaaggcactaggtgggttgcggggaacgacaacaatatccctatccttggtgagtcgtggcttcctgatactgagaacccaatgattatttcttctcacccaagtctcctccatgctagagtgtgtaacctcatgaatgttaatggtgcggaatgggatgccgaagtcttaacagacctgttggacacaacaagatcgtgatttggtgttgtagattccagtccaaactcaaccaaccagggacaccttgatttgacacaaggaaatttcagggttgtatactgtgaagagtgcctacaaaattcttcaagaaacaaatggtgactagttttgacgattcagatgtgaatcgattttggaagaagctttggcaattaaaaattccactaaaaatgaagaatttgttgtggagagatggtaaaaattgtctctcaactatgtctcaacttcaatcaaagcatgtcgaggttagtattctttgccctgtttgttcattagaggagaaaaccatcccgcatgcgcttgtcacctctccaactactcaattgtgttggaatcgggtggcattggtacaaatgtgcaacctggtttttcttttattgattggtgcatcggacagttcttgaagcttgatattgaccgtatcaagttacttgtggccttgtgttgggctatttggaatgcaatgaatgacaaagtttggcaaaacaaagtggtgggtgcggatagcattgtctcatcggtgaaaaactatcttaatcaatgactacttgctcaacgctcaagtaatgagctcttgtttactatttttttaccaagggacggagcgaagcagtgggtagcaccaaatgataatagcattaagattaatattgatgcggcagtgtttcacgagacctagagctacggtgttgggtttgtggctagaggagcaagcaatgtatttctggagggttgcacaaggatgtttcaaggctcggtggcacctgaagttgctgaggcaattgggattaacgaagctttgagttggataaaagataatcattggccacatgtgatcttggaaactgattgtctttctgtggtacaagccattcgtagttccattgtcatgattttcatgtttggtcaagtggttaatgattgtaaggctttgttatgttcgttgagaaatgtgtctttttactttgtaaaacaatcaattacggtggctcactcttttgctagagcttcaatattttatcatgattgtcatttcaatttaaaaaatgtcccaactgacttattagttattacctctcttaataattgagttttatggttaataaaatactaatttttcattaaataaaatgaaaaatcaggataatatttatttaaatgggacctttatttttctattacatcaatactacttgtaaaactttatcctataaatattaatcaaaaaaaaaactttatcctataaattaggggtgggcatccgatccaatccaacctttttttcctcatccgatccaatccaattagtaattggatttggaaaatc

SEQ ID NO: 305302 - DNA, 1789 bp, Cannabis indica
aatatcaactcactaacaacacaaataaatgagataattatcctcgcacaattaatatccaaacacaaaattaaatactattttaaactagatattacataagaagtcattctgaacatcctatttctatcaacaacagaatcccaaccacaagactaaagctgtagttttcaaattgcaaataaatcacatgtaaatctttatatttcgacatgcaatgaagtttaagaaattaacctaatgatgaaataggcaaagactctacactcgaaagaaagtatggtttggaagaacacacactaacgtcaaaaaatggttgtatagaaattttttgaaccgaaggatcttcgtttcgatcaagcctatcaacaatgacgttgaactggtcaataagggagacaattttagaactaatatctagatttgcgatttccactagcgatgcagtcaaaatcactagtggtggtgcaccttgaaattcttgagccttaattccaagaagaagataaatggagaagtcaatatcacgctctagtatgacccaattcgtgtacaatgttgtttttgagttttcactctcgaagattataattttaaaataggaaaatttgaaatttgggtaaaggtagtaaaaattgcatttataagtatttatacttgcaaaaacacaaagcaggtccaccgattaagaaatctctctatctataacatttaatgcattgtatagaactgaggcaaaactgcataatgatatttttctcgaagcttgagctggaataaatagtcgtcaaaacatttgggttgtcacgcatgcctcgtcaattgaacggataccttgcgggccaatgaaataatgccacaccaaatcctaaaagtaaatgaataaaagttgtcttccatattcattttacttaaaaaattgtaaagatttcacctttagcctccacatgtccacttatgtagactgaaacaagcttatccacaacattccaaaagctttaggggtaaatattattcgtgtttccggtaagagacacatggacacaaggcaactacttaaagtccattagtgggccttaaatgacaaagatttggccaagtccaatatcaacctagcctttttggaagacactcacataacttacctaggcgagtctcatctaattaagtgtagcccatagttggaggacacttagcttcgcgtagctagaagtgcctataagcatgtgactagaaaccagtagtagtttcacatttgttaatttgcacataataaggaaggtactctcctcaaatcgtagacagagaataatatcaagttaaaacaggaaactgcataattgaagatcaaataatttgtaacgcctgtatttttaatttactaaacccaaaaaataattttaatatatcataactttataaacatataggccgggatcccgagtatcaaaatatgatttaacagtatcttactagcatatgtatatgtatatatatttttttttttacaaattcatgatcaggcaactcaaaacacggactcaaaataataaaagaccgaaactctccaggttacactgccgcaatatgtacaatctctgccgagctccatctcactgttcctccagcttcgcttttcctttacctacaccaggtagaaaactgatgagtcaacagactcagtaagacaagcaagacacatatatatacaagtaatgcaacgtcagctttatgcttaagccgccctgagctcaaaaattgagctcaccaagtggataagaacgttctt

SEQ ID NO: 305303 - DNA, 1759 bp, Cannabis indica
ttattctatgtgggacaatgtccacaatacccctagtcccagagcattaatttatatttgaaaataaaaattaactagttataatatatttgaattcaagtatagtaagtagtcttgttaaatgagactattattttatattgatgagttctaatattttgtttatatatataggtgatcaatgtattaaaaggtgatattagagatgtgaagcttaaagttttaggagaagatgtttgggaattccctaataaagagattaattatccaactctacaactacaccccacatcatctctaaacaccttagaagacttaatccataaattaactcgtcgtgacctagacaggttgaaggatcatttttactgggatgaagagagaaacaagactgttgaagttgagtcacaagaagatgaggttctaaaactttctagttttacagaatctgatttcatgcattatatcttcaaagagtctcaattcatctatttcaaaaagaagttgggaataaaaaggagtgatctagcattgaagattgttggcataaaaggttatttcataccttttaatttggcctctgttatgaaatacttgcttcacaaatacgaagacattagtaacaagtattattccaaagagttcaatagcattgggtattactttgtatgtaaagtatgaaagagatgcatactactttggttgctgacatcactaaaaatcttcttcaacaatggtatcactatttattgtttgcaagtaatgatgctcgttttgaggtggattttttgtggcaatttctatggaagatcacacgagaattctattatcaacagctaagaaaactagttgagattgagttcccaatgaaaatagaaaagaagatacttgagctgcagaagaagattgatgagtaccatgctggtcttgacaaatgcaagaaacttcgggagtctttgaattctacagaggaatctatggtgaagcagggcttggagaaggcattggaacacaagtggaagctagctacccaattttaatctaaatttgattaaaatgatgatgagaacaattgttgttgagctctataaaagtttctatgttttttattatttattttgttggaataagtgctatacatatgagtataatatacgcttacatatatatatatatatactagtatattgttacgtgcgatgcacgtatgctatgttttatattaagtattatattatgagttcggaaggaaataaatgaatcaaaaaaatataatatttaatttagagagatttgaataataaatttaaattaaacttttatgtccagtaaaaatatattggaaaaaataataataaggttataataataacaataaatccaaaaataatatgtaagaaaatttcaaaaattgtagttcgttagagagatatgtaagttaatcgtaaatattatttaattttttggtttaattattgggtttattttttgaaatttgaatttagccgtgggtttattttttgaaatttagccgtgggtttattttttgaaatttgaatttagccgtgtaaaaaaatttaaaaaatggttgttagagagatatgtgggtaagatatttttttaatttaaaaaaagattgtttaattttttggtttaattattgggtttatttatttgttaacgtttaacgttaacagtctgttaagttaatcgtgtaaggctaaataaaaaaagaatcgttaaaccaagaatcgttaaa

SEQ ID NO: 305304 - DNA, 1492 bp, Cannabis indica
aatggtcaagaataaaatacccatacatgggtaatacccattaagagcatacctatatatatatattgatgtttcaatacattaacaatgtgagactattaatagtaatacacattcctcacgtttaagcctcatatagtatggatataatgaacaatttttaagagaccacaaggtcaaacattacatttgaaagaatgatcctacaattttttgaaacaagtcaaagaccctgatactaaaaattaacatacaatagcctaaaagtcccaaatgtaggtcaaagacggagataccaagagtttttaaattgttatatatggtaccatgttaaaatttaagataaagtacatggggtaattccatctcaatgccaattgtgtgaagactcggtcaatttgagaaaaaaaatatatacagtacaaaagtgggtgggattcacaaattttttaattattcaaatccctctccctcacttgttcactctctttctctccctctcccatctctttctttctttctctctcttcaaagcatcaaaaacccactaaccaccaccaccgacgtagctccaacgagcactttctcgatcaccgtctggcctcacacgataggccaatcaaatccccaggcactgatgacctcaacccacaagtggcaccgccatttttactgccgttagattaggatcgcgagtcattgttttgaggttcaaaatttgggtgcactttttgatcacctttttgatgagttgttttcaccattagacttagctcactgaggagaacaatctacactgagtcatttcacctatctctctactttttctggtaacgttttatagctttgccctttttcgatgatatcatatactggtgtgacaagtggttggtatggtgtaatctactcactatatgtggtcattttgatatatacgacccctatttttgatgatgttttaggtacattgattactaccatcactgattattattgtgcaccccttaggtgaggttttaaaacttcaaactttaaatatagtcatgttatatgatgtttgaatcggttttgagtgtagaatataatgatgataatcataggtgagtgatatctagtattagactaaataattggcccttgggacttgaaagcttaggatttttattttagacaaagtttaatgacttaggagaggtaaggactgatcaacttgattattgaacttgcttttatatatgttgaatgacattagacatattccaattcttatcatttataatgttaacccaaaaatttttcctagtgatatggacttcaatgtatgacacatggcaagaaggatgacatcacgaagttgagtagacccgagtcatagcagtcgacctgggaggggaccctatgttgggttttatgccctaaataaaactcatttcaatataatgagatttacttattaatatagattagaaataacatttaatgttgcatggtt

SEQ ID NO: 305305 - DNA, 1611 bp, Cannabis indica
ggtcagttacttataaatcaaatgtagccagaaacaagttatttgattatttcagtttcaaaaaaagttgtgttatgtcttttggtgaagaagatgactagatagatggcattaatatttgacactaatgcaagtggttgaaaaactaacctcaggttggaacataccacacaacatctattctactcaatttgaagcctccaacaccaggaattgttagcagagggattgcattggagggtttctgcagtattttagccggactttggggctctggaactgggtccacaaccttaacagaaaatgtgcatactgttggagtcacagaggtggctaatagaagggctgtggagattggagcactttttcttatcattttctcatttataggtaaaccactcaacatgttacccgaaaaaacattgtagtaccaagtattgtatatggcatgagcatgcatcctttatgtttaaaatgtgaatgtatagacatgtatctttccatttgatttcgaagcgtttaaattgaatgttctatcgtattgatgagttagcttcttctttttaattgcttcataggaaaagttggtgccattcttgcttctataccacttgctttagctgctgctacactctgcttcatgtggggtcttactgtggccttgggtctatcaactttgcaatatagccaaacagcaagttttagaaacataacaatagttggtgtttccttattccttggcttgtctatcccctcttattttcagcaatatcaacctgaatccagcttaattctgcccagttatttcattccttactctgcagcatcgaatgggccagttcattctggtaatgaacaagtaagccatcttttcattaagctaatcttctattatgccttgcttataatttgtatactgtagacttgctgatccttgctttgttctgtgttacctagattgattttgctataaatgcacttttgtcactgaacatggtagttacactcttggttgctttagtactggacaatactgttccaggaagccggcaagaacgaggggtgtatatatggtcacactcagaagatatcagaagtgatccgtctttgcttgcagattattctctgccagggaaagtcggccggtgtttttgtttgccaaaatgcttgggggtgtgacagtttttaatatttcctcttgaatcttattaacaatattctgaaaagtcatcttatctgtgaagaggttctcagtacacagctgaattggaaggacactggagcttcaagatttatatatatatatatatatatatagggaatagttgctgttgatatacataaatagcttcttcttacacgataacgaaaatttctggctactaccaggtttgtgaaatttgttccattcaaaaaccaaacattattaatatcccggactgtactatagttaaaatttaatatattctttgagaaaggctacttgtctgtctatttgttaccaatctttttcacttctttttcattaatgtacaagcctaccatttactttacttacaaagaagttggaattattagagttgaactttacatggaatatatgaggttcac

SEQ ID NO: 305306 - DNA, 1882 bp, Cannabis indica
caaaaaaacatcttttctttcccttgctcctcttatgttttctgaaaggtaaagtaaaagcttcatgacacccaccattggccatttcggttcttatatgctcagattaagccacgtttcccaaactcaatagattgaaacttctccaaaaatatttacagagaaatttaaaaaaaaaaaagtttacctaatagaaatccaccattccctccaaataaagatgaaaaataattataataataataataaaataaataaataaaaattctaagtcaaagcactaaagccaccacctttcatcatctgcctaaactccttgtaattaaccctgccatcaccgtccacgtcaaccttcatgatcatctttttgcaatcctctacggtcctcccttgcttaagcccaagggaagctaacaccgatctgagctcatccacggtgatgaacccatctccattctgatcgaacacatcaaaggcctctttcatgtcatcgtcctctgcctctcgattgtccatgatcgatctgtaaagctcgccgaactcttccatgtccacacacccatcgccattggcgtcgattttcgctatcatctgagacaactccttatcagggataaagatacccaaattctccagcgaatcgttcaattccttcttcgtgatccgcccgtcgccgttccggtcgaacatttggaacacacgactcagctccgtcggctccattctctcgatcttgttcttcttgttactgatggccgtagcgagtgccgatgattgtacggtcgttaatggagtttgtggtgtttggtggaaccaagaagaaggtaaaaaagggattagcttcttgggcaccaacgaaaggaggaaggaattgagaaggttatatataaggaatattctaactaaaatatttggcattggaagactagaaagagagagcttctttggtttgttgtgtgtggtggtggctgtttggttaccaggaatctgttgagaaaattttggagactaaatttggttgaattttctcttctgagtttaatgtgaatggcgagaaatcggtgtggctttatttagagctgtcgtttgtgagaccaaactcacgcgtattaggaacatttatttaatattattaatttcttttaattagtactggtgtatttattttattattaattaattaattgacacttacccaaaaaaaaacgcgcttttataattgatgtttggtgatttatttatggttttggggtgtgacttggttttttttttaataattaatttttattaaatgatatgaccgttgataacggatctggaatatgaaaaacaaagagaaaaagaaaaagaagaaatataaagagaaaaaagaaagggtcttctcctataaaaaaaaaaaacaaaaaccggagtggttggggacgaaaacttgggacattaatgattggagccggcagataacgaccgttggattcgtttaacggctacttatactttaattaatgggctttggacgcgtggcaggtattttagttggcctgaggtcttttcagctatggtaagtaaccatttcttggacggccttgagaagaacagttcacacgctacttctacgtattcaagtaataatgtattattttttttgacaaacaaataataaaacaatttcattacgtttttgatacagaagatttctaccagtcactgtctagcaaattagtaatttgttgtgcagtgggaagaaagtagagaataataatataatgaattaacaataaacccaaaaaaaaaacagaaactaattcgtacggataactctagaaaaaactgttgagagagagagagagagagagagagagagagagagagagagagagagaga

SEQ ID NO: 305307 - DNA, 884 bp, Cannabis indica
agaaagtttaattaggtaaacaaatattaataaacaaaaccaaaaccaaataatttatatctgacaatttcagtcactttaacattataaatttgccaacctacatgacataatatattggcagctacttataatttttttgaaaaaattattagattttattttttatttttaagggaaaaatttattagagttagatgattgaaaaaatatattataattaatctgttttatttattaatgtacagtcttgggtaaggtgttataaggttgcagtggaagatggagttattcatgtgatcctttataacactttggatttgcattgagtaccacaattcattaatttattttgatttcaatttaccatttttattattgtgttatttaactaagaacacttcccaaaatttttggtgggtagattcactatttgttcacctaacacgtacttcaaacttaatataaaatttgaatttttttttgaatgaaacataaaaagtgattgatgtgtctttataccatattatacttaaaatttgaacttaactcccaacatcaatagttaaatagttaatttttattagatattactgaataataagtgtatgcaatttaactatttgagtgtttttaattactcataaaatatttgtagaaaaacttctttgtagcaatatacacgttaaataaaatgttaattttgattgaattgacacatgccaccaatcatattgatctaaaaataattgggaaatttaattttctatacttattaaacttaaaaaaaaaaaaaaaccaatgcattttacactataaaaaatataccaattttttaaaaaccccaaaaataccccctcataactcaaaccctttctctctcc

SEQ ID NO: 305308 - DNA, 1508 bp, Cannabis indica
aaaacacaggatctaaaatggtatttacccctaaaaaaaaataagtataaggggtaaataatttcaaaatatcactattgtagctattttagttttttttttttagttgagatattgtagctattttagttaaatagtgtgttactttaagaacaatatgacatgttcttagcctttcctttagccctcagtttcaggaaccactcgcaatcgtagcgcgtgctgttaaactgctcttcttcgccagatgaaaaaacccaaaaccagctttccagttaagctcacatcgtattcctgaattagatctcatccagggtttctcttcttatcaaggtatcatttctttgtcttctttattatactaaattttggagtattcattgtttattctattcatttctgcgtttggtgcgatgctcaatttagtgcaattttactatttgatgacactaatcaatgaacgagaaaagaagaagaaaaaaaaattatttaagtctacaaattctaatatttgttattagtaaatttggtttctttttttttttgttcttctgtgataagctttaatctaaaccctcaatgctgatacctaaaatcaatgctgtatgactgagaattaagccagtaagttcttgtaatcagtctctggattttcacacacatgtctatatttaggtagttttattagaaattaatctagggttaattgatttatgtgttacttagtaagaatagtttgcatttccttgttcatttatttttctgaattagttgaatatgaaaattccctttgtcccttttgcagcaatgtggaagcactataaaaaatccaaggcatggattaggccacaatttcgaattcttctggctgtggtctcttgtcttacttcactgattctgttgttagtatttttatgttccaacaatgctcaggaatcgaccaagtcaccattgggacttcaaaatcaaaaatggaatagctttgagtcagtggtgcagtttcatcctaccatggcttttcgaaatggtacagatgtaatatggcaagtacccaattcaccaaaagctgttctctttcttgctcatggatgtgatggtcaagctcttaacttttgggacaaatctcctgactgttctaattgcattggtttgccagaagaaaggttgattgtgcttcatgctctttctcgaaaattcgctgtacttaccatatctagtgctggcagatgctggtcaatggggaaggagataatgattgctaaagacattataagatggtgggttgagaaacaaggattagagaagcttcctcttgtggccatgggagcctcatcagggggatactttgtttctgtgcttgcaacagagttggatttctctagtattgcacttatgattgctgaaggtgtgtttgaaagaattgaaaccaaggagaactatccacccaccatgtttgtccacatgccaaaagatagtatcaggcagcgaaagattgataaaaccatgga

SEQ ID NO: 305309 - DNA, 1397 bp, Cannabis indica
taaaacacagtatttttaaaagcgtgtgacagtatttttataaaattaacccaaattctaatatttttgtaacctgttgtaatgtctagttgttgaggctcttgcctttggtgggctatgatgaagatatttctatggagaatgtaccttcctttaagaagtttgtcttgagattgagagtagtgcatgggttttagattgagttctttttaaggggtaagttgaaaaataccacttttattaattaattaatcaaatttacctctacttttatatttatttgaaacatacctctttttatgtgtattgtacccaaaataccctcacataagagaatcacatggagagtatcttgaagtgacagtgacaaaattgatacaatgtttaaaaaaaaaaggtaaaaatgatagaatttaaaaaagaggataaaaataaaataggacaatataaaaatggtatagagtgtaattttctctttttaatgtggtatggattttgaaaccattagtctcatataaggtgggtcttgagactcagtgagccttaacaaaaaaaaattattaggtcttttattcaaaatatgttatatttttgaaaattattaaaaaaacatatatttttaaaaatggaaaatatttttttgacccctgagctcatctactatgtcatgtcttgtcagcttaatttatgaaaattttaacagaaatcttagtttttagtaattgataaagttaagggagcattttaacaatactgatattataaaggttattatcatataattaaaggggcaaaataattttattctttaataaaaatcttcatttttattaaaaaataaagttaaaaagacatttttgacgatactataattttataggggcacacaattaaagttaaaaggtatttttgacgatgctaatattacaagagcacacaaatatataaaatatataagcgacaaagttttgacaaaataattttttattcaactaaaagtaacgaacgagggtcaaaaatatacaaataaaagttctggataaacaataattattatgacagaaaactattaaaattattaaactatatattccttaataagtggtttaaaatctaaaaaatattcaacgtattaatagcactaaaaaaattgaaaatcaaatcaaataaaattaatatgaaaataaatatatgatattaacctcagaaaattgccaaaatagatagaaattaaatattagaatgttttaatatatgaaggtatagaagccataggtatctttccatgaggatgcaagcaggagaaaagttggggatataatatatcaaacgattatatgatcatcccctacaaaaaaaaaaaaaaaaaaaaaaaaaaacaaaaaaaaaaaacgaaa

SEQ ID NO: 305310 - DNA, 2307 bp, Cannabis indica
aaaaaaaaaaatcaaattcaaataaataaataataaaactaaaagaggaatcatccaataaagaactcaaaaaccggccatcaatttcaatgcagtttaaatgtttagataatatattagtaaggcaaaaacgacaagcagaaaaaaatataccttgagtcgtcgagcactacttttactgacgtcttgtttgtttcatcttgggatttttgtttcaggtgcagggtaagggtcgactaaactacaagcatttagtgctcatgaattttagattgtcctaaaagaataattgaacccactcaaataaacttgacagaagtacctcagtagctatctttattttttcttcatgatttccccttgaaagcttaaaatatttagtagtaacctgcaattttttcaaaccttccatagttcttaaaaagtaaggaaatatatatatatatatatatatatatatatgtattattttataagaaatgttaaacttttactttttgtgtgcagatattgttactcaaaaatttatgtaaatatatattacatagaacgaaatcccatattaaaaatttgacaatgcataagtcttttatccacgttatgacaatttgcacatacaaaatcacagaagaaatattaaatatttactggaaaaatggtcatgctagctaaaataatccagaatagaatgctagaaatcatttccaaaagaaatttaggaaaggaatcaatgtactaataaagtaatcatatccaaatcaaaatattgtctcaatttatccaagtcaatagaacaaacaaacattattattattgttattattatcatcactcacaatacaactgcaagactacaagaaattgaacttcattatattatcatcactgataatacacactccacacagtccacatctaatcaaacattaaattagtccaaaagcaagaatttctcatccctcacccctcaatctagctaataagttgccacaatttatcaccttttgaaattttaaacattaaattgataaagcacaaactattcttagctatcaatttgacacaacaatatattgacaataccaataccaaatttgatctttgatcatataaattaaaaattatacctaacaacaaaactagataaaaaatatcatgctcggcaaatccatcactctaccatatcagttaaacaaatgatttctaacctaggaacttcacgacagagattagaactcaaatgattcaaataagcgtgaaaatgagaatactttctcgattcaatccaatatttttcaactaggttttttaattttaaaatatatatatacatatacctgaacgaaaacgacaatgttagagtaattttgtgcgaacttggcctgcacaaaaatgacaatggtagggggagagcttggcctgaacggaggagagaaggggagggggaggagcaacggaggagagttttttcgacttcaatggggtttgtggtttggagcagagagagataaaagagatgcgattggggcggagtaaggtggtgcgtcaatggcaagagcttagagaagagggcagagtgcatttggcgcgagcagtggggtttgaggcaagctttgatcaccgttcatggggtttgggattagggtagagaaagagaagagagtaatggctttggttcaaaatggggaagactcacgaattggggataatttataatttttttaaaaaatagaaagttcatttttagtgtcagtttactttttagtgtcagagatatcaccgacacaaattcattattatttgcgacggtgaccaaccgaagcaaaaagataaaggttgacttttgcgtcggtcaacaactttgaccagacgcgttgaccgacgcaaaatgtcatttttgtagcagtgaaatgaatcaaaaggcccaatgccaattgtgtcacaaatttggtcacttggtcaagcaatgcttttatcgatttgataagtctttcacaggccttgagtcctttgccaactttcctgtcacaaccaacattgctgagatgcctactgcctttaccacaccagaaacggttcaagatgacaattggtacccggagttaggtgcttctcatcatcttacacctgattcatccaatcttggggcaagcacttcatatgcaggtaatgacaagttcttgttggtaatggtgttggcctgaatattgaaagcgttggtaagtctatagcccattctcctttctcttctcaacaattaattctcaataatcttttacatgtgccttccataacaaaaaatttact

SEQ ID NO: 305311 - DNA, 2437 bp, Cannabis indica
tttttttaaatttttttttattagcattattcgttatagttacaatattattcctataattttttaaaaaattataaatagtttacaatgcctaaaacagagtttttgatattctattatatcacgcgcatttaaaaaattttaaatttatttttggcactgtaaactatttaaaaattttcaaaaatttataagaatgatattgtaaatataacgaagattattataaaaaactgaagaaaaaaaaaatatttcaattttttaagtacggagattgactaaaagattataataagaagttgatggttgttcttaccttttattttaatgaattatctaaaacttaataaatttaaaaaaataataatcatactaaagagatatagaaaacaaaaaaaataggaaaaaccgtgttttgttggttcatttcaggcaactcatattgatggttaccacttaacactaccaaaataataccatttattattattatttttctaaataataattgaatatgtccatatatgtacaactaattaattaatatttttaaaatatattataataccaatggattagatgaggttaagggatctatctacatcatgaattattacatatatttttaaagaaatgaaaaggtatgtataggatcttcttacttttctcagtgtgatgtgtgatattaatgtaattaaatatttggttatataacttaagctataaaaatttagaaaatataactaattaatcgtagaacgctatttttagatagtgaggcattactggtgctcaataaaaatgctcatattttaatatagaacattactattatgtaccagtcaaggcagggctaggcccgtgcctagaacccacattttttagagacccaaaataaaaaataaaatatctcattagtcttttatttaagtaaaattaaatatcatgtaaataacaaatatttacgggcttaattagttggggcatgtggcacattatacaatagtgtgggtttgagtctcatgttatgacactctttttcaatataaatttatgaaagtgagggccccaaaatttaaatggtcttaggcccatatattctcaggatcggcttggtataccattggtgtctaatatcacacagaggtgacactatacagttggttagtgatactccataaaagttattacattaaattatacgaaacctaatacttaattgtatcaataacaatatcacactttggagagtactaaacaacaacagtggtgtcttttagcatttctttttaagaccatctccaatggaagatctaaaatttgtgctaaatttggcacaaaaaatgagtttgctatattcagcctactatttacaattgtgctccaatgcaataaagaaaaaaaatttgattatattgatggccatttaatattttattaagaatatataaaaaattatatataaaaaattattatttttattttttattatttgataatatggtaaataaagaatgtaaagtttagtaaaagtcgatgaatcacaataattagtgacactataataaataaaaaaaagtagcatttactgtgagctaggcacaatattatatcttgtatcaaatttgatacaacttttaacatgtaccaaatttagcacactttttaaaataccattaaagtaattgtttttttcaagtgtgctaaaatatagtaatacaccacatttttacattatagatgctctaacaaatgatatatccaagctacccctataggtcttattcaccacctatatatgatattttgttgtaaaagtgttataatttattataattattttttattataccccaaattaatttgcttatccccatacttctatttaatgttttcattttaccctaaaataattactattttgattgagttattttgctataaattgtcaaaagtggtattttcaaatacatttaatgcacatgacatgagtctttacttaataatagagtttgaaatttgttttcgcatatattgaccttttggtgggaagtgaagttaattatattatcttattaatacatatttaatctgcttagggtcaaattaattcaagtaatttttcatcaattttgaatatatatatctaaatattgtataataaatagaacaaattggaatcttaaaataagctgcatacatatatgttcttaatttgtctttattattgtatagtaattaaataaactatttaaattaattgaaaaagaaaccaaacaattaactattaactacaaaaaatttattactaaaagtagagaaattgtaactaattataaatatcatcattcctatgtagtgactaaaaagtctgtggctaaaagtattagttacaaaaattacaatttattgtgactaaatgtatttttagtcacaa

SEQ ID NO: 305312 - DNA, 1193 bp, Cannabis indica
aacattaaatgttatttctgatctttttaataagtaaatctgattatattgaaatgagttttatttagggcataaaacccaacacaaaggttaaaagatacctggctcctcctctagatgacactctagatggctcccatagatttgaatgtatgcagtcaagagttccctttatgctgtactttctaacccctaatctgagtcttgttaccttccctaacacacattgctcacataattccatgtcttcaacaatactttttccaagcagcctttccgttgtcaagatctcaaggcccttcatgctcacatgtccaagtcttctatgactaagcatattataattgatcattgtctattatgccattgctgattgatcctttgttgtgttccattgcaggatgtagaccccatttattgttgatcctttcattacatttattgaccctttaagaatcttcacaatacttttctcaatttttattaggtagctttctttgtttagcataactactgacatgagatttctcttaatcttagggacatgccttacctgccgaagttcaatcaaactacctcttacaaactcgatcttcatagatcccattccaactactggacaagatctattatctccaagcttaactgttccaccctcaatttccttatagttacaaaattgaaatttgtctagatagatgttgaaggaataacttgagtcaattatccaattgagtccagagtatctgttatccgcatttttgccaaaatggcacgtggatactaattaaggaaggacgaggagattaagccacctaagtgtcccgccttgcgctccgggaagaaagcatcataaaactcgcacaacaagcccctacgagagaagcctttccaggaggagaccacgaaagagatgtccgcgggccagcgacattctccattctagaagacgggccccttttgttcccgtgaaaggtacgagtcttttaccagggtgtgttcgtctgggatatgccttcgacccgcaagagtgcagcccgcggacccatacacctattgagactgtgtaggtatgggactacacagttgaagagagcttaattagattgattgatactacctatataggtgtatcttgtttttggtagcccatcacaaaagaaactccacaattaagtgtgcttgacctaggg

SEQ ID NO: 305313 - DNA, 1255 bp, Cannabis indica
ctcacatagatagcctttgtgattaggagagtagcctaagaagatacattcctcagacttgaagtcaagcttgtgattattttagggcctcaagtgaggaaagcaagcacaaccaaaagcctttaaatttccataatcagggacttattgagacagacattcaaagggactaagatagttgagtaccggtgtaggcattctatttatagtgtgtgtggcacattggaaagcatgccaccaataggtcatatctaggccagattgagcaagaagagttaagcctatttctgtgatgtgcctatgtttcctttcaaccctcccattccgttcatgagtgtggggacaagaatattgttgaaactagatgccttggtctttaagaaacctgtcaaaaactttaaattcaccccacattcagcctgtacccgtttaataggcaaattaaactatttttcaactaagattttgaattgaataaagagttcaaaggcttgagacttcactgtcataggaaaaatctgctaaagtacgtcatcaataaaaataatataatatttgtaatttttgttggatgaatcatgagatgctccccatacatcaacaagaccagaccagactacgccgtaaggtcgagaaacacttggtgagccctagtcaggcaaaaaaatcaggtggcagctaagaattctaaagaaaaccctagaaagaatagagagaaaccctattcatattgcaaagaatttcaattgtaaaaaagactaataaaaatattttattttgaacagctaataatttcttttaataatctattacactaaatttatgagataataatcaataattataattttaataatataattaatttaatttttttatatatatataaaaaaaacagtagactacactgttatatctttaattttttttatattaaaaatacaaatttaatgctaatattaaaatttaaaactagaaattatatactaaccttctagctagttttactagtcacttagaatacaactaccataaatggtataatcataggaaacttttaattttgtaaattaacgatgcttaatttagtcatttagaattgtttgactgtataattgaacaatttattatagaggttttattttatacaagacttgtcaaaatacgcaacatatatatatatatatacatacattccataaaaaaggctttcatttctaataaaaataaaactttcatttattacatattaaaa

SEQ ID NO: 305314 - DNA, 1460 bp, Cannabis indica
gggtttaagtccggggtcggatttgggttcgagtcaaatgacgagtttagtgccagggtcatgggggtggatttgggtccagatccgggtccgatcggactccaaaatattgattaagaagaaaaaattatttaaaaaaatattgaaaacgaacttttttaaaaattttgattctcaattaataaattgaaaagtgaaaacaaatttatagaacatggtttaaaaaaatattttcactttttcaatttcaaaaacaaaaaagtgttaccaaacgccaccttaaatttttttttttttttgtggcaaaatacatttaaggattacgacctctagtccaaaagtcaatattattatgataaggctagaaaaactattttaatttacacaagtgttttgccaagtgtttgaaccttagaatttgcctgagcactcaaccaatcaaattctaaccctttgcatgactggattttcttatatttgtagtgttgggattctaatatgtgtacattgcccgctgatggcgtaaatacaaataatacatcaacttctggctcatctagtgaagcccgacccatgaggcattgatcttctgctaacgaggacgccacatcaggttgatagttgtcaaattgtatcctatttttgtggataataaaggcacattaatgcttgattgaaaattactttatctctatagtcggaagatatgattcttgaacatgatcctaggaatcaagtcctgatgttatgggatttgttaattaatgaatgtgatacgtagctggatatttggatgcttatgaactaataccctgaaagctttgctaaatgttatctagatgcacagagtgctagaaatttgtctcgtatggttgagtcatccttccagcataaaaaaggcttgacttttctaatgaacccagcttattatcttgattgtgcctgcgattgggcctagaacaattgagctaaaaccatcttagaattacatgtttcctccatccggaaacattaataacatttatcccccaagccttcagaactcaagggacattgaaggcttgcattctaccttcctgataacatgagggcatgtgtatattaaaaatgaggaaatctttttgacttccaaacaaatctatttatgatcaacaacttctcgctttttgaaataaagcaacacatggcattaattttgtggctcgtgggaattactttcattaatggagcgcgtgtagtatggatttgtaaaatgacggctaattatgttagcaagtgtcctcaggagaatatcatcattggaatacctcggttccaagcaacgcatcaaatgcaaatttgacgtctctttcgttgtaatgaccgctttagtaatttggattaataaaggaaattagcactaatttttattattttattattatttatgaatttatttaattgtggaccccaatatttag

SEQ ID NO: 305315 - DNA, 1550 bp, Cannabis indica
ttttttcttgctcatctctttaatcttctgtttacaaacctgacctgtctgtttcctttttcaatttttgtcttcttccctttcctttactagctcccactcatacaaaagccccaatatgaaaacaccaattttgacaatatacaatttcattacattttcttaaagcaaagaccaaacaaagttgaagaaggaaaacagagtgtgtaatactaaaatgaatcaagaaatgaatgggactgaagctaataataatgatcagagtcagagatcttcttatcaagagaatgggcatgagaatattgattacgttttcaaagtggtggtgattggagattctgcagttggcaaaactcaaattctttccaggtttaccaaaaacgagttttgttttgactcaaagtccaccattggagttgagttccagactcgtactgtcaccattaatgacaaactcatcaaagctcagatctgggatactgccggccaagaaaggtctattctattttcttttcttctttttaatcatacaaaacaaccattgttaagatctcgatcatatataatctgaaatttcatgtaataaaataggtatcgagctgtaacaagtgcttactacagaggagcactaggagcgatgttggtgtacgacataacgaagaggcagagcttcgaccacgtggccaggtgggtggaggagctccgagcccacgcggacagctccatagtcatcatgctgatcgggaacaaggctgatttggtcgacatgagagccgtgccgacagaggacgccgtcgagttcgccgaggatcagggccttttcttctccgagacatcggctctcagcggtgacaacgtcaacactgcgttcttcagggttttggaggagatatacggtgtcgtttcgaagaaaagtttggagtgtggaaatgggtcaaagactaatggtgtggaacttcagggttccaaaattgatgtcatttctgggtctgagatggaaatcagtgagatgaaaaagctttctgcttgttcttgttgagatttgctatagagatattacttactaagtttactatatatgatgatttacatgattatttgtttaatcaagctaagcacagcagtgattctctatctatattactctatgctttaattaggttaatttgagttttcacttattttttattttaaccttccttgttcatttttttttttggaggaaagtgaatatatttgagagaagatatctttgtggatttatgatctgatttagattttatgtttactaaacagagcacttgtattgtatgagtatttgcctatgaaagtgaacatgtagctttttattttctatctacttccaatttaaacctatctaaatagtaattaaaagagcaatttgcggcgaaacccccttatgttttgatttttatacacttaacccccttatctttatttttagtggcaaaacccccttatgttttaatttttatacacttaacccccttatctttttttggtggcaaaactcccttatgttttaattt

SEQ ID NO: 305316 - DNA, 1724 bp, Cannabis indica
ctccggaattgagaaattataactctaatgtctatttctaacaatggggcacacagataattaaattcataaataattataaaaatatcataaattagtgctaatattacctttactaatccaaattactaaagcgatcattacaatatggatcaacaacagactcttagagttcttcataagtgttactcgttgaagttgacacccctaaaaccttaacttttttgttaccaattttccttggtgtgatcagagtaccccatgtctcttttctactcaatcatctagttttgagacacctttttatggctttatagtctcaactacgttcgttgtagcaacgtcaaccatagtaacaacctcaatcatagtagtagcattaacagtagtagccacaatctcataaatagattgagaaatattctccatagttttatctttcccttgattagttttagactttttaacccaaaccttcccattatctttaacacaagtgctcacattatgacgaagaacatcacacgttccacattttataggcaaccattcatactccactagttgttccaccaattgatccaattcattaatgtagcgaatatgtttaggagatttaaccaaaatcccaacttcaactaaaacttgagcatatatgatcctcgttctatctcgagtaaccttgttaattataataggcttgcctaacgtactcacaagagcactaagactattcatgtcccaatattgcaatcccaatcaatttaatcggatccaaacatgtacataacacaccaacctgactgaatcaagatcactggtccatggtcgaataaccacatgtttcttgtcaaaataagttacccctgtttccaacactaaatcttgtgttgcctcatctcgaaagcttactaaagtaaagcttaaatgcatttttaaaatacgagccatccttaaattatcccatattattttaaggaatcattcaaacacacgagaggggggattcacacctaaatcaatacaaatgacagagttctcccacattccacagctacctcttccacatttattttggcaatgaattgatcaccatgtttcaatggttcagtaaattcaagtttagtggatggagttctctggttcgccttgaattttctccaggtattctttgcagaagactggagatcaacttcttctacctccgcaacctaagatctaaccccaaattttagatctctttccgtcagaatccccaaatcaaccctaagcacgaaatgggtatcatgaaaattatctgtttggctcgtatcctccacactgttctagttctaagggaactttgaaaccaacagagtgagtatcggaagtggcacacatagctgatgaccttaatatagggcttcagagttttctttttcttccgccccatggagagagaaacggaacctcacacacccttgataactaagtattaaaatttctttttgtatttatatatagggatattggcggctaaaccacctgaactttacaatttgtaacacttaaccacaaaaactgaaattttggcggctaaactacctaaaccctggttccgttttgctctgcaaacctccgttcaaaaattacagttaagtgccacggtggattgtccacgtgtacacacttgtacacgtggcaagttattagtggtccacataatattagttttaaaaaataat

SEQ ID NO: 305317 - DNA, 2672 bp, Cannabis indica
tttttaaaatgactaaaaccacccactactacaaccgtaaaaaaaaaactgaaaaatggggaagaagatgaacagttgaggggagagagagttataattataaattttataattacgaaaaataaataaaaaaaaataaaagaaaaaatagcaaaagtacaataccttttgataagaatagaaaaccgtcaaaatcaaacaattaaaaataatttttttttaaaaaaaaacgtggcaaaaccctatcgtgacaagtggcaagcatcagcccattacataataaagtttgaaaggcagtatactgaccaaaaaaaaaaacagtataaaagttaatttgagcgtgtaacagtataaaaaaagaaattgagaaaaaataataatgggtgtaaatttcactaaaaaaaaacatgtactcctacacttatcccaaagttaaacgtagtaataatcggtggcccatttgtctagctaacgtggagcccgactatagtatggtacagatcagaaacccaatacatacaataaggttcaattaaagctccccacgtctcaaatttgattacgtggcacgaaagtataattatgttcctacatggtaccgtagtcatgaccgcagcagataaaactcgcggcatttgccttgagagttgagagacgtggacgagagtagaaaacacgcggttgacgcgtcttgttgaccgcttctctctccgcccttttatcgatattcttattacagagtgcttactttaggtctcaaattcctgtccgaatttcaattttggagaaacctttttctttgatttcttccatcatggcgaccaacaacaacaaccataacgatgcctacaacaatggcgttgacgaatcgagccctttcctcgccaaccaagtcgatggagctgacgacaaaaattccggaaaaccctcgaaggagtcttcaccggagaagtctccggcaccgggatatgtaaattgcggcgctgaatatggctggaccgccgatgggttgcctttaggacacggcagcgtggttggcgagcccattcgtcggaatcagtgggattctagcctcttcgcttgtctcgggcgcaacgatgaattctgtagcagcgatcttgaagtttgtaagttatttacatttttagaaatagtagtttgaatctaaattgcggaaaatttcatttcttgcaacaaatttattgattttgctgtgtttaattttgcatttcggtgtaagtaagggcgatttgggtgtttcaagttacgattcaattgtgattagatacctattttgaagattactttcaatttggctggtgttattttcataagataaaaatgcagtagtatctgctctaacgattgagaacagtgggattggaacatttattgaatgtgatatgattgcttgtcaatgttttctcaagttgatgatcgtgattcactggtttctaattctggctataggtcttcttggaagtgtagctccttgtgtgctatatggagccaatgttgagagacttggatccagtcctggtacatttgcgaatcattgtctaccttactctggtctatatcttcttggaaatttcttttttggtgggaactttcttgctccgtggttttcataccctagccgttctgccatccgcaggaagtttaacttagaggcaagtgatttctttttctcactttaaactatgtccatttaacaagagaagtataatcatttgatggattttggttgcattgtaatatgcatctattgcccttctaattaattagtagcataaagaacttctattaaaggttttaataacaaatgttggcttaacctggggcttccttgcctctggttcattatgtgcaccaagtgtgcttgttacaaaaaaaaaaaaaacactagagttgatgaatcttgagctatatttagagtttccgatcatggattgcctatattatacatgttgcctttcttggatgatgctcttgtgtcttggcagcagttctaaatttctcctttatgtgcttgatttgatgtgtttaaatgagtgaagataaacatagcttgaaaagatagtggcgaaggatatttgatcctagtatcggtactctgttgttctgttagggactctggtgtctttcagctaaaaaacaaatgttatcaaagaggataatagaacaagctttctgatctactttttctttgactggttgtttggtaatgagcagggtagctgtgaagcactccacaggtcctgcgggtgctgtggaagctttgtggaagacgatttgcagcttgaacagtgtgagactgcttgtgactttgctactcacatcttctgccacacgtgtgccctctgtcaagaaggtcgtgagctccgtcgccggcttcctcatcccggttttaatgctcaaccagttttggttatgatcccccctacagagcaaactatgggccgtggagcttaagagtatctgcctgaacatggacgagtgcggtccatctactattgtgatattatcatatgatatataaaattgttttactaggttatcttttgtttgaacacttatcaaaactaaatttaccatgaaaatgtagacttatgcatatgctgttatgtttatataattactttttttaaaagtaatatatttgtatgatt

SEQ ID NO: 305318 - DNA, 5848 bp, Cannabis indica
  modified_base (74)..(74): a, c, t, g, unknown or other
cattgttatgaccatggtacctgtttttcaggctggcagtatcaggtatcaccaccgacagtacagtgctttcnggagaaggctctaaactgtgcaacaaagttagaaaggaaagatctctgcttggttggagcaggaagaacagatgcaggagttcacgcgttaggccaggtccgtctatattacacttttaaggattcaaagaagtatctattgattgatgaatcacaaactttacaattagtgaagatttcaggtggcacactttgtgacccctttcaactatggcagcttggatggcattcatgctgctctgaacggtattcttcctgatgatatcagagttagagagattagccccgcagtgcctgaattccatgcccggttttcagcagaaggcaagacttatcattacaagatatataatgatgctgtcatggacccaatgcagcgccattttgcttaccacagtgcttgtaagctcaatgctgatgttatgagagaagctgcaaagcattttgttggaatccacaatttctctgcttttgctaacacatccaacagcgacagagtgcggaatccagtcaagagtatattcagatttgatgttgttgaaatggtatcactttctgtgctggtgattatagtttagaacatatttcataatgacagtgacattacatgtctctaactggctgattatactatttagggagctcttttacagctagaggttgaaggctcgggttttctatatagacaagtccggaatatggtcagtaccaataatctcagtcacttttaataatagttgtttgtttttgtcataattcaatttatcaaaatgataatgtttgtatgtgtcacaataatgtttattaattataaagaacattttctgctgactaacttgtaacaggttgctctactgcttcaagttggaagggaagcacttcctcctgatatcgttccaagtatgctggcatcgcaagatcgaagggagcttgctaaatatgtcatgtttgctccacctcacgggctttgtcttgtgaatgtcatgtacaataaagatcatttgcgacttccaccagattgtcccacaggcagttttggtaaacatcatactataaccaaatgtaagcttccattctactgaatgtttcactttgttgaagaagaataaattccatattattttttaaacattgagtaatggtatctataaatgtctgttaaatcgtgcttctattattttcctatgtagtaacatcaagtactagtttatgatgtggaaatgtatgtgaaacatatattatcatatggtatgatagtactatgttttgttttagatcgtcattatataatatattaggttaagcttaagatttgaaccgaagtactatttgatatttgaaataaccaaatttgtggccaaaaatttgggctgctcttcccactgagactactgaaatttcttctattgcacatggcaaatagagctttttttcaagggcagatttgttgcatattttggcgagtagaacaggggaagagcatcggtgctcgctttgcaacaatgaagctgaaacctccattcatcttctcaagtcttgtccaattgtaagaggtacatggtcgggccacaaaagtgacagaaatgaagctgagaatgactcaactaattaggtggtactgtgaaaatgacaatgatgttgacactaaaggcttgctctctttttctgcttgtatctttgattgcatctggacggctaggtacaatgtgttgctgcatggaaaagagagactgaatataggtagcatgataactaggattaatctaagttaacaggaaattgcaaaggtctacaaccccaacactttggagaggtgttttgatttattgtgtgagccaccatcattggagaggacagatacaacatttgtcgatgcttatttgttattctgaaaattaataaattggaacgaattatcaaatgatatttttagttgagccacggattatgtcgctctctttaagatattttgcggctctgcccgaagtgtacactacagtttatcaatcatgacgtttccaggataaaacatgctctgtatgcgaattgctttgcaccgaacaatagcgcttgattacacttaaaaaattgttttgagaaaaattgaaaggaagaagaagagtttttttttttttttgttgtgtttcaaaagacgtgttcttctgttcttctgatataacttataaagagaagttttaataataaaacggtaaatatgattgtaggcggaacattggttcttggcggtgaaaagtggattattgattgattgctcttactgcttcagttaattaacattaattaagtaataaataaaaaatatttattttattaaataattttttggtaaaaaataaagtgacatcacaaccaatctcccagctcggctcagcacggttcggtggcgacggcgcacgcgcgtgtgatggttcggtgtgtgagtcttcatacatgcgcacaaaactgggtgactcctagtgcccaaactcaaatctcatagttaccccttatataaactttcaaagaagtgttcctatcccacgtgagactcaatgcactatcacacacacttcatttctcatatattttgtaaaatttgaactatagttccaacaatcacccacttgaaattttaaaaaaatattttctcgagcaatattacaaaactaaaagacaatgcttaaacaaagatatctttcgatttgaatttttgcgtagtgaatatgatttaaattttactagagtaactcgaagtcttaaactttatctctaacatcgtaccacacaccaatctttcaagggtgtattcagaaaagtctgtgcattaatgaccatgcacgtctatcccagtatagtgaatactctagaaatttcgtcccaaattttataggaagtgaccccacttctacattcacataggtgagtctatcaagagtacccctgcagctcggtactccactcaacatagagaatatatctcattaagaatttctattaactcatcctcttatcgcttcaggacttcatgcttctcatataaaaatagcatgatcaacacatcacctcataacttgttattacccgttgaacctaattattgggatctctagtctttaggttggattaccattatgactgactcatctttctaagggcaatagtctcattcctttcaaagttttatggactttttttctagctagtccttttgtcaaaggatttgttaaattgtcatcagtgcatacatgatctacgttaacatctcttattaagagaaactctctaatagtgatgtgcttacaacgtatttgtcatttcttaccatcataataataattctgtatttttgcaatagtcgcggtactatcgtactggatcaacatagtggtatcgatctttcccataaagagatctcagctagtaggcttcttagccaatctgttttctcattagtagaggctagtgctatcatttaagactccatgatgaattgtgctaaaatagtttgtttctttgacttccaagaaacaacgccaccaactatcttaaaaatatagctacttgctgctttggatttattcagtaaagtattcaagtcttcatcattgtatccttcaagtacagttagaaatttttgataatgtaatccaaggttcatggctctcttaagggatctcattatcctttcaatagcattcaaaatacaagatatccctcaaatcaggccagataacttgctctaaaatgcaaccaccaggaataaatcgagaatgcctagcaatagcatgggcagcacgatttgctgatcatttaacaaaacgtaaattaacatcctttaaatgagaaaataacaatgacaatcctctataataatacaaaaagtaaaagacatcttttggttgcttctaattgcttgcgcagatagaagactgtcagactcaagctcaacattatgccattccttattctttatccaactgagagctcccttgatgcccaaagcttccactacttcagtaggataggaaccatgcagtgacatgttttggcctctatgaacttgccaaagtgatccctcgccactaatctgtagacgtatgagttgtcttgttgaaagagtgtcgcatctacattaatcttgatgttgtttgttgcaggtcgtgtccaaagctcagccccgtcatcactattatcaaacgatattgataaaagagcacttttatcttcagcttttcttttgcttgtccaaaaattgtatttattctccttctggagtaattgattaaatcagtcttactcaatttaatctatactctataataatatgtatttaataatttagatgtttatgtatacaattatttcttttaccattttttttatgtttttaattaattatttataatttttaaaattatctaatgtgtaatttataataattaatatttttattaattattattaatatctgattcatttaaaatgaatttatatttttgataacttttaattattataaataattttttgtgaagtgcatttttatttatattgtattatagttaatatttgtgctaatgaaaaaaatatgttatataaacatattacataattttatattattgataaaaaaaattaaaaaaatatatattatgcttgaaactttattcttaattaataaattaatttttgttaatatataattttaagaaattattaaaattgtgcaaagtgcaataaattctcatcattatagtgttttgcatgtgtacttttgatgaacgatgggtctcaccggttatattgtttgtttattgcttgcaatcaattatatgctaggtaagataaatcagtagtttaaaaaacacacaaaaattataaaacttttacattttttgagagtataatgtgttcaagaatatcgaatttagaaggatcctcatgaaagtgaatggttattaaggtaaaataatacgtaaattaataggtgagaaaaatcatctcagaatttgtgcatcaaacaagatcacttgaaccgttgaacgttataaaaaaaaaaaaaacaaatagatccaagttacacatgaagtatgtttgagcaaaaataaactcttaaaaaaccatgcaacaacacttatccaaagattccaaaccaatacataacataaaattacttctagtctattaataatataaactataaaactcaaaaatgaaagttaaagacaaaagggcagatcaactcaacagaaagcaagccaaatataataatatattctccatagcaaaagcagcaagactgtaggaagaaacagcaatggcatccctaatcatattaaacaaactaaataattgcaagaacacaaacttgtctttccagctaggaatgcgcaggagacacaatcagatttcttatttcttgatgtgggatttcattagtactggcgaaacctcgatctaaattcagatggggcttaatattttggatttttcttgtgttattttaagtgggtctttcttttttatttgtagtctttaatttaaagcaagcatagctatggtgaggggatgcagtgatatgccggaggctgtattggaggaaatattttcatggctacctcctgattctttaataagtttcaaatgtgtgagtaaatcctggtatggtcttatcaaatcacttgtcaaaaactcaattttcgtgaacaagctattagaatatttctaattaaggaaataaataatatattgattctgataaatgaatattttat

SEQ ID NO: 305319 - DNA, 1849 bp, Cannabis indica
atcactatataagtattaggttctcttttatctgttctatatttttttggcagttcgaccgggagactgtcctagtggctccaaggttttttagtcaatgggagtttcaaacttttgaacaaatgcctaccaacactccttaccactagaccatcccttggggttatataagaattagtctcgtgatgcatatgccctcttttttggattctttaactctctatatccagagaatctggatgcatccgtgcaacttctatgtgaaaggatattgtatattttgtcgtttgtggtagagtgagtgcatttggcttttgcatagtggtcgttgtttttatttaattgattcactttcaatctcttattaccaatttaagtttcatttctgacattttccttcaaatagatttgaaaacattaaattttggaggagcaaggcttctgctgaccagaagtcagatatggaacacagcactgggttggtacaaattattatttttgaggcagctgatcgaaataatattggtggctcagcttatggtgggcaaagagctatatgctgcacccctgatctggctaagattgaaggttgtaaacaaggtgaagtcattagggtaccttctgcaacagatatcaactggcctattattctgaatgcacagtttagtgggaattctatagttgcaagtatggaaaataatgaggtttccatcacgaaaaccggaatgtacaacttgttttttgtagcatgcgatccaaaactcaagggtcttacaatgaatggaaaaacttcatggaaaaaccctgatggttttctacctggtaggatggctcctttcaagaaattctacgtgtatatgtcacttgcttatttcttgcttagtttgatttggttatctcagtatgtgaggttttggaatgatgttctgcaacttcaacactgcattacagctgtaattgctcttggtttcttcgagatgattctttggcatcttgaatatgtacattttaataatactggaatgaggccagttggacttacaacatgggttgtgacaattggagctgtgagaaaacaatctctcgcctccttatcctcctccgtttcaatgggttatggtgttgtgcgacctacccttggtggtcttacctcgaaggtgcttgttcttggagtaacatacttttttgccactgaattgctgaatatttctgagtatgtgggaaccatcaatgatatatctggacgagcaaaactctttttggtcctgcccaatgcatttttggatgcatttctgatattgtggatctttacctctctctcgaaaacactagagcagttacaggtatgacaatctccctaatgatgccttattctagttaggttttcaagttcctttaaaatgttcctactagtatatttgtttcacataagtttaattagttttgtgttacactcttggaaactaaactagttacttttccaggcaaagaggagttctgtaaagttggatatatatagaaagttctccaatgcattggcagttacggtgattgtctcagttgcatggataggttatgaggtaagttgtagtcagtagtgtagaaattacgtgtggtttcctcatggaccttttccatatgatacatataaaactagaatagcatgaaagagtaaagacattgtttcctttggatttttacatcattgactggactaggaggtttgcatatgttttcctacatttctacatttaatacttattttcttaacatcctgaaaaaccaaattaagacaaaaatggatttttatttgttatgaaaatatcagcattattattattattattat

SEQ ID NO: 305320 - DNA, 922 bp, Cannabis indica
tgtgactaaaaataaatttttttgtagtatgaactctctacttctagagcactaggtcaaattgtaaatatttctaattactccaacaagcatactatcaacttattataataattcccgctactaataatttaacattgttatgatattttggcctccgatcaagttccggccaaggttgttaaatctgaaaatattattattctacaaacagctcatattatattcacacatactatatataaatcttcataattaattatatttatttatccacttatgacaaaattaagatttatgctgaaataaattaatagtatcataattctattcattatttaattagcattaatatatatataaactctaattatttattattaaatttattgggaaattagattattgttaattggctaatattgattgtcaccattttgtcgaatgatcgatttggtaataaagcaaagtaatcactctagagatgtagaaggaatttatatactacactacactacaccaaaatttaggattagtgaacatttttattagtgacatttaacaaaaaaatgtaataatagtagtactgttcaatttcaatatgctaagcatatatatatgatgaacttattttactgtgcaacccatgtatggtctacaattttgactttaatgtgaagaattttgtacacttgttttatttctattttgattttggtacgagtgattttgagtcacttttatattttacacgctagtgaaaataatcttaaatagtcatcatgtgaacttgtgaagtgctatgctattggctttctaccaaatccaaagctggatacttcactaacatttatctggcatgttccaaatttactacatgaaattctgtattttaatattcccagtttgattatctaattaa

SEQ ID NO: 305321 - DNA, 1945 bp, Cannabis indica
taaaataaaaaccgtaactgaccggtcggttataaaattttaaaaaccgaccataaccgaccgattttcactcttagtattgcatgtatcatctacagttatattaataagtagtaaaaatgtaataaaatatataatattttatgttaaattttacacattttttaacttatactaaattttgctaatattatacactattattagaatttaattttataaacatggacctacattataatactccattaggagatactataaggtctaaaatggacattttatcaaccttctctaacacctcagcaaatcctcaacagaaaaagagataaaaggaagaaatattaaaaatattagtcttccatctctttgggagagaataggccaaaaatgcaataactttttcagtgaatgataataatgagttattcaattaataaatttagaggatgattaattaatttttgtaacttaattaggaagtgacacgcacggactaggaatattattaaatataaaacacttaatattctttttttggggaatgggggaccataagagccacgcgtaaccttattatacaaaggacccaattttcaattattgatttctcctggacctctgtggttcaatgagctgtgcatcctttaacatgaaaagacataatacccctctcaaactttgttttctcctccactcttatgggtcaaattgtcttactaattatttaattcgatatgtccttttcattcctttttattttttattttttttacttttgtatatgtctttttctgccattgtatttttattattttaattcctctataattatggatccaattaataagagaaatgctaaaagtgatgctcaacaccctcttatgtgttaatatcgctattggttcaactaagtatcgggtctcatataatttaaaataatagcttttacagagtatcgctaaccaatcgcaacacgacatatcgagaaagtgttaaacacgactgatacctcatagcaatgctcaattaataaataagacaaatcccattacttcttgtttaaagataaaaatttaggaaaattgtatggagcaccctaaaaagattgttttgatacattttatatttgttttagaattaaaaaatggttttaaaatttatgtttttttttataatggtgtattttgtatttatttaagattaattataaatttttttaatttttttttaataatttacagaaaataaatattaaaataattacatactataagaaaatataataaaaattaattataaattatttatttttttaaaaaaaatttacatatattctaaataactatagtatacaatagaacaagatacaacataacatactcaacgtaactatgaagaaaaaaattaaattatccaaaaatttaacaagataaaagagttgtattaaagatactcaacccaaggttctattactatacgttgtattaattttcccgaaaaagattaatgttaattaactatgtttctaagagatgtgatcaatttagttgaccaaaatcgagaggttcttaataagtttttccagctgtctctgattaatgtagtttagttattaaccaattaaattgtacaaacgtgagtttatatcttatattattaggtttagatcttgttagattaaaaaagtttaggtaggtcatctagtttgaataaaaataataagaacatgacaaatattgtttactaaggactgatcacttatattaattataataaaattagattatctaagtgatgtaaaatcttacactttatatatactaggtgattgttacgtgccaagccacgtagtgttagttttatttaatattttagtttttattttaattaataattaaaataatataattatttgaacgatttgttttataaaaataaaata

SEQ ID NO: 305322 - DNA, 1796 bp, Cannabis indica
caaacacatttgtattagtactcagcaaagaaatccagatggaaacagaaagggaaatatagtactcgtcaaaagtttcaagctactagatcatatgatttattattcatatcatagcacaaacaaacaatcttatcaaattacaaagacacaagaaatattatccaaatataaaggattcagagaaataatttacaaagaaaatgacaaaagtatcaaaccttttgcaaaaagcacttaatctctcccaccaagacatccagatttttggaaactagcaagcatacttcagtcccactgaattataaaaaaaaaaaaaaaacttgtagaaaagcttataaaaataaattataaaaggaattgtttaaaatatccagaacacaagataaaagtcatttccatgcctgaatttcacaccattctttggttttgaaggtagccttgtcaaccttttttcagaaacacattctctcgtacttaacagataattatgtatctcatcatcagaaatacctgatattccaaaggaaatcagcaaggaaagatactacaattaagaatttgttcatgtacactaatgtcttaaattcaaaatcatcaacttaatcatgatgacacatccacttgtgtaatagaatttaaacagatccacagcacatcacataatcatgatgcaaatcttcaatcggaaaaagttaaaatcaaggacaaactattccaatcaattcaacgcatacacactaacttgtttgatagaatttgtacaaccaagaatttcatcatgatctctaaattatagaaaaagaactaagaaacagcactaaagtctgctaaaacaaactacatattatttttaacaagatctagatcagcatcttcaaaatcattgcaacatctcatcagtttgttcaataaatcttttaacaacatcctatcacgcacataacaatcatgatcggagaaaacgtaaagcaaatattcggacaaagaaatctagcaaaagtgaaaacaattaaacaaaatcgacacattttactgtggattcattagtattactcacttgtggtggtaacagaaagcactccatctgtatcaaaacggcaacgcatcagatctcatcaacgccatattatataaatatacatttatatatatatatatatgaagcatttccattacttaccccaatattcagagccgaaatcttccgaacagagtttcaaatcaaaaaactcgtccaaacagcttccgataccagtatccgagactgtacgtaatgatgaattcaacaagcaatctaaattcgaattcaaaaaatatatatacaaaaaaaatctaaaagaggaatgatggatctgacttgcgatttgaacgttggaatgaacggagaggcggagagtgatggataatctgcaaaggtgttcggaagctcggcatcgttggaatgcggaggatattaactgcaatgcaataatgttggaaaaatcattgtagttgtagacgatgatgacgataagatttgaagaaaagcaaaggatatcgaatatggaatttgggggctattcttacgtacatgtagagagagtggttgagcttcggccacattcatgttcatatgaatcatatctcacactcacagtcactcgtaataatttctttcaaaaacactaactcccgcgcttttcaaattttatactactttttcctggcaaacccttttgatttactttggtggcgtttggtaacacttttttaatcaattttctgtttttaaaagtagaaaagtgaaaatattt

SEQ ID NO: 305323 - DNA, 3262 bp, Cannabis indica
ttgaactcgaattctccaacaatgatcatgatcgagtagagggtagagattgtcctttgagaaatgatgtaaaaagtgataaggagttgtttggtttaaagcaaggcaattaatgtatgatcaacttctctaaatgttacaaatgtaaccctattattaattgtttaaaataattttcttctggtttttgaatgaaaatacagtttatttctattataaaaaaaatcatagttatctttataattctatttatataaatttattgtgatatttaattatataaaattataagtgaaatgtgcaactgcacatctaaataaaaactaatatatgtagtaagttatataaaaatataactatcataattataattatatttttaatgtaactattaaatagtcacctatacgaaataaaacaactaacattattacatatgtatagaataaaatcctagtattataactaagcacttccaatccttattacacaaactaatattaaaaactttgtgtagaaaatacaatacaacatagtatggatatggctagaatcaaatgaagcacaagttgacttttaaaggcataataggtgtagttattttccaattgttaacttttttatttttatgaaaggaaagttcattcatgaaaaaatgtttagagggttggctaaagttattcatgttcatcaaacatttcttggtcggtgatgacgatttgattcgaggaagatcaatcatcgatggctttggaggatttacgagattcttttctaatgttccttcatgattaatcgatttcaaaggaatgtaaatcgctttgttaatgtcttcaagcaattcagtgtctgaatcatatcgatttgaagagttaaagaacatttggaatacttttaagcaagataggtgtagaagcctacactctttaggaagattggtaaaaccattgtcattaatcaaaacatgctcaaggaactccttcttcttatcgtttaatatctctttcaagtactttactacttcttccttattctctatctcaaaattattcttcatgtaaactgtaattgagtttggtttgccttcttctctttccctctgtaataattaagcaaacaaaaaaaaaaaaaaaatcatatttttgttgcaataaattttgtgattagcaaactttatatctttaccctaaaatccaaaatatatattaatattagtcacaaaaattctaatttattacgtatacttttagtaacaacaaaatttgtgtcacgttattactctattcttacatacgtacctcagaactttgtaagtcattcaacaaacgacaaataatcatgaccaatttagtaacactttcatactccattaattgtaattgagatttttttaaggtcggtttcagaagaaatgaagctggaagaagcaaggtatgagttgctacagaagtcattgaaactttaaaatattcttccatggttggtacaatcccacttttactccattcagattcagtaagccatgaacaaatcgtttcataccactacacacattaatatttaaaataaaatattaaataaataaataaaacaattcaaataataatagatattatttgttattaattaaattataacttacaatttttcttatgtagctggttatgtcttcatgacttttttcttgttgttcaaggtacatagttgacatttcccttacaagattatctagggcatcaaatatctttttactaacaccactcaacccttcattattccacctggtataataaaattaagtatttgattagtacaatttaagataagtatatatttttatattttttataaaaataaataattaaatattattaatagaggagtgtgttatcgcgtcaacctcctattacattctcttagttaacatctgtactcgaacatatatatatgctggaatattttattcaaaaatttttcatggcgattttcgttatagttacaacatcgttgctcttaacttttgaaaattttcgaatactagaaataggtttgaagttgttgaacacgcttggtacttgtaaactatttgatattttttaaaaatttacaagaataatattgtaagtatatataatgaatacgactatgaaaaaaaaatattccgacttgtgatttcgggtgtgaaattgattaaaagattgtaataaaaattttaacactcctcttaataatatacctttgaattgccttagtgaagaattttaaatcagtgaatagagagcctttcatatcaaaaaaatcatcagcaaccgttactattatagcaccctttgtaatcatcaatcgaattggagaatcataaggcaaattacagcaagcacaagctactgcaaaataattgtatgtacttttttctctaccaaatcccatttcactaagtccccattctttagaccacctataaatatacacaaatacatataaatatatttaattttaattttttaagaaaatatatagcaacaaaataaatattattgtatatataacaatatttatgtatttcaatgtggtgattattttttatgattgaacatacataccttgttaactgttcaagttcactcttgtaaatatactgtttgaactcgtagtttaaagtggctagacgaattaatttatcattgtaaaactttgataacctgttaaattaaataaaatgttaaaaaatataaatataattttgttcaaaagattaaaagttattatgacctacttaactttcttttttcccacttttgtaaaatgcaataattttgaaaattattattattgttgttgttgttgttgttgttatatatctacaattgtatctattgaccctttcaaaattaattaaaaaaatatatatgattaatctccattttttaaattaacattaaccatttaataaactttcttcatattaatatatatatttaatcataattatacctttgtgaagatgtctttcccatccatagagctttattagtttgttggataaaaaacctatgttcgaggtgatctagtcgagccatccatggaagacttaactcatgctcaatctaattaatataattaaatacataacaatgaaattacaaattaatatatctttatatattaaaagtaccaatctaacgacaattcttggtttaacgattcttggattaacttaacagactgttaacgttaacaaataaataaacccaataattaa

SEQ ID NO: 305324 - DNA, 1158 bp, Cannabis indica
agtttttttttaatattatatataatgtatataatttcaaagtatagggtatgtataaattgatggtatttctgatgcaaattaaggatatttattgtttctgtttttttttgttcaatttaataacattctgaaaatttctaactaaatgtttgttatccaataattagaactgagtactatatagttttagtaatgaataaaagactatataatttcaattcggaataaatgatattaattttgaatttatgttaaatttctataacttcaaaaatattattatatatttgaaagtttgttattttcataatttctaactaaatttctataacttcactatggtttttttttttgaaagtttctaactaatagtgtttgttatcgaataattataactgcatactaaatagttctaataaagaataaaaaactacatagtttcaattttgaatgaatgatattattattgaattcatgttaaatttctataattttatttgagaatttctatatgatatagtatcacaaatgttagattgtgagtggacaaaataattatattatagtactatctagaaattaaatatatattgaaggataatagggtaccgacactaattaattattccaaacaacctttatttatttatttatttatttatttttaataaaaataataggaggctgtagatgttgacaaataattcgaaacatcttgcaaataattcgaaacatttttaataaaaagctcattttatgttggaggtggaaaataaatgtagggagcaaaggcttaaagtgaaactagtaaagagccctttcaaataaagaaaataaataaataaataaagtagtaaagaacaaaagagacaattgaagaataacgaaataacgaaataacgaatatgggatgtccgtttgcttaagttgctactaattttttatttttaatatcagccttttgaaaatagatatcttaatcttaatttatgggaagcagggctctcaatttttattcttattttatataattcagttaaacatattcaatgttatgtatatatatttttaaattatcttattatccatgacattcttgaattgttaatatatattagatggatagatgttacgtgcaagtcacgtatgttaatt

SEQ ID NO: 305325 - DNA, 2777 bp, Cannabis indica
tattgttcgaatcaaactcaaagtgttttaagttagttcaagtcctcattcaacacctcaattttgttgtatccgccagatctccaaaccctagttcccatgtcgaccagaaagaagcaatcagagggtattgctatgctctccatgtacaacgacgaggatgaggatgatgagatggaggatgtcgaggaagatgaaagcaatcaagaacaacaacgagaatcgcttcaagacaacgattataaagacccaagagatgttgctgaagatgcttttatggtggataatgatagaacagtggctggtgattctggtaatgatgataatacaccgcaagatgttaatgatgagaattatactcccagtaaaaatcagtttcgtccctccacaccacagcaagctcaagtttcgtttacctcgcccccgccaccacatcagcaccagccgcataatagaaggggaaagcttgcgattgtcgattacggtcacgatgaagttgcaatgtctccagaagctgaggtattttctttttcttttcacttttatgtaatgatgggaaatttgatgggttgcctataaattttgtaataatgaacgtttttttccccatttttgtttgggattttggttgggtccaaactagggacatttgtgcgtttaaggtcagttaggcaaaggagttggtttgttttgtttattaattatctgaaacatttcgcagtatttatcatatacttatgcttttgcaattggcattcactcagtgggcaatttgaatcaattggtgtggatacttacatgagttttctacgttaggatgataatcgtgatttgtagtagcttatgatccactgccttatgttgaagtgggtgaatgtgattgagggatatcgaaacccgtgtaagtttgtgagctaaatatttattttttgtcaggagtttgtgagctaaatataaatctataaatgtggaataaactaccaaagggatcaaaaacgtagtatttccctaagaaactcaatgcacatgaatctgtaagtttgtgaactaaatatttattttttgtcaggagtttgtgagctaaatatgaagctataaatgtggaataaactactaaagggatcaaaaacatagtatttccctaagaaactcaatgcacatgcacttgtttcactctctctttggcacttcgaagctcactctctattgatggtgtaaactgaagggaattagatgagtgagcttggggaccaattgagctatttatagcagaggctcttcttttaagccttggtgcacgttgctgcctttgtttggtctgttgcatgactgagcaacatagatgcatggccaaacttacaaagtttctgctgctggttgttgaatgctgttagtgttatacttattttgattttggtgctgattgattgcaggagggggaaatagaagtaagtgatcgtgtcatgtttggtacaaatatacaatctgtaaatggtacgaattttctatcacttagtgtgggttatgtggtttgatatctatttttttattcacattgttgcctttctttccttatgcattttttctgcaatttgttacttgtgagggttatttgttctggtccttttgctgaggttgtatttataattcacatgtttctataccactattcaagtttggaatctttatcatgtcacatgttgtgcttggtagttatatctggctgagcttgtaataatattgagaatgagttaggtttccttagaagcaatgggtcttagttttttttgactggaaaatattaactttattaaccaacaaattcagtttccaaacaaggtaacaaatcagtaggaacagactccatactgaaggtacgatcaggatacaaaatagctgacctagcaaagctatgggccactacattagcagatcgtttaataagctacaaactaaaaaagattttataaagtaagctcatgaacattatgtagtagtagggattccatcagtggtggctttaggagaagcatttccttttatatggtttttatgtacagaaagtattatattagttcactatatatgtgaaaaatgttagatatctgcttgattttatttacactcctaatttgctttcatgctcttgtaattcttctataaaatatatcctgatgagggcatatctcttcttcttgtttctgtgatactataaggtgcttgcaaaaaattaagatcgtaagggaattataaaaaaaaacatagaaagatgaaggcaatatgaaattctttgtatgtgtgtatgtattttcttttggttgttgactcatttttaaagaataaaatgatattttctattacagctaatgttgtggttgtgggctattccacatttatcttcaatatgtgagtctaatcagctaaaattgtttgttgtaggtgatttccatgatagaacacctcctggaacagttcaaattccaacacctagtaatcaagcaactcctcaattatcagatccatcacaatctgataaaatgaattatgcaatgcatgattcagaagttggaggtgctacggagtctatggtagaagaacataaggaggttgatccattagataagttccttccaccaccaccaaaagaaaaatgctcagaggagttgcaggtaaagttccttcttccagagcttttggttcctaaattgcacttattgaatttaagttttctttcattttctctaagagttcatatctatgtttttttttggtgttgt

SEQ ID NO: 305326 - DNA, 2602 bp, Cannabis indica
caaataaatggctttggtgtcacaaagaacttcaaagcccaaaaagtagtgtactgaaacgagtattttcaaggcaaatctgttgtgaagtttagtgatagtgttgctgatttggtccgaacattcaccagttatgaggatatcatccacataaataagtatgagaagtaacttcttgtgttttctacaccttcattttctccacctttacattcaaacatggtatcagagcagagataaaaggtcaatctaaagtatctctaacaccatcacatgcataagaaaaaatcaaagggcaatggcatttgtcacttatcatttacaaatatatatatatatatatatatatatttcatttgtagttaataatccaatattatagttagaatttgagattaaggagtatggagtcttatctcataattaattgacaataaaaagagtaactattaactaatagattttatatattatattttctttttacacattaattatactctctaacaaaaacatcaattactaatcaaattgaatcactgaaattactgttataataactaatttatttttgggtgtaacattatattaaatttatcatatttttgtttacaatatatatatataacttatttaaattttctacaattttatttaattttgattagatcttacgaaaattttttaccagtatttttgagtgatgataactagattattttacttgtaattaaacccttttttcatatatatgtaatgcatttgtttctcttttttttttggcaatatgtctatttctaaattatctattatatccattttaatatattaaaaaattgttataatcatctgtttatttttttcttttaatattccaatatgactacattaattagtagggggttgatataaacatttgtgtcctcattattattgatcaattatagctataaatatatatagctggccacaaaaaaatatctccaagttcaagcgaagatatatatatatatctatttgaaagcagcagggataataagtgtgaccacgggtcacataaagctttttcaaaagacaaataggtgaaggaatcctagagcaattaaccgaccataccagaaaaaactgccaaaaaacttctgtgcgccgacccaactaacatgcacagtgaataacctttataacctaattggtttaacatgtcaatcaataattttattcatccactttttctttcttccttactaaaaggttgaatcgtttcagggaaaagagggttatatgaaacacactttcctttttttaatatatatatatgtatatatgtgaatttcacgtttaatttttacactaaaaataataataattttatgtcacttgaatcttaaggtgcatgtcccatatcatttttcatgatatacatctgttttaaaacaatagtctttactttcaaaagaataattaaaaaaaaaaatagtcttccattaattaatcatgtgcatgcatttaagacgcaaaattaagatataataatcatttcaaaaaaaataaaaataaacaagataaaatagttgattatattccgaaacttcactagccaatgagggggttttacatgtcatatagcatataaaagacattaaacgatggaaatgtgtgtacagtctattatttaaattattcataagtatctaatttgttccccctacaaaaaaaaataaaaaatgatcgttttttctttattaacattttctgtttacatatgaatgacatccgctttacgtataagaataataattccctattggctgctaaatatcccaatgatatttgtgtgtatataactctaatttttggctgagccaaaagtaaaaaagaagaaaggtaattatatatatttaagcaaaaaagaaaaatcaggtacgtataaattaataggaatagaagagagacaagaaagcattatcaagaacaggatagagcactagagaacgtgcgattgttggatatataaacgtgtatgcccaaattaagttgggtaccttcgtccttcctttatatatatatgcacttatacattatgagacaacacaaattcaacagtagttttaatcagtaactatatatatagcaagtaattaatacgactttgtaaacactttatttttttgccatacgtacatgtggaaaaataatctataatacgtaattatatctatatgatatctatataacaatgctataatttatatacttattagtttttttttttttttagtaaggtaactaaatacaaccacaaattaattatagttcaatagttagtaatgtaacaaatttctttgtaatataatatattctttctgtttattaattttctcataaaacaatctagctagtagtttaaataaaaggttttgtatacttcaaaaataataatttattgcaatattattttctgatctttgcgattggccattactttggaagaaaaagtactaatgctaacactactacaaaaaccccctttagaggcggtttttaagccctttcagcgtcggttttcgcaaaattcgctatcgacgctgatcagggcgacgct

SEQ ID NO: 305327 - DNA, 1695 bp, Cannabis indica
gtacttacggtggcgtacggaaaacaatgccaaaaaccttattctcatcatcgttggacaccgacatcacttcagctccagtctttttatgtctaaatagcacagctttcgacttacactctccgataaactcttcggaaactttctcaaaaccaagcttctccacaacctcatcctggaccccagaaaattctgaaccaaccaacaattgaaaaaaaaatcaacattaaaccattcatttcaatcccagataaattctaaaaccccaaactttccaaaatgaaatacagctaactctttcatgaataataatcagcaggtaaggcatcaaagctagggattttactttcattgactggataaaaacaataaaaaaataaaattaaaaaacgagcttcaactgtacctgaggaagaagattgagtgggagtggcgacggctcgcggagagagagtagagaagtgcttgtggagacgaaatgaagaagacgaggtggaagtgcgtagtaatctccattggcggcggagaagagagcgcccgttgatattgggaatggagcggtttcttgaagaagaagaagatgatgaaaatggcgatgaaccagagcgagatgaagaggagagaccgcgcctagtagcggaacgaaatgagaaaattcgattgcaggctatggaagagcgaagtagagtcgccctctccattgttgtggcgagctttcgtaagagcggtagaagtagaaagttgcagcgaaaaggaattagagatgagggtgtagtcaggtttatatattatctatattttgtggttaattttggtattatgtgtaattaagagggttaaatagaaaatgcgaattagaatttttattacttaaaaaaaaatttaagtgtagtaaattatgtttctaaaattattttaacatgtattaaattataacttttaaactttcatacttttttaattaaaattagaaaaaattccccatcttaataatttaagaagatttttaacggcctaattaactaataaaatatcaataaatggttagcgtgacgcattaggagactttttaacaatttttatttttttgttattattatatataaaatatcaaaataagaaaaattcatagcacgttccttcagagaagacaaattaattttgagtcacaaaaaatttagaaattaatttgagaaaaaaaaaaaaaatattatatgtgctgctaaaagttgagacgtcccctatgctctgccgtgtatttaaatttgttgttatttggcacataacgataacggccatgtcataatttttgtgacgggcttgggcttctttatggatttagataaaatgaaataaaatgggtggggagtttacaaatatatggaaaagattgatataatttacgaaaatatgagaaaaattaaagtagcatttaataatacttttttaattagttttctatttttaaaattaaaaaataaaaatatttttttaaaaagaaataattacataaggtaccattttttgtaaaatatttacatttttacgttcaaagaatgtttttttacatttttacggttttccaaaaaataacacgaaaacaacataaaatcaacaagaaaataacataaaagtaacatcaaaataacatcaaaataacaacaaaaattaacaacaaatgaacaaaatttcaac

SEQ ID NO: 305328 - DNA, 2764 bp, Cannabis indica
ttttttatatatatatatagaactactcactgttaattgtatgacacacatcataattattgtctaattaccaacctcacttttattgaaattaatgcttgatgtgattaatcttagaaaaaacaaaacgaaaacctcacttttaatttataatcatgattacgtattcacttagttattagtagtcgtatcttatctttcaatcccagtagttcgaataattttactaatagtaagcaaacgatcatcacacatcataatacaaatttagctaatatcctgcacttgcatttatttacatacatatggatatccaaaatccaaaaatatgcatatataaatatttatatatttagctatataaaaacctaattcagataaacgattaggcttgttggtgcgcatatataaggtcactcccaacccctatatataaacattccttgatcacgttcatttgttagttggggaacgtatctatgatacggcctgtcacagaaccacaccacaaccttttagttaccattcttaaaatttgaatgaccttgtcatcacattcgaatgagttttataaattgaaccacagtacataaatatgaaatgatcaaataatatgtaatatattggagaatttttttactaaccctttgtcgtgtaaatcaggttgtgattattgggttgtatggagtccggattataggtggtgtcataatcgttttctgcgtgtgggtcgatatcgttcccttgatttttattagaccggcccttatttcttccttcttcaagctaattaaaacaaaattaatattaataaaaataaccgaatggtaatgttatattcatttataaatatataatgtatatacatatattaagatttaactaatcgatgcatatattatttatcttgaatcaattagcaaacgaaccttggacttcagctgttcattcgtctctctaagactgtggtcctattacaattagaaagaaaaaataaaaagtttagacaactctattttactaatatgacatatatatatatatacatgattatgatatatatcaattgtgattctaatcttacattttggcggatttcttctaggcggtctaacaacatttgccactgcacatataaatcacgagatgttatattctatcagtttcgtaaatctggtatcttataaacagataatagagccttattattagaaagtttaacttttttttttttgaggaaaatattagaaagttaaccttgtttttagaaaaaaaaaaaaaaaggtatcacataaacacataaatttttaaaataagtaataacttgattaaatttttctatactgtttgttttattttaaattcctttaaacgaaaaaattgagaaatcaataaaaacacagtacaaataaataaaaatgaataagtgtacagtctcagcataatgagatgctatctatgcacagttgtaaggacatagaagcatgtatgattgcctatatatgccgtcagttatatatatccttatagctagatccaacgtacgcatatcataaaatcatcaaaccataaatgcacttacaagtattctgaacacaaatatgttcaactttatataataatatatatatatttatttatttatatcaatgacaatactgaaatgaaaaaataatgagaagaaaatgaaattgtatgatgagaaagtgacatatgactggcagtctggtttaatcttttaagaaggttacctagagtaaattataataatagtaataaaaaagaagtggtgtgaaaaatctcattgaaaaacttgaataaatttgatatgtggtacagaaagtttctacgtatgatggttaaaggggtaaaaactgaatggaaacttcacgcctaagtgagtaaaagatggagatggttctcaaaaaggttaatacaaaaaagaacacaaaccttctagctagctatcgtatcaactatgtattctctctctctattctcttactagattagatcatcttcagttgcatgcgcccaagagtcattgacaatggtggacttggatatgaacaagaaaagtgtgtatatctatattctcagtctctagtttttaatgataaactgaagactctattttcgtattcatcaacccttgtcatatgttctcaactgttcctgttactgcagggtttcacttcacagtgcatcaattttcatgtcaaacgtctactgttggataaaattaagtaagcttattattatgccctcatatataactatgcccatatatatataactattcccattatacgagcttcatgcatattccttgtattttgtattgctttatataatattttttatttatatatttattttacaattaggttttagttttaaggcttttaataagtcatacgatttgggaggtagagaggtttctaatgaagtgatcatactgaactcggttatatagaaactataggacaattttccaactgacataataaaaagagttctatatgtatgtagttattttttattctgggctatgaaaaatttacttctacaaaacataaatcaacatgaaatcattattaataatgtgtctgattttgttttatttttatttatattattatcttaacatatgtagatagttattatatagtttgatttcatggtataactattttaagtgaaaatcaaagaaaaaaaaagaatttaaattaaagaacgtattttagtggttataagcattcta

SEQ ID NO: 305329 - DNA, 648 bp, Cannabis indica
gtatatgtgtaataaaatatagagaaaaggtaaaaaagttgttttgaccgtgtgtaggtttatatgtaataaagtgtgtaatttgtatttttggtgtaaaaatttctaaattatatgttatattaattatgttatatgtatatgaggtcttatgtaaaacttcatttcaatttaaagcttcacattcctctaatatgacaaagaagtgatactgtagctacatgtaatcacaggataaaactggttattaattattatcgaatcgtacacatctttttgttagagaaatagtttttttaatattgtttaatttgttttgttttttcaattttgttactcactaaattaaattttagaggtaattttttaaggcttttagcgttagttttagcaaaattcgttatcgacgctatttaaagcgacgtcgtaagagaagcattaacagacgtcataaagacaccctatgccattagttattatgaaataaccgacgtcatagggacatattatttgtataatgcccctttatggcgttggttattagcaaataatcgacgtcgtagtgttttatggcatcggttatgtgacagtcagtagtccgtgatccgtaaggggaaataccgggtaagctgtgcaatcccacaccgc

SEQ ID NO: 305330 - DNA, 3504 bp, Cannabis indica
atgttataactaaaaagttcatgagtaaaggtatttgtcacaaaagttacaatttattgcaactaaatgtatttttagtcacaatacttgttgtgaactaaaactaaattagtgacacttgtaaactaaagactatgttttaatcacaagtaacattttgttgtaactgaaagtcatatttagtcacaaaaaattatattgtgattaaaaaattattattaaaagtattaattttttgtaggaaattttcggtaaattatgtatctgtttttaatatttaaaaaacttttttagttaagttttttttttaattgtgtacgtttaaaactattaacgatcacttataaattttttaaaaaaatttaaatatatagttaaagaaacaatcgtaaatattattttcggtattataaattattcaaaaaattttaaaaatttacaaacagtcctaaataactatcatacaccatgataaaataatagactacaaaattttattgagtatcaaaactgatagaaggtgtccactatatatataccaaaaaaagaaggtttttttggttcaaaattgctagatatccactatatatgtataattgacctttttagctccatcaggtgagaaatgaagtaataaaaaacatgagaacacactataagataagaataaaataaaaataattatttaataatatgttatgaaaattattttgataaatgatttgagtttgatttaggggagaagaattgaaaataagcaaaggtgtatgcaaggcataataatcccacaatattttgaaaacttgtggcacttgaaaaagctatatatattttatttttatttagagtttttctttgacataagtgtacaaacaaacacaaaaaactctttagtggttggtgagacaaaattaataatgaattataaacaaattcccacaacttttcctctcaagcaatatatagaaaggttaattgggtcccattttctttttaatttttttttcaaaaaattaaataataaaataaataaataaaataagcttcatctccatgccatcaaagtgacatagacttccactctctcttttctaattaattacttggtcatgagtagtgagagtcacacttcactaatgttggtttcatttatataaatatagtcataattagtgtatcaattatagcatacataaaatatattttatcaacacacaaaactaaccaattaaaattaagggtatattccttaatattgattaaataatccaatcaaaatatagctttagttttcatgtaatgcacgctttgatcaataagtttcaaatatgatagatcaattaaaagggtgataataattaagaatttttagtttgtggagtttattattattaaaaaaaatatttatacctacattataatcattttatttaattttatgaaatttttcaactattttaatttataattattaaattaaaaaaattaaaagataatacttttattaatggggctattagtattagtggatttgtttcctagcggcaaaatctccttaactcttacaattgttacccatatgactctaataaaaataaaaattgcggcataagtactttattttacgattttattgcggccgtactcttttttagccattaaatatcaacttataaacacgacaatatattattaaaccacgtattaaataagctaaaaaaatatgttaccacgcgtttttgaactggcacgtaacaggcttacactacaacaaatatatgtattagagaggcaacaaaagtcaccgttaaaactatagaaattcgcccctaataactattagaggcaacaagtcacccctaaaaagtcattttactaaaacagtttctacacgtttgaatttctctaaacctacaaatttcttaatattaattgcataataattttacttaatactacttatacaattaattaaactcactaaatatattataaaaccctagtggacttttatattgggctttaactaaatgatcacatacgttataaaaatgccacaacttaattatctttagaaaattatcataactactctaagcaataatctcaactcattaacagtataaataaataaaaaaaaattatctacgcgtaatcaatatctcaaaaacaaaacattaaatattgttttaatctagatattacaaacaccattcaaagtataatattattatttgtggaattaagtattgaaactcacataatttaatgtaataatttctatttaataccactaaataccattcacaaaatgtcaccttgtgatgatgctagatatgcctaatagcaatgttcagtttaatactaatctaaagccactttccaagccatagcacaagtattagaccgcttgggtcattacacatggcccaatgtcttttatttttatcacccatctatttatatataatacaataaatgcttttttataatatatttataggtgacgcttagtaatatttttctttttaaaatttttaatcaataaataaaagtagaatttgtgtttacaattttatttttaaaaaataaaaatgtgttttataactacttttatttctaacaaaaaataaaagtgtgttctatatatttcttttttgttgattttatttaaattgggtccggatcagggtctacaatcgggtctgggtcggggctgagtttgggtccgggtccaggttcggatccaaggtttggggccgaatctgggtcgggttcggatacagggctgagtccagttttggggcgaggtcagggtctgggtagggttttgggtcaagagctaaggtttgtccaaagtcggcaccgggttcggggtatggggtttaggtttggggtcaggtcgggatctaggcttggcccggggtcttggtctggggtcagggtctaggtctgaggtccaggtctacgtctgagtccggggttgggatccaagtcagggtcttggtccggggtaggggcctgggcatgggtctaagtccagtccgaggtttgggtcagggcccggggtcggggtaaggtttgaggcctgggtacagggtctgagtttgggtttgggtgtggtccaggattcgagtccagtcaaggtccaagtcgaggtcggggtttgggtccgggttagggtttgggtctagggttcgggtcggggccatggttcgggttggggttcaaatctagggttcgtggtccagggtccgagtttgcatttggggtcctagtctagggtcgaggttcgaggtctaggtccatgtccgtattcgaggttcgggtcatgagtccgggacgggggtgtggggcccgggtttgcttcaggcctagggacggggtctcgggtccatgttcagggtccgagtccagagtctaaaatattgatcaagaaaaataattatttaaaaaaaggctaattaggatttttgccccctaaactttgacatgtgtcaaatc

SEQ ID NO: 305331 - DNA, 1569 bp, Cannabis indica
aacggggtattgaagacttgcacccaaagaggaattttgagaaggctgtctccattgagagtatccaccgagcccgggatatccataaggataggctgattgagatatgtccaaggctgctgaagtagaactcgacgccgatcgccttcacacccaaactcaatgaggaaaagacccctcgaacgttcagttatggtgacgggaaaacgggatatattattccagttgtctgtcattttgtccataaaaactttcctgttgaaagttttgacagtgtagagtttggctacaagaaagaaagggccagcagggagttgctcatccacgtttccatcagctggtatgggttcatagagagtttggacagtgctttctgtatctgtgaggttaagagcaatggagagagaggtggttaagtcatccatgggtgagtgtatgtgtgtgcactgggggaaacaaatgagacgcacgcaggtgagacacaaagaatgtttgcctaattggggagcttcgtacagacagagaaaaagaagcaaagtgccttttatagcataatggatagaaatggtaatggctaaggattctgtgtctttgaaagtctttcctatatttatatatagggatgggtataaaatccttagtttaggcgtagcatttaattgggaaaacagatatacatcttgtcttctataggcaataggcagatagcaaatagactgaacgccattaaattcaagtacaatcacaatactacataaataaagccatttctgaaaattctgggcacaaagaggtttcacattagcttgtgaaatgcaattacaagaccggtcaggaggaaatttatggtaaagcttgtaattaaaagcaaaattacaaattataatcttttctgacagaagtgatttgacagagtgaagaaaaatggagaaaggtactcgattacctgaatgggtttcattaatgaggaaggttgagagtgtccttgagcttgcatctgagtgaagaggggctttagagttaatgttgatacgacggggttggttgagcttcggtttcttgacgcgacaggggcggttggagctcactgaactgggttgttcgacggagaaaatgggaacggagtcaccaagatcactagatctgggacttgggatgggtttcacaatgtggaaactgttaggatataggtgtgaaaaggaaaagattgctgggcttctgttcatctgcatggttctcaagagagagagagaacagggacggtcgaagtgtctagagagtattcctttatagccttaacaaattcatatatattaaggataacctttttcatcaacttgttaatgaacttttacactatgtgttgtatggtggaaataaaatggttgagaaaaaaaaatatagaagaaatagtaaataggagagatagaaggttaaataaatggggatttatatttacatcccaaaaatataggaatattctataatgcacccttttaaaagagatgaagcgatacatatttatctgttttagtctccgaaataattttttagtcaaattttttctca

SEQ ID NO: 305332 - DNA, 1452 bp, Cannabis indica
atcattcgagctagagcacttaaacaagaggaacaaaactcaatgtaaataggaacgagagtcgttgcatgagaagaaagagataatgtggctgttgaatgcatcacctaagatgtttgaggatgtggaaatcatctctgacatagatggcattggtttgatgatgtgaagatcatctccgacatagttagttgtttagttagttggcattgctttgtagttagtttggctagtctaattatttcactaactgattctgttggttaaatgttctatagccttgtaattgaactcctctctggtactataaataaagtgaaagcctcttatgaaggtaagctcttttccatcgcttttctgaaattcttctctatggtcttccctgtttcatcttcttcatggtatcagatccagtgacctttatcaatggcttcttttggcaataactcatatctagttggtgttgatcctactgctctttcgcaagctacgacaactccatcttggaactgtggctagctacaccagctcaaatgctgtttggaaagccttggagcaaaaattttctagtcagtagaaggctcgattattgcaactcaagactcaattgtcaaacatgcataaaggtaatcaatcaatctttgactatgttgataagatcaaagctctctctgattctcttactcttgctagtcattcaaattttctgatttttgagtttgacttcttcatctcctggatggtcttggacctgagttttgattcggtggtatctggtatcacatctcaaagtgacaatttgtctctggaggaagttcaagccttgttgatgtcccatgaaactagacttgaatgacacacaaccatgatggatcttctaccaagatggtagccaatctcacttttggatcaagaaatggtggatttatgccttacaataatgctagtagaggatcaatgtctaaatttccttaagattcccactcaaggaaataatccatctcaaccccatcattctttcaatcctaacaaacctttatctcaagtctgtatgcaatatggtcatactgctcctacttgtcactataggcttgataagaattgggcccctaaatctattggtggaaatcctcaacctcaagcaaactttactgaacaatttcttaactatgagcctactacttttgtagctcagaatgtgcctgattgtggtgattatcaaggttggtatgttgacattgatgctactcatcacatttcttataatgaggttcctcttgacaacatggttccttactctagccaagaaacagtggttgttggtgatggtaagaagcttgtcatttctcatattggtaaagcttttactctctcaaatagttcttctcctttacatttaaactctatcttacaagttcattctatcactaaaaatctcattagtgttttcaa

SEQ ID NO: 305333 - DNA, 2562 bp, Cannabis indica
gaacaagaagaagaagaaaaaaagaaaagtaaaagaaaatatttaataaaaagaaagaagcaacattcatttatgacatttgcaggacttgatatgtgattcaaagaagctagctaggcattcctctacccttcatgacatgccttcttagaccaggaatatggacatttgtgatgtaatctgaccaatcaatgctctccacgtcaaacccaaacttcctcctttcttcctctgacatgatatccattagtctttgtgtattgctgttatcaaacctggacacaagtacagttcttagtatcaaaatctatccatatgatatgattaatgtggttgtaaatgtgatcatcttaccttccattatagaaagtgtatggctcataaatgttagctaagtgctttgcttgctccactgactttctgcaaatgatttcaagtttctgagacagctttttatttgaggaagccatagttaataacccatttcgttggacagtatctctccaaaggtgttcagagaaatcttcctttgagttgaatagcttcatggaaggaacatggattggcctaccattaggatcaacacatggtgagttgttatagtgttcatacagtagtctagcaaggtcatgaaacactagagggttcacaaccgaagaagcgatttggtaaacattgatatctggtttttgagccaatccatgttttgccatggctgccaaggttgcattaacaaccatgtcagctggtacctgccaatagccaagttaagaaaaagatgatccttagtacattcttagcttatctcaaaacagaaaaaggatctaaaaaaacatatgaatgaacaatataattaccacatcaagtactccattggggtccactaggaaacctgacagttgtccttttccatagtacaaaattattggatccatcatcctataagaagagatgagtttatgagggccttatctcaaagcttagaagaaaataaatgcaattttgcaattatgggaatgtacctatttccctccatccatccagggaatggctctttgaaagtgctttcaatgacactaggtctcattatgactactggtacatctcccctcatactatcaatcatcatttctcccatggcttttgtaaacacataagtatcttgccatccatattgttgagccctgattataatgaccaactattatacaactctaaggtcttgtatggtaataaaaagagaaaaactcattagtcattacctttctaaacccaacactttcatcttttgtgtcaaagcattgttttctagatcttcctttgagttaaaagccagctctatttctttttcaatatcaagtatgggaagtaatcctggtggggtttcagaaacaaagttctcccctgaaatggtttctcctatacgaaatggcttttccataatctttccttgtctttgtccatttacataagctgtgtatgtgaagaagaagaagaagaagaaaaaaaactcattcaattttgctgtctagtaaacatttgaagaggccataacaaaaaaacatttatatgtacctgttgatacttgcatgaatagctttagtttcttacaattcttagaaaagttcataaggtgacaaggcccttttgtgtttatagccaaagcaacatcatatctaacaaagaaaagtagttagtacttacaattccaacttgttagccttgaaattttcttatgagcaccataacttgtctcacagggaaacaaaaatcaaagataaggcataacctttcatcaaatgttgtatttgctgcagaattcacaatgacatctacttcttttgcaatagtttcggctatatcgccacttaatcccagatcagattcacatacattgcctactacaggaactagtttgctcaacatgaatgactgataggattttccataagttttctggagtctcttgtaacagctctgtgtttatgatctaaagtgcaataataaattagaactaagcttttagagccaaaagagtataacactaagcaaacaaaatcaattattcattggagaatctggttttgaagacacatcattccccaaaaccaaacaaataaaaagacatacttcatttttcaaccttcccatagcagcttccttgttcttggctttgatcaacagatatatcttaccaacatcaggaactgtccttagtattttttctactagtactgcaatattttaaaaggaacacaaaaataactatataagaataatatatatatatatatatacatatattaaataaaaaaaaaaaaaaaaaaaataacttaacattgtttcaatcaaatgagtatatatatatattatgtatcgtgactttgaaataattcaaaaacttaaaaaaaatatttactttggggtttaggcaaagattcgtgctgataacgtgttataaaataatataaaatatttaagaagacaagaagaagatgatgacgagagaaagagaagctgaatgagaatttcttagttgtttatttcgattgggtaaacccc

SEQ ID NO: 305334 - DNA, 852 bp, Cannabis indica
taaaaaaatatatattttaattgctaaattatattattagcgctcagattatgaagattctaaccgaagatgatgctaaactaaaaaccaagttttcttccctatttgataagttaatcctttctttttatccaaaaggcttaaatatgtctttattctatataataccattaccacttcttttttcttttaaatctagctagtctttagtctacacagtccatccatgtggaaatttggcaaacaattaatctcttctacaattgctactagtaaaatttgtgtataataggtatatacctctaaaccctaaacttggttgaataaatgctgttataaaaatatatgtatacaatttgatttttagtgaatatattcttttggtacttgttatttgtcttcacaccagttatacggtaaattaatcacctcaaaagtataatttatcttaacaaagtttggtaaatatatatttttttgaaaacaaattaggcccaagttgtaacttgtaagtctacatcacagtggccttttagtaaatataaaggtctaaggagggcataaaggggtttatggaacttgtaatcctgttgatgggccaagtatggatcggtccttaggattagtccaagtgtgccacccataccacctgcaagactttctttggagatttcatggaaaaggtttcttatctgctgacgtggcaatcttctattggtgacttcagattttagggcttacctggcatgtcttttaaggaatggatgatattcacgtgtatcaaggtgggattttggatgtctctcttagaattaggagcaatgatttgttagactttttttttttattttt

SEQ ID NO: 305335 - DNA, 1708 bp, Cannabis indica
aaaatagtatttaccctaaaattaataatattcaattttccatggatagtgtcttatccaaactctctatctctaggcttgacatcaatcatattaattctcttcaatcctctcttgatgcaatcttgcttaaagaggaagttttctggaagcaaagatctaggggttaattggctcaaggccggggataaagacactaagtactttcataataaggcctccactaggaaaagaaacaaagtcatcaatagtgtcactctcgatgataattctattgttaacaatctcactgatatcactaataactttgtctagttttattctactctttttacctttaatagtactgatcttgagtccattaacacggttcttaggggtatctctaaacgcatcgatagcaaccaattcagcttccttgccagtcctttcactttctctgaaggtaagagtgttcttcttcagctgtctagtgataaggcccctgggcctgatggcattaaccccctcttctaccaaaaaaattggtccgttgctggtactgatctttgccatgccgttcttaatgttttgaatcatgattccaatcttgctcccatcaacaagaccttcgttgtccttattcccaagaaaactcacacttgtcaagtttgtgatttcaaacctatcagtttatgctcgaccatctataaagttgctgctaaatctcttgctaatagattgaaggttgttctcactgatctcatttcccacaatcaaggggcttttcttagcaatcattatattcatgataacatcattattgctaacaaaattattattgctatcaccgccaggaaaaaaggtaaagtgggttgggctgctctgaagttggagatagaaaaagctttcggatatggtggagtgaattttattcatcgaattctctctctcatcttggcctacctgccaattttgtttccctcatttctaactgtatcttaactatttctttcaaactctacattaacaatagcctctcttctcccattattccttctaggggaattaggcaaggtgatcatcactctccctatctgttcatccttgttgctgaagggttgtccggtctcattacttccaaagctcatgccaacctttttaaaggaatctccatttgtcgtgctcctcctcctatttctcatcttttatttgttgatgatagtatgcttttcacccatgtcaataaccaaaattgtggaactattcaagacattcttagtatctataataaggccaccagtcaatttgtcaacctcaccaaatcctctgtccttttctcgcccaacactacacctcaagataaaaattcttttctcaattctcttcatatggaggataaaccttttgttgacaaatatttgggtgttcctcaatgtttctctcgatctaaaaaatcttctttctattacatcctccaaaaatcttacagtaagctttcggtctggaatcaaaggcttttctctaaagtttgaaaagaaactctgctcaaggtagttatccaagtcattccttcatatgccgtgtcttgttatagaattcctatctctacttgtaaacatttggggaagatgatggcaaattacgggtggagatctttgggtcaaaatcagcacaaaattcattggaaaaaatggtattctcactacaagaaaacccgcttttgccg

SEQ ID NO: 305336 - DNA, 3842 bp, Cannabis indica
aggaaaaggtctcaactctcaaccaccaaacaccacaacaagagcaacatgcactctagaaatggaggggggatttattcaactatacaattccctattattaaattctcaatacaagtagtattctccggccactaaattacactttttcctaaagtcaaaacaattttggccaaagaatagcaacaccattacaagatctattacaatacacaaaactaacatctttgagcctattacaaaaactaataatatcatctaaaataagtcccaaagaagtaataatggaagccttatttttttagtttaataacaacactcaagtagtcaaactcaataataatatgcccacacccaaaagagatgcattaaaaaaacatgttgccgatagccaaggctttagccacttcgggaacaaaacaaccatccaaatactaacttgccgaagctataacagttccaaaccgatcacaaatcaccatacccaagccactagatttgcctagtgaacaaatagcagcatccatattgactttgagaaaaccaagtatggtgtaacgccctatagagacaccacgtgtgtgattttataaactaaaacagtacaaataaagtaattaattattaaaatctatgataatattaaaaacttaactaaaataaaacattaaaatggacatcataatgacactaaaaatgtgttctgagaatccttgttgtaaaatttttacaaaaaggctaaatacgacaacaagttaaaatactaaatcaaaatatatggtagatacagtccaaaaacaactccgggcaacttggcacacagacctatagggtcaatacatacattgttggagaagactgtcacctcatggctgatctagcttttttttcctttacttccaccacggagcgcttatgagtcacaaggactcagtaagaaaagtaataaaagataatacatggaataaacaattattcatttcactattatagaatgtttaaacaataacatttaaaggtggataatataatcagtcatatgcatagaaataaaaacaatcatgtattgcattgcctaatcaggtaattttgtatcataatttgatatcatacataatgtcgatgcatcaactaatcggatgagcctgtgccacaatctgacaccaatgtattgcatcgtctaaccagacgagctcgtaccatatccaggtacctatatgtcattgatgcctgtacctaatcaagatcgccaacaagaatgcatcatctaaatagacgagcatgtgccatagcctggcacttatatgtcactgccacccgtgcctagtcaggattgccgacaagaaaaacttaacaatagtttcaatttgtgccataacctagcactcacatgtcactactgaccgtgcctaatcaagattgccgacgggaagaaacctaacaatgatttcgatttatagtcatgaatttataacggttgcctcacaagcacaacatgaatactagcatctacatatcacatttctaaggtcaattcatgccatagcctggcattcatatggcacatcacttaatcaggtgagattctatatcacattgtctaatcaggcaagctcataccataatcttgcactcatatatcacatcacctaatcatgtgagattgtatatcacattacctaatcatgcaagcccaaaccataatctggcattcatatatcatatcacctaatcaggtgagattgtatatcgcatttgcattatcattacctaattagatagttgataattacgaaacttgttatgccataaggtacattatatttttcttacttttgatccagattcatacatgtcggctaatccaagtggataaatatctccaatgatcttgaccctgtgtcacaacaacggtaaaccaataagtatatatcccaaaatactgtttaatagttgcagaggacaacctaaagttttctaccaaaccctatagtataaatacactaaaataaaacttatattttggctctaagacatagatcatattgtagagcttgtctcaagcttcgaagcagtatatagaatgtccaaaacggacacccgagtaaaaagttatgacaaaaatataattcccgatttttttaaaattcccaaaaacggtaaactggttgggaacggttaaccgtttcccaacgaatcggttaaccagttgcaccaagcagtggaacggttcgacagcaacatgggtcaaaaatcttaaattttacactcatcgaaaccccccgaaacctattcaaatcattccaaacttcacatggcacatctataccatatatacaataatccttacataacagaaattaaaatcaagtccttaaatggaaaacaccataaatatttagacttaagctttaaaaagttttaaacttgatttttgactcaaaatcacctcaatttcaataagtatacatcgagactagtctcatagctaccaaagaacaattctatgaagtcaaaatctccaaccactctaaaacacaaagccactatataaaactaatcgtttttaacttaaaacaaaactactccttactttaagctttctttcttcaaaaatttactattccactactaccggagcttgaattactaggtttcagattgaaaattaaagaaaataaattaagggaaatgagagttccgtcgcactgaaagagaggttttcgtttcgtacattttatatttttaaaacataatatatattaaactaatcacttttattaatagttatcctatcatttctattagtcactaaaaaaatttaattgtagaatattgggtcaactctgaataccccaaaatatctggtatttctaaaatcagtttatctcaataaatctcatcaatattactaactaaaattgttgtgacatttttggtctccaatcggatctccagggttaccgaatctgaaataatttttatttcacaaataacttacattatatccacataatcaaataaatctttgtaattaataaattacgcttatttatccacttatagcaaaatttataatttatgctaaattaagttagtaagatcataatcctactcattactaactaattaatctataatatataataaatcataattattcttaggtttctgggatattacacagggagatttccattttggaaccacttgaaaagggagtatctgaagcaccaacccattagcagagacgtccaccaccggctgacaggtggaaagagacactggcaaagtctgtttattgcaaaatatcccaaggtaatcacaggcccaatgcacagtgagcacaagaggcaattcaatatggaccattttattacgtctaaaccagatcctctacaaaatcaccaaaaagcaattcaatcattttctccaaaaggatatcaaaaaatctatgaataaagtcaaaaaaatctacataataaacaagcagatctcctaacacagactcacagagttttctgcaatgtaacaacgaagaacacctcccaaagagcatgatgagtagtctcttcttctaacccacacaaaggacaaaacccatcagttaatagaccatgatgaactagattgatttttgtaggaatttaattatgggacgcttgccaagtaaagagtctaacctttgggggaagattaagagattaaatttttgggcttttttcaactttaaccaaaaaaagtatagtattgaaaatatacttccagctggccagataaataaatatacaacccaaataaaaaaaaaattacacaaataccacttaaacacaccttcaacc

SEQ ID NO: 305337 - DNA, 3689 bp, Cannabis indica
tttggtgcatatacatgtctactgagtggtctacaaatgttcattcatcattcatgaagtcacttattaattgatacacctctgtctattccaggttataagcactgctaggacttgcaattgcattttaattgttcttgatgcaataaagccaataactcataagcgcctgatagagaaagagcttgagggatttggcataaggtatgacttatctggttgatgctctttcccttgttgtgtttacatgtctggttattcttcttacaaaggaaatttattatgcagaagtactgtatgttaatcttttcttattgaagatttcataaataacttttcttaaacaatgtatgttttgattatttttgatgaccggaaagttttattttcagtgtatgtcattaaggttgagaattaaagtgaaaacaaaaagataatgttagatggatgtgggtaggaatggctacttgaagcaataggcattctcagtacaaaaaccatgtttttcggttgcaacttggctccttttatccatttgtcccttttcaataattttttttcctcaaacgatccttttttattttttgagagcaggttgaacaaagaaccacctaatctaacgttcagaaagaaagacaaaggtggaattaattttacctcaacagttactaacacacatctggaccttgatacagtgaaggcaatttgtagtgaatacaggattcacaatgctgatatcactcttaggtttgacgcaactgctgatgatctcatagacgtaattgagggaagtaggatatacatgccttgcatctatgttgtgaacaagatcgatcagattactcttgaagagttggaaattttggataaacttccacattattgtccaattaggtatggtatttcttttatctccaaagtgtcattttctctgtgaatttgtagtaaataattgttgcagggactgaattatacgattgacttatcttaaattctttaaacttctgttaaagatctattttgattttaattcagtgattagcttattctgttgaatactccacttacttgagttgatcttataagaaatctgcttatgccattcatagtcttcagaaatgggcagaaggttttctgttcttgagttgtctaaaatgtatcaatgattgtccctccttttgtgttttaacataaacctactatgtaaaaatgaaataactggaaatacttgaaaagaggaatgatcgcttgtatatttcaacgctattactgggcatattgacagtggtcggttcatttattatttagttaagggtggattgaataacaccatcttttatacttgttttcttgtagtaatagtattctgaataacaccatcttttgtatttgttttcttctagtagtagtattctgtttccactgcttgttttaacaaacaaagtaggaaaatgttttttttatggtttatattgttggctcacatatggtagatttctaaccaaaatttttatcaatgttaattgtctaatatgtaatccactatgattattatgcagtgctcacttggagtggaacctcgatggtttgcttgataaagtatgggagtatcttaatttaactcgaatttacacaaaacctaaagggatgaatcctgattacgaagaccctgtaattctatcatccaagaggagaacagttgaggatttctgtgagcgaattcacaaggacatgcttaaacagtttaaatagtaagtagcctcacctataatcttcatggcctgattacatataattggcaattattctgtcaaacatgtgaatgctgaaaaggttgtttagaaagaatttaactgtgccatgatacggctgcatctaggacagttaacatgacaactattgtgataatactttattatggttttggcttatttgcattggttgtctaatccggctgtagcttgtttactttgtcgaatagctgtttattttcccctcttttttctttggcttcagaacaatcacttgtaaaactggtcacttcacacatggttttgctttgtgtgttttaacttattacttctaccttggtaactatggattttctcttcgtaagtgaggctccctaatttatttgggagaaggtcaggctgagacattttccccctttgcatctttttcaaaatgtgggtcactacacacctctataagtttctaatgtatttaggtgtagtagatattcttctcatctgacaactattttgaatttcagtttctcgttctgttcctcttcatgttgactctgtctattctatttctttaatttaatgttacattgcaagtgaaagttacctctgaccaatgttgttgcagtgctctggtttgggggtctagtgcgaaacacaagccccagagagttggcaaggtttgtaatatatcctcattctctatgctattttctctctccctcttccctatctgttctgttatcatgaatcattactttttatattctgtaaagtagtatcacatacttgaagcttttgaaaatggcaggagcacgagttggaagatgaagatgttgtccagatcataaaaaaggtgtgaaattggcaaatcagatgacctgtttgccttttcacattcatgatcagaaaccggttgcaagtgttgtcctaagaatagttaagatttgaaatatcagagcaggccgcactattcttactcatttttgttttttgttttcaattattcattctagttgaactaccacaatatggagactgcttgatatgtaaatttattagttttatggtcaagcaaatcttctagaaagtgtaaccattttgactgactgtatttgatgatgtaatgaagattgaatgaactacatggatgatgatgatgagctttccaaacacaactcggtagctagggattcaaattcggatgttattagccctcttattaaattttctgaatccttgcaaatcgtttcaagagtaatgtattatatattgaactgactaccagacattacaaatttaattttaagttttcatatacagatttcttttgctttgattttacgaaccttctaacaaattaccaggaatattctatcgttctatacaatcagaaaagaaaatttcttttaatatccctataataacttccacatgtcagtagtatatgttacccatcacaaagtgtaacttattaccttactgttgtttaaaagcgtagctttaaacaattaaaatttgaaaggctgttcgagtctttcctcatggaatctgttaaacttaagattatgttcctaaatacttgccttagcatgaatcttagcaataaaatctgaattgtttttaaagagaaagaagactgtagagaaggaaagattatagtaggtctccctttactctatttcctgatgtacctggaatgtttggtgtgtcatattcatttatagcaaacttaaagcaaaataaatgaaaacagtaatttttttctcacatctacacagctattgtaacaatgttacataatacagatggggagttatatttacaccccataaaattataaatacaccccattattaaaaaaatataaacttaaataatttttaaaaattacttttaatattttttaaaaaaatttctcctattattttatgttaattttaa

SEQ ID NO: 305338 - DNA, 1021 bp, Cannabis indica
gggacacgtgtcaagatataattcgataactgctgaacctgaattttatcattaattagtttctcccactactactgctgctgagttttcctattttaacgcctaaatatataacttaattattatatgcaccacgtagcctttttctatattcttaccaaaattaatttatatatttgcattacaatagtttgacctattcaattacaatatataaacaaaaataaattatacaatatacctacattttaaatttatttatttgtttgttttttttttggaggagactactccttaaaattattggcactgcctttcaatgttatcccaaagaaaaaggaaagtttttgtctctggttaactgagagaattaatttatggtggttggtctagctggtcgaccatatattaaataaaaagaaaatcattgtactagttataacctagcacatggcttggtttggaaccacaattaattataattcattattaatttgttagttaaccaattattaatgttatataatattacatatgttcttgaccatgatttgccgtaaggaaagtgtttttggagagagttaggttaacataacaacttctttttaagggtttcaggtttcaaaactatatctaacttctgttctattctatagatttattttctgtcttaattagtaagtaataaattatatttaagcaaacacttccactatatattaatatatattcataaatttatatcgagcaggaatccctaccacttatagtgtcttataattaattaattaatagttcttataatttttattaaattaaaataattgtgattcaatatttaccaattatgatattacactttgggctcgtttggtacgccgtattaggtcgtattgtattgtattgtattatattgaattatattttatgtaatatttttatgtaaaactatatttagtattaacttttatggacacctaaatatataatattttagtataaattaaagtttaacatagta

SEQ ID NO: 305339 - DNA, 3035 bp, Cannabis indica
tatatatgtaatgcgtactcgatgagaatccttctcccgtcacccccactttaatttaaatgggtatcagagcaggtatgaaagtgaatttaagaaacgtgtatggggtgggggagtaatccccgcacccgctgcgccccgtttacatccctacttaaataatataatatggataaggaagaatctaatacagaatgagaacttttcagaatttccccaagtacacgacgtactcacaacacacatttacaaaatgcatataagttgactacattcatcaaatcccatcgtccattttcccaccatcagatcatctctaccgtcaaatcctccactcaatcaatatcagccgtcaaatttcgattccatcttttggtccttccttccactttttttttccggctctcgggccctctacggaatccaaactcttttatcaaatttagtttaattctcaaaacaaaacaaaaaaaagtattatctttcatagcttaccctcaaaaactcgctctctttagatgccacgtcatcatacaatgggtaattacgtaattaagtccttaatccacccacaaattgaaattaccattatagcccccgaggcacaggtatatatagaaacgcaagcacaaaattcagaaacacggcgtgaatctgacgcttgagaaaactcgtttgaaatcgggaatagcaaaaggtttttgagacgatcatacgatgtcggcgactggcggcggagccggcggaggtggtggtggtggtggtcaggaggaagacaagaagcccgtcgaccagactgctcacattaatctcaaagtcaagggtcaggtatgattttgaaatttgatttttttttgttttgttagctttgcatgcgatctctttgttgattttaggctgtttggatgtcgagaaaccgcgggaaattccgattgaggaggtgaaatgatgttgattacgattttttttttactactaatttgtgtcagttggtacaatatatggtggtggtagtggggtttcgaggttttaagagtgtttttgactttagggttaactagttggaccatatggttaggttggttggccaaggtttgctcaatcctagacattgtgccattttagtaaaaggaaaaattaaagttagcttatttaaccatgaagggattttagttatatggtctgtttggggagattatttgagatgtaagtgaaaatgattgtattaggaaagtgttattttcattaattgggaatgtaaatcatcctgaaaggagtaaagggttggaaggagtttgatgaaacaaaacaaggaggagttttccttaggcatggtctatacatgtgaaaagaggacacagttccctttttctcttcccatttattgatccaatgtgtattatgagattgggtttttgattggtccttaaataacctgttggttttgtttcaaatcattatataggatggtaatgaggtgttcttcaggatcaaaagaagcacccaattgcgcaagctcatgactgcatactgtgataggcaatctgtggagctcaactccattgcatttctttttgatggacgcagactacgagtcgatcagactccagacgaggtaaacactttagctcatcatgaattagctaaatcataattatactgaatgtatagtttaaacactgtatgattttgatcattcaatatggatattgggctcatggtttataattgttaatagcttgagatggaagacggtgatgagatagatgcaatgctgcaccaaactggagggagcccatgaaggtgtcttcagccggctgcggactctgctacgccataattcgaaaatggaggtgatagattattgcttgcggaattccttattttgctatatatgtccaaagttactgtaaataaaaatggatctgatctggtgcatactctaaactagactatgaagttttttattgatgatcatcactattaatggatttattattatgcgtggttgtttatgatttttgaccattaaatattgacagtctataattgtagcgatctatatttgttgtgacttatgttgttttgcttattggttccatatccatattggaaaaattcaacatatgtttgtttttttcatataagcaaaagaagacagaatccaaataggtttggcatataaatcatggtaatagtaaaaatccaaaaattatagaatggatactggtgatgaagtggaaatggcaataaaattagtcaaatttttatgggtgaaaaatacaaaaattaaaattttcttacctttttctttttaagggaaacttatgccgttatactgcaatgaggaagcaatgggatttttctttcttttttttttttaaccaacaataatgagattatgtagccaataatataatacgtaataaattgtggcaaaactttcaaaaattttattttgttagtaattaacctttaaaatctattttttcttgtggcgaaatcctaaaactcatgtttttttagcagtttgttgtatcatgttagactgtctacgtgtacaagtttaaggaaattaggttttccgtttggttttttatttttattcgtttatttatttattaaatttaatttttattttaaattaatttattacaaatttaattttttaaatatatttatatataccaattaaattgtgttatgtgtacataatgtctatgtgaaccgtcagtatagtataaggctaaatattgggcgggttaattgaatttcaagttcacaaattttgagtccaaaaaaatgaattcggattcgaaataaggtcaggttggcgagttggtaggtcacaggttgaccaggtcatttttgtaaatatttgcacatagtaaatgtgacagtcagtcccgtgatccgtaaggggaaacactgggtaagctgtgcaatcccacaccgcctggggaaggtcaagtgggatgattctgaggctgtgtaggtatgggactacacagttgaagagggcttaaatggattga

SEQ ID NO: 305340 - DNA, 1366 bp, Cannabis indica
aataaaatattaggatttttaaattatagtttttcaaatttgcctttttgaaatctattttttctgatttttgggttttgaatcgggtaggtttaccacgtggaagaattttcgagtataaatgtaacaccctatctttataggtatccgaaacaccttatagttcacagaatcacagcatatagattacaaagcatcttaggaaaagaagaggcaataaagccacataggaacttgtctcctagagatggcatgtaatgtttttgtgaatacacatgtcatgactcttcaagacttcaacttggttaagtgaataaaccaaaacaaacaaaagaaaaaaatacccatttgaaagcacatatctttattattactatagctaaaactcaataaaataattaaaaatgatcaacatcttagcaattcttcaatcactcccatcactctacttcccacaacaaaataacaagatgaacggctttgatttgttctatgttgttattctccctatacaatatacaagctacatttatatatgtaagacaaattataccatttttttaatatagttttatattagtttgtatatctgcaatttgaatgacatcatatatttttattagcggtgctgatgaagacattgagaagataaagctttggaaaagatgacctttatctccttatataataaaaataaaatctctctatagagaaaaacaataatcaattgttatatatataatggatttatgattaggtgagaagaacaaagagtttacaattagaaagtggcttaattagcatttgtcctaagtgtatgggtatatatgacttggtcttattttatattgaatatccattttttataaaatatttatttatttaaataaatatactttttttatttttgctgaattataaataaatatacttatgtatggtttttttggactttttcattttggctcatttacaagttcatttaggtgcctccaagtggcagtcatttagagccttaatgattctgtcttagataatacactaagtttggtactaatttttaagtaatttgctaaataattattaatataaatatttaaatttaatttagtatctaaacatttaatgtgaaataaataattatgtcacagtatttaattaatttaggtcattaaaattttattttctatttaaaaattattttaaatatactaataaaagtataatacgtgaataataacttaatatttaaaggcgaaattctaaaaatataacttaagtattaaatttaaatatttatatacaattaaaaattaaatttaaatatactactaattaatcttaatttttttattttattttttct

SEQ ID NO: 305341 - DNA, 3311 bp, Cannabis indica
aaatataaaataaaaaaaaatcaagaaacaaattaacaaaaaaaataaattagagaatgtaaaaataatattgagaaaaagtattattattttactttaattaatgggatgcttatatgtattcttgttgtaattattatgacctatgtgtactaataaggtttttttttggaacaatatgtgaaataataagataataagaatacttttcttcttctttatgaaaaaaaaaatagaaaactttcttcttcttctttttttctcaaaataaataagtaaatatattatcgggccaataaataacggacggttggcccaataaaacatcctagtcgttcgttctaaaatcaaaatcccccgtttgatttcgaattgtgtgtgatgaaatcgtataatgtgaacccatgcaaagtattaaaaaaaagtatacacattaataattaataataaatattaatataataacatttcaactcactctactcacccagtagtactaactgatcatcactctttttcttctgttgtatatgtaaattcatttaatgcttattacagtactataaatataccatcatctccatcaaattacaatctcttcatttcatctcaacccctttattaccttacccttcgattgattacacctttttttttctttctttaaaaaatattatccacaaaacaacaatggaagaagctttcactaggctaaacggtacaaatattaccaacaccaatgtcctaaacctaacttccgaatctgaccaaattacccctaacaagaaataccccaccaccaccaacaagaggtcgttgcgagaaagctctactactaccggagcagcagctgccggcggcggcggtggaacaatgcgttaccgaggagttagaaggaggccgtggggccgttacgccgccgaaataagggacccacaatctaaggagagacgttggcttgggacattcgatacggctgaggaagctgcttgtgcttatgactgtgctgctagagctatgcgtggactcaaggcaaggactaattttgtttaccctacttctcctccaccacaaccacctccgccgcaactttcctccgaccaccacctccaccaccacaatctctactctcctcccttcaacttcaccaaacactctcttaagagccagttcatcatgggttgtaatactactcctcaagctcaaactcaaactcctcttcagttttcttcaaactggtcatcatcatcacgttttccacactcttcttctaatgttgacttttctgctggtcaaagaacaatggtaataataataataataatactactactacttcttctccaatgaaccacatgcaactctttcttcgtgaccatttcaactactctccacataatcaatttccttcatcatcatcaccatcaacaacttcttcttcttcttcttcttcttgttattcaaccctaactactactatggtcaactcatcatcagaaataataccttcttcaatccctaataataattccacaaaaaccacctttactactcaacaagacaataatgataataataattattatgaaccggaatcattctttccaaaagaggaatccgattccggtcttttagaagaggtcattcaacgtttcttcccaaaatcctcaaagaagtactactccaacaacaacaacaacaacaacaacaacaacaacgagtctcttcccaaatcttcggacactgttactgatggtagttataacggtaaccctatattttcggggactcaagtagtgacagctgggatcaaaactgattataaccaacaatacaacaataatctcatggctaccggttgttgtggtttcgattaccaacaaaaccccaacaataacattcctctcgtttcatcatctcaaacggtgccgtttggtatcaatagtaatattaataatagtaataatgatgctgagttgaacttccaccagttcggtcaagatcagtcaattttcatggatgatattttccagtttccagagcttgttactgcctttgctaccaggaccctacaaaatgcttaaattactatgtatgttcaactttaaatatatatttggtttttagggtttttcttttttcagctcatgataaaactttgatatgtagtacttaactttctagtatttgtacttgtgcaactttttatatatataattatttttgttacatgctttaatctcaatctctccaattttagtagtacattgctattaattaatttttcagttcttcttggccactaatatatatactgttgttacatcttaaaagcctctgttgaaacttgtctctcattatcactttttaacaggtatatataattaaataatcgaatgtcaatgctttctttactattttgttcatgttaaaccatgaaacatatatagctctttttttttgtggcattgtgttgtacagtagtaagctttttttttatagttgactctatatatgaaaagtctacatgataatatatatataatatatagatagagatagtacgtaagtgtatattcacttcccagaactttttggttttttgtctctgctaatcgatcttgattcttctaaagtgttaaatatagttagtgtagactaaaaggtcttgcaaacgttctttgatacaaccaaactaaccactagctaaaaatgttgtactaactactctttctttttttaacaactttttagggggaagagaatcaaatatattttattttattgtattagagttatttgaaagaaatttgtaaagtaatctttaaattctggaatatcgaaatattttgagaaatgatttaaatatattttgtgttgtatgcgtattttctttcgaaaatttgtaatacatccttgaaagaaagtatctggtatgtaattatttagtatcattaataaattttcagaaaattttaaatggtttacaaaatatttaaattttatttttcagcaatataaattattcaaaatattttgacaattttttgaaaatttataggttaagtattttaaataactacaacttacaatataagaaaaagtaaactaattaaaaaattctcatgaatatcaaactaaatagaaaattcatcgaaatactcttttcaaagggtataccatattttttccgcatttgttatattaagtaaaaatattttgaaagcttgctagatattaaattaggtgacgtttggtaacacttttttaatcagttttctgtttttaaaagtagaaaagtgaaaatattt

SEQ ID NO: 305342 - DNA, 1351 bp, Cannabis indica
gcaagtggtgaaaatgttgaatcagttaggaaggattctaaggcagctgcatacatagctgggttttatatattatgcagtataccttggattgagcttgatttcatactaatgactgttaatgtgattattcttgctcattagacattgtgtattcttgacattaagttgagatgcttaaaagtattgatttctacgaggtttggaaagtacaagaacaactcaaagaattttgttcgtgcattttctctaatacttcctatattgctgtcatatgtcaatttctatgaggggatgaaagatattgacaggagtagtaagcactggcaaggtaaaaaagagactgatgcatttgatattgtcgtgatttgataatttgccccaataagaggataggtaactattttggtatgtttctatgtttattattattatttttttttgttatcttacaattattatggtttattctgtgatgtggtgattgtggtatttttattgtaaagtatgctcattttttttatgcatggattggttgataagattcttaagaagctggacatttcattcactcgtaagaagttatatgttgacttgttgttcatgcaaagaagaagaagttgagtaggtatgagtcttcttcggagttcccgggaaggatgccatagattgctacaatgaaacaacttgttcgattcttagtttacaatattttgaactttatatgtcttttatgtcatgttgtttgaactctaggtttatgttggtgttcatttaagtaacttttcggtttacttaatatgtttaggagactattgcctattatacttttgaagtaacatttcggtgtactagcacattatgtgcagttttaacttttgtattgttataagacaatatgttaaccttttggaatatattttaggttttacatgaaaattagttttatgtactaacttctgtatgtgatataatttaattttgtttatgagtttatagaccattgacagtttcgtataccattatcagtgttataaaccaatttaatggttgtaaattaataaaatgattataaactaattacagttggtaactatacacaatattcttaacttgttatttttaactacttattttatatggattactagaatttttaaggcatggtatattaaccatggtattaaaaagtattcttagtacattagaaatatttatcaactgacaattattactgtaaatattttttggttactgtgtatatagtaaccatgtttgatatttctatcaacatttttcttttcttctttctcttttttttttcctggaccttaactccatcaacctcttt

SEQ ID NO: 305343 - DNA, 697 bp, Cannabis indica
tcaagaatcagtcaaattattcagctgtggtgagtctctctctttaaattaatatttttttagagaagaaaaaggactaattaatcttaaatcccaatgcagattatcatgttcatcattctattggctaccattcttgcttatgttaattccaaccgatcaaataactagtgtaagttttgtcccaaaatattaaatgtcacttaaaattaatcaacaaatttctcaaatctcatccctgaattttttttttctttcttttgcaggattttgctggctttatttatttatttacttcagaccaaagtggccagtttgtccaaaaaaaaaaaaaaaagtaaagaaaaatgtgttgttattttatgtgtagacagtagacatttatggaaatattgggttttgagagtaatattattaaaagaaaattaataaattattgcagttgcatgaatcccatttagcttttgatcattaacagctaaagagcattgtatttatttcttaccatgcatatatatatatgtgtatatatataagggtgtctatcaatggtttgatgcttccaattgaaatgaaaatatataggggtgggcatccgatccaatctaacctttttttctcatctgatccaaatccaattagtaattggatttggaaaatcatcatccgatccaatccaattagacctcaaatccaa

SEQ ID NO: 305344 - DNA, 1555 bp, Cannabis indica
gtccaaggttctcgtgttccaagaatctcagcgttgaaagctagggatttgttacgtagtggatgtcagaatctcagaatctcagaatcatcagttaattctgtgttttagttggtggcactcttcttcaagaaatgggaagggtattagttgggaatcttgggacagattggttgtccatataaagattcgggtgggatgggttttagaagccttcatgatcacaatcttgctatgctggataagcaaggttggcgcctcttaaataatgagtcttcattggttgggcgtgttttaaagcaagatattaccctctaggttcctttttatcagcttgtattggaaataacccgagttttgtttggcggagcattcttgagagccaatctttgattcagtcgggagttcactggagtatagctagtggggctttggtggatgtttggaaccagccgtggttgatggataaagaaaatccttttgtctcctcttcacatcctgctttgattgatgccaaagtttctcaacttatgatcccgaatgaaaggcaatgggatgaggatattcttttgaatcttttttcagaacatgacagagagttaattagggcggttgtgattagttcatccatggaatttgatactcggtactgggctttcgaaaactcaggccattacactgtgaagagtgcttataaaaggcttcaaatgttgaatggaagatggactggtggagataattctgggttatggaggaagctgtggaatttgaaaataccagcaaaagtctctgtatttttatgtcgtgcttgtcgtaataatctaccaactcggattaatttgaaggtgaaacatgttaatgcccctgtagtgtgtcccgtttgtcagcagaatgatgaatctgtagagcatttacttgttgagtgctcttttgctcggctatgttggcatcatttaaacaccagctttgtcatagctgatggtgtgaattttgccgactggtttgctagtttattcagcactttgtcatcttcttttttgggaaatgtggttgtgatttcctgggttgtttagaaggcgaggaacgaggtggtttggagcaataagaatccggttgcagcagctgtagtgcaatctgctttagcttactttgatcaatggaaaagtgcaaaatcttcgattgttgataatgctctgcctgctggtgcagacatcaactcgcactgggaacctcctagcttgaatacaatcaaagtcaatgtggatgcttcgatttttgcggctgataaggttgggtttgggtggttggctagagaccatgagggctgtgttctttatgctactgctatgatacaacagtattatgttgatcctataatggccgaagcaattggcctcaaagaagttctaagttggttgaaaaacaatgattttccacatgttgtggttgagtccgattgtcaagtgcttgtcaacgccgttttaaacaaagtaactatgtattccccgtttggtttacttgttgctgattgcatttctctcttaaatgatttaag

SEQ ID NO: 305345 - DNA, 1859 bp, Cannabis indica
agttcctggtaaaataacttccaacagtttcaccgttgcttgagagtcgaatcgttgttttgattttagtatgactttaggcttccttcatggtagccaaagtctaccatccaattcaacatgggttccacaggcatgtatattctcgccacataatttttgtcgtgcttatggattacttttccgatctcttgggtggaaacattgcttgggtgtcagatgcgagttgaaccctctcctttaggaggaggattgcctaaagtccttcaccgaatttagttttcatctatagttttaagcatgaaggctttgctggaattttagtgtggcgcaagccttccctcgtggaagccaaaagaccactgtcaaattcaactttgccttcgttgtctttcgaaaagagtccttcacaggtgacaatagtcggagagagcacgattggagtatttgcgtaagtcgagttttgcctctcatatatcccattcagtggcccaaagtgacacggtagtgtcacaagttatatttcagacaaatgacccagaatttggaggcgtccaaatctcttacttcaattggggagtgttatgcctagctgcgtatgacctaggaaccaatggtgctttgcactcacttaccttgtgagagctattagcgtgccatgcatctcaaaccataaacaggaagcattttcaaccaaatttcctaagggaaaaaacagttcaaatccttcttcaaaattaaatatttacgtaactctggagatgagatgcatttttagcaaaacttcccaagaagaaaaatctgcccagactccttctcaatggtctcattaggtttcataagatttaatttatcgggattttgcaaggagctaaaggctatgttggcaaggttcaacatagagaaattcgcttaaactcgttatggttccagctccattcccggacaagggaaaatggctggagtgtatggcacttacgtgcatcactcccggaacctaacttcataaaaatataggagcctaggaggtaattggaaagtggaagctcccgctttcgtgaagaaaaccatccttgagctaccattccgtgagcaacattcatgaatgaataattagctactaagggcatgctaaaattactaaggcttcgtgataacctggtaatctaggaacaggaaattgaagttttagaggccccccaaattagctgaaagggcaaagactggtgaaaagaattgaagtggtagcccttagaaccatacacttcaaagcaacctaacgtgaacagcccttcaagggaaagggtaagaacctacagttattacaaagaacccccgcggttaaggcaaagttaaaatgtcttcgtgaaatgaaaagagtaaaaaagggggaggattatgtagaaaaacgagaagaaaaagaaagattgttgtatgctacggatagaaaaggatgggtgctgctggatggatcgaaagactctaccccaggaatcctgtaacaccctaactattataggcgtgttagcgtgattttttaacgtactatgcaactcgttgctaatcaacgagattattggaaatcgtgaataattaaaattttgtttaattatttaaaacataaaatattacatttataaaattctgatatcccgtttacaaaatacaattacaaaagcttactattctttaacaaaatatttgttgcccagcgactaaacaacaaaaggcgctgatgtcccgaggatcgtacgctctaggcctaaccgccctgacatgtaaaatcttcacctgctcgctgtcatggctcctcaactttagctttgcccttacctacacatagcaatagcattgtgagt

SEQ ID NO: 305346 - DNA, 2410 bp, Cannabis indica
agttagtaccgtgtttaactaattttagtacatttttactaatttaaaaaaaaactaagacaattttagaataaaaacaaaaagaattaaaaaattttagaaaaaacaataaaaaaataaaaaagtaaataaaaaattagaattccatgctattatttagaattaaattaaaattattcaattaacttaattatcgtttttttttcttctacggaaaattagtactatatatatactgaaagaataaatatactctttagttgctttaaacacttctatatattacacacacaaattattcagaataataacataatatttatttcgattattaatactttttaaccagaacacataattcttgtatatattaaatttttatacataacttttatgttttaatattatgcatcaaaactaaacttgatagccaggaatggtgtgaaagaggggattggccaccctcaaaattttcaaacaatttaaatcacatcctattttttaaaataattttcatattttttaacaatcataaatttgggttcataaagcttttatttcacatcgtagccctcaaatcaaatgctccacccgtccctcatgattattatagcttgccataaaaaaaaattattaatctaatctaatatctaaaaaataaaataccaaccctcctttaggaaaaagaaaaaaaaaagagagagaaaatatcactagtctcaaataataattaggtgacagtagtgaagtatattgtatttactttcttttttattttttttaaattattaatttgtagggtaggtttggtcactcaaactagtgtttaattaagtttaatataagaagaatatataattaagatctctccatataacaaaagatagttaacttcccacgtcaaagtagtaagtagtcttatgagttcttaacttagtaagtgatttcgtcaacgaatagagcgacaaagaaattgggtttgttgtgaattcatctatagatgacaagaacaagagaagaggtacttaaaacactaaaaataccttattatataatttatatattaaagagttgaaaatccaatttatgtaatagttattaaactaaataatgataatgagtcaacgtgtttatagatatattgataaatattattattgtagtgagcaagtttattgactcactatatatataaatattaaacatgtatgttctaagtcaaaagtaatcattttttgtggacttggtaagctttgtcttaagcctatattgcttttttctacttggtttataccggcatgagaaaacaaataaaggaacacaaataaatgtctatctcataatgtcaagcaagctattattataaccaaattatattgttttttattttctctacaattaatgggctattataaggaaatcaccctttctcatttttttcatttttaaattgttttagagacaatatgttagttacaggaaacttatatcttatgatcctttgattgagtgatcgaaaataaaattagaaaattctcatcacattaaagatgacataatcagcaagctaatctcctaaaatgtcaaatataatactttctaagagaggttataatgaaattcaaaatcttgactcaaacacgaaaagactcctactactacaccacacaacaaatagtataacctttcattttgtaaaactaaacatatggaaattacaactccaatgaaatgaaccttttaaaaaaaataaaaaacgtaaaaaattgacatcatgtataattcaaaaccaagttgaaccctattatttttccatgtttcataaaagaaggaaatgaatgcgacatgtcgttgacttataacctaatcgaagaatctttaatttgaaagacacttgcaataaatccaagtgagaataagtcattttttgccataaagaaaacaaactcagcgctacacactttaatgagagattatagaaaatccccaaaaggaaagctgccattccttttctcatataaatatataaaatagaactttatagagttttgagccttaataatactgtaatgattttctttattgtagaatctcaagaataatactaggatcacaaaattaaaaattctttgaaattagaaacattacagatacccaaattgcaaaatatttgatttaaacaaagaaaaaaaaaggtagaagacgatttataaggattaatttagttggtattggcacttttagttgagttgagacatagaggggttaactttaaccaaagtctatgcaaatacggcgccgtttaaagccccaatgagcaacgaagccttatttccgtagactttagtcggcctttttaaaactccaaacgacacttttttttcttttcctttttttttcttttcctttt

SEQ ID NO: 305347 - DNA, 3632 bp, Cannabis indica
acacaattaataattgtgatgactcgattatagatatgttgtttcttagaatatatatatatatatatatatatcacaagacatattgaattcaatttaactattgctatatatattaataagatatatatgaaataatatagttaattgttttttttattaatgatatttaaactagatcttcatatatagtgtcattgctctattcatatatggtgaatcaagtaattaatgaattcaattgcaaagaagttcaatggagacacaataagctctacttctaacttgtccattataaaattatgtcataatatatatttttcatatgaaaattatcatatatttattaaatatatataatactaatgatccactttttttttcattatctttttgtttattttggaatgggaccgaagatggtttatattttttatattaaaatttttattatctaaatttttggtatctctttcttatttatgttgcaattttaatgttgtgattcatataacttaatttaacatatctttagaataaataatgattttttttaaatgaaaaaactcctccacacctattgtacaacgtaattatgatcattgttattttaacattagttaccctttaataagagaattactaaaaggtttcatctaccacaccttctttcatgttatactgctatttgtgtaattaagtattgaatcttataaaaatagcttttaaggatggtatcgctaaccaatcatagtgcgccacctataaaaagtactaagtacgtgcctaataatatgctccttaaataataataataataataataataataataataatgagtttgtaacatttgggcaaaattgatccaaaacatattatttcaatggaacactctagtccacacattttcatcactcatgaaaatatctcaatagatttattaattggttaatgaaaggatagtaaagtcaccatatgctaataaaatacactcttaatcacttttgtcatctctaattaaatattgatccacttttgattaggtaactacttaatcatatatataatataaatgcctttaattaactaatgtttaatcatttcataaaaggttgtcatctttggtgcaatgcatatatatatatatatatataattgttgagtagtgtggtgcttgtgcatttgcttacgtacttgtaataaggttttaattaataatttgttccactaattaatacaactatatatgcggataacaatgttcgtttatatatataaaatatataaatatatataatgtatctataaatttactttaaccaaacgtcatttgattttctgctcattttttattaagcgtgttcttaatcatcgtcatcgtttttcttgttgtatatatattaatatttcacaatcaataatattaatatagaataataaaatgtattgttgcacagtactagcaagctactattcttttttgtcgatagtcttaggttatccaacactgtttaatatatattattagtatataattgtgatttgtttttgatgtaaaatataaaataactatcattcaataagtgatgaagaataatatttgtaagtgccatattaatattttttagtggcaaattatgttgattgcttttatgagttgcatctcgtctgattgttcgtctaatattttgttagatgcatttgttttctctgcaattattttattggttgctaggctagcatcgagtacttcttctgtgttagttggaacaactcattgcaagttgtaatgacttagttttacatctggttaataagttgattgtaccgaattagtagaggttataaaaagcttgttaagctttttctaactaattctcttcatctttgttagaaacttctagtaattcttattttgcatgtggttaatcatgttggcccaaactcttaatctccttgataattaaaaaatatttgattattatttgtcactaatgagttgtcgatttttagcacaattaaagataattaaactttttaaagacaaattaactccaatgataaaatggtaattttaccaaaattctgaaaagtgacccgaagtggattctaagactcaaggaactcaagacaagactccatgaaggtttatttacatttcctaatcttgtacagtgatttttaattctatacttaaaaagttctatatgtacgaattttggccaactaacttgtgtgataagttatttcacaaaaatgatatctaacatttttacattaaattttaagatcacatatcatttaactaattaagagaaaaaaattaaaatttttgaaatcagataaatgagtagaaagtaatgcgcattttagagctgaaaaagtggctttttgccactgccctaattttggtttactgtttttcacagaaatgggaaaccgtttaaaaaatggcaaactgttttttcctagtattcctttttaaaaagcatgataacgactataaagtgttagtttttgttcctacactatataaactcgtttttcactcaaaataaaatgttggttataccaaacatattcaagtgattttaagaacccccaagttgtaactccaacaaaacacttttcacacactttgagccaaatttcgtatttattttttctaagtgtccttgctaatcactgtaggttcttcattgtatcatcatacttctacagtgagttttcttgtacttctagacacattttcaaattgtaattgaggttgtcacccgtattgcaaacaacccagttagagtgagattggcactacaacaatctgaggaagaggtggatagtccttggcattgaaaaactattgtaagagatttcaaaaacaccttggtaaaatattcccaatgtacgtaagggttagttaagcccgttaacttggctcgatagtggaactcaaggatataggtggctttgttctaccgaaccttgtaaaaattgagagtttgcaatttcttacctttaaaccctttactttacaagcttgattatttgctctctctatttgcttgtcatactatttgcatttatttatttaatttaattaattgcataatcttgagttaacaaatcattggatcttcaagagccgtagaataaatgatgatttgcattatttgggagtttagatgaaactgctaaagatatttcaactgaaaagaagcaagggaatcttggcttcaaaaatctaagcgaacttagacctgtaaacttgatttgaaatcaagtgtttggataactttttgtatgaattcatttatgtttactttgattgagttgtaattagaactggatattgtatcttaattcatttcataatggaagttattttacttggtttaagggaacttatctaagtaataatcgcctagaatataaaattaattttttaatattgaagaaacagttttatcattgaaattatatatagtcagacaaaaattagcatattataaattatcaaatgaggcttatattatatattgccacgggctgtagatattgtattatattacaaaaaagaagttatttttaatgataatttttttgttataatataaatttttttgttgatt

SEQ ID NO: 305348 - DNA, 1260 bp, Cannabis indica
atctttctgtttatgcgcattgtaacgagagaggaaactcttcctcctcaagtttccagccctataaatattgaggaatgttcactgggcaaaggaccgaaaaattatacgccgaaacgctataagctaaggctatctaagaattatatattcaaagatattattgtaagagctataagaaaaggaattttcttccttattcttaagtcaatacaactaacgaggattaggctattaccgaactactcggggctgaacctttataaaatttctgtgtcttattattgctttattacatattcttattacgacatatcgtttatcgcttatcaaaaagactcattgtcgttggctaaaagcgaagtcaacacagtttaaggctcaaaaggagtaaactatgaataatcacaaaatcagttctcttgaaaggcacaaacattctaaacaaatttcgtaaatgatttttcaaagcataagtcattaaaaattttgccctaaaggccaaacaatgcagattctatcaaattcaaacagtcataccaccaactcttgtcaagcatatataataaaatccaaaatatatagcaagtgaaaaatattaaaatttctacataacttgtaaattaaactctaaaacaattaaaccaagcacatagttattagaaattttattttcactattaaagcaatgcaattatagacaaaaccaataaattaacaaaaaaatactaacacactcaacaaactaaatattgatgttgtccctaatgtgaaaataaaaataaagagagagaacttacctcaaatactacgattataaatttatcttttagtgacacgttttaattaagtagcactaaaagattacggatgagttgtagtgagccacaccaatggactctgaaattcagggttattgacctacaatttgggttactaaatgcataagggaacactaaatgaactcaaataatttctattatatcttttctttaaaaaaaaatattaactaatagtgacacgccaaatgtcacttgataaatgtatccccatccacttagcacatcactatataataattctaaaaaaaaatagctctaattaatatatattttttatattacaatatatattatttttaaaaaatggtgagaattcggccgacactattaattgatacactttatattgtttttttcaactcacataattacactattttaattaaaaaaataataaaatataataaaaaagtatttt

SEQ ID NO: 305349 - DNA, 1835 bp, Cannabis indica
gtaaaataattttcaacaaattattgctagagaccagatctagcttgatgtttcacatcaaaccatgttagtgagcaagctttcagtcctagacgaaaggatcctgaacattaaaacctaaccttggacatctcaatcaagatatgccagattgtaagtacttacaacaccatcttctttagaaataaattgagttgggggatcgcctttgatgtatggttgtaatctgttgccaatggtaacaagaatttattgcttctaaagtaaaaaattgtgatcatttaatttgatagaaatattatgggtaaaataaattggagaaaaatcttgatctttaatcttcggtcgaaccatttccgactgataattgttctgattttcaggtacacatcccttctcaccattgctagtgttattccttgaaccattaggtcaagaacatctagatacaactatttgccattaatggaggaaagagttctaataccatattgaatttcataagacattttaggagagagggagatggagagagaccgaggaagaagattagtttaataatcttaattattgagataccgacaagcagtgacggacgcacatgtatcaatgtgagggctaaaaatattatcttttaaaaatttaaatgtaatcttttttaatttgataattataagttaaaatagtagaaaaacccccacaaaattaaataaatataataagagtgattataatataagtataaatattttttattataaataagcccccacaaaataaaaattctaggtctgtcactgccgacaagcatcattacaaccgtatatcgattttacacaactgaagtaaaatcaatattgctaaggtagtggagcctaaccgattataccaacagaatcactaacaattaactagctattagtaggcttaatacttcgccacgaaagtatgctttttattgaaccagacgaatgaattgggaacttgaaaactttctcttaatttctcaattgtatttgtaatttgaattaatttaaaaaaaattattttttatatcaatagtattgctaaactattgacaatacaaattatataatgataaacattacaaattgaaaaaagaaaaaagaaaaagatagagagaacagcattacaaattagagagaaaagatcgactttcttttagataaattcatttcgaaacattatactatagttttactctattatactacagtacaacattttaattacaaacttcattattaattaaaattttaatgccttcgacatcttcaaaatttggacatctacgtattgtatacgtacatgttgatcttatacaaaaagaataccaacttttttatttcacctcaatgtgatgacattaaaagtgaaaaattaggtaggcctctcaacaaaatgtttatcaaattttatcgtaaactattgtaaatgcatcattagatatcgttactttctttttgtgtgattgcaagaaattaaatttttatggcatcattgcaactgtattgtaaatacatcgttaaatattgttttttaataaaatgagaaaaaaaaagatttcattaggccaaaacaattattgattttaatatgcagaacttgtaatttttagggcaaataaatgatgttcaaacaaaataaaaaaaatacttgtacataaatctttcaaatttataagttgtctcatgttattacttatgtttaagtttgaattggatttataattgtgaaaacatgataataataaaaaggatttttttcatttttaaccaaaaaaaagtaacaatattacaaaaatacttttaact

SEQ ID NO: 305350 - DNA, 3813 bp, Cannabis indica
gctcatcctcaggcagttgtcattggaaatccaaatgacaccatggtcacttggagaaaacttcagaatctattggttttcacatgttacctatctcaaattgagcccaaaagtgttagagatgcccttttagatgatttttggttggctacaatgcaagatgaaatgggaaactttagaagacttggtgtatggattatggttcctcggcctgatggatcaaatgtgataggaactaaatagatatttaaaaataagatagatgaatttgaaacagttactcaaaataaagctagactagtaggtcaaggataaaatcaagtggagggaatcgactttgatgagacctttgcaccagtggctcgactagaatccataagattactactcattgttgcatgtttcttgaagattaaactataccagatggatgtcaagagtgcgtttctaaatggtgtaagttgagaggaagtatatgtcaagcaacctaaaggatttgaagacccacacttttccaaccatgtgtacaagctcaaaaaagcactatatggattgaaataagctccaattgcatggtatgatagaatcacctctttcttcatttcccatggatttactcaaggtactgtcgatagcactctgttcattaaaaacctagaaaatgggatttttgttgctcaaatatatgtagatgacaatgttgaagatggtaattgtccatagtgggtcttttaagtttctctcttttgtttacaagtgacaattaatttaaactttaagtctcttttgcttaaagtgtgaacatcactattgagtatgtatgcttaataatccttttgatgtggggacatcctcttagcgatttttcttttgaattttatgacgttgtgatgtatgaatgtttccttatggtcgtatgacttattttcttaatttggtattaatattcttcatattgtattttgttgatgtttcatgttattcacttgatgtaaatttgccattgacccatatactatatctcttagtctatgtcttagtgagtgtcactaaacttagattttggagcgactttgctgagtaaatcgagtttggctgaccattttattgttgaataaattttattatttagttatgattgaacataattatagagacttggtttatgatttgaaaagtcagactgaatatagcttttgttacttaatctatggttgagcgtaactcttatcattgagtttgtaaatgaatagctggggtagagcatagctcttatcacttagttcgtaagtgaatatttgggtaaagcatagctcctatcacttactttataagtgaatagctgggttgagcatagctcttatcacttagtttttaagtgaatatctaggttgagcgtagctcttatcacttagtttgtaagtgaatagttggattgagcatggttcttatcacttagtttgtaagtgaatatttgggttgagcgtagctcctatcacatagtttgtaagtgaatagttgggttaaacgtagttcttatcacttaatttgtaagtgaagatttgggttgagcgtagctcctatcacttactttgtaagtgaatagttaggttgagcatagctcttatcacttagtttgtaaaagactatttgggttgagcatagatcctatcatttactttgtaagagaatagttggattgagcgtggctcttttgttattgcttttgctttacgtttttgagctctaaaatgtaacaaacacttaaaatacttgagacaaatatttacttggaaacccttttaggaaaaagccatgggcagagcatgcgaaaatcccctatgtagaatgagaatgtacaaaggggcattgttttgccatacatgtgattagaagtggtatttcttaaggtgtacaacattctagctattttctatgtttcttccatctactgctcagagtttgtatgctccttggccaactatctttgtaatttggtaaggcccttcccaattgggtcctaacttgcctactccttcttccttcgtattttggaacactcgtcttagtacccattctccttccttgaattgttggacccaaatgttcttgttgaagtgttggaccaccttttactagtatcctgctattttgataagtgtttgttctctcttttcgtctaacaaatcatgtcctgtgttcatgctttgttgatttaaatcatctgtcaagtgttcgaatctgatcgttggtatttcaatttccgttgggatgaccacttcagttccatatgcaatgcaaatggggtctctccagttgaggtctttgttattgttcggtaagaccatagtactcctggtaactctctgtccatctccctttggctttttctagtcattccttgagtatgtttactattatcttgttggttgattatgcttgtccatttacttgagggtatctaggagttgagaatgataattgtatcccccactctacatataagctccagaagtgttggcttatgaattgtgaaccattgtccataactatctcctttggaattctgaacctgcatattacatttttccaaatagtattttacctctcaatctctaatttgtatgaatgcctcagcttctacccatttggtgaagtagtcagttaaggcaagcatgaataccctctatcttggagcaattggcattttgcctacaatttccatcccgaaagtacttcatttctcgttttggatggagacaaagaaaatactcgaggtacttcttcaatattgtggctggaagcatcccaaactgacaatatatcatcgagggcgctaggtacatcaccaggtggccccagcaccaagtgcttgggcgctccaaacagaaagtattcttattttgattttgatgcctctaacattttagtgaaaggtcttatttatgtctaagtataaagtttgagtcattttcaataagatgaactcaaaaattgagatcctagtgtggaatgtcaacctaggcactgggtgaaaacccttgggcactcggggttgactttcagggtgttatttcatctattttcagttttcaggccttggacatgaattcttcttgtccttttagtttagaatactaaaagatggtgagttgaaaacaacttggcgaatccaaacacccatttcagagttcccagactcgactgctatgactcgggactactcaaatcagggatattttctttcttgccacgtgtcaaatatttatgtctatgtcactagggtgagttctcgggtaaacagataatttaaaaataatagtcgtgaagaactctacaagagactccctagagaaattataggcataacatatttgattataatcgaactcttgaagtggttttatataagtacctatacataatatatacatatgttgaaaaatatgtaaattaagagatctctataagttatatcaataagagagggaattattatataataaaattattgtcgacaacaaatgttaaatatttgcatatgcaataaactaatataagatagcaagaatcatgatattaaatttgtcaagaattgtcgacgtacattttgtttttggcacccaaaaaaatatgacacaatctaggcagtataaagtttacgcacaaaggatgaagtaatgcatgtagggcgtgtaaataagtattttgttggaatatgttttaccatggtctagatttactaacaagtatgtttttaatatcctaaatatgaatttctaaaacgatgaaaataaacacataaaatgtatg

SEQ ID NO: 305351 - DNA, 2813 bp, Cannabis indica
aaaaaaagaggttactttgactagcttgtttgaacattcccaataagacaatttggcatatataaataagtccttattaatatttttattttcttgtttatttatttggacccacctaaacaaaactataaaatccaatagtctctgctacaaaaatgacatatttgagttttattttatatatcaacatctatatagtttaattaatttaagactgtcatgacagttttagtatctatatattaatatgttgtctaaagtgaatggtagtgactaatgaagaaagaggcacatgcttgtgtccaacaataaaaaatctctatgacacatttttgaagaaaaaaaccatctgaaatttataaataaatcattaatgaatcatttggttgatggtattatattaaataacaatgaataaaaaatattatattatattaattattatgactataaaattaatacaatgtaaattttattatttaatacataacaaataatttgtattagtttatattataatatttaaaaagatgttcagagttgaaaacctgaatcctagcctcagactcagattctagaccggctccaaaccctagacacgacccaggaccctgacctgggacccgaaccctaatcctgacctagtccacaacctgagacttggtctcggaccccggaccaggccccagatcccccagatccgggtccgaggttaggatctggggatggggtccgggtccaggttcagcccaaggatccaggtccaggtccaggaccagggttgagattggggtcatgtttatggtataaaaatatacttttatacaacatattattaatacgtgaaatcaatatcaaatattatattaaataatactaatataatatgatacaatacagtatatcaaacgagattttagagtgttaattaaactattaatagctagtgtcttagatccatatttacactaaaaaaatatttgaaactaaaaagtagtattttgatacaaaaagttgtcactaatttattagtcttataatcataataagtacagttataaacacatttaataaaaagcacaaattattattttgtgattaatattttcaactaagaacttttgattgataatatataagtttaataattttttaatatttctaattacaatatatgttttaagagcaaccgataaagattaaactaacaaacgttacatatataagaggtgaagatgtttcttctatctatgaacactcattgtcgattccaaagacatgttttagagctaatttatattccaataaagttgcgactgacacgagaaggagatgctccaaacaaatagacatcaaaacttttatatatattttaaatatctatatttatatataaattattaactagtattattggagttttgattgaaaatgaatctgtttaagtatatgatcaattatattaagtcggcagcttcaagcaaaagtagcaaaagtggcacataatgacatataaaagaaaccaaaaatggtatcattgatatctcacaaggaagtggtctctagtaaatccttacaatattatatatacacatacaaaccacactatatatatatctcacttctatatatcaatatatactcctcataattaattatatatacacatcttcctatatagctagctagcttattatctttatatacatatagtaatataatggtatgtacacatttctatagtattgattttttcatgtaattaatttacacacttattgatgatatatattattgaattggtgtaggatataactatgaaaggtgatgagcttgttgaaggaaaattagattggaagggaagaacagctttgaagtataaacatggaggatttagggcttccatgctcattctaggtatataataattaacctcttttaagtttatatattgctttaaaccatattgttattgtttcaaaaatagaatttatttattgtatatgaatgggtaaattcattttggaccattttgtttatcgatcagttttattttattaaatggtaatttagactctgtattttataaaaagaaacataataatacctgatcgaggtctaattaattttggtcaacatttttttttttgttagaaatagagtagaattgaattaccacaattgttagagttagggaaataaaaaatttagggttaggatgaagattgaagacgagttaggataaaaaaatagttcgaccaaaatcgaattcatgagtgtattagatatgttccttattgcaaaacaatagaaccgaatttttcttttaacaaaataaatagaatcataacttgataatttttgcaaaatacaggatctaaaatgatatttattctatataatttaattttattttattcaattttgtttgtaacgtttgggtgtgcatatatcgatcatattacttataatttaactaaatataaatttgagagacacttatgaatatgatcgtgcaggaacgtttgcgtttgaaaatttggcgacgttagcattggcggtgaacttaatcacatacttcatagcattcttacacttccaagtagccgatgctgcaaaccaccttacaaattttatgggaacttcttatatcctctcaattctcatggccctcttagcagacacccttgttggtagattcagaattacactcatttccgcactccttgaactcatggtacttaataaattaagggataattacataaaacacttattttttttttaaacaatttatatttttacgtttaaat

SEQ ID NO: 305352 - DNA, 2847 bp, Cannabis indica
aagttcatcaacaataaataataagaaatcaactaaatctctaattaaaatacatccaattcaataatatttttcaaacatcacatttcagcattatagttttttttttagtatttactatgtagtatcaagaacttctaattgtaatcaatttcaaatgaagaataaatacaaaaattggatcaacagtgtcatattacaagaatttactttatgactttcttgcaatacccaaaaaaaaaaattgttcgaagaatataaaccaacagcaataagcacaacgttgaattaaaacataaaaaaacatgatgatatatttgaactttgaagatggaaaaatggattattttcaacttacgatgattccatagattgtctgcaatgacctctgcttttcttgtagcttgttcgaattttttcccacacctactaaatgacccaaaaactctcactctttgaccttaaaaaaaattaattacaatttaaataatcataccaaacacttcaagtcaacaactttatgatcaaatttacccagaaaaaaaaataacacaataattaaaattaagtacttacggttggcagaggaagatgatgaaacaggaacaggagaacaattaacataaggattattagtgttattgtaattgtgattagttaatgatgttggattagcagagtgggtattattcatgtttggcaaaactggattttgggtttattatgaaattgaaaattggttcttttaatatatatatgattatgatcaaagttgtatactaggagggaatattaatatggtatattttttgtattgtgtgaacgagaaaactgggaatcgaactccattccattaaattaaaggtgttaatctaattaaactcaacttaactcaccgaaagagaatataatccgattatggaaccaaaaagagacctgtttttgcacaaaaataaaaataaattaataacatttcttattaaattaattaatggagtatgattattattattaattgtatgatttttcatttctttagttattatctacctagctacttcttgtgtttttaaatttgttatataaatttttatttgatgtgtgattagtgttagaactttatattctcttgtcttcgattgtgatttttatttgcaaggctagaaagatttgtgagctgtaaagaaaagatgctttgtttaatacgtgtaacattttacaacttaatttgtttttaatatatatttttattttgtactaataattgagcttcttaaaataataaatcttattagagcactccaattagtgtcttaataactaaaaattttaacttaaaacttatcttaacccttccatcaatatgtaatgtttatgtttatagcttagctataataaatttgcatctctacatatagctatggagagagaatgaactaaattttttttaatataaccaacttaaagataattcttaacatgaacagatacagaaaatgtaaacagttttgtcatgatacctttaaatcagattattattaaattttattttgacaaaatattagtttaaagtcctatttgtaccattttagaaaatacagagtctattttgtcatttaacaaactgagggtctaattggtaacttttgcaaaacacagagtctaaaatagtatttaccaatttataattcttattataagtatatgaaaaaaaagtaaatttacagaagaaaacaagataagaaactttattggttgaacaagacagcataaaggagttcgacctaaagatcataaacgatacattacttaaaaacttatataagaattattcaaaattttatcatgaataatcaatgtgaaaataatatccaaacatgtgtctcacaggtatcgtctcgtcaccttataatgcgaagcgatataggataaatgcatcctattaagaaatgcgaagatatgtgaagacaagactggtcattacaaaagagtatgtatactgcgagatggatggagacaaatctacataaaagattatctaagtgatttgcgagcaacaacttacaagtgggtatctttgtaaaataactgtgtatatatacatgttagtaattgtatgaaacatgggaatagtccacgtttaatgaacgactagaacaaatggaataactaccattcttatatccttataaatagtggcacaagtaactggacaaggggggataattgggaaaatacaaagatccttacgatcaatatttatactttgtataaacaaaaaagtgaaaaataagacgaacttgtggactataaagatttaactttaaaacgacgcaaaacttctttgtatattatttacagtcatctttcagtattatttaattgtcaattaaggctcatttattagttaataaaaaaatcacgttaacaataagtatgagaaacatagatctaaagaatacctttgttgattcaaagagaagaacttaaatgcctttctagtgattttggttaatgatcttccaagaaaataagatttaggattttctaattttctctcttgatgagggaagatgagaatagaattgttcttgtttcttggggaccactactattatataacctaataggttattaattttagcatttttaatttatcctctcaataaattaaaagtatctcttgaggtatttacacattagcccgtaacactttaataccaaatgaccaacaattattaaaacaatcactttatttgggtcaaacttcaaataacaatgcactaatacatctgagtccatattgaggataatccaatacttttaatataccacccaattaaaaat

SEQ ID NO: 305353 - DNA, 4151 bp, Cannabis indica
taaaataatttccaacagagcctagatcaccaaatctgtggccgcttggggttgaacaacattgacgcctgcatcagcttggcttccttaaaccggcccaggtcgatttactatgtttgaaccaagattgtccctattcctattgatggcatcttgaaggtctccactccctcgagggcctacacgttcaaagattgacccggatcttgtccttcctcttgcattttgacggttaacccttccatcgaccaaaggtgttacttggccatctctaccgctttagggtagctttttgggttgatgtttcctattaggggtatatggacctctggcttggtaaacccccagctcaggatttgctaggtcgttggaccgacttttagcttcgtcatcgccatgactgtcggggtagttaggacaataatcactattaacctcgaggtcttctcttttcctcctaggtctactgtttcctgggtgattgttgccctctcgtggttgatcgaggggctaccactccatgtgttgggctatcctcccaccgtttctaccacggtcaccattgttgtttccggagtttcctctaccgctctgtctgagacgaacattataggagtcatctggtcccatatagtgaccaaataggacttgttcatccgcagggagtggtcgattgttgttatgggaaacactgttggaagggtgacttctagccctctcttcgttccttgggcgttcttcaagtccgtagaccaccctttcccattggtttcttggggtagggacttcctgtggataggttcggtggtcttgaggtattcgttggttatgggcgtcagtacccaacccttgagtgttttggttaaagtagcttcatattaagttagtagccttttgagtgtgacagtcttggtcatcttggcacctcctcatttctcgagcatgatcttccaaccaatatatgagctctctcccttgattagcgagactttcaattagggccactcaagtttgaatttgctcttgtgtacagtttggaactggccttgcattcagcctatcgcatctcctatatgatccatctcttggttaattccttcgatatccacatggggttcattccggtgcctaaagatgctagggcctctaccaatttgagtttggcccgtgccatcactaggtgggacaaagtttccagtattgccccttctagtggcgccatcagtagcgccgcctccaacaggagtggtgttgatggtacgcccagtatttgtctgcccaatggcagtagtttggccagtcatctcatgaccaacagtagtcttggcagtggcgttggtggtggctacaccaccattacgaggacgcgggggtcgttcccattatttttggcgagattgcttgctgatggaacttgctaggcattatccatctcctcatcaggttgttcttgagatcttctggttagcaccatttttttcggtaaaaatttcaaaattttggtcagagctctcaatgaaaccacgaaaatgttgattgaatttttatccaaccgacgcggagttgtaataagtgagatttaaactaaaatcgtaacaagaaatgtaaataatgataccagaatttgtaataaatgtaaagaaagacactagaatttaaagaggtttgacccagatgtcggtaatagcctactccccttgtgttttattaatcagagttcaaaagtcaagaacaaactcttgaatgaaaagaataaaagagtgtttcttctctaagtgctcaaaatcgtagatccctttcccaggccatgagtgaccccttatataggggaaaatgtcagtgcttctcgcttcaggagacgcgaccaacgcagagctatctcaactgtcttcttaatttttagaggtagttgaagtctgacttttatgataatatcccgctattttatggttttataactgtctttgagcttcttgtggaatttgaagatttgaactagtcactaacgatgagggtctcctaagggtgtgatacggtcgttgaccaccttcgaggatagaagctaaaacttgggggtgacacccccaagacccaagctgaggagggtgtcaattgtcatctcggggtgatcccccgagaccccttgtatgttatgggtagtgatagtgttgtgtagatgttctcatctacctttgagaatgtcattatgtctatggtgggggtagtgtcatctaccccttagactaatttggcatgtaggtgagtggtgattgtctatcccacttatgaggtgttagtccatcatttttccttcttggagaggcccaccttactcaagctaagcgtaaaggtgaccgttagacttccattccaacggtcatgaccaccaatcatgattaacggtcaccccaacggtcatgactttgcatattcttcatcaattcaatcctagtgttttcgtgccacgtgttgtactcttgaaacttcatcatcattaaaattttggtgaacatttggccccaacgcccacgacaacacaacatgtggctaggcatgaccaacaactattacctccccctatcgcgggtcgcttatatgtgaaatatggaagagctcatttagctgggaactttagaaaatcctgagaaaaatacgctcggtcccttagacatgagttgagtgacgacgtgttggcagtccaggagtgagctcccaaacaacctcagtatgaatatgaatcaatcacattctctgaggatgacaccagccacgttcgatacccacacaatgaccccttggtggtagaagtacagattgccaatatgattgtatcaagaacggtgattgataatgggtcttcaaccaatatcttcttcaagttctcattggagaagatgggcttggggacagaggatttgaaaccccatgaacatctcatatatggattcacaggaaatggtatggcaccagctgggcttattgagctaccattgagtgtaggaacaacccccaagagtgtcactgtcatggcattatttgtggtattggatatcgtatcaccatacagcgccttgattggtcgtccaaccctatatgacctaaaggaggtcacatccatctttcaccttctcgtcaagtttcctaccaatggtggaataggctgcctaaagggaaaccaactagtagcacgagagtgttacaacctatccatcacaactaggaaaaagcatccaaatccctcaaagctacaacgatagttctcagcaatgaggactcgcccaaaatggggtcaaagacattgatccccatttcggggatactgatacaggagttggtccaattgaagagttggaggaagttacattagaccctgaacaaccctttagattaatcaaaattggtaaagaactccctaaggacataagatctgacttgatccaggtcttaagggagaaccaagatgttttcgcctggtcacacgaagacatggagggaataagtcccaccgtgataagtcacgctttaaacatcgatgtcgacaatttcaagccagttcaactgaaaaggagattactcaacaaagagagagccaaggcgataaaggaagaggtggaaaaactttggaacaacgacttcatcaaagaagccttctacccagtctggatctctaagcctatattagttccaaagctaaatggcacttggagggtatgtgttgactttatagacttgaacaaggcatgcctgaaagattattttcccctccctagaatcaatcagttagtggacgagatgaccgatcatgaaattctaactttcatggatgcatactcgaggcacaatcagataactatgcatccaccttatcaagaacacacaagcttccgaacagacatcagcctaaactgctacaaagtgatgccatttggtttgaaaaacgttggagctacgtatcaaaggttagtcaaccgattgtttaaagacaagataggaagaaacatggaggtatacgtcgatgacatgctggttaagtctaagaaggcccacgggcacattgaagagtgtttcgagatcctaagacaatatagaatgaagctcaatcctctaaagtgttcttttggggaaagctctggaaaattccttgggttcat

SEQ ID NO: 305354 - DNA, 1868 bp, Cannabis indica
gctaaacatccaaaggcttttaagtgatcatatttaggcattttgtcaatacaaaatttcaaaaggggatttctatttcagattgggagtgggggtcctatttatgaggtatgtggcagtgataacacagtcactccaataggcaaggggaatgtgagattggaagattaatgctcgagcaacattgagaagatgttgatgcttcctttcaaccacaaaattctgctaaggcctatgaacgcatgaatgatggtgaaggatacctaggttcttaaacaacttatcaaactgtaattccttagcattatcaaatgttacacctttaacagtgacattaaattgtgttttgatgagctgaataaactgaggaataacaattcgaccatcaaatttttatttaataagatgaacccaagtaaacatagacttgtcatcaactatagtaatgaaatacttatacccttcaatagataaagtgtgaaaggaccccatgtgtcaatatgaacaaggtgaaaacatttagcagacatattgtatttagaaacaaaaggtagccttctttgtttagaataatggaaaatggaacaatgaaaattttcactaggataatggctgaattgcaatcttttattcaaaggatgaagtttgatacaagaagggtgtccaagtgtataatgccacacagtttcatcaacaattttagaatttaaaatggaacaaacaacagtattcatggtgctttgtggtagattcagataatacaaatttccaactcatttacccatcacaattttctgtgtcttcataatgtcctgcataatgcaataatcaagatagaaagaaaagaaacatgaggcattggttagtgcagtgacagataaaaggtaagtttcaaaagagagaacacacaacacatcttgtaagatattatcatgagataattgaatagaaccaatgcaaatgacaatagcaattctaccatctggcaacttaacaaaggaacaagatgtgttagttttgatactgataagcaatgaaacatcagcacacacatgatgtgtggctcctgtgtcgataatccatttttgataatgaacaaaattggtgttaccagaaaaatgagacacaattggttgctctgaggtggagggactttgatcttgattttctgagatagcatggtcattaacttttgacattacagggtgagattgggaattagatcttgatcaacctctcatccttggtcagattgattaccctggttttactgagatcttgagaaattagcagcagcctttccagatgtttgctgaccttgatttcgagcaggaaatcttccatgaaactcatgtcttggtggatatccatagatcttgtaaaatttggacatagtgtggccaggtatgcaacaatgtgtacaagtaactttgggtctgttataatttgcactaccagcaaattgatcatttgaaggatttgatgtgggaggattagaatctttattcaccttcagatttgtagcacacacttctctctacatttcttcttgaataacagaagcataagctttgttaatagcagaaagtggttcttacatcaaaatttgagatctaacattgttgtaagattcatttaatcctatcaagaactctaaaactttatcttcttcttgataatcttgtatgattttcatagcaccacattggcagcgaggcagtggtctatattcttgaattaggtcccataatgcttttcttcgagtataataagtagtaacatccaaggctcattgattcaacatctgcatagatctttttagcttaaaaaatccttggtgcatttctcttctggaacctttcttaaag

SEQ ID NO: 305355 - DNA, 2104 bp, Cannabis indica
ttagattaattagtgctaagtgttctactaatctcatgtctatgtataacagtcattacatggagcgtataaacttggttggtatgataaaaatatggaactagttctagtaccaatgtactggaatggtgaacacctaaaaaaatactaccaataagtgcaaaaggtctagggaccacacaagttacacaatgctcaaactcttaagtggtggccttctgggaggacctcgatcaaaggttcagaaaaacgactggcactaaggtcatgtgaccactttcaaagtatagttagttcaaaatcattactcctgagcgatgtctttaggcagaatataccgttcaaatgtctatgttttaattagctaaaaatcagacaaatcataaaataacttttgataattcaataaatgtacgttaccacgaaaacaacacatatcgaccaataaatgaataaagatataaattattattcaaattgtgtcaattttatacttttttgcaaaattatagcaagttatttgattacctaaaatatgtacaaagggtttgcctaaacttaaaagctggacagacaaaataaaatttgtgaaatgcaagtaaccaagagtaaaaagtctgctcggtcacttaagggcaactatacccgtacacgcattggtagaaaacaagctcaagcaaaaaacaaaattcagacttaaaggaaaatattcatattaagatattaaaacaagataagtatgggattaaaagttgtgtggctagtcgttgtcttaaaaaaaataaaaatattttccaagtttaaaagtcgtttggtcagccatattgtatcaaagaaaagtcatgcaggccgaacagacaaaaaaagtttaaagagtttactccaaaagagtcccaggctcttggtattgattggacgaatcttgagcagcaacagttgagtcttgggcggcagggttctcttgctcctggataatagaagaatcttcaacaacttttcttgcttcttcatcgactttctgtttctcgtaaaagccgagaaagatagtacagagatcccctttgaaatattcataattgccttttagattttccttctagaactcgtaaaaaacacctagggcaactgttttgaactcttcaacttccttctgaagtttttctcgtttagtgtcaaaagttacccgctcgacattaaaagttctctacaaggcagctttctctcagccagctccataactttagctttccggctttgaagctgggtacgaagactttccctctcattctttagactattcacctccttagacaacacctcaaggtcctcctcgagcttggttgtagacgacatgtccttaatctcttgctttagatcttctatgagcttatttgcaacaacaatttgcttgtttactttgcctaactgaaaactcttttgctcatcctcttttttatcatcttccagtgccttcttcaattcactggtagttgttatggcctttatagcagcaaactttgctcgagaataagtatatgccaacttcagattaacttacacggtgaaacaaagttaaaacttgtacgtaacaaaacatgtataaaaacaatcccaaggcaaagcacttactcgagtggcctccttcaagactccactaaccaatagctctgctaacatctcctctgccctagtttgctgctcattcacatcaggcatcatatgatcttggtagaagttaagcctctccttgcccttcttggtttctggctagaatacgggcagagtagccaatggacttggtattctaggccccttaatgttgggccccttagaatttttggccgaggtggtggaagcctgagactttgtattcttcttggctgaagggacaacattaggaacaacattaggagcgtcgtagagtcgacaaccaaactcttctcagtgttaacctgaggagtcttagagttcagtgcaatgctcttcagtagagcatcatccacctttggacgtttgaccgaagacttctgaccgaaagcatcgctcgacctcttactcaaagcacgtaacattctctctgacatggctgcataaaaagaaaaac

SEQ ID NO: 305356 - DNA, 2011 bp, Cannabis indica
tatatatatatatatatgtgactgaatgtattttattatctgtttacactactagcactactaactgtatagttataagggtgttagtacagtgtagggttttagggtgattacagtgttaccaacacgagtgccagggggtaggtcgtgcatgtggtacaacacttagtaactatcccgaaagtacaataatggatctaccaacacaagtacggagttggtactttagagcatatggtacaatggtcgtacttccgttgagaacgttcttaaccacttggtgagctcggtaattgggctcaggacggcttcagcattaagccggtatagcattgcttatatatatatatgttatgcatatcttactgagtctgtcgactcatcagtttgctaccttgtgtaggtaaaggtaaagctaagctggaagagcagtgagttagagcttgtcaaggattgtacatatcgcggcagtgcagtttggaaggtttcggtctttcaacattttgagttgtattttatagttgtctgtcgtttgtaaaaaaaaaaatattatgaaactatatatatagtaaatgtaatttcaattgtgttttaaatctcaggatcctaacctataagactatataaatttaatataataagatttattttagtttagcaagttttcaaatacgggtgctacagggtccccttaactaatttgtaaaaaacaataaattccatcaaaagagaattgagagagcaaggaagcccgatttcccatactgaagctatcattgggattgaagctcaaacattaatgactggaagaataccgatctttttatcgcatatacaatttcgatatgtctataattatcccgctttatatatcgttcatatatatatatattatatttttatataatattaagtgtaacagtaactaaaaattttgtggcaaaatgtattagtcacaaaaattataatttattgtgacgaaatatatttttatttaatagttgttgggactaaaactaaattagtgaccatctaaatatagtatattttagtcacaagtaatttttggttatgtttacccacaaaaaagttatattgtcgtaatttttgtttgttatatatagtaattcaacggttaaaactttcgaaatggatccttacagaaaaaacctttcgaaattgattgatcaatcgaaaaattgtctttaggggtgtataaacaggataagcattgtcataataggtttgtttactcttgggttatattgttatagattggctttgtttaaagcaatttttttttctttaatattctcttatccaatgatatgtttagattgtttgttgctaattggttgtgttttttttttttaaatcctgtgattggttgtttgagtatatatataaacttatgttttaatagtatctaagggcaagtgggaatttagtgtatggttagagtattatgccacccaactatttaagaaaatttaaaatactaaaactaacttattaattaatgatatataattatcaatacaatttatttatatttttccctctcgaaatgttaatacaagttgtctactagcaaaaaattagcatttatattatatatagtttatttattgacattaagtttaatcaattcttttgatgaaattcgtttcttgttctggttaattatgtaatgacataatgggatgtcaacgagacttttgaattgcttttaataattaatttagttattgattctaaactctcccaattgaacccttatcaattatttattagcaaatttacatttcacacttttaattaaatctaatttataatttgaacgtttgacattttgttgggggttattttcaaaaatatagaaaaaaaatattaaagttataataaatatggcatattatctaaccaatcaaattaaaatatgattttttttttaaaaaaaaaaaaacaatataaacattgaaagaaaatctgaatttaagattcataaaaa

SEQ ID NO: 305357 - DNA, 1497 bp, Cannabis indica
  modified_base (56)..(56): a, c, t, g, unknown or other
gtcaaacataaaaaataattaggattgaaacataaatggaaaaagaaattgcaganagagaattcgaaaaccaaagatattcgttagacatccttaagagttaatagaatttctagatctccaacccctaccaaaaatcaaaagactttaaatttaacattagtatatacaaatttaaaaataaacatgtaaaaaattataaaaatggacaaaaccaaaagcaaaaaatttgctctaaaaaaacccaaagccactatcgcacaataagcaccaatgatgacaaagcaacggagaataagcgatggatgatagtcaggcaatatgtccatatctcaattgtaactaataaccctacaattttaagaaataaaaaagaactaattttgaacaacaagagtcatatttaactcattgcaaaactaatttgatacatgctaagatgaaatgaggtagaaaagtgaactgtatattgagaaaccacaaaccaggccatttcaaacttaaaatgagtgaggtccttttgtgtgtatggtagttttgcaaaacccatatattatatacatacataaaaataaatacatgtggccatgactgtgagtggaggagacttacgctggtggagcaaaaatttgagagagggttgaagagcttcagagctgatggaggcacagtagagcaaaattttaagagaggggcggagatgattaaaattgcgcccctagggttcacactatcagagagtatgaacgaatgatttgcttggtctaagaaattttgggtaagtgagccataagagagtttgtgtctgttggtcacagtcgcaactttttttttatcgtcggttggaaaatgacagagataatgtttgtgagacttttaaaaggacgcgaatcttatatatattttttcaaattttctcttttgccgtcagttgtctatttagtgaaggatatcaaatgacgcaaaatatctattatttgtatcattttaaaaatgacgattacgtttaatataacactattcacgtcggtcaacgcgatgaatagtcacgttgaccgacgtgaatagtgaattttgtagtagtgcggtcagcccgttgtctctaaaatgaaaaataatttcaactttaaagactgcttggcgggtcatgatgtcttagaaaaggcattattgccgaataagatatatgaaaataaaaggataaaagaagaagtgtttaaaaggctggagtcccaggcttcttatttaggtcttctcggccggtaggagctggaggatctgttgtttgaacaggaggtacatcagcattttggccgaaggtagaagcagccgcctcggtttcaccataagccacttgggaagcgcaaaactcaaggtacatgtcctcagattctcctaagtagtcgaagtttgcctgaggattagccttccaatttcttctggaaatatttgagtagtaaacaatgtcattgattatttaaaatcattacattcact

SEQ ID NO: 305358 - DNA, 925 bp, Cannabis indica
acaagcagtaactcaatcatagattggaagactgtgaaggatcaaacttgaagaagaaggacgtaaaataattccaacaataacttcataggagatcataatgttatctgttataagtcttcctggtacaaatgcactttgattgacagaaattaattgtgggaggactaccttaagacggttggcaagaactttaaatataatcttataaagaatattacacaatgagattggtctcaaatcacccatattatcaggattttttttttgaatcaagacaatgttggtgttattgagatcattgggcaataaaccagtactataaaagcttctaacttgttgaataacatccttaccaacaatatgtcaacatttttggtaggatcctggtgtcattccgtcaggttggggggccttgtctaggtgcatttgaaatagagcgttcttcacctcttaatctaaaatcggtgcaagaagaattgtattttggctgtcagtgattgtagttgggatgagagataactgagtaatccacatatttcgaacaaaataaattttgaaagtattcagtaattaggttcgacaatccatcttcccaattggtcaaaacaccattgtcgtttctcaccttaacaatggagttcttcctctttcgattagtagcatagatgtgaaagaacttgatgttccgatcgccctccgtcaaccaaagttgttttgaacgttgcttccagaaaacttcacactgtgtataaacttcaaagagctccttttcagcatctttataacgagaggtagatacatcatcccgacctttctttcaagctttaatctcctttttctagaaattattccttcttttgaaattccctacgtaatcttctccccaataggggtgttcatcaaactgctcaaactgcccgca

SEQ ID NO: 305359 - DNA, 2496 bp, Cannabis indica
tttttgttatttttttattatttttgtgcatttgtgaaattaacccattttttaattttatatggacacaacaaaggcccatttgagaattcaggcccataagactatttgagttttgatgggccattaggagtgctggcccttaaagatgttctagtgtaagtttatacttgtatagtggtatgtgaagtagttagtattgagccaaaattttagatatcaaatgacaagagaaggagttgtacaattattattttgtgtttaaaaataggaaaaggacaccagtgtaattgataattgattgttaagattgcgatcttctgactcttgacatatgtgttcgaactcaaactttctagggtaataataataataataataataacaataattgaattgaaggaaaggttgaaaacatttgggggtccaaaaaagacaagttagaagattgtttatgtacgtgtggcccttgtagttggcacccaataatgtgggcgacactacacacacccccatgcccatgagatgacccatattacatattatgatttaatgctatcacaaccattgtctcacttacctttacaatttctttttattatttataaagaaaatactattttgtacacatgtgttgttataatctattgacatattaaattaagtttcaagaatagaaagagttgtttagaatataattttggaaatgtgtctaaaaatattacagtgagggctatagacctaaagcgaacaatattatactaatgtgggaattaaggtgaagtggtagtctaacaaagtagaagaatgggacctaacatgtggtatcaaagccaatgtttaggagttgagtagtggattgcatgtgcaatgtgtgggagaagctctcaatgtgatgacctcgcgattaaagatttgtatggtgtgttgtatcgaaagtttacttgatattctggtagcgaggtaacgtgtctagttagtgattacgacggtataagatggagatctatgtttggtgccttatgttaaaagtcttcgtggcaatgttgaatagatatcagtatgagaccactaatttcaaaagtcttccaagtcccacatcaaaagattagatatgagttgctaagaatataaatgttctacttactctattattatgagaccactaatatggaagttaagatgtaacccaccaagatagaagaatgaggcctaaaataaccccatacattttattatatggtgatgtgcaactctaataatttaaactgaccgtagaatcaattatttcgaaataatttttcaatatgattaaatttgaactcgcgtcattttgactaaactcgaagttacttctgaaaaattaagtggaaagtattactttttcaaaaattattttattgaaattaaattcaaattatcataatttattttacaaaataattattattatttagcaaaaatatatgtcaagttattagtattttccttatattatatatacaaagaccaaaagaaaaagaaacataaagagtagagagatcatagtactattgtattttttatgtttctctcgtgccaatttttctttttaattgaactcatatactttataagtaaaataaaaataggctagtgtttattaagaaaaaaaaaacaatgtgcttgtttgttgtgtgtgtgtctctctcttttatatgcatttcaatataataaaagacactttcttctccactagataagaaataatcaaaattattttaagtatttataaaaagtttttaatcttccttagattgaatcagttatctaattatttgaactattatgatatttataatttttagctttaaaaatgactcttttttcttttttctttaaaaaaatcatataaaaattgaaataagataaagtaaaattgagggatttgtactaaaaaagttcaatattgtttttctaagggatctatactaaaacaagttaattcttttttatcacaaaattatgggatgtaatgattagagcactaacaataggctctttaaaattgttaagctttgaaaatttaacacaaaagtggtaaaaataggcttgctttactttataactattttagctcaatctctattcactactattcattcttcaaacttatttcaataatatttctctcatctcttacatcttactttttcatcttttcttttcttgttaaatatattttaaataaataaataataaaaatatatatatatttaaatgttacaaaaaaaataaagaaattaatatatagtaatatgtacaaatttaagataaatgaataaaaagagttttggggcacgtttgtggtctattatattgtattatataatatattatagtattgtatagattatattgtaatactattatttaataaaatgcaatatttaatattgacttgtactaataggttgtgtaaaattgtaaattatttacaataaacttgaccccaac

SEQ ID NO: 305360 - DNA, 1642 bp, Cannabis indica
agtttccttctttttattaattccttttttttttgtcattacatctttggttgcattaatctaaatatttgcttcctttaactttggaatctgtaaattctaaatccagacctactattatcaggatctgaagtgtttataaaattatttctatagctattttttcatgtctagattattgtaaataaatgtaccatttcatacttgggtaattccagggctggccctaaatatagtgggcataggaaaaagattttttaggctcttatttagaaaaaattatttagaaaaaatgtggtattttataaatcagtaaaaaaatataatctaaaagggaatttttttttggacccttgtactaagtggaccttaggcacaggcctagctgcctatgcccaaagccggtcaggggtaattctcaaaagtatttgctttcatttgttccaagaagcttagacttaagacaatatatatatatatatatatatatttatatatatatttactatgtttgatatttctttgttatagtcatgtctttaagattatgagaatatttttcatcttatcaacttcttggaagaagttgagcatcaatcctagttatgatggttgtattatcgtaatacaataaaaggctaattggatcatgcaagttggaggagaccatttgtgtccccagtcctttaaacaagaattactcctaccaagtttgttacaaattttattttacagatgaaatttaactttcctggcgcatttgtcactttctttgtttagccaaaggttagggctcttttgctgcatggctaggttaaactcctggaattagactatacactgggaaactttttttaaggtgattgttaagggataaggtcagctaattgatttattgatggatattgtagccatggacgcttaaatagttacaaatggtggaacagtttgaaattgaattgcctgctgtttatgttcttaatcattgccttatgcatgtcgtttattcctgattttggtgctttcaaatgctttttatttcatatttgtaattaattaatttttttgtaggtatgttcttaagctctgtaatttcattttttttttaatgttttttaacaataatgcttatcaaagactagagttcattggctacattttttattgtagcaagagttattgaggaggagatgtttggggttgacaatctttgttggatctcatcgaaggcaacattagaagcttcgaggctggcagaatttttaatcctgcagactggaatgacagcttttgggaaagcattctacaggaatcagagtgatctcgtacccaatgtatgcttgtgttttccaagtatttgaattttagtccctgcatttgttgattggaccatggtttaagaaagctattgaggctgatgccttggggtgaggtgctccaaaaatgcctcagaagctaagcctcagcaggcctcgcttatgccttcgaggctattgcctctgaggcgtgtgagggttaagcctcatattggtgaagtctttagggctaaaaattgtattcaagaatgactgattggttttttacttttttttttaattaattatttatttattttttttaaaaaaaagtgttctgattacat

SEQ ID NO: 305361 - DNA, 2039 bp, Cannabis indica
gagtgagtgcttagttttttaagctgtgaaaccatgttcttgaaggggtcaagaacagatgtactcgggtaggagatgagaaactaagactgtttctctggtgtgtttctcgagtgttgcagagctgtgattgctcttgaattggtgcttgtatcactactctcttattctccatgttaatgaaagaattggtgatgttttctcagctggagtatggccagggaccgaattgatctctaggaccggaaccaggataaatcttgttgtctccttctagttcaattcaattttgttactttatgttgttaactggtttatttgtgtatgttattgctattcaagttgttgatttaatgcaggttttagattgaattcttgatgttattgttgctgaatttacaacaatatttttatatgaatatatttttgatatattataaaaagagattattttttaattaagtagttaaactaagtatagacatttaaatttctctttcattagttgttattagattaaaatttgatgatttaatatttttaaaattaatatttatagttaaatttatttactgatcattcatagctaatacccattaaaaagtgtccatttatatagataaatataaatataaatttataacattttttgtaatagatacatcaatttaaaacattttcaatgttccaaaaaaaaaaagtctaaaacattttcttactgataatttgatgtcttgaaaatatcctttatcattatcaaaagataaataataatattaaaagaaaaacttcaagaaataaaaagggatatggtagtccgaaatccataatccatattattaccatggaaatggaagaagatcaaaacaccaaaatcaaacaaaaagaagccttttaatactaagctgcatcttactaaccctcggcaactgcggggggccactagtcatgcggctctacttcatccacggcggcaaacgagtctggctctccagctggctcgagaccggtggctggcccatcattctactccccttagccgccgcttactaccaacgccgccgccgctgcacaagaaccgctaagcccatccagatgaagccattcttgttcttcagctcagccttaatcggcttgctgaccggcttagacgactacctgtacgcggaaggcgtggctcggctaccggtctcgactctgtcactaataatagcgtcccacctgggattcacggccgcattcgcttatctgctagtgaaacagaagttcacgtcgtattcggtaaacgctgtcgttttgctgacgatgggtggggccgtgctggccctccacacgagcggtgaccggcccaagggagagtcggagaaggagtacatagtggggttctttatgacactctcggcggccgctctgtacggctttgtgttgccgcttgtagagttgatgtacaagaaatcgaagcagaggattacttactccttggtgaggttcagttggtcatgtgttttttcgccactgttttttgcaccatcggcatgcttattaacaatgatttcaaggttagttttattcatatttcctcttttatttttattttcactgatgatcatttcatttggttggtggagtttattttactacactacgagtttagaatgaaacaatatcaatattttaattaaaacaatgaacaaacataaggactaattagtaagaaaaagaaacaagtttttttttttttcgagaagaaaggaaagtaaaatagttgattatcgatcgataagatagaatgaactttgaaagtaaaatataacggacggtgcttattgcttttgtgtgttaaagaaaggcatcatgattttctttgaattacaatttcaacaagttaaaagactattagtaaatacaatataacctccatctaaaaatactttattaaaaaataacttctaatttattataaaaaaaaattaagtaatcactttaggccaattataaataagaataaatttataaaattgtaattagttatacattat

SEQ ID NO: 305362 - DNA, 965 bp, Cannabis indica
taacatacatataacaaaaaaattaacaacaaatgaacaaaattttaacataaaaagatcgtattttatgtaaaaaaaatcgtaaaaatgtttaacatacaaaatgaactggcctgaacaattgtaaagattatagaagttctacaatgtatagattaaaaggattttaaggtgttgttaagttgtaaaaatagtttggtgtaatacaatgatcctgatttctaaaaaaaatagtatgtaactattatttataaaattataacataaatttgcaaatttttgttaaaagagaaaaaaaatattgtgtaattacgattatagcccaataatatatttttatattgttttcaacattttgtatttttggtatttttacaaatatgtagacattttaaaaaattcagctacacaattttaggcccaaatgagttgagagcttaagtgggctggagaaatttcttataggcattttcaaatggataaccataatgacaataaagagaataattatttgagaaacaagccagttttgtaaaatgacaatatatttttgatagaacattcacaatcttaaattattagtagtatctttttataaaatgacttaattgtatcttataagttgttaggcagagatttttaacattattgtcatttgtcccatatagtgattattacattacttgacaatgacaaataataacattttgaaataatatttaattcttctactagaaatcaaaatataaaatccatggccaatattgaaagtgatcctctactaatgcatagaagaattttgtcaaaataaataattaaaataatacacataaaaaaatcataacccaaacatgattttaggagaatctcaacactagatacccaatagaatatatccaagtacataaaacacatgttggattaaaatcctcaatatgggctcatatgtatattagtgtattgct

SEQ ID NO: 305363 - DNA, 2420 bp, Cannabis indica
aacataaaatgttatttctgatctttgttagtaagtaaatctgattatattgaaatgggttttatttaggacacaaaacccaacacaaacaaccaaagactttatgggaaatattgtcgggtttggtgttaaacagcttttcaagaggagagatgagaccaagttggggtgaagacatacgatttatgagaaacccagcagatcgatatgcctcatcccaaaactttaagggtaaggatgcttgagctaatagtgtgagccccctttcagcaatatgtatgtgtttgcgttcagcatcaccattttgttcatgtgtgtgtgggcaagacacacgatgtagaatgccattttcattgagaaagcttgtgaaagcttggtattcccctccccaatcagattgaatcattttgattttggtgtttaattgaagctcaacttgggttttaaagctaataaatgtggataaagcctcattcttggttctaagcaggtataaccaggtgtgcctggtataggcatcaataaaactgatgtagtacttgtacccatttgaggaagtaacaggagcaggatcccacgaatcagagtgtagggcctgtaatggggcaatgtaaacagtgtcagaatgagaaaaaggaaatttatgatgctttcctagacaacaggcattgcacaaatctgaagaaaaattagtagctttattatcatttggaattttgatgttacaagaagtaagagtagcctggacaatccgagaagagggatgtccaagtctcttgtgccaaagagataaaaggctactgttattagctaaagaatgactgttacactgtgtagaaagttgaggtttttgtggttgtggcagctgctgttttgagggcagaaaatcaaactgggatggttcaaacttgtacagcccatgatcaagcttcccaagcattaaagtcctctgagtatcctgatcctttaacaacacaataagaagggtgaaattcaaagaagacattattgtcattagcaaattgtgagacactcaaaagatttttggtaatatgagggacatgaagtaaattgttcaaagtgagatattgagattcaaaaggagagaggaaggttgattgacctatattacttatgttcaagcctgttccatttcccatatgtatcttttggtctccatagaactctgagctggaagcaagattattggcattgggggtgaggtgatttgttgcaccggagtctgggtactagtttggatcagcaacagtttcaggagtggcatagtaagcttgcatttcagcaacattagcagtgcttgtactggtttgaaaggattctggccctgagaagtttttatcaaacatgtaaaagcattgttgtacagtgtgacccatcttatgacacagttgacactgtggcttttgtccccaaacagagaatatgcctcttccacgagagggaccccctctgaaattaccaaattgaccacgaccaggggatgtacctcgcataccagggtagggtgggaaacctggtggtccattggtggtgttgaagtaagagccagagccagttctttgctggttttgattagatccaaaagagttctgtgaaaagtgagaaggagattgaccaaaaccacgacccatagtggacttggcatgtgcaagattggcttcatttttggtgatggctaactctttggcagctttgtccaagaaaacctcctgcgccattagaagagcttcgatctctgcaacactataggcatcgttcgagtgttgacagaggtgataaagacattgtagtcactggttaatccattaaaaatggcttcaatgtggtcctgggttgaggtagagtgtccaatggagcctaaggtgtcaacaagattcttgatctgagaagatagtcactgagggagtccttcattttggtatttctgagtaaagttctgtattggccaacgttagctctgttgagagctgtgtaatactcacgaagagtagtccagatttctgctgcagtgtcgcatcccaccatgcgagtaagaactttctcagacattgatgagagtaaccaggacacaagaacattatcatgttgttcccaatcttcgaattcagcattgattttgttggcacggcgatcgtcatcgttgatgaattttgaaggtgttgactggggatcaagaaatcgttgcagatgacttcctttaatggcggctagaacttgttgcttccatggtaggtagttcgtttcatcaagacgaacagaaagtgagtgagaaaaagaaacaagattggttttgtaatgaccgctttagtaatttggtttagtaaaggcaattagcactaatttttattcttttattattatttgtgaatttatttaattgtggaccccaatatttagaa

SEQ ID NO: 305364 - DNA, 1856 bp, Cannabis indica
aacatgttttttcatgcatatataaaaaccaaactaagtcatgagttacttacttcagtctttacccaattcatgtgatcctcttcttcttcttcttcttcttcttcttcttcttcttcttcttcttttttctttctcttggttcaaacaaagaggccaaaaaagacatttcaggtccattcttgtttgtcttatggtttttatagattgttgaaaatctcataaacaattaataaattgatcaatgagtcaaatggaaggtggtggtggggggtttgataatgtaaaagctccattgctgttatcaagtgttgaaagtgggactcctattgagaatgggagagttcacaagagtaactctgttactactcttaagtctgagtttttctctaaactgcctgaaaaggttcgttctgggcttgatcctgaggcccttcttaatcttgactttactaaaactactggtttattagaaggtaactcacaatctatcttctgttttttctctttcttccatttagtctcttcaaattaacaaatgaatgctcttaccattataatgttagcaaaggctgcctattaccatgcatattaattacttctctaatggtattttgtatttatgatcaattttatgttattttcttttaaatttttcttcttcatattaggggagagagaatattatgagaagcaatttgctacactcaggtcctttgaagaagttgactctctacaatcatcccatggcaataatgaagagcaagatctccaagaacaagccaaacatgagagagcaatgaatatttccaattgggcaaatgtttttctgctagctttcaaggtaagtaccttaattactaccccttttcctatgtgtagagattatctttctgatttttcttggtgggacttttcttacaaatgtataattgtagatatatgctacagtaaagagtggatccatagctattgctgcatcaacattggattctttgttagatcttatggctggtggtatactttggtttacacacttgtccatgaagaacataaatatttaccagtatcccattggaaaactcagagttcaaccagtaggaattgttatatttgcagctgtaatggcaacacttggtatgttctaatccttaaactggtttcaaatagattccaacaagtttttcttaagctgatgacttaagttccccattgcctgatttcgaaaatgcttgatttcttaataggctttcaagtgctcatccaggctttacaacaactaatcaaagacataccatctgagaaaatgacttcagaacagttgttgtggctatacactatcatgcttacagctacaggagtgaaacttgttctttggatgtattgtcgaagctcgggcaacaaaatcgtccgcgcctatgcaaaggtttaatgcctaaacaaagctatcattgttgaagcaatgacatgttcttttgccatgttcttgcctaacacaatgcttaattaaactgatgttaatttgttttaataggaccattactttgatgttgtaacgaatgtaattggtttggttgctgctgttcttggtgacaaattctactggtggattgatccagttggtgccattgttcttgcagtctatactattaccaactggtctggcactgtgctggaaaatgcaggtttgctcttatgaaacttcatactatactagctttgattttccttataaaaaagcctaaaaaaatataggctaattatgatttttgctccctgaattttgacatgtaccaaatcatgccccctgaatttttaaagtcgttaaaaatatccatgaactattgagattgttg

SEQ ID NO: 305365 - DNA, 3713 bp, Cannabis indica
aattttttagtttattttttcttatagtcatatatacgtagtagttatttaagatatcctgttaaattttgagaaattctaaaaaatttaacatgtcgaaaagaaatcaaacaatctattgcattcgtctttttcttattttatactcgtgtaaaacaaatttgaacattacttttgatattgtaaattattctaaatttctcaaaattttgcagtatatcttaaccaactataacgtacacgattatgaaaaataaattagattaattttttttctagaaaccaaaataataaaaaagtgcatcagtgcaacaagtgtaaattgtagaaactccctatcttattttatggaaccaatatacatatttagattcatgtatgtatgcatgactatttgtgtctgtttcttcttgaaagaattatctagttaaaagtttttatttttttttatataaccaaaaaacttcattcaaagtaagaaaaaaaaaaagaaacagcattagttcatagtaactacaaagggagttactaccctcagagaaagaaagtgaaaagtaactcaagctggcaaatcatgagcgacataattagcagaccgaaaaatccaacaaaaagctgtgcaatcgtaattaatgacaaaacttacatttacttttagaaggtgtttataaattaaggtctttatgttatgcatgaaaaaaattcatcctatggatggaaatatagcatatggtgaataatgataagtcaaatatctacaatcatttaatttaaaacagtattttctaatgccaaagaaataaaagaaaagtcctaaaagtataagagaacaaatcttagtgtcttttcaatggcctaaaaaaacttggtgatgacaatcactttatattctttgtggtccttttttttcatttcaaataaatggggcttcccttggtgagagtgggattcatcactttgtagcaaaatgaaaaagccaagcttttttggtttaatcaaaatctcactaaccgattagatttctcataaagtgaatagataatatcacatttaagtaacacacaaaaatgtagaaattatttcacaaatacacaaaaacaataaaaagattacaaaaatatagttttacggaattttaaataattttacaattcttttgatttcatttacagaaaatacggttttttatgttgtactcttgtttatttgttgttaattttttgttattgtataaatattttggataaatataaatattttgtaatgaaatgatacaatgatactttagtgaaaatttataaaatagggatctcccaacttagtaacttcttaaaaattgtaaattataatataaaaattatttagtaaagttttcaattaaatcacatttttattcttaaataattaatttattattataaactaatttataaaaatacacatgtaatcctataacttattggtgagaggattacataatattagtgacttttagcattaatgtaaaaacaaacacattataataaatcaatgttgtgccttagaggtattgatataagtgtagagacataaggaatctatgcttggtttagctttagtgacattgttatgggcctagtttatgactcctccaaattgggtggttgggtgatcacatatgacatggcaatttttgtgcttttgtgcttttgtgtgtgtatataattgtataaattgtatattgttaattggtggggtcttcaacacaagccactttaaataattggattattgatgagtcaccatgaaaaaaacatgctactatgatgattagatctttacaatgtaataatgattttagtttttaaacaatgaaccttgaaattatcatgaagtacaaaaaagaaatcatccaaccaagtttcaagaaggaatttatattgaaaaaatctttataataaatttataacattttaaattaataatatataattttatttcaactattgcattttcttttttggatatattggtaaatatgtctctaagctcaatctttaaaaaaaaaatctcatttctaaaaaagttaataaaagcattttggttaacaatccaagattaacttatttatgcataaattaaagttgatacaatccagctttcaatttttgtaaaaatatttttcttagcaactctaatgaatttatttacttttattatatattattaaaatatttaaaaaaaattaacatgggttggtccaactttgttaaatgttggttgattgggattgtaagatgttgttacaaactttgctttatgtggctttatttattgttaaacgatttactattagagttgctcatagattttcatcttatatttaatttcaagggaatgatatttcttttgatattaaaaatgttttgtcatttaatttgatttaataaaatttgaccctttatataaaaaaaaaaaattagtaattacgtaatataattatactcaattttcatgaagccttgagaattgcatagtataattgagacctctcaacacacctttaaagttttttcttttaagaaaatgaaagaacatttggaaactcaattatttaatttgaagtgcaaaacatgtttacaattttgtttttaaaaagaaaaattactaatattagtgaaaaggtgtattttgaattgatttaccaaatacaaaatattataagttagtttcaaaataaataatatggacatattattaacttaatattcttttaaaatttataattttaggaaatttctgaattattaagattcttttaattaatacaaataagaatttgacatctttaaaaagtaacccaaattgtatgcaaacaaacaaactagttatcatgttggttaccactaaccaagttgatgaatccaattcttataaagaagttttttccaactcagttgggattttttggttctatgttttagcattattttctagttcctaataattaggtattctccttgatctctaaagcatattctccactttattaatttttttaaaaaaagaaagaaatgaaaaaaaaaattgttgtagataaaggatttgaggatataaaaagaaaaaagaaacaactaatctatttatgtgtgaccctattttgaggaagaatatatataaaagagaaagagtctaaacccctatcctcttctttacagattctgaatttatataccttataccatagtatctttatcaaataaaataaataaatatttttgtagactttttgaccaaaaaaaatatatttttgtagatctttttaataaattttattgatagcaaaaattaaaataatagcttgcaatttttaatgggtacatctcttttattggagacacgaccataattagaattagaaaaacgagtcaaataatcaactgtccaattcctatatcgtttgacaaaaaactaaactaaaatcagatgaaaaagagtgcagcatcatagttaactttaaaaacacttatattcggtttcatctataccgctcaaaagatacaacagtaataaaacgttgtaacagattcattcaacttcgtagcttgagcattcaattattgtacaaggtacgtaactgtactactaacaatctcttcaatcgtagaaaacttgttatggcaagctatcaaaaaaaagtaaagaaaaaccaacaatttttttttaagtaagtg

SEQ ID NO: 305366 - DNA, 1064 bp, Cannabis indica
tggaagctagagccaaaaaccacatggcaggagctccaagacattctactgagcttcgatagcaagatcgagaggctccaaacgctcaactcgggtggaaaaactagttccacacctcaagctaatgttgctgctaaaactggttccagttctggaggtcgtgggcgtggttacagcaaccaaagtcagcaatacagcagtggaggacgtttcagtagcagtcgtggtggtactggcagatctcgtggaaagggtcgtgctaatggtccaagaccaacttgccaagtgtgtggcaagtatggccattctgcagctgtgtgctacaacaggttcgacgaaaatttcatgggatctgaccccaacaacactcagaaccaacaacaaaaaggacagagcaatcacaatgcgtttgttgcaactcctgagattgtggatagcgatgcttggtttgctgactcgggtgcaagtaatcatattacttcagatgcttccaatatgagtcagaaacaggagtacacaggtaatgaatctgtcacagtgggcaatggtaacaagctccaaatttctcacactggaaatggctatttgcacactgaaaatggtggtagtttgttgctaaaagacatgttgcatgtacatgaaattgccaagaatttaattagtgtctcaaagctcacttatgacaataatattctaattgaattctattctgattattgtttggtgaaggacaaaacaacaaagagggtgttgcttcgaggagtgcttaaggatggtttgtatcagcttgagtcaccccaatctcaactctgcctttctgcatccaaccctgttacaacacagtcatctcagtccaagttttcgtttctgtccagttctggtgttaagtccaagagtcgtgtaaatcagctaaaaattgataatgttttatcttcaaaagtcgatgtgtggcataggaggttaggccatccatcctctcgtgttctgattcaagttttagagtcgagtaatgtaaaaatttccaagaatgaagtgcaatctttctgtgatgcctgccagtttgg

SEQ ID NO: 305367 - DNA, 1602 bp, Cannabis indica
ttaatctaaaattaatactaaaaataacctaacaatgggttgacacgacacgacccgtgtaacctgtttataagcatattttatttaaacatatcaaccaataacacgtttatgaagtatttaacacgtttataacctatttatgacatgttaaagtactaaaataactttaaatagattattaacaagtcaatttcgtgttagctgcgtcaactcgaacacgacccatttattaaatgggttagacgagtcaacccgaacccatttaaggtaaaccaaaacccactaactctcgtgcgggtttcgagtcgtgttatcgtgtctgatccattttaccgaccctaacaattcacctctccttgttgacatatcagttgttattctagcctgaagggctgtcaactaaatactaatgttcaagttcctcactttggctgctaccgcgctgaaacgactcaagtaagcctttagagactctcctggctgctgcttgatgttagttagtgagtgtacctctagccttccgtctcttacaacctgaaactgtatcttgacatctttagatagttgttcccaggatgtaatgggatggttggtgaatttatcaaaccagctgcttgcatctcttctcagagatgttggaaatagaatgcaatgcaagttgttggaaacattgcttgctcccattatagtgttaaaattgttcaaatgtgcgacatgatcggttgtaatgtcatgttgtacaacatgtgggtttttgaatccttgagagaattgagaatttaatatattagaatgaaatgtttcagtttcttcatctgaatcataccctgataatttcccatattcactatcttggtatcgcctgaacttgtcttctaattatatcattcttaattgaatcggatccatggctggctgctcgacttgctgctgtcaacctgtgctctgattaaattgatcttagagatctagaacatttcggtttagatatttgtgtaagtcaagctgcctatggttcaagtgttcatgcaaattagggtcgcgtcacctttcattcctctggtcgcaattactaatcgatcttgttgcagagtaacttttagattggtaactttgagaattactcatgttttcttgttcatcttgatggtggcgacgtgtatcttacccatgtgtttgtctcttgcgtgcatgggtcctggtcgatctgctctaatcatgagcctttgatctggacccattaggaccaatgcttgaccctatttctttatgctcctatcacactggcctccttctttgaaagagatttgacacacatcccctacttaaataggtatacgcgctatctttgtcattttggtttggtctttgcaaatgtatcggtggtcaacttgatccaggcttattgcctactcccttcacatcatgctaagtgtagcatgacccccaggtcgcgtttccctaacatcggtgtttatgcgagatgaatttggatttttaggttgtacatgttgggttgtctgccctaaataaaatccatttcaatataatcagatttactaattaataaaagatcagaaatcattctatattgcatgg

SEQ ID NO: 305368 - DNA, 2314 bp, Cannabis indica
atcattgaatctttacatgtagatcaatctatctatataaagttaaattaattatttgtgtttacgtacgtacatacttatttttatatacgtgtagaatatgtcatataataaagttatgatattttaaaaaatatatatatttatatgtttgagtgattaattgttcttcttaagagctggttaatgcttctagctagtgcatgactttgcaagtttgcattcgtttgatattttattataattaggtatatttaaatatatattaataatttatacataataatatatatatatatttgtgatttgatgatatgtgatcctgcatgaatgaatcatcccttatcatgatcatgatatgtaattaaggtttttccttggaagtttagggttgatggatagtcttataagttatattaattgactcattaattaattaataattatacaaaaataaataacactattctcaaaagtttttcttttaatttcttctcaccctttatctgactatatatagtacaatctactttgagttaggtggtaaagataattttgattaaatcaaatatgtaattattattttggtaaattatcttatccattttttctgaaaaaaaatagctttactataaaaacttactttatatatatttatataaataattaaacaaatgctatatacaagggttaatttgcatatatccttagtataaaaatgtataatatgcaaaagttctatatcatttgttatatgaatacctatatatatttacacagaaaatatatatccttgattttatattaattgtttacaaataggtacattattagttatatatataagatttaacctataattacagtcatagcaaggaagagaccaaaaaaaaaaggatgtaactttattagatatataatcaataattatatattattaactcatctatttaacactaagtttggtaattaattagtaggagatcatgtagggaattagggatggcatgggaaggagaggtgggagataacaaatctgtttaatttgtttggcaagagagattaaatgagagaaatgaaaggtgaaatgatatataacaaatctacccaaatttgcaattttaaatttctttattgaaggaaggattagaactttctttcaattatattgtaaataacaaaaatatcttctacaaatattattaaagttaattaagatttttttctctgaactttgatatatgtaacaaattataccttgaacatttaaagtcgttaataatcgtctttaaattattgagattgttggattcaattttagtaaggaataaatctaacatggttgaaagtttagggagcttaatttggtatatgtcaaagttcgaggaacataatttggtagatattaaagtctcggaaacatgatttagtacatgggcaatcataaaattagtaaaattaattgaatgaaattatataaatgtccttaaatctaacattctcaataatttaaggtaaatttttaaaggctaaaaaagttcatgagatataatttagtatatattaaatttcaagaaataaaattttaattaacttattaaaaaataattaaaaagataaaatagtaattttataataatttagcaattacctatccttattcataccaaacaacataaaatataccaaacaacaatgaatgattattactctctcttccctaccaaacatagtctaaaactcatctatttaaaaatggaataatgaatgatttggaaactcctaaaaggaaattattattgctctacttggcttataggcatagtttaaaagttaaaaagaagaaagcgggaaagggagaaaaataaataattattattattattaattaaagaataaataaaaaataaaaataaaaaagtgataagaaatcacatgcaaatacagaggaagtaaaattacacacacagcccacgtgtacgtggcagaaaccaattaaaaagattttaacgagtccacacagacaaccggattagccagtgaaaaaggcgcgttggaagaaagtgggtcccagaagagggcggtcgtcgagcatttaatgcaaaaccaccggcccattcctcatatagtccgtacacatggtttaactggcaggtgccggtcaaactcatcccaggtgtaggaggaagaatggaatacctccttaagccaacctgttctccaaaatcccaaccccaaaatatataaaacaaaacaaaatctattcacacacacacacactattactatagtctctccctctttctctctctct

SEQ ID NO: 305369 - DNA, 1167 bp, Cannabis indica
atgtcatactaacttccaatataatgctatgatgtgcctaaatctatattttttttgtgtcgagtcatgctcatgcctctcagacttcatgcctctcagacttgtttcgatcttgtattgtattaaaaagctcgacccatgtttataagactacatagcactgtcttttaaaatattggatcccaatttaaattaatataattaatttagaaaccaatttgtggtgcatatattaatttaagtggaggtttcatcactctttacataatgtaatgatcaattgacttgttgcttgtggggttatcttttgaccttcggtgagattgagccgagtgttcataacaaaatcagccaattttacaagcttcattcaaactgatattgccaagcataaattattatcaaatgaaagaatataaaaacatgtcaaagcaaaataattttaaatacaaaaaataaaccccatttaaaaatacgtactttctatatactacgagtgcgaatatttcatcattagattgattcaaaattgtgtatattttaagtcttaagataaattaagcaacaaccaacccaacttagcaaactcagccttgaagttagtccaacaaaaacactatcaattttactatccaaattaagagacttcaattacttttttttttcaaataaaggactagtgaagaaaaataaaaagaaagaagagagaggaaaacttggcaaaagaaaacttcctttttttttattccacatgataaagacaatgaaagcacaaatagaaaaagtttgaacatgtcatctctctctcttatctttcccaaaggccttttagatatcatttgaggtttgagatatatctacatagtaataattttgtactcacaaattacacccacacattatatacatcatacaatattttaaattgagacccacaaggccttttagataccattatttgatgtttgatatatatctacgtagtaataattttcgcactaagaaattacattcacacacttgttcccatccccgttaaggattttaatccacatcctcgtttattcttcatcagggatggggcgggaaatcccctaatgggggcagagacagagcagggaattccctaatagaaaaataaaatttataatatacaaaaatattaaa

SEQ ID NO: 305370 - DNA, 840 bp, Cannabis indica
aaattaaaaaaaaaaaactacactaaattcttaaacaaaaactattagaacttaaaataaaactaatatttacgtggctcgccacgtaactctcatctagtttgaaagataaagagctattttggaggaatttagaagctaaagttaaccgatgtgccaatccatggttggtcattggtgatcttaattgtattagtaatgctgaagaaagggttggtggagcaagcgtcaagcatcgtgacactaaacgattgatgaatttttttcattacactggaggagttgatctacgcttcaaagggaataattttacttggcaaaatatgaggttcaagggtggcttaattcgcgaaagactcaatagagccattggctcctgcgattggatctcaaaatatccttcctcgggtattcttaattttccaacttcagtctctgaccatgcccccatcctttaagattctcacatgtttgccaagagaggattcattcttttcgcttcttcgaagcctggtctatagaagcctcgtgttgtgaggaaataaagaaggtctggcctcattctgtccctgatgccactactactcttcttcgcaatattaataatactaggagatatcttcaggcttggaaaaaaactttatgggcaatgacgagggcttaattaaaagcttggagaatcgtcttcaatggctccaaacccagctgtggtgaaacctcaccctcaaaacaagttgttacagcagtagtaatatctaagaaacacaaatcaaaactaaaaccaaaatttgaacttagttgaaataagacaaagaaaacttaactcaataatgaatgaat

SEQ ID NO: 305371 - DNA, 1600 bp, Cannabis indica
ttattagaaaaaaaatccttaaaaaaaattattagaacaaatctcaaaatatgatcctttgctaaaaaaatcaaaatatgacatttgtcatttaattatagaaaaagtacaaaaaaaaatgtaaaagaaaatcttcttagcactgccaactcatcatgactgtcttatttttcttatctcactctttaattataatggtcactttttctttaacaaaatatggatgtacataatatggtacaaagaaataaataagtaagagataaggacttaaagggctacaaagaaagatatgttgttaaccttttaaatttcattcattatgatgtagtgtattagaacaaactaacaataaatattttcaacagtaatatatctgatagtctgatttttaaagaaaattgattgatacctatatttttaggtcttataattaattagtaatttttataatttttattaaattaaaataaatggaaccttttaatattttactttgatcaatttggaattagtaaaccttgagaaataaatataatgttagtaaattttattgtatggaaagctgtgaaacacagttagcaaaaatgttgaaagcttttgtttcaaaccttctttaaatgagcaaactataaaggcacgcacgtggaagacttttcttgcgtacgaaaaatttattgataagttacaaacattaaaagatctttcaaataagtaaaattaataattgacccaataaatgacaattctgtgctttttgagcaaaacgataagaaaataataaacattaaatgataccaattcacctatttggcatattgagtagtctgagtctccattgtttattattatatccttatttattatgatttttaataggaggatttcactttttatggttgaaggtggacccataataaaataacccaaagtttttacaacataattaaattatcctaattttccctatacttctcaaaatgtcccattttatttttgagtactctcatttctctttctacctctttcccttgtttatttctttcttctctctttctcctatttgataaaccaccctctatcttaactatatgaaggtactttgaaaaaatactcaaaatttggatttcttttaatcttctataaaattttgcgtttagtttgttatttacatgcattgagttgttttagatcacatttatacatttcattgcctgtttggttgattttttggcaaaaaattatatccgcgttttttgaatattctgtattttctaattgacaattttcgacgatattcaatatgtgtattcaatgtgtgtttggtgtatttcaatagctacacaaatgctacgttttaggacaatagccttcagtgcctactcgatggtttcttaatacttttacaatggctaggtcagggatgatgattttcaaatatttttcgatgcctattcgattagtttttgatagttgcacaaatgcttagttaggaatgattttttttgatacttttcgatgttgttttgatggtagttgcaatgtgttgggttttatgccctaactaaaactccatttcaatgtaatccatattattcaa

SEQ ID NO: 305372 - DNA, 1377 bp, Cannabis indica
ttttttttaatttagttttacctgattttttagttgaaagattttttaaaaatgtataatttttatttttttttaatgtttaattatatatgtgacactgatatgataatggattaagcagttatgtcattattttatttgtcccacgtgacaaaacttgatagaaggtccaatttataatactgcgaatagttcaagaattatttgtaacaagctaaaatgtttagcaaatataataatacataaatcataattcgatgaataaaaaccctaaataactttttttatatttattattgaaatatagtcacatcctaaaggcatgaatgtccctctttagaatggcttgtgcaattgtgccttaagaaaatccacatggcttgtgtgtatatattaatatacatgttataaatatataaatataatcatgttagacattattgaaataaaacaacgtgcatacaatacaaccccaaaaacacacatataactttatttttgttaattgttttgtaatatgttgcacatctgtttttattaatttaaaaaatataaaaagacaactcttatgacctcttaaatttcaagccaagctaattggggccatatgctaaaaaaatcagcttgagtttttttatttatttattttaagaataaataggatttatctcgagaattattaacctttttaaattatgttccctaaacttttttatttaataaaattatttcttgaattatatactaagttatgcccttctatctaaaattgagttggcattatgaacgttaatgtgatgttgttacattaactttacgtgtataaatacaataaacaattaattttaaattataacttatataattaaaaatgaaaaataaattattaaaattatttagttgaattatacatatagtaatgacgtgacatgtcaaactgacaaaataaatataattcaataataagaatagttcaggagaatttttaataaataaaaaagtttaaagacatgatttaaaaatagtaataattcacgagataaatcttgtttgcttttttttttcctattgtttttttggaatataataataaaaatttacaatgcagatttgtgaagattttttttttttgtttggtatgattaaaaataaaatctattgagaaaattctttattgggatttattgtaatatttttaaaaattggacccagtcaacaaatcatagtgttaaatgtataatattgggaaaattacataaattataaattttatttttttgtaaaattttacacttttacatttaaagtattttctttttacataattacgttattctataaaagtataaaaataacaagaaaactacatgaaagtaa

SEQ ID NO: 305373 - DNA, 5080 bp, Cannabis indica
aaaaactaataaaattaaaattaaaattgttttcaaaaaacaaattattttacacatccaaacatgttttttattttttgtttttggaaaactatttttaaaaacattagccaaacaactctactttttaaaaattacaaaaaactgtttttatttttgattttgagaatataattttaaaaacaaaaacagaaaacattgtcaaacatgcactatatttctcaccaattcaagaacataaattcctcaatttcaatagaaaaagaaaaaaaaaacatttgtcatctgctggactatatatatgtacccttcgatgatttaaaacttcacgttgactctctacatgtttcttgtatcacattaatatgatatgtacaagatggcacttactacttctaatatgacctttccgtaaattttataacaagattacaatattcatatatatatatatatatgtatatagaacttcatttagtgtaattaattaatatatatatatattttatgaagaagaggaagagtgagagtgagagttagagtgagaatgagaaggatggtgattaggttgtaaattccaagcatttggagccataagaggcatttggttgtaatagaggacaccaggggtctcatgattgtggactccatcatatgttgttatcacatagcttgagtcttctctgtctctttctactctcttcttcacattgcatcctccacttgaacatttatagtagttcctgtatgtatatgtatttataatatattctccatcattttcaattctaaaaaattatacataagtatatatacatcacttttttgtttggtcaattttggatccaaatatatatataacaacaaaaattgaaattaggaattatatgcatgattgtatttatgatctgcaatagttaatataacttttgcaataatatgtatgggtgacccaacttgtttaacctataaatatgaagaacaatatttaattttgattaactaatcaattcattaacatgtttacaatcttattatgatatatttatgtcttatataaatacaaaatataatttatatggaataaatataataaattttagaatgcatattcttacatagtttattattgtgtcatttttgaatcaaacgtatcaattcaaaaataacttgtttaataaacggattaataccatgtcaaccctaaaataatccaaatccgtttattttgtttgagtttctaatcgtgcgacttattagatagtaacaaaatttttagatttttatctaatatgagtttaagaataacgtacagaagcatattagcaagaaattgatttcaataattcacaaataatatatatttatatataatttgagtataggtatgttataggcattttaactatgtggacactccactaactaggtagtactactactactagcttatatatatatatatatatatattagactatacccaccactaatgaagtgcagatacaattattgttactgccctccactaaccatttccgataatctcccaattaattgcagaaagcaaaattaagttgaataattattaattacctatcttatcatttaggtgtttgatggatagaagatgtatactgatagagagatatactgctaatttatatagttagaattaactttaatacttttcttaacattagctattaagattgacacttactttgatatatcttctagttagtaatattgtactaaaaatagtattctattatctatcctagtagagaaatagtccaaagaaaaaatttagaaagagttagataggatttttattatctaaaggcacggtcaaatataatattttggacatgtatgtatatgagaaaatctatattggagagaacgagacttattagaatttgaaagtaatcaaattacccttcttccatggcaaatggttatatatatatatatacacataattataaatacagatgctatatatatagagagagttgagaatatgaaagctacatgagtagagtaggggaataaataataaatatttgatttaatatacacatatggagacaatacacctttttatatttatttatttttttgctgacacttttataattaagtttgccaattcaaagttattcaagcagaaaacatattttatttcccgttaacacaaggtgaaaggttgtttttttttttttttggaaatgcacggtaaaagggttaattagtataaagttatatatatttacataataacccggagaaacaaactaattaattctaatagcagaaaaaaactaattaattcttttttttacttaaccaaaataattaattctaataacagacaaaaaaactaattaattctaataacagacaaaaaaactaattaattctaataacagaaaaaactaattagctcttttcttttcttaaccaaaactaattaattctaattaaatatataagtattactattatggcggcctaacttatctatacatacacatagatagggtagacaagttggagctataacgcagcactagaaagtctcaaaaataaataaataattgtgcgaaaatcattatgtggctataatctcacctaaatgttacttgaaaagcatcgaatacgtacataaatatttctgcgcttgaagagtaaagccataaatatctctctttaaaagttggctgatatgatagttgtttgtttatattataattaataaagctagatatatattcagatatcaaattaattaatattggctattctataccatacataccttacagttgtagaatcaaaagacaaattagcttgaagttttctcaaagaaaaaattattatttgttgtttacaaaaaaaaaaaaaaaaaaaaaaaactactagttatttgtagtatgcgtatatgatagtctatatgtaatatatcaaaatatgaaggtattttttacatatatataaaataattttatatatatttgattttacgtggaaattagatctgtaaagcacacacgttaattgtacgtattaagtattacaataaagaagtgtagacactataatattgcaatttgtattatttttcaattatatttaagtgaaattaattatctctaatgaatttaattatgataactcgataaaaaatgaaccgcagaagtaaataaatatatatgtactgattgaaaatatatatatgttatatatggcatgccattttgcattattgcacatcacatgataactagctaccttataggatccactaactataaagccgccgattttgcattgcgtagcaaatagtactgtggatatatatatatatagttacatatattgggttcgtatttttccaagttatttttaaacttgtacatggtcagtcgattcctaatgctcacacataagggccattgctaagaggcatcaaggtggatgcccagctagtactaccatgaattgccgctatataaatatatatagtcagctatttttaagatttttataataataaatgagatttgatattgaattttttcaataatgatactatatcatatcaagtgatatatattatgagtatctttgagcgtttctccacacataatgctaagggacacatcaccacagtccacaagacacataacatgctattaatgtatattagagaattgctaaaggggcgcactattaggtgacgtttggttggaaggaataaaaatataagaatgagaatgagaataggtcattccattggaatgacattctaacactttaatatgtaaccaaacaaagaaatggaatggagattgtttttttttcattccatttcattacctcccaccaaacgtcaccttagtgtcaagcatcttttttagtattaaattgctattggtgtaactaataagtagcgaatctcatataatttaaaaaaataagttttaaaaaataatcgttaactatcataaaaatgacacatatagaaggtactgagcaccactaactagtgtttaataacaatgctctctatattaatatcgaatatcacacgtatttaataaattatatacaaaacctataatcaagtataaggtgtacagtgcaaaataataatgctactagttaaatataatttttttttttgaaaaagttaaactttgcctagttgttcatatatatataaatatatatatatatatatatataaatgaatcgatgaaggcaaaatgagagagagacgaaagagagagacggatcaaaatgatccactcgttgctaaatgctaactggtcccatgcaatttttatttcaatgaactctattaattaatttattatagagatatataatatgtagaggatttcggcaattcttttccgtatgctatgtatatatataataaacaaataaaagaaagtattatctcaatagtgtttaagatcactttattatattatcattttaattaattaattaattaaatacctgggatttgggctattcttgactgacttcttcccatactttctccacttgaaaccatcatccattatctccagctctgattttgttttaaaagcaactctatgacccacttcatccatcttattttttctgtttttactgtacatattgtatatataaaccaattaataaatatatatatatatatcattcacatgcgcaaatattactacttcctctaattaaatgtgaaaaaaacaatgtgggcatacatacatatcttgatagtaaaatgttttgtaaaataaaatatagataattaagaggaaaaatagaaaaactaaattatgtgttaagataatgataagagatgacttgcttgttagtgttagttgatgttgcaccaatcatcatactgttgatggtttgatcatcagtataacaaccgtagttgtcatcgcagccgcctccaccgtcgttgctagacacaaaattattttccggggaaggaaagctctgtgaagataaagagtcaaattgatgatgatgatgatgatcaagtactaca

SEQ ID NO: 305374 - DNA, 4273 bp, Cannabis indica
ataaatgttggcattaattactataatttaataatcttattataaaatattaaaagtcaacttttttagatgtaaaatgaattatttaaattctattttttacaaggttaaattttttaaatttactcaaaaatttaaatcatattttaaataggtatatatatattatatacaacattgttatatataacaaatttggacttataaataattattaggatgtcaaaaatatatatattttaaaaaatgtactaatacactcaatttcaaggctagggttagtataatcaatctatagtacattattattatttatataataatatggatagagaatgagataagtctttgggtattaataatgaattattttttcctttttagtatccaaagagaggcaaaaggcaattaattttgataggtagaaatggataataatggattgtccatttagtcatatatatatacaatacatacatgatatgcattgaattgcattactactaactactatatatactatactttgatgagactaaaagataatgacaccctaatctaatctagtctaatctaatctaatcatctctctattatctactattataattagagatgcacacggggcaagaaattagcgggaagtattcccccattcctatcccgccgttaagaattttaatttccattcccgcttattcttcattgggaatggagtgaaaaatcatctaatataagagcaggaacgagataggaaatctcttaaaaaaataaaatttataatatacaaaactattaaactacatgaaaattaaaatattacacattaattattatttattaaattaattattatctaaaacataatttaaaattcataaaaaagatactaatatactaaaaaaatagaaatataaattataaattataaaatattttaaataaaatacttaacgggttctcgtcgggacagggagtgtaatcctcgtccttgcctcgtttaacatttggggacaaaaagtaattcacattcctgtcatgtttcccatttagacagggaattcccgccccattaggggcgggtccccgcaaagccctatcctgtgggagaaatatatgcattcctaattgcaataataataagagaatttagtactcttctcggtgtcatatcgctattggtgtaattaagtatcaaatctcatataatttaaaaactacatataaaaagtactaaaaattactaatatacccaataacaacactctactaataataatgattagtgtttggtaagaatatatatttaaagaaaataccatttttgtcttctccatcttttcatttttaccaattatatagacactacactaataacataattaatcatctttatcattattacataaagaaagaaagaaactaacttaattcaaacaatacaaaacaataaccaaacaccaccacacaataattaatctaataatttatatcaacattataaataaaattaattaatatataaaactagtactattcctcttcttctttttctccatttatatattattatttattaattaaacactttgatccacattcaaccttgcaaccatttccatagattgattttcattttgttgactttcttggttataattatgattcgatgaaatcaaggtttgttgttgttgttgtttcatcttcacatacattccataaacataagaacaaaatccccaaacactaagtacggcggagacagccttactcccaccgaactcatcgccgtaaaccaccacacctccgatcacattcatagtcatcaaagccgtcatacaaatgccacctgtcaatgatgacgtcagaaaaaccatcccagccgttcccataaaacagagttgccacgtcaccacattaaacccaaccgttaaccaatacgccgtcgttcccttatcaaacccctcaacgggtccgccccggctctccgttaccatatcctcgaaaccacctttcccggccatccccgcggttgccaaggcggttgccgccagctccataacgagctgcatttccataaccatcgcgtaacaatacacttttcggtacactctctccatgacggggaggtacagggcgaagaggagccccgccccaaccgtgcagaagaatcctgcaaagtactgcgaacgtgtcgtgctttcaggcttgtcgtgactcgagctcagtgctaacagcactgagctcgtgactaacaaaacgacgcaattgagattggagaatgtgattttttgtttgacaatgaggacggagaggacgagggtgaaagcgagttgggatgagaggagtaaggccgaggtggagacggggaggaacgagtttccgtaagagaagagaaggttgttgaggccgaggaggagaccgatgaggagggagaggaagaggagatttggggtgaagcgagtgaaaggctttcttgttgtggtgttgaaaagatagtaaggaaggaaaatgggtattagaagtagtgggaaaccggcacactgaacccaggtggaaacccatatggatttcccattgtgaatgaagtagtattttgatagtaagcttgatgagagtgaaccaacaaataaaaacacaaaatttgttaccaataagggtatgtatgttgccttgttcatcaccaccaccacttcacttcttgtactattactacttctcttagcatcatcatcatgattagtagtattgttgttgttttccatagaagaaaaagaagatgaagaagagagtgttgttgttgttggtgtttgttttgagtgatatatgattatataatatggttattattatatgtagtagtgaatagtgaagatgaagagaggttttacttaaatatttactactgttatttcggcttatattgaggcctttttggtttctatgactataagagaagagaaagggtcttaatgttattagtatagtatcatatacatgtgatttttttatttgaaaataaaaaaaaaaggatggatattatgcaatatgaatccaataaaggtgatgagattattaaaaggaagaaaaaaagagtgaaatttattatcaaagatggtaatttttttttcattaattgttattggaaattaagaacacatattaagaaaagtgggtaattaatgttggtgaaagtagttgggctgaacagaagagaagagaagatagtctataattgtgattataacaaaaaatggaatggaaagagaggaaggagaaaagagatatgcatatagatatatatgtgtatgtatatatatgtatctatatctatatatacaatacaaacaaaagattttggaacggctactttgactggttcatattcatatacatgggttttctctactttcttacacagtcacagctcaccaaaccaaaaaaccattctcttttacattaattgccaatatatgagttcatgggtatcaatgacaacactctaagccaagtgtcaccttttgcttttctggttatctgggtctttgccacgtgtcttccttacaaagcatgcgattctccgtttcttttccttgatggagagtcttttaactttttaccatttaccaataccatacatgttttgtaacgtaaataactttttcatcatcatcatcattattttttcttataaagagaaaataaattttgtaaattttacgttttattattattattattattatataaattttcttgatttccaatttggagaggtttccaaatttaatgcttcccatctaacaaaattttgctactttttatatttattttcttttctaacaaatatctcttttgttttttttatgtatgtatggatgataagtgtgctcgaataggttatattttaccacttgacaatagtttttcaaaattgtgcagctagtattagaaggaataaaaagaattaaatatgcagtctcaaatattggtgattttatatctattctatataaagtgtgcctatataactgaaattcttagtttatgagaaattcatgatgactttttatttttatttaataaaaaaaaaaaaaataatataaaaaaaaaaaaataataataaaacaaatcccattaatatttgaattgatatttgaactgatattaaatattcgagaatcacaacccatttaaaaagaatacacaaaggttaattcattgtttttttttaacttctttaaaaaacttcatgatctttgagattgattat

SEQ ID NO: 305375 - DNA, 2787 bp, Cannabis indica
ttttatatcaactttggctagccaccataccttcccatctaaatctaatctagtatttggctatttttttggtccctctaactaatatataaaccaatgcggtgcacgttagcatgggataatggtccccatctacaatctatttctttttttgttatactcgtcactatttgtatttaataattgttttggtcaatttgttattttcactttggctgtaaaatgttcctcaatcaatttgcttgaagcattgttttttaattttagcaagcgaagcaccccgagtgcagaagcggattcaaggtttagtttcccggagtcaaccatttctagtacttctcctcctcaaggtatcaattcatatccatcttacataaaatactagcttgtttttctgggatttgagtttagtttatggtttatcaaaatattttgttgttgttttggatatttatttttgattagtggtgatgaagacgtcgtattggtgcgaaggagagaaagttttcccactgaaaaagagaaaagggagttttctaccaggagaagaagatggtaattatcatgattatcatcataaggagcaacataataagaagatcaccactaacgtgatcaagacagtcaaagctaaaacaacccagaagaaagaaagtaattcttttcgtaaaaacgacgacatttcaaacgaacaacaatatgatgatgatgatcataatcagcataatcatcaacttggtagtaataacagtggaaaaagcaacaagaaaggtcgaggtggtgcactcgtggagggttcgaggtgcagtcgtgttaatggaagagggtggaggtgttgccagcaaactctcgtgggttactctctttgcgaacaccatttgggcaaaggacggcttcggagcatgaccagcgtcaggagccgatccatgttagctaaaccatcatcaccatcatcatcttcagctgcaacggcgataacaacagcccagatgggcccattacatgaggtgaagcaggagaaagagccgaagcttcatcgtaatgttgagagaatgataagagatagtattataatcaatgaagaagatgacgacgaggatgatgacgaggatgattacgatgacgatgatgatgatgaggattatggagaacatgatttcgagaagaataagaataagaataagaagaaaccgttgaagattgcgaataagaagagggtgaagctcgggatggtgaaggctcgatctatcagcagcttacttggtcagaccaacagttgtacaacaagtacaggtactactggtgcaatttccatggcggatagtaaatattaagcaagtaagtatagtagtcctagctagagagtacgttaataataaattacatgaaacacatgatataatgtgcattaatatattcaatcatctactgtgtatatctctgtgttacatgttatagatctcaaagtgctatagggatctagatagagaaattgaagatgtcgacgtgacgaaacactgaacctggtgcaactatatggttttgtttgtgatctaatgatgattatagtttattttattttaatatatattattatatggataggcatggtgaagttgtgtcgtattggctatcgttttcttgcttctttgttttttcggagactcagagtaaattatattaaattatttttttttttaagaaaaacatatgccttaacgagattaattataatattatttaaataaagtagaagtacccatatgtagaccctataatacggataactactgtataacttttgactaacgttgtttaatattatcttgtaactctctgttgggatattgcgcgagccacataaaaactgtattctacattttttttttttcttagtgttcaatttaaataaagaatataatacgcgcattatgaaactccagaagtttcaaaaaaatatttctgaaaatgtataagtagatgttcaatggtttcataaaaaaaaaaaaaaaaaaacgttgataggttcccagtcaaaatgtgtcaaactaataattcgtttttattatttacgtacaaacagctttttgttttacttataataaacatatttttacaagcaagaaaatatttttttttctttctttatgtatggaaaatagaaatacaaacaatattttaactaaattctgttgcgttcttaacatttaaaattatgtgatgagtaaagtatatgtatgtatatcaagttttttttttagatagatttaatataaaaggaaagtaccatttatgtgatgagtaaagtatatggtatgtatcaagttgttaattggtacagtctataggtcgaagttgttaattggtacagtctagtcggcaccgggcgcggctggttttcaatgtgatgcaaaaaaaagtaatacatatgtgtgcatgcgtttctacgtagatcattatctattctatataaagtgtgcctatataactaaattcttggtttatgagaaattcatgggtgtgactttttatttatatttaataaaataataaaatattatttatatataataaaataataaaataaaaatttaaactgatatttgatatttgaactgatattatttatatatatacaatattatatattgttctcatgtgatattatttaaaccataaatttactatcctattttgaatttaattaaaaccaataaaatatatatacctaatcttgtacgttctcattttttctaattttttttattaaagttaattattttaaat

SEQ ID NO: 305376 - DNA, 1266 bp, Cannabis indica
taatatacaattgattctaaattttttttgtttttttttttttttttgaattgacaattgatcaaaaaattaataacaaaataactacaaaattacaacataaaaatactatatttgatgtaaatagaattttaaaaaattgtacaaatacttaaaaatctatacaaccataaattgtaattttttttatgtatattttttgaaataatcttttttttttataataataatataataattaagtggtccatttagataaggattgggtcatttttattgcctagctaactgaaaaccctgcaacaatagtagtaagaaaaaaaaaagtatatgtaaacaaaattgttggcatagagaaatagccaaatggcatttacctcatacaaaatccaaacatgaccttaattaatatgtatgcagttatacctgaagacaatcagcctacatgcctaatatgacaaacataccctgagaaaacccaccttgtcctttcctttgttctctttctctttaatcatctttatatatatatatatacatatttaagttttgtataatatgggggggttatattatatatactattatattaggcctatgcatgtagtccttgtgtgattagggagttcaatgttagttatgtcattttctggttaaacataagagacaaagtaatgactattttctttttcttttgaaaaaggctactattacttcagaacctattacatcttattactctgccttttcataagtgatatcttttgggtccccatctcaatttgaatttaacattattagattacccataataaagttgattttaattatgtttgatatatagttggttaatttgttagtgtgggagatatgggatttattaaaatgacaagtttcattgataccaaaacttttcacaagtctcaatacttagatagttttggaccaaccaagggaaagacccatgttgggttgtgggttgggaccataatatattgtaaaaagaaaattaatgtaagtatgtaacatcattcaatttcaatcattgtaacattatattatatatatatatattacttactctattactaccactacatgcaatatatacttgatttcactatcatcgtattatataatgagtattaatatatggtaccaattgtgtttgtactactttgagttgagttgaagcttaatgatattttataatagttattaattaaaatatgtaagatttgatatttaattatattaatagtgata

SEQ ID NO: 305377 - DNA, 2226 bp, Cannabis indica
tgtactatagaaattttctatattgatatatgttgggattaaacttaatttatgtagttttatcttttcattttcttagatgaattgaagaaaggtgttattagttataagagttggctttgacaccaacttaaagagagccccaccaacatttataaatagaagtacctttactctttgaagacaatctccaatgctcataattttagatttagagtcaagttttagagaaaaagagtccaaaatcacactgagtatgtgtgtggaggaatgtaatgagaatataacttttgaagtgatttctcattgtgagatagttctttgtaatttttcacaatgttaagttgtaatctttaacatatccaattatttactagtgactattcaattaataaagggaaaaatcttatagaataaaaaatgtagatggtaaaaatattcattattttaaaatttatcactcaattcaaaaacttatgttaaatgaattgcatgctttaatatttttgtgctagtgtccaatatatctcaatatatgtagggtaaatattattttagaatttttatttctattttgctaaataataattcatgtattttcaaaatagtattatgatcttaattttcgtcagaatattgagttcaggatattattttgtattatttttaaaaatatagagtttgatttgtcatttaaccaaatagaaggtctgatcgaaaattttacaaaacacaggtaactaaatagtgtagaaaaaaatataagctaataggatttttttcccccaaattttgatatactaaattgtgccccttaaatttttcaggtcgttaaaaattctcataaaattgagaattggattcaaggacttatgtccaataccgttaaattttactaacatggtgattgtccatataccaaattgtgcttctcgaactttgatatgtatcaaattgtgtccctcaaactttaacattattgacacaattttttgtcaacagatctaagaagatcgtaaatgagcaagatgaatacaagcaacaatcaatcaaagtaagccagtttgtgaaatttttttgacaaagatgaacacgagaattttatagtggttcacccactttcaacagtaataggcttgtccacttgtagttttattatgagaatagttctctagagttatattctccaagagttcaatttttaagtgaactttttgggaaaagagaaagagaatttgcgagtttgtgttctccgagtgttctcaagtgtttcaggttaggtagagagagagatcgagaccaacggtccctttacaatggccatcaccacccttatataggtgatgatctacgtatcacttaattttttctcccaatactatttaattaattctaaatttaaaataataataatataacatttcaaaattaatatctaaaaaataattagagttgaatgcgtcttccaagtcatgttagggagttgtgagaggcacgtatcaaggtgagacccctctattgggccgaggtgatgggatcgtgagaccccctttggactgagatggtggaggcgtgagtccccctttgggccgagacgacatgatggcgaggttctatttttgggtcgagacattgcgaggaggtgaggagagacctccttggtgtgagataccatgacgaggtgatgctccattggtgatgagggtggaggaccccattggtagtactccataattgagagaaactcattggtaggaccctgtgaggggatcccatatctagggaggaccccatttgtggtgaaatattatgatttttttacatccaaaaaaaattaataccataatttttttgagggataacaaacatatatcaaatcgtgtctcttgaattttatttacgttaagagtaaaattagacaaaaatcgttaaatttaataattttaatagttcaaattatacacgagtaatggctcttataattgtaacgtctccgcttcaagcctccgttgggcccttacacccacggactaatggctcttatacacgagtacgccacactctggctgcttcctggatcgatgactgaccctacagaccaacacgagtgttttcacgtgtgactggccctcactcgcacgcatcctgggaggtcacccatccttgaaattgctccaggctaagcacacttaactgtggaattctttcgagatgggctaccgaaaa

SEQ ID NO: 305378 - DNA, 2190 bp, Cannabis indica
ttataattgtattatagttgttacttatgaggttatttttagttattttataattgtcgtgaggtaaattttttgttatttttttagttattttgttattttttgttgaaaaaaaatgtattttttataattttaaaattttaaaagaatatttttataaataaaaactttatgtagtaaaattgtaaataaaacttttaaaaaaataagaatatttatgaaaattttcctttaaaaaatcacatttatttttgccaatataaatgtcaaattaaattaaaaggacccttagtgattgatgcttgctttaataaataacaagtccttaattatgccatcttattatgatttttagttagtgttatgccctttacacgcaacaacaacaataataaatatatatatatatataaatattttatcatgagtattgttattggatactaatagtagtatgccctttataattggttaacgatattccttaaaaattattttttaaagttatatgagatctgatacttacactaataacagtatgacactgagaatagtatgaagcaccaataatactttttaccaattctcatactttataaatatatagatactttataaacatcatagtgatgatgatggtttttgaactcctaatgcatgatttgtatgctttctacttttttaattaacactttttacttcataaagtcacatcttcaaaaagaaaatctcaattgatcacaagggacaatttctttggtaggagggttttttgttaaatcctattaaaaagtatgaagtttgataaaattatttaatttgttaaatttcaaaaaagaaaatgcaaattctataaggattttaatgaattatttgctcaaagttaggtattaatatatattattaagtagccttccataatttttttttaatcactttgctagcaatttcttttatataataattctttgtaaaataatcagatctaaacacacatgttatcttatgaaaaatcattgacattttttttatcttttaaatgaaaaaagaaagaatgaaagaagaacatgaactaaagatgatatttgcaaaattaataaatgagcactcttagttactttatataattctgtgcaatatatatttttaaaaaattataataaatatttatgttggccccctctaatatgaaattaataaaactttaggatatttatatttttctatacattaacatattttcttactatgtaaactacaatatgtcattaatctataatcaaatcaaataacttaaaatgtaagaaagaatctttctctttttttaaccaaacataacaataattaagatgtaatcaagaattttgtattagagcgtaacatttgtaacagaaattcattctgctcggccgaccaaaattcgaaaaatccaaaaagattgagttttaaaaagtattggatggtttcgcgtgaaattctggtacaattcgggtcgggttcgtgtttaagtagaatttttaaaatccgagttgtacccgtattcgccagaaacttgagtgcattaagtaattaaaaaaatatatattttttgttatttttgtttaaattgggtaatgcttgtgtatctaatttggtaatgagtatttgggctcgcttttgggctcgcttatttatttatttaatttttttaaaaaaatctaatacaatctcgaacccatccgaccaaaaaaaaaatgggcaatttcggtatataatgttccgaaacctaaaatttgcctgatgggcccacactacgagataggtcatctttaatcactttcagagtttattatttcaaagaaatagtaacaaattggtcatctccgggagggcctacccaaatgacggatggttcttatcccttcctcttcataagtgaatttgacccaaagaggatatagttggacaagcaaagtgtagcagactgctcgaggttaagtcactgtatacacatttgatgcggcatgggaaagaacatccaacacattacactaaacagacgtgctcaagggtttaaactcataattttctgatttcacgatgccccatacactacataatgagttatcaaatcataaacaagagggcctcaccaaacacctatagtcattctaaacacttcataaaaagtaggcaatcatgccctatgat

SEQ ID NO: 305379 - DNA, 1413 bp, Cannabis indica
agtaagaaagcataataataattaaaaaatatgaaagtgataagaaaatgaatgaaagggaagatctgaggatgaaagatagttatttgaaaagcatttaccaaatgggaaattggacgtgagagagaattagattgagaatgagaatgaggatgagaatgacccctgaaagccaaggaggagatggtgtctcatatattctgactctctcttctttcgtaccaaataataaataaataaaagaatgatctttctcagttttaaaatattattaattattgtttattacaaattacaatgtgatttattttttaatattttggaaaatgagaagaagaagaaaaaaaaaagtgtaagagttggaattgtccccttcctcgtgtcatcatcatcatggttgacataaacgctcgattggatacacgtggcacacatgcttcatcttagaacatctccaaccaaaatttaggaatatttaggtttggtttgatctgaattttaattttttttaaaactaaactagtaatcaattaaatgtttaaattatactaaaccaatccagttaagaataaattagtttagttctaattgtgtggtttgtaattcgtaaatattttgatatttttttgttaaattatttttactttaaagcttataatacgttgttgactgaagttttcgacaactaataattagagttgtatgaagttaggcattaatgattcttagtctacgagtcactatatttatgagagtttttattacaaagctctcttggttgatccctatttattattggggtatttataggctcataatggtggtaaaagaccactattgtcgtgttcaatttacaccatacttggctatttctcaaatctgatttaaggcataattgcttattttataatgggttttaggttatctataagtgtttggtgggatgtgatttattccttatctatgacttgacagctcatttatgcaatcgctgattgatgcctgggggctcatgaagtctgggagtgatgggtttgaacccttaaacacgctagtcagcgtaaggtgtttgatgatcttctccatgctgcactaaatgtgtatacagtgttttggtccttgagtgacatcatctttcactactcctctcctatcatcctccagatatgccttactcacggagaaggtcaggcgagggatgttcgcggcctagctggatacttccggaaatgactaatatgtcattacttcactttggaagtaattagggtgatgtgtctcgcacccgtgggtcctactgccacatggccactcttgaatgccatgtattttgagagaaattctaggcaacatttacccccaagtcttttttttgcaattttgtaaaatagaacttgcgatgtgcctcctgaa

SEQ ID NO: 305380 - DNA, 849 bp, Cannabis indica
ctacacatgtgatgcacattgtttgttgattttgtgtctgaaatgaaactccgatatagttgtattttccaggttttttgtcgtttaatgatatttagtgacatgttagcgatatttttgtaatatatttgcgaattggaggttagggataaaatttaacgatatttaccaatgcatagcgatatccttagcgaagtagatccctgcatattagtttatcagagattagcgatgcttatcgatgtttggggacatacgtatcgatattgtttcatttatattagtcgagtgaattttagtgatgtgtttagcgatatttcacgatatatttgcaaacgagtctagggacgaagtttaacaatatttaccgatatatagcgatgtccttagcaatgtagatccatgcatatttctttattaaagattagcaatatttatcgatgttgttccactaatattagctaagtaaattttagcaatgacaattgatggtttgtgatacatttagcaatgtatgttagaaagtgtggaatttacttttttcaagatatttatcgatgtgtttgcaagtagcacataattttattttttcaactaattttttgttctatgtttatttgcagattcaactgaaacctcttctttgatcttcactaactctggatcagttaactgagcagctttaattcactccaacagatcagattgcagcgtcaagttataaagtttgcctacaacaaactcgatgctagatatgaccatgtcctctgctaattgaggtaaaatctgaaccatactagttacttgtccgggacccttcctgctcagggcatcagacactacattggc

SEQ ID NO: 305381 - DNA, 1879 bp, Cannabis indica
gtttttttgaacacgcatgataaattagaatatcggaaattctgtttttaatattgtaaactattcaaaaaatttcaaaaatttacaggaatgatattgtaattataatgaataccgctatgaaaaaaaatttaaaagaaatattccaacatgtaatttgagacgagaaaattaacttaaaaattataattaacactataataatttaggcaatataaattaaaaaatcagtctattgtactaatatattttttacccttcatgctagtttgataaaaattggttgaactatgatacttcaaaaccttaaattatccaaaatgtttaaaaagtttttaatagatgtttcttaggattaaaatacagtgaaattttatggttcatccccaaaaataggtttgttgatgttcttttgtgtttttggtaggttgatttaagatattttacaaatttatgagaaattcaaaataatttaacttaaaaaaaataaaattcaaacagtctgttacacgtgcattttttttattttatacacatgtaaaatagactgctttaattttattttttatattgtaaattattttaatttttttaaattttactaaaatatcttaaataactatataatatacacaattatataaaaaaatattgatattatatataattatttagatatcaaaaacacgaaagaaatgtattagtgcacccattttttggaatgcactgtaaaatcaccttataatatatgtacataccttaaaccattgtagctcactttgcatttgtaatgcagccccaggaattttattaagtttgattaggaggtgccaacaatccagccatgtgtaacatggtattaagtccacaatctaatgatgctatagtgacatgtttagtagaaaccccatgcagaaggcaataaatttgtggttgtcgatgctcaattgaagccatgaaaacatttcttcctatatcattgtagtaaaacacaaggtgaggatttgtttttgctaaactaacaaagatctcaaccactccttcctcagcacatttgtaaaaggccccataaactgagacccctctcttctttatctcttggctcatgcagtttagcaatctcgacgtgtaatgatgtcgtaatttcatttcttccatactttttattcctagaaaaaaagtaaaagagggcgagacatgattttatggtaattaagtgagcctcacttttgctcttactataaagggtgtctctttttggcatgtatagaaattataactcaattttttatacaactatagatattgtagttatagcaaatattcactaatttttaagaagttttgaataatttatagtaccaaaaatatgattcaaatagtaaattggactgacttgatgaatcatgcttttagtactgtaaaacttaatgaaatatctactataactataatgtatactatgataaaaataaagatgactctgattaaaaaaaaaaaataaaaaatgatgccctcattataatttttcccttatataattaactgttattcgtacctaaaattttaaagagaactgaagcaaaacgttgttgaaatgtacctataaagaagaatacacaatatctatttagtgattttggatatatatatacttttagtataattttatttagtacatgaaatatgataaatttctcacgagttttattttggttttcttctatgatttttgggatatcattcgtcctcgtcctcgtagtgtcatgaatattggcatcaacatttttcgattacattaatagtaactccctacttaaaagaagatagcttctaatgttaagcgggcttgagtgcaaaaaaaataattaaggaaact

SEQ ID NO: 305382 - DNA, 2261 bp, Cannabis indica
ggaatttttaccaatgtccctaacttttcaactcatttttttttaacattaagattgttagatgcaataattgctgtttaattttgcttaattttactaatataatgattgtctatgtatcaaattatactctcaaactttgacatttacaaattcatactttcaaacttcaacatgtacaaaattatattttatgaactttcatccacgtcaagttttttttagtaaaattagataaaaatctttaaatccaacagttttaatagttcataggaatttgttttagcctaaaaagttggatgagtatgaattggtacatgttaaaattcgggatcaaaaatcctaattattagatttgaaaactaaaattatactttatttgatttgaaaattttatcctcttcacaacattttattttaaattttggaccaaaattgaatgtcacaagtgtactgtacacaatttcacctcttagagcactagcttataattaaaaataaataagaatgttaattcaatttaatttgtaatattttgtttacaatgcattaaatctcggatttcatattttagattaaattcaatttgcataatagttcaaagtcaactgttattttggattgattattttttcaaaataaaattacttaatttttattaaaatatttttttttcacatctttaaaattagttgttgacagtgagagttcattaactacattagttgccgaaaaccttgtgttaatgaatgaaaatgataaacttacaatacgaagataaaacttaagtgaaattgtcacaaatgaataatgagaaaatgctttgtagaatatttggcatcccttaatattcaaagttttcaaccatctccccaatggaatgaagggatattataggttttcattttggctcttgtttacaaactgagatatatgtgatccctatgtagatgatgtattattctgatggcaccaggtggtggttgtaggtgataatagaatgaaagttgtgttggtcaggtttcagactgcactgacacatggaggttttgtggttggcatgatcgcacacactgacttgtgcttgcctttatgtgccctttgtagcttgtacatggtaggcctcttgtgacggctctacgctcttagaatttgtctaagtgttggactctctatagataggggtcttcatgatgttgggccttggtcattactcaatattcatcaaatggtgataagtattaaatatgggaggaatgcgcctcatggctcacaagggtctttgaggatacgagtgagcatggtggaggattacttgggcgagtgagacttctcgctggggcctagttgggtccatgaggccattaagaaagttcttcttattgggtcactgaggtcgtgatgggagacaaatcattggggtcaagaaggctccaaggccttagggcttgcaaagaatgtatccccttgttgggtcaagggccactagattgttagttttgtggtactaaatcaggcgtgtagcggaagtattatgatgattaccatcgtaccacaccctagagtctctataagcatatacattaaaactgaaataaatagataaatagaaatatttacctatttaaccctattagggtattcttgtttcttttgcaagttgtatccaagaatggtgattgaaaaactcatatcttgatctttcaaatcttccagatcttccaccatacacaaggatcagtagtaagaatatattttaccaagacctagatttattaacaagtatgtttttaacatcctaaatatgaatttctaaaacgatgaaaataaacacatataaagtatgagaaaccttacattggttgcagcgaaattatatgactccttccactcagatctctaacccttacatccaatcggtcgcagagtataatcaagatctgagcctgaaactccttcaattttttggattcttcacagccttacacactctgattgaggactaacttgctatgagtgggcatgcactcaatcattaaaggctggatttgttttgtgaagaagactataggattcaaaaattagaaggaaaagaagaagaagaactctcaaactctctagttgcctgacaagaagaaaactaggtcaagggtcattagttggattttgagaccattcttttctttttatacaaatttacttaaggttaggattgaattattttgaataaaaaatgataaaattgttggattttgtgccct

SEQ ID NO: 305383 - DNA, 2002 bp, Cannabis indica
attttcactatatttaatctatttttaccatttgccttccatcttaccaaacaaagtgttaggcccagcatcagtgatggcccagtccagaagttaaggctggtcagttgaacccaatacgtgtggtgggaggatagcacgtgttaaggctgacacttaagccgcttaaaccctagaaaacagagaaaccctagtctcattctcttctgccataactcatcgaaggacactgtgtgaacagaagaagaaaatgggaagcgatagcgaagtagagaagtctcatcagaaggagaaagaaaagaagaagatgcaagctctcgctcccattgccaaacctctagctggcaagaagctttgcaagcgaaccctaaagctagtccgtagaggttatttttttttttttgccctcttttgattccgttctctttatcagtctgtctcgtttctgagaaaacccatcgattcatggattatattgcgctttgatgttttcgagttccaattgcatgtgagatgtttgatagaagggtctattttccttattaaaaaaatgttcaatatggtttatatgactcaatgatgatgtagtttgtgataatggttaaactggctctctgtttttacagctgcggagcacaaatgcttgaagagaggagtaaaagaggtggtcaaaagtataagacgtggccaaaaggggtcagttttactgcttatttatcctatgaaaaataatggttgatttgtttagcgttacaaggtggcaaaacatattgcaaagtgatccgccttgtagttatatagtcatgtttgtttatgacaactaatgtatgtaggcatatttatattctgctctaactaatatgtaaacaacactgatgtggttgcctttggttagaaggttgcttaatacaatgttattgcattaatggatgttgttgatgatttttttttctcttttcctatggatgtagagtatgtgttatagctgggaatatttctcctattgatgtcatcactcatgttccaattttgtgtgaagaagctgaaattccctatgtatacgtcccctcaaaagaagtaagtttatgaataatacatcactctatttgacattttgggtttttattcctttcctcgagtcatttttagagtatgttattactttgtcctctaaatatgagataacacccaagtgtgcgtagtgccttcataaagtgttatattgctattggcgcaatttgatatcagatcatacttaccttactttaactatttataggacgcctcaatgtggtgctaagcaccatggcccctaacagaaatgttctttatatatggtatattagcttgccctgatagatcattactgtctctattaggctacccctaggatgtgaaagctctctgttcttttgttctctccagcccatattatgtagcctctgaccaatggtgtttcttcaggatctggcaaatgcaggggccacaaagaggccaacttgctgcgttctggtaatgaccaagcccgccaagggagaactgagcccagaggaactggaaaaactaaagtcagattatgaccaggttaaaacagaggtttctgaacttgcatctacacttttctgagagaagtaatattgttgcctttcttgtactcgtagttgtttagcgtagcttcttttatgcttttcccttgatgtagtactttcatttgcaaatgtgtctgtggctcggttttgtatcataatgttttctttcccagtcatctttatttgattttttattgcaaactttggatgtctattttaagagatagcgactagtgaatttgcatatctcatattaatagggacattaatctatactactggccaaaagaaagaattcattatggtaaaattgtatgttcattcattacatggggtttgtacatttttttcagtttgcaagcatgcaaatgttatgtcgagtaaatttggtaaacgtttttgttaaaaatttg

SEQ ID NO: 305384 - DNA, 1140 bp, Cannabis indica
ttttttttttttttgttttgggtgatgctaataattctttaattggtcctgacacctagtcatgatcagccattgtgcttttgggtcatgcccttgattgagctattattaattaagtgattgattatacaattcacagtattatatcttaatatatatatatatataaattaattaattatagatacctatcagcacaataagccaattaatattgctttcctcatattttgacatttttcaatgtcttgcttttagatatttaatgtcaagcaacttaagctacagctctcgttgagtgtttattattttctgttagctcggttatttcggttgtaactaattttctgttagtattattttctgcacgtgtacttattgtactgtatataagaagttgtcttttccattgaatcaattaatgaaaacagtttctctttcttgctttctctgcttcatttttatctttctttgagagttaacatggtatcagagcattgatcgttcttctatggagcattcttcagctgtcaacaattgtagatcatcgactccaccagatttgtctcgataaatcaatttacctaaaactaatattgtttctttgtctcactctctctctttgttcgtctggatgagttcaactatctaccatgtaaacaccaagtcctggcagcaatcaaaggtagtcaactgcaacaatttcttgaaccaaatcgtgctccacctcagtttctcccaactgaggatcgagctgcaaatagagttagtcctgagttcaaagactgggaacaacaagataatattcttatatctttgctcctcccgtcaatgtctgaaaaaagtactcacaaggatggttggatctgactttccagttcagatctgagtcaaccttcgtgaatgccacacatctcttaatcgagccaagattggatagtataaaactatgcttcgcaacacaaaaatgcagacttctcttaatgattacctgttggggattgttttactaggaaatagatttactactgttatacccgaaattcagctgtactttagaaggtgacacgtgtcaatctcgtggaatttgaatcaacaaatttaatagtaattatattattaaatgcaaaatggaataac

SEQ ID NO: 305385 - DNA, 1997 bp, Cannabis indica
acatcagaacttccctataattatatactttcatttttttttatataattatatcatgttttttacgtattcgtttgaccaagtaaattattcaacctcttaaccattgtaacagaaacgaaatagaggagagaaagagagaatgagagaaagtctcttattgattaagcaaagctttacaattatatatacacacatgattaaagaaccacaacaacaaacttttaaccaattgtaactaacaagagacacttaggtagttaaatccttactaaccaagctaactaatcaaacttagaattagtaggatcaccaattgtgaatttgtgtggaaaagatgagaacagttgacttgatataggcttggttaaaccatcaccatctaattcaatgttggaacatgcttgacctagaccagttgttgaagaattttctctcggacaaagtagagattcagttcgatatgtttggtgcgagcgtgcaaaactagatttgatgtgaggagaacagtgcttagattatcacaccatactatataggacatttaggcaatgtgatatccagctcaataaacaaagaatgcatccaagtaagtttagtgacagcttgagcaaggcttcaaaattcagcttcagtgctactttgagacactgtatattgtttcttacattgccaaacaacaagattagaaccaaagaatatagcataaatagatgtagatcgtttgtcatcacgatctgtggcccaatttacatcacaaaatgcaataagctcatagtgttatgattttctaagatgaatgccataatccatggtaccactatgatatttcagaattctctgaactgcttgccaatgagattgcaggggattggccatgaattgtcagactttattgacactgaataatatctctggtcttgtgattaccaagtattgtaaggctctaactatagattgatattgttgaggactctcaacatggggactaccataagctaagagtttagaccactaaccattagtgtattggatggcttggcttatccatatcatctttgtggagaagatctctaacatatttggcttgagacaagtgcaaacctgttgatgtagttgtaaccacaataagaaagaaatgaaagtttcctagatccttgagagaaaatttggcatttagagaagttgtgtaatgagaaataagcttgggatcattgtctgtgatgataatatcatcaacatatatcaaaataaatgtcatggaaagaggagtatgccttatgaagagactgtgatcagatttttaagaaacaaaacccaatggcaaaaaatagtgatgtaatttctcaaaacatgcaggagggacttgtttgaggccatacaaagccttgtgcaacttgcatacaagctttggagaattaggttgttcagaactaggaggttgcaacatgtacacctcttcatgtaactcaccatttaaaaatgtattgttaacatcaagctactttatcttccagcctttggatagagcaagagtaagaacaactttgatagtgacaagtttaacaatagggctaaaagtctctgtgcaatcgaaagccaggttattgatggaaacctttagcaactaatctaggtttgaacttgagaacactgccatcaaagttttctttaattatatacacacatttgcatccaattgcagtcctgccaggtggtggtttgacaagagtgtatgttttgttcctttttaaagcaagaatctcttctatcataactttattccattgtaattgtttaagagcttgcttgagtggtgtgggaatttgagtatctaaataagctttatgttagaacttattttaccaggatctagatttactaacatgtatgtttgattaacacactaaatatgaattctctaaaacaatgaaataaacacagataaagtttagaaaaccttacattgatggcagcagaatcatatgactccttcc

SEQ ID NO: 305386 - DNA, 1766 bp, Cannabis indica
tttttattctgtttttaaaaacaaaaaactgttttttagttatgatgtcaaacatgcatgcacttaatttttctctacttagtttttttaagaaataatgcaattttattaatagcaactagctaaaatattagtttgcaatccagtcggaacatctcctttgctgaaaacacgaccaggattagaatcagaaaaatgagttaactaatcggtcgcctgattcccgaatcgttcgacaaaataaactaaaataaaataaaattaagagattacaacatcacagttaaccttaaaaatacttatattcagttgcttctaccgctcaaaagacataacaataaaaaattttgtagcgggttcattcaaccccttagcttgtgcactcaactattatgcaaggtacataattgcacaacaaacaaccccttcaaccacaaaaaacttgttattcccaactaacaatgacgatttgatgatgagtcatcgaagaacaaagaatacaaacaaacaatgaaacaaaaaaataaaattatgtcacaaagagaagactaatcgcaataagttaaacaaaacacactcaaaataatgtcacagagataagactatcacaataataaaacttaatcgtaaaagcaaaaccacagaccccaaccaagccacgcctaaacccagagagagttagcggaccttgccagagaaaaaataacttgaaagtctctgtactttgggtgatgcatgcaatacgggcacaacaacccaggcttgaccgattcgcaattaaaataatctattctgcaacgacgatacccttggcggaaccatggtggtggataagcgagataaccatttatttcactatctaggaacctccattcgttccctaatttttcattttcaaaacgttccacaaattctacctctttttgcagagtgcgacgatattcttcactacgttctcgtttgctctctttactagacatttacaacttaaaagagaagaacactctagagttaaagaatgagaaagatatgtaacttatgaagtagaaattttctttcactgagtagaatagttgttggaaaggtgagaaaaattaattagcattaaatgtctagttgtacacgtgtatgtcatgcaatatgcatttatcgataatatgtcaatacgtcatcgataatttatcgataggcaccaaaaatgaaatagacttaaattgaggtcactctttatcggtatgatatcgatgatatgttgacagttttgtcgaatgtctctactgcctcaatatcaagacattatatcgatagaatttcaacactttgtcgatttatcccactatttgaaatcatgacacttcttatcgatgggatgtcgataggttgtcgattatgttagatttttgctatttttagttttatatattttttgtactttttcctaactaacttttttgtttaaaattacaagatcgactgtgtttttttatatttacgatggtgtttggtgtgttgatggttttaattgggtttataaagtcgaaggcagtttggcgttgatagttagagctaacacaactatacaacaattgcaccagattttatatgaagagttggaggttgatcctttggggtatgatttaaaattagaaatttgtttcttgtacatgaagggacaaatggttccgtcagagattattaagaaagaacgctattacgaattttatgtttactacgcaagtatacgcaatcaagtagtatctcacgca

SEQ ID NO: 305387 - DNA, 1824 bp, Cannabis indica
tttgaaaaaaaggttaaaaaccgtactacccgcaccacaaacacccttacttgtgagtggcagtttcttccaatagggactgagaatgaaggagacttcccaccacgaggacaaggaagttagttccacgaacttggtgggtagtggagggacgaaatgacatcttgaagaagtggaagaagctattgaacataaaaacatgaaagttttgctccctttcattgttcatatctctataatagttagctgtactaaatgttttggctaagcatccaaaggaacgtgtattttctttgttgggcaaataataacaccatacatgtggtaatccatatctgccagcatacaaagtggtgaaaattaagaatatcagtgagaaaaattattaagctattccctttaggagtcccaccacaattttatagtttttctttattaaatacagtttttcccagagcaattttgttaatttgttcctcatcttcaatgaaatatttggttggagaactaagatggtgacaatgaagatggacttgcaagtcatgtatatgttctttctactcaactcaaactttcatttttttattgttttaagttttaaaatctcatgtgatctattttatgtgataatatcacgaattaacttactcgaatatttattattatttgtgaacccagcttcttttttttttccctcctactttttacattattaatttgtacttatctttgactgttctttattatcaaccaacagtggttgataaaattaaattaaaatttctgcaaagagatttctggaaactcagaagtagtggagcctagtagttagggccaattgaggacatataatatctggctgagattgctgctgcactagctgggcggggagtgagtcacagatatatatatatatatatatatatgtctcattacagacttgttataaggtatggtgttaaaaacactggactatttaaggacatgtttcatcatcagacaaggactgagaatgtggtaccatttttatgttcaaaagagaaggaagaggaccactatatagtaaaattggatcgcctagctaggagaaatgcatacatacgtacacagacacaaaaaacatattgaaatcattacattcacatggatgtaatttaattacttacttttgtagcagagatgggttcagtgaaaatttactttgagtaaaaggactaaggattgagagagacatttcaatctttttttctttactttttttgtctattatagtactatagtcaattagcatttgttgcagcagtctttcatttgtagaagtgcttttaatcaagatttcttcaatatcattatggttacctcttcatgtaatatttataaatacacagttcacatacgtaaatttgtacattatgcatgcaaaatgcatggaaacttgtttaacctaacaactgattatgaccaccaattaaggagagttctacactttctttcattcattagtcttttctcgggttctgtaaaagctttctctcaataataataatattaataataataataatcatgataacgaataattattaatattccttttgaaaaaaatgattaaaattgtttaccagaacagtaacacagtattgtttgtatgtatcagtaattttgctcgtctgtttttggagcataaggattcaactccagtcattgaaggctatagttacaattcatctcgtgtggttgaactttatcattaattactagcctagcttggtaaaatattttctgtaagggctttgggaacgtcgtattaggttgtattgtatt

SEQ ID NO: 305388 - DNA, 2152 bp, Cannabis indica
ttctcaacttgggaaaattaaaaaaattaaaataaaaaaatactaaatttgttcgttaactaaaatttgataactaataataaacagttgcaatgcaagtacttagtttccatgatcatatgggtgtgggtatgggtatggatacgggtatggatacgggtatggatatgggtatgggtatggatatggatatgggtacctatatgggtaggattgaggatatgagtgaggctgagggtgattaggaaactggctgggagtaatggaaggccaattagtgttgttgttgttgtagtagtttgtactgttgctgccgttgcggatagtaatattgttattgttgtaggtgttattttgtggaataacatcacggggttgctctttaatggccttcttcacctccactcgcttgttcttgaggttgtgaaaagtggttttcaatacctcttgcacagtttcttctgtaccaaaactcacaaacccaaaacctcttctttttccactcgacacatcacacattattttggtctctataacattaccaaaagtgttaaaatattctgtaaggtctgtttcattaacttcattaggaagacccccaacaaagatcttgttattgtggtatgtagaattattggtgtttgtttcattctcattaagaacttgtaatattgaagcaggggaagtagacattttcgttttgccaaattaattgaatttcaacactaaacagttttgtgaggtaatgagatcatagactttctatttataatttactttcgctatttaattacaatcctattaagaataggactaggataaactaaaactttttgaaaggaaaaaaaaaataatatatcccaataggaataggataaattaaaaattttgaattgaaaaggaaaatatctaattcatcatttaatttatttacttatcttttttttttttcttaaacagggctaataaattttaaatatttgaaattacatgtatttgccacttcaaaaaaaaaaatgtttttaattaattataatactttataaaataagatatgttttttaatttttatgagataaatataactaaaaacaatatgtatcatccaaattataaacttcgacgttaataatataaaatactctattttttgtttggaaaagataaaatattctattttactaatattatatgtaatcctactgtagagttaaatcatttaattcacgttacattattattaataataatttaaattataatgtatctgaaagtggtccacttatcctaatagcagatatacatgtgattcgcatgctgaaattttgatagcgtggcagcagtagagcttatattactccctgcaccctcattacatataatcacacctctttctctctctacctaaatctgaagaaacctttcctattcaaaataacaaaaccactttaattagcaagcaaaacaaaaattgcaagaaagaaagtgatggagttcgcaaaggccgaagaaggtgtccttgaatcggaagctaataacaacaaacgattggattttattgatacaacggcggtcgccgacttatcatcactcccgtcgaagactcttatgagggcggcgctctcactcaaagatcaggttcgtacaacagtatatatatatatgtatatctacagtactactgcgtgttctaagagcttcgctgctcacagtcactggagagagtaaatgttagagatattttggcgttaattgttaacgggcgtaggttaagattttatcagccatatgagtacgttagcaaatttcatttgtttaggtggttgcaatcacatgggaacgacgccgggtcttgggtgtgggtgtgggtgttgacccgactgtgtattcgggcctgctgggcacggcgttcacttgcttcaggtcgtaccaagctaactctaatcaccaagatttggttatatgtacggacattatcgatacttgcgccgagatcataagtactgctaattccaggtattttatttataaaattattaaataacagaccagatatttttttcaaaaataattataaaaaaatagagaataattttttagaaaattttatttatactcttgaaattttgtaaagatatcttattttaataat

SEQ ID NO: 305389 - DNA, 1410 bp, Cannabis indica
aataaccacaagatctaaaattacggtaaaaaaaaaaaattccccaccggtagaaaacttttgctaggttctaccataatatatatgatgaagcttatacgtatatctttatataatagatagatggtaatggagaagcctatatcaaatattaatgatcaatgatcaataaatttatataaattgagttagggtttgttgtaaatattgtatatatatatgtttaatgttagggttataatatgtagatggagatttatatggtttacttaattaggatatttttttaatttttttattgcttcaattttctagttaattttttatacggccatacgtatatatatttgaaattttaataattttatttaactattaattattttttgtattgtttttaaatattaataaacgatatttataaacttattaaaaaataaaaaaataagacaattaaaaaaaataattagaatgattattagcaccctataccataactctatatctatatataaatagtcatattcttagagatagtgatctttcttccaaattgtgtgccttcaatttaattttttttcctactaaaaagaagttgaacgaatacttatttcagaagatgtgcaactcttatctacattgtaaaaagaaaaaaatgaaacaaaatctaatataaatttaatacaggggatcattggtacaaaatttatacattcaaagtttaaatgtaacatcagcaacgttcgcttctgccatgagcaatctcattcctgctataacttttattttagctgtctctttcaggtacattaattctctccctctttcatcaaaattattgttatttgaaattttaaaatctgtaacactatacataattaatattattaattaaaaaaatgtgagattcatgaatatatatatttggtaagagtgaaattgaatattaaattacactaattaatagatatatatatgcttccatttataattattagcactttaggtgttgctcagagccaatgtactctatggccagcgagcatacctttatcaatttttcatgaaatttgttagttttagtaatatatgtgtagatataagtaaagaatgtaagagattttacttataatgatagataaattaagaaattataattttattgtaaaatatattaaaaaaataatataagagattgattaaataaatattatttcatacttaaacaaaaagtactacaaaaatttttatttttagtcacaataaaatttgtgactaaaagtgaaaatgttgtcactaattatataaattctccttcttatgttgttattattaaaagatttgtggccaaaaatattagtcataaaaattataattttgtgactaaatgtatttttagtcacagtactt

SEQ ID NO: 305390 - DNA, 2203 bp, Cannabis indica
ttcctcaaacccctgccttccctatcagagaccggccttcccccaatcttgtcctcctgagaaagcaccgagttcatatccctcatcatcattcagggagtatccaaggagcccactatacctgtgactgtctcccaataagcttttctatgctcctgtctcgggggggcatagacaaaaattcacgtctaaggtttgaaatttctatcttcacccacccgaacaatgatcttatcaatttccagctaaatgacttggatattccaaccaattttccagaaaagagccaccccaccagccgctcctactgaagacacggccacacccgcattgtaacccagtctttgccatatcccttccatatcctgactgctcttctttgttttcatcagaaaaaccatgtccggatttgcactacgaaccaaagtccgcagtgaattaactgtctgagacttcccaagttcccggcagttcaaagagaggaccaacataagggattggggggcacgataaggcccgcctcctcggcctgagaaaaatctacctctccctgctgtgaaccatcctgcccccgtatatcgccattagagtcttttccattctccttaccatcactggtggtagccaaggactcgcaacaggggttagtcgaagtgaattatccaacgatgggccccaggctccaaaggagctacaaacttcgaacagctctttttgggcaaactcgggcttggcagacaggagtccagtgggggaaatccaaatgaggataggcccatatcctcctcccgctctaaacattcaatcctccgctttttccctgtactcggtccactgggcccaatccccacaggagtaataagcccatccagattcttgcgggtagtacccttcatattaggacgaggccttttgacagccgttttagttattgggtccaaagctcccttaaaaatcattgccaggtgtgatatttgtgattcggtggggtccacacctgcagggggatattcagaaatcgtactgcaggcaacaccaccatcctttccttgtgtctgcatgggaattttaaaattcccactacgtccagggccacgtcaacattcgtacactcaataggatcttccattatctcctttgggcaactcgccggagcctccaccgccgggcagatagcctcaatattgttctgaagggtctcctcaaaaatcccagttccaaccaaagctggttcaaagccctgggagggttatgttgacaccgcattaatctgacctccttcctgtccccctgcctcagtaaccatacttggctcatttgtatcctcccgcctctccggttcaagggccataaactcccttcgggcatcttctgcctccaaagctgaaaagtagtgttttatgcggttgcccagtctaacccacgaaccgtacatgggaaccgatcgattaaaatcatccataatgaggcggcgtcttcgattacacatcatctcaatatgcccaatcattccacatttgaagcagaactgagggaggttttcaaacttgaagtaacaccataaacacactccttcctccataggcagaaagagccccaccaaaataggtttagccaagttgagttccactctgaaccgaatatagtcgtttctaggaaaaccattcttccataatcggtcaatgctaataactccacctaacttctttgcaactgcgatagcatttttgttagtgaaaaaatgaggggatataataaactcttacccataccgggaccaagtccatgtaagcattcctccaacaaccatcatccgggaaaggtttgagtattaaatggccaccacatacttcccacgggcttctgtcaaccacgaattcagcatccgcctttctctgaaactttagggtatagacgttaggctcctcctcagccatattccagcctttagccaaacgccatttctgagccagaacattacgtaagagatctttaaaaatggcacgacgcgagataacttttcccactaccatctttccaataaaatcctggttagtctccaagttatgatccagagacagggacagggtatcccttgctaagatctcaacctcatccagggccgccctgaaatgtagtgggctatagggtaaaaattattttttgggcccttatttagaaaaaaaaatggtatttttcaaaa

SEQ ID NO: 305391 - DNA, 2157 bp, Cannabis indica
caacggcactgagaacacacgataaaggaaccatacgatagacgctggagagaacacattcgatactcacactactcactgactcaagcagacagtcgttttttctaagccttttctcttaagcctcacctatcggagttactcttttagtccgtctgtccgcttgtccactcatccgtccggctaccatttatattacatttattttccattattataagttttttactataatcgtactgacttgagcgtcggagtccctttggctgacaccccaccggtgctcccaattgaacttctgtctctctctttgttcttgacaggttgctggtgcccaaattccgtattgtagatttcaccctctacatgaaccatgcaacataaaatgatttttgatcttttattaattagtatacctgattatattgaaatgagttttatttagggcacaaaacccacaatattgacttctgtatccaccttctttaaaaaatttagggcttaagaatttctaaatatttcacccctagtgattgcgaatccaacaccacaagaaattacaactttggatttcaattccgagatcgattctttgatcgaccacaccaacaccattctagtaagatttgagcgtctgggtcatcttgctgtggagagagtttccctgagaccctcaattgacttcagtgtgtactcttttagaccacatttctattcagattcttagtcatcgtctagttcctctatatgtaagatttcatccttgttattttttgaatcatggttcatgttcaaggtataaggtaggaggaaaaatatctgttgtttaagaattagggttttgagcttgtgactaggatactgttgctgattagcggagaatgttttgattagctccttaagttgccctgaatattgttagacgttgaattcttttattacattattctaggaaattccaatttgtcgttgaaatactgacaagaatctctattcctgtatttaagacccttatggtttcgaacaacctatggacctttttgtttctcactcttgtgttctcgatttttttacttggaacaaatgctccgtggggattttgtttttggataataaatgtaacgcccgtacttttataaaaatattaattttatttacaagcattaaacgcgaaaaatcataatgtcgcatttttatttaatacttgaaatgttaaaactggccagttttcgtacaaaagacataataaataataactaaaatcaacataaatttaatagcataaataaataaacagagtgccctagaccccagttgtatggctttcagcgagttcacacacacaagcatccaaagtttcactcgccaccggcattctaaacttttaggtatacctgggtctgcacatagtaatttgataaggttgagctgctaaactcagtaaagaaatatgtgtcaggtagtcacataaataaataaaatacacacaactaaaatgcacatatttagaaaaatagcaatacataaacataatttgatcactagtagctaataactagtttctaagccaagtcacataataatgatcacgcccgagtctgacattggcaaataaactcaaactattggactaaatgatggagggctgggtacagtaaaatcgtacccactactaaatggccccctatctaccatatagactcaatagtcaagtatttaaccattatcttctcggtcaaatcatatcacataagctacaattcatgtaatttaaattatgtctgactactatacattatttaaatagcataatgtatcataatcataactttgtttaaataatgtgaatccatgtcccgtccattattcaaacagcataactagtttaagtaatgcgaatccatcataccgtccattgttcaaacaacataactagtttaaataatgcaaacccgttgtaccatctattattcaaacaacataactagtttaaataatgcaaatctatattgtaccatccattattcaaacaacataatatgataatgaacatatgaaaataggatagaagtcttatacctcattcccgttctttttgaacattattttatatagaagatttaaaagtttctacttaatttccttacctcgaatgtg

SEQ ID NO: 305392 - DNA, 1149 bp, Cannabis indica
gataactaatcagattgtaaagagttttatttagggcataaaacccaacagaagacagcttcagagcatgggaaagaattcatctaaaaagaattgatcatagcacgatgaattttagaataacttctatcttcaggcttctacttgttattctatgtaaggaaggctccaaagtatttcaaatcctccatattacatttatcaacacaatccttgaatctttgggaaggcggagcatgaactttcttcccaagcctttcattagcatttagtatctcattaaagtcccctaacatcagtcatggctcattaatttctgtgctagcctctccaaatcagtccataattcttctccttttttctcatcattgaatccatagacaaaagtgacatgaaatttcccaacttgttgcttcgagtgaacatagcaatgaattagttgacttgtgcagaagttgatgtcaacagagtagacattaggttgcaaagcaacaattattctccctttatcaaggcaaggattattatttgaaaaacaccaaccttgaaatagactagtattgagatcccccatattcttatttcgcaccttactttctaggagactaacaaaccccacctctttcgaataaatcaaccgcttgaaattattatgcttctggtggtttttaattcccctaacattccaacaaagaaatctatccattggaattagggggacttcccccctctccaatgttggccaaattcccttgtttaaacactaaggattcgaatctgttattcacaatagtctctacaatttctttttccaccatcacttttttacccttcactactttttgaaaaccttcaacatcaatttggacttcttttttcgtctgctttttcttaggaatccatacctgtttcccctgttcatctttagattctttcttcctacatacctcagtactatgacctattcctaaacaattgtagcataccaactgtaaagcccgcttagttaatttggaaattatcagttgattgtaattaattatgaaattatttatagctatttaaataatttattatactgtcatttatgttattcagtatcttgcatattttgcatttccggtgtccggtattttggaactcggcgtt

SEQ ID NO: 305393 - DNA, 5548 bp, Cannabis indica
aacttaagctacaaaattaatttaaatatttataatagttacaccaaaaaataaatataaaatataatctaagtattttgagtaacactttccaatatgatattattattatctaacttaatacttgcatgctattagtatatatagttatgcattagagaaaaatccataaaataaaattataacattttatagtctaactaatttgagtcaatacagtaaaattatttacaaaataataaaaaatcaatatgcagtccatttttaattaatcacaaccattaaaaaaatatagagatcactactaagtcctacaaatcttccaaataaaaataaataaataaataataaaaataaagagagaatgaattagtaaaaaaaatagtaaaaaatatattttggttgtaagaagaaaaatatctcagatagagatacaatttcaacccacacacaaaattaaattgactaaaatcagaatatataacaaggccacatgatacaatcctagacttcacacaacaaatccgtacccaaccccaaatcttaccatcaccatccccattctagtaaccccaaaataaacattaatatatacatataaacataaatatatataaacaaaattatatataaatataaaatacatatacattaatctaaaagagatctatgtgggttttgatttggggtttgagatttggtctgattcggatgggatatgaatattgtttatttggggatttgatatatattagagattagtgggtttggatttagggataatgtttacaatttgagagatgataaaaaataaatttaatctttatatatatatatcaatatatatacctgaacaaaaattttaatggagctttggctggtacaggggagcttggacagagcttggacggaacttccacgccagcaaaattttagatgtgagttgagaattattttttatacatgagttgagatatggtggtgggatcttggagaggagctgagatggggagagagaaagagatggagtgagaagatgaaagatgaaggagagaagaagaagaggcacgaaatgatgtttgaagtattttttttttttatatataaaattattaccggcggaaacccgccggtattagtgggttccgccggtaatagtctaaacaggaatattattgttttattagcggcgggatccgctggtaaaagtccgccgctaattattttcaaagtaaaaaaaagcgggaattttcccgcacaaaccacattgcccattaccggcgaggcattccgccggtaataactactgtccgccttcaactccaccggtaataagcccattaataggggcggacatgctccgccggtaatgtgtccgcccctatttctgatttttcttgtagtgagatcttcaaagatgctttccttaaatattttggcatttaggtcttgatcacatccttgattttatgggattgacttgcaccaacaagaaataatatgaagctttcctagttttcctttttagttttatctaatttgggaaacctaattattgtatttttttcctataaatagtggagtcattccattgtatagggacccgacatcattgattctagaagagctcttatgctgtaaaagaattgtaagctttttcctaaggatttttaagaaactcacttagctagctccttgtgatcttattaaatcttcaaagtaatacaacaaaaagggagtaggctattaccactatcacagggtcaaacctctataaatctatgtgttcttatttgttcaattacatataattattatctattattctcatcactttaattgaatcgaaaaagatgtcagattagtttctactacaatgatagcttggaaagcagttttgaagagaatgttgacaaaacttacgttatttactagaatactagacaccctcttatttgttgagctacaaataccaatgggtcattatgtggaaaatgcacatccttagcatcatcttctatgaaagtgattagaaggttcatcatttagtgacattgagtagatgtttttacatgattacatgtttcttcttattgaagctaatttagatatatcttctgagcatttttggtgcttccgacaatatatgcacctccagatacttttaccacatggccatctagcgtaggtggggcaactccaggtggatatagatttcctggtttgggagcagcaataggtcttgccacagggacattttgtaccccttgaggggcctgtatagtcggagcttgtggaagacctactccttgaggaatatttacgactccaggatgtccaggaataaaaagttgtttgtgtgtatccatttcggactaatccttcaatttcatccttcaagtagtcacatatatttttagtgtgcccagtgtcaccattgtattaacaccttttactctgatccctttttttcacctttaaacatcggtagaggctttttataatggaccatgttacacgtagctttgtaaatgctctcacgagtaacaagcaagcttgtatacttggagtatctgaactgttgagttttctctttctttgaggattcactttagcttggaggttaaaatttctcttgctccaagaatgaattgcgttcgattccaaaactttcatttgttggctcgtctgtttgggagcgacactatatccattttgtgccactccaaagcaagaaaagttggcttgtgaatgtgctcgttggaggaataatagctgaagtagacaactgcggggtttaagttgttgcagtactagaagttggtgctggaagtactctataggcttgagcataagcttcttctaggttaatgaatcttcgggctctagataagaagttagctaaagagtcttcccttttttgttccaactctcccctaaagaacaatctagtagttatccctaatgttaaagccaccatcttcctatcatctgtaccttggttttttcaaatgcgcccgtcttatgttgattgtatttcttaaggctttctcctggttgctacttgatatttgtaggagagtttacttccaggtcaaaatcctttaatgctatgaatgaacttttgaacattttcagcagatccttctagttaagaacagatccaagagataatcttttccaccaatcattagcagactttgatagagttaaggagaaacaaaggtacttagcatcgtcactttccttagctactttcataattttggtgtatttagatagatgggccttgggatccgtcctacctttatacaaatccatttgtggcattctgaagtgttccaaaagctgtgcctctattattcttttcacacatggttctgtatcctcctcttccgaatcagatataattcccttttacttcggggagatgcatcctatgagctttgtcaactcatcaattttttgttctagacgtttggtggatacatcttgagattcaagtccacaaatttgatcattaatatggtttctcaaatcatctctacaaggttttgctttctcatttatatcttttgttcttttggcattcatttgtgtctggagatcattcattgaaagacttccacttcggtcatcttatactagatgaatctcatttacatcatcactccaactagtagatttcttgggatgacttttgtcttttccaacggcaggttcttgtgtattagtattgggcctatctttctgcacaactcagcctttagaatcagtctggttaccttgccttgaagcattggtccctttgtttttcttaggaggttggctggcagttctttttttcttcctctggctagtgggagaagttttctttgaggtttctcctacttttcccttccctttatccttatgaggatcataagtttcagaatttttcagaccagacttttgtgcattgttatcccatggaatagtattattaggattattatcgttaggagccatatttcctgtcgcaagtagtgcttccatccttgcaaatttctcatgtattagtagagagaaatcttctttggctactaactttagttcagttagcctttaatttttggctatgatgaccacaggatcagacttgtcgtgctcacttcccatattagcttctcatcctcgagatctataggatcgttgtcctcagtctcatcatcttcttctccttcatcgatgggatcatcttgaagaccttgcttattatgttgatctttttccttttgatgactggtcgcctttgtgaggtcttcactgagccctgtcttgccgttcggatcaacatcgtctatcagagtgtcttggttgtgatgacaagatttatttttggtgagtaccattattacagtatgtaatcgttgatggtatcactactttgttcatctctcaatgaaagcactaaaatatttctcgatatttttagaaactaataatttaattataagaactaaagaataataattcacaactagaagaaataagaacactcaagatttttatgtggctggggcgttaactaaccttaagccacgagtcaatattagtaatataggctagaaaagctttacatgattactgaatatatgaacactctattataaatcacataatatcttaattaattacactaataatcatttgcaacataaataaatataaggataataaattaaatttaaattccataatatgttgttaatggcatattaatcaaaatagattaattcagactatagacttaatttggtaatacaaattataattgcacactatttaattgaaaaacttaaaatttgataacattacaaacgtaaataaatcatgtaattaattactaaagaaaaattttctaatttaatttataccaaataacatataaataccaattttttttattgaccaaatttacacaaataaggaatgcacttaagattccataataactgaaatttataaaaaaaattaagattttttttttcaaaaatcttccttagaaaagcgacatgtcctttggggttatcttcaagctttagcgtgggtcattatgacccattttgctacaagtggttttgggagacctagtccaaacccaatcgtaaaattactttttgatgaccataaacatcaatgatcaattttgaatgaatttaaatgtaaaaattaagagattcatgtttattccatgtatcgaatacatgtaaaaactatacttttagtttcacaaaaaaaatttcgcacccgaaaacatgtttttgtgaaagtttccaaatttttaatacttttttaaattattttcatgcacaaaatcactacatatcacaatatgaacatgataataaagaaggatttaaaataaacatgaaaaatgaagatggaatttttttatatacacggataaaaaactcaaaattttgtgtatatatattgtggaaattgatcctctaaaccaacttattatccaactcatttaaaccaactaacttaactaactttcggt

SEQ ID NO: 305394 - DNA, 757 bp, Cannabis indica
ttttttttttttttttcagattgtgcattaattgggtcaagtttatattaaaaactattaacctgattttcatcatctttttggccaattaaattgatgatgtcatttatttttggtcactttgtgttgcaagtgaattactaagaaataaatcaagatattcaacccatttacaaatagtcatagcattatgataattttgtactttatttcatggttccatgtaagtgatgaaggcaaaataattgattttctccctttttgaccaatctaaattaacatcgtccattaaaccagtaaaggtttgtcctgagttttttttgttacttcaaatccatctaaagcattcttcctcacttgtcatataacaatctactatatattgttgcagtagtcaatcatttcgataaagagtgtgaccttcatctaatctttgttacagccttaagcaataatattctctcattgtcaacattttcttcttagaatcactctcatttgcatttttaggagtgggaagtctatatccattttcactgtaagagtgtattaatgagtatgttataaacatgaatattggatggaaatctatgattctttgaagtcctttagtttgatgttctataataacattaagtttagagttctcttcattgaaatatacaaactattaacctgaagaaaaatattttaggggcaaatcactatatatatatatactaggtgattgttacgtagtgttagttttatttaatat

SEQ ID NO: 305395 - DNA, 2847 bp, Cannabis indica
agtattttttaaaaaaaattccgtgtgacaagatttttgtaaaaattaaactaaattccaatatttttgtaaaggttagaatgtggtagagggcttggtgcccttgagtatttctcaataaaatactagtgtgtttggagtgtgtgttgtaagagaaagtaggtacgagtccaagctacgtcttgcatagctggagtgagtgtatatatttaggcgtacgtatgattgggattggccattccttttatatatttacccttacttttaacgaaaattacgctttgcccttctatataaacctaacctaacctaacctaactctactctcctttctttatttctctttttttccaataataatattaataggactggtgggtatgcatgccatgcaactctttcaatttcatattattaattttaattttagatgagtacgtggtatagccccataagggcatcaatatataaatataaataatttaaagcatgttattgtttgttaagcaataacttcaccaatccttgaataaagtaataagttagtattatgtgaaggtagttgttgaaaaagtttcagctaaaataagagtgtataatggttgttgccttttgtgttgcaaaaattttgttttcaacctaaaccctcttagtgtgttcctatataaatcaatacaataataggaattatggctaagcaattgttcaaaaataaagctaacttttaggtagatttacatatttggatcaaatgtaatagaggataagtatattactaaagtgattacaagtaatcctattaggctcattttggacacaaaaaccaagtccccaaacatgaccctatcttcgattttgtgtctgaactcaaaccttgccctcagcttaaacttgcaacttgaacccccgaccaaaatcctacagggctcgtgcttaggacctgaagcgctgcaccaaatcccaattaatgtcgtgaattttatatgtatatgtttgaaagtgcacaaattgacaagtaataaagtagttaggagactgatatcgtgccataaaaattaaaaattattaaagcaattaattatagtaaaattaaaacctaattttatctaagcaattgatttcaaatgggttgaagaaatcaaacttaactaaaaaagataaaaaaaaaaaataacaacattaagttgagaataaatagatcaaaataattgttaaagttttgattttgccctattataactataattttaatcattaatgtgcctagtttattccaatatttttaagaacctagagtaatattatatctttataccctcttttgagtgccgcataagaatgtgtaagcgaataatagtctatatatctataccaccgttataccttacgggtccatttggtacgcaagactggattggattagataggtttatttgtccagtccagtgtttgggtatgttagaactctaaataactaatccagctaatcccatctgtctgagattatttatcccatctagcagggtatgataaataatctcatactggtaaaaaataatttatcgtttttttaatcttgattttgttaatttctagactagaagtgaattaacggtataattctttccaaatttattaacgtcatttaattttcttttctaaccttctatattcacctatatactatatttttagttttcttttatttgataaaaaataaaataaaagaattagagaataatatcattcattaaaaatttttgaggcaaatatatcaaaagttgatggaatgtatgcattttcaatgttgcatcaatgttgtttattaatttcaattttaaataagtatttttgttatatttgatctactaggcatcatcaatcatatttatatctcaatttttattattgacaatgtagttcgtattagtagttaggtagtttcttcttcagtctttttacctttttttttttataagaaactaaatatacctatttatataatgctgaaattaatgaaaaaaaaaatgtatgtaatatgtatatgttataaatttatccttatttaatattgtcaatcaattataattttgtagactttttttttaattgagataaattgttaattgtaatttagttaattactgtttattaatacatttacttattgtaaaagtatcattgcataaatcaaaaaataaatttcaaatgagcattgggcgattggcgactgtaaattttctcaatttgaagttttaaactttaaagtcagaattagcagcaaatatcaggttctttcgtcactttttgatcttccaaatgaatagttattactatttgattgttctttgaaatattatattagttattgttgttgtttttttttttactatgtctcttaaaattagaaaatatgagtttaggtataaaaagcgtaataaaaagaagaagaaaaattaaggaattaactcaatctcaaggagaagctcttgataaatttactataaaagaaccaccacaagttttgtttataaatcataatcataatgttgttgatgttgaaatttatgaaaacatgctacctattattgagaatcatattgaaaatgatgatatgaaaaatagaggtaacatgtctattgaaaatgatagtgtggaaaatagaaatgatgtgcctattgaaaatgatattatagaaaattaaaattttgattatgaaaattgtaatgatgattatttgaataattcaatcgaaaataaaattttagaggataataataataacaatgcagaaaaaacaaattcatttaaaaatttactttatatatttgatccaagaaattggga

SEQ ID NO: 305396 - DNA, 2528 bp, Cannabis indica
ccctaaaattgaattgaagataatcatgtagatgagggttgtacagagtgttttgtattttttctaaaataacatttctcaagcaacaaatgtagttttcggaaaatgcaacttagagtagctgcccaaacccaaacaattcactagccgaacattgtaatctccaagaataatttattgtcatagattgggtgccagtctgccaaagaactgaggaaagtctaaattgcatagcccacttaggaaatttacaaacaatcaccaatgctatgataatttattgagcctcacagttgtatccctaagaaaaatgcttaaatttctctagtgttaaaatggatatatttaaaagatagacaattacatgcatagtgtgcgtcttcccactacttgtcacaccataggcaaaaactgttcctgcatttaagatccgaaaaaatatatattaacaaaaattaaactacaataaagaaacttcaatgcagttactattaatcaatttagtgaattagctttcaaagtcaaataaattcaaagcgctagttaaaagcattttacttatatgattactaaatttaatttttttttctaagattccaattataaaattgacccattaagagtcttgaaaaggaaaattcaataccatttacaccctccatggcagccttgactacaggtttagccgctacctcatatacatcttgcgaattcgtatgtggtccaaagactttatctgccaaacaaaatcacccaccccaaaaaaaacaactcataatcaatttctatacttactacctaaaacttaataaaattcaacaccaaatcgattggtcatctgcattttcaattcatgaattttccgaagccaaaaatgatcatatcaatcaaaattgaattcaaaattaaacaagaaaaaatgaaaacaaaggaaaaaagtatagtaccaaatgcataagctgtagcaggattatattcatttctcacaattttatctccgtctgcataccaagcaatttcatcccctttctgaaactctctctcactgcaagcaaacaaaaaagcccccaaaaaaccagaccaatgaatcacatttacctaaaaacaaggccctacgaccaaaaggttcaactcactccaatccaaaactccatagatctgatcaaacaagctcagatctaccattacctcaaaggcctaaaccgaatcgtcacagatatactatcccctccagccctcggcgcatcaagaggctcagcaatcagctcttcagacgggaatcccacaggagtacgactaccgtaagtccgtggaccaccgtacactgaatcggaacggccctgactagacgtcatggatcgagaacctactccaccactacctgagttgaagtaagaagaagccgaggtagagcaagaacgaggtataatacgaccgttgacaaacgaagaagacgaagaagtcgatgagtaaggacttgactgcttgcggtgcgaaaatggcgagctgcttcttgctcgagacgacgaggccatgaaggttcgaagcaacccagcgagttggtgagtcgacgagtcagcgactcagtacccccaaaaatgttgcacaaatagaagaagaataataataacaagtaaaatcaaagaatgtgtcagaagacctcacatggctcgaaccaaaaaagcaaaaatcatcgttttttttcctcctctttttctcaagaatatatatttatatttatatatatacacacaaatatatatatgcgtatatatatttttggttttcgtcttctttaagccaaagagtttgagttgcagagaagaaagaaaatgaagagagagaaagagaaagaactggcgtgagtggtagtgagagaaagagaaacaaagaaaatatagtttaaatttgaagtttgaattttctatttcctaattttttaaattaattgttaattttctatttttaaataattaaataaaaataaaatttacagtgatgacgtggcgaagtgtgggtgagcggtgagggtttaaattaaatcgggtggaatcacccgcgcattattgaagccttttgtttcacccaaattattaaaagaaataaaaattaaaaaaaaaacgtggaatgagcgggaataacagcggtttttgccgatttggaatataaaataggcttagtattttttttttttttttttttttttgtaaaaattttcactgttattaaaattgcatatcgtttacaacaacggagaaaataggatttggaatttcacccatccaacagacattcttattgttaaaaaaaaatataaacttaaataatttttaaaaattaattttactatttttttaaaaaaattcctcatattattttatgttaatttcaatacttattttgatttttttttataattttttctaactgatgtacacatttttatatttttttttctaaaaaaaattcatataattttatataaaaaacattgcataaatagagttcaatataatactataccatac

SEQ ID NO: 305397 - DNA, 2717 bp, Cannabis indica
ttgtgttttaaaaacttcaaaaaactattttttgttactcatttctaaaaacaattttttaaaacaaaaaactgaaaacaataccaaacatgctctaaactatttaaccttattgcgccatggagtacatttgcagccatgttataaaaacaactcacattacatgcatataaatttaggcaaacatatcaaactatcaatgactgctttatttgaactctttccccttaattttgacaaattatacaaatactttgcaccaaaaaggacaagcttaatattaaaaagattcatttcaggtaccaaagtgaaaatatttgctcatgtttttactctacactgtcaaaggaaactgaagaaatattgtaacggtttgttcaacaacacattttgagaatcatagaaacattacatacctgagttaaggaaacatctccatataatgccagagcaagcgtccttggaattggagtggcagacattgcaagaacatttggagccatataattgtcaccttttgaggtctcatctgaattgcctattgcgactttggagcttatgttattatataactgcaggtagaactcccaagttacctcataagtcagtgtcgatataagtaatctataaatgtaaatggtcataaacattaaacattagttggtatagtccttttgttatggcaatccttttcgggttagattgtgatcttcactaacacaatctcctatagttggtctgaatagattgactaaaagagtttacaataaagaagtctaacttctagctaatcaacaaacaaaaaacatgttagaatatatgagttatacattggttgtagaaattaaagttaattgtaattagttagtttcgtattttctcttctagtttcttatttaaactttctaattttgttataaatacacgttattctattgaataatatacaattttattcattgttttttacatggtatcataacaaaattaagaaattgaaattcgaaattagggtttatcccaaaatttaggtttgcaattgagtttgttcttcatctttcttaaggttcattttttggaaaacacatttaaagagcacgtgagctcatcgctggcaccaacagacaaccgagccgtcgatctgcaaaaccccagagtttggtggttggaaccgtcgcgcgtgagccacatgcgccgcctaaagcttcggcgacaactcccacatgctggcgcgtgggggcacgcgtgaggtgtcttttaggtcgtttctttgccggttgtttttttcggtgtttctgacattttggtgcattcgtttcgaccattattttcttcttttatgatcgttgaggttgttcggcatcctttggtgtgattcttcgtcctttatctccagtgtttttcttcgtttgtggtttggtttgggttctcttactttggttgtgagattttgattgctggctcaatatctcatttttttcccagcttgttgtctagtttattttctcctttatagatttgttggttggtttgttgtttgagctagtttggtgggacgaatataatatttataatggtttctggaactccaattcttgtttctgcggatgaatatgccaaattcatacaatatcaagagtctcttaagtattcatcttcttttattactactattgttgattcaaataaaccaaattcgtgtcaccttttctcgtcttccaaatgggtcataaattctaaagctacaaaccatatgacagataattttagcttcttttctaatcttcaacctcacgcttcacttctactgttacctcagctgatgggacaccatcacgtgttcttgggtctggtacaatcactcctactccaatacttcatttgtcactcgtcttacatttacctagttattcttttaacttgatcccgtcaatcaacttactcgtaatcttcattgttgtatctctttttatcattgcttatttcaggattttatgacgaagaaaatgattggtaaaggacatgaatctaggggcctatacattcttgatacaccaatacctgaatcagttgcttgttctggtgtacaatcccccttcgaggcacattgtaggttgggtcacccatctcttcctctgcttaaaaaactttgtccacaatatagtaagttattttcgttagattgtgaatcatgtcagtttactaaacatcattgccttagccttagttcaaatcattctgatgtttaaggttctattaattctaaacctggttttcgttattttgttattttgttacttttgtggatgattattctcgtgtcacttgattgtttttttgtagataatagtgaattgaattgtgtattgtattctatagaatagtaaatatttatatacaaagctaggaaactaaatggaaaactactaaatacaataggaaaccactaaatacaatttaccctaattttcacaactaatatacagctaatattctaacacttcccctcaagctggagcatagatgttaatcatgcctaacttgttacaaaaataaaacccgcatcccattcgaagcctttataaaaatatctcttaattgttttccagacttcacatatcctgtggagatcaggccttgttgaattttttaacgaacaaaatgacaatcaatctcaatgtacttagttcgctaatggaacacgggatttgaggcaa

SEQ ID NO: 305398 - DNA, 3290 bp, Cannabis indica
ttttttttaatttttaaatcacattttaatcaaaataatttgaactagtaaaaaattttagtcccaaagaaaataaaataaattaattgaagtgtagattttcaataaatattaattacttagtgagtgtcttttagctattttcgctttttgtgtatcgaacccaaccataaaaattgtgttaaatttaattttggtgcatattcttagctaaatttaacacaaattatacattttacattgaagataatttaacgatacactaccttttatgatacttgacaccttaagttaccccttagagcatctcaagtggaagtgctttaaagaatgtttgatgatatagatctatttttgacatatcttaatggatgcttactttggagcgaaaaagaatgccaaataaaaatgtctaacaatagcatcatttatatcttctcttttttaaattattattattttgtcacaaagtaaaaaaaaaaatatatttaatatacattaaattataatataatatatatcataatcatatgggatgaaaaatatatgagaaaaaaatctaaaacaagaatttctctccgtacagggtggttttgaatttctctctgtacatgagggtttttctgaatcgcaagtcatcctctaaagcttcgttttgggcttccgagctatttttggtgctcctccgcctttgatgctttcttcctggatgtcagtcctctattttgggtgcttaggaacctcttccccgtgataagtgttctgtttagcgtcattggagtagagacaactatcttttgtagtgtagagttttgaattccctggtgctcctccgagcttgctaggtatttttctgagcctctttattggtctccagctcttggttccttctctcctctcgcttgtgattgctggggatttctttagtttgggtacaatgcacaagggggtcaactcgacaaatgtagtgcttattccgaaggtcctgaacccccagaatgtgtcccagttcaagcctatatccccgtgcaatgtcgtctataaagtgatctctaagactattgctaatcggataaaacctttacttcctagaatcatttgtcccactcaatatactttcgtcccaggacgcaatatccaggacaacaatgtcttactgcaagtaattatccattcttttaagcttaagaaaggtaaggaaggattctttgtggtcaaaaaggcttatgagaaattgagttgatcatttgtagagcaagtgctgaaaagttttggggtcccaaagtgatttcgtgacaggatatcccaatgtattattacatcatcactcaatatttgtcttaatggggggctgattggaaagatcatcccgaagtgcggtattcaccagggggatcctctttccctgtacattttcatttgggggctgaaatcctttcttcgttattggatgaggctttgggaaatggtagaattcaagggattaagctgagtaagaatggtccaaaattatcccatttattctttgtgaagggccttatccttgtgggaagagcttatgttgaggaagcctagaacttttgaggttgtctggaaaaaaaaatatttcgtggttaggccagaaagtcaacaaacctaaaaagctcatatttttcagctcgaataattctaaaggaatgaagagggaaattaaagatattcttggtacagatagcccaactggaaacatcaaatatttggggcttagtgtgtttagaacccgctaaaaggttgctgatttcaactttatcttggagaacctttcttccaagtttcaaggttgaaaagtgaaaaccctctctaaagcgggttgtgccacacttattaaattgataggtttatcctttccggtttattctatgcaaaactacaaaactctctcaatggtttgcatctaaaattgatggcattgtctgtgatttctggtggggaagtgagaaaagaaaccatggtttatatctcaaagcgtgggataaaattttccttcccaaatctttaggagggttaggcgtttggaaaactattgagatgaatcatgcatttcttgcaaaatgggagtggcaacttatcaataaagaccaatccttatgttacaaagtgctagctgccaaatacctcaagagtaccccttttcttcaaagcagatataagaactttcactcatgattctggaagaatgtggttaaggaaaaagatattttgagaaggggtgcttgttgtgtggcatctgatgggagagatgtcaatatctagaaggatgtgtgggtggcacatggtaacgtcttctgcccaactccgaatggggttccttttccaggatgtatgactgtggctgacttattattggagaatggggagtaggatctcccaaaattgaattggttgtatgattgaaacactggccattttgaaagagggatagtcttcaaggcaagggagggatcactgggtttggacaaaaaggaaccaaatggtaaattttccacaaacccaacttatcttttgcaggctcttgagagaagcccacaatgtcatgtcactctttctttgtggaacaaactttagaatagtaaaacgcatgagcgacaaacaatctcttttgcatcaaccacatcctcttccttgtagttatcaaaattaattgcgatatggtggttatggaggaggctatgatgcttgcagcagtggcccttgatcatgttgggaaggtgctttgggctggtactaagcaggtgccttatgctaatgctcttgatcaggaagtagaatcttgtatgttggcgttggaacttgctgctaagaaaggtttataatttattattgtggagggtaattctgacattgtctttaaaaccgtcaaggggctaaactcgtgatgaaaaattgataactttgttactcagtatagatgccttatgaactcttttaagggatgcaacttttcaaagatgtctaggtcttttaaccatatagctcacaatttggctaagtagacatttaatcaaaatgtaactagtatgattggggcttcctcaataccagataacattatttgtagaggccaagtggcttgatttggtgcttatatctaattatgtttcttaaaaaaataatataatattcttttaataatttttagaggtgcttagagcactcacatcagtttttctactctattttttaaaattacctcatcaaaatgttattttttttttatttacctcatacttttacattatataatacattag

SEQ ID NO: 305399 - DNA, 1406 bp, Cannabis indica
atacctactcattactcccactcaacagtctcaacttaaatcatgaatccgcaactgggtaacacacttcataagtccccgataataatattaactatcaaaaataatgtttatttttttaaaatctattaagactatcaaatggatatttaatttcttgtactacaatatgctccttgtttttagccatgaaaatatgatattgttgcattaattgttgactattttctaaatcaagactcggtctcctattccagggaataaaaaaaagacaaaataagaaattaaactatgaacttcattaatatatatataatgacatatcatccgcgaatcggtcaatcggatgtaaatttgtcagctctcatttgttagtcatgtaatttttttgttttgtctcctaatttctttattaataaatggaaataaggaataaatttaattcttttattttttttttcaataaatgagaataaattatacgtcccacactaatataaaaagtttgtgtagtttgggtatgatagctagagatgacaaaagggaagttctagcttttgttgcttggcacttgatcggtagttttcagctagagatggacgaagctttggccttgagaaatacggcttctcaatatgttttactttgttttcataatgttatttttatatgcatttcatataaataatttatatgtatttgatataaattatttatgtgaaatgtatgtatatttatattataggcaaaaaataattaaaaatataaaaaaagataaaaaatttatttaatataatttttctatatatttatgattataataaagtaaaatataagactattattattattattattattatttttattattattattattataatagaattttaacaactttttcctacagcccaactatcctaaatcaatccttagtgctattactgaattttgtcattctttttctagatttatgcaaattgttaaaatatcattgtgccaagtttctcttgttggcagatgttagtactgtttggtggactggctatccttcttatatttaatctcaaattttacatgacgcaaataatgtaagttgaaatatactcattttttcatcagttaactaaaaatagccttattttaaattcaattgaaatgtaccccttttataagtccattaccgattataccctacagatacacaagtcacccgattcaatcaactcccttctctcgattcaatcaactccctcacagctaccatcgcctcttgacacaggaagctccactgcgatccaccatcgatagcgccaatctacctcttctgtcaccgccatctacaccacacagttcgataaccgtattcacaaccgccacaaccttgatattgaatgtacgtt

SEQ ID NO: 305400 - DNA, 1424 bp, Cannabis indica
cttatattatgactaaaaggtccatagctaaatgtattagctagtcacaaaaattataatttgttgtgactaattaaatgtattttataatacttgttgtggctagaactaaactagtgtcaatttgtgtctaaatactatattttaattataaataatatattgttgtgactaaaagttccatttaaataaaaaaaatatatatattttgattaaaaagttgtcagtgacagattttgtgatgacaattaactatgctttatagattgatatattggttataccatatataactaattatatatatgatttataagtctacaccatatgtatttagatgtaatattttatttcattccacattttcttttaatattctgtgttattacattgattacatgttaccacatcaaaacaataaataactaaagggtgtttaattaaagataatgaaatagaataaaaataacttttattttatttttttgttttattatattttaaaatattagaatgtcactccaacacaatcatttttccattattttagtagaatgcatattctattttgatgaatatactaaatgagaaaaaatttaataatttttttttatgtattttaaatttgttccattcctatttttatttcaatacttttttattccgatatttttagtctttctagctaaaggccaccaaagatgatgtgagtactaggatgacaggagtagaaaagattaaattaggagtataccgccttgtgttgttgttcaattcaatattattatgaatagcaataattacaaatacgtgtagtatagtttatatatattactatactaatggtaggcgcttttgtagaagtaacaaatagtggaaggtctttcttatatagagaagaaattaaagaataaagttctcaaaatttattttacattatatatttataaattaattattaatattagagtaaattataatagttagagagctatacatgtgtaatgcaataataattattttctctcatatatatcgcaacatgtttgtagaaaataaacaacagtgatgatctatatataggtcaaaaatcttcgaccatattaattaatctcaaaataaataaaagaaagtcattattattattatttttagaggaatttattttatatattatttattaattttttttttaaatttacgtatttggattactttggtggtttctcctggtttttatgtagccggttgctatatacaaattttatagttaaaaataaaaaataaaaaaaactaaatttaattttgtactagctaggttttttctttagtactacgaattcaaaaactgaaccacatatatgtaaaaaatagatatataatgtaaataatatatgtactaattaaatgaaactcctaaaaat

SEQ ID NO: 305401 - DNA, 1681 bp, Cannabis indica
tttttttttttttgaattttatattttccaatttaattgtttgtgactgaattatgtttaagttgtgttgtagattacaacaaagttaacatacataacaacttattacagacccaagtaacaaagaaaactcaaatgtcattcaaactcagaatttctttccccaaaagacccaccaagacatcgtactactccgccgaacaagttggcaacaacgacgacctcctcaaccaaatactcctccgccttcccataaagtctctcctcaaattcaaatccgtatccaaacactggctttccctcatctccaaccccaacttttctcaccgccgtagcccttttccgaccgccgcctccggcctctttcttcaaacctcaagatcatgtgccaacagcccagaattcaatttcgttgactttgacccttcttcctcctcttttgtggccccttttaagtctctcacctttgtcaacgacctttacggaatcacaatcatacagtcctgtaatgggttactcctctgttccacagctttctattcaagaagaaaaagcttctacatttacaatcccactacgaagcactatacgacacttcctccgctgtcgtttcctcgtggaactttcacctggtccgtatgggacatcgtcttagctttcgatccttccaaatctcctaattacaaagtcgtttgtttgactatatgtaacaacaacaacgacaacaacaatgtggtcgttgacgatcaatttcagattcaaatttattcctctgagactggcccttggagaccttgctctgtacaagtacaacctttttctttatcacaccttacaaatttagtagccattagtggggttttctgcaacggggctattcactggctaaatcgttatggaacttcactgtatttcaaagttgatgaagagaaactttaccaaatgccatcatttcctgtgcttgataattctgatgtcatcaatggggatttcaagtatgttggtgagtccggggaccgtttacatgcagttatttgcttaaatgggataacagataattatttggaagtatttgagatggaaaaaggattattctaaaatgggttttgaagttcaaagttgatcttgctagtaaatttttaatataattcctgaggttatctatgataatactcttttagtgctttgctttgttgttggtggtgagttttcccaagattcatttttggtgctgatgatttttgatatagttttccgatatgatttaaagactggaactttctacaaactgtgtgtcaacaatcatcagcctgtgtggtatgtgaaaaattatcagtacatcgagagtctagcttgtgtttgatttcaagtttttaaagtgttgaaaatatttattagttcgggtttctgatgtgatatgccaaatgggggttgtaaattcttttgtaaaattctgaaattagtgcctttcttatatagtttatgatcgtaacaaatgtataattatgaaggagactagcactgaagattgggcgggttgattggattttgggttataaaaaaagaataatttcacgagccaccatatttgtaaaacaattacattttacgttcaaataatgttttttgcatttttacggttttctgaaaataacacgaaaacaacataaaatcaacaaga

SEQ ID NO: 305402 - DNA, 3825 bp, Cannabis indica
taattaagttttagattaaaaattactatagaaatattttacatttttaccttataagataggttttttacctaaactaatttagttgtccatcaataatttgtcttcaatttatgttggatttgcaacttttaaagcaacatagatatatattatttctttcttaaaatttgttcaagaagaaataattaccttaaatacctacctcaaatataaaataaaataaataaaagtagaatttttgaatattagtatcataaaagttaaatcataaaaactagctagtaatatgagttactgtggtattgtatgactcttgtattgtgacacgcgggtttaaaaaatacgtataagtgtggtcattgaatgagtcagctcttgcttgattgttgctagatcgtgacctttgagatccattattttgtggacgttttgggtattgacgataatcatgagcagatgcgcgacaaatgcagcaatgtcttgagtttcttgtaagttgctcctcacttagtccttcgcttgtatttctcttacctttgattctcacaactaaggaatcttgaataacattggagttgttacaatatcttttagattgtgtcgtctctccttccggattagagctgaactcaaattcttcctgttccatctttgttttatgtcttttggttacttcattgttgctttgtttatgctgaagtttttttgtgttttattcaatgtgttgctattgcagagttgtgcaggtattaaatatataaattaaccaccaaaaacatataaattttatcataacataacatgatatttcatgagtgttagcttggtaaatctatgaaactgttgcccaatttaatatgtattttaatattaaattattagcaaaatggtcatcaaatttaaattattagcaacatttttttaattttattttatgaatttaactgttaaagaaaataataataattaaagatctattttttcttcatgaatttgataatctcttctaaaaagggaagccaggtttgacaaaagctcaagaacagatctatttctgtcgatggactggttcagacccatattgggcaatctcactcggagattgggtggtgcttattcttcttcttcgtcactcccactcagaaggactctggaattgcttacgttggtcttctttctcgctattacctcctctgtcatttctcaattcctaactaacaactctctgtcttctactcgccggagcaattgtcattttccggccattttcaacttcggcgattccaattccgataccggtggcaaatcagctgcctttcatagactcccttatcctaacggcgagaccttcttccacaaaccttccgggaggtactgcgatgggaaagtcatcgttgatttcatcggttagactgaaatttatttactttaagccattgttactatgattcgggaaattgaaacccaatttgatgttagtttctttggaacggttttattatgtagctgagagattgggtctaccatatttgggtgcttatttagattccattggaaccaattttcgacacggagcgaatttcgcaactggagggtcaacgattcagtcagtggatgtgaaggttttcgaggctggttttagtccaatctatctggagatacagattttgcagtttaaacagttcaaggctcggactgacgagctattcaatcatgaaggttaggtaatgtgttgttttgttttggaagaacattaatagatatgatgatattgatattggttatagcatcatgtattattccagaacagtagttcttaattcagtatcagaatccaattaacttaaattgccattagagatcttaaatttaagattgagactgggaaagatctattactttgagatattactaattgacttggatacacttataatactgtagttctccatcattgccatcaattttgagttagaactggtttttaacaggaattttgggtagaacagaaccttgaaagttttttttattcttcagcttcaagtttagatctcaagaacagtctccctagaccagaggacttctccaaggcattatacactttcgatattggacagaatgatcttcactttgggctcaaagccacgggagaagaacaacttaaggcgtcttttcctaaaactatcagtacgtttgctcaggcaatcaaggtaaaagggaggagaattttatgccttcagttttctggtcagttaaataatgccgttagccttaccttgccgctgaactgtgatttttttcttctttaggaactataccaactaggagcaagagtgttctggatccataacactggtcctattggatgtttacctttttctgttataatatattctccaaaacctgaaaatatggatcaaattggctgtgtcaagtcccataatgaagtggccaaggaattcaacacgcagctccaccagagagtttcccaacttagggtgcaactacctgatgcagttattacttatgtcgacatctattcagccaaatattctttaatctccgaagcaaagaagtacggtacgtccctgatatatgatccaactgttgcatttttacttggaaaactttgtttgtgcactcaactttgatgtattcttgatcatagttaacttcgtagtgtcaaaattacaggttttggtaatccacttgaacaatgctgtgggcattataaagattactatgtacaatgtgggaagaaagccatggtaaatgggtctgagattgttgggaatgcttgtagtgatccattagtatacattaattgggatggtgtgcattattctcacgctgcaaatagatgggtagcccaccacattcaagatggctctctctccgatcctaaaattcccattgctcaagcttgccataatcctgataattcatcttgatatgtttgatggttttacgaggtcatgaaagatcaaataacataattttttgtcatgttcatgaaatatttcattagtcggtcaaaagactcaatttgtaacaccaaatatttcataatcaatcatgttcatgaaagttatgctgtatagtatgcaatgactgcagttgtgatgaatgagtgactttgaaaatttttggatcaaaaaaattaaactttgaaaatttggtcttggcagtcttgagtgcttccaactgttcaagctcatgattttgatggtctcctgttttgtgcaagggttcaatctcagccattggtgagagattctttgaagatatattgttgttgcctaagccttttcctctgtattttgatgttattataaactctcattgttccctcacacaccaaaaaataaggctttgttttcttggtggtgtttgttggaacatcattagttattggtcattgctattgtttttgttctaagtaggggtgtatatcggttgatttggttggttaaagtgtatttttactaactcgatataaatgccgggttgcaaatatctaattgtagcctgtttaatgaaaaaataaaaaaagattaattcatccaatgatttcgttacccatccaaatagatatttattttttattataattagtttttggtgtttaaataattgatttgaaaaataaatgtatagtatacatattttaaaattaaaacagttatagtttaaattaatattaagaacttaaacctaaattaaatataaattgaataaacttttaagtattaaacaacattcttctaaaaatagaaaaaaagatggttaattttactagcttatttattaagcatcacggta

SEQ ID NO: 305403 - DNA, 2859 bp, Cannabis indica
gtttattttcattgttttagagagttcttattaggatgttaaaaacatacatagtagtaaagctagatcctggtaaaataactccaacactcctatggtgcttctgtacagttctggtttttcaaaaggtgaattgtccttgtatctaatttattggccagaatcatgggagcagaacattcttttgcatcttcataattagttatgtctaataaatcagcagcatacttagattgtgttaagtacaaaccaaaggaagtcgtgtaagctttaaatcccaaaacgtaactgactgatccaagtgatttgagagcaaactttttatttagagcttcaatcagtcttgaaattgctgctgtgtcaccacctgttatcaaaagattatctacatagactagaactaataaaagatacccccctgctgatattgaaaaaatagagaagcatctgagacagaagctttgaaaccctaattaataagagtagacttgagagtgtcaaaccaggctcgaggagcttaatttaggccatagagtgatttgtttaactggcacacataatctgatttttcagggtcttcaaatccttgaggttgttgcataaacaccttttcttgtaactcactatttagaaatgcattattgacatcaatttgttggatgtcccaatcatatgtgactgctagagtaaacaccagcatgattgtagtagcctttatgacaagactaaaagttgttgtgaaatccaaacctggtgcttgttcaaaatccctcactactaaccttgctttaaacttattaagagatccatctttgttgtactttgtcctatacacccatttatttgacaatatattcatttctggtgtggaaggaactactatccatgtctttttcctctttaatgctacactttcagtatccattactttcttccaatgaggaaaacttaaggcatgtttcattgtttttggttcttcatagagtttttgtttggaagttgtaacaagatataccttaggcttatagataccaaatttagatctagtttgcatagggtggccttgaggcaaaggtggaggagaaacatgtatgtcaacagcaggcaatatggtgtcactagatgagaaagaaggattggaagctgagttggcaatgggagactaagaaggatgattctcagttggaagaagaggatgagacatgtggaatattgggtgtagaatctgctatgctatttgataattaatgaactaaattgaatatttggcagacgagcatgatctggtatgaaaggaatgacttatgcaagagcaaggtagtttttgtaagtggaaataatggtcttggagggaaacaaggtagaatatagaaactcatgctcattgagattgacacttctagcaatatagattcttcttgaggagtgaagacacctatataatctttgtgaaatagactatatccaatgaagacacacttagatgttataaatgtaaacttgtgttgattgtagggcttgagaaaaggaaaacatgcacatccaaaggttttcaaaaaattataggctagtatggaattatagagactcttaaatggtgatttgtatgcattgactaaggtgggaagtctatattgatgagatacacaatagagacaaaggaatcccaccaaaaatttaatggcatcttggcttgagccaacatggctaaccctatttcagtgacatgcctatgtttcctttcaactcttccttgttgttggtgagtgtgtggacaagggtgtctaaagagaatactcaatttatgtaaaataggttctagttttctgtactctccccctagtctgttttgcaggcccttaatcttattgttcaattgcttttccacaaaggttttataggtgagaaatgtggggaaggcttctattttggtctttaagggatagatccaagtgtatttggtgaagtcatctacaaacaagatataacacctgtaaccttcatgtgtagaatatggggaaggaccccaaagatctgagtggataagttagaatggttgagtagttttgagggatgaactactaaaatgcataagataatttttaccatattgacaagcatcacaaaaagataaagcaaatttgaaaactttttattcattgtttgtaagactttgctaagaattgcaaatgaaggatgtgctaatcgattgtgccacattgcaacaattagattggattctttacagttgtttacattagaagtgctatgaatacaactagtcttattgcagaattgagtacaatagatttaataaaatatttctcaattttaagaataattagtatttttgccctttgaactttcggcattacctaattttgcctcataaaatatacaacttgttaaaaattcttcctaaaatataatagttacataattatgctccttctgttaggttctgttatctttaccgttaaaaattaacatttttaccccctaaactttgactaatataaaattttgctccgttttgttgaaaaagtaactttaaaaattataatattctattaattttagaagaaaaataatttttttttaaaaaacctgacaaaaatattaaattaattaaaaaatattaattttacttaaaaaaatattcctaaaaattatttttaaactttattttatttataaacacgtatcttcaaaaaatcaaaccaaattattgacaatctaataaataattaaaataaactaaaatttttgaagaaaaaattaaacttatttatatttataaactcatatctttacaaataaagaaaaataattaaaaattcaataaaaatataaattatt

SEQ ID NO: 305404 - DNA, 2002 bp, Cannabis indica
taaatatatatctatatgttattaaatctacttttatatcaattaataataataatgttattacttttgtaattgattgatgtatacccatttaattaatattaatttatatatattttgtatatacaatataaatatacaagatcaatataaaataaactattataaattaaatatatatataattcacagctggaaattaagaaagactgtatctatacataaatataaatacttattaaatatcatgacctaatagtataaattttatctattattcttaaaaaaaaaaactgtataactccctatttattttagcatctaagatctttcttattttttttatcataatttgctatatatatttattttgtaattttttttaaaaaatttgaatgttatatacaggccattactcctaatgtgagacgaggcggccgcttaggcccccgacaaaaaaatattaaaacaagagttagttattaacaacttggaggcgaagagttcaaatttcaacatctccatcttttatatgcagaagtctcaatttttatttttgactaaaaaaaatcacagagagccgaccttgagagtatatattttcatcggtagttaggttttactattttggttgaattttgtagtatgtggacggtctcgactcgatcgttacttatagtattaggttttgattgttgtttagttttaattgtgcaaatgaaaacctttgtgttttttagcataatttttatactgttaagtatgtaagtgagttgattaagtagagcattaaagttcgttttggttgtttaggtagcaagaaaatatcttcaaaagatgtacatgtaaacaactgataatattttcaggtctgagcttgttttaacttttgttgttcggagttgtttaatttagtgagaattcttcccctttcatcaaataaaaaaagttcaattaattatttattatgcatataaaataagcaatcgtgtacaaaatatttaaattttatttttaaaaactattctaattttttaaaaagtaaagaatagtcctaaaatgttttattttatttttctgtgataaaataactaaaaatgttatacattatttattcaaattttacaaaacaaattaattaaaatcttaaaatcacctaaactaacattaaaattaaaggaatatattttatttaataaaaatattagtttcaattaaaaaagaactttgctattgggttgtccaacaccttttataagttacatcttacaattaattaataatatttgttattttcttaaattacataaaatttaatacttaattatactactaataatataataataaataaaatattagacgtcaataatattttttaacaatttaaattatatatcaaacattaaaaattaattatttacgatattctcaagaaagtggtaacgataataaacataaaacacgtggcgagatttgataggagaagagaaagagaggtgttcctaagtgggaagctaataaatgattgaggatgacacgtgtacgttatgctgcaaaaaatagtgccctcccgtggccacacgtgtcagtaagtgcagttaatggttcacgtgccagtgcgtggtccccatgctctccctctcacggaaccatctctattgggtcccacacacttcacacatctgcatctccttttaatattatatatatatatttattatattaattagtattttttttcccgaactttaacatgaacaaaattatgctctcttaatttttttagccgttaaaaattatccctaaactattgagattattagattttaaggatttttatctaattttaataaaaaaatctaacatagatgaaaattaaaaacatgatttagtacatatcacagtttgaggggtataatttgataaatatcaaagtttgtggaacatggtttagtacataaacaatcactaaaaaagtaaaattgaatgaaattagaca

SEQ ID NO: 305405 - DNA, 1329 bp, Cannabis indica
tggctcctgtggaggagatataacattctcctccacaggggtatgaaagcaggccgacgctgaaaagctagcatcgtcaatggaaaaagtgccaaccatctgaagatcaactacatcatctctgccatttggactcccctcactcgggttaacagagcacccgatagaggtggaatggttatagaagggttcatctgacgccactttggaaacccaaccatggttacatttatcccaaggaaaatcacgaatgactcccgggtggtggcgaattaactcgagaggtctcacgcaaaacgaagtagatgcaccctcaaaaattcctttcatgagaggggtggatctctcatttatttcataagtgggtttgaccccaaagtcaccaccaaacttttttatctcatataaatccaagctaccaaattgtttggactcttgcaacaaagactcttggcattggaaaaaattggacaaggctaagacttcatcaaggaggaggtcggcctttttcccacaagcagagctatcccttgaaataatagccacaaatttatccttctttaacaaattttgtctaatcttcataaacggcccattggactgcaaggagcccaaaccaattatcttaggcacacgactctctatataaggcccactgaccaaactcttaaaacgtggcccaattaaagaagagaagttagggataggatgagcatcaacattatccattagttgctttaaagatttcggcccactatccccaaccttcaacaggcccactggcccaaccaaggagcccgagttgactaagtcaaacaaatcaaccaccccgtctctatccacaccacacggctccccataaaaatttgaaataggctctaaatgaggaaaaatggcaaactcctttctcaccaccagcatctgaaattgagaaacatcacaaaaagaggaattaacgttcctctccgcctctgccacctttgggcgccactcccggcgaatcgtcccgttagcttttctcatagctggcagagatcgtctagggatcgaggaccgaggaatggcgaacggaagatcactcggaggcagcgctttcaacgcctgatcggaatcctcaatcccttccttctccccatgagcttccacatccaccataaccttcccagaatccccaatcctacccgagaaacaactcaggtaagaggaggaaaagaaaacatcaaccattacactcactggaagtctcggagagaaactgtcttctgtgtgaaaaatagcatcaaacatcccacctaacatcctgtacatagcagggtgtctagcatcttc

SEQ ID NO: 305406 - DNA, 777 bp, Cannabis indica
ttttttttatataattttcccatcatttttactaatatcttatgagttttgggttcaaactcataccttttttttatcacttcatattttagtttcaatttcatatcaccatacatttgcatatatttttttttggacatttggtcccatattagttaatatatagtacgtaaaagtggataatgtttttttataagggagggatgaatgtgtaaaggattttaatttattaattttttttttatttatttttttttgatgaaatggtataaagttgattggattgttgcaggtctcttgggaaaattgtgggagacaacattgtacgaagacatacatgtaacatgtaacttgttcaatcgttcatggtatggtgaatatgagtcaaattcttatatttcatttaacatatagtaaaattcattttgattataatccatatatatttaacaaaggttaggtatccatatatatttttataatattagtctagtagtgtagaccatatcataatgcaataacatgtatctcaattaagatattactatatgttgttaattatattatctttttcaatcacaattttatttatagtacaaattcataagatttgcaagtaggggtagacaacatctaaaccctatgaaattataacgaattaattcaattcactcaattactaataaataaaaagatattcaattaaaattagattgaattaatttattgtaaccacacaacaccaactcaaaaataggcaaaataaaaaaaaaaaaa

SEQ ID NO: 305407 - DNA, 6889 bp, Cannabis indica
gaaatcacaaacaaacagaaaaaaatagaaaaatccaatcgcaacaatcctatcacaatgtagtcacgatcgaaaccagtcgacaaacgcaggaaccagagaaattgcagcaaaccagtcgatcgacaaacgcagaaacaaacgaaaccttgagagaaactttcacacatgccagctggcaagacttttttggagttaattagagaaaatctgatttagtatcttgtgtttttataaaaaacatatttggtactctgtgttcaataatacttaattggtatatatttggtacctaagataaaatttaatcaatacaactttatcattttaactaaataaattttagtttatgtaattaattaaaattttagataatttaattgtgtaaataaaattttatcaaaaaaaatttaaatttaaagtgacacatatgtatgattttaaaatatagggtaaataaatattattaaaatacaaaatattaaaaaaaaatatatatataaagtactaaataaatattattaaaaatacaaaatatttgacgtatttagaaaaaatataaggtagcaaatgtatagacacccaaatgaaaattattaaaatttgtttctttttaaataaaattttgcaggtaggtcagtccccgcttttctcacatctttcccatactaacacttagctcaaactacaaacatcgctcttcagattcacacccctttcttccttcccactctgaaccttcacaaatcaaatccatggcgtaaatccaacctcgtcctctgtgcttcctttctctttatcttatctggtcactcacttgatctagtttcctttagcatttctacaattttcgtttttatcgaaaccctagaaaatgtcaggagggtttttccgggtaagttttgtttgctggttgtatttgaattctccgttttaatctcaattactcgctactgttcaaatatctttatatacgtatatttgttcggattgcttattaaaaatttctgagttttactatctacatttttactttgaattggtgttaaaatgagaaatctgcatgagttttgttcttttagggtacgtcggctgaccaggacacgcggttctccaataagcaggcaaagttgttgaaatcacagaaatttcatcctgaattagagcacttggttcgtgtttgttttcttcctgatttcatgatgataatttaatttttttttagtggtttgtgtaataatttgtattgcggcattatattgtgggtaatctcagaaaatttattgaaatgatgggtttcgccttttaggtttattaattgggcgttgtatcctatgtaggtggacatgacaaaggtcagtgcagatgttatccgtccgtggattgctaccagagtgactgaactgctcgggtttgaagatgaagtgcttatcaacttcatttatggtcttttggatgggaaggtagtttggttttagggcgtagtgtttttttttttcttctttttctcaagagagactagttatttgctccgttattatcgcaaactggatttagtttgtatgtaccatgttccaactttctctaaatttgcacggttaaatttccgtggatatctaactgagcaagacttgttctattattttgtatttttttccaaattccctttgtttgagaataatggttttttgtatattgatttctgtgtgtagtgaatttatgaatcagtcaaaatgtcaaattaaataaagcctctgtttttattcaacaggcagtgaatgggaagcaggttcaaatttcacttactggatttatggaaaaaaatactggtaaatttatgaaagagctttggtcgctactactgagtgcccaaaataatgctagcggcgttcctcagcagttccttgatgctaagcaagaggagactaggaaaaagaaggttaaaacttgtgtgtagtaatgttgctcttaaatttcatgtgcaggaattatatttttggtttatatttatattttgattctttcaggaggaggctgatcggattgcaagcgaaatccagagaaagagagataaggagagtagggatcttgaagaagagagattgaagaagatggtaatgttattatgttcatgctagacctgaagtctgtggaaatgagttttcgtttttaactttcgtttgtgttttcatgcattcagctagcttctgcaattatttgggttcattcctttacctcaaactactgtaggaaggaagggttgaaacaaaaccaagcaatgctgctttggagccaaactcaaggcacaacttgcctagggattcaagtgatcgtcctgaggatgaagtaaccgaaaagaggaatggcacaagagcgaggaataggtagatatttatattaccttttaatggtgtttctatgacatttcctgtttgtgtatgtcttcttgttccttagacgacaatacatcggattttaggaacatagattttcatttattattgttgaatatagcagaaagtcattctaaaaaaaaaccttgttgtcctttttaatatttcaattgaatgaccagtggcttgatgatgagggctttgagggatatatatttatatatattagaattagggttgtgatgatgcttttattgttaaggcacgaattatacactatatgaagtttacacctcaaaacctatgctttgataatagagatttatgattggtcgattactgtgtatgcattatagagatttacagtttgaactttgattgctgggttgattaaaatgggttccaccaagcagtggacttatttggtgtatacactgtgtatacatttttgcaagatagggattcacagtttgaactttgattgctcggttgattaaaatggttccaccaagcaaagattggcaattttctgcatttgtcaatgatgtccagttagtttgagattacttggtttagatggtactgatgaatggctgtaaatttgcagatacttaaaagaaacattagaactaataattgagttacctttcatacaggatttcaagatctcctcattcagcaggccgttcatcgtcttcacggtaattgctccggcttgctcttattgtctttattatagttttgcacaaaaacatattcacaccaatcaggtttatagaaaattagcatagattatcctccaaggtctatcaacaagtagtattataataccaaaagttattcagagtaggtttttcttatttttcaatagaagaagccgatttaaacttttttcctttgtatttttgagtttattgctggtttttaacttagaatagcataacaatgttttgcttttagtcatataggtgttttagtataattttgtttcaacatttttaagattataagatcttaccaaagctatgatttgttagtgaaagacataggtcaaagagcatgtcccgatcaccagaagcacaaggtcggcccgtgacctcttcctctccgagaagacggtctattacacctcatcgaaggcgttcacctcgacaatcaatttctccaataagaaaaagaggactaaattccaagagatctcgatccccctctccatctaggcgtcgagtaggttctccatatcgacatcgatcaccctcatttgaacatcgtagatcaccaccacctttgcgccgtcgtagatcaccatcgcctttgcggcggcgtcgatcaccatcacctatgcgtcggcgtaggtcaccatcaccttttcgtcgacgtagatcaccatcaccttttcgtcgacgtagatcaccgtcaccttttcgtcggcgtagatcaccctctcctgcacgtcatcgtagatctccatctccagcaagacgtcgtaggtctccatctcctgcccgtcgtcgtagatctccgtctcctgatcatcgccgcagatctccatcccttgtgcgtcgccgtagatctccatctcccatgcatcgtcgtcgatccccatcaccaatgcgtcatcgtaggtcaccctcacctggacgacgacatatatcaccatcccctgaccctcatagatctccttccccagtacatcgtcgtatatcaccctcaccagtgcgacgaaggtcacctactcctatacgacgtaggtctcctccggtgcaccgtaggttgcaaagatcatctactccagaagatgagtctccatctcttgcacgtgggaggtcacccgttgctggcaggaggaggtcaccaattggtggtgggagtaggaggtcaccagttggtggtgggaggaggccaacccttgatagtagatcaccatcaccttttgaacgaagttcttcatctccaagtcagcttcgttccacttcaccaattaggagaaattctcttaagcatcagagaaaatctcctatgcaatcacctagtggaaggatgaggtcagtgacacactacttttgataatttaatgttaagccttttacatctgttgaactgtctttcatctgataaaattacttttgataatctaatgttaagccttttacataatttgaactggtttttcatttgataaaatttgttgtgtagggattttacttgtttctcttattattattgtttttgttgggagtatgaggttgtatgatctaactgcttgtcattttttctcattttattaacattataaagtcagaactatttgataagctacaattttattggacttacaataattattctcttatggcacatagatctgctagttctatgagatcactgcaaagagaatcaaggaatcaaagtgattcccataacagaatttcagccttgtccccattgcctgcatcaccgtcagctggaaggagtactagcgaagaaaggaggtatttatttggcttctcacgtgtatgcgtatcataaacacttcgactgtaattaaaattcttctgcagctttattatacttatgttttatttatcatctagtccatatgagagctctatgaggcaaccaaggggccgaatgtctcgggatattagctctagtcctccaaggaaaccaagagatcagaaacttcacaacgacagtacagagataagtgaagccaagtaagaagcaaagtgttttcgaattatttttatactgtttttggcacagagtatttagttagtcctgttatttattctgaggacaaaaacatcctgacagggagaaaaaaggaacccttgggactcctgatcgagataggccttcgaaagtgtataaggaacctctgccagatgatggaccacatgcgttgtattctggtgaaggtagaaaatctgatgacaagggccgctctcattcaaaaaatatcaaagagagcagtcatgagagagttaataattatagtgggtcctttgattcagcttctgatgaaaataataaccatggagctggaggtaaggaaaagagaaaacataaaagatcagaaaggcgagaatcagcttctgatgattatagctctgattctgaaaaggaggacagaaaagaggctaaaaggagaaagaaagaggaaaagaaattgcgtaaagagaagaggcgacaaaaacgtgaggatcggcgtcgcagaagggaagaacgccgggctgggaaactaagaggaaagaatcaaagtgatgcttctgcttcagatgatgaatatggtggtaggagagattctcaaactagtgagaatgaagagatggagtctgagcagaaaaagcttgagattgagttgcggaagaaggctcttgaatcacttaaagcaaagaagggcatcagtcaatgaatttaaatatgctgttgtggaatattaagcttctatttcgtttttctgatactataaagcaccaactttaagaacatttaggaatattatctgcttgattgagagttatcaatattttgttactgtttaatgcagtctgtttactgctggcagctgaaatggataatgaggatttcccgagcttaatctcgtgggtgcaactttatgcaggcattgctgctagattttctggtaataactgtcttccctttgtcgggaaatttttctgttgttaaaacttaatgttgcttttcaatcaatatggaacctgttaatgttattttttggctgtatattatttgaatttggatttctgtacgtctgtttttgattgggaatcagagtcagaagtgatatgttatagtttgtttgaagttcagtgcaaggaatttcagtcaataattggctgatcttgttttaataacttaaaaggtcttggtggtttcattaagggtcacactaagctgagtttttctgatcaattggtagatgaaaatgtcatggttgagcaggcagatcagcggtttgtacatatatgcaggcattgctgctagttttctttcttttacaggctcgcccgtcagaagaacattgtttgtgcacctcttatgtaaatttttgtttagtctaaggcttatgtggctcttaccatgtatataagcagatgctctgcctttactgtattttagttcaaaattcatggttggccactctctagtcaaaataataaaatataagtcaatgaataaaaacatctctatactactatgaatgcgtgtcttactagaaagtaatggcattttttagtttatatatttttttgttagtttataaaatatttttatagattttaaaataaatgtgatttgatataaatatttttatagtttgattaaacaagatgatctttgtaaaaaaaaaaatgaaactctttgaaaaacaaaataaactgctgcaaagtatagcatttataccaaatttaatgaataatcaaccttcattaacacgcaccaccaaaaaaagtccaagtcactataaa

SEQ ID NO: 305408 - DNA, 2593 bp, Cannabis indica
gtcaaacgttcggccaatatggctgctcacagtttggcaaagtttgctttaggggtggatgaggcttgttcttggtatgaggaaatccctcctcccatttactctgttattgtaaatgaatgctctttttaatttataataacaagtaattttactcaaaaaaataaaaataaaaaaatactcattattctttttaaaaaaaaaattagactcaaatattttttttttaaaatgacaaataattatttgttaaaaataaaagaaataattttttttttttttgttctttatgagattttgcagcatcagatttttaagataaataaattctcttgttctgcttggaaccagtaacaatgtcaaacccattggagagataccaaaagctcggtttcagagactcattcccgagaatgcatcgctacccaattatctgtaaagagcttagcctcattatcagaggcgcttactctaaattccccaaaaatttacaagccctaatcatccaagacaccctcaccgcttttcgtctccttcctgggtctgtctctctgtaatccctatatagtaattgattcaatttgaggattgcaaatttgccttaaattgtaggttaatttagtatagtttgcagtgatcttatatgtttttatttctagaatgcagacgcgtacggccgtttctgcagctcatcttctctttcagagcgccgaggcttctttaccaaagcagaagaagaatttggctgtgactgaatttaaacatgccatggtttctcataggaggcgctgtaaaacccgccaagaagaaaaaggtaactttttattacaaaccttctttgattttttattaggaagataccccatttaatgtttttaatgattttgttcatattatgattgtagcaataagaatcccattatttatttatgatttgaaactctagtctatacatagtttcaggttctgcccagctgccagaagatgttcttgttcatgtcttcagtttccttgatatgccatctttaattgctgtttctcaagtttgctggtaatttttagttctttcaaatttgtgcatattctttagtttatatgccatggtgaacaaaatttcgtttacacaaaaaataaatgatgtatttgtgtggttgtaatatgtggtttcaatttttggttggatttacttaatgtactgtcatgtgaattgcatagcaatagggtagaatatatctcgtggaacctcgttgtagggttcaagtgggaatgaaaacaaatccaagaagagccttgatttgaaagttagtgacttaacttttcgagatcgaatttaactcggttgctcgtttaggttgtggaatatggcagcaagtgatgaccagctttggcatgcccaatatgttacattttttgggaatgctcataataatagattggagattagtgggaaaaaaggattagatgttggagtcaagaaaaaggcttcattacagagagacatggttgctggatcaagcattcactggaaggaagcctttagaacaacatatagaggtaaggtaatgtcacatgcacaactgtgaacacagatcatacccacaaatttttggggtatgaaattcatttattgcagtagttcattctggtttttgctcattcgtctcgctatcacattgtgtttggggatttttacagttgctacatatatctgctttgatttcaggctcgttaacgaaattaacttctaataggggatattgtgggaactgtacaactatagtttggcttgaaaacatgaaatgttcaaatgaacattgtcgattatcatctgaaaatcaacgagtcaagcccgtgtcctcttaccaggttatgtatcagtttccatttattcttgttgttgatgaatatgatcaattaataaaactattgcttattcattcccaggttgttgagtacattttagatgattcaataacgatgttatcctcttcggatagcgacagtgatccagaggaagaagcttcggggtcaatgtgtaggttatgggcttatccaaaactcaggtatggcaagccaacaaccttcagcatagaagcaaatcagtactagattgtttctcagattaatatagcatgcttttttcctactgcaactttggtttgtatcagcaaaaacaacgtatcatttttagaaattgtgcaaaaatatatatatatgtatagattagtccttgactaagttgaaaaactaatatggagggttcaccttcaagatgctttatacaaacaacaaaatcaattacttccaacatcgtatttgtacaaaaacatctttgtattttgcaattactgtaattttttatttaactccgaaccctcgcatcagttttatttatttatcttttgaaatatatcatcaaaaaactctaccataaatagcattttaagaacatctccaatagaagacatgtgtaaatttgacacaaaaaaataagtttgtgttatgtgtagctcactatttataattgtgttctaatgcacaagatgtaaaaaaaaaaaaaaaaaaaaaaaaaaataaattatattgatggtca

SEQ ID NO: 305409 - DNA, 1174 bp, Cannabis indica
atgagtgtaaaagagttccaagactctggttgtaatgtgctgataatcaataaagaatacatttttactgccattgaatttcgagatacgctgttctattttactcattttctaatttaaagttttatttctgatttaaagtttgaatttgtagttcttatgagctgttacaaatcacaacaattagtttaatatgaatttaattcacctcaaagtatatataaagaatgaggcggtttagtttggtttgaactacaagcgaaaattttaaaactgtgactgaagtatagaattataaagtcttcattgaccaaacaattgacaccaaattcatttagtctagattcgttggggtttgaaactatggattaagaattatattaacaactttaactcataaacctcattgattcttattacctttattttatacttttttttatttattaatgttgggataattttgttaatttaccccactaaattgattggttggaaaatgtaaaagattaaatatgtctatatatatagtaaaaaagaaaggccaaaccaaacgtgaaatagattaagttacatgttgagccagtattaatggcatctttgcactgtaaattaatagagccaccattaatgatctgttaaaatatcaaattaatgaataacgtgtcttaatcatatcaatatgatgagtgtgacataagatttatatatttatcatctgacatgcatgccagtactattattatttaattttactaaattctcactgttattgttacatgcgaaatgtaatgaaattgacattgaaacatgtgacaaatgtcatattattaattaaagacaatatatactcactgacagaatcataatatctcatttaagagaccaaaattaagtgtattcatccatggacaactcattccctttgccacattctacctcaaagaaaatacaaataaaataaacccaatattcctataatcacaacattcaatttcttgtccacttccaaaaaataaatgaagaaagaagagggaatcggtctctcattaattaaatccaaatttcagacactttaggccatttgtcaaaataagtaggaaccaaaaaactgtagcataaattgatagtcaacgtgtgttttgtttttcctttttctttttttttttaaaaa

SEQ ID NO: 305410 - DNA, 1953 bp, Cannabis indica
aaaatacaattattatgtattctgcgttcattgaaccttataaatatatgtttacacaaagctaatttttatgttctccagataaaagaaagggggaaatttgcatctagacttataaggcgtgttcatgttgtattagacaatacaataacaatcacagaaaaacctaaacttgccgcctaggaccacctatataatagcattatagctaatatatgcaaaattgtttatatatggagagatcagagcaatgcataccgaatatttctcgcagatggttttcatgcacattcctggtgagagcatcaatgtgaagaacaagtgactcatggataggagaaagcttcctgaaaaccattgcaacactcgttagtgtatacaaagataatcacacaaaatggaaaaaggaaagaaaaatcagttagtgggtagggaaacatatgcactagaactctgatgaaccacaataagaataaagtgctatctattttttggcaaaaaatacagtacataggattcttgggatattagataattcattaaaattgaagtatagaatctggcgtactgaaggaggtttaaaagcacagccgcaggacaagaacattaactatatcaaaacatactaactgcagttaaggtgccaattttaaataaagttggagcaaacaaagatgaagtaacttcctctagagaattcctcaattgaattatagactaagtattaaccttggtggtggagacgcctttttagattgtggaggtggggagcgaccacgtcgagctgtatcaggactgcatatgacacattgatttagactcaaagttgggtcatttaggcaatgtggtatggtaccacaactaattccataaagaacaaagccaattctaaaattttgcaaacccagaacaaaaatcaacaacaatcttacaaaattaaacttaagattcttttttcataggaaaaattcgataaaccatttaagtagcttaatttcgacatataatcacttacattcatctctacacttctgtaatttgtcagcaataaagaccatatataaccaaaaccctagaagaagaatttaaaaaaagaaaatgttcaagaagaagaagaagaagaaaccttttcttaggtagaggtgggcttcggctgcgagagctgccacttctagaaggagaagaacttgaagaaaatgaccttgagcgagatcgagagcgggagcgggaacgagaggaggagcgagaatcggagcgagagtaggaacgagagcgtgaggaggagccagaaatggaacccgagggcgaacgacggcctcggcttggcttcgccatgggagcagagagtgagagcaagagaggaaccctagataaacccccaaaatccaaacaaaatcgagagaactgaggaaggaggagctgaacaccaaaacccaaatagtttatcactgtaattacttttataccaacaataatacgacatgtcgttttaatattattattattatttttcttcttctactcacttaatgggtgcttctattttcacactctcttataattaattattacacaattatagataataataaatttaaaaactttatatattgatctaataaaaactttacataaatatttttaatataataaaagttaacatattatacttcatatcattttgttcttatttggagtttagagaaaataaaaataaattttataattaatttttctttaaaaatatggtgatgtatgtagtagaaagaatattgtcaagaaaggaaaacaaaatactatgttaccaaattaaatttggggaattatctatatactgttttttttattttttttttaaatttactgtttaggtttctaaagtggttgcagcgctagttgcaatagagatttctatacgattttttattgcaatttaggttgcagtactaattg

SEQ ID NO: 305411 - DNA, 1354 bp, Cannabis indica
taaaatatttaaaattccgtgaagtatttttataattttttttgttgtatttgtgaaataatcttaagtaataatgggatttgactagctatgtttgattagattacaaaaatgagataatggatgcatattaagcatccattttaaaaaattgtttcaacaatgttcagaaataccatatgttgactgatcagtggtgttactatttcaccacttccacaacgaatgtcttatcttttcccctcataatttctagtacattttatcctctcaatagaaacaaaataaaataataatcattataaaaattagcaaggcaaaaacatgatgctcatctctctttaatatagtttgtaaatgaacaagaagttaggtaaagtgatagataaccacaccaacttaattacttccaaagaagatactatatgttatgttatagtgacaagtccatgttttatatatataatagtagttggtggtgttatggttggttactatgggcgaccactaaagtagctttaagaaaatagataggaccacttgtaccaagaagttcataattatataataacttagtgtagtgtaatttagattgttgtgaactgaggggaataataaattgcagggtcacgtgggtggggacttttcatttttggcccatatataacacaacacaatatcaacaccaacaccaacacactcatctctcttctttctttctctaatatctcataaattgagaaaagaatatcaatatagaaaagatattaagtaataagtattgatagtactcttgagttgggtgagaatatatagtacatacaagttgatatataatagagaaaggttggacaaaaaataggtgagagtgagacccacgttgttaacttaagtacttaattattattatttgaagtctctgacattaataagttaataagttatttgtcatttctaattactattttcatataatataatgttctaataatatcactagactataaattgtctttgtcccaatatttgtttttacttttgtttttgctgttggaatatattcctgtcttttgaatcagtgtattgcagtgcagaaactcttcatttagttacaagaatgaaaatgaactatacaatttccctgatcttactctcaacaagaaaacaaattttcacattaaatttattattactggaattgagctttcattggaagttagtgttgacttttgctgcctccgttcttccactttattggattgactgtgtccgttttgggcctaagtctattggtcccgttcttctactatattggggttttaaatcttcacggttttttttttttagtattttt

SEQ ID NO: 305412 - DNA, 2139 bp, Cannabis indica
cttgatagtttttcatttaagaaactaatttttacaattcaagaaactggttttagattatataaaagtaaaatttataaataaaaaacttataataaaaaaaaaaaaaaaaaaaaaaaaaagaaaagacaaaacacaataacaaaaatgaagcaacctcattacagtaaaacagaggtgcttaaaaaattggttaattaggatttttaccccctaaacttaacatgtaccaaatcatgctccctgaactttttttgccgttaaaaattccccctaaactattgagattgtttgatttaaggacttttatctaatttcattcaattttactatttcagtgattgtttatgtactaaatcaacgagttcaaagatatattgctagacgaatgcaagttggctataaataccacggtgaacacttgctctggtgtcacctgggacttgcacgtcagagtggatgcttcggtcttggatggtaaggctggtattagtgtagtggagttgcaggaagatcaaaatgaaggttgggtgcttctgcattctgaggtagtggagaatgtgttaggtgctgagttattggcaatctataaggctctgtcttgggctgttgagaggaaggctaaatctgtgttggtggagtcagattctctggttgcagtgaaggccttaatggcaaaggagttgtcgtttgcttggggatcttaccctttgttttctgcttgctgcaatttgtttgtttcttttgatcactgtgttgtgtctcatatctctcgagatattaactcgttagcagatgcctttgctcgctatgctagaatgtcgtgtgtgaactcgagttgtttggttagggaggtagccccctttgtggctactttgttttgagtgtgttttcttttcaataaaagactttaattaccaaaaaaaaaataaaaaatcatgctcactagactttgatatctaccaaattacaatcatgttcctccaactttgatatgtattaaatcatgtcccctgaactttcatccatgttagaatttttttactaaaattggataaaaatctttaaattcaacaaactcaatagttcatgagatctttttataataaatttttcaaattaagaagttgaatataaattttatgtgaagacacattaacataatttgtccccaatgtaaatacataatattgcaccgtccgcatctatagttttcttcctgataagagctgacgaatcccttcatatgaacccagagaatagcatatcatgcctttaagctcttaacttttctagaaactcccttttttgttctttctattattaattataacagtggtatttaagttccaacttgcaaaacttccacaaatgaagaagaaaagaataaagtatcataatgttactttaacataacgattaacgaacatacacgtatctatatataaccaaaccaaaccacatatctatctacaataacgacgtcaatctacattgtcgtttctttagatatacaaatggaattggaaataacggcaatagcagatcacggcatattagggttgtcatcagagagtttcagagctttggagttggatgaatttgggaaaacgacatcatcatcatcatcatcatcagaaactactattccccaagctttagtggtaattggttgtgtgcttgagaaatggattaggaagaacgaaagggtgataataagggcatcgagattgaaagatgaggaggccatttcgatcttccatgggtccaaagcacccaggttaagcctacgacagtatctggaacgcgttttgaagtactcaaagtgtagcacttcctgcttcgtggtggcctatatatacatacatagatattttcacaatcgccctcacttttcactcacttctcttaacgttcaccgcctcttcatcaccgcacttatggtcgctgctaaattcctcgacgatgagtaagacatatatttatatttcataaaataataatatatgaatattaagaacaatatccatttcgctaaaacttaattataacctttgtattgaattctgaagagaaaaatattaaaattaagaaactattaacaggtagtttatttaggtgcagtttggtaacattttt

SEQ ID NO: 305413 - DNA, 1223 bp, Cannabis indica
tttcaaattttttctttggatttcatataaaccatatgacctttgggtgaagacagcaagctcttacctatatatacatatatttatatgaatatatataattctttatacattctatactttcaaatagtgtgtatgtataggtttttatttatttatttattctaggtattggtaacaatatatattagttatagtaaaattttcaaattgtaatatataaacgcttaaaataaaaaaaaaataatagtaaaatttttatataaatataaaaaaaaaatagttaatttattgtgttgaaataaagttacaaactttaattagtaaaatcattttgtttttaacccaataaattaatttgagaaaaaaattatgaatccctatatgtaatatgtattgttataatatattgtatgtatgtatgtatacataatataattacatatatttgaatagagcattgctattgggcaccagtggtgcctagcaccttctaaatatgtcgacttacaattggctagcgatactccataaaaattattatattaaactatatgggacccgatacttaattgcactaatagcgatattgacatgtaggagggtgctgccctttagcatttctcatttgaatatgaacattctttttttaaaactagttcttcttataataggttaattagtacacaagaaacaataaattatttttggagatttctatcatttatgttgacaaattcctagatgagttaaaattcttggaaaaagaacttttctttttctttgtttttgttggtttataagatgcacatagataaagtaaatgggctccaaagagaattactaacaaaaaattattagtgtttagtatctttttgggagtcatatcaatattagttcagacctcatataatttaagaaaataacttttaaaaaatattgttaactaatctataatgtcacctataaaagatactgggcattattgatacccaataatagtctaaaataagaaaagaaaaaaatcttatttttttatccaaaaaagaaaaagcattgttgaaagtaaaataggtggtccatatcaaatattcataccgtttgccaaccatctttcacattttaataatggtggtcttccaaaatgtaattgaaaaatcttgttagaaaatatatataatttaaaatctatctatttttactaataatgattgtaactatag

SEQ ID NO: 305414 - DNA, 1530 bp, Cannabis indica
acaaaagtggttacagaacgcatttttatttttgaaaaataaattttttaaaacaaaaattttactttcatttgggaattaaaaaattaaaaaataaaagtgttaccaaacgacacctaagttaataaaacaaattcaaaaggtacgtaacatatttggttgtttgtttcttgtgaattatatattatatattaagtcaatattatgtttaacttattaattaggtccgtatttgaatactcagttttcatattatataataaataaatatacatatatgaacatttttcagatacagtcggagaaaataattatataattaacagttaattaattaacaataaaccctgctatcatatatgctctcaataatcgttttgccttaatttgtacattttccaatatattaaacaagaaagttggaatgattcaattcaaaaacagatcatatatatatataagccaaactttggtacatttacatcaattaattgattcttttaaaattggaaagaaatgaattacatcatcactcacgtgtatatgtgggaaaattctagaaattacccaaaaattattacaattaaaactaattaatttttagacttaaatagttgttttgtgttaatatggaaaaaaaaaaaaaatttattttgactgtcgtggtaagcaaaccaaattcagtcttatatttctttaattatgtttcttacgtaattaagctattaaattttggtttgaaaagaaaactattaaatttaatttgaatttgaataatttttgattgatggaggaaacaatattatattgtcatgggaaaatacaaagacatatacaatgaataagattttattttatttttcttaaaaaagatgtatttgggagtgggtatagctagacaatagaacacgcaatcatttgtcaagtattctaaaattagagaatgagtagaattatagataatattttaatgagaaatgatttgtcaggtagtgtaaaaagagttctacaatatatatacatatatatatacctgtggtattgtataggtacaaattattggatcacatacattaacttataatagtgaatgaatagaaaggttcttaactattgattagtatggttttatttggacgttttataaaagttagtctacattaattacagggttgtattgttatactatacttacgatgcacattttttctatggggatggccctacggggatccgctcctaatagaatataaattctttgtctaaatagagaacgggacggggacgaggattattttttgcatctgaatgttaaacgaggcagggacggggatcacactccctgtcccgataagaacccgtttagtattttattttatatttctagtaatattttataatctatgttcgcattttttagtatattactatattttttatgaattttaccttgtgttttggataataattagtttattgaataataattaatgtgtaatattttaattttatgtagtttaatatttttgt

SEQ ID NO: 305415 - DNA, 5279 bp, Cannabis indica
tttatataaatatatagatattatgcactgaaatatttgtaataattatatataataatgtgtggttttcactaaaactattaagatcaatgaattaattaattaaagtatgtacgtacgtagtacggcgggacattaatttatatgtaaattatttaaaaggaaaatttcctatgtttttttatttattaaataatatatctttaaatatataaaaaaaaacaataatctcaagtccccacaaaataaatcttttttttttaattctcaaaaaataacttgaattttaagcaagtcaaaataaagacctaatttattatttgtcatctccaaagtctaccaatttataatagaagtactactcttgaattaattatcaaaaaagaaaataaaaaagtgttgcttcaaagaaagaaaatagttcaaatgtattatattgttttgacctttattaaattctaatatccctccaaaaaaatgtatttatataaaaaagaaaatagcaaaattacacaaaaaaaaaaaaaactaataagtactatatgcaatattaaataaataatttgaatatatagtatataccatttctcattttagatttgttttaattatttgttaaaacttgttatactttgaccaaaattggtgagtcatatttaattttatataatacaaatatttttttttgaaggctatataataatacaaatagttaatttatataaacctcgcatattcatcataataaaataatatttatagcatgattacacttaatcatatgatcaatcatgcatgcaaaattaaaatatatatctatatataaaaaatatggtaattattttatatattattttttaactttgttcttaaatttataatttgaattgctctgtagtttattactacgtgaatttcagttacgattaagttattatgtgaatttttataaaaattgcagaaaaaactaatttaaaatataaaaatataaaaactcataaaaatatatataataaattaattaattaataatatacctgaacggcgccgtttgattgattagaagtgtccctaacggcaacttcccaaacaggatgaccattcaaaagtttaccatactctccacacatctgattattactctcattattgagcaatgttccagtgcggtcgagaccagcgtaacgaatctcaaccacctttgaattgaacttgatgcacttgagcacatcaaagtgtttggcataggaatacaagtaatccaagacctggatatgtgtaggaaaagtagtgttatccctatccggccaaggaaaatccgagaactcgaaatcacaacggggtgtttggagtttcgtacaactgtacgaacagtgtttccaaacaccccctatgaattccgtagcctccaacacgacaggattgtgtttggagagctgtttggctgcggctataccgctaatcccagctccgattattcccactttagatacttgcttaacatgatcatttttctcatcatatagcatagccatgatattgaattgagatgatatatatttgtatgtatatgtgtgtaagtataatagcaaataatattatgttgtagtagtgtaatttctattatggggtgatctatcatctatttatatagttgttgagagaagactttttcaatttttatgtagaccttatattattatttgaattaataacacaaatatatttcaattatttattaattttttttttaaaaaaaaaagaaagaaattcatatgagttgttaggtattttccttaatattgtttacttatcttctaccaagtcttagtagtgcttgtaagttgtaacatatataatgtatataaatattaatataaatataaaaatatatatagttgtatataagcatatgtcacactacttaaaatttgacaaattattcagaaaatatttatcgaaggtattcaaaagctcaaccggagtagtatatacaaaaatgttacgatcagaaaaaatcgagagcttctaaatctaacaaaaaaaaaaaaattaacttttagtgacaactttttaatatgcaacataaattttatgtgattaaatgtgatttttaattataacaaaaatttacttgtgactaaaatatagtatttaaatataaattgccactaatttaattttggtcacaataaattataatttttgtgactaaaatacttttaattattaaatttttagtcacgatataaaaataataatttattattagttacaatttttttacttttaattacagttttgattgctgactaaaaaagtaaaaaattttgttatatgagagaaatttttttattggctgatcagagaagagataaattaattaggtattattataattatttattattattgggaaaattagttatatgtggtctgcatgagattgtatatgaaacacgtacaaatatgagctgtgcatgagatgcatatatacatgatatatatataaatcgatcgatgtaatggtagggtatagtatatatttatatatatatatatatatttacttttacttattttgggaaaaaattgagggtactattttcgttgtattcatacacacatacatatattaatgctcattttttttttttttagaaaaaaaaaaggttgaaattgtgtatatgtgttaatattcatgttttcccattacatgtaataattcatgtgggggcttaatttgccttacaataaaatcttatgtgtgggctttgactctatatatgaacttaattgtatttaatgcttctttgccacttttaagggaggcaataattctcgttattgtattgttatgtattgggtttttaaaactgtttttagatttctgaaactttaaaattaaaatactatatttggataatcagtaagtttcagtttttaattttggaaacaattatggtagttttttcaagaaaagttttttaaatagttaaaatcaaaagtagaagttttttaaattgtatatatcaacgatcactaacatatgatattttactcattaattcatgttatgttacttttatacgacaaaaattaattaattatgtatagatatatagttattttattaattataaattatacattttgtattaatttcaaacttaacacaattatatggaataataaaaatataatgattgagattacctcattagattcatgcacgtacgtacgattgcttttgtttttttttttatttaatattccatttgactagtgaatttaatataagtaaaatttgctgaattttaataataataataaaaaaaaaattagtaaatatacaaagttcaagagttcatatacgtagtagatagattcgatcctctcaagtatattaattattaattaattaatgcctttgaacaaaaattgtgtgttgacttaattatttgtcttagattaattaatgtataatataattaattattagggtttcaagttgtgcatattgaatatatatatatatatatatttatttaaaaatgacaaaaactacgtaggtgtatgtatatatatactaactactaagtgcttattagttatattatattaaataataaatatataagaaaagtgaacacaggaaatatcgaagaagataagaaattaagaaccttaaaagaaagttccttggtccattatattatataatattaagaaatataataatcactaacgagtatatgctatatagtatattttgtatatgcatgggtgtatttatagttcatatttttaacttaattaagtagctattttaatttacagtgctacaaacaatcaattgcatgcattatgcatgattgatttttttaagcaaacaactaattattttaaactttatatttgatattatataattaattttttaaaaaaaaaatatttgaaatatatattataattgcagtatatattattgggtatttccatagtacacattcttaaatatatagttgtttcgataggttttttagtccaatttttttttcatgattgtataaattttcaaaaaaaaaaaaaatagatagtagtttacgatgttagaaataacgtttaaatattttgttgcacgtatgactgttttcgtatacacgtggtaaataattatttgaaccttattttttacactataaattatttagaattttttggaaaatttacaagtaatcttaaatagctacaacatatgcgattatgaaaaaaaaaattggctcaattaatttttttaaaaaaataccaaaacagacaaaacatctaccaaaacaatcttttaaagagggtgtactacaaaaatttcatatactattatgtaaaataaacacatataaaaataaaaatcccttaaaataaaaataatagggtaagtctataatacaccttttaaatgagtattttggtcacccttttctgttttagcatacaaataagttttttagtcttttttttttttgcatgattgtgtaagttacaattattaattatttagaattatatatgtaaattttaaaaatatcctgagtagcttatttataatatcgaaaataagattttcatattgtattgcacgcgtaattattttttcttatagctatgataaataattatttaattttttttttataaataactactatgtaactaatcataacaaaaaacaaatttaataattgtaaatgccaaaagagaatctaccaaaataatctttagtgagtcacaatttccaaaataataatatatactggcctacaaattaataaactcccaattaatttattcaaaaaaatactaataataaactcccaattaatttacgagtcaattccatgcagagggagatggatgatagtcttttgtgaccaaaattgccacgtgtctaatatgtgtagtgttgaccaatttcggccaagaatttgttttctatatcaaacatttttgctttttcaatagaaattttttttactatttttataaaatcaagtggggaattgaaaaatattgaaattgacacatatccatatcgataattattttgacatgcacatataaataatacaaattcgtatatattggagaaagagagtagtttcgtgatccgtaaggagatttatcgagtaagttgtgcaatctcacattacctggagaaggtcaagtggaatgattctgagactgtgtaggtatgtaactacacagttgaagagagcttaaat

SEQ ID NO: 305416 - DNA, 879 bp, Cannabis indica
gggtgcttatagaattttccattattattttagtttttataaataggctttaaattttataatataaatttttttatttacaaaataattacatttagaatgacttttaaaaaaaatgtaattatgtgtgaaccaatgtaaacttgctaggtgtacaagatgtatacgtggagagtccaacttgaaagttaacgaatgataattggatcgaaagtcatgtctgcaaataaaatataagtttgaaaaaattccttggggggttagttggtaacgtaatcaaatagcgatttagccactatttactcaaacataattaatagtaaatttttgacttaaactaaattttgtacaaaatatgaaaaattaattttgataacttaataacttgaataaaataacacaaaataaaagtaatccatctatatcttagcaattgtaagtataaattaaaaaactatttgattttgttgtatatgcatgtaatataatagaataaaaacaattgaaaattgatcataatgtttagtttattgttgcaatgaacatattgcaattagaattatattgtgtttgctttaatttgataaattagatatacaatgttattaaagccatttttagataaattgtattattttattaaaaccaattatgtatattctcattatatatgtaatggctattacaccatccattgtaataatattatgcccattacaacaacaaaaataaaaaagcaaacacaataatagtgacaatttaattacattacaaagtcctattacatgatttacacatccaagcaaacacaaccaatttcaaattatttttctagttatttatatatataaaaaaaaaaattaatagagagaatacctt

SEQ ID NO: 305417 - DNA, 3409 bp, Cannabis indica
tcaactaatgtatgacttcttcggccaaggtcttgcaccactgggatacattcgaatgcctctaatagttggagaatatcccacaacaagaacactaatggcactattggtagtaatcgacgttccactagcgttcaatgcaatgataggacgacctgccctgtacgaccgaaaggcagtaacatcaatctatcacatgtggctaaaattcttaaaaggcatggagtgggatgtttaaggggagaccaacagtctgcccgacactgctacaacatggctttgtctaaacctaagaaagagaagattcccgccaagagctttgaccaagagcatggcaaagggcaatgaagtcaagcccaaagcggggaggaagacatagatccttgctttggggatcctacaggaagcttggacctatggaagaattggaagaggtggagattgaccccattcttccaactagcaaactaaagattaggaaatgttttaatactagaaataagataaactttggtaacatttctaagggaaaacattgacctttttgcatggtcacatgaagacatggtaggaatagacccatctataattacccatgcactgaacatcgatccaaatttctgaccaatacaataaaaaaggaggttactagataaggagcactcacaagctctgaaggatgaagttgaaaggctaagcgccaatgacttcatcagtgaagcattctacccactttgggtatctaacctcgggttggtacccaaaccaaacattaaatgggagtgtgcatagatttcactaacttgaataaggcatgaccaaaggattgcttcctgcttctaaggttcgatcagctagtagatgctacagctggtcatgagatcctgagcttcatggatgcctatttagcttacaacaaaatcaaaatgcacccgcagaccaagaacatacaagtctcatgatagacctagtcctgtactactataaagtcatgcccttctgactgaaaaatacaggggtcacctatcaaatactggtgaataaaatgttcaaagatctcattggccgtaacaatgaggtgtatgtgggacatattggtcatatccaaaaaggctggggaatctaaatgaatgctttgagatcctttgagagtacaacatgaagctcaatccccttaagtgctcgttcggagtaggctcaagaaaattcgtatcaaactccctagaaaagtgtgtccctttcatcaacatactcagaggaaacaaaaaatttgaatggatagaagagtgtgaaagagcattccaagagctaaagattcaattagctcaaaacctttaaacaatgatgaacgaggcatatacttggtcgtcacagaatatgctacccgtgcaatcctgattagagaagaagatggtatctagcatccagtgtattacatcagaaaaaggcttattaatgctaaaagtcgatactcactcatggagaaggtgacatactgcttgcttttagaaccaagaaagctatgttcgtacttccaagatcacccaataagagtgtacactaattagccattgcgacaagtgttatagaaacctagagcattaggtcaattactcaagtgggccatcgacctcggccaatttaagactgcatactataaaataatggccataagaggccaagatcttgccaattaactttatggctgaatgtactggcatacctcctaaaatctctcaagattcaggagaaaagcaaaagccagagaagaagcaaaagtaagaaaagaaggaagagcacaaagattcagcttggaagttacatgttaatggaagctacacgtaccacttatccgctgaaggcattacccttattacacctgggggcaacaactgtgtggggaaatcaagttcaattttaaggtttccaataataatactgaatatgagctctcaagctagcagacaaagtacgggatgatcacatagatatatataatgactctcaactaatagtaaatcaagtcctaggcgagtatacaacttgaggtgaaagaatgatagcctatttgagcaaaaagcaagacttataaaagtcagctcaaaggttatacagtaaggcaagtccctaaagaaggaatgcaatagatgatgcactcgcctgtctaaaatgcagcatcacagacgacaaggcaaattcggtgccgatatagttcttaaaagaaccaaacattactattctagaagaggttgacatcttggatgacagtccaacctggatgacacccatagcagcatacctcaagaatggagtcttccccgaagaaaaggcaaaagtatgaggaggaaagctgcttagttcttaatactagatagattaatgtacagatgaggtttctcaatgctgcttctaaggtgtgtcactaagagagaagccgagcagttattgatagaagtgcacgaaggcttctgcaacaattatgcctaggggcaaagcctatccaaataaatactcagacaagggtatatttttcttaatatgattgaggagtcagtggactaaaaaatgtgacaagtgctaaagattctaaaagatgccgagagctccaccaattgagctcacactgattcagtctccttggacctttgttgcatggggaatagacctcatcggtcaaatccctaatggaaaatgaggtgtataatatgtcgtagttatagtcgactacttcaccaagtggacagaagctgaactactagtgacaataatttccaagaaactcctcaactttgttgtcaagaacatcatatgtcggtttggactgccatagaagattgtgttaaataatgggaaacaatttgatagtgacatgctcattgacttctacaacagatacaacatcattaagagcttctcaaatgttgctcatcctaaaacaaatgggcagatggaagctataaataagaccttgatggaaactttgaaaaagcatctagaagaggcaaaagataattggcctttattactcttagaagtactctggtcacactatacaaccaagaagacgaccacagggcataggccatttgcattagcctattgctatgatacaatgtttcccatagaactgaagccacaatgtaaaaagattacgttctaacgtgagaatcaagaatgtaaaaagcttgaggtcatcaatgcaagattcaagaaaataataagaaaataagatttaaagacttacccactaatgaagtccattgaggatgcttgtgggaatgttggatcgtcaaaacaaagcaaaaatctcgagaaacgaagaccttggggcgtcgggatgcaagaggaagtgaagagcttctttttcctttttctcaaagaggattcagagagaggagagagagagaga

SEQ ID NO: 305418 - DNA, 2597 bp, Cannabis indica
gggctatgtctcttcacaaaatacttgttttaacaaaaattattattactatcatcaaacaccttatatttacaaacaaacatacaaatgtttgtttataattttctaaactaccattctcacatttatcatacttctctttcttcttctaaaattaaaaataataataataataatcaccctattggtgtatgagctcaaaacttaagaggttgagttttaccaccaaaaatgatcaaggcaatcgattcagcttccacaaaacgaaaaaaaaattactcattaatttttaaagttcataaaatgaattaccctatacaatgtacatatagatccacgaatacaagcataaagcaataagttacacaataattttgagctttacaaaatatcggatcaacattctaacaattctacacccttctttctttctttctttcttctttctttcttttctagaaagataatataagagagtaaacttcattacggcaaaactgaaatccaacctttattaaattaacttgttatacgggtacagcctcaaccagccttgaaaagtagaattgtgtagtgacaatgcctcttttattaattttccacccaacttttcttaaagccctctcaacatctgcctctgcatggagatatgccctcgttgcctttgaaggccctgggaataactctccaaccctcttcaacagatcataatagaatgtctttggtgcaaagctcagaattaaccttttctcagccaaggaagctaaatgaccaatcattccgtctgctttattctgaggataatgaattaaaacatccaaacagaccactgtgttatacttaccatccaagctctctaagtctttcacttcaaattttggcattactgaccctgatagctcttctctcgcctgcaaaatatttcaagtgtgtttgaggttcacatgttcttctaagagtttagattgaacaatctaaataggtaaaaacactatagaataataaagacaactgacattgcacaacattgaaagaggaaacaatttcagctgaaacataaacaaataagcaagataaactctttcagcaaattttaagggataaatttctgcaatcctattgtccagtgaagcatgaaccaatcaaacattctatacttggcaccaaatagctaatactttttttcccttaaaatatgaaagagaattgctgtaccagtaccaccacgaggtggtgacaccaagctaatattaagcgatattttgtaatagttattaaattaaaatatgtgaaattcaatactcgatataatgatactatgactcgtatagacaccaccgaacccttttagcatttctcaatatgaaatccaagtagttctttgatgctataaatgtcctaaatttctgcttttaccaaattccaagcaaaatagagttattatcatcgaaaatccaagtcaaattacattaagtatcgagtatatcaaaatatgcaaaactctgtttgatcaaattcaattatcagctggaaaagcttatatgctcagttcagaaacgaacactcacacttataatttttcaaaaacgacactgtaacccaaaaaacgacaaaccagcatatctcttttctttgatgaaaaaaaagaaaatttaaaacaaacctttttctcagcctcagcaaccatggcagcggagatatcactggcggagacaatggcaccctcctttgcgagcggaatcgaaagcgagccggttccacaaccagcgtcgcagacagtgactccactaagcggaccatcatcggccaacatcttcaacacattctcgacggtcttagaatggccgagtctaatgtctttctgaactctgttcacatcatcggtctctccataaatcttcttccatctctgaaacccagaattgttgaagtactctctcacaacctccttgtcgccacctccgacctcctcggcctggagcttgcgccgccgctcggggtcggtcagggagagcgcggcggctaaggcagcgacggagccaccgcctatgacagcaatggtggtgccgtctacgtcggcagcgagaggaggaatggcggccggcggtggggcgaggagtctgaggggccttgaggtagtagtagtgggggtgagcttgggagagaatctagggtttgaagtgggatgaaagcaaatggaggaagagagagaggcggagagcgccattgttgggattctccggcgatggagtgagtggggagttgggaagagtaagaagcagaggaggaagaagaatgggtgttgttatgtggaattcttatcggatagggaataggatagataagttggatttctgagcttcttcgattctcgtgggtccccacccgctttctattttacccgggaaatgttctgttacgggtttggtagttatagaactctcaatctcattctcagccgaccacgtacacaatttgtgtgttttaaaataaaataaaaatataaattctatcataaatatttaagggaaatttaaatttccatacttacaataccttataattttttccttaaatgcataattattaaaattggt

SEQ ID NO: 305419 - DNA, 1500 bp, Cannabis indica
tcccaaatgcaaccatggcttccacgtggattgtatagacatgtggttccaatcccactccacttgcccaatttgcagaaactcagtagctcaagatagctcatcctctgagttctcgagtttgtcaagggaagagactgtacggacacccttggagggtttaccttctgattcaacagagtttccgaatttccccaccaacattttgttttggggaaaccaaacccaggtaaccgctggtaacactagtttggaagagggtcctccttcttcacaaccttcttcatcatcaactccatcgtcatcgtcgtcattgactacaacaactaggccagagggtgttttggtaattgacataccgagtgagagctcacaaacgacgtcgttaggtccttcgggtagtagaatagctatggaggaggaattgaagtcgcctgtaacgacaagattaaggtcactaaaaaggcttcttagtagggagaaaagggtcaatccctgtagtcctaattctggtgaccttgaacaaggaagcagaggacagagttagaaagaaaaatgtcgtttttgagatagtgggtgtttgaattaatttactattcaattcaagccaatatatttgtacacataatttgatattgggaactatgatgccggtggtgacaagaaaatttgttgtctcaagagtgtctgataattatttttcaaatctaccatcccagattccagagctctttgaaaatgggcaaagttaacaagtaaaaaacagttgttattttgctcaatgtcattttgttcttgagaagattaggtagatgtttgagcttgagaattgagatatctcacaaaagagaaaaacagtcctttgtgtggactgccttctatacaagaagtttgtacattttttcttttcttttatttgataatagatttaccacaattgtttgaaatgaatgtatattgagaaagcaaaaaatagttggtttgtttgattttcccatttgttccttatcgtacacaatttagtttcaaccatattttgatttttattaaattgatgcgtatatattgtttgtgttgttccaatggtaatgtccccaaagtttagggaatgaaattctgcagtgtcttattctggccatagaaaaggtcctttcccatttatgatgtatatttattgatataaagaaagagaggttttgtttttctttttaaaaaatgtaaagaaagagttaatttactattaatatcttatttgcttgaccctttgtttactccaaaacggtactagctagtcagcactaatgacctaattttggataaacatatgcttgtgtctcgactttaatgaacaacattatatgcacttataaaatcaatttctatggttcttactgactataccaagttaccacagaaaaagataaaacatcatatgacaagcatgccaattaaggttgttgattaaagttgaatgcttttaaaaatttatatatatatata

SEQ ID NO: 305420 - DNA, 1737 bp, Cannabis indica
tttttttttttaaaaaaaaggcacgatgtcgtcatattcaccctcgtccgtactcctcctcctcctagtaatattcatcttcggcggctcatcagccgaagccgccgaagcaccactatcgagcgcggcgaaggagtatctccaggcgcacaaccaagccagagccgcagtgggagtggagccgctagattggagcgagacattggccaacgcatcgagccgagttgttaggtaccagcgcaacaagatgagctgcaatttcgcgaacctgactaacagcaggtacggcgcgaatcagttctgggccggcggcggctcgagcacgccgcgtatggcggtggataagtgggtggaagagaaaaaatactataaccacggaaacaacacgtgcgctccaaaccacacgtgcggggtttatacacaagtggtatggaggaagtcactccatttgggctgtgctcaagccacgtgtaccaaggatcagaccacaatcgccatttgtttctacgatcctcctggtaattatgttggagaaaccccttattagttgagactttttcaaccttaattaattaagtatgtttaattatatgtttagtgggttgtattaatagtagtagtaattgtgttttattttatgttccacgtggcacgtgtaaaccttaattaattacgattggttattattataatttagtagtgtgatatgtgatccaaaacttgtgctgccaaagatctaaataaataatatgaccaaaccaaccgacaagtaggacgaaaaataatttaactaaatttataagaatgacagaatggtggggtcatgtggtaatggtaatttataattgaccttaaaaaggatatgtaattgtgaaatgattatatatcaatgtattgtattgaaagagttgttttgatatatatggtatggagtatggaatagtgttttttatgtttggttttggtaccattattattgagtattattgattgttagttgttttgtttttattgagcaataataatttattaattttgatatatattgctgtcttgttctataacaccaacaaattcaattggatgacttatttgatcttttcagagtgagacatcactaacaaattaattacactcttttgaaaagagaatgtgcattgaataaaaaaaaaaaaagggttagatttttcggtcattaataaaaaataaaaaatgttagttggtatagaaaagatcaataaacaatcatatactgtttgtgagtgaaggttcactttattatattatgaactatgaagttataaattctaataatactagaaagtaaacacaatcacattgcaactatgcatttttaactcgtttttcaatcagtttcttctagctattattcagttttatgtgactttaacatgtgtttggttgaactaaagatgatcaaattttaatatttgtttgtttgtttgtggggtattcaaagtttaattgatcaatctaataatatgtaccatatatattgcaaagtaggaactgtatattggattgaaaagttaaaatctaacttttgatgtttaacataaccacactatgtgttgtctggtgtactagtaggtaggggacggagctatatattgagattaatggacctcaaatataattattttaagaaaaaataaaaaaggattttttcaattaaatttttaaaattaattttttatttatttataaaaatagaaa

SEQ ID NO: 305421 - DNA, 1346 bp, Cannabis indica
aattattaggtgaaatggaatggagatgcaggagggctcaacattaatggaactaactatacattgatggattgtcattggcatacaccatctgaacacacaatcaatggacgaaggtactttataattatatatttctatttagggttttttttcttacattttaaagtattttttttttacgaaatatatattataatttacgaaataacttaaatcacaacttaatttatattgcaactcatgcagcaacttagattgcaaccaatagagtaacccaaatacgtaaaaaattaaaacgtaaaaagttaaaaaatagtatatgggataatttgttcttttatttatatataaattaattaattgtatataattataatatattttaatatatatatatatatatatataaatagaatacttttgatcgtgtgaataacctaatgatggttactaaaaaatattagtataaatataaattttagaaatatttaactattaaattttgatctaatgatcaataataaaaagaaaatttgaatttctatatttaattttaatatttaattaagaaaaaaaaactttaattttacattatatcaaaaaatacgtttatataaaaaaatatcaaattcaaattcaactgttttttttaatatttctcacccattgtaacaatcccaattcatattataatataaaaatgacataattttttataattaaatcgcaaaattaagtatgaaaactcaaaattttcttaataatactcatgacttatttagcatagtcatagtatattcaacacatatttatgatatatttatgatttgttatagctttaaattaactttaaatacatcattaacaagttagtttcgtgttagtaatatcaatccgaacatgattcaaactcatttaagaaaaactgaatccgttaatttcgtgcaattttcaagtcgttttatcgtgtttaatctattttgttgctcgtaataaaaacaaaataataagaaccaagaactcgaactattatggcaaaaatgaatcagttttatcaactttgaatcaacacatgtacaacttaaattgaaccttgtaaactatacaattatggtgattaacactattacataattccaaaacactcaaaaaacactcaagaacacttaaaacttgagagagatgaacccaagaaacccctaatttcttcaaggtactaattaatttgaatgagagcgaaactaacttattatttataggcttcccaagttagttggcccgagtaagaagaagtcttaaccaatttaactactttcgttgccaagtaggattagtagtgatga

SEQ ID NO: 305422 - DNA, 664 bp, Cannabis indica
atattaaaaaaaaaaagttgtcaaaaattaagctcagattctacttttaccattttagaaaatatatggtctattttgtcatttaacactaattcaatctataacttttgcaaaacacaatgtccaaaataatatttatctttttttaaaaaaaaataacatttgggtagtttaaaatagctggaagatcacctccaatatatagttaaaattctataattgtgctctaatacagtaggtagtaggtgtaaaataaattttatttcaataaaattgtataataatattaaaacagcactccattccattggagatgctgcttgatttacgtgttttgttgtacatttaacataatttttaacatgtgtcaaatttatatcatattatacactattattagagttcaataatataaacatgactaaaattttctaatacaccacatttataactctcgagttacatgttgctcaatgattaatctaaaattcattccgtggttcctaataataatgatgttttcaaaactacccgaatggacatcttttaaacacatgatcgtttttcctaatataataatggagagtgaagacatacacatgcaataattattatactttatatatataagtatatatatattttttacattaaagtataatta

SEQ ID NO: 305423 - DNA, 1531 bp, Cannabis indica
atttttttaatatttaaaaatattaataccggcggaacactgattgtggtccgtcagtattaatgcatctgcgtgtaaaagtgcagacattaatgtcgaaggaccccaccgctattaatccgccggtattaatattattaccggcggaagaccatttttgtcgctaatagtcacttatagcgaccaattaataccggcagataattatcgacggattccaccagtattaattattaccggcagtctggtctattaatacaggcgaatgtctccgccgataatacaaaaatttgttgtagtgaataattaataaaattaatacaaaaataaataaattaagagtgatgactttatatttttttaaaattaaaagtttggggaccaatttgtcaaaaaataaagtttggggactaatttactaaaatttatatagttggggaccatttataaaaaaataaaatttaatgactaacttgtgaaaatatatataatttaagaacatgtggtacaaataaacttttataatatgacctgtttattaaaaaaatgaaataattttttaaaattaattaaaatgtatataaatttgtaaattattaagtgtttatttaattatggttaaaagtcaatgtaataaatatgtatgtgtcaagttgtaaaagggtagacataggacaccattttttacagcaaatttgaatccgtttaataattaacgtcactaagatttcctgttaattgcaattccaaagattctgcatgaacataaccaaggatttgtcagctgatggctgatattgacccctttgttttatttgtaatttattacattattgggatgaattataacaaatattgacctttaaaagttctctgtccaaaagtcatagcccttaattatgattttatatctattaaaagatgaagagtagtatatatatacttgctattagaaagaaaaaaatcgattaattaattaattaattaaaaagttctttctagctagagcatataattttttatcccaataattgttattggaagataacatcattgagaagcagtgccttgacatttaagcaaaaaattattttgttgggatgataatgcttattatctacaaattaatactaattaaatattgttacatatcggtttaaccgacacagcaaattaaaacaaaatttcaccaacaatatataaatggatacgataagattccatgcatgtcatttagatatgcttttttgcacattaatgttgacatacacaagtaattagatacatgctcaaattacatgtatattaattagagtaatttgcgacataaatacttaagtttaactctcagttgtaaataaatacttaaatttaatttttggcggtaattatacctaagttataattctagaacttttgtaggtacctgactgttaatttcaaagtaattgccacatgacaattcctaattggtccaagtcattacatttttattttttataaaaaattaattaaaatataccaataaaaa

SEQ ID NO: 305424 - DNA, 7149 bp, Cannabis indica
taataaaaataaaaaaatatattaattatatttttagtagctttttttttgtgaaatttgaaacacgattgttctatttatatattttcatgatattttgttatattttattacttgaaaatattgatatttaagttatttcaaacatttagttacattacgcttgtaataataatatttttatagagtattaaactttaaaaaaaatggtgatatttaattaagtgtgaaattgaatatccaattaaaaaacagttatttgatttcataaagaataaagtttgggtggggaaagaagtacttattaaagccatcattcatgctattcccacttacacgatgagctgttataggattcctaagagtactatcaatagcattcataggatgactactaaattttggtgggaatcatctaaaaagaagaataaaatgcattggtgtaagtgtcccgagttgtgcaaaccataggaacaaggtgggttggggttcagagatctagaaatgtttaattaagccttgcttgcgaaacaaacatggcgatgtataagaggtatatcgagaccagttagctttaagatctatgatgagccaagtattccaccataattgtatgttgttgacttgaagcaaccaaatgagcaatgggacactaaatttgtgaaaactatttttaatgaagaggatgtcgagctgattctgaagttgtcgtgttggattgaggataaaattacgtggcactatagtaaaaatgaagaatattcagtgagatgtggatacaaaattcctccaaaggtgaaatattttgtctagaaattagctcattcttggcttccgacaaattttgctcttgcaaaaagggggattcatgctgatcatggttgtccaagatgttcttatagtggtaaagaatctatttttcatgcactttgggaatgcaaactgaatcgtcctaattggaagcaatgtggtcttcaaaagcaggtatgtcatgaggaagaggaagatgttttagtcttatgaatgaggttggttgctggtttagagaaggagaaatgtgagttctttgtaatggtgtcttggtatttatggtatattcaaaactctatgaataatgggagttgtaagccacaaactacagacattgtggattggtgtaacaaatacttggaagattataaagagaaaaattatggttaggtgaaaggaggtggaaggacagttgcaaaatgggagccaccaaatgaagggaagctaaaaatgaatgttgatgttggtgttcgacgaggtgagggttgttctgggacgagttgtgtggtgtggaatagtgtgggacgggtcacttttgcctccatcacgacagtgcagcatgaactaggagttcaaacgaagacttcaacattttagcatcgaaactgattgcttggaagttgtccatttaatccaaaacaaagaagagaggtgtagagaagttgatggtgtgttagagaacatacgaagattgctattatttgataatgttgataatatttcgtttgtatatcgtgaagctaataaagtacgagctcatagtttagccaattaagctttgattaacaaaattagtactatgtggattgggattgatcccccttgtgcaagtcaagctttacaacttgacttgcctaatcctttgtaattgttgttgtggttgaatgaattttgtttcaaaaaaaaattgtagagaaataattccttttggcccttactttagtcaagttctccgatttctttttttggtaaacaataaaatatgaattattacaaattctcattctaaataagtaaacataatatttatattaaataaaattcaagggaagcttatacaaaatatttaagaaactaaggactagaagtctagaattataaaaattatttataatttttcatcctaaatattatactttataatatcttttgtggatggactcagaacaaattcatttttaaaaaaaaaaaagagattacactagattcactacttttattcttttttttaaaacaataccacttttattcttatatgtagagatatttttatttttagcattaaagaaattataacttaatttttgtttatataactgtgtacattgtgagtagactagacaccatttgtttttgaaaatttagaataatttactgtactgaaaaacaaggtttaaatattcaattggatacatttttcttaacgtgcaattgacaactttaaactcttaatttcaatattataaattgttcaaaatatttcaaaaataaattaaatgcctactataattataatacaaacaaccaaataaaaaaattagacaaatatacaaacaaaaaagaaaaaaagacactactattataattgctctttattccttctatccataattgggaattaaaaggtattctagatggcattaattccatattgaatacataatgtggagagagttctattttttattttttatttttcttctaattgttttatttttataagagaatccttaattttcataaattatggataccaatttccattgtttgctacatgaagaatggtataacctcaaataaagtttccactatatttagaagtgaccaagatagaacaaattcttttaaaaaaaaaacaattgagccacttggaatgaaataattccaattccaataattttgacctcaattatttcaatgggacaattcccaagaggaaaaggaacaaatcaaagttagatattgatttgcccttcttgcataataaagcaattaagcctttaataactactattaacataataaaaagagcatttatatattgatatgaagtatatctcaactcaaatttaagtgaataatgttaccatcactttagtacctatgcctttataaagactcaaaacacaataacaaaatcaaccacaaagagaagaaccccataagcctaatattatttactatttaaggctctctttctcctaaatattatagttgttttgccatggcttcgatgcagtgtgaaaaaccaactaaggagattgagattacccatgaaaataccaagaagaataaggagaagaaagatgatgtgaaaaaggagaagaaagataagcatgacaagaaagatgatagcaaaaagaaggagaagaaagtagatgatactaaaaaggagaagaaagatgatagcaaaaagaaggagaagaaagatgatggcaaaaagaaagagaagaaagatgatggcaaaaaggaaaagaaagatgatggcaaaaaggaaaagaaagagaagaaagatgatagcaagaagaagcacaaggatgacaagtagagactaagtctagcaaccacaggcaagttctctttttgttgaaaacaaagtgtgagtctcttttatgttactatcaattgactcaatttcaagttttctaaccatgatgtactcttacattttccttttgttttacagagataccaggaagatgtagcatatggtgaataaggatcgaagctcattataaaagggttttacttagcatgtgattactcctatacatgtaagaaagaattatcctctaatatctatgtcaagagaataagactaattaatgataagaaaagtgcacttttcaccaatttattggagatgttacaaatatccatagaaactatcaataaggcaatctaattaaactcagccccttcattaaaaagtttaaagtaatgtaaatatcaacaaagcacatacatgtctggcacagcttgcacaagcatataatattgaggtttgagacaccataattctacatataatataagattagaaccgagcagtcctcgacagagaacatggacagtcagcatcagaaaggtttagcctcatgaaacatattatatacagcatgagacagttcaagtaaaaacttgaaaaccccctattgtcctttgaaaaaaaaggtgtcacctgtctttgatagagcctgacaaaaagtctgcaatggccttaagagcctgatcttcagctccatcttgcgttgacccattggtttgcaggtgtttctttccaatcttgaaagagtgatcacccccatcaatgacatgcaaatcgcttaaggctttcatctttttacgagtagactccaacttttctagtggacagagcgcatccttgctacccttcatgaaatatatatgtgtataaccttagcatacaattagcttataaaagttcaaggatataacagacttagaaagtgagaactagcggcatgtctattagaatttagagagcaatttagaaagaacattagtaacattaattgttgattagtattactttaataaagctaaataaacaaataaaatattacatgaagatgttcttagaataagtacctgtacaaacattataggaacattaagttgcaacagaatctcatctctcactgctccaccgatgccctgaaacataaaggggaaatataacacaaaaatggaaacataatccctctgaagaaaaagcatgaaatgcttgagtagccttactctaatgaaaaatccaatctcatccctagagatctatgtgaagaagaaaggtaaaatatagtttcatgctgatagtcatatgaattcaatcatttttatttaagaaagtaaattttgtatcagcttccactcacaacaatcgactatttaccaagtgattcaattatgtaaaagagaacgaaactataatattggagaatggtagacagcaaaatcacaccttttatacgcaaaatgaaaagaaagtccatttaattttacatacaagaaatcaaaacaagaatacagatcagatttttaagaaataacggcaaacctttagtgggtatcccaagcaaattattgctgaagcacttatgtcttctttgcaagccaccatgcagctgactctaccacaaattaaaagttgaaatttagtgaacagtaaaaatcgttattctagctacgtttcacatgcttaggctacattaaaaataaaaccaagggtgctgagtgagcaacaatatattttgaattcatcaagatcctatgcatagtaaataaccacaacttccataatttgcaaagattgtagaatttcaaactcaatgctaataatccggattgataataataaaaacacacacacacaaaagatgcaagacagtttattgccattattagaaactataacgacttatacctcgatcccattgacttcccggccaaaataagtggatggccagggtacttggcaacagtctctttgacaatatcagagtgaaagtcaaccaacttttctgccttaggaggcgccctccgttttccaccagacatatctgttaggaacaaggtttttcgtaaatttaacataacttactagaaaattccctttggccttcaactaccaacttaagctatttcatctgcattttattttatttttctctttctcataatgaaatttaaagaaactcacaagggtaatcaaatgtaacaacttcaacagcgtgtagtgctttgcccaacatatctttccatctgcaaacaataaaaatgaacagcacactagttcacaacttgatttagcagcataaagtttctcaatcgtgccctatgaattatcatactcatagatagatgttggcgattagtacctgctcaacacaaccaacacagtgcaaaatacaacagcaaaaaagaacaagtaacagagaccactaatcaaacacaaagcaatcaaaaaataaaacataatagaaagaattagatacaaccagtgtggttgatcctacatcaaagactaggcaacaacacaagtcaaattcactatatcagaaaagattacaccctcaaagctctcaagattgcaacattacaccttcaacttcctgatatagaggatttgacttgtgttgttgcctattatgttgtaacaatgggaatctcaagatgcaagaaccaacacaacaagaagaaacagttatgacaagtctaggataagaatcaaacaaacttaacagaaactaataaactaaattcaaagacagaaatgaaagtaaaaggaacaagaacacattacatggttcaaacaagatgacaatgagtcacctgcctactccacggccagaacagctctaatggctggtatcttcattgatcaatagagagtttacaaggagtcgagttacagcaacgtaagagtatgaatctcacttgagaaaagtctcctctaaggaagaacaatctctatttacaactctctttctttctctgttctcactaactctctctctagattcttggagttctagctgaaatgatcgaagttggttgtttatgtaggcaatgtaagaataagagctaacaacagtcataacagaattcgtcagttaattctgttatatcaccttgagtgagttgaccgagctaaatagagtacaatgtagttcttgctttctcagctaaaactctcaaaaaatgatccatttacacaagagaaaagagcctaatagattctaacaaattatggcttttctgttgtatgaacttcaaaaggagtttaagtaattgcaattgaacctatgagctgaccttggttgaagaaagaaagtcacaatcttcacaaatgacatagacataactgtaagtgtttactatcaataatcacaaaaataaacaaattgggtcattttcttttacacaatacaacaacataatgctgaactcaatcttgtctctatatgaagtttcctttttcctttggcagcaatctcttctatttttgtttcagaaaaataaatgataaaaaaggaagggagaaagtactgacctgatcatccagtcagaagtagaaggagcaccagcaccatgagcgaagacaatcacaggagataatttctcgagggttgaagatggtggacttgacgtgtcaactgcatctatatctgcaccgtctttgctctggtttgctctccggcgctttctagaaggtgaagaagccattgctaattcctaaagcaaaactcccctttgaaatgtttcgaaaccctaacaatggcaattgccatgggagtagagtagagagagagagagaga

SEQ ID NO: 305425 - DNA, 2493 bp, Cannabis indica
cataaaacccaacacatttaccactcgttaaccacgacctgaatatgtcactatcattgcccagtaaagcaagtgataagtaagaaacctatccgcgatttcaagagtaattactcttaacggtaatgagcatttccaaccctcggtcataaccgaggcacaataaacatttaatcagaatctcgataataatcaaagttataatcattcaaccgttaatatttaaccacatacggtgcttactacttttcttacctcaattcaaaactcaagcgtgcgggccgacctgagtgtaaaaaaagctgggcagtttcggtccttgagaattggacaacaactagggtagattttctagcaagatctgagctgaatttatgaagaaaaggtttgatcccccttggttccatctacagccgaaagagaagagtgagagagctaaatgaatttcttctttcttttttttataattaatctatacctatataattaatatacttagaaaaatactcagccaacattaatcaaaacaatgacacatagccatgcataatgactatattacccctctctcaaatactaagctaaacatacactaagggtaaattggtaatttcttactaacccgccaaaccgaccacttaaaattctaaactagtcgagaataattccaattcaacccatactttattgtcgtgatatttctgaccactccgtctagtttctacggtcgatgggcccaaaaatattttattttagaattggtatccacgatacccatatattcccaataaaatctctgtaattaataaattatgctttatttgatcatttaataaattctcactaattaatctaagtaagattataatcttacttaattaccaaaataattacatatttaataaaatatgttaaatacctattttccgggatattacaatatatttcctcaaaacctccataaaaacttcgacattctgcctcattcgcttcaaagagcaccaaattgtcgtcagcgaagaatagatgtgaaatcaattgaccccagttcccaaaagccaactcagttgaacaaccctgagtttcttcatattgtatcaagctagagaaagcctcaacacaaaagaggaacaggaacagggatagtggatctccttgcctcagccctcgttatggtttgaacaaccccatcacctctccattaagtaggaaggagaagctaactgatgtgacacaagccataattttctatacccacacctctacatagccaagctttaacatcatagcactaatgaagcgccactcctttctgtcatatgctttggccatatctaatctcaacgctacctgtgatccattctagaatctattcttcctcatacaatgtaacccctcatagccaatgatagcgttatcatgaattagtctccctttgacaaagccgctttgagaatctgaaatcaccaatccaagagattgcctaagtctatttgccaaacacttcgaaactattttatatattacattacataagctgattggctaaaactccaccttttttggattatccactttctagatgagagtaattagagtatcattcagactttcgattttagccccctcatttagaatagacaagcacacttcaattacactctgttgtactgtatctcaaaatttctgatagaataaagctagtagaccatccccctaatgcctttgtaggtaacatttctgatgccgcacgaatgacctcctctttcctaaattcttccaataattcctaattcataggttgagaaacctttggttggacggtagccaaaacttcttccatcacctccacattcaaatctgaagctgtaaataatcccataaaatagtcactgattatattgtgcaccatattcatatcattttaccatacccttatattgtcacagagccctttaatctcatttttttccttcatgccgaaactttatggtggaaatatatttagaatttttggtctgccaaaatcggtcgatcggttggttctggtgcaacagaactggtcgaccgctttccctgttaaaaaaattcccaagttttcttcaggttcagttttggctcgggatggtacctagtatctgatttaggttatttatacgttgtatggcctattttagagctattggaggttaggttttgttcggttatggggattagggtttgctcccagaattttggtttaaggcatttattgaattttgttgtcgtgacataggaccgatatcgtctagctctgtttccattcagctcggcccgcacgcctaatttctgggttgaggcaagaaaagtgttatgcaccggttatggttaaacgattatgattgttatagtcttgactgtgaacgagatctcgatatgtgtttgttgtgccttgattatgatcgagggttggaaacaatcattactgttatgagtaattactcttgaaaccgc

SEQ ID NO: 305426 - DNA, 1684 bp, Cannabis indica
caaagcacgctaaaaacactcgtgttggtctgtagggtcagtcatcagtccatgaagtagccagagtgccgtactcgtgtataagagccattagtccgtgggtgtaagggcccaatggaggcttgaagcggggacgttacacaaacgcgcgggtttggtatgctaattctatacatccgaaaacccgaaacccgtcaaaactcacccgatgtgcacccattatatacaacaaaatatagcttatagaattggtatttgtacaaaaatgcactttttttttgtactttaaattgttggataattaagtaagttgtatttttattaaataattttttatgatacttacacaaactctactttgttaccaatcttgtatttgtagtaaactcagtcaagtttatctagtcttacttaagtggaagttgattattatcaatttcactggtcaaaggtttttttttacttactatcgtgtttgtttaactcgatagtcaatataaattttcttttctactttgtaacatctttttaattacttttcaagccaaagattaatgaaaacaaattattttttgacataaagagacattataaatattgttcaaaaaaatcatagtttcaaaatgagtttgactgttggattttacttaaataatgaccaagattaatctttgttttgactaataggattaatatgtcctttaataaaacaaactatatatagacttacatttatggtagaaaagaaatatatatattttaagtactactcatgagacacatttaaatattcttggtaaagtagtctttttatgttctaattaattcacatacatatataatttatattgtatgtatgaaatagagtagggaaaaaaatgaacattttgtcaaacaaaatggctatatataacatgtcggagaatattcaatattacaactcaataatatgactgaaaaataaagacaactatataagtgctcaaaatatataatatgatgaagaattgtataacttcatcttaactctatatattagtatgatattgaagaaaaattttactttatacttattttttatttttattttaattttattagttattttattattttttaatttataccctaattttatatattatatccctattatatacattaaaaactctaaattttgtataaattatataaagttatattttggcactttatgtaataaaaaggaatattttttaacttatttcataatattgtctgttttgggtttagcacacatagttttaatttcgtgtaccttcttacaagatcttttattaatagagtaactagaacacttttatctaaaataactcttacatattcttctggtgtaggacttgagtttattagggtcggccctcgagctaggcccgcgtttaggatccacccatcttaaattcttagggactcaaataataaaaaatatcttttaaaaaaatacatatatttttattaatttttaaaaatattatttattttttataataaatggacaattttttttcctaagtaatctgtaacctcaagatatttgtaatatatcttatgataaaactcatttaatatactttgtttgatttatttcatttaatcaaatactataatattatatatatatatatagcatgaataaactaataaa

SEQ ID NO: 305427 - DNA, 4777 bp, Cannabis indica
ttttttttttttttaacaatttacttaccctatgctctctctctatatctatggtggaacccctctctttctcttcctctattattgtattctactttttatgttgagaaattaattttcctacacaaatatagtgatcaagacctttaggaaagactgaaaataaaagatcgacaatacttaaaatattgtccttctactacctaatatcatagactagagattgaattaaggatagtcatcaatttcggttgtgtaagtatttaatactttggtttatataaattcattaaagagatgttctagtactcttaggaacttttacatatttatttgtttaaaaaactgaaaataatatgaaatagttaaagattctattaactaatttccaacaataacaatataaatgtatattctatctcttcttgttaactatctcttctagcagacagaaagatatgccaaagtttcttatatgtatgatatatacatacttctatacatgcatgtttgattgtgtaagagaattgtgtataagatgatgagtaatatacctttatgatgatgacacctttaaatttagtgaggataaataaagctaatactttggtctgtcacaagctagctttttcaaaagaaagtgtacgtatatataaatatatttacatatttacgtatgtattttgtaatttaaatgttgttcttacctcataaaaggaagcttctgtgaaagccatgacaaagttattggtagtaccatcgatatttgtgctatcatatagctttgttttcatgttttggtgattaattaataaagatggtaacaaatatttgaggttgtgttatcaacaaaacgcatattgtgtttttctctctctctctctctatccaaatcttcaattcactttttcaaagaaaattataataagaatccatgattaaattaagggaatcatttcgcttcatttcagaaaagtaagtgttgattttaaggatttcttttaaaaaagaagacagacttattccaataacctttaaattttcaaaaaaggaagaggtggtttcctattgtagatttcaatattagaagttaatatgtctaccaattctggtaataaaggagaatgtgtgattacttttttagataattgggaagcggacattttaacgatacaacttatagtaaaacatcttaattacaaaagctgatttatatatttagtaatttacagccttttcttcttcagaatcattaattaattgttgaactagacacttgatattttaacttctgatcttgatggttttagttaccctttttataacacaaacccaataatgtttcaaaaacaaaataattattgcgagttatgtacgaattattagcatacgccattaaaaagacttatcatattaatgatcataaattttaggtataacttttctgtgttgctacattattcatgtgtacaatgggattttggggttagtttttatttagagtgtttttttagttttttttttttttgtcaaatacatttggttaggtgacgtttggtaacacttttgttttaatttttaatcacaaaataaaagtaaaatttttgttttttgaaaaacaaaattgcgttcagtaaccacttttgtttttcaattttaaaaacagtaaataaaagtgtattctataaaattcattttcctttttattttttgattttatttaagtcgggtctaggttcgggttcaggtcagaggccaagttcaacgctagggtcgtggggggaatttgtgtttaggactggttggggtccaaaatattgattaagaaaaaaaatttgtttaaaaaaatattgaaagtgactttattttattttaaaattttcattctcaattaaaaaattgaaatgtgaacagttttatagaacatatttttgaattttttttttcacttttctaattttaaaaaatagtaaattgactaaaaatgtattattaccaaacgctaccttagtttatttatccactcattgtaaagtagtttacctattttcaacaaatattacttgtatttcatattccattatatattgtggttctattgtacatcataatttcattattataaaaaaatacattttcatcggtcaaaacattagtttttttttttttttttctttcgaagagtccactattggagtcgagtgttggtgcaaaactgacattgatgaaaactcattagtgtcgatttataactaatgctagtaaacaaaacaaaaactaaataaaattgaacccaacccatatatcccaatcccaatatatataaaaccgtatattaacgcaaaaatttggacaaatatttggctacacccgctctctagattgatgagaatgtaatgagacataagtataagtaagagacacacaaaaaatttatagtagtgcagcccccgtgatgcgactgtaataaagctacgtctactttgagtatttatttctcacaagaattacaaagaattggctaagtgtggggctcgaaattctagagagagatgctttgacctttaagaaacttcgcaaaatgtaaaaaatgatctaaaggggttctcattttataagagaggaggtttattaaaataataattaaaaaatacatataatatatgaaaaaaaaattattttgggcttatcttggccattgatgatgatttaagatgatctaaggatgaacattgactcctggtaaaaatcgtcaatttttagacttgaatctcatccgttagatcatttcctagttatttgatggaaaaatcacaactttgttgaggacaaatttttggccaataatcttcagaatcgcaatgtggttgtgagacatgacttcatatatctttgaaatagcttggaaaaaatagttgaatcgcgtcattatgaccattttactaaaggttattcagtaacctacggtttggttgacaacctagctcacatgttaacacccaatgcccatgttgacattctaatgtcaacctggacgccgggggagtgccaaaatgtccctgactttattttttatgcctaaatgatgtgttgacaccacttagtcagacttaatgttttggtgaagttgttcaccagttctcagagattttactgtttggtgaaagcaggatgactcgaaaatccccgattttgccgatatcccgccttgctgaaagggtgaatatcaaagtgtaaatttgacctgcataagttgtagctctcatttactatgaaaaaatagttgaatgctcaaaattgaataaattttattaagtagaatccaacgcacctagtctggtgtctaccgggtgctaggtgattctcgggctcgttttgatacttctatgacatttgagaatgcgaaagacatctcctaccccacgttcgactattttaagaagcatgcttagagtaaaatttatgtttgacgaccggaaacatgcaaaccaagttgcttatcaactagggtgcagggcccagtgccatgtccacctaggtgctaagaccgtattctggcttcctaaaaatctcattttctccgcgagatcactttaactttcattgtttctaatgacaaaaaaatgcccgtaacattttttctgtaaaatgattcaaaatagccttgattgacaaaatgtcaacatgcgcaataggcccagtgtcaggtgtcaactttggcagtaggtcaaatttctagccaccagttgactctattttattcttaggaacacttatatcttaatgtttaaaggataatggagaatatgcctaaacaacttctctataaaacttcttggattgtgacacccaaatagctctgtttatttctcgaaagtactcaaatcttaattattgatgaaaacgtataatatgcatagaagacttcccctgaactactgatgaaagtggccaaggctcattaattgtcaactaaagagctagcatagtgccgaggtcaaccttggtgctggttccccattttggcctacatgtcgctccatttcttccttgaagcacttttttttgtcattttggatacatatgaagaatacttttgggatagttcttctctattgttgttaaaagtgccctaagttaacattatgtcagcatgggcgtgggtgcttagggcacctgaggctccgggtgctcaaagctaaaagtatttcaattcttattctgtcgactcaaatatgttcgtgataggtctaattcattttccagtacaaagtttgttcaattttcattaagaagtgccaagaaattaaaatcattgggcacccaggttgttattttatttattttcatcttctagaccttcaagttggattcttcatgtcttcatggtatagaatactaaaatatagtgagttggaaataacttagcaggatccaaatgttagttttatggtactaaatcaaatatgcaatggaagggtttcgtattgtaaattatcattgtacaatatcccaatcgatatccacatgtgtttacattaaatcaaaacacaaaattaatagtttagaataaatacctcatgatgactataagggtatcctcaaaacttctagtatgttatatcccttaatcctttaatccagctgaggacgatgatgcaattggattcagaatagtgtcttcaaaatcgttccaccacacacaaggaatagtgtgagctattaggataaagtgtatagggttgttcttattgagttctcaacacatgagcaacaa

SEQ ID NO: 305428 - DNA, 1565 bp, Cannabis indica
ttaattatttgaataaaaaataatttttttaaagagttgaccgagttgactgagttgaccgggtcaacccgccaacccgctaaacccgatcaaccgaaacccgccaactcgcgacccaccaacccgtcaagtagtgtcctattcgggttcggttttaactttttgaacccgaaacccgccaactcgaaacccagtaaactcgcccgatgttgaaccctgaaacataccacatatttgaatagtttcaaagttaattatctcgatcacaatcatctcattcggctatgaaattaagaccacataaatgaattattgacttttttgatatttacttaatattattatcataatatcgggcatagtctatatataacaattcaattcatttatttattccattttaaatatttatcaacaacaattgtttaagacactattcaattgtcatatccatttttctaacagtaaataaacaaatttgattacaatacacatagaatgaaataattaataatttagtactgcagatcgtcaaattaggaaccacttagtaagaatctaatgtgtgaagtcatctaacaaagatcacaatatttatgaattgaagtatttcaacattgttaagaaatgttcataaaagatatatcaagagctcggaatatgatgaccaactcaaagcctgcctttttatattttaaatatagacaattatttgtatttattaaatacaaataattgtctatgcatccaatactcaaaaataacaaagattcatagactaagtagactctactaaactacataaaatatttcttcttcttcttattgactacgtttttttttaggaaaaattacttgttattataaattaaacaggaatgtcatcatttacaataatagagtaaaaaggtagaggtaaatcctctaaccaaaagcaagtctcttccacccctaaagtgaacttagctaaactgtgaacaactatattggctgagcgtttagcatggacaacattcacttgtggaaaaaaaggaaagaagactagtaacatcaagtaaaatatcatgatatgaagaaattgcagtagatccatattgcaaagtgttagcaaccagaagtgcatctgtctccacaatagtaattggtaattgcagctgaataacccaattaaggctatgaaacatagccttagcttccattacatgagatgcaaaattaccaataatttgtttcgccataggagcaagggcatgaccagccgaattacgaacaacagccccaactccaataatgtttcggttagcatcaagggcggcatccacattcagtttcagatccaaactagttggcggagtctattttttagcagctggtgctggtgtaggcagtgtagtagcagaggttgttacaacatgatatttccttgttgctgatctaaaattggataagtaattaacagcaaaagaggcaagtatcgatgctggttttgtagaagagccatgaaccactcggtttctttctgtccagattgaccaaagtgtgcaaataatttgttccatctcttg

SEQ ID NO: 305429 - DNA, 4355 bp, Cannabis indica
agtcgagggcacgatttagtacatgtcaaagttcgggaggaaaaattactaattagcctttattttattgcaaggttgtatgtaaaatctcttttgaccaaatatgtttcacattgaacatccagacttttctgcgtggggagcgagctactaagtatttaaccagtgaaataaagaaggaactgcgtgacagtgctgcagcagagattaccagtcgctattatgatttagctgctgatcttgttagtgtggttagtattctcataacccacataaaccttaccaacaattgatagaagttttctagatccacttctatgccttgattatattggaatattgtcatgaccaggctaggaaaacagagtcttctcttcagagaatacgacaaggtgcacaacgacgtgctggtgcaagctcagacatctcggaacacaacgtgtccgacactgacaagatctgcaggcagttgtttcttgacatcaatgtaggttttgttcatttgcatattcattgagtgtatttacttgttgaaatggacactgagtttcaatgctttcttaacaggagtatggcaagaagcttgctgaattgggtgttgttccaaaggaaatgtcggcttaccgttccctgtggcaatacgtggcgccgccgggtgaggaaagtgtttttgattttgaggtggccaattggctttgattgagccctttgtagatatctgatttgtccttttgattatttggttcttataagtgtttgatttacttataattttgtaagctatagtttgttcttagatattcttattatttcttttcattttttttttcaatatgggaagcaatattcttgccttgtactgttcatctttagagtaaaattatatcaaataatttcaaacatatttttatgtataattttaaaaatatatatatatatttattaacaaaaaataataaatctatttaatatcttagataaaaaagaaagcatgcaaagaaatatcttcaaaataattttcatcgtcatagctcacttgtaatcaaattaatgtatcaccgccatctcacttgtagtcatcattaatatcttttccaataatcatcaccgtatctcattgtacataaataaattaaataatgatttgtatgtatttacttctatacacaagtaagtttttttttatgaaaaaattaataatctcttgattattgggattttaaatgtgctgaatatagaattagtcctattctaatttttagatttacaaattgtttaaaaagttaaaattaatctgcatatttttctgaattaggacactgagtgccaaatatatttttgtccaaatatttatgcaggttataattttttagtttattcaaaatacagccgttatgttgctggattctctaaaataaaagggaatatgttctttattattcttattatttgcccacttttagttatattgatgagagccatattgatcatgatttgtgcatattgttatttcatgacctagtatttgtgtcatcataagtagattatgtatgcactcacctgtacgtaaaagacttacaggaagagaattgaatctgagccacgatattatggtggttattaggtttggctacccattttttggatatcattctctatgattgatattgagagctagggatctagttgactgtgtgatatgcatttgactcttaattttgtgattatttgtgagtctctctattttgtttatacattttgataatggtgatgtatattttatttttaaaaactaaccatgcatgagttttattaaaccaagagtcatttgatattagttgtttttctactcggctttatagagtcaccccatattttttcccattctaagagctcaatttgatgctaatggatgaggatggtatcatggtatcgttgaggaaaaaattcgttattagtttattttttttttttttttccttgtttatcaaacttttcaatgaaaattaattttgtatttaagcttgaatgaatagtctggatgacttaaattaattatgtactagttaaaaataaggaatgatggatgctacacattatttttgtattttgttgacttattaaatttatgtattgagtaactatataattgtgagggatattattgttcttttacattaataagtgattctaatttcattactaatatttactttataggtacatgacctattctattatttttaaatgtgtatttcttaatataaattaaagtaatttataagtaatattttcctacaagggttaaagtgtaacttttgaccacccaaattatagatattacacatctgtcacgacctaaggctcggatcgtgacaagagcatttagagggacaaactcctaaaaaaaagcaccaacatcacaatggacataaggtgcaaaatactgaaagagctagaaaagctaaagtaaacaaaccaaacaaaaacaaaaagtaaaacaatttcactcgtcactcccctaacgcaaacgaagtaacactaaatcccaaaactagcagaacaaaaatagaggagtgctaccatctttcgacgagaaaagtccactctcagctgcccgttgtgattataaacggtgaaagtgttaggacaagggaagtccaaacatgtctttagacacaacataaaattacaaggacaaaaatatgtcaactacacacctatcttcgtctcaaaacaaaaaaaaaaaaaaggatgactagtatcaaaataatctttatcgtggcatataatatgaatattattattctaaaccaaagtaaaataaaaatgatgtttgtcaaccaaatatgacaatttttctttcctattcttcttttttctcacccgttcatttaagcgtgtataacaattatttaaagtggccaccctacctatttcccttttaagtttaacaatacaaatttatgcaaatcaaacttgtacatataactcttgtaggaatttgtacaaaagttgttatggtataatctcttatgcatggtttaaaaaaaaaaagttcttttaaatctaagtattttagttatgcaaatatgaatttaattatgtaagaaaattaatttatcaaaacaaaaaattaattgaaaatagcgtgcaatttttgtgtgaatttgtgttaacatggaacaaattgaaaaaactatataaaatcatatagaatgaaaataataaataaatatgagtattattaattgtattaatgtacacacaacatacaaaatacaaaaaaaataaataaataaataaagaattgtaacaataaattgaatgattataattaatagccactactgcatcataaccctgaactcatcaaagctaagaacaccatcaccattcaaatcaaaatgtttgatcataactttgcattcatcaatggattttgactcacccaatctagtaagcatcatactcaaacttttgggtgttatgaaaccaactctttccatatcatatatctcaaaagctcttctcaaatcttgcaacttctccttctcaccatgatcatcatgagtactcgattccatgaaattcacaagatcatccaataccaagaagccatctccatccaaatccaagcattccacagcctcttctgcctcttcaagtggtaataactcatctccaaccaatacaactccaagcctattccttagctccaaggctgatattttcccatcaccattctcatcaaagtattggaaaacatgttccatctctaaatacaatttgctcatcaccatcttattattattattagtagtagtagtaatgatatgtatagagattgtaattgggttttgtggaaaacattgttagaaattagagttatatgtactatatatatatatgtggttatgatgctgatcacagaagttgctgagagttttcgaggcattgagaaatttaggatttaattattaatgagaagtgtgttgtacttgcttgcacggtcacggatgatgggaaattatgtagtttacggctacaacacggagaagatttttcatatatatacgcaaattaatggttgattataaagtaggctgacaagactggaaaattaaaagttgactttggactttttggaaaagtccatatatatgaaaaaatgcatattaaatgaatgtcaaactttttgatattagatcctaatcttaataaaatattttaggaaaattctacaatgcactctttttaaaatggatacattgatacatctttatctattttagcatccgcaatgattttttagtcaaatattttctcatggtcatatacgttatagttattta

SEQ ID NO: 305430 - DNA, 2026 bp, Cannabis indica
  modified_base (82)..(82): a, c, t, g, unknown or other
agtttcataactaaagatatgagccaaatttcccaacatacaacatgaaaacgtcttatgtactgacaaatgttacacatanaggtttaaacgaagaataatatcttaatgttcttgggaaaattctaaaatccttaagaatctagggcatatctttatcttttatccccaaggtatttcccctacttgggaattctgcattgcgtgagttttggattaaacatgacttttagtgtctgtgtagagaaacaaataccctagccttaatcttctctatagtcttactagtttgttgaactgacctcacatctagatatttcctgttccgagtttaaaacgagaacgacacttcatactatttagcatcttatagggaaccatccttgttacactctgacaactgttggttgcacgagaacttgatcaaattagatatttgctccataagttcttgtgatttatcacataaacttgcagtatatatttcaatacttaaattgtccttccgaactggctatttgtctaagggtagaaagttatgctaaacttcaactacttaatgttagttctctgtagactttactaaaacttaaaaataaatttagtaaatactttaaaaaaatgacaaagacataccacaatttagttaaagaagtacttgttttaattggagttagccaattatgaagtcatttctttattgcatgttgccaaactctactactttatcttttcctggtagctagaatagtagtcttgtataaatagcacaaacaatattactgctaaagaatactccagtcagccacttattcttaattaactttctttccctctatttatatttatgatttggtgtgaataatcaaaagaaactctcatattggttttgaagaataattaagcactgcttataaaagaatgatgggtatggtaaataaggggagaaaatgaatatacaaaactatcagtgaataacaagataacttaatagtaaaatatcatactatatatatgaatgattttggtgataaagtattatgcaaaaagcatatataaaatatgtgacattcgataggggtgccttctggagagatatataaaagtaatggtaatggcaacatatcttagaggatggctaccaagccctttcattttttttattaaaatgatattttattataaataaacaagtctttttttaaaagtagttgtttcagtctagtttcattcagagggcaaaacattattttataaaagtagttttaatctatgcaatataatttaatatatataaacatgtattgtagtttcatcacaaaaactgataaagaaaatagataacaaaacaaaatgataaattaatgacagtcttgactttctagctgtgcgtgaaaataatattaattataataaatcaaagacagcctggctaattgtgtatacagattattattagtaacacatacctgaaaattttttatgtgcaaaatcacatactttatctaataaaatgaagaatggtcctaccatatattgcatatcacacattagaaacatagtaaaacaacattaaacctcaacattagacacttctataataatgttccatgactacaacaaataagacaatctacatttcatttttaacagtaggagttttgtataagtttatatttttctttaaagaaaaggaaaacagaataggaaagtctattggtctatgtacataggatgtttttatttcttttatttgtctctctttttaattaatcttttatgttttattgtgtagatcaaatgcaaaattcatcatcaaataaataagaaaaagatgtgaaatattaagtataaatataaataatgcagaataaaaagttatgaaactattagttataaaaatcattttccttttagtttaaatcaaaattactattattttagtgggagaattttaatattatgttattaagaaccattaatgggacttataagcagcgacggacgcacatgtatcaatgtgggg

SEQ ID NO: 305431 - DNA, 2116 bp, Cannabis indica
ttttttttgaaaaggtttcttcttcttttcaaatatatatttttttttttgagaaaattcttttcaaatatatatatatatatgttcacacaaaatgattttattatatgtaaacacaattagtcaattaaatataaagtgtcaatttataccaagaaaagtctcctacaattccattgaaatgtatgaatgaatcaatgaatgtttgataatgatgtaagttaaattatatatatatggagtatagttccatcaacaaaattatatttttcaatttccgtgtggtatttgaagatatttgtcctatgtgtatggtctaccaatcacaattcacatgatgacatacatctatgtcttacaaaataagagtaataacatgtaaagtaaattaaaatagagataaaatactgtttattttttcccctctgattcttttttttttccaatataaaagtttcttttagaaaaaagcaaaaatagcaatgcatgggccatatgtgggatataaaaaccatgaaaaataaaaaagtacatcagtaaataatatatatatatatatttgttctctttagaatatgtatatatgtatgtagatgtagtactcatatatcttcaatttcaagtttacaatttgttatataacaatgtagtgataattgctaatgggagcaaaggaatatgtgtgatatttattgaggaagcttcttcaacttttgtgccaaaccattaaaaaataaaaaataaataaaaaggagaatcggacaatttccgtatacttaaattacttgatattgacagcgatgctctttaatcgcaagcctaaaatcctaaaaggtactttttcctatacataaaatatataaccataaaatataacttaattagaattttttgcttttccgaatttaaggattttgtgcaatttcattcgatctattaaatcatgtttctcagactttaatatttactaaattatatctctcgtattttaacatgtgtcaaatcatgctacttgaactttcatctatattagatttttcttactaaaattagataaaatctttaaattcaacaatttgaatggttaagaagaatttttaacgaccaaaataattcggtacatgtcaaaattctgggaacaaaaatactaattaacaaaatatataacatatggttaaaagtaaaataatatacattaatactaaaaagagaaatggagaaaattaagatattcgactaagccggctaaaatagccgttgagaatacaaagaagattagaagagtatggagatgagcatagtgagcttcggtggcgcacaagaaagcgaggagagggcccatgagaaggtgttggggtgtgttgggacccacacacgtttgggttcgtcgtctccaagccaacaaaagagcgctcccaagtggtccccgccaccatgaacggacctcgctttttcgtccattctatgatctcttcgccctttctaatcttttaccacactcacccacttctttttctttttattttttacataaaatgcatcatattataaaagagacataatacaacatatacatacattaaaagcatatttagcaaatttataagcctcggtattaccagacctattagcatacctaatatgaaaattggacacaagaatcctagtcccctagtcccacctaaaatacaataaaaattagagacagcctggtgcacaagttaatttatgctgtaaattaatgtgtattgtgctggtcgactcaaatttttgtgtgtttttaaaatatgagtagtattttatagaattataaaaaaaatcctatcgtgctaatatttttagagttttttgcggcaaaattttttcaactataattttacttgtatttaatttttgaagttcaaattttcatggtaagactctctaaactactgaattagtagcaaatttaaagtgtcatttgtttaactgtcactatgggtagcttatgtatacactcttattcacatgacacacgtttatattgatatacttaatattattatttaaaaattattttcaaattttattttaaaattaaataaaattataaaaataaaataaaatattttaaaaa

SEQ ID NO: 305432 - DNA, 1961 bp, Cannabis indica
agtaatgaaattaaatctgtttctttattgatttgaatagaaaagattacattgaaatagagttttatttagggaacaaagcccaacagtaatcttcttcttctccactttctctgagtttttctctctcaaaaatgcagtctaaaagtccctaaatacaaagtctaaaagtccttttttataatttgaaaagcccatttaaatttaactaaaaaattgatttttcacaacttgtacggacgtcatatgtcctctgtccggcccagcggtgcttaagtgtcgcgggctggtggttcctgggaaatttgcgtcgtgtgctcagataaatattttggtcataactccttcaatataactcagaattagacgattcaagatattttgaaaatctgagaacgagatctacaactttcatgtagtgctcaaagttcaattctgcctttaaagttgtaaaaatttgcaattacgttcagattagtcaaaccaagctcttcgacttctactattttctaccaaaatgtgttaaaacccttgaaaatgactctaaatacatgattagtattcaatatagcctaacaaattaaaattacactaattaataatttaaagaattaatttaagaatattaatacataaaattatccatatttattgggtcaagtcaatttagaaaaattcgcgataacattcagtccgaatgtgcagcaagcggagcgtgctaatgtattgggtgtttaggcttgaattcagtggtgactcatgacaagtacctgcgattgttgacgaaaattgagaagaataaaagacgtacttttaagagtatttatgaaaaggtccaaaaaagagtttaaggttggaaaaggaacttcttttcagtgggaggtaggaaaattcttattaagtcagttttgtaagctataccaaattacttaatgagtattttccagctctcggttgcaagtgtaataagttgcgcttgattttgctgcaattttagtagggaacgaagaatgataagaagaaggttgcttgggtgaagtgggaactgtgtgtcaacccaaatcgagagggagattgggattcaaagacttggaattgtttaatcaagaaatggtagccaaacaagtttggagattaatgcgaaatcctgagttgttgtcgaggcatgtattgaagtacaaatattttcctaacttttccatcctagatgctaaggatcaaaatgggtcttcccatttgtggtcaagtttgatttgggtattaaaactattaagaaaaggattgagaatgatggttggagatgggagtaggattgaggctttttgagattcgtggattcctacaccaaggtcgtttcgtcctattacttgttggttgagggaggagttgttggttaatgattttattgatgactgtgggtcttggagtatacaaaagccggaacaaagctttttgcctatggatgtggatgttattcttggtattcctttagcggttgagaactcagtggatacatggtgttggcattacgatagtagtggatgctattcgattaaaagtgggtacaatttggctttaaagttggtgggtgatggaagggcagtttcttcatttgacttgcgcagatggtggaatagattatggtatttgaaagtaccttagaaggttaatatattttttatggcgtatgcatttttggtgctataccagctgcgcacaactcattaagtgaaagatacatgttcaatcgttgctccagagatgtggggaagcagatgaaatcccagagcatgccttggtcttttgtggtactttgatcccgatgtggattcgatcgaggacttggagtattttgtcgaggcttcgatctggacctttataagagctattagtggcattgtttgaggagatctcttaggaggagttcttgctggtggctacggtgtggtggtgggtgtggt

SEQ ID NO: 305433 - DNA, 2794 bp, Cannabis indica
actgacttgataagagtggcatctttcttgaaagtttagtatttttgcttttcacccttgcagcttagaggcaagattgtccaaaatgaagttaaaattagcatctttctgtttagtaaggaaaagaggtaaacccaaatatttcacattactttctggaggaccaatgcccagggcctctcttattccccttttaactccatctggcatattcttactaaagaaaatagaggttttgaccttattgacttgttgccccgaccaagtacaaaatctttccagacaatgccgaaaggctttagcttccgttatattttctcttcccatcaaaataatgtcatcagcaaagaaaatgcgtgaaagcaccaggccgccacaacttaacttaatttccttaatcttactcttccccagggcgtcctccaaaagtctagacaagatttctgctgcccagataaagaggtaaggggatagcgggcctccctaacgaatactgcaagatgagttaatcttcccaacaatgcccccattgaggcccacattcattgaagagctcgagatacactgcgttgtatccacttacgaagaatattaggggcaccaaaagacttaagaacatctttaatgaatttctagcttatcttgtcgtaagcttttactaagttgattttaatggcaaaaaaaaccttatttcccttttttctgcttaaatgaatgaataacctcctaaataatcacattattattattctggatattcctaccaggaacaaaggtcgcctgggtagaaaaaatcagccttgagaggacgggtttaatcctattagcaaagattatagaaataaccttgcatgacacacagcgagatcggacgaaagtgcaaaactctcttggggtttgggattttaggaatgagcagcaaattagcagcattgacaccttcatgcataattccagacagaaaaaaatctaccactgcctcacagaagtcgcttcccaccgagtcctaatagtgctagaagaaaaggacagacattccatcaggcccacgggcattatgactacccatagagaatagagtagacttaatttcctcagcacaaggaagccgagtaagctcttcttgttccccctgggaaagacggtcaaggataaagccatcacgaaagttaacacgaacaaaattggatgaggagaaaacattcctcagataatcagtgaattccttcctgattaagtcgcgcccaacaatccaacgattatttctatccagaatactttcaatggcattgcatcttcctctgattgcaacatacagaaaaaagaacttggaacatttattgccatttttaagccaatcaacccacactctttgcttccaataaagggatttcctttcaagggcttggtttagagattgatgaagaacaagttcctcgttccaaactcgttcacctatcgagagtttttgcatgatatctaacttgaattcgagctttttgatagtggcatcaagcttcccaaactggatcttattccaatttaacaacgttaaccgagtcgccccaattttcttgaagacctagcgggagcccaggggtggataatagaattctaagcatgggccaccacaagtttgcttctatcatcacgggtccactcctcttcaaatttgaaattccttttaaagtttgtttccaaacctccaaagtacagacataacggtcgatgatcaaagttactcgtctgaaggagaagacagaatggctttcagaaataaacacaaccaatccttgttaataatccccttgtctaatgcagatttaacatgggcattcccatctctgtggttatcccatgtcatcttatcacctttaatagggaggtttataaaccccttatagctgattaaactagagatgaaagggataaaatggtccctccctttagaaccctctttttctgaagcatccaacacaaaattagtgtcaccaataatcaaccaaggaccactgaacctatcacccaacttcataaaatccatccagaacttcttttctcatgggaatacggtgactcatacacacaggagagcaaccaagggtgagcggagggattagaataaaccaggccagaaatttggttacgccttacaataatacttttaaacacaaaactagatttccaagctagaataataccctagcgtttcccacagcaggcaccgaaatattgaagcaaaattgaagttggttaagaatacgtaccattagtgacagatcaactttgagctcggataagaatacaaaatcaggtaagcacgcccgaattagggacttcaactcccaaactgtagaggtctgccccaaccctctacagttccaagcaaaacctctcataactcctgtggaggggacacaaaatcaacctctataggggtaccaaacggcaacgagattcgagccccagcatccttatacacctcacgcaccaactgagatgaggagatgttatatgattatataattaacctatgggatgacgatagtaatttaaaaacgggaaatttaaaaatctatacattaaaaaccctaatattttatgcttaaactaatacatttaaaaatatatatatatgacacttttatcaaaaacccaagaataatcctcacataacaacaccttaactctctctcttcctctatctctctagcttctctctcaaccgaaccctcaccattctctctgcccactttgcatgaaccgaaccccccaccgcccaccacgagtcgag

SEQ ID NO: 305434 - DNA, 554 bp, Cannabis indica
ccttcatctctccaagaaccactcctttttgctttgcttatcccttcaccaatcacttccttcatagaccctcctccagaattcaatgtaccctgtgagagcaaatttcctaaagcagtcaaaccaaaagtatcacccaagaacacttctttacccttatccgtggtgcctagattggaagaactggaaagggagaacagatcagcacccattctttgaatctgtccaagacttgacaaatttggagggcctttttctttgtttatcacagaattaggagaattacaatttgtataatggactcttttctcagggaaaccagggggagctgagttgtgggcattcagagtagagaaaccatgtaccgatgaggcagaggagtctcttttgtcatctactttcaaccaaattccatagctcggcttgacattccccataccatcttcaaaacatttaactggttctgcacaaattcgagtatcatgtcccacaaaaccacaattaaagcacataaaggggagacggtcatgttgggaattattttaccaggatct

SEQ ID NO: 305435 - DNA, 1818 bp, Cannabis indica
tttttttcaaatttttaatttattatgtaaactttttttcttattaccaaatagacttttagaatatgtttgatagagatgaagagtgtaggatggatgagttttacttatacatttaatcacatcaaaataacatctatcttaagattggtattaagaaaagagaggaaaagaatggtttaaagtgtaaatataaaattagtataaaatatatctattttctttcttattaaacaataaaattttgctctccctaatctcactctccatccctctatatttcctttatacttgatatagtgttggtcataaacatttaaattataacataaacataattttacttttttagtaacaaaattgaactctaaagagccaaagctaggtacatatataaaacaaaattattgtttctgaatacatatataatgcaagaacaagatgtatagctggatttgtgaaaacatgtggataaactaaattaaggagaaagggtttcaatatatttttttgtcaaaaaatgagaaaagagaagattttttctaattaaaacaatgggtagcatatatagattgacaaaagagttaggtgtgtatgtatgcatgttttgtaattgccaatgatatagttgataaaagagaattgttaaaatatattattggtgcctaacatcctcctcagtgtcatactgatattgttataactaagtctcgagtctcatataacttaaaaaaatagtttttagagaatctactaagcatttataaaacgtcatttataaaaaattctgagtaccactgatattcaataacaattttagtgctaattacacttttgaaaatttttaggacagcgctttttcactctaaaaatttcatattaaaatatattgttttcttttttttttttgaaaggaacatatttaaattctctagctaaaaaaacacaacttttgattattataataattaaattttcattcgaagaaaaataattaaaaaaaaagttggagttctactactatgtggtttgatttaaactggtaccaaattttatttatttattttgagtgactttattatcatatcgtttacgtatcaaactttaagaacaatgtcgtttacttttgaaaaaacgtgaagtggtaaaattaaaaagaaaataatagtaatggcaggttccaatatgttatttattagtttgagaataaaattgtcgttgaaatttgtctgtgttttgtcccacattatttatatgtgagtaatttttgactaaattttaggggttttttcaatattatacctaaaaataattttatttataaaaatacctttaagaaaattatttgcacaaataccgttgtgccacgtcagcatacataccgaattccaaaaaaattaccgaaaatgaaaaatctcgttttcagaaatttttcgcttttttgggagttttgaaaaagtaaccttttagttacttttaatgtgaataagatatcaattggttatttctctattaaagaatttattttagaattttattcatatataaataataaaataatcattttaatgtgtgagaaacatatgtttttctgtctctaaaaaattacgattaatattaaaagaatcttttttgtttcttttttatattttcaagctatattatgttattttatagtttaagatacattgagattatttttatttaatgtaactcatatgatgttttagataaccaacaacaataattccctaaacaatttgatatttacatgcagagatgtaattaattttaaaaaatatagaataacttgtgatg

SEQ ID NO: 305436 - DNA, 2081 bp, Cannabis indica
tcaagatcctcctcctcaattgaaaccgcaatatttcatcctcagtatccccattgtgccaacttgtcgaagccataactatcaagaaagacacccgaatcacccagccaccacaaagaaccaacaacctcaaaacgtcaaccaagaaacccgacaatcaagaacacatcaaccaagcaacctgtaaaccaagaaacctagcaacaaagacacccgataactaagaaacctccaaactatcaccacacaaccttaacacctaaacactaacaaaacaacatagaaccaaagaaacaaagaaaccatgccatacgacaagaccaccaactcataagaattaacctaataacaataaaaaataaaggaacaaactaaaaccagtaatttaaagaaaagaactaaacaaaactaaaaaaagtaaaacagagaaacaatgtggctaacaaataaaattaactaatagtaaaaataataatagcagaaacaaagtcacattgtctctgtgatcaaccaaaacgaatgctatcaaaaaacagtaaaaacacagaaaataaaaacactaaatccctaaccaaatcgttcaagaatcagaagacaaccgcctgaaaaccaagaaacaatgtcaccccagccgtgagagtggtcccgtaaacctgttaacgcagaacggaagacgccagcgacgacgatgctccgggagtcaactcgcatggatgccggctgactgaaccaaacagaagatgtcggcgacgctccttcgcgaaggttccaaccaaacacgcgatatttctttgatatttcctttagttgctcacgtggccctcactgtacttcggctatgtaaaataaaaaatagcaatttgacacttagattatgaatttgaaagacaattagcattaattatttatattttaagattatatgtgaatattttatattgtgggtcctattttcaaaaataggcactaggattataatttttcaattttggagattttaataaactctaagtgtattatatgtgacatatatatagaatatggtattggactattttacctctaagttttaaggtttattaaaggtaaagtgagggcaaaaatgtaattttgcccaaaggttttaaagtttctctttagtggacttagtagaatttttcaagggattaattctgatttttttctatcaattaattcaatatttttaaaaaatagataaactttagaaaaattaaagtaaatttctagtttctctctcttcttgcttggccaaaaagaacttaggcaaaatcagagtgttccttcttatttttctggcgattcttcatgatttctaacttaaattcaagagtgttaattaaatgtaagatcctagtctttttccttaaggtttttttttttttgaagttttctttaagttgaagcatgcaactctggtgtaatggttttgtttgaaccctaagctataaagaatttttttctgggttaattttaatttgattggtgttatttgagctagttttggtggctagtttagtggttgagaaactcaaacttggctcaacaatgtcatttttttatttgtgcgttttgctagttgttattgcttaggttttgtttattgatgtgtaaatagatgttctaaaggttatcttgaagtttagggttgttttgtgctcaaagtaggacttattttttcgcagcagaaaatggcagacaatttttgtggaaacaatctatcatttttgctggcaggaagccagaaaaacggtctaccatttttatagaaacgacctaccatttcttaggcagtttttccatagtctcattttttatgttttctagatatttagggtattgccaagctatttatcgatagggaaatttctagttttgggtttaggtcctcaaaaatattttagcaagttgtttacctattttgtgtgattgtgacatagggcatccgttcagcgcgtgaatttccattcaggttgactgacacacttgaatcagggaacgaggtaagattagcataaaatgtgtatgtaacaccctaactaacataggcgtattacgtgatt

SEQ ID NO: 305437 - DNA, 1018 bp, Cannabis indica
cagaagaggaacaagttattattactactattaggttaaacaaccagagaaagtatttatgtattttttaattatattatatttgtttattatatttattttcttttctcccaaactgggatattgtaatcctttcccccttaagggggtgtatcttagctgatctgatcaaaattgtggttttctcatcaagaatgagttttctctcttagatgtatgtataataataaaaataatgtattcaattgacattttccaatctaaaattctctgtgatatataatatttgattgatgcttaacatcctaatcatcctccatcaaattcaattcaaattcaattagaaaaggaataataataaaaaaaaaaaatgggttagtgataacattgtcaaaattttaattaaaacttatccaaatctatcagatattcaagttttattagtcaatttaatattctttttttcccttgcagcaatttaatataacatgcttaatgtgattcaaaagtttatttgatatgatattgaatatcatcatttttagcttgtctaacattattaagtataataatttgattccatggcatttcgtttctttttgtttgcttcttaatatgtctcttcaacaaaatctgttgtgtttttatgaccatgtttacttcacactaaaaagagaaaacagaagaaatatagataatgataatgttttccaatctcagtgactaaaaagccaagtgggtcgtttactaaaggatcttctagataaacaatatgttaatgaattatgatccataattttgaccgacaaataaaaggcaatgaagattatcattgcatcaatatattgtgaaattgtaatggtatttcccactcgaagaaacttgagaaaacacattatgagattgatctatttgttatggtaaacacgtattatttattattacgattaaggtaaatagcgccataagtacttaaagttttaagtttgtaagcggcataaacttaatgtttattttt

SEQ ID NO: 305438 - DNA, 2378 bp, Cannabis indica
aaagtagatctaataattcaagaatgccatcagtcaagcatttaacataatatcaagaatcaaggaaatctgaatgatattctcttcgagactcgtgtcgaagtaaataattaccaaaatgataactctgctccacgcaccttgtcgatgaacgttaatcccacgaactacaaaagcgatgccacatatcacctcaattcaaaaaatgaaaagttattaaccacctttaaagctaatatggaattcctaaaggttttaccttttagccttcacctgtatatccatgcagtctaaagtaagccttcacaactcacagcgttccaaaagcttgggggtaaatgttatcttgttttgggaaagggacatgtgaagtcaaaataataaatatagcccatatattcaaggcccaacagtgggccctgataatatcacgggagtttcagtccataaagtcgtgactcttttcgggtaaaaaactattaactcatccaagcgagagtctatccagcatggtcaacatttgaaaagacatataaccgcgtaaccgaaagaagcatgcaacatatgtctaaaagctcagtgtagttacttgttttccactaaatcgtaacaaatctgaaattactttcccaaaattttgggcaaagatcatatcttattatataaggaaacatagtaattgatgatggggtaattaatatgatattattacccacaaagataggacacgattttgacaactagcatcgtgatatgacatccacatcaacatacacaaagtatctcatgagtcgagcttcaccatataagtccaaaatcaatgtattatttgtaaactcctcattagagggggaaaaggtaactagtatgatctttatgctctataaatactaagcaaaccctacatacaaagggttggaacttcttggctcatttgcttatgcaaaaattgagtgctcatactttattgtaatcccttaagcttttatagcttctctaaataatactgactcgtagactaagactaattaacgccccaaccacatagaaccttgcgtgtacttattttatttcctttgaattatatttattttgctcatatatttaaattattagtttttcaaaaatctttgtaaacaaatacgaactcgagggctacatggaaatgctaaaataagatcagtgagagattttgggaatgacccttatggtaataatatcacaatagtataatatttagcttacctaaaatcaaactgggttgttttgaagagatcgaagtgaagttgccattagagcttgtgaaaggaagaaattgagctcaattgaatttgtgagcgataagattaagctgagtgttctcaagtttaaagttgatgaagctacttgcctttgccgttgctgagaaatgttactgcaccactagacaaacacacacatatatacacaaaaattttagatctacaccctagatctcatatctatttccccaacaaatttgaaacagatctgagatctccacacccacaaacctaaaatctcgtccccgtcgaacccatgaacccgtccccatccctgtcaaaccacgaaccatatccccttacctgtcaattacgaacctattctgcacaatcatcgcatcgtaaagtaagatcttagtgcagaggtcctcggggtaaggctatacaagcaattgacattagtaaagtcattgagcagatcaagcccaaccacatcgagcttcccgacgacgaggattgtaagcttggtgtcaagatcagcagagccaatcaataccaaacgacgagactggtggcggcaaaggatagaggaagcttggacgagagagaaagggaggcatttctaagaggttaaagatggagggtttgagaagttcgggcaaccatagaaaaaaaaaagaaaaagaaaatatatttttttaatgatttattttttatttttaaatatttatttacgtgtgttaataatattatgttatgtgtatattgtgtccatgtggacaatactctatgtacatatagataaccaacttggcagttaattaccgaaaatagatagaaataactaaatgctaacaaaacacatattttgagggattttgccgttaaaattaacattttggaggttaattactagcaaagtgaaagtatgaaaaattatggcgtgatttactctaaattacatgaattttgatacttaattgcactaatagttatattgacatgtaagaagatgttagatactacaaccttttagcatttctcattaatttaagaaagagttgttgacacctaaaccctcttaattatcgtttcacttgtgtttaactctcttagctcaaattttagtagtaaaac

SEQ ID NO: 305439 - DNA, 1147 bp, Cannabis indica
ttatgccgtaaattactctaaaaaaaataataacaatgtagtaatttattgtgagattagggttattagttattaccccacaaaaagggtcaaaattcaatataggagcggattttgaggcagattgtgttgcagattatgttgtgttctaattctaaagcccatttattttgcttatgtgtttagtagtagagatgcatgtgatcttgacccctcaacatattcaattcaattccaccattatttttaaacctaattcatttattacacccacacacaaaattcatattttaaattttgattcctctaatttattttttattttttaatttaacattgaggtgacagaattttatactacaattacaagtggttgatgtcttaaaatatttgtacaaatttaagatttggtttcaagagttcattatattttttttttttggtattttttatttgtacaaatttaagttgatcatttataaatatgatggatgattggttagtgttattttttattttatttttaaataatatattagttttataaattagtttatatatccattcgtattactctcatacacatggatgttaaccattttcaaacttttgcctaggtcaaaacttgtagatattttgggtatatttatgattaagaaataagaaggttggttatggcctttacttgataggactctttcccatttatatcttgaccaagaagagaaggaagttctataattgcgatttgagttaaagcaatgaaacaagtgagtgaactacgtgtatgtgtaggacataatcgcaacactaagagctttcgagggagacgaacacatgcaaaatacttgcatgcttgcagggagaggcccttcttggacaaaatcacaataagttgagatgtgaacactttcaatttatttgtttcattttacttttatatattgaaaaacttttaggtagagctggttattaagagttagtctcacattgttaatgtgtagaaataaattgtgatatataagatgaatggactactcctcccattaccaattggttttgagatggaacctcattcatcttattcccaaattctaacatggtatcagagtcacttgtgatccgttgtgagcccaaattgtcaccg

SEQ ID NO: 305440 - DNA, 2078 bp, Cannabis indica
actatatttatatatatatatatatatgaatatgatagcatcttaaagagactctaaagccaaatatatttaatacacatataagtacaagggcataatttttttagcgacaaagttatataacaagaattaatgctattttcgatcctgtattttactaaagttatcgattgggctttctgttttataaaatgatatattagacattgtattttctaaaataatataaaatagtattatgagccaatttataactaacttgaaaacaatttctagtacaatcaattgcaagaaaatgtatccagttttgtcataacaattttagatcgggttattattaacttttattttaacaaaaaattaagttaaagtattattttgtaccattttaaaaaatataaaatctaatttaatatttaacaaaaataaataatttaatggataacttttgtaaattatgaaaaattatattttacccataaatatatttttatatatataatatatatgatagtctcttaaagatactccaaagccaaacttatgtctgagaaaagggaaacatatgatattgtatatgtagataattcaataaggccatgcatgtgaatgatgatgattctgattccttattgtggagcccattttctttattgggggcccacttaaacgtgatatgtaatatatgggttgggcagtgaattgtggaagctttctattgggcccatataacacatggacatcctctccaagtacatgatcacaaaaatgacccaaacagatgttgactcatgcatgtgtatcaaccaatagatacatatattttggtaataataccatgtcataaagtagctcaattattatatttcattaagtatggtagtcttacaaaatattaattattaataaaacttattcatggttagacatacagggtacacctttaatcaagagttagatcatggaccaataaaatgtactattaactgtatctgataaagtatatttaatttcaatccctacattagcaaaactatcatttttatctaatttcttaaatacagatttcgttttaaatttattaaaagaatatttaaaaataactcatacactatatttacatccaatctaataatttaaaatctaaattttacaagtgtcatattaaaaatattaccggagcttgtaatgacaaaacttgattaaaattatacttctagtaatatttaatatttatataccgctaaaaaattattgaatttatattaattataaacttaaaacttttaagtatttatatcactattaacctaatttatttaaccaaaacttgcacaagttagatctacacaacacaaattagtacaaatattggttctgtctcaaactatttattctatctttttttcaatagttagctagtacaaatttcttgccaatttttcagaactcattgtaaatgtaccactttttttaggctgtgtggacctcaattattgtctcataattataatggagttgagtgtggcattggaaaatgagactaatattttatgaatattagctcacaaagtggatatggcttacactcagagcaagatttaagaaaccataatgtttgatttggtctttgagatgtttttatgaagataataaggttgtgcagtacctaccaagtacaataattttttttgcattaattgaagagaattatgaagatatactactattttctttttatgtcataataagtattattaaatatcgagtttcatataacttaaaaaaatactcttaatgaagatcactaatcaatcgtagaaagttacatataaaaagtactagacactactagtattcaataacaatgttgttagttgaaacaaagaaagaaagatcagaaattaatacttgtagggatggataatatatctcactaaattcattaatatttcaatacttggtccaaaatcattgggcaacagcaacatttgtgattaagctgtttttggattaatggtcaatactatgaagcaaagaataactagggctgttcatccgatccaatccgcactttt

SEQ ID NO: 305441 - DNA, 3179 bp, Cannabis indica
tctctctctctctctctctctctctctctctctctctctctctcactattgaattttttgaattctttatgtactttctactaaaaatcaatcctatagtgtattgagtactagcccaatacatttaaggtggtactcagatctcagtagaatattgtggaaaaagtatttgcaaattcaaaaaaaagatctataggctcattacttggcaataccttactacatatcgaaaattaatagttagagtaattaaacagaagaagacatttaattctgctacaactaatgtgagaaatttacaatcttttacattttatttatcgttttataaattttatattttaagatgtaagattattatgtaataattaaatatacataattagtaaattaagatcttggtgaaatgaattataacagtaacaaccaagtttaacagtttaagtaacatttaatagcattaattagtctaagagatgtatatgtaaatagatattagggtaaataatggcataagtacctaaagttttaaatttgtaagtggcataatcccatgaaaacagaggtctattacatggttgcaaagtggcaaacaaagcgccaagaatttcacatatgctattcgctgacgatagctatctctattgtaaggccactcggactgaggcaacaagagtccaacagtattgagcaaatttgaatcggcatctggttagaaagtaaattgctccaaatcttcaatttttttcagcacaaacacaactttgacggttcgtgaagacataagcaatttacttggtatgtctatagcgggagtcaatagtttgtatctaggattgcctagtaccatgtctcgcaacaagtcggatgtgctaggttatttgaaagaaagagttcgcaaacgcattcaaggttgggaaaccaaattcctgtcacgtgcagggaaagagatactcatcaaaacagttgctcaatcccttcctagctacgcgatgagcgttttcttgctaactcttgacatcacccgagagatggagaagatcatgacaaagttttggtggcaatcttcagagaaaactggcaaatgaattcattgcctatcatgggataggttgtgtaagcataagaaaaaaggtggaatgggtttccatcatcttagagatttcaacttggcattacttggaaagcaaggatggagactaatatcacaaccggattccttggttgctagaatctttaaagaaagatacttcccaaacaacaattatctcagctcggcactaggtaataatcctagttttgtgtggcgtagtgtctgggaagcaaagcaattggtcaacaaaggtcttcgatggtatgtaaggaatggtaatcaatgtccttgaagaaccttggctgcctagtactgagaaccctttcgtcacatcttaccatcccaatctagttcatgctaaagtccaaaacctgatgaaagtggatggtacagggtgggatacagaatttctaagagatttttttgatgatagagaagtaaagctcataagaagtattcgtttgcagcctagtgtaactaaggatacgttgatatgggctgctgaaactttaggtatttactcagtaaaaagtgcttactatttgcttcaacaaactaatggaagttgggataacaatgatgatgatgtctctaagttctgggcttcactttggaaacttaaaattcctccaaagatcaaaaataccatgtggagagctgcaaagaattgtctccctaccctctgtcttctacaaacaaagaaagtaaatatcacttccctctgccctgtttgtagcattgaagaggagacggtccttcatgctttagtcacctgctccagcatcaaattggtatgggatcgagtgggaattggaacaaatgacctgccaactgccagtatctttatggaccggtgtattcaggtttagtctggtgcggactcaagcaaaaggggtctgatttcggctctttgttgggatatatggcaagctcgaaatgattatgtttggcaaaaaaaggtggttagggttgaaggaatttttgtgttagctacaggttatcttgatcaatggataaatgctcaaaactctcgtgttgagacatcatggtctggctttcagatgggtgatggggttgagcaatggtccgctccaaatgaaaatagtatcaagatcaatgttgacgcgactctttttgaatgaggaaatagttatgggataggcttggttgcacgtgatcaccatggattcttattggaaggtcgaactgatttctttacgggggcttctacaccagaaattgcaaaagcaattgggattcgggaagccttgagttggataaaaaagaagaattggcaaaaggcgatcattgaaaccgattgcttgacggttgtgcaagccattcgaagttcaatccaaatgatatctttgtttggacaaatcattactgaatgtaaacaactctatctagagttaagaaatgtttctatcattttaattaagcgatcagctaatgtggtagctcataactttgcaagagcttctatattattccctggttgtcgtttcggtatggagtttgttcctaccgatttgttaccttgtttggtaacagaatttgttggttaataaaatttattttccattcaaaaaaaaagtggcataatcctaatatttattttagcggcataagtacccaatgtttgcaaaattgtaaatttttctaattttgtcagtacaagctctattattttcttaaacaggccacatataaggtctaaattcttgatcattgggtctagacataaacatgtagtatcagttacttccaaatgttcctttaatatattcaaaacagagtctgtactgacaaaactggaggaaaattacagttttacaaacattgagtttatgccgcttacaaacttaaaactttgggtacttatgccgctatttactctagatattaataaggaattgtagcaattacttatcaatatatatatatatatatatatataaaggaaggttttaagagaggtggggtggctttctataaagatagtattaccatctttctattttatggtaattttaaattttttaattattttttataataatactaaattaaaactaactaatta

SEQ ID NO: 305442 - DNA, 2491 bp, Cannabis indica
agagagggactgaatgttaaggttgcaggaaaggttctatacatttttggcatcattccaaattgccttaaactactagtgttaatttcctgattaaccaaaagtagttgccaaagatatagaatccaatatcccaagagagtagatgttagtgaagccccctgttttgagactgccagactttactaaagagtttgttgtggagacagatgcatctaatgtgggcattgggggtgtattgatgcaagaaggacatcccttggcttactttagcaagaaacttgggcctcgtttcataggagcttcagcttacagccgagaaatgcgagccattgtggaagccgtgtccaaatggcgtcaatatcttttgggtcgacattttacaatccctactgatcacaaaagtttgagggaacttctcactcaggtgattcaaactcccgagcagcaacacttcattcgcaaactagtgggctttcaattttccattgagtacaaggctgggaaacacaactcggcagcagacgcactatcccgccaacatgagacttccttagtatcttgtcacctagccttgagcacttgccgttttgatttcttggatgagctacgccaagaaaatattacttgtcctgatcttcgctgccttcatgaccagctccaacaaggcacattagatgctacacaatactcagttcgagatgggctgctctatttctgcaacaagttttttatcagtcaacattcctcgctaaagcaaccacttttgactgaatttcatgctgcaggagtggacagaacctttttacggttgggagctaactttttctggcatggtatgcgcaaagctgtgcgcaagttcgtctcagcctgtttggtgtgtcaaaccaccaagtactccacaacagccccctatggattactccaaccccttgaaatacccgaacgagtttgggaagatttggccatggattttattgtgggactaccgaactcctttggtgtcacaaatatcttggtagtagtcgaccggttcaccaaatatgcccactttggcgctttaccgaaccattattcagcaactaaagtggctgacctcttctcccatatggtgatccgtctccatggtatgcctcgctctatcgtgtcggatagggaccctattttcacaagtgccttttggcgaaagttgtttgaattgatgggcacaactttaaagatgagctcagcttatcatcctcaaacagatgggcaaacggaagtcacaaatcgttacttggaacaatatctacgagctttcactgctgagtacccaaaacagtggagtaaattcctcacttgggctgaatatcactataataccagccaccattcagccattggtatgacaccttttcaagctgtttatggtcgcccaccagccactattccttcgtatacacgaggatctacaaccattcaagctgtcgaacacgatttggtgaccagagatgaaattttacagcagctgaagcacaacttacagcaggcacaacatcggatgtgccaacaagctaacaaaaaacgcagggacattgagttcaacattggtgacttggttcttgtgaaactccagccataccgacagaccacggcggcaatgcgacttaattcgaagctcagtcgctgttattttggcccctttgaagtgattgcgcgtgttggtccagtcgcgtacactttgaagcttctcgaaggtagtcgcattcatcctactttccatgtctccttgttgaaaccataccaaggcacttcctcaccaacttgcttccctctaccggaattgagtgtggctaacaaaccagttgtgttgcccgtagccatccttgccactcgagttcatatggtcaacaacactccaacaaagcaagttttggtacaatggtctttgagtaccccagaggatgctacctgggaaaattttgacactctcatccgtatctacaaactagacaaccttgaggacaaggttgattttgagggggggagtagtgttagtgaagcccaattaataagcccaatacaactcaacttagaggcagcccatgaacaaaggaaaaccttggcccagcaggaggagaacttagcagctgctgaagggctatttccagaagagtgcaagtcaaaaactggagaagaagtttcactcgaaaaaacaggggaaggagcggctcgaaatcggcgtggacgtacaaaacccggctggctgaaggagtatgagttgaagcttggtcactaagagagagtgagatacttgtaactaatttctgttagagtgaatcaaaattagtagaatatataaagaaatacttgtaattactgagaattatcctgaatgaaattggcattgaattgctttggagattagccttgtctcgaagaaggcccttagctaacagtagacttatagagaggaatttcacattatcaatgattttgtgattaaaggaag

SEQ ID NO: 305443 - DNA, 2653 bp, Cannabis indica
accatattgtagagctcgtcgcacatttcgaaacggtaatttttaaaaactataaaactcgaaaatcccaattttcgcactcaccgaaacactaccaaaacttatccaaatcactccaaacttcacaaagagcatatataccataaatattaccatccttacgtaacaaaaataaaaatcaaccccttaaatgaaaaatgccattaacgtatggactaagctttaaaaagttccaaactcgatttctaactcaaaatcatctcaaattcaacaagaaaatatctgaattagtccatgactacccgagaacaattctataaggtcggaaccttcataactattctaattcacaaaaccctatacgaaaccaattatttttaaatttaaaacgaaattaaaccataccttaagctttccctcttcaaggatttgctatcctgctactaccgaagcttagatcgctaagttttagattgaaaatagaagaaaataattataggggagaaggttttatcgaaagagggagaacaagcatttcctttgtcattgttcttttctactattataacttaaaacttaatttatatatatatttaaaaagaaatgagcagttttgttacatatataataataatataatattaatatattaatgataataatataatattaataataatattaataaattttttattattaatagttatcttattatttcttagccactgagaaatctctatttttatagtatttgactaacttcgagtaccctaaaatacccagatatttttaaaatcaacttattctaataatcccatcaatacttctaactacactgttgtgatatttttggcctccaattggatttccagggtcgccaaacatgaaaatatttttatttcacaagtaactcatatgatatacacgtatttcaaataaatctccgtaattaacaacaaattacgcttatttactcacttatagaaaactttaaaatttatgctgaaataaattagtaggatcataatcccacttattacttgattaacccataatataaatataaaccatattatttactattaggcttatcaggatattacatatcttctttcactcttttcctttttatgcatgttgttttagcctttatcttttgcttgttggttagccatttattaggttattttaggatgctttaagctgctagttccagcggccagagcattgaaccttgaacatttcttagggttgatcctaagccacttgttaagctttggaagtgtcaaaaaataagttcttcttctagatgttacattttatcagaattagggcccttttatggcacatatagaatttatccaattaaattttatagtagtgtaataggatcttaagtttattcctaggcccttagggtttcactgggtcaattcctttttggtacataaattaacagtttgagtgcaatattaaatctaaatgtagtgataaagtgtctttctcctaagaggctaggctttcgtgttccaggcatagctttattttttgcactaaacataatattaatttgtgcatgcaacaaggttggttaattaaactagaaagaaaaaaggttgaaaatgcatcgaagtttaggcaatattttcatttccacaattttaattaacaaagctgacttgattcacaacatatttacctttcacaaaatgtgataagagagcagctgaaagcgttgaagatcaaatgcaaatctttcttctccaagttgtttaggtatatggttgtgaaaattattttgcacatggtaagaaaaaagctgaaaatgttacaaattttacgcaaagttttctacacctaaggtttcataagtttcgatgaggaaactaatgacagaattcaaatgggcagaatttaaatgataaaagggaaattatatatttttaggggcacatagctgtatatactaccccaaagtgagctgagaattcgggcgtctccaaattcctagtcacttgtttgaaatgaagcttgaagccgaaaataaaatgcatgttttggtatagttattctaatttcatttgattatgcttgaaagggtacatttaagaagaaaaattacaaaaaaatacagttcaacagaaagaaaatatttggatctagacacccctagtttagtgatagtatcgacgtaggtgatccgcaatcctggctcatcgaatttttgatccatcatttttttaagttggtaggtactgttacccactttatattggatttcataggatcattcccagtttggtcctaagacccccacttatggttcttgagaagatgggaataccctccttaagatatgatctacaacttcgaatgcctggctcttaaatttagaattgaagtgcctggaaatcttgccttggtacattattcgttgggcttgtaactgttctcaaagctcctcaattaaatattgagattcttgaagcagagcatggttttaggtttggtcataagttttgcgtgtaatggaaaggatggtgttttctactaggatgatagccttgcatcaatctgttgaccaaaattcattcactcatttattttgatgataaacaaatatttgattattatttgttactaatctttt

SEQ ID NO: 305444 - DNA, 1858 bp, Cannabis indica
atgtatatgtatgtatttaagtaagatgtaagtatacaagtttgtcagaggagcaaaatcttggatattcattgggcgggagaggccagaaaaggggtggccagaccaagcagaatcagccaacaaggagttgactgctttggtggggttgtataggtcccaccacacatggcttctagtgttgttgcaagccatctccatagatagacacccaattgatgcaccgtacaaccccagtccacaacaagcacttttcacatcatcaaatcctgcaaatccacaaacacttttgacattagtgtcccatcaaattctataccagaaatgcatgactgccattcagataatataacaaatagatttcattaccatagcgctctggtttagctatgatctctttgatcccttgataaacatcaaagaagagtatatgggcatcaggcatttcttcattaagctctataattttctcctccaacattatattgaactcaagaaccattctattaaccttttcccaacatcctcttctcctgtgttgactagcttcaaagtcaaatgattcaaacgccattctaggagtgcaacccaaaggcaatatcccctggcatatgatcttcctgattttcatatcatgaagactcctcacaacattgatcatttcagataccaaaatgtgagcaaattcatggttactgtactttggtgctccaacagaggaaccactgttactataactactcaggtagaagttaatgtagtcatctttcccaaatgaaaggtaataaacggaggatctaacaaaccgaagcgccatgttcgggctgagctgaagttgcaagagctccatcatctcgaaaacttggcgaagctgttggttaagagattggtagccttggctgctggggttcattattgtggcttgtgcagagccaaaattgagtcctgtcattaggtctccaattgaaccattttgagtgtagaatgacaatgcatatggcaagcccatcttctcagctgtcttgatcataaaaatagcaacaattagaattgtaaaaccaatcgttttattcgattaaataacaaactacaaagaaatgttctaatgggtttgttgcatttggactaaagaatttgaccttaaatagcaaaacagccaattaattatccaagattaaagaagaaacaaagaaaccgagtaagagaaagagagttaataccaagaagatgaggaagaagattgccatcagcgccattgcaaggaattagggaaagatttcgatgaaggcgagaatagaaaagagtgttggttccacaatcgaccgaagaatccccaaatacgtacaaagcagagacatttctccttgcggggaataatggaatcctttggccatgagaaccgatacatagaaaccccataaccatgaagaaacacaagaagacaccattatcaagaaccaaaacctctctcatctcacttctctagttcgatggttcgcttttcttggattcaacttctcttattcacttctctcagaaataggaaagccaaaacgagtgaggaaatccaactgaggactcttatatgttgcgcgtttagttattatatatatgttacggtttaatttgttagttaacgacgtaacggtttcttttcttgactccagtcttgacgtgagttatggatggttgcgggtgtagttttttatcatttttttaaacttatttgcggtttttttaattttttaaaatgaacgcgcattgcgaaactaagaaaatgaaatttgattttctatacttacaaaacttaatttttttttttaaaccaatacattttacactacaaaaaaatatgaca

SEQ ID NO: 305445 - DNA, 1840 bp, Cannabis indica
caattcttattcccattcttatttttatattttcatctctccaaaaacaaacgcaatgtgattcatggaaaatatgtgaaacttcatttgtactagtgcaaaatccattatggctagcagcttcatgcaatgctacgtgtggtgcccacacggtctttaatcttaattattatttctctatacccttacttatataatttgctctctttctgcatatacatattattattaatatttatttgattttgttttatttacctatgtgatttaatttccagttgtcacatacaacattacaaataggaaacatctcgcgtggtatcccatgattagtgggaccattctcttttaatctaaacttgtttaatgttctaatatatgctaatctctaccaaattttgggagaaaatatcaaataaaaataaacttatattcctttgattaaggcactaataataagtttatataatcaaaatgcaccttattacttaaagtgtattcagtccagccattttctactcataagtccaatattattactcaatatatattatataatatatcactctgatccttctaacaagtactactaattaattaattaattacttttatatttctgtattctattaataaatctctgttaatttctctgtttatatatacttaattggttgaccaacagttttatatattttctttaatgatatatatgctcaatgattataattccaaaaaacctaaatgggatatattggtagctgtgtactgaaagcacatgggaatatatatatatgtttatatttaaaaaatataactctctctttctcatgaataatattattattaatcgaaagttgataccttatgttaggttggtaggcctcttaatcaaaattttgggtgttatttgattcgtccaccgactaattactcaattatctctttgttttgggtatttacagaaaagtcaaaaaacatatgtacatgaagtttgactactacaacaagttgttatccttataaactgagccatgcatatttattagctggagtcaagtaacaatgggtctggttggttttttatgtagtggacataaaaatggtgtcaattatatatatgcatgcaaatgcaatgaatacccaataaagagaaaataaagttgacccttttctttattttcaaataataatcacgtaaaattggtatgggataagtttcaggcacatggatgacacaagtggtctctgatttttcactctttttttttttgtttgcttctgtttctgtttataattttctataatataataaagtgttatctgaactgaaatagtacacagttttcaccatttgccattttcccaagcacaaagataatgcaaataaaataataataatttaataataaactaataatagttaatcaatttatttgttcacaagaaaatttgttcggaatataagatttttattttgaaattatatttacggttttacggttttagtttatataattatctattgttaaaggaacttaatatctgcgtctgtgggcttttttatttaattgaagtccagttcaatttagggttatattattaggttcttaactctataaatacaaattatgttattattagtgatttaaagagaaaaagactttctaaagttagcattcttccatttttttcaattattatttcaagatcaatcaggtatgtaatttatattatttcgttacaatagtattctaaattttatgtaatttaatatgttaggtggcgtttaattagaggtaatgaaatggaatgaaatgaaaataatttttattctatt

SEQ ID NO: 305446 - DNA, 2675 bp, Cannabis indica
gtcatggatttatggataattttaatctgcagctgctccgtgctatacactccctttggtccccatcagtatttcaaaacctacctgttgaattgaaagctgccatggcaatgagtgatgttgagcgattcagtcttcttggggaaggaaacccctaaattatcaaaaactactgggttaacttatgctgaatggaatctcatatcagcatgggtaaagaaggattaacagagataaatgaaacagacatacgaaattggttgaaaggtatcagagatagtgggtatgtattgcttcaggtttttttgtttctttgcttattcataatagttagaacataactagtaaatgataatgtaaacaagggaaaaattacaaacttaaaagatacaagctttgagcaattagaaatctgagtacatatattgttttaaacagaaaccatgttccctttcttctaaaattttggaaagcttactcaatattaaagttctagcttgaagttttttaaatgttcaaattttaattctaggtacaatgtattgggcttgtccactaccattggggattccttttttaagtgttttggatgtgcattctgttgctttagctctggtggagaacataaactcgatggaattcaggcatgcaagacagcttatccattcagtttttatacctttggtcaagaattgtccttctgatatgtgggatatatggctggaaaagcttttgcaacctttgtttctacattctcagcagactcttagctgctcctggtctggtcttctaaatgaaggtagagcaaaggttccggatgcgcatggcatattagctgggtctgacttgaaagcagaagtgatggaggaaaaactactcagagatctaactcgggaagtttgttcgctcctctctgtcatggcttcacctcagttaaatacagggttgccttcattggagcactctggacatgtcagtcgtatagacttgtcttcacttaaagacttggatgcatttacatcaaactccatggttgggtatgtgtggtgtgcaatgcttattaattatagccgttgatatacagactgctctaacaacacattcactacttcaattttgttctcttataatattgcttgattgcagttttcttttgaagcacaaaagtcaggcccttccagcattgcagatctgtctagaatctcttaggtggacagatggtgaagcagtgaccaaagtttcttcattttgtgctgctttagttcttctagctatattaacaaataatgtggaactccgagaatttgttgcgaaggacctgttttcagctatcatccaaggtctagcacttgaatcaaatgcatatgttagtgctgaacttgttggtctcagtcgtgaaatttttctctatctttgtgaaagggatcctgccccgagacaggtatattgtgtcacttcatccttctcatatttcatgattgtatttgtggatttagctactttgaaagaatatgtaaacaatcgttaatcaaagtaatatgcttctttggatgtatcaggttttgctctcacttccatccgtcacccataatgatttgcttgcttttgaggaggctttaacaaagacgtctagtatcaaagaacaaaagttgcatatgaaaagctttctcttatcagctacaggaaaccagttaagagctcttgctgctcagaaaagtgtaaatgttatcaccaatgtaacaagtaagcactttcactccatcgttatctgacattctatttctttttccatgtacttgatggtgactatgcttaatgccatgatataaccatttaaatttattattgcactaataagattttgcttttctctcccagtgaggccccgaggaacgacaaatgcggcagaaaccagagcagatgaaggggacagtattggactggcatccatattgtgatggctttgacgaaattattgtacagaaatgaggttaccttaaagaaaaatgaaacatgttttgtgtagcatactggggtggggtggcgaccttttcttctttgggtctctcatttaggtatgcttgaggttttttaaagggattcccttaagaggcgacagacaccacgtggaaatatagattacatgtacatgtaaaaaaaaaagtctaaaggctctcctagtttgtttgtcaccacccgccatccatggtggagaatgagttttgtcagtgtacagaacatagttattgatattggtggattttaacccataattaagtgggttaagttgatgattacccgttttttttttgggttctttaaccaaaattatctttaatagttttttagttatcttgtttttcaatgaactttcccaaactacccttgcaacacatctctcttctccttctttctcaaactcacgaatgtctccacattagtactacacctatgcaacagccaccagagctgcttttgctacaaccatcagaactgcatcattgtcatttgtatttatggcattaagggctcgtttggaacgccgtattaggttatattgtattgtattgtattatattaaattgtattttatgtaatatttttatgtaaaactatatgtggtgttaacttttatggatacctaattatataatattttagtataaattaaagtt

SEQ ID NO: 305447 - DNA, 2535 bp, Cannabis indica
tagaaaaaataacaaaacaatactactaacaaaaaaaaaaaaaaaaaaacagaacaaactcacaaagtatgacataatcatgtatgtataacattatataatgttttttattcttctcgaagcaatacaacagtatcgtctatgtatacctaattatctgactattgctacttcccaaattggcaggttattagctattgaagataatttttttctgggtaaaaacaataaatggataagatttcaaggtttcaaatcaactgttatgattagtaaaaaaatttaatatattttgtatcacagctgttgaaaagaattacaaaaaatgagacattgaacacaatgcactctccaccattcattaatgaggaaatttgaagccacatataaactggatattcctccatgttatcaccactcttaggattgagaaattccacgtggcccaataaaaagtaacacgcaagccacattagccaatgacaatccacttttggattcacccaatatctaatacatacttcactgcttctttaatttcctacacatacccaaatctctttgagtcttcaactctaaaaaacaataataaaaaatggcagcaaataccttaatgagctgtggcatcgccaccgctttcccctctgtcctttcctcctccaagtcgaaattcaccacatccggccagcttccctgtgccaatgcgtcgtcacggttctccatgaccgccgactggatgccgggtcagccccgccctccttaccttgatggctcagcacccgggtaactggaaaaaaaaaagtgttatgtgaagtgtgtgattatactaatgtattcaactttctctaactatattttggttgattttggggttttagtgactttggtttcgacccacttcgccttggtgaagtgcctgagaacttggagaggtttaaagaatccgagttgattcactgcagatgggctatgcttgctgttgtaagtctttcaagttccactcttcacctaatcaaatttaatttcaattttatatcattggctaataaaatcaaacacgtctgatagtaaaaatctgtagcaaatataccttaatcactacaatttttgtttgggcaatgagaacctttaagttttgagttgattaactgcctctgaaaatctcaaacatggttgtccttaagcttttcctgcatgaaattttgaaaatttatctatttctgtgtcaccatcaaacgtttgttttttaagtttacaaaccaatctttttgctgaaaaaaactataatataacaggggagtagtagctctacctgagggtgcaaatgtctacattgcaaacaaaataaatacgtacggatcccaaccaagtctcatatggccattataaaaaccatgaaccaaactatagaatgttctgaaatgatactgcgtctgtggatgaattagtctttaccaaatccaaaatccccttagccgagcttcccagatggcttagacaatatttttaggatttaattatttataataagggtaatttggctatattaaaaaatgttaggatgactgacaaaatatatattcttaatgattaatattctattctttgtttttcaataattttgcagccaggaattttggtacctgaggcgttgggtttgggaaactgggtgaaggctcaagaatgggcagcagttccaggagggcaagctacatacttgggaaacccagttccatggggtactttgcctaccattttagtcattgagttcctctccattgcctttgtagagcaccagcgtagcatggaaaaggaccctgagaagaggaagtaccctggtggagcttttgaccccttgggctactccaaagacccagtcaaattcaaggaatacaaagtcaaggagatcaagaacggtacgtagaaatcactattggaccccattattgcctacacaaaacaaatctttcatacttaactcacataaatttttctaatcaattacatatatacagttaactcacatttttcaatttgcgtggtatgtatatataggacgacttgcattgttggctttcgtggggttctgtattcagcaaacagcttatcctggaaccggtccattagagaatttggctactcacttggctgacccatggcacaacaacattggagatatcattatcccaagatcgctttaaattaaaagttttaaattaatttacactgatcgatcacatgtaaaattccatgtatccattttgtaatattgaatccaaagtcttcactcttgatttgtttggtaattaatgtatgtgaagtgactaccggatattcattcggaagtaactagtcaggatctgtatgctacctcatgcatatgtgtttaacagatctttattattactgtgtacgaataattttgttttctcgtttcatataatagatagttataaggctgcaggcacaacagagcaaacattggccgtcaactatgttaaatttagacctcactgtaatctttattattacagt

SEQ ID NO: 305448 - DNA, 1731 bp, Cannabis indica
tattattattaattatttttttgaaaaaatattctaattaatgttgattttgggctttttttttcagtaccagacatgatatgaatccaaaagttgattcaataatttggttatgaaagagtggcagagaaaaagaatatagaacaaagctttggtacaaaattaaaccatcacccttcgctggaaagggttgaaactaaaaaaaatggataaaagaaaatatatattctggtgggaccaaatggggccatcgaagattccacaagcgaagaaattttttttatattaatttttttaaaaaaaattctaattcaaaagaaaattgttctagaatttgggcagagtaatagtaatttgatttgtaataagttttgactaattgaaattttgactcttctttctcaaccctggccaaaggcggcttcacaatatagcaaccaaagccattatcggttttaatttgactaatatttacgtaccatacctatccccaacttagcccggaagctaaatatcttgatattaaaagcttaaaatacgaaaatgattgtgggactaataataatagttaaacatgttttcaaaatatatgaaatcatcaccttaccattgaccagcaattaatgctatattttataattttgtatgtatataatataatattaaaaggaggcttatatattgcaaaaccacctagcaaaataaaaaaattatgtaattacgtaagtggggtttggttttttaaggccttactcagatcttttatgataagtatgatcttccttggattagtttcaaaagcaatgacgttcattcatgtaccttaaaataacctcattaactttttatatattattttttaatttatttttaagttatgagatacacagggtggcattttatgagtacatgtttccactttttatcctcattgttatcctataaatattaataaaacaaaaaataataatgatgatgtaaaagtttcattctccatttgtaaagctaaaacagagtggttagtggtagctcgtcaggaaaattgtacaagaagacataatctgtgtttatttatgttgagataaatttagaaataattaaaaatttatgtattataacaataagacatttaaaattatatatatataaatcaagtttggtgactattgtatagcttttgtggcatagtggggatatagattcttttagtggaatctcatccccaaccaatgctggaattatcaaaaattaatgggaaattgaactggaaagtagcatttccaccatataacggtcctatgatttaaccacccaagattctaacgaaaattaatatttgtaatcttaaaaattaatattattataaaagaaacagtttaaccacaaaattaagacaataaaaaaaacaaaagtaataaatgaaatataataaaaattataagagcaaaacaaaatagaccttaagcaatgacaaatggtgcatgtgatcacatgcactctccaatggggtcggttccaacatacccgcttgattgattggtaacttattagttatttatttttgagtttgaattgtgtgagagttattataaacaagttttataaataatataactacaattttaaattagaattatttaaaattttggtcgtgaagcatacatttagtagtgacgtgtgaatatatatttatatattttattttatatatatatatgttactcatatgtt

SEQ ID NO: 305449 - DNA, 1820 bp, Cannabis indica
agagtttgggggccctctctgcttagctttataccactaatggtaccaatatcaatggcgtgctcaaggatgcgctaaaggatttcagcagcccagataaagatgtacaaagatagggggtctccttgtctaatgccacactccggggtcaaattgttaaatttccttccattgagaaaaatgttgaaggaggttgttgtgctacactggcgtacccagtggcagaacttgtcatgggccttgaaactattacactacttattacactccattaaatatgcttttacacactataatattgaactttaattatagtgtgtaaaagcatatttaatagagtgttataagtagtgtaatagtatattttgatatttttgtaaaaaaaaatatattttttaattagtgtgctaaaaatgtagcaaatttgatacatgttaaaatttacacacaaataatctacttctttttatttataatattaccatttaatattaataagtgattttagtatattttttaattataattttattatttttaaaaaaaagtatatttaattcattaattgtcattaatgataatttatctcaatttacatcttaatttaatattgtatattagaggcacaatcgcaaaatatattctaaaagcatgagttaaatttacatcacactaaatatttttatttttatttactttttttatcagttactaatgtaattgataacttatatattttctttcatatatataatagtgtgttgaaaattgtgctaaatgtgaatcatgattgggatttgtggtgcgggtcaaggttaggatcatggtccgggttcaggtccgaagttagggatcgaggtttaggttttaggtcagagtctaggtctagggtttggactagggttcgggttcgggtccgaggtgggggttcgaggtcgggtgggtcgggtcgaggtcaagggtccggggcatgggtccgagtgtcgaggtcgggttgggttagggtcaagagtctgaggcatgggttcgaggcttggggttggggtccgggtctgggtttgggtctggagtcaggtgtcgagttaaggtttggatttgaggttggagttcgggttcgggtttagagtctgggtcagggctgagtccaggattggggtccaaattcgaggtcggggtccaagttcgaggtcaaggtcgggtcgggtcatggttggggtttggagtcgaggtccgtgtcggggccaagggtccaaggtcgggttgggttggggtccaagccaaggttacgacgaagccagggctggggtctatggtcggggtccaaagtccatgatcagagtcgaaatatgataaagaataataattttatacaacatattaacataagtcaatattaaatattatattgtagtaaataatagtatataatacaatataatactgttagagattttatgacaatggaagataatcaagatatattataattttattgtaaaataatacaaatactaaaataagagattaattaaatatatgttacaatacacatgtatacactatatatatataaaaaaaaggtagaagaagaagattataacacatgtaatataatacatatatatatagtaagagaagaatatatatgtatatatatatataatacactcactcacacaaccttgagtgtagattagtggggatcaccatgacttgaacaatgtactttgggaattatcaagtcttagaattttctagcaatgtgtttttttgtgaaaacgtctcctaatataagcaccttagacctctttatatagtgt

SEQ ID NO: 305450 - DNA, 1120 bp, Cannabis indica
tatatttttttgtgacataacacgattcaattaatttttgaaaagtatgaaaaagtacaaaccgagcaatataacacgcacgaatttacagcactactagtaataataatgtgtcactcgcttgatacctgcagataccacttaacatatcttttcatattattatcaatgcagtgaaagcttggcactaacatagacttcagttctaaattctaactaattaccttttaatccacacatatatatacttaagttaatacaataactcgcacgatcttgatcattataaaattatgatgtacttttctaaaatatattatcatttcgattgagcagaacattttgattcatgtgatattactacaaaaatgattgctcactcaactattcatctattctatatgcatacaaataaattttaaaggttatattttattatatgattgtgtgtatatatatggttatgaattttatctagaaattagtaatttgtacttcgtagttgtatgcctgcaggaaggtttatatatagaatatatgctaaaatttataattaattattaaaaatagacaagaaacttataacttgctcattatacagagattaattattgttttatcctatatttggtgcaaaaaattaatgtcttgacttggtagattattaatatcaataaatctacggcagcaatatgatgatcaatcacgaattgacaaaatcaaaacaagaattattcaaatagagctagggaataataatttcaaaagtaagagagctccttataaattagttaattaatatatatatatatatacatgtgggtgcactcttaataggtattactcataaatagttaaaattagaaaaaattgagtttttatgcttaatttttctatctaattagaaaaatctctcactttcacattatatgggctgagattgttctatgggttaaaaaaaaattagcaaaaaataaaaaagaaagtaaaagttgagtttcacttagatatttttatatgaacaaatttttgatatacagtataaaaagagatattttttcgatatttttttaaattaagtagttaaactaagcatgaaaattcaaatttcttttttatt

SEQ ID NO: 305451 - DNA, 3659 bp, Cannabis indica
cacttcttgtcgtgatggacactgatggcagaatcgtgcataaggatgcaacacaaatgatgtgcatttggggaaatcaagcatatccttttagtttggaaaaagaattatcactctggcagcaacggaattggacaatttcccttcttgctgaaggaattgaccaatatttgcctacttgggtaggctttacagccatttcaacaatctttttgacatgttatgtcgtacgtgcatacactcattgaaatttcttataaaatcttaaacttttcagattgaagaaaggaaacatatatgcttatatggaggagaagacatggaatggatccggagtttcacaaggactgcaaaaggagttgcactaagatatgggattgagcttgagatgctttatgcaggtaagaacagatctcgggaaagagttgtgaaaaagttaatcaatgttactcaacgagaaaggctaagcaaagcgcttgagtggaaactcatctcatacttctggctaagaatggagaagatgtgcatgtctgagcccccactggccatcccagaacaggaggaagtagttgatgagtttttcatgccagatgatcctgacttcatggcaccggtgcaggggcagaagtatcattcgatattctctggaatcgttaacatgctgagttttggctccagcagtaaagggtgggctgtgatcagtggaggaactgaggatatgttgtttgaggctgatggggagttattgttgagagctttggttgatcatgaaaagtggaaggagagagcagagaattatggatttgtcagagctctggaaatctactaccaccagctttgcaatgacctcccacactgtattagtgtgatactgcctgacaccgaaatcaagggaatatcttgtgctgcctgtaacaaaccgatggacaagatggtcacttatagctgctgcactgatagatcttcatatggatatgattagcatgaccacactcactatacgtgcagtgacactgcctttgtttcgagtgtcatcaccggagtttttagtgaataaatactaattttacttctgtaattctaatgcaaatttattaattattaactctcaatggcagcatttgtgaatttaatatcatcaactcttagtctcatcaaactggaaaattaaaataaatagaagagtacaaggtatgtactcttcaattatatatagaagagtacacgttatctatagctaaaacaaatgacagatcataaagtgaccagaaactttatcgattcagactacatagaatgagtaatctcatatccagttatttgacttgcctttgcctttgaaatttccttatgaaaaatatccaagtagttacaatgatacatgtcacagagcagcttcactcaacaagggataaaagaattcttgattgaacttgctgaaagattcaattacaagtgtgttaatatgtaaccaattctgcatggcacaaatatgtaaatgctaatgcagacacttcaggaagcactaaaattctcatgcacacatgaaagtaataattcccttaacctcattatctctgaaacctttgcccaatgttatcttggattgtatgtctagtaaacctagttatccttaaacaaaacacagatcttaattgttaaatattactttttttttcttttttttttccacagtgataccagtgaccttttcaagctctacatgcacaactttttcaaactatttaacaatacagttaccttatctagggtagaaaagaaaacaattaatgttggatgatattatatacttaaaattctaggtgtgaataattaattagtcatattttaaaactattatgtagtttaagagagtgtgcctatcagtattcatattttaaagaaaaatgacaagaagcatattaaagtggcaatcatcacaaatagtacggtacaccgttgtaaatgtaattaagaaaaatgttacaaaaacacaatcgtgttgtgctgatacataatagcaatgttctataatttattatcgggtctcatattttgagtaaataattgtttaccgaaactttcaaaaaccaattagtatgagagttgaagaattaactaaactaatagataatagagatggagatttatatgtagttcgagtgttaacaaaccttaatctaccagtcacttgtatttggtcgaatgaccttgatgtattacaatggagattttacaagttcaagaacccctagtttcttgttatagtattttcacaatgattttacactctaaaatttctcccctttttataggctatgaaccaaattcgggttcacttgtgacccgtcaggttttctatgtcagctttgcctattaatgggataaatacattaaataagtgactatgggctcactagttgagctccagttcatggggttgaagtgattcgtacatttggggaccacacagtcctgagcaattcgtacatctttacaaaattattcatgtgtccacgacaatctggaaggaagactgcaagcctccgtaactctcgagtcctagaagcttggaggtaaatattatatgcatttacaaaagggtgacacatggtgcttccgacttctttcaatcagtccgtaatgacctggcctaaaggccccaactaaaggacaaaaccaacgcatagcccatatggaaggatgggcccaagcccatctgaagcctcgatgacacaccctcaagacggggttggtctgaatccaaggcatcctgcctccctcagatgaaatgattgaacctttaattttcagttaaatactgagataaatccaaagaaggcactctaaaaggcacctgagaagtctagtacaaggtgacatagtagccctctgacatccaatcccataggatcaggagcttgtcccctatgttagagcataagagtatgcacaccaccaaaaggaaaccaccccttgtttgacggcgcaaatgtgacatatgttaaggacatctgtcaaggaccacatggtcccagatgtacaaatcgcctccacccatgaactgtacctcaataggtgagcccatagtcacttatttaatactattatagtgggtcaagttgacacagaaatcttagcaggtcatgcgtgaatccagacgtggttcttagcctataaatactctcatgaaaatggaagagatttcagagtgtgtgaaattattgtgaaaatacaatatcattcggccaaatacaagtgacattagagttcattaacacctaaatcacctaaaaaatttcatctctattatctattaatttagttaatatccctcaactctcattttaatcaattttcaaaggggataattgcggcaaaagtccccaaaaacttaaggttgatacagattagtcctcaacctcaaaaattggcggtgaaagtacctaaggtcgaaaaagttgtgagtccgttaatccctctttctaacagatccgtttactagttaaaacttccacgtgtcgacaacttattggtctaaatcatattttttaattttaaaaaataaaataataataattaattaataaaaaatcataaaaataaataaattatttacatatctgtttagtttttcttaacaattatttatatactgg

SEQ ID NO: 305452 - DNA, 588 bp, Cannabis indica
aaaaaatttagagtgtaatttcctcatgtaaaagcacaatttgatatagagatacatgttagtaaattgaacccaattgaacaaaagataaaaaaattaaattacacatgttaagtgtaacttgtaggtcaacatatgacattatgaataaataaactacggcggatcatgaggataacttcaatacttgataaacaagcgaccgaataaataagagagacaaaaacagcttatataaatcttcgcatgaaaattaacgcgacaaaatctttagtcaaaaacaccaaattgatcacacacagtggtgtacgtaccaatggccagcctctctaattatagaagggaaaaaaagaaagaagtttcttctgcatgaaacataaacgagagacaaaactttaataaaggcaaagaaagaatctataattttaaactgggacagaatataacaaaccccataccctaagctagaatatatggtctaaattaccaaaaccacaactcaaggaaagccatgccaatacaggattaattgaagatccccatgctctctctctctctctctcctctatatatatatatatacaattt

SEQ ID NO: 305453 - DNA, 2364 bp, Cannabis indica
actgaagtgtaaagtattcaaagagaagtgacccaccggcggaggacaccacctcggcgtggcccaaccagcattaacggcagctaccataatcaaattgagttgttggtgctcccgaaactcccacaatgcctactgtgctagttcaaaagtgccactctttattgtgtcttaccaaacaaaacataatttctatcataccatagccaacacaacatcattatcatcaactcaaactcatcccaagaaagttcaaaaaaatagagcaataagaatatccagttttgggtcattaacatacctacgaattgaagatagcagtccaacacttccccaaaccaaattgagtgtagaataaaaataataaggcatgattcagggtctcggattccttaccacatctcaaacaacgtagaggaactaaggaatggcataatgaaacagacgtcatacaaacaccttcacttttagagggacccttaaattccactacctcactagtcgagataagtcagcaacaccctcatcaaattgaagggaccatgccaaagaataatcgcttttaatcgagtaaatatcgtccctatcaaaatgccaacaccacttgtcaccatacactccactcgccaaaggaatggataagatagcatctgcatccattggaagaaatgtcatctgtgatttcccgacatcccactcaccatttggagcaataaactcactaaccaaacaagacttttaatacgccaaaaggtcacaggctgagagatccatggatcgccaaatacccttacttgtgagtcatcaccaatcacacatctcatgcccttctgaatcaactccaacctccacaaggctagtccaaagatatgaagacccaattctttctgtagcttccataattgagcaatggggaaagtgcttatgctttaacacacgagcaggtagtgaatcaaggaatcgtagtagccgccatacttgttttgctataagtgcctaattgagtagtcaaaaatcacagaatgtaaggccaccgaatgccttcagctcacacactattccacaaaatcttatttttatcaccattcatccctcgccaaaactctctcacaattgacttgagtttgtcactcgtatttgctggtaatttaaacacactcatcaagtaactcagaatagcttggagaattaatttaataagtacctcacaaccactagctagctgagaaaaagttgcacttctaaccccaaacatgctttcacactttctcacatattccctcaaaagtacacttcttatttctacctacaatagttggaagccaaagatacttatcgtggatagccacagacgtcaaccctaaagttcgaagaactccactctaattcacgcgagagacatttgaactaaatgtaattgttgatttctcatagttgatcttttggcctgatgccaactcatatgtttgcagaatgcattgaattgtttcagtatctctaacattcacccttccaaggatgagattatcgtcaacaaaatataaatgagacaccctcgatctagatctagaacaccttaatcccatcaactcgaattgagattcagcttgcgagataagagatgacagagcctcaacacaaaataaaatcaagtatggcaagacaggacatccttgttgtaatcccctagatggaatcaccctccctctcggttggccattgaccaagaatgcatattcaggagtcatgacacaacccataattagcttgatccacctattcgcaaacccaaagcgttgtataataccatccgaaaaacctcactccaccatatcataagctttactcatatctaatttaagagtcatgaagcttttcttgccattattccttttaaacggtaagtgtagtagcttgaagcctaccataacgttatcacgaatccatcaacctggtacacaaagcactttgaaaagaggagatcaaaggaccaataacattcttcattcttaatgctagggcattggagataattttatacatgacattacacaaactaatggctcgatactctttaaccaacttgggtttttgcactttgggtatcaacaccacgtctgacttattgaactactccacataccacccctcattcaaaatagccaaccaaacacatgtaacttgttgtccaaccacatcccaatatttttaaaagaagattgcatgaaaactatcaagactaggagctttggtgtccccaatagccttgaccgcttgtagaaaatcatccgaagtaaacatagcaataaaggcttcattatccatatttgatagccgagactgtactactgttgggttttatgc

SEQ ID NO: 305454 - DNA, 2143 bp, Cannabis indica
actataggcgacggttttaaactactgagaaatgaaactaaaatgagaaatttatcaactactatagccctagaccttaaaatttttccaaacctaattataaaaaccaaaaaatacaaatcaaatattgtcattcaagtacaacaatcactctcaaagataaataataaatagaagacacattacatttaaagtaacaattaaatcaaaaaatttaaaaccatagtttttttttagcaaactcaagccataacagcgaagggagctggtactggaggcatgcaattagtagctctctccctgatattcagcaattcaatttggaaaaaatatattagatatcagaaggtaataaggtgctatgcattcctcaagacaaaaagcattggaatgagcatgtttggggaagatttaataccccaaaatacagcttcatcatgtggatggatgtacaagggaaattgagaacaatggaggggttacacaaatttggaatcattgatgatcgatcctaactatttgatgtgtaacaactatgaagagacaaatgaccatttgttctttgaatgcagcatgtcagtggcctgtttgacagaaataagacagggttgaattggagggctattgatagtactccttgattcgaatcactagatggataaacagaagtaaaaccagcaaatttcagaagagggtccagtcttgtgtaccacatttggaaatctccaaatgaattgatatggcaacggaagaaaggaaacatggcacacctgattggtaggctcaaagaatctgtgagaccgataattgttttaatctggccaaaaaaattcagccaaaaggatgagagttggtttaattctttgtaatttttatatacattatgtatagaaggaagtattaaggccatacataattggttgtggtgcttgtaggatgtacaaattacagtttagtgcaatcaaatttatttgattcataaaaaaacagccatgaccatttgattgtttttctttctttctttcttttactttttcttgttaaaaatgtttcaaggcaagggtacgtattaaattcaaaagaaaaacacaaaagagctaaacacgtggatcgaatgaggcttttgaaacatattttcaaccaaaattgatatttataaaagagtcattcctagtactcggtatatgaatatggaaaatactttattagtaccttggatttatagcctctttgatgacgaagaagattttaggtctataaagaggaagaaaattactcaataaacaaaaaaataaaatagaaaaaagaaattagtagtaatgcatttcagaagagagaacatcactactttttctttacataagttttaatcttttttaaccatggtagacaaattttttcttccccagagtgaagaacggaaaacatgtaaaagaagaacaattttctaattactatagagacttacttgtagaaaactacaatgacagagccgtctagacccacgatgtaggagagagaaagacagtgagagtgtgacaaattgtacatgaaaatgaagtacaccaaattttcttcagagtatagtttagtttcctcccttagaatatcatgtacacgaaaatggttttctaattgatttttagccctaattaaagaagaaggaatgacttttgccctaacactagaacacggcttgaaacaaaaatgaaaaatgaaagaaggaaaaagaggagtgatgggtgatgaatgatgataaaaagacacagtacactcatatcaatcaatttttacttttttaagtttaataatattttaatacaaaagaaaactggttacccattttctttatcctaaatacctctatattaacgacaaccctctgataaatttacttttcaatcttacggctacagtacaacaatcacagattgtatacccaaaaatgtaataacaagaaaaaatcatgtcgttatatatacagcctttttttcttagaatcaaacaagcttcttgtggccttggatggtcatcacagctcgcaccaaaagaggcagccacagtccacctcgaacacacacataacacacaacttccccttttttctttgttatattattttataatataataagtgtagatt

SEQ ID NO: 305455 - DNA, 4738 bp, Cannabis indica
gcactgtaactatactaatgtaaagtttaataccctcccttcaagatggagagtgtatgtcaaaaacggacatcttggaaatatgtgtgttaagtattggagatgtcaaaggcttggtgaaggcgtccgcaagctgaagagtgctggaaataggaataagtctgacagtgccattgttgattttgtctcggatgaagtggcaatctagttcgatgtgtttggttcgttcatggaatgtggggttgttagcaatatggatggcagagttattatcgcagtaaataaaagcaggatgaggttgagggatgtggaaatcattcatgagatattgtaaccaagtaacttcacttgtcgtggcagccaaggcacggtattcagcttctgctgagctcttcgatatagtgggttgtttctttgtgcgccatgatatgaggcagtctcccaagaaaatgcagaaccctgttgtggaacgtctagtgattgggcaagaagcccaatctgaatcggagaatcctcgtagatgcaatgaggaagttctagaatacaagagtccttgtccggggtgtcctttgatatatcgaaggaggtgatgggcagcttgaaggtgcgttgtacggggggctgccataaactgactaagggtgttgacagcaaaagtgatatccggtcttgacaatgtgagatagagaagtttcccaacaagttgtctaaaacttgaaggattgtccaaggcttcaccatgttcattgtctagtctcaatttaggatccattggcgttttactgggtttgcagccaatgaaaccagagtcttcaagtaattgaagggtgtatttcctttggcaaaggaacagcccttctttggcacgagcaatctcaaatccgaggaagtatttgaggtctccaagggccttgagtttgaacttttgatgtagggattcttggagctggtgcagcagtgaaaggttcggaccagtgattataatgtcgtctacataaacgaggagagctatgaaattttcttcggttcctctagtgaatagggtgtagtcggcttttgattgcttgaatccttcttggagaagggcatcggatagtttcttgtaccattgtcttgatgattgctttagtccatatatagacttgtgaagtttgcacacaagattagttcctgcagcaagagaagaaggaagaataagtccttgaggtatagacatataaacttcttcgttaagatctccattaagaaaggcgttatttatatcaagttgcaaaatgtgccagttcttaacggtagatatagcgagaagtaatttaagcgtaaccatcttagcaacgggggaaaaagtatcaaagaaatctagcccttcttgttgcgtgtatccttgtgcaacaagtcgagcctttagtctttctatgctgccgtcactattatatttaatcttgtaaatccatctacacccaatggctcttttgttggctggaagagggacaatagtccatgtcttgttgtctgagagagcttttagttcacattgcatggcatttaaccatgctatggtctgtatggcttcaaagtatgttcttggttctttgatagaagaaactgccaaaataaaagctttgtgagtttcagacagattagagtaagatataaaattattaattttgtgtggagtggaggaatgatcttgaatgagtgaataacattcaaaatctttaaggtattttggtggctttgactgcctatttgatcttcttggaggatcctgtgatgattgtggtgtgtgtatgacagtcgtttctggtggaaatgcagcaggttgttggatttctatgactggtgcgtctggagtgatggtagaagcagtgtcttcttcagattgttgagtattagcttcattctcatggttctggattgagggttgtacattattactagagcctgtaggatactcacagatagagatgtcaggtatagtagcatgaggaagcacaattctagtgaaggggtctatgtcactctgctcagtattaagttttcgaaatggaaatatgttttcatgaaacacaacatttcgagatacaaacacttgattattgttgatatcataaagtttgtaacctttaattccttggggatatcccataagaacacaagtacgagcccttggagaaaatttgcttctatgagcagacaaagtagatgcaaaaacaagacatccaaaggaacgtaaatgttgataatcaggctgtttgttaaagagcagttcatagggagttttgttggttaatagaggagtaggaactctatttattagatacgcagcagtcaatatacattcggaccaaaattttataggtactttagattgaaaaaaaagggatcgggccacgttgagcaagtgctgatgttttctttcaacaacagcattttgctcaggtgtttcaacacaagagaactcgtgaatgatgccgtgtttagcgaacaaatctttaaataccaattctggtgcattatccgagcgaaaaaccttaaaaacctgctgaaactgagtattaatgtaagttaaaaactgaggtacaataaaactaacgtcagatttttgttgcattaagaaaacccatgtaaatctagaatagtcatcaaccaaagtgagaaaaaatttgtgatttgtgtgagaaacaatgtgataaggtccccaaacatcacaatgaacaatatcaaagattttatttgaaacagaattactttttggaaaagaaagtttcctttgtttggcaataggacaaacatagcaaggtatacttttgtgtaaatcagaaattttacaattcaaagtgtctttaagcaaattcaaacgcttgtttgataggtgtccaagacgataatgccatgtctcagctgaaacagaaagaacatggttggaatttggtctagtgtcaagaatatagagatctctcacattactacctcttccaatcgtcttcttgttggcattgtcctgtattgtaaaaccattagtagtgaaaataacatcgatatgggaattgttaattagataactaaccgacacaatgttatatttgaaagatggagcatatagaacatcggttaggatcatgccatttcctaacttgacagtaccactttgattcacaatgagactttcattattaggaagaattagtttagttgaggggatcttacatatacattgaaagaatttgacattagaacaaatatgtctagttgctcccgtgtcaacaatccaagaaccaagtaaaggaggattagaattgtgtgatagtatgatacctgtgttacccatggatgcactaggatcattagtattcataccagcagattgagtggcaagtaaattcagcaactgttgatattgaaccgtggacagctgaggaagaaaggcatggttctcattcgaatttgagctgttttcttctcctgtttgaacctggtttgcagcaacgtccttgggtttattttgcttattgaatcccggcggatatccgtgaatcttgtagcacttctcgatggtatgtccatgaatattgcagtgtgtgcaaaaggggcgatttctctttgacggatgagattttgcagcttgattgtcatccttttggttccctcttttatcaccttgaagagcaaaagccatagcagaattgttgctgttgggattagaattagtacctctttgttgctcttcttgagttacaagatggaatacccgattcacttcaggtaatggatccataagaagaatgcttcctctaacttgagagtatgaatccgagagtcccattaagaaagacataatgtactccatgtgaaagtgatcttggatccttttaactcctccacaagtacatccattgcaagtacatgaaggcctataatttgctagttcttcccatatcgttttaagcctagtaaaatacatgcttatagtctgattttcctgtctaagattcatcaaatctttcctcaaattatatatatgaggaccgtttttctggtgaaaacgtatctttaaatcattccaaatagccgaagcactctcatcataaagaatacttgatgaaatttcttttgagacagaattcaagatccaagatatgactatattattgttacgataccaagcattatagagatttaaatcagaaatagggggtttagagattgaaccatcaagaaatccgattttgtttgaaattgcaagctgcattgccctgctccatggaatgtagttgtcttgtcctgtaagaggttgagagaccaacgaatttccaggattgtctccatggtgtagaaagaacggactcgaagggtcttctaaaggattcttgatcgaagtgacttgaagaccttgattattttgagtagaaagattgtcaagatcgacaacagcaggagttcttgtttgatcttcctctgtagtcattgcgcggaatcaatgtacagaaagaaagaaaagatcggagaagaagatagagtaacacacagcaaaccggagaaggagaacacggcagctggaaggatcggacgggaaagcctatctttcccgctctgataccatgttgagaaaagagagaaagactgttttgaaaagaaagagtctgaattcaattcatcaataacagaggagaggcaagccttttatagcttggacctcattacaacccaaccgacttaaactgacttgtgaagttta

SEQ ID NO: 305456 - DNA, 1460 bp, Cannabis indica
atttctaactaaaaccattttgatatttttggccttcaatcgggtctccagggtcgccgagtctcaaaatatttttatttcacaaataactcatattatatccacgtcttttaaataaatctccgtaattaacaaattacgcttatatatccacttatcgagtcttcagggtcgccaaacctgaaaatacttttattctacatataactcatattacattcacacatgttatatcaatctctataatttacaaattacgcttatttactcacttatagaaaaatttaaattttatgctgaaataaattaataggatcataatcctacttattacctgattaactcataatataaatataagccctaattatttaccattaggcttatcgagatattacacataatctgtaggagtcttcaactagcttccaggaggagttatagttggagctaaagattgtggagtgtgatttgaactaccgacgattcttgacggtgcttaagggaatctaaaaagcttagatgtatgcttcctccaaatttatgataccctaggccatagataagaaattggacaaggtgtaggacctcttcctttgcagctcaccccacagtaaggatctaatggatattctggatgttagagccaataacttcatatcatcattaaattttgttctagtcactgcttccatcatcctctaaatataattcttgagtttcttctccctattaattgatgttagtcagagaactaacctccatatcgtagtcttttgtcgctacgaattgtttcttaaacatggattgcaagtctttccaactttgaatggatttgggtggtagcgttttccaccaatcttcaacgaacttcgttaaagttaacaaaaaatagacatttctcattgtcacctaccttcacaacttgcattagtctaatatatttagacaaatgggccctaagtccgttttgctttcatataattccatttgtggcattctaaaatttccaggcagggatgattctattattctttacacacgcttctagatcctcctcttatgaatcagatatgatcccactttgtttttgggctagatgttccgtgagcttagtcaatgcggctatttgatcttccagctgcctggtatgctcatctgggaactcgcgtctagatattctatcattaatactatttttgagatcacctccgtgaggattagctttctcacctttagttttatctctttttgcattcaaacgttcctagagatccgttgttgacatactgtcttttgggaaaatctcctctattccttcactctggttaatagaatcactagggtagtttttgtgacagtcagtactctcgtgatccgtaagggaaaacagtaggtaagttgtgaaatcccacactacctggggaaggtcaagtgggatgattctgagactgtgtagg

SEQ ID NO: 305457 - DNA, 4217 bp, Cannabis indica
ttaaaaacaaaaaacaagtttttagttatgataccaaacatgcactaagtctttctcatgtttaacttagctgcttcgtccataggcacagggttaaaccactagctaccttagtagaatagtgacaagagacactcgacactatttgtttcctgaaaattgctaaagaaattgaatacatttacaatttcaatatgacacaaataatttatcttaatttgtgaagatattaatttatagccattaaaggggcagtgtgcacaaatgaattcacttttgcttgtacaacttcctagcttaaaactacaacaaatttacaataaattccagtgtttccaaaagcacttaactgatatccaacttctctattatttcaaaatgcatctgcagatcaggccgccgatcagccaagtaaaatctctcacacacctgtaattttcctccactcctttgagttacagacttaagcaaatgaaacaatttttctttttcgttgcgaatccatgatctattggtgtcacaccactgcctgggagttccatgaagcacaaaccgtagtcctttatccccttctgcttgttcaaggtgttcagtgagtttctcaaccaagagaccgtcagtaatgtatgcaccgacggaattaagtccaacatccacataatgtacctcagcaatgctgtccaagaagtcttctttcgtacagggtataatttgttgaagttcatcttcaatttgtattctatcttgcattgatctagactttgccaagccaagctcagcaactagctgattaactacagttccacctttgctgaatccaaataccagtgttttggggcgataaaattgcaaccctgaaatgctggctaggcttggaatattttgtttatgtgttgcagcactctgcaccagccatttatttcaggttcaatcaaataacatgtttctaaagaccaaaatatctcatcattgtttttcacaaagaacctcctttaatcgattaacacatacagagagttactcagataaaagaaaaaagtttgatgaatcacatgaatgaatatcagttaagtacactcacctctcgaagacaatttgataagagtgatacggttgaccaactagcaggaaacccagttgggtcatatgattttggttctccccattgattcacagacggtataaagtccttatatacagcaaaaggcccattaaacaatgaagcctcaataacccaagcattgacagaaccaccaatttttgagaccataatatcagcaatgttttgtaaattagataacctctcaatcaatggattcccagtccccataactcgatctccagtgaaaaagatagcatttatagacggcacctgcccatcaaatttacaacaaaaaacaagaactcagttctttaagtgactaaacactaaaaaccatatgaagattattgttaaaactcatttgcatagaacaataagaaaagaaacaaaaaaaaaggtcctgaattgaacaaaagaacttacagttagggaatttgaagatagtgaaaggcagagagatgcagcaacctggtgaaaatctctactgtcagcgtgtaatgggactctcaacagccctctccatcgctccataactcgatcaaaaagcaacgaaaaaaaagctgcgctttgaattgagctctgtaaattactctacagtttctattctaaaccatagaaatgacctgttatatactgaaacatcaaaaagctgagggctttatacaggagacttttaacaaacagttctcgtgcaacacaaacaccttgaaagtagatgaacattaggaaattatagcgaacaaaataatcgttcttagctaacatgcaccactataagccatggcaaagtattatccagagaaatacaactgtttcccagtttacgttacctacagatagatacatatagtcataccaaaaaacatgctgattttctaattggatggtgaaagcaaccatgactaccaaactcagaagagaatgcacagagatagaaattaaagctgcagattcttaatatagcttcatttcaattcaaacccagtaattaaagatttcaagtaaaaaaaaataaaatgttccacaaaacacagtagccaaagagagtagcagcaaaaccctagaaaatgatattgcattgcacagtatttaatacaaaaatttatatacgcaccttggttgatgcgatggagagaagttgagttcaaaattttgggttcgattttcctaattaaatcgtttgtggagatcgttccacatatcataaccatattattacaggtaatccaaaaattgagaggatatcatataacaaaaatggtcactacattaagaggattttatatttttattttttacctttctttatttttatttgtagctgaaattgaaatcaagtttgacaacacatgattattacagctttttaaaccaacattatttggtttagaaatgatccaaatagttttttactttttaccccaaacaagtcaaacacatatcatcatcaattaacttccattactttcaacatcttcgacactaacacagccagcaacaagaatgctcttcatacgatcaatcaaatcctgtatttgttccctcgaatgcaagggcgacggataaaccataacacaatccaaactccccccacgtatggtgtgaaaaaccgcaatcgagggaccaactccatgagccgaagcacagcccatgtagtccaccaagccaagctcttgttgcaattcagcagtttgatcgacaattgaatcctcaaaaaccgacatgaaagccgtcctcatggaagacgaaggagtcaaactcgggttttcaatggccttgcacatgaggaagttcaagtcagacatgtctgtgaaatgcttgtttgatttcttggcattggcattggacgtgtagcttctttttgccaactcccatagtgtgtctcttccggttatgttatgagtgttaagaatggcagagtgataaaaccctgcattgcacatacaaatacaaatcaagtttttattttttacaattatttatgtataaaagattaaaataaattttgggtagatgttgttttaccaagatggttgtttgaaagaggtggttcgagaattgaacgacaatcggtgagaattacgacagcatatttttctttattgtcttcaggaagatttttagatgaatgtgcagctaacagtccagcggctgacaaagccgcccacagttttattccccttgcctcgcaaccctgtaagggaataacatttcaaggttaaaccccaaacaatattactattctctagcattaacttattctaaacaccttcttagttattttttttaattgatatccaaaccctttaaaaatgacttttcattagaaaaaaaaaaggaaagaaacaatctttacagaataggtacccgaatcggtacctcaacagaaaaaataagctacaatttttaatttttatttatcttgtgttctagccttaagcaaaacaagaaagcctaaacataataatgaacaaactcaaaaaataatgcaataaaataattgtcaaaaagaaagaatggggaatttgagctttgatattagatgctagtgcacaacatcactattctattcactaacgttgttatgaaattattaataattttttataataattattaaagtaatatgacttttttttgtaatggaaattaatatgacttaattaatatcagaattttcttttttgagatagtacgacaaaacgttgtgtcaaatgactatattggacaattcttgtacgacgataacatgagacccactttacggaaatttttctttttttaaacagtgacgtgacagatttctgtgcaacggaaattatataaaaggtaaatattattttggactcagtgttttgcaaaagttacagattgaaccctgtattttgttaaatgataaaatgaactctatattttctaaaatagtaaaaataggaccctaagcttaatttttaacaatttttcttttaatacaaccaacttgaagacaatgcttaatacgaatagctacaataaatgtagacagttttgttatagtacttttagatcgaattataattaaattttattttgacaaaaaatcaattcaaggtcctatatgtactattttaaaaaa

SEQ ID NO: 305458 - DNA, 3547 bp, Cannabis indica
aatggataagttccttgtttggattgttcggggagccaacaaccagaaaaaacaacaacaaatcaggcagttcattcaaactcaggaggctggttttgttgggcttctcgaaacaagggtaaaggttcacaaacttggaaccttgtacctcaatgtctttaatgggtggtgtttttcgtcgaacatagcatggcaccaagggggcataatcgttatagcttggaatccaaaccgtttcattgttgatattgtcaaatgcacgagccaacttatgcacttgagaattacaacaatggatggaacctataacagtttcttgacagtggtttatggatttaatgacaagaaagatagattggaattgtggaaggatttacagacactaaagacagatgaaagctggataataatgggggattgtaatgccatcatagccaaggatgagagagtgagacagagtaaaataccaagctgagtctgagttcattgagtgcttacaatcctgtcaactagaagatattaaagctactggtagttttttcacatggacgaacaagcagcatggtcaggacagaatgctgaagccttgtttttgaatgagggaacctatgatcatacaccagggatattgtctctatttcctaaatggaagtgtggaaagaaaccattcaaatatttcaggatgtggaaatctcatcctgaatatgatagtaaagcagctgctgtttggcaacaacaagtcaatagcaccagcatgtatcaggtggttcacaagttaaaggctttgaaacctgtcctaagagagattaaccaaaaaggcttctttgatttgcaagcaacctcgattcaagcaaagcatgtactcgatgaagtccggagcaagctgcataaagaccctttaaatgaagtgttacaggaacaagaacttgctggtaggaactcatttatttcagcacagcagcactcactcttttttacaccagaaagccaagattaactggattcgagatggagatagcaacacttctctatttcacgcaagcatcaagcaaagaacacaggcagaaccaggtttattcaatacagaatgaagttggaatgagggtatttgaaccagaacaggttactgaggctttcatttcgtattacaaatcactgttgtgatcaaaaatggcaaataggaagaaagtttccaataagattttgagtagatgcccaaaagtcacttctgaacatgctgaaatactaaatagacccttcactaaggatgatgtcaagaaagtggtatttgagatctcaggaaacaaagctccaggaccaaatggtttttctagttactttttttaggataattaagagctagtgggagaagatgtatacagggcagtcgcctccttccttacttctggtaaaattctcaaagagatcaacacaacagttctcacaatggtgccaaaaatgaagtgcccaaacactgtcaaagattttaggccaatcgcctgttgcaatgtcatttacaagattgcaattaagcttttgtgctctagaatcaaatggattctccctgatctgatctcaaactctcaaggagggttcattcagggtagattcattgggcacaacattatgatctgtcaggatttagtgaggcattatggaaggaagtcaaacaaggcaaattgcatgatcaaacttgacctccagaaagcctatgatacaattgaatgggagttcatagaggagatgctaatgggattacagtttccacatcacttcattcaaactataatgaactgtataagaacacccagattctctgtcatgtttaatggttctgtacatggtttctttgaggcaaaaaggggtctaagacagggagatcccatgtctccgtttctgtttgtccttggcatggaatacttatcaagaatacttaaagaggttggagacaaaagagattttaactatcatgagagatgctcaaaattgaagattaatcatctggcatttgcagatgatgtaatgctattctgcaaaggagattttaaaagcatctattatatgctacagggattgaaattgttctcaatatcgtctggtttgcaacctaaccctaaaaaatcagtaatatattgcagcaacatgccacatgaggaggttagtagagttctttcagcctctggttttactctaaaagacatgccttttacttacttaggggtgcccatttgtgctaaaagaatttctgggaatgaatgcattgctttggttgaaaaaatgactgcacgaataagaaccttgagctccaggaatctttcttttgcagctagagttgtcttaaccaattcagtgctcatggctattcatgcatattagtgccaagtgctcattttgcctaagaaagtggtaaggcaattggaatcaatatgcaaagcttttctatggaaagaccaagcttgtgcaacaggaccaggtctaatagcatgggagtcattatgccaatataaagctgttggtggccttggctttaggaaaatacaagaatgcaaccaagctgccatgggaaagtacatcttggcaattgctcaaaaacaggacagcctttggttgaagtggattaatagtgtctacctcaaggattatgaatggtggagttacaaggctcctactcaaagtagttggtactggaggagccttgtgaacttaaagaaccatttcaaggatcttgtaggccatcacatttgtacacaacaacaacattatcaggtaaaaattgggtatactttactatgtccagtctaggccaaagtttcttggtctcagtaggtgtggggtcagttaaataccctaaaacaatgttttatttcttggttagcaatacagaaacgacttagaaccaaggatagattgagaataatgggaatggatattgatgagcaatgtgaattatgctcaacacatgctgaaaaatgcagaccatttatttttcaagtgtagtatctctgctgcctgtttacaggggatcaaagattggctttcctggcatgtggcagctgatactatgcttactttaaccaggtggattgggagaccaaagatcagcaagtttaggaaaaatgtcctagcgactgctcttgtttgtctggtatacacactttggaaagctcgaaatctcagcttgtgggaaaagaccaaaccgactgtagaaagactgatcgagcgaataaaaaaagatgtacttcacagagttgctgtagtatggccgaaaaaagtatctttagaggataccaattggtttcaaaagttgtagatggagtcaaatgcgtatagtctgtacaggttatatagattaaaagaatataaatgtatagcttttttgcattttaggccattcggggtgctatttggttgtacaaagatagttgttgattgttaattccatttttggcatatttaattgacaaaaatattttattattcattgtatattttcggctggtatacattaatatagtttcctatttgtgtaaatcaaacttgaaaggaa

SEQ ID NO: 305459 - DNA, 2600 bp, Cannabis indica
tgtctaagttttggtgacccatcttaaattctttctcttcaatctctttcgtttctgattctgtaaaaccaagagagcgagcgggatattatttatagtgagtggtggaaaactctcattaatatggccgcaactaagaacagtggtaaatccaagaaaggtgtcgacgaaacccagatggatatggatcttcgcttcagcttggagaggcgtcaatggaagccagttttagatgaagcttccatgtcacccagaccttacaagaagattcgaagcccagaccggcaacaccaatcgtatttctctgttgctgttgattcagctcagccaatatccccaggtcctccgaacccctcgcctacctcttcctcttcatcttcttcagcttccagaattgtgtttcctttcgcttacgacgggtctgattctcagactcatatcaacaaacagttcacgggcaacaattatcccctgtttccaccggtgtcgcttccccaaattccgcagaaccagatgatatcattcggttcgcaccaacaaaacgccatgaactaccacccttccttcttcgcaggcaccggagacgtccaaaatcaacagcagctgcttcagtactggagcgacgcgttgaatttgagcccgagaggcaggatgataatgatgatgaacgggttgggtcccgatgggaggcctattttccggccgccaccgccggttcagcccatcaacacgaccaaactttacaggggagtgaggcaacggcattgggggaaatgggtagccgaaattcgtctccctcggaacaggacacgcctctggctaggcaccttcgacactgctgaggacgctgccttggcctacgaccgagaggcattcaagctccgtggagagaatgcgaggctcaattttcccgaccttttcctcaacaaaaacaataacaactccgactcatcggccggaccaagctccgccagttcttgtcctaataataaggctcatgaaagttccaaaagaaccattcatcgaaaccaacctcaagctcaagaggagttgaatattgaggcatcggattcggaaagaatgccgccgcctgctcgagacgacaatcctgatgatgaatcgggacttgggtctacggcaaatgacgaggttaaggggttttctgctggggaaggtagtgtggtgtctcagtctcagtctcaggagttggtttggggtgacatggctgaagattggctgaatgcaattccagcaggttggggtcctggaagtcctgcttgggatgatttggactccaacaacaaccttctcttgcaatcacatgatcttcagttcacgaatccaaaccagcagcatgagctaaaccaacaagcacctcaagatattcaaaaccagaggtactgctttgagaaatttggttcatcctcaacttcctcctcttcatatcctatgaagcctttcttttggaaagatcaagatgatccataagcttgaaactctcttcatttttctcaagggagtaaggaaagcatgcaaaaaaaaaatatatatttttctttaattccatatctcataatggaattcaacttcttcaccttcctgcttcccaaaggcctgcctttttaaggccttttatagcagtagtggagttaaccttagttcattttgggtcctgcccatttcttccttaagcattagtattactgtcattatattgctgtgtctgtaaacttagagagtagagtcattattattatatggcttagtgatatttactcttgacctttaaagagggagacggttttgtgatctccttctcaaaaatgggttgttcgatccatcacgagccttggtttttatgctccatggattgaaggaaactatatagctttgtcaccgatatctatccttacattgtattacttactactctgtattattttccattgctgctgtttatcaaatagtttgtaatgatgaatgatgtttactagtaaatatttaatggagttgagctttgtgtttaaattttctttgttatatatatctttaccaaatatgcgacttgacatttgttaactttttcctacttatgcatgagtattttgaattttggacttcttcttaaaagtacattcaaaacgtggccgtttcatgcttgtatattaatttcctcacctaaaaacatacacgataatgatagacataacagcatgcattgcatgcttctaaaaaaatatagatatataaaacataaaaaccagttgacgctgggtaaccatcataagttgaactagttgatgtgacaaaaatatttttatcttaaataactgagaactggttttggtaaatgaaatcatagtctcacgtgccatgatgctattgtgtttctctccaattgataactaagggcaacttgaatgctcaaacttagatattgtgtcaaaacaacaccaaaaagtataattttaacactaattttttcctattgtaactataataatatttatataaatataaaaagttaatcataaatatattattttaatattaaaaactaagaaaaaaatttagtgaagtctatagtgtcctactatttt

SEQ ID NO: 305460 - DNA, 2332 bp, Cannabis indica
tcatgggaacaacatcagaaacaaaaacagattttgaatctgattttatctctgccataatctcaaaagcaaacacaaatgacagagaaaaagaacaaaagaacaccaaagaatgaacacccaaacacgaagaagacaaacaaataccgaattacaacctagaacagatgcgagtgggcttagaagaacccagtaaagaactggcagaaaaatgtcgtcgaagacatcgccgcacgcgcctccacgcgacggcgtgtgtgaaaaggcgcaaaagcttatggcggcgcgtgagccccacgcgcgaggaattcggtgaccggactttggggttttgtagatcggcgactgggcaaccctcctgagtgggcggtgagaatagattcgtactccaaaaaaaagatttttaaaaaaaaaacctaaactcaaaccctaagctctcttctttttttccttttttttatgaaacctaatttcgaatttcgaatttcggatcacaatgctctgataccatgtagaaaatagtgaatcgaattgtgtattgatttcatagaataatacatatttatatacaaagctaggagactaaatatctactaaatatttaattcttttacagctaatatctaacaccgaggataagaaacctgcaattattttattttgtgagtcttgcattatggctccatatccatgcttgcaatcctggttcttaaccgcaacatcaacactcaatttatacttgactggagaagaaaacagagattccgtgccccactgatcagagttgatattttgaatagtgctatttggtgatgatatgactttatcttgagcttccttatactttggcaaataagaagttatagaaacctctatatccttacaaaacttcctattatctgtgaagaggaacttgttacgattatttcaaatagcccataaaataccaaaaaatatagccaactcgtctttttgaaacaaatcaaatcctcttaaaagaaattctttgatgtcacaaactttattattatgaaagaaagaagaaaagtgggtttgtttccaatacttacctgccctggaacattttactagggaatgagtattagaatcaatttcatttaaacaaacagagcagtaagggttatcaataatctttctggaaaagagattaagtttagaaggtagtaggtggtggaaggccttccaaataaaatattttatcttgggaggaacattggaggaccaaacagacatccaccaagccttgaaagtctcaggattggaagaactaggattgggagagttagaattggctaggtggtaggctgaactgactgtgaaagatccagaaggaccgtgtccccaaatgagacaatccatattagtggggtcaataggcactttaaggatcgagtgaactagctcctgatgaaaaaaaaattgagcttatcagaattccaagaaccatcctccccgatgaaataagaaactatgttttcaggtggaggagaatcatttttaaaagagatagagtttgaatcaggaattcaattaggattagtgatgtgaatagatttacgatcacccactttccaaactaagcccttagaaagaaggtccctaccccagagaagactcctccaacaatatgagggataatgaccaatgggagcatgatgaaaatcattgtttttaaaatatttagcttttaagagggaagacacaagggaatcagagttagtgtatatgcgccagccttgtttagcaagcatagcctggttttgatgaataatatccctaaaaccgagaccgccataaaacttggagttacaaacttgggtccattttttccaatgaatcttatgatgattattgcctaaagatccccaccaaaagttttccatgagtctttcaaagtgtttacagaaagagagtgagagcctatagcaggacatcgtatatgagggaatagcttggatcactgctttaaataaaatctctttaccaactttagagaagagtttttggttctagattgacaacttactactaactttttggagaaggaagagaaaagatgatttcttaaagcgagaaaaggattgtggaacaccaggtatttgtcaatgaaaggtttatcgttcatattaagggaattaagaaaatagttcatatccaagggattagtgtttagggaaaagagaatgtaggatttagctaagttaacaatttggcacgtagctttattataaattttaagaatatcttttatagcatcagagttgaaagaattaacctaagtaaagagcaagttgttgttggaaattatttt

SEQ ID NO: 305461 - DNA, 1774 bp, Cannabis indica
cagaaaatacccaccttttcaaacttgaattgtagccactgtttctctccactagcaaggtcaaagaaacacccagagaccagtagtttcttatactcaatgtcaaccagaactctaagccacaacgctggtttatcattttccaaatccaccctcaccacctttcctgcaagactacctagtaggttaccatttttagtggagaaatactcttgaggtaggttatatatttgcatccataatctcaactaatgtatcacaaccgaccctaccattctcggagcccaagcctgtaacacgagagtatatcctcgatagcaccatggtccattctgaaggacccagtctgtcttcagcaacttcaaatccgaactcaaaatagttaaaagtctttgcattctcagccaaggccacaactgagaccttcttttaccaaattttaaccacataatcagccaaagagccttcatccacgaccattggagccaccagttttccatataagcacaacctggttaaggccttcagagaagaaacacttggggtcaatgtaacagtggtttcaaggcagaaaaaacattttcctttaagatgggcgttggtagtattaaaaggttccataactacccgacaataaaagacaaagagataagaaaaagaaactaaaccccaaagtcaaagccaaccacagaatcaagagaataaatgacacaagagaataacgaaaaaggaagagacaaacaagaattaccaaccacccaccctcgaacccaaccaaaagcacaagacacgaaataaaagaagagagccactagaacttaggacacacagggacagaagacatagagaaaaggaaggaaggccatagattatcaacaggggagaaaacacatagaatgaaaggcacagagagtagagaaaaccaaagaaatatagtcagaaaacacaaaagtgaacgaggaagaagggatagtagaagaccattccttcaggcaaatataataataaatttgtaaaaataaatacaattattatatgataatatattaaatgcaaaattccataatttgtaattaattgcagatatttttttaaaaataaataatttagacaataaattacatgatttggtaaataaatataataattacaaaattttaaatgttaaacattaatacaattattaaaattacatacctaaataattactaaatgaaagattttcaattttaagttataaccaaataatagaaaaataacaaatatatattaaattaaattggaaaaaattaattaaatgtaatttataaactaaattaaccaaaataagaaaataattgagattccaaaataaatgaaaatttataaactttttggaatttcctttttttttttttgtaattctgtcccttaaaaaacaatgtgtcattttcttttatataggaaaaatcatgtatcattttcatgtcattttcccataatatatggaaaacgacttgccgtttcatgttgtcttcaacttcaagctataggtcacacgacctggttctctgcacacgcgggtcatcggacctgtaataaaactcggcctaaaaacatcatttttgactttgaaatggatagatttttgcccaaaaattttagaaaaacatttatgataagatttatgaagttttttagcatcaaaaacacgaaaaacattgactttaatttcaaagaaagtttttaggttcgaccatgttcttaagatttttttttctttttttttcctaga

SEQ ID NO: 305462 - DNA, 1589 bp, Cannabis indica
tgcttatttagcaagctcctatagaaatcaggctgcctatttagcaagctcctataaaaaccaggctgcttatttcataagctttatgaaaaccaaactgttcacactaccttccaacacatcaactcaccaaggttcttctacgaatcataagttcttatattcacagtcatttctttcttcttacaaacgcaattatatggtctgatacacctcccttatctacaaaatacgttaatctaggtagccatatatgcccaagattgatcattttttgtaagaatatagacatcatttgctcttgatccttgtaatatttcattttaataaagatgcacaactgactgtttgctaccgtagacgtaagcaaatacaatttgctgaactacgtaaatttgtgtcttattttttatttaaagtagtatatatatatgatatatgtgtatatttaaagtaatatatatttatattattaaatgtttggctagaacccctgaacaaacttttagaaccaacacacctaagagtgatcacatagtcatcaatggcaccacccttcatcagaaataacaagtacttctccaagaaagaaatactgtctttttccttaaagctaatgtagagatccctaaattaacgcaaaagtattttcattcaataaaatttgagaaaatagacattagataaaactgattttgccttttatatattgaaggagcaaataaaataaaaaaaatgaacaaacgtgagtgactaaatatatttgtgtgatgatgatgatgatttgtataatagttgttggtcttgtgtttgttccatctcctacttttataatcttatcatcagatcaaaatagtgttatgatcaaccgttaaaatggaaaaatggtaagtagcatggatcgtgattttctattggctgtagggtcattagcccctcaaacagaagcgggacgaagcgggattttctactccgagagaagaaggaagagcttcaaaaacagaagcgggacgaagagggcttacacctgttaacccttttgctccaatgtgcagaggcagtatcggcagacaactttgattatgcgagcaagattcttctcaagatttcgaagcagtcgacgctgtttgggacgtcagcgcaacgcgtgacggcttacttctcggaggcaatgtcgactctacttatgagctcgtgtttggggatatacgcgactatggaggtgatggctaaatgagagactaacattaggataaaaagttaaaatatggtattcctagttttatttacaaaattatgacatacaaaaagcccataaaaaagtaaataaaacaaaaaaacccatattctattaagttatttaattatgccataaaaatgtaaacacataaaaaattctcataatttatgtaatttcttcttttaaataataattttaaattttttaatcacttgtttactagtttttaatgatcggcaaatatgatccaatagtctcattttttttttttaataaaaaattactccaaagtgtaaaacataaatttatacacgaacacgaaaaaaaaagtcttgtctatattgacatg

SEQ ID NO: 305463 - DNA, 1903 bp, Cannabis indica
atgacaacacaacagatgggtacatccatgaaaccaactatattcaacgacaaagtagcggaggccctccgcaactggcaccactcagcccgaaagcacatcaaacaccaaaacaaggcggcggggtcagtgacgccgctgtcaagccggccgacgacacccacacatcacatgtccccggtccatctcttgcgccactaccgcagtgaggcagcagacagcctccaaaactccccaaggcgctcaaactttgatggtaccaccgaacggtgggagacagattcgccatctccatctcaccaccaccacggccgcttcgcgaccgagggttcctcctctcatcataatagtaataataataataaaaataaaaatcagcaaattgaattgggacaaataatggaacaacatcatcttcatgaagaccgcttcgccaatgagcttcctcctcaaaccacaacattaagaaatcaagctgctactgctgatgatcaatcatcagcagcaaaggtggggccgccaccgccccaccatgaaatcaatattggacacagagatttctcttttgaacggtttgaacgacagcccagcgtttgatgacgatagagaattccgttatttggttataatgttaatcggacggttctcattgtctcggcctgtgatgatcaacgagctagaatgattgagatgatttattactgatcagccagctccaataatgagcggtttaattatatgttatttatgtataattaattattatgtttatataatttttttgtttatttgtttttcattagtatttttaatttataaatattaatttcttttaagaaacgaatttggcgcacgtggagatatggagctggttttggcatcccatcccatgctaagcttcatgatcagttttattaattaattattactgcttaattagtttaatttgtacgtaagtgcattttctatatatgtatataaaatgcatgtataattaggaatattttcgacaattttctttttcattttatatcgacctaatcacttatattattataattatataagcaccaatttatattgttgttacctcccaataaattccatgcaataattcaaactatatcaagattaattatgaacaatagaaatgctggaccaaaccacatacaaagttgaaataagaaacaacccaaatagtattaatcattcaaacatgttatatgtctcgaaatgtttcattaaaatggtaaaataatacgcacttctctattttgtgtgtgtcaaccttgaatattaattattacatgcttggagcggtgacacctgttatatttataatatatacatgcaattaatagtaacagctatttggacacatttattagcctaacaatataaatatatttctaattacatagcacgaccattgttattaagcactattagtacttagtatttttttaatatgtcacgttgcgattaactagcgatacttcttaaaaactattatattaaattatataagactcgatatttagttggaccaatagcgatattaacacataggagggtaagcatcactggtgccctttctctattaacatatcaacactatatgtgatgttttataaagagcattgttattaggtaccaatggtgcttagcatcttctcgacatgtcgcgttacgattagctagcgatactctttaaaaactattatattaaattatataagactcaatacttaattggaccaataacgatattaattaatacataagagggtactaaataccactagtaccctttagcattttacttttataaatacatcatgttttattaatagttagtaattttttattataattaattgttaaattactctaataataatat

SEQ ID NO: 305464 - DNA, 2451 bp, Cannabis indica
aggaaaaaccggagataccctcccattaacttaagacaaaaaatgaatgaaaaacacagtgatctacgagatcacctagacaaaaagaaacatgcaccatcggtcttcgcgggaacactaaatgaaggaatcctggctgagctggcaacgctgcgcaaagacatagctcgggtctcccgaaggcaaaaaggggatgactcagattccaattgcgaggaccgaaagccttgcacccgacacatactagaggcagaactccccaacaactttaagatgcctaaaatggcggcatataccggagactaggaccctagtgattatttatcccgtttcaatcgggtgatgacagtcatgtgggtcagcaatgatgccaagtgtctttgcttttcgctaacattaagtggttccactgaggaatggttcaaaaggttggaaccaggattagtggactgttggaacaagttgcaagtcaacttccggagacaatttgtcgcagcgagaaagattaatctcgaagtcagtgctctgactaacataaaacaattgcccgcagaaaccttgaagaactttataaaaaggttcaaagaggaagcttcaaaaactaagaaggtggatgacggacaacagcttgcacttctctaagctgggatttgaaaggggaccccattctggaacgaactacaacaggagggagcagccaatctacaagatttccaaaagagggtgcaaaagtacatcaatttggaagaagcccaaataatggcttacggggcatactatccaaccagaatatcaggatatgtactcggagctcagctctcgagagctatgcccagaccactcctcaaatgagcggcatacaattctccgctacaccaggatataataagagcctagccttggctcctgcatcatcacattttggggaccccacaagcaacccctcggggatgagtggtcaagctctgtctcactccgctcctaccgcaagcctgacaggaccttctcagagctcccggagcaagaggtcctcaaagggcagtaatcggacggaagataaacggcaacgaaggtgatgcacccctcagtatactcaatacacggagctcacggacacacgggagcgggtatattttgccacaaggaaaaatacacattaccggaagcctcctccactgtacattacctcgaaaacttggtataagttttgctaacgtttgattttatttattaagtccttttctccattgttccttcataatatttttattagaggaatagtcttactcctgaagacaatatctttattatgaaggacttgtattgatttttcctagtaagaaaaatctgcataaagttctaaagtatcataacttagtacaaaatttaagtctgaaacatacttttttaatataaaaaattatttgcatttttaccgcttgaactttttaaactaccaagttgcggcccatatggtataggctttattgataatatcactcgaaatataactttgatagtttggaactcgctagaatctgtctttttgatgcttgatcttttttgtggtggaaagtgcacatgtaactgcagttgtgtatcactcgataaacttgagtttatgacgcgacacccaaatgatacgcacagtcaacctgggcgcatgatctagagtttgaccttcctcgcggcacagtttgcaaaaactcaagtcctagcatcgttccatgttggatttaagaaattggagtccaaagaagttcccataaagctaagccctaattgtcgtgcccctaagatgactaaaatagtcaacctagacattgggtgtctaagcacctcgagatttgaattattctagagtttgtttagttgatttttagggttcgaattagagtacaaaagttgtttcaattgaaaaaaatatattttagttgctgataatgtgaaccataagcctgaggtatacaacatatttacaaatattacactattagacatatttattaactattagggtataccacaggtttttcagatccatctcaaaactcaaaacaagtgagggctggtaagaaaagttaatgattattttgtatatagttatacacagtttatgagacactatgatgatgagagagggggagtgaggctcactagtatagttgtgtgtgagaaaaagagacagttttcgacctatatggtttttctctaatgaaaaattacaatcgatcaagtcaagcctataaagatatttataacttctatttaatctcaataaataaagttaaataagtcatttatttaaattttaattcaaataaattattatataaaaggtttatctttttttattttaatcatttaataataaatattttatcctacaaaatattttattaaataattatttagtttaaaataattaaaaaaaaaaataacaaaaataaa

SEQ ID NO: 305465 - DNA, 1993 bp, Cannabis indica
aacaacattaaattaattcacatcaaattttgcaaaaaagaaaaaagttctaaacaacttcttttctttctttcaataataacatttcatatattaatttctgattcactattctttcttaccctaaatttcatgtgttatttagaaaaataaataaataaataaataaaacgtatatatatttaaaataaataaataaatgagtgtgttcctagcttcacttattttgattaatttctatctatataaatttaatataaacaacatccactacacaaatcttcatacaaaaaaccatataaatatatagaaacaagttgtaaattattatatattaatacaaagacagaaattaaattacctaattaaactgactttccaaagataataaagctaatcataaccccattgttttgtagcatccaccctaataatcaatacctacaaaaaattattcaaaacaaacaagtactatatttaattaatctcgaacttcacacattttaaataaaatacgataaataaaatttgatattaaattacactaataataataataatcacctcaaaaaccaaagggcgtattaaccgaaagatgagaatatccccatcctctaaattatgagcaattgcaaattctttccatccaccatatagtgtacccctcttcttagccatgtagttagttttaaactcatttttttctttatctattaatgttattatctcatcttcctcgggcaagtattttgtaataaatttttttggaagacgctgttaattaagtaattaaggttaattaattaaacaaaaacaaaaaaattaattataattaataattaactagttaatattattcatgagaagattatataccagccaagatccatcactaacatttagtgggttcatggatttgagaaatgttggataatcgagttcgaaacctgatgttagttctctcgctcttgtccatgcagctaatctatctttatgtgaagctatcgttgtcattttcaataatgtccaacgagtactgaagatttagttagcgacgattttaaactgatgcaagaacttcaacttattatagcgtcggtctagcttcttctgtacatgtttgtattcaacaaaaattaccatttagtaatgataaaaaagtaaaaaaataaataaaaaccaaagattttgacaaagaaatgtgttaaaaagacaaatagaagtgaaaagaagatcaagaaagaattagatccattattataagttcattgataaacatttcgcgaagaaaaactcatcatcatttgtaataaatccaacgagtgaaaaattaatgtcaatttttaaaccaaagcaaaaccttattatatatagcgttgctttaatcttctctatacaagtttgtatttatcataaattaccatttagtaatgataattaaagattatgaacaagaaatgtgttaaaaggactacaaataaatagaagtggaagaatgaagaagagggaattattaatccattaattataactaacttaataaatatttgtaggaactaagaaaaattcattaatgataattattaaagatcgatatataaagatattttaccagtttataatggattgggtttccatttttggtgacgaaatccttttctttttgtgttttgtgctccaagaaaatcataggctattcttgatgatgtgaaagaagaaaatagtacttaaatttataaaaccatggaaaataatttttatatatatatatatatatttatattgtccactccatgcaccgttaattaattatttaagtaatatatatgactatagccaaatttatcattaattaatttcacgtaatcaaacaaaataatgtaaaattaagggtgcatttgtaatattttttagtcagttttttattataattagaaaagtgaaaatattttctaaaaacatgttttttaaattattttacttttcaattttt

SEQ ID NO: 305466 - DNA, 2401 bp, Cannabis indica
cgccaagttcgatactggtgctagagaagccgcacttaccaacgaccatggaagtcgtttatgggagcggtcgcgtgaagtcgacgattggggcaaagggatcactaatacacgatcatcaaatcttgcctttaagccctactacaaatggcccactctatttcgttgggctccaaattcatcccacctcaaaaatgatataaggtccactttattaagtgttggacaagatccagcccataactctcctttgatctgattcataaagtgacccaagtaattactcaaatgagagaaaagattaataatccacactgtgattcaaggtataaagtcacattaacacacattactaaggcccataacagcaaaagtcttaattttattaatcaaatttattggtcagccctttgagaccaaagtaagggccaacatgcttttcaagcttatcaattgcaatatcagattccctcttcatcacttggtcacaaggaggggtttccttcttcgatagcttttctcaccagcaacgtccaccatggacgcaatgaccaaggatcgagagtcttcttcctagtaccacaagcaaaggtggcagccaccatggtactcatcaacgaggagcagcaactccgattcgttaaagtttctcaatatgtcaaacccaaggaagtaatagcttccaacatcgtttggatattcagtgtctaggatccgagttcagcttatcatacagagctctcaacattttgtttcactatcttcttagcttgttaggttccaaacaagagttatctagttgtgagtgaactattatgggagaattacatggccaatttggtctttgattgaggaaggtggaattttttgcaagttttttgagtcgtcaacctataattgccatatctcaacagtggacgttgctaaactggttttttgatagaggtcgattggtgtttgatcttaacagtagccatggacttcactcatttggccttgttctttcactcggtacctttcaatggagactattccaccaatcaatcaccttgaggataaggtgaatttcgggcagccggtaatgttaggccttaggattagtatggtgagctagaatatactaaataaaagggtatttgagtcattgttttaagggtggatttgcaagtgagaaagtttatatgcaagtgagaaagttttatatataaggggacaattggtggtatgcaatgtactgagtgttcactctttgcatcaacaggcctaagggctctaatagcttgtaattgatttttctcctactatataaatataatttcttcttgtttggctactattttattgtgttcttgagtttgaaattatcgagtcatatcatgagcataaaaagtgttagccttattacccaatcaacaatgagcaccttcctagcccctgctttttgagctgctactgccgcaactgctgcattattatgaagacaaaatcccatggcctgcctaacaccagcatgatgaccaggaggtcgaacctgacatccattaacgattagtaatctaaaggcccaatatcgaatgaaatgattaattaaattactccaataaaaaaatagggaagtaagctctcgtaccagggcaaacccatttttgacgcggccagtaacgatgcctgaagctagatcagcacataaaccagctgcaagtctagcagcacatgctgaatgctcattagcatatgtatcagaagtaaaataactggagaaaaaaaaaacccaattaataaaagcctcacctatcttaacaatcattaagtataattaaatgaaatattaagagaattctgattgaataccaaacttattgggaaactgatggcatgtaaatcaagagggaaggaaaggaacaaccaccacctatgacatgcttaacggtgtgtttggaaagccaccatgtaattaaaactgagcgtaatttagaataattagaagttttagcatgttcgtccaactagctaattacatagtaagcatgtaattggaggtaactgagggctctcaattacactctaattctcatgtcccccatgagaattggatgtaattataaaatattactattttgagataatttatattattaaattgtgtaattactaactcatttgtcaaatatggaaagaagaatccatatgtaattactattagacattcaaacacgcattatactttaaaatagagtgcgattactatgtgtaattacaaccctagtaattacactacctaataattaaacagtcgcttccaaacacacactaagatgacgtttggttcaaaggaataaaaacataggaataagagtaaaaatgagaataggaataggaatgtaatcaaatttaaaatgta

SEQ ID NO: 305467 - DNA, 1505 bp, Cannabis indica
gtagaaaatatagaatattctaatatcaattcaagttcattttgttgagtttaagagtagaaaattcataaaaatatcattaggtttacaaaaatttaaagttttttttttcatatgatcactcctaattcaaatactatcttaatgttacaatagtttttaattttatttttaaaaaaaaatttaaaagcatcaaaaggatcatatttgaaaaatctacccacaacaatgatcacttacgggtgtttaaataatacaccttaaaaccatcatctcatatgtatatatgtaaatattatcctgaggatgattattattttaatgtatatataaatattcatatgcatgcaaatcatcatcagttcatcataacttccccttcaaataacacacattaaaatcgatctctttttacattaaacaaattaagctccattaattattcttatatcctctccttttttcccttggttaatagaaaaaaaaaacaatacatacatcactactaattaatacggtgcatgcatgcatacatgcatatataagtacgtacatacgtaaaagtaataagtatttatatacgtatatatatatgtctatacatttatgaggccagaagtgtagggaactccagtagccttaatccaagcatcaccccttataaaccttgaagcagtatactgagtagctctagtggttggaacattcttaattcctttccacttgacccgtcgaaccttattggatccggggccccgattcgaaatctcagtatagaaacaagtattaatagcaaatgttccagcccaaggcaaccaaccttcgggagctataatatcatcaatttgtgaattcataataatggtcctcgaatactccttccatggtcttcccaaataagccttgttcttgttcttgttgggtagataaagcgggtcgccggcaatggtgcagttttggaggactaatccggtggcctcgcgcttgtcggttcggccttgggcggtgacgatacagaactggttttctagaggctttcggacaaccattttgcagttttggaagagggcggcggcgtcaccgaagatgaagtcgattgtgccggagatggtgcagtctctgtagaattgacggtgggcgtgagtgtagagagtgtcttgataaccgtccatgtggcagttgtagaagactgacatgtcggagttggctcggagggctactgcttggtgctttgttggtcctgctgtgttctcaaatcccatgtcttttgctatgaagttgtttccaacaatggctgcattattcatccaattattgtatacattaattaatcaattatgccatatttacatataaaatatctacaataataaacatttactatcagttatcaatagttattattttaatgttgattttgtatatataaagtaagcttcttttggaatgctgtattaggtcgtattgtattgtattatattgaattggattatacattatatttt

SEQ ID NO: 305468 - DNA, 1983 bp, Cannabis indica
gtttattgtttttttattttatatatatatatatatatataagagaaacaaagaatctagtgaaatatcaaagagaaattaactatctattattgtgtattcttttaaagcacttttactttaaagggaaatataactaggttagttatatatatttttctgttttttaagaactaaaaaaataaatgtaaaaaatcctttcaaaaaaaataaaataaataaataaaagtcaaaaatgaaaaactcacattctgcgttagcgagctcagcatcaacatgagaaggaagaactctattatccttgaaatggtagtggttgtcagattctggagtagtaacaataatcctcttgagccattttaccatacggcccccaataaaaccaggtataatcatcctcaccggaaaaccgtggtccggagccaaaagctcaccgttctgcatgtaagccagtattatatctctagaagggtccatggccatctctttctttatactcgtaccgtacttggagccaccaccgccgggaaggtcctccgcaccctcgaagcacacgttgagggccccattcttacgggtcatgataccacaccgcttcaacaaagcgcgtagcggcacgccccgccaaacagaggtcgagatgccagccgccccccagttgaatccaattgtctgctttacaaggttctgctcctttcggcggttcccggcacagaccagggaagcaccgaattcccgactagggaactcgttgaccagttggtccatggtgaaacgggtcggcctcttgaccaaccctgtcacctcgacggaccagtcggcccagttggccttgggtacggccccgtggttacggacgtagtggagcgggactggggtaatgaaaccgtagtgcatgagtcgggtcaggggtggctcagagttgaaagggtgcttccccgtgagacggaccatgctggggttgcgatcgatccagctgtcagacgtaccatcatctctgggatcattgatcgacggctccacttcgttcttgcccctaacgatcaaatcctggtactccttttgggtttcgctctcgtcctcctcatcactggacgaatcgtctattgccacgtgtttctttggaaagttggtatgtacggtgtacccgcgaaccggggagtcggacctgtggctaggtccggacttgaacgaccgaacgacgccgttcctggcgggttcgaggtgagtatactgacgattttccactgacgccgccatgatgaatgaaaaatcacctaaaagacttcaaataagaagaaagagatgtaaattgaattaccaatattgacttatttctctctcttttcgttttttcctcttctttttccctttcaaaagagatagggagatgttatgtatctgtttatggttatctgggttcagtggagagagtgagacggatgtacaaggtcttatataggcctgcaaaggaggagtggagtgctcctgggacccacttgattttgtgttgattttaattttttctttaatattatttctattttttctattgttattattttgtctattattagagagttttagtgaagagaaaaatacttgtcacgtaacataatccatcagcctcatggatgagttcagaagagagagcaatccagctggtttcgagttgtcggcgcagcatttgagccgtggcttcaagtggtcaatgtggcttcacaacccaatccaatcaactggctagagccacacaaatgttacacggtccatctaaactagatctctaccaccaccaccacttgttattaatttttgttcttttgtgttttatgaattatttctcttctctttttcactcgttattgataattataatttatatatttatttttcccggtctaggacattatgataataaattttttatcacattaggatagtgctaaaggagaaatacaatatctcaaaaaaaaaaaaaaa

SEQ ID NO: 305469 - DNA, 1320 bp, Cannabis indica
aaagtcaagttttttgtagtgatatagtataaaatataaaatattaataaaaaatagcttatataaatatttagagtaatgtacatgtttatttatttaactttttaatttaattttagttaggtttattatatataatttatatttattttaattatactaataataaaattctatatatttataaaagtaaaattaaattaaatttttagtaaaaataaaaaaataatgctaaaatacaaaattttaaagttgaaaaaaatcataataagaagctcctatatatgaagtgggtttattatttcataataattgactccatatatagagttccctacactatcggttgttttaacccctacagcgcttcggtaataaatttcaccaaaactgatgctaaaaaaccttaaaaactgtctcgaaaagttcaattttatagcagtgttctgtcatattacattatccatttccatacttgtattttgattaaaacacttttatacattattttaattccttacacataacatatctattagtattttttattttacttttttgagtgttgtttttgttactgtgttttttaataaaatcacatgagtaatcaatcaaaatctatatactacacattgaattgcgctagataaggcatttttggcacttaattaattaagatctagtctcttaatattaatcgatatttgattggaagaagaaagaaatacaaaagagagctgcaacataaaacccttcttcccaaaatgctttccacatacagccaacattgttaaagagtgggctacttcaattgccgaccaacatcagaaaataattttaagtttcagttacaatatcgctttcgaatcgaccaacacttggacatttgcatggcaagaaaaaatttcagagagtataattaatggcagataatatattcttaatcgatccacgagttaacgtacagttattgaaaaccaaaatcaatacatactcagtttataaaaattgtcaccaatgaattgaaaggcatgctcagttgacttgctgaactttataaaaattttgttacttttcgtaatttagaaatgatgcacacgaattctccaacggaacaaagtattaacttgttagtatttaattttacttgttatgtattaaaagaaaaatatatattttatgaatagtttaattttgccacataaatatccaagtttaataaatatttaataagtttttttagaagtaataatactaagttacatttttgaaactctttgattacttatctattaaatattaaatcattatccacgtctc

SEQ ID NO: 305470 - DNA, 1683 bp, Cannabis indica
ctttgcaaatgcctttaaaaattttaaagttttaatccataaataaataaatatgttttttttgggtgtgtgattattaaaattagtatttttggagttttattttttatgttaccttttagctcgtgccaccacattaactctattaaaaaaacaaaaataaatattccaattccacagatcatttagaacaaatagttaagttttttttttatgttaaagttaaatttttattactaataaaaatcttttggatctcaaattattataaatgcataaaaaaaataaagaaagaaaaaagaattttttttttgctaaactataaacttaaagtaacatacaccttggtgcacacaacgaatcaaataaatatcactaaaagctaccaagtacaaaatatatttatatggttcttatctttcggccaatcaatatccaataaatttcccaaacaagtaatatgagctcaaattttcaagcccaattaaatttgagatgatattttattttggcatcaattagttattaatgaactaaaaactatttctaattaaattatactgacatgagaattaactagacaacactattttttcatgacatttattaaggtttagcaagttcgaggaaaaccagccaatgttgcaagttattgtttttgttgctgttaaagaaattttacataatcaaagtgagtgttatttgactatggtggaccccaggagacacgaatgaagaatgagaatgaagtgactttagtaattggacagcacaacaaagaaagagatgccacgtggcaggatgatgaggtggtgggttttttttgttgtgacaaggaccaagatatggcgtgggaatgcggcgtcctctacccgaaactgtgtggatgtaacgagtcagctgaggtggttatgtggatgcctcgtgctcccacgcctttctttctactttccattctccgctctttactttcttttttaccattttacttccaaaatctcacttttagacttttttttctatcattattttttaacatttaccctttaaaaaataatgatattgctcataagttttctttaatgaataaatactattggactttttatattttataaaaagttgtcgattgatatcttttattaaattacaactctttttttttaattattaaaatggtataaaataattatgaactcaattttaattaatttttttaatataagtaacttaaaattagtttttaatacaaattgatacaatatatatatatataaatagtcttgttataatactttatgttaaggttattattaagttttaatttgacgaaaactaaattaagaatctattgtgtattattttaaaaaacgtagggtaaaaattatcattaaacaaaataacgagtccaaacaataactttgtaaaacacaaattctaaaatagtattttaatattttataaaacaagtttaatggtttagtttatttatttatgagaaatactaaatggcactcatggtgcttagcacccttgtgaggtgtaatatcgctagggattggtgcaactcaatatcgagtaccgcttattttagtttaatgggtaaataccattttagaccttgtgctttgcaaaagttactaattggactctctataacaaaatagaccttgtattttccaa

SEQ ID NO: 305471 - DNA, 936 bp, Cannabis indica
cattgagaacaccacattgaaaaacaaccgagcaaccacacagaaagaaaattcactcgaccttatctagtcaaactaaatgatacaaaaaacctagtttagtttatcatacaatacataatctgctaaaacaaaagttaccaaatcagatgagcttaactaatgggcaaaagacaaaaccttcaactaaaaagctcaaaagtttaatctcttcaacttatattttgaagtgagaaccaccaccatcaatggttccaataggtaaagggtatgcttcatataaataaatattgactaatcgaaaacccaattaacaggaaatcactgctgtaagtaagagtataatttaaaaccctaaaaaacaaaatttgatgaaaataaagaaaagggttttattgtatgtagggagatgttttggaaagtacgaaccttgcgcttcagattgtaacggtgccattcagacttgtaatggaacttttgctcagaatcgtcgatgaattctttgttgcaagcgttgcaagctaaccccgacattatcagctaagctataagcttctgtctgtgttttcttctgaagatagtgaagaaaatagagaaacttggtggtatggattaggaagaagaagaagattagtgaaggaaaaatcaggttttgtaataacaacgagaccgacggctggtcggtgtaagattggactatttatatgtaatccacaaaatggttctgcgcaagcgctcgcgtcataagttttcttctttttttcgttttaagaaaattacctatttttttaatctttttacaaaaatacaatttataatatatcaatgttatattagggtaaattacgtcataaatacctaatgttttagattttatacacttaaatacttaatgtttatttttagtaggtcaaaaatatctaatgttataattct

SEQ ID NO: 305472 - DNA, 1366 bp, Cannabis indica
ttttttttttgttttgttttaatcatatagagaatactttcattaatgaagtggtgaaacctcaacaacccaaaaggttaagcaacatacattttgtattttcgctcaaaatatgcaaagtaaccacttgaggcttagttattcattgtaatagataaatatttaaataaaaaacaaaaaactcaaaggaaaagtataatgagtattgttgagaatcatgcggtcttctctcaaaaccaattagtaatgagtggagtagaccatgttcttatgcatggttcaatatttttacatttgatctgtgtggaacaatattgtccaataagtatcaacttatatcatattaatggaccactagaaacagtgacatgaatcaattgtgacaaagcaaaaaaaaaacatcatagtatatatcaaagatagacagtaaaaaatccacacaaatgtggacaatctaaacccaaaacaatgggacgttattgaaaacaaaacaaaataaaataaaacgtgactggttagtcactactaacacactgcaccctgttaccgtcacaccaccatcattgtgcccaatcgaaggtttaccaccaagatcaaacatgtcgggatcctcccacaaacccatggcaaggttgctcctctaaagcgccaacaacaagccccataaaaatcaattgagccaaaggtcttttccagcaccccccatgtcttcgaccactagaaataaactaccatcctagagaaaaacagcctcgttgtccacgatcaaagacccctccaacaaccctcaaaccagagctgatacctctcaacggaaaaagaacaaaacaaaaacaagaggagatcccgagaagctctacacaacacacacctagagaaaaaaaaaaaccccttcgactaggtctaaccaaacacatagaaacaacgccaacatccccaatcaagaaaataaaacaaccattcgcagcgttaaagaaaaaaaaacactagtagagagaagagaagatgagactaataataacaattgtgccaaaagcctctcaatggaagcaatttttttttttcacaatattttgatttttaaatatttgtggcaatactacccaactttagttattggtacggtgataccatctaaactttacttatgttttggtttttaagtttgaaatttcgtattttaaagttaccagtttattatttaattaatttcttaattaaatgcgaaataatataactgatactgaaacagcttttctgtagctaacaaaaggcaactttgtaacttcagaataaaccgaaaaaataaataatgcagataagtaaaaacacacaaggtttttgtacgtggtttcaacaatctttt

SEQ ID NO: 305473 - DNA, 1502 bp, Cannabis indica
aaaaaaaaactaatacataaattcgtagcaaaaaaaaaaaaactaatacataaatatattttgtattacgtggctattatataaacctcacacgtaccttgattgtggtagagtaaaagcaatgaccaattcagatgtcttttgagagtaatacaatgttattaatttatttatttatttgaaaagggtaattgtttcttttcaaataataataattgttattaaggctaatcccatttttctataaaaaggatttgcttcttcttttcagaaaaataaattataaaaaatatttacttctattcttgggtaatttgatttttttaattattattattatttattatttaagctcttgtagtggtttaaaatattgctgttgatttccaataatattacttcaaaaaaatggtccatgaaatctataataggattctaagaattgatgtttattgtgtgtactatttaatttattttattttttttttgctaagaaattgaaattcattaacccaacacacaaagtttggtgagtacatagggactcacctcccaaagacgcaacaaatcattacaaaaatgggacaaaccccacctaactagagcatgtgcagtcttattgaaaacacgataaatccaactcacaatacaatcactactcaccaaagaaacacaaagtttagagaaagaaaagtgaaggctccagaacagagattttccggcgatcagagctttgaccagctgaacattatccgaaaagaaatcaacacctccaaactacatttccaaggccaagccagcaccaaaacacagagcctccagttcaccgtgaaaaacgccttgaacctcaaccttcttcgcgctaaaggccaagaccgaaccttagttataaaaaaaaaaaaaaaacaacagccgccacagccccaacgtcatcaaccagagcaaaatctacaaaacccctcgctctactaggtctaggaaggccccagcgcacctgaaccacaccacgacaaccttcattaagtatttgctcctagatcaaaagtcggttgtgctcaagaaaacactcctccactctctaatgtagcaacactacaacattcaggagcaatagcggcgggcccctcggccgctattgctccagtttttggccgctaaagggcaatagcggcggacctcggccgctattggtccgccgctattgcttggccgctattaacagtattagcggccaaaaagtggttccgccgctaatactattaatagcggcggagcaatagaggcgggacccgccgctaatgccctttgtcagtttcgtgtttcgagactgacaaagggcattagcggcggggtcccgccgctactgctccgccgctaatacccgtcagaataaaaaaaaataataaatatttataaaaaattatttatatattaatctatatataaataaataattaattatttgtgtaaatatttaataaataaaatttaattaatataat

SEQ ID NO: 305474 - DNA, 2992 bp, Cannabis indica
ctctctctctctctctcacctacatatctctctctctctctcacacgattataaacctattcaggtgtgtgagatcaaaatcctaactctattacaatgtctcatgagtttaatacactctaatacctaaatttgttcctccaaattagatctaatagcccactttatccctgagtgttgagacttgcttggaagatcaatgtgtgtatattcttcaacaaaattcttgaattggatgttcgataattataagaaaagaaataaggataccctaataggtctcaagaggtataatttttatttaagtagtttagatttaatctatatatattttgatgatatctttgggcttatagtttatattagataaaaattatttttatcaaacttcgcttctgcttttataactctgatatggaccataaaaactaaaatttataatatacaatttgtgtttttgtaacaattatgtatatttattgtattaaaccaaattatggtgagataatttagttctcgaagagaatgtctacacgaagagactagcggagataaattattgttggtgtagatctgagataatctcagatttcgattttttatactatagccgacagttttaaacgtgacgtatatagtagccattatatttaacggttttaaactgtcggggaccactttttgctgtcatttttcaaccgtcgcctattctacttagtattcgtgacactcgaataagtgacaattttagggatcgataggaatacattttccgactattttaattgaaaaatccatattttttcaatagtaaactatcatttttttttcggagaattgaaacttgttaatcgtatttggttgtgaataaatctttttaagttagattaatgttaattaaattacattatttaattaacatacaaaagcgtgatatatattattttgaaaaattgatgttaatttattaatatgtgcaatttattatatattaaaattgatgaggatctttagattttttgtgatttggttgctttttttaatttttaattttctttttgctaattaactttttttctattttttttttttaaaaataaatattagcagctattattagtttgtataaaaagtttttgagtaatgatatacacttgtttcataaaaaaaataaaaaaaaataaaataaagattagtcctccaatagatcgtgttagttttccaagacttaatttttttaatttgtttatttacatatttttttgcaaagtcttccaagacaattaaaaaagataaaaatctggccttgtatacaaaaaaatgatcctactccatactccaaacaattccaactgatgcgtttgaaattgcattacatcgaaacaataaccaaattaagctacatgtaactagagtatgtaataatatataacacatatatccaaattttattattattattatatcattactcaattggataataacacaatatatataaatatattatatttatatatttaggtgatcatcaattagtagctaggtggaaacttaaagagagagaggtaagagaattgaaaacgcaacaattaataacaacatgaaaggcgagctttacgtagctaaatgattaaaagcggcctattgagaaagaaacaaaaacacaagaagaaggggttgaagttggttaatatataagaaatgatcatatttgaagaccagcagagccaatcaacttagtgaggccaaaagtgatggccatagccaaccaccctccaatcagcaccctagcacaagatttcaccacaggagtcctcccaagcacagctccaacagcaccaaaaaacataagagcaaagctagccacggtggccaccacgccaagcctcaccttatggtcatttatgaaggcagcagccaacaatggtgccacagcgcccactgagaaggccagcgcagaagccaccgcagcctgcgctggattcggtagcttatcattctcctcctcctcatcatcatcatcattctgtccaatacgacgtcgttgctgtcttcgtctcctgatttgagacttttcaatgtcgtattgagtgtagacagaaacgaactctccaatggccatgctacaagccccggctactaagcctgcaaaaccagctagaagcatggctttgatgtcctttctgactgacccaattcccatcatcagtgatgctaccgaaaccaacccatcgttggctcccaatacagctgctcgaagccactgtgctctttgggagtagtcaactacttcctcatcatcggttttcatcgcttccacgttattattattattattattataaactgggatttctacgtggctattattgtacatgttgttgttaccaagggtttgatgatcaccagcagaagccatatatgacagattcttttcaaagatatatatatgtaataatgatttgatggattgtttttgtttggtgtatttgcttgtggtgaacacacgccttcccattttgagtatatatagatcacgaaaaggggatattcattagtgttcaggggccatggtaaatggggtccttgaaaaaagtgaatatcatggagagcaccatagatttgtgggtttaattttcctatatttaattccaattccatatagtggagtttatatttaaaacttatttctattaaattttctttccgacccactcactcactactctcattttttttattatacatagtttggtcattgaataatatatatttccttcattaaccatgtatcttatttagttcccgaatgtataccatatacatatactcgaacctctagcctctaagaaaaataaagttattgtcatgtgttgatatatatatatatatatactaggtgaatgtacgtgccgagtcacgtattgctagtttcatttaagattttggtttttttaagattttaaatgtattttatttttaaagatta

SEQ ID NO: 305475 - DNA, 1413 bp, Cannabis indica
ctaatagccaaacaccgcgttcccatgttgccgggcacaaaacatgcaaaattatgaaattctatatataacatatgaaatgcattctgaattcaaataaatcttcgtaaataaataattccaaactaatatgcaagtttcataattaaaccctaattctctgctaatttccaaattaaagttaagcggtctttacaggaactttcgaattttgatgatcgttggtgtctagttggaagattccttagagaaagatccttggattttatggcaatgcaacataagatggcctctttttggagaccagggagaggtttgtttgtgaaagaactagatgataatctttatatatttcaattttatcatcatgttgatattgatagggtagttgaaggtagcccctagacctttgatagggttcctttaatttttgccaggttgaaagttgacgaataccatgttttgtagtgctcaataaacttgagttctggatacaactccatggtttgtcaactggttttatgtctgctaaagtggtcaaagatatcagtaattatattggcaccttcatagaagtagatgaaaataatttcatgggcatatggcgtggttatctttgtgtaagagtctctgtttgtgtggatttgccattaaaacgaagaatgaagttggaaaagaaagggggagagagttttgttaattttaagtatgaagatctttcaacgttttgttttatatgtggaatttttggacactctcaaaaattttgttcaaggctttctgatactccactacatttgatcaaaaaatttacaaaatggatcttatagcggtgccgggaatgagacaacatacaattgggttgaaatggctcaggcaaggtctaatgtcaagaggtgaaagctctggtgcccggtctgatggagattatgtcgagcacggttcagtttcaggtggctcccaatgtggacacaatcaatgaaaaaaatcaacaggcagcacattcagtgggattggatggagcaattagaggagttgacttgggcattaatgttggcaaatttccaactaattttatgggatcaccagccgagtatatttttgaagataagagtaagaatgatgatgtcaatgatgaggtggatggggatttaatggtctctgagtcaaagaggaaaataatagttgtctaagaaaaatgggtcgagtagagaaaatagtgaaagtatggtcattaacaattcaacagtgacaaaaaatgttgttggggagggttctgtggtagaggcccgccaaaaattatgaatgttttaagctgaaattgtcgtgggcctgagaaccaacagacttttcaattccttaaagagattatttctcaaaagcaaccagttttattttctgtgtgaaataaaa

SEQ ID NO: 305476 - DNA, 1346 bp, Cannabis indica
gggttaaaaaatagtaacgtaccctgagatccatctaatgtaccctgagactcatctaatgtaccacagaatacattccgtaaaagtacatcacgagacaaaatcgtgtccctaaaactataatacaaatataatattactattattattttattataattgtgggaccaacacttaatatatatagtatactctatatgtgttaaatacaaataccaactctttatatttccaattcaacaaggcactatatttttatttacttttatatactatgattattatatatatgtaagttctaaagtggccacgcccttgtgtgggtgtatgtggctccgtccctggctgtgttaacctttcagattcgtcggtctgactttacccataaccgaatcttgattgaatctgaacccccccgtttagctccgttctttggctaggttgttggtctttctgggcttcgtgaatgggtcgtaagttaatttagggcacacccctactataaatggttagcagttttctataacttttactaaagtaaaataattaggacctaatattgaattgcactcaagagcgaagctagaacaaaaattgaggtggggcattacataacttcatattatatggagacttcaattttttagaagaaaaaaaactattgagttagatataataaaatgtaaattaatacacttctttcttaacaacatatgtaacttttatacaatggtattttatattttcatctgggggttaaatcccaacaatgatattttagttttttaaaaaaaacaaattaaaacgaagatgttgacagtaaaacttgtatcatccgtgaactttaaaaaggcttttacgactacatcaaataatcttgactagaaaagtatttgtataaaggtccaaaaacattatttaaatctgagcgtcaaatcacgactacaccaaactaggatcgactgcaccacttagtctatatgcaaccgcaccatttagtttacatgtggcgtcactcataattgtatttatagtgatattacacctcacgcaaacactgaataccctttagtatttcttttgtaatgtgacattaatttttacttggtgatctttccattaatttttatttggtaaggcagacaggaaaaacaagaaacccgctactcaaaccactttaacaatgtattaatttaaaaaaaaaaaaaaaaatacgaacctctttgaccattaatttaatgaaaataccaaaaaaaaccttaaatctggccggtttccaatttttatataatggaatacagataaaaaaaaaataaaaaaaaaatagacgctatttgtcaataaat

SEQ ID NO: 305477 - DNA, 2568 bp, Cannabis indica
gcatgtaggcagagtttaagagagagaagcaataaatatacattggtatacctaataaaaaagaaatagcctaaattgtgagtattaaaataggtaagggtaaattcttaaataatttaataataatagttattggtgcaaatatttcaaaaaaaaaggggcaagtgatacaaatatcaataacttacagaaggaattcaaagaagaaaaggataatacctttagtaaactttgaagggtagctcgcatctcagtcctaactttatacaaggttttaatattgtcatatgttgtcttaattgctgcatatacacaatctgatacaccaggtcctaacttcggtttaactgatttaacccactcttcatggtttgatttgaattcatatctgagaagaaaattgcatggttacagaacttagaaaaacagagcaccaaatcctaaagatcctcaacgaaaaaataaacaagagtactattcaatttataaagattaatcagtcaaaagtcagcaaaggtggctccaatgactgaagctgcaatggcaacaacttaatacaaagagagagagggagagatcacaaccaaatctaatactagaaaaccctataaaatttgggtaaataacccaggattaagtcttgagaagaaaaacattatttgaaagttccataatactaatcagtcctaaagaattagcatatttactattaactttttaagacatcaccagtctacaattatctacaagaccaggctgttccataatctgcaacatgcatgggaacaagtagccatttttacgaacaaagtaccaaaccaagtttattttggcaaatactaattcatctttcaggcaataatttatttaatgccagtacttcaaaaatgttaaactattgcacaaaagcagcgagttttccacacggctttaaacatttagcttgaagatatatactccagcagttaacagtttatttggttggtttggttcaataaacacaaattaaaagttaaatagataaaaccctatcttgaatacctttgcaatgtaaccatcgcagatgacagagctttcaaagcaaatgctccactttgaacgtttgaagaaacttcacaaaagcctttcagactgggcacatttgaagcaatatgctttccaaaattcatatgctttggtggctggtctgcaaaaccaacaagaaaataaccaccacacagttatcatcacttttacttttatcacaacaatatatgacatcaatcacactaggaagatggataaatcattggcaaccacaataccacaagttccgtctatttattacaagtactgctactatttttctttaaactagaatccccacctaacccttttctaaatggcaaagttaaacagtataaaaaaatacaaatttaaaccacgattgatagttgagaaataactaagttcgaagagtgctgcaacttacacccagatagattttcaatagctttgctcacaacatgtactgtcctctgtgtaggaatcttagacagctgaaaaagatcatcagcaaaaataagacgtctgggcctcttaggttccactgaattcagtcgaagcaagacatgtccaacacgatgtagaacagatgggtcgctggaaaagattcctaaatataatacagaacgatattgtcagaaacaagttattgatcaaataaataaaatcagaagcaaatgaagaaaaaaaacaagagagggagagagagaaacagcttctggcataccaacagcatccaaactttgagaatttggcaacactccaattgtagatacagctccatgagaggggcggaaacccgattaaaccacaaaatgatgccggtattcttacacatccagttgtatcagtacctgtaaaggttaaaaagtacataaaattgtaaatcaaatggcttagtgaaaacaaatgtacgtatacgcacaaataatggaagttaaccaaaagcttttgtgaggaaaacgaaaggaaatatgggatctgattagtatagaagatacagatatttgtatgttttggtttactctgtaaaaactgtgtgcctgtcttgtttggcgcattagaaagaacaaagagagagagaagaaaagtggctattaggagcacaaatgatccacgggaatggaaatggctgatacaacacaaaatcaaatcccaatcatgatgttgtgtcatcagtataaaatttctagaaatcatgactttcattgcaacagttagacaaatcagataaagcctaccctgaagacaataaatgaaatgcaataaaactgaacgtaaatctccaagagaaaaagaagcagggccaatatgtttgatcaccatagctgagtcggtattcaataattaagaaaaaatcggcaaacaagcttaccaatagcaaagtcgacaagtctagctgcaacggccacagcagaaccactacatgaacctccaggaatgcaggagggtacatgtggattaacgggagtaccataatgaacattctccccagttatcctaaaagtaaacatcccaaaaaaa

SEQ ID NO: 305478 - DNA, 1712 bp, Cannabis indica
ttgtagaatcaccctataatatataatttcacttatatttttatcaaaaactacggttatgtaatattatgtgttttgacatgtgtgatttttgtcccttttattttcttggatgtcctgtgtctttttgttctttttgtcatgcatcagcaagttcaagtagatgtcttttgattcggacgctgaggttactcttgattttttgaagagtttggtggtatgtcgttagaggttgaggaagatgaagaagaatatgatattcattagtgtcttgtaggtcgtttttagaatgctggaattattgatgtgcaagctatgcagcacatgatgacttttctttgaaagccatgaacgtttgaacgtaaacaacttattttcgaaaggctaaaggctggggataacccaagatcaatcatcctcaatcggttggacttgtgggttcaaatctacgatttacaacacggaatccgcacagaaaaatctctacagaagataggaaactatattggcaaattcatagagtctgatgaggctaatttctcaggcatttggcgagagtatttcaagatccttgttactatcaaccttgaccaaccattgaagcatcgaataaaaattcgtcggttggatagctccaactggttttgggtaaatttcaaatatgagcacactctaacgctttgtttcatttgtgcattgctcggtcacgctgacaaaatttatctaagaatttttaaaaccccagaagagataatcgttaggccaaaaggagcattcatgagagctactactcaacgtcaaaacaagtttattggctcccaatagcttcagtcgagaagaattgacagacagggggaagatcagccatactccactagaagccagggcggtgcagctactggtggcaatacagcaggtcacaacaatcactcaacagttggtaatgacaaagatcgtgggaaaggagctgattgtgggattcatgaactaattatagtgcaaagattgggctctaattttgaggagaatattggagtaaatgtggatattaatatggccaatcaagtggtggggacacgcatggtctttttgataaagagttgaccatttctgaattaaaaagaaagaggctcaattcgattgggccaagttctatagactctaatttaaatggtatttctacaaatgaagacgatttggtaaccaaaaacttgtttggggcgggcctggtttcttaggctcgcaaagaattatgagtaatttgagttggaactgtcggggcttgggaactcttaggctttacagttcctaaaggatttagctttctgaaagaagtccaagtttatttttctttgtgaaactatatgtggtaaagctacattggagagagcccgtttgtctttgggctatgagggattatttgtggtggaggcccgtggtcacagtggtgggttgccatgttatggaaaaatagtgaagagggagcagttattaatttttctaaaaagcacatcaatattctcactcatgtacctggtatgccaagttggagactgattgggatttctggtgaagctaataggggccatcgtgagaataccagggtgattaagtattttgtgattaaggaaatgtaatggtggagaaaagattgtgtttaattcaacctgtcagaccatattacgaggagtatactactactacacttgatt

SEQ ID NO: 305479 - DNA, 2622 bp, Cannabis indica
agtttgaggggcatgatttggtagatatcaaagtctgggaaacatggtttagtacataaacaattactgaaacagtaaaattgaataaaattaaacaaaagtcctcaaaattaacaatctcaatagttcgaggggaatttttaacggccaaaaaagttcggggagcacgatttactacatgtcaaagttcagggggaaaaattactaattatcctatttttaaccaatgaaagaaacaaatgtggttttggcagtgtgcagcacaataattttgaaactaaaataagagcgatttattatgttagaagccgctacaagagaaaactgaaatctcatttctatgcgaaacttttatgtgtgataagttataataataacatgaatatgaataaggccatatcagcctcaaagcaaaacatggttcatgagtttttcagtgcagataaagcatccttggttgttgctgagataaccgcatctgaagcgtttggcaagtaataatattttcctgcacaaagaaatttacaatgagactttttttccctcatgggtttaaaagtttacttgataatgtctttaagtcttatcagattagttgaaaggaaaccttgagctactctagcaatctccttggcaaagccagttgagacaaacttgttttcagtgtcaatcactaggagagacatccccgatttgtatattttacccgcaacttcaagaatctcatcctttattgacaagcattgttgagaaagagagcatgtagtcagtacgataaacttttatgcttcagaacttcaagctctatctagtatgcatatgattaaatgacaagctagaattaacgataaaaatttgctccaacatcttatatactgatgattgagcttgttttcttcagaaaattgcaagtgctttgtcgtatcaagcaagaaattttgtcatcacttaggctactaataagaagtattagacttttcattcacaacatgccacatgtatattaaaaaaaatattatattcaccttcaactcctgtgatgatggtcttggggcatcggcagcagcagcagcttcggggtcagttgatctttttagtgatatgtttgccctaccatcagtcaatacgacaatcatcacacgtccaacatcgccacttttctctgcatttagcccaaccctgacagcctaaagagattttaagttcatatttggaaaatggtcagtaatgttaccactgcacttacgagcagataataagactcatacactttgcagcaccaaaaaatatggtgagtgtaaaattaaagaattaaaagtgtatattttcgttatttgttttaagaataattaagcgtatatcagaaggtccatactaagtggagcctagtcataatatataaaacactgaacatctccaaacagagttttccgtccatatttttcttcattttagtttcttactttcgtacaagatcaattagttgtggattaatgatataatacacaccgtggtaagaccatgagcaaggggtgagcctccaccacatggaagtctctcaagacggtttcttgccattgcaattgatctagaaggaggaagaagaacttctgcagagtctccacggaaaggaataatagaaacctggtccacgttcacttaaaagactcagacatattatctaaattaacaagatcaacaagtctcattataacacaacttgtccttttcttattattagaacataatggagaattgtataatctgaagatacatttgaatcagattgaaaaaataaagcaaaaactagtattgtttccactttgaactgattaattcggtgttcatacttaatctacatttgaacatagaagtagtgaatgtgcctgcatctgcggccatttgatattccacaattaccttcaatgtttaactgaacacacgcaaacatacttttgaactcactattagtcaacaattatgggctccagtaaattcattttctctcttaagatatgtcagttattatgccaaaaccggtgacttttctttcagatcctcccattactattacatttcaagcttaagtcccccaccatttagacaatgtgactgaatatccagtaaatattcaagtatgcctcaacataattagcgaaggcttttaggacaaaatttaaaaaattaaaaattaaaaaaaggacgcaatttgctggaagaataacttgtaacatggtagttcattggtaatttaatacttgttgaaaatgaagatggtttttttttttcaaaacaaggaatgaagtaaaaaccataaatttggacctcaatttttgttttgaggtgctaattacagcacagatttatgagatcataagagtcatacatatatttgtttactcacctgatccctgcttgtataactctctgctagtaactttagagcggcacctttcgcattctgcattctgttcagagccatgctgccacttgcatcaactacaaatataacctgtaatgatgtcaatgttagagcacataagatctttcaagcgtaaaatcaaaagttcaccatacagagagagagagagagagagagagagagagagagagagagagaga

SEQ ID NO: 305480 - DNA, 3647 bp, Cannabis indica
tagaatggtctttccttccatttcaaaatggaatagtcattccaacattttaatatgcaaccagatcaaggaatgaagattgtttcctttcctttccattccatttcattacctccaatcaaatatttactcttactcccattaaaatacgggataataaacattttagtccaatggtgccatgctctgaccttcatgtttgatgcatttgccacttggtaatgatggtaactgagtgagaaatgataacaaagaataatagggagaactcaactagtgaaacaaactcaggaaaggcaagcacaatgaaacatttcctcctgcaattctctcattgcccctaaaaggggggaaagctacattagtgaggtctttgttacagttatggcttaagcttactacagcatcagtgggtccacaataaatcatagagctcggttccaggttaattctgcggttggtctagcaaaaacccgggttccttatgcagatgcaatggtcaaacttcagtggaatgtccatggaaccatggtagtcctggttgaaggcactgttttgtgtctgaaactgggattataggtcccaaaaagatgcgccataaatcgagtattatggtgaccagcattgcagcaccaagagcatctatagcaactctaggtaagtcccatggagcaccagatttttcatcgatcctgcaaaacgaagatgaaccaaagtccactgaactcaatcctatattgacttaaaaaggaacttgtcttgcaaatttatgtgtattacgcaattgaaattagtcaaataatcttagctaaacaggttcttaccttagaaacattgggaagctcacaacgaagtagatggcataaaacaaagacccaactttatacatgcttgcccgatccacaaactcatagtaaggaaactgtacaatgagcagcaaaatattgttaatttctgtatgagaattagctgaattaaaatacactattctctaactggaataattccaaaggggctgtagccttccccaaaaaaacagaagcagaagaaaacaacatatgggtttactgtcattatgaaacagaaggtaaataaaagggattgccaaaactaccaaggcaataaacagcaaatgcagagggataaccaagactagtcaaaacagcagtaatctaaaactgtactgtatcactagcttgggcttgatatgccagccaccataaagaaggatcgtaatctatttatactactatacgtagagcaaggtgcagtaacatacattagcaatagcaaaagtctccagaaatgctatgaaataagaaagtgccaaaatccatgctgcctcaatagcccattgaactctttcaggcatgtcagcaatggcatgccgcaatctacgaagtgtaatgttcgaggttacgtgataaaacaggaagcaacaatgagcaagaaggaaagttgtatgtggtacctgtacataaacatcaacatacacttattaggagagatgataatcagacctattgcccatttcttctacattatttaaacttacattgttcatcctccatgatggaaatgtatatgaagctcccagtactgtgaagaagtagtgtgtccaaaagtaattaccaacatagctaaagatgaatatccaaagggtagcctgcctcaacacattcagataagagtattacacagcaaaaaattaaaagaaattttctactaacaagttcacaaaatctatgaagactgaagtctttctcaaattcctgtatcactaatttttaagagatactgcatttcaacacaaaattccaaaagagtctttgcatgataaaagccttcaatcgaataaactacggaaaggtaaaagtgctgaattattccccctatgacccaactaaactaaataacacctaaagaatagtattgcttttcctaggaaatattctgattactatgttttattttgtttaagatgaacctggctccaatgtaccagctaaaaaactttgataatttagtgaacactctatgctttaattttcccatttaagattttggtaagcctcacttatagaacaagtgctacaaatatgaaaaagatgtaaaagatcacaaaatatcagaaacaaatgattattaacagaagtgtgaaaattgatatgttccaatccaaacaatttaactgtgtttttttatacagacaaaacatatcaccatagtgaaaaaacacaataaccatatggcatgtccccggtactaagcaaacaatccatggtcatcatactaatattttaagatacttaccttgacccaataccgatccttccatgaaatgcttctatcagcctgcaaaatttttcagagaggaaatgttaaattaaaacaagtaaaatatgacctagagcatcggatattaaaataacaactactcttttgcatgtttgcaacaaatatccaacagcaaaccataaaattgtataccaaaaaccaattaaaacaggtgcttttataagattaattgctaataattgtcatcatagagtacaaataaagccaaaattgcgtaaggaaatggaaactaaatgaagtttaaaaccccaaaatggttttacaagcgtttactagtcctcaaagctggtatgtgaaactttcgggtgaaagctgattctttcaaattcttctattcttttattaaatttatatatctgaacaatgaattgacttattaagtaaaacgaaacaaatatgaaatcaacacatacagtccataattgtcaacaagactaacatccttatacactgccactatatacattttgagaatattacctttccaacccatattaatggtataagaaacgaaggaacagctgaaaccaaacccagaatcaaatactccaattctgtaaatctctgcaaggaccacaacacaaatccaatcaagaatattattataatacggcccaaatcaaaatccagcctatgtttccctcactttcccatgaaccaaacagagtctggcaaccaactacaaaggaagtaaaagcgaacctctatagcttgtagggaacaacgatgcccaagcaaagagtgagccagaaaggagtgtacaaaaggaaaaacaattctccccatctcttactcggattgggggccaaccataaactcggtgaaggagaagctgattctgaatctgaggaaaatgcacaacaaaggaacaaaattaggataaaatgaatggtaggaaaagctgtaatagaaggaattgaagtctgaaatttacctcccattattaattatgatggtgatgtgatccagattcaggaggaatgggtttgactattcagtgtcagagcctgagagtcaaaatggtatgggtaaccagaaaatatcacaggtatggcaagttaactagagttactttttttttttttgaaaagggagtagacactatttagaatccaaacaaagtagtgaagaaatttaactaaataaataaaaaataatcataattaatatttgtagggacccgatctgaaggctaagattaaagtaggagtagttaagctttataagttggtcaccggttgatattgtatttaaaaatcattatttttaaaaagttgatattgattgat

SEQ ID NO: 305481 - DNA, 764 bp, Cannabis indica
attaattagtaaatctaattatttttaaatgagttttatttagggtacaaaacccaacatgaagtgggtacataatgtgtatgaagaaggaaaattagtagaattataaacctatacctttcggcagctagtattggcgcaaactggttgcaatcaaagaaagagcaaggactttatttgatacaaatcaattcacaaatgagaggttcaaaattgcctatggttatcaagctcttcgacctctaatcaacaaagttacataaagttttacagtgtggagtcatcttaattctcctaaatatagtttcatcctttggctttctatgcttaaaagaatcaacactaaggatcggctccaacaatacaagattattgagaatgttgactgccttctttgcaataatgaaggtgaatcggttgagcacctcttctttgaatgtgccttttctttggaatgtttgatgaaactaaaagaatggctgaactggaacatgggtgcttgttaaaatgttgataatattgttgttaaagtcaaagatgtaataaaaaaagaattatatgaatatggccaaaaaaggctactaatagtgaaaaagagtggtttaatactatgtaaaggttttatagatgtttagattctccatcaattggagaatgctattaccctattaggttgtacaaatcgtttttagtgtaatgatatacttcttattcataaaacaatgttgaatcgtgcaatacgtgtggggagagagagagagaga

SEQ ID NO: 305482 - DNA, 1195 bp, Cannabis indica
ttattttagttaaatttaaaacttaacttgagagtaagaatttaattaaactgcaaataatttttaacgatagagagttcttacgttcaaaattcaactatcacatctccatgattaagcaactataaacaaaatggaatattggaggcagtacgtacattgtgatataatggttaaagtacgcaccaatgccctaattccatatgcatacagacaattaagtctctttgaataaacttcattattagggtcagaactatataatatgacttgaaatttaccaaatggcttgtttgctaaaactaaaacaaaacaaacaataaaactacaaaacctccaaacttgaagcccccaaacatccaacatccaatgttgcttttctctgtattaattattaactctttcttctctcatattatgtgtctatctgcacaaatgtgaccctaacaaatgcatttcatatagcccgtgctcttagaatttattacatttatattttagtaggatattgccatgaaatacccaagttatgatatttgtaataggactgacaattcatattttttgtgttgtgtgtgcgtcgacacgattattaaacgtgttaaaaacacaaactcaaacacatcacgattcacgattaattagcaagttacacaatattatatatgataacatgattatcaagatagacatgcctataaaaaaaaaaatttatgaaacatatagtattaattcgtattatcgtgttgagacagttatcaaacttgtcgacatgctccaaatactaaaaatatagatgctttctaatagtatggacaaaagtgacaccctatactacaacaaatactaccattagcgttgattttaaactgaaggaaagcatatattctaccaacaaaatcctataagcatttgcgtagttttacactgactgacactaccatattattttgtgtcttgcactgacacaaatgaatatatatataacttttacaaaaatactgttatacgggaatactgtaaaaaatactgcgtttttataaaacaccactaaaacacaaaacagaacaactcaaaacaacagtagaatacctaaaaaacatcagtagaacaccagtaaaaacttaacacattatactgcagtatgaaacttataaaaaatcacagtgaaaaaagtaaaaaataccgcctgaca

SEQ ID NO: 305483 - DNA, 722 bp, Cannabis indica
gtaaaataatttccaacatctttatcaaagaaagagttgagcttgttaatatcctaattgccattttccttgagaaagtgggaaatattattttcatgaggcaaggaatcatctttatagtgtagatgaccattatcaggcagttaattaggactgagggtaggaatggatttgccatcaccaatcttgcagactaaacccttggaaagaagatctcttccccaaagcagacttctccaagaaaaggaaggagagtgacccaaagaagaatggaggaagtcattatgcttaaaatatttagcttttaagatagtgggaagaagggaagtagggttttgaaatatccttcaggcttgtttagccaacatggcttgattatgacaaacgatggttctaaaaccgagacccccaaagaatttggatttgcaaagattgttccaagatttccagtgcattttagacttgttgttgccttttgaaccccactagaagttggccatgagtttttcaagctgcttgcaaatcgattggggaattctgtaataagacattacatatgaaggtatagcttggattaccgctttcaacaggatctatttgccaactttagaaaagagctttgatttccaggtactaagtttattactgactctttgaagaatgaaatggaaagaggatttcttagatctcgaaaaacattgagtgttggaaatattttacca

SEQ ID NO: 305484 - DNA, 2890 bp, Cannabis indica
agcgatgaagccttaagcttcgatactttttcagtatttgcggatttttgaaaatggatcaatgtagaaagttgctatcttgaggcatcaacaaatagtagtctaagctttcaaccatttcataaagtgtcatgcaaatcgcaaacaattaaatcgttaatgatagatgattattaaatgagtattgttatgaggcaccagtggtgcctagcaccttctcgacatgttacgttgtgattggttagcgatactccctaaaaactattatattaaattatatgggacccgatacttagttgaaccaataacgatattgacatgtaggagggtgttagcaccagtgccctttaacatttatcttattaaatatatgcttaaagtattaattaattaatgttaacttaagaatgtggaaaccttaaccgattaattatgggatatacttttgtttgtcccctttcactttgaacaaccatcattcaaatttatttgatagaccatatacatatataatagttatacgcccacatgttacaaataagtaatttttatcctagagacatattttaaataggaatatagttaaaccacacattacccatatatagaatttttttaaaaaaaaatgttatatacagtaagttattcaaattattttatcacttttgaaagaaaacacatgtatataatttcaacaattaaataatatgatattcttgaagcatactgtaatgaactacagatttatagcttttagctattaaaaaattggtaacaaattaaatgatgtagatttggtagtaagttggtagttgaatcatggtcgctaaaattatttttactaaaatttcggtagttgttgctatttttttgtacatcaatcttttagtagcaaaacatatttattttaataacaaaactattaaattgtaatattcaataaaactattttacagcatttataattagtaacatatatattaataatactattgaattattttatttccttatatatatgtaatgtgattaatttcttaaaagaatgatgtgatatttttgttgtttgaaagatgtttttttagtttgtttttggatactttgatatatttttttgtgataaatttattaataattaaaataatattaaaaaattaataattggtataaattgtcaaatagtatcaaaatatttgagttaaatactaattagttagcagtaaaagtatatattttaaaatataagtttaatgttggatttcaatgaaacataataaaaataaagtagaattaatattaataaaatatctattggtatcaaaaataattatttttcccatcctattgttttgaactgttatttaagtttgtgaagataaatattgttttttttaatgtgtgtgagcaagtagccaaattattcaaccaaatgtataatataagactaatagtgaccattcatttcaaaaaaaaaaactaatagtgaccaaatttggctaataatggaaaaatttataaaagaaattcatataaaaaattaggtgagtataattatttaaagaaagttgttatcattgtaactatacttattatataaattaaattagttatttttaataattattattgtattttaagtatattatttttttctctaataaattagaaattatgtgtagatgtgtaaacttctcaaaattagctcgtggcccaaagttatgggccgttgaaagagaatttgttggcccaacacaacagcttcgtcttcttcttcttcaatggctgacagccattaacatattatccatcttcaacagttacaaaaagcttcataatttgaccataaacaaaatcgaaacgcagaaaaaacaatgatgaacattcgtttaaacccaaagtttcccatgtccacttctatcttcaactccaaacccaacaaaactcttccatcaaaactcaagagcacgttaagcagtgaaaacaacccaactgaccaatcatcatcatcttcttcttcagctggaaaaattaaacgcttggttctctcacaagaagaaagaaccaaaatcaatccatattcagacagggatttctacgcttacccgcggtttgtgacccacgtggatgatggatttatctcaactttaactgacctctacagagaaaggttaaaacctgaatttgagattcttgatctgatgagctcatgggttagccatttaccgaaagaggttaagtacaagagagttgtgggtcatgggctcaatgcagaagagctttctaagaatccccaacttgattatttctttgttaaggatttgaatgaggatcagaaatttgaaatggaggattccagttttgatgcagtgttgtgtactgttagtgttcagtatttgcagcagcctgagaaggttagatgtttgattttttgtttcactcaattttttctgcttaacacaaaatatgcatagtgtggattataataacatcattacttctgttgggatattgtaaaattacctaaaataaccttgttgtattggcctatacatgttagaccagcaaaaaaatgacactaaactaatgattgaacacatgacaattatgactagcaagaaaaacaagatatgttgtgtaagtgtaaccaaaactcgtgtcgttgcgctatagcgcgcaacaccaaatttttctgcttcaacctttctcagtaaatcatgtataacttttgcattcagaatctaaatgagatgatttaacatgttttgaaaagctcagaacgagctatatcattttgagtttcatacgctcttcgaaaaaataatgaaaattattataaaaaaatgggctcaaaagaatctcacgtccatcacaaaaatgctctttcagcaac

SEQ ID NO: 305485 - DNA, 2031 bp, Cannabis indica
gactaattctcttctccggccataaggaggagcgaggagccggagagccaaagaaatcttgtgatcaatgggagaaccgaaatcattaagagaagagctgtcgttggagttgtcttccgatagagacaaggacaaggatgaggagagggaaagagaagatgagcttttctgaagcccaattgggtagattctcttcaagtgttttgacagcttcaacctcgggcttgtcggcctactaccactactactactcattatgatcttctgatctttattctctctactcacttcttgtttttttgggcttcccttattattattatttgatactatcatgcctgctgcctcctacttaatccacctatataatgaaaattataattgatattaaataaaataaataattagttatatatataagcacttcaaattttaataagttatatctcttgtgtgtttttggtgcatataaatatataggagtagatatattataaaccccaagatgggtagtttaattaataatctctttctcactctctctctctctctagctctctctctatatatatattatatataaaatatattagttttgattttgaagagagctaattatgtttaaatagtgggtttggtaaagtgggagcttccaaatcatataggttactatattttaaaattttgctccttagtttccaagcaatattcatgaagaagtgtataaggactagaccaaaccttatttgttttctttttttattgacaacaaaaagataacatatatatatatagttcgatcatcactttatttattatgtatcatcacctcacatctattttgttaattagtaatgcataattataattacacacaacttttaagaagtaataaaaatactaagaaattaaacagtactaataatgacctcttcctaatagacaattaatgattcaaagttgtgatgaattgatatctcgtcaagcatatttgaacatatcattgtttatttttattatcatgagatgagtttatcatatggtcatttttttattccacacatatcattattttaattattcaaattaagaatactattaataatttattcaaattaattttcacatctgtcaaacactaattggtatttaaataattaataatagggttagaattggtggaatatcatgaaatgagaaagaaaaatgatgattgaaaactgagcaatttgtttgactgttgcaggtagtctctcttttgtttattcaaagaataagtacaccccaacaacttggactttttatatatgtgacatacgtataaaaatatatatgtgtaattgttaaaataactaaataaacataaaaacaacgggtatatgtccaaatccatttcaccacgaaaatattactcattctttgcacaaagattaagagtcacaacaacaataatataataattaaaaaaaataatcctttttgcttaaaatgatgtgggtagaaaaagtgtggcatttatataatagttgtagggttattgatagataaatagggtttcccacttaatttttcacgtatgacaaattagtttagttgtggtgtttgtctcaatgcaagtgtgtaatgggtccataacaattcttaagtcctacttctatgcccttcaacttatgagacttaccttttgccaataaggaaaaagatatcccatccaatatatatacgtatatgttctttcttattttaaacattttatggtcttttttgttttaattctcatgctcatgttaaaaaggattgaccaacaattctataggctccgtccaataggaaactggattttatgcctgtaaatactttacaaaagcccaataatttgtgcatttgttcggcccataaataaaagaaaggaattatttcacaaatacacaaaaacaacaaaaaatttacaaaatacgattttacggaattttaaatatttttacgatttttttgattttatttacagaaatacggtctttttatgttgta

SEQ ID NO: 305486 - DNA, 1458 bp, Cannabis indica
aggttcgaaaagcaaacatgtttttctggattggccaactagagctgtgatttgcgtggaaacggcaactggtctggcttttcttcatgaggaagctgagcctcatattgtccatagagatattaaggctagcaatatacttcttgatggaaattttcacccaaagattggagatttcggacttgcaaaactctttccagacaatgtcactcatgttagtactcgagtggcgggaaccatgtaagcttaattttttttttctttccatgtacatacaagttaccccaatcctggttgtatgtatgtatgttctcatttctgattgactcgtatgtctgcagaggttatctagcaccggaatatgcactcttaggacagcttactaagaaagccgatgtatacagttttggggtgttgttgcttgaaataattagtggcagaagtagtagtaaggcagcatttggagaggaattgctagttttggtggaatgggtatgtgattatctgtttatcatcattcattttacattttcacagcccaaaatggattaagcttttatgtgcacactctatatctatctacactgtgattctaataaggaaatgacctgtgttttaaaactttaatcaatccctttagcaccattcaaaaccatatgttctaatttgttgtcccataaaatgaaatgaatggtggtacaggcatggaaactaagagaagaaggaaggcttcttgacattgttgatccagaacttactgcatacgcggaggatgaggtgatacgctttgtaaggttgcattgttttgtacacaagcagttgctcaccaaagaccaagcatgaaacaagtagtggaaatgctttcgaaacaagtccacctcaatgaaaaggccctcaccgagcctggtgtgtacagagctagtagttcacggcggggctcgaggggagccagttcggaggaaacatcctcatcccaagcagagaaaggcaagcattcaatgactgctctcaagattcagagccagtatgatgatcctgattctatgactcaaatgtctcctaggtaatttgtatcatgtatgtagtagcagtagtaagctaagcctaagccatgtgaagtttttgccttttggcaagcttgtaaagaaagagtttgtgtatttgattttgtactcaacatttattcttattattctttcaaagtggtttggtctatatttgtgtaaaggaaaatatcatttatgtatttatattattctttgactgatttgtttttagttaaagatgtaactcttcttcaattgtactagagaatcagcctcttgtgtttcaatatttgattattaatggatgaactatttacattgcaaaataaaataccaaagcctatttttttaccttaacactcactaaagtgttttttttttaatgtttatttaaagggtaaatagtggcata

SEQ ID NO: 305487 - DNA, 2817 bp, Cannabis indica
aatgtatgggtatagttagcaataatgcatgaatagtatccaaatatttttgtaaaaaatgcatatcatcacattaattattacaccgaatatttgaccatttttggagattggctaaaaatacattaaaatgaagtattgaaaacattacatgtactatcattaacattcaattcacatttatatcttttttgaatatgagctttcatggaagtacaagtatggaaataaataaacttgtacatatattactaagcaagattttcctttttaagaacattattagccataataagacctataccccacttgtcacatgcatggcctaacacattatccaagcattatcctaattaaattctaattaataattataataagatgaatagatgatgatgatgaaacagtggtggtagcattaaagcaaattatataaataaattcaaacaaaaacttaaactcttcaatcaataataatgataataatcaatcaaataaatgttttttttttggtcctttttttttcaaataaataaatatatatttttttagaataataaattactattataaaataagctttaacttaaaagaattgagatcttactttcacgagtgatagacaaaattataggtcacaatcaaatcccactaacccctttgaattttgtaatccatggtaattttttaattaaaataatgtaattgatttgggattctatccttattaactatataatataaattaatatatagaatgatagaatatagttttatatttctttaacacttgaaaaagttaaaccagtcactgttatggatattctttacaattaccaaatcttccacctggccatacccatatagtaggcttattaataatgttatttgtaatttaatcacttcaaaattgtttaggatgaacgagtactacttgatacgaaaaaatataaatttaagtatgacactgtatgatgttgttaattagcatggtatgacatgataaatatgaacttaaatacgataaaataggtaacaataaacccgaagacacaataggcaaacacaaatagactaatacaaaagctcaatatgttaaaaaatctgacaatttgacataacaacaaatatttatttatcgattataaatcaattaaaattgataaaaaaatatttaaattttagtaattacaatatttatatatataattgtgtgtaaataaaattgtgaaaacgtggagcatgaattcgagcttgtataagaaaacaagcactaatctatttaaaaaaaatgggttggtctgagtaaagcataacacgaattcgatcgagcatagtacgaaaatactaagtcaatcctataaaattatttgcatgacacggcacgatccatattataatctgacactgcataactcatatttttgtgagctttttaaaatacgtgcaagccgatacaacacacacatatttataactctattattagctatactattagtactcgatactattataaggtgacactttgtaaatacccgttgtaattagggttgaacatctgatccaatccaattagtaattagatttaaaaaatcatcattcgatccaatttaattaaaccttaaaattcaattaaattcaatgatcagttttttaattggatatccaattacacacataatttttaatattaagttaaaaatataaagaaatatacgtaaaaaattacatatcatactttatttaagtttaatatttcattaaaatactagcgttataagacaactaaaattttaaaataactaaaacaataatattgatgagtaataaaatagaataaaatatcataaaaataaataaacaagataactaagtgttatatattaacaactaaaaaaaactaataaaaaaaaataaaataaatatattttttattttttaatattttttattatataaatagatataaataattttttgatatacataaatagaattgaatttgatcggttttaaattaaattttgatatttacattcaataacttatccaatttaataaaagtccaactttggatatctaatttaatttaattattattaaatatttaattttttgtagtttaattgaattcaatggtttagttttgttaaattggattggatattaaaattactaatgtctacttttttctttgaaaaagtgagtagtacgatgatttattttttaaaagataataatgaaagcttgacatataggagaaattctattggtactaaggtgcactaatttgtgccctacttgtaagatatccaatagtgtttataaagacacaatctaacctaaaagtaagccattaaacacttgttttttttttttttaaaaaaaaaaagaaagtatgttattaaatcaaagcaaatcttacaagaggaccaataaatctaggacaagtatctgtccacaaatgaacccctaaaggactagtaacagacttagctagtgcatgggccacaccattcgcatcacgcgaaatggcacaacaagaaccaccaccaacagccgttaaaagagaaataatctcctcaacaataggcttaaacacttgtttttttagtattaagcaaaaagaaaacaattgagtcagcataatcttaagatatgtcatatttgacaaaacaaatttataagttaattattttttttttcaagaatttgaatacaatcatgtatttataaaaaaatgattgaattatttagctattgtttcattattattataaggtaaatattattttgagttgaatattttacaaa

SEQ ID NO: 305488 - DNA, 2749 bp, Cannabis indica
tccactgtgctgacgacacaataaacaagaatataaatgtgataagggtttggatgaatttataaatcaaataaacatataaatgataacatgaactaaatgacacattaaataagtgatgaaaatacttctgtctctttattgataattaaatgatagagattacattgaaatagagttttatttaagcccaacagtacgggaagctttgagttggataaaactaaaaaaatggcagttggtaacactcgaaacatattgtttggtggttgtacaagcaattcgaagctccattgaaatgatctctccttttggtcaagttattagagattgtaaaactttgcttgatactatgaaatatgtgtctattttatttgtcaaacggtcagcaaacttagtcactcattctttagcaagagcttctagtttatatactgatcctgttttcagtatggggaatgtcccaactgatttgctgcctctcttagtagcggaatttgatatctaataaagtctgattactttttcaaaaaaaaaattatttaaatgataataacaaatttaaaaaatgatattggttattaatttgttatacgatgtcaatcttccaaatacttaaacactagatttatgattatccaaatattcatctccaagcttccgccagaaaagaacaagagcagtaacctcaaaatctttaaacttcagccaatcacattccgaatagtacatctcacaaaataataagtggcagattttattttaaaaaataaaataaaatcaatgcaaactcacacggcaagtggtccttccacacccacatgccaagactcctcccacactacgatcggagacgagatctctcccatcaatgtgtctcaaccaagagcctagagctccagtcctcacaccctccaccctcgcagcttgccttccaactatcacatcgtcgatcctttgaagtgtaccaagagactaggaagacgtaggccatcgaccttctgcaaagagaggatgggcctgggtgatgaggaagacgaggccatgggagtacctcttcagagaaatagtggcggctctaaagggagggcatctattgaacttaaaactacccctttttattacacattaaccaaatatagctctaaaataattttaattgataaatacccttttttataatcaaagtactaaatataacctcacaaaatttatcaaaattagacttcttaatgcacataatggaaatataacttataaaagtgggtataaattaaagagtaataaaatgaaggtaaaaattaaaatatgaaacaaaaagtgggtatagagtgtaattttctctttatattttggatttttattttattttattttcatttgttatagtgaaaaataattttattttaatttttatttcaataatttacaattatatattattttagaacaatttactatttatatttaaatcaattcaaataataaattaatataataatcatataatgaattagagtgggttaatttgagaatattaaaacattaaatacttaaggtatcaaagttattgtagtttttaaaataaaaagtactaattgattattatcccaaataaaaataacaaacgtgaattttaaaaaaaacataaaataccaaataactatatattattttttaaataacaatcaaccgagatgaaataaagccctacaataaatattttataaaataataaaatttcattctaataaatatgattggtttagaaaggatattatacccttgattgtatatacttggagcaacttgtgcatgttgcagatcgagtgaatcaatcatccctaataataaggcactggtcacggtgacatgcaatccacctacagaaaagttcactcttttgctttaatgacattacttattgatcatcacaaacataatcactctaagtcattgcatattaacttctaagagcatcttcatagacacatttggcataaaaaaaaatatttttactccaacctacaacacaaaaaattacactaaaaaaaattccttattattatattaattttttaataaaataaaaataataatatcatattaattaacaaacacaattattatatttaattaataatttaaataaacctattaattagataaaataataatactgaatttttttttcagcgtgttaattttttcaaaatttttcataattttgtaaggtgtcttaaataactataatgtacacaaccatgaaaaaaaaaagactaaacaagtctctcgaatgccgaaaaatataggagtatatcagtacgccacttttaaagaagtaccttattttcggcgtgttaatttttttaaaatttctcaaaattttacaaatatcttaaataactataatttacacggctatataaaaaaataaactataaaaatctgctgaatgccgaaataaataaaaatatattcgtacattacttttaaaaatatatattataaaatttcttaaaaataaatttttaatttcataaatatataaatattaattaaatatacaatagatatagcgtgattacatatgtcgtgcactgtaaaaatattctcaaaatggtgcactaaatggagtctcattagaggatgaattattgcatatatatatataaatactaggttgattgatgttacgtgtaatacacgtataatttagttttttttttaattaggttcaattaggtga

SEQ ID NO: 305489 - DNA, 997 bp, Cannabis indica
cctgataaaataattccaacaccacgagcatacgaataggccaatcaacccgctgataactctattcaacaaagattcatttagctagaagacttgtttaggaaatactaggatggggaatatgggaaacttctaggatatgatttagatgacgacccagaacctttccattcaaaaatattgaatagccacatgtgataccttatgatgggacgaccgatctagtggctcatttagataatttcaacactataatacgagccaacaatgtgggattatgatgcattctatttccaacatccctcacaagagctacgagtagctagtttgacagatttaccgaacattctattacctccggggaacagttgtctcaggactttaagaaacaattttttattactagaaataggagacccaatgcatcatctttaactaacttaaaatagaaacctgattaatccttaatgtcctttttgagtcgtttcaacactaatgcacccaacgttaaaaatttgaatgatagcaataaactaactgccatataagcaggaataagaggtgagcacaggatgatatgcaagggcaccccactactagaaaaaatacaattagcaacacttttttttaactaagaaaaattaaaagacaacacttataaaagtgttgcctcctagagtgttgccaaaaatattagcattaaacaacacttaaaaaagtgttaccatatcttattaacacatatgacaacatttcctttaaaagtgttgccatacataattttcaaaattgaatcaaatgaaattaattattattttctaattaaatttataatttaattttttttatacagaaaattttgttatttaattatttcaaatgattttatggaattcaatctttttttctgtatattcaaaaacaaacaaaaaatattttatttacattaaaatcatgaaagtttacaattatgctttaacattacaaaaatttaaac

SEQ ID NO: 305490 - DNA, 1282 bp, Cannabis indica
aaaatcacgtaaaatttctgtctttttctttattatcaagtatttaaattcgatgcatttgtttaacaatattatattcaaagtattaattatcaagtcctgattaatcttaacgaatttttaagttaacaatagaatatatgttttttatttattgtagttttgtttcctaaaaaaatccattctcatattcctataagatatgcttataaaatatattttaaattttaagataaaatttaaaaaatttaagagtaattttctaatttttttatattaaagtgtacttataattttataaggtacaaataaaactattaacattcaatctcaattgaacaaatttaatatattgaatagatgtcaaaattactttcttttataaataaaactggatacgaaaatttgaactaaaatgaagatttagaaaagaaataatggaggaaagatcatcatgtcatatggactttattcattgccaagtcaatgatatttaaattcaaatacactcatactcatacatatgttctctatctgaatacatattgtttcattaaaaatgcatctaaacaaaaaaaaaagtttaaattacagtaatatcttgagaaacatattgtttttagaaaaaaaaaaggacacattaaacaacaatttttttgacagtagccggtagaaacacaattgtaacttgtaagcagtatcatattcaaaaagtaaacgctgctacattataatatattttgtcctatttgaggaatctaaaaacctcatttgcaaatgagagacttcataagaagcctttatctaaatagttgtctaattaatgataccataaaaattgtattaaataatttaatatatgctaaaaattaagttgattcaatcaaatacatttaacaataaagaataacttttttttttttgaagtataaagaataacattattaattacaataatattactattatttatttatttatttatttttgtttaagtcatcaataatttaagtaaaaattgtgtttggatcggtgcatgtgtgagtgtgaactgtgacggtagtggctaatatagaaaaatagggatggcaaaacgggtttcgacacggcacacgaacacgaatacgacacgaattttacgggttaggatcgggaaaattagatgcgagtcgaaaatgggtcgacacgacccgcttaacacgaatgtgacacgtttgacacaattttttttaaatataataaaataaaaaaatacaataataatagtataattatataaaaa

SEQ ID NO: 305491 - DNA, 2459 bp, Cannabis indica
aatgctaataggaatatcaggggtacgggagagtcctcctctaaaactgcttggagtggtctccactagacccgtcatccagaagtaaagccctcacagaacttttccccaggacgataagatcgagaactcaagagtgacttgaagattcccaaactaggaccataagatccccagatagaagaaaatgaagattaagattgttcaaaggtgccttgaactcactcagtgcagacgatgaattatgagcgaaattcatagatcatactcttgactattggcgacattcataccaagataaatccacatgcaaataatcacctaaaccctcaacagagaagatgtatatcctgcaaagaatcttaatacgcatttcaatgcaaaagaaatcaacagcttaaagggggaaaggatacttgctcgaggaagaaggaagttgtgggggtggcaagatttgtagcagtgcaaccatagcaagatctctgacactgcgatgaagtttagcctaaaattcgtacgcccacacaagttgtttattgatctctacttgaatatttagtggcctcaataaatctggaaggttcgttgtcaagtctggtggtaatgctcttattttttctctcgctcaatctcgaagaagaagactaaggcagtcgtcaaaaggattggacattcaccaggggtgaagtttggatttttctctctcaaaatatttaaactcgatatgaaaaataagctaaagtagaaattgtgtttcttcaccctatctataagtgaaaaatgtcgatatgcgtacttccatgattaaatgcatgtttttttttttttttgtaatcattagtagggaattcttttttaattttaagaacagaaaatgtaaatttgctcacctaatttttcttttaattttaatatattatacttatttgaaaatatcgtcttacattgattaaatgtaaaaatattgatccttatacaagaacgtgatcgtgttactctatttattatcaattagttttgagatggaatctcataattcttgtcatggtatcataatcatatccctagcaggcttttgatatacacttatctagatagtaaaacagccgcacgagattcatggtccaaagacacttgaatccgacaaaaataagcaagcaaatagcactcccagacgtgaacaaaaataaacgagcaaatgacactaaaattaaacataaaaatatgaatgaaaatgagaatgagaataggaatataattaaataaaacttaaaatgcctaaaaaaataataaaaaaattattaaaattttttcttcttgcattggaatcgaccattcaatctatttcaaaatgaaatggtcattctactaaaatgatagaaaaattattctatttaaatgacatttttaaactttaaaatgtaactcaataaaaaaatagaataatttttttttattcaaatacattacctctaactaaataccatctaataaatgtagaagaagcagaaaaaaatcttaaaaaaatacaaggaaggagacaaagaaaagttaccccgaaaaccatggccactctcttagttaggttagttaattatcccctagtttcatgatttatatcagattgcgtacttaattacaatacaacataccatatattggcccatagtatataaaacgctgggctatttaaaatggtgtccagtgtagattaaaaaacacacactagaaattaaatgagttaaatgtttaaaaatttgagcattggtttcatttaaaataaaactgatcatcaaccgaacagttcctctattgtataggttattttgccaattattgccgtcattaattaattcatttgagttttacaatcatataaatatgtctgacatgcaacactatagtatagatacatgcatgtgtgattaaaacacatgtatgcatatatatatatatgtgattatgataatatatagataaataatattggtgtgatcaacttttaaatgcacacgaatggaagcacaaatgggtgatggacatggaccccaatgtgtcaaattaggttattttttttagcttaattagattgaacagtattatcactgttatacatatatatattatatatatgcttcagaccaatggacatggtgggactagttgatgagaccatacttcatacttgatttacattatcgagagtgcacatctccagatcctatatttagctatacctactatggctatgtatacctatatatgtgcatattgtaattacgatctcctaaattatttacttttataggaaaaaatatatgaacataggaaattgcgcaaaaaattaaatggttgatgatataactaataaaaaggagatatattattcaataaataaataaataaataaataaataaatttgttagagagatatgtgctaagatgatttttttaattt

SEQ ID NO: 305492 - DNA, 2176 bp, Cannabis indica
aaatgacgtgaaacttgtatttttaaaattttttttttattattttgtgtatttgtaaaataattcttatattatatgcgtgtgcagattttctcatattaaaacatgcaaaatcattttacaatagtgaaaaaacataaaagcatgtcaatataaaattagtgctattttccaagagtcatttcacaagttttgttttgttatgtctcgttgtttaaatttaagtcgtgatattttataatgattaattcgtcccaaaaaagaaaaagaaaaaggaaagaagtggtgatgacgactgattttttaacacagaatatgcatattcatcgaaagcgactacaaagtgtgacgtgtacagttttggagtggtcctaatggagctgataacaggaaaaaagccagtggaagctgagtttggagagaacaagaacataatatattgggtttcgaacaaggtggatacccgagaaggagccatggaagtacttgaccaaactctatcccattcctataagaatgagatgatccaagtccttcgggttgcggttcggtgcacctataagaacccggctctccgaccaactatgaaagaggttgttcagttgctgttggaggctgatccatgcaaatttcattcctccaacaagtataaaactatttctactactactactactattactacagagtactaataattaaatactgttaagataagaaatgaccagtttgattaattatggtttattctcaagcgtgacacttgtatagttgggtgaacttgattcatcactcaaggttaggttatgtactacaaatatatgaatatatagtgtagatgtttatatacttaataattgttatagggtccattaatgggtctcctttgaatctaaatgaaagccacctcattgttatagggagtagatttagttccgtatataaaatgtttctgtggttatcccatatagtcactttaattattggatcaagagatttaatggttgaaagctacaaatatatatacttgtaagaaaagtaagagggccatgacacattgttctggtttctcttctgttcattattgcttaattatcataatgataatttaaaaggaaattggtttctctatagcctttagcttttgtgcatttcttttccccaattggtttcttgttattaaattcataccagaaaaaaggaagagataataataataaaaataagcacattaatcggtttaaaggttgtgatatgcatggcaaggggctccctgtctttgttttttgcattgaagtgggtttctgattcttaatttataaagttgagaggacatgattcgtaatcgtatgtggaaggaccacttgagagtgaataacctatagctatccatttgggaaaaataacatcaaattaaaacagctttcgattgatgagcatcttgtcaattttttagagttttggaacccataacaatatgaagtgaattttgtttttcttttatacaatacggctcttttccacgtgaaatcgttcatgtttcaccacactaagtgagccataaaaacctccacttgcaattcgaaaagtttctttgttagtttatcaaaggtattctttttttgaaacattattaaaggtattctgaataagagatatacacatataatagattccttctttttataaattgccagaatataatttatgggtacttgttctactagctgttagctagtagctctattatagataagtgatatattaaaaggtagaagtggcgcattacaagcaaaaaaaagttacaaacacccttaaattagtgccaacaaattcaatatttagtactaatagatatgtaggtacaacaaatatcgtgcccaaaagttgcaccataaataataccacaaatagtatcgtcgacacatgtggtgcctagttagaatcataaattctatcaattatatgtttggacacgagaaagtcgtgcccaatgggttattaattttttttttaagaaattaatgttgtattttaagataaatttatatttatatttaaaaaatataattatccaaaactaataaaaagtaatttataaatgtgtgttctaccatataaattagcaatcaaaactacaataaaagtattcaaataactaaatacaacaactaaa

SEQ ID NO: 305493 - DNA, 1243 bp, Cannabis indica
tttcggatcattcaaatactattaattaattaataatgtgtctctttgctgttttttacgataatacgcgtgatctaaagtatactacaacactacttttcgtttcaaaaaaagaatatatatagaacactttgtgattttttaaataagagaaaaaaaataaagaggcaaatatgaaaacttttgcaatttgtctagggaatgcagtcatcattatctcaacatcatttgaatcccaacaaattttaatttatagcttgtaatttctaatgattaagtaatcgttcaagtcaagtccataaccagaaaacagatctagatcgattgagaattgcataaatatatgtataagatttctcatattatatatttaatatgcatggaaatgataaattagcgattattattattagtagtcgtagtagttaattcgttattataaatttaaattgttagagtgaatttgtctttgattttgatctcaaattaatatattaaacaaacatacattttctgacttgctttaattgagacatgtgaattcgaaaaagtggataaaataagggccaaacagagagttggaaagcttcttatgccctttgaaagtttggtaactaatatattttaaaagagagagagaacattaaaccttccacagaatcatcacacatggcggtttttgtacattcaaatttattcttttgtcttttttgaattttttgagtgtaacttagtgtattacaaatcaatgccctctccttttatcatatccctagccttggcttacattcaaatttttgttgttaatattatatgtttctttatcaatataatttattaaaaaaaattaatatttttctacaacaaatcttacatatagcaagagatgttatcagcaatcagcatacaaaagggtgaaaacgcatgatataataaaaacatcattagctagacaatatacccaaataatggactgcaattcaaacttacattccattatgtcttaccgacataaactatatatatccatcattattttatagttatatttttaatgtaattataatagttattttactattaataacatggttactaattaataaatattactatttaaaaaaattaattaattacatttaataatttttttaataattaatatttataaataattttatttttatatttaagtttctattataatttttttttatatattaaaccatttgattataatatt

SEQ ID NO: 305494 - DNA, 1256 bp, Cannabis indica
caaactagctgccaagcttaggtgacttcaaatttcatcgaatcgttgtttgtgcctgcgtggtgtatgtttcgacccccctaaaactgtgctacatagaaccaaaggtcgttgcgcaagaactaattatctgttttttttttgttacattttgattggaagtacttgagatacttattattctattgcatcatacttgaatatatgatttgagatgtgcataacttttgcagtatggtttggagctagttttcgtgaagaattcacatgattttgtacatgaatacatgaaaaggccagattatgtggagctcatgaggcggctgggtgccttgggtgatggtaaccaagatcatagtaagataccttctctgtcttcagtttctaacttttatttaatcactcaccagctctgattttcaaattgtggtcttcaggtacgttatcgccagatgaatgggaagcagcttatttgtacttgtcattcgttctgagaaaggtgagttcttcttcccttttgcatacatacacatggtcattgttccattgctcattggttttaagaaagcatatcagctaacttcgaattttccttcattgtatcagcgtgggcaaacagaccggacacaaaacaatggaaaaaaagacaaagggcagatgcatataccaaaagaggacatcatgaacatcagtggttgatcttcacataacagccaatgttttttcctaagctccattctcaaccagaccaaataagaagccttttgccacttatagcagcttcgccaatggctaccacacacatcattatcattcaaaatggtgtaactattcaattttgtagatttaaaatatttgttcattttgcttcaaagtataattatagatgagtgtagttaaatttcaattctgcatatttttattataagtataactattatagtttgtatcatgccaaaccaaacttgttagtatcaatgccataatgagaaaggtcctcatcattaaattaattcaatgcggtttactttccatttgtaattatgctcatgaaataatacatgatctgcacgtgaactactcacaaaaaaaaaattataacatacaatatttttatagtatacattttataaataattatattattaagctatgtattataaagaattatatctttatatattaaaagtgcctatctaacggcatttcttggtttaaccgaatatactaaaaataaaagaatattttgttaaatt

SEQ ID NO: 305495 - DNA, 974 bp, Cannabis indica
aatcactaaatttatatttttatataattatattattaataacttttttattttattatatttaaaaaaatcgtgttaagcgggtcgtctcgtgtttgacttgtttttatttcgcgttaagtcatgtcgacctgtgtctaattttaccgaccctaactcgtaaaatttgtgttcgtgttcgtataccgtgtcaaaatccgttttaccacccctaataaaactctccaaagatctttacgtacaaaaattataaataaataaaaatatgtgtacatacacttaaaaaattatttagcccttttaataattaagttcacctaatatgtcgcatttttctactctcactgccacacaccacactttcatatccttcacacgaaggaaatttgattgaagttttgttacgtgtgtacgtacgtctatagttttgttcaaacgtaaattctctgttatattattacgtatggtttattaggtcaccatgctgacgttcatggcttaatttccgtgcaagtggcaaggaatagatcccaaaaattatatcttgctaaatcatcatttttattaaaataaataatcctaattaatatattatatttatcaacatatataccgtcccatggcaaataataatattccttcagattgtatgagttttagaaagaattttaaaatggatttatattcgctttacttttacatgtattatatcactagttaattggtaataaatagaaattcccaattacagcaagtatgttcattgttaaaaaaagtacatgcaacaaggataaaagtgtcttgtacttttataattaatatatatatatagaagaggtttcgatgattatatttttattgtaatcatggatacatttttttaagccattagattactattaaatggttgtgattaatttggaaattaaataaaaataaataataaataacttgtaacctgaaagtaacctaat

SEQ ID NO: 305496 - DNA, 2675 bp, Cannabis indica
ggtaacttacagaaacaaaaaaagccaataacagaaagagcacatagtattgtcatgtagagcttattggatacttaaaaaaatgaagaagaaattacataagcagtcatctttggccatggtccctcatcaaaagccttgcgcgcagcagccacagctcgatctatgtcttctgcatcaccctctgcaacatgagccaacacttctccactacgagggtcatatgttgggaatgttttgcctgattccagttcacaaaatcagctcacaatcccatttcatgatctaaacaatttcagttttgagataaataataataaaaaaaaaagaatgaaaatacagacctgaggctgcatctacaaagtgcccattaataaggttcttagtataagtaacttcaataggtggagtgattaattcttcaacggcggctgatgtactgtacctgctagtacagctgtttccactgacagagcttcctgaagctgaagatcacattttgattataagaaaaattatcagtaaataaagttaatggttttctctgcatatcgaactggatataatctattattgtcccttgtttgtaattttggatcagtctaattatccaacacaaatctttgtttagttgcagagaaaactctgatttaaaatgaaacaaggagaaaaacttttggcatgaacaaatttaagaacaagataaaatcaaaatctactgcaacatctcaatagcttgatcaatgacataagtatgtgtgtgatttagaaatcaagaaaaaaaaactgattcagaaaaaaccaaatgaaaaggaacggatttaaaagaaccacttttcattatcaagcaatcattatcacacaacagacgccaaaaaatgaaaggtgacaaaaggtgagatatattttaccaagagaacgaagaaaagaagaggatcttaaagcaggagaaagggagagagagcgagaaagcactgaggaaagcctccgagcagccatggctttacagagagagagagagagagagagataaagctggaaactcaaaactcttatcttgggtagagaaaaagaacagagtcccctgttcttatataacaaaagaaatgaaatgaaaaaggaaaaagaaacagtttttcctattataactcactcatatctatctatctatctatctctctttacattcctgtgagtgttcttttgtacgttttcaattttgtccaacaagtggaagaaatgcatggcttgaccccactattcccatttataataatctaaaattaatgcagcctttatataattaatattatatatttatgatataatttagggagcgttatcttagagggtattagtagattttgaccacataacttatctataataatctccaatttattttacgctcaaccttccataaagagaaaagtatcaaacgttacactagcaccacaaccatttgaaatccattcggatacaattaattaattataaatataagactaatttcgatttttacctaaacaaactttaacatgtactaaatcaaaacttttcaggtcactaaaaattctccacaattattgagattgttagatttaacaacttttatctagttttactaaacaaagtctgatgtatatgaaaatttaggggacataattttgtacttttgaaagattggagacatgatttagtaaatattaaagttcaataggtaggatttagtatatggacaattgtcatatcagtaaaattgaatgaaattagatagaagtctttatctctaacaatttcaatagttgagggatattttttaacggtctcaaaagttcaagaggcatgatttggtagataccaaagtttaaggagtaaaaatcttaattaatatattgagatttagtaacatattatttgcaagcatttaaaaaatatatatatacaaatttgtaaaggtatttacatatatgtaagtttattaaaatttgataaaatcggtatatttgtaagattttgtgttttcaattttattttttaattctggtgtatttttgaaaatttgtcaaaagtaaatgagttgatagttagtcatataaataaatggaaaaatactggatatggattatgtaaattgattggattagattttccaatattttctttttttgtgagataatgtttattttctatttctaatttcataatgaaatcacactataaaatcactcgattctatccaatcaaatttaatttaatttaatttaattttccaaacataactgtagtaatcagtaataatgtggaatggtttgttcccaatttcgaactttaataagagaaaatggataaaaagaaaatccatacgtatttgagccaaccaaagaaagagcagtaggtgccaggtggatgaggaatactatacacgcccttctcatgtgtgcatgccaaccaaatttagctctttctttcttggttttctttccttttttataaaagtttggagcaatttttcttttcttacctccaagaaaaatttagaaaaatttttaaaaaaaatttacaaaaatgcatcaccgaaaatttatttttactctttttttttatttataaaatatttctttagtaaaataataaactatttttaagttgttgtataatttatttatagttgt

SEQ ID NO: 305497 - DNA, 2404 bp, Cannabis indica
tctcaaaaatagggaagttgttgatatttccccctattttgtgggttgtcaaggtccaagcccccacttagctttctatccacggatgaatctgttatccccatttttgtcctcatgacatggcatgcttacttggacagaactagtgccacgtggcagtacaactcactaaaaggaagaccaagccaacatctgaacaaacgaagaccccgaaactcaaatgagcattaagtgacggaccagctccatcacaggagctgaccgaaaacccctagctggccctatgggcggccaaccatggaatagcaccatggctggcaagtctggcctccacaggggcctggctggctaaggaatgcactgcaaactttcgtagacacttctacacctggacaacagttataggctgcaaattgggcactaaaagcccaacatattggttgaataatatctacaatcaagggaactttggtgttttgtaaatatctaacaaactatacatatgataagagatttgattgtaaacctagggttttcggtctcctacataaaggccttaacctctgattgaaaaggtaagtttcctctaagcttgaaacctgatcttaatctctaagggtttgataaactctctctcttcctcatttcctctctcacaggcctaccttagtgctactcaacacttgagttttgccagtattgattcataccttgtaatcctaagggtactatagcagatcccacctataacaatttagatagtaattcccttggtataatacagctaaaaggtgagtaggtcattacccgctatcacaagggagataaatctcttcaacaaatcttattgtctattgcttttcattcttatttgagcagacacattgcaagcatcagatctatatgaccctactatcagttgattattttttgaggtcaataatttggtgcattcatttagagtggttatatattgatctgatcaaatgccatggtgaacataacaagaacttttatcgcaccatttgcatctttgggtctccctcaagacccacagatcacaaatatagggactcgcattctagtcaaaactggaatccccatgaataccgcagatgtgttgaatcccatcaccacaataggcgttacaagttttgccactacaggtggcaaaactaacacgagcacccaagcggcaggcccgtgcctctaagactagacccaccattggcacctccaacattatgaaggaccctagggcgacaaccctttagaacaaatactagaccttaacttcaatttcatgctggagacacaggcccgagagtgagtgagctaacaattggagagcctcatctagacctaggagaagaccttgaattggcaagactcagggaagttgtaggccatgcatgcctaactaaagaacaatgcgctactgattgcgatgtttttgctaagtaaagatgcaagttcctgtgatggatggatgaccaggagtacatcctttgatctcaccaagcaaaattagatcgtcgcaactgggaggccaacaatctaataagacagctcaatcaaaaacaaacaaaagaggccatgatctctttagagaatcactcgatgcaagattgtcgccaagtttctcaagaactaggacagatcttccccagccagagggaggacaaacctttcctcacaagtcaaacaatgagaacagtcagatctcgataaccagtagcatggggggctagctagggatttctggctcagtagcaccccccgttgtgcagccactgggcggccagccaccaaaaggaatactcatggtcggcttgagtaaatcacttcctccctaaggggagggaggtgcgcaaaggttgatcttcgatcgatgacgatcgagagtgggtgaaaacacccaaaacgacgattcaagaagtgaaatcgatcactttagtcatctagatccaccgtcctccaacaatttgtgagatctatccccaataaacacacagcgaacactggaagattgtggagtcacgagtggtcagaccttgcccaatgcaggtctagccggcaaaggaagtatcacaggcaacaagaccttatcctttgcaggttcggtcgaccatggaggagtatgcggcagccaaatcctgcctaatggaggtctagccgtccaagcttagcaactttgtgtaggcctaaccagcttagagaaactctcatacttgggaatggccggcaagggtctgtagggcctggctgatcttcaacatacactctcccagggtatggctagtcaacccctatgttttcaaaatttacagcctccccaaggagggcaagtcaataaggtccccacaacaagagatccttctgtgcaagcacagttggaccaact

SEQ ID NO: 305498 - DNA, 4291 bp, Cannabis indica
acaagacaattccctttatttaaattgtgctacatatatctcttcaataaagttatcaatgctaaaaacaagttgtgctacattattggctaagcaatgatattatttaagaatttaaaaaaggaattgaatatttaacaaataagaaaaaaagagaattggaacaacatgctacattatgggaagaaaaagacaacttatgttttgaaaataagaagaaaactaaacttaattattaattatttgaatttgaacttacttagacatcactttcaatatttgaatttgaacaaaggaaaagacagaattcagagttaattattaattactctttttcaatatttctaccagtaataataaattaataagattgaaatcaagatacactgaaagagatgaacagtagtccataaaatataatccaattttacaacttaaaatatgaagaaaaaaatcccaacttttcttccactcttttagacccttaatgatttgcattattaatttattgttaaataacacttcattaatatttagtacaaagtttattactaacccattatcaattttgtaaaatgacacacttaaaaaccagaacaatatatcttattatatacacactacttaatactcatcacaagttgttaatatgtacatcactttactaattttttccactttctatatatgaaggaaaatctctccaaaaaaaaaaaaaagagtgaagaataaatacacatatatataattaattaataataacttaactcattaattattatatatgatataattataatctcatcatcttatattggctaattaaaacaataaaatctccaaaatgatgttttataattatgagtagtcctttctctctttggagtactaccttgatgatggattatctcccacatcacacgtatgtctgagtattctccacaagattccatgtctttgtaaagactcactaatccatctccattaattcctacacacaaatatatataattactttcagggacgaaattaacgatttatcagggacgacattcatcacctgagacgattagagagtctttcagggacgacttctgtcgttcttaatggccatttttgttataatgaaagagagaaagtgttatgaaagaagttttatttttgtgtatatattattttacctttggagtgtgttcttgatttggttgaagaaatcttattaagaagaatagacttagttgggagaagaaatgaatccttgaaccataaccaacttttccaactattattactactctccattttcacatagggttgcttcatcatcatctttttcttatgccttcttcttttgaacattttaatatatatagataaatgatctcatttcaaattaataaattaaacttttttaatttgtgtgtatgaaatgaaatgaagtattcataaatatatatatatatatatgtataaagtatccaattatgcatagcaaacaaaatgaagacgacataacacaaagcaacatctatcaagacagacccctcttggggtgttttgattggactgtcaaaatttaacattattattattatttaatttcttcttaattaagtatttattaataaacgtatttaagaaggtaaataattaattaaaaataatgtagttcttaggtcccactaaaattattgattccttctcttgagttaaaacttataggaaattaaagtaagatcgatgtgtacggaataagttaactttaacaagaaaggacatagtaatatcaattgaaaatctatcttcgattggaaatatgaaaacgatattcacattttttgactgttgacaaaaataataattaatgataattaggaaaaaaataagtattgtatgacaagatttctcacttcaattttttcgcaagtgatcatgacattattatttgctcgcgggagttttcggggtttggggtttggagttttggggtcttttgatctcagtctagggttggagttggtggtggtgataattattatttttttaattttaatattttcattttgttaatacttgttgactaattaaaatatattatgtgtacattggcactacaagaatgtgctggcaaaagttggtattgcgctagtaaaatagaatttacctatgatgtgttggcaaaagggggttgacaaatcaatgttggtattagaacttttgccagcataaaatgaaaagtgctggcaaaaaagacttttcccagcgcgtaaatgtgctggtaaaagttatattttagccactgcaaatgtacgctggtaaaactgtgatttctttgccagcgcaagcgaattgtgctggtaaaagtgatatttcttgtagtgtggtgtatctaagaaaatagattgaaatcaaagtttgaagaatttagctcccaaaagtttataaataatgaagattcagcatacttaacctttaaccttaaaatttagataatttatttaccaagaattactctcctaaagaaaaagtaaacagtaaatataaaaacaaatactcttgttgggatttgaattttcattttctgtttctctaatacatatgtaaaatagcttaaccaataaagtcctaactattagaactggtaaaacaggtcagacacgataacacgatttgaaacttgcacgagagttagtgagtatgggtttaccttaaatgggttcgggttgactcgtctaactcgttttataaacgggtcatgttcgggttgacacgactaacaaaaaactggctcattaatgacctatttaaagttattttagttctttgagttataaccgtgttgaatacttcataactgtgttattggttgacatgtttaaacaaaatatgtttataaacgggtgtagggttacacgaatcgtgtcatgtcaatccgtttataaacgggtcatgttcgagttttattttttgacacgattattaaacgggtcgtgttcaggtcgattatatatctattataatggatatcgacacgacacgaaccatgaacacaaactgctacccctactaaccacatatttttctaaaataatggaaaatatttagttatgatttctcatacaaatattaacttatgtgatagttataactttaattggtagataacataaaatcaaaagaataactatgaaaaaattagtggcttttcctgtagaaattttgcacagagtggatctatataaaatgttttatatgaattttctcaaagatttttttttggggggtagaaaatgtagagctcaatgaaaaaatatatggaggttttatgattgttttttttttaattcaaaataattttaggaataagagattaatgagtgaatttgaattttttattttcttttcacacacttttaacatctctaaattggagaaatattataaagagttattcaataaaataatagagcaatcatttaacaatgaaagctcttctatgtctttatcttaccaaacataagaaaattctcaagtaatttttgcatctctcttttctttttcttttttctttccttgtatatcttatatatgatatctttctttataccaaacctacctagggttaagaattgaaatacaatatatatgtatctttctttattacactctaatattaaatgaaaatcaaaccgttaataaaaattataaatatccggaagaggtttttaataatatatattgtaatagcataaactagttgttaattaattatgaatatatgtgcattattataaaaataaaacctactatttgaaataggtatttgtgatatcatttctcagttatagaatttttattgaattttaagtgtgttatatatgtaatatatgaaatttgatgatttagaactgtcttgaaagtttggtagtaattgaggaagttttgagagttgtaaaattgtgaatttttgagcaaaatttgccgtgataactagaattccaaatggtacagggttatactaatcggaagtccagttgaacaatttagcaaaaaataaatttttgtattttgaccataattttttacttgattattcgtcttgaacgttctatacatcaccaaaaaatttgtgaaaagctctacaacatggtacttaaacttaaacttaatttaactccaatttaattttttaatctttatgaaccaatagaataacttcaatctatactaatactcatagtttttgatatttttttttatttttatttatgtttagttttttaaacttttt

SEQ ID NO: 305499 - DNA, 833 bp, Cannabis indica
tttacgaatttttttgtacagccctagattagggacaacaattaaatgtcacctctaaagaaacttgaatttttttaatctgtccaacattaggggtgacacatgtcgcccctaaaactattagaagcttagtcgcccctaaaaatttaaaacccaatagttacaaatagacgggaattttcccgctcaaactataggggcaacttttgtcccccctaatgccttgccactaacatgatcaaggcattaggggcgactttgttgcccctattgtcgcgtctaatagtatgcctattaaaatctcaaatctacttctttcacgagctactttacccatttttttagatttctctcttcttcttcaaaataccccttcttcaacccacaaaaaaacttcattaacaccttcaatccaagaaatcgagcaagaagaaaaagaagaacagggtgcggccattaacgccattaacttcgaacaaggtttgtttttgtttttaattttttttttcaattttttagttttgatttggagtcattcatagttttggtatacttacaaataaatctagaacaaagttgttctagactttatttgtaagcatacaaagttatggatttattgataatagtattaaaatttagatttttagtgtttgtatatgtgtaagattatgtatttttacaaatatatgcacatatatatttttaatagttgtatatgtatatatttgtgtgtatgtatatttatatgtgtatgtatatatataaagagatatatatgtgaataggtgattattcaatggttacatttttattgtaactatatggttata

SEQ ID NO: 305500 - DNA, 2769 bp, Cannabis indica
ttcttggaaacagtgactacaggtacacaagcaagactacttttagtcttagtagcatcagaatcacgtctcaaattatcatcctgataattcaatgctgccccatcagaacaatctttattacaaactcctgagcaagtggcccttgaaattctagacaaagaactatcctttgttgcatcacaaccttgtgccgcaacactctgatgaactttgccaccattcaaatcctcggcctttttattctctttgcatatattggagactaaagactctcgattctcctgtgcagcatcaccaacttcttccacaacactctgatgaaccttcctgccatccaattccttatttctctcaacagcttcatgaaacaatttcaaccactgactaggatcataatttgtagaagcattatcagcacagccactctttctgttcttggaaacagagactacaggcgcacgagcaagaccactttagtcttagtagtaacactctgatgaactttgccatcatccacatcctggctttcttattctcattgcatgatttggagactaaagactctcgattctcctgcgaggcatcaccaccttctttcacaacactctgatgaaccttcctgctatccaattccttatttctctcaacagcttcacgaaacaatttcacccactgactaggatcataatttgtagaagcattatcagcacagccactctttctgttcttggaaacagagactacaggcgcacgagcaagaccacttttagtcttagtagtaacactctgatgaactttgccatcatccacatccttggctttcttattctcattgcatatattggagactaaagactctcgattctcctgcgtggaatcaccaacttcttccacaacactctgatgtaccttcctgccatccaattccttatttctctcaacagcttccataaacaaccttgcgcactgactaggatcagattttgtagaatcatgtttatcaacaccacaaccacctttgctgttcttggaaacagtgactacaggcacacgagcaacaccacttttagtcttagtaggcaacactctgatgaactttgccaccatccaaatccttggcttctattactcacttgctattgatttggagctaaagactctcgattctcctgcaggtcatcacctaccttcgtttcacacactctagactgtaccttgctgtcatccattccttttatctcacagctccgaacacttcaacttgactggatcgagtatcgtgtagaagtctatcggtttatcgagttcgaccgtacgaacctaccgtttgacctactacgttcggtaaacctacggttgaacgttacgagggccaaccgtacccgtaaggtccgtaacggtaccgtaggtttttaacggaccttttaacggtaacgaccggtaacgttccgaagtttacgtcgaacggtctcgaaatttactcaagtcctggaataatttaactaccacccccaccaggaaaccaatcctctctttacgcaatccctgagctagtggccactgaaactgctaagacaaagaactatcccttgcaccaccaccttctgccgcaacactctgatgatctttgctgccgtccaaatccttgaccttcttaaaattggttatgacatctccattcttttgcgtggcatgaccaccttcttccacaacactctggtcaaccctgctgccatctaattccttttgtctctcaacagcttccttaaacaacctcacccactgactaggatcacattttgtagaagaatgtttatcagcaccacgacccactttcttattcttgcaaacagtgactgcaggtatacgagccacacaacctttagttttagaaacatcagagccatgtctcaaatcattaccctgataattagagatgaaagactctctacttttctgcgaggcatcaccaccttctgctgcaacattctgattaactgtgctgctatccaaatcattggcactcttgatctcttttggaaaattagagatggatgactctctattatcctgtgagtgtgaggcatcattatcgctggatttagatgatgaagaaccacaaggtcccttacccttgtgaagtggcaagcccttctcattatcatctactccaaaatcggtacctttaaataaacagactttcttggcaagttttgaatcctcaatttgaatatcgactttcctaccatacccatctccggatttaagctccgaacctccagaaattactgaaatacctctcttaagggcgcggttggtcatattacagagtgcagaacgggttttccgaaactcgtttgtgtcgctcatcctaaaaaaaatcaccaacgacaaattcaatcaatcaaactcagtatacgaacttcaaaacctaaaagtattcgtcgagttacaaaaacaccgtaaagtgcatgcaatcaaagcaaatctcaactgtttattacaattaaggggggaaaataaagcagtgaacgatagaggattaaattgcaaaccctaaaatcagtactgaccttgggtaaatggttaggaagatgggtcgggaccgggagacatggagaagcagtaatgatgaaagaaaaaccaatttgattaggcgggagaatgaagtgaatcgaagactgacccgcctttctctccttttcaaattcttatgttgtttatttctttttttttttttaattaaaaaaaaataagaaattaaaa

SEQ ID NO: 305501 - DNA, 2551 bp, Cannabis indica
aaaattaaaataagtattaaaataagttatacacaaaataatataaaaaatgaaaaatattaagattggctttttaaaattatcttaagttcatttttttaatattagagtgcaattataattttgtggggtgtaattataattattattatttttcttaatatatatcgttatataaagttgagtactaattcatgcttagaataaaaaaaaatccacttctagaacttattatgtattctacttttagttgtctcaacaaactcttcctttttttctaccacacacttaattaaaacaagacacaattaatgaagaaataaataagatacaaagtgacacttattattaagaaagctagctattatttggttcgcatcattaaatttcttatttttattacaaaaaatacttaataggattgggagctacatcattgatttttttttaattatattgttttttaattatattgttaagattgagtaaatcattattatttgtccattcaaaaaaaaaaaattattattatttgtcaaaaatataggaaaattttatgatgcactatgtctcccttatttattttggcatcttgaaattttttttagtctaatttcttttatgattgtgtatgttctatgttgtaattatttaatatatcttgaaatttgttgagaaatttaaagaaatttaacacacaaagttcaaataatctattacaagcgtgacacttttattttatatccatgtgaaataaaatgtttaaacattggttatatattgtaaattatttcgaatttcttaaaattttgcaacttgtcttgatatcaaaacaaatattagtctacatttttttttggagtacattatagaagcacccaaaatatacagggtaaatatcattttggaccttgtgttttgtaaaaattaccgactgaacctcctgttttcttaaatgataattcaaaccctgtattttttaaatggtacaaaatagaccccaaatttaattttcatcaattttttttttataatatattaaacttaaagcaaatttttagtacgaacagatacaaaaaaatgtaaccagattggtcataacaccttcaggtcaagttattattaagttttaattcaacaaaaattaagctcatgtttaattttgtactgttttgaaaaatacaatatttgaattgtcatttaacaaaaaagaagatccaatcgataatttttacaaaatactaagtctaaaataatatttgctcaaatactaattacaaccttttattacaatctcttagtcaacattcgtacctgaaatcacataccaaaatattttttgtcataacagtattcgttatagttacaatatcattcatgtaaatttttgaaagattctaaataatttacaatactgaaaataaagttcctgatattctagattactacgtatgtttaaaaaaatttaaatctatttttaataatgtaaactattcaaatttttttaaattttttcaaaaataatatcataattataataaacagtgtcataaaaaatattccaacatatatttgagcataaaaattgagtaaaagataataacaagaggttgaagtgtctcaaacttattagttttatattgtaaccgctaattgcggtagaaacaagacaacataggatttgtaatttaatagtctcaaaacaaaaacacatttcaataaagaacatactcttttttctcttctccaatgattatccattccaataatacccacttcaccaaacaaacaaggatttttatggaaataatccaagattttctcaagtcaacccaaacccaaaattattttatcaaattttgacaaacaatacaaagaacattgtatattatcatcatctttgaacagtttgagtattatgatgatgatgatgatgaatcagagtctaacaatggaaattggttctttgaggtcgaacctcatctgggtcggccacagttccaatgatcgttgccttcattccataaagttctttccttttcaccatagaagcattttcccgggaaaatggaaaggaaacagagatgggtttttccctaatcgtcatttttatgttaattgcaaaatccaggtgatttattaagtacccttttgatcaatcaactcatatttcatgtttgaattattaaagcaacatgttttgtataagtgtgctttgtattataatgatttaaccttttgacatctagaagtagattatgagtaattgttgatttatgagataatgaatcaaagagttcttagttgaagattatcatgactaaccattatagggttattttcagtgattcaagcagaatatgtgatgttggattggattctttctgtaggagtttatgtatatgtttttgaaacagattttttagcattatgtgtctgcttttgctacgagatattgttttttggatcattgtttgaggttttagcaagtttgttatccaaattttgatgagaaccaagtaatcctagctcaagagaaccaataacacag

SEQ ID NO: 305502 - DNA, 1427 bp, Cannabis indica
cgataaaattattggccggtgagataacaaaattgatctcatgccaaaggtaagagttcttaacacaaaaaaaattcaacaccacttggtttgcacatttctatttcaaatggtaccatgttatgttaatgttatttacattgtcttattgtattgttcttataggtaagtactgaagatctgtgacattcctttggtagaaatggttgtccttgtcagacaggccttctttagttgttttcgtaatagagtatcaaaatcaccttagcctttttcttttctccttttaatataagcaaaaacagctttgcttgttagtgcagctgaaactaggatagaatttttcagctcaaaaatttaagtggtactttgttaatggctctggtttagtgattttatcaaaataaagattgaaatgaagaaatataaatattgaacccccagacacgataaaataaaagattgatgagtatagacaactgagttgagtatcttggctaaattatgccaagagcatctccaagtcatactttaatgtcaccctattattaaatttggtgtcaaaatctatttttacttcaaccataatactaaaaactacatttaaaataaaaagagttacacatgtaactaacagtttaaatcttatttatggtgtgttaaattttttaaaattttacaaaatttagacaagtaaagttttttgaatagggtacattttttaatttgcacacaataaattaaatattaattttataaatataaatatattttaaaaaaaaaaaaaagtgaatgtcattgctacagtactacagcatatatatcgtgcactgtagtcacacgacatatttgatgaagtagttgaagtctccttgattaatttcacccaccaagtataatttgaaagagtaatttgcagctaaatttcttaaactttaaagtttggtacagttaaacccctagactaaaaaagttatggttaaactctccaacctccacaatcgttttgctctaaaattcttttgtccactttagtctgttaagtgacaaagtggactgtcacggtgtatacaagtgtacacatagtaaatttttattagtccacccataaataaccataggccaaataaacaagaaactattgtttcaataagtaaccgtgatagatgcctattagattagattggattcccatagaaaccacggaaattaaaagacacatgactctcctttactgctatagtgcaactaatatgataaagatcattagaatgaatagtaacctattacaaattatttataagatctattgacgattagactatgattaaaattagatcattagatctgtcaacaaattaatcatagcaatttagatcaaataaataataggtttgttaaaaaaaaattgaataaacaattaaata

SEQ ID NO: 305503 - DNA, 955 bp, Cannabis indica
aaaattttgttattggaataaaaaaaaaagttaaaattgatattgtgttaaaatttaaataatatttatttaaattttttatgaaagaaaggcctcattttaaatttcgccctaggcctctcaataccttaagacggccctgtatatggactttagtaaatgacaaacatgtgtgggattagcgaaatcaataaacccttaaagttgactcatatatagaatttcatggaaatccctatggagaaagatattttagatatcaaattacttgatcgcccactactaagaaatgccaatgctaagaataaggtgaatggtagttggcttaattaccgggctaaacatctcatgaaaattgagaccataggtttgatggaagcccttggccatcggtgtttaatataatgcgatacactcacttgaatcccacaattatagcatcttttggtggaggtacaagcttccaagtgctttgagaaggaagggtaaaaatttcatgttgcatagcatcattccaaacttgtaatttgttagcttctgtaaaataaaaagtttcaactgggacagaggtgagaacactataaaataattttggtttgaacatgcccgattttggtttgagacagtgggattagaggtaggagaaaggggtactagaggaggagtagtgaggacataaggaggcaaagagaagagggtggagagagaagaggagtacggtggaaagagatatcttgggcatgaggagtgacatacaatcgtcccaaagcaatatgaaggaaaagataccctttgtgatgactaatgtagccaagaaaaatacaagattgagaacgaaattcaagtttatgaacattgtgtatggatgaagaaatgaaaaacattcacacccaaagacacgaaaatgagtgtactgaagttggtttatgataaagaacatagtaagggctatgaa

SEQ ID NO: 305504 - DNA, 1582 bp, Cannabis indica
agctagttagttagttagttatagtaatggtataggagccgatcatatggaggagagtttttatacttctctcttctcttttcttcatcttttcatttattatttctttttattatagctaggtcgctttgggatttattcgtttattatatgtatttaagttttgttttgtatatggcctttcttaggctatatatattcccatgtatgcatttgatcacatttgtacatttgttcattaatacaataagtttatcatcatgatcctcatatatatcatggctttaatttaattgtttattttatttattgtttaaaatatatatgaattacatatcacatagatagatatgatcatcagtactgatgaagaaaaaaaaacactcaaaaggataatattgagaacaataagtagtgaagtcaacaaaataattcattagtgttgaaagtttagaattagttaaaccacttcatatactctaacctaaaagcatgtgtaatttccacatgttttaattaattaatgaattaatacttatctgctttatatttttttcgtcatcagcctaattaattaaatacaagtaatcaaggttttattgagctattttacaaggaatatctgtatattaacttattagaaggagaactgatgatttacaatatggtaatatatatagtgagtattgactaaaaagttatataggagtacttcttcaaattatatataatatccttatataacgtggacggtggatcggtgattatgttctttaatttatttatttaacgtgataaatgagaaatcagtgaaatgttattattaacacattaaaaatagctgtacatgaacaatattgaacagcaatatattatttcttttatttcctcttaatatagccagatagatcacattatattaatatacactaattcattagttatttttaattaatttattatttttcaaaatggaaagactattatataaattatattataatataaaaaaagtttaagtcatgcatatataataataacagtggcgtgtaaaggccatatatatatatattttttgaaaaatgtaaagggttgttgtctctccaaagtcttgtaaagtcagtacttgttgcctgtacacggtttttcgagtacaatatattcttgatatatatacgtgacaaagatagagaaccttacaggaatgtatattaatttggaattagttgtacttgtcatgctgcatgccgtacaagttaattgatgagtttgtgtatatatgtaaatgcttattattctttctccatttaatgcacacttatcaccataatttattttagttttttggaacgttgagatttcaaaaggggtacttggaatttctaatggggtggtgggttaatcgtagtcccacaggtcacccattgaagctgacatttcattgatttatataatttaattattctgaagtttttgttggtacaaaaagtcgtacgtaatgagagtcagcaaaaacgtacatgaattggtagaaattatatgcctagctaatattcaatgccaatttcttagtaatgagtcc

SEQ ID NO: 305505 - DNA, 2772 bp, Cannabis indica
  modified_base (2742)..(2742): a, c, t, g, unknown or other
aataaaagtatttaatcaatgatgagaaattaagcaaaagaattatcttgatttaattacccaatggtttatgctaattactattctctttctcaatgtgaatgggagattataaaaattaacctaactctttcaaatcttttaggccctaaatcatatgttatctaatcatctctgaattagactaacatataatcagcattaagcaataatttcaatgtcactaaggctatgcaaatactttcatttcacatcaaaacctagtttatccaatttcccaaaactcacttttcaaattttaaattgggatcatgaagtatgcaaaaggtgatcaatcttaaacatgtaattaagcacaaatatgaataaatacacaatcaagaaagaagaattatcaattatcattaacctaaaaaaataatgtcaatcaacattcattatctccccaaatataggagtttagttcataatttccataatcaaatccataattaaaattgaaacagaaaataacataaaaaaattaagaaagaaggaaagaactagttgaagcaaccgatccaggtcgccacaagctgctcttaaagtcctctcctttgtttatagggctccaattctgaataatgatcaaaaatcatgaactcccttttaaatgagccaagttttctttttaaaatttgtgaaattacaaaattgcccaagaactcgtcaggaaggcttcatcgcgacgaagcttatttcccgtcgcggcggttggagaactctcaacttggaaaactttttgccaagtcctgtcgcggcgaagcttattccccatcacggtgaactttgtacatttttttttacctcaactcttttatttcttgtcatctattcttgtgaatactcccaaaaccataatggtcccgaacagagaattaaaacttcgccatggtcaacatctttgtgctaagtttggttttcagcaaaaaaccactaaaaagaaagagtttcaaaaaacttaatactgtcttcaaccaagatactaaaagtaaaagatactaaaatgatggaggggagggatttaggaaagacaatgaatttggagagggtgaagacctcggggaaggaattcaaacttcgtgcggtggccgtagcgatggcaggacaacaagaatctcattgaggcaagcaactctagaccgaatctcgcaagcacgagctataagtccatcaatctatgcttgaaaatccagcagtctcgatgggtttgaaggaggaatcgttaggtctgagggtggtgctcctgggttttctcatgctcgaatttgaagtaaaaggtgaaggcactcatcggaatatttgtaacatttgttttttaaaaaaaaaaatcaaattcatattaatatttatctttgaaattaattaattaagcaaaaaacaaattcagttgggcccacctatgtagtaggtgcctaccactgtggagaaacacagtgctaggcaccaccttataataattacattgtggtgtttgtcttaaaaacaatttgactccctaatttatttaaataataaatttaaaataaattatttatttcataataaataattactattttgttaatttaaaatacatttttcaaacatcattgtttagttttatccataccattgagattgttggcaattcggggaccatggacctataatactaagctccaataaattagattatttattgaatcttttcaaccaaataattatatttattaattccataattactacactataaatatagaattaaactcttaataattatagaattatatttactgagtttattagagtgtccattgatataatcaatttttgtgattaggcctccttgtgtcggttcttaattagttttggtcaaattatctttttacctttctaattacttctttattctttagtattgttaattcactagtgacatataatttagatccaatataaatttgttacacaacttttcaattatagaataaaagaaccaacatttgattcgttaggaaagtcaagattctatgattataaatcaagttcctagtcatccacattattagcttcacaaaatagaagttgtaagaattatcttctctgtgaaacattaacgagtgaatcaaagaaactaataacttgaacatcagttcatgattactcaagattcaggccgatctactattgatcatcgttgtgatatgaattaggtctttatagtaaatgacatgtttgacaaagacaacttaattacatatcggttcatgtcatatataatttctattatatacaacaccttcacttagataacatactacaacaatccgaatcaagatttcttgcatcgaataacgaacatcaatgaaccgtactagcaaacgttgattaatgattccataattttaatatgttgttgattattttattcatgaacagtgatcttaattctccgtacaatacaagtaacatcctcatatatgaataaaaaaaatttcgatatatatatataaattattcgaaattggtatcgatgccaatgatgttggtgtggggtgagaaggctgactgcggatggcgagttggctactgtcgacaccaagaggactagagtgagagagtgatcaagggtgagtagagagttttagttctagggtttattttgatttgagtgagaattgtgagatctgaatgtgtataattttgtgagtaaaatanatttttttttaaaatttaaaaaaaaagaaa

SEQ ID NO: 305506 - DNA, 1914 bp, Cannabis indica
tccatacatccgatactagtatactttaccaatgtcccgaaaaaggacttaccacatatcaatgtgtaagtaaacattatcgctgattatcacctcagtgtgaattcagtgcactgataaattatgggacttaaactttgaaatatataaccacaattactttctactgtgatgacatcactgtaattatgcataactatatgttctagatttatcaaaaattatatattaaaccataatcatgaaaataatatgtaaacttaaataacttttgatcatttattgataacaaataagattatattacaatgaattttatttagggcataaaatcccaacaatgtgaaagaattttgggtagccagttccacaacatctgagctcagaatcgaggggaaattgtcagagataaaaataatatgagggtctaaaagtaatttcatcctaataaaagaataaaaattaataaagtaatatggcagaaaaaggaaaacatcacttttaaaagaaaggaaaagcaaaagagtggagctgagttcggaatagcttgaggaacggagcttggtaagtagagcaaagaagaaagtgcacgagggaataggagaacaaagccatttggaccaatctgaggagagaatagagactgcacagcaccaattcccgcctataaatagaagaccttgacattcaaatgggacatggattcttgaccacactagcccagtcaaaactatgtcgaaatgcttctccaaaaaggcatttcactaaaatctgagttcgtcaatcgaagagaagaaccattagagttctaatctttgattggaacgatcttattgtaaagaatttaaagttcagttacaaatttattgttgagctaattagcattaacacatggagttcaatctcaaaactaaatggcaatgagaagggtagttcatgcatcttatatatagtattatgttcacatacattatcaatgtgagactctttaacatcccctcaagatggtgactattatttttgctcactaatattggacgtctcgatcacaagtggctcttttggcttaacgaatcacaagcggctcttttggctcgtcttattggatcgacacttttggctcacaacgactccttttggcccactatcctgaaatcacaagtcgtactttttttctcatctttttgaactggttattagaattttatcggatactcattaaagttttatttggctctcatactattttaaaattgtaaattcataaggttccatctcaaaaccaattggctatgagagtagtagctcatacatcttatatatggtattaactttctatacattattaatttgggactctctaaaaatttgtattgacttttaattatattattaaaagaaattatagtttacataattttgctaaattttaataaccctaagtgacattgctaagataatcttaaaatttactttaattttatctttaaatttgtttcaggatgattagaactagcaatgatttttgtttctaggcttttaatgctaatgttaagaatgccaatagtatcattcacatatacacacgatatggggctgagggaaacacacacccaaaggataaagaaagcctatgctttttttttcccccttttttttagtccaaaaggcatttatgttctaactttctaaatgagaaaatctaagtaaatgaccttattgctaactctatagatagttaatgtctcttttttaaaataataaagcaaatgtctttttttattttttaatacctaaaatacccttcattatataaaaggttattatatattttattcctttaatagaaattatgaaaaataataaatcaaaaatctctctactgaatttttgtcaactattttttcattatat

SEQ ID NO: 305507 - DNA, 1396 bp, Cannabis indica
ttttctaatttgtatatatatttatagaactcattgttaaacatataaatcaagactctttgattactaaggtaagattaccaatgtgaggttcaacaaatgaaacaaaagattgtcaattactacatgacaaacaatataaaactcagtacattcacccacctttatcatatcatcaattgaacgggtctctcgaataattttattacgatttatgacaaggactgctgccgcacaaaatactggtaactcatcatcccctttcttagttgatgacaatgcagtgcagatctccattgaatcattccttgtccaaaaatttcttgacaagccacaaaagtgatgagttgtttctgacttagtattttcagacaaagagcagttcacatttccatgattcgactctaagcatccttttgtagtaccgctaccattttcttcagtttcatccctcatttctgcttcagaatctcttggcagctgaaccatcaatgcttctagacgactctcctctaaatcattgaccatggattcatcaaaatcaagctgcccacatcatctgcatgttttattaaacatcaacattaaaacaaatggaagaaattctgtactttgagattcgtttacgtaaaaacagcaagacaagaggcttataataaacacatatttgcattttcttgatacccatcagactattcaacatcaatacaaattcattttaacagccaagttcaagaactgtgctttctttaattcactgcttggggataaaaacaaaattccaacattcaacacacgagaaagtaaaagcaaaagaaatccagcaatccattctattacagtccaaacaagaaaattagacaaacctcccacatacagagagcatcgttaaatgataactcccgcctgaagagtaccagcaacattcggaatgcaaaatgaaggctttcagcacctatatgtgacagatgtgcaaagatttctctgtcagttaattccaagatatgccacaatgattccaactgcttcatcactccagttggtccttccattagaaaattttcacgctgcagatttttacgttaagaaaatatataattgtaatcttataaggactaaaagtgaaaatatttatcaagtttgacataccactcttcttaaaagcatttcaaagcaccaaaatgcatcagcgtcatcttcaaagagaacaatgaatggagacagcaagtcactcatacctaataacattttgaatcaaatggtcagcagatgattgcaggaagtatagtaaagttattcaatgtaaaggcaccttgatttttgtacatttcctttttttctgtatttcttaactaataaaataaataaaaataatatatatacaaatatttatata

SEQ ID NO: 305508 - DNA, 1462 bp, Cannabis indica
attacaatgtaaaaggattataaaaattaaaaggcctaactaaacattgtaatcgtaattgtcatttccattccattctctgccgaatatatattttgccgtttgatcggctcattaattttttgttcaaattttagtgcaaatatagaaaatattaggccctttttgtgcaaatacatagaagtaaaaggaggccatagttttgattgtcgtttcctctttgtctttacctaattgtcgtttagtagttgtggagatctataagcaagtatgtttatgtatgtgcttctgcagccacgttttgtctttttcatttggtccacgtttgtttgtttgtttcttatttttgttattttttatgcacaatcttttatacatacccaataatcctcaactcaaaacaatattaatttaatttaaatataatatattaaatgaaaatatatatgtttaacttcttcaaagtcttgtcttaattaaccaaatatattaattattcattgtatataaagtagtagttatactttggcaccttgccttagttctttccagtggttagatctacacaaaatttagattataggcttcaacttatttattaaatgaaataagggcaagccttaaaactttcttcccaacaagaaaagaaaaatgacttggaaattacttaaactaggcattaattaaaaactattgatttaaagtttcaagcttgaagaagaagaccaccttgaaatgacatattgttttctgacctacttttttggttgaagaatcctaaacaatcttgaatactataaactcacaattaattaattcaaacattaactatcaaaaatatttttatttttttaaaatgtaaattccaaatattaaacacatgtgtttcttactcatatttccatttgcttcatttttttagttgaactacatttattgtttgccatttttcattttgttttgaaatatgaactctctctagttcagatgaataattgttcttaaggaaaaaaaaaaaaaacaaagaagacttttttgggtactaaatataaatatatatattttaaaaaaaagtataattatataaatataaacaaaataggcctaatagcttttaaaaataatataatttggtattgaggaagcctaaaaataccaattatattttaagtaaacgtcgtctttcttaaattgttaacaataaaataaaaagatctagatcatgtatttgaaaaattatattaaaaaaaaaaatcataagacttacacaacaagcaacttataaaagttaagttttgaatactaaagtgccgtttggtaacacttttattttctaaatttataatcacaaaatgaaagtaaattttttgtttttaaaaattttgtttttgaaaaacaaaaatacgttctgtaaccacttttgtttttcaattttaaaaactagaaaacaaaagtgtgttct

SEQ ID NO: 305509 - DNA, 3076 bp, Cannabis indica
aatattattgtcttaaggacaaaaactttaccaggatatctagctgtaataatatcactgcaacaagcgggcgttcttcaagtggagccttttggagatgagcaaaaaatatgtgcatagtgttcaagcctccccaaccttctttcagtctgtctaagattgtatttatctgtgttcttctgcaaagatattcctcaactgattagaattggaaacagatggtagatgattctaaattacattaaaaatatgtcattacctattaaggcagagtaattccatcaataaagtaaaggttgatccacttggattcttgtgatattcaagtacaatgagttctagaacataatcaatgttcaaactgttagctaagtagtttcgacagcttccatcagctcgaatacaacacagtaagaaaacagcagcattgatcctctcaacagcatcccctctttcaaattttgataccaacaagcttaatcccctaaagacacaacttgtctcgcattatctgagtttctgtcttcatacaaaacctgtaagaagttggtctagtaagtaaaatgcagccactagaggactgcattgtattgtgaagagagtctgtaactggtctccaaactctataacccgaaggactaatggaacccactctattgatatcatctgcttcgcctttggcttcaataggtaaagaagaacagctgcttttagaaacaggctgttgcttcttagatgtctcaagaagatttcaagctgtgcatcagaattcagtactatcaattgatttagctcgttcttcattacaagctctgctaaaaccgatatcactagttctaaaacttcatcatcatcagaagcgaacaacagctcaagcattccctcaataactggtactttggacaatgcagcttcaatgacaggatcgaaatttgaatccaaccaagctttggtaatgacacgaattgcaacttcacactcacttagactttttgaagagcaaatggaagcaatagctttgcttaaattgtttggaagataagtattttcctcctttttcctaacagagttagtctttgataaagaattcccacttagcaagcactctatttgcactgccatagtgttttggcaagaaatgaatctaaacttgtctggtttttgagtctctctccatgtttcagatttctgacttctttcaagttggcatgaagatcttcgactcgagtggtttccctataacattcagaaagcatattctcaaatccagttgatcttaagaaaacgaaaaacttgtagaggaagacagagaactcacctgaagaaaactgccaatattgctgtagttatccttatctgcacactggttttcctcttcctctaaaccccccaaacccttcaaagctccatttcgattatcatcattcgttgattgacgctcagctaccgatccaaatacagcacgatatcttgtggtgacaatattgaaacagattagcaaaatattcaattgtacaacataagacatacaactatgttatgtttcagtacttacaagttgttaattgaggattgtgtactagaggaatccattgatcttcttgaagatttgttataaggtctttcaggcaaaggaactttaggaacagcaggggatttaagcccaactttaagccattttttgtagtaaaaagcaaactcaattgttcccttatccatatgttcattataaacctgactcaaagctttcattttcgtctccttatttccgtagtcaaaatttcttaaacaatcaagctctttggtataccaaaccttgagatgaagaagatgtgggagaaagaaatgttcccaaagatcaggagccaattgggttctggcaaaaaagggtgactcacagaaagctcgaagcaaatgcctagcagatgttcgatcatgtttctcaagcttataaacaatggccaagtagaactgagcacaagaagagagatgtgaattgggcagtccataactcaaaccattcctcgttttctttgtgttaagagtagcaacagtgctcaaaagctcaaccgcattccttacagtcttcatccttatttccttcttgttattccccttgtcttccattaacttatccacactctcaatacccaattccatgtttgagaaaatctcatcatccgaatccattttcctcctaatcaaacaagaaacacacttctcccgaacattttcccggaaagccacgtccttaatgtaccttcccacatagctactaagtacagaaatcacagctcgggaagcaacatcgtctacaataggttcatcttcatgtctcgaactctcagaaacagaggtcttggaattcgatctttccgagatagaaccgacccttttggacgaaaacaccgaagacccatttcccacaagagatttgtcaccgttataagtactgctactccttcttcttcgtcttcttcttatcattcgatcatggccaccattaccattaccatggcagatatacaggggaagaggcttattgggttcagtctcatcaagtggtgcaactctgtctctgttatgtcgtgttggttggagttgtcttctacttcctctttggaatctctcatcggcaagcaattctgataaggaggaagccataggtgagtagattgaggatggtgtttttggagcacagaaaaggaggaagtgattggaagaagcctcactaacattctgtcaaaaaaaaccaaaagataataacaaaaaagacagctacagaagaagaatgcactactagtgctagtaataatactttttctcaaaataataaaaaataaataaatattattattattgttttataagagacgcacatataaagacaacttctttggattttaaccgcttttggggtatatagttttttttaaaaaatattttttttttttagtcaatatttctaccctcaatttctcgttacaatctcttaatcaattttcgtactctgaaatatttttttcaaatttttttttcacatttgttgatttatatagttacaacatcatctcta

SEQ ID NO: 305510 - DNA, 1888 bp, Cannabis indica
cagttgggttggggatctgatctgaacaagttttcctttttttattttttttttatttttatgaatagaaccagttttacttagtcacagctgccctgtaaatatatattattttgacaaggctatttgtaagaaattatttatgaattgaacctgttttcttcatgaaaagaaacagtaaattgcattttgaaattagaaacaatttatttaggtaaatatgttgcattttttttttacagaagatatatatatatatatatattaactactgatacaccgaatgtataatatttggtacaaagtagtgagcaattaattaattaattatttacaactggttgcagggacataataaatactgcttatgacccatcatatgaagagaatggcatagctattgaccccatattcggtcctttacttcatcctccatctaattaattaccacattttggtaattaattacaattcccatatcatttatctctgtttttggttcaataatttctgtcttcatgacaatcagaaagaacatgttgcttgttttatttacatgcagacaagtacttaaatctgttattttattaaaccggttgattggtttgagaactcatacaatttatatttttattgagacataaactttgggctacaatgtcattaaattcatggtgggttaccgttacagtgaacaattttagcattgttaacaatattttctgttgatatttttattttggtctcacatacatgcattaaaaaaattgttttaattttttgctaatgtttggttcgaaaaaataagggagaatggaatggattatgggttgtttggttttataactgatcgaccgtttttcatttttttaaaatagaaaataggaggtgtttagtgaaatattttaaaaacacctttttgaaaaccgagtaaaaaacaaaacaaaaactcaaaaaatatcaaaatattatttttattttaaaatattttttagtttttttgtgtaacatattttgcttacattttttctttcaaacctgggtataaggctggagccgaggcttggggtcggtgtccaggttcgggtttcggggtcgaggatgggttcgagatttggggttggggccaaatctaggtctaggtccgaggtatgggttgggtccgggagccaagggccggggttggggtttgggttccgcgctgaggtccggggtccagggtagtctagggtccagggttcgagatcctaggtccagggtttgggtcaaggtgcggtgtttgggctttagggtcttggtgtccgggttcaagggcggggtcgcagctgaggttcgaagtcggtctcagggtctaggtgggattggattcattttttctttttttttctaaaaataatttttagaaattatttgccatgtcttatattttgaaaactataaaaattgtttaggttctcatttcattattttctccctaagtgatatattttcaacgatatctctaattctccaaaatatattgccattcaatttgaaatttgatgaaaattttggatgattatattgcacccgataaatatacaaagacattctatttattaaaacaaatatatcaaactaatctatttttttgtttcaagctattcatagttcaattttgccttctcagtttggattacttgttgatgattgtcgggtcttactctcgtctctaaataatgtttttttaaagtttgttaaacgatttgtaaatagggctgctcattgtcttgctagagagtcttgtttttcgtcagattgtatttttaatcagcataatgtttctgctgattttaagtctattgtaatggctgaaagtgtttaaataaaattttcactttgactcaaa

SEQ ID NO: 305511 - DNA, 1631 bp, Cannabis indica
accttataaaagtataatattaaaaatccctataagatattattttctatgttcataaaattaatcaaaaaatatagtattttctgtagtcaattttctcttgtttatacaaattataatactatagacaaattcacattattggaattagtagcatgtacatgtatagtgatcaagtaaatcctttacaatatgtggtccaactagtttttgtacgtattatctatcagggaatgaaagttgtggcatcaaagaaaaaaatttgaaacccttgatcattattcgcaagtaaagagcacaatatcgattttatatctagcagaagtatatatgctcaagagtttcaatttgaattccacgaatttattagttttcaatatgaataagacattttcctgcatgtttttcaagtgtgaacaatttagctattgtttgaagaaattaatatctatgttgaccatctaatttgtcaaataaacttataaggtaataagagtaagaatatcgaagtgtttgattttttttgttataagatcgacaactcgtacaaaatgatatatgatataatattctcattgcttttttgggggggacatttcatatattctaagtatctcaagaacataccaagaaggagtgttaggccccatgtgtaacaccattaagcaagcaaagaatgtctagtgtagccagaaaaacaagcatatgattgtgatggtttttgtttgttttgtgacaagattaaggagcaaaattcggtgtttatgtacattgtcaagatttaacaatccaaacacaaaatacgagtttagagtttcttgtgtatcatcatcgaaagaccaaaataaaagtgcttttctccttttatgcatgattgaggggaaacaacaacactaatatttagttccctttatattacatttatatgccttcctaagtttaaattggtaacaaccataaagttgtaaacaaaaatgcaacgatttattttccaaaatatatgcaacgtcaaaagagatgtcatgtagatgttctcattaagacacttttctcttcattcgtttttttggttaattaggtatatgagtattcatatctttatatattaaaagtgcctatctaacggcaattcttggtttaacagaatattcttaaaaataaaaagaatattctgttaaatttaacgattaggtttgatctcccgttaacaaataaacccaataattaaacccaaaaaattaaacaatcttttaaatattaataatctttttttaaatgaaaaaaatcattttacccacatatctctctaacaaacctattttgggagaatattaatattttttttatttatttttttaaaaaaaaaaatctttatatattaaagttaacatcacgttatctaatattttctctggataagcataggaagcagaaataccacttctatctttgtgtgattgcagatataccacttctgtcattgacccactttttagctttataaatggagatgttcatataatattaacactttacagaatatttatagatataaacttacattacaatgctatgttaaaaaaagaactaaatagaataatctactactccaataataaatttatttacaa

SEQ ID NO: 305512 - DNA, 1619 bp, Cannabis indica
tgccaatgtgcaaatggcacgccaaatgggcccgaccatgtcgtgccaatggtaaaatggcacgccaaatggtccattcatgtcgtgccaacttttttgggagggaaatttcccgccttgacccaacgacatgttttcaaattaactttggcacgatattttggtgcccattgcacctactgtcgcgccaacatccaaaaaaattaaaaaaaaaatggcacgacatcttgtatgtcgggccaatattaactctgagattagtatcactttaagtcgtgccattattggacgtgcctatatggtattattgttgtagtgcatatataaaaatatgagctaatttattcattaccaactgattttgagatgaatctcatgtttctcaaatacaaaaatcttgtatattgttttatatcattttagtatttttgtcaataattaagagaagatatggtgaaaatgaatgagagaaaggctcaagaacaccgtaatgaatggctgagtaatgagttgatatttataaccagtttacagaagttgttgaaacaaccaaaataaacaatacaataacaaagcataagagaaagctaacgactaactatatatgctaacatttttccaaatccaagtttaactattttctttgccgtctcaaagtttgtgggataacaaacagagtgtgccagagaaaaagttttagaaggcaggcagagtatgtccatggtgactagaactttaaaagagagtatggccaaaaatctcaaccggctaaatgagctcctttactgttccttctgtttcaggtaattttatcatcactctctagctgaattctcataaaaggcagaatttatgcttgcattccttttgcttaattgttgatttgcaagtaaactggtgtggtgtgaaactggtggactttgtgctcctcctcaattcatctagttccttccaagtttaaaaatgcaaagacataacgtaaagtggtgaagttatctaaattgatgcaacttagtcagagtcttatgaaactaattgatgcaattggtacagaataactaataagtttgattttctacttggtcattcttcagaagattatgcattgggaaactttgtggccttggcctacgtttagtattcaaggggtgaaaaaattggtttagttaagatgtttagggagggtatatagaagaaaggatgtgaatatttctgtttgtaggctctagtatagatcctaaatttaagacaagtattattaatatgttgtagtagattgagacgctgacttgagtgtgttactacatactagtggatcttctccaggttaacatcttattattggaggagaaatattgggcctgttgctggtacaaattacatacaatttaggtgttgaaacctcaaacctggtaatatataatctagttattagctttggcatattgatggacctttcagctagctaaacacgcatacaactttgttgttgtgctaagtaacaccaaagtcttcaaatggcagaaatataatatggacgcaaaacttagctgaaacaaaatgcaaagaatatagcatcaaatctatcttttaatttaatatattgagagagagagaga

SEQ ID NO: 305513 - DNA, 3493 bp, Cannabis indica
ctaacttgttgataaatactaatccaagtgtttctgctggtgtgcaaccatctgctgctgagcccgattgccctcaacacaatctccctcaaccaacactcagaaatatctcacctgatcctaccatcaatatatcacatgagctctctcccataccagttcccaccaatactatgccagtccatacaccatctgttcctgaacccgcttgccctcacaataatatttctgaacaagttcccatggttgcaccccagcctaatgcagaaatctcacttcagcagcctccaacacgtactcacaacatgaccacgcgatctttgaatggcattgtcaaaccaaaatcctatatggctactaaacaccctctcccacagtccctactacctacagaacccaagaacctgaaagaagctcttatgaatccgaagtggttagcctccatgaacactgaaattaatgcattgcagagggctggtacttggtcactggtgccatatgaagatggtatgcacattatagataataagtgggtacatagactgaagttaaatgcagatggttcactcgatcgtttcaaatcgagactggtggccaaaggttttttacaaactcctggaatcgattatgctgagactttctcccctgtggttaaacctgtaactgtgagaacagttttatctcttgctgtctcacggaattggcctgtcaagcagcttgacgtgagtaatgcctttcttaatggccatctcactgaaactgtctatatgagacagcctccaagtttcattgatacacaaaaacccaaccatgtctgcctattacacaaatccatctacggacttaaacaggcaccacgtgcgtggaatgataagctcaaaacatgcctgctcaactggggattcacggcttcaaaggcagatacttcattgttcatctacaacaatggtaattcatttatcattttacttgtctacgttgatgatattttggttattggccctagtgtgcatcatatagacaagcttattactgatctaaatggtcatttctcactgaaagatttaggggaagttcactattttttgggtgtagagatttatcgagactcgacagggatgtatctttcccaaacaaagtacatcactgatattctaaggaaacttaacatggaaggagctaaatgtactcccaatccctccagtgcctcaacaaagctatctttgactgatggtgaaccattctctgatcctacattatacaggagtactattggagccttacattacctctctctcaccaggccagacattgcatacatagtaaataaactcagtcaattcatcaaggctcctaccatttgtcattggaatgcatgcaagagattgttaaggtatcttaaaggcacggtcactgaaggtttagttcttcatcctgccactgacatggtgttacatagctactcggatgccgattgggcaagtagtattgatgatcgcaagtcgactggagggtttgttatatttttgggaggtaatctgatatcgtggacaaccaaaaaacatcaagttgtggctcgctcaagcacagagagtgaatttcgagcccttgctaatactgcagctgagcttaaatggatatcctccttattgtctgaacttcacgtttctttggccagatctcctataatctgggtcgacaatcaaagtgctgccgcacttgcagcaaatccggtgtttcatgctcgttcaaagcatatcgaaatcgacttgcatttcgttcgtgatcaaatcattgccaatcaacttgctgttcaatttgttccttcggttgatcaagtggcagatattctcactaaatctctgtctactgagagatatcactacctaaaatccaaacttaacatggctatctccaagtttagtttgaggggagatgttaataactaactctgctgtacagttaattctgttttgttagttattagttaggtagttttctgttattgttattagctttgtattaatctgtaacttctctcaatataaataaagaagtagctaatcactttgattagcttttgccatttcattttttctcttgctctgtttcttgctttctctctgtgttgttcttccatggacattgttttacatacaccattgttgttcatctcattccctctatcttttatcattgtttccaagaacattgatcttttcctcacctagagtgaattgtgtaatgagattgtattgaaaaagcatctatccagacacaaacacatagtttcactaagaaatctccattataattttactcaagcacgcttttgagaacatactctggtgtgcttaggtcctattaataaaactaaaagtagacgtggttttattaccatcacaatatgggaagtgaactactataaatctcgatgtcactttttttacggttttattttgatgactatagcataagtccaatccacttatactttttataatatttttaaatcagttaatgaaaaactacgtcaacaaagtattattcaaatgcatcaaacgaatttatcagaattaaaaatatgtatataaaaattgtatatgtgatactaattagtgtgaaattagtttagttgatatatgaatatgctatgtcaatccaagggcgaatacgatggtttgagttagggttgcgattaatttctcctcacgaaatatatacatattaggttagagttgatcaattatacatgttaatctgtataaaatacaaattaaatatgatatgacaataagaaatatccccctataataaagactacatatatagtagcaatgctctttctattttctataatcaaatcaatgtagtacatttttttttattactaaataataataatatagacttttaatataaacctatacttaaaaattaattgctaaaatgagttggctatgatctttcaatatgaaaactagtactccaccacaataagaaaaagaaaagaatttactatgaaagtgtggcagtggatgagctaagtaaatttcagaatgcaactttatgaaaaagaaaaaaaaaaaaggacagattggacttgtgctatagaatgattactttgagttgtctaattaaaattgattaagatcgaagctaagcttttaaaatatactttaataaagggataaaaacaaaagctgatattttaggctgttcatttggtgactttcgcagtgaatgaatgtaagtgtgtttattcacgtggcctaatttgggtatggatttcgagagataccacgtataagtaaaatgaaaatgattatatgtatatctcttctatataaagtgtgcctatataaccgaattcttagtttatgagaaattcatgggtgactttgtatttatattaaaaataaaataggtttattattaaaaataaaaataggttcattagaaaattgaatggatcactttttatttatatata

SEQ ID NO: 305514 - DNA, 2819 bp, Cannabis indica
gccacccacaattatcatggccgtggtggaccatggttttcttttttttttcaattagatatgaaaagcaataaaataaaattatagcatttgaattcatatatttatcaatcatttttatgatgcgcgtccacaatacatagcatttgaattcatataaaattgtaggtccacgtatgcatgaaatgtacccccaagtcctaaatgatgcatgtggagaacagtgaactactaagaaaattatgcaatgagaaagaacaattgcaataataacaactatcataatcataatgtattagaagatggggcaggtagattataacacgaagagcgagataaataacaagaggcgacacatgcacaaaacttttaagctgaaatcatgtgcctttaaagaaataggccaatgtaattggtatgctaccaaaccataacccattgatacagttttaataattagataaatgttatgtttaaaaaaaaaaaaaggaaagaactagtatctcccaaatatatatttttgtgttttcaactttattgcagagaatttctcatcacggtattacaaatgaaatgcctccaaactaactgcaacatatatataaataaattctattgattccgaacagttaattctgatgtacaaagatatttgtggaaaagcaatacagcacatgctcttggttccgcctttgaaaacaagcaaaccaactgttgagatgtaaaggccaatacgccctgttaatttatctgagtgttcatcataaccagcacctcctgttgcagcatgctgcacaatacatatcctgatctatatgccattggacatgtctaactggttgagggatgggaaatatcccaagtcctcatcccaaaaaacagttgcagaagtggcttagaccaaaggtatagaaacaacactaacctccaaaaatttgggctaagagacatcttcctacgtatagacaattttaagcagcatacagacgaaagctctactttatgggggtgaacatacagagatacaaaactacaacagtacaagacctaattgggtcgccaactctggtgttaggctcatcaaaacagagtattgcctgaactttttcttttctttttgtgttagagaaatacttatttggtaattttggcagtttaataccttctctattaagacctggagaggagaaaaatggtcaactataaagtgaatttacaacacatcagagcaccggatacagtaccgatcaataagccttgccacaaggctatcaggttctggaatgagagcagatgttaagctattccataagtgaaatgtcattgactcttccaaaaactttttaaacagagaattctgttcaaatttttcagtctctgttgtcggtgcagtgaagtatctgttatcagctcaaaatgattaaatcatagaagattaaaaatgaatacaagaaacagacacaatgagctgctgaaatagagaattaaggaaaggagagaaaaaagaaatagagaagtaaaagggaaaggagagaaaaaaggcaccacaacacacatatacccatgcacaaacgtgttacattccttaaaccagagatgattggaaatcaaagaaaaagataatttaaaggaaaaaggaaataaatagttatgtaaaagttaaattatacaaatatttgtcagctaccttaatagtcagtcacaaatggtgacctattttaaacggcataatcatcaagcatatcaagcagttgaaagtaattattctggactaatatcgagcactgttaggtacttgaatagtttcaccactaaaattgatcaataactaaggctagcttagtggtgagggagggatgggaaaaagagagagatcatgggtttgaacctaaaaccttgaagctattaagctattaactgattgtaaaataccattacactacacgcaaaaaaaaattgatcaataaccactgtttaattacgcattcaattcattcatcattaaaaaaatgtaattttgaagaaataaagtaaaataaattaccttgttatattctgagagccaatagggaagaaaattggagaatgatgcactctcaactctagctctttaatgggacttctctccctttctaagaatttagttgcaactctagtcaaaagttccgccccattccatctcaagcgagtatcgtcatatgtcatatagaactctttcatgcactccattagaaagcgactgttttaaaagaaggaaacattagaattgaaactttgcaacagtggaatatataacttcattcttttgtcaaataaatcaatgatatacatattttcctcagaaaaaattaccaagtcagcaccgctgctattgctattattatctatgatgggatatgaaatattcagattgactaagtttctacttatgcttataataaataagtataattgttgacttatttttacatagctatagtatagaaaaaaaaaaaaaactaataaaaagaattttttaaagcatttggatatcattgaaaaaaatattttttgtcagtaaattaaaaattatgtaaattattttaattttacaaatagattctcaaaagtaattttgggagaagttacaaatcctaccttcttccaatccaaaaggacttttcattttttattcaaacacccctaaaaggacttttaattctaaaagctaaaaaaaaaagcttacagaaactaaggcaaatctattctatataaagtgtgcctatataacagaattcttgatttatcaaaattcatgggtgactttttatttatattaa

SEQ ID NO: 305515 - DNA, 1745 bp, Cannabis indica
gcatggtgcaattatcccgtttttaaatcgaagttaccattttgagtctgtttggtattttcgttgggctttaggcttttatcaacatttgggttttaagtcgatcgataaggcccatattaactcatcatcaatgtttacttgtttagtagttagtaacgtggcttcctattcttctaacacgacatcgttttactactttcgtccctaacttcccttcctctcctaactaactatcattctctctaggttttctttctgcaaaaatggcgaaaactctgaaccgcatcttttcatcaatctcgaatctatcgaccccaaaattgatttcccccttcgccagatccgattctctgaacccagcagcgattcgactcgtctgctcctcagctcagcaacctcaagaaaacatcgacaaagaaaaaaaagatgattcggaacacggcgagaagaataaagatggtgatgaaaaggatgatggcgatgaacttgacctgaacgaggagactggtgagatcggtgggcccagaggacccgaacccacccgatatggagactgggaaaaaaatggtcggtgctatgatttttgaaatataatttttgtttttattaaactcctctgttgttgttggtcatttttataaaattgaaaactgaataaaatgttgtcaaggtgatataagtttatatccttagaattttgatgaaggagtgttctcaaaatgttcatataaaaaattcattacgaaaacgcaatctcaatattattattaattatatatattatagggtgttatgtatgtaccctatatttttcagaacaattttttagttcctttttttttttttaatagtggtatactttgtagttagttaatacataaaattttgagaaataatttaatgttaaatagtgtatttcacatatttatgtatagtctgtttattagctactacgacataatcagaattaataagttgcttataatctaatatatgcattcacaggttgttgttcagatttgccaatgccattattgataatattctttttttttttttacaagaacattttttataatattcaaagtcatatttcatagactatacaggttcaaattttgacgttgattcaaagttcaaacttcaaacgtatgaggattgagaaaccttttagaggttttggagagaaatagagaaagaaactctgttatttgagaaaatgtaatgttcaatctcaatacaagtaaagctgagtttatatactcagcaagaagggtaaaacagtaagtctaactaatcaagaattagttacaatgataacaaccaaattaatctcttaactaacataactaaccacccagtgtaaatattagacacacacatcttggatacaatgttgttaaagtgtgagggaagtaaggtcttggtgaagatgtcagctacattttgttgagatgaaacgtgaagtaacttgagagtgctttgctggattttttcccgaatgaagtgacagtcgatctcgacatgtttagtgcgttcatgatagactggtttttcactaatgtgtatgactgttgtgttgtcacaatagagagaagcaggccggttgagggagattccaaaatccttgaggagagcaatgatccaagttacttcggaggttgcatttgccatggcatgatactcggcttcagctgaggaccgagagacgtacttgttttttttttgatttccaagagaca

SEQ ID NO: 305516 - DNA, 1216 bp, Cannabis indica
tcgttagcgctcttgaagaaggtttcaaatagaggattgatgtcgtttgttttcaattttggggggttcttcttggtgttcgggatcggcttcagctagatcttatgtgggattaggtttgtagaaagggtcccaatctgggtcaaggggcttcttcgggtctgctccttttcgtctagtcgtcgtggtagatttttgtcctttcgggtaggcgttctcacttcctatggggtggtccaattcagatggtctcatcagatgggtgtcaatggttcgtgggggttgggattcacattggatatctaagtggggatcgtcgtcttttgtcgaatacgcctgtggtggtgattctgttagattttatttaagcttacattaatttttattggttttattaaaatttgagctgattggatagttctttgctgtattagaccatattgttggtgattaataattaatggacttagcatctatgtgtgcaaaatgtaggtgtagcagaagtgtgaagattttttaattaactaaagcctttgttaagctatgctcagtccaactaggattatatagttaagtctactccctataaatacatattttctcatcacaattgtatacttttaataatcaggtagaaattaaaattatttctgatttagagatctcaggaggaagctaatcctcatgcctttgccccaaatcttctgagtaaaggagtcagtagcctccctagaacgactgtttattttttcttattggctcgcatagattgagtctgatagtccatccactcttggaattcacgtcgttgctgtttgaatgcaaagttcacaatgacacgagtttcctccaagttatggtgaagtgtgttggtttgcattaggacttgtccttgcatatccctcaggttctccaaaatagagttatcccccaaatcgactcggggctctcctttagagggctgaccaatgccaggtctagtctctccaagatatgtccaactggtagtctctttctcctgaacattgagcatgactccagtgaaatgggttattgtcctagtaattcaggatttagtatttgcagggactacaggttggttgccttgaggaggcagccgagggttgggattatctaaccttgagttaataggtgcctggacgttgcagttgttggaattatattttaccaagaacttagatctactcacaagtat

SEQ ID NO: 305517 - DNA, 2767 bp, Cannabis indica
attttgtgaatcctatgctaacgaaaagatatgacagctagtgcaaatctttactgggattgctgatttccaacaacttcggaggcaggggaattacaaaagagcccctgcatttttctcgtgacaaaagtaatggtaatcaactatgaataattcatagtgataactataaataaaataaagtaataacaataattttaaatataatataactacaaataaaaaataattatataaataaaatataattataataataatgagtttgaatataataataactcaattgatattaattaaaaatatcttttattcataatagaaatagctaaataatttatacacacctgatatatatttgaaactaaatagttggtccatactatttttataactagaaaataactactcgtgcttagtgagcgattgtgttaaattatctatacgcaacataaaaaagtccaataaataatataatacgtgtcaatctcaattatgattaatttttttatttaattaaaaaaattcatttttacattatataggctgagattgatccatcaattagaaaaaaaattaaaaaaaaagtttttacaacaaaaagtgataaaaaaaaattgtatttgacttaaatatttttcatataaatatatttttatatagtgtaaaaaagaaatatttttcaatattttctttaattaagtaactaaattaaacataaaaatttaaattaatatttatagtttaaatttatttattaactattaattgataatactcattaagtattccatatacatgaaaaattaaagcacgatttaaggacaaatatgaaaatagactacaggttagtttggcacagctgtgctatgagaaaaaacagttgtgctgtgaaaagaaatagctgtagcaaaactgtgaaaaaaaaagctaagttgatagtgtttggtaaattataaatttcaaagtattgtgagttgttaagatctattataatgataatgatagtattataatctaatttattataatcataaatatgcaaaacttattttatataatattttattttttatatatttttaatcttttttaaatataaatttatacgcatttgataaaaataatttatagtatatttttattatgttttatcaattttaaaaatatttagaaactcaagtatataagaaaaattttaagttgatgttgtttgttaataataaaataaaatataaattattttttgtttaaaaaaataagagatttaataattatttattttttcttcaaaaaaaaataattatttattttattataattagtttattttaaaaaatttaacttttttaatatataataaataagtaaatatggttttagtaaaaaaaaattattataattttttaaataaaaatacattttcttttaaaagctaggttgtaacaacttcagcttttaaatgtaacttctcaaaaaaaaaattcaaaaaaattttaatttttcaaaagcggtgcaaaaaagacctacgaacttataaattgtattggacttggacttacttttttaaaatattaacaggactggctataatttattttttaaaaagcacaaataaatacagctaaacacaaacttgtaaccacatcaaatatattacataaaaataaccttttgttactctgttgtgtttcatcccttaaaatgaataattgagagattacataatttggcattcttttgaaaattaaatacttttatgcataaaaaagagtagagtagagtagtactagtaggtaagacataagaggaggatggaggcacctaggagaagatgaagatgaagatgatgagaggtagccagccgataagcgacagggacccagtcgagtagtccggtccggtcacacccggtacgggacgaccccacttgtctcacattcacccttaccgcagcaacgcattacacatgacgatcgacggaccaccaccaccaccactctttctttctacttgtggccaatggccgcgccagccagttcgattccagctctcttggtcagcgattgcttcacacgcgccaacaccaccgattgtgacgtctttcctcttttaattattattattattattattatataatttaatgagtgcattaatttcttttcagtgaaagaaaggaagagagagagagagagtaaaagaaagaaggaaagaccgtatacggaagaggaccatacggcttgtccgacacaaccacgggtacccctgggccccacttcactccactaggtcccactctctctcttccttttttaacgtcccactatttaacctctgtcacggttaaacaaactaaattacattttttccttttcttttggtttggaagaaaacaattttttcttgagtactaataggaggactaaaatacccttgttgttattaattttttttgtttgtttgtataattgccctcactctgtggcaataatcaaaggaaaaaaatgaaaaaagatgatgagattctcgtcagctggtgaagtgaccttattgttattaggtgatgtttggtttattggtaattgtaattgtaattgtaattgtaattttaattgtaacaggagatatgattataggaaaatgtgtaaactgtgtttggttgtatagggtaatatgtaatcatattggttgagtacatgaatcttatatattattttaaaaaattgaaataaaaatatttttttatatatttatttaatgttaa

SEQ ID NO: 305518 - DNA, 862 bp, Cannabis indica
ttaatgaagatgtttaaaaatattatattaaatgatgtaaataaaatataaagaatatgatttatgggttaatgtaaatgcgtgaggcaaaatagataaagtgagattttagtgagctattttaaaagatagagaagagtagctattgagactgctcttagctatatattttacctcaacagttgtgattgctgtgtttagtaatactttttgatgtgttttgcaatactttttcaattagctttttatttttttaatcaaaaaaataaaaatattttcaaaaaatatgttctataaaattatttttactttttgattataaaactgaaataaaaaagaccacattcaataattttttaaacaactttttttttaataatagtctatttgtatttctctctctctattaatattttggatctcaatctcgagcgaggaacccaaccccgactttacaccttacccgaacctcgccctggatccagacttagacccggaccctataaacccaaatctagattcgaattcaagacttgagacccagacccaaactcgcaatcggacctcgaaccaagatttgaaccccaaacccagactcaggactcaggacccagaccctgactcgagacccgtgattcagacctaaacataggacctggtacctggacatcggaccttagacctagacccaaacctgaaccctcacctaatttctctcaactcaatttcttatttctcacttaaataaataaaaaagcaaaagtagttacaaaacacatttttgttttttgtttttaaaactaaaaaaaaatagttatagaacacatttttattttttaagctaattataatttttgccccc

SEQ ID NO: 305519 - DNA, 2982 bp, Cannabis indica
tgtgtttaatttatcgttttataaagttcatatttagggtgtttaaataacatacttgtgtgtagatctaagatcctggtaaaataaatatccaacatcatcccacttgaccttccccaggcgatgtgagatttcatagcttacccggtatttccccttatagatcatgggactactgactgtcacagccttggtcaacatcaccgctaagcaagtggtatccttcatcaataagttcctaatatgtaggtttgggtgccctacaaaatcatcactgataacaaaacccaatttgaaggggacttgctaagttcctattgctttgagagaggcattgagaggggattctcaacagtagtacaccccaagctaatggaaaagtagaggaagtgaacaagataatcaaaagaaaccttaagaaaaagctagaaaagcttaagggcagatgggtagatgagctgtcgaatatactctgggcatagaagaccacgcctcgctccaccataggtgaaactcctttctccttggcatatgggtgtgaggttgtactccccattgagatgaaactcaactcatttcgaatgaagaatttcaatgaagtaataaatgaaaaagcaatggcagaaagtttggatctcttggaggaaagaagagatgcgacccaaatgaggttggcagtaatcaacaaagggtggcacgatactataattcaagagtttgcatgcacgccttcagcaacagagacttggtgttaaggaaagtcctaccaaacactaaggacttggggagcaggagtgttgggaaccagctggaaaggcccctattagttgccaaggtcatcctgccaggaacctgcgaattggctcgcatggatgatatagtgataccaagggcatggaacacaacacacttgaaaaattactattgttgaaaaggtgagttggaagtatcctttagttgtttgaattgttaagaatcaaggaggcggcccgcgaggcagctccactagtttaagtttcttttgtttttattttaacaattcaatgtaatgtaacaagaggtcacccaaatggccttcaacttcttccttataatgaatgaatattgcattgagattgttcaatcattccttatcacatgttttcataataatatctctcttcctttcaaaataatgagagtacaagaaagaaattatgtgcaaaactcaagtgtacaacgccatgagcgacgttacacaattgggggacaagggggagagagtaaaaaaattcaaatcaacacagactagctacccttggttgataatagaaatgcacttactttcccctacaaaggttacttagccaaaagagatcttgaaagacactcttggcattatgctagaaagagagacgcctctcgagcataaacaaacatttacaagcatatgcaatagtgaaaattcaagttaagaggtcacagcacgctcaaagaataataagctcccttacgtccaaagaaaaggataaggaaatgtaaagaggtttagaccactcaaagagtcaatgtccctcaaataaaaaacctgcttaccatagcgggaaaagtcacttggccaaggagtaaccccaagggtcacttggccaacgtcaattacaaatgttaaatatacagaagataaaaagagagttttataatcatccaaagggaaagcataggggtcatcctaataaagctatggacctaaactaaaagaaaagaaattactagtcgttactagtgttagcaccctgaaagcgtttagcttggcgtgatgcttgttgttcctcacggtctttcttgaatccctcaatcatttggagtgtcgtggaacgggtgctaaatttcacatgaggattagttacctaaatggagtatatcaggcgctcaactttttcaacctcacatgcatctctcttcctcttcacagtcttgatgcgcctctctaactgtttaatagtggctttgaggttatcccactcttgtttggtttcacttttgaacttctcatgaaagctaagggaaaatcgaagttatcgggaaagctcatcaattcgaggtgttgcctgcttcagttgagcccgaagttcatctactttgacctggagttagttcacttgagtctgaaggttgttgcactctatatttgagctagccaactcttccaaagctatttggaggcatgaaagtccattgcggttagaggagctgaaagtagggatgtattgttaaatgatagaggtctgcaaagcaagtaaaagtacaagtcaaaaagacatcataagaaaaatgccaatgtaatcaatgtagacactaactcatatagagtattgaagtacaacttcttgatgatcttctttggatgatccacgaagctaggcccagtattgaggagggtatttgccaagatatcgattgtacccactcaaaaattaagccatctaagattgagaccaggcattatcgccaggaccagaggaagacattgggaaaggttagttgacatcgtaggaaggctggagtaagagctcttggttgaaagccttcgatgagacattggagacatagcccaaaccatcctagtttgctctgccatgagaacgatcatcttcccctgagaatggtagccctgtggcatatcatgatccatgggatcactcacccttatatttcccaatgggatattggaagacatagaatcgggctccaccacatcatccctctccccccatcagttggaggggagagggatgaacgtacatcgcaaagggaagacgtatagggaaggtcaaagatgcgcaagttggaagcttctgggcaaataacacaatgcctctctttgaacttatcaaaggcttatatcacttggtcaagaggatttctaggcttagaaggcagtggaggcattgatcctcactttttagtgttggagtaagccctgttaggctttgtgccctaaat

SEQ ID NO: 305520 - DNA, 824 bp, Cannabis indica
gtaattaagttacaaactcgacggtggcaatccaagcaaggacaatgtagtatcacaagctattacaatgagatggtggtttggtggcaagagttggacaaatataatgacgatgtttgggaaagtcaagctaatatgctccaacacaagaagcgtgaagaaatggatcgtgttttcatgctacttgttagaattaacccgaatatggatgagttgaaaagaaggattcttggtcgcagacctttgccataaatcagggaggttttctccgaaataaaggtagaggagagttgccaaaaattcatgtccaacaatgaatcatcatccattttaggtaaggaagcttccactttatttgttaaagaagttgaaactaataatgacaaaaagaagaagccatggtgggatttttgcaagaaggaagcttccagtttatttgttaaagaagttgaaactaataatgacaaaaagaagaagccatggtgtgattttcgcagaagcattagcacacatggaatacttactagattttacatggaaattcgcctggaggtaagccaataagacttggagcgcctcaattcgtggctaaatctacttcagaataaagtgttaactcagggcagtctcctttcaccaaggaacaagttaaacaattgttgaatctgttacattctaaatctcagcctttcttgtttccttgttcagcatggtaatttgtgtttcttatcttcttctcttgtttgtatccaacctaaagttgggaatattttaccaggatctagatttactaacaagtattttgattaacatcctaaatatga

SEQ ID NO: 305521 - DNA, 1081 bp, Cannabis indica
aaaaaaaatatatatatattcacgcttttttttaaggcagtaattaaatattctattaaaataatcgttagtttaaagtcaatctctaacaacttatacatatatttgtagcaaaaagaaggctatgatttggattgattaatttaagaaaattagataacaaaacttaatattaacctcaaacactataaaaatgatattgttgtgtgccagcaaaaatatgttgctggttaatatatatggcgcgcgcgcactgtcaacaaaattcgtcggttaatatagattccaatatttatcgtttcactagagttttgtcaagtttcaccaatatttgttttggcaaaaatatgaaaaggataggcttatttatttttagagactcctaaacattgatatattaactagaaaaactaactaattagctaaaaattgttaaaagataatattcataattttctcaacaaaagtttgtcatcacgaaatttagagataattcgatgaatagtgtgttttaaaaaatccatatatcaccatcaatagaagaagaccaacacgagtgaaaagaggcagatctacatgctccatacgagggcctggcccccccttttttttttcattttcttagttataattttgttaattttttttttaatttttcattaagaatttatttattttcccgtttaatttgtttttttttgcactttggtccctttactaaaacttcatgcctctgcccctatgtgtaaacttggttctttttcttttcttattaatttattagagatgtctccaattttttttatgcccccaaaaaaaagttgtatcattagaaattctctatccaacttttcatgtgtacgttaaaccacttgtgtgaagaatcaagatttcttgttaaaaattattgtgtgtcatgctgtgttaaaccaatccatgcaaatttgacacgttaattgatttttcatttattaaaaaattaactatctatacaatttgtttcctcttaaaactaatgctcaaattaattgacgtgtcacaatgagattagtttaatacactataaaatacaatcttttaa

SEQ ID NO: 305522 - DNA, 3427 bp, Cannabis indica
tggtgagtatgaggacaagggtgggaaaataaaatgccttggtcagctagaaatctacaaaaggtttgtactcaccaccaacatcagcttgaacactcttaattggcaaaccaaattatttttccaccatacttttgaacttaataaagctgtcaaatgcctcagattttagtgttagagggtatatccaagtgaatcgactgaaatcatctaaaaagtgaatgtaatatctatacccatctttggaaggttcatgggagggaccccacaaatcagtgtggatgagttggagaggctgagtggctctttttggggaatgggagaatggaagtctgtgatttttgccttgttgacaggcatcacagaactgaaattgttttattgtgccactgtggggaagagaaggcagtaatttttgtaaagtggacaatgtaggatggcctaatttgtggtgccacagattaacatcagataatgttgacacatgcaagacagaatgctcagtagaaggaaaagatgtacttttattacagtaatttgtattacagagatggtgtgaagtatcacacattttggtacaagtacatttattattggaactaaattcagatgagtcaatctcagaagtggccaagtgacactgcagagttgatctcgattgagaggagggatcaccaagaaggtagagtccatctttagctttctctttgagcaacacagactcggttgtcttgtccttaagaaaacaacagtttttgtgcaattcaacaaaaatgtcattatcgtgagtgagtttagacacactaacaaggttctttgtaatagaagggacagtcaagacattatgcaaatgtataggacaagctttattgtatgatggaatagaaacataaccagtgtgagagatggataatctcttaccatctccaatagctagagcctcaagaccatgaaaaggtttggattcatcaagattgttgggatcaagagcaacatgtgtagtggctccagaatcaacataccaggagccatcatctccaaaatcttggatcatggtggtgtgatatgcctgtggatcacaatcaagatcaatttcagtgagataggcacgattagagttgttacctgccttaggtgtggtccagttcttgtcgaaccgatagtgacacacagcagcagtgtgtcctatcttcatgcacacttgacaacaaccctctgagatggaaatctgtgatccgcgaccacggcctgagaggagcagagagtttgttgaagtaggattgacaaaagatcgaacacttcctgatctatttgtgccaagagctaagtgtgcttgcaatttgacattgatatcgttcatggccagatgatgttcaaggcgactttcgtgggacagcagtaaggcctgaacctcttcaatagacaaggcatcgcttcttgaggtgatgccagaaacaactgagtcaaattcgggtccgaggccatttaggacttgaagaatcaaatcttgatcgtttacaggagaccctgctacggccagagaatcagcaatactttgaaccttgtcaatgaattcagaaatggatgaatttcctttgtgaagatgggagaattgtcccttcagttggagacgtctagctcttgtttgagaagcaaatttttgttcgagtgcgcgccagaccgcgtaagagctatcgtaattggcgacagaggcaagaacagtttcagacatggaggatcacaaccaggagagaagaagctgatccttgcgtcgccattgaagaaattctggattggaggtgccgttgagcagagtagcagggggaggaacaccagtgaacaagatctcatcgagatcttgtccaatgaccgtgggaataacctgagacttccaagagaggaaattgacacgatcaagtttgactgtaagagacgatgggagagagttggagaaaggattccaagatccatgaacagcagcagtggcaggtgccggaggagctcgatttgcattaatggtggcaggggcctgaggatcggtggttgacgaagacatagtctagagtcaagactactgataccatgtagaggagagaaaagcagagaagaactaaagaatacaaagaaagagctcactttattattgattatgcaccagtatttatacagatgaaaaatacaaacagacaaggcaatacaactaactagtaacagaaataacaaactaactaacacctaatcacagtaacagataactaactatgactagatacaatgttaacatacaatacaagattgtataagattagagacacgatgaatgattagaacttttaactatctttatttatagaaattcatcattcatcacacaatagacgtcctacgagacttgatcttagtcctgaagtgacacacatatatatatatagtcttataatttttgacttatcgggtaaagtttatgaatgaaaacagagacttaattcctgatatgcttgagttataggattataggttgccaagaacatattgcacagatatggaataaactctttccttaattggccagattaaatatttctttgagtattgatagcggtacttgaacataaagcagtcaatttatattagagaataaaaatttcatttgtatttgatttatagaaacgttcattaaaatatcaataacactatttgttgaacatataattagagagattaccatacaaaaatacttaactctaattatgaaatatttaatggagaatcatataactcatataatgaatatatcaatagaaataaattaatgtgattaatcttctaaataataatagatcgtatgtgttgaaagtataattataatttaattattagtggaataacatcataattaataaattaattgttgagccaagatttaccattaatttattagagcttaccactacaagtaaatctgtcccggtacataattttccctcataaaaatatatctataaaagattgtatcatatttttattttatttattttttttttaattgaagttttgaattttctatattttttgtaaattcctcgtgtatttgtgaagcccacttggttgttagcccataataaacgtaaaaattcacaacagtaatttagcgttatacagtacactaacgttgctgtagaaaataagaaattcagtagcattaccctacaagtacaacaccaaaatgaaattattttaatttgttcagcgtataacccatcaaaccgaaggtaaaaacaacataaacaataatattgttttacttattatcgatcatccttacaaaagaagctcctccacataaatcaaaggtaaaaaaaaaaaacgaaaaaggaaaaagtaaaacgaaaaaggaaaaagtaaaaagacgatagaaacgacctta

SEQ ID NO: 305523 - DNA, 2821 bp, Cannabis indica
tccgcacttagtgcggattggatgttgttagaccaaaaaagtgacggatttgatcggatgaacaccctaatacacaccataactacttcatttaggttaaattttttttttttaaaaaaaaaaaaaacttaattaattttgtttggttttatgtttgtcataatggtgttagtgtttatctctaaatatataaatacatatattttaatatgacaagaggaattcacaatgacatgagaaaacacaccttagtacaaaatatatatagttattatccaaaactttaccatatatatactttttatttctagttgagtcaaagcacatagatatatgttatataactaaaatcaacatgttgttgttgtgattgtaatagcattaaatagctacgtcatcatcatgatctttttatttaaggccaaatgcaaaaaaccaaaactctcttatcttattattattactacctacgtcattttgtgttggacttatacaatacaatgtcaatcaacacacgtaaaattattaataatcaaatcaaataaagttcacacaacatattgagtatagtagtgtttaataagatcatggtcagccttaaattaaagtgattatttcgcaaatacacaccaacaaaacaaaaattacaaaaatacaattttataaaattttaaatatttttacggtttttttaattttatttataaaaaatacaatttttttatgttatactcttgttaatttattgttgattttttttatcgatatgttattttttagtattgttttgatgttatttaaatgtgattttcatgttacttttagtagttttcttgttgttttcgtattgtttatatggaaaacgtaaaaatgtaaaaaaaaaaaaattctttaaacgtaaaaatgtaattttttttacaaaaaatagtaccttgtgtaattatccctaaattaaagtaagttaggcctacgcttaagatttacttttataagaagcccaaataaaaataaacttttaataaatatatatattaataattgttaaaaatattatttattttataaaaaggttctaaaaaagttgttttttttagggcccaaattaacttaggtcagccttagtttttagtactatctaaatgtgtctctttacaattagtttgtgatacttcttaaaatttattacactatacgagacttgatacttaaagtgcattaataacaatattaacatgtaaaaagattgtagatatcccactagtatctttttaacaaatttctattggtaagtttactctatatactatactataatattatacagtgtaaaatatcagaaaaagggggtgtgattgtgttgataactatttgataggaccactttattatttcttcttaaataataatcaagttaccttatttgataagagcccttttgtctttaccatttattattaactctcacttgcacaagttttctagttaaatgggccccaactctcctagttgggccaacagtgggccccttcaaaaacatgttaattttcagaactcgtcctccaattattggtgtgtggacaccacatcccttcttcttatttctagtcccaacatttttattttcttttttcaagtaataacagaagaaactaaataaggtacccatgccatgactgaatagaaaaaacaatatcatagagtagacatggtgaatgaatggccctttgagagacctgaccttttgagtccatgaaaggagtatataaatatatataaatatttatatatgtatatatattattacactaggtctcatcaaccaatcaaacggccaaatctacttttcaagctttcggtgtcgagtttgaccaaaactaggtatagctacttacaatttcccaaaacctgtatgtatataaatactccattatatattgtagccaagtgtagttgagtaacatgattgttggttaagtaatcaagtataagatttgaccatgcaaattaaaatactatagttttcgttttttggaccttattaaattttttagcattactattttttttaataatttctttaccattactattagctaaacaatttaaatttgatgtgaataaaaatattaaacttaaatttaattgtaatgatcatagaatttgtgttttcaagtgaatactattttttaaattaaaatagtagtaatgttaattttctaacacttgaatttcatatttcacttcaagtctactccctccgattttattctcttcaattcaaactcatataataaatatcctattaggtgtcgttggttggaaggaataaaacatagctagaataagaatgacattccaatctatttcattttattaccttcaaccaaataccacctaaagtaagtatcagtatcttgttcatgacggtctaaaaacaatatgagatatcataattaattattactaaaaaattgtcaaccattcgcaagacaataagatcatcttcaatgggagatgtaaaagtttagctatattttgcacaaaaagtagttttgtaatatttttacataaacttttactgttgtgctctaatacataattataaatcttgatgtaaatttattatgttatttaatgcttacttaataatttattaaaaaatataaaataataataataataataataatacaaagttaactgtaaaatttaatagtaaaataataataataatgcaatttatttaacattgtaaaggagtatattagctaaaatttaataataaaatattaaaaatgacataatggtaaatataaaagta

SEQ ID NO: 305524 - DNA, 3570 bp, Cannabis indica
attagaggccaattctatgtacatgtatatattattgtttccaagtacatattgatttttgaattgtttcctgcaaaaatttcactgtcgtcaaggaacaaatcaaggataaaaaagtaccactcttccactttcaaaccattgtcttcctgagagcttcttatccttaggtgctgcaagcgcagcctcgggcattagcctgaaagttagaacacatctgctggtgaaggctgaacacaacattgtacagagttatctgctttttgaataagctaataagtagggttgggaagcatcaatagtgtgactttaaacaagaaaagagtggataacaacctttccaactggaagtatgcattacaatcatactcgtacttgagtttgtgtactaaaccttataaagaaattgtataatttacttacttagctcgttcgagtgctaactccgcttcaaacctctctctccaagctaggaatgtttcaactgtcactggttcaccatgagggatgattacctgaaaataagaaaggaaacataaagaaatgagcaaagtaactcctcttttaactaaaaaaacataacaaatgaaacaccttaatgtaatataaaacacttccacgtacaataagcacaaactcccaatgaaagttacaaatagtgaaagaaaataagtaccaattccgcaacatgtcaagtttaatttacatggagacaagcagcttgcaaatgcttggcatgcttttagaaaacatattttggcttttaaacctcaaattttgattcaagtaatgatgttaatcatgaaagcaaacacacagagtcaagtgacaacgctttttctttccctttccgcaatcaatcaattagtacattgcatcaaaaaggttagcttagagatgaaactcaattcttcacacacaattataaactgaaatttatagcctttaagataaaagatatcaaaatgccaataaagaacatacatcgtctttagttgcttcttctgcttcggcattatcaatgtcagtttcttgagcaaatcgctcagagagccattccttagctgatgagacaagggtatacatcatggccataccaagattttcagttgcctgtagagttagtatgacattaagtcagccttatatgaacggacccaacatcatgtcttacaattgttcacacttacaaagagtaggaatcattactagcattaactggacaagacaaattttataagaaaaatgctttaagaacagggggcagtgcaaaataaacctcttgttgaagcttttctttcaatattctaagatcgtcaggtcgaattcctcgtaaactggatggagaaaagtaaataactattattgcagaaaccaaaatatgttctcggaaatgattaaactaaacggcataagactgggagaactgatttatctgcaaaataaaacattcctaaaaagagtacagatctaagtcgaaaccagtgagccattgttcctccacttctttaacaatgtgaacattttccctatttactgtgtgttgtgtatatttagctgaaacttttgtatattttttagaaagcatgggttctcccccttaagcaactttcaattgatatactatctatatgatagataacaaagttacaagtactcttacaaaattaattattatttttcaatcagggctatttgccaaaccctacaacatttgaggagagaggaactataatctctgtgtaggtaccactcaatctcagaccttgtgggagcataccacaggcctgatcgtttaggcttaccccctctgaattacaaaatttatcatattagaataagcatgacttgagcagtcagaatgtaccttgtaagatttaaaagtggaggttcgtcaggatatttttctgtgtgcgaaaaaatcaaacctagctgaactgcaacagaatatttcaaaaccacaaggttaaagaaagtgtaatgattcaacaattagaagaaaagagctagtttaattttgtaagttaataacctggagaagattcaaaatctgcttcatcatcctgttgaaatagagcaaagaaatatttacatataagaatactcattttcatgccgttttaagtcatattaggaaagggccacaattaaatgggagttcatagttgaaaaaaacacaaataaacaagtataattgagaagagtatcacaaattacaaaaaatttgatagaatcattctaatcacttcctccaaaaattgtgatgagtcccaataacagtgttagtacaactataaaaaaaacatagtgaggattacatacctgtggaaccacttttatttggaagcaccggttggaagtatttaatccactctctccagagtgaatttctagcatgaaaaatcaaacaaaaataagtgagcagagacaactcagtactgggaagaagaaaatggcaagaaattgcaatcttatatatatgaagtaatatgtaaacgttaaacctttgaactcatccataagaattgcttctaatgcttcgatttccatctcttgctcctgtgcatagtctgtagatatatagttcacagcaactaaatgtaagagcgtccaaaattttaagaacaaacaatgaagggttacatctaaactcaattgtataccaatcacttatttgagcaaaaccttaaaagatgaattagaattttaaatatattttaagtttagcacattggtatcaagctcactgataaatattcagcactctatccaatattcagctgtgtttgctccatgtgggtcagaactgggtttggtgctcaaggaattcaactggttttcttaggtgaaaattgagcatggacaactatttctcagaggtcatcatagtccaaacgactatataaacaaaataactcacgccacacggtaatacaccaattgatatcatacacatatgttctagaatgattgaatataaccacgcaaaagattaattaagaagcgaatttcaaatattataattacaaaacaaactcttttttttatcaacctagatccataaatatcccaacacaacattaaaaattaaagtaacaaatccaattgcactttgcccctcaccaaccccaactccatccccaatcccaaccccaactcatacagatgaaaatttagaacttcaaaacaaaatgttcttcaatagattgagatatataagcataaattttcacgccttccgtaaaatcaacaaaatatatacttgaaaggaaacccctttatttcttgatcaaccgaaattgaagtacttgggaaattttttttttttagaaaataggcatttgatcaattacccgtcatggttgcgttgcaattcttggattgagctcttcagttcagatgaccgaatttgaaattgagtgtcgtaatttcccaaacaatgtactgtcttcttagccaaaaacactcctccctactctcccaagtcccaactgagcaaaccctaccccctctcccctccgtatcaaaccacgtcgttctgttgtttttttttttttttttttttctctt

SEQ ID NO: 305525 - DNA, 1556 bp, Cannabis indica
gctgaattgaattgtgtagtgggaaggtttgcattgaaaatgaattttgagttcatggtaagactgtggaccaaggccccagagaaagtcagcactctagcttcccagaagtacctgatatcaactgaagctccatgaacttgaccttgatatctctaaacctatctgaaccctgataggtaagacgccggacgaaatgttatgaaactagaagtttaagttcaggagccatctctaaagaatggaagcaaacatattaaaaactgaaaaaaaaaaaaaaaaataattgcaaactacgtcgcaaatatgttgtgataagtcgttaaaataacaaatccaatttagcaacatattcatgacatgttaacgacatacatttaattaataagcaattgtaatgttcagtagaattttgcagtatatatctggcgatactattaacgacatctcatgacagcatgttactgaacatgtcgtcaaaagtcgcaaaacgtacgccatatgtcgctagttgtcataataagtaaaaccataacaacaaatattaagaaatatcctagaatattgcgagatgtcgcacaattgatacaaactgataaaaataaacaacgaacatagaagccattggggacgtaagtaatcaaatatatcgtgagacatcgtaaataatatcgctagacattgtaaaactacaacaaacaatcaaaattccaaaagctcatcaaactaaaacacgtcgcaaaatgacatcgcgacatgtcgtgaaacattccataaagacaaacatctactgcaacttgttatattcaaaaacaaaattgaatgacgtcacaaataatgttgctacacgtcgataaaccacaaaaaaccagaacttggacaggcatcaaagaaaatcaaacaaaaaacaaatttccttacaatcaaacaaatttccttacaaacaacaaaacaaacctgacaactcattcaaaatcaaataaaattttaggtaaaataccttttttgcaatctctaatgtgggtttcgcgattcgagattgggtttagcgatttggatctgggcttctaccatgggattctgtcaaggtagttgggtttcgtcggtgatgacagtggaggtgatggggcggaggttgatcgtgtttggtggttctgtcggggtgggtttaggagagagggggggagttagaggaagagtgtgatccaaatgaggagggtatttttggatttatgggtttttggagtacatatgttatgtagagtggaatactaaaagaccttctcgctattttaagcatgcattgctaaatttttctttttaagtaattatatatagtataatttcttaatgtattgtaacgccatatcccataaagacgctatgtgtgtgatttaatttgaaaaattattaattaattaaatatataaattcatggcattgtaaccttttaaattcggggatctccttttaaaaatatatcaaaaattgtcattcagtattacattaaaatatacttgtaactcaaaagtgctataaacaaaaaaaaaaaaaaa

SEQ ID NO: 305526 - DNA, 1909 bp, Cannabis indica
tttttttttttttgcaaaaatgatgtatttttgttgtgcaattctttacaatgagaatgtttttgatacccaaatttggaaaatgaattcttttgagaaaaaattgccataattgagttaatattatgtgaatgtggttgctcttgttcatcaagtgtttgtcaaaaatttggttttttttttttttgcaaaaatggcactttttattgtgcaattattgacagtaacaatatttttgatacccaaaatttggaaaatgaattctttttattaaaatttccatgacagttagtatgtacatttgtgaatgtgtttgttcttgttcaccaagtgtttgtcaaaatgagtttttttctttcagaaatggcattttttgctgtataattgtttgcaaaaacagcatttttgataccccatatttacaaaacttctcattttataatatacgtacatgagaaatgccatgaaaaatatatggatatattttcagaaatgacatgtcttgtagtacaattcttaacaaagctgctcattttgataagtttgtttgttagaataaatactttttcaaaaataccatttttctaaaactcatttcaaaattgccataacagagttaaacaagaggctttcagatatgatcaaggaaggagataacaacaacaacaacaacaacaacaacaacatggtacttaaataccaattgggttttgaagatcttgatgcattagtctcaataagaacagatgaagatttaaagcacatgttagatgaatatgatcgtcaattagagacaactgaaggctcaccaaagcttcgtactttcttattcccatcatcaccacaacaacaacaacaacattctacaatagactctcataacaacaacaacaacaactcaattgaacaacgttatattgatgccattaatggtgttgttcgtataaacaaaaccaacaaacaacaacaacaacctcccaatattgttaccactttcaccatttcagcctgttcttcaccaaactcaaactcccctgattttcaagccattaatgaaggacatgagatcatgttttcttcgaataattgtaacaatttgcatagggttcaaagctctccaagtctctatcgttcaaatagtcctcaatggattaatagtggttatattcctcaagcttatcactatggtcttcctcaacaaaattaccttttggatcttcaaaaggctgcagctagtgagcggctcgccccggcgttgtccatggctagaggtgagtttagaagaggagtttttggtcatggtggtggtggtgttgttaggcatgatttttgtggttatggtactaataattttcatgggattgatcatagagatgatgttagtcatcctaagagtcctagaaagaaattttgggagtagattctttgttttgttccctttttgtgtgtgtgtatatagattgttatttcttgtttttgatttttgtgtttgttaaagtttttgtgtgatattctatgtggtgttatgttgaatcaattccattaatgaaaatggtgtgtttggtgagtttgaatcacaagcacaatgttcctaatagttcatttttttgctcttctactttttatttttaacaatgaataattcattgaaaaaataaatcatctaattaaacaatttgttcatcttaagagagtatgtatagataatctatatgtagtatattggttgttcggcacatctaaaaatctaaataacaaatttactaaatcctcaagcaatcagggacgggcttagaaatattagcaaggaaggacaataacataaatattaaaatattaatttatatatatatttttttttttagacaaagtgatttagaatcactcatgaatttacgatgcagacatc

SEQ ID NO: 305527 - DNA, 2494 bp, Cannabis indica
attatattgaaataaattttatttaagatataaaattttaacactatattcatatataaatatatacagaatgaatgtatagatttatatatatgagggaaatgttgaatggtgtcgacgttcaagatatcctattggcataaataataagaagtgtttggttggttaacttactgactgttcaagtaattatcaaatgatatatatataattctcagagccaaagcgggacaaagtgatgaaatgaggaattcttgttcgcttatattcccaaaacacaatgtgctcgtaattaccaattgcaattattgacatattacacaaacatgagttatctaaaatctcttatccttgtattcttaaaatcttgatatatctcatcttccattaaaaaagaataagcttttgattgtctagtgataaccaactaaccgatgtgtcagttggttaggatttgttagtgttagtcaaagctactgttagcttcttgagtttgttgttataacagaatgtaattcttgtgtgtatataaacacttaatcaatcaataaagaatatgagctttcaattgttcttctcttccaaaacacactctgttctttctccttcttcctctattttctttcttcatggtatcagagcccttgactagtgccaatgaattcctctggtgaccactcgtcttaagctaaagcctctgataccgctgttgtgctagctcagtccttttcgatggtagaaccatggaaccccgtctcaaactctctaacagctctcttaatttgaaactggatcacacaaatttcctttcctggaaatcgcaagtcatacctactgtcataagtcatgatcttgataagttactcttcagtaataatgctcctccttcgaagttcatcaatggtaatgacaatcccatgttcttacaatggcatcgaaggatcaactattattgtcttggctccgatcttcaatgattgaaggaatcttggctacaattgcttgctattccacatcgatttttttttggaaggctttggaacaaaaatttgcaagttagtccaaggcaagactccttcaactcaaaagtcaattaacaaatttgcagaaaggtaacttgtccatttctgattatgttgacaagatcaaatttgtgtgtgattcttttgctattgctggacatcctcttaatgattttgatctcattttacaccttcttaatggagttgttcccaagtttgattctgttgtgtccaatattacttcttaaagtgaaactctttcactggaagaagttcaagctctcttgatgtctcatgagtcaagaatagaaagacactctactatcttggatcttttaacaaaaatgacaactaatcttaccctggatcaagaaatggaacatacagatcttttaatggttcaagaagaggttaaggatctaaaaaatgcactaagatttcctaatcgtggaaatggatctcgacctgtcaacaataacaaacctctctatcaagtgcgtatgaggtttgggcacactgctattacctgtcactataggtttgatagaaattgggttaccctaaaggcttctattacttagccacaagccaatcttacaaaacaatctcttgactatgatcctcaggcctttgttgctcaaactgtggcagattttggtgatgatgttgtgtggtatgtggattcaggtgcaactaatcatataacacactccatgaaaaatcttgaatctgtcactccccatactggtcatgaaacaattgctgttgcttatggtaagaaattggttaattctaacatcggtacaaccactctttccttaaattctcattctttaaaatctaaattcagtcttgcaaatcctttttaaaactaaaaacttggttagtgtatccaagcttactaatgaaaatgatgttttcttggaattttataaaacatgttgttttgttaaggataaggaaacaggggcagtcttgtttaaaggaaaaataaaagatggtctctatctcctaggagatgatagctcgactctttccaacacagctctgcaggtgcatcttgcaactttagatattcaatccaagtctatgttgagtcattctaagtcttgtaatcagtgttgtacccaggttgatacttcaacctttttttgtactgaacagaataataaaaacccttatattatcttttcagttgtctttaattctactattttgctttcacaaactgataatgacataaatttttggcataataaacttggtcatcccgctcctcacactctaagcaaaaatttaaccaaagctaacataccatgttcctttaagaatttaaaattttgcaaagcaagtcagttaggaaaaagtcataggctgccatttccattgtctcaattcagagcctatcaacctcttgcaatggtgcacactgatttatgggttccttcccatatttctgttgggttttgtgc

SEQ ID NO: 305528 - DNA, 790 bp, Cannabis indica
ttttttttttcacaaaaaattccaacaagagcaaacccaataagaaaatgctcaaaattaaataccactgataaacgaataactatttcttgtcacaatcagtgaatcaaaatagacatattttgatgaaaattagctaaataataagatttttcttgaaagagtgctcacaataccagtatttgccaataagtagtatttacatatatataaaagaatcatgcaaaattaaaaaatttactgaaagtgtttaagcaatttgaataaataaatttacatagggagtgtttcaaaagaggtttgtgttacaaatgagttttatttttcaagtttaattaatggtattgttaacaatttttgacactttcatattcccttacgccaagcaccctctaactcaagttcgaccttgagtacaggcggactaagcctgtatatagagcttacctagctttagagtcaaaaaaattcctcttaaaaatatactttttttttaactgaatttaaaaaaatatcactttttttttaaaaataaaagtctaaaatattatttttcttataaccaactatattttagagttgggtcctcctctaactttattctcttgaagcccaactcacataaaacatatgacatgtttactaataagtaatgggaatcaatggtaaggtaatcattctcttacatttgtttacttacattatttaaattaggaaaaagagaacttgattaataagggaaaaaagaaatgaaaaactttccccaccaattttgtaaggaatgtcatta

SEQ ID NO: 305529 - DNA, 1764 bp, Cannabis indica
atatatatattaagatacaataaatctaaaaataataaaaatatgacaagaaactaatcaataaaataaacaattacgttaatttcttggatcttagtccctgccctagccatacatcgaattcagtttccaaatatggatcaataggttcaccaattttatcatccaacggacataactccgaaacgtatttcacaattttgtactcagatccatcaggagattcagatcttgaatctacattagcctcaccaaatcctagttccataaatgtagactttaaaatagctcatctttctatccctctttctagaaactaaaattagagtacccttgaaaataatgtaacaaacatcatttgcacccaaatcatcacggtaagaatcaccagcaactttgccagaagattgagcctatgatacaataagttatgtcaagatacacgtacaaagaaaaaaaaaattacgaatgaaagattattaaaacaatgccaaattaacaataaaaaaaaactatattaaaaacaatatcttcttttccacaccttgaacaccagaagacatggtagactcaccaacaataatgaaagaacactccttctagaacaaaataacttaattcatgatcataaagaatatcaaaacaactaaaataaaatcttaaaacaaacctaaaacaacaataaaacaactattaaaaataaatgccaacttctcaatagcttggacaccacaagccatagtagcaccaacatcaacaaaataatcatcatcctttgaaattaaaatcatgcttcaatacatacaaaaacaacttaaaaataaccaacttataaaatactaaaaatcaacatgccaaagttgatcaataagaataagcactaacctcattcatattttgcaaaatacctacatccaaaaccaatgtaaaatcatttctcattctttcggtagcaacatttgaatctttcacaatctcagaatccttcccgtcatccttaacaccaacattaacctcacctttctctgtgtcttcatgagcaaactcaacatgtccatcatcctgaccgtcctcagcaggtacattatcctcaccaccctcttttacattatcaccaacctcattcatatcatcataatcttatacatcgtccccaccatccttattcgcctcatcgccatctttgccatcatgatgttttgaatcatcaccatcctcatgtctataaccatgaccatcatcttcagcctcctcatcattaatgtcttgattatcattatcaaatgtgcgaagcacatcatttgaattctgatcagaattcaaacgctgtcattaataaataaaaaaattacatgaaaatataaaaataaaaaagcaattgtaaaacaacatacatacatacattcaaaaagatatcaatttttcggttcaactcagccacatcaaaaatgataactttctgctggctaagaaccattgaaatatctctttgtaaatcttcatattcaatatgagatacgaattcataagccttagaggaagacgagtcaacatcatcacaatttgtggaaacatttagaatggtctcaaattttcttttctcttcccctttggtgaacaagtcaagtgtttcctccagaaaataataaaaaaaattaacttgtctttttcctctgtaattggacaaaaattattgagttcaagctacaacaacaaaaataaaataaaaatgaaaacacatatcaataaataaaaaaaaaaaaa

SEQ ID NO: 305530 - DNA, 2502 bp, Cannabis indica
gtgttgaggtatttgacctgtttcaaaatccataaattttccgacatgtacacccacaaatttcctaatatttggccttgtggaattctttcaaatgtcacgttcgggcctgtagtctcttaaaggtcgttcgttatacccacactttccaggcccaaacgtgaggagggtgtatagagttagtcacacattattaatgtgttgaaataaattgtgatatataagatgaatggactactcctcctattgccaattagttttggaatagaacctcattcatcttatccctaaattctaacacaaggtgatatattattgatcaatatcatattggaacacataaaacagttctttatcatatagaagggtcttcttaatttgcataaatcaattgctaaaaaccttattaataataaccaatttaatctctgtatgatgccacagaatcaccacatttatttttccctacataattttttataactaattagtcggaaaaattgatgtatcaaattttaattttctataattaatgtgcgaaaacgtgattttttttgcttttattgcattaactaaaaatttgaaatggaaaaaatgatgaaggctttcaattgttcggagtattttatacagttaatcatggtatgtattcacactcttagatttagtctgatgattaatgggaaaatatatgattattttttaagctcgaacatgtctcgagcaaagagacccaatgtctccattaattgttatttgttcttgtatggagtgcttgtcactaatcatgatgaaagttgggagctgagaagggtttaaattccatgaaggatgtcgaggcttgcaattaaatcatttgtattttgcagatgatgccctgctattttgtaatgaagacttcaaatcgatctatctaatgctatagggattgaaattattctctcaatatcattaggtctctttctaagtgaagctaatacgtcagtaatttattgttgtaggatggaatagagggagatatagagagtcctgaatgcatttagatttatgttaagtagcatgccatttaggtattttgggatctcgatttatgttaaaagactttcagctaataattgtgcaggtctggttgagaaaatggtggtcaggatttcaacttgagttctaggaatattttctatatgtaagaagaaattataatcaatctgtgctagttttgattcattcatattgggcccaaattatgctccttcctaagagaattttgaagcaaataaaaaatatatgcagagcttttctttggaagggagtgacagattattgggggtcaggagttgtttcttagtcaaaattgtgcaagccaaagaaagaagggggattaggattttgaaaggttcttcattattagaaccaagcaactttgggaaagtatgtatgggcggtagcaaataaataagacaatctatgggttagatgtaagcataatgcttacttgaaatgaagaagtcggtggattatgagtctaccaatcaagaaagttggtattggaggcaaacagtgtgagtaaaaaataaaacgaagcgatacatgactgaacagtaactgaagcaatggaagtactctattagtcgtgtttatgatgttgaacctagtaacaaaaaatgttaagtaatatgcactagtgtgggatagatttaatacccccaaagcattgttttattctttagttagtgttgcttgatcgtttacagacaagggaaagacttcattgtttcaatatttgtcaagaggaagtttgtttagcttgtggactgaatactgaaaatatagatcatttgtttatttttgaatgtatctagctagtagaagatgtctatatgagattagaggttggttggcgtagttctcatttaagattaacactacaaaaaatattatttttaatcacaacaaaatttgtgattaaaagtgaaaaaattatgactaattataaataattatgctcatgttgtgactaaaagatccgtggctaaagatgttagttacaaaaattataattcgttgggactaaatatatttttaatcacaatagttattgtgactaaaactaaattagtaacaacttgtatctaaatattgtactatgttttaatcacaagtaacatttttttacgactaaaagtcacatttagtcacgaaaaaaattatgttatgcctaaaaaattgttactaaaggtagcagtattttgtagtgtaagcttgggtcgctgctgaagtggacttcccgaagatgcctatctccattcaagaaatttttttttccatggctattgctacaatgttgtatcatgtatggctgaatcgaaacaatgctttgtcgtagcagaaagtgtctacaatacctgttcttatacattgtctacaatacatagcgataataatgtcatcaccatatgtgtaattcttttgggattatttcacaaatacacaaaaacacaaaaa

SEQ ID NO: 305531 - DNA, 2295 bp, Cannabis indica
ttacaaaattataacttaggtattattatcttaaaaaattaaactgaggtatttatttacaactggaagtaaaacttaaatatttatgacataaatattatgggatttatttttaaaggaaagtgttcttttagaacattattgtgagtggccgaagctccaagttgccaaagcattgccatttggtgaaattttgtaaaataatattttcttgataatatttgtcttgtgagtattttccacatatttatatagtcttggttgaatatagttgttccaccaccctatcttataaaagggcctatttaataaagctgtagtgtatgcttttacctcattttttttttcttggatagaataaaatagaatgaaaattattaatcaatggataaaaattcgcattactcttactgaaagtacgatctaatatgaataagtgccacgaacaacacaatgtgcagtcttattcgcagaacgtttaacaaaataaatttaacagaatttaaaaaagctaataaaagcttacaattattcactaaagaaccaaacgaagagggtatttttaccactttgaattgcttgtacatcaactaagcaatcagtttcaacaataacattttgccagcacttgcatttaattcaattcaaagtttccttaaccctaaaaacctctgccatagttggttgtctacgaccaactcgacttacataaaatgcttttaacaatcagtcatgacaatctcgagctaccctgcttgctctaaaattgccttatgaatcaacatttatttaatcatattcaaatttggtttagtccaatgccccaaatcgttattcaccccccatcttctttgattgagcacttcgctattgattaaaaaccactctaactgacaatataacctctgcaatagaagtaaatttttgcttccaaaccatctcatcccgagccttccaaattgcccaagccaccatagttaattcctcatgcacactcacaacatgatgtcgcaacatattagtaaactaactctgaaactccaaaacagtcgtagacacaaaccatcaactgacatatgttttgatatctactgcatttttgtagataaacaactagtaagagccctccaaaaaaatgacacactctaagaggaatatttaaactccacgcaattctctacacgttggaatccacattagccaccactaaccaataaatggttgaagagacttgtaagcttgtttaacaactatcactatgaatagagccgtccaattgaatactcaaaattaagattagctacagtataattatccaaaccaattaattaagaagtcacatatggtagctctaattttggaatccaaggattacgaagaacattaatagaagtacttggcccaactgagcgttgagctccttcccacaccacagactgagcttcaaaaatactcctccaaataaaacttggattatcccccaaagacacaacaagataagagctacaaggataataatagactttattaatgcgacttattagtgaggtctcattagaaactaatctccaatcttgttttctcaacatagaaagaaaagaggaaattacattgtatacccactttattatacctgttttaatttttacctctattttcatattctttaagatatacccacttttatagatgatatctccattagacccttaggttaatgtaaattatatgctagacttaagtagagagtgagggtatattgggtaacctactcaaaaaagtgagtatattttaataaaatatagtatgagggtatttttgattaatggatacaaacaagaggtatttttcaacttattccaagaataaactctcacaggtgacagaagcctaacccaccataggttttatgagatcataacttcgaccaattcatcaaactcaccccacatttcttagcagaatcagattttcaccaatatttactcatcataccttccagtttattacaaatatcaatcggtaacaagaaaacagacattacataagtaggaagagcttgacattgtcttcaacagtacctctttgccagtctctttttagtatagtatgataatgacattctttgagagtttgtttggtacactgtattacactgtattgtatagtataatattatattgaattgtattctaaatcatattttgatgtaaaattatatgctatattgattttcttatgtatataaatatacaatattttgatataaataaaaatttaacataacattatata

SEQ ID NO: 305532 - DNA, 2982 bp, Cannabis indica
atttattatatttgactatttttttattatttaatttttttattttttttacctaattagtctatatatttggaggcattttcgttgtaaacaaaaatccgagttgtggtatttttacaatttgtgggagatggcccatgaaagaaagatgaaatataagagattgtgggggcaaaggtgaaaagtgggcgagccgagtcaagaagagtaagagtcggcatccattaccccgtgattacaggggtttttgtttttgacgcttttcaagggtttagggctttagcctttccaattcccattcccattgctccacctctgttggcttggcttggctgcaagaatcaccaggacggcactctctctctctctctaccctttctttcttttcctcaccaacttctcttctcttccttattattagggtttccttaccctaaggcggctagggtttctgactcatatcctaatttgactcttattctaattcaactttgcttatacactcaaatcttccattctcttttaaacatatccgatccttatattctcatatacacaattcaattcatacatcacacactttcccatttgtttttcttcgtttttgtggacaattttgattttttgcaccaaatattcatgtggggtttccctatctttctctgatcattcattaaacttccaaacacagtctttgatttttcgagtgtttttttatatgatatagcaatctgggttcctacctttatattctgtttcaatcgtagtgttcttgattagagttaaactttgattatttctgtgatcaatatcatatataaaatttaaatttctgattgtgaaacatgagttttcctgactctcgttcccaatttatgcaacctataccggcttatgttggtggcacggacgccattaattgttggcctcaattttcaatgaacaatgaagaccaacaatctgaatttgagcagcagccacaacctcctcccttcaagagagcgagaaattctgatgatgaaagccaatccaattcttcaccttttccacctatgaacactagaatgatcccaccaaatgctccagtcaataagggtgtcagtaacatattcttcaagacccgcttatgtgccaaattcaaagtggggttgtgtagaaacggtgaaaattgcaactttgctcatggaatagaagacatgcgacaacctcctcctaattggcaagaacttgttggtggacgtgaacgtgataatgaggatcgatcatcatctgggaattgggaagatgaccagaaaataattcacaggatgaagctttgcaaaaagttttacaatggggaggagtgtccttatggtgataggtgtaactttcttcatgaggaccctgctaagtatagggatgatttgggtagatttagggagagctcagccataagcattggaaccacaccaccaccaccaccggttaatcagggaaatgtgcctagtaattcagatgataatagggctgtgaactctgtttcagattcatcaagagcgattgtgaaaccagtgtattggaagacaaagttatgtaacaaatgggaacaaacaggtcactgcccttttggtgagaaatgtcactttgctcatgggtatgcaggtacacagtctgctttacacagtaagttatattttacacctttagccttctttaaatttctgcagttgcctttttttttgttctatattacttgtttgtttgaaatgaattttacatgatgcaacttcgtattttaagtacatgcatagatacctgaattgatatgtctgcccattgtctttaaaattgagaaacaagttagaatgtctccatttcttataaaatgaaatcccttttttgtccgcaattaacttcaaagtttgtcacccttaatgtggttatcttctcgacaccgaaacatccaacattgttttagaagttacttttttagtttaatatgctcaaaagggctcctctcccaaagaggtttcgtttgattgaatcactaaagttgagttgttacatgactttgtaacccttattctctatagaattctggattgtcctttggatagctgcttgtggtttctaatttgaatgtgatcattaatatcagagttgcaaatggctaatggaagagttgaaccagactctctgaatattggctccttacagtcaaaacctcatgctgttgctattgattctcttccgagtgcaacaactgcagctgcttttgatgaagatgtgcagggtaagaagtgtctgttgaagtggaaaggaccgaagaagatcaaccgaatttatggcgactggcttgatgatcttccgctagtgcacaacctaccgagtagagtagagagttgacggaatggaaatcatgttctttctggtttagaattttaaaaaaatttgtaccaaagaaaagtttttgtgttaatttttcttcttctgctgtttgctttgagttcatttagctttctgtttctttacagtgatgctatattcttttcccttgcatttcttcttattgaaggtttgtgagatatagtaggattgcaaattttgaactagatattggttctggaagtgtccaataagagtcttcgatagcaagtgtgataatcaaggttagtgttcatgtccgcactgagatcttcatagataatgattttgaccattttagattatccaagcaatacattggatactcttgttcttcataatttggtataaggttgttttaatgcaacaatttctatcttttatctttatttttttttgtggtagaagaaataattcaattttattgatagcaattacctaaaataatagtctggaacctaattatgactggcaacaagattaggattagaattttacatatgcaaatgcaaaagtaactgatctaattcacacttatttaaatttgttttaaaaattataaatatattattaatattt

SEQ ID NO: 305533 - DNA, 880 bp, Cannabis indica
ctttgtggtctttaatctttatatatatatatatatatattaaaacacctagctagacatatattgatgattataatttgcaataagctgttttgcaaagtcatggagtctagtttgacatagtaatattctcacgtcaatgtttatacatatatatgtcaagtagacaaatataatatcagtgactgagctggagagacatcgtaataattatagagttggtgtgagttgtatcaaataatatagagaggtacgtagagtcatatttaatttattacgtatatatagtcccctacgttcatgggtcaatataaattattcgactcgggtttttaaccttaataatctatctatgaggccacgtcataaccagcgtatatatataaatatattgacttttacaaaataatggtcagaatacttatggtttataggttcttccaatcattattttctatatataaaataaagggatatgattttgtcccgtaataactagagtagagagctaactaatcttaatcgattaattgtactaacggtcaactaacaacaattctaccttgatcattaggacagtaagaaacaatagtagacagttaagaaaaaacagaacaaaattataaaaggaacaacttagaacatagaacaattctcattccaaaattctaagtaggttcaaacaatgtttgaactttgttgtagcaaacaaccatgattagcatgtctgaggggttttcaacagtagagaccttgtccaacttgacttttccatctgcaattacatctctcatgaagtgtagatgcacatcaatgtgcttggtatgctcatgaaatatttgattcttgcttaagtgcagtgtactctgactgtcactaa

SEQ ID NO: 305534 - DNA, 1523 bp, Cannabis indica
tatatatatatcgattattcatacatataatattgatatttatatatatgtaagttatttaactcttttccttaaataatgtatatttcatcatcaggatccgttttacatggagtatacacgtaatatacgagagatgaagaacgtaatgaacagtattattttggctgatgatgattatcgtgaacgctccatagaagctttgaacttggtcaacgctgtgcttagagtcggcattgattatcatgtccaagatgagattaaatctatccttgaaagggaacatataattttcagtgaccatattagtaaccaatattttaataatattaatcaagaccacctgtatgaggtttctcttcgtttccgattactgagacaaggaggttatgatgtctctccaggtatatatattatactatatatatatatgtgtatgtgtgtgttatataattaaaaaaaaaactgataaattaaattaataaattattgctatatataatttgtatgtatacagatgtgtttaacgagttgatgaaggacaaaaagggaaatttcaatgttttagtggaagaagacagagagggactaagagaattgtttgaagcctcacaagtaagaatagaaggagaagaggtactagaggaagctgaagtgttcagtggcgaacacctaaaagaatgggcaaatcttcatcgtcatacgagtgaagctcgaagtattcaattaacgttagaccaaccttgtcataaaagcttggccagggtcacatctccaaactttttggacagtttctcagccaacactgctaccagagaccaaggctggacctggatgacccttttaaacaaactggtcacaatggacttcaaaatagttcagtctattcaccaaagggaaattgttcaagtctccaagtaagtttttgtttgtgtttctatatttcaggtttaattttcaacaataattaataattgatgagttgagtagttacacactacacgtagtgttctatacatactagctaatagattctcttactaattaatgaatgaattaattacactgacaatagatttaattacaatatctatgaataataatattgcattgctcaacaacgtacgtatacagatggtggaaagagcttggtttggcagaggagttgaaatttgctagagaccaacccctaaaatggtacctctggacagtggcaagtctaccagatccaagcttgtctgaagagaggattgaactaactaaacccatttctctcgtctacataatagatgatatttttgatgtttatgggacactagacgaactcactcttttcacagacgcagttaataagtatgaatatattaatatatcaaaaataattttgtttatttttattagggtaaataccattttagaccctctgttttacaaaagttaccaattggactctgtgttttgttaaatgataaaatggaccctgtattttctaaaatagcacaaataggaccctgaattgattt

SEQ ID NO: 305535 - DNA, 2847 bp, Cannabis indica
tttactcgtttttcttggctttacttactcaataccaaagacaaagcattcaacactttcctcatttttaaaaatatggtttccacccaattccaaagcaatattcactccgtgcgcactgactggggtggaaaatatcgctcccttaccactttttttaatcaatgtggcattagacatgagctctcttgtccacacactctttaacaaaatgggcgcgttgagcgcaaaaatttccatgttaaaaccaatctcactttgctaggccatgccaatttacctctgtatttttggccttatgctttttctatagctatctatttaatcatctgtcttccaactcgtgtacttcggtactccagcctttatcaacttctttatcataaagccccaaactacacccttcttcgtgtattcggttgtcaatgtttcccttttcttcgcccctataatcatcataagcttgagtttcgatcttctccttacatttttcgtggctatagcagtaaacataaaggctatctttatcttcaaccaacttctgggcgttctatttgttactcaccatgtcatttttaatgagtcttgctttccatttgctactgccactgctccttctccaccttctcaaaagcctcattctatgatcacatctcttcctttctctgttcccaccataactcacattccaaatctatctcatactactccacctccatctacctctgtccatacagcccctataatcacttcccctccccactcacccattactaataatttttccttacctgctaccccaccctccaatgcatctacttcctcctcttctaccgcctcccctcccactattccattgatggttgatttgtaggcccctcatgaatttctcgttgctcatactaatgtacatcccatggtcactcgtgctaaatcgggtattcacgagcctcgtttgttttacagtgttgatgcgggtacaccagtcaaaccatccaactttcgagaagctattgtcgatcccaaatggcataacaccatgaacactgagatagttaccttaaaatcacagggaacttggattttggttcctccaccacctggttttagtatcttcggctgtaagtgggtgtaccgaatcaaacttcatgtcgatgggtctattgaacgctataaggctcgcttggtagcaaaggggtttcatcaaacacaaggtcttgattaccatgagacttccagcccggttgttaaactgaattcaatccgtttggttctttctttagttgtctccttcaactaagttatcaaacaacttaatattcaaaatgcctttctttacggtgatgttaccgagactgtttacatggctcaacctgagggttttattgacccaaacttttctcatcatgtctgtgaactcactaaatcactttacggtctcaaaaaatcaccacaggcttagtttctcaagttgagtactactgttttagagtggggttttgttgcttcacaggctgatgcttctatctttatttatcgatctccaacgactgtgattgtactgcacatatgtggacgacattattatagtcgggtcatccacttcaacaattgatgcacttttatccttcctcaacaccaaatttgttgtcaaggatctcggccctcttcacttctttttcggcattcaagttcatcgttcttcggctggtgtccacttgtctcaaacaaagtacatccgggatcttctcactaaaactaacctccttgataccaagcctgtcaacaatcccatggccctcactccactctctcattatgatggtgaaccacttcacgatgccacagcttatcagagtctagttggagctttatagtactgcacattaactcgcccagatatatcttttactattaacaaactttgccaattacttcatgcacccaccaccattcaccctcaagtagcgaagcgtgtcctctgttatcttaatggtacaacccatcttggtgttctcctccaacctgatgcagcaaatgaacttcattgtttcaccgatgccgattgggcctcgtgccccgatgaccaccgcagcactagtgcctactatgtctacttgggcctcagtcttatctcttggtcttcagcaaagcaaaaagtggtatctcgttcgagtactgaatcagagtatcaagccctcgccaatggagcatctgatgtatcttggattcactcacttcttggagaacttggcttccctcttcttgtccctcctactcttcattgtgataacattagcactcttcatcttgcatctaacccggctcttcatgctcgtactaaacatgtcaaaatgacaaccattttgtcgtgaaagagtaaagcagggactgctccgactttgtttcacttcatcagaagaccaagttgctgactgcctcacaaagcctcttatttcctctcgttttcaggaattacgaaccaaactcacgtgcttcccaaccccgtgagttttaggggggatgttaaataatagaaattaatattaggctttatgtgtattatttgtgtagtgctagtccttgtatgcttttaatgtattcaaaagttattatatctagggaaatttgcggcataaatagctattttgttgataataagtattcaatttttaaaaattgcggcattcatactcaaaactccttttttacactatgtcattggtacccactaacagaagttagtttgattcttttttttttcacctaatttattaaacattacataaaactaattaataaatttaaaacataaaataaaataaaaaaaaattaataatcctttaa

SEQ ID NO: 305536 - DNA, 1183 bp, Cannabis indica
gcaaaaatacggtttttcaatttatatgtgtaggcaaagacaaagtaaatgttgagcaacagtgaacttagactagatgaagattgtacattttaaggcggttaaacctggagtattcatatctttaagacagttatctttaggatagttgggctttattttgatagtcgttaggcgataatttttctatcttttggaaattagttgtaattttttaaacacgatcccagaatatgtattgtatgtattcattagtttaagttaatttataaaaaaaaagattattatttatatttttttaataaatctattgattaataaaggagtatatagtaattagaaaatatattaacttgcctaatctaataaggcgttacaggatacatataaaatatgtgattgaaaatttttaagaactaaatccaaattaatttttttagtttttggtttaaaaaagaaaacataattttatgttttttgaaatttcaaatcattgattccaaaaaaaaaattcaaatatttatttacattaccttttcagattaccaaccaactaccaatttaattttcataaaacataatgaatattattagagtcactcacaatttttgaaataattttttacatacaacttatttcaaatttactcttttgaaaaacataatttctaaatcataaaccaatcatttccaaatactattttttttattaactttcctcttagagtaatcgagagataatatattcctgtaaaataaacctcaatatctctaaactcttattagaccatctttattggttacttcatttcggtttacatttttcaccaatttgatgaatattttcttacttttaataataactctaataattcaacactaaataattttatttatttaaaaatctcatattttatattatttatattaataatataataataattaaattatgatataattatatacactgccaacaaataattaataattatattttaaaataaattaaaagaatggtaataatgaaaaaaaaaattatgccctaatttagtgtgaatctaaaatctaatatcattattacactactacaaaaaggggtattttcgtcgttttataagtgacatataaagattttgcgtcggtctacagaaccgacgtgtaatccgtagacgtaaatagt

SEQ ID NO: 305537 - DNA, 1792 bp, Cannabis indica
tatggaacccaatataaagctcagcaacaatgatggcacccctctccaaaatctaactcaatataggagcttgattggcaaactcctctatcttactataacaagacctgacataagctttgttatcaatcgactcaatcaatttcttcaaacaccaagggaacctcatatgactgctgccacaaggatccttcaatacctcaaaagcactcctggccaaggcttatttttctatgccgattgccccaccatccatttctaagcctttgctgatgctgattggggagcatgcctcgacactcgaagatcaatttctggctattgtgttttccttggacggtctcttatctcttggaaatcaaaaaagcaacccacagtctcaaggtcttctgctgaagctgaatacagagccatgacaaatgcaacatgtgaactcacttggctccacaacattatcaaagatttccacattcaggctcaacttccctccacactcttttgtgagaattctgtagcaatacacattgatgaaaatccagttcatcacgaaagaaccaaacatgtggaaatcgactgtcacattgttcgtgaaaaagtttcaaatggcaacatcaaaatgaaccatgtctcctccaaatcaaacctatctgatgtactaacgaaacccctatttccagcattattcaaggacattgtatccaagatgggtgtcaaaaatttctacactccatcttgaaggggcctattaaactgtttgttctgttattttgttagttatttcggttaggtcggttagttagttgagatcttgtttagttcattttgttgcctatataaaacagcagcttctcccttgtattcattcaacacaattcaataaagaaatactttcaatttctctgtttctctgttctaatagaacaagactctttcacataattatagttacaaatttcaaaaatcacgacactatcattggtcaaatatacaaactcactttcgtatattctacttctttattcttttatttctatcacattcatattctcttgattagtcttttaatattttaataatagttaatcatcaaatttttttaagattagaaattaatttctgatcaaccccaaacgtctattagtcacatataataatttattaattgcactaagaaataaattatttggatgagacttgttattggttggagactatctctccacctatttactctgttattgtaaatgactctcttctttaatttataataacaagtattttctctaaaaaaaaattatttggataccatgactaatcatgataaatgtaatagataacaatttgttctacatctctcaactcgaaccacttattaggatacatgattctttttatttaagattatgaatttatttaattaataaaaatatttatttttaattaaacaaatgatactttaatacatattctgtatatgcattaaattatttaattttaaattctaataatttgttttaaataaaatgcacattgtcgttaaatggattattaatattctcttaagtatatttattactcacactcaaataaacaaatatctttttgtcttgtgcatgtacataagtttaagaattaagacctaatatttttcttatgtctaggaattttcacatattaaattacctttggaagtattccaaaagtttcacaattattaacaattattattatgggaataattacataagacacaattttttgtaaaatatttatatttttaagttcaaagaat

SEQ ID NO: 305538 - DNA, 1260 bp, Cannabis indica
tcaaccagaagacagaaaggaagaagaacacaatgaccttttggggtctttcatgggagagaaagaagggcttacagatgaacagatcgctgataacatcattggagtgatattcgcagctagagacactacagcaagtgttttgacttggattcttaagtaccttggtgaaaacccttctgttcttgaagctgtcactgtaagtatataaactgtttgtgaaaagtcttcaatgaatatgatcacttgtgttttgtttattaatattaatgtttggatttttataggaagagcaacgatccatattgaaaggaaaagatgagaatagtggtagtcttagttggggagatacaaagaagatgcctattactacaagagttattcaagagacacttagagttgcttccattttatcttttactttcagagaagctgtggaggatgttcaatatgaaggtcagttcatcttcttcttttgcctttggcttttttctctttttaataatagatatttaacatgttttttttatatgattaaaacaggatatctgataccaaaagggtggaaagtgttaccccttttcagaaacattcatcacagtccagactttttcccagagcctgagaaatttgaccctgcaagattcaaggtcagtgaaactactgattcatcttcatgattatataatgaacatgatccattttgattatttattaacatgttgtttaaatgaatgaattatgtaaattacaggttgcacctaaaccaaacacatacatgccatttggaaatggggtccactcatgtccagggaatgagttagccaagttagaaatgttggttcttcttcaccatataaccacaaaatacaggttggtaaaaaaaaacacattgtattattattgttgttgttgttttaagtggggtaagaataatatggagggaaaaagatgctaaaaatagtaaaaggaaagaattgatgttttttattttgtgtgtgtgtgactgttgtttatgagtgtgattgtgagagtgacaagtgttgtgttggtattgatgtgcagatggtgtgttgaaggtgatcagaatggtatacagtatggtccttttgctcttccccaaaatggcttacccattacattgcataagcaataaccaaatagcctacaaaaatatattacatacatacccctttctttctttcttcttctttaacaaatctctctcaatcctctattattatttcttttttttttttt

SEQ ID NO: 305539 - DNA, 3614 bp, Cannabis indica
aacactcgtcgattcatcatcgtcgtttcgcgaaatgaaacgtcgtttgagttcatcaaacctgtactttacagttgtctggactccgatacacagaggcggttcggttggagatttccatggcgatggagtcccagttcttggtgccgtaccggttaacggcgcacgctagtaagagttcctctaacgtgcaccatggttgcacgctcgtttcgtgttccttagccatactccactcatgtcattcagttttttggtttgtttttactaaaattagggttttttttttaaaatctctattctttcttataattattacttatatttatagaaagatataatttttttcttctataatgtttttcaatgttatatctctgggtttttgtgatctttgattttgatatatttatggtatatgtttgtatatatatatataagtgttgtgtgtgtatatatatgtgctctaaatttgattcaagtgagtataataagtctttgttttgaaatcttcatttttgggttttaggcctttttcacgtacttttttgggttgttgggccagcccgattatgatttttatttttattttatttttatttttattttatttatatttattattgggtaaatatatttttctattattgaggattgagaatagtagtacttttaatttgtgtgtattgggttgtctatgttattttcataccaaaatgtttcaaccacacatcctaattaaaagataaaatcatgttaccatctctatatttttcaattgagtaatgattttgctttatctaagaataaactttttattaattaaataagctaattgcaaacaaatatgaattactcactcaatctgattacaaatacttagtatatttaagtacattctgcttaaaattaaaaaaaattttatctttaacaagacgcaatctagttttgagattctttttaatgtttctatctatatataataagtttggagctatatattttttttaaaatacacaaaagttatcgattgcactagttagaatagcataaaaaaattttgttaacaaagttctcgatcttttttcttgcagccatcaaagaagcaattgaaaaaaatttggccaaagccaatcctccaactgcttcttaatattttgtatcactttttaagagagagcagtcaaagaataaatatttatgggattccaaattttattcacaaatcggacagtagatactagtaatgggcacatgcttcttgacaaaattatctctggtaggttagtgtgcaccacttgccacataataaaaatgtattttggtgtaagagcttgcaccaaaagactttcttatgatcaaagcttgtcttgtcccattcgaaatgaggtattcataagcttgcctaatcaaaaatttgtcattagttctaacattgataatagcttcacaagagaaggtttcttttagcctcaaaattttcttctaataccaactaacatctgccttcaactcaagtgagcacatttcttgatcttttatatacaagtttttcactcattttacccaaaccacatcttgctttgtagtagtagttcatagatactttgccaaagccgctttgttccatttaggaccttctcaacaatttaaacctccaagctctcttggcaaacacaccaagttctaagaagccatatgaaacctgctctgatcatctttttcctcccaaagaaatctacaaatccagtcaatctctttaattattttttgaggtaattgaaatatgctcatccaataacacctgattcaaattataacaatgtttattagaagagctttacctttgcaatttcaaataagtgtcggcttgtccaagaatgcaattttttaaccatgggtgctatacaaaaaattattagttatttcaataataaattcaaaactttgaatacttatgttgcaattatcgtgaatcttaattatatttatttaagataaatataaataggtaggttgttaggatatataatattttggtgtatatattattatgtaaatctacaatgtatccccataatgggtattttgatagaaccctatctgtttccgcatctacaaaaactttgtattttagttttttttcatgatcacatacgttgtttgtatttatttaaaattacttgtaaattttcaaaaaaatttgaatactttaaaatgccaaaaaataaaatatacatattttgttgcacccgtgactatttaatttataaacgtgataattaactgtttaaactttatttttggttttataaactattcaaattgtttaaaaatttacaaataaacttaaatagctaaaaaaaattaaactaaaaagttttttggaaacaaatagaaaattaactagaacaacattttaagtaaatttcctacattattactcttttaacttatatgagtaatttggtgatatttaagtatgagtgtatattgttttttctttctaaatttgttttaaaattttcaatttcaattttcgtattgggatttttctgaaatgtacaaattgtgaggaagaccccaagtgtgggattcaacaggtctagctaggccaatatttgtgttatcttattataacataactatatattttcccttataaataaaaaacaaaagaaaatccaattacgtatggttagtttaatttttaattatttttcctttggtgatgcattctctccaaggcaattccagctcgtagataaatagaagatttcctattaaggatgtgaattgccccctctgtgggacagaagaagaatctattgagcacttgtttctgttttgtaaagtggcctatcacctatggaggtcttctccgtggagtatttacccaactgtgacaatagtatccatatgtgagattgggttaaatttatttgggatcttaaatataaaggcatcaatgcggatgaggtcttcctatatgcatcattaacggtggatgctatctggcgattacgtaacgacaaggtccataataatggcctgattgatgtatttaaatgtattaacaatgttcactcttgttttgcagtttatcatacctctttctttctagtcgtgcttccgcgtcaactggacgcttggcaatttcccccactagactggataaagcttgactgtgacgttagagtggggttggactgcatgtgtgcagcggttgttgctagggaccatcttagtagggtcatctgggtccatacttcttttttggagtttgtcgatgctttgtgtgttcaagcggtggcttgctgcattgtcgtggacattgcgaagaagcgaggatctaagtttattattgttgagagtgattcgagggtggttatcaatgctctcaatagggagatatctcgttaagagattgagaaccatgtctcattttgtttgcaatcctctccttattttgttagttgtatcttttcgaatattagtataaattgtaacctgcccataatgtggctaagtagacgtttactcacaaaaaattcagttgtatcccgactacctctatcccagaacaattattttgtaataaccatgaggtctaa

SEQ ID NO: 305540 - DNA, 2697 bp, Cannabis indica
aaaataaataaaaaagtaaaaaatagcattacccgtaatggtttatacctgaagaaattgggaggaaaacttctcccattcttttctcctaattttatgcctttcccttagagtattccaaccattaaataaagtaaacaaatgaaaaggagtgattaccatacctatcactcccaatcctgattagtaaacatgccataaaagattttaaaagacactagtagtacttaatatatatgttaatatatatgtgttaatattattaaggataaatatatagcatattaaattttttttatttttttacttttatactgtgaggtggaaatttttttaaaaatactgtatattgtattaaatttttactgttattttacggttgttttttaattattttactgttatttttaattgttttgttttgtgctctactgttattttataaaaacacagtaatattaaaaaaaaaattccgtatgacagtatttttataaaaattagctcaaattctagtattttattttatcttacttttacattatttttgacactcgtatttttaaaaacacttcaataatctcatacattattatttaatatattatttattttaattataaatatactatcacattaaatttaaataaattatataatactatagagaattaattgcggtaaaactctcaatactcgtattctgttagcagattaccacttccatccaattttaattgttaactatcatgctagattaataacgtgtatacaatatacacatggcacaatcttattagtccatataattacattattttaaaaaataaaaataataatttaaaattaaaaaataaaaataaatcatatgaaaattaaaaattaaaaaaaaattacataactattttttttcttctctcttcccaaaatcactcccaccataaccaccatttctctcttcccaaaaactatttctctcagtgtaactcccattctacccaccaccatcaatacactattttaattccccacacatattaaacctcattttattttatattttatttttttataataaaaaaattaccttaattcttacaaccaaatccctaatctctttcccccggacctctctcttctccccttaaaacctctatagcttccaccatcccatcaccacaaccaatttatctcctctaaaccaccgcgacgacccaccgtaagtttcagatctagaaaatcccacttttaaaactcacttggtccgctaagactcgtcatggccaaactgaagtcgagaagctccaatgtgtttctaaacatttggacacaagggcaaatctaaaattgtggaaacgtttcttttcatctggcagttggcagttgatgagtcaagaactttcttgataaacaactgacagtgtggatgtgtcgcccatcctttggatccgtgaatgccacacactcaaaggggatacatctattgcagagaaacgaaatgaagattgagttatgatgtaatgactatttaatgcgaatgtagatctcgaggtgaaaaaacatgatgaagaatgcctcaattctactaaatggcattaaatgcaatcttttaaactcctcatatgttggatcacttctgtgctctcctagagattatcctagcctttaattttgaatcacatggatcaacatcttttactataaataggcgtgaaatggccactgttcttctttttagcattttcaagctttttgagcaatagccctctctttatcaaagaataaaaactatgaagaaaaaaatcccataacacccaagtctcatcttttggtgaatgagtgagctctatgacattctcattcatcttttcctgcgaatttgagagaaagagtttctagaagcaccctatgaacccgtttgtgaaccagccccagtcgcctgaggccatcaacgttcaagcgagttgatcgggtcttttactgggctctcgatttcaaggccaactaccctcatcctccttcatccccacatcgtattacaagtaagttttccagaaaccatcaaacttttcaatttcatgctaggataaaaatacttgtttgagatgtgttctgaggttatattgtttccatgcgattgttagagataatgcctaggaagtttcaagtgtagtcttgctaaaaaataggatttttatgttgtgaaagctctttagttttctaggttgactagttcgatggcttcatctttcgtaagagtaattttgcgaactagattaggctctatttttcccatttggaattattaggtcatcgaatggggttgttttccaattttttcctttgtaatttctctgtgggttcccgacttggtactcaaaggcattttttcgcaagggcaatgcttataagtattgggtccaaaggagacctctccaatatattctcgaggaggccttccccaatacccttatcgtccttaagatctaggatatttaattgcttgggttattttttttcttttctagtgaccaaccgcgacgatgagttcaacctcaaggccatgaacctcgaggagactaaggttagggctccgactaaggagctccaaaaagatatttcctcataaaggaagtaggagaaggcaaaggcttctgttggaagttattttaccaggaacttagatctactcacaagtat

SEQ ID NO: 305541 - DNA, 2611 bp, Cannabis indica
ttacaataaaaaatcctaaaacaaataaatgcttacgtctatttataatttactagataaagtgggctctacatgattcacgttatacttaagattaatgtttgatgatgattatttaattaaggcaatattattttttctttaatattaaatgccatatgtatatcccaagtgatttattttatttttattacttttgaatgcattaaaatatttttttgtctgaatttaaatgcattgataatagtgggtaattatatatgttatgagatttatcgtcttaccatgtaaaggaatatttagttctctttttttattaaaaatataaaaggaaaatatttaattgtctaaaatatatataattatgacagaatcataatcatttagaaagtgtgaaataaatccaaaaaaaaaaaaatagaaaacttatttgttgttattagtataccttattataaaccaattcatatgttatgtttttaagcgttgtgtggcatgtcattgttaattattttcttaattaataataccaaatctttttttaatatatatttagtgcacgaatattttcagttattaaaatttcatgtggtgatatgtgtttaatgttttggggctggaaagtgatgtaatattaattgttacaaaatatttggatccaactactaaataatcttttcatttactatctatattcatcaattaatatttttatttttaaaaaatcaaactctttatagagcaacatatgtatatattcacatttactaattaattattggtcttgtcaacaagtaacataccttatcgttgtctctagctctttgccaataaagaaatgtgcgttttaataactccatataataaatttcagtattgatattaccatggttacaatattttatatataaaagtattaaatattgtattagtcttcaatgactaaaatataaataaagtaaattccttgagaaaacggtcggtatgaattgaaataagtaatacataatgatttgtccttttttcagtagtgatttaattaatatgtttattttattataattattgttttggcaagaaattaatatgtttatttaattagatattatttgtgaaatagtgttcttttttatcgtatccaaaaggtatcttcagagacgttgtctttactcttaacgcgtggaacacgattttgggtaatttcttatatattgagttatacacgtgaactcattaattaccaaataattgaggttttaccaaaacaaggccaatattttgcgaaagattagaatcaaattaaataaataatattcctatattaaaaaattaattaattattgacaagatctcttctctatcaaaggaactattttttttttagactcgaaatgcaagcagtatttaatgcatttgactagctagcttcatggttagttctttgttcaatctcactagtaaggttgtttgttacaaggcaaattttcacggtcacctaaataaggccaaataatatataatattcgttattaaaatatacaagtaataaattgaattaattaatatatgaacaactataaaaaatgtaaaaacattatttgtaaaaccattagtttgttatgaacaaaaaatttaacagttgcattactaaaaaataattatgagtgttttttttttcttttttgtttttaacaaaaaataattacgagttgaatacaaaacttatcactcaaattagttccatacttttttttttctaaacaaaatttttataagaagagtaaagaacatagtctcagacaacaaagttaccctatttagacacagaaaaccaaaacaaagaacgtagtctactaaattatatgcatcaatattcttaattttgcaaatccaacacaccttcatatgcttgacaaagagaatccaaaactgaaaatggtaaaagaaaaaaaaacttgaattagttgattggttcttaataagttatatctttccacccgttattatttataattaggtcaataaataattataaaattaaaaaactttgtatgaaattaaataaagagaagaagaaaaagttgaacaatcacattaatccataaaataaatttaagtgattcaaataataatccttaaaaaaaaaaaattaattactaaaagtcattctaaaataatagacataaaagatagagatgaagagataaaacacaattgaagttctccactagtgccttcggctccttgccctccttctacactcgaaatttctctcaattttcgaatggtgtcaaagttttgccttcaactctctttttataatgaaaaatatatatataagtttccattttctgccaaggtcgcggccttataagcgactttcccctttttaattcttcattgatttttggtagttttctgtttcaattttctttcagcgaacaagtcaagtcgtgcctttccttacaaaatcgcaacttttagggctaggattcccttttcttgatttccactttaatcttggaaagtgcctattattgacccttgattacgaaattaagggctgaagatgccatctttgacctatttagtaaaataggaaaatcaatcc

SEQ ID NO: 305542 - DNA, 2248 bp, Cannabis indica
ttgtagcacgtgactgcgatggctgagtgatggaggcgtttctaactatttcttctgtcagttgccgactcgaaattgcagaagttctcagtgtcaaagaagcatttagttggataaagaggaataacaggtcaaatgtcattttagagatagactgcattttagttgttcaagctattattagttcggtatctatgccttctatttttagtttattagttaaagattgtcaagttattttatcttctttaagtaatatttttattggtcatgttaaacggtctgttaacaaagccgcgcactgtatggcacgtggtgcttgttattggtcaggtctcttttttctgagagtggtattcctcttactcttcagttctttgtattaacggatatttctatctaataaagattattttcattgaaaaaaaaaattatatatcttatttttgtataatactgtcaatataatatactataataaaattaaccaaagacaaagaacccgaacaaaataataccatattcaataaactaaatataatttacagtaaaagaaaaagtcaaagacaaatcatctaattgctccaaaaaaaaaaataaaaaatactatagtacaataaacagagtcataataattttttttagaaaatttatatttcaagtgtctgaatttatataatcgttggatcatgattattcgtttcccaagaaagagggcattttttatgagcccgatagaaaaaacccccggtatatttatccctatattaaattttttattattatcatcaacagaatatatattaataggtatagatgatgaaatcaaagcttgttgagcttggcaagaacaaagactgtagcagaagtgactcctggaataaagaagtcattacgaatagcacgtggcatcaaagactgctttataaacaaagtagcaataggaactccaaagatgtaaatcagcgtatccttagctcctccaagtcctgtcaatcctggacttatattcagtatctctttcaggattgtttgaaattgtatctttgttatctctgtcacttctccactattctgctcatcatgaacctattcatatatcaccaccaattaattcatatattattaacgttaatacttataatatatctgtacttacgtggatataggccttgtggactacatcagcagcaggtatcttaatttgagtgttacctaattctttgttgatttctctgcaaaattagatttaacatggattaattatattaagttattaatcatttctgtgaaaaaaaaaaaaagataggtgcatgattaattagtactcgacagtttggcatactgcccgatagaaatcggctacggtagggtcctttttggcttccagatgctttttatagcaccgttctatagtggatatttttatgttcttctgctcacttcctacatacaaaatctcatataatgaataatgttctatatatatatacataattattgacagcatgtcatcatgtttatatgtacacacaccatctcgtttcatcaaaataaaaaaaatttcatgacccaattcgatacaattgcatatttgctatatgtataaaaatatgtagataaacaaaataattgagattgaaaaagaaagatgataccggaagaaattttttggagggattggcccataatatcctaaacttcttgtggtttaattattttgagtagaggtatttgattatgacataatttagaagtgatatatataaacataataatattaagatgggtgagaataaagggaactgtcttataggaaaatatatttgcattcctttggcaataagcaataccttgaagacgttttagacatgattcagaaacagcacatggaatggaatgaaatgtacatatcgtccttaaggaaagtatatgttataatatctagtataatataatatagattaaaatagtttcatacggtatatatgtatatagaataattttatagtaagaaaattggttttgttcttatagttactagttagtgtagaaaaataacagctttaatataaaagttcattagaaaaaaaaatataattggtcatagatatgattcattggagttggcaatgagttttactcttcacacgccaaattcacttggaccaataagaaaagggaatgactctattctaaggaagagagaaattgaaaatactaaataaatattggatggaaaaatatg

SEQ ID NO: 305543 - DNA, 1667 bp, Cannabis indica
cttcaataaaaaaaaagtttgaaaaagactgtttaaagtgagagatttggtgttacggcgtgtgtttgctaatacacgagaccctgcagcaagagtatttaacccaaactgggaaggtccttattttgttgaagttgttgtaggaacgggggtttataaattacatggcttaacgggtcgctaacaaaaaatacctgaaacaacgagcactcaccatattaccagtagctgattctgctgtatttcatttaccagttcatgtaaaaaaataattcattttaatgaaagtattttgttccaagtaatcataaagtatctctttaaattacttggagagcatattttggtataaagtcaaactttgataactatggcaaacatggacaaagaattaaaattgatgaaggaatgcaagaaactagcagttggtgaaagtaactaattatcgatcaattatcaatatgatctcaataggaataagtaaaaacattttctctactatgaggtatcgagaacatgtcgatataccatcctgaaaccattgataacgtaaaaaatgatggtttttaaaatcaaattaaaataacaattgtttaccacctacttttataacaaaaacataaccatatttgactaaaaagtgatgttatatcagattcaacctcaaacacggacttcggatgtagttctgttgtggcctgaaccgccaaaattgccacaattccgaggcaacatcacttttttatcaacggaggggaaacattcctcccgtcgtcttccagcattgttcttccttcgcttttatacacccaattaaaaatcttaacaccctaaacaccaccatacaatacaaaaaccaaaaacacacgtgatcctacaattcaatgccaacgtaaagcaactgaatcaaattacaaaaatcacaaaaaattacaataatgggaaacacagttgacaaatagttaagaaccagtcgaaaaaccgtcaataaccattcaaaataataaataggcaaccatcgagaaacagttgacaaccagtcgagaagttgtcgataacatgggacaaggaatattgaaaagacaactatccacaccatcgacaaagaatcgacaaacaatcgagaacacatcgataacatgtcaagaaaggttgtaatagaaaaatcattagccatgtcgagaaataatcgagaacctatcgcaaaactgtcgataaaggacttctctgaccttgggacattaatgtcgagaaccaattgaaaaagcatcaaaaataatacgaacacagagaatacaccataaaactagatctcatgatttcaacgaaaaatatatcaaaaccaaaccaatacaaacaacaaccacatatatctactaaaaatagactatatttttacaattgtttaacaaaatagcttaaaaaaatacttacccattatctcacgtggtccaaccttcaattagaatgtggtgtggtcctgcggtttcgatggtggctggaatggtggtgtggtcctacgatttcggtggtggctggaatggtagtgtggtccttcggactttgtggtggcgagaatggtgatggttgttttgagcttgtgtgtgtgtgtgtgagagagagagagagagaaagagagaaatacaaaagagagacgaatgagagag

SEQ ID NO: 305544 - DNA, 1714 bp, Cannabis indica
agagagagagagagagaggtgcgagtagggagagtgggagagaaagagagagggctgtaagtaaagaggttagatgagagagacaggaggggggcgagagagagatgggcgagaaggagagagttcaagaaggagaggatgcataagagaaatgaaggaaaagtttgcctaagtgaggagaaaagactgttaagtggagaatcaacagacaaggcatgcacatagagaggtataaaacaaagtacgaccacgccttcaatgtggcctggtgacgagagggtaaaagtagtggagacactccatctacaacccttgatgtctcgacaatagatactctgcaacaactacgcctgcaactcgagaccacttgacacccaacaatggtacaatgcaaaagaccacctcctgcgcctacatgttgcatccccataaggccagcttgtcccttgggggtcgcaagtgtatcttaggccattagagcctataaataccccattttcatttgtgataagaggttggaaaatcactataatacttcacctaagaaatacaagcgtttctcaccctccattgttgctctgaacacttcttaaagttttcatattttcatgttttcattcttgttctaagacttgtgtatgatttttgattttttggccttaagttagttgacgagttttcaccgtcaataatgtggactaataaattttgacatgtggtaattttaagaactacaattgaagatgttaatcgggtacctatgaactaacaatgagaatctcgagcttggagactattaccgtaattttttaagattagagacttatgaacattgaaacaaggcaagaaaggctagatggccatcaaacttgacatggcaaaagcctttgatagggtcgagtggcaattcattacaaaaatcatggatatgttttgctttcccaaagtttctctaatctaatttaccgttgcatctctactatgtcctatcaatttaatcttaatggtagggttgtaggaaatgtgacccctacaaggggaattaggcaagggatccactttctccttaccttgttctcttgtgctctaaaggcttttcctccctcattcgtaaatttgagcaatcttgcaatttcactagcctcaaaatttctcgtaccgcccctaccatctctcatcttttcttcactgatgacaacattctattttgttaggcaagtatccattcctggaatgttgttaaagagactcttcatcactatgaacaggccataggacaatgtgttaatctagataaatcttctctttattctctcctaaaacagctctgtgggttcgaactcttatctcgaattacatgggtatgcctgttagaaatgattttgaaaaatatctgggcctcccacaatgctttgaaagaactaagaaacaagccttcaagtatatcagagagagagctggacaccacatctccaattggactcacaagtttttcttaaaagggggaaaagaaatccttatctaagcggtcttgcagtccatcccctcctatgctatgtcctacttttggcttcctgtcattatttataagtctttcaaaaatctatgagtgtcaatttcaggtgggtcactaatgctaacaagagacctaggactcattgtcatagatggacaacactttacaaatataagaattaagtgttgggttttatgc

SEQ ID NO: 305545 - DNA, 2338 bp, Cannabis indica
gtcttctacattaatcgtatttgcaggcgctgctatgggattttcatatgctcaaactcgtaaccttctgactccaatcaccatacatgctttctggaactcgggagttatattggttctaaccttcctccaggtattagccttactcatgttctataactttgtcccaacagggggggtaagcccacctacttttgtgctcaatgaacttgcttgcttttcatttccgggttttatatcaagtgcttagacttctttttctggttgactgattatgcagcttcaaggatatgatatcaaagaattgttgcagtccacctgacgatcttttaatttgataaagcagagcatatgtttcattggattagttattgaatatctggataacttatatcttggataagatgtctagatccagtgaacatagactggagttattcaatgtaaaaattagcaaaactaatgaagttttgaaacatgattacattactgtttactctgttcaccttgccaactagccaattgtattcaactattcatatagtgattaaactatatggttttatacgttttatgatgatcaatgacattttttctttgctttatctcttactacaacggacttggttccggagattattgtttaaaataatttaatgttcatgtgatttcatctatcatatgatattaaaataatatatctacctacacgtgagttattttgaatagggacgaaattctctttttgttttttaaacaaaggtataggtcctatatataatatatgggatggatgccatgtgggcttataattttgagataactagttagttaagttgagctggttgaatgggttaagtatggatgaagcataataattgacgagtgtagctgccaggggtttgaagtcaaagtgggtgttgggttagtagctgtcttccaatgaagtgtccatcatgatgtgttttagtattattttagagaacaggttatagtgtccaaaacgtgatgattgctgaaaatagatatctaaatgatggtggttggtttgaaaaacataacccaaatctgttgacatttgtgtgtaatatacataacaaatatgtatgcacaatccaagttcacttactattatgacaaaaataattctaattgcagacatttttcttgtcatatataaatatacatatattttcttcttttattccggatgcaatgttgaagattaatacatgatatcatattacggctttttaaagactttaattttttttttttctaagttctttctgttaagatttatagaacactcaaaaaaaatataaataatcacaaatataattatatttttcagtaagtgttttaatataaaaaattttaaattatattttatagaacttttactaaattaaagaagaagaaagatgataatgagatgagctgaagtactaatctaaagtcattgttagatattgcagagaaagttatgattttccaagaatacactatttcttaaagtattttctcttattagaattgagagaatacagaaaccctagtgtttcttggggaccactattataaattaacttatgatatccacacattatattcatgacaatttaatacccatttgatactcataacagaattggtcacttaattttgtattaaactttataatagcatatacattatacatatatgcccacaataagatttttaacccaacaatatcccacttcgacaatatatattaccttataaaggtataaaattatgagctcaaaatttgctattgtgtaaaggtattcacaacaatctcgtccatcaactatactcatataggatcaaagcgactttaatcatatctataacaccctaagtaatttaggcatgttagcgtgatttctacatactgtgcagctcattgctaatcaatgagattaacgaaaaacgtaataaattaaaattttcttatttaattagaaacataaactaatatatttataaaatctcgggatcccgtttacaaaatacatttacaaaagttaatattcatatacaaaagtttgtcgcctagcgactatacaacaaaagccctgatatcctaaagatcgtacgctccaagcctaaccgccccgacatgtacaatcttcatctgctcgtcctcacgattgctcggccttagccttgcccttacctacacatggaaatagcactgtgagtcgatagactcagtaagaaaagcataacataaaccataataatatcccgggttataatcaggcgcccatacccccaactataaccctattcctgtgtcccacacggtact

SEQ ID NO: 305546 - DNA, 2326 bp, Cannabis indica
aacaatgagcatcttagaaaaaacatcacaattttaggtagcataatttcgagtgtaggtaatccgaacaaatcacaaaaaatttatcatcaaggctcagactagcatgatgcttaagtcaacacaaaaagttagacaaaatattgcaaggtaaataagcaaatactcaatgaactatgcaaaacatgtacttagaatatgttatgcttttaatctacaacatcaagttgttgaaccaaatcagaatatgcaaaacaaaatatcagtgattgtttaatcaataaagttcataatcgaccgatgagaaatttgttgacagtagcgattggtgagaaatttgttgacgaactcctctgttgaaaaatcaaaagaaataagttagggttaagaatccaaatgaatgaaaatgaaaatgaatttcttgtttgcgtttttttatactgagatggggatttagggttaagatttgggtttcagttttagaaaacttgtgatttgagttgctaatgtgggttccgattccaaatttgacaaagattaaacacagagagacagagagagatagaagagattgagaagctttataatggtggtctccggtggtctccagtggtttccaacgatcacaaggtttgaagtttagaagaaaaaggggaaaaaaggttaatgtaaaattgataagaaaaagaaagattttaggtggtgtttgctttgatgtaatgtaatgtaatgggaatggtaattgtaatatgaatggtaatgtgatggaataagaattgtaatataaatggtattatgatgtttggtttaactctgtaataaaaattgtaatcaaataaataagttgtatattgacaaatatacccttagttttatttattttaatttttaaaattttaaaaaaaagtaataaaaaagggcaaaagagatattttctaataatgtaatcatcattacattggttttttaatgatgtaatggggtttacaatacatagtgtaatagccattacaatgtaaagccattacaaaggtttaaaaatgaaagcaagcaatgtaatggtaataatgattccattacaattctcattacactaaaccaaacatgccattaatgtaaacatgagaaaaggaaaatataagcaatgccctcaacgtgcttgacaaaatgccacatagaaactctgaatctcaagataatcatcagacatacacacaaatcatacaaattaaaaaaactataaaccttttcttgatcacatttgagctcgagttctgctccaaagaagctgaaactcttgtacccaagcttctacttctgctgaatcgcgttttcggcactcctttcaactagaaactaaaaaagaagccgtgaaagaacaacacccaagtcaaagtttgttttgaactaaaacatttaatgaaatcatgggaaattaaagaaatgttttctttataaagggcgagggagcttgagttaccgtgtttaaattgaacaggagaggagacgaggtatatgggtgaagaaggtctgaagcaatgagcttaaatgaacatttatgtgtacaaacaataaaagtattgtaaaaaagctcatttcccttttatttttcactttttaaatatttaaataaaataaaattaaataactgtgtaataattttaattatgaaattatatgtgtaaaaatttaaataatttaagtaaaaaaaataaattgctaaaagatccttatttaataataaattgcaaaacattaattaataattatacttaatttcattttaaaatataattaatcttaatgaaagttttaaaaggaaataaattaacaggttacatgtcattttttatttatttttatttaatttctaaattaatcacaaccatttaatagtgatccaatggctaaaaaaaatgtaaccatgatggttacaataaaaatgtaaccattgaaaccttctccatagtatattaattatttttactcacttttacaattttaattttttttctttccttttttatatttcattttattaactttactgttaactattgttttttatttcatttttacgatttactatttcgcttactcttcatgttccttcaccaagcttccaaactaaaatcgatgtattcttctctttgacgaccatttgaatactaccttgcttcttcataggatttttttcttctccatcttttgattctcattgaagaccatcgacattatttctccttcttacagtaagggtagtgtaggaatattgtgcaattaccaaactgccctacaccaacatcaaataatcagtattaaacca

SEQ ID NO: 305547 - DNA, 730 bp, Cannabis indica
tattttaatagttgccgaaaacctcggtcaacactaagcagtacatataactctatcggcattgcatcgttcaagattttatgcaaaattgcttgattgaaattgcgtggttcgtagtgagctgtcactgcacaaataaaggctttgtgagtaggagacaaattggtgtatgacatgaatttaaggagagggtaagaatagatgattggtcttgtatggccaaattacactcatataatcatgaatatatgtttttggtttgatatttctagttgtccttcatgggacaataggagctttgattggagaaggttgagctattgcgaccttttctacatcattgtcatgctgttctggtatagttccaggtatggaaatgttataagcagaatcactggcttgtaaatctatatttgttcctgcaacaacaaatcattcttaagggtaattagtaacaggagtattgttaaagatggaagaggaaagtaccatagtagagaaaggatcaatcaaattttcgataagattaaatttgttgaatggataaacatgttcatgaaacacaaaattttgtgaaataaagagttgttttgtattaagatcatataatttatatcattttacaccttggggatactgttgggttttatgccctaaataaaactcatttcaatataatcagatttgtttattaatatagatcagaaataacatttaatgttgcatggtt

SEQ ID NO: 305548 - DNA, 2785 bp, Cannabis indica
aagctatggaaggagacagaagagttggggtggctgtggatttctctgagtgtagccgagaagccctgaaatggactatcaataacgttatccgagatggggatcaccttattctgatcagtgttcgtccagagggtaattatgaagatggagagatgcagctttgggcaaccactggttcacgtatgtataatctatataatctgtatatgatggtttaattcagatcgggactatatggtttgatttggggaattatgtttaatgggtatttaaaattttgagtgttttgttgtagctttaattcctttgagtgagttctgtgatgctcacaccatgaaaaagtatggagtaactcctgaccctgcaacactagacattgttagcaccattgctaggcagaaagaggtaacgaaaatccctttaattattggaatatgttgaatgtgtgatgttgagagttttgagttggatttggagcaggttgtggtgttaatgaagatctattggggtgatgcccgtgagaagatttgtgaagctattgataatattcctttgagctgccttgttattggtaacagaggccttggcaaactcaaaaggtataataatttggaaaagtttacactaatcactccgtattttaaacaaagaaatgctaaaaaataccagcttaatactttttctttgttaatatatttatgaagagcgttaattacactttctattacaatcttttaatttctatgtctaaaattacatgtaaaaattaaatttttgaaaatttttgtatataacaattgagtttttgatattccaatttacactacgtgtttaggaaacttcaaacgtattttttgtactgtaaattatttgaaatttttcgaaattttggaagaatgatgttgtaagcataacgagcactgttataaaaaaaaatattttggcatgtatttttggatacggagactgacggtgggtggcactcttctattgttatcggtccatctaagtatcgggttttatataatttaatgtaataacttttaaagagtataaccacctaatcataaattaactttagaggtattaggaacaactaaaactcaattctcctccaaactctgtattgtattctctttgtacttttgtgccctttctttttattagcctatggttttagttgacttgactataatatacgtaatcaagtgctaatttgcttgaacaatgatgtgatacctttttagactttcttaactctagtcctgttcacctatatatattcctacttttttcatcatataagtagtctagtaggtgctctctttttcagattaattgaatttggtggtgtttgttttgaacagggttgtccttgggagtgttagtaactatgtggtgaacaatggctcatgcccagttactgtggtcaagcatggacaccattaaaactcattatgcttcagacttataaaaccatgctagtggtaatgcctttgaataaaatttctttatcattttagtgtggtaaagctgtgttaatactttttgaaaaaagtatttgtaaatgagagtcttttgatgctttgtttctatgttatgatgtggattggaggtacttgaagaataaatgattgtattgggtttttagaaactgaatgtggggaaatgaagtatattcgtttcttttttctttttgaatctaattaagtattaaatggtgttagaagccattaatgaagcttttgagttttggttcctaagaatgaaaatgaaccatgaatgaagataggacagacaccctttagctccattactatgacatttatgtgtttggatgcattaacaacagaaaattctagaaatttatgctcaacagcacatttgtatggtgggagtgtggggctagtcgactcagtagatgcgtgctctctagtagtagtggcaaatgacacaattacacagcttttctagcaaagtataggggtgaggggtaagaggtgttgacagattggtttggttcggttttttatatttttttgaattaaattagtataacggttttttaaatattagttcgaaactactatttaatcagagtttataattatttttttttaataaattgtactatttttattaagttttttttaattttatttttcggtaattggtttatacatataaaaatataaaaacattttctaaagttgaaacataacataaaatttttaaatttatccaataaaaaacctcacacgcaattgtaaatttcttttattaaatatatagtcatatataatatatatcaattatttattataaatagttctaactattatgtatttattacaattacaatcgaactattaagcggtgaacggttcgaattaaccgaatgttgtgaaaattatatacgcaagtatacgcagtcacacaagtaataaagtgataagtaagatcgtctccacagggattgcaaacaaagtttgatataaaatcaactaattacaacttaaaataaaaagaaataatatgtaaatggttgagtaatgattcaaaattaaaattgacaagaattaaacttgctaaaattaaaactactgctgctagaaaaattgtttgcaagataaaaaatataatatggcaaaaatggcttgaataactaattccttctagtcaggttttttacagtcagtacagcattggttcagcattactttagcattctgcacagagataacaacaaattcctctaggcttgtgagaattttccaacact

SEQ ID NO: 305549 - DNA, 3958 bp, Cannabis indica
tacattgaaacagagttttatttagggcataaaacccaacacagcagtggcgctgcttgatatttaaggttggtagagagaaagttgtgtaggtaggtagtggcaaggaggcaagatccttacttggtttagtattttaaccatggacaactttatttctctctgaccaaattgactaaagtgcgcaaaagatttgttccatctcagactttgagtagataaaggttaaatggaacaaataatcaccttttcgcattaagaaacacgcttgccaatcaaaaaccagattcgaagatctccatactgctcggacatatttacaactaaagagtacataaccaattatttcccaagcttgacgactgacggagcacattaaatttgtgatgattttccttcgaactaaggaggtggtaataggtaagtcatcgtggatggctcaccaggcaaaaatcttcacttttagtgtagttggagggaccggaataattttcaccataaagaggtcaagttagagcttaagccttgattaaagtctttaagagatgaagagggatggcagccagtttgtactgtgtaaagatcagagttgtggtggtgccaaataagcgcgtctttgttactaaagtaactcaaaggcaccatcaaaattatgtccacatccagaagagaaaaaaactattgtagcagaggaatatttcattgtcttcctctgtaattaaatttgcaaccactccattcaaagggtcggtatatcaaaaaaaaggaaatcgttatgtctcgagatctaaggattgaacccgtacctaactgacgtcccctccccaattttccaatgcaaacctgtcacaaggagatcttttccccaatgaataccttgccaagttaatgagggttagtgataagtatttgcttcaataaatgagttattgggaaagtatctgctcttaagcagctgcccaaggagagattcagatttctcaataagtcgccaagcctatttcgtaagcaaagcttgaagaaagtggacaaaagaatggaaacccatgcctcattcacattttgtcttgcaaagcaagttccatgagcgccaatgaattttcaaagcattttcattcatagtccaccaaaaattatccagcattgattcaagttgcttatagatatagaccggtagacgaaagtaacttatagcataagtaggaatagattggaccacgactttgagaaggacttcacgaccccttactaaaaaaatattttcactcctagtgtgtgtgcatgagcttctaaatattttctttgatgttgctaggaagttccttcttatctcgtccaaaataggatggtagtcctagttattcaggggaaactgaacttcctaactgccactggataccaccaaattaccctggcttcttgtgttctgcctggcgtccattttaatagaatagtctgcgaaactaagaactagcctggtcaaatcgcaatcaagaataaattactaattactgtttatttaagaaacataaacatgtgcctacttagctattaggctactaacatgctttctatcagatttttcttacaacatactaataaaacaagctactaaagcaataaaagcttgctgaaccatgagtcgagcttatctctgatgactattatacatattgtgacgatctttgaaagataacctgaaggctttgatactaaattgtaacaccctactactttaggcgtgttatcatgattttgtattaattatgtaatccgttgctaattaacgggtttgttgaaaaattgtgattaattaaaactttactgaattatcctttaattgaaaacaaatatcttttgcataaatcgggatcccgtatatacatatttacaaccatattacaaaatattagatacaaaagttgtcgcctagtgactaatcaaaatacggcctactgtcttgaagattgcacgctccaagtctaaccgtcctgacatgtataatcttcatctgcttgcactcactgctattcaaccttagtcttgcctttacctacacatgtaaacaatagactgtgaattgacagacttagtaagaaaagcataatcatatattaatatacaccagattacaattaggcgtccatacacccaattataactctatctcgtgtcccacatgtattgagtctagaacatttgtatgacagcactattgaccataatatcagtctatactcggtactctagtcgtaccgatgtgataacgtcaatcagtacttaagccagacatacattcatcggtatccactataactctatgtatactgatactgttatttcaacgtaatctaataggcattcataaacacgcatactaaatatgtaatcacatatgcacataattatactaatcttacctcaatcccgaattcaagtgtgtctgtcaacctaagtaaaactgctgctctacagtttataggcccctaagtcacaatatacgtaaaactaatgagtgatacgctaaatcacttcttggggacttaaaatcaaaattaaaaaattccctatcgatggataacatggcaataccctaaatatcgttaaaacatgaaaatttagggtgcctaaaattgtcacaaccggtaaaccggtttcctatcgaaaaatactgattctatggggtttgcctggggggaaccggtagaccagttctatagtgcaaactgaaccggtcgaccgattgagtgcaggaacccccaaaaaagccacaaacaaattaattcaactcttatttgtctcaaacttccaagagtacctaaaccaaccacaataaacacaaaacaaccaaaatttgcaagaacaaacccctaaatttgatttcacaatgaaagggcaaagtttgagctctttagctcaaaatttgtccaaacacaacaactaacaacaaatctaacctaaatcagcttaaacaactacaattcaaccttggaaaacaaaaccaaatctaattcgaatctacaacaacctaacctcaaaatatgcatgaacacttaaactttaaatcataaattttatagaaataagaggagaacttgcttaccaagaattgctgctttcaaaccctaaggatttccaagagactctctaaattgttgagaaaaagcaaaataaaaaattctaactcctatggccctaggtgaaccgaccccaagagagaaagaagaagaacttgaattttctatattgttctaatttcaacctaaaagaactaaccccttattcagcatattccttgattaaataacggactaaaaaaacaattcccttaattcactaaaaacaagtagttaaggtaaaattacttatttaccatttgctttacaaagaagtaaccttgccacttaagggcattttggtcaaatctataacttcaaatactcccgacattcttaatatccatctaaatcgccccactatttctaaaatactaaaccaaaataaagtgactccataggccttacgtcgtatttctactgttaccgacataaaatatgaaaaacataaaatttcacatataacataattagcagacctagaattcgaatatatctccataatcaagtaaataataattaaaagtttaattctaaattaaactctaattatctactaactctcatattaacactatgtttggtgggagggagaagtgggtggatggagtggagaggagggagagagataggaggagacaacaaatccacttgtttggtaagagggattgggggagggaagggatagttggatggagagcaaatccttccaaatccctaatttaaaatccttccataaatagaaggattcacactcttcctcttcaattatttaaaattacaaatataccctcataatatattattaaaaaattacatttaaggacaatataataatttca

SEQ ID NO: 305550 - DNA, 1581 bp, Cannabis indica
cttagttcacaaaactggagaaattgataaacgctgaactaatagctctggtctgttcaactttaacactaaactaataggtttactaagccaaagttaatagctttcaaatgagaacttcaatttcacgtcatagtgcataattgatacatcttataattgagaaagttgagcatttgagctcagtcttgagttccttctaaacacaaagcaataactatattccaattatcctaaaacgaatgaatgaaaaggaattggcatcttaaaaagggaatgaatgaaagtctacctgcgtgaaagcgagaaatggtggggtgatcaagtacaaaatcacagaggtccacacgcccaaacatgtaagcacctttatcgtatctgaatcaaaactcaaaaatcagctacacaccaattgcaaggtccaattctttgaagacaaaagaaaaaaggaacttacacatcgaattggtctattatagaaccttctttcagaacttcaaagtagaaattatgaccgggagcttcactccacgagggaatcgtgtacggaacgacatgtcgttgggactcatcagagctctgcttaggaccgggttcgctagttttcgcaacttcgacgtttgcggaaaccgattcggattcttcgaggggagcttcattttggggttctggtggctttggctctgaagaagtaggctgtttgggcggaggaggacacatgggggccttcattgtagtttctgaatcaaccggagacgaagaggagggtgaggaggaggttgtgggttcgtctagggttttgggttcggaagttggcgtagggttagaggttctgggaggaggaggacccatggcggtcgtcatggtcaggcacacactaagcgcacttggacgagccgcaacacgagaagacgagtctcgaatccgatcactgattcaattggactgtttaactaataaatttttcaaaatctcacttaagtatttcagctaaaaataaaatgaaacaggactcctccattcaaattattgcgttttgaaactatttaaccgttttatcaaagtcatagactcacattctaagtgtaattctcaagttattgtggttaaaattcttcacaaggagttactaaaataagttacgcgtaactcggagtgacacctaccgaaaactaaaaattagccttcaccactagaagttaatttttactgttagaccattattatcgatggaaaacactttatttgtatttttttcttatttttgtaggtctccttcacttataaaaaaaagagcttcattatctcatttttcacattcataaaactacttataagtcagagattctctctctaaacttgttctttctagagtttggagtttctgatacttagtctgttgttgtaattagcatcttgtaaaatataaaaaactcgaattagacttagccacataactattgcgacataggagtgaactattataaattttgtgtgtctctctaaattatttaacttaaacttaataaatcaatctcgctaatctagtcgagttgttggtccatttttctagcgtcaata

SEQ ID NO: 305551 - DNA, 1081 bp, Cannabis indica
actgtggttgaatacagtgaattggattctaatttggcttctgctatcaaccaagaaacagggcgccttcgtttttgttggagcaacgtttgtttacatatgtttactcttgatttcctccaccaagtagcgaatggcctcgagaaggatagtatttatcatctggctgagaagaaagtaccttcaattcatggtcacaccactggttataaactagagcagttcatctttgatgcattcccatatgctccctctactgcccttttcgaggtactccgtgatgaagaatttgcgcctgtgaaaaatgcaaatggctcgagttttgacactccggacagtgctaggcttcttgttctccggcttcattcccgttgggtggtggctgcaggtggattcttgacacactccgtgcctttatacgccaccggtgtggaggtttccccgctgtgttcgtatgcaggggagaaccttgaagccatatgccgtggtagaacctttcatgccccttgtgaaataactttctaaatagataattccatgcaatctgttgtctgtgtcaactctgttttaacgcaagttagggtgagttaagtttgtttatctcatatatgttcggagatgaaataattaggatatgatttactggtgtgtgaatattggtcttgggatattttgggcatgattcaattctaataatatgtgatgtgcaatttgatgccttcataattaataaagagccattacttttttttaaagaactaaagaatatagaattctcttttcctatgataaaactcagcaaatatgataaatccttttgctaatcattatacatttctttaaatgtatgttaataatctagtttggggttatcagtggcttaaacggttgagttgattaattgcatttagttatgatttggacctttattggtagtagctggaacatgtaacattaactgtgttttttctatgtatgtgccagtgtaattttcatgtatcattgcatgcattatatagtataatcatcatacatgtctgcataattatttcctttttttactcatacatcgtcagtattt

SEQ ID NO: 305552 - DNA, 1306 bp, Cannabis indica
atatttagtgtaattttataaaaataaaaataaagaggcatggattgaacattttcacaagttgcatagaacaacaaattatagcacttagtctagtattaatttttttttttcaagcagcattagctattctaaatgtagattcatatttaaagacaaatagtcattacattaatctaataagagaccacgcctaaatagtaaataggctaattttgcattgcaattaggattacgcctaaaatcccacctatctctacaaataatcagaacacacagctgtgggattgcgaggttgcaatctcatctgccgagtgaggagcaaaacttcacattgcaatgcctatacaaattcacccaccaaacattttccaagttgaaacacaagttgacagagattaagcttattgccatttacatgaaaataccaccaccaatgcatagataagtatccaggttgcaaatacagtcaaatcacaaccaaattcagttagaatttagaagactacatttaaaacgattaaaagtcaagaacaacgagactactgacacttcttcggttgggtagggacacagccaagtgccccaaatacaccagggcttaggcaactggtgggcggagaacatgatcctgcgaggtatccacagaagcgggtggcatgaactgccacatagccaccccagggtaaccaatgaatggaaccaacttgttgccaggagcctggccttgggcagcggcaaatgcagcagggattgcaggagggggggccaagaatccaggttgggcattcatgcccttcagttgttgttccaacttttctttctcaaccttgagcctctgcttctcatcacgaagctcattcttttccacctaaacaatagagttcacttttatatatgctttgttcctttgacataccagtgacttttaggaaatccttgtttttgtcacacagctcaaagttgttgagaaatgtttatatatatataataataaataaattaataaaagaaacatccaggtcaaaaattgatcatttcgttttcaaataaagaaaattaagaaacacttgccttcaattccttgatcttctcctgcagactcgaatttgagtccttcaacttctgggcttcaccgcgcaactgatgcaccattcgtacggcatcaattaaaatagcagccttgtctgttttaggaggccttccaggctccaatatagatcccaattccacaaacctattttcaattatgttagcacaaagcatatttgattcacatatatgataaataagagagagagagaga

SEQ ID NO: 305553 - DNA, 1338 bp, Cannabis indica
taatttccgtatgaaaaatcaaactcccaatcccaataatcaatagaaacaacatcaaatttcaagttctcaaaatgtataaaataaataaataaataaaaaatatatctcatcaacactaactcaaacattagaaccccagtaaaatactaaaactcaaacgttaaaaatacacacaataaaatatgaactcaaaacttaacacatacatcagaataaaaattaaactataaatgaagatttatctactatttttttaattacggtatttattagcaacaaatttaatattttatgtttagtaaaattaaaattttaatataattttactaagtaattattattaattaaaatacataatttattttttttatatataatttaaaatattttatataacagctgctgcgaatcgaaaaatatttactagttttacaatatttatataagttatccttataattatatgtgcagcaatcacaattattattaataatgaggtgttaaaaattcaataaattttctttttaaaacaaaaaattttgggtcgaggttggaggtcttgggcgacggcccatcttgttcaactcttgggtcgaaccttacccattcacttgtcaaatatagcattcaatccattaaagatggttttagatcgacactgatattcattgacacaattttattttttctgttttcacaaaaccaaatcttcaatattaaatatgtaattattacgagatttcgactatagttttgtacctcatcaagaaaataaataaataaataaataaaaatcccattataagtattatagaaggcttcgtacattatatttacaaaataaaggaaataatgtgagaggtcccctttctttaatttctggtttcatttattataagaaagtggttcgatctggataatatttccaggctagctagctggctatacatcaatcacaaaatttagtaggcaaaatttatataataaaaaacaaaaaacaaagagaaaaaatatgtaataaaaaacaacagaagatctttgagagatttgtgtgttaaaacatgaattaagctcatgaatgggagctatccaaccctattcatttcaagttgtaaaaaatgtaaagcataccacttgtgaaaggttaattaatctgcatcttccatatgtaaatatttaattctctgctattttttttttaattttcttaaaggtagtttttgaaattcttatgtgttagtcactagatcttttgtatgatcatgtctagaggtgggcatcatctaatccaatctaattgaacctaaccgatccaatctaatccaatccaattac

SEQ ID NO: 305554 - DNA, 2912 bp, Cannabis indica
gtcctatttctacaattttaaaaaatacaaggttcattttatcatttaacaaaataaaaagtcaaattaataattttcgcaaaacacaacatccaaaatcatttttacccataatcaatcctcaatacattaaaacccaattccacaataaatcatcatatgcagcacatctttatcatacctaataatgaaaagaatgtcgaacatgtatatacatatatattatactttatacattatacatatgataagagtagtaatatgtggagtagtcaaaaatattttaaacaatgacatgtgcataaaatgtgagtttatttgaattaattgtatatatttcaaatgagactcgatttcaaatataataagtgcatattttagtactcttttctctttatacattgctgagagatcgagttcgaataattgggttgaagaaagaagtgcctagcctatctcaaatagtagtattatttaaatgtgttatatattttcaagatataatattttattttattttatttttcattatagaacttttaattttaaaaatgcttcaataatataatttcaaaaatattaaaattataattttaaacattattatatatatatatatattttttaaattattacatatattgcacttttaaatttttactttaaataaatatactattgcccaacatcaatacaaattttaaaaataatatctttatctttaatagtatttactgcttacacttttcaccacatcaaatattttccgaaatactacaattcaagatactcttacgagcttcttccgcttttagattttgaattatgccaaataagaaaaatccaaactaaatgctacagttccactgtactcttacccagtttcaggtccccactttactttttgttttggaccaaactaccctttctttatagtgtttgtttcttttttaaaagctacaaattagaacaacttttggcttctcattaatatattttttaagaaataactaaaatataattcctaaaagcagtatttttcagttaagcaaaaaaaaaaaaaaatacattttttgagttctgaaatgcaaattagttttgatcatttttataccataatccaatttaattttttatattataagtattgttgtgaaaaaggttgagaatcttaattttgatttttcatatgtattatattttgtttagatttttctctctttcctcttcttttcactttgttgttggttggaacgttacttcatcattatgttggaaagtggtacattcagaaaaaaaaaaataatataaataaattacaccctctttgtttttctttttgaaggtgaaaattatactctctttcaagttattgaatttttttaaaaaaaatttacaataataaaacaaaaaaaacaaatattatttcatctaaaagtccttaatttaatttactaatttacttgagcgtgttgtaattggtatttagttaagttattcaaacctacctaattctaaacgtataaattgtatatatttgactgtcttaagtgattatggacttcttcagtaataaattaggcaataatattaatatcaatcaataactacaaataaataaataataaattaaggcatgttgttgtaaacttgtaattactatagtagcgtgtattgagccttaacttttatttatttatttatctgaagcattgagccactaactttgaagaagtaaaaaaaaatactgaaagatcaccttaaattactggtacaaaacattcgcattgttatcaatcaatctctttctttggttagacatacttatcaagtaaaacaataaaataataataatgaagcaattcttgttatacttcatagttcatactaatacaataaacaattcataagtacagattaatttggacatattaccaaaagggcatcacttataaatcttttaccatcctttttaggggacaattttgtaccaattgtagtagtaagtagtaacagatacatttgagtctgtgacacccactattagtaacaatttaaaactcatcaataatccattataggtatcttagcatggaagacacttaattattattatttttttaaaaagatggtttaagaaaatgatacccaccaccacaacacctaaacatattatttttgagtataattggaaattggaatggaaaccaatttattagaattaaataaaatatgccatgcttttctagtagcagtgaaaaaataaattggcgataataataaattattaattaatgataaaagtaaaggcattgcttgaaaataaaggggtattattggtaagctataatgttgtcgtgacgttggttatttcaaattattaaagaattattaatgttattttgttttctcgtgacaaaacaatgaagtggaacataattacaaaacacacaagcccatttcctttcctcttcaaaatttatgagttgtgaaagcttaggaagatcatataaaaaagccttgccttttcttttctctttactcttgtgtgtgtcgctttctcccttccatttatgggactattttctttgacataatttttggatgtggttccttatttttctctaatggggtcctcctttcttttcactctgtaacaccatcacaattattattattataaacctttcccttataccccttaagcttcaaataggtgggagaaagcttcttctttttcttacttaaagttgaagtcatttctttttttcttttctaactcaaatgggtctgaatagacctcacaagactggcaatggagtttctaccagatgggtatctctcttttgcattgctagcttcttcttgggtgtacttgttgttaacaggtttgttttttttttttgaatttt

SEQ ID NO: 305555 - DNA, 2072 bp, Cannabis indica
gacacatttaggtgattgaccaacaagtaaaggaaaataaaggaaaaataaataaaaggaaaaggaaaatggagtgagtagtggaattgagggacatacatttttgcagattggtgggatatggtcgtttgagaaattaattttttttttttttaaaaaaaataaagaaatatacatatttattcataaagttttgtgggtagcataaaggaccaattgagtgggaagaaaataatagcaaaaatatatctatgtagccttgaatgcattttgtttttcaataaagaaagcatttttagtatatatttatttatatatatatcaatgtgggagtgcacttattctatcttttatcatggttttttctttatttttttagtctttaatttaattattttgggctaaaaatagctccaatattattttacttggtgctggtagtcatattatgtgttaatgaaattttaatttattgtgatggtggttcaaagttgagacattggtaaatccaactgttaatatggcaaatatgctcgcttttgattttttgtcaattaattctgagatttggcagatgcttgcagaggcttatttttgacatgtataatagaccataaatttaaaataaattaaaatttgtagcttagttgggatgatgtattttatgcatgttgtctaaatatgtatagtgtttggggaccaaagttgctattatagattagttattgagagagtgatagcctaatagggttaggttaagaaacggcatctactctcctactttgcatgtaatttataattaggcatattatagatttaagttcaaaaaatattaaactcaacatttaagttttaattatttttctttttctttttggaaagggcttattaacattaattataatttgaaattaagaagtaaaagattgttttttattttgtttcagttggagagtagtaatcaagtagtgtctttttcttggttttgttaataataattgtgtgtgccgtcctataattcttaattttatacaaaatatatagaagtagagattcatgacataataagttcattgagtggagaccattgttgttgtagccactctattctcatagtgatccttctaatttggctacagtactaaaagctgtttattaagtctccagctagagtagcagtctatgatttttgttaatttctgagctgttttttttttctcattgaaaaataaaaagttataataaaaagctttttattagagaagctagttttatgaattcaaattcactgttttaaaacttgcattgccgacaaactaactagatggttaaaggcctaaaaaaaatagattgtataactatttagactatgtagtttttaaaataattaatatttaacaaaatatggttaataacttctcctttactatgtaatttaaatattatatttttaaaatatttatttatataaaaaatatataataatattataaaataattctataatacacttcaaggatcattccagtacattctctatctattttaaaatttataatatatcacaataaattatttttcctaattgcaactgtttttattcaaagtataattataaatgctttttattcacatatctgactttaaatcatttgaatttagttcatgggataattacatcaataaactagttttttcatcaagaaatcgattttttcatcaagaaactagatttttggtgatttttttagcgacaatattaattctgatgactttttcagcgtcggtagcaatttcgacatctttttcggcaccgacagctactccgacgacttttttgaccccaacaacaaactccggtgactttttcggcatcagtgacaaaataaaattgcctaagcaaataaaaacattaaatatgggcttttaaaaaaatttaattgggattatttcacaaatacacaaaaataacaaaaaaaattacaaaaattcggtttcacagaatttttaatattcttacaatttttttgattttatttacagaaaatacagtctttttatgttgtactctt

SEQ ID NO: 305556 - DNA, 873 bp, Cannabis indica
ataaatgagatccgatattaacctataagaggtttaatggggacatcatctataaaagttggtatatcttaaaaaatataaaaatgaaggtaaaaattaaaataagtaaagtaaaatgaatatataatgtaatttcccttaaatattagcagttttctataatcattatcaaactaaaataaatgagatccgatattaacctaagaggtttaatggagacatcatctaaaaaagttagtatatcttaaatagtataatagcaatataccacctcataaatgtgctagacactataaattttttacaataattattaatttaagtaaaataggatatatttaattatgtacaaaaatagcagtatgataaatcgtaattatggaaaacactactaatactttttctttgattcgttatatttcttgagcaactcaaattctgaaagaaaaaatatgttatcttcatcatttatcatattaattatttaagatcacgtgctctttacatattattgaactttatcccattatttctctaataacaagtacaaactgtggggaaatatatatctgttggcaaagtatcatgaattataaaatgttgacatttatatatttatttttatatatatttgtaaatgtatataactttcatgtttaaccaaactagcctttataataaataagtcgtctattgacaggccaagggaagtaactataaggatgagcatggccttcattattgccattgaaacaaagatagagtttaatatttataaagatatttcaaaattgttatttctcaactacactatatatagctaattagaataccttatatataataataattcaatttaaaaataggattctt

SEQ ID NO: 305557 - DNA, 2979 bp, Cannabis indica
tgactaaaaatacatttagttataataaattgtaatttttgcgactaacacttttagccacataccttttagtcacaacacaataataataatttataattagccacaattttttcatcattcgttacaaattttgttgtgactaaaagtaaaattttttgtagtgtcatatcatcacccataagttccataagttctaaatagtagtacacttgaattatgcaatgcatcattacttctacaatgtttattactctagtgttgtctcatgaaaaaaattaataaatactttatttgtcaagattatgtttagtgttcttcttcttctattttctacttgtttgaaatttccaaaaccagtctatccttgtttagaaatagtcgtagttattaacttattaggttgactaattttactaattcggtttgtttaataattatttaacattatgcttgatagagaagactgaaaggtggatggagaagggatagagggaaacatattaaaagagagtatggaatcctttgtttggtatgatagagataggcaacccaacccattatttttcatccctccacaaggaaagagaaaataattatataaatataatatataattatattagtaaggataatattgtaatttcaatgattaatttcctctctattttccaatttgataatatcaaattaataacacagaaaatgtgttttgctctccattcatttttacttttattccttaccaaacatatatatatatataaatatatatagcatagtcaatcttcttttgtgctctttgagtatggtctaagttatatataggacgtactgcgatccatttcaaccattaaatgaaaaacatgtacaaaaaatgatttgatattgtatattctaagtttttgcatagctaggaggccgtaattggtttgtttgtaaccttttaatttcatctgaacaaaacaagctacatataatcacatacataaatcggtttccttattataaaaagaccttattaattttatattctggaatattatgtccaagctacttaagcagtcattattctttctacaataattaagctgcatatgatatgacgtgtttcagtgatatgttcatttgaagttcatgcatttttcaagtaattagttaccgtacgtttctgttgctaattagttagtttgcatgttgatcagttgtagttcattaattcttagcttggcatgtatgcatatatatgactgtaacctatattttttaattatatattttcaatgagaattagagtaataattttcttacttttcatataataatatggttttaaccatagttgataggcttaatttgtgatccatattaggatttagtataggcttaggctacatagatatctgttatatttagtttttaaaagacttaatccaaatttagaatgcggaagtagtagagacatgaggtgtattgtaaaatatatgaatagtgaagtaacaactcatgtaacttatatatatatgatattaagtttccagacattattaataagagactcccaaatacctttctcaagatagtggagttcgaactcaagtgactctttttgactcactatctccaaattataaacaatttttttcttgattggattttgaatgtgaatcgaatgcttgtcagagttttgttgtttagttctatgttaagaatacaattgttgtggagaatgtagaatagagtgaagtgtatggggaggtgtatgaagttatatttcaaaaattaattagtaataaaattgaaataattcatgcatcttatatatttggtatattaagttcccaaacattatgcttttttataagttagtcctaggagggagatgaaatttagtctttatataaccttgagctatgatcacttggattttatgttactagaaatttccagtgtcatcataaattgtttatatttccataaattttcacttgtgacgatacataattatattatctgccatatcttgctagaagtccaatagttatataattacttttagtagattttctttgtcgaggccaaataatttgttattgtctgattcttggcgtttttgtctagtttatccttgcagtacgtacttataattcaagctaggttgctgatttactttcctggctttagttgcatatgcatgcttagtctaatatatttttaaaacaataatttttctacttttatagatgtttttcattttacatgtggtatataaatatatataggatattactgatattataacgtgttttgattttctcagcatgcaagctacgatagaacgttataggaagcacactaaggacaatcaaactcacaacaaatctgttgaacaaaccatgcaggttctcccttattaattattgcttcttttaataaaattaattaattgattgatatgtaatatcgttattagttgcactagctagtaaaacaatcacttgttttacatccttttgaggtgtaatattgttattagtgtaatttattatcagattatttgacttgttttactttaaaaatattataaaaaatcactaaccaattataaaacgacacttaatcgtagtgctaaacactataaatgtatcatagcaatgctgttaataattagatttctaattaatgacacttttgaagtgaatctatatattgctttttgaaatgttccaatgcatgcactgctaaattttatagctagcatagttaaaaagaattaataaaatatatatttatttgatttatttatttattttgaatagaaataaaattttattaagaagacaaattgtctaacaacataaacataaactcagtgagtgaaaacaatactggcacagaagatttgatttgaaaaaacaacaagaaactctaacaaaactatgagcttgtttggctgtgttttcagttttcagtttttaa

SEQ ID NO: 305558 - DNA, 841 bp, Cannabis indica
cattcatttcaaattgcaaggatttggctaaagtataaattgaatcattcgacccatttttccttttttcatcaattcagacttttagaacccccatttttgaattccaaaccagagttttttgtttcagagaaatctttaaccttccaactctggtgagtgcaagaagccttggactctttgattcaatattttctaaacctcctttaagtccattttcccgacatagagttgttaaaccttgaataaatccactcctagcccaacaaaaactttgacgctcaagctagcttcgaccgcctaatcgattgggttcaacattcttgggcagatttccacgacaatctttcattcaccactcaaataccaagttagtatcccgacgatttgttaaatatttgctatttcatatctagcaaagagatgtgtagttcaagctaggtctaggatatctagtatgtatgaatcgagagatgatgcctgtagaattttgttttctaggacagagttatgtggaaatttttacgccatggaagcgtttatactatttgaatagttaggttacaacaatctggactctatagacatttgcatgtttttaggattctggaattagggcttgaactagacagggtgaacctttgactaagtactaggtctatttgtattccatgcacctatctggagttggtaggactctgaaagggtttgacttttgaaatttttacttgaaattggctctagtaatcctttctgggttctcgacctgtcactgtgtgttgcctagtaagaacaggcttttgggagtgataggtctggcagggactgttgggttttatgc

SEQ ID NO: 305559 - DNA, 1615 bp, Cannabis indica
aaactgaaaaagtaaaaaaaaaaaagagttaaggcagaaaaaatatattaggagacggtatatttaagatgtgttggttgtaattttggagacatttaattaattattggagagttcttacatgtgggtggaagtttatagttctaaataactatttattactggcttcagaacatcatgtgttatgccctgccatgaagaaggtgtgtgtaagtctgtaatgaagttatgtatccattaatacatgaccgaaattagattcaaagttagtagatttgactggtcagcgtattcaggtatgtcagtcagatcgaattctaatacttattcacatgtagcagcagtaggaggagaggagtgttttttagccatgcccatgcatatgaatataataattattggattaatattggaaaaatactgaatatttattcagttttatgtatccactaaaactgaatatatatatataattctcaactaggaaaaatactcagtaccatatcattgagatatagagcaatcagcgatataaattatatttactgtacgccaaatacaattatactataaactatatttttgtattctgggtattttccaagtatgacagtttatccattcaaaaaaagagaagaaaatgacaattgataatggtatatatatgtgtagctggaccctatatatgtactgcatgtcataggattttatcgttagtaataaaatataattaaaactggtacttatgacaggatcattagttatagtactatgaagagctaacttgctcttgctgctaattaaattaattaacattaataacaagaatcaaaattttactcatctccacatgctttatataaatatagttaatgtactataattgatgagaaccagtatatataaatatatatttatgtataacaactttcaaatattcttattataatgtaacatgtatccttacttacaccagccactaactatacaaaaataataagaatagttctggtgcacgccaataaagaaagtaattaacagctacactagcgcgaatcgggctgtgcattattaatctaacataatttctgattaattaatgtatgtattttttatatttgacaaactaatgtgatctaattctaccacactataattactatatagtagttactagagcaacattattttctaagcaatgtcaaatatatgtaaacattttaaatacgtaatccttaaacgcaaatttcattcagagttgattaaattaaaaaaaaaaaaaaaaaaaaaaaagaaaagaaaaacctcagcagaattagacgactatttaagttatatattataaaaatataatagcactgacaactgacaagtcttctgtattcaattatatattctatactaaattatatgtattttatgaatgtgtgttgtattaatctaactgatatttctcgttataattgtgtaagtaattatttaatttcctgcattgatttttgttttttattcgttaaattgtataatcattgttcttctctttcttcccttaatattagtctttctgtgttctaatagtatatggaactgtggacgttcacatgttaatatgagc

SEQ ID NO: 305560 - DNA, 2016 bp, Cannabis indica
tcccaaaatactacttaatattcgcataagataatcaaagattttctaccaaaccctgtggtataaacaccctagtataaaacttatattttggctctaaaatatataccatattgtagagctcgtcgtaagctttaaaatatgatttttgatcttcccaaaaaatagcaaaaatagtaattcgtttggtaaaacggttaaatgtttttggggtctcgtaacaagaatcgcttaaccgtttgttccaaacggtaaaccattttctgcaagaaacaggaaccctgaaagtgaaaacaccattaaagctcaagcgttgagcttaaaactcaaacatttatacaataaacccaacataacaagcaataaaaaatccatacaataacacctatataacatccatacaataaacccaacataacagcaataaaaaaaaaacaaagccctaaaagtgaaaacaccattaaagctcaagctttgagcttaaaactcaaacttgatgctctttcacctcacaaccaataaacctaccagataagcattgataacagtccttaaccatcctagaaaaaaatcccaaggctcaactaaccccatcaacaacagaacaaaaatcaaccccttaaaacctatagctcaagctttgaaacattaagaaaataagctaaaaccttacctcaagcttcaaagtcaatttcctatgccctcaactataacgagagctggttttaggtctaacaattgaagaaaatttaatggtggtaggggttgtttgatcgaatgatagagagaaagagggatataaatatgttgattctttaaaaccaatagaaaacaacaacaacataatactaatatataactttaataatgataataataaaattttattaataaaaattattttgtcattttttagccattaagaaatttctaaccttaaggtatttggtcaacctgggtaccctcaaatacctcgataattctataatcaatttatctcaattattccattaacattattaactaaatcgattgtgagatttttttttcctatgatagggtcttcaaggtcgtgaaacttgaaaatatttttatttcacaaatagcttacactatatccacatatttcaaataattctctgcaattaataaattacgcttgtttatccacttatggcaaaatttgtgatttacgctgcattaaaatagtacaaacataatcctgctcattactctctaattaacgaataagatataataaatcctaattattcatagttaggttttcgagatattacatctttgtccccatcagccgaggtcgagtgggcctcaccttcgtcttttacttcttgtagcttgacaatttcttcttcaggagcatcctcgtaaggatcatgaactaacaccattaaccgagcatgatgcgggtcttcaaatgaagtctttctgtaagtttgcttagtttgtgccactttcctagtcatgggcgggtgtctagatgaacgatattgtacgacgttaaccgcaatatccacttccacggtaattttctttgatggctttggatcactttttggctaagtattcagaactcctgcttggaccttgtatgtccaagagggaggaagatattgccttaaccctcaattcaattccaaaatgaatcgtctgtacccccacacttccattatggtcgtggtaataatggtgttgcgtggaaggttttgaaggttttggctccttgcttgttacttcccactcgtcaaagctagacgtcaatgtctctcttgatgatgaagaggttacgtggagtctgggtagtactcgtagagtaattgatgccctcatattctgagtgcttacctcctccgaaagtcgtccaggttcatctaaaaaagagggaaagggaggtaagtgttggaaatattttactaggatctagatttactaccaagtatattttattaacaccctcatatgaattctaaaacaatgaaataaacacataagagt

SEQ ID NO: 305561 - DNA, 1618 bp, Cannabis indica
ttattctccattccagataataatttttcaagcctagatgagtttagttgtggctttttcaggaagacatggaactctacaggaaataattttactccaactatactttcagcatttaattcaaagaagattcttaaggagataaatactactactactcttacccttattccaaaggtaaaatgcccaaacattatttgtgatattaggtccactgtattacaatgagctcaataaaataatcatgaattttttttgttcttggctgaggtaggtgttaccaagtctcattgcagctaatcaaagtggatttctaattttttaggatctttggacacactatgggaggaaaaattatagtccttcttgcattattaagatggatatgaagaagtcttatgatacttatgaatgaggattcataagagaaatgttgatagccttgtattatcctaattctttcatcgaattggtcatggaatgtgtcactacccaaaaattctctcttatggttattgactcattaaatggctactttagctcaaaaaaaaaggtcttaggcaggaatctccttttttatttgtactagtaatggagtatcttccccatttattaacaaatatttcgaagaggactgaatctaagcatcatcatctatgtaagcatttgaagctgaatcatttatgtttagttgaggacttgttgatgttctcaagaggggatattacttctatataatgactctcgctagaactttaaaaaggttttcgaacatattaacattacaggctaataatagcaatacaattatttattgttagggaatgaatagggcatatgagcaattcagtttggagagctcaagttatgtcaagagtagcttgccttttaagtactttagaattcctatttggtaaaaaaaaaaaattaaaattttagtgtgatagaattatttaaaagatggctagtaggattaaccataatcaattttactttgattagtagttcacatttattgggacacaatcaatgataattcttaaattcattttaaagaataatagtatttgtaaacctttgttgtggaaaagctcttattttttcgaatgttgcaggttttgtttctaaccagctttatttaacaaaagacgacttcgatggtctgggttttaggaatattgatcaatggaatgtgggtgctttcagaaggtatgtgtgggacgtttctttaaagaaagattgttgatgataaaaatattatcaaaatcaaaatggaacgtggctaagttaagtaggaaattcaacatttcttaacttttgtttgaaaattttcatcaaagggtaccacttacacaaagtttggtatgagtatatttggaataaattttgccgccaaaaacacaagttcataacttggctgactttttttcaaaaatttcaatattagggcttggctgattaaacacttattataattaacacatttgtatttcagtctctttattaaaaaaaatcaaatacataggtccatataggcttgtttcatcaatttttgcttcgactctcaataaaattttagtttgatcatcgatttttttttaaaaaaaactaaaaataa

SEQ ID NO: 305562 - DNA, 1364 bp, Cannabis indica
gctcttcctgcaaaagaaaggtttctcgaactcaaacttttgatcctggctgccattttatcaacaagaatgctacattcctttgctgatatcttttttgcacaaatgggtatacccaagtatctgaatggtacatgacttctataaaaccccgaggcatcaatcactctttgaatttctttagagtccattccactacagtatatagctgacttgcttggaattggatttagacctgaagatctggaaaacaatttcaatccctgcagcatgaaataaatgcttttatagtctcctcctttgcaaagtaatagtacatcatctgcaaaggaaaagatgatttagcttcagtccagagcatctttcatgatagccaaaatcctctttcttccctacttttttgcataatcctagataaatattctaggcctaaaataaaaagaacgggagacatcgggtcaccctaccttagacctcttcttacatcaaagaaatcatggagagatccgttgaatagcaatgagaactaaggtgtactaatgcaagtcattatcagttgtatgaatttacttgagaattggaaggcatgtaccatttcttgtaggaagtcccattcaatgttatcataaactttctatagatctaacttgatcatacagttagcttttatcgatttccttccataatgtctccctagatcctagcaaaccatgatgttgtgagcaattgacgtcccttttacaaaccctccttgattctgagcaataatttttggaaaaatatgcttgagtcttgaacatattaatttggttgctgcctagtatagcacattgcaagcaattggcctatatttattcactgcattaggacatttaactttaggtactaaagctaagagtttatgtgattataaggtaaataatttatttttttgcgttttattttcatcactaccataaaatgagcctttagaggtaattttttcagtcctatagaagcagttttggagaaatttgcaactgttgccattttagggattgctaaagtgttagagaatctattataatggaagaaaattaaaatgtattataactctatcgtaaaataatacaataaactaaaataaaaaattgattaaatatatgttacaatacacatatatatagtactatatatattgcatatatatatatgaaaggtagaagaaaaaaatacaacacatgcaatataataaatatacataacaaaagatgaatatatttatgggtgcactcttaatgggtaaaattagaaaattttgagtttttatacttaatttttctatctaattaaaaaaattctctcatttttatatcatatgagct

SEQ ID NO: 305563 - DNA, 3180 bp, Cannabis indica
ttggtacgccgtattacaccgtattgtattgtattatattcaattatattttatacaatatttttatgtaaaactatacgttatattaaattttatggacacctaaatatataatattttagtataaattaaaatttaacatagcattatataaaaatatgatatataatccaatttaatataatataatacaatacgacgtttcaaacgagccctcagtgtgcaatattatatgccgaaataccaaagttcaaagcataataaatctgtatatgaaacttgtgatataaatatgaaattcaatgtcggaaatattaaattaaagtaaaatggtaaattaatgaagaataatacttcagatatatacacagaatttatgccttctcctattattccatcaattattcgccattcaaaaaactaaactagttcaactaatctgttttatagcttgaataagaatgttctatgaacaaagttaatatgaccacgatatttattttttactttttaccaccaaatcgcaacttttgtgatcagattccgcgttagaattagaatcaacaaagacaaataacacatcattaaatgacatgttgtggcaaccacatgcagttagctcttcaatggccccttcaggaaatttcctcattgcttctgatatctctcccatactgaccaatataaactaatctctgtcttacctcaaccccggaagataacaactttagttggttttttttcttttagaaaaatcataataagcaagcactttgtctcactcactcactcaccaatgtgtaccagaaagtactacggagaagaagggaccaaagggttgcttatgcttcgcctcttcgtgggaaaactccaaaggagactttctcttttagcagcagcagcaagagatagcgatgagagtgctctcgatgaagaattggaagtggcaacaaccgtgcctgaggacgtcaaggaaggacatttcgcggttttggcagtaaaaggtgatgagaaaaagaggtttgttgttaagctagactacttaacaatcccggagtttcaaaggttacttgagcaagctgaagaagaatatggctttgaacaaagtggagctcttgcagttccttgcagacctgacgaacttcagaaaattttgagaagacataccagggatgagagcagcttctctaaagaagactacaccttctagtaatcttaccatcaaacaggaaaactaggcaactgaacacatttagcttattcaagtttgtatatctactcattattcttagttttcacaatttcaactggacaagaaagaaaatgttacaaggaatcatgagtgaggctgtgtgtttgaataatcgatgtaattttattcattatcataacccatgatactcgtttgtcccaatttgtagttacatacagaaacttcattacatgtttgtgtatttacatcaagtatctatctgactcagaattgtggggatcaacataacccattttctcaagacagactcaaaagaatttatgatagcttcataaaaacatgttagaaaattggcaaagacctgaaaatgggagaaaagtcttggtaggccggctccactgctttggtattatttgacatcagagcagttgcttgggcctacaggctctttcaagcaactagatattgccataactgctgcttcaattgatgcatcctcaccctgtttcaacacatttggaagcttcatattccaaaacattacaaagaactaaaatttcgtataacaaaaggaatactactcaactcttccctaccttctctttccagtagaagatattcccatacttgccagccaaacgactccaaaaactttgcggtacatctaaatcgaccgatgcgcccacattgaaattcagtatatttcctggttaaaatagattcccatggccatgaagtacatcaactatggcagagctcattagaaatcaaaagtcatattatattatagaaaattaaaccctttaccaaaggtagggtcagccacaaagacaatagttctatcatccacttgccaaaaatctctgatagccaaacctgcaaagataatataattggttctaacttccaaaagggtaatcgaaattcaaaggtaaaaaagatcaaattttttccaacttccaaaagggtcatcatcagaattgatctaattggttccaagtttcaagagggttacattataattcaatctaattagcttcaacttccaaaaggtaatcgaaattataaaaatgtaattggttccaatagaattcacacaaggaaacacaaattctaaacctggggtatcagggtaattctgggccaaaactctcaacttgaaaccagtttctttttcaatatttgaaatttcttgggcaagcctcttctcctgcacagaacgaaagcaccataattcagttttgttatctctaaatcagaaagaaagagagagattacctggccatcagagaggaagccagctacatcaatcacagtagtaaactctttaggaagcaattctggcttgtttactccaactttagcctcaacacatcctacaaacgacataaatgtataaactttttcgttttctttttctctttcaagtctaaagaaaagtaaacaacagaggtttgaaactcaatttgtattaagcattgatatggaaacactacttgcctggtaatgcaagagaaaaaccgagtgtgagagcccctgagaggagccaattgaaggagttggatttgaaatgtgtgaagaaggaagtgggttttgtttggggtcgacagagatgaaacgatgcattagtaatgggaagtgtgagcaaaggacgtgaggttcctcgtcggactcggagagtaagtggggatgtacaaggaagatggagtggataaggcattctgtttctcgaaattgtctttggaagagtgtcatcaaaaatatatataattcagctctactaatctttttgttttgcttttaattatataactactaaacattcgcccagagatataaaaatataaaatattataaattatagggtaaatactattttgtgccttgtgttttgcaaaagttatggattggaccttgtattttgttaaatgataaaatagaccctgtattttctaaaaaagtaaaaa

SEQ ID NO: 305564 - DNA, 2695 bp, Cannabis indica
ctcaagtttatgagcgagtaattttattcttcttcttcatattatacatacatgtgtgtgttatattatatatggtgtaatttatttttttattcattcttatatatatataaatatatataatatttatagtgcatctgtaacatttatttaatttatctcttataattaaaagataattccttttcaatagaagagaggataaatcaagatttttaccatacaaggtaagagactctgtgtggaagccattcatgtgtaagcatattggtgtatatttgcattttactatttttaataatagtcatatgtattaacatattttcttttttgagatagaaaagtctcacatgttataatagagataaaaatatatatgtatatgtggatggtatccctatttccaaaaagattgtaaacagaagtagtaagcgggtgccacgttagatcgtacagaaacgtccttgattccccttttgtttgggataggatcagggaaggcattagggtgaccaggagagcgcacctgttgtaaagaagaaatccatccttgaagttgtgacctaatgctttcagcatgcagaagcatatgtgaagcctaggtcttcaaggaacactcatgaattggatatttcaggaggtcctaggttacacttccagaaagtaccttatagcctaactcggagatatattcgacggttactctttgttcgacaccaagtaagacattgtcccttgcgtcagaccataattgtgcgcgtatgtgcctctgtagtgcttattatccaacgacttgtctgggatattactttaaaaggagagacatttgaatgacatgtgtccctatcaacgtgtgataagctgtaccaattaagcacaacacgatggaagatccacctaccaaattaatggtcagatggtcttatagtattgcacaacctcatttgcgtgctgagtaaagacacctagtggggtaagagggtatgccctcacctacctagagacctataaatacctcccatttttaagtgcaaagggagaacaatttttacttacagaagctctgctaaaattcttagagaactttattcttagacagaaactagagtaatgctaaaacttttattgtaaacaattgtaatacttagacactaaccaaataaggctaatacaattgactcgtggactaaggatcattaacacctgaaccatgtaaaaaatatgtttatcttgtatttaatattttgcgcatttccttaacctcatataatttgtttccgaaaatctcggtatatattttggtatattcattgagagctaaggaaagctagttagttattatctcacttcagctatggtgaacatgcaaaagaataccagtaagaaagtcacgctggacacagtaatggaggaggctgactcccatgtctctaacctctagacttgtggtgtcagagaagaaggtatgccccacgcccaggcctgagaggaggatactgagaacgtacccgatggccatggtgatgactagtacctcaaaggggaagatgaagacagcgaagacaacaactatatcagagatgggtattacaaagatgagtatcactatgaccatgcctctaattttttgcgagtgaccaaagatttagaggaaactcaagaggagttggctgaacaaaaaaacctcactacgaaactgaaaaagatgatggagcatctgaaaagtaattttagagaatcggtaaaattcgatggtgaactgttagtggatgtagtggttggggaacatatccaaaataaaacagaggctgaaacctcaaatcgtcttaaggataagggtaagagtaaagtgggtgagcactcgtaagggcaaagtgggcgagccctcgcaagcccgcacctaggcctcctcgaaaggatgataccatggttggtcagccctcaaaggcgtaaaaggccaccagtgctttcaagcccagacgcccttctaaccctagaggtaaagccacgccatagagacaaggtctgaagtacccacacacaaagggcaaagaaaccaccctagtgactcggttaacaacgatgatagaacaactgtaggtcactctagagatagctggtccacaatagaccttcgacaatgactagacaccaaatatggaagatacaaaagcgagaaagtaagatcacgtggagatgaccttaggaaccatttgagtaacaacatgagagggcacgacctccatgagaatgatacaaaaaagttagaagaacagattgttgctttgaccaagttggtcaagaaataaagtggaacattatcagattcaaaagatgatgatctagaaccctatgtgagaaggatcccagaagctctgcttcaagatattttcaaaatgccccacatcaagctgtacaagggaaaaactaatccgctagcacatttagctaaatagaacaagatgatgcaagttgcttgcatcagtgatgacactaaatgtttgtgtttctccctaaccttgactaagtccgtggaggacaagtggaagtgattagctcctagatcaattgatagatggaaagatatgtaacctaccttccgcagtcaattcattactatgcgggacaaggatctggaagttggttcactcacaaatgctaaacagcaacacaatgaaagcctaaaggcttttat

SEQ ID NO: 305565 - DNA, 1106 bp, Cannabis indica
tttttacgtgattatttattgttcatatatctagaaccctatttgattaaagttaagattataagattaattaatttgtgatttttttgtataactttcaaataacatagaaaaaaattaacataaaatttagtacacgtgcattgcacgtagctttttgctagtacaaatatatgtatataaatttaaatttctcatactatatactatatgattaaaaaaatatttttaagtatggaaataaataaaaagtatattaaaacatcttttccaaatatttgagaatattgaaaaatttcacaaagtagatgctttcatgggaaaattgggattttaatataaccaaatgttgtccatcattacttttcttgttttgtttcacagccacgtgcataaatatctttcaactaattaataaatgtagttttgaccaaatatcatattttcgttttccattcaaattaaatcattctctgactatttgtctcctttacgtgatttttcaactacttgatggcaaataatagtcgtttggctcttttcgccgccgagttgcacttgagataattaatatacttacttcgtatgtattattttttttagctgaagttaggtaaaaatagtgaaggagagttcattataactaaataataaaaattaacttaatttgtctactaaatggtcccccattattatcttttatatatataataattgcttatccacatgtaagaataaggggccacaaaatagatcaaggatagatttttatatatataatcgggtagttcaaaataggtatctaaggataccaaaaaaaaaaaaaaaatagggtaatctaagtttatttgtctagaaagagtactatatactttgtaggtataactactgtaggtgaaatatatgtaatgaattccatctcgtttagtatggaagtgagattaggtgatgatcattcaatctaatctataatattttgtttatagtgtttttgatttgtactgagtgcagggccgaccagagggtgaggacagccggggccgaggtcccataattttgaaagctccgaaaaattaaaattaatatatatacatataaaaatatat

SEQ ID NO: 305566 - DNA, 1693 bp, Cannabis indica
atatatatatataattaaaattaagtcactaaatttattaatttccatgcacacacatattctaatctcaattatctttttatatcaatatttctctaattcggaatttgagtaagaaaattagaaaaattaattatgaaatcgaaattgggtgctctctattatagtggcgaccaaatgttgacatggataggtcgaaatggaatagccattattattatatttaggtgtaataactgaagttgatatgggcattctagcaatatcaaaatcttagattaaatgaattaacaaaataaaaagcaataccaacaataccattccaatacataatattattgcatgtgatgtgaaagtgtgaatgtgatacactattattatttgaattttgacaatagtcttttttcagtttcatcttctgagatcaacaagattcaacagattatgatgtcccacactgctgacttttttaggtaagaaaatcattatagaacagtttttcttgatgactttgaactcctagctaataacattcacaaaagtctccttattttgaattcactaacacaattatttctgattttttcttaacttttagaaaactgaaactgtcgtggtttatgtgtaagtgtaatacaacttaaaaaaaataattaaaaagagcatacatcgattaaatactttaaaataaaacatatttcatttaattttttttaaatgcaattgttcacataacgcatatttaattggctgtcttcttcacagatcgttcaaacacattgaaatattgtttaaagaagccaataaatgttgacagtcaaaaataatcaaactaaatggagaaaatatttggtatgtatggcaaaatacataaaaaaccagttaacaattagtttcaacaaccacctaagaaatgatctaatgtttaatccaattacccacggcttctgccatattctattgtacataactagccaccaatttcgactcgacctcaataaaattatttggtgtattttttttcttacacagtgatgttcattaatttttattatttaattaaattatcatggtacatatgtgttgagtcaagagtttctctattggattggacttaaaattggctatgttgtttgtgaaaaagaaaacacaaatacttgaaactggttttcagaactgtctaaagaggatttggatgagggagagattcagatttagtgtcaagcatttattacatgccaacttcaaggagttttcctggtctactgttaaaacacaagttgtgggcttgtgctattagtattggacactatttgtgtccttagcatttctcatcaaaatatggtccaatacatttctatagcaatggacaaatcattctcttaaatttagtgcattcataatgggagtaattaatctcaattaatttttatagatttatttttaggaaattaaaactttgaaggaataactcatgaagtctcttttttgagaggtatatacttccaattagaatattcattattatttctgtaaagatggcatctcttctttttaaagaattgattacctgagtgacacactaattttacctctcttaattctcctttaaaaaaaattaattaaacttcctctaaactcaaatcttatttgtaaagcccgcttagttaatttggaaattagcagttgttta

SEQ ID NO: 305567 - DNA, 1711 bp, Cannabis indica
acatgattgtattagagaaaatagtgcaaaaccccacatagaggtgagatgagcagtcaacccccaaaaaaaaattgaaaaaatatatgtgtaatttttgattagtttacaaactaaaaataaaaaaatataaatataagaataatttatggcataaatatataaattttaactctcgatttacaaataaaatgtctaactttaattttggcagtaataatacctaaattatatttctagaactccgtaagtacctaactattatcgacgtggaccattcagggattaccacgtggaaatttacttaacacttaataatcaagtacctacaaaagtttcagaaatataacaagtattattatcgccaaaaattaaacttagatatttatttacaactaaacgttaaatttaagtatttttaccgcaaattactctaaacataatattaattttgacatgatagttaagttatcttagaaaaacatttttatttttaatatttaataattttagtttactttttgccttctcacaaaagaaaaaagtatgccctcaactttagactaaaaaaagaaaaatatacacaatatgcttaaaaataaattgtaataacaaatgataagaagattactctgcaaataatcctaaattgttctaagaaatttttatttttatagttttgatgagaaaagttacataaatatgactttattttttttttttttggtttcaaaaaagttaaaaactatcgggaaaatgtgtgaggtagctagttactttaagctaaactgtttcgcccatatttttttaatattttttcataaaataattttctgaaaaataccatattttttacacacattatattatataaatactcataaaagatataatttaactatttatttattaagttgattacaagttgggcagaataatattatggcatttattgttgagttgtttaattcaattatggaaaagttgggaagaagtgaagtataatagaagatgcatgcaaacaatgaaactaataaatgcttcctcaaaatttggttcacaacccaattcataactctctctatttgccatattaggcactgctgccatatatttaattatactaatagtgatatgatactgatgatgatactaggcactagtaaggtcttttagtatttatttcaaattatttgttcataagaaatgttagagggcacctataatgcaattagtacagtttaatatcgagtctttatatattttactttaataaagattataaagaattaacaactaattataaaacgtcaactcataataatatattagacaccttggtatccataagaatactctatgtccatgcaaacaatattcaaatttttttatggagcttttcctaacccattaaaatcattttttttcattttttttttatttgttttgctataacgttctcttttttgttaagaataataaaaatatatatttattaaaagaaaaagtagaggggttgttttcattattgttcaatggtacaaaggtatattaaatgagcttttaaaggctaaggaaagcaaaaacatgatttcccaaaccagtattttgttttgactttgatcaactttacaaatacattttgacacgtaaacaacaacatatataatgtatcaaactttatttatatgtatatatatgtatatatatt

SEQ ID NO: 305568 - DNA, 3418 bp, Cannabis indica
aaaaggaattttatttgggccattgagaatgaggatggccagtggatggaggagagggcggaggttagtgagtatttccgaagtaattttttgaatctgttccagtctacaaatccaaggatatgtaatgagattgaagggataatcgacccttgtgtgacaatggaggaaaattgccagttgatcttgagtccttctactgaagagataagaaaagttgtttgggagttagctcctctcaagtccccaggcccagatggattccctgtgaaattttttaaagattattgggatgttgtggggaagaatgtgactgatagtgtgcaagaattctttcgtacggggaaattgtgcaaggagatgaatagaacttttttagttcttattcctaagaaggcccatgcgagtaggtttgacgagtttagaccaatcagcctctgcaatacggtgtacaagattatctccaaattggtggctaatcgcttgaaaatggtcctgaataaactaatctctcctaatcaatcggctttttgtggaagggagatggatcgctgagaactcgataattgcgaatgaagtgttccatgagttgaggcacaaacagggaagccatgtttttgtgagcattacgtgtgatatgtctaaagcttacgataggttggagtggcctttcattgataaggttttatgatgctttgggtttgaagaacatttctgcaagctgatcatggcatgcatttcgacggttcaattccaaatcttgccgaatggtggtttgaccaagaaattctctcctcgaggaggcttgagacagggggaccctctctctccctacatattcattctttgtgctgaggtgctctcgaggctgttacacaaggaggagttaggaggaagattaaaggggttccagctgagttgtgggggtccttctttaagtcatctgatgtatgcagatgatctgctcatctttgctatggcaaacaatcaaaatattgatgaggttagctcctgcctggccaaatactgtgcttggtctggtcaaaaggtgaatgtcgaaaaatctaaactgttcttctctaagaattgtccccaagatatatgctttcacattcgggagaagatggggtttgaggagatgactggaagtgaacgttttttgggtaatccttacttcatagaggtaattgtagcaaagattttgagttcatcaatgacaagattaattcccgttttgagggatggcgagccaaactattatctcaggctgcgaggactaacctaatcaagagtgtcttggcgtctataccgatatatacaatgtcggttttccttctccccaagaaaattacttcccaaattgatcaaattgtgaggcggttttggtggatgggaaacatcaagggaggcagattccttgcgctaaaatcctgggattctatatgtaaacccaaagagtgcgggggaattggatttagaaaagcaagggatataaacttttgcttaattaccaaactgggttggatgcttgcgaaggggcccgactctttgtggactacgatgatttgtgccaaatactgcgattctgaaggattcctctccacacctatgccgaaaaaggcttcttctgtcatcaaaggtatttgggcaacaagggactttatcttggagcatagtgtgtggatcacagaaaaggagtctaaggttaatttgtggtgccaaaactggatgggaagagatggtgatattatccatcagggagatataaatccaatactatcaaagaggctgctggttggagagctggctaattcttctggttcatgttggaatctccaagctcttgtttcaaccttcaagcccgaaacggtgaacaaagtagcagctattgatagaaactccctccctgacaatgatgtggggatctggaggtcgaatccgaaaggaaatttttctttaaagtcggcttattgggatcttaacaaggtgaggttctcccagaaggaggacatatgctgcaaaatctggaagagcaacatccatgagcggctcaaactttttctctggagattgtatcaagatgcccttccttttggaggtaaactttaatctatttttgggagtcctctgggattgtgtgtgctttgtacgcaggatcaaggagatgaagtgtgccattttatggctaattgcccgataacaaaggcactttggttttcctccccctggaatatccgatcagactctctttcttttgctaatggaaggaggctgtttcgtggttgtttaatcctcagatgcatagcccttttaggatttttcaatgttgaggagctagctctttatggtacgatcctgtatcataaactgtggaatttgagaaatgaattatatcacaatgggacgcaggtgatggtggagacagttagacaacaaatcaaaaagacttttgaggagcataaagctgtgttgggagaatctggaggtattgattcagagcctcggacaatctcgggtctgcgatgggggcttcctcggtctggtcgtataaaagggtatgtggactttacaatgaacaatggggtggtgcagttgctgtggttttctttgatggttcgggtgcagttaaggcgactggagctaaaaaggtggaggcgagttctattattcggggagaattggaggctcttcagtttggtgttttgatagctcaagacctttttgctaatgatgtggagttcttttcggacaaccaagtgttggtaaggtctctgatttcagggacttctccttcttgggaccttttctttgttttcaataagttagttgatagtttgttgtgtggtactgtagcggttagttggatttcgcgtgtgtgtaatgtgggagcccatgccttggctagatggggtctgaaccataattgtaacggtttaattcagttctgggaagtgagtccccatgtgctcactaagtttttcgttttagcttaatgaagatgatgttttcagcaaaaaaaaaaaaaaaaaaacttatttagatttgcaagataaacatatacaggggcggagcagaagttaggaggccaaactattttataaatttagttgacaaatatttcaagaacattattaatttcataattaaaatttcgttcataaaaaactttataattaaaattaaaatgcaaatatttttttacgaaaattatggataaatgaatacttttttttagagtaatttacggttaaatcctctcaattatgattttacttgcacttaaccttctaatcttaaattttgatggtaaaacaaaaccctccaaacggctaaaccattcacaaatttaaggtgtcatccattatcttagttaactgctgacatggactgcctaagtgtaccattatgtacatgtggc

SEQ ID NO: 305569 - DNA, 2839 bp, Cannabis indica
aaacacttaactacctataaatgatatttcagtgagctaatataatcactaaatgagcgctctattaattatctctatccagccaagctcgaaggaaatcatcgtttcgcttctatgtccagatagaagctatagatttcatatctatgattagtgctcccactcaattgaactaccatgtccttaatctatatgtcacgagaagatccataggtcgactttaacaaacagattgaagaacataaataatacaattgaactagaacctaaccatctcaggattgagatcatttgatctaatatcaactaggtgatattgaattgaatagatattatggtaagtttattatatctaattcaagttcaatataggtcccttccgatgtaatgttacagctagttcagggtagcatgacattaacaaaatatgctactaaatttgatagattgactaagtttgattttgatgaggtggccattgaagctataagaaaatccaagttcattagaggcttagaagagcacattgcctgagatgtggttgtggctgctaagcaactacgagttttaaggtcttatgctcaaataatagaattagctctcgctactaagggggctgaagaatagatttggaaatgcagtaatatgagaatagatgcttagaagccacattttggtactggttcgagtaggggttctgaccccaatgacagaaaaaggaagccaattgatccaccaattacgggtccaaataaaaggtttcagggtaaccaaggttttcactaaggcagctatgagaacttgaggacctatcctaaatgtccaagatgcaaaagacgccatcagggcaaatgtcaagttaaagcctgctttcagtgtggggtagtaggccacctaaaaagagactatctacaactatagaagacaaataccaagagaaaagattccatggttcattctcgggtgtttgctctaatccaagcagatgttgatgctagcccttcaatagtgacaagtcatatctttattgatggcattatattttctgctctaattgattttggtgctacacattcatatatatcgagtagagtaattgatggtcttagtaggccatgtgatatgttgctgagtgattttggtactttgttacctactggagagatagttatctctaggaggtggattagatccttaccagtgtttgtggaggatcaagaactgtcagtagatttgatcaagctagacttgtcaagattttgatgtgattctaagtatgaagtggttaactaagtacaatgctacagtagattgtaaaagatagatggtaacttttgaaccagacgacaagactccatttatttttataggggaagttcgtggatctcgaattacaaggatatcgacacttaaagtaaaggatttgttacggggaagatgtatagggtatctgactaatgtgatgaatactatgaaagaagtattggatgggaccagaaaaggtacgtgtaatgtgtgaattcttggatgtgtttccaaaagaattatcggggttgccattaaggagatagattaactttcagattgaattgatatcggaggttgagccagtttcaaaggccccatatcaaatggcactggtagaattaaaagagttaaacattcagttgcagaatatgcttaatttgcagtttacaagatcgagcacatcaccttggggtgcaccgattctatttgtgaagaaaaaggacgggtcgttaagaatgtgcattgactatcaagagttgaataagttaacagtgaaggttaagtatcctttaccaaggacagacgatatgtttgatcaactttaagggaagacggtcttctccaagactgatcttgaatctggttattaatagttgaggattcgacaagaggatattcccaagactactttcagtacctggtatgggcactatgaatttcttgtgatgtccttcgaattgactaatgctccaacaacagttatggatttgattaatcgagtatttaaggatttcttggacaactttgtaattgtatttattgatgaaatccttatctactctgattcagaagaggtacatgagagacatctttagatggtattacagcatcttcgagagcatgaactttatgctaagtttaagaaatatgagttctggttgccccaagtgagtttcttagggcatgcggtaagcaaagatggaatattagtggatctgacaatgattaaagcagttaaggattggccacggcccaagtctgctactgaggttagaagtttcttagggttggttggatattacaaaagatttgtggaagggcttgccaagatttctacacccctgactaagttgacccgaaagaattgtaagtttgttaggactgccaaatgtgagaatagtttccaagagttgaaagaaaagatgatcacgacaccaatgctgagtttaccaatgtactgtgcagctcgttgctaatcaacgaggttatcgaaaatcgtgattaattaaaattttgcttatttaattaaaaacataaagtaacatatatattaaattctgggatcccatttacaaaaacatttacaaaagtttaactgtacatatacaaaagtctgtcaccttgtgttaggctatttttagcctatattttggatcgattttatgttcacttttcactgttttaggacggaattacgcttgttttctatgttttcaggttccttggaataatagaggtctcgggatgcaaaagtccagtaaacgatgagctgagccaagaaaaaaaacacctttttgaggagagatgcata

SEQ ID NO: 305570 - DNA, 1359 bp, Cannabis indica
tttcttaactttatatgtgttatattctattatattagggaatacatatttggggtgttaatcaaaatacttgttagtaaatttagatcatgacactacaagaaatatcacttttaccagcataattcgctaccgcgctagtaaaagttttttaccagtgcatttcgcaaactgcactggcaaaaaggtcaaagttttaccagcgcacatttacagtggctaaaatctaacttttaccagcgcatttacgtgctgagaaaagttatttttgccagcaattttaattttctgctggtaaaagttgtaataccaacgttgatttgccaactccttttgacaacacatcagaagtaaattccattttaccaacgcaataccaaacttttgccaacacaaaaatgtgctggaaaaagtgatatttcttgtagcatgataaaatatattccaacaatttagtcatgagaaatacgagacaattaacaatttatttattagttattattataagtgcattggtagaaaataagacatattgttagaaataggtattagtgagataattttttaattaagacgattttattgagttctaagtgtaccatgcatgtcgtatatgaatttttaatattttcatattttgtgctcggtaatagtgtactcgaagatttggccattagtgtcactttatagtttggtatcttagaattattggagcaaaattttatggacatttagaatgtctagtttgcgtggggtgatgagttttgaacattttattccaaattgttaaagttacttaagaaggaaaaaatgagtatttttggtcttctaaccttaaatttgaattatctacttagtagaaattttagaagattaagctaagtcttttaaatttgaattttaattagaataaaaacaagaatttaagataattacaataaaaagaagaagaagcaaacaaccactcacctcacccatctcttactctctcttggttcttgaaacccaaggaaactccaaccatctttcaaagttttcaaaccaattcaacaaggttttggttatagtagtggtagtataaatttcaaggaagatggaagggccattaattgttgagcaacagtttttattcagattggctattacacttgattgtggaattaaggtaaagataagataaagatcgagcaacaatgattttagagttagatgagaattgtacatgtgaagactcggtttgaccgagtcaaaccgagtgtgtatatataataaataattaaataatatatatatgtatttaaaaaaaaaatcaaacaaaagaaacagtagcagacacccccattaatcgtctctctctct

SEQ ID NO: 305571 - DNA, 2892 bp, Cannabis indica
tctttctctattttctgcaattgattaatcttgataggaaaattcctatcaaatggtatcagagccaggttctctcccaaagttacaaactaaaaccaaattcttcacaccctttttctcactattctttcctatatataacactcctatccattacaattacacatatgccctttttatttatcctaaggcctatcagtggtgtaaaagggttgcaccaaaatcacaaagaaaatcgtttggcagcagaagatgttgccattttggtgcggccataggtcatcctcccctccattaaggttaattaaaatactagaagtttgtgaaaaactgagtaagtagtttaaataagtttttactcatttcaattggctaaatatttttaaaattattagaaatgtatgtaacatcttagatataaaacatattcataagatgacataaaccgtttaaaaacctaaaaaaatatataatctttaagctttaattataacataaaaaaaatattcataagttttaactaaataaattcttactcatttttattggctaatattctttaaaatcattagaaatgtatgtggcatcttagatataaaacatattcataagatgacataaatcatttcaaaacctaaaaatatataatttttaagctttaattataacctaaaaattcaaatcaacttaaataaataatctaattaaatggaaaagttacaaaagagaacgaagaccatgggtcctgatgtcctaaccccaaatctttgaaataaaataaaattagaatttttagaaattgggaatttattttagtttaatttgtttatttttgtttctttaaatttgagattgttttttcaaacaggaccctccccgttatgcattgagaatctcacttgtggcggaggaaaacctaggttacataaacaactgagacaacaaggcctaaagcagttagcactctacggtactgaacaaaataaactagacaagaactaataataccactacaacaatgttttccattctctacataaatctaaaaaagacaaatcctcaaaatgtttggttttaaaaacccaagtagctgtccagaactcaactttctcgcacacaaccgcttctgaattttcagccagtgaaataattctggcatttctttccaaccatacagcccaaatttttgctaagatcgttgttctccataactttgttctacgtttgcagccaattgattttgaaactatcatttgtggtacataacttggtagaactcaggccaactcgaattcctctatcaaattgatccataatcatcgaataaatttgcactccaaagaaaaatctccaacatcttccccgatgcctttgcagcagacacaccaaccaggggaaatgtagaggaaaggcttcctcttttgcatcttatcctggacgttcattttgcctaaagatacaagtcaaccaaacactttaactttcaatggaacacaacttttccataaaatcttcgtccaaaacaaacctctaacagccgagtttgatgtaaaccagcaaaaggctgatttacaagaaaaaacttctgacagattcagcttccaaatttgactatcttccaaaatactcaacacttttacatgtttgaccttttgcagtaacaaaataagacttgggacctctcgatccattaagttccttctaaacttgaattccaactctatgcccacccacctgccaagccctcgtcaacaatcagctcctttatagttgtgttcctcaccttagaaatcattactaagtcagagaagacacaagacactgagcaatgaatcaccaagccaaacatcttcctaaaattgaatcctatcccttcttccaattttgaagtgtaccagtccaagatattcatcatacacatctaaaatatccctccacaggcctttaggagacagacgacatccatttttggagtcccagaaatcatcagccttattatatctgcttaccaccaccctatgccacaacaaatttggctctaaaggaaatctccacagccacttctaaagcatacctttatttctcatctccaatcgcccaatacccaatcctccctcatctcaagccactaaatgttcaccacctgttgactctctaccttcaagagataataatgttctgttttttctgtttcaattgtgtttctattaatcaaactcttgaagtgttttcttcattcacggtgtttggtctatactgatatatataccaggataaaaagtatgtatgtattaactatgaatatacagtatacgttttttctttttcctttttttgataaaatctcattatgtttgatggtctctttccactatttttacataaatgggaaatggtaatttagcacgataagtgaaaatctcatatgtactagaatagtcactagatctcgttccatagatatatataaacatggggagtatcatttgatggagttaaactagtgccaacactaactcattcagttttaggaatgaagatctaaagttttttgtttgaattatttttttattaacattaaatgtgtatttctgattttttttttataatattaggtattagtttgaacttaatttaaataataataacaatgaaattaaaacaattcaattatatttttttaaaatatatatataatttaatctaattttaaatttatatatatataaataaaataacaaataacaaatttatctttttttttagtaaaaagagtagaggatccttttgtcattgactaggatccttcccgacttaaatatttagaagcctcccttgtggttgggagaaaactatggttacaattaataacaaaacatgacttctagggcc

SEQ ID NO: 305572 - DNA, 2619 bp, Cannabis indica
tatataattttataaataaaataagtatgtattatttatttttctcatgtaaaattaagaatatattttttatcagtaataaaatgtataataaattatatataaaattttatgcatatatacaataggaaaattctataatgtacccccttaaaagggatgtacccatatatttttatctgttttagtatccgaaataattttttagtttaattttttttcatagtcatgtaaatgatagttatttaagacgttctgcaaaattttaaaaaattcgaagaaagtttaacatgccaaaaactgcgttcaaacaatgtgtgcacgcgtgattattttattttatacgtgtacaaaatagactgtttgattattattttctatattgtaagttgttctgaatttctcaaaattttgtaggatatcttaaatgtctataacatacatgaacatgaaacaagattagactaaaaaattcttctagatgccgaaataagtagagagtacatcagtacatctcttttaaggggtgcattgtagaatcactatgatataattaattaatataaagtatataaatttattaatttatcattttatattgcatttcaaaaaagtatgtatacatctatatgtatatatttaaaacaaaaatacgatttacatgtcagtttaatagagatggacatacatacacaagagactagactaccggaaaacttacaaaaatattaaaattttggttaacttttacaaaaatcttgtcatacagaatttttctcaaaaataccgcgcttttataaaacaacagtggaacacaaaacagaataactaaaaataacagtggaacaactgaaaaacaaccgtaaaacaacatcgaaaacttaatatagtatacagtataaaacttacacaatgttttttttaaaaagtccgctccacaataaaaaaaagtaagttcccaaaccaaattatagcatatacaaacttcaattttgaggatgataaattataatcttattttaatcttaactttaattttgtcttttgtctgactattgtttttgtgacagtatttggtgtaattatcatatctttttaataaatattttaaattttttaaatataatttatagtacttaataaattattatactaaaaaaagttatttctactaccctaaattatttaaaaatttacaaaagaaatgctataactactatgaatcacgttgtgaaaaattactctaccatatattaacttattcaagatggtgataaactagtgatgccgcggtggagtagtgaaaaatatatatcgaacattagcaataaaggaaccaaataataagaaagcaaatagagaaagaccaaaagaaaaaacaattgagaaaaactaaccttagaataaattagtagtagaagaagaaccaactccaaacgattgaaccatattacgtacgcagatgcggttatatatcatggttgcaatgctgataatatatatatatatgtatatatatatatatctcttctttcttcttgtgcgagtagcgcagagaagaatacagagagaggaagatgagtaataatgtatagaagtgtgagtgaagagatgcagttatatgtacaatgtaacctatataaaaaaaggaaaaacaataatgaagtggcaggcatggtagctaaggaaaaccccacaaatattaaataatagtattatatggacacattttttatataataatttgtagtgataatatgaaacttaaatttttgactaaatttgcgcaagtatctcacagttattgcgaaataagtaacttagtcagatcatttaagtaaggccacctcacttatttaatgccacattacatgtaatattttcttgtcaaaacttattttttcataggctcctattttatttattagttctttaattttagaataatttttttttacgggctcatcattcatcattcatttttttttaatgaaaaaggatccatcattttagattagtaatttttgtgggttttatggaaatcctgtccaatctaatagacgacacctttaatgttacttattggaagagtagtatatccttaatttagacaagcactttctgttaaaaaataatataaaaaaatatagagaagataaacaaaaataacaatatattaatttattattgaagaacaaaaaataaacacaaaataatataaaatacaaaatcaataatagaatggaaattcgaggtacatgaaacacatttcccttaacagcggatttgtcccctctacttgaatggtgttggaagattggtgagtaactacttctaatgatacaacgactattaagtagacgaatacaacacttttactactccagtatactcgaatgaagaccttcactctatcaccataagaacaacgagagagataaataaaagaagattagagaacttttaagagtataatatactaaatttgttaatgtgattagaatgaaaggagaaactccttttataaacttcatatattttgtgtgaataccaagtgtgaacacaagtgaattaacgccgaaaatccaacaaaattagtgaaattgattaattatatta

SEQ ID NO: 305573 - DNA, 1655 bp, Cannabis indica
tgatctgtacatatctacaatacgtgttttacctctacaggtaaacttgaacaactttaatcttctcacctagttatttttaactttggccttgaaggccttaataaacgtccaaggattgtgactttttatgtatcaagtataagtacccacaacgagaatagtcatctataaaagtgataaaatactatttttcattccaaaaaattgtaggcaatggaccacatatatcagtatgtatcaattttaagacactagaattcctgttggcacttaatttcttaatgtttatctgttttcctttgatatattcgatataaacatcaatgtcaatgtaatcaaggggtgcaagtattctatctaaacacaaatctccttattctacttttgaagatttgtcctacgcatttgtgccataagatgatagaattctcatttgataatttttgttttgtacctcttaatgttatttatatggtttcataattataagaatcaattgtatttagcatatataggttgtcaattaaagaaccagtcacaactaagtaaaattaagaaatagactaaatttattatttccaaatgaacaagactaaccatagttgtctaaaatagaaataaaaaaaaaaaatcaaatttcatctaattgacggtactacataagtctcgtttaattcaataaaataaccagtcttataatataatctaaatgtgacaattgcttcaactgaaaatgctttgcccttgcccacaaggataaatcttttagcatcatttgaagatcgactccaaatgtaaccctacataaaaatatatacttatgtgagtagtagcaccagaatctacctaccaagttctttgtcactaaatatagtattttcatacaagttatcactaatttagtattagtcacaacaagtattgtgactaaaaccacatttagtcacaacaaattgtgatttttgtgacaaacttttagctacagactttttaatcacaacgtaagaatcacaatttataattactcacaatttaacaagtattgtgactaaaatcacatttagtcacaacaaattgtgatttttgtaactaaaacttttagctacagactttttagtcacaacgtaagaatcacaatttataattactcacaacttttttatttttattcacaagttttgttgtgactaaaagtaaattttttgtaaatgatgcatagctatttataaatagggtaatttctactgtaaaaggctatgatattttgttctaaagcaaaaatgttgaaacccattcaattcatgatgataaataattatgagcgagtgtagttacatcacgctaagataaaaagtactacatataataatataagactcttccttttgagtatttagtatgtgcaaaagcataaaagaatggagtacttcgtattcttacttgtgagtattaaccaatgtatatgaatgagtaattaagtcgagaaacaaaagaaaatgagtttctagtattgtaatttatttttatatatatatatatatatatataaggcaagactatggtaggacctagcaaaagtttgttagacatttatatgtataaactgaaatatatatgtttatgtataaagtgcggaattaatcaaacatata

SEQ ID NO: 305574 - DNA, 3187 bp, Cannabis indica
agctcgattatgccaaggctagcgatgctatccctggtgaatctgcaaagattcaccatacaaggccttaacttggcctttttgagccccattttccttagagtctccttataaatgatatttaccgagctcccattatctattaacactctcttgatcctcttattggcgagttgaatggttatgaccagcggatcgacgtgagggtatctcacgttcttctcgtcttcctctgtgaacgtaatggggggttcctcggttttcaccttcttagaaggttctggggcaaagaccgactgctcgttctttatctccttcacatatctcttctgagtgatcactcattttattgacacaaatcccggctgagcttcacaatactactatatctttgattccgaaaattgataatccttccagggctattgattatcgaccaattgcttgttgcagtagtttgtgtaaatgcatctccgagctcttgtgttctcgtttggctagagttcttacgaatttaatcaatcaaaaaccagggtgcttttgttaaaagcagatctattgcttacaacattttgattcttcaagacttattgaagaattataagaggaaaaattgctcttgtaggtgcactataaaaatcgatatcagcaaagcttatgatacaatcaactgagactttcttgagcaacttctaatttcttattgcttccctgctaaattcataagttgggttatgacttgtgtgagaaagatatcctgtccttgcttatgaatgggagatttcagggttcttttaaaggagagcaggggttgaggcaaggggattcaatatcaccccttttatttgttcttataatggaatacctgtctcggagattccaacttgtagccaaggataaaaaacttcagatatcactctctttgtggaaaacttaagcttacaaatctctgtttcgcagatgatcttattgttttctgtaaaggggatgaggattccgttcaagttatcaaggaggctttcgaggagtttagcaaaacttctagcttgaaattaattttgagaaatcccaaatatattttgggggagtgacctgccccgagaacttagctcaaaaaatcaacttatctattgggaattttctcctaaaatacttagggattcctcttaaacctaccaaatggagacttgaagattgtggtatcatcctgaaaaagatgaagcaaagaatcctttctgggctaataaacatctatcatttgctggtacagtttaactaatccaatctacattgattggtcttaggaactattggatgagggttttccttcttccagtgtgattaaagagattgagaaactttgttgtggctttttgtggggtttgaaggaaaatcagcccaaaattcatttgtctagctgggagaaagtttgtcttcaaaaagctcttggaggcattggattcaaagatggtactagatggaataaagctccccttgccaggtttatttgggatctaatgaataaaaaagatatgttgtggatgaaatgggttaatgtagtctatcttaaggggaataacttctgctcttacaacttaaaagtggacacaagctggtattggaagaagttgtgccatcttagatctgagttcactcaagatggaataagatctgctggtgctgggggaatttttagagtgtttaaactctataattagtctttgaaccaggtagtagaccctgctaccaaagctatttggtgcaagctcaatgttccgaagcaaggttttatactgtggcaggcagttcattcaaaccttctcaccagagacatgcttaacaagtttcaaattgttgtggagaatgactgttgtgctgtttgtgaacttgatttggaatgccatcaacacttattctttgagtgcaggctatcaagattggtgctagctgatctatttgtgtggctggggttcaaaggctggtctaatagatttagcagctggcattgctggctgtgtactgctcaggcaagtttcattggtcggttgctggttgttctgttggtagcaactatttacctcttatggaggaatatgaataattgtatatacttaaattactctaaaacagtgaattgtatagtttaaagtactaaaaaagatgttaaatatagatttagcatggtcaagaatagaaaagggtctagattggagataaatttacttgagagaatgatttataatttattgttgttgtgagattgggtcttttccttttggaaaagtttgagggtgtatttggtttgttcgattattgaagtttttcttcttgatttaaaaaatgtagaaaataaagacatcagcaccaagatatatactacttcaaatccaatagatcgatgtgatctatggctctactctagttctggaacaccatcgaaatccttctttattgattgagcaagaataggtacaatacagtcgagactagattctctattgagtactcactaagtgtttcaactctcacacgtacacccaagaatcttcttcatctatagaagattcttcttacaaaattgaaacccaatctctttcttttctctacacctctctatctacctcccaatcttttctctctcaaactctcaatctcatcttaactaagttcttcatctcgtatctcaaaatagtcaaggtggtatttataggcttgggatcaagatcctaaagtcagtggttgaaagaaatgaggttgttaagttagttaaagataactaacttaaccaactcctctttgagcaaagtcttcatgtctgcttaagtatcagtctccgagaacatatacaagcttttggactcacggaccaaagacactcgctgatgatgcttccagataggattgagcttgttgaagtcaactatccagaactaccgttccaagatggagaactagccaactagaactccatcctggagtgaggctagcttttttgaagactagacttgaagtagacatgatagtcatttggaaactcccttttggactcaactattattccacaagactccttccaagatgggtaagttagttgtctgagaataatatctaaaagactcctaactttttaggaataactttccaagaataattttggaaactttttcatttggaggaactataccac

SEQ ID NO: 305575 - DNA, 1519 bp, Cannabis indica
attgatgtttatgtcaaattgctctctccatactaaacaagaattggtttgaaaggagtctcatttgcttgaaatatgatgactgtgtttttatggtagacatctaacatggtactttccctgaggatttagtaatgttttctttgttagggtatgtttttctcttctttcttttctttagtatattgaactattaaaaaagtgacaatttagaaggtgggatgaacagagtctgatgtctgtactctgtaatgtattacaggctgttgtaagactctttcatataccacaggataagctttttctgtatttagtgaaattgtctacataatcaaaatcattttttgttgatcttaagtaactgaaagtattagaataaggttaacacaacccacacacattgctggaataggaatatttaattatctgtttaattttgattttgttcatttatttctttatttttttatgaatcactcagtattcccattacacgattttctagaagaggagtttagccagttttaatagtcctgaaaaaataagagtacttggaaaacagtctatttgtatggttgctttgttaccctgttgagtttatctactcatattttaaaaaaaaaaaaagtaacatcaacttcaccaaactccaattcatttttgtttgcatttacatctaaaagtttttgtgatgaaacctacaattcttcctaactgacagcaatggtgataaactataggatacatgtggaagttccatgggtgtaaatgagtacttttgacatcagtcctctttggatggaaacctctataatatccttgattattttatcaagaattttattttgtatgccagattttattctcccattttctaactttccaagaatgctttgtatgaaagttactcttgtacaaaataaatccaaaagctttatttacttactctctgaatggaaagagttgcataacaagttttgctgcatatgttgtgttttggggtgtttgaattactagcagacctcattttttgctgtattttgtactatgcacaagcatttattactatacaagatgtgggtacatttgttgaaactggccaaacaatatcactggagttgattattgaagtgaatcatattctttcaggggaataccagttctcaaacaagagtgattgtagctgtaagacaggggaatttgctggctaccgcttttcatcctgaactgacagcagatactcgatggtacacgtctcttttgctgaacttctgttctcattgtttcacattcactgttctctgagttctaagtttttcttcttgttcaggcatagttactttttgaagatgatgggtgaaggatcatcgagtagtagtatcgactcggttggaactgattcacatataattcacccaccaccacgaattgactttcccatatatcagtaattgctgatcaacatagtactttttcctaaccccaaggggtggtctagtggtaaggactgttggaaagt

SEQ ID NO: 305576 - DNA, 1624 bp, Cannabis indica
tctttttcttcatcataacctcatattaactttgaacctttttcttgtttactaaggtttctactttgacattataattttatgaatagctagtctgctagtccataattctaaaacttttctgcctgtgcagttgctgacagaaatggatggatttgagtcagacatgaaggtagttgttatcgcagcgactaataggccagaagcattggatccagccctttgccggccaggccgattttcgagaaaagtatatgtaggagaaccggatgaagaaggaaggagaaagatcttggctgtccatttgagatatgttcctctagaggaagatatgaatctaatatgtgacttggttgcttcccttaccccaggttttgtaggtgccgatcttgcaaatattgtcaacgaagctgctttactcgctgctcgcagaggtaactttaaatatatttcatataccttcaagtcaaaacgcattttcctctatcgaaatatccatttttaaaacatgtcatagatgccattcattatggattattcaatgtttagtctgattgttcttgtaacttgtaaggagagaacaaatacagaccaaaaaaatgtgaatatatagcaactgtgagtagagatattaaatccacttctggggtttgcaggtggtgaaattgttacaagagatgatataatggaagcaattgaaagagcaaagtttggaattaatgataaacagctgaggccttctacaatagggaaggagctgggtaaactgtttccatggatgccatctttggcaagaaagagtgacaccagaacagaagggtttcaagatccattaggatatcagactttaagctgaagtgaagaagagtaagtatacaaagagtctattgatgtaacttatattggattttggacttgaatatccatttaaatttggattggtaattttttttattatttgttaccatctattgaacatataaattttcataagaatgacataaatggaatctcaaaactattacttgaatttgagcttcacatcacaagagccaatcaaatttctggtatgaattccatgaagtgtcatgctggtaaaaatggagtcatattctggtcaaaagtcaacttctaaaatgtcctaatcagttaccactcaatttgaaggcccaatatgaagaaagcaatgcttactcaacttgctttttgtttagtgcacaaaattattaagtgtatgtattgactatagtattaatacatactcaacttgcgttgcatgcattgccaatcatatcaagattgaagatattggagtgaaatagtgaatataaaattggtttattgtgggaaacatctcattatatcaatggtcttaccttacttcttcctacttgatttatgtagcttgaagaactaggcgtgggatattatggaaatccaattcagctaaaagacaaatagaaaaagtgatattaacattgtcctataaagatgactagaccttaggaaaatttgattttctatacttacatatacctaatagtttattcctaaactaatatatatcaccattaaaaatgtatgaccactttatttaaaattcaaaaatactcctctcaaattt

SEQ ID NO: 305577 - DNA, 1264 bp, Cannabis indica
tgttgttgttgttgttgttccttgtctcattttagccgagtaattacgccaaaagtaacagtagaggaatagtgatatgacgattagtactaaaatatcgccgagtattatggcgattaatgctagtggggttattttagctgttttgtttgggtgagtgtttgccgagttattgggatttgagttaataatcgggagagaactcggcgatgatgaaaccaccgtttgattaccggaaggtattactgacgacgcggtggctccgcctgagcctggtttggtcggattagtttgggctgtcttgcaattctccattggagatccacagaggttagggttttgagtaaaagcggatttggggaaagttgagaatgatttggggatttcgccggcgaaactgtttccggtgatgtttaagtcttggagatttggaaggactaagccggagatggaaccggagaatcgattctcttctaaacgaagagtcaacagatgagtcaaacggttgattgtggttggaatctcgccggataagttgttgtgggagagatcaagacggtagagtcgagcgagagaagttgcagaggccggaaagtggccggagaagtcgttgtgggagaggaaaaggagtttgagagctgtgaagtttgagagatcgggaatcggaccagagagacggtttcgtttgaggctcatgactcggagctgagtcaatgcggtgagtgactcgaacgagttacggagatcgaggttctctaggacgagtctggaaactctgtggtttatgcaggaaactccggagaagctacatgggtcgatggaggtagagttccaatcggagagattgttcgatacgtctgagctcgctttgaacgccattaaagcttctaaatctgagttcgaagaagtgccatgtagaagtgagaaggaacaaactaagaacaagaagtaaagggttctttccgccattgttgctctgcaaatgaggaaagagagagagagagagagagttgagtgagtgtaatattgtgtagtggaaaaatggtctggtttttagtaaagaaaaaggaaggagaaaggggtaatattgtaattatacaagcatgagaagggtattattggaataaaagtatgtttattttactcactggcaaacgacgtgattcatcgtaaggatgaaaagacgagagcatgcaacggtgaactgatcaagatggaaaagacagtcgtacccttctcgtcacttatggtcaacacacttctc

SEQ ID NO: 305578 - DNA, 1800 bp, Cannabis indica
tttttaaattatttttattattatacactagtggtacttattacttaataccattagttagccatatttaataaaagttacatttaagatttaatatttaattgtattaataatgataagacactttaaagagtcttaagcaccaattattttttagctattttttttaattattattattaattaagttgaataaattataatttaaaataaatatatacactttgttttgattaaaatagatagccttgtttgaaaatatacttttcactcggttttggtaggtgagttatgcatttttgcttagctaaaattgaggtcacttcaagattattattattattttttttgttttgccaaaggaaatggtcacacataactttatatattacataactttgaagttttcaattcaatatttttttttatataaagataattttatgtctatgactatagctatatgttctttcataaatttgtccaaaaaaataaataataattaagtggtaatactaaaataataaagttaattaaatatattttttgtattgaactggtctaattacaaatataaatggtaaccatgtcaaaccaaattttttattttatatttggtgtggtcttaaatcaaagagtaattaatatcttaattagaattaaagaatccacaaataacgttttcataataataataaaaaaattaattacctttcataatttgtttccccctaatgcaaatctccccagattggttacgtggaagagacgcgccagtatcaggatcaacaatcttcatctcggcgtttctaacgactgtaccacacgcgccggatttaataggaaagggttcctttgcaaaggccaagcacatcgatagtacgggtcccgcctctgtcataccatagccctgtaatttttaaatcacagaccaatgaacaccgtctgttattctcaaattcgtcaacgtcaggtcacaataacatttagtagttaatgatgtcttatatagttacaaaaaagaagttggtgattcttggtacaacggctaaagaaagaaaaaaaaataaataaaaaagtaagatccaacacaatacgtgcaaaccttttttatttatttaatttgtcacctgaatttttattttattaatataattaaaagatttttgtattacttaaaagtataatattttattttattttctaatatattatttttaacactttttttttataataattgagtaataaccacttttaaaaattattaaataatatatattttttaaaaaaaactaaagttattcatgaaaacaattatttatatatattaaataattaaatttttttattttaaataaaaaaataaaaagaatgaatatataaaaactatcatataataatattttttttgtacattctttttcactctaattgtaaacacccattaaaagatgtggaaaattctttaaaatatttctactgaaaatgctcttttagtgtgtcgggtcgggtgtccaacatagagatatgatataattaagtatcattataatttataataataataccaataattttatcacattttatggcagtactagctaaatattactgcaagtttcctttaaaatttcttaataatttaagttaatattacaaaaaaaaatacttattattcacaaaatataatctaataatgctcaatcaaatagtaggtgtgtctgtgtcaatcttaccacaatttttttaatatataaaaataataatcattgcaaattcttgatgacttggccaaac

SEQ ID NO: 305579 - DNA, 957 bp, Cannabis indica
ataataataataataatagaagcatggaaatgatgaattggggattggtataatgattggtggagatcgaaggaagaaaataaaaccaataattataaaaggtgacaatatgttgagtagtagacacctaagatgtacatgaaaaattgcattacatgtcgctctaaggtgtatcaaataaaacaagtggaccctttaaggtgagaagaaaaacaaaagaaaacaaattgtagaagaggagtggagtggaatagagtggaccctttaaaaccatataccatagcttagcctccaaaaatattgattatttctacctataattaaaacccccaattcatcaatcatgaaattagcatatgtacatatatatatatatatatatatatacatattacaacctgtaatcctgagagattatagctgtactaccaccaccggaggagtgtttgaagttctgtataaatgtgtgtatatatgtgtgtgagtgagtgtgagtgtgagaaaaaccaaaacttgtactttgtagaccccaatagcttcttcattgcttccatggtccccttcttctccctaattttcctacatcacgaccgataataacatattataaagcgatggacgttttgtaggaccatttatatacttcaaattcactaccttccctttaaaaaaaaaataaataataataaaataaaatgaaattcactaccttcttcttatttcatttgttgatcatataaatataaatgaaatttaatttgcttcttttttactaactaatcaaataatattaatatacttttaaagtatacatgctaataagactatgttgatttttgcactatgttttaatagttttgatgtctcttacagtttttgtacctttcatgatttttctgtcatttattatggattgaccctatttgtttagggtaattttcaatgggcaagagaaat

SEQ ID NO: 305580 - DNA, 1044 bp, Cannabis indica
aaaaattaaaaaaaaaaaagatggttacagaaattatttttgtttcctatatttatataggtacacacatttgaataatattggtacagtattgatgatgagaaataagaatgagagagtttgatcatatacagcaagtagaattttggttaagatttcattaaagccaaaccactagtgtgttcccaatcacagtggtaccaccatcattttatgtctctatcaccgtatgaagtggacggtggatgggcccatatgcattttctattttatgttccatttgtgcctttctttaacctttacctcattataagatgcttttatttataacgttataacgtgctgacattgctcacaagtataaagaaaatattataatatacactaggaataggaaaaggtaaaagctaggtatgaatggaagtattaagaaaaatggataaattaagtatgtaatatatattgtcatcaaattataagccaactaaatatctaacaaaaatactacgtggtgaaaagaaaaaagttttagacattcttttgttaaaagacaattgtaatataaacaaccatttcaaagttgaacagttatttcattttcagaggtggtgtgttttctcttttcttgtaatgttatgtaaatgctaccactaatagtctcatagtgttaattagcatgttgaccaagtgatgatctactatgaatcgattcttattagttgttgtaaaattgaaaaattatgaacaaattaagttgtgtatatctttaaacaataagatacatcctttgggttatgttcccgagtgtttatccaattaaatctgcactattttgttcgtagtgtatctatttaatatagagattaatttcaaaaaatatttgaggcataaatatgaaaagaaccaattctacaataaaataaataaacactaataataacacacaataactcaaataaaatataaagaaaccggttatatttatcaactagttaaaaatttaagacaaaaaactagttccgtaaagcaactaagataaaaact

SEQ ID NO: 305581 - DNA, 2577 bp, Cannabis indica
gtatttttcaacttacccttaaagaaattggtattaagatagagccggctgtagacctggctatcgacccatctgttgcgggtcaagatcggtgcttcccctacccgaatatggaggtcttttgccacctctagtgtaaggataaaggcttacttttgattttaaaaccaacttcatcaataataatgtactccataaatttgaaatttaaaaattagttgattttgagtgtgtgtgcatacacatggcaatattgcatggtactaattgttaataattatgtcttaaattaagtaatcaaaaccatctattaatgaaagtgcgaaagcagtagcagacaaccattttgaaataacaagtaaagcaccaattttgattaatttaattaaacctctcaaaatcattccgagattgggcttgctttttgtgcttcataattatattattagcttatttctatcggctttatatgaaacaatgattaataattataattagttgagctaatcctaaaggggaatgtattttattttcaaaaagaaaaggggaatgtatttaacgagagaatatcgataatatatatttatattcctcatacatgataagtaattgagtatagaaggtttatggaaatttgacctgcagagacgggtatacactttgaatggaatgagaattactcgccttaatagataatagagtaagagtgggatgcaattttatatacccgaagcgagtttagagtcaagatataatttaagttttattgtctaattttctaacttataatattattattttattttgaattacattatactattatattattattattattattattattattattattattattttaattttaatggacaggtatttcccctactcggaacataaatgagaaataaattaatcctttcccttgaaggttttatttcatattttatgtatgtataaactattattctcttactagtagttgtatggtttaacttttttaaagatattctctttcccatataaccataatttaaaatattgttattagacacgtgctcttatggcatattgcaattatagttagtaatttttaatgataattattaaactaaaaaaatgtagaatataataattaattatagtaataactaatataataatatatgatatcgtttatgaattgattatgcaaaagtaaatagtgaattaatttggatatataattttttataaaaaatttataatgtgaatgaaatgttgaattttctaaaatatatatatttctaacaattgccagttgtaataatgccttttgtctctttgacaatacagtttagagaaaacactcttaagaaaaattaatattccattccatctgaacacatcatatatatgatatagtaaaattaagaacctaaatattctttcttgcattccttgctcctttttaacgccacattatatctataaatatataaatataatataccatttctttgaattttctagatcataattaaatatctgaaacatgggtacccacctcatttacttttaattaaagtaattttcttttcatcatcttaattaattaattatattacttgcttaattaattaaagtgcatatataatccctgctcaaacctaccatatataaataaccttttttctgatctctatctattactatttatttatatgtatgaataagaggagaagatatatatatgatgagaaattttgtaaatattggatggttgattttattattagtaataatctcatgtacatgtagttataatattactccatcttcaagctgtgtgactctaaaaacaccaaccaaatcatcatcatcaaattattattattataataataataataagaaggctattttgaaagaagaagaagaaaaggcacagagaggcaaaggaggagtctatggtggaggaaatgctgcaaatcgacctcgtccatacaaaaattcagcttcatcttcaatattactattatcaccaacaactatgcatcttttactatcattattgatcctactactctttatactctgatatataaatatatatatatatatatatatatattatgcttgtatttttgtgtgcatgtattaattaattgttttacttgtttggagcttttgagcttgtaaaatttgtaattgtacatgtttgtcagggttttcctttttcttactaattagtgttttgtgtattgtctatatttctttgatttcattaaaattgataataaattaataatgtttgctgcaaaaaaatttattatgtatgaaaattgatatatgacaatcatttgagagcaaatattgttatcaatactcttaaaggatcttattccacttcgaatgtaatggactctttaatttgttattagatattgtaattcattttttagcccgttgttaaaaaatttaattaatatgatttatttatcaatattactagaaaacattatttgtaattgaccaggtggttgaattttatgatatatcaaaggtttatttttttttcttttacttttt

SEQ ID NO: 305582 - DNA, 1235 bp, Cannabis indica
tatatatatatatagatttaaaacataaaatgtcttttctccaaatcaatttcctaataacccaagagggctagctcaaatgatgcttcgctcccacaaagtcagagatttgagtctctcccaggtacatatatatcaattactacaatttcttatctttcaaatattgtagaattatgtgggtagcctagtttcaaaaagaaaaaaaaaactttctaaaaagggggcacaaaacaattaatgaaggataagtgtgcataatttcctatctgaatctttcctcaaaacataaaggacaagttaatgtcatccagtattttcaaatatctatacgacaaactattatgttagcaaacttacttccaacgtaacaaattacagtgcaccatactattatctaacactcaaattaagagcaacaaaatgatcagcaaaggaaacttacagaaagaccacgtttgtctagggcagtggctgtcataagaattgcccatctaccgaggattgcagtgttttggtccccaacagcattcctcatactatttttgctagctagtgtaaagcaataaagaccaatagttggctctaagaaagaaatattgttggacaaaaatgcaaacttctccgcagaatcaattaggggactgaacattctcataaaagattgatagtaattccccatttcccactgcatatcgaagaggtccacaatcaatatacattgacaaaccacatgcaaattcatacatgcagatatatcataattatctaaaatagatccatgttaaagcacctccagaaggcttgctagccaatggtcgcccttctcaattgcagatggaagtataaactttgttattaggtgatgctctgcttgtccaccgtgcccctcaatcagccgacaattactagtgccagttgttcatccccaaggttctttgcacaaacattgatagcagaagcaatatcacctccaagcagaaagaaagcaatagccaactccagctgatgcttccccatcaagacatatgcattcttcaaagcagctgccttatttttctcttcctaaaatcattaacaccaataattaataaacttgatacaccttagaaaatcatgcagtcacttggtcaaatcttttaagcaatgtattttatatatagtgtgaaaacagtgtattttgataagtagcgtgtaacaggaacacaagcacacacacagagagagagagagag

SEQ ID NO: 305583 - DNA, 2185 bp, Cannabis indica
caaggagatgagtccactgtggtttgacctttgtcttaaggccgtttacactatgaatgacttctttgttggagaatatggctttatcaagttagaaaaagttatcactctagccatgggctctaatggtggcaagaagaagttagcagactctcaaactcttgttactgaagcgtaggacaatgagaaaaaaagagaatccaacagagggaaaagagccaacagtggtggtaagcaaggcaactccccaagtgaaaagaagcgcaagactaggggaaagcccttatgagagtatgagctttagtttaccacctagcccacccttttggcaccaagagtggagatctatacaaccacacattcaatagtgaagtatcacaaacctcttcccttcaaagagttagggaagagagacatgaacaaattctattactaccacaacaattacggtcttgacactaatgagtgtaatcagttgtaggatgagatagagtttctcatcagacaaaaaaaaataatactattttgcggtatgtatgacctaaagctatagctgagggcaatgcacttctctagcctactctagttgcagttagacttgagatttcgattggtggccctcaccaagctagaaattcaaggaaagccttaggaaggtaagcaagatccctgcgacatgaaccaaaacctgaactactggaggttgcaaagcatcttccaaagtctcaacgctacgagtgtgctcccataacattcaaagattcacactcctatcatgtcagttaccctcacaacgatcccttggttattggggtgcaaatagcaaatatgatggtggcaacggtgatgatgaacgatgtggcactgtacggagagaaaatcatcttgcatggaagagatcttgaggttgtttggttatgttttcatttttcatgtttcaaaattgtgttttcaaaagtgagaatagaaaaccgttttttgtcattttaaaaatttaatcgtatttggcacaggttttttaaaactctttttaaatttttttatactaaaaaaaatcaatattctacaccatacaatgacatgaacccatcctaccccagacccgacccaaactaggaccttggcttaaacccagacccaaatctaaaccccaaactcagacctagacccaagacctagaacccaaaccccgacccgacctcggaccctaaccccagacccaaacctgaacccagatcctgaaaccgggggtaggtctaaggtccttagttgggtctgggttcggggtctgagtttgggtctagggttcggggtctgggattcgggtcttcatttgggttagggtctaatcagggttcgagttgaggttcaggttcgagtttggggtccaagttcaagtctggggtctaggatctaggatccaaaattgagatccgaccccagtttgggtcagggtcgggtctgagtttgggtccatgtttggggttcgagactgggtccaggttagttgttagaggttcaagatctaggtctgaagtgtgggtcttagatgcagggccaagatcctaatccaagtcttggttagggtcgagggtccgagtcgaggtctggggtcaagggtccaagttggggtctgaggttcgggtctagggtttgggtctaagtcttgagtccgagtctgggtctaagggttaggtccgggatcaaggtttgagtctgaggtctagggtctgggtttgggtttgagatccaagtctaggtctaggtcgaggtttaggctctagggtccatggtcggggtttagtgtctagatttgggtctggggttcgagatctaggtttaggatccaagtctagggtccaaattggggtctaggatccgggttcgggttagggtctaggtccatgtcagtcagggatccgggtcggagttttggtcggggttcgggttcaagtttgagatttggggttcggggttcggggtctaggtttggggtctaggtctaggtttggggtacgattctaggtttgaggttcgggtttaggtcagggttcgagttcggatccggtttcggggtccagggttcgggtccaagttctggtccatttttgggtttgggtcttgggtccaagtacgtgagaaaaaaaatataaaatataatatgttagacaaaaaaaattatttt

SEQ ID NO: 305584 - DNA, 1105 bp, Cannabis indica
cgatattccctaaaaactattatattaaattatatgacacccgataattagttagaccaattacgatattcatagaagaaaattactaggatgtgtcctttagcatttctcttgaccaatgtaaccaataggaatgatgtcttaacaatactcataaaagaattcaaaccaaaaagcaaaagctctgaattcttctctctcatcttttactttttttttcatctcaaaacaaaacactctctccatttacacatttctctctctttttctttttctttctctttacaaatctcttctttttcttcttcttcttcaatggcatcatcatcatcatcacctctcattctctccttattactccttagtattaacacaggcagctcggcttcgacctggtgcgtggctaggagtgacgccggcattccggctctgcaaacggctctagactacgcttgtgggtctggagccgattgcattccgctacaagccgatggactgtgttttcttcctaatacgatccaagctcacgcttcttatgcttttaatagctattatcaacgtaaaggaatggctcctggttcttgtgatttctccggtaccgccactgtagctcagtccgatccaagtaagtttatatacatatatctatatatatgtatatatatatatatgagtgcttctataatgcaggatgcagtgatgaactatggatttttttggtattttgtatttagtattttttaatttaatttaatttaagttatgttataattatttataaaattttaaatttttttaataattttataatatagaaagtaatgttgaaatagtttagtttgagttataatgttataagaaaaaaattgacactaaaataattgaggtgcattggggcatttttttagaaagagtaattatatgaaaatataaaccaaaatattatgcattttaaaattattttgtaatattttagtgaatattataaatgtgatatttggcctgaaatttcttttttttttttttaggattgtgtgtagtatggtttttttttaacattaattagtaaaaattcaattaaacttttgtaaaaaaaaataatatt

SEQ ID NO: 305585 - DNA, 770 bp, Cannabis indica
gctgagctgcttcgaaaattgagtggagtacctaaaaagaacagggagaggaagcccacagcgtctgatgaaaatgcatcatattcttcgttagtagggtcttctgggttttaatttccccatttttggcgtgatcgtttgttccctttgattatttcaccttaaatttatgcataccacttgaggaggaaatctgaattattggtaacttagtagtgctatcttatgcttttgaagcataatagttgtgagaaagatgaaaaaacattagggaatgatgataggaatgtccgagtcaaaatttggagtccaacttcgattattttaatataatgaaacatgtgtccttgagttcaggagtacgaggacatttgaattttgaaaatgtgcataaaccaccattccaatttaattttctaagtgctaaatgtgttgaacagttttctttaaagtaaaatttatttttctcgttactttcctaaatgtgtggaatgtgttgcatcatcattcgtctgtttttgttttttcacatcctcaatatgcagaataatattattattttaaataattaatgttatttctttgtacgattactaatctagtgaaacatgaaaataagaattagattactactctaataattatacttacttccaaagacacttttgtcatctcatttcttttctattttaaatatgagtaatgatatatgcacatataaattatacacaaaaatatatataaatagggtgattggttaaaattacttg

SEQ ID NO: 305586 - DNA, 1099 bp, Cannabis indica
aatagggaagttgatgatatttttgtggtactttcatgggctgttaaggccaaactcacagtttagcttgttatccacggatgaaggctacgcaccaatggattgtaagggaaaagacaggctggccatgttcctatgaaagtccagctggccatgtttctgctacggtctgaccggccatgtaactgccaaggtctagcaggccatgtgcctgccagcctacaggctacacatcaactgatggctttcctttgtaggtggaggccatcctttgtaggtacaggccaacctttttaggtggaggctagcctttataggtggaagccaaccattgtacaccttttccttgcagaggtcaggcttccttggtcgaatggaccctcccttggtctaaaagtcaccttctgtcggccagcttgtgctcaaatccttgctggccacacaagctcatcttaagcggcctatgtactccctttggcttgccagacattgttatgtagcttcttgacggctttcttatctcctcttgcttgttgcttgatagtttttccatgccttgcaaggggactttgtccttctattggcaaggctattctccacgtgtcctcttacttggttttcgtggacatgccatgtcaggtggacaatatttgatataacaatatcatgtactccattttgaaatcatatgatttcattatttctgttattattgtaactatttatttaatttttaaaaaataagttatcattttaactatcactaacttaaaaaggaaaagagaaaaaacaaagttgaaagaataaagttgtaacaataaatttcattgaaaaaaaaatataataggaccaaaagaaaaatcaagttgtcaaaactaagtgaaaaaaatcgtaatacgaagccatatcgtggagttgatattattttccctattacaatttggtcaatgtttagttatgtttttgttgctttgtagttatctttttgttgtttaatatttgttttcatgttgtttattaaggtgttctagggttgtttttgaccttcttagtcgttttgagtttttttttattttactgaaacacagtatttttgtaa

SEQ ID NO: 305587 - DNA, 2366 bp, Cannabis indica
tatcaaacacagaagaatcatagctagcagagctcaataataaacaagcaatggatgtggtaggagcaactgacaaaaaggtagattgagtctaggggctaacactcccttaaaggtgataagctgctaaagccccttaatgtctaaaaaagagagggagaaatcatgcttagtaaatctgatacagctatccaacaacataaaataaagatacccaccctaacatacctaaggggcgccaaacaaataaaaccaattgagaaaatcactagcaacctccgccagattgatcacaataagccttccattcggccgcatgttgaacggcttcaggaccaaagatgcaaaagataggattggggttagcatgccacataagataaagggcttgatccacaatctcactgtcatgagcagctgacccttggagggtcttcccaagttctctctccaactctcagacacgagataaaagcctgccaacttggctctctagcttcctcttacctttacaagcactcccaatcccgtgaaaaacctcttccttttctttagcggctttagccagtcatgcaagcttatcatctctctcccttataacctcgttaagatccaacaagaattccacattgaagtctccacaggcgggaagagttgttgtcgctttcttttgagcatccccagctgtgatgagctccccttctaactcccgaatgcgggcctcattggagtccaccagagaagaaaaatggtccctctctgccttggcaaattcgaagtttccaaaatgcggctggtagataaatgaaaccaaaagctttgccttgtgcaagcacctcctgagatgcaacaaccatctacaaggagatgggaaaacaagggaaatggttagatataaaagaaaaaaagatatggtataataacactaacgtaatgacacaaaaatattggaaaaaaaaggaaggtcacccagacataagagcggaacaactgctcccacaagccaagtggaggaacgcctgagattccttcccaatgttcccttgaatattgagacatggattgttggagcaccagcataatgggatgtgcaagacttctcccaagataagatctcaaccatgtatgaaggcacgagcccaaacccctttcacgatgagcagaagtcctagttcaagcaaaaaatcatggtggggaatgtctgagggtagataggaagctagaggggcgtggtgatttgatagaaagatgggagggacataatacccctaatgctggtgtatcaacggggagcccgaatggtgtgaatagacctcttcgggggatcccccgtcatagggtgactgctgcctattctagtgtaagcaaaagaggtaggatccttgagctgttctggccagctagactcatttgggaaattcgaggggaaggaacacgaaacctcagtcgcttaacaccgcaatctgagctcgattgtctgcacttgctacttgatcaggatgggaaggcataggagagcccgaaccccctagcaggctaggcacgcaaatgttccaaattgggtaagggatgcagtcaaagtatgagtagtaggtgcaaccccattgctaggacccaactacaacaaggaaggaggagcactaaaaggcattgagctccaaggaccagagttggcacctttttctccccaggaaggaccctgtgaagaaaaacaagtttaggatcatccactaatgttcttcttcaagaaccttacattttttgctagtaagctcttaattgaaggctctagatgggtagcataattagggaggtcagggggcacagctagccccttacacgaggaatgacctctcgaaggctcacccgtggagcgagccacccaagggctagcaaaaacttcatccctcgtaccaatagtcgagctttcttccaccactacatcctcattgagttcctctataggggcccggtccagcttaccatcaacaccgtgttggaattaattttaccactaaatatgaacttctaaaaagataaacaaaacacataaaagttaagaataacttacaatgatggcagcggaattaagtgtctccttccactcagatctctaacccttgattcctgtctgtagcagagtataatcaagatcagagcccgaatgtccttcagttcgatgtgatccttcacagtcttcccaactataattgaggtaccgaatgatgtgtgtgggcacttctctctcacaaagaatttgaaatcctctcttcttttctctcttaatttcgtgagctatgatgcatacaagagaagagaacaaggactcctatatatagggaaaagggagagctcaactttccaaa

SEQ ID NO: 305588 - DNA, 694 bp, Cannabis indica
ttttttatattaataaaagtggtgttttgatgtataatgtatgatggcaactgggactctttgattgtgctactccaaattgcatgaaaaaactacagcagaaagctaaaattaattcaacagtaatactgtgccaaaatcaaaagtctccattgaggaaattaaacttgaacacagaaaatggctcaagaattgcaattttattttcgaaattgagccctttgttcagtaaaacattcttttttcttaaccagcattaaaagtaatagttaatacatggataataagtgaaattatataaaggggagaaatgagaaataaaaagccaatgagccaaataaaggtctacacagaaaaatatatcaaatggatttgtaaatattaattaccaaagcagacgcggtcaatggaggagtaagcccaatatcatacacagtcacaaccgctgtgcccagcccctttggagacaatatcaactgtaagcactgtagacctgttggaggttgaacgacttctacgacttgagtatcattcacaaatgcttctaagaagcagctcccaccagtggttgatagattaacctttgaaaaaataaaaagaagcaattatgctgtggaaggttataacaaatggaatttctaataaattagtgaaagagaactacataagccagagcgcaaattagtgtagtgca

SEQ ID NO: 305589 - DNA, 900 bp, Cannabis indica
aattttaaattttattcaaaaaatttgcttactctttggaatccaaatcaagcaactcagctactgattctgaccaagccacaagctgaggcttatccacttgaactgatggagaaacttttgtataacaagcatgcaaaacctaaagaaataacaataccaaaccaactttgagctaattcccaataaacaaaaacaaataaaaatcgtatctttacaaaaaaaaaaacataactctattgaatcaatttaggttttcattttctaggcaaccaaacacaaaatcaaaccaaaagaaaacaaacaaattacctctcgtggaaagctatcggtcctgggatcaccaggaagttctctaacaaacgattggtcccaattcagatcctctagattcaacctaaccttcttaattccattactaacatcaccagaagcttgtaaggtctgattctgcaaatcccgagctacggaatcgagggataaagaagcaacgtctgtagaaggcggcgagtccattgaaagtccaccgctgccgttgccggagctagcgtagcatgcgaagggtaaccggggaaatttgaagggaagggaagggcaaaatggtaatttgggaggacggtggtgagagaagggaaggaggagagggagtgagagagaagaagaagaagctttcgatgagaaataagaaagcattttttgtctattgtttttttttttttttaatttaatttcatttttattaaaacaaaaatttgtaatatataaatgaaaataaaattaaataaaaaaaatttgtcattatttgtgtgtgttgtgttttagtagggaaatagattatatactaggtgattgttacgtgccaagccacgtaatgttagttttatttaatattttagtttt

SEQ ID NO: 305590 - DNA, 5217 bp, Cannabis indica
tctccgttcaaatagatggctttacttctttattttctttttttcttctttattgtgcgctttatgaatatgtaattctcataattaatcaaccagaatgtattctgattttgttttttgcgtaaagatttggatttttttttaggttgaattgtttgtcaacttttagtagtctggtattttatttttgagctttcttaagtcgagaaacaaatcttatgttgttgtaagttgtaaccaatgtaaaaagtgatctttaatgtttcttttcttttttattttttctaaatgaaggaacaaaatttattaaaacacaaccaccaaactacaaagcaagctgccaagaacacaaacactgaagtgttaatcaaagacaaaacatagacagatcactaaccggtaacaagttatctgctatattgtctattgtgtatgctgtgttccctgctgtattctatatttagcttctttactttcctgcactgaccgttatggtcagatattctttgtcaagtagttagttatagattaagtttaagtcggtagttagttggtctggtgggtatatatacctctctgtttcccctttgtaattcattcaattcactttcaagattaataaagttttccttctcttccgcattatggtatcagagtgggaaagaaatactttccctgtccgatcctagtctccttctccggtgacggtatcgcgtctcttcttcttcttcgatactctgactgctgcgtactctctctgttctctatcatgttgagcaaaaaccagactgaaactcagatggaaggtgaagatcaaacaccaagaactgctcgaagtccttcagcatccatcggacatggtaatcaggatctgcaattcatcagctcaaagaatcctcccgaagatccaactaacacatattacatacaccacggtgacaatccaggtaacattcttgtctctcaactccttactgggcaagacaattatgcttcttggagtagagctatgcagctctccatctctgtcaaaaataaattggggtttcttgatggatctatacctaaaccatctccctccgattatgctctgcataatgcttgggtcagaaacaacaatatcgttatttcctggatattgaattcagtttccaaagaaatctccttcagcatcttttacgatgaatctgctgctaatatatgggaagatcttaaagttcgatttcatcagaggaatggacctcacatctataacctgagaaagaacttgatgaatcttaagcaagacactctcaacattggaatgtatattaccaagttgaaaacgatttgggaggaattaggtaattacagaccatgttgcacttgcaacggatgcacctgtggaggagttaagaaaaatcaggaatattaccatatggaatacattatgtcgtttctaatgggactctctgaaaaattctctcaagttcgtggaagtatacttctaatggacactcttccagagatcaattgagtatttcatctcgttacccaggaagaaaatcagaaaggaaatctttctgctgaaacagatactgctactagccatgcttttgcctttcaaggtgaaaaattcaagtctgatcaacaagggcagaaacctcaagctcccaagaaaggaagacctttttgcatccattgtaacatccatggacacacatagagagatgttacaagattcatgggtaccctcctggatataataaaccaaataaaccaaaagaagctgtggcaaatcaacttcaaaccagtgcagattacagtgccaagagcgaggatgctcataccatattacctcaactaagtgccactcaataccaacaacttctaaatctacttgctaatcaacatagcaacacacctgtgaatgatcccatcaactctgctgaaaattctggtatgatcttttcatatacttcatctcatttttttgatacctcatggatcatcgattcaggtgccactcggcacatttgcaacaatatcaaaatgtttcaaagcatcagtaatgtgccatctactaggcttattttgccaaataatgaaaatttgttggtaaatcaaagtggtactgtctctatttcagaaaaactcattcttgaaaatgtgttgtatgttcctactttcaaatttaatatcatatctgttagctatcttacaaatcatgaatctattaaaataaaattctttgctaacaatttttttatccaggaaaagcatcacaagactgtgattggcaaaggtaaagagataaatggattatatgttctggacaacagtaactctgctgtttgtaacaccactgttactgctgagatttggcactctcgaatgggacatccatctcacaaatgtttggccttactttgcaataagatctattttaattttgatgactgtcataaagatactccttgctttgtttgtcctcttgctaaacaaagaaagctcccttttcctaaacattcaggttttgcaaaatttagatttgatataatacattgtgatacttggggcccttatcatattccttcttactccaatcttaagtactttcttactttagtagatgataaaactagatttacatggacctttttaatgaaacaaaaatctgatgctattcaaattgttcctgaatttctttcttatgttcaaacacaatttaattgcatctttaaatgtttcagattcgacaatgcacttgaattgatttttaaggatctttttgctaaatatggcatcatgcatgagttcacttgtgttgaaactcctgaacaaaatgctatagccgaaagaaaacaccaacatttgttaaatgttgctcgagctctatattttcaagctaaactccccattcagttttggagtgattgtgttatgactgctgcttaccttattaatcgcactcctactcctaatttgaataataagtgtccatatgaattaatgtacaatgaatcaccaaagtatgaacgattgagaaattttggttgcctcacttttgctagcaccctcactgtccacagaaataaattcacttctcgagctcgaacatgtatttttgttggatatcctaagggtataaaaggatataagttgtatgatattaataacaaagagttctttgtttcaagaaatgtagtctttcatgaaagaatatatccctttcataaactcaatactgctaaggagctaattgatccttttaccaacattgtccttcctgccaccagtatatctaatacacatgtagcagattttcctaataatgttccatataattcttgtactaacacttcttctcaggcaaaaaatgcagataaagatacaaatctacatgatgctattcatgatcacaacacaacctgttctgactgtccagaccaagaaaattctagtgctgacagcaacaatgcctcgtcttcaattgacaatccacctgatcttaggcgcaccagcagaatctctaggcctcctgcctacctacgcgattatgagtgtcattctgtcttacaagacaaaacttttacccctcatgttcttcaaaatttcatatcttatgacaaactttttccttctcataaagctttcatttctgtaattacagctctatatgaaccgaccaattataatcaagcttttcaatacaaaatttggaatgaagccatgaacaatgaactctttgcattgttgaaaaataagacttggacctatgtaaggcttccaccaaacaaaagagccataggctgctgttgggtatacaaaataaaactcaacaatgatggctccattgagagacataaggcacgtctcgttgcacaagtttacactcaacaagaaggcttggatttttttgatactttctctccagttgctaagatggtgactttcaagttgctattggccatctctaccatcaaaaaatggcccattctacaactcgacatcaacaatgctttcttgaacggagacctttatgaagaggtttacatgcaacttcccaaaggtctaacattgcctcctgagttcgcaaacagctctgatatagtttgcaaactgaacaagtccatctatggtcttaaacaatcatctagaaaatggtacaagactctttctgatgtattaatccatgaaggcttcactcaatccatggctgattataccttattcactaaaggctctgaagacaacttcattgccctattagtctacgtggatgatatcatcatcacgggcccgaacttgtccttattacagcagatacaaactgttttgaacaacaaatttgccctcaaagctctcgggcctctcaagtatttcctaggctttgaaattgcccgtgctcaagagggcctggttctctctcaaaggaagtacacaatccaattattagaagaaactggatatattgacagcaaaccaacaaaaactccaatggaccctcgaatcaaacttgatgatcaacaaggagaagctcttgaagatccctcttcctatagacaaattgttggcaaattactctacctaaccttgtcaagaccggaaattacatttgctgtgaacatccttagccaatacatgtcctcaccacgcactccgcacttacaagcagctcaccatttacttcactacctcaaaggacatcccggacaaggcctcttatattcagcatcttcatccttacaacttcggggtttttctgactcagattgggcctcttgccccacaacaagaagatctactacgggtttttgcatatttcttggtgattctcttatctcttggaaaaccaagaagcaaccaactatatcacgaagttctgctaaagcagaatatcgtgccctcgctgctaccagtagtgagataacttggctccagtatctcctacaagacttccacatacctcaagatcaaccagccttcatctactgtgacaaccaatccgccattcacaacaccaaaaaccccactttccacgagcgaaccaaacatattgaactggactgccactttattcgcgacaaaatcaaccattcaaagattagactcagtccagttaacagcactatgcagctggcacatgtgttcaccaaacccctgccatctaccaccttacactctcatatcagcaaaatgtctgtacacgatgtgtacagtccatcttgagggggg

SEQ ID NO: 305591 - DNA, 2167 bp, Cannabis indica
tctttaataggaattagaaatgactattgagagtggccaataacctttaactagtttctcatattgtattctcaattttgctttgttcttatcttttttttttctgctattcaattacaactcaatatccccgttaatttttgtttaatagtgaataataaagtaatcatagtcctcgtgggttcgacccgtacttgcttttatactgaaataattgaaagtattgaaaaaatagtaaatttgatacggcatacaacacgcatcactaagtttagcataggatataaattcctcaatggggtaggcagtagagaaagtatgacatacatagtcttttaggtgtgaaggtttggttatttggcgaccagtttttgatgtaacaataggagccttggattttaaatctggtgtgggaataacaccatctgtttgtgagtgtggctcaatagaggcatctggtgtgggaataacaccatctgtctttgattgtggctcaataggggcacttggtgtgggaacaacaccatttgtttttttattgtggcacaatagaggtacttgttgttgtaccagggatagtgtatggaacgtgtcattctgtaactggtgtgggattggtaccagtgtgttgatgtttaataataggtgtgtgagcaggtatgcatggctattggaaaaacaaattgatgtcattgctcgaaccttaaccaagaaaaggaaagatgtgttcatggaatataacatctcgagagtgatatatttggttggtttcaatgtcaagaagtgtgtaggccttcatgccatgtggatacccaatgaagatggatgcatggcttcttggggaaaatttgttccttgttgatgtcaatgtggaggcatatgctaggcacccaaaacttcttagatgttcacagttagggggtttttagtataatttttcataggatgtgctaccattgaatagagcatatggggttctgttcatcaagtctgtggcagtattgattaggtatgcccaatagacaaggggtaagtgagattgaaagcacaatgttcttgcaatgttaagtatgtgttgatgttttctttccgcagctgaattttgttgtgggcgttcaacaaaggaatgataatgagtaatgcccttggaagcataaaaggatgacattgctagttctttggcattgtcaaatcaaatagctttaattggtgtagaatattgagtgcaaatcatgttgtaaatcatgggaatcacagtgtggacatcttctttagttttaagcataaaagtaaacgaagatgtatcatctacaattgtgagaaaatttctatatccttctgttcttgtaacatggaatggtccttgttatcccattttttgcactatgacgtggcatcacgtgttggtgacacgcggacctgattccccatatctacccaatagagatgctccgagcagggcacaacacatacctacacggacgatgtcttcccaactgagtagtgaaccgagcagcgtatcaacacttagcaattccagaatttgcattgtgaagcacaagagcaatccctataaatctgggatcgtatcatagagatatggcaagctgtccaaatcccacaatctatgtattctaaatatgtaatatatgttcttaccaattatagatattgtaagcgaaagggaaaccttccctcaagcatgtagccctataaatagtgatccgttctcactggtaaaggggtcaaaagaattactttagaaagatctaagagagcatatactcagagatttcatttgagagcttcaagagaggaaacactgtgttctttgttcttgagttaatacaaatcaaggggagtaggctattaccgaactgaacggggccgaacctctttagaaaccttgtgttctttacttatttgcttatattatacctaaatcatattctttatcgcttattattagactcattctttttggctaaaagcgaggtcaacatttttgtggtttcattgagagcaataatataagattgctctttacttcaagtttggcacaaaacgatggtggacaaactcgcagagccatggtcgatcaggtggatccactagcagtagatcctgcaatgcagactctagggaatgcaagggtcccaccagccac

SEQ ID NO: 305592 - DNA, 973 bp, Cannabis indica
ccctaaccaatgcatgcacaagtaattgcactgtgattctatgggacgttggccaaagcctaaccaagtagcctttaagtctttgttttatttttaactttttttttccttttaattacatatatctttattatatgctattgatatatgtttcttatttattttttttgattgctcagccaactagcttaattcttcagatgaagagattaatttcatatacatggttttatatattactgtctaaattcatgatctcaaatctgtgggccataaaactcagaagtctgctttggtttcccacccccccaaaaaaaaaaattaaaagaaaataagacacttattttttaattaattacagttgccaagttggtttttattaaggatagttggttgttattaatttgttctatttgtatattatatttttaggtatagggttatacccaaaatcaaagacaatgctctatatattttatgtgtaaaattaataattctgaatatatagtacattattctgataaatatggtagcctaaagctaaatctatagaagtgacaaacccataagcatatattatattggctcttccatatatattcattcattctcttgatgaccacaaatatatttgaaaatctacttattcattttttttttcaaaaaaaaaaatctcttttttacttttatgtactgcagatgatgtaaagatagatactcgtaaattgcacaaaaacgagaaattttatttgttattttatttttggaagaagtcattatttttgttgagaaaatttggtaaaattattcttatagtccaatcgagtcttctgcaccactcaattatttgtggttctagattgttgcatatgttttttgttttttgttacagcatgggtggagatttttagcacacctgagaggtgattttcacactacaaaaaattgtaattttttgtgataatttttagtc

SEQ ID NO: 305593 - DNA, 1524 bp, Cannabis indica
aaaaaaactaataatgcatcataaatgagaaaaaacaaatagttaattttatgttcttaacacactcaaaataatcatttcatccttgattgttgctagttttaatgaaattatcatttttattcacaaaacaaaagagtaatatcaaattatcatcacattgctctcaatctcttgacattatcaatttattttctttttattttctattttatttcctggtcatattttcagtttgggggatgtcccaactgagttgctaccctaattggtagctgaatttgttggttaataaaagtattttcataaaaaaaaaaatacctttagaaaaaataacaaatttacaaaaaaatttaaaatccatcactaatatattataataatataatatggtgattacatatatgaacattatattgtaactatatatcttacttcagtttcatctttcacttctcttatagctccagaatgtatgttttcaggttagaacttaatcaaattaaaataaaattagcaagaaagaaacgtataattaattattcattaaacaaaatcttaaagtgtaataaatattatttgccatggttaatgtacatgtaaagagtaggtaattaacttccacatacgagagcaattaaaagggcacttctctttttatcacacaatcagaacttaaaattaatcaaaattgagcactaacaagacaaattgaatttgacacttttcaaaatatatcttctttttttttacctctcttttgaattgatcacaaatccactagcaccctattggtaagaagggctagatggaagtaaacaagcaaactttgcctgggatccaatatgttaacatagcatgtcctcctgattcagcatggtgataattaaaactttcatgaaattttcaaaaaaaagacaccaaataccatgtaattttctagtttagtgactaataataagatcttgtgttataagtattgaagatggttaattaagtaccatcttaaaaagagttcgatttcggattcaattttctttttaaatattctaaaactagatcggatcagatccaatttaggaaaaaaataggcaaagcggggcagattaaattcgagatctgataagtatctgaatgtttcggatcaaaagtgatccgtcagatcgaagtgtcaatccaattcaaataaatgaatctttttgccatgactagttaatatcctactcttattgtcattatataatatatactaggtaataacaacatgcaatgcatgtttgcttaaacttacattgcatattgttattactcaattattaattcaaataataatattgactcaaaaatttggactagacttctaagccacacctgctcgctagattggcgaaaataaataatttgttaagtaattaataagaaagacacaacaatttataatagttcacccttatatcgcgatagtaatagggctacgtatactttgagtttttatttctcacgagatggtaattacagcaatag

SEQ ID NO: 305594 - DNA, 3200 bp, Cannabis indica
taatatttggcacttttttccctttgagatttttctaaccggatttactcaagaggttatgcggcgagatttttctcaaatatatatatttatatatggtatgcaattttgtgttatgaaattactaaaatctaagagattaatgtagtgaaagtgaaagaggaacaatccctttctaaaaaataaataaacaagaaaatgtacgctcaatcagaaaacaaagcctttttcttattgccaatgagaaagaggaaaagatacaggaatgtagaaaatggtaactggaggaatgaaaatggctaccaaaacccaatattgtatttttaataataccaatatgaattgaagggatttgatttgatcacatcaaatcttgatgactttgtttttctcttttttcttttcgggctttttgatttgtttagttcatactacattcactctttgccatcagcagcacgtagagaacccaattgaacaggtgcttgagttcccaccacctttgaggacccataaactgccaaatcaacacctttagctttctctttctcaatctgctcctttatccaaaagtaagtaaacctaagcccatcctttagaaagaaaaaaaaaacaaaatacccaatgagaatttgattagtctccaccttgaatacaccaaaacaatattatacttcaaaattattttgtaaagagttataaaaacaaaatttattttagagatctagcactttgtacaatggagcataatgatagattttatcattcttttcaggattttcagattagattagatttcagactagaatcactagagtaggggatttaaagttaggattatgtttatttattttttatggcaaagtacaataggctttgaattgttatttaacaaaataggaggaggatcaaagagaccaattaataatttcaaccagagagaatccaaaatgttatttactaaaaaaaaatatgttattttgaaagctaattaagatttttgtccgtaaactactttgatatgtacgaaatcatgctacgtgaacttttctggccattaaaaatttctcctgaactattgagattgttggtttttaggacttttgtccaatttcatttaatttattaattcggtgattgtccatgtactaaatcaatcatgctccccagattttaatatctaactttgacatgtgccaaatcatgcttctgaacttttatccatgtttgacttttcttactaaaattagacaaaagtccttaaatccagcaatcttgaatttttaatagtcttcaaaattcaaggagtatgatttggtatatgtcaaaattccaagagtaaaaatgaaaaagcctctatttattatttataataccttcaacttcatggttggggcccagcctagcttttctttaatgagagtgttgtctgagtttcggccacggacaccttcagggccaggaatgtgttgaatgggaaggtccttgttatcaaaacccagcacaatctcagccatttcattcatgctaaccatctcatcacttccaatgttcactggctcacggaaatctgactttgtcaatctgcattaattgcatacataaataaattttaatacaaaatcatgatcaaattctaacattatacatatatgtatgtatatttgtttgttaataaaatttaccttaggacaccttctacacattcatcaatgaaggtgaaagacctagtttgaagaccatctccccacatctcaaacttatcagtggaagtaagggtttttctacaaaatgcagctggagccttctctctccctcctaaaaaattaaaaaagaagaaacaacacattacgaaatgaaaatgtttatcatttcatatattcatagtcataatagttgtacactagcccacctttccatgttccaaaaggtccataaatgttgtggaatcgtccaatacgacactcaataccaaagtccttgttatagtgcttgcatagctcttctgttgctagcttctccaacccataagcatcttgaggctatatatattgtgcataacaacaattaatacacataaactaaatcccatgacattttgaaaattttgaagtaaatgagtatttggaattggagattgtggaaatattttcacctctgcaggccaagcatcagcctccttcaagctcacattagtttccaactgtttgaattcaggataaatgcacgcactagaggcatagaagagcctgaaaattaatcagtacaaatcatgttaaataaactattttaactttgtaacacctcattccaagatctccaagattttaaatccatatataggtgtttttaaatgaaaatacccaagagataagtggtcttgtattacataaatatcatattttatattgagccctgaaaacttcagagccgaccctggggctggtagggagatctgcaccttatatttggtcccttgattgagctagacccaaggattagattaagcagagtaattagaagaagtaaagagtacctcttaacaccattgatccttgaagcctcaagcatgttaaagctgatcatggtattgttgtacatgataactgagtggtttgactgaatgaagcccatgccacccatatcagcagcaaggttgaagacatggtcaactccactagtgacctttaaacaattgtccatgactctaagatcaactagatggaactcatggcaaaacatgtcctctgtcatgtgctcatttttcttccaatctgaagcaattatgtaatgcccttcactcttaagtctcctagcaatgtgtgaggcaatgaatccaccggcaccggttatcgaaattcgaagcttctccgagggccagtagagctctctctccaagctctcataggtgtattctccatagctacttcccattatgctacaatgacaaacaataaagcaaatattagctactaaaataaagttttaagagttttgacataacataccactagcttattaagttacatatattattcgtatgtacaacacatcactcaaccttttctattgaagagaaatccatcagcttagaccaattagattacatagaataataaaagacctgagatagagacacaaacctaaccttaagctagcgctttcatagtttgtcttttatggaaagttggagaaattgg

SEQ ID NO: 305595 - DNA, 1478 bp, Cannabis indica
ttttaaaatcaaacataaataaaatttccttttaatacacattattccttaaatattcaatatattatatactaattatttcattttatctcttaaaaatattacttatttatagactaaaacatgtcaaaatccttaataagtcaaattatttattattttggtaggtactttaatgccatacaagacatgaattggttgttctctctttttttttttttttttggagataattaattgacggaaaagagtatttaaaaatgttttctcattaaatgattgccctatattttttgggaaacatttaagttttagttaatataatgtatgtaaaaaatcattaattaaaagaaatcatttattattctcaataatgtatgtaaaaagaatatgcggtcaacctcctcctacatgcttattatcttaatggataaaaaattaaaattttgttaacaaattggaagtattttttcaagactgatatgataattacaaaatattctacttttttagtcaaatttttacatttaaaattttggggtataaataaaatttctcataatataatactgagaatggttctaattacaaatatagccttttagcaattatctacaatagatatgaaaatctacactaattttctacttccaacaggttagggtacatagggcacattattttatatattctttatgtaataatgctgctgccagttggcccttgtacctagatagatatttacaaaagaatcaatgctattttattaattagaaataaaaatatatttatacacaaacaatgacatatattgattaattgaagtaaaacattaatgaataaaattgattgcttccatatcattcatataataagtcgtagtccttatcttcattttttttttgatacaaaaatatcaacaacgagttgttaagaataggggaccaccagctcattgatatcataatatagcctctacaacttactcattatcttcttattactttcataatataataaatgttaaaagtaagaggtgcctaacattatttattgttattattaaagtaaatagtagcaagtatttaaaagtttaatttgtaagttatataaatttaatgtatattttttagtagtataaatagttattgtttataaaagtgtaattttgttctagttttgtaatatcagtattgatgaccaatggggacggattctttggttgttgttcaagcaatctgaagttcggttatcattccatctccttttggccaacatgtgtctgcttgtcgtacattattggcttccttacctttagtcacgattaattttgttaaacgttctgtaaacaaagctgcacactgtcttgctcgtagcttttgtttgtattcagatcgtattttcagtgagagtaatgctcctgctgatcttttatctattgtaatggttgaaagttcattctaataaagtttaccatt

SEQ ID NO: 305596 - DNA, 1875 bp, Cannabis indica
tactaattagtttttttttttttttgcatattttttgtaattatttattttttttgtatatttatgaaaaaagccctaaaaattattgtaacaactaaaatcataaattaaaaaataatatataaagtaattcccaaaaaatgaactccaccttcacgcacctcctttggcatcagttaattttttgtactatttgcttctatattttacttttttctttcttttttaagttttgaagtttaatttattaatacttttctatagtaattttttatttaatttcatttgaaaggttttcttagttatgtatatttaattatttttctttaatgttttatttccgcttaacatttttttcacataatattttctatgtttcgaaaaatacctagactgaagatacccctccctcgcggctcttcttcagtctctatctctctcttactcattctcccttgaatggacagcaacgggataccgggggggctaaccgttcgacgacgatgggatgcgaacgtagctctggtggctattgggtgggtcgagaggaccaactcgtcttcttctgctaagagtgcagttagtgcgaggcgaaggtatttttttcccattagtttcaactttcttctgttctctctttctaccatttttgctttctttgtagatttagataccataattcttaaattttttatgccttttttgcattatagttctattcggaagatggtttaatttgggttcaggtctgtggctttctaagtttctaatgtaaagagttttttttattattattattttctatttctgctgtgctattgccggggatgagttactttataatggtgtaatgtggtcttgttttgtttgattcagaaatggaagcattataaattgctggttttctcattagaatgttagagtttcatgaaggaacggcttttatattatatatatttacatggttacatgcatatatctaagctagctttgttttgagtacacggtgttgatttgaattgttgatgatgttacaaaatgaatttacattcatgtttgtcaccatgaaatcatatctttgaatttgctctgtgattttgtatttctttgttattcagattcttttttttgttagactatggcttgtcttattgtttgttacctttagaagtttttttttttgtcctggcaggaacatgtttgtcaccatacttggtcttacttggaacaaacatcatacatgtaattgtaatatgtgcttatgctctaaaaatgctatgtgctcaaagatggctttttatgtgctcaaagatggcttttttattttaacatttttgtttgaattggatcatgtggtggtgataataatttgattcttacttttagtttctctaaagtaacaattaacaagcttctagcattatgtttagaggatacatatatgtttcagattagtttactggtgatataacatgctttatttttttttatagttccttgaactgctagtgtgaattgggcaagatgtctacttaaatgaagcatgcattcttttaagacttgtatttatttttacggagtgctttgtaagtattactaaatttgtatcatatatatttatatatttatataatacatattaatgtgctgtgcaattgtaataatggttttgattttcatagatcggtacatctcctaatgtttttcattccagtacataattgcacatgttatacatggttttcggttatgtggtcttctatagcacaatagtaaatatgaattattattatcatttcatattttatttttgttttacatactgttgtccctgaattcgcccaaaatacgtggaccagtcgaatagggacacgt

SEQ ID NO: 305597 - DNA, 2396 bp, Cannabis indica
cccaacctcaacccaattaatcaaagaaaaggaagaagtagacatcacatcgaaactaaaatgccccgacaacaaaagataaaagctttttacatgaatattaagtactagttcagcttcaagaactcaccactagctaagtgaaatctcattctcaataaatctattatgaataagaaatctatttgtgccaaaatgcctcctcaactgtatacagttacaaaagtcaccattttcctttgttcatttcagtacttaataaaatttctgacaatactattcttaatagttatccacatgcacacaactgttaatttttagccagctgcagctcatgattatgtatattgtcaaacaaaaaaagccaaattcataaattaaaagaaaaaaaaataacacagcctaaacataaattctaattacttaacattcagactagtgcagccattagaaagaccaaagatcagattcagtaccttacaaacttctcgcgttggccactcaagtattgcgacttcaaaccacaatcaaacatttccgtctttcaagcacataaataggacctataaaaataacaccaaatgcccaatcaaaacgaaagctaattccagttaatgtccatgatttcacacataaaaaccttactctgtgagaaggttgacaactaaaagataaccaagaagtggcatagacccaaaagacaagttccatcagaattcaaaagacacttatcgcaaacccaaaataatatttcaacactaggttcgtgttctatcctttatgtaaaacctatgcagtaaatctgccttcaatattgcttcctaaattttaaaagtgaatcctaataataagatccagcctaacagtgagctattaactttcaacaaaccgaagcaacgcaaacttatcgggtataaacagctaaataaggcacctaggctttatgccatgttaaaggaactgttatcactggcaaccacaaagtactataaatcattttgaaactcttaacagctcagaagtagaccaaccaaaccttgtaaaacataggccttcgtattactctcgagtttaacagaaacaaaatcatataatccaattcgatatgattaaaatagttcaattcttgtcaaatccataccactgactgaaagactaaactgttatacatagtgttctgaactttatgtgttaaaactaatatcaagcaagcatctaatacaaatttcatggttacccaaaaaggcataattgttaaaaattttctttaaagttctaaaccaacggtagctacatggtttccttaccaattagcaacatgggttgatttcattatcttatttatcataataatgggttggccaaaataaaaaatctatatattcattttcaaacattggatcttcaaagcttctaagttctccttattctcataaaccataacatgttgctaataattcctccttaaaaattggatcttcaaaagttgaacatccccccccaaaaaaataaaaaccaactctttcactttaaaccataaaagactaaataatctaaatacccataaaccaaggctaaaataacgagcgcagacatcattacctaccgttgaccacataatcaaatggaaagaaaagaaagccattagagacccttttaagtccacaaaaatgttatcaagtaatccactttctttccaaaatctgaagccaaaactagaacaaatatatacccttttctcaaaaaccataaataaacaagctcatccatgtatctttctacaccaatttttctcggtgaaattgaattaagagagagaaatagagcaacttacagaagaaacccaggtcaaatcatcccttatagatgtgagaaaaaagatgtacagctaatacccgaaatatgcgagagcacacaactatggaagaggggtttgacacagacagggggggaagagagagagagagaaggagaaaaaacggaagctttgtatgattatatcgtttcctttaccatataatataataataataataataataataaataaataaataaaatataaaaagaaaaacccaaatgaaaatggagaagaatagtcaaactgtttcacctactaataaaaccaaaatcactgcttcgccatttcgttgcagatttcagcctagtggaggatgacactgccctgtcctgtctttttttctctatgcccaccttgtaaaaatttaagctttaacttttcttaccaataaagttattaaattcaataattagtattttttgcctattaaaatttgtataaatgtaaattaaatattttatacttttttattttaatgattagaaaattaaaaatataaattattgttaaaaaaaatcttttattttattattta

SEQ ID NO: 305598 - DNA, 694 bp, Cannabis indica
ccctgatcagcgtcggtagcgaatttcgcgaaaaccgacgcctaaagggcttaaaaaccgcctctaaagggtgtttttgtagtagtgtagatgttaatataagtgatttagctaatgatatttatgactaatcaatatgaatagtgcaatatagccacgcaaacaatatattgtgaagattggtttaggcgtggaatgtggactccttgaaaaaggaggtgtattattattattttttattgtttatcatcattataatcattattgttaaatcaggccgttatacctaactaactatactaattatattaattgcttaggtgtctagaaagattatttattaacatatttgtaccttaaattatacaaacaactaattatgttattttgaatctaagtattttaattagatgcaaactattgaatgcaagtagaacctgtgcttcaaaagccttgatgtcttgggaatgcttttctccattttgaccccattgcttgtgttgttgtctaaatatatataccaagttgtgtaggggtttaagggaagcggtacagtacttccttggttttttattgtcaagtttggtagcctgtcttatgtgggaaattattgttggtattttactcaaattatttatttatctatctacatttgttaagttgtaattttttttttttttttttgtagttatta

SEQ ID NO: 305599 - DNA, 1027 bp, Cannabis indica
tcttctttctattccgcaatagtaaattgtattttactatgtgatttgtaaaaaaatataaaccacaacgcacaataaaagatttcaacccacattgttttttttgcgacgtggtgtacataatttaggcagtatggacaataataagctaattaagaccatcacccactccaataaaaaatgtaaaaattataatatatttaacacaaaaaataattttgtgatgcacttacatcaatttttagtattatactttaatatataattgcaaaaaattgtgcaaaatttaataaatgtgttattaaaaatgtaagagataataattttattgttttattgtgtaaaataataaatatatatatatatacacatatataaattgtttataatttaatgtcatagcaaagtaaataaaaaaataacctatttatggtgtaattatatcttaaatttgacacaatatttactaggtgtaaattgatattactatttacacactattgtaatacatctttcgctacgtgagatatgtttaattttgtattacttaattatttgcatttacaataaaaatactaagcatggagatgtaaatcggtgtgtattgctaaactatatattattttgcacaaaaattgtcaacaattttgcaaatttgacacaattacaaaatttgtgccaaatagcataaattttacatttcttcttgaaaataatgcgaactattttgaaatttatcttgatggtttattttattttttatttttgaaaaggatctttacccatttcaagaaaaaaaaaaatcttgaccatcatattaatatgtcactttagttgctttatagaatgacaactgatcctacaaactaacacgagtgtttccagcatactttgtcctcactcgcacacttcttgggaaaacttctcaggagatcacccatattgaaattaccccaggtcaagcacgcttaaccatgaagttcttttgtgatgggctaccaaaaaacaagatgcaccttgttgatat

SEQ ID NO: 305600 - DNA, 911 bp, Cannabis indica
gaaaattaatgatatgtatgcatatattctctaccttctaaaatgggaaatgctagctagctagcttgccactaaaagagaatggccctcgaaaaagcaagcactaaaagttctggtatcattgcatgaaaactatccttttctctttatattttaaataattaagatataggatatgaatggaaaaatatataggaagaagaattaaaaagacgaaaagataggatatagtattgtggctgactttaagcagagcataaaacatatgggcgacaatttcggtgtggaagataaaggattggttggaacgttgaattcaaaatctgttttctcattgaataaacgttttcttttcaaagaaaagtctagaaagagacactaaaggggcatgggaatactcatctattttacatgtttcttcaaaaagatctcattcacatttttaaataatactataaaccataattattatataatgtcttcttcccaattatagcccgactttgaaaataagttaatgttaattaggatgaaatagaatgcaaacctcaacaataacggtgaagattaaaatggtataggattaatagagacaatagaaggaattatgattttttatctcaaaagtaattgataattttgtgaaaatacacatttttataaatggtataaacggtccctcacacttttcatgtaagacataatggtcaatggaattttaacgtgtcccacatattgaaagtgtacaaaaattgtaattactatcataattcataagaataaccacattctatattatgactctctctcgtttaatttattatttattattttattctatttagtaaaaacacctatagtgacaactttttagtcacaacataaatttctcactactacaatgtaagcct

SEQ ID NO: 305601 - DNA, 2091 bp, Cannabis indica
agcatgtacacccgattgtgtccctgtgtatattatgtaatgttaactgaaacacacttattacgtgacccttctaaactaaaataatcatgcatctaacatggtgaaactataattcattactaataaaaataaaattacacgagggttatgtgaccttaaatagtgctaaaattatagaaactaacaaatgacaagtaatatttagtatctactaaactatatcactacatctactaatcttgccatacctataataataataaaaaaaaaaaatcaaaacttgtaccaattttcttactatcttctataatgtctcaacttcatctcctatatggaatttttgttattaccatcttcttaatatacaaattgtatcagcttttaaggttcaagctcccccctggccctcacccctggccaatcattggaaatcttcacattaccttgaataatccattaactttccaagggtatttcgagttagcacaagcttacggtccaatcatatctgtttggctaggttcgaacctaaacgttgtcgtttcgaactcaaaacttgctaaggaagtgctcaaagataatgatcgaaaactagccaatcgacataggacttggccactggctaagattaccaaagatggctctgagttaatttgggccgattatgggcctcactacttgaaattgagaaagatatgcacacttgagctcttctcttctaggaagcttgaggaccttagacacattagagaggaggaagtcaggtccatgattaagtccatttacaaagagtctaatagtgttaatgggaaaagtttggttgtaagaaagtttttaggatcagtgactttcaattatttatcaaggctagtgtttggtaaacgatttgagaatgaagaaggtgagttagaccagcaaggattagaatttaaagcaattgtgagcaatggaaatgagaatggagcttcaatttttctacacatgattgagaatatttggtggcttaagtgggtgtttttccttccaaacaaaggattctctcaacacttggctcgtagggacaaacttattcaggatataatagaggagcacaagataaacaaggctaacattgggaattttgttgatgtgttactttgtctcaaggataagtatcaacttagtgaggataccataatgggactactttgggacatgataacagccgggatggatacaattgcaatctctgttgagtgggctatggcgcgattgatcaataatccaagagtacaaaagaaggcccaagaagagctagatcgtgtaattgggcctaaccgagccatgaatgaatctgatttgataaacctttcatacttacattgtgtggctaaggaggcactaaggctgcaccctccaactccactcatgctaccccacaaggctagtgagactgtcaagattggtggctatgatatccctagaggaaccaatgtgcatgtaaatatatgggccattgggcgtgatccaaatttgtgggccgacccactagagtttcgaccagagaggtttataaaggagaatgtggacctaaagggccatgactttcggttattaccatttggggctgggaggcgaatatgccctgcggctcaactcggcaccaacttggttacatcaatgttgggccagcttttgcaccaatttaactggactaggcctaaaggcgtgcttggggagattgacatggctgagacccctgggttggtctctttcatgcgtacccctttgcaagctgtgcctacaattaggttgtcaacgcacatgtacaacaaggctatgatttagcttattatgggttttagttttttcaagttgtgcttttttaaattttaacactataaggaactataattagagaaaataatattaaagaatctagctgtttttactctttttgggtacacttttttatttcaatgtataatgctcaattaacacagttttatttcattcttatgaagtcatttaattgaatctgccaatgattttttttaatatatagcaaactctatatctatttctatatatctctctctatatatatgt

SEQ ID NO: 305602 - DNA, 3111 bp, Cannabis indica
ttaagattgaccctacttatatgataattattgagtcgtctcatataatttaaagtaataaattttagaagatatcgctaattaatggtagagtgacactaataaaatatgttgggcactattaatgcccaataacaatactcttaattttattagaaaacatatatttttattaaaaatgttaagaggcaccacacaagaggtgtcaaactactattttagtgtaatttaatatcgggtctcacacttttataatttaataaataatataaaaaactgctaaccattcacaacacgtcacattattatagtgttgagcaccttaaaggacctacatcaataacatatttttatctcttaggcatctattttttttcaatatatagatttcaatcacacaaatattaaaattaaggtttggtagctataaatataatataaatcctacaaatcactcacaaaaataatgtgagacacaacacaaatgcttatttgttatgatttcattagctatataataattatttaattataccaaaactctattatataaatttaaggtatagttatattagagaaagaatataactaaatataattatttatctatacgatgagatgaatcaaaaccatacgtaaaagaaaaatacctaattaataaccaaatcatgtgggaattaataaagatcaccaacactaattaatttgtacgtaaactgtactgtaccaaactatacttaacaattaataatttgtggactacacgttgctagttcatggttattaaaaaaaaaaaaaaaagaaataaataggaatgtccccttaactattttttttataagattttgccccttcaatcttgaccaaaaaaagttgaccatgtagtatttttcttttagcaatttgttctacagttatttatttatcaaggcagccaagtgttgcattgcagtgtgaacatgtgttgatttatgtaatgaaaatataataataatgataatgataagtaggcatagagaagaatagactatttggcatatcaattggaaaatgacataaagagattcagttaatgtgtattattttcttaactttgtatttttaggtaatatggtggcttgttcaatttcaaaagggtttcttttattgtgggaatattccattggatcatcaaccaacctgtcctaatttcgaactttaataacactcaaatttcacattaatttgattttgagtatgccctacaaattatgtgtgtctatttttattatcatacaacttattaatagtgttgtcattgtcacacatatttgcataataatatttgacttgcttccgtaatgtaattaaagttgctttactttcttcttttggggtcaagctcgattttgggcataagcgaattaggtctgtacttaaggtctatttagcttaagagttcaaaaaaaagcttgtcttctttaaacacatttttttttttgctaattttaaaaactattacatttttctcaaaacaagggctcaattttttttttacagcccactaaatttcagggtcagccctgttttggattatagaagattatcgtaaatttcttatatctttaaataatacttttttatttttattaacgatctgctaatatgattgcttataatattactagagtatcttgttcatttccaatttcgggcatctttaaataatattcctgttgaggtacagtcttattttttgactgacgtaaatttatcaaaattctatatttacttctaaaaatttcttctttttttttttattaaaaaaagggcaattgctgaatttgagaaactaatcatataccaaaaaaaaaaaaaaccttggagttgagttttgaagaacatgctacattaaatgaaagaatgaagataagatatgttggacaaaaaattattaagataggcccaatagtttgaggatgagaccccatgtgattaattgatctgtaattcagtatgatggaaactttttgtccatagatatttttatgaactttatgtagatatttgagataaagttctgaattttaaaaaaataataatcttgaatattagtctaaaatttcaaaattttaaaacacgttttgaaaaaaataaagaagaatcatgagtcctaaaacataactcattagaatttttgtctctttaactttgacatatactaaattatatttttaaatttttcaagctcttaaaaattctcctaaactattgaaattgttagattcaaggacatttatctaattccattcaattttactaatgcaacgattgtttatacactaaaatgtatcccaaaactttaatatctatccaattctatccccgtcgacatgtacaaaattatgtccactaaactttcatccacatcaggttttcattagtaaaataaaacaaaatacttaaattaaatagtctcaatagtttaggaaaaaattttaacaatttttaaccgtcagaaaattttagaatacataatttgatatatattaaagctgaagagttcaaaattctaattaattttttaaataaaacaaagggtaaatcataaataaaagaaaaaacataatttatcaatttttttaagtgaaaattatacattttaaaagtgagattttaaattattatttttaagtgatatatccactaaactttaaattactttttaatatatacataggtaacctgcatatcccaagaatgtcttacttcccattttaataattgcaagtttgaaacaaattaataaagttttccctttaataaacatgtcacaattttgttggagaaggcgtgaatgatgccttggagattggttttgcattgcattcacacacccaaattattattttttattaattacttttactatttagtatataaattaccccactttaatgtcttattgttaactccattaacaaagattagcacaacattagctgtcattaaatgctcttaataatttagtacaacaactatgtggctcaaaaaattgcacactatttcaaaagagaatggttaaagggcaccagtagtgcctagtaccctcttatgtgtcagtatcgctat

SEQ ID NO: 305603 - DNA, 604 bp, Cannabis indica
atatgatatataatccaattcaatataatacaatacaatataatatgacctaatacgacgttccaaacgagtcctaagaaaattaaacacacattatacggcatgtgagattgagattcattttatgtaattaattacatatcatgcacatatatatatacaaaaatatttaccatttaattagttacaaataaattaatattatatgctaaaatttgaaatttagagggctagctagtctataaatttgaaaatcctatagaaagaaacaaaggaattaagaataaaaaaagaaaaaatgtaatataaaaatggaagggtattattgctccctagctagtttagtcagctttaggcccgtgagtaaattctatttaacatatataattaatataaatcccaaagagagaaattaatatatgtattacacgactcatactttatattttcaaattacaagaaatataatggataatttgcatttatatttttttggtatttaatatcaatattaacgtaattttttaagagtacttttttatttttactattttaaaatatatatatttttttttgtcatttttactagaattctacattaaaa

SEQ ID NO: 305604 - DNA, 913 bp, Cannabis indica
atacttgtgagtagatctaagttcctggtaaaataacttccaacaatatgtctgactcaattgacttctaagggcataaagtacatgtcaaccctattcgtattgtatgcttctcaaggatggggtcatccgtctgcccacaataccaattgactgtttgacttaaagtccagcccaaagcaaaatagatctgggtatttctacttctcccagattgaagagaagtggttttctggtaccacggacaccgacgtaattggtggctttgtggaggattattattttgttaaggacatggggactaaccataccaactttcaacatattctttcttattgtcgaccccctttcaccatggaacttaggaatagagccaagaagatactctaactttttgcagaggcttagaacatctcactattggtactgaggccaatttcattaagtatgggctttatccatctgacgagggctaggaggctaagcatgtgatggatgtccaagttttatgtgccaaaggtttatgtcattattaacagtagagtaatagacttgaggtggaaaaataaagggtaaatcattttttttatggaagtagaattacaaggagtgctattttgcaaagcagtgcttttattacattggtgtttgctagaagtaaaatttgaatcatgaatgcaacaacacttttgagtggaatcattagtgcagcaacattttagagttgaggaaaacttggtaatggtagctagatgacattgaatggtggaggaggtttcaccagacaattcttaactatcctttttagcaacactttccacaatttcttgtccttaacaaaataacaatgtttgtaaaattcaagaaagacatcattgtcatggattagtttagagacactaacaagattttt

SEQ ID NO: 305605 - DNA, 1272 bp, Cannabis indica
aaaaaattggctgaaaatttttgcccacaaagcaagaaaagttttattattttagaggttgaccaattacaattatatgggtgtaatgggcacatcatatagaatcatagataatcattttaataaaagaaatgaagttttcttttctcttttcccattaaatgggtcggtctaacatggtttacgttaaacaaatgcttaacatgatataattacaaaaaagacggaatttttaaaagaacaaaaaacagaaagatggtggcttaataattgtcgtttggattctggaatacatccagatgtatctgaaatgagatgctaattttgctttcaattatggattagccactactcctttacacgtctactgctaatcataataataataagatctttgtttctttacttttaactaatgaattgaaatgagggcttcattgagttgagaaccttccaaccctttaaagatgtaatttttctaattaagaaagggcttgattgatttgaaccttcctttccttcaaagatgtgatttttctggcgtgtttgacagaaagttggattagaaaaataaaattaactaaatggagatgcggggaatcgaaccccgtgcctctcgcatgcgaagcgagcgctctaccatatgagctacatccccttgctgcttaagcaattaatcaagtactttatatcactttttgtatgatgaaatgccacgtcaatcagaatcttgtgggtcccatcttcagtcagagaacaaatagacattgaaatgtgtctttaaacggaataaatagtgtagttttatttagggtgtatttggaattaactgtgtaattactaggcagggttattactaggatggtaattacatagtttagtaattacactatattttaaaatgcaagtatgtttggatataaggtggtaattacatatgaattcctcatatcttgtttggcaaaatagttagtaattacatggaaaaataataattttagtagctaatatttaaaatggaatttttttagtaattacacagtgtaattacatccaattctcatgggggctacgaaaattggagagtgtaattggaacccctcaattacttctaattacacagttacagtgtaattacatagtcagacaaacataccaaattgtgtaattacctccaattacacacaaatccaattacagtagaacttctatccaagaatatacttgggaccaagtaaattatattctaattgggaggttataactaaatag

SEQ ID NO: 305606 - DNA, 4107 bp, Cannabis indica
atcacatgaaaacatgagaagtaaactgaattataacaactatttcataatatgatatgatctacatatataatcttttccattctctaccaaaaatattttttaaaaaagcaatttagtaaaatatcgaataaatacattgcagtctgccatgatcatcaacttaagaaacaactgacaataatctagttagcaagccgaaagcttagacgtatcttcatactgaatgtgaaatacaaagctaaactagagctataatataaaactctacactgtaagactaatcaaacaacataatgccccaggttggaaacaagtaaggaaaaaataaagtttattagtaaaacttactgatcatattgtttaatgagtgacaatggcctttcataaccatctgccttctgttgaggctttggtttccctgcatttcttgcctcaggtttccaattagctttaacaagagatttccccaataagtcagcaatatctgtagccattgcctcaactttcttcacatacggaaaattatctcccttgaagtgttgtgccaaccacagatacatagacaaaacttgatgcttagtctcaagatccaagagctctttgtcattactagcagaacccttaggcatgcccatataaatattgactggaatactctgaccatatgaggaagcaaacttcagaagatgatacatagcctttgggtccctgatgttaaccggggcaaagcaaaaattgaatcgatcctcaagtgataacgcgggaaccttctccaacatgtttgcaacctttttgatatgatcatgcctacacaagaaatatgatccatcaagacggcaattctcaccgaatttttcaagtagctggcagaatgaagagttgtggagttttcctgcaaacagctcaacctgctcaaagaaaggaaagagtcccagtttcttaacttcatcaaaaggttgcttcagacactcaattaagtaatctagatcacttaaatgcaacgtggtagtaagtccatcgggatagcggcttccccttcgaccagctcttccagcaatctgcttcacctgggaagctggaactggaacaaccttatcaccattgaatttcgataaggtataaaatacaaccctcctaatattaagattcaggcccattcccactgcatcacttgcaacaagaacatcaaattcattatcttgatcattaaacaaattcgcttgctgcctacgagtttctggtggcaaagcaccatatattacacagcatctgtgatcagtgtgcttctcaatagccaatttaacctcaaatatctctcttctagagaatgcaaccacacagtctccagaccgaacgttcctaagatcacctagtagtgtctttgcttccacaaccaatggtttaaatctctcataatgctgctcacacaactcatcaccagtatcggaacagaccttgcgaacaatattcagaacactcgggtctccacacaaatgtatctcatcagctttcaatccaagcaatgcacgagtccacgcataacctctatgtgggtctgctatcatttgtatttcatcaataacagcaacatcatacaattcatctgtggaaaccatttcaacagtgcaagcaacatgattcgaaaatggaacgtgcttcttttcttgaccagtaagaagactacaatacacaccaagagcattcaccttgtcaaaaacttccatagccaataatctgagaggactgcaataaatacctttctttgcctccataaatctttgcaaggcattataagttttaccactgttggttggaccaacatggtatatgatcttacgcctcatagctcgtgcaaatgggaaccatgtgtgtggcttagtgagatcagctgcctgaatcatactcttaaactgtttgatctcagaagtaaactcttctaagcaaaactcaataaatattgggaacaagaacttaacagctgcatctgatgggccaagagttaccaaatacttggcaatatcagctgagcatttcttgaagaaaaagtttctaaatttttgcacagcagtagggaaaaaagctttgccaatgtaaatggcaagagcttgatcagatgcccaacctgattttcccaacaaattaaatatttctttgagtgtatcccaatcagaccgtctctgtttcgcgcccttctcagcattgcaaagctctcggtacaattcgacaggatcacgatactgaacatgaacataaccctcactcttctccaattcaaccatatcagaattacaattctcatcaatttcaacatcaacaccataatcatcatcatcttcttgttcattggaaataaccgaatcacaagcaatcacattgcccccaatttcattatcaaggtcaacaatttgccccatatcagcatcaaattcagaggctgaaccgtcacttttaacattaaaatcttcgtctacatcatccacaaccgaagaaaagggtttcacatcaaaaccatcactacccagaagaatatctctttgtgaaagtaatccaaaacactttttaccaatcaaacccttaaaaaagaacggttttggactcgaaaaggcggagtctttgaggaattttgagttagcaaagggtgaggttgagcgagatattgattacatagcaataccctaatccttgaaacgtgtttcctagaagcataagcacgaaacagagacgaagcagggcctattgccattgcttaacactctcacatacacatatataataataatctgaaccagaaaattaataataactcgtaaaaaaagattgaaagcttaactaaaaagtggatagattatatagaaaagcggcaaagttgggttttttatagtttttgttgggagcatacctgaaaaaagtagttggggcagagatttaaaagggaaacagggcgcctagcgcgactgcagggaagaacagtggttaatggtggtgatgctaaacccaccgtatacctccaactccaatacaggctctcttctgccttggacttcccttccttatggcccaaattattgtgccccatattcgcaatttggcccaaaattataaatagaaattgggaatatttttttttataaatacccaaaaggaaaaaaaaaatatggagtggtttggccaaattttttctgtttaatatattacaatttatatttttgctcacatactcggaccctaaactcggaccattaaacccagacacagaccccaaaccccgaacccggcttacacctagacttggacttggacctggacacttgaatcccagatcctgaacccgaatccaaaccgaaccctagacccaaacctaacttggacctagagcccaaacaccggacctcgacctcggacccagagcccggacactggatcctgaccctgatcctgacccaagatcccagcctgacccagactaggacccaaacaacttttttttttaagtaatattataaatcttaaataaaatatcatctggatcatggtcctgattcgagttcgggtttggatttgaattcaggattcggtctgggtttagatgggttcatgtcatggtatggtgtaaaatattgatattttttagtaaagaaaaatctaaatatagttttgaaaaacttgagtcaaacaccattaaatttttaaaatgatacaaatttgtattttattctcacttttaaaaatacaattttgaaaattaaaaactgaaaaacacagccaaacagcctctatatttttaagaatctccaattttttaacattattacggatttgaatttttatcttcttacaaaagtagggaatcttattttaagaaaaaatgttgtttcacgttgttttttcataatagtaatgtgaaaatattttttttttctagaacaaaaaataagtaaaaaacctgtaaaatacataatctgtaaaaatgtaaaagaaaatcaaaaatctaattttaagtacattatgttaatttctcatagaaatgtcaacaaactcgactcattaaaaaaaaaaaatttgatttctaaaccaataattcaaaccctaaaaaactatactttt

SEQ ID NO: 305607 - DNA, 2224 bp, Cannabis indica
attttgggtcttattaatttgtacctaacactctttctctcactcactcactacattatgaaaatatatataaaaatatatatatatatttttttgcttaaacaataataaatcaccttgataagattctgatttcatgcagtttttaaactttcatatgttgattagtgagttggctgtttctaatatccctttgatgaatttattaatcaaaacagataaagactgcaatatatttttatataaatatatcaaattaaaacttaaaagcttttactttatccaaaacctaattgtcatctcatccctcctatcaaaaaaaaaaaaattattattaataataataataatattacctttaaaatgtgaagacttccaaatgttatgttatgatatggaaagtgatagagggcttgacaagcatcatcattgttataatttgttgtattcattgactgatttaatggatccatttgtattggataccatagcttagtcctatacccaacaatatataaccaattttctttatttaatttttttactagttaccaatagaggacactgaaaaggatatatatagaataggatcttgataattttgcaatttttgtttttactaaataaattatgtagtttcttaatttttggatcaatttattaattaatttttgtttcaatttcaatttaatccacttttttccattgacattgaaacttgaaacttgaaaacatttatatatatatataaatatataatattcatttaaagtttctttaaagagaagttgaataattgaacatgcaatgaataaaccaattgttttcttgaataaactaatgtttcatggagaaaagagagtaataatctagtagtaataaagaatatttcttttattaattagaaataataatttaattatagtgtaatgcaaaaagaaataatgtaatatatttatatatattaatatctaatattgttaaagtttgtttaatattaaaaacccctccaaaaatgaaatcccattttgtggcctccaatgcaggaaaatccatgatagtcatcactaacaagtcatcctaattatataactatatatgttgaaataatggtgacaaattaggcaacaaaataaattaaaaaaatatattaattatgtcatttagtggacataaattatatgagaatgtttattatatttgattgtatagagagtccatgatgactcaactatcttttaattttactcatatagtggtctaataaaatatacccatgtatgtatttaatttaatcatatatatattataaggacttttacacacaaatattaaattttgagtaaaagtttataattttactgtcatacgaatttttttacaaaaatactattattttataaaacaaccgtataacaacaatacagaacaattaaaacaatagtggaacaactaaaaaataaccgtaaaaatttaacacattacaaaatataaaacttacataatatttttgaaaaaaattctactccacagtaaaaaaaattaaaaaagttaaaaatttcattatatagagttaaaattcctatgttatatttgtttattttgatcgagttctattttaattttaaatatgttatatacatataaataattatgacaaatttaaacttgtaatctaaaaattcatgacacaaaggtgagtaattgaatagattagtcatcatagttatgatagaaaaattgaatgtgttttacatgagtattctataatataaacaaaatgaatctcataaaggggatgaagttcatcctaatttaaataatatgtatagaataagattaagaagttgaagacaaacaataagacaatctttaataatatttaaaaattgtattaatttgcatgaagttggatcaaactctctgcctttaattggtattcttaattccttaatttgttataaggaatgagaatggaataggaatgagaatggtaataagaataggaatagaatggaatggaatttctattcttttgtttggtaaagactatggaatcaataatgaataagaactatgatgattggtatagtatagaatgaaatagaatttttattattttgaccaaaatgtcctttactcttttaaaataatttttgttttataaaattaccattatggtacaaataaaaaaatagatatatatttatgtatcactctcaaa

SEQ ID NO: 305608 - DNA, 3496 bp, Cannabis indica
gaaagcatggaaaaaattgttctcatcccctttgcataaccaggtaaccttgcttctctgtctcaagatgatacatcttctcttgagcattaaaagtcaaagcagcctctttcttggccaggtgataggttacatcatgcagatgttcttgagcttgagttctagcttgcaggtagaggtcctttgcttcttgatagttcttcccaatatccccaattctctctctattaaacctcttgatagtgtgcttcaatctcataagcttcaagtgcagagctgccattccctctcttctcatcgatatgtgctaattttcaagaactacttctttaaagtctgggtgatccgcccagaaattatagtatctgaaaggtttgatccctatttccacattggtagccatcgaaacaacacacatataacggtcagaaatggtctcccagctgtagtgagcttttgtcacatgaaagctatctgtccaatcttcattcacaaaggtgtggtcaagattagaatagatcctcttatccccttcttgattattagtccaagtgtaacccgaacctgtcttaagaagtctatccatgtgactttgagctagccaattggtagcatcccttatatcattcaaagtgacatctttgcctcccttcttatcctccaagtcgaataaagaattgaaatcccctgttattaaccaaggatttgttgagaccttaaggttaattaacccctcccacaacccttttatttcctcacctgtgttaaaaccatacacaaaagtgacactcatagcttcagaatggccagccattttcacatagcaatgaacaaactgaggatcttctctaacaataataacccgagtaaaattttccctccatataactaatatcctgttctcaacaatcggactaatataacaatcccaattagtgaatctcctaaccatcatctcaataattttattactcttaagtttggtctccaacaacccacaaactcctattttattcgaatagcacaaatcaaacacagtattctgcttctccattttattcaatcccctcacagcagtaacagaaacaacaatatctatgtgttcagtgtagctacctgagaagctaccctaccttcatcccgcagaagattaaatgagttgttgctgctctctgccatctccttcggacttccaggttggcttgttgttgacactggaactgttttctttggaatctcccattcctgttgaggattgcttgctgccttttccttggtttctttcttttgtgtctgctggtgctgatgtttttctatcttcattttcacaatttcatcatgcctgcagttagctttggtgtgaccaaacttattggagttgcgcaaattcattaaaataatgtaagaatcggggtggtgcatccgtgatttccatttcaaccaaaactctagcaaattgcaaccatgtttgatcctttgtgtgttggtccaccataattggctttccaattgtgttaacaagctcagttagactattgaagccctaaattatgtaatctgatccacaatggaacagtccgaaccagattcaaagcatttaaatccgcagaccaaggacgaacaattactagttttcgatcaaattgcacaactcctacctccacaacctgatcacgagttgcttcatcattgaaccgcaccattattagtcccatagacaattcgctaacctgaactacaccaaaatgaccccagacccttttaacaaatccttcgaaaatagacacaggtggattggctcctagtaccttgcaaatgactgctgagttccagcatttttcctcttcttgtacctcctctaggtctacctgagcaatcttgatgccttctctaatcaatggatctgtgaagagaagtcgttgatcttgtttcataattttttccttcgtgaaagtctcccaaatttgctttgccgacctcggagattgttgattatctaagttcatcttttgttcgttttctacctcctgagcccaactctgagctcggctattacctgacctgtttgtaacctctgtctcgattaaatcctgaattctaaccatcttcacaatcagattcagccccttagttgaatgagattcatcaacttcttctgtttctccttttattcctgcaagaacatcttcgactggtaatcgagtgactagtttccgtcctacttttttcttccttgactagtttccgtcccacttttttcttcctcgccatggaaggataaagcaaggaaaacgaaaactatccttgctaattgtttaattgtttaaaatttcgttaatttgattctggacatttaattgaaattttttcacactaaccaatttattttattttttaaaaatattatattttattttattcaaaaaaaaagaaggcctaattattatttgtcaaaatatgatataataaatttttacaactatacattatttatttattttttaaaaaacggcccaataattttttttttgaccaaagcgccaaagtggcttgggacgatcctgactgttggttgcccctttatagtattacagtttaggtaggagtccttacatggaacgtaataagaaaaagcaaaaaggtattagtttaggttaagttaggtctattttaagtagtttcaattattaggatagtgatgaagttaacaatcaaatgttaacgtacgtaatccataggcttaggagtcaactctagaattttctttttgggtcctactttggacccctctctctgaaagactcaaactaattcgaggtgacatgcatatgatccctattaattataatcaattgatgcatgttctatgtcgtcgggtacaagtagtagtataattttcttattagcaattactaccatgtatatatgtatccaaaatattccaatcaaaggaatgtaatatatccacgtacacatatattatatatataaaatcttaagcacatgtgctcataatcttgaagagttttgatgtttgtctccaggactgaggacgatcaataacacaatagcttatgtttaggacaacctttcaattaaattgtcctcaaattaaaatacctcaaacatttaaatgtacctatttgacatatagagtaaatataaatataagtacttaaaattttaaatttgtaaatagtataaatctaataattatttataattttttttttttagatttctattatatacaaattttattattgtcttattaaacatgacacatataaattccagaatctaaattaatttgagtttagtataaaaacatgtaatatcttaaactagaaaaataatgactacaacttttataatgcatttacctttaaattttcttttaacaattaaaaacagagtagaaattgatttttttttttataattttataaacattaaatatttatgtcgctaaaaataaagattatatttatattgc

SEQ ID NO: 305609 - DNA, 1359 bp, Cannabis indica
gctctttacagaacccctcatgaacttcttgtgtaatttcctcgatctcaaacctcgctgcgcatttaagatattatagagacactcctcttcgatacaacttgtcatccattatgatacattgcgaagcctgatactggagtttcctagagggggcattctctgcaggtaattctcttattgtcaagtacttgattataaggtccatccatgtgggtccttggtgggtaactttgactttggctttggccaggatgctaggctccatgaggtaatttaccgagactaatcctagttcttctacttctttatttgaggccaacttttctaggcaatcagcttgggaatttccttctctaaggatttgttcaattttgtagcctttgaattcctgaagtatttctcacattgttgagacatacgaagatatctgttctctgtaggtttgacattctcccaacacctgtttgataatcaattgagagtcactgaatatatcaatatgggtagcttccactgctttggacaaccttaatcttgtaagtaaagcctcatacttgacctcattattggaggcgttaaacttgaactactagggcgctttgaagccttagaccttcaggtgatacaaacactattcccgctcttgacctattttcattcgttgcttgtctacttacaccttccaggtaggtgcaattatttctgaatcattgatgtttatcttactttgttgcattccacgatgaaatttgctagatcattcccttgatcaaaatgtgagggacatattggatgtaaaaatggctcaactccatggtccatttaagaaatctatcggaggattcaagattttggattacttggtggtgtgggtgattagtgaagacttttattgcataggctttgaagtacaggtgtagctttcgagacaagataagcaaacagtagcctaagttttcaattagcaggtatcgaatctctgtacctatcattctcttactaatatagtaaacatgatgctatgtcatatcttcctcttggaccagtgtcgcactaatgacgtgttctgatactgccaagtagagatataatcttccccttctacaagtttggacaagattagagcctttgatatgtgttcctttaggctctaaactgctgctttgcactcatttgtccattcaatttctttactttttctcaaaatgtttaagaacggggtgcacttgtttatcgacctagagatgaagcgacttaaagttgctactttctgtaacgtccccgcttcaagcctcattgggttcttgcacccatggaataattggctcttatacacgagtacgtcactctggctgc

SEQ ID NO: 305610 - DNA, 931 bp, Cannabis indica
gaggttgagggggaattggccttaaaagaatagcaaaatagaacattgtagcaatgacaaaatatgtttgggaaatagcgaacaaggaggacaacttgtggattagatggattcactgtctctatataaagggagaagattggtggagctattaagccccaccacaggtgagcaggtactggaaaaaactgattactatcaagaatcatataagagattgtatggatgttcaacaatgtacaatcacacagtataagatttccaatggctaataaggttatttgccctgctcaaaggaaagtaacttgaagtcatggagtatagtgtacataacatcccacgacataactttattttgtggactgtaattcaagacagacttagaacaagagaacgattgaaaaaattcagcatcattgctaaagattatgcttgttttgcaggtatcaaccggagacaactgctcatttgtttttctcttgtacattttctttgcaatgtttacagcagattaaagagtggttggactggagaatggaatcgactgaattaagcaagatgctaaggtggattgagcgtgccaagcttagcaaatttaagaaggcagtgatgaatgctgcaactgcaacacttgtgtatcagttatggcggtctcgaaatgatatgctatggaattcagtggaacaaaaggaggcgcaagtggtccgattaactaaagacgaagtgaagagaagaatccataatgtcaacataatgtcaagcataattcgagagtcaagcataatgtcaacattatcatttgcaaaatgaaaagaatatccttgtttaaccaaaagcggaagcgaaactaaattccttttaaaagtaggaacataaaaagtattgttcagaataatcttattgcgagactgtaattcaagaataaatgttc

SEQ ID NO: 305611 - DNA, 1003 bp, Cannabis indica
aataaaaaaaaaaaaagcaaaatacataaatgttagaccttatggtaattacataatgttgcctggtatagaagatagataatcatgtcagtaacatttttgacaaaagcccacttaaccacattatgaactacaaagttatgagttctcgaaataaaaaaaaaaatttacaactaatcaaaagattagagagtaatctacattgatacacacagttatcaattctccgaaagaaagaggttccatatagcattttgataactgtcttcgagtgactctctattaacacaaaaggatgcttcaatgaaataactgtttttatagctaacaaataagccgcagcttctcgaaaaccgttccaaagtgatctctagccaaaaccatcgagttaaacttaagtatttatgtttgaaaaataattcatatatttttttttaattggaaaatccctaaaaaccaatattcgtgaaaacttcttcttcttcttcctccgcggtgaaagaacccacacttccttctcgacaatctctctccttctctgactcgccggactcagtccactcgccgccctattctgctccttcccatcacttacaaggtaccctttttatatttctcttcttcttcttctttttgtagttgccattgccaactccataaatgtttcaatgtttctatttcacccaaaaatggcttatgaaattttttaatgtaaagcttaattactagtgagaatggtaatttagattataatttggagcagaacgctattagtaatgtgagttgataacccataagttgccatggtttaaactttactgattgattgattcttgttggtttgatttgtgataagaatagaattttggaaactgatttttagtgagccaaatcttgataatttatgtgtagataatctgatgtgataaagtgaacttagtctgtaataactataattttttttttctaaattatgcacaacaagtgtttgaagaaatgccac

SEQ ID NO: 305612 - DNA, 2226 bp, Cannabis indica
tttaagtcatttatatattataatcatgttttacttggaactcgaatccaagacctccaacacacactcacttatggccatttcagctagcctcaagcggtttactaggctggatggttaagtaatagcatttgtgttttaataatattggtggtccttttcagtctatcttctctcttgtatatatggcacgcacaaaaaaacacagatgaggaggattgatagtgatgaaagctgctgaagcatccgtgtgcaatgaacctcaaaaattgggtgtgccacccaacccaattgggacctgatctgacctgaatgatgagattgaaaggttgttctggcagtactaatgcctcatcaatttcatcctaaaattagagtttcaaacatggtgacatatgtcacctcctccttagactcttgaaagtgacacccttttaattaaatgccttctcttctcctagatgaaactaaaactaagtgagagacttaattaaaagcaaacacccaaaatgaggagtagaaggaggtgatggtgattgtggtggtagtagactagtagtagtattagtagtagtggtagggacaagagtgacaacatccccacatgaccacatgacaatgtatattctatatgtaattatgtatccattccttcactcataaatgtaaagctctttaggtaaatttagatatagatgcgaccaaatccaactcccttttgccaatttcaacacaaacatgctttactacatacctccatcccatcccaccatcccatcctatccccacttcttaaaaagtactcctccttgtatacaatatattatatactctcaatgaaatagcttaaggtttcttcttatgtcatgtaaaaacaagagtctctcttttttaagtctattctctaaaaaccaagcaatctttagctattcatctaattttgatttgaagtttgaacaatatacacactactaatctacaaacaacaacatacccaccaaatataatattttataaataaattttaagaaaaccccaaattgacataatttccaatgcacattaattgggtcaagcaaaaataaaaaagaaaataattaaggatattggaatattcaataaattcagttattatacaaactcatatttcaaagaagattactttgatcatgataatgatgatgatatatataatataataccttgtatttaacagacaaaattacctgaagatgaaggtagacaaattaagagaaaaatacaacctgatttttttttttaaataaaaaaataataaaaaagaaaaggaaaaaattaaaaatcaggttgatggcgcagaacttgagctggcgccagaagtcgagccagatagtagctcggctagggcggtcatggctcggacttgcatctccaaagcggctatgtaatcggtagcctcttctagaatcacaggcaaaggttgcttccggcagccgggaaccaaccggccaagaactcgaactttcctctgaaccgccggcaaactcttcccctttaacctaaaaacactcactctcggcttcttcgaccggctactaacattagtcgccgccgccggggtcggtagcctctgcttcttatgttttctaaacttgagttttagccggcttgtaagaatggctcgactccaccgagtccggcccttagcggctacagcaaggactctgtctgcggcttcacggacggcacggcctcggcgcggagtgggagcgggcggcgtgggctccggctggtcctctcgggaggcggaggggttagagatggtgacgtggctcaaggcttgaaggagtttggaagagtagatttgttgttgggtttgggatttccacctggcatgatcttggggttgattaaggccgtgtttggatgaggattggattttcttcttctttttctttcttgttgaatcccttgctcgatcggtcgttacaggattcgaaatcagagttggtgatgccattaactcaactcaactcaactcaactcaacctgatcctgattcttgaaattctctcctataaatatggaatcgataatggaatgattttttttgaggtgagatgaaaattggtggaaatggggggaaagttttgagttttgatggaatggaattatggggagaaagggaaagaggagggaattaagggatgaacggaacggagttggttgaggagggagagagagaga

SEQ ID NO: 305613 - DNA, 2773 bp, Cannabis indica
agctcattgactcacatactcgcgagtattgctaagagactaaatgtcacattcctagcatgatttatcttagaattgtcatactgtgtggtgtcttacatttgctttgcccaactcttatggaaggacacgagaaatgttacttaaagtatgcttaggcgctgagaaccctcttcataataaaatatcttgagaagattaactgattacaaaattttaaaataaaaattgtattctcattataacaagttcaattaatatactatcataaaaatttaaaatagtttaatgaattaaaattaatctcaaaattaaaaagaacattataaaaactggatcttgtgggatcctaaactaatagtggataccaaagaaaaaactatcctgctcaaccatttattttttcaaaatatatatattagtcaaacatatattgatccttcaatataagcatccaacaagcttctctatcaggttgttgtctcccaatcgaccacacgacaactcacccttaaggaaaatacctctctgtacaatcttaatatgccgatgagatacaatcttatgataacctctcttgatacatgttacaattttgattgcacgtcatacagaccaaaatttgggataacaattatattgtgcaatagttgatcttaaaatataagggtagcaattcgatcattcagtacatctaaaatatctcatagttatccaaagttatcatatactatccaatttgaatgagatcaatagtaatcgagatccttcaatttttttttagtgcaaaacttttcatctatttattatgtatgcctttctttgacagagccataagttttcatttgaatgttatttattaatgcatgtgttattttattatcactgttataaatcatgctatacaactgtcaatatatattaacaataaaaaacataagacttcctaccacgataattacaacttagaaatttgtatagtatactttttcgatacattattgtttaaaagaagaattttaaattattaaataaatttaaaagttaaattaataataaataaaataaaataaatcatgtctttacaagggtagcaatttgatcatttatagtacgtttgaagcacctcataattatctaaagttgtcatagactatcaaatttagaaatcgagatcattcatatattttattagtgaaaaaaatttcatctatttataatgtatttttttatttgaaaaaaattattattcaatttttcagatattattattattgcatgtgttattttattgttcactttttatactttatgtaatacaaccatcaatatatattaactgttgaccgaaattttcggcaactaaatcattaatgtagtaaagatagtttaagaagagtaaatacaaatattttacgagattgggcattaatgaaccttaattcacgagtctttgttattaatagacgagtatttatttacagagaatgttctgccttcttttctcggatcccctcgttaattttgttgacggatattttatagcagttgtcaagaataagaaaggtctcaattgtcctaagtgcccgccttagccatgcacaagtttccaaatctatgaagtagggcatgcacaacctacacgataggttgtgtagggtttcggtgggattagccctcatctttccttgattgatgtgattgttcataaatgagtcgtcacttatatcctttattatcgcataattgttgaaagacaggtttatggcgtctgacacgtcctctcatatgcattcctagacgcttcctccatgctacattaaatggtagctgacagttctcctccagtaccacaaatttgaaggagctaaacaccatccagctctcagagatgaagtcaagcaggacctcttaggactgggacctagctcgctgaatagttactgaactatctcagagggataggcctaagtaatcactcttctttaattatctctgagtctgagagcctgacctgtcacgtgtcccataatgagattgccacgtatattgggagaaaactaggacaatatttacccccaagtcttatttagtccttgataaataagacttgtatattacttccggtctcaaggagtgacatggcacgtacttcacgcgcgtgggccattttaacactcgcaatcattatttcttgtcttctagcaggcaacgattcgtttcccgcctgttgatagacctcttcattaatgcagatgttagagagatactcaaatatttcaaccgcccttttcttttcatcatgcgtatttatcctgaccgttagatttgtggcatttgaatcgttgtgaacccctatcgcttgatggtactcattcgatgatgtctcataccccgagaggcctataaaagctagtacgtctcgcgattggttcacttacaatgcttttcgtcttttaggctttcaaaccctcctaacaaaattccaaacttccctgatttcctcctacttttcctccgccattgccaagcaaagtattaccatcgtacggcgtcctctacctcagccttgccttcatcgtgtaagttcctcttctttctatatatatatatattttttatacagtagggcaagtggtagcagataatagttcattctttcttgagggaagttgtacgcatgttattcctgggtaacagccacgacgtctatctgtggaacaccttttctatgaatgttctgttgggttttgtgccctaaataaaacttatt

SEQ ID NO: 305614 - DNA, 1146 bp, Cannabis indica
taaataataataataaaatatatttagctcaatgaattattatttttgtatttagctaaacacgattcattaagttaaaaaatatgtaaaacaactaaagtttagctttttcaatggaagtttaattttataatttttttaataatttaaaaattaaggtatttttatagctcatcaggagtgctcttatatatttgtttatttatcttttgaggaaggagaaaacaaatttgtcaccgattgtggtgcggttcgaatagttgaatttaaaaaggtgtgaaatttaatttggtgatgatagttcaaaggatatgttttgtgatcacaaagccagtttttcatgtaatttgcattcttcgtttttattaattaaatttattataacataagatgatgaatataagcatgtgtatgattccagaagtaatacaacattttttatagtgtatatgtatgttattaatttctttctcaagtactacctaataagttctaattattgtttaaatccaaaaaaaaaatatcacaaaagtggtttcttgtcttttaatgcctttttcaactgaattaataaaattaaattcaacatgtccgatcaatataaggaataaaacgaaaaacgtagtgagatattttaatttttattattatgagatgtctctccagaaatatatatatattattaaatctaggtagtgtaaaatttctttttctccaccgtccattgcttcctgttagttagtttttatatgatcttataagcgataatagctcgagaaaaaaaaaagatgcattatttatagctagaaatacagtattaattacacgatttaattattataataacactattattcttgttgaacttatttcaaataaaggggcttccttttggactaataccgtggggaaagagagaaatcatatgcatggagagataaatgaattaatgattgcattatgtatacgcgtttcaaatgagcattgctattgggcaccagttgtgcctagcaccttctaaatgtgtctacttgcaattggctagcgatactctataaaaattattatattaaactatatgggacccgatacttaattgcaccaatagcgatattgacacgtaggagggtgctaggcaccaatagt

SEQ ID NO: 305615 - DNA, 1105 bp, Cannabis indica
cccatccctccctcaccactaagctagccttagtggcttaaggagcataatcttaaatattacaaatataattattaaattgttaacaacacataaaacattccctaggcttagttgttaataggaataacagaaacctcgtattattgttgctgacacaactaacagaaaataaacagcataacagactaacaagtgtgtgtgtgttaaaactaataatacaattagtttgttaggtagttacaacttagatggctcagtgaatagaagttgtacatttgttttctatttttgtgctataaaactctaaccacattctgttaaatagtcaatttgtaatttgtaagaatttcaaatcaatataaaagctcttcacctctttgtttgtgaggttgagctcattcatcacaattcactctacttcttcattttctctcagctctttcccctgtttcaattcccttgattcactcaccatgactccatgcactttagtttcttcccaaattttacattaatatctactacaaattttgggcaggggctgaaagggaagaaaaaattatctcattttacagattagtgctaagaaagagtcaatcctacaccctaccaaaataagtgactatggtgctaattaaagcactaacaaaacaaacaaactaagtatatggatatgcatattatagggcatgtttagaagtttatgtaactcaggtgtagttaagtgaacgattaaactcttaaagagtggtgaaccaagcttgacagaagaccaccaatcacagcactattgtatgtgtttggctcagtgtgcctgtagtaacctctttgtggtgtaaattgcaagaagttgtccccttaccaacaagaaagctcattttcataggactgtttcccaagaggccaagatacatattcagcctaattaaagaaaaatgaaatagatttggaaagagtatagaagacttcaaaaatagaaaggaattatatgtatgtttgttgggtggaaggtgaaagcaaaccttttgatgttgggccaggactggattaaggcgggctagatctacggtgtttttgggctttcttaaagtaaatgacaaaa

SEQ ID NO: 305616 - DNA, 1404 bp, Cannabis indica
aattaattggaagagtagttataactagaagaaaatcaaattagtgataaaaaaagtatagttgtgaaaattaagtagtgtataatttttgaaaattacttaagtatatcacttttgcttttattgtaaggatgtcttttatattcaaaaattatatttcaattttatatataacaatgtacattataattatataattaggtatattttagatttttaggaaattctaaaataattcaccgtactaaaaattaatcaatgtataattctatatatatgtgtgcgtaactcgctattttaaactttattttcaaaattgtaaattattttttttaaaaaaaaaattaatgtttgttataactacattatacattgtcataaaaagaataaatatacaaatatttttgtatatgttgaaaataaaaagagctcaataaaagtaaaaataatatccttacccaaaaatctccttataattttttatatatatttaaacaactacgtatagcacctttgtttacaagtataaatataaagtattggtcccatgctccattcattcagtttatatatattaaattaccatgaaagaaagtaagagtttggaagaactatatgtttcactaattcattaatttctattaaggatctattttattcgtttgggattaccttatataaacggttgaaagtacacatattcgattttctatttttttcttttctatattttctatatgtataattaatgtagcgttttgcatttttataccaatatttatatatgtctatagattaattttaatctaagattattgtctttaagggtattaatacaacataaggaacagtcatataattgaccttgataagattaataatgtgtgctagattggtgcacgttaactaggtaattttctacccaaacccgtcgcaaataataataataacaaatcttatattacaaaaggattaccacattttgttaattattatatttcattttttatttattgacaaaagtaaggtgtgaacttcctaattattctattggaataattcctaagcatgaggacaacataatataatcaataaacaagactacaacacaaaattaatactcaaatccccgcatgtggtatgtctaggaatgtctattccaatattattataacaaataagataataaggggttcattgagacatataaaagctaataattagcctgctattatatttgtgtctgtgctatgtatagccaggcacaacctcctttaagatcctaaatatatatatatatattacattgatcatatgaccataataataacgtcaaatagagacgtgatttaagcacccggagactaaattatgtttgaagtgtgtccagcaaacccagcacaa

SEQ ID NO: 305617 - DNA, 1689 bp, Cannabis indica
atctaatttgtcacacaacacataataaattttggaaagaattctacacgtgacttgtcacgtgcatgttttatctagtataataataaatgaaagttccatccaccaaaaaatagtaagacaatattatcaatttagtgaaaaaactctacacttaacttgagagttctagtttctagattttcccaattttgctgtcgcacatacactctttgaaggtttgtgcaaattgtcttccaaggttggtgtcttactattggtattgtgtacatcttcgtgactcattttcacctctttcacaaagaataagtaattactcttgctgactgaattgatccttctatatagtttcattaatattaatgttaattttttattacgtagtcgaagtatataagtttggagtgtcattccatatgttaataatttgaaaatgcacactcttttaatattgcagctcacgtgttcgatgaattgcccgacatgggctttgtcatgataaccaatttctttaggaggctgaaggacctctttccctttgtttgagtttgctgttggttcactggagcccttggtcacctcaggttggtattttcctagctttcttattgtaactattttaactgtgtacgaactttgggttgatcaattgtttgacaacggttctcaggtacaccatctctttattctgtgtattgctatgtaaaatcaaccttttgcatgtatattgataacttattgggctgccttcattaatctcatatgtttattgtaagaattgttataaaatatctgttttattatgccatttcctttagttagaattaaacataattgagctgtaacgattgactttaatgctttacagttaggagtttttagtcaagaaaagcatttcaaagtttgaattaagaataggaaccagataagtttagttgcctactttaccaactctgttgggttaatttcttgaaaaaaattctcaaaaaagaaagaaaaaaaaacaaaacttcattcttcttattagggacaaaacaaaaattgagtatcacagcagaaaccaacataaacaagaaaagaatcattctttaagatacactcagatcagagaaaaaactattcattaccccttttattttttcttttttcctcccacttgtacaacaaactcctatagataagagagaaataaaagttatagtttttgcagagagggagagagaactaagacttgcttgcttaggtagctgataattaaggattggtactaacaataataatgacatcaaagttttgataaatccagtagtggaaatagtttaagtgtttgaggccttgagaaatagttcatagaagaaaaatccttaggtgggtcattgacaatgatgatagtagtaatgagaatgagctggtattttcttgtgaaaacagcatcaccacatgccaatagtctccggaaaccattagataaatctatcagaaatatgggcgaaacaaaattagtataacttgtacatgatttggaatttcactacagttaaaagagcaatataattactgttgggttttatgccctaaataaaactccatttcaatgtaatctttattctctaaatattaataaagaaacagaagtattttttactcatttgtgtgttatttggttcatgttatcatttacttgtttat

SEQ ID NO: 305618 - DNA, 2071 bp, Cannabis indica
atgttagttttgattgatgtataataaattaaacttcaattttttgcagccttttgtttttttaagattactttttttctcttttctattttagcgggagaaagcagttttctaacactgtctttttccacttagacaattatgttttgaaggtcgtaatagtacaaatatgtagtaaagtatcaggatttacattgaggagtgtagattatttaaatttttttttttggtggtcaaacaagattatttcaattttcatgcaactgttttcatgtttatatttctactagactcataatttaccttaggaggggaaaaaaaaggagaatcacaatggatttgactgcatttgaccagaagcaaatatcatttggtgtgttgaaaattttagtgtagcattttatacttctatatgagtggacattacattcctaaggatacaactcatgttattaagaaacactttcagaagggagcaaaacaagcagaagaggaattgaaacgaggaaggacaaagcttaggtttgcttttataatccaagaacaattaaagagttcactgcagcttgtgtcattgatatccagttcgacctaatagttttcaattacagacaggcggggaagcaaatccaaggcgtgattagttcagcttataagattgaaagacaggctggtggtatgcattatgatatgtcatagttgttatgccatgtgcaaaattaaacttgagtcaacaggagttttgtcttacatttggtcttttcgtctaccttttttatatattcttgtatcaggcttgaaggatatgcttagtgaacttcctagaagagaagcatctcaattccggtcacaagtaagttcttatttaagtttgtaatttcttttcataatctactgtaccgtgtttgagaagttaagagtcttgattataaacagtttagggaattactttcatagaagttcatcatacatttttcttttgtttggaaatttatattttgttctcttgatctcatctgatagactgccagatgttccctataattattgccctcttacagtactatagtggtgtagggggtagttctgttttcttttctcttgtagtgttgcctaagtagttcatctcattcacatccagatcatgaatttggatgttacgttattcgagtagaccgcttgtttaattcattgtacagtctggaatttttctggaaatgtattctctatgccggaagttgtcaaattaaactcttaactttctgctaggtttcgaatcttgcttctgaggctaaacgagaaagaaacgctttgacgaaggaggtcacaaagattagcaactatgggatctcagtctgagaatgttttagttttcagccctttgaacattggagtcttatgaccataatggttcattttaatattttattccagaaataattgccgtgaaaaaattctccattttttgtgtaagagaaggcgtttttgctttggaaggaaaaatgtttattttccttgaaaatataactgtattcaatacaagtttgcaggttatctcaaaaaaaaaaaaaaaataacaagtttgcaggatttatgtttgttgaggtgatcattataaatggagggatgaacatagggagcatttggtaatgtaatggaatggaaaggaaataattttcattctatttatttgtttggtagtattttaaaatattagaatatcattttaatagaatgttctttttatcattttggtagaatggttattttattttgaaatgaaaggaaagatcattctaatgtaatatgagaaagaatttaatgatttttttaccattttttttatttaaattttattttcattcttatttttatgtttttgttcctttcagccaaaagccactttagagttgttaaaaaaacgagccgagttggttttaggtagggttttaggtagggaatttacatatatactgctttttcaccaaaattttacaaatatactggaacatgggaaatataacttttttactgtccaagcccgttttcttttcttttatactgcccaagc

SEQ ID NO: 305619 - DNA, 1006 bp, Cannabis indica
tttgctatcttctctaccattacgtttttttttttttctgttgcactttctcaccaactgttttctcttgtaggggggccaacaaagactaaaagatggagataggaagatagtaggaatgaacggtgctgcgggtatgtaaaatcgtatcgacctaattgttgttcgcctcaatcgacaattccggagcttatcaatcaacaacaattttatatcaattctgattaaaaaattgaatgttccattgaatcggtctattgacttaaaaatcttctattctctcacttatttgttgaattttgaaattggaaattcaatcgtatagcaccaataggtgattgatatcacaggagtcgagggttgacaagagttgacagtcggcttaagagtttaataattatatttactattttaaagttaacgggagggtttaatctctattaaatttaacaaaataaaaaatttaaacactgttaaaccaacaaatgtcgttggatagccacttttaatatataaagatttaattttgctcttaataatgctctgccaaatcgttgtttttttaaaaaaaaaataaaaatgctgctaaaaaaattgctccttattaggtgaaaaaattgcccaagaaaaggaaaatcgggaaaatgggttattattaccatacgatatcaacaaattaaatgaaagaaaaaaaaccatattaaatacaaaaattaaatagaggagtagttgtggagggtactagtctaccagataagataatgtagaggaagttgaactgaatattgggttatatattattatttttaaggaaaatcgaccctgttttggtataataagttgtattaattagttaatagttattgacaacttaaagggtaatgggatattctaaataaagttggtcgtacgtaattagttggtcacctatttttgcacaaacccatgtatgtatttgttgattgtaagtgtaacaccctaactaacataggcgtattacgtgatt

SEQ ID NO: 305620 - DNA, 1941 bp, Cannabis indica
tactcaataaacaaaaaatagaatagaaaaaaagagtagtaatgcacatacccaaattaaagaacattactttttatttaccaaacttttactcttttttaaccatggtagacaaattttctcatacccagagtgaagaacgaataacatgcaaaagaagaagaatttttgaatgagcatagacacttacttgcacaaacccacgatgacggtcggagacagagccgaagacacaaaagacgaagtacaccagatattcttcaattacttgagttttctccctcaaatttgaaaataattttatgccttaaagaagaaaaatcgtcacttgccctaaaatgaaacaaaccaccacgacgctgaaactaaaatgacgaaggagaaggaaagagaaatgatgattgaaaagagaaactgtcagtacatcaatcactattcacttttcaaaagtattaatattttaatacagaatcaaacggttaccaagttttttaagcctaaatactcctatattaaccccaccctcagatcatgcaacttcctaatccaacaactacagtacaatcacagattgtatactcttaagtactattacggaacaaaatcgtgtccctatattttataatgcctaacacaatactgatgtgacacgctacgaatagttatctattttttatattatttatttatttaaaatacataaaattataattgtcaaaaaaaagaaatacataaaattatacattaatttatattaataaccgtattacacctaaatgcccccttaacatttcttgttttattaacataacttagataaattgagcgattggagtaagacacaaggttatattattaaattttggtaaaattattttagtagtgcgtttttaattatatttagagagactaaaaaagccattaaaaatggaagttacatattttctttaataaaaaaaggttagaggcagtaaaagctaccggcagattcagttaccggttaaagcagagagcaagtagacggaaacttcaaagtcatacacaacagtgaaccgtgcgtggtgtagattccctccacgcgcgattataggtcattttctatttttttattcatttccccaaactacaactgcacttttcgttctgggtgaaaattcaactttcatttttattttccttaaaacaaaaaactttcatttttttttcgtttatgataatatgattcgttaaactgaaccaatttgctctttctggtttaaaaacaaaaattgcctcttaaataaaaaaaaatccaaaattgcatctataattaattttgaaaataacataaaaagaaacatacaaaatacatgagaatctagacagtactcgccagtaagattttgaattacttcctaaagaatctaaaatacaataaaattctatttgaacggaatctaaaatataaatatggaagtaaaaatgtaaaattatcaaatagatagatttttgtgttttatagttataaaaaattcttaaatatttcaacgatacgaaactgactaattgatatttataagtaaaattattaaaaaagcattatataatgcaattttggtttggaattgttttataattcaaaccaacattgctaaagaggcagagccgcactataaaaggaggtgtatagcactccctgtttcacgactctgtattctataccagagagagagagagagaaagaaagagagagatttctttcttcatttactttttgcgtgtaagatttttaagtctctgtgtaatatggcgctgctttcagatctcgttaacctaaacctctctgactccactgagaagatcatcgcagagtacatatggttagtcaatctccttttaatatctttttctcctttgtttttgttttgtgttcatggaaatgatcgtctgtccctctctgcg

SEQ ID NO: 305621 - DNA, 3751 bp, Cannabis indica
ttattaaaataaaattctatgcgtaaaaaatttcatatttatctttattaaaaaaaaaaacttaatatatatattaataggaatttataaaaaggatgaattgatcaaaatataaatggattggtgggaggcaatcaaagggttgatataggtgagatgtgacaacatgggttccacagtggtatgattcatgaaaatgagacaaattaaaccctttgacattaatataaaatacacaaaactatatatattacgtactatatgtatatatatttatatttgtagtttatttattttgcagccacgtatacttattggtcacatagtttttgatccaatgaaactaagaggaaattgatcccttatagcccccatcggattaattagctgatatgctaaaagtaataattaactatatacatcctcatattaatgcaatgtttaattacactaatattgttaaggatttagctcacttactcatggtacgtgcagatcatcactaactaattttttttatcaagaagtattagcttcattaatcacaaacaattacatttagcaattaaatcctacaacagccacggctcttctctatttacaacataaatcttctacataaatcctctcatggctattaaggcttctatttttttgttatttgtaatctataataaactattttctgcatttcatgtacaataaataacactgtgctcgagtaattgttgaaaatgcaattgttcctgttgatccacaagctctatatcgatcacatctgccataactgctgtgtgcactctttgcttcatgttttccttgtttagtactaaccaattcctccatccatggaattcaatcggccaagtttttgaacccagccatttgaagatcagatcagctaccctttgggagaaacagcagtcgaaaaaaagatggtggtttgtttctgctgttactccacaaacctggcacataatgcaatccaaagcaatgtgaaattgcatgaattgatcacgagttaacagttgggcattgacagcttgccaaagaataaaacggtgcttcgacatgtttaaggagctccaaatacccttgctgaattcgaactgaacttgaggcaaccggctattatataaccaatttgtcttgaatcttcccacaacccctgcctttatgattttagtgctagcaaatttgtctctcaagtggcataatttttttcaataccaactcgaatcatttttgagttcataggaccaaatggagttattctttaagtaaatattgttgatccatttcactcaaagtaagtcacttttggatgaaatagcccaaatatatttagcaagaatagcttgattttatttaatcccatctttgaaacctaattctccataggttttgggaggcaaactttctcccaggctaccacatgtaacttgcttatgttcccattccaccctagagaaatcctgtgcaaagtttttttatttccttagtgacactatgaggaagaatgaagatgctcatctagtaaatacgcagaccaagtaaaactgagtgaataagttaagctcttcctgcaaaagaaaggtgtctactagcccaattgtgaaaccttttattttattttcttaataatcactctacaatcttcagctctccatttggtgggtctcaaagaaactctcaaatattttagagggaaatttccttccaagagggccatctctctcaagattaactatttttttgcttctccaacccctccaaagtaaagctgagatttattagtattgatagcaagccctatggtagcactgaattcatctaggatttccttgagcacttgaatcgactgtatatttcctttgctaaacaacatcagatcatcagcaaaacggagatttataatttttaggctcttacacataggatggagcctattcgtagattggcaggcagccaattgcagcctccttgttaggtactccatgatcaaaacaaataagagagggaaaaggggatcaccttgtctcaaacctttcttgcctttgaaacttccttgtactcttccattcatcacaataaagtaggatgtagctctcaaataggtcatcacccaagaaataaacctagctggcaggttataagcaatgaggagagcttccatgaattctcagttcacagtatcataagctttgctaatatcaacttttattgtgcatctaggggagacgcactaactgatcttatagtattagttattttaatttggaatctacactctaaccaacacctatatataaataccaagctcaaatttatgtattggtatcaacttagaagagttcatacatagatttagatgtattctcttagcaagaaaacattttaagagagaagaggggtgtacaactactttcatgtgtttgattgaacgagctcggtgtgaggcttaatgcaatttcagtcttaaacacaatgtaattgacttttgaagagttgtaaactatatctctatactcctaatcaaatatttcaataaagactattcattcttgccattgagttaagttcttcctactttttgttgttagtgcatctttaagatttttttgttttctattaattatttttatctgatcttgtacactgttagttgacataaaattcatattcatagtgattaattcactataaatggtattagagctttaggctccaagaagaggttttaagatccacattcaaacccttaagattcattatgaacaattaagaactcaagaaccagatggcatctccaagattcgaggtggacaagtttagtggcaccaatggcttcagtctatagaggattaagatgaaagcatccctagtgcatcatgaaatctatgaagctttagataagaaagtcatgaaccttattgaagacaagaagaagaaactagagattgaagccaaggcattgccattctttttattcttggggatgaagtgttgagggaagtgtcaaatgagaaaaggaacttggattatggaataaattgccttccatctatatgaagaaatccttaactaataagttatatcttaataagagattccacactttttaaatggataaaaccagtgaattgtgaaagtacttagatgatttcaataggatcatactagaccttaacaatcttggagtcaagattgatgatgaagatccaaccataatattttctcatttcattaccaaaaatgtatgaacattttgtagacataatcatgtatggaaaagataccctaactatgataaaagtgaaggttgcccttagctgcaaggtgataagaaagaataaagcagtggagaagagttgttgattgtcaaaggaaagtatctcaagaaggaatacaagaaaatcagaacaattccaatggtttcacgggaaaccagtcaagatcaaattcaaaagatcctattggaggatcaaattcaagaggaacaacaagataacaatgctattactgcaaaaagaaatgacacttcagagatgaatgtccttgttgcatccaattctgtttcaggtggagaatatatagggcacagttttaaaccgtcgcctataccctgttataggtgacggttttaaaccattagaaatgtaaaaaaacagagaaaaaaatactgatttataattttataattttaccccatttttttttcctccattagttttataattttacctaaatt

SEQ ID NO: 305622 - DNA, 635 bp, Cannabis indica
ttttaattacaatattattattaattattctaatttttttttatttattagtaatcatcaataatattttactttttgtcataatttgcaagatgctattattgtgcattgtagcaccataacaaatattgtaaaaaaaaaaatatcattttcttagatcagctgttctgtcgttttagtggtaaacgacaatgaaacttgtaaggcaaaacgacgtgtcggctatttcgaacagcatcactctccaactttcccgcctcagcagatccataacatttcagtcactttttggcgcttccagttcaatttcgaaccctcggacagagaaagagagagcgagagagagctctacgatctcgcaaaatcactggctcattccgctccagtctccgccccataggtttatacttcgattcttcgtcttcttcctccgactccggtcaatttctggatttctcggcactttaattgggtcaaagaaatgtacataaaggaggtatgcttggagggtttcaagtcttacgcgacgaggacagtggttccgggcttcgacccattcttcaacgctatcactggtctcaatggctctggaaagtccaacatcctcgattccatctgcttcgtattggggatta

SEQ ID NO: 305623 - DNA, 1074 bp, Cannabis indica
aaatgcccctggcttaccaacggggtcttaacatattaaaattcatataatttcacacatattgaactatataataatataattcctcaattattcataattatctagttagggttttgctaatccatttcttaattccgggtattacatggccagtcaatgctgtgtctttgaggggctggtcagccttggtagtttcgtggaaggctagccgactagtgttgtcttctgacactaattttgtacttatttgctttatgggcctttatgaagcttagcctcttgcatggcaactccagggggtctttgagtgctcttcaagagcagataagaaccttggaggctgatctcttggcgaaaggcaaggctttagctgatatggaggcccttggtatgcaaaactagaacatgatttctggtttggacgccatgctcggtattagaaattaggagaacaccttgcaagctgctaacatctccaggttggagagtgacctcacaagacgtgaggagaagctgcgggcagcactccatggccaacaagccataagggacgaatacatcggcttatcttcagaactcatctatgagttcaagctgcgtaatcccaccattaatctatcatacatgggggatgcttctttcttggagagcacaatagcccatgcgctgtttgagagaaggttggaagcagactagaccactgtccagccagacgggtcatcctcaaagtagtttgatgatgatatggccgacccacctactaaggaggtggccggccagagctttgaccaaggggccgaccagcgtacagaggctatggccagcccccactttggtgatccagactctataccttccgatttaaacccacctacaccttcacacatgtagtttttagcttattagtatttgagctttattattttattagtataagcattttgtttcatgttctgtatggcctacgcctttcactcttgaacactacttatttttcagtcttaggactttctgttggaattattttattaggatctaaatttactaccatgtatgtttttaacatcctaa

SEQ ID NO: 305624 - DNA, 1436 bp, Cannabis indica
tcatcaagctttcttatattgcattcgttattacacttttaatggacaacattataaactataatatttagatacacataataataatctcacctaataattaataattatttttctttaattttaattgtataactttcaactaacatagaaaaactagcaaaaaatttagtatacgtatctcgcaagtaacttttgctagtatatatataaagttattgaactatttgtaccatcgatacccaggagattatattttgtaaaaaaaataaatttaaattagtttagttgatgtgtaacttaaataattaattcgcatatatttatttaatcaatttttatgtgtaggataattactcaatattagaataaacaaatctgaattaattaatataaacacttcaggtaataaattaaaggcactgacaagtgatgaatctgccgatgggtggcataaacttgcttgaaaactaataataataataataataataataataataataataataataataataataataatgatgatgatgatgatgatcaatctcgaatgtgtacgatcttatgcaaaaataacatattggttcaatttaattatatatataatggatttatataatttatgtattctcatcaactaattaattaactacttgttgttgtttcaaagtaggagttagatccttttcatttttcggacgtattagcagtgttgcatgtgcacatgtgagatgctttgttaatataacattaactaattcaaaacaaatataatctattcacttgctttaatacaataatattcatttaagtaatgggactcatgtgacccataaaataaataattatataaattataaagtactacttatgttatgaaggaaaatctttatatagctagctagggcaaacattagtcacccaataaaatataaaccgtacctttgggaaatttcatgtgctaagcaatgatatatagaatggttaagataatcaataatgagcacctttcccaacaatatatattaatacgattatatatttagcatctatagctcttaagtttaattctctttggcaatttaatccctgagaaatattaattttgtagcaattaagtttttaatatttgtttattttatcacatttttttttttcagttttgaataatttaataatatatgatgtaaaatatgttgagttgtttcaaacttattcaaagaaacttactagaattttgttaaaaaaataactggatgttttaattgttactatttttgaaactaaaaactaattcaccaaaatataattatcaagatataatttgtcaaacaattttaaataagaatatatcatgcatactaaaaactttctattaattaaccaaagcctaattatataatactctatgggctcgtttggaacgccgt

SEQ ID NO: 305625 - DNA, 4135 bp, Cannabis indica
ctaggcacgaaaaaatacaggcttggacacgacacgacacgaaaaatatgtccttaagcatgatatacgacaagctcaaaaagtatgacacgacatattaaattttttttataatttattattaataataaaatatgaatttatcgattataaataagttaaaataataataaaacttaaatataatactgaatattataattttataattaaaattatgaaaatataaaaaattaagattatatattaatttatttatagggtgtgatataaaaatttgattatttataagtaaatatttaaattttaatagtgttaataattttttatttgattatgagtaaaatattattcaaaagttatataaatatagctaaagtttgtagatataattactagtaaattgtaagtaaaaaaaaatatgaaaaagtaaaacacaaatttaagtacagatacaaaaataggttggcctgtttaagaaacacaagtcagtacgagcaaaacacgacacgaattcgagcatggcacaaaaatgttgggcttactagccgtgttgggcctatcttataaaaatgttgacacaatacggcacatcctatatttttttatagcacggcatgacacgatccattttttaaaaagtatagataaatacaagtccacaggcaacttataacactaatttcagctatgatgactactcacatagtattttaaaatataataactaattcggctagttaattatattaataattttttttttttgaactcaagtaatatcatcttgttgaataatataaaataagtaacaaagttgttaataaataaataaataataatagagtagtttggtgtgtaattatagggttttcttagtaacaaatattgctgtcgttgattcgttatcacgggatgaaggaaagaagaaaaagcagtttttattctatgaataaacaaaactaagaaaccaaaccaaccaagcatggaaagttaaggaaggaaagaaaagaaaagaaaagaaaagaaaagtctgcccttttcttctgagtattttcttctctttttccccgaacaataataaaaaagaaaatcaaagttttgagggaatttttatataatatctcgaaaaactcagccagacagagagaaagagagaaagagcgcgtgtagtgtaccagatctgtaggcttaagattgaaaagggtgaaattttgatgaaacccagaaacatgggtggagttgagatgaaatgagagttattggtcttcgtggtggagctccatttgcagttcccggagtttgatggagtccgaaacggcgtcttcttcggaagaacaacgacttgaaggaggaggaggagtaggaggtggtggaggacccaatgataatagaggaaaacacaggattcttgctgagcttaggtgtcttgaacaagagctcaaatgcttagaggttttttcctttttcttttcactccattttcttttgtttggttccctggaaagttgggttcttggaaaaaagaaaagaatccgattttttcctccttttgagactttccatttgtttgtttttttggtaaaaaatatataaaaattgatagaagagttgttcatattgttttggttcctacacaaaaaagctacttgtttgtgtattttgagaatgcacagaaaatgggagtattgcctaaattgtgctatacatttctttttctaaataacccaaggtttgaggtttgacataccaaacacagaatggtacttaattttatcttgctaagaatttattagatgtgtttaaagctgcattttaacaatttcactacaatatgttgttaagaattagttagttgatccttttaaatggctcaactagagagttaaacttctaaggacaatttgtgtgagagctggagctgaatatcttattgcagttggatagcttgggagaaaagctaatacgagtctaaatggtggctaaattgaggtttcaaacaagtcactgcattcaagtttttattgcattttgtgtaagaatacagattttatttagctcccaattagcttaccttaaggtgtaaaaaaattgctttggagtgcagagttcaagtctcatgaaattgcagcccttatttatctgtgtaagaatgtggaagtgaggtttagaaagtacaatagagcgaggtatatgattagaagtatgggggtttggagtagcccataatcttatatctcgtttggctcgcgtggattagaaagtagagtaaggataataagaagtatgtggttctattttaaaaataattggtaatgagtgaagtaacccatgatcttataaatggttttaagtttccacacattattaatacgacactctaacaatctgcaatgtacactttaacctcaaaaagcttgattgtttgagatcttctaacctttttgaaaaagctacaactttagtgaaattgtactatgttaggtttttgtgtaagggagttggatcagcgaattaataacagtcttgttcatatcttccttttccccatggtttattgtttacatggtgcataaaaacatagttttccatactccattacaagtctgtttctttagttcggtcttttgatcctgattcttctgatgttcaggaagagttggaagagctggagagaactgaaaatgcctcaatgatttgcgcagagtaagtatgagctatgccttctcatgctactaagctaaaagacaaatagtcaagccattttttgttatctgcatttagatttgaaaaagcagaaccgggattgatcagctcttgttgaccaagaacatcccttttcaaatctattttcaccttgttttgacttaacatgctttgttattgttactcaggttgctgtctcatatagaaaccatatcagatcctttaactccaacgtaaggttcaaaactcatcttctcattttccaagtttgtgttgctattaataaacctgttttgatttcacagaacaaatgggcctataaacgttttatgggatcgatggtttgaaggaccccaagattcacaaggttgtagatgcttgatactctgatttgtgactctttggagtacattttgattcaccaggatttgatttttcattctattatttgatttgatatgctgcattacattttgcacctgcatttggttctgcaaatttggggtctgtgataatattgatgctagattaattgtaatcatttattttttccattagaaaagaaaagtttgtaagtacatcagaatcttcaatgagctgagaatgagttaatgaaggcaattttctcaacttacatagtttttaaaatattatttcattcttgattatctgtcattattaagttgtggctttgtaaaagaaaattaaaaattccagtttccacctccaaacaaaatagtcagttatggctgctttttgttcgttaaactttgatcatgatattttaatccatttagatccatagccattggaagtgtacggaaagaataaattactattagcaattttattaagatgggttggctcttggcaggttgtttgagacatagtttgattaattataaaaatttgaatatgtgggtccacaaaaagccaatgaaagcctattcaaacaaaaagaaaaaaaagggcaagggactttctaattccattttgaattaaaagtaaattttttaaaagattaatattatatattaccctaactaatgattatttacattttgagcgcttttgtcagtatacgttgaaagaaaactattgaaaatggaatagttagctttattgaatctaatgaactatatacagtataatgttgttatgttgtagtcaaacgtctaatataatagtttcgaactctttaatataaagaagttttatgctttaatatataaaatgaaactatttaacgattttttttttggttagtttaataaaatattttaataacggtgtcattaggttaagtattattttaaattttgtgttttgtaaaagttattaattatcatttgttttgttaaatgacaaaatgtatctagtattttttaaaatggtacaaataggatcctgaactgatttttgtcaaaat

SEQ ID NO: 305626 - DNA, 2786 bp, Cannabis indica
atatatatataaatatatttccatcaaactcaattaattcatctatatttatttcattatattttttaaattaatatattgcattaataattcattattacaattagctagatattgcccttgaagttagggtactgtctggaattgagaacattccaacaatcccttcttgctagtatttgctctaggttttaattaagatcatcactatataaatatatatattaattatcaagtggttgggattttttttttattattttttcaaattaattaattaattttatcatgtctttcaattcctaaaaccctaaatttattgttgtcttttgaattatatgtcaccttttctttttctttctataattgctactttaatcttttctatatattatcttgatgttaattatttgggagttagtttattataacatatatatatatataggtgtgttgttaaagagagaaaaaaaaaacttttaaatggtctcacattgcatcaagtcagttatgatctttatcaaacacatcaattccattattaaatcaaattatttttcaattaaattttacgaccacttttaatttggccagagatggttaatttttgtgaaaagtaataatatataataattaaccttatatataaatgtataactttaatttatatttctcattattcttttgataatcttttggtatttacatatgttggcaagatataaattttaacaaaagtacgtaatactagatagtagatatgtataataaataattatttatatttttaagtggaaccatatatgcatttttaattgtatggtagaaaatcattttcaagttggaatatttataaaacttaaaggaataataactatagtagttttttatttatgttttcatatatccaaacaatatgcatgtacgtaaaaaacaccaaatgaaagtatatatttctagctatagtagctagtgacataatatatacatatatatatatatatattaatttttatggatagatatagagttgtagctagtatgatttttatctgagtattcatagacaaatcatcatgactaaagaaattatcccaaaaggtttttgttcttgtgtgtagagtaatttctttatgtaattaaatttagttatataagtagctatatatatactaaatatgctttcgaccttcttttcacaataggtattagcctctagcctctagggttatctatataataatctattatatatttatattatatttatattaacacgcacattcacacccacatagaagtaaaatagagcgactcttgaaaaaaaaaaattatatgtgtattttaattaattatatatgatatatatatatttgtaataaaatataatttttattgtcataaattataatattagcttttaagttagataatatatagtataaaagttaaaagtgtaaatttcaccaaaagtttttttagatatttacggctaaatttttttaacctcacaattattacatatataattttaataaaaaattagtaccaaaaataatttgttttacgattttgttatagttgtactcttttttggctatcaaatgtcaactcaaaaatatgttacaacatattattagactacgtattaaataagctaaaaaaaatgtgtcaacaaatatttttgagttgacacttaattaatgagcttaattgatacttaacagctaaaaaaagtacacaacgtactacaataaaatcgtaaaatattaaggtatttttgctgccaatttttaattagaactatatgtataacaattacaaattaaatattaagaaaattttatcgtatatatccctttttcttttaagtttatttttgctcatgtcttatcaataaaaattatattccctcattttaaatctttttttgaaatgaaagtcatcattttattaaatgagtaactcagttaccaaactaggtaacaaaacaactgaaacagtgtctaagttgaagaggcaatcaggataggatatagaggctctcgcaaaggagtgagtcactacatttgctgatcgttttacaaaatgaaaggaaacattacgcaacaaggttttacaatcacttataattttgccaaacatagaaagcataaccgtagtccctcactttaaatcttaaatcaaaattctctattaaaaagtggtatttcatattttgttaaaccaatttaaatttaacacgtcaattaattttgtattaaataattaaaatttttaacttgtcaacaaaaataattagtataattaaaggatcttgattcttaaatactaccaacgtaccccaagctatatatatatatctatatttatatttatatgtttgaaaaagtgagctatatatatatctatatttatatttatatgtttgaaaaagtgagctatatagtatatatgtataataattaagttaggttccttaaatagtcaacgattatttagagaggatggccatgtttgtgggcaaaaatcacttttttattattaatattatattataccattatttacatattttaatattcaatagattgaaaaaccacgattaatataaccatatatatttcaaacatgatcaatctattatagggaaaattagttacacctttctttcatataatttatatattaaaagatgaaatcttcttttataatttatagaaatcgatatttgattggtttgtgatttaaaaattgtaatttttaaaaatgtgttttggaaacaa

SEQ ID NO: 305627 - DNA, 1657 bp, Cannabis indica
atctggtagttgtgaatcttgtcatcttgcttggtcacaggcacaacgttgactaaaatctcagccaattcggggatgttgaccgtgacgctgttcttgcttgaggttctttgaactcggattctggtatttgggcattcccaaaacgacaaatggccatatgggatgacaagattttctccattcaaggagaatctaagatggtctacttggtcgtcccatgtggaagctggtgtggcctcaagtgagaaggtgtttgagtgaaagagaagaccaagagcttgaatccaagtgtagtctcttgttcttccggcgggccggagaccgatgaaccgggcatttatttggaggtttagatccgacaccaaggtgaaatgctcgtttctcatgccatggaagtagaaaacgacaccgtctccgcctatgaaacgagggtccaagcatgctgaccctggtccattgcaatttggttttcggtctacatttataagcacaaacaaggaaattatgaattgagatgtgatgtactagctattataaatcatagaaacataagaaaagagtaaaaggatatgaatgtgaacgttagtaatcttacttttacactcggcttggcaaatgggtgagatgcagttaacatagcaaactttagctttaggatcagttggatttgctgttgggcactgctccggacaagttatcttcttcttagaacaagggctgcttttggcgaagcagagcttggtgtctggcttcttctttggtgctgcttgaatttgtaccaaattacatgacataaagagtaacagaatgaagaagaacaaactagatcctcttaagctttccatcgtgatagcttgagaaaacgataagtttaatcattctcttttgtgtttttataggttttaataagtggactttgggattgttattaaataatataattgtgtagtacagtagtaaaactttgtgtatttatttgatagagaacgtggagtacgttggattcattacttcttcgcagaaatgttgattttagtcaatggatttagtagttttgagtaagaaatgatattaaagaactgctactagtgtaaaaaatagtcagattaactattgggtaatgacaatagaatcttcctttaaagaggttttttctattatttgattttaattaatgttaactacaaacgaagtcagctttgttcacgtgatgaaaacaagttaagttttgcccctgcaaactcgccgtagatacctctgttccatagcttcacaaggtcacttactattactttgttttcgtttagtcttatcttaattctatatgttatgcatagcttcattctttaacacttcatctctaaatttatactccacaacacaagtcacaactaatcttctagcaagttgccattggttttgctcaactcaagaaaacttccctttgttaacaagtgaagaaccaaagaaattcagagactttcatcaagtatggaaggttatccaattttctagaataggtacgctttcggttatgggtcttgaatgtatttgtaaagctacaatgtaaaaagttattattgccacaaacattaggtattcttgggaacattttttttttatgcggtgaatagaattacacatgattaataat

SEQ ID NO: 305628 - DNA, 2013 bp, Cannabis indica
atttaccgcatattttcaaggtagtctcttttccacgcataaataaagttgccgtttccatcttgaaatttccatagaagcaccagaaacgattccaaaatcattaatggttaaaatgagtgatataagcgaccgaaaaagaagtgaactcatgaaacagatcttccacaagaaattctgtcaaaacgggggcctctttaccaaatggagcatgaaacttggcaataaaagacgatcattgttgtaagctcgtacaaatctaacaatattcactgtatgtggaaaggaaagcttgagctgaatcatcagcaagattgcctgtaagaacaaaactaagtttcgtgaggtcttgtttcagattaataaaacaattgggcatacagccttatacttaaattgatagaaacaactagtgtcacttctttttataggaaatattatctgggaaagttgatgattatgaagaggaaaaaactttcttggtaaccctgaaagaagtactaatcttcgtcagagtcttcaaagtcagaaatgtcctcagaaccttcaccttcaccttcaccatcaacatcaacatcttcctcttcttcagattcttctagctcactttcagtctccccattgtcaagcataataccctcttttggtagaaggatttcacctttgcctctataaagcaaacctgttctcataacatgataaaatttctctctaacacgagtcaagggatgtttgttcaccagtttccctctttggtacccttctctaagagaaactgttgttgttttgcacttcaaggacaagtagaaaatcccagggtacctagtgaagattcttgtaaacttatgaggaagatttaactcctctctcatgcttctcaaatagttcctctttgtctttttgtgaagagtcacgctcaaaatctcatgtagaagcccaacaactcttttctccattaaatcactattgggatcaatattcttggaatcctcataaggagaaatgtatggtaatttctgaaactcctccatccactctctaaccttcttctgagctccataaccccttggaaaactcatgggaaacgacaatgtcgtttgacccctcttaaattgcctatattccatcccccacttcactattcctccttactcatttccaatgctgaaacagctaaatcatcacgccattgcaaaagcctcaagcaattcaacccatttgaggccttaatgaaccgaaaaagaatctgggtacttaggaaccattaacttctcaaaattatcaggcaaacccagatcccatttgatcggatacaaagatttaagcggtaaagttctagttttggtcatcataagcagtctacaaagcctctcaacggcgtcgttttcatgagcttggtgtatactctgttcttgtgagtctaacaacagtgaagtgtccgttaacttaaaacaaggcaaatttgagtattgggcgtgtggaaattcatgaaagattgttgggtaccttcgcatgaaccggagaacaggtacggtgaggcctagaagcttctgccaatcggtaaaggacttggcggtgaggaagccggtgggggaccttttaatggcatctttgagaagacaagcggctttgagttcggtatccttgtcgattatgtggtcaaggcttctgttcttgacccatttgaggcgaactttggatatgcctcgccattgatggaaatagggaggaagaagataaagcttggtgggttcgtacgaggggtttgagattaggaacgaaagtaaagggtttctcggtttgaggttcatcaatttagattgagtattgggattttgggttcagagacagtagaaagaatgacaatttaaccctaatattaggtaaccaacgttaaaaatataattcttttcttaaaaagatgggtaaatgggggcaaaacccccccaatactttcgttttggtttcactaaacccccacaacccaaatttctgcgggtaaacccccaaaac

SEQ ID NO: 305629 - DNA, 6963 bp, Cannabis indica
cgatatgtcgagaaggtgttaggcacgatatgctcataagaaatatgtaggcaaaaataaaaaaaaaagaaagacttaactaatcgtcatggaaaggttggagattgaattattgaaattagaatgctaaatgagtaagaatcgaaggagtttgccaaaaaaaaaatatatatagaataacatacttaaaagggagttagaccatttggacgatttctatgaggaagctaagaaatatttctgagtagaagacggacatgagaacttgacaataagcaagcgcaaccaagataaaacgtcaaatcctcgtgcactagaagaatcacggaagaaaagagagttcaatggcagaagaaatgatcgaaacaaaaagagtagaagagaaaatgattccataatatttattaaagaagatgcacgtgaataagttcacttctcccataacgaccctcttgtacttacgtacactgcgtattagtggacaatgggagttcggttgacatcctctactatgggagagcgtcctcgatgtcgtgcttggaagaccatccctcaatcgcttgaaggccattacatcattactaggattaaatagttttgttactttaaaaataattaatgtaatgtttggatactataattgtttgtatttttagttaagataattttgatatttacttaataaaattttatttttcctatcgaaaaaaaaaaaacttatattgacattcaaatgtgacttcatacattttttgtgtagttttgttaaaatgttatggcagaagtctttgatgtatttattcacaatagaattaattaagctaagttactatcacatttaaataaatagaacagtattattagactaagtgaatgaagaccaaaagtaatacaatataattttctagtttgatgtgatatttatatatatatatatatataccttttattataagaaaacagaattattatgtgatcaaattttgtttgatgtattttaattaaaggttaattatgatttttactctctagactttgacatgtactaaatcatatcctttgaactttttttactgttaaaattcatgttaaattattgaggttgttaaattcaaagacttttgtccaatttcatttaattttactaattcggtttttgtttatgtaccaagtcatgctcctcaaactttgatatctaccaattcacgcccctcaaattttgaaatgtaccaaatcatccccttaatattagatttttcttattaaaatttgacaaaaattttaaaatgtaccaagtaactggctcttccaagtattttggttctagatgcaccccataggtctgagtggatgtagtctaatttgttcttcgtggtgtgttgacctgtggtgaatttcactttgtagcttttaccaaacactcactcttcacagaaagtcaagtttctgcccaattttcccttgagtaatccttgtttgtcaagctttgtgattcccctctcacttacatggcctaacctgagatgccacaatcttgtgtcatcattttcttctgcaacagcagctgctgcacttccaatgacagttttcccaattagtgagtacatgccttgcttcaattcacctttcattactgtcattgaacccttggatatcttcaatatcccatctttcaccttgactatgcagccaagtttatcaagcatgccaatggaaatcagatttcgtctgaggtcagggacatacctcacatcttataaagtcctagtggtcccatcaaacattttgatcatgagagagctagtgccaataacattacaggctttattattaccaagcaacactgtccctcttgagatttctttaaaacatctccttcttgggacacatgtggaaagaacatcctgaatccaggatccattcatcactgtctccttcctttgacactaccaagaccctagccatcagaagctatgtcagcttctcatctattcttgcttttctctctgtcaattttggccttcagtgctctgcactcatttctaaagtgtccttccttgttacaatagtaacacttctttccagtcttgaatttggacttggagttggacatgtatccacctttgttcttgctttttttttttactctcttctatttgatcttcctttggagaacaacccttcaccatttgatttaattatgtcctctgatttctgctgaatttctttcaaattcagagcagatttcacttctaacatggttaaagaatttttcccatacaatatagtatcaacaaaatgctcaaaagatttaggtagaaagcttaagaggatgatacattgatcttcatcatctattttgacacctatattgttgagctcgagtatgatcttgttgaattcatccaagtgtttcctgagctcctttgattcatccatcttgattgtgtacaatttttttttcaggtagaatttgttggctagagatttcttcaaatagatctttgccaacttgtccaaaaggctaattgcagtttgctcatcagatacttctcgaagaacttcatctcccaaaaataacagtataacactatgagccttaatatgtatctccttcaccttcttcttgtcttcaatttctgcaattgtagtattgtcaatggcctctaagatgccttgatgtaccagtagggctttcatcttgatcctccaaagctcgaagtccttttctattgaacttgtcaacttcgaatttagccattgccattcttaaaccttgaacctttgatcaaacaattcttgatcttcttgagctacaccagctctgataccatttgttgcagattataacctcatcaagagcaccataacaaaggattcaaggatcaaaaacacaatgaacaaaatgttaacaaatttagcaaacaagaaacataacaagatatcgaaatgaatttaattgaatgactctttattttataacagtataccatgaaatgaggagaggagtagtacacgaattggatcaccaatatacaagttacaagaatacaatctcagcttaccatgagagaaatcatttcaagagtgaacaatctccatttacaacccttcacacatactaaacacaagttgaaaatcatacactttaacaatggtgatccatcttgaatttctctctcactaacctcccctgtaaagctttctctaacacaacctcttctctaactcaatgcttggttgaatgttgttctccagccttgttgagtgagccaaacgtgtgcctatttataggcagttataacagttaagaattaaccaacaaccaaactgttgagctgttaagaaaatagttggttgacttcttgaaagtagtcaaaacacaatagtaatctagtataattttattctattttaattgaataagaatgtattgtaaactcaatatgatgtgcttttgattttcaacatttagatcaactcaatcttaattcagtaattatagtgaccacataaccatttggtaatacttgcaaaactcattctctatattatgaatggtgagtctttccttcatttcttagcaaatgaaataaagtattggtgagggagagttggtgaaatcaaggaggtaacctctttggatgtaacgtttcaatttatttatatatatatataaaaaaaatgttggagacaaaacattaatatatcatctaaaataataataataaaggtgagaacaaatagtgtcaaatattaggtgagagaatagatatgttatctttttatgtacttgatttgtcaatatgccatagaaggaccacacttgtcctaaataggctaattttattttaaatataaatatgacttttaaccaagtttgatatacaaaatcaaatatattattattccatagtttgtttcgtttaaaaatatcaactatagctaagataatcaaacacgctataatgtatatatttggagaatatagtatattgttaattaatgttacaccaaatgtatatacatctttatatatatataaagggataaaagagttgaaattatgtgatggattttatgaatttttcaactttaagccctttattaattattaattaataagtcatcttcttacagaatctctaatttttcttttgaaaatgaaggaatctttaaataaaacactcaaatttttacatttatattcaattttaatcatataaataagtttaaacgaatttattacattttatataaagtcatgggtctaatttctaatcccgtattaatttttttccaataaaaaatttatttggaattcgaacccaagtgagcacacacataaatctaagtttacaaagaaaattcatcatactagggtttagtttctgtaatatatagtaaggtaaaaatatatttattatattttaatatatttttttaaaatttttgggggctcataagatgggaccctaggctcgaactgtgacagtcagccccatgatctgaagaggaaagacggccgggacctgtgcaatcccatatcgcctggggaaagtgatgtgttatgattctgagactgtgtaagtatgagactacacagttgaagaaaatttaaatagattgattgatactacctatgtcaacaaggtacatcttgtttctcgatagtccatcacgaaataacttcacggttaagcatgtttgacttgggtaatttcaagatgcgtaatctcttgtgaagttttctcggaaagtgtgcaagtgaggacaaaacacgctgaaaatactcgtgttgatttataaggtcagtcgtcattctatggacacttgaaacggaaacattacacgaacctacttacttacccttaaaaagtttaattatatatctgaaatcaaatattacatattatttgtaaaaaataaatacatgtaatttaagtatataatgagttgttattattatatagtgtaagacataagatcttatataaagagaaagagcacaataaaataagaagtaactaattaattaaccaattaagatatacattggaaggattggatgaatttcaactcttgccaaattaattaaacaaaaattattaattgattattatcttcttatggaatctctaactaattccaattgagtttggtagggttggaaaaatgtaatcaattaagtaattaattattcatattttcacgtagttagtagttacgtaatactattctttcttgttgacaattaattatacagaaaataatattttaaaataattgccacaaaaaaaaaaaattgagtttcatattaagctattaattagtatgtacgtgtcattttatagcataattatcaattgttgtttaagttttaagttatttaatattactccaatatttaagaacatgtcttaattaaaataaagaataattaaaaaagacaaaggtcgaagctagctagcaacttcatactaattatgacactttacctcactaatcaattatcgtttgttatttttttttcattaaaatataaaattataaaataattaaaacaacttgtttatacataaatattggccaagtacttattgtgagtatctaattatgttaattaattaagctaattaaattatacaattatctaattaattagagggactgaataaaggtaagcagctgagatacattatccagattaggagtactctcaactatatatttgtataatatataaatatttatttatacaattaattatacctaacacttaagtataatgcatagaaatataaatatatatatatattcactccctatatagaaattaatttataatatatatatgccgtattagtataataaaattttgtaaattttctaatattccttattatttataaagatattatttattagtgtttggagagatacacattaaggccatgtctttataaaaaaatacatatatatatatcatgtatggcaaaaacaaactttttcttattagttaatcattttacaacaaaaattagtttatctctgtccaagtggaagatagagataaataaataaaaggtcaagttatataataatggaaatttatgtagtacactcttaaagatgtttttagtagattttttatttttaagagttttttagtttatatcttttttcataatcgtatatgctcgttgtaactatttaagactgataatttttagaaaatttttaatagtgtacaatgtcaaaaataaggtttaaaaaattacttaccacgcatataagaaaaataattgtgtgtagaacaaaatatgtaaatcttattttcggtattatatataaattactcgaaattttttaaaaatttataaatagtattaaaaaactattacgtacatgttcatgaaaataaaaaacaaaaaagttctcatgtatctcgaaacagataaagagtctattgaaatactccatgtaggggtggacataattatatatatatatatatatttatattaattttgttgattagaagaaaagaaaaaaatataggatgtttttataatgcaccccttaaaatagatgtaccaatgcatctctatctatttcggtactcagataaaaaaaattagtctaatttttttatagtcgtgtaggttatagttatttaagacattctgcaaaatttcaagaaatttaaaataatttacaatatagaaaagtagtgttcagagaatctattttacaatcgtatatgttgaccgagattttcggcaactactaaaatacgattataatattgagctgtaagaaagcgagagaaggatttttacgtggttggggcgttaatgagccttagtccacgagtctttgttattaatggatgtatttaataatcgatttcacacttgagggaatgtcacccttatgaatacagagaatgttcttggtgag

SEQ ID NO: 305630 - DNA, 1548 bp, Cannabis indica
tttttgtgactaaatcaacttagtcactaatagttagcttttacgactaatatttagtcgcagacatattaagtcataaaataatatttaaatagaaccaaaagaatcaacgactaatttttagtcattgtttgctatttttagtgactaaatttgtacttagtcactgaaactttagcgccaaattaatagttgtggtgggagcactaaattttggtgactaaaattatttagtcacgtctaaaaattctcaatttgtgacaaaatgtttggtcggtaaatgttaaagagtttcaatgactaaaatattagtcctaaaaaatttatacttacatttattattaatggtttatatataccaactaatttagttagctaattctatgcatatttttttttacatagtatgtatataaattaattctttttaataagatttcattcaaacttatgtggacggtaactattttcttactttaaatgtttttcaaattttaatttagaaaattaattattaatataatatttaaaaaactaaactaattatttatttcaactatcacatttgaaaagattatataaatctacatataaatgtaaatgccaatctttttccattacttctattttctccttttaatgttcattcttctcaaaattcttaaatcactataagaaatgtcacttttgtcaccgcagttcgcttttgtgctaccaaaaatccctttaagcagcacattttgcgagttgtgctggtaaaaatgtcacagttttactgctagtaaaagtaacttttgccagcacaatatcgaactgcgctcacaaaagtgacttttaccaatattgcaaaaattccccccacactaagtaaatcatttgcaaatatccccctccttttacatttagctcattttttttaattaatttacttatgtggccatgaatcacaaatattattgcactacaacacaagagttatttaataacattttttttttgttgagatataagcaagatttttcattactccaaaaaccaatttacaacctacaacatcttccaaagaagacctggaaaaacatcaactaaatatataatctttccttttcttcccattaaagcaaaccaatctatatttttttgacccacattttttgggcaaatagaacaactcaaagaacctgtatagtataattagaacttaaccatctcaggattgaaatcaattggcataatatcaactaagtgatattgacttagaaaaagatataacggtaaataatatatcttttctatttatactgtacaatattggtccagtctgatgtatagtctatacatctagtacatgtttactttgctaatactctggaaaagatattccacttacctaattaagtgtaagcaatttatattattcattatcatatcaatataaatccagcatactcataaatcatgagataaaataatttcattataatgattattttttattgtgtagacaattctataatcatgaataatatggtctggatttaactgaat

SEQ ID NO: 305631 - DNA, 2447 bp, Cannabis indica
aagaaacaatagtcttttttaaatttttccatcaaatattaaataatttattattaaaaagaataaccgatccaaaataaccgatccaatccgcattattgcggattgaattggattggatttaaactcttatgcggatcggattgaatccaaaatatgaaatccgcacttagtgcggattggatgttgtttgaccaaaaaaatgcggattggatcggatgaacacccctagctatatataaaaatatgggatactccactcattgtcaattgattttgagatggaactccataattttcaacatggtatcaggaccatatttctagcggacttttcgatccacacctatcttgaaagaaatattaaaaaacatataagagttgagtcatatataagaacatatatctaaaacctaaaacctaaaaagccaaacttgctatatatattccctcacaactccagcaatggcaggatccacgacttcattattactcatggaaattccgaccatagcttgggtctccattggagacatgttgaagggtcaaaaagtcatgaccctttcaagacctctttgatgcatgcatgaagaaagtgcccaaaattcaaatctaggaaagtcgttccttcattttttatttttataaatgcactttggtaatttaattcattataaaatattttaatttattttttatttcaattaacgtctaatttttttataaaaaaaaaaggaccacataatcaataacatggttgaatacattagtgtgtgtagtagtgattagtgtcaagtgtgtcatgatacatcaacatgtttttaatggaaagaaaatgaagattttgtaatgaaagtcccaataattaccaacgttcaaaaagttcagcataaatttttaacaaacaattcaagggcacactttaatagtaagtacaaaattaatgagggaaaatagttatttattctatcataatatataataataattaactaaaaaaaaatagatgcagtttcactaaatgtggtgtgctcactataaattggtggtattacaattgttttcatctcccctattgtggagagatttatactatactatatacactatttattcaagatagtctaagtgaaatatatgtaccacattaatattatatttttattcactttgccactaattaatattattttcaattttaaattttatttatttatttatttaataatttttatttattcttttgataaaacaaaaaattagatactttctttgattttgtaggttaatttataccatatatattgtagtatatctaggtcaaatataaaaggagcttttttatttttacactttaaagtagttttttttttttttgcatttttacggaattctacatagagtcccctattacaactagcgctgcaaactaaattctacatagagtctcagattgcaattagcgctgcaaccattttaaaaatccgtaaatttgaaaaaaaaaattaaaaaataatatataaaatgatttctcaatataaaattaaccttaattttttgatccaaattttatagaaatttgattttgaagtaaaaaaaaaacacattatatatagatgccaacctgaacgcgcttttaataggtgtgttgtgcacaaacaaactctcttgatctaataaatatgtcctatttttataatatcatctatatccttctttcattttcatatataaataaataatttttgaaatcttaaactaattaaggttgattcataatccaattatattaattaatatattacaaagagacaaaaagtaatcaagtagtataaatatataattataataaaattaaatatttgaaccatgtgaaggctgctgctgctcctactaatttggcctggttcatgcatgtaagaggtcttcttttaattaatctttattattcatttcttgatccccaaaccaaattaaaccttatattatatgttgacatgtgtaatctattggatcaacgttgctaataaattgatttatttattattagattatagttctcataattggactttgtcttggacattatcagcacataatattctgtgtttgttcatcaaataaggcgaaattgtaaagaaaagagattctatgtttatttattaattaatagactttatatgtctaattaataaatatattaaatgacaataatatttaataattaatttttagttattaaataattagaattggcatttaaatggttaaaatagaaaattggcgtttttgagaaaatgggatgaaaaatgacaaaatggcaaaattgcaaagtgggcccattatccattctagggccggtcacttagtgtgattttactatttatttttctattattttaatgccaaataattctaacctaaacctaagtggttacctataaata

SEQ ID NO: 305632 - DNA, 1554 bp, Cannabis indica
aataatattaaaatttttaaaaatttaaataaaataatataaaatttaaaaatatgaatatttaacatgccccaaataagaaaaataataatgtaaaataatcatgttacaaataatgtataatatttaccattaaaattaatataagttcagttaatttaattaaaataaataatattaatattttaatatttttaaattaaaaataaaataatattaatatttatatatatttataaaattaatcatactattactaacactattaaatttaacaaaatatttttgtattcttaaaataatctataaaccgacgaaatctgttagataactgtttgatagccatagctaacattagtggttaaaatgagatatagattggtgaaatgaaccaaattaaatgattgaatgtaataattaatataaagttaaaatctcttaaaataaagtaataattaatatatctattcaacaatatattccaacgttactgaagaggagacaattattatgttcattttatgccaaactaacactttactacaagattattttgcattcacatgcattgattttgctgaattaattaattcgttctttgaaacatgattatacaatattattattcgatatatgattgctcaattattaataataaataaattgtgggcaagggctggctagcttaatgactttgccatattagcacgtcaaatattacttgatatgcacatataaaaaataatatcttcatcaacgttgaacttatttaaaatatagtacactactgaataagaaagaataaaaagttggaagttataatggattagcatataatggttggcgcaacttgtacacatagctagggcccccaataatagctgtttcagataaaaccagagtgttggagagcatacttgagcgttttagctttcttcagtcttcacccaattgcatgcttttgcaatttgcattattaacacatatacttacttatattaaaagcaattttgctatccaaaacaaaatcttgaaagcaatttggtgaatctaatccaatgttgacatccacatgacatatcttgtgaggtcaattaaattcaaacatgcgcacaaccaattttgttttttacactttgccactatatacataccgtagatcctttctacacaaattattatcggtacaaaattatgtaatagttcttacattattttttatgaaattatagcaaggaaatattgctacaaaaatatttttatcattttataatactaagaattaaaatgatcttttattgttttttgttttggaagccactagaacaataaataaatatgtcacacttattttggtaggctccaaagccagtcctgaattttaatgggccatggaaaaaaaagaaggattattttaaaaaaaacattaaaacaaaaaaaaaaaaaaagaagaggatttttacataaatatgagaatttttagttgccatttacttttttatggcagaaaaaataaatcaaaaagatttggaaaaaaaaataattaaatggaaa

SEQ ID NO: 305633 - DNA, 1696 bp, Cannabis indica
tcagcatttaaacggaataataggacaaaaccttactgaaggactaaatttctgtatatgcaaaagttcaagagaagttcttaacaagctgtatattttaagggccaaaatcaatattgtcgaaagttcagtgggcaaaattgccaattattctaagtattatgtatagttttacattattaatatatatttttacaaactaacgtttataacaacataagccaataaaacatcattatttaaaacaggaacaaaggtaggaatttatctttaggaggggggccaaaaggtaaaaaataattttaaaaggagtttacatattttttataaaacaaaataaattgaagaggttgatcttattaactaattgataaaataaaatattatattgactttcgatttataagagtagaatggaataaaaagttaaagtatattattattaaaaaaagcgtaattgcggcctaaaatacttaagtttatctctcggttgcagataattaatacctaagtttaatttttaacggtaataatacctataggtacttaactgttaagtgtcaagttattatctacgtgtcattttcttattagtatatttaaattaaatttaaataaaaaaataaatttattaacctagaccaatcaggaactgccacgtagccattgactaacacttaatgatcatgtacctactaaagttccaaaaatataacttaggcattattaccgtcaaaaaataaacttgaatatttatctataaccagaaattaaacttaagtattcaagctggaaattactcttaaaaaaatatcattttgtattaaaatgatcttttcttttaatcccatgactagtcattctataatgatattacaatattttagaaatacaagcaaacaaaagaagaaaatatttaattgtaacatatgccaattaatttagtgtaattatcaaattaaaaatatttaattataatatgtccaattaaaaaaaaaattgtctgcctaatgtcggattcacttgcttaaatcaatcttcattaatttttttttttattattattatggttaattttagttgttgaaataattagatatgaaaatatatatatatatatatataatcttaaaaaaaaaatattgtctaaattaagtttaaaaaaattgagatgagacaaacattaatggatcacattaaagtaaacaaacatttatccttaaaattaaaaaaaaatatattaatatatttagtccaaacttaaaattattttaacttcaacattcaaacctaaaccaaatcagtaactataaaatccaaagtataaaattaattgctacataaagtccaaattgtatataaaaaatagtttagttagccatagaacataatttatctaatacattatatacatttcaaaataaattataaatcgatttattcaaattattattgggttgattaaataatattcaacccgttaaacgtattagtaggacaatttatcttttgttaggttatttaagttacgtgatttgtcaattatttcaggttagtttcgagaatttgtaaatttttgcccaacttaatttacatccttctctctaaattaaattacaacatataaggtgtccaacgctatactaaactaactataatttcatcatttcttaaaattttgaaaataaataaataa

SEQ ID NO: 305634 - DNA, 1440 bp, Cannabis indica
tatcctgagtgagtttggacacacttagtaaattcttggtagttttcagtactagcaacatttattttaacagtatcagttgaccattgctagttaataaaactctattaccaagatgagagataatggattgtgtaccattaccaacaataactttctccttaccaccgtagtcttgcttctgagtcattgagacagagtctgaggagatatggttgggtgctccactattagcaaaccaggcttcacttttccaagatttctgatgtagcaacaaaggttgaaggattgttgctctttgtctgtgtaatgttgttgggattagatcccatacagtgcacatcaaatcaattgtaacagactacagttaagtggccatatttgccacacacacttagaaggaaggtttaattaggaccaccaaagcttccattaaacctgcccttgtctcgagatcttcctcctttgttagaactcctgccaccatagttctaagaatagtgtggaacctctgccttggtctgcagattgaggtttttgagcaaagttggcttgaggctgagagagagtgttggggagttttttgtttggtgataaggcttgtaatctttctttcttactatcaaagatgagtagcgactcttgaagttcttgccaggtattttttggtcgagcattaatctataacacaatggttagatagttaacatcaagaccaaagaaaacatttgttaccaactaagattcagggtatggttctccagttagagctaatagaccagctcatactttcttttgtctgaggtattctatcgttggggtatttcccttccttgtcacttggatcaaggttcttgtctcatccattttttacttggagtaagcaccttagagttgttcaagtgcttgccataatgctgctgctgtggcaacccatgaccttagttgttatagtttcagtcattgaactgtataactaccccattagcaattgatcatttatgatctagttttcataagctagattgatgatgtgagattctccaatatcaatgctctccatgacagtcaacaaattgagagttacaaatgttagagtcattcaagaaaccatctaatcgatgacttcttactatggttgagaccgttatcttccataggttgtagttgtgcatgttaagtttcagagagaaaggttgatttgaggtgttgcagtgattaggtactggagtttagagctaaggattacttgagctagcaccaagtactgttgatgctgcaactgtggctaagggttgagcaggggtggtgttcagggtttttaggattttgtgagtgtcaacatcttgaaaactttgctctgataccaagttgattttagaattaatttatttgataaatctctgctcaattgatgtgagtgatgcattttctattggc

SEQ ID NO: 305635 - DNA, 1978 bp, Cannabis indica
aaaaaaaaactagaaagaaaaaattgtttattctcaatttataattttttttatttttaatttttttaacattttattacgtgtactaataaaaatagtgtcatgtctatactgtgtccacgtaaatgtatacgtgaacagtctaacataacacttaacatcaaaaatagatgaaaattatgaaatgctaataattttttaattttaaaggttttactaaaacaaaaatgaaaaaggttgtggcggccctaaaagtatgaaagtatatattgtatataagagtgacatgttttgataattaaatatatgattcaatgaatgaagtgatgagtacaataagatgccatagatcacatcacatgtgacgatcacacgtatggcagtaggtggaagcattacgtatgggcagtgacgcccaaccattattattattattcattctcacccacttaaacaatcaacaacaataataataaacactgttggaattgtgtgtagtgtgaataccaatccaatcactttaataaattatcaaataaatacgcaataaaataaagagaattgttaaaggatactattagtgtctcgcaccctctttaatgttatgcagttattgatgtaattatatagcgggtcatatataacttaagaaaataaattttaaagaatatcgctaatcgggtgacacctatagaaaatgctgggcaccactggtacccaataacaatgctctaaaataaatatatattataatattcatcttgacttatacattagagtcatcgccatatcctatataacgttactaatcattttagtctttgttaagtaataattataatatattaaattttgtgtggaagaacgagtctaatttgcctagggtttgggttggagggcctacatgcaacatctatataataattttaaaataattaaactgatatctttaacaataaatttattttattatattgactactgtattaaatattcaaacatgttaagaatttttttgttaaaaaaatatacctatatatattatttttttagttatacctttaaatgttaattaatatcaaataagccctgccaaatatcgttttgtcttaaagtacttttcagtacaaataagtgattttaaaatctctggattaaaataaaatttacattttgtggtagttagtgcatctatttacaaattttgcagtaaatatttaacttacttttagtggattaagtttatggtttctgtgtttgtgatcatgagggttatgggaataaaaatatgggataattacataccattttttgtaaaaattggttgaaatagaagtttttctcttttgtgataggactttcttataattttattatattgaaatatatttttttttgttgcttatttttttttatatatatatataaaaaaacaaattaggattagcttgagccccaaactatgatgtttgtcaagcatggccattctattttaagctagttttttttacatatatttacagtacaatattcttttgtagagagttaatttatgtaactttttgtctaattaaaaattttgcatgttatgtaattagtcgtattatactcaattaacaaggaaaagctaaacaattaatgatgctaatgatataatttgaaggtattatattattatcgatataatttaatatcgaatttaacatattttaatttttattttgttgaaaaaatcagcattaaccggataagtgataaaagagtttccagtttttgggtttttctttaatgcatgatattgagagctctggtgatcttttgtatgtatataacttcgtgtactgtacactagtgttcttaaattattttattttttatttttggctaattaaaatttttgtttcttgaattttaacatgaaccaaattatattttttgaatttttaaggtcgttaaaaatacctttgaactattgaga

SEQ ID NO: 305636 - DNA, 1667 bp, Cannabis indica
ctagattgttaaaagagagcaaagaaaaatgagagatactttggtaaaatgagaaagaagaatacatgaaaagcaaactctattaaggaagacttttttgacttgatggattgagaagtccttgtttgacaacttagttggtgattttattttcagcacttccaacacacatgctactctatttctattgtatcttaatttatttactcatgtatcacaaaaatttcttattaggtgtgcaattaccaaaaccctatcataaggaaatatcaataagtgaaataaagtccctctcgcataaacaatgttttggccattttgcttgctttttccacagtatcatacaatccctctaatgaactagaataacaaaacccaacattcagaagaacaccctcaaaattccaaagcactacatcttaataatgctaatgctattatatatagaagaaacatcaaagaatcaaaagcaaagaaactcaatgttcacgaacacgcactaaaaatccatatcatattataacaacaaaaaccaaacaaaaaattatgaaactctttgttgaaacaaatcatcaaccataacaaaaattttcatttatccgttttaatataaaatctaaaaccaaaatcagagtctactaatagcaaaaaggaattgtttttcttttcgaatttaaattaacaaaacaaaaatgagagaaaaaaaagaaatacatgaaaagcaaactcttctttttcttctctaacggtaagatttctggtacctagccctggcaccacgaccaccgaacttcttaggctcgcatcgcctgggatcagcgacgagcaaggtcctgtcgtattgccccaaaatgtccttgatctccttcttcgactgctcgtccacgtacttctggtagaaagccaccagtgccttggcgatgctctgacgaatggcgtagatctgagaggtgtgacctcctcccttgacacggatcctcatgtccacgccggcaaaacggtgtctacccagcaataggatcggctccatcgccttgaaccggaggatctcgggttcaaccagctcgatcggtgagccgttgatcttgatcaaaccgcgtccgcgcttgcagtaagtaactgctaccgcagtcttcttgcgtccgaagcattggacggactcctttggggttgtggccgccatggttggagatgggtttgttctctctcggtctcgggggagggttttttggctttggcaattggctctggggttttgattcgtaaaacctagcaagtaaataggggttgtagggttttgggactgatcgacgggtgtgatgtaatgcgactcgagatttcatggaagacaattaatgggctaacaaggagcccaatacatcatatttgctggggcttggacccaattgaagtggaagcccaaaatacaaatcatgggtctcctttcttttagagaaaattacatcaaatatggaattttgtaaaaaagttacaaaaatatggcatttataggtttaccactcttctatggtattttttcacatttaagactttttatggtatttaatatgccatatttttgtaaacttattatccatatccatatttcatgtttttgtttataacttaattaattttattttttttagtttattttacatttatat

SEQ ID NO: 305637 - DNA, 5162 bp, Cannabis indica
atccttgttcacagctgcatcattcatggagaaatcttgttattaatcttaagctttaaaaaatattattggacagctcaccagaagaaatcagaatactaacttttttgctctgctagccgcccctgttggataaccaaagcatccagtgcaagcttcttgtaagccctctcaataactttctcctcaatagtatactaaaatgaatcaaaatgagtaccttgaagcaaaccaacacaatttcactaaaatatccatataaataaagaaacctctgtgcagaatcgaaacacttgaacttctttcttttgaccaatcctgtgagcacgatcctgagcttgcaaatctacttgtggattcctgcaatgaatttcaagcattagcatatgaaatgtaatgacagccaggaaagaaagagataaaggactcgcaccaatcactgtcataaagaatgacaacatctgctgtggcaagattaataccaagacctccagctcgcgttgatagcaaaaagacaaatttctcacttcctggcttgttgaaagcatcgatggaagcatcacggtcctccccacctgtattcccatcaatacgacaatacaggtatccacgaaacatcaagtaatcttccagaatgtccaggagccttgtcatctaagtttaaaatcagattcaatcccagttagattagacactaaaaaatagtaaacacctgatcatgcaaattaacagttgagaaaaccatatggacatttcaaccaatcaaagtaacctacaactgtcactgacctgtgaaaatattaagacccttgaatcacgctcttttagctttgggagcaacttatccaagagaaccattttacctggaattaaatatcaagattagtggttactagcaaaacttattagttaatatcatatgaaaacttaagcttaccagcatttgtaatgagatgatctcctgttgtgtatggagggccaggttcagcaccttgaaaaagatacggatgattacagcatttacgcagctgcattgctatattcagaaggcgcttgcgttctccaccagcattaacaacttcaagatctttctgcagtaaagccttgtagtactgtttctgcatctgtgacatgccaactttaagaatagtctcctttttggggggcaaacctttctctacatccgacttcagtcttctaagaagaaatggtcggagaacctgttttaaaagaaaaagacagtcagtatcaaactaaagaaagcatataaatattttgtaaggatctcagtagcaacatgcaatgagtgcattaaagtttaaaattgaatagtaaatgttttaagtattaccttgtgaagctgttgaacaacctcttgttggtcattttcaccagaaatctggaaccactcgtcaaatgtttcagctgaactaaaaatctcaggcagaagaaagttcaagagagaccataattcatgaaggttgttctgcaagcaaaaaaacaaagccagttaatcatcagtcacaacaagaacacattcatttttatcaagcaaataattaagatcgtaagttatacctgaagtggtgttcctgtaattaaaagtcggtaatttgtattataaagcctcatagttttcgaaagaagagaattttcattcttgattcgatgagcttcatcaattattatatagcgccagctgaaccgacgtaaggtagtcttctccttaatagccatctcaaagcttgttacacatacatcaaacttcccagcaacaagcaagtcctctcggatatgtttctgcacagattatggtaaatgttacagtaagaatcttttcttttactaataaaacatctcaatattggagtcaggccagaaaaagagttaccctttcatcaggatttccaagaaacttcacagcccgcagagttgggcagaaacgtcgaatttcattcatccagtttccaagagtagattttggagcaactaccatatgaggaccagtaattcccctaaactcatgcagatagcccatcagagaaatggtctgaagcgttttaccaagaccctgacataaaagaaaaagaacaatggattcaaatcttagttgaaacttaaaataattaatagatagtaaattctttctttggaaaagcataacacaaagagaacaatcaaagtatgggcactaaccatttcatctgcaaggattccatttataccattctcatagagtcgtataagccagtttaatccagcaagttgatagtctctcatttttccctgtatacctgcaaaccaaaaaagacaaccagtcttttaaaatttaaactacaaattaactgatgggagaaacatatctggaacagcaactaaagtaaatacaaacaaaaagtacagtcaacttggtaatgatagagcgcctacaagaaggttgtgtcaaaagccttgtagttcctgcaccaactaaaccatcttcttcttccttgagacattcttcatcctcttcctcttcagttatttttgatgcatgacgacccctaagtcatgtattcatttaaaagaatttcagcaaaaactaagtaaaactttataaaaaaaataataataataataattcaaagcacactggcagtgtttatgcattcaaaaacttaaaactaaaggcaaaccactcaataaatacattaatgtagtaccactaatagtccaaatacctacaaactaaacaaaaatcaaatgtaactgaaacaccttctgctgtcacatttaaaagtgggaaaaggaataaattttgtatttaaaattgtatgcaatgaataagataaaataatgttaacaagagatgatacagcaaagtaacaatttttctgcacaaaagtacagccttagccttgttaggacaaaacccataaattatgttatcccagtaatcaactaaaaatttgagacaatgaaaaagcacttcataattgagacagaaaccaaaaaaattgtgtcacctctaaatgcataaaactagaggtagccataaatcactataaaagtagaggtagccataaatcactatacaaatttacaaggagaacaacacataaaagacatagcctaacacgtaccttcccttggtcttctttacagaagaagattggtcacctttagcaaaatgagcaaataactctgtttgttggagaagataattcaagcgtcctttacccctattgttctgaaaacagataaacaaactggtaaatttaactgacattaatgactgagcagttacaagtaatgactcctccaaaactagagacacaccatgtcagcttcaatggcagcattctgagcatccaatatctcctgaactttttgtttctttactttctgcatttctttgagtctggctttctcacgcttgctaacttcagcattagtaccatcatctccatcctgcataattcaaattaaattaagcgcaaacaaacattaagatcaaataaccttgaatcaaaattgttgtataatcaataacaaattattgcagcactactttaaaagccactgaagaacagaccaccaacattacatgcttataagcacttccaattctctactttcgctacatgaaacacggtagtatgtaactaccataaataatagccaatgctgaaagactgtcaccaagactgaactaaaaaacacttccttagctaacaattttattttaaatcaacaaaaccagtaagccaaaatacccattccccaactctttcttaatttcacaatattttcaataacaaataagaagcaaagaaaaccctagcatgtaaaactaccgacgccctagatccaccacaataagatatcgcaaaccacataaaaaacctcataaacgtagaaaatacagctctacctcttcctcgtcgtcatcgccgttctcagcggcggcgtcgtcatcgtcggaaccaggagagatagccaaggcaggctcatcgtcatcggaggcagcagagcgcgttacagcctcaagttcctcctcgtcttcctcctcgccgttgctctgctggttaatctgctcctcctccgacgaattagaagagttagagaaagcttcgtcagaagagacctgcggtttggagagcttcgccatggaatctctcagatcgagggtttcgttggtagagagggagaaataaagaaaacgatttgtaaaagggcacttggcagtcgggcagtgttgtaaataaaatgataaaaggttgttataagagaagggttgaagtatttatagccgtgtgatttggaaaagtaatatgcacggttgattgagcggttttagtccaaaaaaaatttaggatttcccgccaataatagtgaaatactgaaatgtggtttcccgcctctgttagattgggttagccatggctcgagactaacgccttggctcgaaccaacggtgccacttgtgccgaaccaggtgtgagtagggttggctattggctaaagcatgttagacctaagtaaacggttctcaaattagtaaatcagaagttttaaaaataattaatccctaaaatattatttttaaggcgttttataatcttgcttttaaattggaaaatatttaaaattactatgtaattcctaaaatattaattgtggtagcattagtaacacttttttaatcaattttctgtttttaaaattgcaaaagtaaaaatatttgggcattttacaattttgtatacattattttaattaattacaaaatatgtgcaaaaaaacttattatcattttctcatacatttttatatactagaagaaagttacgtgcaaggcacgtatatttagttttatgttatgtgttctataatttaattaagaaaaattcaataaataatcatataatttaaaataatttaaaaactaattttaattagtgtgtggggttatttgaaaatcaatagtgaaaagtcaaatttaaaatttgcagaaagagaagaggagaatggagattagcttgaaatatatttaaaaaataataatgctacacacttactatggatgcttaactcgagccggtaataataaaattataaagaataaaggtagcaggcatataactggacatatgaaagaaagaatataaaaaacaagaaat

SEQ ID NO: 305638 - DNA, 559 bp, Cannabis indica
gatgaataaagaggcatttttcaacttaattatcattattgggaggaattatgattagtcttttaagaggttaattttattggtgtcattcttaatgatatgaaaattttgaagatacattacctatgacccattatgaaagtcaactatgattctgctgcacgtggtgaggaagagatcagcatatcctttttttcgtaagaaaaaaaaaaaggaagaaaaatacatataaattttagagaaactatagactataatcattttattttcagttatatgtatcacatcacaacacaagcatgtgctgtgtattcaaatcattcagggcttttcaaattgatgggccttctaaaatttggatattggcccaagatttattgatagctgcaacttcgaaagcgtccacggaaatgaaatgtccagtgcgtcaatgtgcatttgcactggcctcgatgtttttttttagggactgtattttgacattttattatttttatatagaggaaattacactctataccctttctatattgtcatcttttatttttaccctcttttt

SEQ ID NO: 305639 - DNA, 1745 bp, Cannabis indica
gattgatttgcatggttctaatttaaaggtaaaaagtaattgtggtaataatgatatgctttcttttatgtatataattaactttaaaattatatttgagttatatgagtctcaaaaattcaattaatcaaaagaagaaagatattattctaaaaatgaagaaagtgcatagtagaatatatataatcaagacatcattatcaactttttatctcatagcaattatttaataaaaaaaacaattaaaaatcataatccaagtacattttttgcatttaagatgcgtttggaaagttaatgtgtaactgaaggtaattacataatttaacatgtttgtctggtcatgtaattacgttatatttgtatagttaaaggtaattaaggggttccaattatactctcatgatcccaatgaaaatcgaatataattacactgtgtaattactaaaaaaatttcattttaaatatccaaatagcttattaagtgtcaatatcattaaatagtttaggaaaaatatgtattacttgcgtatttgttttgacatttggagaaacatttagttacttttttttcataataattatttaagattatttgtatttttttttaaaaaaatttaaatagtttaaaatgtcgaaaataaaatttaaacatttacttactatgtgtataaaacaaaaagtcacccgtgtaataaaatgtttgaattttattttcaacgttgtaaattatatgaattttttaatatttttacagataactctaaataattacaatgtagataattataaaaaaaaaacaaaatcgactaaaaaaactcttatgaatgtcgaactagatagagatttgtcgagttctatagactttacaaataatttatgagaataaatgatttcattggtgtttgttactaaataatataatatttttatttagtaacctacaaatatattaatttaaattaaaaaaattatgttaaataataagtctcacatattttaatttaataattattatatatataaataaaaaataataaccatttggtattacctaatagcaatgctattttgattagtgtgcaattgtatttgtatttttgtaactaagaagattttgtttgaaaactaaaataaattatttgctatataacatttgtttgttttccaaatttagctattttaacttgaataagtaagaaactaacaaattattgttttatgaatttccttgaatgttatggctgaagttggtaagaaataattttattatatagagaaataagactataaaaaggaataccttatgagtaagatcattgtaaagtttaagataaaactaaaagcatattaatttgttttgccatattgaaggaaagtgttgcttttgatttgtattttgttttctaaatttactaataattcatatatgagtttattcaaaaaaaaaaaaaatacatatttgtgtttatcacaaaatttatgatttataattataaattacattgataatattcaataatttgaaaaataaggtaataataattatgaaagttagatcatgacaaatgggctcttaaaactaacacacacctctaaagctaagattgacatgtttaagttaggattctaactctgatttttatcttttattttttatgttttccattttattatattacaaaaaatgaaaaataaaaaagcaataattaaatgtctacaagacaaaaatactaattatttaa

SEQ ID NO: 305640 - DNA, 2210 bp, Cannabis indica
atggcatattaaataccaaaaaaacttaaatgtgaaaaaataccatagaaaagtggcaaatctaaaaatgccatatttttctaactttgttatgaaatcccatatttcatgtaattttcagtattattatagcttgaatgtttaattgttacttctgttaattcggtgtgtgtttgcacttaagatgttgatagtgtgatcttcttaaatattgtgaggtcccctttttaattctgtaagatctctttttgacaaattctaaaaatgatttatctcatttaactatttttgtggcactcgttaagtacatatataataaatttgatattaatataagagaaatactaaaaaatactatgtgttattattgttattagtctaattaagtattgaattctatatagtttgatataataatttttaaggaatatcgctagttaatcgtaaaactgacatatttagagatgttaggcaccaccagtgtccaataacaatatttttaatataaatatattataaataaaaggttaattagcaatttttcccctcgaactttgacatgtactaaatcgtgccccttgaacttttttggccgttagaaattcccctcgaactattgaaattgttaagtttaaggacttttgtctaatttcattcaattttactgttcagtgattgtttatgtactaagtcatgctccccagactttgatatctatcaaatcacatccctcaaactttaatatgtactaaatcacgccccatgaattttcatccatgttacaatttttttactaaaattatataaaagtccttaaatttaacaatctcaatagttcgaggggaatttttaacggcaaaaaaagttcaaggggcacgatttagtacatgtcaaagttcgggaggaaaaattactaattagcctaaataaaatgatatttctaatctcatttaatctaatctaaatccaatcattttattattaatagtgaagatcatgcaaccaaaaaagtgaaaggatagaaaaatttacgtacacacacaactcaagcgtgttgtgtttttatatacataatatttatataaatgataatgatattggtatatttataatttatttgagcattgttatttaagtactagtggtgtttaacaccttctcgacatgtcgtattgcgattgactagcgatactccctaagagttattgtattaaattatatgagacctgatacttaattaaacaaatagcaatattaacacataggaaagtactagacaccacggtacgttttagtatttctcttataatttcttatattataatggctaagagctgcatgtttgccacatgtcacccaaagaaaggaccatatattatgtatgaagagtagcttccaccaccgcccggccaccacttgtgtgaagagacctttatttatttatttattttaatttaatttaatttaatttataattatctttattagtttaaaattgagggttctcaatcacaactaaacttttttgtttggttggtagggaaggcaaggattgattaacataagcttttttttattattaacttatattattatatgcttttatgaggtggtaatggggctgtgctgctgtcgtgtcacaaattggacaacatttttcacatatttttttatccattaattaattatcaactattaaaataagaaaaatgacaatcaagcttttttcttctatcaaacgacatcgtgtggacaaagtctctaccaccaaacggctttaaaagcttacctaaaccaacatgtttaaagttggttttccaattccaaatggtgcaaattaatgcaaaaccagataataatatagccttttaaaatattgtaattaataacacatattaagaacatgattggtagtggtgcctagcatatataatggttttttataaatagttaataatattttataatagttattaaattaaattatataaaaattcttttaaaaaaaattatataaaatttatttttaaaaaaaatatataaatttaatatttaattacactaataacatcaatataacaccaagtggtacattttaaacatttctcatccataaatgcttaccctaaacatttaaaaaattttacatgaatcgacactacaaaaaatcttacttttagtcacaatcaaacttgtgactaattataaat

SEQ ID NO: 305641 - DNA, 1370 bp, Cannabis indica
taaggaggaaaggattggaaaaagagtgaaatacaatgctgcaatagattttattgattgtgttgaaacatgtcaacttgaagacataaagtataggggcggcttctatacttagaataacaagagacaagggaatgaacgaatatgctccaaaattgatcgagttcttgctaatcaattgtggttagataatttctcttctactaaagtaatttttgcaactgaggagctatttgaccacaccccagctataatctcattatctcatgaagtacttagtggaaaaaatccattcaagtatttcaagatgtggacttctcatcctcgatactctgagattgtaaaaggggtttggaaccaacgaattgacggctctaaaatgttcttaactgttacaaagctgaagcatctcaaagtagcttttaaggagctaaatcggcagcacttttcaaacattcaaagtgcaacttataaagcaaaaaaaagagctacttgaagtacaatagaagatgtaatcagagccactctgcccgaagctatagcagaggagaaatgtcaaatagatggcaactcttgaagggtctcaattcttcttgtaccaaaatccaagattgcttgggttaaaaatggagatgacaacacaaccatcttccatgctagtatcaaggctaggaggaaagccaatagtattctctccatcgaaggccaacatagaacccaaactgacaaaccagaagacatctcagaggcattcctatctttttattatcaattacttggtactaaaattgaaggaaggaagaaggttaaggaaggagttatgaaactgggtccccttgtctccaaagcacaaactgaaatactaatgaaagaatataccaaagaagaagtcaagacatctatctttgcaataccgggcatcaaggcaccatgtccagatggttacaccagttgttttttccaggacaattgggacttaataggagatgacattagtgaagttgtgatatccttcttgcatttaggtcagattctcaaagagattaacactactgttttaacacttatccccaaatgtaagtgtcctaatatagttagtgactttagacctattacttgttgtaatgttatttacaaagttgctactaagctaatcttctcgaggcttaaagctatcttacctgatttggtagctcaaaatcaaggaggattcgtcactggcagatttataactaataacatcatgatttgccaggacttgatcaggcactatggacgaaaaaactctaaagcttgatgtatgatcaagcttgatcttcaaaaagcttatgatacccttgttgggttttatgccctaaataaaattcttt

SEQ ID NO: 305642 - DNA, 2712 bp, Cannabis indica
acacacacactctctcttccttttagcttcatcactcttccaaactcagctcttcactcgttccatcatatgtattaagcaagaagagagagtgaatataatatatattaccatgatggataatgatctgtacaacctcggcgggtactcagagcaatcgtcaatggcgccgcctcatgggatggtttctccggtggccgatgattataacttgttgaacagtactactactactactggtttcgacgatcacgatagggttcatcatgctttcggatccgactctatctttccagctccaccgtcggcggattccgacgccgcttcaatggccccgacgtccgacgatttttcgtctgaaatcagagctaaaattgcctctcatcctctctaccccaagcttctagaagcttacatcgattgccgaaaggtttactaaataaataaataaatttttataaaagcattgaaaatgttagaaaataacagtaactaatttttaagaagattatccgcttattgcggaggaaaaaaaaactgaaatgctattaaaacgtacatttctgtactttttctattttctctcatattttcccagtagccaaccacatgtttttcgattcttaattttaaatgcaataacggtagtagtttttttttttttgaattgtgtgtaattattaattaattacctaatttggtggatgatgatcaggtgggagcgccaccagaattggcaagttcgttagatgaaattcggcgagaaagtgaagtagtaacgaccgtttcgacttttgtcgcttcggatcccgagctcgatgagttcatggtcattattaattatcgtaatttcaatttatattgaatgataatgaaatgaaaccctagatgatacatagataataatataaaattaaaaatttgaatatgataatttcaggaaagttactgtgaaatactggtgaaatacaaatcggatctatcaaggccgtttgatgaagcaactagctttttgaacgagatgcaagcccagctcaactctctcagttgcagtactagtactactactacttcaaccagctatgtttcaggtctagtattaatctcattaatatatatatatttatatttttatggttgtggttataattgtgtgtgatagatgtgggtttgttattataaaatcttttaagaaaaatattgaggagagatagaaagagtcagatcacatgaagaacagtgttgttatagttcccaggctttggtttctgatgatggaaggaatattaaatgaatattgacacttattctcgctaagaaacaaaaggtcgtttcagtgattattagtaataagttgagttttgtatctatttattaaatatattcatttatcataaaactaaataacgctaaaccctaggttatatatatatagactgattcttataaatataataaagggtatatggtattgagtattattttggctgagtattagtaatagtaagtaagagttctctattaaattgtaccaatagtaatagtaaatgaatgccctttattatttttcaaaaggatattctgatactctttagtatttttccatagtaaagaataggggttaatttaagacattggaattttctattttaatttagtgcttcttgtatgtaaaatgtgagcttctcatattagatacaatttgtggtattatattgcatataagataaatgtgagagtcctcttcaaatatgtttctgtttttggggatgatttgacatcttggagtttagcttcgaaattatggagtgattaaatatttacactatcgaaggtggggggggggggggagtttgtaaagtaaattatttgcaatataaggttttataatgttagcatatacgttttatttgcatataagcactttagtgtcctttaagaatgctatgtatatagtttcaaaagtaggaatgtaaattaaccacaagttgtttaaatcattcacttcattaatcatctatcatggtctgcacaaaatagattcccatcaactagaatctttgagagagcatgataaaaaatatatttattttaaaatggatgctcatattgtcagatggaagtacggttatgttagattttcaaaatatcatgtttgctcgtgctagctaggtaggtaatatataatagttttgatctgatcaatctcatgttcctaactactactttttgaggttatgttatttgtatatatcaatacttatatatttattttgtatatatcaacacttatatagtatggtaataacaccatttttagtatagaaggctatgctttttcatcatgcgatgtgtctacctagttgtgtgactttggaaattgattatttatatgtatggatttggattggtatggaaccaagtgccttaaaaggtgaaaagcaagtgatgagtagtattaatgaattaatatttatttagatttctgagacgttgttaggctaactacatataaaatatatagtttgatgatgaactacattgcttttttttgatgtcaaatattatatcatatgtacatatgtgtgtgctttgaggggtctttgaattacttatgcacgtgggctctttgttattgattgagattatagacaacagaatcatgacagagaaatggttatggtttttttgagctagccttaatatatatga

SEQ ID NO: 305643 - DNA, 2513 bp, Cannabis indica
caccccacaaaataataagtacaaccttaatattaaaaaaaaagcttaaaataatttttaaaaatcactcttaatattttttttttaaaaaaaaaagttctcacattattttgtgctaacctcaatacttattttaattttattttcatgttttttttttaaaaaaaaatcatgtataatttttttctaataaaatttcatatcatttttatttcattttttgttataatatttaaattaatataatttattttttgtataggaataatttttaagaatatgaaaaaaaaaattagtatgattaaagatatatattttcctatataataaaaatgattaaatagggtgttatataagtttttcgggtgcaaattaagctccccaacactttaattaatacacatataatttttttccaagttaaattaatatatatatttatatatatgtatattacatgtgttaactaaattagtggcaacttatatttaaatactatattgtttagctacaagtaactttttgttgcttaaaagatacatttagtcacaaaatttttatgttgtgactaaaatgttatatttttttgttgtgtttttcgcagttaattaattaatatatatttatataacatgtactgttaacttaattgtatgtaatttttattttattttgtagtgggtagatttatgtaaatgttatttacaagaagcaaaatggtattatagtggataccaaccaacattggaagaatacactgagttgggttggctttcaataggagcatcagtaattcttatgcatgcttatttttgtttcacaaatcctataacaaaacaagacttgaaaagtttgcaattgcaacatcattatcccaacataattaaacaagcatgcttgattacaaggcttgcagatgatttaggaacatcttcggtaagtactcttaattatcacattaattttacgtattagaccttctgttttattaaatagcttcgatcaactcaattttatcaaaaataaacttaggtgttatgaccagactagttataagtttttcatctgattgtgctagacactgacttcagatttgttattatgttaaaaagaaaaagaaattgatgaaaattgaacttagggtttttttataccattttggataagggacgatccaaattttcatttaatatttactttatagagaagcattgaaaataaatataatgcttctctacatgtagaaaagtaactaatgtaagctgagctttttttctaatgtaaaataaggaaaagcacctattctcatctgatgtaattaagtattctaacattttattcgtactcgcgatagcataatttttcagttgtagttttattcgtactcacaacatttttgtgagtacaaggcttgaagatgatttaggaacatcttcataaagtactcctaacattttatttttactttgcttttatatttttatttactatatatataagtaaaataaaagaaaaacacttatgtacttcatttgatgtaagtgatataaccttttagtcgcactcttgatagcataaacttttagttttagtaacaaatatctagttgaagatatgtttttaattaatcacaattttttacctttaagttaaaaaaatatttatcctcaacaattaatttgatttaattaaattgaccaggatgaattgaatagaggcgacgttcctaaatcgattcaatgttacatgtacgataataatgctaccgaagacgaagctcgtgaacacatcaagttcttgataagtgaaacatggaaggatatgaataagaaagatgaagatgagagttgtttatcagaaaattttgttgaagtttgcaaaaatatggctagaacagcactattcatatatgagaatggagatggacatggttctcagaatagtttatcaaaagaacgtatttcaaccttgattattactccaattaatattcctaaataatatttaagataagaatatatcataatatttatgagataataagataacatgatataatatgtcataaataactttcttattgtcatgtcactaggtttcgttgtgtacatgttcaatgtaatatttttttttattgtaaaacatgaaattgttatattatttattattttataatatattaaaatataacatagattaaactatgaaatatgtaatatatatttactgtttgagcttgttttcgatcgatacattaaaatttcttgaatttcttaaaattttataaaatgtattaaataactataatgtaaacaatcataaaaagaattggactaaaaaattctctcaaatgcccgcttatatagataaaaagtttttaaaagaatatattgtagaaatatcttatattatatatatggtgattaaattacatattatataatgtaatatgacaaaagtaacatgtaaagcccgcttagttaatttggaaattagcagttgattatgattat

SEQ ID NO: 305644 - DNA, 947 bp, Cannabis indica
gaggagattatttctcttttagctgctgttggtggtggttcttgctgtgccatttcgcgtgatgcgaatggtgtggcccacgcactagctaagtctgttattagttttagtgggggtcatttgtggacagatgcttgtcctagatttattagtactcctgtaacagctgatttgatttgaataaataacatattttctttcaaaaaaaaaatttaaatatatatatacacttttttcttaattttttttaggggcagcctcccttcaatgtgggtacattccgtaattaactacattagaaaggtgtaatgatattttcttaaaaaagatggaactcaaatattctattcaattatattaacgtaaattaacattttaattaaataaaaaattaaatattcaatttaaataaaataaatattaagactatatataaaaaaaaaacaccaaaagaccatatatttctctttggtctgttattaccgatcatcattttttatgagtttcttagacgagtatatataaataaagatttacaattttgttaaaaaaaattagacaaaaataataatgtgtaaatgtatatggctatactatacataaataaattattaaaaagaataatactcgcatatatttagctaatgctgatataatagataattattgttttattttaatatatatttgtaatataatatataaattatttgtactcaacaaaacaacataatttaattaaccagtaattcaactaaacaatgcataagcatactcttctttataatattttcggtaattatattatgttggaatctttatataccaaacgagccatagagtagatatatatattttaaagatggaatactttttgtaaattctttgattagacaaatgctatataagggtaaataatattttggatttatgttttgtaaaagtta

SEQ ID NO: 305645 - DNA, 685 bp, Cannabis indica
tttattattccgcatttaattgagtatttaatcaaataataaactagaaatattaaaataccaaatttgagagttatttgttacaatttttaatattgttaaaatgttcgaatgctctaacattcaaaactccaagaatggtgacacgctaaccataatgtccaagaaacctcaagaagaagaagacataatgtctcacaataggtaatacaatgtatgttatattgtgtagctgatatttgctcgtcgtaattaattcaatcctggattaaatcattggatagtaggaaagaatattctcaaatatctcagaaaatattagagattatatatttgtgtatttaggtagtgattttaacttcaatttgaatggtcgaaacttgacacttgtattagtgttcacactaagaggagtgttgtagcctaactaacaaacactataaaaatagatacctttaatgataattatttagtcacaacaaaaaattttatgactaaaggtgatttttaatcataacaaaaaagttggttgtaactaaaatatattatttaaatacaagttatcactaatttagttttagtcataataaatattttggctcaaaatacacttagtcataataaattgtgatttttgtgattaatacctttagccacggatattttaatcacaacataggaatga

SEQ ID NO: 305646 - DNA, 1665 bp, Cannabis indica
ttctcttacaagaagtttccatataaagaaaaagttcaactaaaaaataattctttcttaagatagaaagaacaataaaaccaaataataaaaggtgataaaattggattaataatacaaataaatctcaccataaataaaaaatattttcacatctaacttaccaaaaaaataactttacaaacttaattattgtcttttatattgattatgtggttaacttgttacatgtatgtatagtaagttagtaatactcgtttttcatatactacatctacacatatatataataaaatgtatagtttatattggaaaaactatcaactgtctataaatagaaaccacattatataattaacatttatgatattaaaatttatgtttattctttaaagatcgataatatacacactatactttatgttttggtgaaattaaattcaatatcttgtataatttaactagtttagttatacttaaaaggcgcgcgataagaggaatgatacaaagaatcgatctgacttaacaatattaatataaaagcaaatatatatctttcttgggatgagaatatatatatgcatgggaatttgttgaggtaaataccacgcatgtctaacagtttcgcgggtggaaagttactatatgattataaatagaccctcaatttaacaccatttatatattacttaaagctgttgaaatgatatgatcacctgcagccttgtgcgtacattatagcatatatatactgtgtttgtatatgtacctaacttcatgctatacatatccaccacattgattaacgtaatatgtctagtgtgtgtatgtacttatttattaccactttaaaagaaattaaacagcatatattaaacaatattcacacacattgacattggcatattgaatgcatgtgtatatgttattattagtgatgatgaaagtaattgaaggggcgggggtttgaatattttggtcaagatataatatatgtatgtgtatgtataggggtgaagtaattgggtggccaccagttagatcgttccgaaagaaggctatgaataacaagtacgtaaaagtaggcgcagacggagcaccatacctacgcaaagtggacctagaaaactacaatacttatcaccaactattgacagccttacacaacatgtttaatcccactcccactactactaacaataactattgcctcatcaccaatatccaaggtacgtatacctacctaccctatatatatacgcacttaattgatctcatttttaatatttttcttttaatttataatataaatgttaattcattgatatttaaattaattataattaggaacgttgaacacagcatgtagtagtagtactaatgtggaggatcaaatatcaagaagcaatattgattataaggttgctaaagcagtgaaaggaactagtactgaatatgtgccaacctatgaggacaaagatggagacttgatgttagttggagacgttccttggaagtaagattattattaatttccaattcaaactcgatcttatctctttaattaatattattaatcctttttaatttccaaatctcatcatcatcatatatattttctttgccagatttatatcatcaaaaaatgacaaactagcttatatt

SEQ ID NO: 305647 - DNA, 1996 bp, Cannabis indica
aattaatcagatttaaaaaataaaaaataatcagcactttttgtaaaaacaaacttataatccttagagttatttaaaaatagaataaatataattttgcatcctaaagaaacttgtaaaaaaaaaagttagggcaatgttagggcaaaaagataaagaaactagaaaaaaaacctttggactctcatcaacttggttcttccatttcttaactttagggagggaaatattttcagcaacattaacctttgatttcttcttaacatggcaacaatcacttttttggtaggcggagcaaagtctgaatcatcatcttcaacaatgggccatttgcctttagatttattggtaagagatttaacacatatttttgcaggttttttcagcaatggtgatgaggaagatgaagaccgagtaatggctatttatagaacaaaaaaatgaaaaaaaaaaaattggaaaaaaacgtggtcagatgatggaggaaggcaattgagaaagatggacgaaataatctttttttcggattaaaaatagttttgattgtgtgagaaattttcaaataaaaagctaagatgaaaactgaaatgaaactggaaaaaaaaaatgatagaaaatgagggaaaatagatagtgtgtgaagttgatataatgacatcatctatgtgtaagagatattagtgtaaataacctaatataaaaggtgaaaatataggagtagccgtgtaaaagtataaggataatatttttgagtttttgtattttttatataaattagagttagccaatgctcactaactaaaaaaaaatataaagaagaagtaaagaatatattttttaagttttaataagtaaaaaatagtaaaaaaaaatataaagtagaaagcgtataaatataaattgtcaaagtataaatattaaaaaaattagtatttggtgtaaaactcaatagagatgaacaagtgatattttctcaaagttcaactaagacagttcgaacaatggaaaacaacatttgtatacatcttgacaaattcagaaaatggagatgacaagaaatgtgaactaatttggaatagagatgcatttatcaaagtagaccaaagtggttttttttaagactgcctacaatccattaataattttagtagtcttctagaaaaagaaaaaaaaaaacaatttgatcactattatcacaaagaataaatgagattaatgatttattcccccaattatgatctttatagaattttgttctctgaatatttttttgatgcaaaaaatttcttgaactatgaaaatcgttgcaaatatttagtgtagttacattttgttaatttatttaaataattgttgatataacactgatcatcttcaatggaaggtttaaaatttatgctaaatttaatacaaaaatgagtttgtggtatatttgattcactatttacaatacaagatacaagatataaaataagaaaagaatagattatttatattgatggtaatttaatattttattgagaatatacaaaaattattatttttattattttattatttaaataatggtaatatgataaataataaagaatgtcaagtttgttaaaaatcaataaatcataataattagtgacattattaataaaaaaatagtatttattgtgagctaaatttggcacaatactatggctccgtttggggagctttttaaaaagctaaaatcatttttggaaaaagttatgagttaatatgtgtttggtaaaatttaaaaaatagctttttcaaaaatttaagtgaaatttataagttttagggcccgtttggtacgcaggattggactggattggactgaaaaggattggactggactggacaagattggattatgctgaaagtaatcctgtgtttggtttaagaatggactggactattttatttatttccttttagaaaaaaaacttaaattaataaaaacatataataataaattaaaatt

SEQ ID NO: 305648 - DNA, 1686 bp, Cannabis indica
ttattaccggcggatctatttccgccggtaatacccctattaataccggcgggtgagttccgccggcaataaacccgccggtaataactatatttgttgtagtgttggtcgttcgtattcctagtagcggatgaacatatgggtttactttgtgttacttgcatatcgggtctctcgggtctccgaaccattatagatgtatataaaccccttggagttttatacatacaaactttccaattatgctgattgcatagcgagtattcgtgtactaaaaacatatagaactcccaggttcaaggtgagttgtcgtgcacttaactgttgtaaagacacagtctttacatatggcgtgggggaggaacactgggtcttcgcgtgtaatcgctacacgtcgcgactgtgttaacctctctatgtcccgatttctttcactatgcgtgacatagtgtccaattagacttttgtctcggtcgcaccttctcgcatgttcctatcatcagaggataccctaccggggttcatattcttaacacatcatcattttcctattgggatctataagtctatgtgtcaattagatacaagactgtacttgttattctagataaaaaatttatcctataacaattcgcaaagagaaagaccaggagctatgcaatcctacattatttggggtgttaagtgtaatgactttgagactatataggtatgggagtatacagttaaaaggggtttaaatagattaatgtgcactacctatatcaacaacgtgcatgtaataatatcctaaggagaaaaaataattaattaataattaacgtgtattttattaaatatgagaagtaatgtgtactagtataattaatgagtaagattataatcttactagggtttagatgagaaactaggcctattattagaaatgagcaaattagatgtaatttattaattacagagattttattagattatgtgtgtattatatatacattatatgtaataaaatatttttagatctagcaacaaactcaattgtttggcccaaaatatcacgatggtataagtttgtattttaatagtactaagggatattgtatgtgatgtttaaaaattttaggattaaaaaggttaattatttaataactaatttacccgtagagtttatttagtgtgattgtgtgtggagggtggattagtaatttgccaggtttaattttttttttttgaatgaaagtgatctttattaaataacgacttccgctactaagcttggtagcaactcagttggaatagactccaaactgaaacaacaatcaggatacaatgtagtcgccttagcaaaggaatgagccactacattagttgatcgcttaataaaagaaacagatacattgtttaacttagcaagcaaattcttacagtctttaataactagcccaaacaacgaaatcatctctgtggaacaatgaatggcttgcaccacattaaggcagtctgtttcgacatacacatttctccatctacggtctttgatccagcttaaggcctcacggacgcctatggcttcagcaagcacgagttcaacttggccaaagaacaatatggtgcaaccttcaacgagtagtcccgacccattccgaacaacgagctgttgggttttgtgccctaaataaaacccattac

SEQ ID NO: 305649 - DNA, 1567 bp, Cannabis indica
aaatccatctaaagagagttgagagagcgaggaagcccgattacccacatcaaccagtttcctttgcagatcaaagcttatgtgggtttgaagctcaagaatcaatggctggaggtatttcgatccttaaattatagtgcatatatgatttattaatttcacactttatacttaatcatatatatttcagtttatacatttaaatgtctaacacagacttgctgttttaaatttacagaaaaaaaggataaaaagaagaagttgaataaagaaacgatagagagagaaagatgatgagcaatcttatcagtgtttctattttattcttcaaaatacctcatcaaaatttaattttttttgctttgtctcgtacatttacattatattatacatcaacttttttttatatcatttatatattatatcttttaattttttgaataataaaatattatatatcaatactatatattttttttgtgtgtgagaaatatgtaaataggagagagattgagaaaaagagaaaaatatattaaaataataaatgaagaagctttatatggtgaattaaatgtaggaaaaaatggatttttgtttataggtattatagtagagtattgttattgggcaccaataatgtctagcactttcaagacatgtcgcattgcaattggctaacgaaactctctaaaaattattacattaaactatatgagatccgatacttaattagaccaatagcgatattaacacgtaggagggtgctaggcaccattgaagctttttagcatttcacattatagtattatgcatcaagttttgaagcatctcacaaagcacatatttagctcattgttttataatttctttattttttgagtggttcaatgcatttacgtacactgatgagagtgctcttaagtcaaataatcacatgtttattctcttctttattctaccgccatattttctcttcttctttcattaatgagagcattgattactctgaggtttatactattttcctttcccattgcttttattttggccagagcatttattgttcaactcttcccattctccttccttttgcttccatatgtcttttctccttgtcctcatggcatcttcatcctaaaatctatctctttactcctttctttattcttggagatcgtaaaatggaggcaaacgcagacgtatggtatccgaagtcactcagatcttctccatcattgtaaagatcgcttagtttaatttgaaaattagcagttaattatgattaattatgaaaattatttatgctgttatcattgaattctgaaatgcattttacgtcatatagtgaatttcgtaattttacatttccggtgcccagcaacatggaactcggtgtttggctcagtaaaatcacaacttagtatgttagtattgtgggatggttattaagacattgggaatgtcaagagtggtcgggaatttagaattttccaaaaataccctttagtgccctttatgttattttagtgtggagggaaaaaatggtcattttgccccattgatgttt

SEQ ID NO: 305650 - DNA, 1851 bp, Cannabis indica
gattacaaagggttgtgacaaatcactagagggagtccaaacttgtttaagtcaattgcttttgtgatatttgatactttattaattgatttcattctctaggagtggcctagtggactagtagtgtttgaaagaacacttataccacgcataattctcttgtgtcaagttttttaaattgtgtatttatttatttttggttctatttgattctgcaaatctatgttctgcagtgacaagaatgcaatttgttgctgcaggctattacagttgtgtttttactgaaatataataaaattattgacatttgcaaaaaatacgattttttcaattagtttgtggcatatttggtttgttagaaataaatttattaatgaacaatctagattgagagttgagtttattgtgcaataagctatgaattatcaagctcgatatggtagtgctaatgagaagcaaggttcgtctatttgttcagtcacccaggatggttcccatcccgactagaggccgcttgtcgtggggtaccttaagcttaatatgaacgtttcttgcaagaacgaaacaaagaagatggaaaatgggtttgtccttcatgatcttgaaggcgcggtctttgtttttgtagtttggtcttctatctccacggtggcacttgacgttgttgaagctatttcaattctcaaagagctttaaccatgtaagcatttgggttatttgagtttgattttaaaatctgaatgtccttctatggttaatgttttaaagcctaagcgttgtgatgactcccatttaggttctaatattagagatatcatttggatttttaatgatttttttgacgttcaatttattcattgttctaggttggataataatgttactcactctttagccgagctagcattagtggaggaaggacataaagttgggtagccttagtacttcttttttttttttttttggatttaagcgtatatattatattgtataacttaggacttgaacccagaactttcaagatacacatgcactcttttatggccacttgagatagtctcaagtgattaagtagcttgagtactctcatcgtaattcattaatgacatctccttatcattctttttttatgacaaggctctgtcttaagatttttaattttgttaatattttttcttctaaaaaataaattatggcaccacttgcttacatattagagggagagtacttgtgctcattctaaaaagaaaagacgcaacatttcttagtcatgcctttgttaccaatcactcatgtatatcgtgtgtcactattttgaaaccgaaaaatatattatactacaaatttgtgtatcttatgaaatcttgactagtggctagtttagagtttttaataatgtaatattatatactatttgttttattattattattttttttcttctaatttacggtttaagtttttaaagtagttttttaggtgggttttatgtgggttgctatacaatttttggttgcaatttaggttgctccactaattgcaatagaaatttctatgtagaatttggtaaaaatatataaaaaaaaaatattttaaattgtaaaaataaaaaatatccattttcaattaaattgttcataaaaaaagcaaaacttttaaataaataattattcttataaataagttatcttaattaaaaggctaattaagatttttgccccctgaactttgacgcgtaccaaatcatgctcctgaatttttaaggtcgttgaaaatgcccttgaactattgagattgttggatttaagaacttttttccaattttagtaaaaaagtgtaatatgaatgaaa

SEQ ID NO: 305651 - DNA, 1036 bp, Cannabis indica
caaagctcattatgaaaaaccatgaaactgcttttcccaaaatgagtttttccatcacagggcaaaaaacatataatgagaaaaactcagatctttaaaataaaaaggtttagtttaagtaattatgtattttcatttaaagaaacacatcaagatgtttagtacaatatatagaggaaaacctctatatattatatagtaacaatgttgagaccaacatataaatatttagagagagagagtcgcagatgtaataaggctaatgcattaccacaaaactgcttcccaacaattggaggcgtatggtgaatatcaatgatggcagaaagatggacgatccaaattaaaactcattgcaacacaatgtcatcatcaggcacataaaagtttgagtcaaatgatgaataaagtaccctgcaaagtaacaaagttcttaatttatagatgttttactgtgataaacactgcatgctggtgtgaacagacatttctgggatcagaaaagatgaaggcaaaaaatgacatcaaagcattaaaggagttcccatcataaagcacaaacaaactttcactaacccaaaaaaaatataagtcaactctatggtgccaacatatcataagcaaagttaaccatattcccaaaacaactagcatatacaacacaattttgtaagaaatagaaagttgaaattcagagaagtcaagagatgttcaaaacagaagaaaaaaatgaaaatacgaaacatggaaagaaagccaaaatagaataaactggttattttatgggttagtttacaataacatgagggaactaaaagaaaaaacaccaaaaagaaaacaatatcagagccctcatctcatttattttcaatcacatcttccagatgactctacaccaaaccactacaaccaccaccacagacattcattcacagcatccatcttatgaaaaagaagaagaaaacaaacacaacaacaacaacagcaataaaataataacattgatgagtaatgatatccgcacacatatgtacgc

SEQ ID NO: 305652 - DNA, 874 bp, Cannabis indica
tgtagggtcagtcatcagtccatgatcaagtagccaaagtgacgtactcatatataagagccattattccgtgagtgtgtaaggacccaatgaaaacttgaaccgatgttacatgttatgcttatttttttttaaaatgtaaatggaaacttctattaatatgtaaatcagatatagtcattataaaaaaaatatttttagttacaataaaatttacttatatcaccagtgacggatttattgttataaaaatatttatatttatttacatgcttatagttacttaattgttgggaagaaaattcagcaaacatgcttacctagtcttcaaaagctagcttaggcattgtataagcttactcatcattaacatatatgtttgatgagcttcaccgatcgttagagaacacgtttatttactatttttattagctttagtgactgatctaaggtggaattattgtgattatgtcagtcactcaagcaattagtgttgttgaggtagatttaagctttattttctcacttagttttatcaaaaatctgtctaactctataaaatgaaaggcctaagtcattttagatgtattgatcttgtgactaagataaaatttggttggcatgaataaatatatgaatagtaatgaaaatggaaatgagaataagaatagaatagaattaaattgaatttaaaatacataaaaataattgatgaaaaaatattaaaattttgtcatcttgcattagaatggtcactcattccatttcaaaatggaatagtcattctactaaaataatgacaaaatcatttcactggaatgatattctaatacttcaaaatgtaaccaaataaatgaatggaataaaaattatt

SEQ ID NO: 305653 - DNA, 2077 bp, Cannabis indica
tatttttattaaaatataatttaattttttcatatatataagataattaaattaagtataataaataatatataataagtataaatgaaaataaattaaaattgaataaatacacatttaaattactctaaggtggcgtttagttggaaggaatgaaaatataaaaataagaatgggaactggaataagaattagaatagaatggaataaagtttaaaatgcataaaaaattgattaaaaaaattattaatttttttcaaatcttgcaatgtaatggtctttccttccattttaaaatggagtagtcattccaccaaaatgatggaaacgtcattccattggaatgttattccaatagttttaaatgcaaccaaacaaaggaatggaatgaaaattgttttctttccattccattccatttcattacctctaaccaaacgtcacctaagtgtttgtatttttattttagtattatttataattttttaagttattgtttgtataataattactataataaataatatataatactttaatttttatacatttaaaatttataatatgggtttgtatctttttagtatattagtatcattttcataattttttaagttattttcttataataattagaattttgaataataaataatgtgtaatattttaatttattatattatttaaaataaattaatagaattcttatataccaggtattagaatcaatatttaagatgtatttgttaatcattataaaagtaggttgaagatatcatacctaattctaccaaaattttagtagtataaccactataatttctgatcacctctagttaaccaaatacaaacaccatacatatacccaaatttacatgtatatacacacgcacaatacatacaaatacatatatacccatacacataatttatgaaaaataatttcacaaaatatataataaataaattaagttacacaagaatagaagtacagaacaaggtgcttgatacagagcaattggtcggagttccaatctcagaaaatcttaactatggggaaaaaaaatcccccaaaatataaatttgctgttctaaaatattaatagtaaatttaaaaaaaaaaaatcaaaaatagtttatagggataaataacaaaaattaaacccgaaacaaaccaaaaaaaaaagagagaaaactaggcttgatttgttggaggaaacccagcgcagagtagaaaaaaaaagaagtatgcattttatatatatatattaaatggttttgtcgatgcaacaattaatgctagttacacctataatcacattaatagtggcaaaagtggtcagtaataaaccctaaaacgaaatattatcgtttcttaattgacagggttttcatggtgccaaaaattgtactggtaaaactactcccacatttttatttccacaagaaatttttcccaaaagttttgctagcgcgcgtcagttcacgctcgctaaatccagtccccttcccaccaaaaattcccttcttcacgcaaatcaaaggccattgatgcaacatttagcttagaaagtcaaccaaatatagtttaacaacatagaatacatgtagaatgcacaatctcttaggggctattttttaacaatattttatctgtggtcttcacaattagacgttagtaaaaataacttttgttggaacaattctgtaaccgcaccaacaatatagtctactttcttgtagcgcatcttgtatagtattcaagtagggaccatttagcaaaacaaaaacaaatgaaagcaatggtaaaatacgaaagaattagtctatactgacaatcaaaggaaagaggaagagtaaaaaagaagagggtaataagtcttgtcttttgacatgataatttagtttggtgcttatttgaacgttggtttttgctgttttgggtcattgtttttttttttgtacgtggtgttatcgaggaacaatacacaacctgcataacgccctaatgttaaggcacgttacagtgctttttcaattatagtgcaatctttgctaatcaaagaattttcttgaa

SEQ ID NO: 305654 - DNA, 2721 bp, Cannabis indica
aatgcaaccaaacaaaggaatggaatgaaaattatttcctttccattccattccatttcattacctccaaccaaacgctaccttaatttggaggagaccaagaccatattaaattattaatctacatgtaaatgattgaatttggctcacattcacaattgcttccacggattctttgatatggccatcattatttgaagccgatgtaagggatttccagttgtaagtaaaatctctatcttcatcaaactgcaattaataaatgaagatcataaaatgaaatgcaaaccaaaagaagtgaacttaataaatgatatatacacaatgatacacatataaataattgttcttatagaaaaatgatgatgattcaaattctatcaaaatgatcaatgttttccacaacagatcattagtaagtacctcaatggagatagcacaatcacgtgtcttcattttaagggtttccacacaagggaaaatcttaaccaagggatcaaagaaattggcatattgtgaaattaggtaccgtgaactcgagatattcaaatgcctcagctcaaaaaaggggtcaggaagcatatcattatttctcagttcttcaggaaatccctgaaccataaaaaaaagatgtataaacttagattgaattgaattgtagcaataaaacaaagtctatataacactatcaatattatattagtttacctctatatgaagagccatagacaatacttcacagtcagttaaaatttcaacaaagtttctcagcttaacaaaccaaaaccactctgttccatcaagataacctgtgtacaactcaattttcgcattgagtttcccagaacaatatctaaatttaaacaaggtaataacggcgccagaatattcgaagaatcgaaggttgggcgtgttgaattcagctttgtgaagactaaaacatcttctcaccaccaaacttttgagattggaatgagaaatctgaacaccctccttctcctcaaccatgtgacaacactcaagattcaaatactcaagaaagggaatttgagaaagacattcctcaaattcatcagcggtatgaaatgtggtattctcaatgatcatactcttcaaaaatttacaatttttcaaaaatctaacacttccacgggaattcaaactcctaatgtaagtgaaagattggagattcatagcatcaatggagatatatttggctgtattaccaaacatatttgccaccaatattttgagtttagggcacgaaataagtaactcagtgaaacgaaagcaaaacacaacttctaattcttctaacaaaggaagactagataacagattctttaagctactttcatctatacctacacaactcaaatgaagcttctttacagaagagattactggtaatgaattccctaatgataattcaaaacaattcattgacaaaacatcgagcgatttgcaggcagaaaacaacgaccataaagaatcattagacgagatcataccagaatatactttagagcgattttgaagttgtatgatttttacgttacggtttgtggctatggaaacaaattcaataaggcgaggaaagaatataccatctttaccgaggtcagaacagagagaaagcttttccatcttaagtgtatgatcgtcacagtggttgagccagagtgccaatgtgcgttcgacatagtcgtagaaatctgcttgtttaaaaggtagggtttgttcgtcaaattcgaagagtggagatgcaatccaagccgatcgccatagcttcgaggttagagaagctcgaattgcgtcttttggaggaagaagtttcaatatggtttgaatgagtggttccggaagggggtgatccgtgatcgtacgacgacgacgacggcggcggcgccaacggcgaggaggagaacggtgatgaatcatgatgatgatgatacgttgcttaatgaattgggattatatcatgcaattccaatttgcaaccatattgatataatgaaagatacccaaaatttgctaaatgactctaattaactatggagtctcgtattaataatttttaaaaaatattactaaacaatcacttttactatatttatccatatattataatcattcttcctatatttatttaatttaataggattttttttattattatagtctataattattaaattaaaaaaaattaaatttatttttttaaaaaaagcaatacttttattagtagggctatagactccacattaacataaatgggtcaccacatatagaaagtgttgagcactactagttccgaatataacaatgctccccaaaatatgattattttattatatttcttaatttaatttcggtagaagttattaattagacactttattttataaaataatacattagaccttgaaatttttaaaataatactaaatagtactttgaagtattttttctcaaaatataacttaataatgatttggtatagaagtgttattacgttttctacattagttcacgattaaaattatctttaagttagttatattatatataaaaaaaattatcaaaaattaaacgcaatgtaatatttgtattattttaataattttaaaaaatacagaattctttttgtcatttaacaaaacagatggttcaatcggtaatttttataaaatactaaatttgaaatgatattaatccatt

SEQ ID NO: 305655 - DNA, 1467 bp, Cannabis indica
tctcttctcaatttctttatttttattatttaaaaatattttactaatttattttctctctcaatatcttctgaatctgatcattataacttattaacggttttaatcataattaattgctgggattatgaatataatctaataggacaaaagtacccctgtattttccttatattgacatatttaccctcggcgaatggcgctcagggtcttggcattacggtgtttgggatggcctacatgttcgtccacgatggtttggtccacagaagattcccagtgggtcccattgccaacgttccatattttagaaaagtggctgccgctcacaaggtaattatatacacccgcccgcactagattattacataaaattttcatttttttattttaaataaagaaaatgaacggtcaagatttaatctgatgtaaaatttttgtgtttgtttcggactgtagctccaccactcggacaaattcgatggtgtgccttatgggttatttttaggaccaaaggtttgtttttgttttatttattactattttttttttaattattctttttaatggacggtgtggtgagttttgtcgttgagtaagggactgaatcgggtgtggtgtggtgtaggaacttgaacaagttggaggtcttgaagagcttgaaaaggagatcaatagaacagccaaatcatacaagaattcatgactgaatatttgatatggaatattttagagcaattttgacattgtgtcttcaaaaaaagaaaggaaaaaaaaaatgaaataggctaaaagctaagcttaaagttttgtgtggatgtgttgttaggttcatattcccataatgctgttcctaaagtctttttaaatagagatgcaaaagtgcagtatgtatggatttgtatattactttaaatgggccaaaattataaaattccttagttgatttggtgtaattttacttcttatattctgcaaatctcttagtttttgtttacaaattagttttgactaatttcccattcttttttagggcaaataaatttaaagatcaaagttgaaacaaaaaatgtataaacatatttagaatatttaagtttcggatatatgtaaatatattagagttttttaccgttaaaccatctcaattaggaaaatttgaaaaaaatatgcataaaatgcctttatatttatacttaaactaatactttacaacattgaaaatatatgaccacttttccaaaactccaaaaaatatctctctcaagaactcaaaccctttctctctccttcactcaaactctctctgcctcttccccttcgcccgaacccacatcgcacaacccccacacaacccactccgattgaccactccgaccgagacccgcacccaccattccgatcctcatcaccgcccttcgcgaacccacatcgcacaaccccccacacaacccactccgacagacc

SEQ ID NO: 305656 - DNA, 1656 bp, Cannabis indica
aaacactcgtgttggtttgtagggtcaatcgtcattttatgaagcaaccaaagtaacatactcgtgtataagaaccatcatttcgtgggtgtgagggcccaatggaagcttgaagcaaggacgtaacaccctccaaagaccaaagtctcacgttccattgaactttgcgagttcaaatcttgttgaagtacttatctttgaatctcaatcgatcttggatgtgtcttggtcccttcttgtggatcacgaacctagccctaatttgttggaaattctaagacaacatacagactcatctaacactaaaacatatcaatgaaacacaaagaaaacaaacacaagaacacaattgaaaaatcaaacaagaacagaaaaatgaaatgcaataaaagagatatataggatttatcctgttccggtcctagagatcgaagtcctgccatcctccatatgagagtcatcatcattaatccactatgaacaggttaaactttgtacagtcaccaatggcagagttatagagctctttacttgaacatgaagaataattttcaattcttccccaattttcaaaaatttacaagaaatgtataccttaaataactatgttgtacattattatataaaaaaattaagattaaaactatttaaattaatatcgaaaacaccaaaagaaccacatctgttggatatacatataacataatattagaatttattactagtttactttttaatttttctaaggcgttcttaatttatatttatctcacaataaattagttgtgcatacttagggtgaatagtttccatctttactttttgttgtactctactctaattaattttaatgaaagtttaattcattgttaaaaataaaatatatatatatatatataataaaacatctatttcatacaatgctaactattagataaactcaccaattcttggtcaaaggttcaattcttggtccctttatttcttaatcttataaatattatgtgtgtttatacattaatatagtattgtttgtcctgctttgtagtatggtctatctggtcccctttctgaatcttgcatggcaatactattttcgatagatgtgtatcaatggataagtgcaaagatcaatgtgttgagcttgaaaaatattactattacaaaactagctagagttttaacaaataatatgttctgtacttattgatatgatatgagagtatgacctagctaaaaaaatattaccatgatcactctcttcttttatgattggccactccccttaatttagacaattttaattaggtctaatatttcttaatttataaccattttttgttaaacaaaattaaactattacctatgattttgtattactataatttataacttaattttttgtaaaacaaaattaaaataattatttaattaaataaaaaaatgatttaaaattttacaacatctacacttaaattgtatacaataatataacttaaattttatgaatttataatattatgtgacagtcagtagtcctgtgatccgtaaggaaaaataccgggtaagctgtgcaatcccacatcgcctgggaaaggtcaagtggaatgattctgagactgtgtaggtatgggactacacagttgaagagagctt

SEQ ID NO: 305657 - DNA, 1908 bp, Cannabis indica
aaatacggaatttcaaataatttttttaatttagaaataataaatattttaaccaccatttcttcattcttcttttttttttttggcagcaaccactgtttctttctaatgccatacaattgtatttatgtgtgttgggagaacttgagagagtatgtaatattaatcttttaatctaggcattatagatgctctttagtatttttttttaagaacattagcgctttataaataattaacaaattttctgtaattatatatgagctttttaagagtggtagcactttcagcatttctcattaatctaatacaaatttaataagattgacacgtatgtctaaatatgttaatgacaatcatagtggtgcgtgtctttgtctttccaaaattctacaaagagtccataatggcggccaatggtgtagttcggccacttaagacaatttctatgcgcaaagtctcaataaacaaataaccacttaagccatatccacaacaaaacaaagaggaaaatcaatcaaaaccaatgtgaatgctaaccaaatgacaatgaaacttgagaggggacaaatgagtcttttcctctctcactctcaaatataaaataatttacactttaaatatttaaatttaactatccattacaaataaatactttagtttaattattgacaataataatatttaaaattatgtttctaaaatttttatatataattatccacatatatttttattaatatatttaaattatttttttaataaaaaaaaattcataacttgaaccaattaaaaattaccaatttacttaatatttgagagttagatacttacaaaaaaagttttataattataatttagttatttttatcgttaaaagttaaaattaaatatttatttataactaaaaattaaacttaaatatttataacacgaatgatatcttcgaatataagccgttttgtgagatattcaaaaatttaaataaatagaggaccaaagtccctttcgattatttgtttcctcttgtaattttggtacataaatgagatgtcactagccaacatcaactcatatacaaatactaatagtaaccctcaacagaataaattaattatataataaaaaaattattttgacttgcaggactcgagctttactatgtttggtttcattttacaatatttaatattttttttaattataatttataaattaatttgttatttaactacttatgtcattgtcatcaatggaacttctatttctttttcttcttctttcgttcattttgaccattctctattgatttttttttttattatactaaacgaataaatctttaatatacatatttagcaaaaagaaaaaaatatataacatacatattttaaattttaacaaagaaaaaagaagactattaatgtatgatatattaaggcagttctcatcatttttctagtgtttcgatcttgttttgagcttaattatctctttgtgagatatttattagtttttttttttttttttgcaataaagatatttattagttgaagtccggattttggtagagaagaataaaaaattgacttatatattgtcttttaaattttaatagaagaaaagaacactaaattggtgcgattatttttctttaaagaattttctagaagtttatttattttagaaaagaaaaatattggttttttatttttgtcatgaaaaatattggttttttttttctacatttttacgaaatttcacataaaaactcatatggtaactaacgtagcaatttaaattgaaaccgaaattcgtataacaatccacatagaaaccaccggagaaactagaaactcaaattgtaaaggctaattagcaattttccctccgaactttgacatatac

SEQ ID NO: 305658 - DNA, 1343 bp, Cannabis indica
taattactattacaaagtataatagtaatttttatttttatttatatcactattatgctttcaaatttcaatgattatcactacattgaatattattaattttaaaattatgatattaaaaaaactaaaataaaattagcatacgtgacttggcacgtaacatctatctagtaggtatatataagagagagaattatattagaaaaaagagatgcgatacttttttcaaacccaaatctcattcgcatagtagtctccctaaagaagaaaactagggcttcaaatttatcagatctcacctgttgagaatatctgataaatagaaatctccattacgttgttttacgagctcacacttgtctttgggttgtgagattattgaggaagatcttggtgtgagatctcaagaagtgtcatacgaaaagataacaacaagaaaggacttcaagtttaatctctttccttctatcttcttattcaatttgtatttatatagtagaagtagattttacctattgggcattttttcactacgtattttttgatttgatcactaaaacaagaacagggtccaggcctaggttctggggccaggtccaaatcagggatctaaggccaagttagggtctagggtctaggtcgtggtctaggtacgagtttgggtctgggtcggaatttgagtttgtcgtccgagttcaagtccaaggttggggtcaggtttgggtccaaggtctgaggtcaggatttggggttggggttcgggtttgggtccagggtcggggtctggggtatggggtccagggttggggcctgggtcctggtctgggtccaaggtttgggtccagggtccgggttcagggtttggggtatgggaccaaggctggggttcgagtccagatctaagattcaggtccaagattaaggtcggggttcgggtatggggttcgggttcgagtttgggtctggggtccaggtatgagtttgggtttgaggtcaggattggggtccaagtccagggtcgtggtctcgttccaaggtctgggttggggtcgaggtccagatttgaggtttgggtcgaggtccgagtttggggtttgggtctgtggttagggtctaaggtcctgcgtccgggtcgaggtccgagtctgagtccgagttggggtccaattttgagtttggggttcaggttcggggtcttgagtctgagtcaggggttcaggttcaaggtcgggatccaagtctggggttcaagtacagggtccgagcccaagtcgggatttgggtccaggtctgggttccaaggtttatgttgggattggaatttaaaatattgattaaaaaaa

SEQ ID NO: 305659 - DNA, 3130 bp, Cannabis indica
atttacggacttttgtcaaatttcattcaattttactatttcaaagattgtttatatattaaattatgctcccaaactttgatatctaccaaatcatgtcccttgaactttgacatgtactaaattatgccctctgaactttcatccatgttagacttttttactaaaattggaaaaaaaatccttaaatctaacaatctcaatagtccaggaagcatttttaacaaccttaaaagttaaggggcaaaaatcctaattagccttaataaaattatattaaaaggtatttataactctatatgtaatatatatatttttttctaacttgagaagaggcacatgggaagcacgtaacctcttcaactatattgtttactttgataaaagttgaaccgaatataattacgcattttattcaaaaaaaaattaaaaattgaaccgaatgaaagcaaagtacgacgtcgtataaagcgtataggtggccgatccacgcttaagactgtttcatcgtcgtccctctttgtcaatggccctttttgaaacagacacgaatgctaacttgctccatttctcctaaaccctccctcaactccttccccatctctctcatttttcttcttcttcttcttcctcttcacttcgattgattcttctgggctgaattttgaaaatgtcgtggctgagcaaagccgtgagcaaagccgtggaggttgggaacaagaacaacctcactcgaactgtcaaaaactacgccgactccgtcgttcatcaggccggacaagctgtagctggcggtgctaaaatccttcaagaacgcatagtaattttctcaatttctcgaatttttcccagttatgattgcgttttatcttaaaatgcgttattgaattttggtgtccgttaatctctccttttttatttttttttcttgtatatttttttcactgtttgcatttggtttcgtatgttgagcataggtgtagctgaaattttttgggtttaggaatttttctttgatatgtgagtgtgtaatataaatccttaaatgctacttgtaaagtaaaaaagtttcatttaaacttagctcaacatgcgaatctaaaagcaaaaatgcaacagttatagagaaaataaacttatatggcaatttgcgttgaagactaacctaatcgggttctcagattttgacagttactttcaagatagacagtgaactattggtgtgtgtggctgtatgaaactaatccgtttagcaaacaatattgtgatatcgtacttgttatcagaaaatgtatgaaatgcgccttcatgtgagcacaccaaagtgtaagaatttgtacttacagtcatagcattgaagaccacctgaaaaatgtgctttttgattcaaaaagctttattttttttgaaagtgttggatttggcaagtttccttattagtgaatttttgggaaatttttgggaattgccaattcacattagtggatctatgagtttagcaagtgtaatttatcgttttgcatttaaagagaacaagagagaaaataattatcgatgaatttactaatttccatactagtagattttcaaagagggggcctctcacttgttcaaaaaaaaaaaaaagaggggcctctcatagaaaaaatatataaatgaattaaagaacattgtatgtgagctttgttgttgatatcgctaatttaatattatatatctaatagtaaagggccagattagatgagatgtggaagaatgtgaaataggaaaacctgttaattttttgtctagggagaatcatatttagacaaatttaaccctaatttagaactattcttgtaactccatctatgtatgagtctatgagacggtcataaattatctgtttggaaatgaaattaatttctttacaataaaactgggaacctgctaatctttaggatcaatttgatattagaggtaacttagagctgtagttgtctcgttatcatttttcaataatttacaacttacatatatttattgggtatgtatttgggtgaatttatatgttatctatttatcattatcattattgctgttttattttctatttttcctttaatgttatgcatattcagagtgctcgaaattttagaagtgtcaagcagactataaaaagattggaagaagcagctgtctcttgtaggggcaatgaaagaactcatttacttaaaagatggttggctgtgcttaaagagattgaaaagttgtctgacggttcttctgaagataagcaaagcactcttgagcaaaattcagcttctgatgaattgaaagatagtccaagaaaaccatccatggtgagaagatgtttttttttttctctctctttgtatgaaattagttgggttgagatctacacttacataacctggaaacgtccctagagcccatatttttatttgtatctatgacttcaaacaccttgttgacttgctttcaactgcaaccaggcagttattgtaattttattccattttgtagaaatgattaaggtatatgtaatttaggtaaaggaccagaacttatcatacattcagtacttaatttcatgatttgtaagcctctgaattagttgtcagttgattatcttttcttccagttattgctgaagtttgtcattttgctgtgttgcttagtgctgacattctgttctgtgtaggttctgtattatgacttggatttgggtggtgaaccaatgaattttcatgatgtctttcttcaaagccaagctctagaaggcataacattgtctatggtatgttacacccactttatcaataattaagagttggtcctactacttgtaagtttttgatatgatacgtgagctgtctttggaagcatgctaagcaattcttagtaatgttttacatcaatttctgtgaatcaaattattttattgctgaacttcgatatgcagatagctttacttaagatgaattcatcaatcatagacagttgaaaatgtacaccaataatacatgataaacgactcctaattaaataacaattgagataagcatagtgatgcatgtattggtgtggtgtttacaatgccctttatttatttagtaaacaaataaat

SEQ ID NO: 305660 - DNA, 3162 bp, Cannabis indica
gagccatcattttgtgggtgtaatggcctagcagagacttgaagcgaggacgatgcaaatggtatcagagcaatattgtcctaaagaatctatggccatccctaacatgtaaggttcatcgccacgagacgagctcgactcactatactgtaagttttagtcaatctattcatgttagttttatagaaacacttgtgttggtctgtagggttagtcgtcattctagaaagtagccagagtgacatacttgtttataagagccatcattttgtgggtgtaaaggcctagcagaggcttgaagcggggacgatacaaatggtatcagagcaatattgtcctaaagaatctatggccatcgctaacatgtaaggttcatcgccatgagacgagctcgactcactatactgtaagttttagtcaatctattcatgttagttttatatattttatgttgcgttacgtcttgggtgtacaaatttaatgtgactagaatttttttttgtgtattagaagaatatgtcttagaattttaagggtaggattcgatcaatgagatattttcgggaaaatttaaggaaaatatttcaaagtattacgtaatttaagtttaatttttgataggttgtacttattttcataaataaggagtataagaggaatgtttgtcaaaaatataatggtttttttgtacggtgaatatatgattttgaaaatatttaattgttacataattaagaaaaaaataataatatactaacaggatatataatttcattcccttaaaagaaaacgtagataaatattgattttgagctttgtgacatgtgtagttgttttgtattaattattctttactttggtattaataaatttactacaaaaataattttgacactacatgcatgacacctacatatatataaatatatataatttattcacaagtaataataaatgttggcttgggtgagcccatgcatgcaaggactgagctatggttccatggatatatatatatatatatatatttatatgaaatgaatggtccaattaaaccaccagctcattcagtctcattctatgtccctctatctatataaacacataaatatatatagacacagacatatacacaactaaaaaaggagaaaaaggtatagtacgtggggtccacatttgaagatatatatatatatttatatatatatatagatggattgtatatttatatggagaaagtggtccaaccccctctcatataagattttcgtcagtttcctgctactcaatatatattatgttaatattgtggccaaacagacaaaataaaccatatggatagctatatagctaggaaaatttattaaattaaattcattttatgtataagcatgcatacatttattttatgtatatatatatgtacagcagtcaattggtgtcaatgaacagtgtggcaggcaataatattagggcaagaagaccaggccaccagaagacaatcagtatttatgtcacattcaatgccaataataataattaaaaatataaaaacatttattacatctatttaaatcttcattggactacgtacattatacataattaatttattggagatagatagaccaattaatcttaaatctttccaatttattttaaaatatttattttttacttggaggaataactgttctgtatcattaattaaatgcattattttgcatgtaagaattgtagatttcagtgcttgactacatataggcttccttccattttccatgttattattattattattattatttgaaatgtgagcttgctagtttaaagaagctctattagacatgcaaaggaaaataagatcaatttacaagtacagttagaagaaataattagatgtatattattattgagtgtagctaaaaattagatcccatatgcatattttaatttaaagcatttaatatttaaaatatatatgaaactgatatttaattaattatacaaatatcatggtataattagttccctttttatagtgcacgcacaccttattaacattaattctctttattctttaaggtaatataactattataaaagactactgctaattaactatgacaaagcattattagccaaggttttaaaaggagaaatgttaactactactagacatttctcctaacagcaatgcatagatataggattattaattggtaagaaaatatggtatatatatatatataaatatatatggcgtgtaaagacacacaacacaattgatgaaagtgacatctcttgttacattgaaatatgaaatataagtaaagaatcaatgactggccatattatattggtccttcctttgtttctctcttctcttcttggttttggaggataaacatattaattttctactccatcgatccctctctctcaccaaaattacaatttccaatttcttttttatttccaattttttatttatttatatatatatgtaatatatttatcattaaaaaagcaaatgatgatgagatgatatattcaaaagcaaccctaattgcatattgctattatcattattatcttttgtgtgtggtttgagataattacagcataacagctaattaatttaaggttggaatgtaaattaatgtataagtaataaagtaaattaatttggataattataaattaggtaagaggtatctgttgctttgtaataaaatcataattgttgtaaattttaaggatctatataaatgtaggcatatagtatttgctggtaacaatattatatttatgtttattttcatatataggtgaaacctaccaatagggcattaataatttaaatacaattactgagtaacatatatggcattgtacaaatatcatattggcgcccatccacactgtcgagcatagtacaattttattataaatgacaatattaaagtactgactgtattatgatacatatattttactctaatttttaactttttctccttgatgaatttgcataatatatatatatatactaggtgaatgtacgtgccgagccacgtattgatagttttatttaagattttgaatatattttatttttaaaaatttcaaattttttgtttgaaaaaattaaatatttat

SEQ ID NO: 305661 - DNA, 881 bp, Cannabis indica
ctaatataatctatttccatctcaattctccagcttctcaaaatggtccgaatgggctcgccttcacctgcttagtcaacttatgcttttaaaacgtggccttaatatctctaaacctatttgagccccgataaataagacgacatgtgaaatggtcgaacgctagaagtttaagctcaggagccttcaacataaattttatgaaaataaacacaaacaacagattaaaatacaaatatgatatgtctcaaaaaatattgctatatgtcacaaacaatatcgccatatgtcactaaatacatcgttaattcaacaaagtatcgctaaacaactcaacacatggatactaatcatatatatatatcgcaatatgtcgctaacaaaattgccttatgtcgctaaacatctcaagcataatcagttaggagtagtgttatatcgtaaagcatatcgtgaaatgtctctaatcgttagatgacaacaaatgcagagaactccttcttagatgtcgtcatatgtcacaaaaaaattgtcaaacataaatcaatatatagtaacaactaacacaaaagtcgtcacatgtcgcaaaaaatatcgctaatcgttattatgcataaaccacctttaaggtgatatcgtggaatatcaccacaaatatcgctagacgccaataaatacatagaaactgtcaaaatgaacagacaacatcaacaccattgggggtgatatcatcaaatatcgctatcagtatcgacaaacgtcgataaatgtagaaaaaccaaggaaaggaacatacatcatcaaaattcaagtccaaacacaaaaaattaacttataatcggacaaatttccttaatctcaaccataatcaacaaaaccaa

SEQ ID NO: 305662 - DNA, 932 bp, Cannabis indica
ttagtattctcatctatatatatatatatatagatattttattacaaccaaaaaaatatgatatatgtatagtaattttgtaaatatatatttatatatatataaaggaagattttagggaatttatgtggcatgcctaagattgttattatcttcaatacttatttttcccttttctaatatttaataatttgtatttttctatatgtagataaaaagtcatatgtatcataccaacacaatatattcattaatcaatatcaatatatatatatatatcaatcaatttatatacatgtaaaaattacctaaaaggtctcaaaacaaaaacaagaaaataaattgtattagaatatgtacaaaaaaaaaaaatactaatgataaataaaatactacatgtaaaacgtcttatactaatgataaatcttaaaaataactagccaaaggtgttaccttttggctagtagcaacgacaatcacccaactagcctataaaataaaatattttcctaaataatcattaaagattataccatttctaaaaacttataaagttattttctaaattttctaatgtctctgaattagaaaaatacaaatctaacttaaaaacccaatctaaattaaattaaaaatttgaaaactttaataatttttattttaattatgaacatatatttttgaaaatagaaaatctcctacaacatatactacaacaaactaccttaaaaattaggacaagctataattagtggcacaaaagccattgaaggcgtcaaaatcttcaaaccatggtgcataaaaatcctcactatgtataacacttctcatcatgcatttaatagccaaaaaaacaatatgtatatattattataaaaaatattataataaatataaatgtaatgaattttaattaatatatttttttaatt

SEQ ID NO: 305663 - DNA, 1157 bp, Cannabis indica
aaccaagaaatgccgttagataggcacttttaatatataaagatatttataatttacatatacgtatatacgtgacttttgtcttcataaaaaataacagtacaccttcttgggaaattttcatacaagaagaaccattaatactcgtggcttaaacaaagtttgacatatttaattatcctataaataaaaacattttttcttcacaaaaactctaaaattaatgcttctgatatatatatatagagagttttgatcacttttattaatatcaatatgaatatgaatatatataagaatcataataaaatcttatagatgtcactaatattaaattgttgatttgttgggatgttatgagagttatttgaattaagcataattatcttcaattttcagtatttagcttttataactctatacattctaaatttttcatgactttatattatttatacatttttataaatgataaaattaaatcgtcttaaaaactatactttcaaataactacactttaatcaaatttgaatatacttatagtaattcaattttaaattatttaagagtcataatgaagatgagtgtattgtttttgttgtaactacgtattttgtcatcattatctacatattttgtaatttcatattgcatgatgcatgttacaatttaataaaaacattatttgtcatatatttatttaaatattacatattgtataaataatataaaagtttaaaaaaaataggcgcaaatacaagtagatatttaaaatttattttcaatattgtaaattttctaaaattcttcaaaagctaacaatatatgttgtcatataaaaaaaaatgaattatatatttttgcaagtttcaaagtatagagcaaaattgattctccacctcattaattaattgctcataatcaagagagttttgtgttgggagattaattcctcataaggcggaatactacaaatttttttacttttagtcacaataaaatttatggttaaaagtaaaatagttgtgactaattacaaatcactattcttatgttatgactaaaaagttcgtggctaaaagtattagtcacaaaaatcataaattattgtgactaaatgcattttttagtcacaatacttgttgtgactaaaacta

SEQ ID NO: 305664 - DNA, 3576 bp, Cannabis indica
ttggttagataatgccatatttagtgacatttactttttatgccatatttatcataatcttaataatttttcccatatttttgaaaatagcccaatttagtattatgtgtttgcaataatactcatttgaaattttgtacttttgaattgtacacatttggtacaatgaactcacatttaattaataaaatttcgttcatacaatcaattcgactagctttaaattgaaatttaattatttaattatatataaatttgaacaattttctcaaatagataaaattttattaatcaaatctaacttcaaggtactatatttaggaatcgataagtattattaaaaacataaggtatcaaacatatacgtacatcttcaaaatacaaggaatcaaataagtattattaaaatcataaggtaccaaacttgtttttcgaaaatatacagagtgccaaaggattataaatacaggataccaaaggagtttcttcccttattaaagcaaagcaaatggacagaagaactcgtttatgtttgttcatgattatctaaatttttcctactagtataaaatctacacaaaacaacatacaacataagactgagtgtgcttgacatggtgagaagccagtagtagttgtctagccgtgcctcgctcatgtcatctgagaaccagctattccttcccttggatcttgtcaagtcttcaataaatgttataagaaaagcactcaagaagctccctactccaaaaacactattgtacagtgcaaatgccattgttctcattctaacaggaacttcagaatagaaaaactcttgcataccgacaactgtaaatatgtctgaaatgcctaaaagtatgtactgaggtagtaaccaaaagatacttagtgacacagtctcagtactagatccaagcattgctgcttcttttttactaatctttagcctttgtgtttccacacatgctgcaattaccattgctatgactgaaataaacatcccagctcccattctttgcattacattgataccctttttgtttcgagtaatcaactgcgcaaatgggataagaactttgtcatatagaggcatcaagagaattatagacaatgtgatggaactttgtagtgtggctggtgggatttggaagttacttccgatatttctcttcattgtcataccttgcttggtaaaaaaggttgcagggagttggaagatcacagcaaacattagaagcattgtccatatgggcaaaagccgcagtactacttttgtattttcaaacatgtaattagtattgcttttcaaattcttgtccaagatccctatggctcccatgtttttgacaaagaggtttctcttgaagcctatataatagacaaacagttgagatcatcataaactcatgcataccggtaaagtaaactataatttgtctttaaaaatatccaataagaaagttaaacttactctagctcaactacgtcattggccttaggtaaggctattttgcaacttatcgactttgatagtgtttctgtgatgtttttaattatgttaagaagaggtttacgccccatattttcaacctgtttgtgtatgtatattttactcccagatgagaaaaaagctattgatataaccattattgtggcagggatggcaaaccccagaacccaaccgaaagtgtcttggatgtaggacattagtgttaccccaaaaagactaccactacagacaccaaaataccaccactgaaagaaagaactcttgacattattagaagactcttgttcttcttcctcgtctagctgatctgccccaaaggcttgcaaagatgagttgtaaccaccttggcctagagaaattaaacaaagagagcagaatagaaaggtggtagatcttgtttggttagcagcagaccgggcccatatagaagcagatgttgtcaatgccactagcccctaaaggcaagataataagattaatgaatttcaaaagtgtaaattatagacttgacataggcacacatactcattaaaaataaaataaaaaccaacatgcttaaaaataagaacaaaataaatttaggtaattatattcccatcccaaataattataattacacccaatatttaacttcatcccatttgataaacatattttttttttttgtataaaaacactatctatttataattataggccttgaatcaagaatacacccccccacatctagatttttctttaaggacccccttctttatcattaaatttttttctttatctctttctttcttaccattaaacagtaaacaccattaactattaagcagggtattaggttttttttatatggactgttatcatttaaatataaaacttacgtgtcttcaactatttccaacaaaacaaatcttcaaaaaaaaactaattacaggagatcaaatgtttgcagactctacaccataaaattagaagaattgttttttttaaggaaatgttacagtatcataaaccacatcaaatagcgagagaaaaatctccatcaacataagagagagtcattggtggaatccattcaaaaaatcaaaactctccccacatatcattatatatgattgatgatttgtttagagttgaataaaacagttaattttagcaggttggagtgtatttattaagattaaatttgataagaaacttacttttagaagtgtctatttaagtcattttatgaaaggaaaaaaatgtatttaatttttttaggtgtatttataattatttagggtgtacatacataaattttataacaataataatgaatcttgggacaaaattaaaaaaatacaatcatcaaaattgattatataatgttagtagaacatgatgactcaattaagatcataacatcataaccatgagagagtttttgtaattgaatcaatattgttagtagtctgattgaaatttatataaaaaaaaaaagaaaataatgatcataacaaatctcaggaaaatagtgttctacgtacacatgtatataggaacgaaggatcaaagatcgtccgttgtggataaatacattattgacagattgtatatttttactcttcattttccttggagaacaagagtgtcataattttccatcacaattaattgagaaaccgccatagtagggtaacaatcgtcttggcctagccatgatcgtcacgcggctgtacgtcttcgcccaacagcgttcattgcccaaggaatcagaggaagaagacgaagaagaagattgagtttttgctggaggtttcatttgatctactaattaaattatttattttttatctgagttcacttgatttatttgttgagctttgagtattttgaagcttagctttaattttgtaactaacactactgctcatgttagttatctctgctcatattagttatctgatcatataacttaagaaagtgttttagattgttttggtagatttctgtctctttggtcattaagaaaaaaatagtttaatttaatcacttatatcttaattatttaaaattatttataa

SEQ ID NO: 305665 - DNA, 2309 bp, Cannabis indica
attagcaacgagctgcacagcatgttaaaaatcacgtaattcgcctatgttagttagggtgttacagagtgtcattttactttaatatatttgtagctttgtcaggttgctcacctccccttatttcttccacttagttagtgctcagtgttgaattagggaggtgacagttgtgtaggtcttctactcacctcgtactgatggcaaggacaaagtagactttgcgtagggctccctcgtacaatctacatgtggccatggtagccacaaggggttaaatcatagtggaggaagagactgcctatccttgtatcgaggctgagccagaggtggattcagagactggaagctctgatgaagaatccgagctggaggaggttgctccattgagggggaggagattaggatatgttcaatcctccctaaccgtgctttaggccattatggtgcttgaggcaatctgttgaataggcttggctcaccttctgtactaggactagatgatgtgttagaacagtctcccatcctagagatatttgattcgaagccacttaagacaaggtgggttttgccagcttccgctctttctagtaagccctttgacaaggtcattactattgaccttgttgggggtgtttggtgcaagattccttgtaagaactgtagtgcacataagccccctttggactggctagcatggtcagggcgccacatagaacatgggacagtgttgtcgcttcatcattactttctagatgtcgcaacctactttgggatgtgcctaacacaactcatgccgaagagtattaaatatctgtcggtgatgtttgttttgtatagggagctaggttggcctccacctaccccttatgtgattgggtactattttgagttgaagtctggatcgaagcaaagccgatccggctatttttattccagccatgttggtcaccattggttgggtgacaccaacttcaaggccttattttgatgatttagtcatagatattaaacaatatttatcaaatctacctcaagtttgtgttcgtcatattaaacgaactgccaatcaggcggctcatggattagcaaaacaagctttagtgtaggataatatttgtatctcgcatgaggaatttccctatgctattctctttgttgatgtaaatgactccttttaatttataataacagatttttctcaaaaaaaactaaaaaatgaagaaatcaatctcacaataactataaataaattataaaataataaaaaacaattagaaaaataacatcatgtcaactataatataattataaaacaaccaaaaaaataatttattatttttactaaataacgcatatttgttaataaaaatcaattttttttttctgttttaacgtattttgacaattatttttataattttttgtttattatataaaaatttcaaaaaactacatttataagaaaccaaatgcatatgcataaaattacttaaacctatatttggaagtttaattttagtagagaaagaaatagataagaaaaatataggtaaaataaactgtgaaaataaattaatttttggagaattatctcatatattatttttaaaatttttttattcaaatttacggttagagtttctaaagtggtttctatgtgggttgctatacgattttttgttgtgatttaggttgcagtgctagttacaataagagtttttacgtagaattccgtaaaaaatgcaaaaaaaaaaaaaagaaaaaaaaaaaaaaaaaaactagttttgaagtttaaaaattaaaaaatctcattttttgtgcatggtatataaagaattatatggaaaaaagaaatgttaatttaacaaaaaaaaaaaatcatttggaatataaaaatttgattttgttttaatttattattttttgcatactttttccattatttatttattttacctttccaactaaaatttaacttccaaatataactctagagccctatatatatatcattctaagtcaatttgcgctcatggggcattaattgggaaccaagagaagagagcggtcacatgagacaacttgttccataattagctcttgatttgtctgcttcaactttaaatttcttgtttgtattattataaatcagtagaaaaatgttgccatgtggatgaagttcttatacagaccattcctaacgcaatgatagatatatatatatatatattatatatatactagtaaaaaattcgtgcgaggcacgtatactaaattttatgctagtttttttcatgttatttgaa

SEQ ID NO: 305666 - DNA, 1701 bp, Cannabis indica
aacctcctattctatgacctttgacaaagcatctcatgtcgaaactgtcgcaggagaataaaaacccaaaaatagtggtcaatacttaagcaataactataaaattaactttaatgcccctattcatggcataagaatttaacgtcaatgagaaggagaaagttcacttccttaagataggcttcaacgccacctttagtgtctcattctcatgagaaaataccaatgtcacccatgatggttcatcccacgacgtcagtggctacatgaaggaattctcgtagactagtgggaaaagtgcaagtgttaatccttaaaattagcaaagctagtttccaagattagtttgagtaagattcaaaatctatggaatcccatcaataatccaacttgaaatgatcaaatattaccacgataacggatcgtacaagcaagacacacatcaccacaattgttcctcttagcatttagtgtgaaatataattttgtgtatcatttgaaataaatattaatgatgttatgcatgtcaattaagaattaagtgagactagcatataaccagatttttctcaaaaatattaagatgcatcttggcaaggggcaccttgagaggcccctatctcggtatctttctagatgaatcttggcaacattctgatgcatctcgacaaggggcaccttggaagcccctcaactcagcatcttggtagatgcgtctcgatgacatctagatgcatcttggcaaggaaaacctcgcaagccccccatattcgtatcttgccaaaggcatcttggtaacatctaaatgcatctcgataaggggaacctcaaaggccccccaacttggcatgtcaccatatgcgtctcggtagcacatagatgaatctcaacaagaagagaaagtcccaagctccccatctcgcatggagatcttgccatgcctcagtatcttaaaaacaaagaacatctcaagtgtttagtgctataaatacaacaacacaactaggggtcaagatgaggtaatggagttggtggctactcacaaaaatgaccaagtacttccataaagacaacaatctcgtatgagttacccactgtgatacctgcataagactcaagagcttaatgagcacaaaggccaaacacaggaagataaaggaattcatcatcccaatgatggaaaggtgtccatgtaatccactagcaacttcttataatcatctttcaagaaagattcatcttgaaagcgttagggtctatttcttgaaaagcctgtaaagacatttttgattataaataagagttaaatattttaatatatgtataaatattatattattaatatttaatattgaataaaatattttaatatatgtattaaatattatattaattaatatttaatattgaataatttatatataaatattaaaaaaattcttattcatttatagacggttgtgacttgtatttatacggagaattaagatcacttagccatgaataaaatagtcagcatcatgttaagtttgagaatctttaatcaatggttgctagtgcaggtcagtaatgcccattattcggtgcaagtaatcttgtattcgaattactgatgtagcatgacatctaagtgagggtgttgtatataatagagattatatatgacaaggactgattttggataaagctgtctttatcaaa

SEQ ID NO: 305667 - DNA, 1113 bp, Cannabis indica
atttagttaaattataatttaaacataatatttcataaaataaagtataatgatacaacttgcgaaaacctatataattcgacttggtacaaataaaccttattattattattattattattatttattggtttttttttaatgaaccaaaaaaatttatatatcaaacacaacttttacaacctatccaacacatttaagacataacaagtatactcttctattgacaatgaatcaaactattcattatctattttagatatcttttcaggcaaatatattcttgctctagtttttacaatcctctttaattctttgtacaagagtctttactattagacttttcccattccacatactgtcatttctattttgccacaatctgtataccatagcagttaggagaatttgcttttgaaaatctgcttaactttgcttgatttgtccaccttatcggtcgagatactacagtgagctttgtatgccattgcaacaaatttttaagctccaaaaaacacctgaaactatattaattaacaattaaaaaaaatagatattcaacagtttcctcatcatattcacaaattacacacttagaatcttggcatatattgaacttggccagtctttccctcatttgtagtcttcctaaaataaccaaccagaatataaaactatattttagagtatttattatttaatatactctaaatcatgttaggttaataatgctttaattgagttggatactatacttctccgaaagaaactgtattgagaattatttattgagtttggttgattatttattataaataagattaagatatatacaaaaagaagaaaaacatggatgataacacagcgttgtatgtgaattatatatacatgttgttattttcaaataataatgcaaggtacctaactatacatttgtttattacttgtactaattatacatattttattctatttttatatccgttaattaattctctaatttagtaaagggaaatttcactttttggccttaataatacaagccatatcaaaatttataccctcgcttaatttgtacaaatttagtccattaattacatgaacttcccattt

SEQ ID NO: 305668 - DNA, 3200 bp, Cannabis indica
acacacacacacacacacactcagatttccagtttatgataaatatattaatcttgtctttgaaaagtgttaatattgattttcagtagacagcttactgcgttggcattaacttattgttgtcagtggggataatttaatgtacttgtaggtagcaagattacaagaacagttacaaaaggagagagatctaaggctggctcttgaagcaggacttaaaatgtctcatgggccattgccttatctaaccgctattgatgaaaaggttagtcattttttttagtggtcattatataccatgaattttctggtcatgtaccaaaaatgtaacatgcaaatgtgctaaagacaaaagcagagcttgaagaaatagctacaacagaggcagacattgtcaatttgacgcataaacttgatgatcttggaatgcatcttaatcaacaacgtgaactacgccaaggatctatcccaagcatttgcaatttgatagaaaaaaatcaagactttcaaaccaaattgtatgttctcccttctaatttggattcaactctattgcattaaacactcattctatgatttctaatgtataaaacatgctcggatttgaattttcaatatttttttaactggtgcttttaacagaaaatatatgggcacaaataaattttcattaactaagaatggatatacaggaaggagagacaaaaagatactgaagtcgtagccccatcaaattttgaaaggtcaagaaataaggtaattcttcattgagatatttcttttaaacattattttgattgcttacacttgctttaccataattatttttctctttacaacattgactattgattagtagattgaggatagatgatatattgtggccaaggaactattatgctttgatcaaagccttactctggagtcagcaaagcttaactggttattttatatagaaagttttcaccgcagctttagatttaagatgatggtttaatagctaaactaataaagtttattcgtttaatgcttaaatccagtatgaggatttgtgatgttttgatgatactaaactggccttgcgccagtagccatacgtgattgcgttatgattgagtatctagtaaatagttgctatttttagctattacttatcatcatcatgcatcacaaagatgaaaacaataaacgggtaattaagtcaaagttgactatttgacacaagctagagatgtttgacgcattaatggacataatgttaaaaaactgaagatggttattagagaagatgttggagaattaggcgagtgtatgcatgataaaaatgtggatgcgggaagaatatgtaccttggaaaataccttcattcaactgggttggagctgatccagtttggtttaaattttactaatgaaagttattgtttgtgaaatttgttaaaagaaaactatttatctataacagattgtttcatatatcttcattgaggtaacgtcagtgttatggtggaataggatgctcagttaggtgccacagaaaatgagaacgagaggacgcatgattctgcatccttaacaaataaacatgcacaaaaatgccaacaccagcaagaaatatctagtacaaactatcaatctgttggggtgttagcggatccatctcctgcagagccagtggcagccagacgttttgggctacctaattcaaagaggattgctacaaagggtgaggtaggtttgttgtatgctatctagttggcttggtcctttgtatataacacacatcttctttctacattcattggcaaaaaatatgcttggtgtagtagcttcttatgtttctccaaaggctgcacgagggagaactagatattattttttttctttccgttttttaacacctgtttacttgcacaacagggagcgaattcgacgacttctgcactaacaaagttgaccacccgactaaactttttgaaggaacggcggagccaaattgctacagaactccaaaatatggacaaaggccgagtttcatcacagactgtccaaaatccagagaagggtagagaattgccccacaactacccagagaaaggtcaaggatctgatgtccaagccaacccaaaccctgaaaaaggtatacacttagacaaacccgagttgtttcagaaccaggtgaccgaaggtcaatcatttgaaagtccagagaagataaaaaaggtagagagtcatgcccccaactacacagacaaagaaaacgatcagatggacatattaaaaatatcctggacagaggaaaaccagagaaccacacgtctcttaacctagataaaggccaacaacaatcattcatcacttcaagaacaaacaccagataataagaggtgttgaataattgctcattggtgttgtgtttctgaacatgttattgatatgtagtgtgagtgtgaagttgatgtatgctacaaaggctgatttttcatgaagcatttttattaaagattaaaaaagaaagaaagaaagaaaataaaaaaagtagagggtgtttgtaattcttagaatctttattgctcagttgtacaaaatcatctccttcccttgagtgttaaccgaaataaatttagtcaccttaactactatctgttttgctggtccagcgttgaagtagaagaagcataaacagtaatattgcccacaactgtgtctatggttcaagtgtctattgttcacccttctcatcttgatcttgatcttgtacaaccccagtgaaatcaaaacaacgatggaaggaacttttgttaatcaaatttataattatcgccacgtggacatactttattggtttataaatatttttcaattttttgaaatatgtactatctaccttagagaagtaaaataaattattttaaacattagaagaaatatataaaattattacacaaaaagtaaaagatattgtaaaactttaaagactgtcacttcttgttcattttaccaccacagaaattcctattatgtttttaaagtcatgcaacgatgcacaattggcgaatatttcagttctttcttataaaaaaatagtgcattattatagttatcaaaagattgtcaatatcattagcgaacagcataaaacagatcacaataaaacagatcacatagggctcgtttggaacgccgtattaggtcgtattg

SEQ ID NO: 305669 - DNA, 2725 bp, Cannabis indica
tttttttcttatttttttttctcatttacataccaccattcttctttcgaagctccatgtacatcattcctcccaaactccacctcggtcctccatccaaactacacatcttgatcctccattgaaactccacctcaaatccaacgacataggcaaacccaccaaaaattcccatatgggaaatcaaaatctaacttaaaaaccaaaaattctctaagttaaaaaaaaaacaaaaaaaataatcaaaagagaatggaaactcacaatgtctacaactttgttcggttgagccaaggctagtagtggagcacgttgatttcaatggagggctccaactacggggatggacaatagaaaagagaaaaaatcgagaaacaaactacgggatctggaaacctttgacgatgggaatctgttactgccatccatttggttcgtttagacccggaggtgcccagattagacctaaaactcgcagctccagtgatcccttttgacggtaacagaacagtgagggaccttcaagagttatggatctggggtctttagaactctgcaaaagccatatatggcatttgtttggacccactgtggtcggagttagctccatccgtgcacagtcgagagagagaaaagggacctcgagagggagtcgaggtaaggcgtttctataggttacaaggacactggtgtggtggagatggtgttgagtggtggtgcgtgccccaagttaatggaatcaatgttaatgttaatgcatcaatttttttgaggtgatcaagactatagttttggattgatagttggaaatgagcatggtttcttgctggaagatgtcactcgtttttttcacggggttgcccgattggagctcactgaggcaattgaagttagggaggtggtatgctggatcaaaaaaaaataatggcatattttcgaaaccgattgtttagttgtagtacaagcgataaggagtcccactgatatgaactctttatttggttcaagttattgtaaaatgtttctatttattttattaaacgttcaacaaatttagtacctcattcatttacaagagtttttaatttatatctcatcatatttttagtacgggaatgttgattgataggagagtttgaagattaataaagattgattattattttttttaataaataaataaataaataataaaaaagagtattttaataaatttaagcatacattttatggtattagtctgaaagtgatctttttttattgctcgctgtaatctcacgtgttactctttcccaaaaaaatattatgtttccttattataaagtacacaaattattatgattttgtttccaaacaattatacagatactagttgtgttgtgattctttttcatttgttcccttaatactttttttattaatttattcaaattctaattattatttagttatcgtggcattaattccaaatacattttaaaataggaataggatacaaggacaaggagtataattattgcgtacaaattatacatttattgatttaaaaagaaaattatatttgttaaatataaaaaattataaagaaaaatcataaattaattatttaagatttgtaagttaaaattgttgccattacaattcactctcactaaaaacacaatctaaaatgaataagaattacgagcaacacaatatacaatcttatttgaaaaatgtttaacaaaacttaaagaagctaagaaaaacttacaatcattaattaaagaaccaaatagaaattacatatgcaccgtactatgagttgtttgaacaatgattaaacaatcagtttcaataataaaattgccaattcttacacttaatcaaactcaaaacctcattaattccaaccacttacgccattgcaggttgaacacgaccaacccgagtcctgactaatagaaaaagttttctcgcgaccattaccatcccgaggtaccccctacctaccccgaaaagaccttatgagtcaaagattgttcatcaacatttatcttaattgaattcaaatatcatttaactcaatgttctaagacactattcagactatcaggcataaataatgatcccattttttttaagtgagtactttgtcattgattaagcatcaatctaactaaattgtctttctaagttatatcatttccaacctttcaaatcgcgcgagccaccatagctagctccttacgcacacttatagtctcttgccataacacatcaacaaactaactctgaaaattcaaggcagacactatcaccacactaatattcgacctactccaataggattgtaagttaaaattgttctaattatggatatgtactagatcgacttcatgataatcccttaaaaaagaaaaaacgatacaattctatgcaactctgatcggctaaataatcaataaatgtaaaaaaaaattggacacaacacaaccatccatcggcatgaaaacaataattaaataatttacataaaaaataataattaatttattattttaggctatttaggatttttatccttgaattatgatatatgtattattgtgctacctgaaaatggtccctaaattattcatggtattataaatcaatcattcggtcaagttttatcacgcatggcaaacaaaacgataacatggttgcttaataagttgccatgtcaacgccgacatgtgtgtaa

SEQ ID NO: 305670 - DNA, 1490 bp, Cannabis indica
ccaatggctcccactacaccatcaaacccaactccttcttcacctccaacagctcctactacaccatcaaaaccaacaccctcatctccaataaacgctcctattcctactcctactccgaccataccatcaaaaccgactctgccttctcctccaaaggccccgtctacaccattaaaaccaactccctcatctcctcctgaggataactctcccaagtcaccaccatcccaagattatgatactgcaccaccaccagaccccactgatagaagtccaatcagattacatcctcgcccaccgccacaagcagaatcaccagcaccagagccatcacagcctcctaagccacctactgaattgtctccgccatcacctaagccacccactgaattgtctccgccatcacctaagacgtctgatagctctcctccgccgtctcctacacctactttgccaccaaattctccatcacctcaacctaaaaggtcatctcctccatcatcacctaagactgataggcctacttctcctccagactctccatcatttgaacctaaagagtcgcctccaccatctccaaaattaaagcaaccaccaccttctcagtccccatcgccaccatctccatcaaatccacctcaattaatatattcaccgcctccacgagttccgtcttcccccccactggtggttcactcaccacccccacctatttactctcctccaccacctattcactctcccccaccaccaccagttcactctccaccaccaccaatttactcaccaccaccacctatttactcacctccaccaccagttcagtctccacctccaccgccgactcaatctcctccacctccagtgcactccccaccaccaccggcacactctcctccaccacctgctcactcgccaccaccacctatttactcacctccacctccggttaactcgcctccacccccacctgttcactctccaccacctccagtacactccccacctccacctactcactcacctccaccgccaccgccaccaacttactcttctccacctcctcccatggctgtttcaccaccagtatttgatgacatcattctaccgccaactttcggatcccagtactcgtcaccgcctccaccagtgttccaaggctactaaagggttagaatggtgtttacaactgatttttacaattctatagctttctcaatgctagctcagtatacacaactcattttgtaacaaaaagccttttatcaattactaaaattcaattttatttattttttaattttttctaatggtttaactatggagttgtagtagatatgtgttcaataaatacatacatatagagataaagtgtaataaatatagagttatgcatatttaactttacgagtaactttgatctctttgcttaatacttcaaaaaaaaaaaaaaagaatgaagaaaaagaagaagcaaagaacatcaa

SEQ ID NO: 305671 - DNA, 981 bp, Cannabis indica
tataatttaagtataattattaaaactaataattaaacttaagtatttatctataaccaaaaattaatcttacgtatcacattctactttatttattttttcatacatttatatatatacatttataaaagtggtatgaaaaaatttaccaattactagaatattatgtattaccttcatcatgtcgcccgccatgaaaataaaatgagaaggtttagggttaatgtcaatccaggttccatccttagcttgaacttggagaccgccaacttgattctggtgaagtattgttgtgaagtctaaatcagtatgaggaacaaatcttatagtggtatcagagtttcgatcaggttcagtatattttaaaaatcgaagaacatgattatgaacagcctcaacagtcttccaatgcttctgcactccatagctttcaaacaccaatattgtagccatctcatctaataaggctaattgctttgcatatgaatgaacaatatcactgcaccaacatatatatatatatttatacatttatttattaaattaatgtcattatttctctgacatattacaagtgtgaaaagggaaatttacaaacaaatgatgatgagtttcataagaatagatttgcaggaaataggaagtaattgaattcaattttctcacaagaaatgaatatattggaaacttctatgttatgagataaattttgcaagctcaatttaatatataaaggatcagtttggcacaattgtgctgtggaaaaaagcagctgtagctgtgctgtgagaaaaagcaactgtagttgtgttgtgagaaaaagaagttgtagcaaaactgtgaaaaaaagctaaactgagtgttcggtaaattataaatttcaaagtactgtgagtttttaagatctattataataataataataataatgttataatctagtttattataatcacaaatatgtaagaacttattttatat

SEQ ID NO: 305672 - DNA, 1081 bp, Cannabis indica
aactcaatctaatcgttgtatctaaaatagtaagcgttggtagtatttataggcttatcaagatcctaaattcggtggttgcaagaagcgaagtttttaggttaattaggcaaaaatcaacttaacaaactctcctttgagcgtcagcataagtatagctgcttctgagtacatgcatgagagcttctaagaacacgaaccaaagttactcgctgaaggatcttcttgataggatagagccaactggagtcgattattcggaactcctttctaggaggaacaactagccatccgaaattcctttctagaggaaagctagctttccagaggacctttcctgacaaatttttagacataatttttagagacttttttatttggagaaactatactacagttctacctttaggatttattttacttctaactagttagcaaaaccgtgtagtagtgggtttaaggatgagttcttttgttttattaatcattagaaaaaaagcttttctctctgaagactattcaggcaaagagaaagaatttataacaattgaattcgaagaaggctttaatacttcaattatatggaataaccgaagagaaatcgagaaaaatggtcttttttttggttattccataataaccaaacaagagatcttcttatgttttttagaaatcgatatttatatatttctacttattattttatttaatttcataattatacaataaattttaatcagtgccgccttagacattttacaggctgtgttcttatcataaaaattacgcccttaaaaaagcaattgtaactaacattattcaaatattatcatattaagattatatatatactcttcatattgagatgtgattgtgactagtagatcaataataaagatacagaattgaaaaataattaaacatcgatagtgttgtgcactcaagcaccaacaagaacacaatgcaagaacaaaacagattgcttagaatgataaaccagaatttatatcaaaaccagataataaacaacaggaaataacgaggttcagtcacaagttttggataaaacttggacctaatc

SEQ ID NO: 305673 - DNA, 1472 bp, Cannabis indica
ttttctgttacttttatgtagtttttttgttgttttcgtgttatctttatgaaacagcgtaaagaaacctaataagtagcccaaagaatctggttattaaatttcagtatcacattcgaattgcatgttgtgaaaaacccaacatgcgacatagaatggttgtatcttataacgctaaagcttctgccatttcaagagagaaactacccaatatgtgccaaacaacaaaaaccacaacctcaccgatgaagtctcaagctaccatacccaaactacatctattattaagagaattaatggtggcatcgacattaattttcacagttcctgaacacatgcggcatcaaaataagactagaataaacatttagagtagaaggaaaattcctagccgagtgggggccacttgaagccatggctaatctctggtaatcagtaagaaaatcacgaccctgagaaacaataatgtctgaagcaagtagtttatcattatgtaccatgctgtttctcctaaacgaaattatccacatgataaccgaaatcaattctaaagaagccacaagcaaaggatcaagaaacttaagaataaaattatagaaatcaatactgattgcaaaaggaaaatccccccccaaaaaaacatcacacaatttacaaaatttagataaaaaaagggaaaccccataaaacatgataggttgtttctaaatgagtctcgcacatagaacatacctcatctgccaataagccatactttgtaagcttgcatttagtaagaatccagttagacgaaatctgccaagtgaacatcttcacttttggaggtaaattgatagactaaactttttcccaccatcttgagaaaccagctaaagaagacgcacaacccatgcgtaaattacgaatggcaagccaataccactcttgactaaaaaaagccaaaactatcatacccccaaattaatttatcccaaattaataaagaaggcaaaagaataaaaataatggcagtagcttcatcagaagcaaataaaccatgtatcaaatcaaagccctaattccctaaagtagatctgaattgggacaccgtactaattaacttcgccatgaaaattaggtgacaacacaagaatattctaagtcattagaacccaattatcttgtacactttactctaccatcaccatctctccaaataaacctagtcttaaatagttctttttcccataagatattctttcaaacaaaggatcctttcttagatttagtcatggagccaaaagacttatgtttgtgatacaaatctttcagaaccctcgcaacaagggaatttgaatcatcataaagaagcctaacatcgcttgataaaaaaaggtgtaaatcctaaaagcccataccactatcttccttgtgccaacatagtgttttttgttagtttttgtgctctaaataaaaccctttacaatctgatt

SEQ ID NO: 305674 - DNA, 1980 bp, Cannabis indica
aaatgccgttagataggctactttaatatataaagatataacattaggtgtgcaatatatatatatatatttgagactgtgtattatttataataataataagaataatgtaataataataataataagacattggacattgttttccttattccaaacacaacgtaataagaaaaatatattaaataacaaatctataaatccataatgttttttttggtattctgagacatacaggattgaaaatcaatgttatttaattgtcatagcagattttaaatttgtcagtacaattttttaaatgctctccaacccaaataaattaatgataatttttttaaaatattaatttatttttccacatgttttgtattaaaaaaaacaggtaattaattccattcatgaaatacgacctctctctaaacttaattaatttatggaatataataaaggaaaacataattaaatatatataactaaattaataaacttgactttgccaagaaagatacatgtggatgaggtttcttccaaaataagtggatcaatctcttcttaattattataggctttaataatatatatatactaataattaaggtatttttatatcatgaaattactaagttagttgtatataatattatttataaatatgagtaataataatgtgatagtgggaccatatatataataagttaagtaagtaggtcaacctgtgaaatttaattgaatattgttataaataaaataatatagttgcatgaaggaatgcaatcatggtaagaaggaaagacactcagatcatcagcagcaatgggttggagttggaggggtcaccatttaagaatttaatggatataataatgtcccaactcaaatattgaatatatagcaaacaataaggttttaaatttatattgaaatggattcttattattaattattttttacagttttaggaccacatatatgcataatggattcatatatatatatatacatatatgtagttatatatcatacctatatagggttcttataactacaaataactgttaccttagtattaatgttacttttagtataacaaatattatattatgattaaatataatattaaatacaaagttattactaatttattttaattaccatgagtattgtaattaaaaacacatttaaccacaataaaattataattgttgtgactaatatttttaatcacaaaaattttaattataatttttttacttttagtcacaagctttgttttgattaaaagtaaggttttttataatctaagtatttgagtaagtttaaagtgcaccatctttcggtagactccttatttgtatcaaagagaattttttttttcatgatcgcatacgttatacttatttaagatcacttgtaaatttttaaaaaattacaatagactgacaagaagggtataaactataaatccaacatagggcgtggaaggtcttgatccttttgttctgggaggaatagattctcatcatattgtagcaggaaccttggatatattggcgggtctattctatcttagtgtcctcatgccccaatttttatacaaaggttatgtatcgtatgggaaatattggcaggtctattctatcttagtgtccatccgccccaacgttcatacaaaggattaccgtggcatataaattaacaaccgatattgatcaattatatttgggttgattgtttgataaatttttgtcctaagattgccaatagtgttgtgttgcacactctttggaaaaagtagcgctctctgtctctatgtctaattattatatttgtcagcctaacaaccgatcatattcaaattttagggttcgtttagaattgtgtttagaattgtattgtattatattgaattgtattttatgtaatatttttatataaaattataagtggcattaacttttatggacacctaaatatata

SEQ ID NO: 305675 - DNA, 2862 bp, Cannabis indica
ttttctacttttaaaaaaacaaaaacagattaaaaaagtgttaccaaacgccacctaaaataatcttaaaaaattattttacatcctcccttaaacttgtgatgctgctgcaagaagcattgaaaatttgcctaaaaggaaatgaaaatgagaaattgtatgcaacttagtaaaaagagtcagcaagttgcaacaaagaagaaacaaaaggcaaagtaatggtgctcaatttcagatggtgatgagtaaaatgacaatcaatttcaatataattggtgcgttcataaaaaactgagttgtgagcaatttgaatgacactttgattgtcattgtcactttgagcaatctttctcgatggaagttccttcagcttgggcagttttgatctctagtggaggcttgcttggggatggagtggtttgacgtgatctggtttcgctagtttgagattgtgtcttctccagcatggtgtgcaaagtctattgactttggggtttcgttttggcatttgtttctccattcaacgtgagtgggttatctaaccctttcgtaggtgtgcatctgcttattttagataaagggtggtagaggcgttggagattggagctttgatgtttgtttggtgctagggaattgatgtgggttcgttcttgttgtgtcattgctctaatggttattaatgcttgttgtgtcctttatttcagtcttatttcgtttagtttttgttcccattgtttggtgtgtttctgttgtatcctatgtcctttttgaaattgtgacctttgctttggattggttttctagggttcatcttagttcaatttttgttggaattgtttcgtcaggcaattttaaagctctgttgcgtatgtgtaagatttttaaaaagcgaattgctttgtgatttgtctatttttggggcatgatatgtctttgtctgtctttgttgggacattgttctttctggatttttgctctttctgtaatcggcgtggtttgctgttgtttggtcatctctttgtgagatttgtgtgatttttttttcagctaacttatagtaatttgtccctttgaaacgtgactataaaaaatgatggtaaatatttattcatttatttattgagaaaataatcttagagaacaccactaaacgagaaaatcacttaaaggggttgagagttaaaaaaattcattgtatactgactgccaaaataaggttcataattcataaatgttaagcagactatcagacttatttaacggtagctttcaaaataagtttagcaagaatatcaactactacattgacaattctgagacaaaacaagaaattcataatattaaattatttacaagaagcattaatatcattaagaattaaactaaaagatgaatctaaaactatgaaagcactacaagaaaattgagttttaccggtcagattttgcgtcgacaaagggtagggcacctcgtcggaaaagttgttggcaatagacgatcgagaaaaggggtttttctgccgaatgtagttagtttgccgggaaaagacatgtcttttctcggtgagtgcagtcgttggcgtaagcattgctttgctggcctagcgcagttgccaacatagtgtgtgcaattgatcgctggcaaaatgttaaaaaacgccaacaattggcgcttttcgcagttgggttgcaactttttgccgataaaactaaataaatttgctgctataactaatttttaccggcaaaattatgcaccgacaaaaaattttcttattgccaaaaaatgacaaacaaatgccgacaaaacttttttaattccccgatatatctcaacttatactgactaaatttataaatttcgcaggcaaaatattttttttcttgtagggaagtaagtttatgtataagttcttgcagtctcatttgaactgattgttgagaaaaccaaagttgatacattgagaaacaacatagcgaacagcaagagcttccacctgaatccaagcggttgaggcaattagcaggtagtttttctccttaaaatatatatatttatgttgcaaattttttaaatagaaaattttaaaatggagtatttattaatgatggtctgattcaattaagtgccacattcaatgtgttaaatttaacactatttttaatgtcatcaaatctgaaagtattacatttaaaaaaaaaaaatctcaaactatactacacaaattaagaatgaaattcaaacatataaaagagatagaaaatctaaccaatataagtatctatagataatatactcatattaattaactcatacatgcactagaaatgtccttagcccataagaaactttcttaaaagaagttagaaatcatcaatcaaccgaaaatttttatattatgtatctatataatcgtgaacattaagtgcaagtttctttcatagattctaccctcgaatggtggcctatttcaatgtaaggttattcctcataacaactgtcctatttgtgattatgggggtgattcaaattcacatgaaattttttagtgtccctgggctcaaggaatttgaactttattagattaccctttccttcacgagacgaaagaaaatttatcttttaagcaagtaataagctatgctaatgagattgtggagaataatccttttgaaagattaattattatttcatggactatatggacggagagaaataagatgactcatggtgatcctcaaaacaccttaagcaaataattggttggatctcaagtttctgtgactctgttgatttaacgaaagagctagtaaagaaaagtttggctatgagtgaggatggggtttctaactactctccttc

SEQ ID NO: 305676 - DNA, 3254 bp, Cannabis indica
acaaggaaagaagaagagactagaatagaaagtaaaatatttagtcaattatttcagttttagctattttttctttcaatagtcttgtttacttttcttttagtacaatagaaaacaatttatattatttattcaaaaatagttgtatttgaattgtacaaaactcaaaaaaaaaaaaaaatagtaaccaaatgtactaagcaaacccgattactttgagtgcagaagagcatggatataactattcttgaataaaaatcctatataaatgccaattataacgatttttgaaaaagtaagtgaattttttaaattcacaaacactagaactaaaaattgtaatggataaataatgaatttaattatagtcacatgttaagcactcaacctaacaagtgagtatttacgccaaaaaataactagtgagtgaaacgtgttactcaagggagctgaaagagcaaactcactataccatctatttaactaatagaactttgcaaaataaagtgtataaagtacttggataatttaagcaataaaattaaaacacaacctcaagcaaaggacataactctgctcgtacatcaataagagttagggatataactctactcgtgcatagaaaaagagtaaggaatataattaactttgttgatacatcaaaatggagttataggttttaaactctactcaaatgtcaaacttgaataagagactctaactctaattaggtgccgaattcaagtaagagaagcaacttaactcaaatatcttatgaaatgagacatgaaactcaactcatatagaaaggaaagtcatgattcttaattctaaattctaactccatactggaggtacataattcaagatggaaggaggttgtgcccaagtatgatgcttaagaaaatttcacccacactactaaacatgttactcaagccaaaagcttaaggtaaaacaagagctcgaggtcctcatcgatgtggttgtcacctcccatatggtcacgattatacatctacaacaagataagtaggagaggtgagcataccagcatggagtaagggtgtgaagaatcttggtacaacgtcaagatgatcactttggcctaacaccaagagagtcaagaccattatcttgaccaatgtcgcgactcacaatctcaaatatgtcccaacaacaagaaggtaagctagaaccaagctcaagggagatgagcatcttggcctttgtttttttttcaataaaaagggaccaccttacccctagaaagtaccacctcgaccttagagagggaccataacggccatagagagggaccatctcaaccctagagagggatcatcttagcccgaatcttttttttctaaaaagaggagggacctgctcggcccaaatctctttttcaaaaagaaggagaaaagttgatgaaaggccatcatggccttatttattaatttttttattcttttatttatatattttttattttattatttttaagtgattagagatattggtgtatagaaatatttctaagtgcttagaaatagtattgctatatagtagttcctgaaaaaattggtgttcaaaataatgaagttaagaatgcgagaattgtttctctacaagtccatcataataatccaatattatgacaaacttggaaggtaaatgttctccctacaaaaaattgatggtattaagtttttgttggatatgggaaatgtcataatatttcaccacaaatggaatcctcttgaatggggtcctctttaatgaggtcctcccaatggggtcctccccaatgagatagtcctcccagtagggtacctcacctcctcatggatctcagaccaaggtggcgtatcctcacccaagaccaaaaaagtgacatctcctcacctaggacgaaaaggaaggcatattctcacaataactcctcacgacacctcctcatcacctcagaccaaatttcaaacctaaatatgaccatgttctgttaaattttttggaaaaaagtcaaaacgtaaaagatttagatcttttcctcggtttctataacacgtcttgaattagcttatttggagtttttatgagaacgttattcacgttttacttagagaggttgaagcataaaaatcacatcgacccttgcatataccacctcggccctagaggcctaaaacatatcacctcaaccctagagacccaacatgcatcttctcggccctaggggtcttagcatgcatcaccttggctctgggggccgcaatttgcatcaccttggccttacgagccttaacattcattatcttggccctaggggcctcgaaatgtcatcttagaccaacgctagagcctggccatcatgtcatctcgacctcatcatcacttgggactaaatcggggttcttatgcctccatcacttcagaccaaaatggtcatctcgaccttatcataatcttgacacaaataggggcctcacacactcatcacctcggtccaaaatgaggattatcccacgttcttctcgcgacttactaacaacattgtgttaacatgtattcttcgtgatggaaatatgttaacatgtaaagttagaaggtatttcaatctttttttcattttttagatatttgttttaaaatgtgatttctatattttaaacctaacccgaccaaagttacaggaatgtgtttttgggagggattttgtaacgcccgtatttgtaatacgaaatttgcaaactaactttaatatattataattacttaactataaagatcgggatcccgagttataaaacatagtttaaaactatatttgttaatacaaaacaccttgaagatttttttataaacaagtaacaagcaacacaaaataaaactcaaaatattgaaagaccgaaaccttccaggttgcactgccgcgatgtgtacaatcactgccgagctccatcttactgttcctccagctttgcttttcctttacctacacaaggtagcaaattgatgagtcaacagactcagtaagatatgcataacatatatataaacaatgcgatatcagctttatgtttaagccgctccgagctctacaactgagcccaccgaatgattatgaacgttcttaaaggaagtacgaccactgtaccaaatgcactaaagtaccaaccctatactagtgttggtagagccattattgtaaccccgaaagttactaagtgttgtaccacatgcacgacgtactc

SEQ ID NO: 305677 - DNA, 1390 bp, Cannabis indica
ttaaaactatttgtgtgtgatttccgaaacttgacttttagtatgactatgaagactgttgaatttatttctttcaagattctacccgaggacaaaaaggactctattgcttcatgcactttatttcgaacaagctcctacttatcttaaaaaaaataactagagtatccatacgggcctagagccttgataccgggaatacaaaaaaaattagctctaacttcctctcttgtgatcttttcagttaattttttagcttgttgtggagtaactgaagatcccaaattaaccgcacttgttaaaacttttctcctattttccattttattaccaagcaaagacttgtagtaatataaaaaggcctcaatgacctggtctggttgctcaattatggtcccatcttgctgctcgatggaccaaatgcatgttgtatcttattctattcctaagattggcatgaaaatagcagtcttttcatcaccatttttcacccaagtcactttgactttctgttgcagcatcgattgcagatcactatatactttcacatacatgttcttggcttctttttctttaatatgcagctcagggtttaacgagtctcgttgctacctgtcttgacaatctgtaatagcttttttagccatcaactcagcaatatataaatcagaaaagctatatttattgatctccttaaaaattcctttaacagctctaagttttgataccaattggtacattttagttccatcaatttcttgttcccatacttctctgactttcctagtgtaatttgggtgagattgtcacatattgaagtacttcaataattttctaccactagaaatatcaagatggattgagagcacgctaagaatgtggtcaaataggccttcattcttcatttacatgtatgttaatttggttagttttatttgtaactcttttgttattatattttattattctattaattgctatataataatgttaaataaataaatattttcatataggtatcattatttcagaggtcgaaaattgtataaattaaaaaatgtagacaactagtatatgctatttttaattttccaatattattgctttattatattatttctgtagtagatcatatagccaagtattaataaataaatagtgtgaaaatatttgtctctgaaataaatcaaataacttcaaattttataataattatgaaattttgtaattaaataaacatataacttatatgaccacccctaaatataatgccaacctaaaaagtactaggattgagatacaaaatgaccctaaatttggaaactaaggtggcgtttggtaacactttttttaacagttttttgtttttaaaagtgaaaaagtgaaaata

SEQ ID NO: 305678 - DNA, 1251 bp, Cannabis indica
gcttgacattttataagatagaaggtagtaggtagtaggtactacttttactacttaccctaaaatgatagaataatttgttttgataaaataaaataaaataattgagaagggtagtttggacatttaaagacaatgagaatcacaatgatgaacatatttgaaaataattaccaaaatttgaaattttatacaataataataatagttgagcaaggacaattttgccatttaagaagtagtgagaaaatcacaccaaatcaactatgatgaacacatttttgtccaataatagtataaacatatttaaaatcctactcccaaacaaaagatatttgaaaataattttaacaaatagaaaattggcggggtgtactctctcttgtttaagatactatcttcgttaattattttaatacttgtaaatactttttttttttatttatttttgaaggaacaaaactaagaatcacataagataatcatctccaacacctattattttcaattactccatataaaacatgtaaattaatatgtaaaaaaatgtaaattaaataaaaaatatttattattagtggttatttaatattttattaaaactgtataaaaattaaatatgataaataataatgcaaagttttataatagttaataatttatattaattagtgacactatatcaaattttgtataacttttaaaatgtatcaaatttgacacattttttaaaatactattataacataatactactctaattatattctaaaaatgtgcctaatttaaggcattatttcgatataaagattaaaactccattatggtggaatagccaaactatcaccttggccaagctaaggatactataaaatctcttactcctaatgaaaagagtaaagaaatagtcaaagtaacaccttggttgaccaagccaagatactaaaatctcttattactcttaaataaaatgaatgaatttagagtaaaagaaatagccaaactacaatcatcttggttggccaagccaaggatatactaaaatctcttactcttaaattaaagagcttagagtatagaaagagattggaataaataagcaatgcttattttgtaagaaaatatttttattaaagactttacctcttatatagggtttgtattgttggattaaaaatcctatgtgggcacatatgtataatgtatatgctattataaagtgtgatacaaaattaagtgaccaattatgtt

SEQ ID NO: 305679 - DNA, 761 bp, Cannabis indica
tcattattacttatactaaattattggttaccaaaagtctcagtcattattttagtactttcattaagatctgtaggaatattgcaccaaaataaactttcatttaaatggtggtcataagaaacaatcagtggccttcgcaactgcctgatgacccagcacgtcgaaaggagggagtggccttttgagtggatcgtggaggtgatacaaatgatccccagtattcgttaaaaggggaggcatacgaagatggtaaagaagacgagtatgcagaattcgtgtcgctaagaaaataggccacaaagcatgatgcagagttggtagaacaaaaataaataaataagagaatgcaagaggtgttgagtgctatgcaccaagccatggctcaggcaggccttgatgttaatctcgttcctattgattatgaaatcataaggtgcctttggtattactattatttctcacaatccaggaacttcaataatgttggcgtgatttggtttgagcaacggatcgtgacgtgatacatcttcataatgaaaatagagttgcaccaacacttggcgatgacggtgaaggcccctcacaacttcaagaaaatcatacacaaaaggaaaaagtacctagtcccatccaatggcctcccaaagatcctcctatcacaagagaaaatcctacgctagtacctagggggagaagaacccaacgcgatgttgggttttatgccctaaataaaactctttacaatctgattagttatc

SEQ ID NO: 305680 - DNA, 1945 bp, Cannabis indica
tttttaggggaagagactagtggcgtagagagaagatgtaaccctattttgttagactcagttattaataaaaaagtcttttaggctgggctgctctcaaaatcatttaagcccaatgatgttgtctagttttattgtgggccaagaggcttcctttggtggtaatgaaaatagggcagtgactcaatttttccaagcccaagacttatatgtggatgagctgaataatttaaatgtgctgaacattaattttaatgagaactctatcttggagaaggatggccagcccaatgatgatgtacttggcaatgactcttttagaaataaaaaaataaaggcttcatgtatggatattggagtgccaacctctcctgaagttaatgagaaaatcacgccatttaaacttcacaagctggaccactttactctctcgttgagtactacaccaagacctctgcttaagcgcttccctagtattagaagagattttcttgttggcttgggactgtcttgagaacctttttggggtgaaaacaatgctaatgattacaattcttcctctgaagaaccttttgaatgctctgataatattaaggatcagatgtcgaaccattctagtgctgactcttaccatgtagacaagccaatttctctcagatagtcttctaggatcattgcttggaagaaaacaacgcgactcactgatattattaccccatagagagaagtttttatagttgaagatgaaggctcgtgtgttggattgacccatgctagtgttacccctgtggaggaggatttggtatttcctccataggagccatgagaggtgttgcttggaactgtagagggttaaggcggacctctaccgttcttgaaatgaaaagcttcattcgatcgtgctccctgaatttcatctttttgactgaattgaaagtagaagctactcctttggtacgtcttctgaaatttacacttttataataatattgttgttcttgttttggagtgtgtgggggatactttgttagcttggaagtccggttttactattttgagaatatttgcttatccaaaaatcaaatttctagcattgtgtactctaaccctgctcataaccctgggcttttgtcttgtgtgtatagtctgccttatttccatgagaagaaaaaattctagccagacattttgaaccttggtgcaaaatttggtggcctctggatgatccttggggatgtgaactttgttctgaattcttcgaaacgtgttgggtctaggggaaaagaccaatttttaccgtttatctctgagctaattaactaccatggcttgattaacatgcccataaaaggtgataacttgacctgggataatcatagggagggttcaactcatattaaatctactttggacaaagaaattgtgaatgaggattggcttcacttattttcaaaggcagttattcaatccctatatacctacaactcataccacaagcctttatgtgtgtactttggaggccttgaggccaattttaagcgctaattttactttgaagcttggtggacaagagactcccatagtgctttggtcgttgaccatgcttggaattctaccaatcattcttggtcccctgctagggtgttcaagaaagtgggcgctacgaggcttgctttttgcaagtggaccaagaaacaatttggtaaatttgactctaacataaaacggctggaagctcagctccaggacattcaatgtatggaataggatctcggtgttgggatcacaaagagagggtgcgggctgagcttaatgaagagcttaagagaaaggctttattttggcaatagatatcccgcgtatcttggattaaagagagcgatagatgctcgaaattctttttcatctccgtcagcattagaaactgaacagatgttgggaatat

SEQ ID NO: 305681 - DNA, 1093 bp, Cannabis indica
  modified_base (1065)..(1065): a, c, t, g, unknown or other
  modified_base (1069)..(1069): a, c, t, g, unknown or other
tgaaaagaaatttattttgaatatatatggcaaattatattcagaatttttcataagtatatgagatgttacatcaaaactacaaaatacaacatcaaaattgaataaaatggtataaattagaaaacaccatgagatatataaaagctaagaatccccatctgttattttcattgcgtaaacaaaaaataaaaagggaaaaagttggaatttcctaatattcacgccaagcccacattaaggccccctctcttaatatattcagacagattctctttctttttctccctgatctaaaaccataagggcccattattaattcaaaacttttgattctaaaagctacaataatatacatatatatatatatatcgagagagagaaagagagatgagatccatatatatatatatatatataaatacaatatataatcaagtgtgtaggacctagacgacaacataaaaagtgatgccctgatgagaagggtatcaaatatttctctactcttcttcatatggctccacatacaccaccacactatactcctctcttttccttttgacccaatttgttttcctaataattaatctctcctaatgtatgtcttcttttaccaattcaattttcttattatcttttcatctgcctaaactgtttcagataagcacaaaattaaatcgtatatataatatatcaatacgattatgactatgagccaaaattaaagttgatacaagagtgaaatgaaattattatagataataattatgctccaatctaattgtaatatgtacgtgcattacatatgcatggctcatgcacgtatacaaattttggtaatccttaatttgattgcgtgacccaattaccttcgctagctatatagctatcacctatattaacctgtatacaaatatatatatatatataaatatattttcagtcaaacaaacctatactttccacaaaacgcccaaggactacctatatatgtgcaccatatatcatttccaattctctctccaacaaaaactccaataccctctctctctctctctctcnctcnctctctctctctctctctctctct

SEQ ID NO: 305682 - DNA, 1906 bp, Cannabis indica
ttcccctgagttatcttctccattaaaataatgaattacgagtttgagttgttgagtacaccctagagaacaataacagatgaataccttaaaactcagctcgagtttcaactctaatgtcttagtctagtttcctaactctcttcactctgtttttctctctttctatgtctctctccaacagaataatgtacatatattttctttcactttcataccattaataatgcactaactaacataacaaaatgctacaacatttcagataaattttatcgaacaaattgtagcattcgaattcactaacaattgtttgttaaaactgttataatccatttttttttgttctatgaattatcaaacaacaccgcatgttcaagtgagacaaaccagaagtggactaagcctgttatatctatgaccaaagttaatgtagagatggggctctattttctcaagaaaacttttttggctttgaatttgttgtgagggatcgtgatggtaatcttattgaagcttaccaagcttgcaaacttggtgtcgtgaaaccagatatttttaaacagcgggtatgaaggaatttttgagttggataaaatcccatggtaagaattctttgttcagattatagaacaaataaacatgagggtaatactatagttgtattgtgtagtttttaatgatgaaggaatactagcataacttctgatttcatgccttttaattgctagagcattgacagagatttgattttgttactgaatcacctaatactgaaaaacaatgctagcaaactagtttgataaattgatcaattatctacttattaattgtgtagaattgccattttttgttagtctattctttattggtaaacattttgatattttttttatatggaaagaagaattatttgatgataaaaaaatagacgttgtaattaaatggatgttccagagggcgtcttggaatttaaatgaaggagaggcttgacacaaaaaaatggtgcatgaattggaacaagcccatgaggaaagggtatacagtaaaataaactatcgttgcattctagagaaattggcattagttgtaaaactgatgagcgagcaacaaaagcaaacgatcagagacttagggacatgggtattgataaatttgagctcaaatttgatggaaaaacttatcttatcacaattgagtcctttgtgaatatatattattggaattaaagatgacggggagagtataattctttcggtgacgaagacattgtgatgtaggaaaaaattattagggactacaagcaacaaactaaaaacacctcgattaggatcctcgcaatttgaaaatggagagttttgaaagtttgaggtgatgaaaaagaagaaatgaggtgggcaaatcaatttgtacctcgattaggatcctcgcgatttaatggacgacccaaatttcttcttccaaaagcacactttcatatgatagatgggaagttgaaaatatgacatttaagagtcgccttggcatttatattcatcattgtaagcctcgagtaccgtacgcattaaaggagaggtcatctcaattgtcatgccatcactgtaacttctcccaagagatgcgccctcaatgcacgcgttgtcaacaattatattaaaggtgccgcatgcgtggtaccttcaaattatgaccctttacttgatgacaactcacgggatgcattcacaactccagctgctaccacatgtcaagaacatacctccaagaaacagaggagtactgcaagctcccggatcttagagagtcctaaaagtttgagggtaaatgttattcgtatttctaagcatgtgatgtggcatttaaaggaaggaattagctgttggtagaatttattttaccaggatct

SEQ ID NO: 305683 - DNA, 2257 bp, Cannabis indica
aatcatgtaattggatgtaatttaaggattttatttactctaattttgacgactttcatgagatttggatgtaaatataaaatattactatttgtagacaatttattattattattattagggtaaatagtgacataagtactactaaagtttaaagtttgtaagcagcactaaaccaaatgtttatttttggcggcataagtacccaatgtttatttttatgttatatatatgtatttatctcacactcacactctacttatttttttttttttttttttaaactttcactcttttttttaactcatcaagctctgataccactgtcaactatgtatatatatgcttatatatgtgattgaagcagaaaataaataaacttgaaataactttattactctactccacacatattcgtacaactagaactctttatatagagcaccactaacactataaaataggaccacaattacataatcataacaaaccactaattagaagaagtgtccaacgtgtaacaacccattatcttccatgaaatcaataccccactataaacctaaaggctcagtccataattgataaacccattttttttattcaacattctcagaattcgacatcttttgctggtgctgatggcttacatggctgtttgtctagggcagtgacatgaaaaaagaaggctggtgatgagggtggtgccattaaggtcaagtgtgatttgcgtttgcatgactctcataaaggaaagccagttgctcactctgtggtaactgctccgacttctcaggctattattttggaaatttatcctttgacaaataatatccctttaatttttgagaaagggaaatctaaagttcttattgactcaattttatttgaaaatataaaaaaattaagtactgataaagtgtgggtctctcatttaatttggatgatgtagatgatggtgggtctaagttaactagtgtgcagagtattactatggggcatcaaggtgcctagtaccactatgaggtgacgacttataattagttagtgattttttataatctttattaaaataaaataaatgagacctaatattaaattacaccaataataatattacaccttaccagaagctagacaccataagtccccttcagagagtctcttagtgtgcatggtactattaatttgagacataatttggacgttaatgtgcttggtaactttagtttgacattgatgtgggtccaagttaaataatgtgcatgatactattaatttagcacacgactggaaagttaatgtgcatggtaatactattttggcatgtgatggtgggtctatgttagataatgggcatatgtgactttgcatgagaattttgatcacatgattgagaatgagagtgtttcattttcatcgcagcaaggtatgatttttgggagtcatattcagtcttctacggacatctcgccaatctctgctatcaaatgacaatccttgcccgcttttttcttaggtggtatgttgttgggatcttcctctataggacgacggggaaatcctaaagggtctttgacggtcgtaagtattagttttatggtactaaatcaagtacagctcaaaataaatatttttgattattattgtatcatatactcaagattactatatgtatatatattaaatctaaaagtaaaaaaaataaaaaaattgtttatctcttgaagcctatcaaagtatccttaattcttttcgtatgttgtatcctcagaacggtgatttaaaaactcataccttgatcttctagatcttctaccatatacaaggactagtgtgggctagtaggatatagagtgtatatgaagttcttgtgttctctacacatgagtaagaacaattttataatattttttgagagaaaagatttaatcagattaatcctttttaagctttccaaaaagataggttaaaattcttttttttttcttcaaaattttgtttatatggtatatttaaataaatttaataaatattttatttaattaattatttaaattcaaattatttattaaatcttatttaattatttgaataaataatacaatagaattgtgttatggatgtttatttcttatattcgattgagtgaatctctcaaccacttgaaagaatatctcaactacttttcaaatttaagtttaaataaatatttatcttttgaattaattaattaattaattaaacaaaaaaaaaa

SEQ ID NO: 305684 - DNA, 1254 bp, Cannabis indica
tgtgattaaaaaattaaaaaacaaaatgttaccaaaaatcaccctaatttattaaaataaaaaattgattaacaatggatagaatattaccacaacataatattattgatcagcatttcttaatgtgttttgaaggaaattagaagcgttaggtagattaacacataatgctaattggttcttaattggaagtaattaaccaatttttatatcaattttaaaaataaataagctttaaaaatggaaaattatcaatttatctttaattcctctgtgttaagtttaattggaaagcaactcattacccaaaaaaaaaaattaagaaataatcagaagaattgtaaagagaaaattaattaaaactatgatatataaattaattaaagataataaaacccaaatacaaaactcattagttaattaattaattagcttcagatcaaaatatcccaaaatatctaaaaacaccaaactaaaattaaaaccctaacaccatttttacagagcaaagaagactgaaacaccttatacgatccctgagatgatccgatttcgcatgatcgaatctaagaccggtaaagcttaccgaagacgtgaagagccgaaacgaagccgatgaagcagaggctgatcacgaggacgatagtcggaccgatcttgtaaccgggagcgtcttcggtgtagaatctcagcaaattggtagctcctccgccgccgtgaccggtggaggttgttttggcagtagttgctccaggtcggcggcggcgaattccagctgtggctgcagctgaaccgcgaggagccacgaggccagggcgggagttgggggaggatgaggattgtgactgagaagaacctctcaccattgttgagcgtgtctttgaaagaaggagacaggtgtgtttgtgtgtgtgagagagtaaatttggtcactgaaattatttggtttggttggtgagtttaccaaatccaataatactgtatttataataaaaaaaatatatcttttttaatgaaataaaatatatcttattaggaatataaatatatcaacaatattttttagcaaataatatcatagatagaagataatattgtttgttattgtttcaaaaattatattttattttgtaacaaatttatagatagaaaattacaatgagatatttatttttaaacacataatatatttatatttatatattttttaaataatattttaagaataattacataaaatattaattttgtaaa

SEQ ID NO: 305685 - DNA, 1639 bp, Cannabis indica
aatttttttacaaaaaattatgttttatgtaattatccttatttttaaaaaaaggtttcactataatttgatattgatatttggctatttataatttttgctcccgaaccatgatatatgttttattgtgcctttaaaatctttaactcgttaaaaatggtcttcgaactattcatagtgttctaaattggtcattctgttaagttttgtcacaagtggcaaatagaataatgacatggttgtttagacaattgccacactagcactacatgtgtaattaatttgaaaaaataattttaaattttttaatcatttatttattttcagtttaaatataatctttcaaaaatgcatttttaattttaattttaaatttttaacgacaacattattgttattattttgtttatcacgtatgataaaacttgacagaaaacttatttttgcaaaaaaattcaagagatacagtaattcatataccataatttaagggcaaatatcttaaatagtatatttttgatgcattgacttttaacataaataattatgcttttttttttttttaattgtataaaaagtaaatagttaaacattttgtgttaatggagatgagatagaacactagtagatggtatagtgtaacactcattatagttttgaatttaactttagatttttgatttattactcatggggtcttagctttaacattaacatgatttttgtcatacgaatgttccaaaagtcatgattcaatttcaaaaacaacacaatttaaggaagtactttttcttttctttttttttttttatataaaatttaaggaaatacttcaattaaaaggagaatcaaaactttattgtgataacctccatgagcaattaaattacaactaaagttccacaatcaagaacacattatttagattcaaatttatttattttcaatattttctttgtagcgaatagagtaaactttaacatcaccaatcaaagatttggtagcacgtatatatataatttaattgaatgaacaaacacaagctgtctaaagataaaatattaaaagctctaaataagagtgatgttgaaagaattattagtgggacatacttaatatatttgttataataaaaccccaatactttatgtatctaaataggtgggatggcattttcatattaaattttataaaaatttatgataattatttggtgtattttttttattgtgttttaattttattttataagaataagttaagaaataaaatattttttttatctattaattaaaaatacttttatatattatattttattaaaatgtaatcacattactctcactctccacttaagtttagtatataatttgcattatcctaacagtataatgaggacatgataaagatgggtatatcttcaagaaataaaaataaaggtaaaaattaaaacaattattataaagtggatatacaatgtaatttcctctattattttatatatatgaaataaaatagggataatttttttttttggaaggaaaatggtaaactttattagaatgaactttcaaccattacaatagataaaagatcagcaggagcagtactctcactgaaaatacgatctgaatacaaa

SEQ ID NO: 305686 - DNA, 2127 bp, Cannabis indica
caggagtggaaaggaagagttctgccgaggagtacttagtcaagcagttacggtagcagtcctctttggtttcttacatgcagcttttgaagcaagctagccaagcgatagcggggaattagaaagatacatctagaaagactgtattaggatgggccctagcggttaggcatccaggtaagtccaacaatgctcaacatgaaaaaatcccaaaatctttttatgttctgtgcatgttttgttggatatataaaagagatatgaaaaagattttttgtactagtgttcataaaagaaaacttggaaatggagtcatctgtattgcaattgtgaggtcaaaatcatattgcagatattttcaccaaaagtttatctggacaaatttcttatacacaaattggatgtgtttgatatctacacaccaatttaaggggagggtaaaatacacatgtaaaactaattaaactcagttaccgttgttatattatttattgggatattagctagttatttcctgtattttagtcttttttaaatttaaactcatactgattgtattttatgaaagacatgttgtaatttaattttttcatgagtatatatatgaattacaacgtaaaaaattatattcatggacttaatttgtatgtttatttcgtgctaatatgttggtgctttcgtgttgtcttcaaacttgtcgtgttatttggtacttaaacacatgttttacatgttgcgcctaaacatatattttttcgtgttgtgccaggcccaagcccatattttcccatgtcacccgagctcgtgccgtgctgaaaaaatcctgccctgtacagctttaatctgagtattgattatccggttttcatttgagttgtcaaatacgtgggacttggactaggtctttggctctgaaatgtagaggagccgggggaagcaacagaggagttcttagcaagtggaattagtgactgtacaacatcagtcattagaggtctgtaatgtgcttctggctgtacacacatggctgcaatagcagctatctataaaatcaatgaagtgagataaaagtaaagttagttgagtagaaaatagttgtactaactttgaataatgggaccatttcaaaggaaagagagaaaaaaaaaagtctggttagtgggagtagacttacctgaattagatccttcttttagtagtggccttttaaagctgggtcaaccatctccagtagtttttctctgctggttaaccccgaaagagcctgaaaacaagaaccattgaatgaacatgtaagaagtaaatataaaaaaaattaaacaaaaatcttacggaaaccagtgagtgggaaaaagaggaaaacaagcaccacagaccaaggctattaatgctacaactagaatccgtacgagttagaacaaataactaaacagacattgcaatatattgaattgaaaatagattattcgcttttatttattattatcggacatgtacttcgtatcttttgtaaaatctatgccattattcagaagaaaaacgacaagttctgtaaactaacccatgaaacaaggacatgttctccaggggtcgcttggtatcaactgaaacacggcctgttagaagctctaaaagaacaactccatagctgtacacatcagatttcgttgtgagctttcctgttgaagcatacctacatttatcaaaatcaacttaataagaatttaaccatgcaatgtgtttaaatatatccatgtagctttttttattttaataaaaaaaggtggaaatttactcaaaagggcatgtagctatggtttctaactagacattaaactattttgtttttatctttatttttttcttctacatttatcaatggttcaggtcaggtttttcttcttgcatttactggtccttccttacaagcaattaaagaagcgtaaagtgataaaaattggaggagagcgtgttagacttttatttgggcttacattaaattttattggttttagtaaaacttgggttgattggatagttctttgctgtgttagcccatgttgttggtgatcaattgttaatgggcttagcatctgtgagtaaagtctaggtgaagcaaaagtgtgg

SEQ ID NO: 305687 - DNA, 4959 bp, Cannabis indica
ggcaaggccaaagctgaggaaccgtgaggacgagccgatgaagattgtacatgtcgaggcggttaggcctggagcgtacgatcctcgggacagcagcgcttttgtagttagtcgttgggtgacaaatattttgtaaagaattaattaacttttgtaaagtattttgtaatcgggatcccgagtattttgtatgaaatattataagttttaattaaaaagcaaaattttaattaatcacgatttctataaacctcgttgattagcaacgagctgcacggtacgtttaaaagtcacgtaacatgcctaggctagttagggtgttacaaaatatgattttcatattctaagaattaggtgtgaacaatctaatgaaccacacttaatcaaagtaaattatattttttacataatgaagaacgaagtgaaaatatatgctaacaatccaaaatacatgatattaaagatgaaagacatatttgaagaagaaaattccataaactttaaagcatataatggaaaatcaacacaccataagtagtatttagttgcatattacttcatcttccatcttaacaaccttaagaggtttagaagctcataattttcttataataaatattaccaagaaaatacattctaagaaagagagaaaatgaaggaagggtagtggagtgagtctctaagtgtgtgtggtagggatggtattgttatgtggatgttgttttttggtcttcaaaaggtctctaaaactctctattcatagtcaaagtgagtgaattaaaataattaataaattaattattttaatattttctagaaatttttggcataaatgaggtaggtgagatatgagaagggtaaataggtaaaaatatatacgcaatttattggctgagataatagtgagatgagaaaatgagctaaataaatgtaagagaatagaaaattgtagtgtattttttaaattagtattcagggctcattttttatgcatttggaacacttggcaacacaaatggcttggaacaggcggcttggaatgtggagctaacaagtggcgcacatggagagctcctagagatggcggctgaagcagaggtcgacatgtggcgcgctgatggaggctggcatgggggacaggcggggtccacgcggttggaaagctgcagccggctcgaggaaatgaggtgcgtcacgcgccttggtctggggtgatcatcacgtgtgcgcttgagccacacaatcagcccgcggacggctgggatgtggagagtgttgttcgcacgagtggaattcgcctactccgaattctgattttattttgaaatttgaaattttggctccactttcttcatattttctctaattttgtccaaattttggctaataaatacccctaaaaataccaaaaattaattaaaaaattaacataaaattaaaactaaataaaataaaatactaaataataaaattactctaaaatacacaaaaagctataaaaaataatattaagactaaaaaattcaaaatacttaaaaacttaataaattaataaaaaaagtcaagaactaagacgatttttgcttataaaatatggtaaaataactctattttgtaaagttatcaaaaattaatattaattttttttttattttgctttaaaatacatggcattgacgtgataatagacgaaataaccacgtcagtaatttgtaagccacatgtgacaaaacaaaatataaaaactactttacaatactatgaataattcagagaccacttttaatatgctgaaaaaattcaagggatacaatataatgcataaattataattaagggagtaaaaatcctaattagatcataaataatttccatatgggtagaaatatagcatattaagaaattataatttatttttagatttttacattttatactttattctaaatattaattacaaaataacttggcttaattaatttgtattttttttacttaatttacaaaattaataacctttttttaataaatttcattcacacacatagcattaatattattaatagcttgattctacaccctctctctcattcttttattttctttcagtctactaccctttcttctatcttttttctatatattttcttttcacgttaaacatcttcttaaatctcttctctcaaacttaaaaattatttctatacacatcactacttagttgagcttataaaatgtatcatcataatttattattcaatatgattattttatgagaaaaatatatatttttgtcctattttctaaataaaagaaactattgagttgttagtctagagtgttgtagcaccacaatactacgatgcatgaggaagcgactatggtagcctatgctgaaaagcttataatgaggtggtgtggaatgaaaagtctatttctactacaaatgttattctttcagtaagagtggtccttaatcaatggaaatcgtctcaaataaagaagatgatgtctttatttattcatgtgggggtagatcgtggacgtgagcaatgaactaaaccaaagatcaataagattaaggtaaatattgatagagtaatctttgagtcgtcagatgtattatttggggttagtggtgtggcttgagatagtaatggtcgataattgattggtttttctctcaaaaacatgagaaagttgatgcttcctatgttgaagcgttggtattaaggagatgctaagttggatcaaaacgaatcgctggcaggatgttatccttgagtccaactatcttatggttgttcaagccatttttagtttggtccatatgtcatcttcttttatccttttactgcaagattgcaagctttactcgctttctttaaatttatttaagttatgttttatcaaacattctgcaaacaaggatgtagctattgtctctctacagaatgtaggtttagtgagtgccatgcttctattgaaattgaacttttttgtcacaacttcatattttcacttttctggcaaagtgacttactcgaaatcgggtagtttcgagtctctcgattccataaaacagcaacatctctgacttggaagacaaaagagcttgcttaaaaacatcaataggaagcgaccaactaatacaaacatcaccacacatgatgtgtgtaggagaaagtttgacacccttgctgctttggttaagggtgtcactactccaaagccaacagagtacgagttagatcgagagcgattttcacctctctcaaatcgaattaagattttggagatcccctcaaagttcagaaatccagtgtggcacccatacactggcaaagaagaccatctctctctctctcacatacacaacttctaagtacatactaacctgcaaggcatttgagacgattctcgttgtcaaacttttccagccatgctatttgaagcagcacaacagtggtatctcaagctttccctaggtattattgattcttgggaaatgcttaagaaattattctatgaccaattctccccatcaaggcacagaccaatagagcccaatcatttggtgtgtatcaagcaacaagaagatgaacctctaaaggattacctataatgattcttagaggccactacgtaggaaaagatactcagtgaagacaccaaggtcatggaaacaacaattggaccaacaataatgagtccattctggaaagacttaaaactcagtatacaccattcaacagtttttagatagagcgaattgtttgatgaagctcgaagaagccgttaagaaggtcagaggagttgctcaattagaagcaactgattacactgcttatctatttcctgagtctcaaacagacattgaccaggagagtgaagaaaaatcaacacctgatgcctctactgaaatagactcctcttctatttcccaatatgaactcgagcagggagatagtgatgacaagtcccctgctatttctcaagaagatcttgagcaagagagtagtggtgaagaatcccccctacaccacaaaacaaaaaggagaaggaggagaagtacacatgcttcaccctcctgacaaaaactctcgaaataatctacatggcaacccaagctgttgtcccatacaagaagcctcctcccattaagaaggacatcaacaagagggacacctcaaagttctgttgattttataatgatttcggccatgatacaaacaaatatcagcacttgaaaagagagatagaattcctgatcaggaaaactaaccctaatctatgtcgttgtgtgcagaatgaccaaactcaaatacagactgcccaaaatgaagacccaatgccaccaccagtggcgggtcatctaggggtcattataggcagacctcatatagcaggcgaaatgagcaaagccatggggcactatgctcggaccctccgtcatgagcaaaaaattaacatcttagtcgtggaaaaaagaaattccaagcaacttatgcttgaggagcctgccatatcctttgcataaggagatatttcccaggtcatgttccctcataatgaccccctagacataactgcacaaatagggaacatgatgattgctaggtgcatgattgataatggagcctcttccaatattcttttcaaatcaacttattaaaagatgggactccagttgacaaatctagcaccttgtacacaactaatatttgacttctttggccaaggccttgcagccttaggatatatccaactacctctaacagttgaagaaagtcccacaacaaggacactggtggctcaatttatagcaatcgacgtgccatcagccttcaatgcaatgatagggcggtaagccttgtacaaccttaagcaataacgtcaatttaccacctatgcctaaagtttaaaataaggcatggggtgggatgcctaaggggagat

SEQ ID NO: 305688 - DNA, 2165 bp, Cannabis indica
taaaattaaattagtgataatttgaatttaaatactatgttttagtcacaagtaactttttattgtgacaaaattatatttagtcacaaagaatttatgttatgactaaaaatttatcgtaactattttttgtagtgtataataatgtcatgaagatatgtgattgaatgtataattgaattttaaagttagcatgatttaattagaaaatttaacctaattgtgagtataatctttcacaatagcaagatcactgtaaataattatcatattgagttcaccgttataaaactcgacaattacacttactcaacactatattttgattctatacgccttgaaaatccatttacaattgagaatttcaatccaaactaatgagcttgaactgcagatttcagcaagattcgccgaaccctcaagcatcgctcgtcgtaaaatctgcaggacatgttttgcgcgcatttgtaaatggaaaattcataggcaagaaagcgtgaactacaattgtcaagtgtttatttatttttcttttccttactctttttttatgtatactaacatttaggagctgcacatggttctcaccaaaatccaagattttcacttgagaataccattgctttaggtaaagggatgaactatatctctttacttagtcaaacagttggattagtggtatgaaatctcaaccacaatttctgaattttgttacctttttttgttatgttttgttactaataaaactgaattttataggattcaggagcttatatggagagcaaggttgctggactccgcagtgtaactattgaagacaatgatcttagaatttactcatggggttatcaggttgggttggtaggtgagaaactagaaatttattcagatgttggagcaagaaatgttcaatggaacaagtttggtagcttgactaatcaaacacaaccactcacatggtacaaggtatcgaatatcgattactagttctatatttaatatcgttttggactttctattttgtaaaagttactgatcagactcttctgttatgttaaatgacagattgaatttgatgcaccaactgggaatgagcctcttgccttgaatcttggttcgatgggaaaaggtcaagcttggatcaacggtcagggcatcggtcggtattgggtctctttccacacacctaaaggaaaaccatctcaaacatggtgaaaatgagttctctacattgaatgtgtttggtgttactttctcaatctcaatatattattaacatgttatttttttaggtacaatgttccaaggtctttcctcaagcctagtaagaacttgttgatacttttagaagaagagaatgggaacccacttgggatatctatagacaaagttttaagagcaagagcatgtggactagtatctgaatctcatctaccaccagtgagatcatgggtagaagagaaggaaagacaaggaaagaacgataaacaccgcaatctcaaaagggtgtcgccgtctattcaactccgttgcctcgggaaagacatttcccaaatctattgcaagctatggtaccccttctggtaattgtgaaagctatgcacaaggaagttgcatgcatttaattccaaaacaattgttgaacaggtgagagtactttctcttacattactaaagtttcaaagaaaatttcatattgatataaattgtttggttttgtaatggcaacatttcaggcttgtttggaaaggggagctgttccatctcagcaacaagtgaaaattttggtgatccatgccctggactatctaaaactctggtggttgatgcacaatgcaaatgaagaagcatataataaaaatgtaaacaaaatactcttaaggggattctttattcaatgtttttttattaccaaataataaataggtgtagtcttatttggttgagcttctgctttctgtttttagtttttcaaaaagctctttttcaaaaagttacttaaaccggcttctgttaaaaaaactttttagtagaggtgttcacggattggtttggtttggactttcatattttttgaaccaaaccagtataacaattttttgaatattagaaatcaaaccagatcaataaatttttcaaaccaaaccattaagaacagtttggtt

SEQ ID NO: 305689 - DNA, 3642 bp, Cannabis indica
gattttatttaagttgagtctagggccgagttctatttcggtttctaaagtctaagttgggatctaaatctaaaatattgatttaaaaaaactgttttaaaaaaaaataaaagtaatcttttttgtttttaaaattagagattcttaattaaaaaattaaaaagtaaaaatagttttatagaacatgattttaaaaaatatttttagttttttttaaaaaaaaaaactaattaaaaaaatattaccaaacgcatattatacttgctaaaacacgtgcctaacaaaatatgtaaataactggtcaatagacaagtcctattttcaggttgttaatttctttcttatacaagacttcatattaggagcatactataaaattttaatattctgttatgatcttcagcttatttaaagagagcctattatatttccaagttttcataatatatctcttgctttctcattattcttttctctgtttataatattttgttgagtgcagtgcaaaacaacaaagaaactgaacatgggctataatatttttataatttagtagaggtagttatactccacctaaatgaaaggcaactgaagtagtaaagggcctagtaaatggataacactgtagaattcagaagaacttaattcattccatagcttttattatttcggttccactcattttacctttatttagcttctttttaagatagggatagtacaaaccgtaggtaagaaactcaacatatgagaagatcatcaccactcaagctggttcacctaccagcaccgctttttcaatgcctctcaaggcccagatcatggttcaatagcttcccatgatatctacttctattgctagttgaatgccatttgtaaaggagccaattatcagtgtcaactgtcaagcctagttcagaacaagtgtcataaagtagttctctcttttattctcacattagtgattagttacttgttagttcaaaaaactggtagactcaatatacttattaagtaaaaaggaaataagtgaatggggtttgtcctccttagtagcctcttcatcagaatctattcacttgtggaaacatggaatcttatgtcaatctagccttgcaatacaaagactagaaataaataaattgaataagcgtacaggaaagaacaaatctgcattaagatcattactactttgatctagagcctaatttttaggcagtaaggaacatgtgtacagaatctcaactgtctacaaatacaccataaaacatgaagacacttcaaactcctatagcttagctagacaggtttccagcaggaaagggcatatattcgacgtcctttccatccttgcatcaaccactcgccaagttgctcgacaagaaagtccttgtggtaactcaattgtactttcttcttcactgcttcaaaggtttcctggtcaagtggagtctgcttgaagccagccctggcattccgaacttgccactgcttgtaggactccggcctctcgactctttccatgccctcacatgctatgatgttgtttatatctcttccatatattgctttctcaaactccatcctgtacctttcttcacggggtactgttgaatcaaacatatcaaacagcgaagagtagtgcaggagtgcctctctgaaccgtgtcaagaagaaaggcgcattatatgttccattataaacaccatggatgaaaagcgcagggtttatcttccttaacagctttaggacagtgtctctaggattgtttatcaccacagtttcatcaagtatgtgctttaaccggtacatacagttgacaacaacaagctcatctttgttgattttgagatcctcatagtggattgtttcccatttcttagcaatcatgttgtactctgaagggacattgaatctcctgcagtaattctctaaccgacgctttgtctcttcgaccctctcagtaggtcgaaaaccaggttgtggaagctcaactccagtcattctaagcttaggaggtcccccgggtgtctgtgagaggcgttggataagaccaggccattggaaaccatactgaataccaaaatcaatgatgtgaatggttttcgcattctttgctagtttcataattgttctgttagcaaagcaatatgacatccttaagaagggacaagcagtaatgtatagctggtgacctcttaagatatcaaccacagacatctcattgcttacaaggggtgaatacaagactttgctagtaccgaccaaccgcgcctcgaggccattggcaaaataatgagctaatctctgtgttgcagctccatcaggagaagaatgttgccttatctgcttgaacaagtctgttgcagttctttggtcatagcttgctacagcttgggcgcattgagtaagcaaagtccataaatccaccatatcagtcttgtctttgtcttgtttcttggaacgcctcattctacctgatctttttccctgctgcttaacctcatgctgctgctgttgttgttgctgctgcaacttctttgcaaattcattttcaccatggttgagtaacaccttatctaacatctcagttggctcaaaatcatcacccttcacggcggcctgcttggcactcctaacttcttcttcactgttaccatcaccaaattcaccctgatgattcttcttccccctttgtaaacagacgccatctttatccaaatcaatcatttgggtatttcccttttgaaagaatacacttgttgttggttcaccgaaaattggaccttgaaccaaatgggtatgatcaaaagaagttttgacagaagaggaaaagggcttagaagatacaacataatcacctttatcagaagaagatgggggataattctggccaagcacatcataaaatgacttctctgcagcttggagagccaaagggtcctccaacatcaatgactttcgctccaggtcttcttcctccatgagcatctcacttattgaattttgagcgtagcagtgaaggaatcactgtagcctggagaatctactaactcagaacaagagctcgaatttattcttgacttgactcacaagcatggtgttggtgaagttcatttgaataatcacaaggttgtgaaattccaccatggtcgttgtttattagcatctcttacataactttggtttagaatagaatggaattgaattgggctgttgtaactaaaaccaattcattgaaacaacaaattacatccaaagggaagtccataaaaaaaaaaccatctatatatatatatatatatatataaatatatctttaggaaacaaaacaattttggcagaaaactcgtgaagacagaaccaaaatacaacagctgaaaaatcaaaggacaacaaaaactacaaaactaatgtgtacacagtcaatcaaggataagagtcacaaagctagaagaaaccccaacaaactagtatggactaaaaacctaaaagggcttcttttttatctatatatatattatatgtggaattttacacttgcagaccaaaaaaagaaaagaaaaacatagcgatcatgattaaagtgtaattttttttcccaaagcatggatggaaaactaaagagagagagagagagag

SEQ ID NO: 305690 - DNA, 2538 bp, Cannabis indica
tattattgccaaaaattaaacttaaatatttatttacaactcagagttaaacttagatatgtatactgcaaattactctaataattaatagcagcaggagtgcacccacttctaatatttatgtcagtcttgaaatacagatattattagcagcaggattcaccggtaataaattaaaaaaacttaaaaaataaaaatcattttaaaataataataaattacaatatagtatataactaattaataaattaaaaattaactaatattagattaaatatataattaaaaaacaaatacattatttttataagtgtcttaaactaaatactatataaaatcactaccgtgattaccacaaaagtataaagaagggaaattaaaagagaaaatgttctaatggctttgttactaaaaaatttgaatgacttatgatgttttatgtaaaaaattacactttataactaaaattgtattacttacaacttttgtttagaagaatcttaatgaaaaattaaacttaaaaaaaatagaggagtactacatgaaaacatggtatatagagacaaaaattcgaagatacaaagaaaagtaattccaaattcttttctacaaaaatttcaaagaccctaagaaaatgtagtcagttttaagtgaggaaaatatatatatgtgttgaatagagaaaatttgttgagttgaatcacatttattaattttcacttttagctcttataaaaaaaatacaaaaattatgtactatatatgaatagtaaactagtagtcgttggtgttttaaattctattaaatatattaaaacaatttgaattttttgagtttgaatatttattttatatattaattaatttatatatttattaattgtagtttatattgtttgttaatatttaatcttatttattaatgtaattaatattaattttatttatttattaaaattaatttattaatcttatttgttaataatatctaactttaaaaaatttaaataacaacttcaaaagaaaggcattatcgatctatagaattctgagacaactttgaagactgcggtcgataacttaaaacaacaacttctcgactctactcaaaaaagctcagcaagaccttgacgaggctaacaaaaagctcgagaatgtcaaggagaacgctcgtgtaagggttactttggtagccaagtgttctatttataaagcctggttagtgaatccagacatggatctcaattttttgagtgaagttgccgaagagatgttggagtatttcaagctgacttaggaaaaaggagctggctctgacaaggaagatgaggccaagattgctgaagaagaagaagaaaatgttccacctaagtctcctactatgtaagcttagttttattatcctttgaacaatggccttttggtcgagaccatattaggcctttcgtggcatttattatgaatgtaattaattttattttgttttgttggatggctaactttactaaattaattacactataatttttgtgccattttaatatatacctgtttcctctattttgggcgagaaaactttaaatattttgaatatgttatatatttttgctcatgaataaactttttacataactttatcaaaacactttttctcaactttaagcctcgagtgagtttgtattggacttttttgatcgctattgtgtgcgcgcagtttatgctcaccaatttgttgagtaaagagcaaacttaaatactttgaatagtacttagactattttgaatattttttgattgctcgtgcgaatagttagtcctctattcatactttagcttgtatactatttatcacgactcactagggggtctcatttatagtacatgctatatgtgcgagcccttacttattcagatgacattagcttgatgttgattacaagacttttgatactaatctcgtttaaaattattattttcatttctactttgagaaagattctaattatttaactttatgttgttttggactagatttaatcaaatattttttttttatcttttttgcatgttttttatttctaggcattatcggatgaacctagttatttctagatatattgtcgagcttagttattatatttcatgcccccaaataattttaaagagaaaaatttatgattacttgaaatattcatctttattaaaatgaatatttcaagtaatcataaacttgtggtgagcattactattggatatagtggtgtagtataaaaattttcttttagtcataacaaaatgactaaaagtgaaatgttgtgtctaattataaataataattcctatgttgttactaaaaagtctatagctaaatgtattagtcacaaaaattacaatttgttgtgactaaaagtctatagagctcgtttggaacgccgtataattaagtcgtattgtattgtattgtattacattgaattggaatatatatcatatttttatataatattatgttaaactttaatttatactaaaatatta

SEQ ID NO: 305691 - DNA, 2955 bp, Cannabis indica
tttccattcttcatttgtttcttattaattttaataagaagaatatatcttcatcatgcatctctctcacatttccttcttatcttatattattattaacaatttcatttctatcctttctattaattttcaaaaacagtaatgatattgattgatcgtaaataaaaagaaagtagttgtaataattcattgtgaataatggatattgtccaaatgttattgaatgcgtgttaaagtttttatgtaatgatattttttctattaatctcacagagtaatttttcctcactggagtcgctttcaatgtatatatgcatgtaatttgtatggatcgggcccttcccatccaatcatgtggtatagggacctcaaagaggcttgttgacgagattttttgtaaatagatctaagaagataaacaagcaagatgaacacaagtatttatcaatcaaagtaatctcgtttaccaaaaagtaatttaacaaagatgaacatgaggattttatagtggttcaccccctttcggcggtaataggctaatccacttgatattggtctcaatgcttgaggatagttctccaaaattatgttctcaaagaattaagtcctcaagtgagttatttagaatgagagaacgagagttcgtgagaatgagttggagtcctttacgattgatatcaccttttatatagggtttcatctaggactcttttaaggtttaaaatctcttaacccaagacgcacatttcccaaactatagtcaagttaggtttaaaatacaaaatgataacaaaatcatatttcaaaataaatatctaaaaaataataaatgctgaagatatctttgatccacacgtgctagcttataatttttgtcacaaggagcacaagtatgttgataaagagcacatgctaagatcatgatggtaatgagtcgtgagaagcacctgtcaaggtaaggagcatctcagctaggaccgagagataatacttgttggtgagctccgggatggttcttagtgaggatattcccaactaatgacgagatgatatgttggagttgtcatctaagtttgggccgaagtagcatgttggggttgtcatctcggcttaggctaagatgatgcctttgatgttgtaccaagtggatgcacaaggaagaatgtcaaggtgatgtgatgaactaatgaggcttggccaaggtttttaaaattgtaatgaggtgatatgacctctcccatatctaggacaaaaattaatgccacatcatccttcatttttttaggataacaaggctattatcctatatccattcaggatggaatgagcaattgcattatttttttaagtaatccttcaagggaaggacaactctaactcagatgtgttctacactccaagcctcgatcttagaagaatcgcttgtgttatactttgcatccccattaaaacaatgagaatggtagtaacctttcttgttaggttgtacgtatcaacttacaaatctattcccttacttgatgtcgcacagtgaccatcagggaccaacatatgaggcaataaaagtgaccttggactgaatgaaatctcaaacttcactaaagggttttggggtatcttagatttacgagatttaggaggagacatgatctgaatatctaaatcacatggcaaaaaagcaatagtgacagaaggtaaaaataatagtttggctttgggaaactcaatcaagtcgggtaactaaggccaagctgcttctcgtaaataatgatacttaccctcaactatctcatctataaagtgcctatagtgagcaaaattatgggttttcacatttagaatctgaagacattttttctaaataaatgtcgttagattttgtaaaatttgaaactaaattcataataataagtatgaagcaatctcaatatctacttagttcaaataaaactataataaaaccatataaaaaaaacttataaaataaaaacacaaaaataattccataaataaaaaagtgttgatgcttactgacttttggaataaaaggtaaccttgatgatattcttcactgggaacctccgataccaagagtcttggtatgtaacgcgatctcaatttcaaaaaaatagtggtagaaacttgaagaaaatataagagagataatgtggatatgcgacagataaaagaaaaatcgaaaaggacactggagttttttctctatgacaatagtaaatgacaatgaaaaagatggataaagggaagaatgaaaaaaaaaatacttataagctatatctcgcgagcactgtttgattttccatgataatttatcaacggtgattaatctacgggtttgatgaaaagacgactgtaattgcaaattagagaaatttttcttagaaaaattaaaccataaaaaaaagacttactcaatacacataaaggacgttccactatccaagacaaagagtgaaaagtcatttcaaataaataagttctttttagagagcaattgttatactatgaattgcccatgcacgatcttctcggaataagttgatatttacaacattaaatgtgagacgcttaacataattccaatatgcaacttagggtgctaagcttgtgaaggcattcaaaaacattcctaatgttgatattgtaaatgttcagaggcttaacttacttaaacttgcttctgttcttcacctcgacaaatttaatcaatgtgttctccgaggagtatgccaccgaagcacacatccaagtattatcaagctccgtgaataatcaagcacctaggtagaaatacactacaaaatataaagaccaaattaaaatatggccgttatcttactttaaatagaaacaattgtatgttatttttcgcatattagttatatatctattctatttaaagtgtgcctatataactgaattcttggtttatgagaa

SEQ ID NO: 305692 - DNA, 1968 bp, Cannabis indica
ttatgtatcgaaacgacgtcgttgaatgggctgtggaaattccaaaggttgatgacttacctttagtaactctttgccgtgaacggagagaccaatcaaaacggcgtcggatcatcggtacgcactcgctgccgctcatgtaattattttcagtctcttaatgatattggaaacgactcttaggaaatttgtggacgaagaactcgtcgtctccgcctcttccgccgccgattcctcctctgttcctgctctcctgttctcacattgccttctgacgaaggcaaaaagagaaagaagaagaagaaacctggcggtgccggtgccggtggaggagagagtaagaattcttcttcttctactacttcgatttcgatttctcatctagaggaagatattgaggattctcatttgcatttggaatcttctggttcggatttggattctgaattggattctgcctccggtcacattcatatggaggatagccatagccatagccacggtcacggtcacggtcaggggcagggtcatacccatcagaacccttatccttatcctcaaagctatcctcagaatgattattgggcttcttctcagattcctcctcaaggaatttaccctcctaattattgggcttcttctcagtttcctcctcccgtaacttatccacctcctcagagtgattggaattctcagattcataacgggaatggagttaattcctacatgtattacgccaaaaggtcagggacgaacatacaatccagagtctatgaggagcctgaaactgaaaggtatactactagtgcctcatcttatggctacactagtaatccactgtacggtggtggcggcggcggtggtgggttttttggtttctcaatgggttcgccgccaccgcagcagcagcagggtccgccgccggtggtggctccgccttccccaccgagagtttcaacttgggattaccttaatttctttgatacttatgataacagtaattattcgggtatgagatacgggtacgggtcgaatacgagtagtcctgattcgaaagaagtgagggagagagaaggaatacctgagttggaagatgaaacagatgtagaaagaatgaaggtgagagcagctactaagacaaagatgaatcctgataataataataacaatttgggagtgaagaagaagaagaagatgatggatgaagatgttttgaagaggaataagaattcaggtgaagggacttctagagctgctgctgctcatcatcctcctcatgtaccttcttcttcatcaagttcttggccaactaggagcaatgatagtccagaatctattccagagtctattcgagagactgagattagttcagaaacagttgatactagtgtgttgtcttctaagagtcctcaagaagaagaagaagggtattctactaggaagaaaggagtgagttttgagattgatgaatcacctaatactgaagttgagtcttctaagatgagtagcttgactacattgtctgttcatggtacaagagatcttcaggaagttgttaaggaaattaaagatgaattcgaaactgcttcgggttttggtaaggaggtggctgtgttacttgaagttggcaagttgccttatcagcctagagccacttcacttaaaggtataatttaattttgttttattttgtttcttatgatcttgtttgttattgctttttgaaaaatgtctttacttaaaattaaaagtactatttaagattagtactttcaagattaaagtagagattaatatatgaactattaaatttgtgttgttataggtgaataaagttgaaagagttgtggacccaaatcagtctcaagtttataacttcattgcttaagctaacttccaaatatgcatttattagcttgatcaattgaaacttatgatcttctactgtgtagtgattatttccaggat

SEQ ID NO: 305693 - DNA, 2911 bp, Cannabis indica
aagtagtgcatttattgtggtgtaaattttacatcatagcaaatgttgtgtaaaatttggtacaaaatttactatgtgccaaatttatatcactttatagtacactattggaacacatattttgttaaaaattatattttaattttttactacttatttacacttctatcggaaatgctctaatcatacatttaaattcatatgtcaataaaataaagagtatgactatttgttacattactatagtcataaataaataaagacaatacaatcaatcttatcagctatatttctatgttcctctacgatggcttttgacctagtcaccaacatgttggtcgttttttggaccctactagtggtttgaactttgaaggcttgttttgtttttgttttcataaaataataatattttttttacaaaaataaaataataattctagttttaatgccacttggtgaattcggtcaatgtcgacacatagatatattttatatttgatttctttaaaactataaccttttatgttttatgcgagcttgaatgtaataaccaaccaactaacgtggtcattattataaactcaatattattcaaaataggttaacttctatactttgacaataagggtccatgttcctttcaccttcctaaattcttatttctggagtgcttcagtataagaacatccccaattgagaaatataaaaatgggaatcaagatctctctccaattaaaaaatagtgtcttatattctattaaattaatttaaatttaacacatcaattaattttttatttattaaaaaattaaatttttaattgagttaacaaaagtaattaattaacatatttaataaaattaagttagttgatgtgttaaattcagattgatttaatatagtatgggacactactttttaactggaaatcttcattcattgcatgcatgtgttatgaactaaccctatcaacactagtatgttaaggtatagagtgaatatggtaaagtggttaggaagtacaaaataactctaccaacactaatacgttaaaggtacttagtgaatgtggtaaagacgttagttgtatttcaaaggccgggtacaaactaatcctactaacatgagtaccttcggggtactgagtgaatatggtaaaaagattagtacttacatgcataatgatctaaccctacctatactagtacgttacaggtattgagtgaatatggtaaggttagtgcttcgggggtacgaacaagttgtactcttgtcaagaatgttcgagactcgtacgcgttggccgcgtgactttactttgtaattgggtgtatggtcacctaagttatgaaggcagtatatgtatatgctttttttactgagtctatcaagtcacatatatgtgcatcctgtgtaggtaaattggcaagacaaaaactgaataaacagtgagtctggagcttcataaagattgtatatattggaacggttagacttggacggttcagatcttcggaacatcatgagttcgattatattagtcactgagcgacatctcttgaactgttgtaacttgtaaacattgaagatatatgtgatttctgaatttgtaaattttatattttgtttatatttgattgtaaaattttttgttaatcatgttttttttactaaactctttgattagtaaaagatagaatgataatttaaaaattattatagcgtgcctaaattaatagggcattataaccaaggactaactgtttcactaaatatttaagcataaatattattgtagctaacttatttatataggcatttaattgcaacaaattaaactatttaaattcttataccgtaaattttcttattagatttcttcttgctttcacttaaaagttgtaccattattatttttctaatattttgaacaatgacgttaattttttagtttatttacataactttgtatataatttataagtaaaaccaccatttatttatgattactataattaattaaaccaaaaggttgtagagtaataataataatatatcaatatatgtggctgtaaagtaaaccattgtaaaatctataataataatgattttgtatgtgaagttaaaccgacaaatctataatactgttcggggtccaaaagttaggtcattggaaagtttttgactaaaaaatattcgagttagtattattgttttttgagagtgctaaggaggctatttttaatcgggtgacatgtgttatctcttaaccattagttaaataaacaattatacctttatttatttttttaaatgaaaaatataaaattaaagtgcatttaacaaaatatataaatatttctctcggattaaaattaattcaaagctttgtactgaacatataatactaataagttcgttcacaaataataaaagaaattgataactgtagactgtagtgaattaaattttctgttatttatttttgaagaataattaatgtttctcacgaaagagaaaaaaagaaactaaagaaataaaaatattgaaaatatgttattatgaaattaaagttaaatggtggtataagtaatgaaaggtttaaacggcataaacttaatgtttataaatttgtaacggacataaatttaatgtttataagtttgtaagcggtataaatttaatgtttatttttagcactacataagtaattaatatttgtaaaattgtaatttcttctagtttcatgagtagaaattccgttttaaatttattaaaagaacatttataagtaaatgatattgcatatatttttgtttagacccaataatctaaaatttgaacctctatatatgtgtcatatttaagacaataacaaagtttgtattgataaaattagaaaaaaaaa

SEQ ID NO: 305694 - DNA, 1007 bp, Cannabis indica
ggatgaaaggggtgaattgtgccgttactttgcccgtggccccaatggacaacagtataagtacttccctcgggtacatggaaaggaattgaatctgagcaaccaattcaattctcttcacacttgtgaattgtgatccagttgaagactactttgagggaagttgccactaaaatgctctgaatgaacactcccacaatgggtcattccaagatgatccagagttcattctagaggcctcactagggtttctttcacaaccctgtggccaggagacaactataagacccagaacgaccggagcataaaattgacctggaagaccaagagatctgtgttagctcttaataaagaaaataacggtggaagcaagaaattctagaggagactctactctagtaaccaaagctctgactgggatgcatatcaccatccatggggtcaaccagacaaaatttgacaccttggcagctttagtgaaggggatcacgactcttatcttgtctgaattcgaacttgatagagaacgacactcaccactctctaaacaaatcaaagctcttcctattcttctaaagttcaagagcctttcctggaataaatacactgggaaggaagatttattatctcacatccattagtttaaagtgtagaccaatctgtaaggtgtgagggacgacttaagtttagaatcttccctaccacactgacaggcctagcttagtggtggtaccttaaactctcccctggattaatcgactcatggaaagatctagtggatgcttttggtaaccagttctctccttctcgacaatgtcagatcgagcccaatgatttggtggatgtcaagcaacaggaagatgagcccctcaaggactacatccaacgattgcacttgcaactgaactcaaggggatgagtcctctgtggtctgacctttgtctaaagacggtatacaccatgaatgacatcttagatagagtggatgactttatcaaactagaaga

SEQ ID NO: 305695 - DNA, 3225 bp, Cannabis indica
tataataattattaaattagaatgttatcttggtaattaacactctttaacatttctagtgtgattaatgcatgcatacaagtaataataatgtgggttgagttgagaccgtattgtgagacgtaatagaatagtaaagcatatcatcaagatctcagatttacagagaatatacatatttaatattcttgtctgtattgccatgcatgatcttcagtgtcatatatttttttttttttgaaaatgcttcagtgtcatatttaatagatactccattatcattagtattctgaaacatgcacataaatggctcatgaatatatatgataatattcataattatgaaatattattattttatataaatttagtttatgttagaaaatagaaacgtaggtgaattatatataccaaaatatttactataggaaaattttctaattacacatttttttctctttgaagctgacacttttataacggatgaaaattgttttagcttgttagaatggagaagtgtaattgagaaagtaaatatgatgagatgtatggcaagatatatgaaatttcataaatatcttaaaagttaactgataattgataatgaaatagaatagttcatgtatcaaataaatactattaactttccaccaataatcaagatagtaatctttaacatatttagctaatacatagagtttaattctcttatctatttaaactttaaatagtacaattaattaatgtatacaatatataaaatgaataactactaactacttatataagactagatgttcataattataatcaattttaaccttcatacatgcatatatatgaaatgtgaatctaattatatatattgcttagctaattcataatttccttcatcaccaaagttctagccctattgatattcacaagacacaaataaacatgctccttcaactcctccacatgtcttctaaaccctaaatcacccttattaataacatctttaaccacctccaaacaaaatctatgctctctcctctccaagaaagactccaggattgtcttgttgtgctcaagcccattttgaactcgcaccatgagcctgctcatcgtgtcgaattccctatccaagatataagttcctttagctgctaaatcaagttggtctccaacttttctgagagctccacttctcaaaaatggcaaagaggagagtttacccgccgtgcgcttaatagggaagctaaaaaagactggccctacaaaaacaaaactagcagcatgagctgctaggggtatgcaaattccaaaacccttttggaagcacttgataattttgatcttctttgttactttctttctcatcgatttcaagcgatgcaaaatcgaggaacacttctcatgaatcagcttgaaaccgaacttgtttggacttgaaaatatcgagtaatttagttctgaaatgatcaacttgacatcatcaccatcgcaatctataattcggtcgaacacttgtgttatgatgagaaggtaggtggattgaatttggttgatgcccttgaggagatggctacaaaatttcgaagcctcagcggttatgtcgaagtagttgagtaaaagggttttcaattgaggtatatttttggagagtattagggttgatgatgattcaagaatactaggtatgaattcttggcttggttctagaagagtttcaaaacatttgttatggcatgaagaagaagaagattggtgattagccttgtttaaaagctcaccaaaggatttagttcttaatgcattaacatactcctcattaattacgtttaagcttttgtcaacttgtctcgattccttctcaactaaacctgtttaattataatatatacatatatatgcatgatcagtttttatgtatattcatcatgttaatttatacaattacgcacgtctatataatttgcattaaacaagaaaatactaaaaataaataattaagtgaaataaaaatatatctctaggtatcatatttgtacatgtcttgaaactcaagtttaattattaatgatcacaactaattagaagcaacaaataaagacgaattaataatgtacttttcatatactttttttttttgctttatgatcaaaataaattaattaaaaatgtatttctctccttttttttcctgtaaaacttatatatattgatagttttctctttcattttctgggctcattttcatatataatatacagattaatattttgtatacgtatagatattatcaaaaggaatatatcattaattaaagaattaaaaagttattataattaatgttatatataaagtactacaatatatataaggcttaattggaaattatatggattatatatatagttaattataacaactatagcatatatacctaatttgatgatctttgaaaacttcagctttgcccacatattgagctatcaatcgatatgaataattcttctataattatatatgatatttgtatatgttttacaaaagaatatataccctagttctcttaaggaaaatagagattttttcacaactctctctatattcttttaattttttttttatggaaatattctttgacttgcttaaatatatagatacattgctatatgtatatataatactataaatttatataagattgaatgtcacgcagtctatttgataactcttaaaaattaatgatctcatccatagagatgcataataataagtttgcttctccaagtaattttacaaaattcaaggccaaatttcctaatttaaagccaatctctttttcttttcattccttttcttcattaaatttgttacatgtctccctctttttcccctcttatcctctttaattttgtatattgtcgtcactaagttgtacaaatttgtaagcataccaaataaaaagggtgaaaaagtacaacttatttaatgtcttgtagatatatttctattccaaatttgagataactatatgttgttcatttataagacaagacattattaagagccacgtgatttggaataactttttaagcgcgctaaatatcagagatatgtatatggtagttaagggtggccctggctccatttaaatataaatatgccactagaataaatgtaacgtcctaatattttgccttattttataaagtgctaattttgatgcattaatta

SEQ ID NO: 305696 - DNA, 1449 bp, Cannabis indica
atatttccccgaaaatgaatagaaacccattaattcccatcgaaagatggaaccagttgtcacatatataaacttgaaatgtaaaaaagagaaaggtttgtaaagttcgaacctggtcgaaaataccacgtgtggcggtctctttcaacaattggagcaaagagaaggcgacagagccggacaaggcagtggcaacgacatcagaaacgacagggtttcgggagaacaaagcggcggagggtaaggtcatagtagagcgacgtttaggtgtgaaggtagtgaggaaaggcttcttagaagaagtataagcagagaagggttttggagccaagtgatgataatggtcaaagacaaacacagaggaagaaaaagaagaagaagaagagtacagcccaactccacccaatctcattccaacaacactcctttaactgattttaccccaaattgtcaactcttactggtaagggctagcctattctctcgaatgtcctctgctactggatacccatattaatttaagtgttttaaatatgatagcatggtcccaaggtcccactggttccaacaaacacctactagtttcatagatcagttattattgtttttttttctctttcagaaaccctaatttgctgaacaaatcgttgctttgatttctttattcttcttcgattatcagcgttggcagtaaatgaagcttacgaagaaggagaagaatatgagaacttcgtaggctccgaaaaaggccgtccctgtgaacgtaaagaactggaaataaggacgtattgtgacgggacaatatctttgagagaattactggtcctctaagttgtcgtattttaatcgctgtaattaataacttaataaaataatttttaaaaaatatcaaaaactaatggtgagatacacctagtattagtcatttaggagtatttatctaatccaattcacactatgctcataatgcatccaatctgtactaaatttaaatttcatattttgaattcaatctaatttacataataattcaaattcaatctgttatctagaatttttcctaaaatacgtggtgattcaagaataaatcaggtgacaatagtgttagaatttataaaacacttaataaatacaaataataataaatccaaacctatttcaaaagtgctttaatatagaaaatcctaaatcacattttatagaacatttgctaaattaagtaaaaagaagaagatggtgataataagatgagcggaaacattaacttgaatctattgttggggattgcacaaaagattatgatgttccaaaaatacactatttctctaaaatattctctgatgggaagggagagaatacattcttggaaccgctacctatttataggctcattatagaatgagtctcggatatttataatttggccccttaacaaattataaattaact

SEQ ID NO: 305697 - DNA, 5408 bp, Cannabis indica
aaaaatatctgttttgcaaaaacgtaccccggcctctccttggatgggttcaaacaaaaatccagctatatgatctccattttctgcacttcacagcaatcataagttaacatataaaataaattgacattacaaagatatctctatataaaatttcccctctttctcaaaattgaaaaggcaagaaagcttagagaacacaaacctttaaaagctttttcaagggcttctaaatcaccaaaatcaactttgagatgaccaggcaataagggtccaaaacctcgggttgcctcattgtcgcagctcattgagatgacacccaacgtacgaccatggaagcatccacagcatgacacaatgatagcctacacatattgtcattgtgaataagagaaatattatcatagaaggatagtcttaggcataaccatataaatttcttaacaattaaataaatgcagataggatgaggacacaagttccgaatactaacatgattaggattttcaagatactatctaaacaaaaactacaaggttcttcatatcagcaactggataatttgtcttcaataagcatattcaaatttaacaccgagtgtttataatgagcaggcaacagaaaaatccataactaaacgagtttaagaacagatcaacgcaaattggaaacttaaatgagataaattaaacctatgctccacacaacagctaaataacagcttaactcaatcattgtttataaaggtcagtaaataaccaagacatagagagatgaccttgcatctgttgtacataatctccatgaattttaccttatcatttggaattttctttttctcgtaaccccatttcctggctaacttcagagctgtttctacaccttcagcaccagtgttcataggcagaaccatgtcatatccgaacatgtctgttaggcgctcagcaaatatcggaaatttatcattatagaatgctcgagagctaagggtgagcctttccgcctgttcttgtaatgctttcatgattttcggatgacaatgtccctataacaagaacttatgaaataagaatccataaaaactcatatgaaaaacacaaaaagggaactggaaatcgatataaattcgattgaattgaacatcagtaaattgtctgccttacatcttctatgaaaagcaattgtcacagtaataagcaagttggctcagagagaaacaaattcagtgatcaagtaacaaaaatacacataacaacaaaaattctcaatcttgtgtacctgattaactgcagaataagcagagagaaaatctagataccgtttgccttcaggatcccatatacatgatccctttgcctgagagaacacaactggtattgggtgatagctgcataatttcaacaagtactaaaatgtcttagacaaatattaatctattagcaacaggtgctcaattagattgctctagcagaagaaatttacatacaagaaaaaccatacacaagataatgtaaaagtggaaacttcagaacatgaaaatgaaaatgacacaagttgaagaacaaaaaatagtaaagtctctctctctctttctctattaaataaacaatttagcactgaaattactaagtccaatatcaggattagcattcaaaatcatcatcataataatctttcacaaaaaagtgaaatttggaaaacaaagaggagccttttgctcaacccaagaacactcaaaatcttgcctacccatttccccaaaacccaaaatacgctaagttatcaaaaaaaggtataattcagagaaaacccattgaagcataatgagagagagagagagagagagattacttgtgagcactgaactcttgttcggagttgatgaggtcttgggaggaagaagaagaagaggggttgggtttagggagaccagtaaaattcctggttgcagtaaaactaagtctgcccagaacatgattcagctgcaaacacctcctatacgccattgatgaccgagagccagagagaattttggtggggttgttctttctcttctaagaaataacttcaatcaatgaaaaggcgtaaaagattgaaactttgaaatggacatgtgttgttggataatataatattggtatttgatacgatgatgatgatgatgatgatgatcacaattcatatgtagtgtcaagtcattcaattcagagcaaagcaatatttttcattattgtcgtttttcagttacacttcccaaagcaaccattatccatatttcccctccaattctattataataatttagattatgatatgataatttaatttaataagaaaattaaatgtttttttttttaaagaactttgagttcattaattaataaaagagatgggaattagagggggatctccctccccttgatacaaacatgctaaatcactagctagcctagctttcttagctgcaccatccgccacaacatttaaactacggttgatgaagaagaaattacaaacttgaaagttttttgagacattaacgattgagtaaaaaatactagctatcctccaatccggaacttcaacagaagttaaagattggactgcaatattggagtctaacaaaatatgaatctgatgccacccgagttcgactgccctgttcagagcaagaaaaattgcagaaaattctacctccagcgcggattgagcttggatcttctgagctttgacgaaccatgtgccattgtggatgtccacgcttactgctgcaatgccggcacctcctttaacccaagaagcatctgaaaatattacattacaggctcttgctacaagcacctagggaggtagattttcaggcaaaatcctggcatgattagtatctaagttcgaaggagatggaacggtctgaaggtcccgaatctgcaatttaattctgtccaaagcagctacagcatttgcagatgtgttccgaatgcataaaccattcctttgttgcaaatctcagaacagatacaaccaataatgttcagaagctcacttctactcatactgtggtccttaaaaagatcaatcaaagagtccattaagtttatgaagtcatctgcagggatgtcttcaattcttaagggtaagatacccccaaaccaaatggcccttgtgaaactacacttccagaataagtgcatcacattttcttcctcagcaccacacaaagaacagactttatcctgcagaaaatgtaaccgactcttaataggaattgcatcattaagaatcctccaaagaagaactgagactctaggatgaattccgacatcccaaatccttttccaaatcaattttacttgatcaaagttctgagcattctccactagataagcgcctttaacagagaaagatccttttttattattcttccaaaaaatctggtctgagtgaggtgaaggaattctcgggatattgatgatacgattccccatttcaataccaaaaatctgcaaaataacttcctcattccacgcattttcaatagagacgtctcccaaggttttaatggtgtgtcctctacttcttaaggcatgcatcagaattgtgaattcatggtattccagccatggaatccatggttgatgccagaagtttatcgaatgacccgaagctgcaattgagatggaacctttaaggatcgtttgtctagagtccaaaatgcacctccattgaaaggaatcactactccttggcttgacactccaaaagctttcatgtttgcaatatttagcaagtaaacatttaacccagggacgaccttcctgattagcaagactccacgccaactttgagagtaaggcttgattcatgtcttcacactttcttaagcccagaccccccgagaccttaggttgacatatcttatcccaagctttgagtgccaaatacctactcttttccacgtttcctagccaccaaaactttctcatcaaggaatcaagttcacgacaagttgagagaggaatttttgaagtagacatagcatacactggcatagctgaagttacagacttgattagagttaaacgccctgcgtatgagaggagcttcatcttccatccttccaactttctcatcaaactatccttgagcctcctgtaatcttcctttttccttctcttgaaaacaaagggattacccaaatgtctttcatcaccacgcacttggtctatattcagtatactcaggatttgatctctccttctgccattgagattcttggaaaacaagatgcttgatttaggcttgctacacttttgacccgaccaatcctcataggctgagatacaatcaatcaacttctttgcttccgattcgttcgcacgagcaaatagaatcgtgtcatcggcgaacatgagatgagaaactggaggggcttaaatgttgtttgttacataactattaaaaattagaatctccctccctcaatgtaagagaaaaaaaagtaagacttttatttttgaattttgacgtataatatttgaatttttttgtcaaattttattatagaaatttgacgcaaataaaaatttaaagaatacaatttagtacaaagataatcgttgcgtttgtaaaattgaaagtccttgaatttacaatctcataagaatttttaaaagtgtgaaaaatttaaaagtataatttgatacatgccaaaattcaaaaaacaaaatcctaactaacctttaaattaaattaaaaacgacacaaaactctctaatttaatgtccataaattatgttagttttaatcaaataagatatgtatgtaaaactttttgtggaaaaaattgaagaaatacatttttttttatagaaagaaatacatttaatgcatgtttactaaactaaaattagaaaaaaaaaattaaaatttacttatcaaaaatatttcattatattatttactgatctgactggaaagaaaattagaataattttattttatttacatatctagaaggtaatcagaatgctttaatttactgaattgctattgttaaagaatgtaattagtttttagttaaatagcgatataaatactcaatgttttaagtttgtaagtggcataaacttaatatttctttttagcggtataagtattcatatttgtaaaactgtaatttttctctaattttgtcagtacagactttgttattgtctaaaatagggcacatataaggctcagattctagatcattgggtctaaacagaaacatgtagtttcagtttctttcaaatattattttaattgattcaaaatgaagtttgtactgatgaaactggagaaaaattacggttttacaaacattgggcacttatgctgctaaatataaatattgggtttatgtcgct

SEQ ID NO: 305698 - DNA, 1278 bp, Cannabis indica
gttcggatctgtgatttatatatttcttaagtgttttataaaacctaacaagttagttatctgaattattgcttgatttgttgaataatgaattgatttggattctagaatatttattattaatagacttttacatacttcaacaacaaccaaatcttgccatacacatataacttgatcatttcttatggtaaaattgatttgattgtaatttcttactagacaaaatcagaactgcttcattctattttttttttcttgtacgataaatatggcaagttattttccatttagtttgtcttggtaatttatttcctgataattgaaggcgagctgtgaaaattaaggtcgttccgattttgatgaggattgccgattctgaacttatagctctatagaagttctaggtctactcggtaaatgcaaaaatgtgtgagattttggttagacttttgaagaatgggagcaccaggggtattcaatacgcactcctaacattaaactccttatgttgatgaagcaacatgtctagaagccattgaacaaggagttttggagatttgtattgattgttggatgatgataatgagaagattagaagaaatgcttatttgattctggttctcagtggaaattagtgaaagcaaaggaacttatagtggaaactagaacaagcaaaggaactaatagtggaaactacttgaatatgaagctgaggtgagtttggtgggaagtttgccgcgtgaaacaaactattgggagaaaaaatattgttgaaattttgccgacaaaagtaaaaataagctttatttaaacgatgtattttatgctagtagagtttttaaaaaatctttgtcgatgcaattgttacttttgccggcgagcttgaactttgctgacaaattaaagttctttaaatattacgaaccttccccttcttccttgtttctagttgtttggactactacaaaattgactttttgcatcagtcaacaagtcatcaacactaaaaaccgacacaaaaagtttggttccaaattttacgtcagttgcttttgatgctactttgcatcggttgaaaattcgatatttttagatattgcatcgattagaaattgacgcaaaataacgtcaaataaaaaccgacgcaaataaattttcttaaaaaaattagtaatatactaaatgggtcagtgctatacttatatctaaccctaatataccatataacataaaaccctattcctaacatagtctccccttcaactctctctctct

SEQ ID NO: 305699 - DNA, 2417 bp, Cannabis indica
tactcctttctcttcttgtttttgttcagctttacatagtaggaggtgtcgtggttcagtcattttgggtggtgtgatctattgtgtggttgccaagggaaggggaaggaaggaggtgcttctgccctatcttcgttgccatgtgttagagaataggttctagagtagagttagttcttatttgcctaaatcaaattctttgtcgtccaatcactccttatttgtcaaattagatgaaataactttcttccatgacgccatcaggtttttgctccaatcaaaggtaatcatcttctaaagtactttgatccttcttctactccaccaaaagtcaacacaattgaagatgaacactcacgaattgttagtcctgaatttcttgaacatgacattcaagacagtcttcttgtcttctagcttctctcgttcatgtttgagaagattcttacatgcatggttggtcgcaacacagctgcagagatctggtccagtcttgaagagtattactcatctctaaatcgagctaagataagtcagtttaacactcaattttgtcccactcgactcacatgtaacctcactaattatctgctttagatcaagcatcttgtcgattctttaccttcaattggtcatgttcagtctcctaaagatcacatagaggaaatctttaatggtctttcgcgtgagtactctgttgtcatcactttgttatccactcggaaagatgcatatactattgctgaagttgagtccctccttatggcacaagaagtgcgagaataacaagactctgagcttgatatcttcaaacacgaagtgaatcttacagctcaaactaaatccacaacactaagacccactcttcctcctactccttcaccaagcaatggaggtcatgttgcctacccaccttcctatagaggcaatacccatggatttagctattctggcaccttttccccaaatccatatcctccttgtggtggacatcgtggtggctactgtggtggtcaaggatatacaactctaaaaaatcaatgtcaactctgtcacaaacagggccacattattacacaatgtttctatcggtttgataagtctttcactagcccagaatcttttcaatctttccctagaattgctaatattgttgatatacgggctatggtggctacacctgcatcaattgctaattccttagggtaccttgactcgggaacaacaaatcatctcattaatgatgccaacaatctcatgacatctcaagaggtccaagctccagatcagatctacatgggaaacaactcaggtttgcatatccaacatattgatcatactactctcacttctccttttaattcccaatctcttcatttaaacaatctcatcgatgtctctcaatttctagggataacaatgtcttctttattttctatcctgaccattgtcttgtcaaagatcaggtcggtatgaagagtttattggttgaaaaagttgagaaaggactataaaggtttgatcaatgcctttctactccaaactccactcatgtacagtcaaagccctatgcatttgctttttctgattgcatttctaactcccaatgtttcaatactaactctaatgtacctctattcaactttatattgtgggataacagattaggtcaccttgccaaaaatatgttctatctatcatgaacaattgtaacatttccaatagcaataaaactatttttgatctttgcactgcttattatcttggtaagcatcataagcttccattttccaattttgaaatagtttatactgctcctttacaattgtcacacacagatttacggtgactagcccctatagactcctcaaatggatctaggtactacataagttttgttgatgcctactctaggtattcatggctttatctacttagaaccaaagatgaagctttacctaccttcacaaaatttaaaacacaaattgagctacaacttaatctcaaataaaagtcattcaatcagattggagttgggaatatagggctttcgctaacctgttaaaaaccaatggtattattcatagagtttcatgcccccattctcatgaacaaaatagagttgtagagagaaagcataggcatattgtggaaagtggtttaaccttggtagctcatccctccttacctttaaaattatgggatgaagcttacagggctgctgtcatcctcattaacaagttacctactagagtgttaaataatgctactccacaagaaacattgttccataccaaacttgactattcaacccttataacttttgggtattgatattttccgaatctcaggccttataacaaaaataagataaattataagtccatacacaaaaaggtgttagaaattattttacc

SEQ ID NO: 305700 - DNA, 767 bp, Cannabis indica
agaatcaccctatatataatttactctttcattttatattttttggcatcctcactgattatgagctcttaccttaattttcaaaggccatcctcattatttttgtagtgtttggtaatttaagatgtcttttatttatagtggcttatgtatttttctttaatttattaagaagaaattgatttcattaatcacaacacaagtaaaatacaactaaactatataagataagggctacataaaacttcccctacaacaaaacgaggagtacttatctatataataatttttgtataaacctttgttcttgtaaataatgctttctattttttataatatataatttttgaataatcatatttttaatttttatctctttgagtagactattttctcccatccaatgggcatttggtactgtgcttatttttttttattttttttttataacagttggtcataattaagaaaaaacttaaagaaacataaatagataaaataaaaatcatgtacatacacatttattatatattaaaaacatcattaaggtcccacatttctcaactaataattctaattctaataagagttcactatgcacccttattttgatgagcatatacacgaagttatccactaatatgcatgtcatataactattagtaatagtataattatttaattaatagtgacataattaagggtaaataccattttggaccctttgttttgcaaaagtcgtagattggaccctgtgttttgttaaa

SEQ ID NO: 305701 - DNA, 1588 bp, Cannabis indica
atctccgtcaactaccgtctctcaccagagcaccgctacccttgtcagtacgaagacgggttcgacgtgatcaagtatcttgacggagaaggaatcctcccggaggaagccgacgtatccaagtgttttttagcgggagacagcgccggggccaacctagcacaccacgtggcagtgcgtgttgcggaggagagtgcgagcttgaaggcggttagggtgttgggtttggtgacgatacagccgtttttcggaggtgaggagaggacggcggcggagctacggctgagatcggcgccgattgtgaacttggaccggactgattggatgtggaaggcgttcttgccagagggttcgaatcgggaccacgaggcttcgaatgtgagtgggccacgtggcaaagacatatcgggtttgaggtgttttccgaagacgctggtgttcgtgggtgggtgggacccgcttcaagattggcagagaaagtattatgagtggttgaagaaatcggggaaagaagctgagaagattgagtatccggatatgatccacgctttttatttgtttcctgagattcccggttctcaccaattgttcacgcaactcaaggatttcgtacttaattgtatctctaattccaaataaaacctaaacttacagctagtctctgtctccaacattatgtactacgtactcgatcagattgaataaattaattattgcattgtattaattgcagatgtttttattttaattatcattatgaataataattatagtttttaattattcttattattcttcgatgtggacttatatcgcttcctcttttttcttaccagtaagttcggcattgaatagatgagacgaaattgtacgacaaaatttagggattggtgagtgaaaagtgtggagggtgggtgggtgtgttgagtaaatgccacttaaaaataagacaccaggttggtttgttatggcctattcaattatatttcgtgcaatattttttatgtagaattatttctagtattgatttttattggtacatgaatatataatattttagtataaattaaactttaacatagtattatataaaaatatgatgtataatctaattgaatataatacaatacgacctaatacaacgtaccaaacgagtcctaaaagtatgattgaatgaaatttttggattgatcggactaggttgttctctttaaaatgtttgcggcactactcaagaatgtggaaacagtggaaaattatcgtcgaaatattgctgcattgaaattctattgcacaatagagaattgttgaaacactacacccaaaaataatgctcgaactacttatataatataatcataaatatattgtaaatgtttttttttttgtgagaaagatatattttttccactggttctgatacattatataggggatacacataaggtgctaatgagaagaaatatgttgatcatgggaacgttaggtgggatcatgggaacgatgcttaaaataaggaggagggaaacatgtccctctttaccaattaattaaacaagtttaaaattattttaattaattaaataaa

SEQ ID NO: 305702 - DNA, 1292 bp, Cannabis indica
gtaaaataatttccaacagaaacctcatctctttgtcttccaaaaagcaacaggttgtggcaagatcaagctttgaaagtgaattcagagctttagccagcacggctgctgagattaaatggattgccaatcttttatccgagcttcaagtttctatctctcacccacctgtcatttgggtagacaaccaaagtgtagctgccattgctgcttccacgccaggtcaaaacacattgaaatcgatttgcactttgtaagggatcaaattcttgctcattctctgtcagtcaggtatgttcgtgctgtggctagggtggtcgatcttctcacaaagactctctcaatagacagatttcaataccttagaagcaaacttcaaatggatttcacccctttccgtttaagggggggtgttacacataaagaattagttagttagttttaattttcttgattagttgtaacagttgtaacagttagttttaactaactctttttcttttcagtaactattcttgtatgaagatccctataaataaagttctcagctcacttttaggattgagcttttctctgctattctttaatctgttttctctagttttctctctggtttttaccttcaggttttgcctcaattgaagcttggtaaagcttctacaattacgaataaataacaacatcattcttacatgattagagagctaattagccttagtccacaagtcaatattattatgataagattggaaaagccttaggatttatacaagtgttttaaccctaaaatttgcctgagcaattgaggaatgaaatgtcaaccctgttgcatgggttggtgttcctatatttataatgtcaggtttcttatttgttttccttttcccactgatggggtaaataaatataatatactaaatttgggcccatagcactaattgtaggttgatgtggacgtcacatcatcttgatagttattgttaactcaatatttgtcctcttggcgtggatgcttacatgagaaaaaatcagtgccacgaggtaatacagctcaccaataagaaggccaagttagcacctaagcaaacagagaccccaacactcaaatgggcatcaagtgacaaatcagctccatcacaggagctggtgggcaacccctgccacccctatggccggccaagacaacatcctctggactacaaatttttccctaagaacccaactgctgggatttattttatcaagatctagatatacaaagaagtatgttaaatttgttaggttttgtgccc

SEQ ID NO: 305703 - DNA, 663 bp, Cannabis indica
tccgaagttaggtttgacaaaacacctctgtgggtgaatatcgaaagtattccccccttctactggaacctgtcaaacctgaaagaattggcgtccaaattctcccctgttcatgagctgctaggtattaaggacgatgtgggtcttagcactctgaggtttcgggcaacgatcgacctcaataagccaattttctcaggattcttccttcgtaggcagaagcttaaagacctttggattcaatataggtacgagcaacttccaaaactttgcttcaaatgtggaatgctaatccatgatcaaagtgtttgttttaaacccccacggtgattaaagacgataaaggcaccttctacccaatgtttgggacctggctgaaacatgaatccaaagaacgatccaccttcacctctcctctggccaaatggttccaggattgggccctccaaaagcctcttggcaatgacccggtacttcgtaactagttcaagatccagaaggccattctccatggagattccgacgaaccgtagaatgcagactgcaactgccggccaaaaaacgaattttgaggacgacgagtccaattctaggttagatcaaccggaggcggtcattacccaaattcctctcgtgagactgtcgggcattggggagattgct

SEQ ID NO: 305704 - DNA, 1649 bp, Cannabis indica
gcccttaaatccaacaatcttaataattcaggggtatttctaacaaccttaaagttcagggggcatgatttggtacatgtcaaagttcatgaggtaaaaatcctaattagaccaataaaaaaagaaatagaataaaatttaaaataaataaaaatttgataaaaattattaaattttattataataaattaagtcttttcttccgttttaagatggaataattattttaccaaatagtaaaaaggccattaattaaaataacatttcaatacttaataaattattaaattttttctatcatgtattgaaatagtcttttcttctgtttcaaaatggaataattattctaccaaaatagtaaaaaagtcattacattaaaataacatttcaatattttaatatgcaaccaaacaaaagaatagaataaaaattattttatttccatttcattctattttattacccccaaccaaacgccacctaaaaggatacctttttgcgtcgccaaaattagctatagctttagtttacgaagctaaaaaacatttctcaagtggcccctaatcaaaataaagaagagaagaaaacttaaccgtagccccgggtaagaaaagatgaataccttacatcttaaagatctaattagaaaaaaaaaatggtttcaagttatgaagttctctctaggttcctttggaaacagtagtatagcaattagcaggtataggtgtagaatggatctcccttgtaaaaagctttagtccggctgagaggagaataaagttgaattcaacaatgttcagcaccaagaaaataccagggctgtctgaatttctattgttcatctattccagctgttgttgcaggcatccctgatgtaatggaagtggctgccgtgcctgtttttctgccaagacctgacgatacttttaccgttgctggtcttagaagacgatccccaagcagaaaaccacgtcgaaattcttgaattattattccttccttgaactgttcagattcttcacgtgcaatggcttcatgcaactgtaacagaaacaaaaggaggtcaaaaaatgtacatgggggaccgattatctaaaagttgcatctaaatttatgagctaaaatttctaacaattcaaagtcatgtttagacaaaacccttcacaaagtacgtcagaagttggcagaaaggcctcttcattactctctgtttgttgataatcttttggttcaagaatatcacttcaaagatgtaacagacaattatctgaaatctaatgtttaaatataaacgcattgttcatattgcgatacatgtatgagtatgcaattatagtcaaacaaacttaggttgaggggaatataataaattatgtaggcaagacagaacagtcatccaagttagcacacaaaatcagttacaaaaatagtatgatcgtatcaagaaattagttaactgttacctatgaaaaattattattttttataagtataacatgaaaacatgtacaatacactgacaggcatcttacaacattcatcaaagagataggattgccatgttgctgcaagccaatcccatcgtcaacagattctcataaatgcatttatctctattccagttcaaatcgtgccccaaagtactccac

SEQ ID NO: 305705 - DNA, 1631 bp, Cannabis indica
agagagagagagagaagttgaaacataattgtattgtattattcttgataacagagtacaggtacaagcagtttatatacagatgaggaaagtaagggtaattagcgtaactaatcactgacagcagtaacaaacagtaataacaacattaactaactctatcccccttaacagcccccctcaaactcaatgtatgttgagaaacaacattgagtttggttctgaattcaggaaatttggagcttggaatgggcttagtaagacagtctacgagttaagccattgcaggaacatgtttgacttgaagttggtgttgcagaactttgtcacgaacgaagtaaagatcgatttcaatgtgtttggttcgtgcgtgtaggacagggtttgtagcaagaagaactgtactttgattgtcacaccaaattgatggaattgaagtttgctgaatttttaggtctatgagaagagattgaatccaggatatctcgcttacagtactggctagactcataaattcagcttttgttgatgaccttgatatggttgcttgtttctgtgatttccatgctactagatttcctcccaagaagatgcaatagcctgttgtggatcttctatcatcaaggtcagctgcccaatcaatatcacaaaatgcttcaatggagaattcagtagcagcctttaaatgcaatccataatcaagagttccagcaatgtacctaaggattcgtttcactaccatccagtgttgttgaaggggagcatgcatgaattggcaaactttgttggctgagaaagctaactcaggtcgtgtgatggttgcatactgtagtgctcctacaatagatcgatagagggtgacatcttccataggttcactgcagcaattagacaattttagaccactgttcatcggggtgttttgagtgttaacattttgcatctcggccttggagaggagatcttgtagatattttgtttgagtgagaagcaacccttgatcggttttagtgacttggattcctaaaaatagttgaggagacccaagtctttgagtgcaaagttggtgctcaaaccagtaataactctgttgacaacagtatcattatcgcccattattaggatatcatctacataaattaagatgtagatgtaggtggtgttattggcttgaatgaataaagagttgtcagcttgagatgaatgaaaacccatggaaatgagagcagtagataatttctcaaactaagctcgaggagcttgtttgagtccataaattgctttgttaagtttgcatacatagtcaggatgctcttggctcacaaacccaggtggttgttgcatgtaaatctcttcttgaagatctccattcaagaatgcattgtttacatcaagttgtctaatggaccaaccctttgtaatagcaattgtaagaacaactcttatggtcattggcttgacaacagggctgaatgtttcctcaaaatcaaagccagcttcttgatggaacccttttgccactaatcttgctttaaatttgtcaagagaaccatcggcattgtgctttattcttcataatccacttgcatccaattggctttctgttgggaggcatgttgggttttgtgccc

SEQ ID NO: 305706 - DNA, 2972 bp, Cannabis indica
ataaattattattcttatgttgtgactaaaaaattcgtggctaaaagtattagtcataaaaattacaatttgttgtgacgaaaactaaattagtgacaatttgtaactaaatattatattttagtcacaaataacattttgttgtgactaaaaatcacatttaatcacaaaaattttttgttgtgactgaaaaatttctcatatactaattctcaaaattcaaatttattgtattctaaatttagaaattattttaattagtattcttttaattattatgtcataatgcttatataattatgttattttatgaattacttttaaattcagtttaacgccatcatgttagattttaattataattatgttattttacaagttatttttaaatttagtgtaattttaatttttggcaagatatttaaatttcatgaaatatattaatatatgaatttttaaaatttagtgtgacaatatttataattaacataaataataataggtgagactataatagtatttttggataatacattattataagagtacgtatttttagaagtaagagtactaaaaaagatgtggaagagatttaaaatcaaatattatattttgaggagtgatatgtcaatctgctattacaatctcttagtcaacttccgtccccgaaaacacatttcagaatatttttttaaaaaattttatttcatatagcggtgtttgttgtgcttacaacatcatgcccataaatttttaaattttgtgaatagtttacagtgctaaaaatatatttgaaattttttaaacacgcatggtgtaaactagaatatcagaatctctattttcggtactgtaaactatttaaaaaatttcaaaaatttacagtgataatattgcaacattaatgaataccgctatgaaaaaaaatttgaaaaaaaatctaacatatgatttcagacgtagaaattaactaagatgttgtaataggacgtgaataatacttattatttgagtattttaaaaaataagagtgctaaaaaaatatagaagagatataaaataaaatattataattttaaatgttgtgaaagtttttaatacctttaaaaaatacaactactgtagatgctataaaacatcaaagaatcttcagtggcctataaacatattatttatgatgagctaaactttttagctataataattcatctattacgtaaatatgtttttttttttaaaaaaataattttgtgaaaataatgccaaacacttctatttgtgtttaaataacaaattttagttttttaattttggtaccacatttttttagtttttcaatttaatttggtaccacgttcaattttttagaagtatagtattttttttttgctaattaaggtgaacaatatatatcttttgtcatatgtaaaagaaacataaggttttcccctctctccacccttagtttcttctagggttttagatgctcctatgggcgctgccgatcgaatttgggttagtggcgcccaggatcctttcagtaggttgtctccgagcaaaaggcaaaggtcccctctagtggctgttttcagtgatggttggttcgagtgggtgttgggcttcgttctttagggctagcgagtgggcaccgaccatggtggttgggcatctctgctgagatgtgtcatgcctttggttaggggttgcggttagagtcgtcctcttggatagcgagatagtgacgatggtgggcttcttgtggctctcattctcttgttttaggggatgaaattttcaaaggctattttcaaatgtggggttgtggaatggtgtcattattccttttttaaagatcttaggctatgtttggtaggaaggagagagagtaggatggatggagagtgtagaaatgatggggagtaggagtgatggagaggatatttgttctcatttgtgttgtttgatgttaggagtatatgagaaaggatagagagtaaaataaatattaaaattactattttatcattaatacaattatatattattttttcaagagtaagaaagatattttgtataattttttttgtcttttcttgaattcctccatggtaagagggattaaaaataatgtgttcccttctgacaaacaaaaggattttccaatccctccatccttctccctccctctccttctctcccctctaccaaacatagtgttagtgtgtgcctttaggttactattcaagcatcatgactccagtacacaatggctagtggtgagctttcataattttgtaaatgtaaagggagagacttagagttttacccaaagggatgtgcttcctttcagaactacaatagaggacgagtgtgggtttttcttgttggaagatattagtgctcctttgattggtctgcttgtttcaggctttcgtggttcctcttgtgtgttaggcgaagacctttttgaacttgttctatcattttctttgtttgtttagtttgtttaatttttttttggtgttgtgcaccatatattcttagcggtgttggtccctttagatgctcttgcgtgagccatgagttcattactcctttcattatcagtggggctggctgacagttgagttatttccttgtaaaatttgtgcaatattttttctgccaaacttatagagctccaacgtttttttattaaccttgaataaaattttcctttcaaaaaaaccaaaaaaaggatgaataattataaatggtattgtgttagggggacaggaggacagaggtggaatatatttggtcggggacacgctaaacaccttatctcacacaattttcattttcagatactaactatttaattaataattaatgtcaatgtcttacttagacatgcaaattaattttatataattatcattaagattagggtaaataccattttggaccctctgttttgcaaaagttactaa

SEQ ID NO: 305707 - DNA, 692 bp, Cannabis indica
tttttttttttctttccctttttagtttttttttccctatctttttgttcttggcatgatggttaatgatataatgaacaactttggactctttggagctattaacttggacaaccatggctttggcataattattattattaatcttattttgccaaaatcatgcacttaaatagtaaattagtataattttactgtattgtaggagtgaattttatcctgtaaaaaattgtattttgtttatctttatataattgttgaatcataattagtttgatttaaccgatattaattattgaaaaacaaaaagttattaatcttatgaatcaatttactaataaattttaatcacgctactagggtttctctcccgtttctattcttttccctagtcgtcgttgcatgggtgtcttccatttttccgaccaaggcttgtcgccccttcttagggcttaggtgtggccctggtcggacttgatgattctatatagatgggtcttatcctttgcattgttgctttgccgctcctttccttaaggattagaggggcttttggtttttgttgggccccgtttttctactttgtcgggctgttactgactttgactctcacattagtatgagaaccttccaaaaagcctcatactaatggagtaggtaaaacacttatattcaagacaactcttgtctat

SEQ ID NO: 305708 - DNA, 1870 bp, Cannabis indica
attgttaaaaattattattaatgctcaatatttttttcggtattatattattattgatgtaattaaagattgagtcacgtaaaattaaaaaaaaaataacttttataaaatatcactaactaattgtaagacatacttatagaagatgttgggtaccaataatgctcaatatcagttctctttaaattattgacttaaaaagtgtaaatttcaactttgttttggactgagacaataaattcaacagttgctgcttatagccaattatttacacccataaatatctccactgtttatcactgcctaaaagctacaatttgtgcactttaataactcattgttaggtcaaattgttatcccattgaggagccgtttctagattaagatatacaatttctataatgtactatgcatttcttatttgttttggtctatgagagttttttagtcaagttttatttatgttgtagttatatagaatattatataaaattttaaaaaaatttaaaaaaatttaacacactaaaaatagggttcaaacaatctatttcacactcgtataaaataaaagagtcacgtgcaacagactgtttgaaatatgtgtttgacatgttaaattttgcaaaatgttttaaataattacaacataaataatcgttaaaaaaattaaactaaaaaattctttcaaatgctaaaataaataaaaatatataagtagatttattttaatggatgcattgtaaaagcttcatatatatatatatacatatgtccttttttctcaaatgaatttaagatatttgatttaaggtgatttccccatattacaattggttagttttgaccttataatggattttgccacttttgtatgtacttaaattaaatgttaatgtactctaactatgattaatgtttttagatttaattttaataattgataatctatattattttaattatttatccaaaataagatgaatttattttttgtatcaagctctaaattttaaatctttcattacaaatggtataacttaacaaacatatataagagttgttttattagaaagggaaaaaacatagcaattaatttttgctattatgtcactaatacccctctactatttccacatctatatatttatattaataattgtggttgtttttatttaagagaaaaattaattgtagtattactttttaactaggggtcattattaaacaacttggacccaaacatccgtaccatgttacaactaaagagggggacaaatgcgaagaaaacgataaaagaagttagagctacttttactagaaattataaaagcaataaaaaaagcaaaaagagaattaaatggtaactttttaagttgggatatttacttttagtttttacagtgaaaataagtgttacatttaagtaactggataaaattccgagcacaattatgtagcaccaagtgtatactatatagtattactatgaagttacgttttataattagttaacggttttttataatgtttattaaagtaatataaatgagatttgatattgaattgtactaataatgataatatcataaaagtattgggtaccataggtgtcctttagagcatctctaaccggagttatctattaaagtagtcttgccacatatccgatgtagtctaattttcaagactaattttatgtgaagtgttctcaatataaataatggtcatatgaatttttttttaatttttttattagaacaaagtttattttttttacttaaaagtcattaatttaatgtgatatatgatcatggtgaataatttttaaagttgtcaataattaaaatattttttttaatagtaagatgat

SEQ ID NO: 305709 - DNA, 1706 bp, Cannabis indica
gagggttttactgcaattctttttagtgtgctagaggtaacgtagtgatctttcatctaaaattcatattcactggttggattgacattgcaatttaattctcatacttatcacttttggtttatgttaatacttttaaactaagttcatatatcagaaagccttgaataaacacaatagagtgataattaattgccaattgctgctaaaaaagataagaaaaagattgccaaagagtgcaattagttttggctggaaaagaaatagtggggagctaaccactggctttaagcttttctacggagctgatgtagagtactatctgttgaagatttacacaggtgacagctgatgtagaagagagttcggtcataattggtgaaagaaacagagcagcaattgaggcgcttaacaagtcgcttgatgagggcaacaacaggattgcaatactctatggaggtggccacatgccagacttgggacggcgtctagagaggattttgatcttgttccatctcgtgtgcggtggataacggcttggtcaataaggaacaaagacttgaagagcaattccattccatttctgaagaaaatggctgaaatttcaggttggccattgaaccgctatcagactttggcattgcttatattttcttcagttctagcattggatctctggttctgggagctctttttcggtacgacagtgaattggatttcccaatttgcttcagatttcatgtactatgttgataatgcacaagtattgtgatagttccatgttgctgcaaaattcttaaaattgttatgtagtataaaacaactgtttgtatatacttttgtaaatactttaaacatctccattataatttgttaattatttggtcgaaccaaacttgttatgatttcttctaaaaaaaaaaattaagaacttaaaacatattcctttctgggcaatagtatttgatagaagttgtcattattgatatttctttgttaaaagatgtcaggttcaattgaataatcactttgcttgtatcttttcaaaatgtgcaggaaattttttatttttatctcagatagggaatttttaccagcaattttttataattagataaatattaagtttggtgttatttataaaaaaataatctctaatgttaaatacactgatactgtttgaaatatataatgtatcttttaaatttggatttggaagatgtgaagtttgattttttttttgtcaaatagagaaagaaaataaagtctacacaacattttatttttatggtaatttctgagaaacaaatatatttatatatagagagtttcgtaggtaactaaaggattctactgttgcgattactaagagatttttttcttcgaatgaaagtgatctttaatctttattaaatagattaatcgctccaaatgaaaaaaataacattttagagggagccgagacctaaaaaaagtaaaaacaattagcctaaactcgagaatatctagtaaaaaaatatgcagcccaagtttgtaatagtggagagtgactcgagactagtaatcaatgctcttaatgggaaggagtcacattgagctcttgagaactatgtctctttttgtattaaatcttctcccttattagttgtaattttattattaagaggaaattagactctataccctttttatattgtactctttta

SEQ ID NO: 305710 - DNA, 1899 bp, Cannabis indica
ttacacctacaaaatgatggctcttatacactggtacacactctggctgcttcctagaatgatgtctgacccctcaggccaactcaagtgttcccaacgtgctttgttctgactcgcacgcttcttgggaaaactttctaggaagtcacccttcctgaaatgaaatcaccccagatcaaaggcacttaactgtggagttttttcgtgatgggccaccgaaaacaagatgcaccttgttaatataggtagtcccagaccatagtctcgacatcatcacatacgacctttccccaggcgatgtgggattgtatagctcccgacctttttcttacggagcacggggctttgactgtcacggtttgactcatgccccctttgatctcatttccccattggtagtgattagattaacccacataatcgtcgccttcaatttacctaagattccagacaatactaataaactgtcccaccattactaacactagatcacaaaatttttttctctgaatcaattaggttgattcctccattggctactcatgtcctatgttccatttggaaataccagcaaatttaactcacaaaatgtcattgatagaggcatgatcctcaccttgagtggaaaacaagttagagtaaaaactggtgaaaagagggatgatagagttggtacctttaatgatagtgccatcctcaagggtgatagaacaaatggaattattttttttcctagtcgaggctttatgatggaaaaacctagtatttttgtcccttagatttgagccagtcaatcctggatctttgcttccagtaaatttcatttttatgcaacaaattctcgatagaggactcaagagctctaatctatgagaggtcatcaccattaggtattctcttttgataaagcctctcaagagtaatctgagtggaagaaatttgatggttaagagagttttgaccagaaatccactctttgatattagccacacaattattttgatttcttaagaagtcagctaaagagcatgtggtattatgatggctaaaagtttttcaagaggaattaaccactctgaaaaaatccatatcagaaaaccagtgattttcaataaagaattgaccatgatttctaggagcaatgtttatttctgcaagaatggtttggatagcacgatgattcgaactaaaaaaaatccaagtgtatcaaggtagcagagggaaagagcgcctcccaagagctcctaacaacacaccaatcaagacgttgaaaaattatcattaaaatcaccactgatacacaaaggcaaataaggagcaaaatcaaaaatacgattaagaagagtccaagtgcagtttttagaagtagagtaaggagagccataaaaactagtgaaattccaaaaattgtcattacttatattaacattacaatctatgtgattaagggaaaaatgtaaaacattaacaatattgttccaaaagagtaaaatgcctccccctaaaccactccgaggcacttcaaaaacattatcaaaacctaaactaatcttgatatgcattccgtggcctacaaggagcttggtttccatcacaaaaaacaaaataggttggtgttgcctcaccaacagggagagattttggaatgctcgagggctacccaaacctcgggcattccagctaatgaaattcattttcctcggcatttcattagagattgagagtgaaggaacaacagcatcctcctcattagacgcacgggccctcttaagcatacatcagaccgagccacccacttgagcatgttagcgtgtaaaaggcctcttgagccccacttgttggaaattattttaccaggatcttagatctactcacaaatatgttgattaacaccctaaa

SEQ ID NO: 305711 - DNA, 1557 bp, Cannabis indica
aaatattttcacttttctacttttaaaaacagaaaactgattaaaaaagtgttaccaaatgctacctaaatttattagtaaaacttaacaagattattaaattcagttcaccttatatctattattattatttgcttacaaaacaacaattcattaaaagctaatttagattttttaccttttgaaatttgacatgtatagtatcgtactcgcttatttttcaagccgttaaattttttctcaaaacaattgaaattgttagattcaagaatttgtctaattttattaatagaaacctaacatggatgaaattcagggagcacgatttggtacatgtcaaaattcgaaaagtataatttagtacatgtcaaaatttgagagacacaattaagtaaatattaaaatttaggggtacaatttaatacatgaacaatcgtcacgttaataaaattgaataaaattagatataaattcttaaatctaacaatctcaataattcgagaaatttttttaataacgtcatacaaatttaaaggcataatttaaaatatgacaaaaataaaagacaaaaatcctcattaattttctttaaaaacctatatatatagagatggcctaaccttttttaacttataacaatatttgctatataaatattgcatatgctttttaattaaactcatatattaatatacataaactcagttgaatatgattcataagacagctccacgtgatggatacgtactaaacttaagtacgtaattttatggatatatttaaaatatcaaaactaggtccaaatattaacaataaccactaattatgcattattatgtgtctttttcaaaagtgtcgttttgtgtattgatttcatcatgcattgtatataatatcaccactaactactaattaaaaatatatgaacacattaacatcattgttactcttttttagaaataaaagtaaaataatgaataaatatgtaagaaaacaattgtatatgttctacaatttaagaatctttaggctatataggcgtagtatatagtactagtctttcatcagaattatgctatcaacattattattagcatttattaaaagaaaaatgaaaaccggtggcaataaaatcatcagattggtaaataattcacctacctatatttgttgctcaccaataaatttgttcatttttcaaaataaataaataattttgtttgtaattacatccaattcagtggtttttgattgtatagttttgtgatatagattccatgtttaaacgaaaaacaatggcctcattactcattcaattgactagtatagatagattggttatatctattctatataaaatgtcgctatataacagaattcttggtttatgataaattattgggtgaaatttttaaataaaaaaaataacaaattattagatgttgtcacgtaaagagtcaacatcttaaacctaaatataattaatgcacctaaagtgttgaaattaataataaatttgttcatattgtttattttttatttaaaaattatttttca

SEQ ID NO: 305712 - DNA, 2930 bp, Cannabis indica
attgtttgttataactcgtaattatataatggggaaggtggaccaataacatggctccatggcaacacatatcacgccacaaaaggtatttactttacgccattttcatgagcttcttcttcttcttctttttctgataaggttagaaaagagttgatgagattattcacatatatttatattttaaaaatatatagaaatagattttgataataataacaaaatggtagttggaaggctaggatgtaatattttgtaatgatgtgatgacgtggtagcttatgattgcctccgtgatccacatggggggttgatctggacggtggagattagtgggttaagtttgttgttgtttagtatgattgggtgatgaggagaagaagagggccaatttaaatggcacaagggttgaccattgacttgaaaatgattaaagagaagagagagaagtacgaaagtggtattactattaagaagttgtcaacaacaacaacaacacactttggctacgcagaaaaagcagtgcagaatcctaccaactactttcacacgtggtcatctttttggcctttcaatcccttcaaatttttcatagtttttttttttttttttttttaaatggaaaattttccatagctttgttaattattttattgccctttttggaaaacaatcatcgattttgtttttttttttttttttatgacaaaatttatgagctaattattatatcatatattattgaatactatttttcatagcctgaaatgctataataatacatgatataggcagagctaatttgatagtcctatagattttgatatattttttttattaagggtgttttttatttaagtcgtttttcaaattaaaatcgccctgcaacatacacttaaaatttttagtttcgggttcaataatactaaaaatttgaacacacaaagaaagtttaaaattaaaattgaagtttctaaataataatatcatagcaaagtaagatatccaacctttcaaaaatcatttaaatattattatatcagcaaataactttcaacaactccaaaaggattttctaaaaatgttgtttagtagtgtagttaatttatacacttacaaaacggcggttttgttaaattccttaaatattactcatatgaaaaattttaattgctaaattttatttattgctatctaaaaactacaataattattacgtccttataaaaaaaaactacaataattacgttgacatataaactgtatttgtttgaacttttgtccactgctatgaatagttcactacaaagtacaaattataataaatagtgatcgataccaagcaaagaacgaatgagtgacatgttatggtgccaaaattactctgccgacaatttgaccacacaggcgttttatggagtattccttagttatttttgaaaggtcagtaaatgaccaagatttcttttgctcccccttcattagaaaattcaaagtaaagaaaaagacatatatatttctaatatatgaggttgactttcacgaaattcaaccaacattatttaaaaaaaaaaacatcaagctcttgaattgaatgttagagacttggttatgcctcaaattgtaaaacagttgacaaaagcataattggaacgttcatgtaacaatcgatatatacataatacatatattgtttttataattaagggaattaggagcataacttataaattaagaaaagtgtttcgtcctcttcgctgcaggcctatcgatcactcgtgtttttaatatatataatataatttaattattgaactatattaattaatgtatacatatatatatatatatagacgatcatggaaagtttatttaattattgaactatattttattgaacttataataatgctttataatctcgacgttaacccattttttatatataagaaaaatacaaaattatgtaggcaaatggttgaaagatgataaaagcgattgaatccatacttaacaaaccaataacctattatttgcaatattttatttattaaagttatatatatagaaaggatattggaaagtcaaattgaacttataaaaaactataatggaagctccacatataataataaagtgtccacttcgcaaagtacatatatatatatatatattaatattacacattcatacatatatatatatagcatatctttataaaaatcattacactggtagctagctagttatctatcgctatatctagctgcatatgatgttataatgcatagacaatcccctagttgatatgcaatccttttatggaagtttaatattcatcaaactcatataagaaaacacaaaaaataatcaagagatcgaaagccagctttttcattgaatatatgttaaagttttaaagtttttattaattagcatgaaatagagagggtttattaattaattatacatgtaattataaacttaatataatcaaagcaatatagactattattagccgatcgagcctggcgtgtatcaggtggtcacgtggtggaccaatatttggtgtaaagcgtggcaagcaagccttcctataaacaaagttcatattaatgcaaaatcttatctaattaatacatctcaatcaagccaggttaatatgaccatgacacgcccaaaaaaaaaaacgtaattaatatattacttccaatccccaaatgtcaaaggggttaggagaagttttgtcacaataaaaagggttaggagaagttttttggtttgatattccaaccaaagccatgaagtctaatggcttggaccatgaactgttgacgaatatgatcatactttaatttatataataattaatatatatttatatatttgggttttttttttctaaagtatattagaatattttatttatg

SEQ ID NO: 305713 - DNA, 1108 bp, Cannabis indica
catacgatggctgagggtatagaatacatgaaagcaacctattacctctttcggaagtgttggctccaaaggcacctttgtctgggtatgctgtagcaaactgttcaaaaatatcctcctcctccatcaaagggttagaatggcggagcgcccagtttgcttccatgagcttatcatccttggtagcctcgattatgaatttggccaaattgagagctattatctccataacctctttggaagcctgactttggcccatgccactttggaaacagacgattaataggtatttgtgaagcaacttcgtggtggccaagccttccactctcaactctgcttcagtatagagcttgtattgggctgcctttttcttcttttatcttgaattaaggattccgaagcacaagctctaccagaaatgagaagtataaaggcccaattagtgcttagattggcagagactttgaaagaaggaaaaataataataaaaatatttactagggatttgaaagcttaaatggagagtaggcactctccgcgttgggaaaccagtggaaaagaactaatactcccagaggtcatgggagcataaggtgaagctggtagggcaatgtgcatctgagtacctctccaacttgtaaaacccaatattcttgcaattggtgcgcataggttggggattcacaccatagaagtacttgatctcctctggagtaggcacttctaacttgttgatcttgcaaaacatgtaccatctgactaagagcttataagccagatgtatcaattggaagggcactatcccaattcacgtgatgaattctacaaaataagtcctcaagggaaaatgggctgcgctcacgatgtggaactagctctaatcactgaatctatatgtgctcacggaagctgactctcccgcaattgaaagcttgtgtcacattagtttcagaatgttatgcactctgactttagtggcttaaagctccatcatgccatacgaatggaatctattgatttttttgatccatctcccagatggaggcattaaatacaagcacaggaggcagggttttggctttcccctttcctttggattttatgacta

SEQ ID NO: 305714 - DNA, 1308 bp, Cannabis indica
tttttcatttttttttattttaaatatctaagtaatattatttgtaagaattatttttcttattacattattgtactagttaataacatttcatatattaatatgtttgccactctatcaactttattaagtttatattatgttttattaatgttaaaagtacaatataattttcatttgtaaaaatatatatttattatattataaattttttattgtttttaaatattaaatatattagcggcgactcttaagagtgataatgtcgccctaaaaagtcaaaattcataactaacaaatacttttaggagtggttacttttgttgcttctagtgctttttttaggagcgaactatcaaggacaactatttagagacgacaagtcacttataaaaaattttaggggcgaattcctacactattagagatgacaaaagttgtccctaaagccccaatttattgtagtgaagttatgtttagttagattatggcttattgcggatataagatgcagttttcttaggctcaaaatttttcgagttgtagattttaagtaaaattgggtaaccgattataccagcaactaggtactcggttgttttggtaggacctataaaattggttaccaaaacaaatttaatttttttttatttatttgagtgtaaatgtaataggtaagtgggcttgggtatgatttaatccacaaaatttcacagagaataagttgagaaatacttcttttttgtatctattaatcaaaaataaatgtacacacttttgtgagtatgttacccaatataccttcaccttccacttaaatctagcacataattcttattaacttaagaggtataatgaggacatcatctataaaagtgggtatattttaaaaaatataaaaataaaggtaaaaattaaaacatgtaaaataaagtaagtatacaacgtaattttctttaatttttttctacaactatccatacatatgtataaaattttaagtcttggcctaagcacgagcttagccccctttagcccaagattgggctttgctaccatgcgcatgtgacaagagctaaaaggaaacattctaaattttcaatagtatttctgtttgtgatctcttcaataatcttttctatcgtgctttaaaagtataaaagtattgggaaatttacatcatttactaactttttcatttttctttcaaatatactgtgacacggcaaagttaacttttttactgtttttatttttttgtttattacggcagtatactgccttagtcttgattcaatttgtatatat

SEQ ID NO: 305715 - DNA, 2040 bp, Cannabis indica
tagggtttatttatttattaagagactttgtaaggtctaattaataaataagttaaataacactattaatgtcctcaaatcgaccttttaaacccccaaaccacctctttgtttaggctgacataaggactcccatttctttgtagccagaaaatgagttttctcaacacctccagtccaccaaaacctacaaaccagagaattcaattgattgcataaagtagctgggatcttgaaagtagacataaaatagattgggatggcaagggccactgagttattagaaaccaatctactagaatacgatagtgtcttcatcctccaaccttccaacctatttttgagcttgtaccttttaggaaaataaagtcctgaatttttttccttgaagaaacataagggtttcccaaatatggcccaagcgacgcgtccattttaatatccattaggtcttcaatatcattccttttgtctactgtacaattcttaaaaaaaaaataatacctaatttatgtttactacacaaactagctagaccacacgcttcatatttctttaagcattcccttatattagcagcatcatggtaagtagctagccaacagaactgtgtcgtcgacgaacataagatgagaaatcgggatacaacatccttggaaattttaatttcgtgaatcttacccgatcttctcgcgccctctggattaatcgagaaaatattgttgcacaaaaggagtttttttaggggcctctgagttgagtgagttttaggtgcatgcctgacttgttttagtccataattggccttgatctcgaacaacaactgtagatgtactaattaaataggatacaataaaagaaaaattcttatttttttcaattaaatgtcattcctattaatttgaaaattcttatcctcacatacaagaaaatatgatttaaacatgctctttataactatttgaaaaataaaatggataataaaaaatactaactatgaatttgatgcgtgggactaaataaattccatattatttaagtagtaaaggtaagaagacaattataccctctctctccattgttgagaagaataatttgcatttattatttaacgaattatatgacctgatcagcaaagtggaaattaaactacaacttaataaattaaaaatattattttaaaaaataaaaataaaaaataaaatgtatatatattaggtcaattttgccttgtatggtttcttagaagaagcacaaaggagatattgacagtcacccaaattcagtgttgagagtcataaaaatagtaattgaccccaaaattaaataaataattttttttttattttaaaaaaaattgtaataattaccaaattaaatacagatatcgatataattaatattgttcatgttctctatcttaaaattttattaattagtattgagagtacaatccaatttttgtactagtcacactcattggggaccaaaagggacgtatgtatagtcacgtgccaagtcctatatatataaatatatatatatacatttataatgtaattaaggtggtcttaatttaactacttgcatattaaaaacatgattaagactatatactaagtcaatatatatataaatagttttcaatagcattaattaacccaccaatagtgattattaagattgacatgaataggagtcacgtgaggctagctagggcaaaatttgcattatcataattattatttttaatatgtatttgtgtatatagattatatattgattaaaccctaaaattacgggtaattagacacgtatgcagcggaggagaataaggagaaccacatagattagtacacgtcaaattagaagagttgacgtgtatataattacatgctgaattaattaaatctatatatatcttaagataaatattatttcatattttgtgtttttgtaaaaattattaattaatcttttttatttaattaaataataaattagattttatattttttaaaatagtataaaataattttt

SEQ ID NO: 305716 - DNA, 1422 bp, Cannabis indica
atatcataataactacaagatctaaaatggtaaaaaaaaagtttcctactgattggtaggaaacttttactaggtcctaccatagttttaccttatatatttatatagtacatgtttgtgtagtaacattggttttgtcgttattgtacagaagttttaacaacaataaataataaattgaatggtgatgaattgataagtgtatagtaataggggaaattacccattgtacttcctttttaagttttttccatttttacgttttgtttaaaaaaatttcactaatataattctaaattttcattaatatatctattttatcttttaatattcacttttacgtcttcttcttcagtttatctatttcacctctggtttatatttgtctcttcctctgcacttacctctgcgatttggtcctacggcggcttcgacggtatcgacactccttcgacgacttgctgatttatgagatttggggtggtgttgatagaattaacggcaaattgcagactgccgttggtatcagccctaatcttttattaattggtcaaaagccataaaatgtacaggtgttctctgtttactccatgctcactcagtactattatacatataatactattgtgatttcgcttcccttgtttgaatattctataattttgaaagtcacccctttactcttgtttttttgttgtaataggatgcccactgttcaaaattaacctgttcagccttttgttgttcgtcctctttagggatccagccgagtcacggcgagtgtcgggtatgtggctatggctggagcaaaaggtacatgaattttagtggggaatcggttcgttccaatctcatacttttgtgtttttcattacctttatggttcaaattgtctttagattgtttccaagatgttattgtggtgtaaaaactgtaatgcttgatttccaatcagtttgtttattttatgaggctgaaaattgttaccaagctgatctctacttttaaaccttcctgttatttcaggttagtttctaaaccattcattatatgagcattaatattatttgtctaaatgctgtctgatgcttggaatatgagatttagtgattactataatggttcctctatcattgcctcttgttcatgtattttttcacaaatttctatggatgaaatttctctctttccttgcagcattaacaattcttttacagtatgtaaaacttatgccgattgttctatctgatgcttatcttttagatggataaaggtgaaagctttttgtcctttgcaagacatatgactcttaaataaaaaatctatgggcgtcaagggtgagctatgtttgttaggctactatattgataataaatacctatttgatcaatctaaactgatccttctatatttttgtgacac

SEQ ID NO: 305717 - DNA, 2185 bp, Cannabis indica
tctctctctctctctcactctatgtatagactgactgtattgatttgctttgaatttttctcctttatgaaataaaaaattggaagaaaaagcacaatgttggtgattttaatagcatattttacccaaaatttaaaagaatttttcctgttaagggtaatatgttagatttaattacatttatgtccttgctgatgttcttaactaagaagcagtgttgcacaaaagagacccaatagcatcacagattgcaggtgctgtgggacccattatgtgtgaagtttgtggattgagtcaaccttgataagtccaactacctcatatatatttgtaagaaataaaagttaaccaagagagtatagaacaaataaataaaagaaaatagaattatatgtggtaatgctaggtctaaacatatatttgtcaatgcaaatagaccagttcttattcttttgattcaaaatctttctgattcaacctatacccaattggttcttctttcgttattaagatttgtctgacacataagaagattgacaataatggtatgtgataattaaaaggggtaagtaatggtctataaaattgtgcttttaaaaaggatatgaatgtttaagcaaaaaaaaaaagagatatggatgagaataagacagttaacacttttattaggattataataaataattaaatatgtataatttgatggatatataggacatgaaatgaaatggaaatgaatggtttataagccatccaccatctaatttttatcatccattactctactctgccccttatataaggtacatattaaaaagggatgtagtttctagtttctacccttggtaaggactaagggtatagggcacaccgcaccaccaccaaccactaccacccaaatgtttttcttcttcaaacatagaatatgaatggattaaattctatggatttgtgggagacttttgggcttcatgaataaactattaataaagtaaaaacctaccaataccatacttaaacatgccacaaaatccaaactaggaagagcaaagtcaaaatcttgtgtggagcaattatagattgacaaaaaaatcaatcaggggtggaacttaactctcttatcacatgaaaaaaagtaggcagatttttgtttcctttaattgaaaaataaaaaacagagaaaaactaaagttgcacacgtacacgtgcacgtacccagagatgaaaggcttcgcacgtgagaatactaaaaaagctcgtacgataaagctataaagaaagagattgtgaatgtagaaaaattgatggtatgagcaccgagtcagtatattacaacttacaagtttacaaccactgatcaaaatcatcatcaatttcgtggcgcatggtttctaatatccacccaaccacttatttgtctttcttaataataataataataataataataataataatagtaatgggaaagactaggtagttgtgttgtgtatcaaaagttataacaatgttcaatatgtgcaaatattatcaaaaataattaaggtcacagccaagaagaaggatgagttggacaaatattgtgttatatttgacacacaaaaaatagttttgtcatagatttacattaaattttaacattatatatgcttcaatttataattgcaaaacttaatataaaatagtatctctaataaaaatgcaaataattaatagaaagctaaaatagaatttatttaacaaaaagtgtgctccaatagtatgccgaaaaatgatacaaatttagctcaatatttgttataaaagcattgctattaggcatcagtagtgtctaacacctttagacatatcgtttcgcgattagctagcgatacttcttaaatgttattacattaaattatatgggacccgatatttaattggaccaatagcgatattgacacataagagagttcttggcaccacgtgttccttttagcatttcttttattataatgcaaaatttacattacaataaatacacaatttttttatttatatttatgtcatttgtattattttattaatatatttagctatagcattaaattatcaagtatttgatgtgagatgtaaaagttaagttatatttggcaccaaaagtggtttgtgacattttcacatcaacttttactattgtgctcca

SEQ ID NO: 305718 - DNA, 2863 bp, Cannabis indica
actacctccaactatttagacaccaacaatatctaatatgaataggaaatatggtatattctaagaatgcatcaaagatttgacaattattaaatacatagattgtttaaaaaaaaaatacatatatcatttttaagagccatgtggtcaccaactactttctcccacaaatgataataataatgtgaataataaaagattatgtctcaaatcaaaacaacaataatagaagattatttctcctccctttgaattaggcctctttatcgtccaagttcatttaggtttctagagcttctctattttgaatcagtcctctttatcgtctaacttcatttcatagtttttttcatgttgaaaatttctgttaaataataaacatcataatttggcagcagtgagactagatatataggaagatggtatggaatgataatattcctatttaagtgtttcatctatgtacttgcttttttttttactaagaaacaattattattattataataataattattaattgtaattaagaaattgtactttttaaaagagtgatttgaaaataaatatttcagttttgtatgtacaaaattattttaaaaaatgtaattagttgtggtattatttaatatttttgagttttaaaaattgaatttgtaatttggtgagaatcttagaataaagtgtatatatattttaaaaaaattggattcaatgatttaaaaatattgaaaatataaattgttttttagcttaaaacttaaatatttatttgaattaatatttttaatataacaatgaatttaatttttgaaaacattctatcaataaaatattttatgtggatcaccacatatttaaattttcaaaaatataaaattattttgataattcatacaagtcaaatctcataccaatgaagttattactgatatcaataaatatattattgaccaatagtatttggaatatattattagagatattattaatttttgtaataagtttgttggtatttcttttgtttatattccttagctaatagtgtagtacattatttaatcaatggtattttgtggcacttttttttccttctgagaatttcttactaagtttactttagaggttttaaagacactatttttcataaataaataaataaataaataagagtatatttaaaagtaattgtgtaattattagaataataattggatagtttagtaattatattatattttaaaatacaaaatatatttaaatctgagatgataattatatatgaaattttgatattaatttaacttaaataaaaattaatatttttttagtaattaatattgaaaaataaattttttttagtacgttcaattttgatgaaagagcctaattaaaaccatttaattattttcaattagacggtaattatacacataactctaaggtgatgtttggtttggtggaatgtaatagtgatggtaatggtaatagtaatgtaatggaataagaatagtaacgagaattgattaagacatttagtttattattggaatgaatattgaaataaatgataaaatgacaaaattatctcctactttaatttttatatttatatataaaaatataaaaaaaagcattagtgtcattttagctttacaaaagtaattctcattacatagcttttctaatgtaatgggaattctcttgtttaatgtaattatgattacaatgtaatcccattaaatcacttttaaaaataaaacaaacaatgtaatcccattagatcaaattctattaccattcctaccagaacaaactaaacattacccatccaatgactttccatgcactaaataaaaaaaattagttttcccaatttaacaatttttttttgagtcactaattcctgaattaaataaaatataaaaaacaaggaaaagaataaaagccaaaagaataaaaacacaatcagcttttgtttaatgaggaactgaatagagagagcgagggctggtgatttctgcgccactaatttaatctttttttatttattttttatttttttatttttttttttttattttttggcttttggtttttcgggcgggagtgatatgattcagctcttgggtggaggcgcatggagataacgtacgcatcaccaagcttgaatgaacttgtagaagcagattcaaccatgcggaccaccacccgccccctcaagattatccccttgcagcacccttctacgacgtcctcttcctcttcgccctccgtttctacacctgcttctcttttccttaaatggacctccaagcttcagcgcatgacctggatcgattggcttgatctctttctaccttgctcccgttggattaggacctacaaatggcgcgagtatcttcagatcgacgttatggctggtgtcactattggtatcatgcttgttcctcaggtaatttatatgtttgtatctgtagtgctttgttgttgggttggtgagaaaatgaacgaaataagaaaagaaacggaggtttgactgaattaattgtgtaaatactttggccaagtttaatttggttttttagtggtctgttacttttttattgtcttttcagaaatggaacttttttttttcctccgattgatcaaagaaaatgactaaaacatttgctttatggtctccaagaccaaaaaaataaaaatgaacttctgggtttgacatatgtaattatcctagaataacttcgtttagttttcttcattcctcgatatccaagcaatttagcctttatttggtttccatcctacttatcatatgatttattgatttatctatgtattttggtttctctctctctct

SEQ ID NO: 305719 - DNA, 1233 bp, Cannabis indica
ggtcgttcgtgcaaatcaaacgtttatatttttgctaataaatttttttctataaagactaattttactaaaacacacaatataaaaggcaacaattcaactgatacccttttcttcatatctctaatttttgcattaaggaataatatacatgcaacattattcaaataactaacaccaaaaacaaaaatttcaactcacttatccaataataacaccatgaaaattattccaataacactaaatttgtaaagggttaacgaaattatactaaccaatgagggtcccctggaccagtgccacattgatgaaaagccataacagctcgaactttcaatccacaccttcgagccaaagcaataatttccaaatacccttgccaattataaaccctaggccgatccctctccactagaccccaccacacctccataaccagaccctcaactccagccgcagctagagccctaaacgactgcgccatcgctttccgtcgccggacttgcccggcgggacccacggcatccaccggaagcgtgacgaaaaccggcgatcctcttctccggcgctgaggcgagaatccatgaaaaaactcgtactgtaaatcgccgttgtctggggaaacggagccaccggcaccggacggagtcgaggaattgaaacgtgaagatacggcgagtcgacgagttaatcggagagttcgattgcgttgggagttagttaaagcaatggaagggaatcgtgagaaggcggttgccggcgactccgtgcgtgtgcagcagaaggaagctgagaaggtcggagcagatggagatgcgatcgccattgatggagtttttagggtttgaagaaaataaataaataaataaaaatagaaaaaattaaaattaaaaataaataaatatttttatttatattatttatttttggggttatttatttctgggaagaaatgagagagtgaattagtgttaaacagtagagtttgtctgtaacagaaaatatgattcaattcacaatcacagcacagggataacccaaaactaatgggcctacatttaaggttgggctaaagaaaattgggcctcaatgttttcaaaaatactactgaatttgggggaatttttagtggggtatattgaaaaatacctcttttatttatcaattaaccaaatctacctctaatttatatttaattgaaacatatctctttttatatgtattgtacccaaa

SEQ ID NO: 305720 - DNA, 1196 bp, Cannabis indica
attttcattctcattttcattcctattctaatattttcatttctctcaacctaaacgtgatcttacttctaatatcaaagagagagagttactatcaacctccatcttttataacttatccatactctcctttctttctaccaaacataaccttagggacaaagtcctctcacgggtacaaatggtagatctcaaaatataataattttatgaagtcattatcatttaataaactataataaactttcttttaaatgagaaaaatgtggaacaatattcatcacatataactatcacatgagccgtaacccatatcattattatttggcttacctaacatcatatattgttcataaattttgtatccatttaatatcaaaatttgtcaactcataactcacaaaactagtgctgaactcaacctacttagtgttttttttttctctaaaattttattttccaattaaattatttcaatatttaatttaggctaattagaatttttgcccatgaactttgacatataccaaattatgccccataaacttttaagatcgttaaaaatgctccctgaattattaaaattgttagatttgaggatttttgtcaaatttcgtttagttttattatttcaaagaatgtttatgtattaaattatgctcccaaactttgatatctaccaaatcacgtcccttaaactttaacatgtactaaattatgccctttgaactttcatacatgttagacttttttattaaaattggaaaaaagttcttaaatccaacaatctcaatagttcagggggcatttttaacgaccttaaaagttcagggggcatgatttggtatatgtcaaagttcagggggcaaaaatcctaattagcctttaatttaaatacaaaatccttacaagaaacaactgtatcttaaaaaaatattaaagagtaattaaaatattcgtaaacaaattttaagttagtttagatttattgttaaaaataatatcataaattaattgaatattatttatttattgaattaaattttgagttgagttgcaaattaagttattttttaaaaaaattttgttgttcggaactgtgcaagtagacaggaccgtcttaaacattttggaggccctgttccaatcttaaattttaggcccctaataaaaaaaaattattttattataataat

SEQ ID NO: 305721 - DNA, 1269 bp, Cannabis indica
tatcaacagaagttaaattgtaccttaccttttctactccattttgtgtttcaaataacgaaagaacgaaacctagatgaagacccaatcttgatctcgaaaaccctgttctcttctcgttaatacccaacaaggaaatcctcgactttgctggattccatgaaatgggtttctcagggaaacaagtttttgagctgaatacaatgtttcacttgcactgtatttgaggaaggagacgacagacgagggaaaggggcttcttcgaagttcaaatattcaatttagggatttatgaactgagtctaaatttaatttttttttaagttaatgaattactggatcaggtcagagccgtaaggcttcttcttctgcatttttctactctgtttttctgtttctcacatcacgccatggtccaaacacaaagtggaggagttatagaagaaggtcagcattcgagtgatgagcttggccatggcaacaatcagattcatgttcaagataggtttctcgtggatacaaggatgaagctcggaatccttattacttgagtaatagcaatcatctgagtgcaagccttgttcccatgatcttgacaggaggagaaaattacaattcttggaagcacgccatgagtgttgctcttcttcccagaaataagatgaagttcatcaatggacagcttcctgaaccagctcctgaccacgaagattacgatgcatggagtaatgtaacagcttagtcatttcttggatttttcatgttgtttcttctgatattggggacagcataatgtatttggataatgttgcaaccatctgggcagaacttcatgaacgtttttagcaaaataatggacctcgggtgtttgaggtcaagagggctctgcaagctcttgttcaaggcagtgccaacattcagggttatttcacgaaattaagggctctccaggacatgatttgtgattttcgacctctacctatttgtacatgtggggcaatgaagactatacaagcctaccaagaacaagatcgtgtgttagagttcttggttggactaaatgaatcatattctactgccatatctcaaatcttgatgcaagatcctatacctagcataaacaaagtgtatgctactctaatccaagaagaaagcaaagagaattgacaatcccaactgagacaatgaatctggccaagtttaagacagttggatgggagttctcaatttggcagatctaaggttgtttgtactcattgtgggatgact

SEQ ID NO: 305722 - DNA, 980 bp, Cannabis indica
aaatcaattcagggtcctatttgtactattttagaaaatacagggtctattttatcatttaacaaaacataaggtccaattagtaacttttgtaaaacagagggtccaaaatagtatttattagtaaatataaatatagtgttgtattagattaaaatttatattttttttggacccattatatagaagattagtctctactttcgagtgctttttaagtcttgaggagggagccaaagagctttcaaaattcgctttacatattctgcgtcctatacacgtgtcagcatattattggttagttaggtttggcctttttgttccttcccacatttttaaaaccctcgtcggaacagatactccgaatatctctcttcccttttccatcggagagtttctgtcaagctcagctcagctcagtgggtagagagagaaagagagatttctagagagagaaagacaaaacaggaggaagactcttggactctctagggttttccattttcaaaactttcgtaatttttacacaacagaattggaaaatttgtgtattcagaagaagattgtgattgtttttactttttctacgggaaaattttctccagaaaaagaagcttagctttgcgtggagtggagtgattttctttgacaggaatatatatatatattaagaattaaaagtttaatgcacaaaaagcgaggcttcgagttgaagcaaagttcacataagtttcaaattcaaacggagtttgttttagtgagaaaggtcgttgaagtggttctggatgtttaatctggaggaggagaaagttttagtttcagtttcagtgttgagaggaattagatacaatttgtttggtagtttgaggaagctgttgttgaaattgaatcaaatgatttgtgaaagttgaccagtaatcggattggagaagatgatgatggtaattttgtaaatatttgagagagagagagggagagag

SEQ ID NO: 305723 - DNA, 3037 bp, Cannabis indica
cttggttttgagcattgctaacagatttagatacattattatttttttttttgttaaagattagatacatatttgttagctgttttttatattatttagttaaaaaaaaaaatagtgtaaaatgtgatttgaacaaatagctatatgactcgagatgtacatgggataaaaaattggtggggagtgctctatttctattctcgttaagaattttaattcccatccgtacttattcttcattggtgatggagcgggaaatcaccagattcatgcctgagcatagacaaattagacttataggagtctagctagttcgggataaaaaataatttttttttaaatatatattttttgtactgattttaaaaatattacattttttttttaaataatagcttaagttttttttttcttgattcactaaattttaatggcgatggtattttgtaactgaaggtagcctttaacattttttttctttttctttttttgtttttacattagaagatgctaatacatactatgggtctagcataaatacatttgctgcattttgtcgaaaagaaaaaatgattaaattgatacaatgcgattaattttgatcaaataagttttttaacaagattaaatctaaagtgatttttcagcttaaattgagttagggagacatcggtttgttaaagaactatttaatcaaaattaagcgggagtatctgaattattattttatataacatatatatatggaccagtagtgtattatttaatcaaaatcaagctaaattgaaatttaaaataatcaacacaagtagttttttatattataagaatgtgctaggtggcctaattgaattgatcattagtttgtaacatatacatatgattagtttggtattatatatattttaatttggggagtgggagagtgtcacactcacagactcaattataggtgtggatgattaaaaattaatcctcttctaatcttgagactaattattatccaggtgtaaaaataacatacaattatacaaagtcataaataaggtaaaaaagaatgacaagattaattaaagaggtggagcccacacttgttgattatatcattatcaattatatgtagataaaattggatgaaaatattgtttggtgtctaagtttcaatgaagcaattgggttgggatttttggagagttgtctatttatcatcatcaatctgagtcatgatgacatggtgccacgtttggttgactcattctttgtaagatgtaattggttacagttgtaagccaatccttactcattcataatcacttaaccaattatatctttaactatatgggttgtttttattcacattacttgaaaatttccaattaaaatttccaaacaataaaactttgtcgtgccaagatatttttgaatgatgtctaatcctaagatttggtataatacttatttgattatactatatttgcaatgatactcatttgatattctgtaattaattaattgaaattgtacaaatttagtatattgaattattaaattgaatttaaaactcatgatatgatttgattgcattaattgaaatgacaagtactatgtataatttttgtttttcttaacgtaagtactatgtataatttaaattacaaaatattaaattaggattattgataggtgattgatatttttactacaagcgtgaataaaaattagagagtattgatttctattttgaatcatgaatctaaatttattaaagtagtatttggtaatatttttatttttaaatgttttaaatacaaaataaaagtgaaatttttatttttgaacaacaaaaatgtgttctataactcattttattttttaattttaaaaatagaaaataaaagtgtgtcctgtaaattttatttttattttaatttgttgattttattttagtccagtctggagttcgggttcgggctcagttacgagtctagatctgggtccagttttagggttcaagttagggttggggtttggggtctggggtccagggtccatgccactctgggtctgcgttcggacccgaggtccgagaacaggtttagggtcggggttcgggtcaagggtctagctaggttgggatcagggtttgggttcggggtttgggattcgagtccagggtcttggtcgagatcgatgttcgggtccgggtgcgggtttgggtccgtggtctatatatgtttgagtcaggatttgggtctgagtcaaggtcaatgtccgtgtctaaaggtttaggttcggatcgggtttaaggtctaggtccgggtcaggttggggttcgaggtttgggtttagggtcctggtcgagtttgggatttgagtctgtggtcttggtccgtggcccaggtcggggtcaaggtctgggtctaaaggtctatgttggggtcggggttagggttcgagtctctaggtctaggttggggtcagggttagggttcgggtctcatgatttaggttgggatcggagtccaaaatattgattaaaaaaaattatttaaaagaattttgaaagtgtgtttttttttttttttgtttataaaatttgattttcaattaaaaaattaaatctggaaacagttttataggacatgtttttagaaatgttttattatttttctaattaaaataaattaaaacatgattaaaattatacattgttaccaaacgtactctaattatctcagtctattgccctaatttgtaatttaaagaaccttaatttaagtcgactctctttttcaagtgtaacatccccgcttcaagcctccattgggtccttacacccacggaaataatggctcttatacacgagtatgtcactctggctgcatcatggactgatgactgaccctacagaccaacactagtgtttccagcgtgctttgtcctcactcgcacgcttcctaagaaaacttcccaggaggtcacccatcctaaaattactccgggtcaagcacgcttaactgtggagttctttcgtgat

SEQ ID NO: 305724 - DNA, 2944 bp, Cannabis indica
gtatggaagaagtcaagtatgagtttccaagggactgatggctttactgtgttcaacaaccatggcagattggttttccgagttgataactattccaggaaaaactacttacgttaaaggaggccttgttctcatggatggaactggcaaaccattgcttactctcaaacctcaggtactactatataagtatatataatattgattaagctaagctatatctggatctaataataataataaataattgggtttctttttttttttgttcaggtatttagcatccaataccaatggaatgcatacaaaggatcagaagagagcagtccgacaaaatctagcaaagtattctcaatgagaagcaagtcatcactactttttacaaacatggataaaaacgcagaggcagaaatattttttgaaagaagagatgatgatcaagatcaagatcaagatcaagaaaaatagccaacaaaatcccgatttcagaatcgaagggtgctttggaggcgcaactgcaagatcaggaacagaaatggggaagtggtagctcacatagccaggaagaaagtaaacgatagagtgttgctgggcgacgacgtttttcagccttgtcgttcaaccgggagtcgatgccaagttaattatgtcgtttgtaattatattggatcgtatttgtgggaagccctatgccccagttttatgttcttagattattaatttatcatgtataatattatatgtaattaataattaaagaaaaggagcacagcatgcacccactagccactaaacaatactcaattccaatctcatcatcacttccctccacttacgggaaagatggctagataggggtgggtcgttaatcttttttttctttttttaatttaatttgagcagattgactacttgcatttgtgatttaaaaaatttacgaaagagtttgtctcaaagtttttatctttttgtttctacttactttcattctacatcactcaattccatcttaacttttcaactcacatatgaatatatttatgttatcctaattttagcttagatgtgacaaattttagacgattgtgttaaacaacatcagctcaaatactatattttaattgataaaatttaatattaaatctgatgtattttagtttaataattactataaaaaaattacataaattcacataaaacattacctaatgataatattgaaatacaaataatacataatcaaaagcattagggagattatgtggcagcttatataagtctttttacttattctttacaactctatttttctaatttatttaatatttgttattaattttttatcatcactattaattagctatatgtttaattctcataaaaaaaaaaaatcaaaagacataccattaaatagtatttgaggctcttcattatcactctatatgaaactaggtggcctaatctctttctaatcctctactttatctaatttatagttttttctattaagaaaagaaaaattattttggtaacccatcattaacataccaatcaattaataacccaatactattaaatagatagatagtgaataaaacattaaatattaggatgatatatctaaacatattacatgtaaattattagcaaaaccttcaatataattcaattacattatttaattttaaaaatgatgatgttttatattctctcacactgtatatatatagtaagataaaatttaacttgaaatgagaattgtaaatagacaaagaataacagagttttgagaaaataataaagtagagaaagtcgatgagagtggttagagaaaagaggatatgaaattttgttatagagatttatttattattcattttttacatatgaatatagttttttttttacataaacttattaattatcatcatttatatgcatatatgtaggaaatttaactctgatatataggaattaacctctgtaattccagattcaagatcacacttaaacaaacaaaagttaaatcaaaacaaacaaatcaagaacaaaaccagcaacacataaactagaaaaatataatacagatgaatctaaatagctgtcagacacaataacaaagagatttatactggtttcgatcttaagttcaatgtaaatttggtcatactccagtttgaaatcattgccaccaatctttattgataatgagaataaaagatatcaatctcaagagctacaagaaaataatcacaggaagtcatccatggtgtaatacctcaacactcattaactcactaacccgagctaacataatcaacaatgttgctcaatataatttcccaatcccagtcctctctctcagatatctctctccatttctcactctaacttctctctcaattgtatcgtgtctctctcgtgtgtttgagttgttctcttttccacttatgaaatgagaggagtagttctctttatataggccaagggacccaatatgcaagttgtcctttttgatagttaagttagttaaagactaactaaccgaatcttggttgggggttcaaggaataataccacaaatttcaccttatttcttcaagccccaacaaggtaagcatatctgtccaatggaggtggtactttcatgtgtagctacttagcaactaaggttaagtaagtccaagcaatgcttgaacttactaacaggtaacatcttagtgccaatatcagtagcgttctcttctgacttcactttctccaactcgattacttcttcttcgatctcctcccttattcaaaacaaccaaatatcaatgtgttttgtcttctcgtgataaactggattcctgcacaaattcgaggattggctgtcagaatatacccttgcctttccaactagaagtttcaactgttgggttttatgccctaaataaaactcttt

SEQ ID NO: 305725 - DNA, 970 bp, Cannabis indica
ccaattttgtattaaaacaatcataataattcaaatttcccttataaaactgcaaactttgacaacagttggttgaatctaactgaaggaatgttgaattggagcatgaagtcattgcagcacgtgcaaatgctaacgacacgcatgtaccacaaactaaatccccagtaaggcgaccacgaggaaggcctcgtgggtcaaggaccagaagggcactaaatgcccctgtcaatgagaacaatgtaaaaaaatcctgcatatcctcaagaacaacaaccagggaatacaaggaaagttcccattgatagagagattccacgaaatccaagtggtctaaatccaaggcaaacacaacctgaagttctggaaccatcttataggaatatgagacccccaccagaagaacaaacaactcaaccctctagtcttttaggctggtaatgtgctgaaggtagatttcgatgaagacaaaagaatttcatgggccaagtggcttcgagtcaaagttgtgttctccagtgcggatccccttttctttgaatgtttcctcaaaaagcctaatgaagataaaatacagcttcaatttaaatatgagaaattagggaatttttgttattgttgtggtagacttggacaccaacgaagaaattgttcacaaagggaacctgacatcatcaccaacaaccagggcatccctttcctattattttgtccctggctcaataccttctaccatttttcagacttgcttctctggtgaaactcatgtgttcaactctgagggtgccgttaccagatggaaatgaccctcagcttggagaggttgttctggccccttcgactagagtcacgacggctgtgaccgttgttgtaacgtcccctcttcaagcctctattgggtcctcacacccacagaatggatggctcttatacacaagtacgccactctggctgcttcctggattgatga

SEQ ID NO: 305726 - DNA, 5411 bp, Cannabis indica
actgtctaatattttttatctttaatagcattctttattttttttaattaaaatagtatagttattgctctaattatgtttcttactttaattaatatttcatcattttaataatattttataatttaaatttgtcaactattaattaattttataaaataaaaaaaaataatattatctttgattaaaatactattagaaaaatttagcaaaaaaatagagaactaagtcagcttttttatataattggagcttatttttttaagtttctcctctctattttagctaaaaattgtgtttaaaattaaatatatctcatcctatataattgaatatattaatttttaaaaagtattattaaccaatcataatatattatacctctatttttaagtatttaaatgtccgtatataatacagccacgtgtctgttagagaacattagggcacgattaggaccaaataacacaaaatcataatcataataatatttgtttctatcccattattattttctttaatagtatcgtgtgctgtagatattaaaattaaaattatatgcaattatgcattactatttttaattttttttttttttaattattatatatatacatgatattaacgtagaatcttgtaaaatctttgtcgagtaccaatacataaaaataagctaaacacatttggctatcctatgttgaccatctaaaatttaactacataaaaatagtaataataacccttctcatacaaatagaatatttttttttttcaccatatacgaaattgatatttatagattaattactaatgtatagtcgaacccaatttcttacttttcacatttatagatacatttaaagaaataacaattattagcttagctaagctaagcttttgagtcactaaattgtacagctctaaaagaagaaaaaaaacaaagaaaaattataaagctaaaggagacataatataaacagtttggtgttttgtttgtttgtattattattatctctcttagttttcttctcccttagatagatattaaagaaaatgtcccataaccaaacaaaagcttaaaactttcattcacagagagacagaggagcacactgttatggattataatccacaagccttctctcaatctcatactaggcctcctcggaatttacctctgctccggccacttaaaccctttttccggcggttattttcagttccggctatctaaaaatccaatctttcagaccaagcttagcttataataaatcaaaggttctacctttatgtcttatacatactttttcttgctttgcttttgtttttatttaatggggtttgttgatttttctgtttttagaaatgggaccggattagaagaataaaattttaaaaaaaagtttgtatttttaaattagttcttctttttttttttgcattggtattgttgatttttattttttattttcttatattgggaagatggaaagatcgagttttgtttagatttggttgctctttgataagatttttcatctgggatttttctttctttagttgttgaaaactttctagggaaaagggttaaagattccttcaaaaaaagaaagagcttaagtgaatgaagacaagagttttaaagtctagaacttgttttcattctgtactgggaaaaaaagaaaagaaaagaggtcattactcaaaatctggatttaattttgctttattctatttcattttgtacaagttgagacatttatctatatttgtataaacatatgtatatatatattcttgtgttgcagatgagatgagatacttattctactagcctagttgagttagagtttttttttttttttttttctacttttctcatattacaagtggttgaaaatgttggatttaaatattaaaaaaatcaaagaaaaaaaaaagtgtttcaccttttctgttaaagacccaacaattaattaatcaattgagttgcaacttgatattattttacagttttcctttgttcctagtcataattagattaaaagaaaaagaattatgaatgcaatgctggaatttgtataaatattctctgcaaagtcttccaaattcattgttactgtttttcttttttagtatttttgtttgtttgttgattgttaattatcttattcttaactttctgagtcagattgtgtcctttcacatagtcacaagatcacttaattgaaaattctctgttttgttctctgtaaaagaatgtttatattcaaccattttttctcttttataaatggtggactaacacaactcctcataattgttcagaatttttgaacctcaaaccaaacacttggtgggaaatttggatattttaggctttgagctaatggggcatttttcatccatgttcaatggcttggcgaggtcgttttcgctcaagaaaggaaggaactcggagaacaatcatggcggaagagaggctgcagatgctatggctaaggatgcaaagaagaatgacttgattttacgcacttcgggtactgtaaatgctattggttctaacaactttgcctcagttttcactaagagaggccagaaaggagtgaaccaagattgctgcattgtgtgggaggtatgtagagtcatgatttttactgagttttattggagtatagtgtcccacatggaacgagtataaaaatatcgagccatttataagaacacgagttactcctcttattagttagatcaagtactttcttaactttttgagaatattgaaggtttttttggtttggtgataggaatttgggtgccaagaagacatgatgttttgtgggatttttgatggtcatggtccttggggccattttgtggccaaaacagttagagaatcaatgccaccttctttgttatgcaattggcaagaggaactctctcgaatgtctcttgacccgaatttggacttggaatcggataaaaagaatcagtggttcaacatatggaaacactcttacttgaaaacttgttcaactatagatcaagaactcgagcaccatcgaaaactcgactcgtatttcagtggaacaacagctcttagtattgtcagacaggtaacataagtttctactttcatgatagtgatagtgataggactgtagagtttctatattgaaatgtgtttgagaggttaagttgttatggtaatggattttgctttgaaagtcttctcaattagtgctcttcttgattatacttactccattcactgcatttattcaagtggtcataatagcttgccttttactttacggctcactaaactttgaaaaacaccatccactcaaaactccacaaccactcataaatgacaaaaaaaagtttgttttatccaagtgggaaataattttttcttgtttgttaatttgttcatactgtagctaagatttgttgatcagaacaattttcacaatatgattgttttcctctcttttgtagggtgaatctattgtcattgcgaatgttggcgattctcgagctgtattggctacaacttctgatgatggaaacttggaatctgttcagctcactgttgatttcaagcccaatttacctcgttagtcttttttctttttcctcaaaaaacgccaaacaaaatgtacaatgtcatacttatacgaaatgttcttacactgttgtgttcgtttctattttgtagaggaggttgagcgtataactcaatgcaatgggcgagttttttgtctagacgacgagccaggcgtgcatcgtgtgtggatgccagaccaagaatcgccgggtttggccatgtctagagcctttggagattactgtgttaaagattatggactcatttctgtacctgaagttacacatagaaatttaagtagtagagatcagtttgtggttttggcaactgatggggtataattttttaccactttaactaagattttcactaaatgcaagtctaattcagtgtttgattattattattattattttgtcctttcaggtttgggatgttgtttccaatcaagaagccgtggagattgtatcttcagcaacagaccgatcaaaagcggctaagtctctagttgagtgtgcggttcgggcttggaaacgcaaaaggaaaggctatgccatagatgacatttcagcaatatgcctcttcttccactctccccctttatctcagctaattcaccctattagcacctctaaatagaagaaaggacatgaaaaactaaagaaagcaaaaaagaaaaatggatgttcattgtttcatcatgttaaaaatgtacccttgatttgatttaatcaagaaattgttcatctcttttgctcatcaagttcttactagactgtaaaattgttcagcaagtacatattagccttttccttttctttgttggtctcttaaacaattgtttaatctaaaatgttttatgaaatcgaagatcaattaaaattttctaatacaatttcatcatatgaaatgaaactatggaaattaaagaaaggttgaattttgcatataccaaagtacaagtaagttcagattatgagcaaagtgtttatggtgaacttgtcccacatcgacagcggaaacaaaagtagataagcatatgtctataaataagaaaccagctcgttcaataagcttatcccgtcctgtcaggggtgaaaggcgactcgccaatgatcgtatagagacgacgagtcgtgccaacacccactgttatgaacactcaaacttcaggcgagtgggttgggccctactttcggttcgacccgcccgtcaatttttggaagcacccgttttacaacgggagctcaaataaattaattcaatctaaatatttacctagttttataaatttgtattttattttttttatttggaatctgaatattttttataaaataggtagaaagacattgttttcttaattttttttttaataaaagttgattgaaatatatatatatatatatttagttttatttaatgtgaattatatactaacttaagtttaagtttgaaataagtagatacattattttttttgttatttttttaataatatttgttgattgaaattttattaattttttttagcatatttgagtactatatttaatgttggtgtattttttattatttaattactaagcatgcaataaagtggtttatatggtttctaaatttttttaggattcgtttagtgaacatattttttttttctagctctataaatatttgatttctttcattctcggtggttattaaatgtcatgactcatgatctttcatttagttttcttgcctgatattaagcctttaacctaatacaataaagtggtgtaggtagttttttttttttttt

SEQ ID NO: 305727 - DNA, 646 bp, Cannabis indica
ttattaatttcattatatatatatattcatcactatcaataataatattttaacaattctcatataattaatatatatattcctaatttgtattatcataaaattcgcatttaatactattaatacaatattgtgtataatgttcatatataataaccgttattgtataattaattaattgtcttttacgtttacatctatgacattaatacacatatctaagataaaatctcacgtaaatttatatggatagagttcactaaggtgtttttattaatataagttttgatacagtatattttatagtacctaacaataattaaataaattctttagcaaaagaacaataattaaataaattataaagaaaaaagtgcatcctatattgatagtataattagcattatttgtgtaacttttgttaatttaacttattattttaagttttatcaattacccctaaaaattatactttttcttaataaatccaacgaaagatattgacggcaaaacatataataggaacttaggatatataacatcaataaggacggcacaattaattaattaatattaattatattatttatatataaatatatatatactagtatattgttacgtgcgatgcacgtatgctatgttt

SEQ ID NO: 305728 - DNA, 1883 bp, Cannabis indica
taataattgtctatgataataacaaaatcaacttacttttacaatacgttattttcatctgaagttgaataacatatatatactaaatgtattaataaaagacttcagattgtgtcagctgagtgaataacattgaaatttatttctatgtatgttccttgaaaaatttatacataggcatgattggtggactaacttaaaaaggctataaaactctctccacacacaacaattaataccagtcaaaaagagctctctaattgaaaatgttaagtactaagtagtagagctttacacataaagatgtggattactagtgttggatttggggtagtggggttgatggtgatatgggttggctattggattaggaaatggaggaatcccaagtgcaatgggattcttccaccaggctcaatgggattccctctcattggagaaactcttcctctcattattcccagttactctcttgacattcatcccttcatcaaaacaagaattcaaaggtaatgcattagcactaagaggagagtgttacaataactgtaatttgtttcaagtctagcttagctgatattcattgatgtaacaggtgtgttgtctttattttgattcagatatggaactatattccgaacaagcatagcaggtcgaccagttataatatcagctgatcctgaattcaataatttccttttccagcaagaagggaggctagttgagatttggtatttggacaccttttcaaagatatttgctcaagaaggcgaatctcgaaccagcgcagttggtgctgtacacaagtacgtgcgaagcttatttctcaatcactttggtgttcatagcctaaaggaaaaacttatacctcagcttgaacaagtggtcaacaagtctctcacttcatggtcaactcaacattctgttgacattaaacgagttgcttcagctgtaagttaatttcaagcttactattttatctaacttagcttcataatcatattcatagtgttaatctgtaatttatcacagatgtttttagactttagtgccaagcaaattttaagttatgatgctgaaacttcaccattaagattgagcgaggcatatagtagaatcttaaatggtttcatgtcttttcctgtgaacatacctggcacagcataccatcaatgtctaaaggtaagaatatatcaaactttctcttctgttttgtgttgtaccattcatgtctatagcagcatctgtatttattatcaggaccaaaaaaaggtagtatccatgttgagggatatgctaaaggaaagacagaactcgcccgagttggatcggggtgatttgttggatcagatttataaggacatggaaaaagagaagttcttatctgaagatttcattgttttgctgatttttgggggcctttttgctacatttgagtcagttactgctgtgatgacattagctttgtcaatactttcggagcattcttcagtattagaggagatgatagtaagtagacatgttctgagtttgagtttaattttctttttgtacagatcactgtttagcttaacatctcaaaattgaagtcatgaaacaccaagtttttaacaacaatcgatgaaatatttcataacgagaaatgctaaaaggtaccattagtgtctagcacccttcaacgtgtcatatcactattggtataattagtgacggagccaaagtttttattttatggagacttatttattattacaaaatatttatacctatattataatcactcttactagatttatttaattttgtggggacttttctattattttagtctataattatcaaattaaaaaaattatgtttaattttttaaaagacaatatttt

SEQ ID NO: 305729 - DNA, 1156 bp, Cannabis indica
aaaaaaaaaaaaaaaatttagatcaattgtatattatttttaatattgttttgaagttgttttcttattattttcatataatttttttgttgtttttttatgttttatataatactgtaaaaatgagaagaaaaaaacaactttaaacataaaattaaaagtgtaaaaattttatcaaaaataagagtatatgtaattttccaaaaaaaataaaaaatccaaactatgtatactcttaattaaaccccaacctttgatttgaacttgatcaaaaccttaatctccttattaatcattatgtgatattttcatgaaagacaaaacttttggcttaattaattgtcaaaatcttcttcattagagtaatgggtccaaatcaaatgcattaacaatggtatttaatatttctttaaagacaaaaaagctataaattgatctcatattttgacaaattaatgtagttgtaacttgcatataaattctttttcaataccatataatacaagattaaatgctcaataattatataagtttaatgctcattaaactaattattaatatatcctactattgctactaataataacatgtggccaagaaagatatcattcatcatgctctacaaagtcatatatatatttatatataatttttagagagaaaaaagataaacaatctttcaaagcaagtgagaaaatgtgtgacttattataacactatcttctttgttgtgtggtgaaaatgatatgagaagatgatatatatgattcacccacacaatgtaataataataatgactgagtaaacatagtagccatattaattgagacacaagtacatgtaggtgtggcattactcattagtattactactcaactagtcatatatatcatatatatatatactatatatatatactacacatgtatacttgttaaccacgttatttgctcaatcaaaatgaaaatatcttatccatctttaagaaagatacactcaatctctttgtaaatttaacactagattcttatatacctttcaagctattatgaattagtgcttggttttataaggggcaaattttatggtcacaaatttgtagacacataaatgctatatatatatatttaggtgatgtttggtaacactttttttt

SEQ ID NO: 305730 - DNA, 1198 bp, Cannabis indica
taaactcttatgtgtttatttcattattttagaattcatagtaggatgttaatgaaacatactttgtagtaaatctagatcctggtaaaatatttccaacaaaaaccacgtaaacaacttggtgtgatctttgcattattctttttatttttattttctattatttctgtgctaatcctatcacgaaaataggcttatatcgttaacaaaaatctgtgttaacaatttggtgctttcattgagagcgtacgtgaaataagcttagaaaaaatccctctaacccgaaaaaaacacttttctccatggctaaaattggagaaaacaatgacaatgggggaactaatgatactcaccccgaagaaactactcatcatcgtgctggaaaagagtcgatgagctcacagaggctacccaactcacgaacgacaagatccacacgaacaacacgttcaaggagaggccaatgtgagggtggccaaaactcagaaaccatagaagaagaatccaacatgaatttcggtggtgctcaacccatggaagatggtgcctatgatcccacgagatatgtaccgattgtagaactagaaaatcactcaggcgatgtctagaggaggcaaactgacaaaacactgagttggaatgagaggcagccgcacccagggcagcaaaggaaaacaaagcccaaaaccaacttgaccctaaagtgagaagaccacgaggcaaaccttgcagctcacgagccagaagacaagaggcaactaaggagaaccctcagaatgctcaagaagaagaacttgggagaactagggatgctcctgaaatgagcaaccaaatgatcaaccggaaatgagaatagaaggcgacttgagactagggaacaggatatgcctcgtgagaatgagagaaatcctggaaatcaacctaggaaaggtgggttgccgccaaggcatagttaatgtccttctcaaaccaataggtatggggcacatacaaaccccagcagggggcatacaacaacccgtacctaaaggagaaattcgatacgtgacgaggcaagttctagctcgggacgcacaagaacccgtagtcgattaatgcaaggagaggacggaactcgtcgtggtactaattgagagagtataggcataagtagtgtgacagtcagtagtcccgtgatccgtaaggggaaacaccgggt

SEQ ID NO: 305731 - DNA, 3218 bp, Cannabis indica
tatgtaatactataagttttaattaattaagcaattttaattaatcacaattttcattaacctcgttgattagcaacgagctgcacagtaagttcaaaatcacgttaacacgtctatgctagctagagtgttacactctaaatacttagtttttgaaaaactcggtaaacttaaggcatgccctcatttgtaatctaattaattcagttcaatgaatataattctctatattctaatattacccaaacctaagtatagaagatcctaaatcttatcatccatatttatttcggaaaaatagaaattctaaaacatgaacaatcatacattgttacctaattgaacatgaaagaggataaaaagtttttctttttgtccactttctagaatcctcatccaaattatttttgaagtgggccacgctgatctggagtatgagcaatccacgtcgataccacggtttcttcacatctctgattaagatagaaaataacagcagggcttccccataaagtgttgtctcataccaaatctgttggccttactatatttctctcattaaaatcggttgttgatgaggaaaactactatttttttattattacataatttttgcctgtttggctctcctcttctagttttagatgaatacaaaatagtggatttgaatgtgaaaaaagactaatttcttcttatgtttttttttaccctaaagaaaatgcaataaatatatgaaaaactgaagtgcagtagacatctgaaaaaacccagatgtccttacaaaccactaattttataaaatgaaaatggatctgtattaatttcttcaatcagatcaatgacaagcgaattgcaggagacatcaaaaaaaaaccaaatgacctgcttagggaaatcccaagaataaatatatacaagaaaaaaaattgcaaactaatactaataatagtagtaaaggaaaaaaatataataatagtgataatggagcatctttactccattactaatttccgaaaagcctaagagaaattttatgaaatgctatactgcaaactcttctttcttgttatctggattgttccaaacatcagaaaagtcaatgtttcccatgactaaatcctccattctttctttcattatggcagatggtaatggcgagtttatagttatttctccaatatggtagccaatttcaaaagctcactttcatctaacctttttgctggcccaaggctacaacgatggtttccatgctttgtcaatgcatcttcgaatttctttatctgttaccacataaaagaacacaactttagaatttgaaacactcaaaaggttttactggtttactactaaaacaaagttaagagatatctactgttgcattggtgcaactgaagctacacacgcgaccatctggtcctctatagaatctaatgaatggtaaaacatgaatatggagggcatgagacataggtttgagctcttcatagttgaccttaagaaatattgaatttgaattcaactcagccagttgacagatctgagaaaaggggaaaaatactattagttattttctccataaatgtttaaaatctaaacaataaactgagatagtattttactttgtataagtaaggaatcaaagctcaccttaggatgaagagttctgcaacctccgcaaccaggtgagtaaaagtctataataaccaatctatcaccagcactagccaaggaatcaacaagttgttgagccgaatggatctcaatcatgttaggcttaagggtcttctcccaccatctcatagcccggcttacacaaattgatgcttgtgcctaaaaaacataggttgtattaggataaacccacaatttctttttttcttttctttcaaaagcttcaatacaaaaatatagcaaagaaagaaattaaaaatgaatacttacatgaacagagaactgggtaggtgagttgaccctccagtctcttgaatccttctgagtagagacagatatgggctttccaatgaaatcagaagcaaaaataggaaaaggtcttgaattttcttctctagattgtcgcatagaaacagaagaagaaaacacagaaacccctttagagttagaggtgatctcatccaactcgaacccagaaaagctaaaaccactcttcaatgaacaagccatggttacacaaaagtaaagaccttttctctaaaagtaaaagcatacaaaaacaagaacaaccaaacaaaacctagatcagtttttattttctctcttttttgtgggacaagaccagaaagattcttcctttactttgtttgatttttgggcttaagcaaagaaacgttgagaagaaaccaaccaagatcaactagaaaacttataataacaaaatataaaaaggaagggtttgcacaaaaatataagggcccttttgactagagaatgcggttactggatttaagagaaagagaagcaagggttttgttttcaaaccatgaaagaagagaaaaagaaacgagtgtaggtggggtctcctcttctgcctttgggatttggatctcaacattatccattatttatttcaaacttaaataatattgttattattttacgtttataatccaaatccgtttaggattttactaaaccatgtttcaaaaggtggtaaagtttaatttagattttaaaggagtaaaaggatatctacaacgtaaatttcggtataaatatccaaaattaaacatttaatatttgaatttagctgtaattgtaaacatttcctcgtcaccatgaatatatttaaaaataaaacaaaaattagtggataattaaatttcttgcttaggtatatctgagtcagcatgttctgtgttctgttttatttggcagttaggtttatcttcttgtctcgtggatcggctcaccgcgtagcatattcccatcttacctattattaatttttttttggatcattttctacttatttatttttagcagtgtacaagacaaattactttcgcttattggcaggtaaatgaatagataggattttctaagtggggcctatgatgataaattggagccattcatgatttcttttttcttatattatttgggaaatttgaattttcatgcttcatacttcataaattggtcctcttgttataaaataatataaagtagataaaaagaaagaagaagaagatgaagag

SEQ ID NO: 305732 - DNA, 1301 bp, Cannabis indica
tttattccgttacatttctccattaatttattccgattctgattactgtatagtaaacgtgccattaagtctatttataaggttgtgtttagttttttttatttcatttgttaatttaacatatttcattttattgatatttttaaaatatttttaaatgttcgtatttatatgttaaaatttaaaaatttgatttcaatttaatttttagatgatatatatatttacatatatcctaggttaataaatccttatgatcataattttgattgttgattgtatatacctgatttaatgagtttgaagaatcgtcgtagaagtcattgattgtatatattctgttttgagttttctttgttttctagattgaaagttctgattttttggctaagtaatactgtattgtttgagttgcaggtaatcgttgcaaaagaagatgatcgacaggaataaacgaagtcaccaaaattggggaagacggtcgacaatggtgaatcttcgttagaggttgtcgacaacaatcaattgtggagaaatcacgagaaaagaaaatgaaatttccagttttgagataaaatcgctgagagagaatcacataaggagactgcaatttgaaaaataatatgaggagagagatttgaagagagaatttgagttagtttggaaaaattatggaatttttttaatataatttcatttatatatattttgttttccaacattttaatcattaattttattttgttcccatattattttcaattatttatttgtgctataacaaaataaactcacatcattttttccatgaaagttcccctaataatttcttaaggctgagatgcaaaataaccctaaatttgaaaactaagtaaatgtcatctttttaaaaaaaaaataagaaaatgaccaaatataataaattagctaataaaaattatacaaatatatttattacatattatttttaaaagatatatatataataattaaatttagttatataatttttttagtattacatattattatattgtaacaaaaacgaataaatatattagatcattaaatatatacagtagtatttgatatatcgtattactaaaaagtaatatactgtaataataaaattatataccacaaaaaaaaataacaatactaaattaatactcaaaaaaaatatatatattatgtgaacaaaattatatatatacaactattgaaatatgtatagataccaaaaaaatttatatataataaaataaaaactaaatattatcttaaataaataatatactata

SEQ ID NO: 305733 - DNA, 2092 bp, Cannabis indica
agagactgctttttgagagcttgatttgattttgagtaagcaccaccttcacttttctctctagctatagcaccttaagaacttgatgaaaattggcatccaaagaaagtacctatatctgatgcgatcataataatgatcatgaaagaagataaagaagaaggacctaaatttaaatttaatctacaaatgaacaatagtaacaattacaaaaacaacaacagcaaggctaagaaacaaatctaaatgctttgcaaagatgtaagtactataatcgcagcatatgaagggatgtatagtcattccactttttatgataatattttgtaaaaaatatatacactttttacaactttgtttatctaaactgaaactacagaatgaagtactaatgacattaaagaatgaggaatcatctctctaaaaaaatttatggcctaagtatcaataaataataatctaatttatttttttttttttccttctcacatataccccatcccacttaaaacaaatctatgaagtattaatgtaatcacattttttttttcaaatatatataatgaaatagtaattatattactgacatcaacaaacttacggaaaattagacttttaacaaacttaccattagaagttaggtttacatgatattgttttactactttatgttatttttttttttatttctttttagaggttttaccatttctttttcggagggaaattaggctaacatggtaaggttttacatttttattttatttttttttaatttctttttagggggtttaacatgagaattaaaatgtaaggttaacttaatataaaattaatatataaaaatatatatttccatactcccatggtttaacttttattatataaaaatatatgtttccatactcccatgatgaaatgatgaataaagtaatgagacactttcacacaatctagtgacaaagatatattccatgcagagagagaaaagaagtggcatggaaatatatggaacgtagaagtgctcatgccaaattgtcaccatgttcaaatgtttgatctcaataactcaccaatgttttaccatgcaagaaaacagcataattagtcaaataaacttgaaccctcactcaaagatatagcccagttcgatcaaaggggcaaggtatgagactctcaaaaggatataaaaatctttattgatatatagcagaagtaccattgttgtaccaagttttcaagttatttggttaactgcacaagaggtttttggctcttttcacaactcaatacagttagcctcatacgatcgtacccctctaactagagactcctattaatagacagccaataagaaaactacaacttgctgattagggcatttaattaacaaaaagcattagatttttctcatcctttcttgatcctagagtatgttaagcttataggccgtctaacactaccgaacatcaagattgagaagaaaatggagggcttgttctttcattctcacaaacagaacgtcatgtggaagacttcatgcatctttttaagtagctttgatggatgggaactagaaagccgagaagttggcggtgtttcctcctcctccttttccttctttttccgcctcaactgaaagaattgctgcatagcatctgcacactcagatgccagtataccccgtcgaatattcatatttgggtgaaatgggtgaacaggaggagttggcttatctgatgctcccaagttgttttctccatcaccaccggggaaaagcctgcaaaatgattgttgttttagatttcatgaataaaatctgggggatttcggaatttctttattatttaggtaacccaggtatgacttgtacaacaggcgcctatggcaggcgtaataccaggtcagagttacacagccaaatcaccctaactcaatgaaagatatattttccattctctctgcagtgacattattattattattattattattattattattattattattattattattattattactttgcaataacaaactattttcctctcactaagaagtgcaagaaagaataaccaaatgaaaa

SEQ ID NO: 305734 - DNA, 3389 bp, Cannabis indica
ttttatttctttttcattgtttaaaagcagcgcgcgaaaaattggacatctcccgcgttatattaacattcccacgctctctattttatttggctttcccacactcatttcactcccgctctaactttctctctctaaaacctctctctctttctctctctatacccatgcaccaatatcgcagccgccagccccattttccggcagccggagaatccgtcgccgcctacacaccatccttgagcgagcagaagcgtggaaagaagcgagggagttacagctgtggccgttgtggtcttccaaagaaaggtcactcctgccacgtcagcagcggcggaggtggaggaggaggcgatactacgcctactgaatctaccggcgatgtatctgccgagtactctctctctactaatagacatccgccgccgccacgtcagccctactcccaactacgtagagcgttgtcgtttgatgatgttgataatggtggtggcggcggcggcggcggcggcggtggtggtcggtttgagcaagcggagagcgatgatgatgagtttgttgatccgatgatggagatggatgctgatctggtttctggtggcttaccggtgagttgcttgtgggaggtgctgagaaggttgccgccggcggggttgctttcggcggcgaaggtttgtaagggttggagagagacgactaagaagttatggaaggcggcggaagttttgaaacttagggttccgtcgagagctcaggttggattggttggatcaatgttgcacaagtgccctgggcttgtcaatctctctttgagaatggaaaggtatacgattttaatacgggggttgattttgtcagatctggatttttttggatggtttcagtgttgagatgaacattgaagattaagttgaatgatttaagaaagtaaacacaaactgaacaatttaagaaaaatgaaagaaaagaattcaacaagtaaaggacaaacaataaacttaaccaagcaggaacttcacttgcatagacaacggttataaatgacctcacaatgctcgatctatacagaaatgattatatgcaccgtttgatctaaattcttaatcaaataaactagtcattggtgaaagctcatggctttgtgcttgatcatcgtcaagttggtgaaatttctatgttgcactatcagagattcattgatagttcaaagtttttcttttgatattaactgtggtttctttcggtttggtgtagtgatctggatgcgacgatgctggcctgtgttgcattttcatgcccaaatcttgaatacatggagatctctacttctgatgctgccgtcaatcgtatcactgggtaaatttctgatctttcctatcctgtttttggctcaagctaaggttgcaattgtaagtagatgatagtgcttaggatttatgttatatctaaacaaattagctaattattttcttttatgctagatttggtagtaactcctgttgatttgtgttcctatctaatggaaagttactctcgtgctatgagaataatattggttcattatctttctttgtgatttgaaatgcagtgatgagttaggccgttttattgctgatcgacgaatgctgaaaagtcttaaggttgaggggtgttccaatcttggtggttttgttcttagttcaccatgtcttactactctttggctttcagatctttgctctctgtctaagatggtgatcatccacatttttagtctcttatttttgtggatcttttatatataaaaaagtaattcttagtgttattagttacttatccatttgttttggcacaggtttttaattgtccaagtcttaaagagatttctttggaattttctcgccaagaaaatgataataccgaccttattagcatggctgaatctctgggaaggggttgtccaaggttgcaaaacattcacattgcttctatccggttatctcatccagtcgtacttgcccttacagccgcccacttaaggttggtagactgtgctttttttcttttcctcaagctttgtaaacgtttgacttatcatgtgtaatgctagttccattttttgaccataaactgatgtgcaattatcacggcttaagataattgaaaacgaaaatcagtttctaactatgaataaaaatatgcgaagaggctaatagtatggtttggttctccatatgcaggggcttaagaatgctttctcttgttcttggttctgaaatcactgatgcttcagttgctgccattgctgaaagttacccaaatttagagctgcttgatcttagtgggtatgtttccaattccatttgcattataaaggtgattgtgaatttaactcatgcaatggttgcgaactcaaatgagtatgaaattcataatgacatctttttcctttaatgttttctaacgcaatattttgtgtcctatctgagttcaggtctggtatcagtgataatgggattggaatgatctgcaatgtgttcccagacactcttacgaggttccttgtcgctctttgtccaaacattacttcaagtaattgccttgtctttgctctaagataatgaatagaaattttgttttgccctttgtcttttcaaaccttattttattaatgtttgttaatattggcaggtggtattcaatttgccacagcacagttgcccttcctcgaactcatggactgtggcatggtcatatgtgatcccaactcttcagatcctacaacagatgaaaatagtgattgtgaagtgcagaaaacatgcaatgccacagtctcacatatttaccagaatctgatcattaaacatagccgtttaaaaaaactaagcttgtggggttgttctggcttgaacgtgagtttctaaaacttagcaagaaagctgtttttacttgtatacggttctttggatcttaagtttcagaatccaattgcaggctttgtatctaaactgtccagaactcattgatctgaatctgaactcttgtacaaatttgcagccaggtactctattttattttatcatcttagcctttgtgaattaatctggctttatcagttagttgatgttaattcctgcgtccatttacagagaaattgtcacttcagtgccccaaattagaatgtgtgcatgcaactggttgcaagactttgctagttggaactgttcagactcaggtaaatacacattttacaaacaaatctatcccgttaaatcccaacaaaattaaaaccatgtttattcatacatgtgtatatatagtttcattttgttttcagtctatgctgcaatatcaagttttctaacactgtttatttttaaaaaaatgataataggtaaataaccgtactg

SEQ ID NO: 305735 - DNA, 1027 bp, Cannabis indica
tttataatgtacataactatatatattttgtacaattttcctatttgatggctgaagcctctaattatgtttctgttagatataatcctctttctggattccacgggatcctttcgggattcttagttggcatcaagcagatcataccagaccaagagattcctttactaaaattgaaagctaaggtatgagccttttatcctggcatattcttgactgaaaagtttctgcaagttgatgatttctctgtaatactctctgggaacgatccaattatacacagtggttgccatctctctcggttttgctatcaattgtcatatgcttcttggcatcagagtcttcaacagctcttccaactctgatatttggcacatacatgagctggatttacctcagatactggcagaagaaaccagaaacaaaactcaagggtgatccaagtgatgattttgcattctcaactttcttccctgactttttaaggtaattaatgatttttaacgagtttttttcctatgcttatgaaacgatgtaaatatgtcttgacgtgcttttgttgcttattattcagacctgtgatcgatcccattgctactatattccatcggatgctctgtggaagatctgaagctgctgataatgcccagggttatactgtgggaggaaatccattgcctggttctgatcctatcgaagcatcaaggagaaggtaagtttcttgattctatgcagctatgtagtacattagtcaattgtcttggtggaagaagagagaatgaacatattgtaatgaacgcttcactttcagggaaagaggagctcgtgcactagaagaaagattggcaactgaaagactggccggtgcacgaggttctgaagaatcaggcgatgctgtagaaaatgtttgattgcacctaaaccgaagtctggtacttactcaaccaacaccaatgtgtaattttagtgactatttagaagttcaaaaggtgtctaggaagagcatatatatgtttttttttttttt

SEQ ID NO: 305736 - DNA, 1635 bp, Cannabis indica
aacttaactgtcttcccaatccaactaaattccatcgtgagtgccttatggtcatggatacatggccctaaagtttgtagccactgcattcccaactccacatttaatccccatattggtaagacatatagatcaacatagaactgatgaccttggagtaataattccactccatgacagattttagaacacaacagagagttaccatttcccatgtaaaccttgaagcatttcatatcttcagcagcaaggcctactttgctggctaaggattcctgtataaagttgttattactttcagtatctatcaaaacttctaaggtttcctcaccatggttggcccatatatggaatattcgaggattcgctgaattcgacaaggagttcaggctaacttcatccactaaagtctcatccatgtggctcgagtctgattctcctgctagacttcgctccccttcttcctcctcctcggtgccacaaagaattaatacgctattcttgcatttacatctgaggctgtatttttcctcacaagtaaaacaaaggcccttctcacgcttctccctgatttctgcaggagttaatttcttaacaggcagtgcattagaacctgacttaattgattttagtttattggtatttgttgaagttgacccaaatgaagaagggttgatatcggattgaactgaaggttgaggataaattattgtgcgatgagaccaccctgatcgattactctcccccttcgaacgtcccatcaaatcatcattacggtcttcgaacagttgatctttagccataacatcagctaaattaacaagtttagctagcagtaactcccttcaaaattctagcttcagaccccaaataaaaaaattcatgaataaatgctctaagatacctgttactcgagtcatcaaatcttcaaactcaatgcgtaactgagcaacgcgacccatctaaatgagtttagagattcgacccaagggatcatcatagtccgatgctccaaatcgaagttgtagagcttgaatgaaagcctcccaatcaacaaaggctccactcttctccatccattgaaaccatttggatggtacacctgttagatgaaacagtaccaccatcaatctcacaggggaatcaatgtggtatagatcaaaaaatttattgatcttatatatccaatcatccacgtggtcccattgaattgagctactttcaccctcaaatttttcagaatcgaattcacttctctagcatcccctgtatctgagtgtctgcctgtcacccgagtttgctcccgagttgcgttgttctccccctccaactccggagatggtcgagatgaagtgcacggtaatctttcgtcgagcttctcttcaatggctgccctcatttctgctctaaactcagtcatctgagctcactcatcccacttgagctccatagcttgaagcaatgctacaatgtcctcgttttccatcctgagaagaataagaaatcgatgaaagcaccaatcgatagaataaactaccctctttgagataggacaagtctcccaagcaaattcttgctaattcattcaatagccaaaccttttccaattacaaaagagtatttatattaaactaa

SEQ ID NO: 305737 - DNA, 2681 bp, Cannabis indica
aatttatagaagattttaattatttcatattattattacataaaactcgattataataaggttttattgttctaaacaatatttgtcggttaattaaggtgaaaagacatggaaagtgtgcagcttttctcacgtagccagcaaagactctaatacttatattatttgatcaaaactcaagagatagcactaatcaacaaaaactaaaattatttataaacaaaagaaagaaatgaaaaagaaagagtgttgattaaagggttcatttttaaattgagtatgattgggacaaaggtggggtaaactgtaaagtgagagccagagccaaagttttgggcaaacgaagcatgtatgtaagcacaattaattaaaaacactgaaaatgataatgtccaaagaaaaagaaaatgtttttaaagctgaaactatcacgtgagaaagtaaccaaaatgtatattatatgatggcataattctgacacataatatagtaagaaagagaaaaagtaatatagacttctcaaactcgatcaataatgcaaaaaattacacataaacatgcacaaaaaataaaagacccacaaacaaagcatagatagatcttttagaacaattcaataacgtcccaccactaatttaaagtctatttttacactattaattatttgaatgagtaaataaataaataaagaggcatttattaaagcaagtccattaaaaggaaaagaaggctaaagatagaccccactcaagtccaagttaaataaagaaaaagacaaaggagagagaaagagagtatagtacctaggaaatcggtcaagacacgaccgtcggaaaaacggccggtgggtttgccggggaaggtgattccatagggaaatttccaagaactggcttgggattttctgttgttgcctgtgtctgaataagaatctccgaacacaaaaagctttgttggcttaaagctaaacaggtgagaatcatgaccatggtggtgactgtgaccaaaaactatacatttaagaaacaaaaataaattagaattaactaacaaagtacagtgagactaataggggtgattaaggaaattaattaattaatttaattaacctgagagaagtgaggctaagatgaagaagaagcacttgaaaagggaattaaggttgagcttgtttgaatccatgtctttctttctttgtttttttcttttttgggtacacgagtaattattaagaggttgtaccaatttatattttctttttgttagttttaagaagaagaatgaacaagctttagcttctattgaagaagttgatagagttttgtgaagaatagacagttttttatgccttatttatagtacacgagctttgaatttttttatttttttttttgggaaaggatttccgttccgcgttggttctcaccgagctgtgacccagtaaggtcaacgctgattttgtttgacaaatatataaaattataaaattggaaaaggagggccatcatttttctattttggaggaaagaaaaaattaagaattttatggatatattggagtatcaaagagggagagtataaattataatatcttattattaattttttttaatttttgtatttgaaaatatatgttagaattaatttttttaataataatattatttttataaatttttgagaaattctaaataatttatattagatgcagttgttaggtgctcatagttattttttttttaactaattctctatctaacctattcagcttgcatttgtagtacttttgcttagattcattaataaatgaaattcgtttcaataaattttcttctcttcattcttattctcaacatagtattagagtagcttttttttttctctccttcagtgcattgttctctctgattgtcttcttctctctctccattctctattcatttatgcttgcttcaatggccggccgctccaataactccaaccttcaatcatgttgtttttactcataatgtgtttgtgaagcttgatgacaataattgatcttctctggcatcctcaaattctctcagctattcgatcatcgactccaagacttcatttccgattttgttcaacctccacacaagtttctcacttaagaagacgaagtaccaggatagatcaatcccagatttcaagagtgggaatgtaatgaccgcatattagattatagattaataaagacagttagtgttaattattgaaatttaataactatatatgattttatatttgttgtggactccatttttagaaatggacattagaattataatttcttaatttaagagattttattaaactctaagagtattatttatacgaattataaattatacaattttcatgatttttgctcggtgacgatgaaaaatgcaatgaatggttgttagagtcacatgagtaagtttatgtaacgccccgatatcttgtcttacttcataaaaataccattttatatgcataatttgaaaagataaaaaaattcttgaaatgcaatagtggattttagaaattaaaatacaacaaagaagtatcattcatttgtaaaacaaaatatgatatgtaaatgattttaaataatacatttccattgtctttagatttatcaacttcttaaaataaaactaaggcaccaccgg

SEQ ID NO: 305738 - DNA, 1340 bp, Cannabis indica
tattttgataattataaatatggctcgggtttgaattgtggtataagatctcaagggaatgtaattaaacttaaagtcccttgcttttttatccttccaaataaaaagatactagtaaaaaaatcacttattgaagttgaaagtttaagaatagatctgacaaaaaatgatagcctttaatcaattatataaaaataattagtatttttttatatcaagaatactaattataatatttaatcaacttttacacttaaaatcacttaatggaatattgcagttaattttttataaatttttaaaaaaatttaaaaaatttataataccgaaaataaaattaataatattttaaatctatattttttacaatataaattattcaactgtgaaaattttattaaacaaatataaaaattaattaaaaagttataataaaaaatttactctaacttttcacttttcttattaataatatattggaaagaaaggaacggaaaggtttggaaacagcattgaatattataatgccacaaaagatctctatatatataaacgatatatatgatattaatgagaagccacatgtcatatcgtatcatataaatcaactaaaccttccattttttctctctcacactcttctactaatcctcttaacatttacatctaaatatttttcttcgctgaacatacgttatatttttttttgcttaaagtcaatctaaattttcttttaagccctcaaatttggagagtttggaaactaaacccgtagaagaaaagacatgaaaaaagggttggtagttgaatctgggtatgtttcgatgaagagaccagcctcactgctcaaaaacctctcttttcttcgccggagatggcttcaccgtctacgattcaagaggtgaactcgtcttccgagttgactcgtacggacacaatattcgtgataaagacgaactcgttctaatggaccctcacggccgttgtctcctaactgttcgccggaaggtattataagtcttttttttatttacatcatgtcttttcactttcttccacacactctctctctcacctcacgagttgactcagtgagtactcaactcggtgtcgcagaaactattgttaggcatttctagaatcgtgtccgcaaaagggttggctatttttttgatttagatttgtgggtaccaaatgaaatatcctttgttgcttgttttaatggagattcgtttgcctcgtatatatctgagttaactcggcgagtttggtttgagtttggtctggtttggtatatataatctttttcgttttctttctttattgtaattagtttatta

SEQ ID NO: 305739 - DNA, 1818 bp, Cannabis indica
tttttgtagtgttaattatattttacaaattaaatttcatcaaaagaaaaccattttacaatactaataatgatatagtatatatatatatacatatcatgtatatgtgtatatatgaacagacacgtacgtatacatgtttttggtatgtatggttgattttttgttgggcctatatatataaaagcagagatggtgatatgagaagaaagaatacaaattagttcttactcaagtagtctaatcatgtctgagtgccatgttaaagattgacaagaaaaggttcgtaccttatcttaagcacaaagtatcaaagataagattagagtaaatctagctaagtggaccattttcatatatattttatttttatttattttctttaagagtttatatattaatcttcatctactgagatccagctaataaggtggggtttttgtagagttgtagaaatgaccaggataagttttttggggccaaaggaggtccaaaaaatcagtttgaaactttggagacaccgttggagtgttgtgctttttgcttaaatgaatgataattaagtgaagtgaagaagattgaaagttaaagggaaagttccaagctttggtgggtaaccaccctttttcttattataatcaatttgttgttgataataatattgcgttttgttgtgcctttgatttaaagtacatcaaataattataatgtgtgttgatatttctattaataatgttgatctatgcagttctggatgtgactaactgagacaccacaagcacaacattccctctaaagaaacatcatgccattacagtaaacaactatacatatataggaagactatgatacagaacattttatcgatacacattattaagtaatagtattcatcatctccattgtaccgtcattactataataattatggctaattattaggatttttgacccgcaactttgatatgtattaaattatactttcgagctttccgggttgtttaaaattttcttaaactatatattgagatggttggactctagaatttctatccaattctgttcattttactaacatggtgattgtacatgtactaaattgtctcccttgaactttaatatgtatcaaattgtgcctcccgaattttaacatgtatcaaattgtgtttctttaactcatgtatccgttagtaaaattagacagaaatcattgaatctaacaatcttaataaattgagaaattttttgacaacttgaaaaattaggagtacgatttgctacaagtgtcaaagttcaaggaattcattcaacgtaattgtccatgtactaaattgtgctgccaaactttaatatatatgtaccgaattgtacctttcaaactttgacatgtaccaaatcataccccttaacttttatgcacgttatatctattaataatattaaatacttgaatccaacattctcaataatttaaaaaaccttttaacaacttaaaaaaatcaaaaaatacaatgtaatagagttcaagtcaaaaatcttaactatccaataattaatattggtctagatcataccgatagacttaattttttttctctatataaatatatcaaaaagatgtttggcaatacagatctcttttgatgatttttcatattatttaatactctttttttcctaaaaaaatagcattaaaataagaaaaatttacaaatttatgtacattttattactaattataataaatgtacaaaaaagcttatttatgttataaaataatataaagtagatgagaagaaagaagaagaagatgaagag

SEQ ID NO: 305740 - DNA, 1944 bp, Cannabis indica
attaatgtttctaggttatgcatatgcatggatatcatctacagctagggagctcatttagtaagatttaagagctctgcagtacaagcagttggattatatgtattgcaaaacaaaattaagtgattgaaatacttcttttaagtaaataaaagaaatagataaaaattaaggtggtttttggttggaaggaatgaaaacaataaaaatagatataaaaatgagaataaaaatgaaataaaatttaaaatacataaaaaaaattgataaaaaatcacttaatttttttttctcatcatgcattgaaatagtttttctttctatttcaaaattgaatattcatttcacccaaattgtggagagatcgaccataatactttaatatgcaataaaataaccaaacgccacgtaattatatggacatgaattggatatttagtagacatatataaattttattgtcatgttaagttattaaattaatgaaaaatatttataaaattttattttaacatagtgtacattacaaaatttcattttctaggaatatttttttctcgttaaagaattatataattaaaagaaaattttaaacaagtaatatatataaattattattaattaaaaatagtatttaattatttttagtgaatttttttaaaaggacacaaaaaagaatttagttacattttcacttttaccttatataggtatatcttacattttttttaggaatgttactaaacaataaatgtaactaaaattacttaaaagtggaatgctagtaaatccatattttggtgtaataagtagctcatcacagttttcaatagaaatgtagtagcgaatgcgatattcgtatataatttgaaaacataaatcgattgattgaaacttatagttcatcgattgattgaaaagtaaaaatgttttgttttttttttaatatttttaatctttcctgtaatataaaagaaaaggcacattttatattaattaatatgaattaatttccccaaaatacgtaacgttgattcccataaacacatcagaaagtaaaatgaaatggcattgtcaagacaactcatcacaagtgtcgcaccaatcccgaatcaacaccacaaaaagaaaatgaaattttcacgagaaacaaacacctttttcttttgaacggctcctatcctatatatctgatataataattattaggacctaaaaaaagtttcagtatataagtaggctatatgagtctgggactatatgtagtgtgtacatgtatgtttttgagagagaaagaacttttttgtttagttttcttttctttattgaaaataacaaagtaaaaatgtagcagcagggtatgtatatatagctatatatatctatatctgctagcgcctagcacagctttgataaatttatatatgtgtgtgtatgcatgtatgtatacaagtcaaagaaaaaaggtgacattattattgaacacaaagcgaacataacatcttttacaatgacaagtcaactggtgttttggggcaaaacagcatcaaaatgcacaaagaaacaagaagcaaaacaaaactcaatttccttcaaatcatcatcatgatcatcaatatattctttttcattttcttgatctgggcacttcagctttgttcttgaaattcagcttttagagagagacagacacccacccacactaccaccacaaataaaattcttttttttcaatgtgataatatttgatatgaaattagatgaccaatagcaataagtttcagtttggagatagtgtttaatatttctcaacttagaaatgctaagaagtactattcgtgtctaacacttatatcactataggtatatattaaataggataattatcttatatactgtttttttaacttttttttaaaaaatttacagtttgagtttctaaag

SEQ ID NO: 305741 - DNA, 1040 bp, Cannabis indica
ttaaatttaattcttagtatgttaattgcttgcactaaagaagaccctagtaacaagttatgcttttccttttgtgtatgtttctcttattttgtagttatttgctttgtggttgtggaaattaacaagttgataagtgggaactatgtatgtattccattaattgaatgtcaatctattccatttctattttcaaataatttttttatatgattaaaatgaaaaagcttctagctttttttattaatacaaacaaagatttcccatattcaatcttttatttttcttttaaagatcacattattaaatataataacataagtacggatacacgacaatagtagctatcatgtttggttcataattataacataatcatattctttcattgatatgctctaacataaaattaggtggacacaggtcacaaaacagtgttattagctattaatttaaaaattaaaagatttgccacttgaaaaatggacccaaaatatatttcattgttgttaaccctatcctcttcttcatctacagccaacccaagtctcattagcttatcatttgccttattattaatgttatattatataatgtaacttttcaattcacactactatataataatatttaaagtttataaaacggaaatgtatatatagttatctttttgacaggacaaaatgaaatatattgaatatacatgaaaacataatttcatactttatcataaagtttttaaaagatgagtgctttgtttgttttataaaccctactcattctcaactctacactaatatgtttggtttgggttgatttggtttgcatagggaggaaaatgatcaaagggttcactagagcaaatattatccaattggtggtgatagtaatataccaatatatatgtatacatatagtattgggaatatcggtaaaatccttatatttttcgttttcaaataattataattgtaatttttctaagattaaacattttgctatatgtttgttttgttagacaatttatatgtatagactaa

SEQ ID NO: 305742 - DNA, 536 bp, Cannabis indica
tatgtatatatattcagatttaacaaaaaaaatcaaattgtcaaaccaaacacagtggactacgaacagtgtagttgcctaaaattataggctcaaatatagacatcccagcctagcttgcaactcaccaacctgaaattcatgtaaaaaaatgcttgaaaaacaactcatgtggatctcacagaagctgagaagaaaggagctttgacttgggctctcatgggcttcgacttggggaattgtcgggagctgagaagaaaggagctgctgtggtggttggtgagtctcgttacagagaaatttttgagccttgggctcactggtttgaaatttttaagcctttgggtcactgtagagacggtctgaaatttttgagccaaatttcccaaatattttagccaagattagctctgtataaagtgcatctttgtttattcagatttaagagagggcagtagagcgagagggagatcatgagagagggtgatgaattttcatggtgataatggcagattaaagtaggaagaagataggaa

SEQ ID NO: 305743 - DNA, 1994 bp, Cannabis indica
ttaaaattttgcaggatgtcttaaataaagtataatttacatgactatgagaaaagatttgactaaaaacttatttcggatactaaacagataaaaatgtatcagtgtattccttttgaggaagtacattatagaattttcctataaatataaatatatatccctttctctttctctcttcagtcaaatgaaaccctaattctttaaccaaatctctctcgctcttttaagtcaaatacccatttgttatcaatgtaaatgtatttatattggttaaataaaatatgaatctatttatataattttataatttaaattaataatgatacacatctaaatttattcagtcaaaattaaaaaattgttaaatttataataaattaattaataaaaattataaaaatatatttattatatatatattctttttattaggatattcccatggtaaattgcagagtcaaatgggttggaaaccataccagtagaaagagaaaagaatctcaaacaagcaataataatattatgagcattcctattacgtaccaatgctgactagcaccttctcgacatgtcgcgttgcgattggctagcgatacttcttaaaagctattattaggtaacactggtaccctttagcatttagctatatataatagaaatgaaaatgccaatcccaaacagaagtcggaagcagttaggatggtggcctcagccgagtactagctagctagctcgttcacaacacccaataaccgccttatgggaggcggagcggtggcggaggaatactgtctgagcctcgtttctccgccactgctagatgggtcattctatcaaaatatagaagaaaaaaaacgaagagattgttcaacagctaataactcattatatatgattacaatatccatttgaaataaaaatgccaatccggacatcagccgcgagtactagctagctagctcgttcgaagcagtggcggacaagtgtagtttctcgtttgtccgccaccgctcgctgagtcattttataaagaaaagaaaaagaaaagttcaacagctgaaaccatatttattcttaataacttaattatattattacaataatggagatttgaaatgaaaaagctgccactgctgctgctgattccataacctcgtactagttattactagagcccgaagccacccctgctggctgcatgcatgcgccatttaatcaaaatatatatataaaacaaaaatacaaagattaattgtatcaaaatatataataaaaagaaaattggatagataatgatgatgatcactactactacgtaccttgtttttttattatttttgggttttggtgcaaatagttcttgagcagttgtctgcttcagtagtttcttgggattgtcattgttattattattatccttgctttcatcatcatcatcctttccttttcttacatgaaatagttgttgtggactaagggaatatggccgtgatgatgatgaagatgaagaactcatatctacttaccttgaaattataataatatattattaaagaagcaagatgatagagtggatcaatgaagagtaaaaaaaccaatactaaaaatgcatcaataactaataaaaacatgaatgtattatatgtaaaaatataacaaagagagatgatggtgtatatataatatgtagccaagctagaaaaatactaatagggattctaagtcaattggtttgaaatctttcgattcaaattgacctcgtttaaatgggtcctacttctactgggtttaataaatggtgattggtagaaatgcgagtttatttatttaaaaattaaaatggttactttttaatgaagaaagtgagtatgtatatgggaatgcgtattgttttagtccccttatgatggatatccaccgtttatataaacaatttcaatacacatattaatacattcacatgatagaaaaattaataataaacccaagat

SEQ ID NO: 305744 - DNA, 2919 bp, Cannabis indica
agagggcttatggaccaaagatatgaacataaaggccctcgggctgaaaataaagtaagtgttccaaaaaggccacaggccacgtggaacgtgaaagtaagtaatgttctaaagataaaagtccaccggccataaaaagccacatgctataaagctaaaaggccgccggccatattaagccatggagctatacggaacatgaaaatattgtttatgtttatgttatacaaatacaatgtcgaatactactaatgaaaatactgtctaaatgtgtgcaggggcaggaggagctgaatctgaagccgcgaggtcgagattgcaagagtctaggccagccccaacatcaacatgctggtcgacctggtggttagtgtcctggccagccacctcctccacatatgggtcggccaacccatcgtcatgagtctttaatgatgacccctcttgttaggtagcgacctggtctacctccatccggctcccaaaaagcacctttccacgagccaacattgtctccacaaaagccaaactacccatgtacgatagtttagctcaggggttgcgcaacttgaactcataagtgagttcggaggacaagtcaacatactcctccctaatggcctactagccatcaagagcctctttctgctttgtcttgtggtcatcaacgtaagacttcaactcagagataaaggcagcttgtgcagtgttctctttgtttctagtgtcaagtatagtctctaagctaaaaaccattctctttctttctgcaaggagcgcctccaactcagatatggcattatctttcgctaaaagggaagcctccaaggtcttgacccgctcttgaagagcatccgaggacccgcgagagccatcatgggctaagctcggctttattaaggcctgaaagcaaaacaaaacaacatcaatgtcaaagccacagcactggccagctagtcgccccttgggactgctatggttggccagcccctcacaatagcatcaaaggccgaccaaccacatgcaacaagcctcatggccagccagcctgtgcagtgccaaaaagatgaatagagcagaaagtacaacttactagagaaagatctcgaagaccggtagagtagagcctgtctagctcaccgtcaccaagctccttcagatcctcatccatgaaggggatagctctctcaatgtgcctattggctgcctcagcagccttgtacccaaaaattgaccccgctcctctactgggcctcacagtaccctggtctgcaggccgtatcacaagctaccaagctggtgcacgccaaggcagagggggaggcattgacgacccagtattatctccaccatgagaagtcttggccaccttggccttcacttatcttgtgggctcattttaaggtcccccggtatgacctctcaacttagaagacatatctggaaaaagaaagtagcagagtcaaaaagcaattataaatattaatacagaataaaagcatggtgttatcaactatcaaatatcactatcattagaaaaggaactatcagagtcctcgacaaccgccttatgcttgcctctagatacaggcatagggtgagtaggttcctaagaagcttggcctttaaacccgattcggagagaagcatcaccaactagacctccactaactaatcgctggcggagggccctctccctcctctctaaattctatgcaatgtgagataaaggtacgtcatcatccaagtcaggagcttgcccatctccaaggtaggtcccatctacagctgatgcttctgcaactccaggaacagaaggatacatgccatacttccaaaaattgccgcactagtcaacgccaatatgttttcaatttctttagaaagagcaaagatgtggttcgccctataccttatttgcaatgtggggatagaacgcttgaagaatggcactgacggaatggccaatcctcctaaggccataagcaatgaagtacctcttggcatacctgccaacttttgacatcaatttaccatttgtgtctcccaacaactggtgaccgctctgattgaaataaaagtacccagtcctgttctgcttcggggcagatttcacatcaaaaatagtatatgatcttatagggagtaggttgtggccaacctagctccctatataagacaaacatcactaaaaggtacttgatactttttagggtgatttgtgtcagattcatcccgaagtatgcaacattgtttaaaaagtaaggatgaagtggtagcgctgccccatgctcgatgtggcgccctgaccaagccaaccacccaaggggaagctgatgcacccgataatccctacaaggtatctcgcaatggacacccctcactaagccactagcaaggaccttgctaaaggcttcatcagaaagagaggaatcgagagagacccaactatttccctgtggtctcgcatccaatatctccggctcagaagactgctctaagacatgatccaacaaaagctctgaacgctcaccaagcatgttcaacaggttatcattagcatcataacgactcaagggagaatttgggagaacaaaacaagtcctctacctcctcctcctcactagtgcggcctcctctagattagattagtatcagatttttcatcgccttagtgaatctctaactcaacatcagcacacagctaagctgtctcctccaccatcctaactgttgggttttgtgccctaaataaaacccatttcaatataatcagatttactaattaataaagatcataaatcgttttatgttgcatggttcacatgatttatttcatgattatacttaatgtataaattctattaagtccaaaacatatataaatatgtatatatttgttcatgattatagtttcat

SEQ ID NO: 305745 - DNA, 2477 bp, Cannabis indica
tatatatattgtgaatgagaatatgatataggagagtattttatatattgtatatgtatgtattaaatattttaaaataatatttttgttaaatattgcgaatgagaatgagatgggagaatattaaaataaaattttagaatttaattttaaaaaaattagtttataaacaatagtttagaaattaactctattttgtatcaattttttctattttcaattttattcatgtgtttttattttttttagtagctagtaaatagttagttacaactactatgacagattgtattagagaagaactaaagcaagctctttatgctattttttggatcaaaagctccagggtccaaatggatttggtagctctttttttttaggggaaatttggcagatcattggagaaaaggtagttgatgctatcatatgcttcctcaagacaggacaattgctgaaagaaattaagaacacagtcctcattcttgtgcccaaactaaaatgtcccaatacagtgaaagactatagaccaatagcatgttgcaatgtcatctacaaggcagccaccaagttaatttgttcaagacttaaatgtctgttgcctaacttggtttcccaaaaccagggaggatggatttgtacaaggacgcttcatagctcacaacataatgatatgtcaggaccttgttcgtcactatgggaggaagatgacaaaagctagttgcataatcaaattggatttgcagaaagcttatgatacggttgaatggagcttcattgaagaaatgttgtatggattgcattttcctgagcaattcattcagcttgttatgatatgtattcgatcacctagattctcatttatgatcaaatgggtccttacaggactactttgaagcgaagagagggttgcgacaaggtgatctaatgtctctattactttttgtacttggtatggagtatctcacaaggattatgaaaaaagttggcagaaatcaaggttcacttttcatgatagatgcagagacctaaaactaaatcatctcatgtttgcagatgatgtactactattctgcaatggagactataacagcatctattatctattacgtggccttaagcttttctctcaaacatcggggttgcagcctaatccttccaagtcggccatttattgcaatagcatgtctcctacagaggtgcaacgtatacttcatgcatcgggttttcaaagaggtgaggtacctttcacttatctgggtatcccaattagtcccaaaagactctcatcaaaggagtgcattattttggttgacaaaatgacacagaataagatcatggagcaccaggtacatttcttttgctggtagagcagtttttggtaaactcgattctacttgttattcatacttattggagccaagtcatgctacttccaaagtagatcataaaagagattgaagttgtgaggaaagctttcctatggaaagggcagcatatgatggttggagcaggacaaatagcatgggacaatatttatcaagctaaaatagctggtggcattggtttcaaaagagtagctgaatggaataaagcggcaatgtttaaatatgtttgggcgataacaactaaagaagataacctatggatcatatggatacatagtgtatatattaaagagacagattggtggagttacttggttccccaacatggaagctggtactggaggaagatagtagcactaaaaggtattcttttaaccttaatgaatccatcctccattattcagaataagtatagaattgtagaagtttataaactgctttgtcccattgctggccgagtcaaatggagtaaggaagtgtggggcaggttaaacactcctaagcatagctttgtgatatgacttgcaatccaaaatagattgaagacaaaagaaatgttgtttcgattcaagattgcagcggattcaacctgtctaatgtgtagcaggaaagttgaaacttgtgagcatctattctttgaatgctctttctctatagactgcttacaataggtgaaacattggctggggcagaagaccacaacaacttgactggctgaactggtcagaagcattgaacggaggaaggcaacatttcgaaagcaggtcttgtctgttgtttgtgcagtgttagtgtaccagatatggaaagctcgaaatgagaaattctgacagcaaataaatgaaggtccaaatgttattgtacagaaagtgaaaagtgtttgtaaaagtagaatccatagtgtgtggcctaccaaagtgtcaatagaagattcatcatggtttagtgctttgtaaatattatagaaagtgattttcattcctttagataaaaggtgttgtataagttgtaaaatgttattggagtaatgaaatacactgctgattttactaaaaaaaaaaattaacatctacttagtaagttactaatttt

SEQ ID NO: 305746 - DNA, 947 bp, Cannabis indica
aacgttgtataaacaaagctgcatactgtcttgctcgtagctcttgtttgtattcagatcgtatttttcagtgagagtaatactcttgctgatcttttatctattgtaatggtggaaagttcattctaataaagtttaccattttctttcaaaaaaaaaaaaaaacaaacatttaaagaacatagttacactataatagtactatttgttgtttggtaatttatagaataaataaattaaattataagagttttaacaattaattgtttgtgagtttgaattctacaacattggttaggcaaattttgtttgaaatgttgcaccatcatgctatgttagttagtgcactttaaattatagttagttgagtctttcttttcctatataaaggccattagtcattctgatatagtaacataattcatactgaattgagagagtaataagagagacatagaaagagagaaaaatagagtgaagagagagttgggactaagactggtcttcttcgagttgaaattcgtgctcagtttcaagagtattcatttgcaattactctgtagagtactgcacttaacaactcaatcttgtaatttcatcattttaatgtagaaaataactcagagaagtaataggaagtagaccttttgatttggccgatcttgtataaaatctcgtgttctttactttagtgttttgcaatttttctttctcgtttgagtgttcgtaattaattggattttgacttgtttgattgttcttagtttgagttctgtgttgttagaattcgcaacactatgaattgacccattcaattgtagttcactatcattaatattaggaaaatttacatggtatactaacttttgtcaatttttaataaaaatactgccaggcggtatttttacttttttactatatttttttataagtttcatactgtagta

SEQ ID NO: 305747 - DNA, 1579 bp, Cannabis indica
tggatgaaagttcgagggggcatgatttaatacatgtcaaagttcgagaggtatgatttggtagatatcaaagtttggggacatggtttagtacataaacaatcactgaaattgtaaaattgaatgcttaaatccaacaatctcaataattcaggggacatttttaacgaccttaaaagttcaagaagcatgatttggtacatgtcaaaattcaggaggcaaaaatcctaatttatttaagttatgtttgagacataaataaggaaaaatgttcaacagcacagaggttagagtacaaaatcaggtaatgcttgtggagaagggcagcaaaagagcatggatttactaacatatgcattgatatatccaagctacgagtattcatatcaggatattgatataagatttactggcacatgcagagtaggctttagaatgcatgatgtcctaaatattccatatacacacattataccagactactttagagaagtcaatgcatatgcatcacatgcttgtttgtggcttagttaattattaaagattctgagactatgctaacctctccagtgaaaagtacaggacgggattctttagcagccttgattgcgtcaaagttactgtcatggtcagcccgtatcctgtgagcagaccagcgagatgaagcacccttcaaacgggagtgaaaattaaaccaaaacaaattagtaaattaaaaataaaaagttaatagagcaagtaggtgatccattagccaatcaagataccaaagatttaatttattaattaaagtattctacctcacagtatatggattcatgcaaaagagcataaagtggatttgtgttgaaagcattggacttctcaaactgcatacatgtacaatgaatccagtttaatgcgatgaataagattcatcattaggtcagcaacaatgaaagagcaatgatgtcttacagcgtccaaaaagttgtaactgatttgttttggtgctcctggaactaatacaggatcccacaccgtctcaaacctgcagattataagaacaaaaaaggtgaaaaaataaaccaaaagaattagtaaaccaataagttcttaaaatccctgacacatatccttaaaacttacatgtagtgcaaacgctcaaagccagcagaggaacctaagcatgagaggccaagagtttgcaggcctctcggggttaagatgcccccagaaggaagttcaacctacagattgcaggattgctaagattaagcttagcaatcaaatgttagaaagaattacaaggactaaacatacaccatccttacccctcctccttcagactctgacaaatacttgacaacttcttgaacaatcttaatatcctcaggatacctctggtagtacttctcattctgaagtttaacctgttcaaagcacgctgtgtacactgcatctgcggtgcaatgacttccaagtggaggggttcctccagtcaggaggacttgtttcaatccttcttgtgcaaaactcaaataggttaccgcacaaaaaccaccatagctctatacaacaaaaagaacaagttgtcatt

SEQ ID NO: 305748 - DNA, 2257 bp, Cannabis indica
aacataaaatgttatttctgatctttataaataagtaaatctaattatattgaaatgggttttatttagggcacaaaacccaacaactatacccttgagggagactcataaacacatcctcatgcaaatctccatgaaggaaagtattattgacatctaattgatgtaaaaaccaacctttaatagttgctaaggcaagaataagcttcactgaaaccaactttgcaacaggggcaaaggtttcattgtattcaatgccttcttgttggttgtatcctttagccacaagtctggccttaaacctctcaactgaaccttcagcattcaacttaatcttgtagacccatttgcagcctatggcatgttgatcatcgggtaaaataacaacaatctaagtgtcattaacttcaagagcttcaatttcagtatccatgacattgtcccaaacaggtataccttgagcttgatgataaaattctggtttatagtggcttgaaatagctagcacagttgctcaaaattgtggtgataacttgttgtaatcaatgatctcagagataggatgagaattagacaacttagacacatgagattgaacactgttagtagagagaaaacagtgataatcttgaagaaaggttggtttttgagtgtgtctaataggcttattgtaacatattgttcaggcatatcaacaatatcaagattaggaacatatgactgagtttcagtagaagaacatggggattctgcaagaaatttattagaaacattagctggaaagaaattaaggaacggaaccagtcaaaacaaaaggaaaattttgttcgtggaaaatgacatctctagaacaagaaactttgttggtatttagatcaagcaacgtataagctttcattccaataggataacccaagaaaacacaaacaatggcctagttgagaattttgatcttgcaactcctagtgtagaagcataagctaggcacccaaaaggttttaaatggtcataactaggtgctttagatttgaggattttaaaaggggatatgtgctttaggttaggagtgggtgtcttattaataagataggccaatgtgcttatgcattccccccagtaaggtaaaggtatatgagattaacaaaacgactctagtaacatttaaaaaaaaaattgatgctttctttcaacaacagaattctattgaggcctttgcacacaagaatggtaatgaacaatacataggaaggaaaataactctggaaattgaagttttttggcattgtttgatctaattcccttaatttgaatattgtaccaggttttgattagctgtatgaaggcatgcatagctgtttaagcatcaaatttttttctttatgagatgaatccctatatacctagaataatcataaacaatggtgataaaatatctaaaaccttcaatagtttgagtattgtatggtccccaaatatcattatgaataagatcaaaataaaatttagaaatattgtgattggaaacagaaggcaattttttttattttgcaaaatggcaaatggaacaatggaaattagtactaagagaaattgaaattgcagattttcattgagaaaatgattccttacacaagaagtattgccaagtctataatgccacaaagtatcatcattgatttttgaatcagaaatatagtaaataataggaaaatcattctcaatcaggtagtaaagatttccaatcctttcacccatcctaatcacttgattctttgtagtatcctgaatgacacatttattaggaagaaaaagaaatgagtaatttgttaaatcagataaagcacaagttgagatcaaactatgtttaaactcatgaacacaaaggaaattttcaagaattatattgaataatttgaaagttccaatgaaagaaattttgatgttagttccatttggtaacctaacatgtgttgattttgtgtccttttgagtagaagaaaactaggtacaattagaacacacatggtgaatattaccagtgtcaatgatccaactagatttagggatgagattggcaataccagatatgtaaagaccgcttagtttagtttggaaattagcagttaattatgtttaattatgaaaattatttatagatatttaaataattatttatgctgttattattgaattctgaaatgcaatttatgtcatatagtaaattttataattttacatttccggtgcccggtaacat

SEQ ID NO: 305749 - DNA, 2546 bp, Cannabis indica
aaataagtgaatcacatgaactaaaacaaattaaataagtaatgaaaaataaatatatttctttgttgataaatgaatataaagcattacattgaaatagagttttatttagggcataaaacccaacaataagatgctctcattctcatccaacctgtctaaacctagttttcattctttgtcatacaactagtaaatgagagtctccttctatagtgatttcgaacctctcattcttcttcatcaaatttaagcctttagtgatagagtaccatgtcccctcatggcaagtcaagtactcaatcatagcgtggaagatggtggttaaccaaactgaaggagagaagatcctggttcagatcttgataatgctctgggacaaaaaggaacaagggctagagatctgatttgaaattgtcatattattctgctgccatcaatgtaaggtattttgaacttatatgtgtttatttcatcatattaggaaatttatattgagggtgttagattatagattataatcaacatagatgttaatataactagatcttagtaaaataatttccaacacttctctatcttcttcatggtcttcgcaagcttggagagggggatgtcatcatctagattaaaagtatgcctacctcctaggcaagtctcctctgctaccagggcataatttaggcctccagatgggccctcagccccctcaacaccagactcgggaaggtacataccatacttccaaaagatggcctcacaagccaacatcgatatattcctcctctcaacaaggagggacaagatctaattagctctatccctcatctagagagtggggatggagtgtgagtaggtcgacaccctctggaaagggtggtggacctccgggatgtcccaggtaatgaaataagtcctggcgtatcctcccacttttgacaaagttatgatgctggtgttgcctaaccactaatagccaagctgactgaagtagaagtatctgggccagattttctttgccacggatttttgctcaaagaagtatccaatctcgtagggagggggggttgagggctagcccaactctacatacaaatgaacatcaccgaaagatactttattccattcgagtgatctgagccagacacactctgaagtacatcgctatgtctctaaagtaagggtgcaggggtagtactgctccttactctatgtggtgctctgaccaggccatccaattgaatgtcagtcgatgagctcgctggtctctcataggccttacatctcctaccagcttgcatggttttgatcttgtcaagatttagggtagaaatacaggacgggggagatatccaccagtcctgctggtccccatgctcgatgacttggggcgctacagcctcctccataacatggcttatccagaccttggaaagatgaccaaagctattcaaaggtcacctggcctcatcatacaaacccaaggggttattgggcaatacaacacatgtcttgtatgcctcctggtaggcacgacttcttccacctcagacgcagggtcaatctcgattgaggcctcttcatctcggctagccacagcctgcccagccataggtgcctcagcttggttgacccctgtcactctatcatattgaggatgtacaaccacctcagcaatgccgaatctccccctagtcgctagcataatgatgtgagggtcataggatggttccatgcggcacatctgtttgctctttgccataatggatcctgagtgcctagctacagtaactgtggtctctgcagctagaagatctctcggtgaagaaattgcaataccaacgagcaaagtatcgagcgcaccgtccagaatgatgtaagtctaagaaccaagaaggcactacctccaccctaagctcagctttcagatgaaccggctgtaaaactcactgcctattcactctaaatggtgatgatgctggaccttgggttctggttgatctcgaggagcggttagaggaatcaactggacactggtctttgaataaaagaccaagtaaatcttcatcgatatggttgtcacctccccaatagtcactcgggatcatctacacacaaaagacaagggcatgtgagcaaccagacaaagcgacaaggtttagacaagactctggtcaaccgtacttgagggtacttggcagataatttcattgtataaggctgggtatcaacgaagtataatttctagtgtaacaacttgtacaagtgtcgagtcttaagttgagaattgaactacaatagactcaccataaagtgccatatatcatttctaagggaaccacatgtaagacaaaggttgtataggttcgcaaggccatcacatgattcttatcgaggtgaaagaggatagaaaacttaccacccacttgggaccaaagccttgggccgatcagggtcccaaggcattaagagggtcgaccagggttccatgacccatgtaagaaccagccagggactcatgatgttggaaaatattttaccaggat

SEQ ID NO: 305750 - DNA, 1272 bp, Cannabis indica
tttttggttttggtttggctttgtttcttgtgctaaaagatggaaaaaggagatgactctagactaatagcatgccctattggatctctttccttctgtatattcctaatagtttttgttccttttctttttattattattattaacatttaaaaaagggccacagaattgcttgaaaaaccaagtagtggcctcttatagagcgctgatcatttttttacttgtttgacttcccatttaaaagaaagtgaatcatagcgttaggctaaacggaatggtgaaagattaaactgatatccttacttgagaggatttctaactaaaatgtgaaacgatactctaatggagcattcagccataacttttggctttgtaatcttggacttcttttttcttctgcatttatattgcttgttgtaatattgttaggttaaggttgttaaatttagtatatgacagtctctttactatagctatcaatgttatgcatttacggtttcatatttactttgctttttttcctaaaggggaaagctttttactcattcatatatttcttgaggaatacaggtcccgggactactgaagattaggtatattggacaaacaacacttggtagtgcagctatttttggtctgtttttgggtgctgggagcttaatacactgtgggaagtcctattaagctattcgttttcctttcattttggtataccaaaaatatatcaatgttctgttaaaaaatttctggtttctactttcaatatcacatctcaaatacacagatgttgaatcagggtgaattatcagttctatgtaatctgttgtttttttatgggtgcttgcgtaatttggtagccatttctgctgtttatattttatttccttgttgctgagatatattgctttgcattgtgaaattttgtttgcattctcttcaaattcttggggttatgagccgctgagctggctgggtgatattttattccccctgttcctgagatatattcctttcaaacttgcattgtgaaattttggctgcattttctcttcaaattcttggggctatgagtaggggttcggctggtgcataggctttgtttacaccagtatgtgatggtaagagcttgtttggcatcctaacttgttttctgttttaagtttttaaaaattaataagggacgtttgacaaaaatttttaaaaattgagttttaaaaaatttgaaaacagaaaacattaaaatgttgttttcaatttttaaaaataattttt

SEQ ID NO: 305751 - DNA, 1930 bp, Cannabis indica
atatgattttagtacaaaaaaaagtttattatagccttttaatcaaaacagctcattctaaaagttgggttggagcagctttagctttcagctccagcttctccaaaaattcttcaaaaagttattttttgactgcttaccaaacaaaattttattacaattttttcaaaaagcagcttttaactttttcaaaaattgtgccaaacgggcccttattttctcttttgcttcagtaggtgttatacgagaaattggaaaaaagtgactttgaacaaaaagaaaaatgcaagggagtgatataggggttgaataaagagaaagagaaaaggaagaaaattaaagatatgggtagtattgacaaagggaaatcaataggtttttaaagttaactttctagggaatttagaggattaatgggcagttgttgaggtggattgggtgcaaaagagggtcattgtgtgggtcaacataaaatcattttgattaagcacaaggccaagcgtcaagctaaacaacaatttttttctccacctttggtagggaagggattagatgcagtagaaatgatgttatctcagatggaatagtctttgggtgtgatggtcatgattgtgaggttggtatttatgatattttggatttatcttcttctaattcttgtaatgaagcaaggagccttgataagaaaggtcgtcaagagcaatgaaactcttgtgctagaatgtccaaggaattggaaaaccttggatgttgaaagctttacaatctcacatttaggaatttaactcaagcattaaatttctaattgagagtaagttaacaaggttccaagctgagagattgtgttcgagtttgcaatttaataagttctggacagtggatagagtggggcttagtggggtttattactaatgtggagagatgagtacgaactgtgtgttgattcgagttctctgggtcatattactacaatggttgctggagagggatttgtaccttggcacctaactggtttttacaggaatccaaaggtgtcttaacgcaaattttcttggaaattattacgaaatttacatggggagatacatggtccttagttgtgtttgggggactttaatgaaataacttgactatctgagaaagtgggtggacaggttagacttttaggggctatgaaattttttagaaaagttattgacaattgtgctttaattgatttcttctcttgcaaaatagaacttatgtggtgtaattggcatggtgtaatggagaggttggatagagctttatgtaatgaagagtagcttagagtatttttgtgtgaaaattttggattggatggaatttgaccataaagctttagtggttgatatactagtgtgtgattcaaatgataaatgtgatcaagttaagaggcatagccattttcactttgaagatgcctggtgtgaatatgtggattgtcaagagattgtggtcaagcattgggagagtactgatggattaggctcgactaggaggtttaaggtgttaggattttatgctttaaataaaacccatttcaatataattttatttactatcaatagaagattagaagtcatttatgttaacatgtagttttcatgattatggttttaatatacaagttttgttaaattcagaacatatagttattcaccattacagtgatgtcatcacagtggaaaataattgtgattatatgcttcatagtctttagtcccatgatttatcaatgtactaaatttacactaacgtgataatcaccgataaagtttacttacacttgtataagtagaatgtcctttccagggtattaggaaagtatactagtatcggatgtatagagtatacaacaggttggatcgatattgacaatggaaaagatatcattgttgggttttatgcc

SEQ ID NO: 305752 - DNA, 1122 bp, Cannabis indica
tagacccaataatttagaatctaggtcttatatgtacgctctttaagacaataacagagtgacgaaattaaagaaaaactacaattttataactattgggtatatatactgctaaaaataaataataagttaatatcgtttacaaatttaaaactttgaataattatgctgctatttatcttaaaatttaacaaagaataacaattaataaactattttttgtgatttaggccatctccaatagcacactaaaaactcatatatagtgtattttttcttataaaatattccaatggaactctaaaacttatcctattttgatgagagtctatagtgtctcattaataataatggaatattgtagaccattatattaatttttttgtgtaataataaaaaatatagctttttagtgtaattttttgtgttataattagaattaaaataaataaataaataataataataataataccaaaatagtacttttttagtatagacttaacactaaatttgaatttccttaattaaccatataaagaaagaaataaaatataaaatacaaaaccctaaacttgatcattgagatatgtgcctatatttgttgtgttgaattagaaaaaagcatgattaataagcttaaaaaaaagaaagacaatttagtggaacaaaataagggttttgtttgtgggttaacgagaatatgccctactgaagagactgacaagcaaagagagaaaagtagtctttattatgcctcgtaactccctacttcctctcttttccatattatattgaaacttttgaggtcccatccttaaatatatttttatgtatatacaacaaaaccaaaccaaacccaacccaacccttctttcattgtttcattttattttaacaccccaaaacatctatgtctagggatgtaaacggggcggggcgggtgcggggattgctcctccactcctatacccgcttcttaaattcaccccatacccgttccaatacccatttaaattaaaacggggtgggacgggtattacccgacgagagaaaggatctttattgagtacccattacatatatatttttgaaaaaaaaaaaatgatgtcttaaagagaa

SEQ ID NO: 305753 - DNA, 1988 bp, Cannabis indica
ttgcacagcttacccggtatttccccttacggatcacgggaatactgactgtcacaataagtgatgatgccatcacttatgcttagatggtggaaaaggatcttcaagcagagggagcggtagagtttatacatgagtttaaagtgacccagaatagtggagttgttgtttcatctacttcgagtttttgtacgggtggtggtgattcattccatgatcataaaagaaaggctctagcgacatctagtttctcagtcaaaataagaggtttagaggaaccagaatagaagtggtcgtcagggtggtcctaaaggccgttacacttatccaaagtgcttagtctgtaagaagcaccatatgagtgagtggaaaggaaaggcatgtttcgagtgaggtgttatggggaatttaaagtaagacctactcaagcttgggtttttccaattactcaggtcgatgctaaggctagcccgccaatagtgacctgttagctctctatcaaaaattcttgttactccatattatttgatttgagagctacacactattatattgcaagtagagtgattgattatctagataggacctgtgatagttatgaattagagtttggaccctacttcctaatggagagtcagttatctctacaagcttaaataggtctatgctagttaggatggatgatagataattaagcgttgatttagttgagctatccatagaagatttcgacatcatcttaggaatggatttcctatctaaatatgcagccactattaattgtaagagaaagatggcaaattttcaacttgagaatgaaaaacaatttgttcttgcgggattgtttcagagttctcaaatcttgatcattttagtcttgaaggctagagacctattgaaagatggatgcataggatgcctagttatagtgatagagactagaagacccgggatagttgggcctcagggtatcagagtagtgaaagagttcctagatgtatttcctaaagaactacctagtttactaccacaacaggaaatggatttttttaatgatttagttctgggagaggaatcagtttctaagtcaccttgtaggatggctccagtagaactcaaagagttaaaattttaacttcacggaatgttggatatagggttttcccaaccaagtgtatcgccctgggttgctttagtattatttgtaaagaagaaagatagatcacttcgtatatgcattgattaccgaaagttgaataagaaatatcttttaccaagaattgatgatttgtttaatcaattttgggagaaaaataatattctttgaaatagatcgtaattcagttatcatcagttgagaaggcaagaggaagatattacgaagactacatttcataccatgaatgatcaatttgaattttttgttatgtcctttgagcaaactaatgctcctacaactttcatggatctcataaactgagtattcaacaatttctttgatgtatgtgttattgtgtttatcgatcatactatagtgtaagttatatgccatgtttaaaaagtgcgagttatggttgttacaagtggcttttctgggtcctattttgagtaaatatggtattacagtagatttggtgaagataaagttagttagagactggacaaggctgaaaaccgctacagaagtcagaagtttccttggcttggctaggtattacaatcatgttatagaagggctttctaaggtttctacacccttaatagaattgaattagaagaaaaagaagtttgtatggatcgataaatgtgaagccaatttcccagagttgaagcaatgatcaattacagcttcagtattagcctttccatcagattaggaaaagaatgcggtggattatgcatccaagtgcttgacatgtaacgccctgacccttagggacgccacgtgtgtgcttttataaacttattatcactaatctataaatttt

SEQ ID NO: 305754 - DNA, 1582 bp, Cannabis indica
agttcctggtaaaataacttccaacaaaaggtagccctgttggtgggatatttaatcttcaccttggcagcatccctcattaacatcacattcggattaatccattgcaccttagacacaacctcgaccatacttcctagtcttttcatgttgtttatagtcaatgcatttggtgaaaagcccttcatattaatccagcactccacttcattgagtgtagcttctttccagttcccattagtcggccatttctctgtaatcaaaatgccaccatgaaaagtccatgttgacttcttgtacactttttctgcaagcactttatctttgaacgacaaacccaccatcattcatcctttttccttagctagtatctccacagaccatcccttctctttctcccatattttagagaagactgatttaaaaaacttagccgtgcaatgtcttctggctagtactcttcccaccatagagccatctttaaaaatacgagcaacctcatcgttagactcccattcatcttcaacttccacattcaacccatctgtaagagagataatgttatccaaatccttatcaatcataatagcaccttacccaatccaccaccacaacactaaactaagcttaaacactcacaaacgctcaccactcactcaaactagcctgcaaaggaatgtcactaagactagggttacactctttttagagagaaccaaaagctattcccaattttactttcttcttcttattctttgctatataaattatcgaatccacaaaataacgatgttgttaggtgattacttgcacaatgctaaatatcaatataaatatattagagatgatgtatgattccacaatgtcccagagtcgttttaagttttaaccttgagcaacctaattaaggttaaaatttaaaaataattccttttaattttcttttaaaatatattaaaatattaattaaattttaagatattagtagtagtactatttggaaatgtatgtagtacacctaccttctaaatgggcaatgcgcattttagtagactctataatctattttggtattataaacagttttttagtttatagagatattttaattttgtatgaacatgtatgttgtagttatttataaccatcagtaaatttttagaaaattatgaataacttataataccgaaaataaagtttaaataattacgaagaaaaaataatcacgtgtacattaacatgtttgaactttattttttaaaaatttaaaaataactttaaataactacaacatacattttatataaaaaaataaacttaaaaaactaatttgtaaataaataaagagttttccgaaccacttatataaatatagcactataaaatcacccctactattttattctacccaacaaagaactaaatgatatttaattaattagaattcattttccatagaattctaaatatataatgtattattatatttagtcatttttgttaaaatactactataaaattggcttttagtaggcaatttttaaggtctttcaacgtcgattttggcaaaattcgttaccga

SEQ ID NO: 305755 - DNA, 2790 bp, Cannabis indica
gttttttaaaaaaaaaaaaaaatgggaagcactttttccatagccaaaaggcatgctaaaccaatttaactttgttatatttacattactttctaatttatcaacaaaatgatataataaactatttcttgatattaaatatacttctttccttgaatggtcagaaaggtggaatttagaaaacaaaatcatctaaaacttgtatacaactttagtgaatcattctcattctatctaaacaataaattgtacatctaaaagtgatctttgttgttctattttattttgttaatcgtagttttaattctgtagcggattgtgtcgccaaaaatgctagagttactagtgatatggctgtttgtatcaaggggagggaaatcgccctgtctgtgattcccatcgactttcttgatcaatgacatgtagttctttcaaaaaaaagaaaacaaaatcatctaaaacttgtatacaactttagtgaatcattctcattctatctaaacgataaattgtcaaatttcatcaaaatcttctctacaaaattcagaagaattcgaaaatgttgcctagaatgtcacaacaattacaaaagaaaaggaattggcaaatcagctatctcttggttcttagcctgatctttgctatcagcaatttcctttaaagtagtccatgattttttccttcgtttacttgacacggtaatcgatttttcaccatttgtagggttagaactactttcagattcagattgtttcttattcactgatctgttcctctttctcttctttgcttccaacagagtggtcacagttttcaccacaggtgttgcaggactgtgactaataggaaacttttcagatgttgctggtaatggcagtaaatctggctcaccccaattctcaaccccgtctttaccttcaccggcctcctttaagctggaagggttaagagaatttgattttggggtttttgatttttcagtggttttgaccttaggtgggcaaatctgttttagatgtccttttggagtacctcccatgaaattcctatatgaacagaagtggcaagtatgaaccacaatattcttagtaaaagtgaagtggttcttacttcttcgccgtgccttggcattatttttctcaattctaattgtgcaattgaagccaggctgaagaattgtttcacatctgcaaaacaaatagttgtttagctcatctagaatctgaaaacattttcaaactaaaccaaataatcaggagtgaattccttgacaagaatgaaaaagcaaaagttaaggagttcatgtggagtggacaggttctctaagaaatatcttcatctaaccctatttagattttaatggttaatgttataatgcagttaacaatctcaagtcatatcatatcttcacaatcagaataagtgaagaactcacaaatatcatttctaagatcaattgcagtaaatattcacctttcagttaatttatcaatgattaaatgcagactaaactatcatttaaataaatgaaaaactatggtgataaatagttaacaagggacacaatgtattaagctttaaaaccttcataggtttaaactcctaaacccaaaatcaaattaaataaaagtcaaactcgaaactaacctccggcaagaaaacagagaagggttaggagaaacacccaaagactccccaacagaagccaatcttctgccaaagaacgcagccaaggaaggcacagaaacctccccaccagtcaaaaccgctagcttctccaagtgctcaaccttcaataaatgcttgacgttggttgaagaggaccctcctttcttatggtggtgttttttccctgttgtttcttctctcagagttatgacattgttagacccaaatgacgaatttgctacccttctggcccctcctctcttgcccatactaccctgtaaacgggggtttctagtcttggaggagtttcgacgaacagttggggattgcagtgtttaggattctacaattgattgacatgggaccacaatcacatatgatatttcgacagaaaaaataaaatcaaaacatatatctttcacactgtcagtaaaataatttaaaaaacggagaaatccaattagaccaaagttttagagttcataatatttttgaagttagaggcaggctatcaaaactgaatttcaagtaaaactaactttatactcaatatgaataatcaaagtaagcgaccacagacattaaagaacatctatgaacaatgtccctatgaaataaacagttgttgaaaattgtagattgttcaataaatgtagaacccattacagaaaacaatctttgatttatcttccgctacaattttttgggaacacaattcaccaacttttcaatcatcaaataattaaaccgcaaacttttcaattgaattattgaaacgattaagtaagtatcaaaaaggatccatcttcgaaaaatcaaaaggacaataaaaaattgcataaagcccgggtgtgcacagagctttatgaaacgaaaatttcaaatatctgatcacaaccttcaaaagagagaaaataaaagaagggggtgagggtgacgaaccaagactgactgtctgagtgaggagctggcggatctgaatggacttgattgagtcgattgaatcggcaatccaacccatttttcttggtcggccttcgtcttcttcgtcttcttctaaactccagggccgtttcgcatgcgtccgtttcactctgtaaatcgtttttttttttttgtttt

SEQ ID NO: 305756 - DNA, 1931 bp, Cannabis indica
cgcaatagtgcgaccggtaaaaagtggaaaaaactattggcgcaacagtcagattggcgccaatagttttgccggcgcaatagaggttcatggcggataaggccattttttaacggcgcttatttttcaccggcgttatttctcgccggtaaaaggaagttttaccggcgcagttactatacgcgccggtaaaaagtcctttaccgaccaagcttcccagataagctttgccggcgcacaactgcgccggcaaagctttgccggcgcagttagggtacttttgccggcgcaacaatgcgccggcaaaagatgattttcttgtagtgtcacttcgggggaggtgagcatgcatcaatagctaaagggacttcactacttggtgtgtttcagagatcggattggcaaattgaattataaatgacttcgactaagttttagaggaagtctaaacttgtttaagtcaattgtatttataatttttgtgactttactaactgatttcattctttgagcgtgatcccgtgaactagtagtatttgaaggaatattgatacgtccacaactcaacccatcatgatcttgtatgaggtcaaagaaatcaacaacaaagttcagacaagtaggctctagtgtgtttatgttattcaagaggacctttgggttgggtatgttgtaaaaactacctgattaacaaaaagttgataacatagccctagggagtggtgaaccgtaggagggctacgcttgagaggggggctctcaaggactggggaagataggtgggttatagagctaagagaggatcgaatatttgtccattgggattgggcatggatgagcctctactgagccagcattgatgaaaaaataacaaaagaaaaacttatcatatcgtaacattaaccggtatacgattaaagatagctagttatgagagaagggcttctatttatcttccttttgtcttcgatttagaaagattgataggttgcatactaatgacacttcttgtgctaatctttagatccaattgcaggcctaaggacagtaacctactcttccttagctgaaacaaaagcattgcacatcaactctaagaaattctatctaatgacattcgatcacatgatccattaacagctgcataaatgactagaatttgtttatttgtgctaaattttaacttctgtacaattcatttatgtttttgttttgttaggtccgtgttctacaataacaaattttcaacttgtttctataagtcgttatagtcatgttttacattacagttattaaaaaataaattgttttatgctaaaacacaatttttcatgcacaatcttgagcaatgacatacagatgcaataagtaatttgtaatttggtgtacgttggtatgatagcacaccgtatttttcttttcaaataaaaggagctaataatttttttttccaaaagttcatccaatgttaagaccaatcttgggcaatgacatatacaatatgaggtgtttgcattatagtgcatgagcacaaccctcacaacatggtgagctatagcaacaaaatcatagaaggaaaataaaaatagtaatgttttagtgagatatcctgaaagatttataagtgttaaaagacactttttttttgtacaatcaagtattgggtgtaaaatattaagaaatattattagtgatttataagacacacctcctagtggtgccttatatagcaatactttagaagattgaaataaacatcggttgaagtgctctttagtttaagattacaagttcatttcacatgttttatattatttcctaagaatatcttttagacaccataataacaaattctcacatctacaggttcattcattagtgttcactacaaaaaatcttatttttagtcataataaaatagtaaaaaaatt

SEQ ID NO: 305757 - DNA, 1740 bp, Cannabis indica
atataaataataaatagtgtaaatgatcaatactctacaaattttgaaatgagaacatttacttacatagttgtatgaatttgggtcatttactataatttttctaaaaggttacaaatcaaaataccatagaagaagtgaaaaaaaaaaaagaaatcaagtgcatgtttggcatcgtaacaaaaaaatattttttgtatttaaaaacagaaaattatttttttaaaaacagttaagcatgtttgacattgtttttgaaaatagtttattaaaaataaagttaaagaaaatgaaaactctataacaataaatgttgttttatgtttttaaaaacaatttattttttgtcaatattttttcttcacttaatctcacatcattatacatatcattttctcatattattttctcttctatcactttctctctcactattttctcaccttattttctctctcatcactttctctctccttattttctcactcatcaaggtcgtggttcgaggttcggggctaggatcgtggtccgagtctggggtccgaggttcgtatctgggtttgggtccttggttcgtacttgggtttgggtccaaggtcgggtctggattcgggatccgtgtttggggtataggatcagtctgagatatagggcttgggttgctctagctccggctccggggccgagccgggcctgagtccgaggttggaatttggggccgggttcggggccgactttgttcatatcgaggtcttaaagtattgaagtatttttaaaaaataaaatgaaaagattttttgtatgaaaacattagctaagcacaatttgtattttaaaattttaaaaaactgtttttattctcattttttaaaatatgttttttttttaataaaaaacagaaaataatgacaaatatgctccaagcttctcaaccaattatgaaacttaaaactattttaaaattttatattaacacaaaccatacacttcacaacagaatatggaattaaagttaaaaatatagattcctttcacatattatagatcatacaccattctaaatgaatgttatatattttgagttgaatttgattcaaaatataccataaaactatatttgatttagtttttgtatttgtgcttcaattataaaaaataatattagtattaatgcttattaaaaatacacaaaataattaattttatttatattatttaaatattttataaatataaaaatattttttattaataaatagtattaatgaatgacaaagaggtaattaaaaaactggtatttattgtgcactaaaatttgatttatattaatttttgtgttaaatttaacacaagtttagcttgagtcaaacattattggaattaaattttagtaaaatattctaaaaataacaatacaccacaacatttacctgatttgggtagggtgttcggtcgttagagaaaagatttttctatggatatagatgaagcgagagacttgaggcactatggagagaaaaatttagcgttaggatttaagagaaagaataggcaaaagaaaaatttagatctacttcttcatagagacacaaagtaaagtaaaagagaaagcgttatttttttttaatttttattaaataaaataataataagtacttgtattaaataaaataataaaattttgagaaatttaaaataatttacaagaataatattcaaacaatttatttcacatgcgta

SEQ ID NO: 305758 - DNA, 1880 bp, Cannabis indica
aacctagaagatctgaaaagagctaggttaatttataatctgtcattcacttcaagaaaaggatagcaattaggcattaacaattgggtaaacaaacaacaggattctcctccctattatctcatcttgctcaactttcaattgtgttatttaagttttctgaattactttcattctttttaaatcataaatacttttgatttgccaaatagaattataagtatagtttagtagtaattaatccaattccctgtggttcgacctcacttgcgtgagtatactacttgattgcgtgcacttgcgtagtaattaataattttcgcaactggcctcattaccaatcaagcatgtatcttctgcaagccaagcgccttcttagccaagtcatgggcagctgtgttttttgtcctacgaatgtggttaatcttgacacttgggcagagagagggaagtgtcctcaattgagaaataagatcttcaaaaacactataacactcatttgtattgtttaaagcattagtaattgctttacaattcatctcaataaagtggatggggaagtctttgcagtaaaaccaatgaagggtaatggtaagagctttgatttcttagatatgagctttctcgatttcgaaataagggatggcaatgacagttttggttttcccgttactgttacgaagaacctcaacaaaatttgacttgtttgattggacatcgattgctgcatctatatagagcttggcgagaccaaggggaggagaccaaaagtctgagacttttgaatgactaagagggcctaattggattgtcctattatcctcatttgcttgtttatagttgcacaccaacgatcgtgctaattctaaaatattttgttgttgaactgcagttcctttttgtgtaaccttgttcctgtcatgtcacattaaccaagacaaacaaacgaacaactccaaatttgccctaattaaaacattagtgatatgcataataactaaatcaaaagacttaatatgcttcaggtttttaagataagaataaaagggcgtacattttcagtacttcctaacactattgcaaaaaaaataaggcatgacaaatgttttacagcttgtgcaaatgggagcagaaataattttccttttatggaggttggaaaaggtgggaagtgtatcttttgtggcacggtatgcaaaatgcttaattttagatgggaggctaggaccaaagtgttttccaccaagtagacgattggaaagttgtagattccttgcaaaatgagtcttgggcgaagctgagatggtaacccaattagacaagtgtaaattctagaagttgtgttgctagataagagagtcttagttgggtgtagaggaagaggaatggaaagaatatcattaactatatggcttggaaaatagtgagctaggcgagaagagttccaggtcatgttattgttaataaaataagctacttgagtaggaggattccgagaagtagtcacatacctaaccttggggatccagtaattatgcacagggtgaatactttggtcattatcgatcttagcaatagttctctgatttaataactctttcccctaattaatactttgccaaaccagggaaggggcattgccaatagtactggcaagaaaagaagagtgaggatggtatcttgtaaagcccgcttagtttaatttagaaattagcagttaattatgattaattatgaaaattatttatagctatttaaataatttatttatactgttatttattgaattcagtaatgcattttatgttattcagtagttttcatattttgcatttccggtgcccggtattttggaacccggcgtttggctcagtagaaat

SEQ ID NO: 305759 - DNA, 1192 bp, Cannabis indica
aaaaatccattggcagttgcattcgcgaattgattggctacagtcaaatgatcaaaatacgaaattctttcaagcaagggcttcatcaagaaaggaaaataatgcgattcgtagtcttacaaataaggagggccttctagacttcaaaggcagatattactaatgtaatttaaacatattaccaaggtcttttctctacttctcaagttgatagtcaagctctacattttacgttgtccaatattcccacaagtattactgttgctatggatgacgagttgttgatccattttaatgttgaagtgtttgttaccttgaaaacaatgagccctggtaaaagcccaagtattgatgaaatgtttgtcatgttctttgtacagttttgtataaattcatttcaaaagtgttggtgctcaactttaaaaaggtccttccatatgtcatttctgaaatgtaaagtgcatttttatccacaagacaaattacttataacatcttggttgcttttgaactagtttataacattcatcaaagaacttcgggtaagaaaggagttgttgctctcaaacaattgataggagcaaaggcttttgatagggtagaattactttgaaactctgttttcatggaaaaaatggggtttcacatcaggtggataaaagcaataatgaaatgcttgtccacaactaagctctctcttcttctaaatggcgaaattgttggctttgttactccaacaagaggcttaagggaaggggatccattgtcaccatatttattcttgattttttctgagggtttatcacgattgttacaatatgagaaacaagttagacatctttaaggcttctcactcactcaacgtcctcccctagtaaaatacttattattttttgctgatgataatttgctcctttaccaagtaactagataatcttgccaagctattaaaagagctttagactattatcaccgagtgttgggctagcaacttaataaagacaatcgaaaatgtccttttgttagaaattattttatcagatctagatttactaacacatatgtttgattataatctataatctaacactctaaatataaatttcctaatacgatgaaataaacataagagattaaaattttttacgatgactccttccgttcagatatctagctcttgattcatttctgt

SEQ ID NO: 305760 - DNA, 1560 bp, Cannabis indica
aattatatccctatatatatattgcatggttgaactctactctcgctctgtctttgggagtggtgagagtgactttcctttgcttaaactaaagtgtaatcccgtgacccatcaattccctctctctctctcttctcctacaatatataccaggaaggaagtttaccatggcattgcaagtctcttcctctggatggcccacaaaaagggagaaataataaaaaaaatgatatttgtaattatgcaagggtgaagggtgcatgcaattgtcaaatatatatttgtaataaaactctctgatgatgatgatgagacttgagagtagctagagaggagtactgtacactttaatttgcaatagttcttgattcggttattaatttggtctctcctcatgatacccttttaatttgatatagatattattccatttccatccaaaacaaacccacaaataataataataatgtggggtatacgaatgacctgacaccacgtgtcctcatagatcacaatcagtcacatgcaccaaactaaggcaaatcacatgtttttgtattctcatatatacttctactcttaatcccatcacaccacgttgctcttgttttcctccaactttgccctacaatatacatacacctatttatattatatttatcattcaataaaatttacaatttccacctgcattaataatccgggttctattagagtgtaagtaacatctatatatcaactaattatcaaaattctatcttaaaattaaagcttggtagacatgtattagggtgtgtagtaataatatatacaatagttttggtgataattaataatgcgtgccttctcttaattaatttaacttcatttatatttgccttataataacaatacaatagtttaaaaagtacacatgtacttctcttctagttataattaggtacaataaattacttaaaaaattaacttatatttgaatagaatttcgttttcttcgatctctccttttctagctagattacatttacattaggtttgattatagtcgaaatgaaaatatagaattggtaaatgtaaataagaataaaataaaataaaaaaattattaattgatgcgaggagagagagacatatgtatgtagaccctcttattagacaaagctacaaaagaattccataaaattatttggaatttcgttgactatatatattatgcataagaataattttattaactatattgattgttctatggctatatctatacctataactataaatatatagactattcctggtctcttctctcttgtgcataatagtgttagacatttatatgtataaactgaaacatatataattatgtataaagtgcggaattaataaaaacatatatgcactataattaaggatcgaaatacctccaaccattgataatttgagcattagtcccacttaagcttgatctgcaaaagaaaccgattgatgtgggtaatcgggcttcctcgctctctcaactctctttagatggattttgctgttatgaacagaatgagtgag

SEQ ID NO: 305761 - DNA, 1104 bp, Cannabis indica
ggtagatatcaaagtctggggagcatagtttagtacatgaaacagtaaaattgaatgaaattggacagaagtccttaaatttaacaatttcaatagtttaggggaatttttaacggtcaaaaaagttcagatggcacgatttactacatgtcaaaatttagggagaaaaattactaattagctttttttttttctttctcaaatatggtttgaacatgagtgaaagagcttccttctttttttgtttggaggacaaattatgtttcaaaacaaataaataacaaaatgaaatcaaagaaaaatatatttttattatattagttaggttgaattgtacatattgtctctccataatgaatgattttgcaaatgtgcagattgcatacaacacagcaaaagcatcaatagattgatttttttttatcagaaaacaatctactgccaaacagatggtacattttacttgacatacattacaaaaacttgacatatgcccagtttggataagtttctatttttgcatataagtataacataattataaattttaacttatttttactgttagataattattagatagattttttaataaaaaatactttttaaaatatttaaatatcattaaaaaacataaataaattaaaaattatgtaaattattttaattttaaaatatcttttaggagaagttataaatctaacttcttttaaaagaattttcattttttatctgaacactttcaaaaaagaaaccaagtcaaacaggacgataatgtaatgtgataaatcacttttgatcaagtaaaacgtatataaatgttatttgtggcaagccacgatagtatatcattcttctaaataaatgtcacaatatatattatataataccatctatcacaagggaaccaatcttcaatcggattgcctgcaactcctatcgaaaattcacagttcttggaaggataactccgctctatccagactcgtccatcagattcgagagttcctatctctatctctattccctaatgatctccttcagcacatccctcatagtgaaaatcaagatgcacatctcaatgcaagggaagcattaaggcta

SEQ ID NO: 305762 - DNA, 1830 bp, Cannabis indica
cctatatatagtaatttctcacttagtgctacctcccaaacaaagactcatatacccttattatttgctgctagcacagcccacaaatcatagtgcctaataaaacagtggcaaacttttgaattcttgttcaatattattcacttgtggctgtccatctaaaattatcactaataacatgaaaaatggaattttttaagatagttataccagattcagattcaggatagagttaaattttgagtaacactatggatgaaggatttcaattttcattcagttactgtacttgttagggattggagatcattacggtacttcttgttgagaactttatgatctattgattgtattttgtctatcaaattgatgtagtagctaaaagaaaaaaagggtggaaagttaagaaactatagcagtattacttaccactaagacatctgaaaactatctcgctattatatgaacataaaaaaatttgtttaataggagtataaggaaagagagtgagctctggagacatgaatatgacgagctgtgatattctgataaattcatatggctgaaattgttcagctcttggtgttattaagatcataatagttgatgtacagactgcagctttgaaggaagcagtcgatgatcttgagtggcctggagcaagcatccagatcactctacaaccatctccgccttgtgttaccttcagaagcgatgggcatggagatttgcaggtagatttcagtttttaaaattgctttgaagtaattacttgtgtatttatgctctaaaccttcatttgccttatgcagatagacttcatgtattatgcaaatgccgatcttttaatggcatttcattgtgatcatcaagtgtcttacaggtaatttaatagctacagagtaatcatctccggttttatagtctacttgctttgtttaatctcttagttcctcgatgatatgactaggtacaaatacaagttccttcgagccacaacttcgaacataccaggcagtgttgtcagagaaaatcgaggaagcaagttgactattggccgaggtggattgcttaaagttcagcacctagtttctgtggcaagagcatcaactgcacatccacacgttgattctgcaggttatcagcaaccaagccgaattgcatatattgaatttttcgtgaaaccagaggaagatgaagacagctgatggttcgtatcatcatgttgtaagatattcattaaaaaagttagaatgagttgctaactatggagtctctcacactatccgatcttttttaatcctcttctcgtgcgtgtcttatagatgtttgcacaatccacaaataaaatcaaagtgcaattagttttatagttcaggtgactttcattgttcttcatcatcatcatcatcatcatctctgttttctctaaaccaaagcataaaagagggaaagagcagtttatttttatttcggaaataccatagacgagtaaatttttcaagaagagggatgttcctcactttgaatttgtgtaaagcttgtatttggatagtggtattaatttggattaaaaatataagagaaaaaacattgaaaaaatgttgaaataatagagttcattattttccaacaataaattagacggtaaatagaggaaattacactatatacttgtttaaattgatgccattaatttttacccaatattttaaaatttattatagtatttatctctttttttaatcattctactaattttactcttatcactttacaatagcttttattcttctttaatcaaaattttgtcccaactttttcacaaac

SEQ ID NO: 305763 - DNA, 1221 bp, Cannabis indica
caacggtatcttgatgagtctctgaagaatcaagaccccattgttcagtagccaaggagatttactctcaattctatccaggtccttaccgttcttgaacgaaaaaatcaagaatgaagcctctgttgtaacctttttgattttaactccccaatcaacttctgcaagaccccaaactctccccaaaatggttcgaataagggctctattcaggttcttggtggtgcaaaatctccccatcagacacgagtttcccacctctgcttcccggtcttcatttatttcccatccttcatcatctttcactctcaggttgttcgcacgatcaaggagatcatccatggttatgtcaagcgtgttaggcattcctacaggaaaggctcttctcaaacgagagagcaaaagttattattggtaaaacatgataaaaggttttattattttgtttttttggttgtaactttctaataaattttttaattagttgatttctaactgcttactaaataattttaaagcactactttatcaaaaaagaacttccaattttttcaaaaatgacaaacagacctttatgtatggttcaggagccttaaattagttaaagacttggttttcctagcttgatcatagaatcggattatcaatctcttatcctaaaaatatttagctaaagatcatagtgactcttatctaaccaatattattagagagataattgaaacatgtaatgacttttatgatgttgttttagattattggattattttcctagaactattaatggggttgcctataaattggccaagtatattattacaatggtcactaatattgtttcgtgatcaggttatcctaatattgtgttgagtcatgcttttttttttggcccttttggtttaagtcttccttttgcaaataataataataggccaattacctcacttcattttaaggtgtgtgatctctctatttgatttcagctgttggattgaactttaaagtcaaaaagttaaaccttatggatgataattgtggaagtgtaaagtttttaagaaaattggtaaccggttgaattgtttgtagcgtgatgtacttattttgaatattttattgagaagatttgtaggaaaccttatcattgctatatataatgaaaaaatttaatatatatttgttgggacacgattttgtctcgtgatgtattttcacggaatgtat

SEQ ID NO: 305764 - DNA, 2711 bp, Cannabis indica
ggtgataggactactaaaaaataagatgtacttgttgatatagttactacctatcaatccatttaactattttcaactctaaagtctcatacctacacaatcatataatcatcacactaccttcttcaaataatgtgagattgtataatttacttaatacttctccttacagatcacatgacaactaactgtgacatatcgataaagcgatataaacaaattattcctcatttttgttaaataattaatgagagagttgaaagcattatattgtgttcaaattaagtattattatcttatcaaaggaaaaaagaacacactatttttatagtctaaatcttaaaaataaaattagtatttattaaatagcagagataataatcacaatatactttgaccatcatagtccaaattcttaactcatgacaaatattttttcttaaaaaaagaaaagaaaaactatatagtaatttaactaacaacatggtatgtacatgtgtgatcaccatatggatttaaataaaatcacaataaaagccaaaatacttctctgtcacttctataaactttgaatttttttccttttaatttaaaaacttttagtgaaaacaatatagtaatttatgttatattgggattctatatttgagtgtaaggtaatcacatggtgaggcatggagaaaagctaagttaatgacaccaccaacctcatcattggacatggttagtttctggctatatatatacatatacatatatttatataaatacttaaatataaatattaatatgactccaaaaagaggatgtcacctaattctaatttcttcttcttattattactatattttatttattttgagggacatataataattttatttctttattatcatcataattatacagctttaccaagatatgaaaggatatatgtacatgtacacaatcttttatataagattattattaggttagtttagtaattatgttttctatttcatatttcttaagatagctatttaaaaaaaaaattaatattatttacaccacatatatattctcaatattggattttggtttgtacaccaatatttacaagaagaaacaaaattggaaatttgagaatcattgttttttaaattatatatttgaatttttcttaataaattaataattaaaaaacataaatgtttgaataaaaatttttataaagagaactaaaatattaaagtgaaataagaaaaatttaagaattaaacattaataagaaaatattttaacataatattatgggttgtaaatataatttcccaatattttaaagtaaaaatatattccacaatctattaattccatgttactaatgatttggaaatatttttgataatggatgaatgatttaagatgatcattaaatgggaaatataatttaatttcccacttagttaaatgaatagaaactcattaattattggtcaatctaggtcatgccaatatgatctctctttatttatttatttatttattttgttttggtaaaataatgaccacaaataaataataataataataattaagtgcatcttttgatagatcctaaaagttcataaagttcttccacttaatattatttaaattaaaagccatctaatcaaagagtgggatggatcacctgaatatttggatgttaaatttaatataattaattagacatgttttcatgattttggtgatttattagttctattcaattttgttaagtattattattaaatataagtagtttttaacaatttttataagtggtgttatttgatttattttttaaaaattatttttttaagttatataaaatttaatatttaattatacaataagacaccgaacaaaatattaagttttcttaatatataaggttttaatttttttaattatttatttgttttgtttttttctattttgtctttttgtgaaattttaatggagttaaaattgaactaaatttatttaagtgggtgtaacagacatggattatattataattacttcttgattttaagagtctttaaattaggacaacctaatgattggcaatcaagaatatctttaatccattagcaaaaaaaaattaaaattttaagggtaggaaaagtggattctttgaattgaagactttaatttaattttgaagctttcacaatacttaattaagtcctttggtttttcagctggcatagcttgctggctgctcaccattctttaatgggtcaagtttgtttctatattgccataactttatagagagattaaattaaaataattaaaactattctttctttattttctaacaactttgtgcaatttgattaagtaagaaacatcacatatattgactaccaaattgtggtgttaagggtcatgcccaattttttttttagtgtttgaatttttacgacgctatttaaatttgatcttaaaagtagcactttcagtgaaagttatgagatttaatagattcttaaataagtgggttgggctatatttttagctgagaaatttgcggcaaaagtcctgagaaagttcggtttgatacaaataagtccccaacctccaaaattagcggcaatagtcatcaatgtcatactttttatttgtccgttagtcctaattttaactgagccgttttttttttaaattgtcacgtgtca

SEQ ID NO: 305765 - DNA, 1750 bp, Cannabis indica
acggccaaaaaagttcagggggcataatttagtacatgttaaaatttagggagtaaaaatcataattgcctagttactaattagaaaaggtaaaagaaaaattacctcatttggtttgtatgatcaagttttcggctacctttaacagcatattcatcatccacagtctcatacaaaagagacttatccttaggcacttcaactctcacctttctaaatgaagccacaatcacttggcatatctttgtcaatggactcccaataggcctctgatttctatacagttttgtacctgaaaagaagctcatgaccgcaatagccatggctgcggctggaataccgaatccccagctccatcccacatttgtttgtatccaaacaagcactgaagaagcaacaagagcaccaatattaattgacatgtaaaaccagttaaagaaagagcttttcttctccttttcagcctcatcagaatcgtcgaattggtcggccccataagatgaaacacagggctttattccacctgttcctagagctataaggtaaagtcctacaaagaaaaatgtggcttgtgatcccttggcatggcatacattttggtcatcacatgatggttttagtccttgaacagaagctgataatgtcaataatatcattccctaaaaaagaagacacaaaattaaagaaacattttcaaagccaaataatgatttggtactaattgatttgtaatattaggacttacaaacacataaatgattgagaaagatgcaatggtccaatatcttccaaggtaggcatcagctaaaaatgccccaatcaagggtgtaacataacatgtgcctgaccagtttgtcacattattaactgcagccacatttgtctgatttaatcgagatgttagataattcactagatttgtactcatcccataataagctaatctctcacaacattcgttccctgaagaaaaataaaatcaaacgatcacttttttttaaaaaaaaaataataataataaaaatgtaagtaatagaatttgttttgttttactcaaattgttatatgggatttattttttagaaggagatttgaacaatctaggagtgaaacaacttatgtttatgaccaactatataagattgttatactcatgattctaccgtggtaattagttagattaataagtttcatttaaattttagtttttatttaattttattagatattttttctttattaactgctattggtggtggttcttgtagcgctattcaacgattggcaaatggtgttgttaacacattgataacctctgttactagtttaagaaagtgtgtttggatagatgttttttcacgatttttgagtacttttgtaaaagtagatttatcttaataaattattttcttgctttaaaaaaaagctgttacatacatgaacaaaaaaaaaatcatttgtatacttttgcaacgttataattagactgatcataaggatcactattattacttatacttcgaggctcaatatgagcacaagggattaagatattaaatattggtttgagtgtcataaacaaataaattaatcattgtaatcttatctcatgtcattattcttaaaatatatatataaatatatatatatggaatacttcttaatggctattattcattaatgggtaataaacaaatataactataaatattaattttaaaaatattaaaccattagattttgatccgat

SEQ ID NO: 305766 - DNA, 1112 bp, Cannabis indica
aaaaaaaaatacaaaatcaatctgactaacccatatctgaagctgatgaaaacagatcaagtggtgaagtaaaagacagggtggagcatgagatgaaggagcttgatgcaagcacaggagaaggaaaggaacaccacaccgtagacaattctgagagccattgagatgagttattggtctcagatcagagatctcaaatgaaagtgagagagagaaagagagagaaatgaatggaatggagtcaagtaataatataatgggcacaaccaaagggtagttattaagaattgtattggataagatccttcctttattttttgaattcaaatctttcttgccacgtgtcactaaagtaaaggttttgagttgccacgtggcaaggcgcgggagctgggattagtgcacctgtatttatgagtgtctggttacgctaacttctttaataagcaaaactgtatttatatgatatgataagataacacatgagagccactttaagatcattaaagattaaatcttgtgtgggtaacttgaaattgaatggctcggttttaaaatcaaagcttttattataaaaggttttctctctatacacatataaatataatataatataaaatattataaggttggtcttttccgaaaaagcttcaacttcaagttagtggcctatcatttttatgcatttcagatatttttgggttccacacaattagtttattggagatatttatataaaaaagaattaatattaaataaataaaatttatacgaatgatttaacacaacagggtctatagctcagtggtagagcatttgactgcagatcaagaggtcaccggttcgaacccggttgggcccttttttaaagttcattctttatttttataataaaagagaagaacatttaccaagtaccaatgacattttttactccgagaatcccattctcgtttctgtaataaacaatttgtaaaattggttgcctaaaattttgaaatcccaacatatttaaacttcaaacatgggaaaaggttattgtagataaagattaaagagtatcacaataaactaacaataactagttggataaacttcaaaaaaaaaaaaaa

SEQ ID NO: 305767 - DNA, 2574 bp, Cannabis indica
acgggtgttccgctgcctaaaaaggtagcccgtgacactccgcgtgtatgtataacagcaaaatgttgtataatgatatttgaaaagatgagactattattaacttgattaatacaattaatataagattaaactcattcaaaaaaaatcaataagaagtataaattaatttggtactttattaaggaaggaactggatgaatgtaattaaatcttattacttagaaatcgtacgtacgtaaatgcctataagtatatttctacttgaatattcataaaaaagaaatataattatataatgtcactcattgaaatcgtcaataattttataactacaaattcaataaaaaaataatcaaggtgtgaactcattcagaaatacatcatgatcatattaataattccacaaacctattactacatatatgactaccattataatcaatcacgatcgatctatatatataataatttcccaaaccgccatataattaaaatcaaaatatttaatatataattaaaagaaataataataatatgcaagatcagctttacagagagaaaatgggtatatatagcaatatatatatgtatatagaactatacagcaagtcactcttcatcacgatcataatcatcatcagaagaagaagaagtagcagctggtggtggttctgatgataacacatcaaccataatctgcataactctaactctcaattggagattcaaaatatagtcagcggtttctctgaaaagcccatccaacccttctgattccctcccattaggaacaagcctctttagggttttgacctttctcacgattccaccacttccttctgttgttgttgttgttgttgatgatgatgatgatgacccttttctcttcttcatcaagatcctcttattattatgtactccacttctagtacttgttctccgggaaacgacatgtcgtttcatcaacaccccttcaaccaccgtcttgttttgtgccacctcatcatcatcatgatgacttcctcgaacgacagcgcattgatcagtaactcccatattataaagatgttttaattaatactttgtcaatgcaaatatatatgtatgaatgagcttgtatagagagctttttctatgtatatacaagaataaaaatgggaaggataatggccctgcttggagagctagctctctatatatagatgttataattaaaacttgtaaaaggataacacaataagagattagttaattaaacgaaaaaagcaaaagggtatgtgtagggaccacaaaacgtacaatttcatggaaggaggccctccaagagaatggggtgagtgaatgagatagtgccacgtgtcagaaaggggttatgcttatagctttgggcatgttcatgcacatgcaaccacatgatattcttcttcttcttcttcttaattcaccacatatatatatacacatatacacacacacctccacagccctcctcctaataaacccaccacctttcatcaccacccatctcatggaaaccactctggacttattcttcccccactttccaaattcaatgcataattctattatgtgtataattaaattatatccaagtttgggatatatatttagcttcattggccagctcaataaaacacatggcattcccataaataactattataataaaaagtaattattaataattaagtacttaataatatatttaattaatatgtatatatggtggttatataggacaatgcatgtttctgaacaggaaacctatttaaattaatagaagaagcaagaaaatgtagctaggtgccagcagagtgttactaatactattgtcaatatttgtgttaacataaatagacaaattagatctcaatgttggataagggatagatttttcttctgacattcatgaacggcagaggcctcgttttatcggtcgaaattccgatccacaataataataataataataataataataacatatatgatttatattgatcaagaaaaatatatatgatttatattgttttgtttgtcttagaatataagaattattattcgtgaaaacatatgatatatgcatgttctaacatgtctgtactctaaccctttaaagttgaaacagtagtaatactactatatataacttaggcaatatctcacatgacaaagatgcatgcatctcttctctgatgtctttcccagatcgatcatcatcatactactatatatatactactatatatatgtgttgttatttatatatatatatatatgcttaattttgaatatgacgaatacacacttccatgtggattatcttttactatactttttgcatatattccctcactttttttttttgtatagctctattatatgtaggctaaattttgatgacaaatacacatttccatgtggattatctattatctatatacttgcatatattccctcacttttcttttttctataatatgcatgtatttatatatatatatatatatatatatctattctatataaagtgtgtctatataactaaaa

SEQ ID NO: 305768 - DNA, 2336 bp, Cannabis indica
gtgcaggaaagggtaaggcattagctgatcagccatgagtttcaggagcagggcgaagaatgtacatgttcatgccacttcagaccaagcgggttatgggtctaacagtgttgacttttgtattctgttttgccgcttaggtcggctagtaagaaagaacttgtaataagtttgtaaatgtttttgggatcccaactattttgaaaagtttaaatatattacaagtttattttcagtctgtttaatataaaagtttaaattctgcgctattttaattagtaatcccggttaggggattagggcttcataagtattttgggtagcgtgcctaattatttagggcgttacatgtaatgctttgagttagatcatgtttgggatgctccaaatgatattttttagaataaaaaagtctacactgtaaaggttacttgtaaatagaattaaaagagaaattagtttgaggttaagtacttagaaaaccatgtagaaaagattgtacttggtttgagtaattgagttcaacaacttagttgttcttgttgtttgttgtaagtgttctttgagtgcaataaaatcatagttgtaaccaaaaaaaaaaaaaaaaaacaaaaaaacaaaaatagatttcactaagttagatatgagtgcgtaccagcctaacaattatttccactatcttacaatttcatttcaaaatattattaggaacaccactaatattatgacgtgggtagcgtttagtttgagactagaaagtaaacagaccctatgtaatatatattttctctataactatatatagataaaaatttacatttgcacattcacaaataattaatgtacaatgatcagctgctgtttcatcaaactaactgttaattatgttaatgtacagttctctcaaattatattttcaacaaatatatacaaaaaaaataagattgttggaacgtatgcttccatataactgtagtactcaagtagttcttaaattcaaaagaaaccagaattggccaaatcagaacaaaagaaatgatgagtaagaatatttggtagatataaccaatttatataaatgttatatatatataaatatatataactatatactaatcggttagcaccaaacgcgttcagtagtcagtacttgacaaaacaaagaccattattccactaactcaccataattgccgcttcatattattcctataaaaaccataatgatcatttaacataattcaaagcaatatacaaatatcacatacaaaaaatggactacaaacttttcttcctctttttcacagtttcgatcaacttcttactactaatctcatcatctccaattgctaatacttataactacaccctaccaccaagcaagcctgttacaccagactacatttgcaaattcacaccatacccaacttcatgcaaatcactcctcccaaacaaaacctctaatgtctacgatttcgcccgctttactatcttcaaatctttatctcagactctccgtttccaaactttagtaaacaaatttcttcacctcggggccgggttgcctaaaccaacggtggccgccctcgaggattgccaattcctcgcgggcctaaacgtcgaatacctatcgagttcattgggctccatcaacgccacacacagtgctctacctggttggaaaacagaagacatccaaacactccttagcgcgattttaactaaccaagagacttgctacgacggccttaaatcggcaacttcttcgtcttggatggtgagaaagggtcttttcgctcctttggcgaacgacactaagctgtttagtgtttctctagctctctttaccaaaggttgggtgcctaataatattaagaagaagttggttagatcagtagtgttggagacagggaatgatgttgatcatagtaaggtggttgtggtgagggaacaggtgactgtgagtcaagatggaagtgggaatttcacaagtataaacgacgccgttgcggctgctcctaacaaaaccatgggatctggaggatacttcgtgatacatgtgaaagcaggggtttatgaagagtatgtttccattggtaaaaataagaggtacttgatgttgtattggagatggtataaatcagactgttattactggtaaccgaagtgttgttggtggttggaccactttcaaatacagtcaacatttggtaagaactttattattattattattattacattaaaaatgaaaattatatataaattaataataactaacgaccatacctgaatttcttttaacagatataataactaataaaaaacataaaatc

SEQ ID NO: 305769 - DNA, 1781 bp, Cannabis indica
ttttaacaatggaattttgtaaatttttataaaaagggacgtttattaacttaattattagatttagtgtcattttgcatcttcacccaacactatacccatattggattcccagttagaacatccaccttctctatgtctgactagtccaactccagagattcatgtaatatggaacttccaaccatgggtcctgattattcaccaccaccttccgaggagcttgaaggtttgtgccgaccacgtattcgagtagcccttgatgaccctataaaattcattatcaagttgttaggcgagcttaacgagtatgagatcaaccaacttgcatttgaaagaagccaaagggacgttgaaatagagcgtcttcgcaagcataaccaagactgtgagaaaggcataagagagtgatgaaggaggaggaatgtcaaactgtgtttgaacgtttccaacacgggttaggaatgatgaaggacgagtgtatcaacagctacaacaactacattgacctccgtattgcacaacttctcccctctgctcccaaggattctgatttcacactaggcagtgtctgaagtacttgttgttcatctactcataacttctgattcaccatagtgctaaatattcagtgttaacaatctaaaccttgataattatggtttcttatgtaatcagctaaaaagagtatgctttcgttattcaaactgatttttaattttgagccccatgttattatgaaggcagtataaattttattcattttgctttcagcgataataatttacatttagagtcttaaggcttgaaataatgtgatataggaattatgttattctatacggcttttcaatttttttcgtaaataaatattgttaaatttatcactacaggaaaaagagctaagagcaaatggccaacgagcctttttgaagcagtagaccaaaacactatagcaataatttagaacaacacgggaagaaagcgagaataacaccaacaaagatttgaacaatcaacatagatgagcttagttttccactccatatagtctaaaagcagtccttattcaactatttcaatgaggcaacacaactatttgacatcaatttcatacaactttcccaagcaacggactatggagcaaaaaatttcatactccataatgatttcccaatgttttgagtcaaaaatacacagaaaaaatgtaaagaggagtccacatcagttgtatgtttgctattgagggtttcgatagcttagcacaatcactttgaataatcacgttcatttggaaatgttttttgatattctacttggaaatgaaattcaattgctgtaaccatgggacatcatatgtataggttttgcccaagacatcatatgaactacttcttttgaatgcactcaaacccatcatgagatacttaaaagacatcgaagcccaattaattcctcgcacattggccaaatccttcaatgctaatatttgagcctcataatccctactcgcataaactgttgtgttaggcatcaagaacacactcacaataaaaagtaagaattgatggtcaaaccccatatcagtcttactgttgcatttcaacttctcttccaagtgagtgattaatatccgccccacattacaattatcagatttggaatccaagaagtgttctgttggaattattttaccaggatcttagatctactcacaagtatgctgatttaacaacctaaatatgaacttctaaaacgataataaattaatcacatataaa

SEQ ID NO: 305770 - DNA, 710 bp, Cannabis indica
ttttttttaatttttgtttgaaatatgtgagaaagaatctaattctctatagtacttggcaatagggtctccatccaaatctcaaactgttgtgttattttctgatttcaaaagcaaaatagaaatataaagtatgcccaaaaagcccaagacttgtaactattttgcttcattgatgacatgattagaatctctttgtcatgtggttttaaggaatctattgaggtagggcacaccgtttttcttttatttttcttatgccattaaaataacttttaccactcctcgtcgagtggtggtataattgttgggatagacggtttgtgttttattatcgaattttaatctttgatttagttcgagtgtaattttttttaatttaaaatacgatatttataattattatttaacaaaaatatagataagattaacactaaaataataacataatctataattccactatctttatgattttagagtatagtaattgaaattcaaatgcataaaccaaccaaacaaagggtaagtggttggcctactatatccttttagaaaaacaaaccctagttaaataaatgattattagcagtaaaattcctatacgttttgattttatacactattttttttaatgaaaaaattctcttaagtttattttttttttttttactaaatttagtaagtgtcagttaaatattatcgttaaa

SEQ ID NO: 305771 - DNA, 1877 bp, Cannabis indica
cccttaatatcaacataagcccagcaaactaactactggtaagacagggttaaaacacgtaaaagttaaaagctgttccataatatgtcagaaacaaaatgaacaaaagaagggcacccaccaccaacaactactctttcctatcaattctccttaaccgccttgtcaattgtctcgacgtgatctcgaaaaattttccactgcaagagaatattaaaaatgagtattgtaacactctccaagtcaatgtttgcagaaacagaaaataaaggaaaattacctgatccatggtaagtgagattcctgaaaacaaaggaaaacatgttataacctgaactacattttataaagatgagtatccgcgcgtccaaagaaaccaagatgtgctaaaaattcccctcttttgaagtagcaaagataaaatgaaatggtgttcaaccaaaactcatagcatagcattttgcacaaactaggcatattgcggtctagatgcatattgagtaatgtgccaaataattaaggttgactttaagctgaaaaaaatgtggagatgaatacaatcatatcaccaaactctttggtaagtggtagttgattatgactaaagcagacctaagatttgatttcatcttttctatgaaacagatgatactattaaaatcaataagtaggcaatggtggacgacaaaatagtggcagaggcttgtatggatcataaactaatgatggcaagattctatccctaccattgaaattcaattcttacaaggatttagggagggagttgggaaatctaaagagtatgaaagcatacttcagcaagtgaatgcacacacagaagaaaaaaatcatctcatagtatttcatctcaatcaaacctaataatacagattgttccacacaaggacaaggccaaaagagagcaggtactataagtacaactagcaaaagtttacaactagtttaggtgagaatctggaattactagaatttatggagcagaaataacacaaaccctaatgtccatacagagaaataaacggctatctctgtctccatacatcatttggggctttattcggtttctatacattagaatagaacccaaaaacttattccgaaactcgggtgaaatccaaaaccaaaaggaatttaattattgattcgaaaggagttatctagttcatttctcttcttggttcaacttgtaagcatagataagtagagaaataaaagaaagaaagaagtggatagataaagcatgggaagatcatcaaatagaataaaaccctaaaaagcataaaaacgtaatgaagaaggagaacctttcttgccaggcatttgcttgccatccttgaggtagtactcgcgaatgtcgatgaagatcttgccctgccaatggcgtacagaaaccctacggttcttggagatctcgcaaacgacaacgtcgtcgttcgagtcatcagcagagtcttctttcttgagggtcttcttggggggaccctgagcatgatgaacatggctgccggccaaggcttcggaggccaagtcctggtcctgatcctcctcctcctcctttctctttcccaagcatgacattttcactcactttgactcttctctaatctcttctctgtttctgctctgtgtggttatactaaaataaacgagggaagctatgccttttcacactttcagttacgccgcttcaaagcttttcaaaaatttaagtttaacccctcttttctcatataattaacacaaaattcttctcctctagatggaaattgggcggttaatgtacggggaatgcaattcatacccccattcccgctacctatttatacctccattcccgtctaataaccagcgcattc

SEQ ID NO: 305772 - DNA, 5334 bp, Cannabis indica
caaaatctcgaaatcgcgaccagagtcgcgaccacagaaaagggtcgcgacctggctcattagtggtcgcgactactgatgcctctcgagcagatttttccaatttttcgccagtttgtcccgtcttttcaccatttgactgaatttgaactttgacaccccggaaacctgaaacaatgaaaaatcaagcgtaacaccgctccaaaagataccaacagaccaaaaaatacttacttttcagacccgaaacataggctaaatataacctaacaacctcaattctcacttaaagaaaacaaattgagctagatgttgattatgtacaagaaaagatgctggaaatttttttgaaaatcaaatacattcgttcaagtgaccaaattgtagattgtttgatcaaaaatctatcttttgctcaatttcattttcttgtaaccaaacttgatatgctccaaacccccttagtttgagaggtgatgtgaagaaaataaatatacaagaggtacattttagtcatttatacaacactccaaagaggacaatttataattttgtaatgatggcgagtacaataccattagaatattatgatttatgattttttaccccgatttgttatagattgtatatacgtgtacaaagtctaaaatattcctgcagaacaagctgagtaattattcatctaatattgtgtgctttttccaattataaactcataagcaacttgcatatttattagcttattgaattatcgttgtttgttttgagtaatcttaaccttttacttgagtactactcgtatcagtcgccgcagctgctgccaccaaatacgacaacacatgcacaattctaattctattaatattttgtcactatactttttactcttattatatccgaccaaagaaacaaaggaaaaattgtctatgtacagacggatggtttctatctaaaagagcaggtagctagccacgtgacaggtgcattgatcgacgtcttctcttctatgtctacttccacgcgtacccttgcatgcaacactatcatcatagtctatgcttcttcataaggccaaacactacttaacagtttcatctcatcacaaatatattatcaggtaaataggtatattactttagtttttaataatttgatcgaatatgtcctgcccccacccagttgttgccggagagcccactcagaccggtactgccctcctcgaaactgccactgccgccatccagggtttcggccccatcaatcaaattcaccagcacctctgcgcgtaagtatacatgtatatgtttattaatggagaatactacttcagtacaacctctactgtgatgtgttttaaaacatattatttaagattcttagacaatgatttcttggcgattcagtttttaagttttttcgcttttgattttttttttaaaaaataattttaactttataaatactatacatgcatggatgtacttacctttctcccaaattggtaagaattaaaattgattaaattatttatatctatagattccactactatggcgatgacatgacaagacaagtagaggcgcaccacttttgcgcacaccaaaacgaagagatgcggcagtgcctgatctacgacagccctgccgcggacgctcggcttattggtgtggagtaccttgtgtcggagaatctgttcatgacgctgccggacgaggagaagccattgtggcactcccacgagtatgaggtgaagagcgggatcctgttcatgccagggatccctggccccatccagcgcaaggacttggaaaaggttgccaagacttatggcaagacttaccatttttggcaaggtcgaccggggtgatgctcttcctcttggcctccctcaactcatgatgtccttcaccgagatggccagcttcatgatcaccttgccaaaggtactttgttatatataattatgttttactacacacgaattatattaattcaatgatgtataatgttgtgtgttttatgactaaccaaatagaaattgtagtactttttgtttttacaagaaaatcatgatgcttatgataaataacaacgtgatatcagatgttcagaaacgtttcggagttaactatgaggaggagagagagaagagggcttacatgaaaggacctgatcatgggatacatccaaaagcaaatggaggaggaaaaggcctgaagactgttctcagagagaccgactgtgggcctgctccaggtccacatgtccataatacgactgttcctagggtcttcgtttgagtctcctgtctctggttacctgttactacatattatacatcttcatgaagtacttattatatgtattttggacatattaatgtgtgtagtaaatacaatttatacatatatatgtatattaatatgatgtctttgttatgtaaagctctttctggatgaatccaagattttctagtatacttggttttggttcaataaatcctttaatcatctgtagatagttttgcctcttcctggtcctgataacagaacaatcagtaccttttagaccttttagtaatggttgtgagttgtgacgaattcatcatgctgattatgaacattttacaaagaatgaaagtgtaagggcaatacccaaaacgttagggtgtaataaaaagaatgtattagagttttcccaaagtctgatctaccaaaaatcaccacaagaacaagttccatctttaaaatggtgaaatctgctcccatctctcactatgatctctctttcaaacacttttgagataaacttggttacctcatgacaatcctcacaaactcttaaattttttacaactcgtatgcattccccatccggaattactaacaatccaaaagcaatcgctagcctctcactgtgttctttgatcacaatctctttctcttcatctccaatgtcatgcagcacagaagaaatgtttggtgagtaaccggcttctgcaattcgtgtacctattgtttcaagcattttatgaatttccataaaacggtcatgttctctatcaccggcaacaaacttgtgaactctcccatgtgcttctatcaagctccaaccagtagttttattagtgtttctctcaatcatcaatctcctaactctaataacatcttcccatttgtttgacttggcatatattgtagacaactgcacataatgcccactgtggcttggatccaatttgattaacttatgaccaatctcttcacccagctctgcatatccataaatcttgcaagcaccaagcaatgttgcccacaatacagggtctggcgtcactagcatcttgtcaatcaattcaacagcttcatgtacgaaaccagctcgacccaagagatcaaccatgcatccataatgctccatctctggttgaatcccataatcctgagtcattaacttaaaataatgccttccctccttaaccaaaccagctctgctgcaggcactcaaaaccccaatgaaagtaacagtggctggagcgaaaccttcatttatgaagatttcgaagagagcaatagcttctttggcaagtccatgcgttgccaaaccacagatcataacattccacgtccaaatatctttctggggcatgttgttaaacaaaagtttagactgttcaatgcaacactttgcatacatgtcaattaacgatgtcccaaggggagtagtcataggaaatttcaaagatttggcaaccgaatgaactaatttcccatattcaagcaaacctaattgagctgccgctgagagaaccgacactaacatggcctcatttatcctcaatcttttttccattacgtctctaaaaagcttcaatgcttgctctagaagcccactttgtacataacccgttattatggtgctccaagagataacatctctttcaggcatttcatcgaacagttcctccgcgagatcaatttttccatctctcacaaaacacgccagcattgtattccaagtaaccaaatctcggctactcaagatctcatcaaacacctttttcgaatactctaatctagagcaagcagaatagaagttgatcaaagcatttcgaatgaacaaatcatcagcaagaccgtatttcacaacgtgagcatgaacttgagctccttcctccatacccaaagccttgctacaagcttgaaacaaaaatgtaaaagtatggttattgggtttggcatgttttcgcaacatggaggagtacaaaacaatagagtgactgggagaatcgctcttggcaaagcaacgtatcaagttattggtggcgaagacagaagggtacttgaaattttggtaaatggagagagaatatcgaagtgggggagaaggggaaagagcgagagaaagaaggagatgagccatgaggttggcatggccgacgaggccagaaacgatgatgcgcgcatgggattgcttggttcggttgacagatggaaatgtaggggttggagttgaaggagaagaatgacatattattaggttggatgaaagagagaggacaggttttgggttcggtttataagaaaacatacagaaaatcgcatggtctaaccctggtgtggtattggtaagacactctcgttcctgagttcaacgtatcaagtattgtggttgagcatccttccatgaccaccagagtacgagcagcaaaatggtccaatttatattaaaaaagataaaagcgtgtgggggcaatttttcacacaaacatttcaaatttaatagttgcgagcctctctcccagatagtgcccagatcgttacacctttcgtaggtcaaaatttggttaccttaggaccgttgtagttacaactgccgttcactagagcctcgatcgccgacttccctgtcatcatgtcatcaacttccttagaccttttggcactggtcaaatgtcagccctcatacatgatcttacgactttgtggagacttgtattttcagtaaacagctgcccagccctgattactgtgaccccctttgtgagcaggcactccttcgtctttgattgtaaaaggataaatgcccatttagtgccttgtgttttgttaaaatatgcacttagtactctatatttgaataatgatcaattattactctctcttcgcaaaaactactcatttttaaaccctgagtgcatttaagattttaatattcctaaactatcctcattttaattgttgattgtgaaaacttatcaactaaattatagccgaaaaattgaaacttgaatgcaagacttaggattaagatgaagatctaaaaatatgaaaa

SEQ ID NO: 305773 - DNA, 1644 bp, Cannabis indica
cggtaattttcgtatcacatttggacatgatatacggtacaattgtacttttcttacatttaatctaaattcaagcgagccagtcaacctgagtggaattcgtttgacgattcaaggccctatgtcacaacaatggtaaacgagtaaataactcattttaatccattttaggacttaacctcaaaataaaagttttctatcgataaaaaatgagcatacatggtctggaatgagcctctcattcgtgctttctctgattatgacataattgaagttattctttgaattaagcctctgcgagctagaagggataccttattttggaatgcttctaattttggtattttttctgtcaaaagtgtctattggattagtcaagtcaagcaattttgagctctaatatagtatggaactctctttgaaaatagaaaatccatcttagacacactttcctcctttggaagtttccatcggactaactttccacacatacagaatgggtttcctaccaccaggtgatcagaattgtgtcttctgcaacttgaaagtggagattgcactgcatttaattcataagtacagtcttactcgtggtatttatttataagcaagaggggtctgcgaattgataacctcaaatggaacaatcctttggactttgggaggccgtggattgacctgtaggaccatgagttcaaactctttgtggcttgtgtttgtgatgtgttacagaaatagagaaatgatattatacacaatcgaatgagttgtgatttcatggaaattctttcgaattgtattctaagattcaaagaattttatgtagtgtatggtgatccctctagtgaaaattcttgctcgaatgtgttgctgactaatagtttgactatcgttgtggattgctggacttttcaagttgatgcctcagtaggtaattcagaggcaagtattggaatgactcaaaagggttgtgcagacttgggagacgctgttatggccgtgaatttcatttcagtttgttgtgtgctgaagggggagctacgtgctattaatctagctttgcaggtggccaagtcaaaaggtatctcgaaactaattgaatcagactctgttgtggctgttaaggggtttagctttggttctcttctgtttgggtgggattctttcccgctatttttggactgtattaataggtttaaagagtttgagtttgtagaaattgtggtttatttcttgttctactattgatttgctctcccattgtggtcagtactttggcttagtttctctaaattataaagaccttctcgttatcatatatctattttatataaaatgtggttatgtaacggaattcggtttaacggtattttgttaaaaattaatctaattaaaaaattaaacatatgtatattgcacttaatatcacctaatcgaacctaattaaaaagaaattaattatatttacattatacataatatcaaactaatatatatacacacattattattctcttatatactagtatacttagtatattcatttcttgattcaaaaaaaaatatatatatataaatatataaaaaattaaactcaaaaaattaaacaatctttttttaaatgtttaaacccaataattaaac

SEQ ID NO: 305774 - DNA, 2671 bp, Cannabis indica
agtataaaagaaaaaaaaaggggaggacagtataaatgtaaattctgccgtgtggcagtaaaattgaaaagtattaccccaaatccagtatttttgtaaaatgccctatttattcaccaacaaagttataatctaatttgaaagacttttcacattaaaaaatgagaaaatattttcgaaaataataaatgcaaatacaaatacaaaatcaatttaaaaaataacaaaaatattatttttatctatttttttttatcaaatatacatatacaaataaaatattttataggtacgtacatacatatatagttccaacttttatcgttagatgtttatctatgcaattattctttacttgaactctcgaatcatagtaaattagctattagattagtcttgcatgagaaaattatttaaaaaaatgaacgaaatacaatagaaggaaaaaatttacgattatttttgtagtttgaggagaagtttttacaaataataataataatttgaaggaaaaaatcacataagatcatatttaagatgaaaatcctatttcttcttaattaattaattagctttcggagatcaatatagtatgaccaaaaacctcttcaagagaagaaccaccaacaactacatacctaatattatataataaaatataatactatggacttaattattactagtcacctactttataatttcttcactatcaatatatataaatatagagaaatgttaaaaggcactgtcaagcaccctcatatgtgtcaatatcgctattggtctaatttagtatcgggtcctatataatttaatataataatttttagagagtatcggtagccaatcataaggcgatatttcttaagggtgctagacaccgtagcaatgctcataaatatataattataacaatagacatgttactatttttctaataattagttaatgtggagctggtaaaatagtgctagaaagcgaaacttaatgtgacttgaaaattgactagtaatataattaatgcatattttgtttcaatattcataactaattcaaatttgaatatttctatattctatatattcttttttgtgcaagaaagtatacaatattgtttaacacgtgtgcatattgacatatgtgtattagctgacatcgaatgaaaacttggcttataaatagaagagtttacgtgcctcatcaaatatatctgacaaatattgtatttgtcttcaaaatttgtttacgattcttgaaaagggttggtttatgatacaaataagtctttctttttcatttttcaaaatatttttttttatcgttgatttcttgattttgatgaaacgtacttttttttttgttaattttctatcagcttcaaatataggtgattttattattaatcttgctttaattagtatacatatatacatatatagttatatttttttgaatgatatattcaagaaaaacatattctcaaaaaatttatatagttattaattaatagattaaaagaactgtctttgttggataaaaggatgaaggaatacccaacaaagcagttataaaattctcaccctggagtctacaaattaagaaataatcaaattaattaagacgaacaataaaaatcccataccattatacatttcttataaaatctgatttctttacttatatatctatatatatttttgcatgtctttgcatttttttgttggtatatatattaattctatattagtttaagtgaatttttggcttgaattgcatgcatccatatatgtaaaatctcgccactttcttcataaaatttataaaggaaaatcaagaatttgtgttatctttatataatgatcaatattcacgagtattactaataatctcattttatattgaatttacagaaaaaattatataaattattagtaaatcaacatggccgaacagttgacccagtcggctctcaagaagacgatgctgttcatcaggtgattaattaataaaagtatttaaggcttaaaccttgatcatcaaaacgtgcatatatatataaatatatatatatatatcttatttatataaattttaatattactttaattgtacaacatttttctccatgtattaaatatatggcccttattgtcgtagatatagatatatttatatatattgttaattataatatatatatactccgctttcaaaagtactaaattatctttaaggtattacctaaaataattaatcacatatttacatgactaacaattatagatattatataatataaataaattgatggaatatggattcaacatgagtttaattaataattaattattattaatgttgtatatgtagtgggaataataaggaaattagtggggaagatgtgggagctgcagaaaccttaaatgatgagagtaataaggtgttgatgatgaagagtgaagaagtgcaagctggacaggatcctaatgcaagctttgatcctgttaggagaattgcctgtggatttaatcactttctcatccataagtactagtaagataataatatttatacatacccacaagttttatatatggtgctagctagctcttaaaaatgagtttattatatgcacttctttatatgtttttgtcatcctcatatatag

SEQ ID NO: 305775 - DNA, 2484 bp, Cannabis indica
gtaatatagtaactatagaaagattattaaatgcttactttaaaagtttttaaaaagttttaccattatgcaacataactattattttaataataattaaactatatataagagtcctaaaatttaaatttactttagtcgacgtatactttaggacagacgctatatgtgagtcattgtttattattcttttgtgttttttgcgtcttgaagtgggaggacaaaaacattttcgatattttgaaataatggacgaagctctttcaatttcagaagcattaataatgattcccttatgatgtaatgattctttcttacgctattacttgatgaggtcatatatcaagcctatatattttaaacctaaaacataaacaattaaattaaaccttctagttctttctcatgacaatttgagagagattatctatgttccacatattccatcttactcatattattaatcccaaaaacactgttatattagcttgtcacacatggatgtatagcctctaactgaacaaagaaaacatctctatagaaagaaagaaaggatgtataattgggaccagtaagacaattggatattattctttagatataaagagatctacttaatcgttgaagacaaggattggaggaggtgagggattagattctctcccctttccttttttttcctagttatagtgaatttcttctaaataaagtgtggaaaaaagataaacaaagcttacttcaaggaattgctctatttgaaagggatcctatctctctatctatactatttataattatacatatattatatatatgaaagagttttttagctttgttcacacgagtatacctcttcttctcaaggcaagtatatatatatacatataaattatgtatatatgagcttcatcccatatatataaatacgtaacaaagtgtatagttattgattttttggtttggttaatattgttgtaaccatgagaggtgttgaggttagaagaagtgaagagtcactatgtgagatgtcattgaaagtggttgcaaatatcattaggctctcagctttctcaatttctcaaagaagccttggcaacaacactaataataataatgataatcacccagtagtagtagctccttcttcttcttcttcttataaaaataacaactatatcaaaaccaaaaccaaaataagcacaagccctccttctcctcctttgaaggtgaataagccgttgttgagggccctaaaaccccagtgtgagccacaacaaatctacttggttgatcatgaaccaattactcgtcatcatcatcatcttgaccataatcttgatcttgtgaaggaagacatgaataatgttgatggcagagcttccgacttcattcaaaaggtacgtcagaagaatctaaaggctgtcactaataataatgaaactatttattcatgcaaattagtccctcgaagtcgtactatgtaaccatcagcaaccacttaccactacgtaccaccaccatcaccactgcaacgtctagctattactatttatatataaatacagagaaagagagggtacatgattatatatatgtttgtactatatatatatcatcaatcgttgctttacggatttttttgctctctaattttcaattatatattatatatattatgatcaaaagaaatccctagctatagtattaattaatatatatctatgtatcagaataattaagttataatcatgatgattggttatatgatatatgatgtatcttattctttgttagttaaggacagattcgagggcgatatatatatagaatatatatatatatatattgaaactacaccatttggctttatatatctttagttatgtgtatatatacatattttttattccatgtttgttttatatattcttaattatatatgcttacgtttcaattcactaacctttcattaatagacttgtagtctggtttaatattcatcttcatccatattgttaagcaaaaatttcacatttagaatattaaaaataaatgcaaaacacaatttcacctatgctaaaattatagcataagagtttattaatttaagttcgacccatccaagattataagaataacctcttaattacaatcctttcaaataaaggaaataccatttgattccaattacgatgatattaaataattaaaataaatttgggaaatttggggtaaatttagaattgcagctgaactcagtccattcaattaaccgagctgcctacataccttctttgtgaaggatcaagccacttgtagttcagaatgcggtattttagaatttggatataaggattctggtagatgaccactttcaggaatcatttgctattttgaaaatttggaaaaattcctaggtgtatgaccttttatggaattttgagagttatgttttataccattttgcggtatcggggactgcac

SEQ ID NO: 305776 - DNA, 1083 bp, Cannabis indica
taaatttaaatttaataatttatctaatatcatttcatatagtatgttgaagtatctttacacgcttatctaaatttataattcactaatgaaaaactttgtaaattattttccgaaaattttattagagaattttttggaatatatcctttagtatatagttacaattaatcttaattttatacgatgatttattattaaattaaaatatgaatcatatatataattaatattttgtgtataattagatcaatgcggctgctacaacacaacaaatgttagatgtatttaacatgaggggtattattcattttgggattgctgggaatatcaacgactccatgtctattggcgatgttaccattcccaaagagtttgccgacactggcatttgggattggctggtaattaattaattaattttagttatattatacaaataattaacaaacaatatgtaattaattaattaattggcagaacccgaatgcaacggtggatagcactgatattgcaggattggatgtgaagaattataatgtaccagaaggaggagaaaatctattgggacatattggattcaactttgagcaattctactcaaattctgggaagccaaacactgcacagcccatggtttgggctcaggttaatcaacactggcttcatgttgcttccaaacttgaggtacttactgatttggtatatttcttcattaactatatatacccttctttgttgaaatatataccaaataattacctaattgttatggttttcaggggatggaactgaaacagtgtgtgaattcaactttgtgtttggagaaaaagcccaagttagttgtgggacttaggggttcaacatccaatatttttgtggacaatgcagcttatagggacttccttttccaaacatttcaggtttcatcttcagacatggaaagttttgctatggttatggtaattacttaaaactaatttctctttataaaatttacaaggtttaataagatgatcatacaacatttatgaataataatataattgggtgtgtgtttttttgcagacaagcttgtccaat

SEQ ID NO: 305777 - DNA, 2078 bp, Cannabis indica
cagaacaaaggtttagataaaataactagtactctggtcagatgaccatctttaaggtacagttttaaaagtgcaattgttttatgtttaatttagctaaagattagttagatcatgtaatagctaccataattcaataaatgtaagttactacggtaacaaaattattccgaccaataaatgaataaagatattaattatcattctaattgtgtcaattattttatagcaagttatgaacttaccattaaaatgtgtacaaagggtctgctcgaacccaaaggccaaacatacaaaaattaaacttgtgaaatgcaagtaaccaagagtggcatagtgtaagttggaattaattgactttagctttaataagaatctctctaccaggcttagtgaaagatttagccttccaactattaagttttatccagatacgatcccgaatagaattaaacatgcctaacgtagtagcgcctacaaaacaaggaaggcccaagtacttttcatagctctcaaccccaaatattcctagagacattgtcatcacaatcttgtctgcctcaaaaatattaggattaaaatagactagtgactttgtaaaattcacactctaacctaatggtgcaccataccaagagagaagaagtttgaaattttcacacgctaaagtggtagcattcagaaaaaagagactaccataaaaaaaaagttgatgagaaataatcggcctacacctagcacatggaattccaaccaacatattattatctcaaacctttgaaccttcagtacataataagaattagtaagaggacatgggatcattctgacggaggcccctttcaagttgaatagtaccataactgccatcattcaaatgaaccaaatattccacagaagaaatacactctatcaccttaataatccaaatatcatgaaagcgtaaattttgcataataagagggaagaagtttgaatcattcataggctaaagtggtagcttttagaagaaagagtctatcattaaaaaaaattagatgagaaataatcggcccagaactaccacatggaattccaaccaaccatattattatcacaatcccaataaatcaaaactgtcaaaccttcactacataataagacttagtaagaggacgtgggatcactctgatggaggcccttttcaggttgaatagtaccataactgccaccattcaaaataccaattattccacagaagaaatacactccaccaccttactaatctaaatatcataaagcctaatttctgcataatctttggcaaaaaggcaactccacccagctatacgctttgtacatatcaagtttaatagcacaatacccacataaccatatttttttgcgtattattacactcaaaaaaataagagcattgtacataatcaatttaccaactaaaaaaaatttgttcaatcaaaaacgtcactctactcttgcttggaaaaatttcactaagttaagccatgttgttgtgggtgtcttatgttgagtggcatgcctaacaaccatgctgagagggagacacatgcttgttaagttatatgcatgcattctgagtgaggtgaatgcatgccaattgaggtgcatgtgatacgaaccacaccaacagttgtgatgaaacccgacaccaaatatggaagactctaagaattctcaaaatttggatgtggaaccgcgacccaatgcttagttaagcatgaaccttggtatgaaggaagacgccacaaacggtggtggaatccgtttgataagtcaggttgaacgccacaaggaatactccttgataagttcgaatagttctctcaagaactcaagaagaaaacctctcaaaattttattccaaaatattctgatttttcaaagtgtttacaaggctttatatagccaacttacaaccaagaaaaaaggaaactaaaagaaagacaactttccaaataaaacaaagacaaaataaaggaaacaaaattaaaaaaggaaagctgccaattgccttggaaaacgtgataactcaacttgggtctaaattgagtctactt

SEQ ID NO: 305778 - DNA, 1316 bp, Cannabis indica
gtgttggacaaaaacaaaagctgtagattttagtttaaaaattccaacaaagctcatccatgaaaaggatggtactctgagaggttagaaagttgaataaattagatctaattacctcaaaatttagacccctttaaattgtgagcttctaagatatcaaccttcataatatacctagaggcatagaagattccttcagccatttaagagttaacaactacttaatagcttcattcaatgagtttgcaccataaaccctgtaatctcttaagatactcaatccagtcaaatgagtactagataacctcttacagccttttgaagatcagcttctcaagatttgtgttcaaatgcactgcttgtacatagaatattcaaataagttaaaaaacataaagcattttggtcataaataataaattatgatttaaactcaatcaataaactaaatttagctagtataatgcattatctattctaatctaagatatactaataatttatcaaggttggagcaaaaaacgattactttctcaataaaggtaaagccattcttacctagttttgaaatcccatcctgaaactgatgaggcatataaactaccactggtttaccttcttccccacatgccagatcgtctatgaaatggactccctacataaaaatgcctcactaaatggttttgacttcgtagaaaatggagaaatccctccgcgaagcatatccaataccaccacaaattagcgtagtgttttaaaaaaactcaattcttcgatagatgtcagccgaaagccctaggagtatggcatcgagtttcatatcatccttgaaatgtgagaaattggcaccaaaacatcgaatttgtttgcagcagtggaagaagaaaaccacgacaatggtgtttggaagtgaatactattggtacaactgtacttagcattagcattagcactattattaatcaacacatcatagaatttataaaacacttaatgtatatatcagacatataatcatattcctaaagttactttaatatagaaaatcctaaattataaatctatttagttctttacttaattaaagaagaagaagataaaagatgagcagaagcactaacctgagagaaggtttggaaggagagaatacgctacctatttataggctcattatataatagttttgggtatttataatttgacccctcaacaaattataaattaacttatggtaactacactttattttcatgacaatttaatacccttttgatgcccataacataattggtcacttaattttgtatcacacttta

SEQ ID NO: 305779 - DNA, 697 bp, Cannabis indica
gaaaccagaattaatttgtttttatatatttttaggacagcaccttacaaaatatataatatatatttaggacagcgaatgaggcgttgctccataaaaatcaacaatcttgtaacaaaaacaacataaaaacttgtgcttgtacaaatttttgcaaacaaatacaaaaccttaatatgtctatagcgttagattctccctttggatttaatttttgataatattagacagttatgtaaacattttgatgctgtgagtttttttttttttttttttttgcccagaactactaatttagtagttaatatactcttgccaaatttgcttcacatttactgcaaatactgtggtagtctgattatccaaattgtatttgtgaaatcttatttattatcttcagctctcaactccttagttgctctttgcagtttgcacttcgatggtgttttctaaagctattttctcaaaaaaaaaaaaaaaaatacatatacatatatatatatactaggcagaagttacgtgtctagccacgtataattaattttattttaagttttagttataattatggttttttttcaaatatcatacgtaattttaaaataaataatgctcaatatagagtgataattgtagaaagaataataataaaaacattaaatgaaaccttattacaaattgaaatcaaatatatgat

SEQ ID NO: 305780 - DNA, 1828 bp, Cannabis indica
aaaataatttccaacagattcctcattattgaccaaggcaaaatcaggctgcggtaaatttaaaaaattaggcccaatatcaaggagaacacgtgcttctaattccccacgaggtggtgtctgcacagccacgtcatccaccttgcacctacccactgtacgatttctgacattctccctatcattcctcacctccactccatcgtacgaatctgtgcagtcatgcaacgtccgaggggaatgacagctcaccacctccggggccgacgtcctctccactgcagaaaccagctctttgaccttcctagtcgcctcaggttccccttttttctccgatggatttcttcttttctagctacctagactgcgtttttagttcagttcccattcaagtacagtcgtagtttcaatgaccagtcgtgtagacccttttccagtaaaacagttggacttccccgtttcgcttttgatccaactaccatacatctggactgcctttcccgtcttcggagtaagcatagccatcggactgtggcagattttatcccaatttgccaatctcccgcaattgaaacataagtggggtattttctcatacttgaactgaacccaggactccgatttcccatccgccgttaaaaagaaccccgcagggaatggatgagcaacccaaacatcaatccaagcccgaatatatcccctcctaacaagctctgttttactttggtcatccgccatgacaaaagaccccaccttctttgcactatcggagagttgtcattcgaaaggcatcttgtaggcaaaccgtggaattgcacccaaaatcttgcgacctcgaactcccccgtccgcacttccctctcaactggccacggtttcaggttcagcaacactccattaacaagccaaggtcttttgtccaagacaaaagcgcaatcatcctcattctcaaagaagaaaccaagcacaccttcatcgcactttttcattcttcagggacctagtcttctccaaactccggtaaggattttcttcaccaccgaggcaggcatatccttacatccaataactttacccacacaagccctgttagcaaccacctcttccaaagtaatgtcttcaaagagctccaggagctccatctccatggcactatcacgagtcaaaacattattcatggtttcatccactgactccacatggataactttagtcgaatccacaacgtccttcccattatccaacgccatagaacaaccacaaagatagacaaacaacacaggggacaacactctccttaaccccccaaaagaagcacacttcacactctacacaaagaaaactaaagcactgaggaaaacattctccttaacccccaacaagaagcacacttcacattccacacgaaaaacatacaacactgaagcaaacactcgaggaaaagatattaaaagccaaaaccgtaaaaccctaagctgaaaggagggaaaccaaaagttcaaaaagaactagactctacgcatgagctattttcaattgaaattatataatttaatggatccatcaccccctatgttaatattgtttcacagagtaaaaaaatatgtatggaagtttttcatgtcatccctcatgtgcaccctatcacaacctcaagaactaaagctccttaagtaattttttccttcttttgattaagtgcacacaatacatgaatgcaaaatagatgaccatatatggaatatttatagagcattttataattttgtatacattattttaattaattacaaaatatgtgcaaaaaaacttattatcattttctcat

SEQ ID NO: 305781 - DNA, 1836 bp, Cannabis indica
gtagatatatatagagtgatggagatgataaaatggtagtagctaactaactgtgccagaataatacaactaagacttagcatactaacagatttgcctttgcagctgtacataagtttcgtaacctcaactacaggaaatgattaagaaatattaatatatctttgctgtaaagttaccttttgttttcactcttttccaacatttattataatttatttgtattgtaattggtagtttttatatggttggtgttgtatcgtgttgttgttttgtattattattttattttgtatggtgatatttggttatgttaatgtttattagtgtgttatgtttaaattttattttatggagttgaccaaagtttgacaagtttttcttttaaagttttcaagttatatagaaataagtttttttcttttcatttttattcattatttttttcactagtattatgttcttgcttttgttttctttaatttatagggaggtttgtagtaatcatgtaataaaagctctatttttagccgatgcattggattggtctcctacacttgggttgcctattagtcaatttgagtgtgattatttagttgtgatttatgctttctctaagagatcttatttttggttttgatcatttaggatatttattagaggtttttactaaggcatctctaatttatgtatgacacacatgaattaacaactcagggtgaatatcaaactaattttgatggattaataccatttttttttctctatgatatctcaaactcttattatattcaatgaatgttcattgttcaatacatatatatttatactaagcgtggagatgtgcaacatgcacgtaaccccatcaaaacttataagttataatcatatatcttattttaatcaattatatttgaacaaagacataatgtggtataggttcacttattgaagttaagattatcaatcatcctgtttaaatgtaagcatatataatttgttatactattatctactaataaacaaaatttagaagaaaaataaaataataattaacaaaaatttatgaaaaatagaaaataacgacacaaaaaagattactatcatatgtgtgacaaaagattgttaaaaaaaaagtggaaaaggcttaaaaaatatattttaaaagagaatggagaaaaaaaaatgagagacgttttgtaaaaaagggaaaaaaaataggtgaggtttaaaaaaaatgacaagaacattaataattggtacaaataaaccaaaacacacaactataaacatgacaaaagaaatacacacacaaattactaattagataatcttatttagtttgagaaaatacaaaagagcaaagactataggaaaatctcacctaagcagtgtgcaacaagtaaaaaagaaaaagcattactattgagcacctgtaatgacatcatgattagattatggattagcaaatgtaattagcattaactatcgatatttaatgattatacataactttatatttcttatgggtctcattttcagaaataggcattagagttataactttccaattctggaaattttattaaactctaagtgtattaattaagttataagcaaaatctacaatttttaggtttttgcttggcgacgatagaatatgcgacatatggctgatttagtcacatgagttagtttagaatctttttttagcagggtatttataagttgacatttggaatatcgagattaggcaaggttatggtgttgaactatttacccctaagtcgtttttgttgggttttgtaccctcaataaaacccattacaatttgat

SEQ ID NO: 305782 - DNA, 2531 bp, Cannabis indica
tttactaaaatatcatttaaaaggagctaagtgttttaaggataaaatgcattgaagggtagaacaggttatttgtccctacttgatgtagatcattatttcccgcgatttttaaaaataaaataaaaacaataagagttgaagaaacaataattgatagaaaaaataggcatgctggtttttacgtggttcaggcgttaacaagccctagtccacgagtcagttttattcggtagtgtattacttataataatctcaaaagtacacagggtgtatgttcctatattttcctgagcaaaagtacgtaagagaattcaacctttaatttatgagattagttggatatttatagtggttggagaagtacattagggtttttccttttcactctattggggagtttacaactgaacaatgtccatgggcttactcatgaagtcatgcccatgaaggatacaatttgctgacaaggcaaatcgggcttgagttgatcttgtcaaaaccatatgtaatcttaatggtaggatattctgaaataactaccctgcacttgttatgggaagtttcctctttaatcgtgatatcatattatgacctaatctgacagttggcattcccttatttataggaggggataaatatggaaactagaagagtcttctagaaatgatacatcttccccctccaaactcacgactctaaaactgtcttcttggctcgatctgtagaaggtggaaagtatcctgagcacggaacctatgtaactctcgaaaagacacatctggatgggcttggtccactttaccattattgaaggtcccactgattggtctagaaagctgacatggaatccacgtgtcccactctggaaacatagataaaatttacccccaagctttcataatgctgcttatgatggaagcttgttctgatcccttaatctggacgcgtggatcttagaggaagaaaacggtaaccctttccaagttactcgtccatggaagctgacttctgcctgcgatgatggtgcgtccacatggtagccgagtgtgggtcagggcatagttattgaggagtcgtaatctaggaaggattatatttcggtggcagttcactgtcttggcacgaaaatcaaaaaagggaattttaatcattacttcacaccttgattttgaaaggcattaaatgcaaagatattcatagatccttggtctccctaactattggatgaggatcgccctttattctaaaaagaacttggccatccactccctcctcacgtggatcatcttcttgtggtataaataccatgggtaaccttcaattaccacttttgccttctctttcaaactttcaaactttcgaatcgcgccggactccctaccatctttagagctttgaatcgcattcaaggtgaatcatcctggatgatgcagtagactactgcctttgcctgttgctgagaattagggctcgagaatatccccatcttccatcgcagtgatcaagacggccaccgcaaaataaatctcaagcctagaatttgggaatgaaattgactcgttgatagcctctgtttctcatctttaggagaggtacgatcatcttcctgaaccgaatccaacaataatcagtttaaaccaccccttgtctgcatcagatacatcctgttttctcatgtattgtactttacaaatttttaactttaatttagatatgcacgctctgtttgggatgaaattagggttttctcgtctgtgcaaattccaccgtaagcaaatttaggagttgtaggttgctttacttcctgaattttgcctttaggaatttcatcaaatgttctagccaatgtcttttgcccaaggtcctcatggttttgggtcgaacatcaatttgtgtcatctcctttcatgcattgttctgggtttagagtttggaaggaatagtgtgtttagttgggacctctccaagaagtttatggggaaggacccctagctccctttctatactaggtagttagggtatctaaccgcttggacctccttcttcctatacagaaattatgaaaaagcgttctcataaaagagaggctgactcagaggaggagacgaaggaaactcaaagagctccccaactagtcctgaacgacagtccgtgggaaataaaccagtgttggaatatattttaccaggatctagatttactaacaagtatgtctttaacatcctaatatgaatttttaaaacgataaaaataaacacataaaaggtatgagaaaccttacagtggttgcagcggaattaaatgactccttccgctcagatctctaacccatgtatcctttttgtcgcagagtatcaccaacatctgagcctgattctcctcgttgttgtttggattcttcaaagtcttacatactatgattgatgactcacttgttatgtgttggcatgcactcaatcactaatggctgaattttgttttgtgaagaaaggctatggcattttcgaattagaggaagaagaaggaag

SEQ ID NO: 305783 - DNA, 3516 bp, Cannabis indica
gataatttcattgaaatctcccattacaagccaaggcataagtggagctgaatcttttaattttttcaaaagttcccaagtgaaagctctttgtgatacatttggagcgccatagaatccagagaaatgccaattgaaaccatcagcaacagagatatagcagtcaatgaagtttattccataattaataatagatacatcaacatcagctttccaaagaaacaacagaccaccccctaaacccacccgaggcacttcaatgccatttggaaagtgaaaagcattcttaaatctagaaatagaacctatacttaatttagtttccataataaacattacatctggttttttttttttttttagtgaaaaatactttattataaattaaaaaagagttcatttacaataacaaagtaaattggtggagggattttctcaaaccagaaacaagcctcatccacccctaatgcaaacttagccaaactataggcagccatattagcattccgtttgacatgcgagatggttacattaaggagaaaggataaaagacatgagatatctacaatcaaatcattaaaagatgagattgaattgaaaggagctcaaagtgcagtgacaaaccataagagcatcggattcaatctgtgataaaggcagttgttgttggattgcccaattgaaagaagatatttgtatttttttaactattttgagtgaacacctattaaaattatttcaaaacacctacatcaaatttatgtttatatacattatttttcttattattatatactttaattaattttaatatttaaaaatagaatctttaaatcttgtaaaaatatataataaaattgatatatagttgtaatatttttgattggacaagtaaatagataagttaaatggtgttttgataaggtattttagaaaatgaagtataattctcaataaactaaaatagataagttaattggtgttttgataaagtattttagaagtactaaggtgctctttagttttattaatatacacatcgattttatttaacaaaaataattagtttattaataaacataaatgtattgaactagtcttcctatttttgatctcatacaatatatcaccaagagtgtcatataatttagtttttttttaaaaaaaaaaaaaaacaaaactaattttattaacctttaacttttgctactaaaaatagtaataaatttggaacaactttcaaattaaacgacaatcaaaatataatataggaattctataacaaagttatgagccacactattagtaaagttatgagtcatataataatttttaggacataaaaatacttaaaaaaattatggtataattatcataaaattagtgtaaatgagtgtactaattactgaagtttaaattttatgaataaaactattaatatttgaaattgtattttttaattaatatttttggataagaataactatgtaatgaagttttcttagaaaagaaatgggatgtatttataaataaaactttcttaaaaacatatataatatacatattttattttctttacaacaacaaaaaaattaatgtacataattaatgccagggctctctgattgataaaaaatatgttttgcctctctgtagaaaatacaaatttacctaaaaataatacttcttaaaaagtattaaaaattcataatgaaaaaaataattaaaaaaattattcatcaccaccattaataccaaaaaagaagaattattaatggtgttttgagtcttttcactattaattaatataccaaaaatagattcttcacatctaccaatttatctctatatacatccatgtcgaccttaattaataaattattttagtgcatttgtttccttttataattgtgaatataagggtcttaatctctagaaaaaaactaaattaagaaattaatgagtatatattcttcttataatttttgcttaattatataaataattctcttcttatcttcttggtaaacgtttatacatatcgatagatatcctatctctccatatttctataattaataatatgaataagatgatagaaaattgtggtacaaaatataatttaatttatttccatttacattaattaatataagttaagaaaattagattaattacaacaaaattcaatcaaataaaattagctttctaattttacaactggaaaatgaaaaaaaatgaaaatagtggttttgaacatggaaaataattaataaataaaatcacattaataatatatagtttacaatttttataatttttttactcactcaatgggggcattaatttatttatttttccttagtgaaaactgaatatacttcactaaaaagggttcaaaaatggccatcccaattaggagtggacctcctcaaaatttcaaaagccaatgactcttatgaaatatattaaatgatacaatattattacaatgcaatcaaattattcttgtactaccactttaacaaacatataaaatacctagctatatggtaaaaaaataaaaaaaaaataaaagttaagtaattatcgaggataatcttttataatgatcatatattaagtttatcatgtcactattaaataataaaatctagttattaattttttttttctttaatatctatcaaatttaatttctcaatacataacactaatatgatcatgagaaaatgatcatatcaccgaaatattagataataaaattcattataaacaattagttattattattatttatagaaacaccctatatatacgaatataatataaaaacactgattctatacattttttaaaaaatctttttaatccctacaactacaagtgtttgagattttttgcaaggctaaagaaatcaattaattatttttgacttattattattatttattaattatttgggtgatgaaaagtaattagggcacctagcctagccatagagtgatgaaactccaaaaaaaaaaaaaaaaaacaatttagtttgaagaaacaaagcagaagagagaagaacagagtatagttcaaaaccaaagaaaaatacagaaaaagttcaatctttattaatgaatgatgaagagtttatatacacattgaaaatacaaactattacaaaactaacaatcaagaagctaacaaacatagtaacaatattttaaactaacactaaccaacttaaacagttagttagttatcatagttatttttctttcattctttttactactccccttaaaaaaaatgttgaaatatattttgtgaacaattctaatacgtacagaatatatatggatattgtacatattacaatatagggatccaaattttacatatatgcatctctaaagatggattttcaaacggaaatttccatagtatattaattttgttcattttttataaaatattgtctagtcggtatttttactttttattgtgttttttataagtttcata

SEQ ID NO: 305784 - DNA, 4529 bp, Cannabis indica
ctcccagaggtacctgagcatctggagcctgaaccactcctccaggaggtgcttgaaccctgagttatccttctttcatatgtggcaggagatttcttatgcactcgtacaagtggcccagccatattaggctcttaatttcatcctttaaatttttgcattcattggttgtgtgtccaatatcattatgctaccgcatcttttattgggatctctttagaaactatctcaagagaaaggaggtggcctccggtagtgaacgttttgtcttgtagccaagtacacatgttcctgaatatccaccaatttaatgtactgggtatactgagggttgcattcgaatgcccttttcgctttcttgttctcactttgggtgcttcccttagatgaccgtttactctaggaggtttggggagctgtagttgcagtttttgcaagtgaagcaaactaggcggctaactgtgcgcatgcttttggagcagggccattattttgcaacccataattagaatgggctggtgccacggtgagattttaagaatattttggcggtgtttgtaactacacactgagcatcccactggcttgaggggtggcaggaagtacccttttgggaatttgcatccaaaaagcatacccagggccttcgataaggtaataccctccaaaagtcattatttgggcttcttctaaattagtatacttctgagctctcttttgaaaatcttaaaggttggccgcaccttctaattggagctcatttcaaaagggagttcccatctggatagcagcttgtaacaaggccaattgttggccatcacccactttctttattttggaggcttcttctttaaacctcttgataaaaatttttagggtctctaaggataattgtttaatgttaatcatggaactaacttcaaggttgatcttcttgtttgcaacgaactgtctcctaaagtttgtttgtaacttgctccatcaatccatgtatcctggttctaacttcttgaaccattcccccacggatcccccaatgttagcgggaagcacatgcacttagcatcattactgacccttaatactgtcatgactttgttgaacctcgataaatgattggatcagtgtctccatgtataaggtcatttcaaacttcttgaaatttttagggagctctgcttcaagtatgtttctagcacaaggctctcgatcctcgcagtcatactctaagtcgtctcattttggccttcgggagacccctgctatgtcctttcggaggatagagagtttagctagaattccctcatttaggatgctctctaataatggagtgttcttcttttgatcaaggcgtgctcggaggtcttcatgctttgcattatgtttttctcataagttgaccgaaggatcttccctcccaaaccctctctttcctcttggtttttgatgcacagaaacacttctttgatctccccggtcttgggggccagctttttctttaggaaatttatcccctgcagatcctttcctttcggaagatcaaaacaaaccttctgtggatcactggctattttgttctgttcaggtattgtcgtagggttctttctgggggtggtctctcaaaagggtacatgatggggctaggctccttgtccttctatttttggctccctacaagttgaaagggtcattttcctactttctcatgcacatagggtatagcagttgggtgtacatggatacctgcaatttacatcgcctttttcatagcagtcaataccttttgcattcttttgtgttgctctttctactctgctaactcagcctcttgttcagtagcacattgtcttaatgccactagctctatatagttatcttcgcacatatattcagtgtcatttgtatctccttttccttcaacatccacttgagaagccatatcctcttctactggacccttttggttgccaggttgggatggtgggcgtgaagtatttcttgttaaaaccatgattgtattgattattatatttctctttaagaaagcttcccccagctctcaataaagtaccaaaatgttgatcaagattttcgacaactattaattaaatccatttgaagtaattagtggaaattaaagaagaaaatttttacatggttgaggcattaatgagccttagtccataagtcacttttattggtgagtattttcttacagagatccaaaaaaaaaaaattcctcttccatacatcatttgagtatttataggcacataataaaagggaaccaacctccattgttgaagtatgtctgaattattctttacacaaatcccccgaatcttggggatagggcatcattccttatatattaagggtgtgtctatgtttatcataggtgtttagtgagacaagacttttcctttactgctgacttgatagatcataatgtagccgtcaaatgatgtatcgggtttagtgaaattagggaaatatgggttcaaacccttgagcatgtctttttagagtaatgtgtaagatgttcttccccatactgtattaactgtatgcatagtacctttgcctcgggccgtacactatactccttatccccttttcgagtcgagttttacctgcagagaggaagagcaaaacttccatccttctggagggcccatccggagatgagtaatctcctgaagctcctaccaaatattcacggtccggatgtgggttaatataacacgtcctgttttgaggggctcgttatcatatgtcacctttcaaaagtgccacgtatttatgaaaaattcctaagcaatattataaaaataataaaaaaaaattatagctaagagcacatacaatagctaatgtaaaaatttgattaaaaaattattttagataccaaaatagataaggatgtatcggtgcatacctatcaagagggtgcattgtataattttcctaaaatagctacaaatataaaattatagctaagagtaaaaaaataataataataaaaaaatcatatccaatagatgagctaaaatagctcaaaatttatctcattaatagtgcttagctaaatgtaggtaagaaatttataagttttataatgtcttttgtttatttgtaagtgtaaaaaataaataactattatgtaatatataatattttattattttgcgtattataaatatattatttaaatagtatagagaaaaatataaagaagctgatgtatggtgtgttgggaaaaataataaacttcaagggcaacaaaataataagaaacaaaacaaacaaattttactcggtttggtaagactaacaaacccacaaagagagatatatttcacttatcactcaaaaattacatatactctctatctgaatctcttcacccaaaatccaatacaccatttgtttctttctcactttccacacactaaaaacccacactcatttttcttttcaaagctcacactttttctcacacatactcttcttttctctcttatacaaaacacatatttataggaaaaataatcttgggcaccaagataatttggggaccaaaacactccaaagctttctttagaaaacttttcaaaacttggccaccaagactttccttttcatacaattaataattagccaaaaataaattgtaatatagttaaataaattaatttgagtcaaaatctaacaatctccatcttaactcaaattctctaaactcacaactcaaaccatcaataagagtatatatgcatcgagttcatgctctcattgaacttcacttgagcacttgtcttcacattcttcaatcttttactgatgccttctttcttcaaacaccatttaacttaaattggagtcttctctaccttggcgcattccttcactctaattgaatgccttttgtggcttgactccaccttcatagctccacctaaattagtcttcttgactaatttgtacaaatttcgttgttttttattcttcacaactattaacccacctttcttaatagttatttcactatcttttgcgaaatagtcacaacctcgagtatccaaagctcccaaagagaataagctccttcttaatattgtatcaattagtgttctcacaacaccattaaatatcttcaccttaacaattcctattccaataactttagagctagaatcattgcccatcaaaacagtgccactatcatatgcctcataagtgtcaaaacacttcttatatgggcatatgtggaatgaacaactagaatctaaaatctaagaatcaaaaaaaaattcatcagcaatgacagagagaacatcatagtcactttcaaagtcgtcaccaacaatatttgtggaatttgatgtgtctttgcattcttgattcctcattgcttcaagattgtaacgtccacgcttcaagcctccattgggtccttatacccacaaaatgaatggctcttatacacgagtacgtcactctggctgcttcatggactgacgactgac

SEQ ID NO: 305785 - DNA, 1706 bp, Cannabis indica
tgagtagatctaagatcctgttaaaataatatccaacaaatattccacctggtcgctgggtgcactaggtgccctgagcgcctggtcccttaggtgctaaaagttaaaagtgttgtaattatgattctgatgcctcaaatatgttcgtgacatgtcttactcatgtccaagtacacagttagagccatttgcactaagacagacctgaaaactaaaaccctagttgggatgttaacttgggcgctgggtgaaaatcctaggcacccaaattgacttccggggtgcaaatttgtctcttttcagctttcatgccttggtcttgatttttcttatctttttgatttaaaatactgaaagatagtgagttggaaacaacttggtggatccaaacacacatatcggagtttccagagtcaacctaggcatagggttagaggcccctcgcagattgactattatgactcgagactactcaactccagaatgctttctttcttgccatgtgtcgaacattaatatccacgttagtttccaagcaaacaaaagtattcgtgcattggagttgtaatatagaattgtccaagaacttaactatcattagttcatcaccgccaaatcttataaattttgagttcttggcctctacatttacatctaaaagaatgattctcattcttctctaaattgtatttattaattgaaaatggatagcaattggaaccatcttttcaagctgtccggaaaaatgttacataattaattcaagtattattcgcacaagtgcataccagcaattatgtgtgagggattaaatctttgatttattattattatgatgatgatgttgcactaaagtcacgtccaatgggcctataggtatatgcaaagaagagaactttttggtcccatcgccatattaaaaagagatagaaatgtcgatttttgataattgggatttggaaaagattgactattattgggtgtgggaccatcatatgcccatgggtccaacccacgtaattgctttttataggtagaagaaaatactttgcctatagtttctctttgttgagttagctttctggtttgttcagtgttcaccatccctcaatatagggacagaatttcatgtatgtttatatgtatatatataaaaaaatagggttacagctttcgaaacaatcagagtgatctctctcttggccatttcaccgtctgcggcaggagattttgggctctgagacctaactgttgtctagaagtacgataaaaatctttttttagtaaggttttacaagtcactcactgtaacagctcactacgcaacaaagtattttgtcgcattgcccttattacttactctccatcattttttattttaattttagccacctttcttcgttttcattgaataattaacggagttaatatagcaatgttgattatatggaagatataagggctatttacaaaaatataatatggaaaaaaaatataagttatgatatatatggcataaaaacttaattatactagatataacattcttcaaaaaaaactttaaaatatggaaaaaaataaggaggaataccacacaaaaactttaaattgtgtttctctttttttttttttatttatttatttttctctttttctttccaaaaaaaaaaataaaaacaaaagaaaaaaataaaaacaactgtaat

SEQ ID NO: 305786 - DNA, 1749 bp, Cannabis indica
acttgaatgatcaaatattcaaaataagcaatcaaatgtgtatgagaaaaaacttaccttgaaacaattttttttaataaaaagtaactaattgatatattatttacatcaaaagcaattaaaagattgctatctttttttaaaacacattgaaatttttaaaagcgagatttttaaaaattttttcattttcggtaattattttagatttcagcatttgtgctgatatgacatatcggtatttgtgtaaataattttactgaaagtattttataaataaaatcagtagttttatgtataatattagaaaaagggcaagtttaaattataatagctttagctgattggctttaattgattaaaggcaatagaatctgttattaaatgcattgttaatacccaaaaggaggaagagagaacagacaaagaaagccgtaactcccaacgcaaatcgtgggtatattatatagctgacgatggattgatattaagccagcgtttcccttcaagaataaaatcagatttttagggtttctccaacttggtatttctagattttattccttaattacttttatattatttatatatagggttgtttcctcaaactaacttaactcaaagcccaaaggtcgtacgtgcaatggcctgtgcatgcccccaaaagaacaatcccctataacttacgaaaatgcgaagattagattagaaatatttgaaaacgaaacaaagaaaaaaaccaaaaaaataatttataaaaatagtctcaagctggacgcgtggaactcatcacacgcgataatcggcagaatcaaaggggacaagcttatcgtacgtgttattggctttgttcatctaatctaaccagactagctagttgattactgatactatgagggtgcaaatcttggtgttctttatttatttatcttactatattaatattaaaattatattattattgtttatatgaacttacagcctggtttcttagtacgtattatattctcgtggcaaaaatatcctttttattatgtatttatcttttacagaggcagctaattaatttggactgttttattattgtttttatttctttgagaacttgaacagcatgtctgatttgatttgatttggtttaattatttggatcatctaaattaaataaacgattcatgatacaatgtacaattctttgagtacataggcttaggctgtcaacttcctctgaagttggacttcaagtatttaaatatatatatatatataaaaatatatattatatatgaaaggataaactttgtattggaattatcattattaatatatacattatacatatctacatgtttggatggtcatgacacaagagaagaaacttttctttgaggaacaagacaagaaatttgaaattttaaaaaggataattgtagcatacttaaagttttaaatttctaattggtataaattaataatttttttagtagtataagcatttaatattagtaattaaaacggtaatttttatttagtttaatattagtatctgttagtaagtttaaaattctaaaataaataaaaatatgtagttatagccttcttttaaaaactaaatttgcttacaaatttcagacaggtgaaaattataattttactaatattaaatatttatgatactaaaaaaaatttattaaatctataatgcttacatatataattaaaattttaattatgtatttatatatatat

SEQ ID NO: 305787 - DNA, 1236 bp, Cannabis indica
actaaaagtaaattttttttatatagtataagccaattaaatatacatcacaatagaaaataaaagtacaatttggtggttttttattatatgtatgtgagtgcaatgtaagtgtgatatttcatgccataaccaaaactatgtttaatcttcttcccctatatgtgtgtgtgattccaaattataagaatgatgaaagtatgcttattgaccacttatattcgaatgcaaatcttgtgtgtgatcttcttcatcaatagtaaatattttgatacaaacttttgtgtatatcaactcatgagagaattatttttagattttttgaactaaaaagttagctgaaggcttgaagctatatgttggagatgatctttagagcaaagattccacacattaattttagcatatattgcactaaattgataacttttggagagatgcccttaatactacatttaaaataaataaataaaaatagcattgcacatatcttaaaattagctgtcaagcactacataagtaatatctccaatgtgaattaaatttggtgccaagagtatgttatatttgacccaatataatgcactaagtcatttgtttattgaaaaaaaaaacctcaataagtcatttgtttattgaaaatagggaattttttacaatttttttcttatatctttttattatatttttataaatttaattttttaaaaataaaatttaaaattttaaaattataaatatgatttttttattaaaaaaagtgtgaaaaataacgagaaattaatattgcaacaactataaataaataaaaaacaacgagaaaatcaacctcatgacaaactaagtagaaggctgtgaattttgatgcatctcagccgctggaagccgagtcctgggccttgattcatgctctgaactggtgtgaaaccagaggatggagacaggttgttgtggtctccgattgcttgttgctggtgcaggggttaaaggcacgcagggcccccgactggcggttcatgggtgtcttttgaaagctgctggagctgttggaagtcctacctgaagtggaggttctttggaagcctcgggcgcaggttcaggcggctcatttggttgctcaatgggcttttagactttcttttactggttttttatctgcagaggagctggtccctcttgtgaccttctaaactttgttgttctgcttttgtgttgtttaatagagtttttctccag

SEQ ID NO: 305788 - DNA, 3262 bp, Cannabis indica
tttgatcagtcacgtcgacctagatgtttagataaaaataaacgactaggacctatctgatgtagtttaagtagcgaggtccctgtaatgaggatatatatatatatatatatatatataataaatgtaagaagataataaataatcacaagggagccttactaataatcaaaagaaaaaacttattatgatcatgaaaattgagccttcatcatgaaccacaagagaagaagtttggtcatagaattttactaataattaatctataaagtttaattgctctcatttgattcaaaatatattaattagggatataaaaatatatagggagagtatgattaatgcttttacttttgcccatgtcccttcttctcatggccttaaaaaaatgtggaaatatatttagtcaatatctctgatttagaccctcggtcagtcatgaccaagtatattttatgcctacaacatatatgacaagcttgaaggatgatttgttctctataatttttttgttcttttgttttttatatttctttatctatagataacaaaatgtgaatagggggttgtatatatcatatgatatactagctagctaagccacttaataaattaatagttagctaggtatatgtatattttaataaccactttcaataatttaaaaagaaaaaatgagttcattgagagcatacctaaggtagctatgtgtgagtgcagtgcacctccactttctataaataaataatccttcttctagctacaattaataaatagcaaaaaaagaagagaagaagggcctaacatatatatagaatatatgtgtgtatatatggtcaaaagttttgcaatgaagcagtaaccccagcctcagtcctttcatcacctaaggttggtccatttttctcctttattttctttttctctgcccgagcatgtaaggataactacaatagataagcaaagatatgaaataaattggaattgtcagttctaattcccaatatacagatccataattatgtacatatataaatataaaatcacaactatttaattattgccacttaactacctacgagtgttttaattgatttcatttgtcacatgatgaatagtattatttatcaaattcacatacataactaaatatatacgtttaacaatgttagttcataaaagccctacgaccaaattgagtggagttttcttgatcaaactttggaggcttttggtttatgtgcccaattccgtggttaattatttggtggctaaatgtgtgtctttggtgtctttttccatcctccggggatcccttgaaaaaattctactggaaaagaggccttaaacggggagattctctatcaccatatttgtttattgtgtgcaatgaggttctatctcaaatgttgataaaggctgaacaaactgatttaattagtggtttttgtgaagtaaatctaaaaaatattttagagattcaatcttgcttggattagttctgtttggcatctggtcaatgcattaatgtgcataagtcagctcttatcttctctactaatgttggcataaaccttacaaagaatattaaggaggttttaggttatagggatatgaatggtaatgataatttttgtggtaataccattcttttctctcgtagcaaagtgaaagatttaagtttccttattgataaattagccagacggattgaaggatataaatctaaacttctttcgcaacttgggcgctccatcttgattcaatcagtggccttaagaagcccagtttactcgatgtctactttgttgcttatgaagtccatttgtattgaattagataagatggttcgtagattttggtggatgggatctgcagataagtctcagtttcttgctcttgtgaattgggattcgatttgcatgcctaaagagtgaggtggtcttaattttaagaaatttgaagatctaaatatggttttattggctaagattggctggagacttgctgtgggtgatgattctttatagtgttctgttttgagccaaatatttcaaacaaaattattcattctggtttgtacctgtccgtagcaatatgtcttttggtgctagaggtattatggcatctagagatctcatctgcaatgaagcttgcttccttattggtaatgatcaggaagtggatatttggcactccccttgggtgcagtggctctcttgggagaagtatgtagcttcattcaatctaaggattcaagaatggggtgtctcgatcaactctttactctcttttgacttgtcaaattggaggtctgagttggtgagaagctagatggtttagtcctgctctatgtgatatggtgtggtctatcctgaggctctcttgcactagtgcagatgagctggtttggaaggactccaaggatggttcattttctttcaaggaggcttatttagctcgtgttagacatcaacttggcaagaaagatgatttgtggagcctaatttggaagagtaaggtccatgaaagagttcaaattttttctttggaaattttcttgtgatattcttctttttggtagcaggatccatcgtatcttcgggaatgattccaactccatcttcagcctctcagatgatgattcccctctccatttgttcttctaatgtgaggttccgaggcaaatttggaggtctagctcgtggggaattttctctgaggttttgttttttgcagaccccaaagctctagttagatggctcctctctcctacgaatattccttttgctgatgttgatgacaggtccaaagtttaggggtgcagcctcctcctcttcctccgcctcggaaggactaccaggacggacatcgcattgttcctctatctcctggaccttagcgtccccttcatgatccccctcctcctacacgggtggatcctgttcggcgccgggcaaggtggcgtgctaggccacatgagggccagacgcgttgactttacgcattttctgtttagtgcgagccatcatcctgtggctggacgggaagattgaattaaaatgtctgtcgcttgaagagggcggactagaacaaaggcgagggtgatcctcgtgcaagagttgaagcagatcctggtcgatttggtgttcgcttccccaaaactcacctgggttcatctacaaaagacaacacacgagatgagtgtttggtcgggatatcaaacattaaacaggaaaatatgctgaccaggagtactcaa

SEQ ID NO: 305789 - DNA, 1484 bp, Cannabis indica
atactatgtaaatttcccattaaaaaagatgtttagctaaggcttctttaccactacatcacacaatttatcgtactctatcctagtcggtagagaagccagaaatttggagtttttttttttcaaagtattttataagataaagaattaaactcacggtcgttacaaaagagagcaatttctaacataattatcaatgttccacctagaaagactcctaaaggcattaaaaggttcttgataatttttttttccacaaataatttcttgaagaaaaacttaaaaactacaaaaattaaaattatgtcattattaagaacatggttgttttgggccttggtttgagcccatattctctctctcttgatttccactagaaaaggagtatcaagaaacaagaatcaacacaagctagcaacacaaaatctaagatcataaccagattaaaaaaaatcagaccaccaaatcattattgctctacaaaaaagatagggctaacttagcgttctattttattaacgtataatatatatgtttagtcataaagaaaatttcattaaaattaaggctaaattaagaagctataacacaatacaaggcagttaggacacaaagatttacatataatcataaatagaaatgaaaggttactttttttgatttcttgcttcccaaaatcccccttattattgattaagtttataatacaccccttaaatgattagttcggtttcagtagacacctattttttttttataatttgcgttagttataattatttagggtcacttgtaaatttttagaaaattttaagtagtttataatattgaaaatattatatttaaatattttattgcacgctcgattattttcttttattgcgtggtaagtaattgtttgaatcttattttcaacactttaaagtatttataattttctaaaaatttacaaatagtcttaaatagttacaacatatacacgattataaaaaaaaaaaaaaaaataagacttaaaaacttttttacaagtacaaaagtttccttttttattaaccattcagtaattaaaatatatgtaactacttaaggctaattggttttttttttttttgttttaagtattaaggctaattggttagttattatgattattacctttctattaataaagttccaatgtttatgttgatctgattgaaaacataaaaacaaaaaagaagaagaaaagtgggtaatgaatataattaatataaatgaaagaaaccaaattcaaatttatgagttcaaaacttgatgaagctctctcccataatatatatatatatatagggtaaatctatagtaggcaagtttatttttacccttatgctatagggaactaaattgaaccaaataaaaatttaaaaaaataaggttgcattgatgtgatgttagagctaggttgtatgagattatttattactttattaatttaattaatactt

SEQ ID NO: 305790 - DNA, 971 bp, Cannabis indica
aaataaaatcaattttagatataatattgaaaacaccccttgaatataactgtatacgtgtaggaagacagttagaaagtgccttcgaaatgaggtggagaacttttggggaactttaatcttccaaagagtcttcgaggccatatcctccatgttagaactccaagcaccttttagctcttgtaaaaattggtaagcgtttttcacagtataaaaaccagctgtatatttcttttaataccatgtatcttcctcaacagaatagcttaatggtatacttaaaataaggtcaccatccctatcctcaaaaagatcataccacaccctttgagaaactttcattaaattttaaaccttttatgaactcaacccaggatgtgttgataaaacaaacggattagagtcatgaggcaaccaaggggaactcagaatttcagtacttaacccattaccaatacgaactcgggctcttgctttgatcaatctttgagtctcaaaaatactcctccatatatagcttgagttattactcaaagatgcattcagaatgaaccacgggggtagtatcttgccttataaacatgaccaataagggagttttcattaagaagtaactgccatccctattttcccaacaaagataaattgtaatcttgaagactccgaaaacccagccctctagagctccccaaaaagaaggaacaaatatggagacaaaggatctccttgacgaagaccccaagctagaataataagacccatctcatgaccactattcacaaccatatactgaacagaagaaaccgtaggaaagcacaagatccactattcagtggcattcacaattacttaaactcagtcactataaaaataaaatttcacacaaaaacaaaacaatcaaaaccaaatatgataatcaaacttgagatatatgaaatgagaacatactttgctccgaaaagtagcgtcgt

SEQ ID NO: 305791 - DNA, 1249 bp, Cannabis indica
caccactagttaatgagtttggtacctttggttttatctttctcgctttcaattttccacatacattgtagaaagtcctcaattaattattctgaaaaatgatttgctgtaaaggcacaacattgtttaatgagtgtattcaaccacacaataatatttatattggaaatgttttaggtggagcatgacttttgtttttactgtaagaatgttttcaattttgatataccttaaaaaattatctcaataatcttttacatgaaaacatattttacaattatatgaaatatcttgttttttttttaaatatattttgaatatttaaagtgatgaaataaacttaaatatttagttacatatttctttttacaatcgtgcaacagataattttaaattttattttctacataccctaaattatttataatttttcaaaaataagtaagaggtgctgttttataactataatgtataatattatatatatataaacaaaaattaaggtataatttgtctagatcgtccatgagaaaattaaataaatttccacgttaaaaacaaataccaacgaatctccctaaatatatatacagatacctagaaacactgtttagtcatgagaatacccagtgactcaatcatagttattatacactcaaattatgaagtactatattgatattctttgttgggtaatcgatctttcctgtattgaaattattattgtatgaagtactttgccaagcatcgataatgaaatccatatatgttacataaatggtatttccacatgtctagttatcacataaagcataattaaactaaagcatctacgtacaaaaagaaaagaatatgctttattgataagatcaattaatatcaaggtgtatctcattataataccctctcttatcttttcttatatatgtctatactcatgtgatgaaaagcgtttcgacgtacatataaacaaacttatcaaaatttacttggatatggtgattgagagttatctcatcattttgctaatgatcaaatgaaaaagaataccaccattgaataaaattattcatccctcacttgaatattttgaataaattaattctcgtcacttaaatatctaaagctaagtgtgaatttatatatctattctatataaagtgtgtctatataacaaaactagctaacaacccgcgcttcgcgacggatatttaaaaaaaattaaaattactaattttcatataatttt

SEQ ID NO: 305792 - DNA, 1142 bp, Cannabis indica
catataaatatataatatatatataaaaaaaaaaactctcttaatcgggttggttgggttagttcggattgattggacgaattgatattattttttaaccagcccaatataaagattgggcgggttatatatattttcattgggttttttagtttgcattttttgtcgggttatctcagtttgatttgggcgagttattcgaattggaaaagtttatgtacatccctacttttagagctcgtttagtatgtcgtgttgtaatgtattatttaatccaatattatgtttgatattaacttgtattaatagtttgtgcaatattatattacctttaccaaaaactcaaccccaatcccgaccccagcctagacccggggtccaaagctggggttcgaatgcgggtccaaggtttgggcccggatttcaggtcttcggtcagggtctgggatccagggcaagagtctgggtccagggttcaggtcctaggccgcattcggagtctaggtcaagagctgagtttgaatttggatctaaggtcagggtacccaatcccagactatttgtaaatattatagtacaagcttatacaaataatttatttttgtatttacgattcacatgatattacaatttatagttgtaataattaatacaatataatatttttatcaaaatatattattatttattgtttaatataatacaacaacctatcaaattaacgagccattgctctctttattaactcgtataataatgttatttgcacatgtaatttatgtataataagatcatttctaagcctcatctttgctttttacttaatttatagttgtatcctattttcggtatccaaaaaacttatatattaattctaatttttttatatatgcatattgtaattatattagatattttgaatgttttcaaaaaaattaatgtaaataatttataacatcaaaaatagaatccaaataagtacgtagtacgcatacatatttatttatttatttattttgaaaaaacatacatattatttttaaacacgtgtatatacaacaaactattttgaattctgtaactttttttagaatttttcaaaaaatgtaaaatatctgttatatctgttataaatattaata

SEQ ID NO: 305793 - DNA, 1760 bp, Cannabis indica
aataaaaataatgataaatgtattctttcaaattttcaatcttacaacaaaaataaaaataatactgttgaacaaaaaattaaaagaaaatattgtcaatggtattattttattttttaataaagtatttattttttttattatttgtattggactacttttaaaatgagcttgattagaataagagtaggctcatgaatcatgattaaaatattgagtgagggcttttgtgaattggactttaataaattgagcaaagtgaattaatatatgtatatatctacatataaaaaatttgatgtatatatttgagtgagggctttagcccacacatggactaaagtccctccgtccctggcagtggccggtataaatttataaacaataataaattttactaataagtaaagcctacttataattatcaacgagtggctctccaaatttccaaaatcattaattatttatccttaacgaaatcacctgtataaactatactaggtgtatctagataacaattttttgttgacaaagtgtagataactaaaagcacaaaattattacttaattaattatatttggagaaaataaataataatgacgtgtgtacatttcgcttaatttgttcaacgtttcctttttacaggtaattaattaatcaattaattttaaaatgatccatatttcttaatatcatcatgatttaagaaattcacataagaaaaagaaatgtatgtatagaaaatcactctcataaattaatactttcacatgagccattacaacttgcaagagtctggcttttcaatattattatatttagtatgctatgcatgtcagaaccttatttttgattttgtgaaattaaaattatatttaaatttaaacgacgccactgatggcatcatcacgaaaaagacatctttaagtggatggaggaagataaatataattatggcgacagcagtagtagtagtaaagtcatgaccaattaaattatatagaaaattgctaaaaaataatgatagtgcttagcatcttcttcaagaggacgatctaatttaatcgaatcgaatgaatccattacaaaaatttggatatccaattatagttggattagataaaatgttaaaagttgaattctacttagattggatcaattattggatgttattctcaaaatctaattaaaaactgattcaatccaattatatttatttatcaaaaaaattatttatatatatttattgatgtataataaaaaatatacatttaaatatatttctagtggtttttttcttttgcgtgtagaatttataacatttggttgatttatgtatttgttttgatgatgttttgttctattttattacttagtactattgttgttttacttatttcaaaattttaattgcattacacttgtaacaattaatgatatttttataaaatattaaacttaaataaattgtgatatttaatttttacgtatttttcttcatatttttaagttaatattaaaattaggtgtataattggatattaaatcaatctaatctaattagtaattaaattggattatatttgattttgaggtttaattagatcggatcagatgatgatttacaaaatctaattactaattaaattggagaaaaaaaattgggctagatcggatgtccaatcttacactcctcggtgccatattgttatggaattataacataaaaaaatataaattgacattttatttacaaaaa

SEQ ID NO: 305794 - DNA, 1081 bp, Cannabis indica
cataatattccatctaatttcagaactaaaacaaaatatccagcaattattttgcataattaggccaaattttgcattaattagaaaatacttttgcatgtatcaagcaagaaagcaaaactgaaccaataattttcttcatgatttgaagtttgaaactagtggacacttggtagaaatgcaatgcagaacatagatttttcaacgtaaaactgggcttcttttttctttgtcaaatgcaacaaagagtgctttttcactttttgtaaaataatttgttgtattggggtttgaaatgtgtaaaagtaaatttattttaccttttggagggcaccaaggcacttggtgcagccagaataagaggagttacggcagttcttctccaagttcttaacggcagcagtaggcgtggcgttatggtgacctgagacgttaaaggccgctgggcaactaagggagccaatctgatgaagcctaatcccacagaagcacaacacagcatcgcacgtcgcattaggctgcgcaatccgaatattcctactcaaaagtgaactctgaagcgagttcacacacttttgagaatcgtccggcatcatcggcaactccccaccaacctcagctggagccggcgcagccgaagacagctcaagagccgacctagcatgagctgcgaagagccacgccgctagaacgggacaacatcggctgcggtcgaggtctctgccgcaggcttccctaacgccgccgaaaagctcgtcggagaggtccaggcggcatgtcttggcttgggtctggactggaaaagccggtaccgtgtttgggcttgagtactctccgggcttgacaggctggtcgtggccactgactggttcggcgagaatgttagcctgcgaggagtggagaaaattggacgagaatagaactagaacaaagactaacatagaagtagtgagcgacatcatttctttttcttactttaaatatttgagaaagtgagaatatgatgatgatgaggttttagactaaagttggttatggccaagggtaaaaatgagaaaaaaaaataaataaaaagaagaga

SEQ ID NO: 305795 - DNA, 1843 bp, Cannabis indica
aaaaataaaataaaaatattaataccggtggattggtattaatatcgacgaaaattctgcccttaaaattaagagcgggaatttaaccgcccaaaatttcaaaaaattaataccaccgaattattagaggcgggatttgtcggtattaattaagaattctgactgttttattattatccggaggaacctcaattaataccggcgggtcccgccgataatatttatctataaaagcacaaacccaaactcagaaaatatttttctctttttcagtttccctttgatcctctcctcctctgcccctttctcttctccttctccacctccgcccattttaccattgttaaccaacattgcaccaccatcaactgccattctaccatcattttatttgataggtaataattttttttactataatatttttgccattatttttgtcttctctattttgtttttttttttgtaattatttatttttcgtccttgctttaagtattgggtgcgatacatcgcctgagacactaacgggaaccgaaaacgatggaagagaaaccaaaatttccaccaaaaattaagaagttggtttttttttttattaattttatttttctcttattaaatgtttagtaattagtatattaatttatatatatatgtgtgtatggttaatagtgtatattataagtgtatgattttgtttatatatattatatgtatatatatatgtgttgtatatttatatataatacatacataatatatatacatataatattgtttaaaaaatttaaggggtgtaaatctgtaaaagtttagatttcaatttattatttgtaataatatatattatgcaataataaatgtaatttatagggttatattatttaattttgttaaaaaatgttatgcaattaatttcttaaaaaaaattacaacttttgaataggtacaaaattataaatttgttaaataattgattatgtaattatttatttattaaaaaaagttaattataatcaaaatattgtttaacaataattatataaatgtaaatatatatgtaaattatttttaataaaaataaaaaaaaatattttcatgtaaagaattaaataatattttagatttagaatctaaattacaatttttttaataataaagatttaacataaaaaattataaataataattacttaaaaattaaatataaaaaataaatttaattaattaataatataatgatttataaaaattaaataattaatattaataataatgatttaatttttttaaaaataataagaatttaatatattaatgttaatggtgtatggtttaaagatgaccatacatacttgctaatcaagcaaaggaagtattttatctcgatgatttattgagaggaaaaaattagaaaataatcgagaatgtaaactataagtaaatctgggacattgtggatgatgacgctaatgtcgaagttaatttggttcaggacacaacctcatcaaattttgtatttactgtagatcttggagagttaattatgcaacctaatcaacttccaattgacattgacactgaacaaagtttgcatgttaacgaagaggataacaacatggacgaagaagaagctactgaagaatctgacgatgaaattttagttgacctttgtgaagatgatgtgaacgataatttaattattaataatatcgatatggatgattaattttcagacactttattttgtaatacatacaattattaatttcaagttaatattttctttttcaagttaacattattagttttaaattaatgttactattactaataaata

SEQ ID NO: 305796 - DNA, 1008 bp, Cannabis indica
gtttttattgggtgttgaattttcgagtttagtaatgaccaattcacccttaggagttttcaattagtgaatttaattaggggcaaagtggtgatttagttagagtttatcctttatcttttatgagttaataaacttattattaactcatatatatgttagtaattagtcttttcctggtcaaagaggaaggaatagttgttgaccttcaagaaaaatcctaggaaccatttcttctcaaaactctctccctctccttcgaatcatctagtaaccagcccagaattctagttttctttaacatatttcagtgagtattggtggggtttgaagcttcaacccaaggtattatgctttagcttgtctctttttgctttccttagcttaaagttcatttgtatgtatgaactttggggattgagttactgtatgcgtggggattttttttcttggtattctgaagttaggtattgattatctaggttgtttaaggctgtagtaggtgagctttgtattgcttaggcaacatggagtttgtgaactctaacttagggctggtgaaatgaatttttatgtgaattgttgtggtttgatgcttgaaatatgttgtttggggtataagcaggtatactggaagtttttagaaggtttggatttgaattagatttaagggatcggttttagggttgccaacacagaaccggtcgaccgattctgggggaccattagaaccggtcgaccggtcggtacccaggaaccggggttccggtttggcaccggtctgccagtcggggctttttccgaaaccctagttttccctgtttttgtgttatttaaggtgttagtatcctaattatcgatagggttatccttagttgtaattttaaatccccgatatgagttttagcgtatctctcattaaactttgaacgttatggtctagggccctgtaaagcgtcgagctgcatttccgctcagtctgaccggcacacttgagcacggaacgag

SEQ ID NO: 305797 - DNA, 2406 bp, Cannabis indica
tacttgtgagtaaatctaagatcctggtaaaataattccaacaaatggatctccttgaaatgacaattcagacaaataacagtgatccaaagcttgtcgaaagtcatccatttgagattcatttctcaaggcactcccttgcttattcacattagaaagtatctcattaaaatccctaatcactagccatggtaaaagtggagctacatcaagtaatctctttaatatcgtctatgaatggcactgattattctattttggggaaccatagaaagcagtaaaatgccaagtaagaccattgccaaaagcaatataacagtcaaacatatttgaataaaattaagaagtgttacattcacatcgtctttccaaagtaaaagtaaacccccacctagacctactagtgggacttcaagtccattattaaaatttaaagtatgacaaaaatgagaaattacattagaaattagtttagtttccataataaataatacatgaggaaattgctctttgacaataaaataaagatggaatgtgctcgaattccccagaccccactcattccaactgatgattttcatggctggttgtggggctaagagttagccactgcataattgtctaagaaacccgagtgttctattttaggactagaaatgctctagtttggctcatctctagaagacaaagttagagagaacaagatttgcttaggtcccttgcatctttttagagtttttctcatagagaggttgtccggttgtcttttggagattcgatttggtgatgtattttctttattcgtagactgctttgtagttgaacatatgacaacatctgttgttgcaacggtgttcatttgtaaaggcttgaaactagatccaccatgaggagtgtatatcgtggatggaattggaggataagtggcaatggtaccaacatctggtatgtaaagatcagagagatcatctacatctaaagccttcactattggtttatttactacaattgctaaagaaaattgacttgaggcttcagtctttacaccaaaattatggttcatgatatttgtcaaaagggctggtttaaagaggctagtagttgcagattgtgtatttgtagtggcattcttatttgcatttattaccactacactttgaaccaaaactttcgagcaattagacacatcattgttaatcaaaggagaggttactcttatggactgagtggatcttggaataatagctccagggctattattttgttgtctctttgatgattctgctagcagaagaggccatgaatctggtgttttcttgtttgagagggctggaactgctaatgataaggaatttcaagccaagtgcgtaaggagtggccagacattccctttagaaaaattttttttgtacctatcatcactagaagtagggagtacaacccttttaattcaagatcatatggtaattccggttcaataccattatcaattttttccatccactacaagcatttctgaaaatgggtgtccaagccttccacactccatacaccattttgaaagcttttcataatggaattccacccataatttgtcacaaatttacttaagtcatatgttgcaacccctcaataaaggcttgatgacatccaatttgactcaaaatcgtaaaaaaggactcccaacctttttccaccgaatcttcatggactttcaaaatttcaccaatgatgtctcctaaagctttggctaatgctttagacttactaagaaaagaaagtctaaaacatggatccaaaagggggagaagataagatcttcaggtgaaacattttgtagaacacttggcgtgtatatcacaatatggtagttttgaaaatgataggtctctgagaagtactcttcgtttgtctccttcacatctaaaagtaagaacaaacaaatcatgtggattctcagttatcatcgtgtggtaccttccattccaataatttttcatctacctttgtagtgtagacaagaagagaaatttggtagtgagcactctagcgaccaatgcattattcaaattagcattttgtttatcaacatcatcaaagataagcgttgattcatcttcttcaacaagagtcatcgttcctttcattttatttaccttaattttttatttatttattttaaaaatagcatcaatgccaccgtatgacatcaatacaaattcttagaatgccacctatttctttccaatagtacaacactctcatattttatcaactaagttgtctacctcaacaaacattctccaaaatttaactattaaagatgctcttacactatccattatcattcctaattcttgttagccaaagttgtaaatactaaaaggtattagtggtgcttaatat

SEQ ID NO: 305798 - DNA, 2156 bp, Cannabis indica
gttgataacgagttttttaagagcttgcagctcattaatctgcatactcacgagtatgttgaaagactaaaataaatgagcaaaatacgatctatctcagaatgctcatagaccacgcgaaagaattaactcaaatggataatagaggatacaatcttaaaggttatctcaagattagtcataaataacaaaagtgaggaaaacacctcaactagcgtctcacaaaatacgtccaatcattcctaaacattgttgaagagtgtgaggaaaattttgggtataatatctcggcaaagaaactgctttctgataaggagaaaaacggttatcaacagttaattcatttatcccacatgttgtaaatataaaatatgatgattattcacatttcataaacaattatctagataagataaaaaaggataactatcatttctaagaatcctataaactgggataggacctacaaaggattgggggggggtccgttttttgggagaaaattcttgagagattaagtattaaagatacccaaaaatattattgtgtatctataaatactataaaagaataatctgaaataacacttactcgtggagtatctagatttcaactacacaaccacgtaaaaagttcatttcattttatttatatttagtaattataaatattttaattttatttataaagcttcattattgttaataaatttctgaattaagagtttggtgctttcagtgagagcctttgtttaaaattgaaaactcaaaacacatctccgcaacataaccagacttcctcgtcatggaaaacactcaacatgatgaaccagacatggaagaagagacggtgcatctatcgagaaaagagccccatggaacacagactcccaaaatagaccaacccaagaaaggagtcctactgaaagaaaccccaaatgcgatgaccttgaggaagaaatccctaagagagtagatttagatgcgcatgaccccacaaggtatgtcccaatcgtcgagtcagaagaccaaaaactttgacaaagactcatagaatccagttaaaggataaagagttagaacgagcaatggctatggtcagagaacctcgaaacgatgccccaccaacacaagaagagcaacctatttgacgaccacgaggaagaccctgcgagtcacgtatcagaagggcacaaggacccaacgtcatagagcaggagctgaataaccccactcgctcccaagaaaaacaaccatgggaaacaagggtagttcatgttgatgaatagggccacagaatcagggtaccacaactctgctcgccctccacgtataccatgaggaccaataagggaggaaagggacagtatgtatgaatacttgactaaggggcagttcgctaacttatttgaaaggtgaaggccagtctgaggagaaccataagaattagaaacaaatacaacccaatgtaggtcaacaagccaggggcaaactcaatcctcgagatcccgtacatgggaaaatctaccatgaggtgagagaacaccacgccacaaatatcgaagtgagcaagaaagtgtaagtaacttgcaaagttaccaatccaaaagtaattccccaagttgatcagtaagtaattatggtaatagacagaatcaatgcaaaaatgtacgtgatcagcttaatttgcgagatcaattgaaccaaaggcgtctagccttacgcgagcagataaatagaaatgcactagatcttggagagagattaaataaagatgctccacgtgttgggctttgtgccctaaataaaactctatttcaatgtaatctctatcatttaattatcaataaagagacagaagtattttcatcacttatttagtgtgtcatttggttcatgttatcatttatatgtttatttgatttataaattcatccaaacccttatcacattaatattcttgtatattgtgtcgtcaacacagtggaaagtaatcaagattgtgtgattaaatatatattcctagatatatcagtacacagggtttaacagatatgataatctacaacatagtttacttgcaccttggataagtgctatgtgctttccatggcattggttaaagtaaaaacttgggttggatgtatggagtatgca

SEQ ID NO: 305799 - DNA, 3044 bp, Cannabis indica
atcatgttgaagaattgctcattttcgtgaaccagaattcaaggagtttaatttttttttcttctgttagaccccatattaatagggtgaggttgagtatagcaaataagagagatattagttattgtattgaagagtgtttaagtggagaatagaataggataagtaggtgagcaaagagaatagagggattatgcaagaatttagaggctatttctctgcatcatggagagtcctaggcctctcaaatgcctaggaaaattgtctccgtaattctctttctgctgtaccaatttatacttaagttctctctattttccttgcaattgttcttgtattagctactgttcttgtactggaggatcgggtcatatcatcttcacatatgtgttttcttatagataagtgcttttttttttttttcctttttcgaaagaagatcttacactcttttatactctcattacactcttttatactctctattacactcttttatattctcatttctcaaaatgcatgacatgtagacattgtgttattttgaaaatattattactcattaaacatgtcattcattcatgtagtcaaacgatagtaaaataaagtgcatttaccatttctcaaaacaatactgttaaaaatctagcttgaacatttacatagtaaaacttattctcaagccaattatagagttgagcattctccttttaaacttttatcatttgcattcacatcctgtagttttgaagtttgtagttgttcatttcactacatttaccctttttaggtctcgtcttgtttggtttaaagtcactaccttagagggttcttgggtagttaggtcttgttctagagagttgatatttgttcttactttctcaattttgagcatatttaatatctttgtgaaccattacttgcatctaactcagagacaaacctggtttgaagctgacactagcagacctggagtttggctttttttttagttagtgattttgttcctctaattgaattgtataatttagtggtaggccagaaatccaatagatgatgagtcactattgtaacctcgataatgtttgcaggtagaggagttaattcaggaagattctcgcttagatcgctatccaaagctggtgaaaggtgaatcaaaagtggtgtgggagtggcaaggttggtatattttatttctgtagaagagtatatttccacatttgaactgtcacctccctataacagcttcatgtttaatctacaattttccattcatcttatacagttgaaggctctttgagctcaaagaatattagaaaaaagagcgagacgagcaagttgaagtacaccgagaacatgaacatgtattctgatcagccccgccacagatcaaagaccggtaaatttctctttgtttcacaatcttgttcatctcatcaatttttcaaacggtttcaaccggtttcaggtagttaagttctttaacattttgttgaactcacaatctacgcagaggcacatttctcttgacttggggagatttgcaatttgtaaaagtcatcagtatcttctcaaaatccaagggacaaagtaagtagaaaagaagaaaaagaaagaaactttagaacttatatcatcaacattggctttctatacacatgtatgttcacggatcattctaatgtattttaacataatctatgatatcgttttgaaatataaggttttgagcttagagattgtttagtgctagtattagaatttgttaatctaaaatagatgaagttgttcattgtagttacttaagattctcttctttcattatccttcttagttttctcttttatttcagtgaattcttatcaatagccatttgggtttttttggattagccaactagtagaaagaacaattatgtccaaacttgactaccttcactactcattttctaccaataaagaacaattatgattattggttaaagatttacaactaaaacttgagttttagtgcctaacttctagattacttaaaagggaatggtattatcagaatgcatgtatgtttctatgtatcagcaaattctttcttttcaaaagtagcaaaattaaattccataacagaactttttctacttgtacgttatgttagatttgattttgtcataaagtgtatgtattatttttctcaattttggatggccattttatgaaattacaacaacatatgatgcaatagttttcaatatacttattttaaaagttattattattattattatttaacttatcaccacattttacaatctttattttgtgaaagaaaaatgtttagcataccacatggaatataaaagactattatatttttcgcctttttatataagaatgctcatgtgaaatgaacaatctcaatttaaatataatgtaaaaaaatctttgatattttattattattaaagttacttgaatgttacaaattgcatatttagtaatctatgttcatgtgaaattaacaatcttaatttaatataatgtaaaaaaatctttgatattttattattattaaagttacttgaatgttattgcatttttagtaacatttgattcacacaatttgggtaaccctgtacatgtataaataaatatttatggtaaagaaataatatactaaaattttctccattatttgacttggtattagagccaaatcaacattttttcttactttctttgttaattttccctagccaccatcatttcagatgtatccatgaatccaccaacattctccgagtttaaactacttcagtcattcctaatatctgttcaaatcaccatgccatttagcttaatgatgataatttttttagactgtctcaatcattcatgatatacatgcgaggacatgggaagatgagctacctcaccagagaaaagaaggctcccaaggaagatgatttgacgtatgttgcatgggctgctgagaactctatgatgatgacttggctggttaattttatggaagaggacatcattgtcagg

SEQ ID NO: 305800 - DNA, 2051 bp, Cannabis indica
tgggactcgatacttagttggatcaatagtaatatcgacacataaaagggtgctagacaccacttgtgtcctttagcatttctctaaaagaaatgaaattaattaatgagcgttgctccaaaaccaaaaacagggaaaaaagaaaacaaaaaaggctgaattaatggaagtcagaatttactataagccttaatagtggagaagagactaataccatacagttgatgagtagttgatactcaggaccaattgtgctattgaattttacgccccattaatgaatttttaatattaattatatttccacagtttctttctgaacgcacgtacataaaaacaaacacattaacacagtacgtagttgacgtgtaaaaagtataaacagtattattacttggaggtaaggttaattaaacgtgctattggtatatttgcattgcaaaattcagtttcatttttactcgtaatggtaactgatcacatacatatttttacctatataacagatcacttgtactatttccagacacttcgcagctcatattatatacgtgggaatattgggatggacagcagaagaaatatttttttttagtgtaagttaatggtattttataattatatattagtttaatagtttaaaagttctgagttcgaatctataacttctctcttttttctatctctccccactactaaactagtcttagtggcttcagccgaagaaataaacttgtgtataaactatatatagctcgaaacaataaaaaaaaaaaaaaaaattgtagtataaagtaagaaaataacgggtataatttatttcggtataatatagtaattaatatacatctgcatatatataaatagtcttttttttttgtatgtatatatgaattatttgattaattcggctatttcaatattgtttattttacaacatatataattacctcaatttttcaaatgttaagtaaattagtcctaattataaattagatattataagcataatcactcaaccataaatatgtagccattaatttttttcatcttattcttatttgatagatatataatactttttgtttgtttgtttatttgttaaattctatattcgttgcttatataaataatcttgtaagatcatgagcattgctccaaatttatatatatatgctttaatttaagatgcaaaagataattatatctaatgaattgctatcacgtacggcatcactactatgcaactaatcgttgacttaatattataaattagaagaagaaaaacaattcagaaaaatatatataattaaacatatatttgcgtattttcttccaatttcttattgcaacttggtttaaaattgttattttatttaccctaatcataataaatcatgactactaaccggccctaggttgtcatctttttctttaaaaaaaattgagtagtaactttccttaacttcgttgctatttataatatatagtctacaacactactattattggactattataagcgtaacaattttttaattttaatcatttatttgtgttcgtacatatataattaactacataaagaattataattggagtatgtatagtgtggtatatttattaccaatggaactcctcggaagtttcaaaaataagattgaccaataaagtttgtaaccacatttgaagtaatattattatgagatgcaattcaatataaaaaatgttaccatataataattaatgcatcaattgatgtatatagtattaaatgaaagtatgtgacgccgcttatcgctactaattatacgtacagtactcaaactgtgagatttattatcacacgattaataagcatatatagtattattttacatgttacattacaactatatacaaatatatagttaagcaaaaaaaacaattcaaatatataatatataaagatatagtactttaattattttatgtcaaaaaaaaaatagtacttacgtacaatccataagtttcttcttttttttttttttaattttgttaattctttctag

SEQ ID NO: 305801 - DNA, 852 bp, Cannabis indica
tatacccgttggctctttctccatgacttgaaactgagagactttgaaacttgaaaaaccagtatcaggcacaactaaacaagaaatgaaaggacttgaaaatcagtaaaaacactagccccaggtgcttagagtttagtataggcaactatgtctaaaatagaccagacccgacttggggacattctattattgatcattataagaagctatatttgccttttgaaatttaaaatacaaatttattttttttaactttttctcaaaagaagaatacagtagtactatgccatttgcgcccaattctaaaggtagctcaaatgatgaaaacattcattaattcctttcactaaaattctttagtacaaaaaactataatatatatacatatgtattatgtatgtatattaaatttatactaatctctgataactagcttattgccataaaaaatagtacttggaatcataatataatttatgattacgaatatgtcatttttacgtatgttattcccaaaaattattgttaaacaataattaattttgtgctcttgtttttctttttctcttgtattctagtatatatacaaatgttaatggttggggcaagggattggagtggtgccatctttgcatagccccctaactttttagtttataatttttttgagagaaattgataaaatttattgttaaaatatataaatagggatatgattttgtcccgtgatgtactttcacggaatgtatttcatggtacattagatgggtctcagggtacattaaatgagtgttagggtacgtttctactttttaaccctaattatccctagatcaatctcagccgtca

SEQ ID NO: 305802 - DNA, 1126 bp, Cannabis indica
taaatgtgttatgataagattagttatatttttatatttgttcgtgctacaaattgtcttcaagttggttatattataaaaggaaataatcaaaaattgagttctggatatttattttctaccaaagttgaaaaatactatttttattaatcaattaatcaaatttacatctaattttatatttaattgaagtatacctctttttatatgtattgtacctaaaataccctgacataagagagttacatggagagtatcttaaagtgacaggggcaaaattagtacaatatttaaaaaaagaggtaaaaatgataaactttaaaaaagatggtaaaaataaaagaggacaatataaaaaaggtatagagtgtaattttctcttttaaaaaataaaaggtccaattttttatttaacaaaacaaataatttaattaataatttttgtaaaacacaagttctaaaatgatattaatccttcaaagtgagatattaaatcaaatcgactaatacagaaaaaaaaaagtatatttagtctcatatgaaatgaattatttactaatttaacaacaaaattacaaacatgacctaataaaatcgagtttcgtgtttttgattacagttcgagcaagagaggaatcacgtaccatctacagtagattgctacatgaagcaatatggtgtatcggaacaagaggcatgtgatgagctcaataaacaagtggttaatctatggaaagaaataaaccaagagtttcttaggccaacttctatgccttcatctatcttagttagaattcttaatttcacaaaagtgcttgacattatctacaaagaaggtgatggctatacacatgttggaaaattggttaaggacagtgttgctgcgttgcttatagatcccatcccattatagatctcctaatatttataaaattatttacaagctttggatgtactccataatataaaattattataatatggagtgtttatgtcattattaaaataatttagaaataatatgttccaatatgtattatgatgtcttatatcagctcatatgtaatattaatagggaaatttgattttctatacttattaaatttaaaaatttgttttttaaacc

SEQ ID NO: 305803 - DNA, 1775 bp, Cannabis indica
tttttttttttttgagagaaagattgattcatttaaaacgagaagaaaaaaaaggagaaacagggtgcccctccccttgaaaatctataaggcagtctagctctctttgctaaataatctcctaaagtattgtcacaatgactaagataaaccaaatgacaactgctaaaagacttaattaattctaaaacaacaatggatgtgtgtttaaatcgccagtctgggggaaatttttatcagaaaaagcttttacgactacttgagcatcagaaaatagaacaacttcatccaccaactcttgctttgcccattgaagagcctagaaaatagcaagtctccacttccatggccgacattgcattatacttatgaagcatcactctccagccaccattgcacctgtcaataaggatagcagcaagacctgcctcccctttagaccagaaagcatcggtcaataacagaaaaagtggcaacaaaaagatcagctgcagagggaaccattgataatctgagatgatgattatcatcaatgtcttcagtttaggagaagctcttgaacctaaaacaaacctttttaccaatattttttgttgaaacacttctcccacctaatctgagagtatatttctttgagaccaaatctcccaaaagacacaagttgcataagagagcagctccaatcttcttttccccttgcacactttgaatcaaagcttctaaaaactccaacatgttagtaccttgtatctagtgcataagacaaggatagggcccggacaaccaaactgctctaactagtgggtagtccttgaaaatatgacagcaagattcctctgcattctcacaaaagtaatgtctttattctcaataaaagggagcttcatctttgtatgttgagtctcattaattgatctccatagcattatggccaatcgagggtgcagactaggtttccaaatccatctccataaatctctttcctcatttaatcgatgcttttggtccaagacataggctttctttacagtaaattaaccatcaccgttgcttttcatattatactgtcctttgaagatagaggcagtctaggaatttttagaattctttcccacatcttccctgaaaagctaatagattattagttgctaattgaaaccaccaacacatcgcactcgtaggtaaccactcacaaaaatatgcacacttaaatttgataaattttctaagaaataacattttacaagataaatgagtaatttttaaaaaatttaacaatgaaaatattaatataacaaaatgtaaattacaatactgaatatgctcactacctccaactaaaatcaaacaatatctttattgttcaaagatatatatatgaaatacgagatatgtatagtgggcatgtacttcatttaatctcttgtaattaaatgggatggacatgatatagatttacattgtagcattggctgatgatagaattggacatttgtgagcccatttctctttgatgatacttccctatccagccattcaaaataatacatatataaggaagttggatcaatttctaagctctcaattgggccttatccactctttcacttcaagcatttattctttttctttgctccaaatctaaatcaacacaaaatctaattagattaaatattttcagttaattaggatttttttctccctaaactttgacatgtacaaaatcatgcttcctgaatttttttaaccgttaaaaattctccttaaactattga

SEQ ID NO: 305804 - DNA, 3275 bp, Cannabis indica
atctctatgatcattggatttggagctataataatgaagagatgactttcagcatttcaatgctgctacgtaccaaaactcatgtgcctatataaggcccattaaatgaggcaccaaattttgaaaaatatcatccattttacacacaaaaaatctcctaaatttgtaaaattttaattttatatacaaaaatacaaaaaaaatagttaaatttgtctttggcttcacttaactaataactgaccctgactctagccccccaagtactctttgggataaattgaaaaatacttttttttttgtattcattaatcaaaaataccctcatattatattttattaaaatatacttactttttgagtgggttacccaatataccatcactctctatttaagtctagcatataatttatattaacctaaggggtctaatgggaatatcatctataaaagtgagtatatcttaaagaatataaaagtggagataaaaattaaaataaataaaataaaatgaatatactatgtaatttcctccaactctttagttgcatatttagttgttttactttcataaatatttatctacagttaacaaatttgttcgttaatgttagtttaaaaaatatatataattttattttaaaattaatttcgtaaatgatcaacaaaaaatgtatttttttttctttgggaaatgaatgtatttttaatttaagaagttgtattaatgttatatacaaaagaatctgatgttggtagaaataaaaaaatattcagggcatttttgtaagttttcaaaattaaaagttgaaacattttcttatttcagcccatcccaattggggactttagacattcatatgtataagagaaaataataatatttttgttaaatgaaaaaaaaaaaatttacccaaatcacataattcactacaaacaaaaattaagtttggtgacattttttagtcacaacataaattttttataattaaaaatgatttttagtcacaacaaaaagttacttgtgactaaaacataataattagatacaaattgtcactaatttatatttagtcacaacaaattataatttttgtgactaatactttcagccaacgacactgagtcaattaaagtgataagaataatagacaataattaataataatgatatgtgagaaaagtgtactcaaaatatagaaaccaaatctcaaagcaaaagagatgaacaatgcatactgaaaaacaaatggtgttatacatatacacatattatttttctttaaattatggagtaattaatcagtcaaataatctttttatttgagacaaatttttaataaaaaaaaaataaataaagggttttcaagaaacaatttgttacaaaaagataaaattttaaaactattcaaaaacggtataaaattttaaatgagtttattaaaattaatttcagaattttaaagaggtcatcaacctcacaaaatatcaaaatttcataaaaggtcatttatctcgaactttttctaaattttcaagcagcaataatttgatttctttcaaaagtagacaacctaattgctaagattaggtacgatcacaaaccaataaaaatttctaaagaggttgtcattcacctcaaaaattctaagtgagatcttttacctcaaaaaaactcaagtgaggtcttctacctcaatttccaaatgagatcttcaccttaacaattaaaatctcatctaagatcatttatttcaaaatatcaaagtatgttaattcttcacaaagttctcaaagatataaaattagtagacaaactatcacctattgaactacctttttttaattactataaaaggatacataggtaacttaattgctaagattaagtgcatcgcgaataccacaaaatggtataaagtacaaatcctaaaatttcacaaaagatcattcacttagaaattattaaaaatgtttaaaaagtaaataattcttgaaaatgctcatataccaaatatcttatattcaaatcctaaaataccatattctgaactacaagtggattgatccttcataaaaaaatgtatataggtagatgttaattaaattgtactgagttcagatacaattcaaaattcactctaattttccccaaattgtttcaatttatttataatatcatcataattgaaaataaaaagtgtttcctttaaataataggattttaattaagttgttattcttataatcttcgatgagtcgaactttaaattaataaactcttatgctatgaatttgacataagtgaaattgtattttgtatttatttttatattttaaatgtgaattttttgcttaacaatgagaattaccaaaatttgaatagagttttacacttgaacagactctcttattgtcttaaacatgacacatataattaatgctcaaattctagattattgggtctagacaaatatgcagtatcagttactttcaaatattcttttaataaattcaaaacggagtctttattgacgaaattaaaaaaaattacaattttaaaaacattaaatacttatgtcgctaaaaataatcattaaatttatatgacttacaaactcaaaatttaaaatagtggtatcctattgaccctattattgattacatatgcagcaaacgtacttgggatgacgtaatgattattatgttatgcgtttgtaatatttataacgaacccaaatgggatagatggatgtgtggttcattcacatgagtggaaattattatttgcttgactttgactaagttcagtcttccacgtacgtaagttaaagatattttatccaaatttcatatgatttgtggacatgtattataacaatattcactccgtcgattaataataatttcaaagtttaattaatttatttactatagtgacatataattgagagcacagtttaatcttattaattaaatttgttgactaagttttgaattgagaaattgaaaaagtttgatactttatgtctgctgatcatgatatgtaaagaatcttcatctctctcttttccaagttttctttttattttaatttctacctttatttttttgctagatgtatatattattattgatgtattttaatttaataaataataccaaaaattactatacataccaattataaaatactatatcattagtattgttggggaaatttacacagattactgtattttcctatttttttttcttttatactgttacacgc

SEQ ID NO: 305805 - DNA, 1151 bp, Cannabis indica
agtacaaaaaatatatttttagatttaagtctatgttttttatgtttgtgctttcatgtcatgcattcttacttgttgtgtcgtgtcgcgcttaaattcatatcttttatatcgtgtccaaatcctataattttccgtgtcatgctgaacttgagcacatacttttttgtatcgtgcttgtgcctcctggccatcttgtgtcaatttttatgttgtgctgaaaagtccaatccaaatgtataactttaaccatatatataataggttttttttttttaaaacattacaaaattaaaaaaaaacaaaagacgtatttatagtttttttaattattttaatgaatttaaacctttttcttacaaaatacgaacgattgtttctacgttattttcataacaatattatactatgttatttgcatgttattcatcatataagttttatatttatattgttgttgtggtaaaaaatttaactagagaatacttgctatttttagtaagtgaatatcctctgcctcaacttgaattcttatgaatctccttcttgttctcttatcatctcctctccggcggtcctcaatttggattattaggagcacgaggggtttttctacagaaatttcttccatacttaagttaaaaaggatttttacatatatatatatatagagagagagagagagatagaaaaaatataggaaaactatagtttgaatttcgagagagaatctgaccctatttcttactcaattttacacttttataagctaagcagatggaaggcgagaataatcttactcagctaaatgtaatcgactcaacgatcatttgaaattgaccctggactttttgcttataccccaactgattgatcacgcggatcgatgacatcaacctcttatattcttgctttagcgaattgatgaagtcaacaaaattaagatcatactttcatctgatcggggaaactatgtataggctaagactctgttcttcgaatgcagttggattggacaattcctttagtggaccttcatgggcttggtcttctttatttttattttatttttgtgaatacttcgcgaggagctggatgagaagaaactctcattcacactccatgttctgagaaatatttaccatccgaaa

SEQ ID NO: 305806 - DNA, 2081 bp, Cannabis indica
tttgccagcacagtttgcaaaatgcgctagtaaatttatcagcgtagttgtgagctgtgctggtaaaaatgacatttcttgtagtgtaccttgaatttgtgtagcctctttttagtcttcaatttatcttggatcgccaaccacaatacaaagctgtgttttgagatgtttagactgcaccaaacttctttactccaacgaaaatgctccatatttgagttcatcaaggaaaaatttcataggatccattagttgtcttattttatctttagcttcgacatttttttttcaataccaattgctgcatataggagttttgtattcccaccattcaccttgcttgatgtacacattatgtattcaattaatccataggttatcatttttattgacaatcgaccaaacatgtttagaaagtgctaccatgttccaatccgaggtgttcatgaaacctagtccccctaatgttttagatttacatagcttgtcccaagcaacacttcctgcacttttcatattactctgccatttccaaagatagcttctgcaagctctctcaatttctgagatgattctcttagggagaattaggatctgacaccaataagtgtgaatagtcaaaagaataaaattaatgagtacagcacgacctgcaaaagagagatttcttgtgctccatgttttgattctagcaaccgttttctgcaccaaactagaacactttgaggctgatattctcttggtacaaattggtatgccaagatatctaaacggtgtgttgtggctgctaaaaccaaacatgttctgatctttggtatttcattttcttgcattcctctgaaataaacaacagttttggacacatttggttttaaaccagatgtgttagaaaatatttttaggccctacaacattagatatatactctttaagtctcccttgcaaaataacaatacatcattagcaaaactgagatgatttaatttcagatcactacatctttcatgaaagccaaagtctcttttctccccaaccttcttcatgattctacttaggtattccatccccagcacaaatagtaagagagacatagggtccccctgcctcaatcctcttcttgcttcaaagaatccatgtaaagatccattgaacattagagaataccatggtgttgtaatacagttcatgatgagcttgatgaggcggattaaaatttggcgggtataatattgtgttaattgggaaattataattttacccttttggctaaaaagattagtggatggaaactttgattctgctgcaattccggtagtaattctattctctgtttatgttaatttttataggaacatgttttaggaatttttatatatttatatgtgaaataattgtgattcaattaagtatttataacaggcctaatgtaggagctcgaggaatatactcttttttatgccaaccaacttgttattatatatgctttcttttttgcccactctagcttgcagagatcttccagtataaaacccatttgtgtgaacatatatacccatagtttccttgtgggtggtctcttttcaaacagttgcatattatctcttttaataccatgtttagttagtaaaaaatgtatatggtcataataacaaaccttctcatgcaaacaaatagaaggtgttgcaacattgcaatgtaaattaaggacaaacataataactttgacccattccgtctagagtgactactcattgttggataattgtttacaatacacaacaaggtcgcctgaaaggtgaaaaaactataccatcaattgcatctcgagttcatacatcgcgatatccataattctttcaatttgtttaatcaatagccttaggaaaacatcaaggtggcgtttggttgggaggaataaaaatgtaagaataggaatgagaatagaaatatgaatgaaatgaataaaatttaaaatgcataaaaaatttgataaaaaaatcattaaattttttctcttgttatattggaatggtctttccttcctttttaaaatggaatagtcattccaccaaaatagtgga

SEQ ID NO: 305807 - DNA, 3124 bp, Cannabis indica
tttttctttttctttttctttccaattctgtaaaatacctaatgtgtctcttacaattaaaggtagctctgtgttatccacaaagaatgatacaattgaagagagcaatcatgttctttcactagttaagctgacagggagcggtttgcttctatttaccttcaccaaaggcacttcttttgatcctgtacaaattgtgtctaatattattgagtctcgggaatatgcaagctctagtccaaccgagtaagtagtgagtctttttagttttcttttcacgtgttttcaattgtaactcatgatctatatggaggtcacatttttcctccatttcggtagcatgtcttctctcataataaaatttcattacaaaagaattaaaatgcttggatgtcatgttaaaatttatagagtaaacgaatttcggggaaaataaataaaatcatgttagatcgcatatgtgtagaatttagtaaataatgggggtgtatgagtcactttgatgagagagggctgtgatcgagcatgaatgggttagtatagtatgagggtacaaggagagcatgaagggaatttatataagtgggcctcggctcttggagagtactgggtctcttgaatacccagctgttctgttttctttatcgttttatcatctaatgtcaaacatcagatctgcctgttgccatctagtctcaattttctcaataatttggcctgttctctctgatattaagtgaagtcactggttgatcaacaactacttgtaggctatttcatgaactttaccaaatatcggtgtgataatattagaaagaaaaaacaacattatgctgtataatatataagatgtaggctctttagttttagtgatgttaactcataaaagggaactattgttttcatgtaatgtaatgttgacgatgtattttattgcaatgatggtgagatttcagcacttgacaagctcagtgtagtgtatgtgataattcaatgtattgtagatgtaatgtttgtgacgttgttttgattccctattcacacacaaaaaagtggttttggtgaagtttgttcatatgcatgctttctcaaccctaatataggagaaatataggcaatgtatataagattcaaggactaagggtgcagtttaggctttgagagcaagatttcagtttgacaatattgaaatgttatcataatgacttaggattgaaaagcttactaagtttgcagatgcatcgtaggaatgttagaagaaagaaattgtgagaaacccaaaataagttttcatcttatatgactgatggtatcacgtttgtttgtcaatgtcaataaacattctcttagcatctccaaatgggtacttgtatgagaatgcaaatgaaaacttcaagagcatcaaactcctagtcaacttttctacagttcttcagaagcttttcatttctgtttcatctttcattgacaaccctctaaggattgtatttaacatggttcaggtggtgccgtcgcatatttcctatccaagctacttgtagtttgaatgagaaggaactacatacacttgtatcaaagcttgttcttgatttcgtgagcgataaacaaaagaaactggcaaagcctttaaaggtagaaatttcagtgcattaatttagataaattgaatatgcatatggttatggtacttgctagagtgagaagtataagtcatcatgtgtaggtcatgtattcgcctctctgttgtaactcttttgtttatgctgtgtgctttatttgcctactttgctgtgctagcctatctttccgggcttaaacttagtttcatgtctgatatcttagaaattcatacttcccttaatgtcttgcaaaaattctcttgtgtccaaccaatttttcattcggtttatttattcttgaaagttgtttcagcatcctggtcttatcgtaagttttgtcatgaaacttaacaaattatgaatggtacaattcaaactgagatctgaacacgaaacctttcccaccctcacagaaaaacagatattcatgctgtgtttctttatttcacttaatatcaattcattttctctatcttgtagtttgcagttggattcaacagaagaggaactgaagaggcagagatgaaggttccgaaagataattcaaatatctcaaccggatctaacttgttggatcgtaacaactgcttttcagtagtggctgccgccgtcaaagaagttgtgccagattcagtagtggatcttcggtctccagaggtgaaaacttaatatatatttatggttattagttttgtgcttgcttatactgacttgcaatgcccaaatacacagctttctgtacttgtggaactacttcccctctctagggtaccgaacggatcattagtcgttgctgtatcagttctcccacaaaatctagtcagcacaaaaccacggctgtgtataaaggctctggtttcaaatgtcaaaccaaagggtgcaaagcattaagcatgagattgttgtgttcaagttaagtaatgtgttaaatatgttattccctatatccaatgtgttttaggacattattcaaactagttgaatttggtttaagatttatttgtcttttctttatttccaatcatatcccagtctactaatcatgttgtttgttctgtactctttcagtaggcatagccataggaccctgctaaattatctccctttcaagttggaatggtcggtgctcggttaatttttcggctagagccatggatagaacaatcataaagggatatagattagttgttcatactcaataaataatttgtttggttaaaaattgtctatttttttaaaaaaatgtatagtcttttaacctgtacaacattatttaatttttaatgattttggtcattgcttgcaaaaaacataaaatagaaggacttcaaataatgatggatgaaaaaaaattgaagtatttggcattcaaaattaacaaccattattggtttcagattaagaaattactcaatattcaaatcgagtttaagaactgaggccgggcccgtaatctgtgaggccgggcctgtaatttgtgtcccaaggtccaagttgaagtcaaa

SEQ ID NO: 305808 - DNA, 1437 bp, Cannabis indica
aaaaaaaaaaaaaaatccctttttagtattaggcaacggttttgacaggttagatttagtcctgaagcaataaagcctcttaaatcattgagtaaatttgtcttcctcttataatttgctggactacattgcttggcttttaactctttataacgtgcgtggcttcgttttgatgtcaatttgtatttttagtgtcaaaaatgagtattgacatccaaatgaacttctagcgattaaatcaatttgatctagcactatttttcaataaaaacatatatattcacgttgaatctttcaatcctgttcatacttacattggaatgtttaatttacattcttcaaacaattacaaagtacaatgacagaaaagggtataatttttatgttttacctcttctattataaacgtaggagttagcaaaatgcaagtagaaagcaaagccaattgtactaagtccaaaaagtaaccaataaaaccaatctagatgagccttgttcaagttattaggaaaccagctatctctgccttctccacctgttgttttctcaataacagaaataaaaaagctgcttaagaagtttccaataccaaatacactaaagtaaagtgcaaggcctatgctcctcaactctgttgggacttgatcatagaagaactcttgcataccaaccagagtgaaaacatcagctaatccaaagagaaagtactgaggtaacagccaccacacgcccataggaatcatcacgtccggcctatcaactagcccatattcttcaacagttttgagccttttgatctcaacgagggctgcaactaccatagacaaaacatggaagaaaaatccaactcctattctctgcagcattgtgattccagatggtactgttctagtgaaagctctagtcgtcggaatgaaaatgcaatcatagattggtaagaggataataagggtaagatagatgaagcattgaagtgaggcagctggtattttggagcctgatacaattgctctgtccatggtggcaccttgctttgtaaagaaagttgatgattgtgcaaacaccataccatatatgcagcatgtcacccatattggaacaagtctaagtacagcctttgcttcttcaacatcagcaatggagcaagcactatcatcagcatcaccttccttccagttagttggtgtaatcaaggctttgttgagaaatctacaaagaaagattatagaaaccaaagcagcaaggctttcaattagtgttagaatttgagacaaggtgaataaggttccatctcaaaactaattggcaatggaaagagtagccaattccttttatatattctattatctttccaaatattaacaatgtgagactttctgatattccccttaagatggaagctatttatttgctcaccatcttgaacaactcgatcat

SEQ ID NO: 305809 - DNA, 2643 bp, Cannabis indica
aatatattaaaatttttaaaaaaataattttagtagatatgttttaaaaaaattaatttataatatcatgtaaaagtttaaattaaaataaaaataaataaataattgcttgaaaccaaactttttttagcattggagaatgttaaaaacaaccactgtaccactttaattataagcattattacttagctatatagaccccctgccacaacatcatatccttactagtgccgtactcatagctagttgaaaagtacttcaattcccaacacgaattcatttttggtacctgactctttatgtaaagaaaatatattatgaaaaaaccctaaacacagatgggtaaatatcaaaagagagtaacgggagaagtgggtaagagaaagtcaaaagcagctttaatcatttctctcgtttaatcttcaggctaatgggggtatgccacgtgtcacttcctaatagtcttttagcttgttactgcaatttttcagagttcgcgtgcgccgacttgggctccatatgtaagttccttcacagtctttatgccagtcacactccacaatacaaagaccatgaccccggtcaaggttctcaccgttggattggaggaatactagtttcaaaataacttcattaacttctgttttaaatgtatcatacggtacggtctctacttgatagatacgtttgagttcctcttacttaatgattgaccgacttaataaatgctttgacttcaatcttatcatatgatctcattttattcttattttatttggttatttttcaagcatcaatatatataagaaaaatctatgtcaactattacccaataatttaccacttatactccttgtttaacaagcgtacaggtggtgtaatgtatgaggaatcatgactggtgtatacattaaaacaacctaaatatttgtacataatttcgaaaatatgttatatgctcaaaagtagcatcctaccttttctctctaaaaaaaaatagcattctacctacagtttagactacctaacattatttgataaaatatggagatatccttaatgtgccagtgtcgaacattattacaagttatcatactattgttagtatagttacatattaggttaaatataatttactttaataactataaaaaaattgcactattcattcataattaagtttcatctcgtactaataactattagcaatgttctaaattatatgtagtgaattaattttcccaaagtatattttcaatataaagaaaaagattttctccatgtattttcaattttaaaaccaaaaacaattttttatttttttatttttcaattgtaaagagcttctttaatgaaagcaacattggtatttgcttgaggggctcacatttggttttaagctagttagttgttcactttaaatttggcaaactaatagcggaatcgtatttataattgatatcaccatgtgtacacaacaagaacaagtaaataaagagacacaatatttttatagtggtttgacctcctttgttagtgggtaacgatctactctccttattgattgtattgataccagagataataccacatagacaagtggattctgaagtggctctcttaagattacaatagtgagaatctaaaagcaaatctcaagtagaaaagatgagtgagacttagtctcttctacactgtgcgtgtagaagagagagctagggttttagaacttagaacttcagagcatagagagagcttagaactcgagacctaacaattcagacttatagagataaggtttagtttagtgatctttatatatgagagcttacaagagaagataggttaatgtcacttaaaatgaggtgatatcacctatttgttacataataaaataataaataaataatatgttaattagtcccccaaaataggtaaataatgaagtttatctcctatttttgtgggctgttaaagctcaaatcgtaactgaaagtgttgtccaagatgaaagctacagaggcacaaaaagtgcttaccagggtcaaagctggccgacccttcctttgctggaggctggccgacctatgctagtagtagggccagccaggggggtcagccagaccccttaacttggccagttcattatctttttgtcccgcttaagtattcaaactcccccatcaattgatatgttgcgtatgatgacttggcattcttactgacaagttgtactccacgtggcatcaatcttgcccacgtgtacatgtcacatcatgtggacataaattaggatagtgagctcgttgggtggagctctcaagatctttgagaatctttggcacttgtcacattttttgacatagtccatcgaatcctgaatcatggttgtgttggaatatattttaccaggatttagatttactaacaagtatgtttttaacatcctaaatatgaatctctaaaacaatgaaaataaacacatataaagtatgagaaacttacattggttgcagaagaattaaatgactcctttcgctcagatctctaacacttgtatcctttctgtcgcataatatcaccaagatttgagcccaaaaactccttcagttgtttagattcttcacagtcttacacactatg

SEQ ID NO: 305810 - DNA, 3586 bp, Cannabis indica
aaaaattcttaaatctaaaaatctcaataagtaccagaaaagtacagaagacctaatttattgtatgttaaagtttatttgtaaaaatcctaattacttttttttgttctaaaaactaaaacagaacttagcatgaccattgcagtgcattattgctcgtaattccgttgtcttccttgaagagttgaggtgtttaggcgttagggtttctttgcttcgtacacgcctcgaacttgccagcagcaatcataacataagaagaagttgattcaatccaacgaccctacaatggatgatagtcaagttgcagaggatactcctcggaaatgcattggtccatcttctgtttcggcttaccgcgatcctaaatactggtattctctacatacatgtacacatatagatatgccccttatattgttcccgtacttgaattgatttctgttgtgatatttacaggaataatcgtttttctagtgaagaaaattacgagtggctcaaggattactctcagtttcggcaccttgttcaaccccatttgactcccacttcttctgtattttcactactttcttccaatactctcttatatatggagtttctcgttcttgttttgcaaaatgcatatatgtacgtgcttattattaacataaactagaaattttaagaactgaacctataatgtgaaggattccccaaaaccgctagtttctgaaaagagtaaatatggccactggtttctcttatgctattatgcaaaagccacttgatttcttcttttgcttattttagttaggggatagtttattggcgttgaaaattgatgacacttgtattcttcaggttttggagctgggctgtggaaactcacagttgtctgaagaattgtacagagacggaatcaccgaaataacttgcattgatttatcagctgttgctgttgaaaataagaagaagcagttgctatctaagggttttaaaggtggaagcatcctttacttatctatttttcgtatttttctgtttgtgtgtctacttatgtagtgttgtttatttcctttatacattatcatacaatttgggcttttaacaagtttaatttttaatttatttcctttctttataatcattttcaaatttcagatgttttagtctaattgtttgacatatttttcaattcgatttgtatgtgtgctataagcaccttgtattatttggagcactaaactcggtgactgtgattttaggtaaaattgagtctagcatttaaattaagaagagaaaagtgaatgttcatggaacaaaaagcaatggtcatggagcaatttatagttgcagtgaaaaaatagcatttacttctactgtattaactttttctcaattttgtttaatcgtcagaaataaaagttcaagaagctgacatgctagacctaccttttagcaatgagtcttttgacgttgttattgaaaaaggaaccatggtaatgttcaagccacagttgtttgcgttttatctacacataattgattcagatttgatgttctcaaggatcattgttgtgatttcttttcagtttaatcgttctgaggaatgagatgaatgaatatattgtgtttctcttttttcaactctgaaggatgtactgttcgtggacagcggggacccatggaatccaaagccagcatcagtaactaaggtcatgaagatgcttgagggtgtccatagggttctaaagcaggatggcattttcatctccatttcgtttggtcaggttgttgtgaactaaattcttaagctttccttattgttgctcctattgttcttacatgtgttgtatatctacagccacatttcaggcgtccttttctcaacgccccagaatttacatggtcttttgaatggaaaacttttggcgatggatttcattattttgtctacattttgaaaaaggtcagttagtccaaaatgtctgcatacaaaatagttgtacttgtatcatctatatacctattctattatgaaaagtaaatgaatattgttttgtgatgcaattcatgatgtttcagggaaagagatcgttggacaatggtgaattagaaactagtgagaagttcaacacaccgcttatatctccataccatgatgaattagaaagtgaagattttatgttccgaacaaacattgaggaactcaatagttagaactcattgaactgttgtgataccacggttagttgtttattaatgtagatacaataacttgaaggatgaattcaagtttttttttctttctttgaaaaaaattaaaaatactaagagatttgtaacatttgtcaactttgtgatttagtgcatgatttaaagttaaataagcctacaacttctccacttgatgttttaattcagacttgtaaagtaatgttatttgaactttcttttatttcaatttgttttgtgaaaaaaggctaccgggttagtgttagtgatcttattcagagatcgtccaaagctttcgacacaccggtccaaagctttcgaagacacccatgcttgcacctttctctctcaaactctgtcgtcttcttcttcttcctcgcccctctttgtctggatgtggtggcagtagctttagctccttgatttacgttcagcctccaccactattgagtgaggttgtcaaaccaccattggaggagtcttcgccaacactatagtgattgcatttatgaagcttcctacgataagcatcattactttgacatatcttaagtgttttttctattttttttttttatgaaagaaagatgcatcttcattaaatcaaatcatctctaactaaggatgaaatttcagtaggtaaagagtctatactaaaaatacaactagtaacatgaatagaggaatgtgttaagacatgcaccatgtttacctaaaaatgttaagactcaaacacgttgggaagctgctgaacttgagtaacatcaccatctgccaaacttggtcgcggtgactaagtccagaaaacccagaaattccatttgtaaagcctaaaaatgcctaaacacaaacctaacttcacctaagccataaacaagcaaaaatcatgttaaaccaatgtatttccaggcattagtaccacagatatatatgctcaagataaccaatttatactcatcactaagtatgatacacaatcaacaccattacacaaaattcacaagcttgaatccaatcattcaaaccttcaagagatacccaaaaaattcagagcacaaacccaaaatttaaaccacatttatcaatcctaaaatcatccaaaacaacctatatgcaataaacataatctcaatagctcaaacaacaataatcatcaagttcctccttaaacctcaccaacatgcattcacaatgaaacaacatcaagagcatcacaaaaataccattataaagcttgaataacataaagtaaaacaagaaaaagagattaacttagctaccttaaattcttcaagtttccaagcagaaaaatcacacaacttcaagctttgtcttccacaattgaattgaaaaagagagagagagagag

SEQ ID NO: 305811 - DNA, 1228 bp, Cannabis indica
gtgagttggaaatgagttatcaattctaaacttccatcccaaagttctcgaagttaacctgggtagggctagggacccctcccaagccgacttgttatgactcaggactactcaagtctgagatgtcacatttattgccatgtgccaaacattgatgtccatgtcattaggaatactcttggtgtaaacactttgatattcgatcgtcaagcggttgctgagaggcttcgacccagggtaggctcagatctggctatattgacagcagacttattagacttaaatgttgttacatgtagtagattaggttctcacaagtttgccacaatggcgagtagagatccagtctttatggttgatagtcttaagaatcatgctgctgccgtaagcttgataacttttaactaagttatatatataaatatatctatatctctctctctgtttaatctttagcttacatctaactccatatattttctttttcagatgagtttgatagcagaaagatgctcttcctaggtaaataagttagcttatgaaattgagaccttgaaggctgaacatgaccattctgagcaataaaaggaagaagctttcaaagctttagatgatgctaagtctcaaaatgaggctatgttcaaacaaagagttgaggcttctcttaatgatgcagtgtctaattataaagcctctgccaaggtggagaatgagcgcactaaaagatacaaagagtcttataatcatgccttcacacgtttccagattggaggacaaattaactgatgctcagaataaaatcaaggagcttgaacaaaaagtgaactctacttctcgagactataacatccaaacgaaggctctcaacaagaagatcatcacagttgccaacttggagaaaaagctaaaacaacatcaggatctccaagaaaaggctgaaacttttaaacgggcaactctagaaaagcttaagagctctaaaattaaaattttagccaaacttaaagaggctaagagtactttggatgagtttcaaaagcgtgctaaagaataagttgacaaggccaaggctgtcattgtgaaggatgaggcttatcctgagagtcttgaagagaaatgtgccagtatggaggtggaacatcaagaaaatttaaagaagtctctggttgttacctagttattgggttttgtgccctaaataaaacccatttcagtataatcagattta

SEQ ID NO: 305812 - DNA, 1609 bp, Cannabis indica
tcaaaattaattggtaatgagtaaagtatacctcgtgcatcttatatatagtataatgttcccacacattatcaataagagactctctaatacctttctcaaggtaataactatttttacttattaatcttgaacgactccatctttggttcactatttttgaatcacaagtgattctatttaatttaaatatagttgaacataaaagtagaataaaatgaagtattccataaaatttaagaagttgaatctagaaactaattggtaataaagtagtggagtagctctacaaccccatagacgtacggcaacccatgtctggctcattcatccatagacgacagactagctagcttcctaagcaaagactttaatttttggtagtgatagagatctaaagagtctttcaccaaaatgaagtctttctagtaaccgctcaaatctttttattatatcttatatggagcaatgaacaagggatatagacatagtactgttacactcatcttttgtatttaatatgtggtaatggtatagtttaaatatatgggtaagatatgcttttaagtaaatttttggccaaattaacctttaccattatacatacatataaggtaacctcaacttgtgaatgtaaatgattattctaaatgacttttttttttaatattctataaatactgtggacgttttttttttttttcttaattataaacatacacatactactacaataatacggtatatttatatattaactgcctaaaaggctaaaacattatgcggtcttaaaatattcaaacatttctataagcaaactaggttaatgatatacatatacatatatatatacaaaaaaaattcaaatctacactagatcccatccaagtgagcatttaagactataatggttcctataaataaaggagatgctataattggattcgacttctcaaaatatacttttggaaaaagtagtaaatgtataattgctatacaccaaaactgccagattaaattatacattttgagtgaaaccaaaaatgaaaagcgatcgagaagaaaaacattgtatttttgaaaaaggaagaggtgtgattatgacaaagattttggtggtaaagaaaggtacgtaatctacaatacgatgattaattgagatattaaatttgttattttcctcaccatgatatgatttcattccacagatattttttttatattatattattttcttgacgaatagaaatgataaaaaaaaatgaaattctttctataatgatatcaagtgtcacgatctagttatatgccttcttaaatattttggaggttttattctaattttaaaaattaaacccctaaaaaattgcaatttaatagttttaaatattgtcatacgattatatattttacaaaatacctaaaaattcaaactattataataaaaaaaaaaaaaaaaaaaatatgaaaagtttgaagaaaaaaaataacagtaatgatttttttttttttcttaaaagcagtaatggaattaaaaatgggctttcagaattgaaaagaaataattacataagacaccatttttcgtaaaatatttacatttttacgt

SEQ ID NO: 305813 - DNA, 3286 bp, Cannabis indica
acatctctctacttttttcactagttgtaattttttttatatttctagaaactgtaattttgcggcccataatgtggtcaattgggcgtttgccaacaatgtttctagtatggtagaagtttttactattctgagtattattttctgtaatgaccgtaaggtttaactatttagttccttctaatatatagactttattttcaaaaataaaaataaaaaaacttaatcctacttatatatacatacgtgtagggtctttgtttgatgatctggaattagatatattaggcagcagagtgttagggcatcactttgggtaattggcatcttcttcaaatgtcaaacctaattaatataaaagaaatctctcatcactctgtctcccacattaatattcatcattaagtaatttcctaaattaattatatatatatatatatatatacgtgtgagtgcagtaattaatgctctctctctctgtatcatgaaaaaacttgacaacgtagcttcagtcctgaccctgatcagaggaagaacgtatcaacttcaagtttgtttgtatttatataaacataggatatgattttgtcatgttattgtactttcacggattgtaatccgtgatgtacgacagccgtcagacgagagagttatttgatttgactgttgagattgatctaagagtaattaaggttaaaaagtggaaacgtacttgacactcatttaatgtaccataagactcatctaatgtatcacagaatacattccgtgaaagtacgtcacccacaaatcatatccctataaacatatataaatatatatacgtacgacatcttctttaatataaataagataagcagagcaccgagtgtgtactgactcctcccacgtggttaactaataaattattattagtattaatttctcataactattttgttggaaggagagaaaaaaggcagaaattttcaaaaacacttttcttaaccatgcaaaaaaaaaaaaagtaaatagtaaaaactctataaaaagcaaaccattatataacctctactactttcttgtttaattaaccacaaaatataaataataataaatttaatttaattcaatccttaaactatatatgatcaatatttaccataccttcaacggtttcttcttttgtcgttttctgttttttcaatggtctttctttccaaaatggaaaaagagaaagaacaacaaaaatcaaagagaaaagaattagggctctcatgcatgctcaacaccgaagtgggagctctcctcgccgtaatccgccgtccggccgatcctaattcccactacctcggatcgcccgaagaatcccaagacaatgcaattctccaatccctaaaatccctaagagctctaattttcaatccacaacaacaatggtgcacaatagacccttctatctacctctccccatttctcgaggtgatacagagcgacgacatccctgcttcggccacgggagtcgccctctctgctctcctcaagattctaaaactcgagttttttaatttaaagaccccagccgcagctgaggccattgctacaattgtaacttccattacaaattgtagactagaaaaaaccgattcaatctcagaagatgctgtaatgatgaagatcttacaagtcttatccgcgattatgaaccactctgcctcagctctattaaccgatcaagcggtttgtgttctcgtcaatacttgttttcaagttgttcaacagtctattggccgaggcgatttgcttcaaagaagcgctcggtacacaatgcacgaactgatccagaaaatattttctaaattgcccgaaatagaggtggttacgagcattaagggttcgggattgggtgaagaagaggaagaaggaggtgaattcgaaggggaatcgggttatgggattcggtgtgcagtggatgtgtttcatttcttgtgttctttgttaaatgtggtggaattggttgagaatagtggttcggaattgggtaataatacttcattttgtggtgatgaagatgttcaagtatttgctttggttttaattaactcagctattgaattgagtggtgatgggattggaaaacatccaaagcttcttagaatggttcaagatgatttgtttcatcatttgatacattatgggacttgttcttcaccacttgttctatccatgatttgtagtacagtcttgaatacctatcattttcttcgcaggtttaacattcctaaattttatatttattccttaattcatttttgcatgcatgtatgctaataatcatgattatgatattataacattgatcatcataaaatatagtgcattgctattattctagctaggcacataataagagtgcctaacaccacaccaaaactatattatatattaaattaaaatattttaaactcgttattaaattgtactagtagtgatatgataattttttttagtgttgggcacttaaggggaaaattctacaaaagaaatacaacttttgctaggacatctctaattttgatattcggaaaaactataatctaatttttttttatatacgacctatcttatagttacatagatattttatttattttcgaaaaatttaaaataattcatgaaagttcacacatgtataaaaaaaaaaacaaatgtaaaatatttaaactttgtatttagtgttgtaaattattaagaatttttttgaaaactaataaaatacctagctacaactataaagtagatcgtgatataaaaaaattgaattataattattttaaattttaaaaataaaatgtcccataaatagtgtttcacctttagcgatttctgaaaatatagaatattttacgaacatattaatgcagtttttttctcgacatctaaatagttataattttaaattttatatatgtaatacttacactataattatataatatatcttgtaaaatttaaaaatactcataacaatttataatacaaaaataaatattgacaataaaaaaaaaaagcatacatacaataaactgtttgaatcttcacaatataaactattataattttatgaaaaatcaaatacaaaaatatgtatttaaagttccaaaatattacttttgttcttaattcttatttaaggtaacatttggttggaggtaatgaaatggaatggaatggaatggaaaggaaataattttcattccattattttgtttggttgcattttaaagtattggaatgacattccaat

SEQ ID NO: 305814 - DNA, 913 bp, Cannabis indica
tgtaatatataaacgcttgaatacaaaaaaaaaaaaaaaaaaaagagttgccacgtcaaatgatgaatttgctattgcagatcaatcaacatttaaattcgagtatattttcttttagaaaatttttgagacagttgtaaaaacatctattagctatcttcagggtttttatagtttataaaaagaacttagattgtgagaagggtactttttttgtaaaaacctagagtgtttagttaggttttagttgttttataatgttcttttattatttgtagaataggttcaagagaaacttcaaacaagatgttgttttcaggagaagacttgtcaaagtctcatttcaggagaaagtaaacacgtatcaagggctgaagagatttcattacttggtgtactttagaaattaaattagcaacatggattacaaacggttgtgacaaatgtttagagggattcaaattttgtataggtaattgtatttgtaatcattgatactttactaattgaatattaataccacataattatcttgtgtgaattttttactttctgtaatcttttactactgtaaataatgttatcgcgtgaggatgtaactaacttgttaatgtaaatttttatagtaatattttaataattattattgtaaaaataaattatttttttcaaaacatcgattttcaatttataagattattagttattacacacttgtcaccaatttacttcaacacggatctcattatttttttttttttacaattcaaacaacatattatgatgtgcttaattgtcactaaaataaataaataaagggttatttgcggtaaaacccctaaagtagggaggtttttgcaactaacccccaattctaaaatttttgccgcaaaactccctaaactcaagttct

SEQ ID NO: 305815 - DNA, 2381 bp, Cannabis indica
attaaaattaaaaaatataatatttatgaatttaaagataaatggttaaaagaaattgtaaaaatataactagtggggccatctatatggtcggtcacttaatcttattttttactattattttatcattttttatactatataacttaatcctaaccctaagtgaaatagtataaatggaataggatggtctcattctcattcaatgcttttaactttatattctgtcagacaactagagttttgagaacttcttcctcttcttctattttcgaattcctcatcattattcttcacaattttcaagcctatagtgagtgagtgcatacacattcatagtaagtctagtacttattcatagtgtatcggactcagatcttgataatacactgcgacagaaaggaacaaggattaaagatctaagtaggaggagtcattatattctgttgcaatcaatataaagtcacttaaactttatatgtgtttaaattctatcgttttaaaaattcatatttatgatattaatgaacatacttgttagtaaatctgaatcgtaaaatatattccaacagacattgccttcaacttggaccctggaaaagtggatgaaccacaaaaaccaaataagatgctattaggaaaaattcttagcataaacagaatcagaaaaggagggaaattaaatgagagatctgtagttctccttcgctttccaggaggatgcaatgtacatgcttacctgaagaacctggtttgtgtgtggagctcttatggtggtcatgccttgccggcttgtctccctccaacagaagtcagtttcgataaaacctcattctgggtgaagattgagagtatcccacttactgttcacactaaaaactatgtttcttcatctgcccccggccgttttctaaagatcaaaacttagaaacagcttcttttttcaaatggacctaaactgcggatctttctactaagataatttctaaatttttaattaaatttgctgctgcataatcatatatattataaatttgaaaatttctttattgtcaaaggaagagaaaatcctgtcaaaatatcaaaaataaaatgaaaagtgtcttcacctactaatctagaagcttactactaatctagaagagcatgtctgaaactgattgccgagtcagaagcatgggttgatgatttcatgagtagaagaaaactctaagacagttcgcggctgcgctttgcagcagcaacaacagcgttcatgaacaggccacggagtccacccttctccaactcgtgaacaccagtaatagtagtcccaccaggtgatgcaacgtcatctttaagctggccaggatgctttccagattttgtggccatagatgcagctccaagaaccttcaaaagaaacaaataattgatagttcccactaaatagaaatcaaagacatgagggacgctttgcatatgcacactgacaaatgggtatatagggttcatcctggtagtaaatatgcaaaagtagagtttgtattattttgtagattaatgtttggaatgaataacttgtggtttgcttcatttatttacaacaaagtgaaatttgtaagcaggaaaagtttatggatgctccaagtaattttttagtacatttgatgatgataaaggatcatcaaattggaataatctggattacaaaagtgacttactgtttgagaagccaggcccaaagctaagtctcgcggtaaccctgcagcaactcccccatctgccaaagcttcaatggccaaaaatacgtatgcagggccactaccactgtattattttaataggaaaagaaaattatgcactctgatcacatgaatgtcgataatatatttgcaccataattgacaaaccatgtaccttaagccagtaacagcatcaaacaatttttcatcagctttccatattttcccaatggatccaaataaattggctatcagattgccatcttcttcagttgcagctccccccaggctcatcactttgaaaggaagaaaaattgacttcattttcatttggaaaaataaggtgcaaacttgaagaagataaaaatatcacaaagattaaagattcgattaataccatctaattatagtaataacctttgtcattctattgactacattacatagatattgcatcttcattaagaaaaaatcactaaaattatgttttagttgaattaaattactctttatcaacactaagttctgtaactgaaccatgtaaacaatttttgagacaaatttgacacagtttcatgaaagaaaaaaaataccaattgaagctaagggtttcttcaaacaaggaaccggatcaactattcaatcaaatgatattga

SEQ ID NO: 305816 - DNA, 1678 bp, Cannabis indica
aaaaataatgtggaaaaaaataaaataaaatattaaattttggatgatgtggagatatagagcagcttcaaagaatgctaccattggagatgctcttagtagcttcagaggcactttgtattggtttcctattccatgtaccattaccaaaatctgagcctgccatttgtactcattggtaattttgctagtagtgaatgactctcttgtgttggacttcattgacatttgaatgacacttaactttaaagttattaaacatatgttcaacctattgtaatctaataaaacttctattaaatatttttatgttcctacataatgcaacaaaatgaatattagaaacctaacatttcattcattttcgttttatgtaaatttttaactactttctatcatattcttgctttctcctcttcgataacataacctcctctaccaactcagccccaccaattagcattaacatagtcataaccacttctatttgcaagccaacactaagagagagaagagaagtagtagtatgagtagatcgtcgtcgataaaggatttgcattctcagtttaggtcgtagtcgctctattgatgactaatccttttttcttcatcattgcatgaagttctgctattcttgacaatcaatcggcgctgtttatgatctttgacacaattcattatcactaacacatacaacttttattaatataatactgatcatagcccacgattaacatacatttgttttattatagtatcatattaatttctttattctcattaaatatttaacaatgaatttatctattgtttttcaaatctatcaaatttgaatcatatagtaacaatttcttttatttttaaatgcttatagtgtttcaaattttgtgcttacagttattatcttttaaatatacagatacatttctctctcgttcttagtcatggtaatttattattatttccttttagtttattcttttaaaattgttttggtagttagttatttttagcaaaatttcaagttaatttattatgcttaaacgatttcttatagttaaattcaagttatgtctttgttcgattttattttcagtatttggtaaagtttttgtgagtattttgtagccttaattttttctgttattaatattgtctttatttggttttgttctttattttttcatattttgtggccattagtttttcattctttttttttgtaatgcaattaatttttagaattttagtttgcttagtttattgatttaacatgattctcattattttttttaacatttttgcaggaggtcttgttgtcatttaaacaaactatgtggatatgttgataacgtcggagcagtttttactagggagattagcagaaagcagattttatagttgtaactcgcacgtgaattgcttattacattccttaaaagatttttttttgttagttaattttcttagatgattttgttagttagttatcaaatttttttgatacatctctgattcatgttcgttgtatacatgagttagcagttcgtgcacggtgcacttatggtggatgatgaactaatttggatgaataatttctcatattttttcgatgaagatgtaaaactcaaaattattttcaaataaatattcattgtttaaaaaaataaaaataaaa

SEQ ID NO: 305817 - DNA, 2519 bp, Cannabis indica
atactagaactcagttttacctaaagagagacaaacttaatgtttagatattactcaggctggagaggatgatgaaatggggtagctaatatgacagcatcttttacgctatagctttaaaaatagttgtagtacacacacactgactctgctgcagacagacaaagcaagtgtagaagaaccattctaacatgactgatgcttagttggcaattcttcttgtaagcccttgttagcctaaatgtattatttctcttatctttgcagtattcaatctaatttgtcatctttgttagattaagggatggaaaatgataacttttgccatagtacttgagctttgaaaggaaaccctgtgtacgttcatgataaaagtgacataaatataaaagttgatattgaacttataatcaatttacattatgaaggaaaaaaaaattaacattatgaaggatatgccctatacttgaacaaacatgtctggtatgagtgaaattcattaacaatataaatttgaagttagcctttcatcatcttcatacatcccacaatttgtttaatgcgtatgctattatttatatcctaaacatccaattttgaatttcttttcagatagccactacttaaatgaagcaattgaccgattgaagaacaaacttattctttcttgaataggaaactaccctggtattaaagtaagaaatatttctttcatatatttacatgtgtattacatttacttacacatataaagacacataatttggcattttctcttttctatgtagaggccaatataggtgtaattgttagttttagcttgccaagaagctaagaatttgattcattttaattttcattgtttcccttatagactgtagtgaataatatattttagaaatattttctaccagcaatcgatcacagctgtctttataccctttgcaatgagatttggcttaagaactttcttaatgaactagagttcgtcctggttagagttgttccatatgcttaattttacttttactcaaatagattgattctaaaaaattgccaacttagaagtttctgccttaggggttgattctaagctaaagttagatgcaatgaaagttatgggaacccacaactattatcatgctgctgttgttggactgggaattggagtcgatgttgaagccattggttcaactattgaaaagctaaggctgcctcttcaccgtatgcaaattggtaagctgaaatttagagtaaattccctaaccaataaataagtctgaaaataaaatgacatatttaattgttttttactataacataatactacaaaaagttcagaaaaaatgactgagttgatggatttgattagtaaaacaagaattcttgcttagtattattattggacttatagtttttctgtggaaagatagcaaagacttctgaacaagttgatgcctctttctgttctctttgttaaaagccgaaaatgaattatttgttatgttcatagttataatggaggttatcacctgatctaaaagtttttaagtttttgatttgtagttcaacatctttgttgttggtctacggcttttacatgcgtacttgcaacttctttcttgttggattttacatacacttgcaactatcttttcgtgctgttcttttgttttcaccgtactcgatggcctgttctttttgttaatctggagcttttcaactcaacattgtcctaagatattcgagtgttttatttcaataacaatacaacatattcagctcatagttttcaactgctgttcttatgcagtgtgcaatgataaccacgggattacatgggtaaatgacagtaaagcaaccaattttgatgcaacatatgcaggactaatgggtcgtaaaggggcgaaagtcttgttatgtccattgtgccatcagacagaggagtcaatagtccagattttggttaagcgtgcttttgctgggtcttgttggacctgatctggtgttagcattggtgatctttctggtgtattgttttctaattttctaatttttgggtcggagacattgaaattaagaatttattttttgaaacttcgaacattgttttctttttttctccttccaatgtatgatgtttttatttcatactttatatcacatattcaattttttaaaaatgattgtttatttaaattataaataaaattattatttaattaaataattaaactacaagtaacattagttatataataattaaaaaatatagtacattatccaaaaaagaaactaactaactatttgctggaatattgtcactctgtcgacactaccatttatctacagaaaaatagacaatccaattatatgcgcaaatgaaaattaaactccacccattaagagtatctttatttttcttatctacaacttttagacagatgttatctttatcaacaatttactgtgtgattttaaattttttttgttattttacacacatttaagttgtgttt

SEQ ID NO: 305818 - DNA, 5189 bp, Cannabis indica
tttttttttttttttttcaagcagtctttaggaatgaagccaaaacgttacttttgctttcagaaattcttttttggaaatgtacttccaacgtggctgtaaaatgtagaataaaatcctttcaagtgtaatgagaaattctaagaaagagagagagctgttacatctaagcaccatctagagctagcaaattgagcaaaagttcaatgtttgcacattatgtaactaataagttacctatacgtaatagataaatataccaatacgtatagattcatatgtatctctatgtgtgtaccctttgtagagcagcatttgtttcccaacattattaagcaatgatgaaaattttatagttaggaaagtgattttgtaccactaactattatgaccataatctaaaaatgtaccttcttaccaccatcaattagacatggactgcataacttgaaaaacaactgcttgttggaggagtaaacaataggaaacaccaatcttgataaaatttctttcagatcagatggcagaaaatgatcccaaagactatccgaatcggccatggcacgaacacaagacgaggctagagacgaacgacatgcatcttgaggtgaagtgagtgacaaaatgtgtgcaaaacagtcttcaggtaaccgatctaaattcatgattttcactcttttttttccttttacaagttcactttgaatttgttttataatgaggaagaaaatgttgttggatgtgattattggtattggaataggggtaaaccgtttatataggacttggacaatgatattacgttaatatgacaacatttgtgttttgcaggatttggtccaaaaatgacaacatgaagtgaacagatgaggacatcggtgacaaaaaatggtattcatgtgagaaattatatggtcagtagaatgccaacgatgccatacatctgaaacaagtccctatctctaacatttaatgaccatatatatgtatcatatatgaatatgatcaactacaactacaccaacttcgttttactttgtattcttgtccttcaaaacaagaacctcttctttttcttttattatcttctttatatatctacattatattatatattatattgtattttttatactcacttttaataagaacaaaacactgaaagaatcatgcataaagtaaccgaaaaaaaaaagcaacacaacacctttatatcttttgttgattatgcttaaactaacttgttcttttcttattcttcgctcaacactcgtttcctccgcattataatctgcttgtttcaaaaacggtgtcgttcgttcttaatgtcccgtgtatattgtatagtccgttcataatatgcattattgtcataactcgtaagatttgatgaaaatctaattcctaatgtaattgtaataataggtttaaatacttaacaaatcagtttttcttgttagagaaaaaaaataaaattaatcatatgtgcaacatcaaattacactgattcctaacgtaacaatttttttaagccaatcatatttatctaaaagcaatatcatgtcattgtgtgttaaacctcctagccatagctgaacatagagaaaagcaagaacaaaacagagagaaagaaaccagagaaagagagagccaaagatgaagaaagagtcagtttattgaattgcatatggaagagtatttatacaatgatcaaacaatagacacgtgactaaaggagtataacaacttataacaaccaatcagttagttaagtaactaacttgacagctcataacagtaataacaaactaactgtccaaaccatcagctctaacacctcccctcaaactcttaattgaagcatcttcaatgttgagtttgttcctgaacatagaaaatcattgactcgtaattgccttagtcaagccatcagcaatttgatcatatgcgggaacatgcttaatctgaaccatcttgttaagaactttttcactaacaaaatacaaatcgagttcgatgtgctttgttctagcatgaagaactggattttgtgttaacaataccgtgctcaagttgtcacaccagattgtgggaggttgaggcagttggactttcagttcagaaaatagatagtgcagccatgataattcagcagtaacatttgccacacttctatattctgcttcagtactagaacgtgagactgttggttgctttttactcttccatgtgattaagtttgacccaaagaaaatagcaaagccagtagttgaacgccggtcatcagggtctgatgcccaatcggcatcacagaaggctacaagatcaaaggacttaggtctttttaggtgaagaccaaagtttgtggtgccactgatgtacctaagaatccgtttaacagccaaccaatgtgtggataatggcttttgcatgaattggcaaacacgattcacactaaaagaaagttcaggccttgtaatagtaagatattgtagagctcccactattgatcgatagtgttgaacgtctgccataggttccccctcataggctgataaacggattatactgaccattggtgttggagagggctttgcatccaccatttgagctttaacaagaagatctcgagcatattttgcttggcagagatgaagtccttggtcagtatattggacttcaatgcccaagaaataatgcagaaggcccatgtctttgagtgcaaactgagagttgagtgtagaaatgagattagtaacagcagcatcatcacttcctgttataataatatcatctacatataccagaaccaaggtaatagatgtattgctgtgaagaataaacagggagtgatccgaatttgatgaaacaaaaccaagagacaaaaggctgtgttgtagtttgtcaaaccaagctcttggagcttgcttaaggccataaagagctttatgaagtttgcaaactaaatctgattggccaggaatctcaaacccaggtggttgaatcatgtacacttcttcttgcaattctccattgagaaaggcattattcacatctaattgcttaatagtccatcccttggacaaagcaagagttaaaaccactctaattgtgaccgattttaccacagggctaaatgtctctgtaaaatcaaatccgggctgctgatgaaaacctttggcaactaacctggcctttagtttattgacagtgccatcaggattttctttgatgtgatatacccatttacaaccaattgctgtcctaccaggaggcaacttaaccaaggtatatgtcttattccttgttaaggctagaacttcatcagccattgcattattccattgaatctgctgcaatgcttcttgaagagttgagggaacttttgtgactaggtaagctttgggcttgtggattccagacttggacctggtcttcatgctatgagtgttcagcttaggaggagcatgaggacagccagccacatctggtggagacacaggcagagacccagcaggaaataactcagatgaaccagttggagagagattggaatgaggagattgctggtctgttgccacttgctggccagtttcaatttgttgagttgctggagcaatgatctcacacacagctggtgcattaggaggctcaatatcagtaggctctcttgatggttctcctgcatcacagacaatttgttggcttgatggccaactgttaggaagagaaacaaaaccagatgcattatcagcagcaggttgtggggaattgtcacttaaaacagattgatcaatccttgtgttgttggaaaataaatcagccatggtgtaatgagttttgggatgagaacagacatgaataatagcagatacaacagagttgggttcagacatagtgctgctatttttgacagcagaattttcataaggaaagacaaattcctcaaaaacaacatctttagagatgtatagtcttccatttttatcaaggcatttatagcctttatggtttagactatagccaagaaaagtacatggtgaggatctaaactcaagtttatgtctgttatatggccttatattaggaaagcatttacaaccaaaggttttgaaggatttgtaatcgggttggatgttaaacaatgtttcaagtggagatttgtttcctaatacaggtgtgggtaatctattgtgaatgtacacagtggttgcttcatcccaaaacttaagaggtaaggatgcttgagcaagcaaagcaagaccattttcaacaatgtgtctgtatttgcgctcagtaagaccatttgatgtgtagtgggacaaggatgcctatggtgtatgccatgttcagcaagatagtttgaaaatgatctaaattcacctccccaatcagtttgcaagactttaaggggtttgccaatttgaagttcagcttcaaatttaaagttttggaatgctttaaaagcatcagatttatttttcaacaaatacaaccaagtgaatctagagaaggcatcaacaaagtggatgtagtatctataaccattgaaagagggtgtgtgagaaggtccccacaaatctgatacaacaagctgtaatggttcagatacaattgtgttggatgtctttgggaagggaaatttatgaattttcccaaggcagcaggcagaacagatagagaactgagaattttttattacttaaagagatattacaagattgcaatacactgtgaacaattttctcagaggggtgacctaatctgttatgccacaaagtgaatttattttcaacagcagcattacatttgatacaagctgaaacaatagcacttgagttatttaaagtgacaacaaaggtacttttagaactaaagttacagctggtgtttggctcagattgctggtgtgaagtggattgatgagggattgaggatccaatgctgaactgagttggttcaaaagaatacaggccattcttgtgcctccccatcagcaagatagaatgagtcaatttgtccttaacaagacacatgtcatcatgaaagtcaaagaaaacattattgtcatgagcaaactttgagacactaattaaattctttgttatttcagggacatgcaacaaattgttaagaacaaggggctgagatgacaattttggaaaaataagggattgaccaaagtgttt

SEQ ID NO: 305819 - DNA, 1124 bp, Cannabis indica
ataagaagctcatgagttttgaagggactcaaagctgataattatattagtttggactttggatagtgggcgactcaaaaaaaagtagcgaaattgtaaagctatattaaaatatttgatgtcgtatttgctggttgctgtattagtatatgataagattttgaatatgtatattctactaaataggatggataaaataaaataaatacaaaattatagaacaaacaccggaataagtcttcctcagaatattatattgtccttcgaaaaaaaactaaaggcaaggaatgtggaaggacgcgcgagtaaatgagagttattttggagttattagtggggttgacttgagagtaagaagtgggcaaggccgacctagagctaaattctaagattcttggatgagtaatgcaacgcaataagaactttgcttgagagctagccggtatgggattttaagatttggatgctaattaagcaaattgtcgtattgttcgttgtaacttattttctttctttttttaaaagaaaaaaaaatcctagattcgttttagctggttgcacgacatttagtttttgttgttgtagcaatacataacaaaaacttatatctagtttatcaaatgtcattttaaactcataacatctattcatttatttatttttaagccatgatagatatgtaatgtggttaaaagtcacactttaactctcgtaagaaaataactcttataaatgatcttttaacttatatcacaaagtacttatttaaaaataagtgaattaacttctatatcaataaaaaaaatattattagttgtaaaataataatatttctacagtttagtcattaaatagatagatttaataattcaataaagtactaaaataatatctagtatcagtcattcctcatttgtaactagtacatagttaatttaagtcatctagaccattcgttcaaggttaattacaaaatcagtttcattagaaagtttgataagtagaataagactaaactaataacaaatttcttcctcaacggtattatcctcatccactatcatcaaactgaattcctagattgggaaaaaatagcgggtgagcttataaagcctagtaagaaa

SEQ ID NO: 305820 - DNA, 1372 bp, Cannabis indica
gtgtacaaatgtaactactgccgtgtgagtatatatgtaataaaaaagtcattttgtatttttgatgtaaaaatttcttatatttataagttgttccttgtttttatattttggttgatactcaaaatgattttttttttatgagtataccaaaaataattaaaaaattgaaatttttatatttatgtgtttgaaacatagtaggttattgtctacaagtataatgtgtttagtcattaaagtacttttttactatgtgcaggtatttttgatgttttttttagagtaatattggataatatttgaagttgagatcttcagaattctagagtaaattctaatttgtaaatatttgttgtttcataattattgatgatgaaatttgaattgggtgtaaattatcttgtaatatgagtttgtaagcttgaatcaccaaactaatatttgtaatcatatgtgattaattaattttatttatgctaaaactaattgtaattgtgatatattgttgtttgtataaataaaaaataaaaataaataaaacagattttaagaaactacaatagataaattaatgttacataaatataataataaaaatttaagcttatctgcatattaaaataatagaaaaagtgttattataacttttattatgatactattttatgtggtaaaatatgttataatcaacttagtaaaatacttatttatttattatcctagctaaatgatttagtcataaatagggtagtttcaactcttgcgaaaaagtaacatttgagaacttatgaacaaattgactagaatacataaactagctaagtgatattttcatatcacttagcataataaaatacattttcagcacgattttctcttggcccaacgtccaggttgacatcacatgtcaacctgtgtgttggtatcagagcacccttcaataaaacgatcataactcatatagtatttatttgattgacgcgattcaacttgcgcaatatatataaagtattgtaattttgaatttatcaagttcaaattttgtcttcaagagagataaatttcaattacaacttacttgaagtaggtcccgcagacgcgactcaagttctaaaaattgatgaccgacctccgaagtcagtttcaccgttatatcatcaataatggtcaaaatagcttaaatatattttttttcaatattttattattattttaatagaacctccttccctataaaaggagagctcatctaatttatttttcacattcaaaaaaggacccataaagtagagcacctctctctaatttctctctctagaaattagagcttttagacttagttatttttcttgtaatcattcttgtgaga

SEQ ID NO: 305821 - DNA, 3358 bp, Cannabis indica
aagaaaaggtaaatttaatagagaaatcaagagcccaaagagaataatcaaagtaagaccaactgaaaaaatgtcaaagttaaaagatgcaagggtgtttatgttgatgtcgaatcattacaaggatatttttttgacattctcgggtgtagatttaaggatatttatctccatgaaaacaaactcctcaaggcacctagcattggaaacaaagaaggacaataaacaaacattcaagttttatttattatacaattaaactagttcacataacaagttcagcaaatattgtttttgttacagagctaggaagatatatattatgtaagttggtaatatttagaactttaaaaaataaataaattagagagtacacattgaataaaatgcaatccaagagggtagttctacattgatgagtactaaaagcataactcttggctgctgcactctttctaaccattataattaaattatctgatctgaactaaaatcatcagatacccaatatagagctcattccattctgaaaaattatggctccaaaatcaaaccaaaacaaatttaaacaatacaagtccaaagttcagagttctatggtttcttctgttaccacactgggaagtgaaaattctagtgttgaacctctaactagttcttttttatataaacttatggctctttcaagttggaaggaatatcgagccaatgttcttgtgtgtgtatataaataattttttttctcgaaaataaatggttcacatttatatttcccctttgttacctaacaccctatttcattattaaaaaggaagtgttcatcatccaattttttttattattatttttttaaaaaaaaatgaaaactcaagaatctcataattaacctggaaagtttgcgaaataggaagagggtgtaattgaatcgatccaagtataaaaatttacagattacaatacccaaaaactcatattttggcgaattttaagtcttggattcttcttaattcaaataatcgaggaatataaggatttttctaagtgggtattaacattgtggttcaaaatcaagaaaaagatagaaaacatgtgaaggttgtggtggaagagaagagaacgaaaatagaaaaatgcatatagagaaagtaaggaagaacctgattagaacggttagctgctactgttgtttcttcttgtactactacagtactgatgttgtttttgggtattattcccctaatgcttgagtccggtcactcgggaagatagatgaaccaaaatggacaacaaaggttttgattatgattttgttattttttttttttttattttttttgtttttttttattatttttttttgtaatattatatttatacattgcaatttctcttaaaaagaaataaaaaaaataatacttaattataaattaattttaattaactttagaatcagttaaattagtaattttacatacatttattttgatagaaattaatactttaatattaaaaattaattttgatagttaatttataaaatattaaaatgttaatttttttttgttaaaatatttttatttgggtagaaattaatttattaatttcagattcacctaaattaagtaattttaatagatttttttttaaaaaaaaataaaaatatatatttaagattgaaaaataatttatttattttcagaactatttaaattaataatttttattaatataaattaaaatttatactttggatagaaagttaattttataattattgtatttctaagttagtagttttaattaatatattaaaataaattatcaaaaataaatgattgaataaaaatactatcttaaaaatatgagctttattagtatgagatattcgatctccattgttggtcttgcaagattgttatttttaatggtattcatccccaatagatggtcatccattagacaatttaacagcgtatgacctcgaaagttaattatttttgttaaattttatattcttattaacgctcacccaaatagagactgcttagagtatggtttacaaatatgaaacaatggtagtagcttataaaataagattaaacttgcaaccagtccaatattggacaatgttaaattcatatttcgatcgaatagaaggttgctaaaatggtgtctattttagaagagctccctactctgtgtaactgatgatatctttgcatctcacccagtacgtgacactgtatatcattttgttaaaaattatggaaaatttgagatatgcttatttttagtattttttttttcatatcttccatatttgattatgtttttactattttttttttgaatatatatgtgattagaatttatatggaacatagcattttttttctgttattgattatgtagtatcaatttcgaatttttattgttagtctaacctagcttgttatttttaatgggacaatccccaatagattgtcattcgttagacaatataatagtgttatatctcgcaagataagtattttgtaaatgcgaaatctagttgactcatccccaatagatgataacataaactagggtttacaatactaaaacaatgacaaagtttaatcgaaattattctttaaattttctctacagctttttcatttagaaattactataatcatacaacattggactatatggattatgatcacctgcttatgatgttgctctaatttcttctaagaaaataagtgacgcggatgaacatatttaagatattctttccataaagatgattatcctcattttttttttcaggaattgaatctccttcttacagtgcatgctactaaaatatcaattgaacataatcttaagttatagttttgtaattgatatcaagcaagctaaacttagagttataatagtatcttagtggtagtttaagctagaataataactcagtttctagattacataaacactaagtttaactttcacaagttttattatccattttaatggattaaaccatgcattaatgtataaaaattgagttgatactctgtgattgagtatctgttaggttttgtgccctaaataaaactcatttcaatataatcagatttactaatgaagatcagaaatatgttgcatggttcacatgatttatttcatgattatatttaatgtataaattctattaggtccagaacatatgtatttgttcatgattatagtgttgtcagtacagtggaatataatcatgtttatatgttggaaactttaattccctgatttgtcagttcactggatttagactggcatgataatcaacgatatgtatacttacaccttggat

SEQ ID NO: 305822 - DNA, 1256 bp, Cannabis indica
agagagaaagagagatagttttagtttgggggtatttttggggttttgaaaaaaaaggtatagttttttagggttttaattattggtttataaatcaaattttttgattttctaagcatagaaaatcaaatttccttttaaaatttggtttgtaggtgtaattttctcttcatattttggcactactgcctcaacaaaagtagatgttttagtcatatttcatgttccttgttgtggtactgaattaatttcctccacatgcatcacaaacattgccacctaatgtctccaacgtacgatccttaatttaatgttaaagatgaccctttatttaaatatattaaattccctgattttgatggctttatttttgttttttctttgttccatttaaaattaaattttccaattttcccttataaattatttattattaattatcgattaagatatatatgtatataccttaaaactaaacttaaacgaccctacctaattagtttctgaattccttagagtttgtagctagcttggttacttttttttttttttttttttttttttttttatgtaatgaaaatgcacgtatgattctcaccaatgtcttatgtgaaaattgttatatgcttaatacttttgcttattttctataggggtgttatggattggtttggtctaaaatttaattttttcaaaccaaaccaagacagactaattaaatgatcaaatcaaaccaaactaatttactcactaacagattggttttggttcaaaaccatgattcatatatcatagttgttttaattttttcttaagtaaatcttcatttttttgataatattttttttttttacctttaataaatttataatacataaataataataataaaatattctcaaaaataatattaagtcaatatctacattcttcaaaaattgtcccaaatatcaaaattctatccaaaaggtatgtcttaagtacatacataaaagaattatacggattgggattggtttcattcgaactgctactgagaattctaaaactatgaccgaataccaaagaattgtaaatggtccagattgacaaaactattcactctagatttattttatcacgacccaagccctagctaggccgtggtagaaatgtaatatccataacatgggtggtcaagggtcactctttgactcttgtaggaaaatagcaaggatcctttaatttatattacaaaatacatatttaaaaataat

SEQ ID NO: 305823 - DNA, 3135 bp, Cannabis indica
  modified_base (157)..(157): a, c, t, g, unknown or other
ttttataggcataaaaaaatatatagctcaaataatcagttgaacatgtacctactgtttaaattttataaatgcattagtagagttatttttgtaaattttcaaaaaattggtagaattaatatctatactgtattgaaacaaaatttggttatanaataaagctccacatatccaaaataacactatatgttaaaaaggagcatataattaagtaaagaccccatataataattaaaaaaatcatttaaaatagacatgaatattaatttgtattcatggcaaaacttttttttcttcttgttttgtttttgggtaatgagacactattaatgagctataaattaattctgagtacaaaatgtacattattgatgagaaatgctaaaaatattggtactttaacattctccttaacgtcatactgctatttgtgtaattaaatattttatataatttaatataaaaaatttaagaagacgtttcatttgagataatgaaatgtactagaatggaaatagaatagaataaaaatgaaataattaacttttattttattttttgttttgatttcattttaaaatattaaggaatcaattcatattctagttatgattttattcgttccaatcaaatgcttttcatgtatttgtcacgtgagtttagttagagaaaatagaatatattagggagggagtatatttcggagagaatatgaaactcaagtgttcgagggaattaatattactatcattttaatttaaatatgatgatattctcattctcatcaagtataaacttaatactaaacgactaatctcgctaacccatcgcattacgattagagaagctgttagagattaatgctcattatttgatagatagttacacatattatacattaattaatgtgtgagatcttcactagatctggtcatataatgttgatggctatgtatgagaatttatggtttttaaatataaatatatatatatagcttcactacacatcactattaattatctcattatgagtactatagtatcaacttagtccttttgtctttggcggtgctagctagtgccatgtactttatttttattttaaaaattaaataaataaactaattaattatagataggaatatatataattgaaataaggagaacttggttttaattaaatgcatcaaaaattaatatatattgttactatcacgttcatcaatgatcttaataaatttgattgcagactttcctctacttttatttgttgctttttaattttgaattaattagttttttttattatatagtgatgaatatttattgttctatttactataaaacataaattttttacacactacaatgtgtattcaattttaatcctatataattttatgtgattgatgagaactatatatataatttgtatggttcaaattaattacacattactctgtataaaaagtccaatgtaagtatatcacgatcattattctgtagtattatataattattttaagtgattgagaaccatatgtatatattatttgtacggttgaaattaattatatattattctataaaaaaatatattattctgcatatattatataattctatggatcattaaagatttataaattttatataggaataattgtgatataaacacttaaaattttatatttataatcggcataaatttaataattttttaacatcagtttcatcaacagaaattcaattttgaatttattaaaagaaaattcaaaaataattcatagtgcatgcatatttccaactagacttaatgattaagtatttagacgttacttgtgttttgtttaagacactaagaaaatctgtaccgacaaagctaaacaaaaattatacttttactagcattgtgtatcatttacactgctaaaaagattatatcacttataaattcaaaactttaaatgctttatactatcatttaccgtgatatatatcaaccatgtaaatgcaatttctagaatattctaattgtatttgttcaattcacaattaataagtagctaatacactatgtttattctaaattttgtccacctgacgtgacatgtccacataattcaaaaacatagtataggcagagtataatcctatcagtagcaaaacaaagtctccatgcaagacataataaaaccgtcaagcagtaaccgaatggagtgaagcgaaactaacatcctttgtcggccagggtgagaatatagaccggccaagatctgggcacaagctggccgcccaaaaagtgactttcagaccgcgtgagcttctattcgaccaaagaaacttgacctctacaaggaaatattgtacaaaattgtctcccacttgcaaaaggatggcgtccacatcctaaggctggcctcctctttgtaaggctaaggactatgacctgccaatccctggcagaagcatggacgaccaggattagcctgggaggagcatggccggccaagattgacctggaaggaccatggccggccagaattgatttggcagaactatggcgggccaaacctcccctgtaggtctatgggcggccagggttaacctggcaggactctatgtgcaacttaaaacgtggacaacaagctacttgtgaattggacccttaacaacctaacaaaccgatagaaaatatctactttcaagggataatttagtcttttgtatttaatcaatttaatatgtaaatatctaagaatttattgtaaattaggattttaggcttcctatatgaaggccttaactctaacctagaaaacttaagtcactaagcctaattctagcctccaaaccactctaagtctgaaattctagtctcttctctctctttctcttgtacacgcccaaatggctcctctcactttatctctcatacgcctctaagtctcactacaaaaattactacttttagtgacaactttttagtcacaacataatttttttgtaactaaatgtgacttttagtcacaacaaaacgttacttgtgactaaaatatagtatttagttataagttgtcactaatttagttttagtgacaacaagtattgtgactaaaaatacatttagtc

SEQ ID NO: 305824 - DNA, 1321 bp, Cannabis indica
gtaaaaatacaaaataaaattcaaaaacaaaagaaacacacgtaatagtaaataacacttcccacccttcaaaatcaccttatgatcaatgtagtaaaaatacaaaaaacaaaaaaaaaaacacacacacacacacataatagtaaagataaaattgagctcccttttgtgtcccattgattagcttcttaagtctagctcactttgatagcccaagcaccaatatcactagggttcttttatcacccatgataaaataatgatcacccatgataaaaatatgaaagccgtagtccatcgtgaccagcttcttctatgtggagttatcccctccataatatttcatatttggactaacaaaatatatatatctatatataatgcacaataacatctactctactcttatcaattcaatcacacctccatttttctttatatttctttgcagtttcataggaatcaaggtcgatctccccctcctcttttggcattctgcaatccaataagaccaagcctcctgttgtccgtagataatcaccccattcagtccatcattgttgaacattgttacacaagagagctagctctttctccttcccactaaccttacaatgtcttctttctttctgttatgatgttccaatcgaccaactcgaccagattcatgcctgatctggttggcatccagaatggtgatgtaacgtcctaacaataaggcacgctaagacaacagattatgaaaccctaatcccctaaactgagattactagaaaggtaagtgcgggaaaatttaaactttattcgaaactaaataaaaattaaacctgttacaactttaaactttacaaccataaaacacatgttttgggatcccgtaaatattttcacaaaatattacaagttcattttacgagccgacctaagcggcaaaatcagagttacaaaataaatcactggtagaccccaacccgcttggtctagtctggccccgaacatgtacaagcattgccaagctctcgcactcatggatgatcacagactgatttaccctttcctgtacagtagagcacccgtgagccaagcccagcgagacagtataaataaccatatacgcaataaatatataacacataattaatggtgacaccgcactatttgtctatttaatatacacctgagtgttacactcacatgcctatatatgtctatgtgacatagaccgacgtattacgctcatacgtctatttatgtctatgtagcatagacccacgtgttacactcacacgtctatttaaaataaggccgtagtagggtttat

SEQ ID NO: 305825 - DNA, 1005 bp, Cannabis indica
gtggtaaccaaacccgaaggagagaaagagatccaggctcagatcttgataatatactctgcgacagaaaggaacaagggttagagatatgagtggaatgagtcattatattccgttgcaaccaatataaggttttcttaaacccttatgtgtttaattttattgttttagatatattcatatttaggatgttaatcaacatacttgttagtaaatctagattcaggtaagatatttccaacataaataactaccatcattgcattctacactcaaaactgaatccaacgaaatataacatggctccatataaagtttagagttctgaaacctcacataataagcggtacacaataacaattggtggtggtagaaatcaatgtatgtactaaaaacattaccaaaaataagggtagtatatattaaaataaccatctagacgaacagatcacacccaaacctactatttgtcaaaatgatagatggtatagtcagaaaggggcagagctacaaaaatttcactaaaaaaagtagcaagctgggaaaaatgacttagtgtagattgttctccccgacgagctgcgtctagtggtgaagacggttcgtctaacgaacatcaaaagtcatcgaaaaatatgttcaaagtttaaacctcaaaattttgacttgcgaacccgggataacgaagacttatgaggaaatgctacttggggattgaggtcgtcaacggctaaagattctgatggtgtggcacgtggggtcagaagatcgccgtaaattggttgtcagagatcaccaatggtggtggctatatggtggcttctttgatgatttgttgataaagaaagaaagaaagagagagaaaatgactaagatgggagagagaaaagtaaagtattaatatacactacaaaaaaaaatctttttttagtcataacaaaattagtgactaaaagtaaaaaaattatgattaattataaatcatcattcatatgttgtgactaa

SEQ ID NO: 305826 - DNA, 1921 bp, Cannabis indica
gttatcattatatataattaaaaacaaaaaacacgtttgcaacaacattaaaatcattatttcaattgccatgggctcattctactaaaagaattttcacaagaaaagattaagacataagagaggagagaaatgggggttggttggggctaaacattctaatttctatctaaaacaatttgagatagaatgatatatataaatatatagaataatttgcagcgtaaataataaacacttaattttatttttttaacaataataatacttaagttatatttctaaaacttccgtaaatgcttcatcgttaagcgtcaaatcattatatgttattttcttattgatatatttaaattaatttttaaataaaaataaataacttaatgacatagaataatcaaaaactttcacgagactattgatttgacactaaacgaccaactacctatagaagttcaaaaaatataacttatatattattaccgtcaaaaattaaacttaaaattgcaactaaaagttaaattaagaatttataccgcaaattactcttatatataatatatagctatgactcacttctcctgaaccaaacatgaaatggttagatagaagaggtaaaatttcaagtatatatatattctcaactatggaattctctccttaaactaatatgtttcttcataaccagtcactcttaataacatcatcattacatgactaaaccccttctatgagtttggctccacaaaaaggctggcttgagggtgcaacccggcttctttcaaagatagcgccagcttctcggggccataaaccatgcgagggaagtttgagaccaggctgtaattctccacctctaaacatcccaatgaatcgacataatcatacacggtctggattgttgctgtgctgtcgaaccttctttccttgcgttctccggttgggaacctcaccaaaacctggttttacaaaatgcatattagagaactttgcaaaaggaaatagatagagtacaacggctggttcccgaaaggcagaactatctaattcggttttgatttatggttgcagtgtaaaccgaagagcttaaatcagtctgaagagaagtatcaaatgagaaagttaaaaatactttctaagctgaacaggaattacctgtgttacattaggtcctttttcaggttcagcaccaagggataaggctttttcttgtcgaatcctagcgagcgcagctgctttctcctctgcttcacgtgctgctctctcacgagcctcttcttcctctttgcgcttcctctcagcttcagcagcttctctttccagacgttcttgctcctctttcctttggcgttccctagcctggtggaaacattggaaaagaaggaaaataatcaagaaaaagtattcatatctaatcatgaatcttaagagcacacaccatgagataagaaatagaccgggaaaaatgaaaaactaaaaaaagggaatgagcatacttgatcagcttcaagagcagctctataagcagcatcttgctcctcccttaaacggatgttacttctcctttcctctgcgtcaagccttgctgtaacgagaactggagcactttcttcaagcactctctgcagtactgtaagcaattcttcaggagttttcggaccttcaacctgaaagcaacataaagtgttaggcaataggattagtatggtgtgctagcatataataagtaaaaaagttattagagtctttgtttgggagaaaagttttgagtgagaaatggtatgcaactctttgcatcaaaggggcataagggctccaatagtttgtaaatggttctctcttatattcaatataattttcctactgtttgtgctatttgctactggtttctgtgtgtgttttgctactggtttggttgatc

SEQ ID NO: 305827 - DNA, 1184 bp, Cannabis indica
ataaaataattaaaataaaaagtcttcaatatgtgttttgggaaaagaggattgaaaaataaataaaataagagattgattgtagtattctacaaagtacaaatgtaggcaataaattttagtctttgtaaaaaaacttaatgtgaatcgttatctacttgaaacaaaatttgatgtattatgtattttgttgatgtactttggtttctaataaaataaaattgtttgatcaatctattaatctaataataacaacaataagtgaaaaatgatttagtcttagtaatagtcatagttgtaaatatgtacatgcgtgtggtgccaacttgatttggttagtatgttaaaaaatctgccaaaatataagttgtgttgtgctaaactataagaaattgcatgttgtgtaaataattttatagggtaggtctgagtcatgttttacttgggttgagtcgtttttcttaaataaactaacttattattttcttatacggacttaaatttgtgcttcacgttttctcatttttattataattaatgacctcaccactaaactatatatgtgcgtgtgtgtgcttttttattctaattaataagctaactactaaactatactttctttcattctttattataattaagggtgatcgataaaatgttaaaataacaaaaataattgcattacgcaataagaagataagattcttccatctaagaaagttcattatctattcaaatatatagtatatgctaaactaatttatcagtgacaataataaaattgcaacttacataaagaaaatatacctctttaaaaaattagataataaacttttatatcaagaaagaaaacttataatgtctttttcgtcccaccaagaaaatatctacagaaaatagtgaaaagaaatgaattaatatgaaatatttaataaatatataataattttcatattaaaaagattcttcccacatgaattttattttatctaaaactttatttaaaacttcacaattaaataatttttacaaaccaaactttcttctaagaaaataaacttatcttatatattgaagtcctttgaaattaatgcttttaaggaaaaaaaaaaaaaaggagtcttaagcctattggagaacattgtcccacatggattaaatgtaaaagtattgagccatatata

SEQ ID NO: 305828 - DNA, 1192 bp, Cannabis indica
tcaacctagacttggacccagatctcggactcgaacccagatctgcacttggatcccaaactcaaacccatatctcaaaccctagcggccagccccgacacgaccccaaattcggacctgacttaattaaaatttttaaaaaaaaaaaagaaaagaaatttacataacacacttttattttttgtttttaaaattaaaaaataaaagtagttatagaacacatttttatttttcaaaaaaaaaaaatttaaaaataaaaattttacttccattttctgataaaaaaatttaaaaataaaagtgtgtaccaaacgttgttagaatttgggattaaggtgtgatgaaagtgcatggtgttctatcccaagattaattaacaatgtgagaagtaactcatcatcttatatatgatattttattttttcacattagcaatgtcagactaactctaatacactctctttatgtttaggtctaaaaaatatgagcataacaaatgacttttaagaaactatatggtcgaacgtgatatttgaaagaatcccacaaaatgaaattgagaaatttatagatatatacgtcgagaaatttgtaaattttaaattcaagtgcatattaaaactaattatgttaatatttagtcattattaatttatttatcttatgacgaattttcgtattagaaaagtaatggaaaatatataatggcacgacttagctatatattattaggaaaaataataattcatctcattgaaagaaatatttatttgatttagtaaattgtttttttttcaatgtgaatgtatgtaaaaacattacgttaagattattattattgtacattatgttttatgttatttaattatgtagtagttaattaaagataattaaccttgttgcattagtctctctttcaattattttggtgtatgtgtagaataacaaattactcattgttagtcttttacttttgtctcatttataatctttttctgttaattatgagcgggttttttttttaccagtagattggattaaactcaactatgatgtagcagttatgaaaggggtaggatcgacttaagtattaggcagtttggactagagctgtacaaaaatattcataaaccgcccaaaccgaataatccgcccaaaccaaaccaaaaaaaccgataaaaattacaaaccg

SEQ ID NO: 305829 - DNA, 2924 bp, Cannabis indica
ttatttatttttctgcaaatattttatattctgcctgttcagttctgctgtagcagaattactttctgctgctgcaaacgcgtacagtttttatattttcgtatatacaactgacatttgcaaaaacacggtttttcacagatcgtttaacaaaacataactcaacaaaagataaacccaaaagtaaattcataacatcttgaacaataagaccaaactttgaggacataaaaataatactttggttaaattcagttttataattgtcgtattgctatatcaattatttgagcgttcataaaactaatatcaaatgtgtaagtattgctatatcaattatagcaatacaatatattgtcgtataattaaatagttttatgaacactcaaacaattgatatagcaatacttacacattgatcatgctacaatattattaattgttattaacaggtatgtcacatagacaattcaacacaagactctcataaatataattctaatattgtaagcttattcatattttaacgctggttgagttgatgttgatttacactatttttacagctgattgtttataaaataacctcaacctacaagttgttgttaatcatttaaaaataattgattaaatattttcgtaacattatctaaatacatggttcgtaaatagttgcatgtacgttatttatgttgtctaataattatcttactaatattcttagttgcttatacagttttgttatcattatttttcagttttatttacatttaatatctgattattacacttaaacatgtaggtgaaacctataaatgaaagtctaattaaagtggaacaataaaagtcataaatggcgaacttgaaagataaaacatgcaattgcaacataatctaaaaagagaaactgccatatactcatgctcttactagagacatgaataaatgcaacaaatgtggccaaaaatatcacaactagaagagacatgccatacaagcagttagacaaaaacattttatttaatagtaatatatatgagatatcatatgtgacacattaatgcaaagcttcaaatagtttactattatattgtctttctttttttaatttctataacaattgatttaaagttgtattacatttgataaatataaatagaattaatattataaacatcatacttgacatattaatatgtgacattaatacaaacctccaaataatttgttgttacactgtttttttttcaatagttgcacaacaattgatttatagttgtatcacatatgagatatataaatagaatagaaatgcatatgagacattatactgttgacacattaatccattgacaatccgaaaatgcatcctcaagagatttttaagtgatttgattaacaccacgaaaagaagtgccaataatctggttttaatcttgagtaaaatctattttattacaatcttccatacaatccaaaaaggtaatcaaagtgaacgcttcaatactaaaacgaatgcaacgaccagcaatatttgcccgaaattccttcgcattgaattgctccacctctcttaatagaagactatatgaaccactttaagggtaaaatttatatggaggaatatctaaaactttatcaaattgtgtagcatgaaacaaagccttgacattattgaaaagattatgattaaggctcttaatgatactgtaagtacaaaccaccttcgatttatagtgattggattcagagtacttgtaaattgtattcccactcttgaaataacaatataaaaaaaaagaatgtcaaagtaaaaactaattgttaaacacactgtaacacaactacaatacaactattaaaaaaatattaaaatccaacatcatcctaaacatacaaaatctaaacaatcataaaaaataaatgattaatataaaaaaaaaatagtaacagactcattacaaaataaaatttaaaattcatagagaaaattaaacaatgaactacaacttatgtggaaaaaatgaaaaaacaacctgaatctaataaaatttaaaatcagtaaacttagtactaataaaataacaaaacaaacaatatataaatcacagatgcaaccactcaaaaaatagacccaaaatacacaaattagggcaaaataataaaatagaaaaactataataaaacctttaggaggttcatcaacatccttctttcttaacatgttaatagtactctaatcaacttcatctctttgatttcttcttcataggatgcctttcattttttgttaaccataggtcgtttccctttgtctttttcctccaataactttcatacccattattcgaggtttagaacttttaagtttaattcttgattgataataaatacataagtttacttttttgcggtaataacacttaagttatatttttagaactttgtaggtatctggtcgttaaatgtaaagttattattcacatgttatctttttattagtatatttaaactattttttttaaaaaaaataaaaatttaatgacctagaccaatcaaggattgtcacgtgtaatttactcaacacctaacagtcaagtacttacataaattctagaattataatttaagtattattacctttaaaaattaaacttaagtatttatttgtaatggaaaattaaatttaaatagttatattataaattattttttaattaaatacattaaattatataataattatcttctatttttaaaatttaatggtcaacaaaatatcactatcatataactactaaagaaattttctaaatctatacatgttttggatgattggatttgtgaagacaaagtactgtattttttgctatataaaggtaaggtactgtgaaattgaagaaacttttcttttaattattgga

SEQ ID NO: 305830 - DNA, 2479 bp, Cannabis indica
aataataataataatgagagaaacaaataccttgaaatatggaacaataatgaagataatttcattgatgcttagttagattctaataatataaactgtgttcaaagataatatattgtatttgcaccaaagatgaaatgaaactgatcatactataataatgaacactccagaaaataaaataaatttatctcaaatttcaagtttaattattaccacattattttctaaataaaccaacaaaaaaaaagtaaaagaaaaatggctgaatattaataaaaaaaaaaaaaaagaaatggttcaaatatatgcaggaaattatgataaaaacctatagagtttattattttctttttttagtattttgcaaataattcttactctctgaacatttatatattattaagttttcatctgatcaaattcacatgaaattaatgagcaaaaatcatgaaaatttggctataaattatgaacaaagcaaagataaaaatgtgatgaagaagaagaagaaaaaagaaaaaagaaattaaataaattgagttatttatttgggtggatgacagctcatgtgggaactgtttgaaaacaaagaaaacgacaaatttgcataaaataaggtaaaattagatgataataattataattaaggacaacttgaacactaattaatttaaaaacaccatgtggcaaacaacaattggtaaacatgacgtaacatgcatgacgtcatctcctcgcatcacttatcattcgtaacaccaaagataccttccaacccaggcgcgtgtctttcaccttttccactctttctttgttatttatttattgttttgattgtcgcttctacattagtctagaattaatttcattcatttctttttgttataacttgttaattttttaagaaaatcaaaccattttaggatgtgacaaaatgagaataaaagaaaaacatataaatctctcaataatttacattagaatatgcttattgatgttacacaaaaaaaaaaattgcctattgataacatatatacaaatctagatagagcaattgatatagatacttcaatcttaaaaaaaattgtaaattgatagaggtaaaatcttaactttttttttctttaaatcttaataaataacacttatcttacatataaaaattatggaatttcatcccaatattaagctaaagtaagtttggcgtaatgaaattacatatatgttagaggtcaaagtttcaaatcctactaaaacactgtattttttctttttaagtttatttttgctctactggtttacaaaaaaaaaaaaaaaaattacgcccttctcactttaaattctaagtccgtcactgggtagagtagactcatacatgacttaatattttcacatttaatttatgtgagaaattattctctaatattgtgcaagtctggaaaacttgacgagaggggtcactaggaagcattggcgacactaatcctagtggggggccatgggtaaccttgccttgtttgaacgatcaaggtacccaaggccaaccttgagattaattgggtcttaggtaagaacagtattattgggtccttttaaaaaatgcagtatttttaaaaattactacaaacattatatgtatgtttaaaatgatattttgtttggtttctaaaattggttaggccctcgacctgcgcttagcccgccttaacccatgtgcgaccctaaaaatactgaataatcaagacaaccatattcacttcttaaaaaggcatgatcttagcaaaggtgcagttagataaggtagtcttttaagggacattgctaagtcgaccatgttcttggtaaggcacttatttttagtgagagtcgatccacaaattagtgaggtactcgtttggacagtaattataaggcacactatttccacgcctaaccactttttcacatcactatatctacttcagcatatataaaagtttttttagtctattttttatggttgtgtatgtgttgtagttatataagactacttgtaaatttttgaaaaattacgaatagtttatgaaagaataacttagcctagttactagattcagattactgagtttaccaaagaatctattatcaaaggaggtagcaatttttaagcttcatctacactgtaaacgcattctatcctactagtgcttgagttttccaaattatggtaataacttttactatatttaaaaatgtatcttacaaatactagtctcgcaatatggtaaataacacaatcttttacaaaatatagtgaatttatatccaaaccaccaagttccttggtctaagacacagatcccttgtgcgaatgttgagctctttttcaacaattttattcaatctgaaatcccttcaaaaatctggtgatgaagacataactgaaatcccttcagtctcaactcagcactgtcaagctctgatctacaactatgga

SEQ ID NO: 305831 - DNA, 1297 bp, Cannabis indica
aaaaataaaaagtcattagttattatttggggaacctcagagaatctttcatacggtcttcctctgctggaaaatataaatagaaaatgatgatatttctctctttcttttacactataattcatctgtttattctatattcttttacagatattttcgctccttgtgcatatacactttttctacttatacctgtatgtacagtagactctattctagcttcagtcctcaacttcatgcctttctattattattattttttaatatttaatgcataaacaatgcttctacaaaataaaaataactattattaattagaagatcatcatctaaggatttccaatctgtgtttttggatggatcagttcaacaacatatatctataaagttcgctacaaccatcacaactataaaataaaccaataattttattttcttcttcgtctttactaccttctttagatcatttaataaccctattaaataatatttacacagctttaaattatatatatatacacatcatcatcatcgttcaacgtgtgattctatattcttttccttcatttactataccctttggtccccattttgcccccacaaaaccaaaccctaacggctaactctaacatccccattctcacgtctttcatgtccacaagtaatctagcatacaacctcttcctaatatatatagcatgtaggcttatttataagtattaacaatttttgctacaaaagaattcattctaattgtattaacactattattttgatataccctttacaaaaaaaaaaaaaaaacattattataattttggtgtactttcaaaaggaaaaaaaaaagggaaaaaagaaatcattattatgatgtaaaagtaatatgtatagtggaaatttggaattttaaatcccaatatatgttgtttttttttcactataaccacttcattaaattaatatgtatgttaatatactatataatcacatagataagaatattaatttttttccttgtggaaatatatgaattagtttaatcaacaaaacttttctcagaaaagaaaactagctaggttatacataatttatttatactataatcgctatacttataattaaaattagtaaaaaggtagtcacggtggtttgctttgttaaatatatatatagacaaaaaatcattcggcaaatgaaagatgatatgattgattattctgctttgaagcatttacaaaagccatatagctagactagagagagagagagatatagcaatcaaaatgatcattttgat

SEQ ID NO: 305832 - DNA, 793 bp, Cannabis indica
tagcactgcaatctaaatcgcaacaaaaaatcgtatgaaaatcttttttgcaactagcgctgcaaccattttgaaaacccaaacgtaaatttaaaagaaaaaaaagttaaaaaaatagtatatagagtaattactttcttttttaatgtttttattaaaatttatatattgatcaaccaaccaaacaacttaaatcgcaattaaaatcgtaaaattaaaaaaaaaaagttaaacaatatgcagtaattcccttaaatatctacttaattaattaatattgactataaagaaattagaattaaactaatattctaataattaatatttatgtaatatctaaatatatattggttgaatcttttatgggttgaagaaaaatcgtgttgttgtgatgcaacatgagatcataacaactattataataatggggcaaatggcaaccacttacttatttttttttattattattgttattatttttttaataacttaggttttattctattaattggtttatatatattgggataaaaaaattatttagttgacattatattatattcccatcaccctcatttcattaacatattaatacttaagattgatgttgtaaagttttaaatgttataaatttatatatcaaagtcaaaaacatatagaataatagtaaaaacaaaattaatgtcaaccatcttatgcaatgccttactgcaaacagtgacgaagtcagaaatttagttgagtgagggcttgaataaatattaagtcaaaactaataaaaataatgataaat

SEQ ID NO: 305833 - DNA, 2737 bp, Cannabis indica
gatccatcaagttgtttaatcaaaagcataaaaataaaacaatacctaaaagcaatctccatttatccaaaaaaaaataaaaaatcaatctttcactcctattacgtactaataactttttagtcataactaatatatacttggcatcaattttttcagtgataacataagcttaatcatattttttttagtcagttttagttttttaactaaaatgttgttacgatcgacaaaagtagattttgtataaaggtttgttatcagaccaatcaagtaaaaagaaaattatattaatcatcttctaagcataactgaaaaatatttatttaataccaaatctttcaaaaacagcaaaaatcaaaacggcttttacacatagaaatttttttaattaattatatttataatgaatcttcaatatacatatatatataaaaatatatatatatatgaacatgtgttcacaaacgtagtgttttttttttttttttttttatatggaacgcaaacatatatatagtggtacatacacgtaatttgatgaccatattgtttcctacgatctttcacttaaatattagcaaagtaagaagtagcatatatagagctcataagacttaccaatgacaagagctttaagagcttcattggtattttggcgaaacttacgatgcatccaacaaagtaactgcaacaaaaagaccactagtacatgagatgaaataaacatcatatgtaacacagctttttaatgttatcatatcatcgatccaaagaaaaatttactataactacgtacgtaccttcatcttttgattattgttaatttctcagaaagttttgctgataacttagcttggtttggtgatgactgttgagaaggaaggaaggagttaaggtatataggttattagcttctcttgtcttagttttatgagtctgcaaatatatggatatagtgtagtcaaacgcttcctaaaagtgacaataagaggtatagctgggccaaaccatgaagatagttacaacaggatcaagtcaagtggccaaaatggcatgtaggtcccttggacccctccataatttttcttttctttttattcttatgaattctcctatcagtgtcacagtagtgttgtgtatatatagacatatatttatacataggggcttctattatcatataggaaattaattatgagcacatgtatattcttgtttttttatacacgaggacatgtattttataattcgtttaccgtttgtataaaattattattattacaacttaactatgtatgaaaattgaaaaatagctagaacggctttttcaaaattaatttcttctgtacaaaaacacgctatgtatgtatgtacttttagtctgaatgcagggtttgatttggtgattttcatatgtgcaattgaaaattaacacgcttgtattagaaagtcccacaatgacaacgtgtgagagcttaataatatagatatatgtatgagctacgttcactttgtcaattatttttgatatggaactatcatatatcttaccatacaccaaattctattctatttttttcaaccacacattgcacctctttgaggatcagtgtgaattaactcatcatgaactgttcaattgttcttcttcttccattttgataaaatatatacatgttcatgcacatgtactttctgcagaagatcatgagatgtgttccataaatgctagtaaattttcttagttggtagcagggtaaccccacaaaaaatagtgagagctagctagagagaatattttgtcataacccaatggggtcaaacataacaggacaaacatgcagatttctctaattagaaactcatggacttaattaaaaagtcctgaattttggttggtccatgatcttcgatgaattattttctttttagtccaaggagacaccttatctaattctttatcaagctatttattaattaattatatatataatgtagtttttttaatttatttaattatacctttagcaataaatatcttattagtacatatttggccttgttatcatcaattaacaattaattataaggctatcattttcttacaccagctgtaataatgataacaccagataagataccgtgtgtatatatatatatatatatatatatatatataaaactttacaggttaaaactcacctttttaactttttggtgaagatcattgctgtcatgcattttgctttgatttttatacatacgcatgatcatctaaaatagttagaacttatattatggatatactactccagtcaaacacatatatagtatcattaccacattgcatatactaccctatctataatattatatattgtattgcatgttcttccggcatgagaagaatgtgtatatatatagtagtgtgggttgggctgaacatgatcaacagctggtatcttatattctaaggtgtttctgttgtgtgatgctgaagttgccacatggtttgtatactaattctttccttttctgagtccttctatttaattttactatttctatcaagtacatatatatatatatatatatatataaataatctgaaaaggggggggatcaggataagagtcattatcattaggatgtagttttactcacagaacagtctctattttgatgagaggttgttggctcagaggaacttgatgtgccccaaaagcatcttcac

SEQ ID NO: 305834 - DNA, 1181 bp, Cannabis indica
tttttttttttttttttctggtacattcttgattctgcttctttgtctcatctcattgatttaaataagagcaaaacgtgcgtgtaaacataatcatcttctttatttcttcgttctcaataagtatctttaactaatttcattacaataattgcaatttccttaggcagccaaaataagattatgtttctgatatgataaaaaagcataatataaatatatacctggattcggaaaggtgaccaattagtggggtccttaggcatctcatcccagaccattagatctttttcttccatcccatcagctgatcttagccactcatcaaacgaggcaccaacttgggccttcacgacccgaacacctgcatcattgttcttaacctcccagttaccatctccgtttcgggctatccgacccgttacttgtgggtacgacgaaagagcgtccgaaagggataccctggctgggtccaaatcaaagtccttgagaacattatccctgtagtaaaatacgatgtgaaggctatgaagacccatggcgtgatcaagagacgtaaacttatgggttttattacccgacccgactggcctgctggataccgctgttagcgtagagtggacactgacccggctcttgctaaccgccatattatacaacagtcaaaatgaatatatatatatatatatataaattaaaggacagtactataagaagatatgattatgcagagagaaaagttttatgtttacatttatatagggaagaaattgaaggaaggtgagggtagttaaatgatattaaattaaaggggttccaagaattaaataggggaaactggtactggtgagtgcattaataatgagtttgaacatgatgataatctcttccgtctcattaatttctttcaggagcattgctattggacggtgtttagcaaatatatcgttttgtaattggttaacaatactctttataaactaaattctttataaattaggtaatataaccgctcttcgcgcaactaatttaatttaatagtattataataaagaataattatttattaatataataaataataatattctttaaatcatgaacttatcattaaaataataatcaaagagtacaaatatattattattaataattttatttattaaaaataaaatccataa

SEQ ID NO: 305835 - DNA, 2464 bp, Cannabis indica
ttgcactttaaccatccttcctctggcttctttttcctgctggtgtagagatggatcaagtggttgtaactgcaacttactttgaatggtttctagatccttcctggcaactaaaacctggctttgtagctctgaaaaaaccatccttgtttaacacttttaacttgcctttgaacatcttcattttggaaaccacttgatacatcttgctaccattaattttagtgttctaaacttccttaaggcttttctcatactttggattagtcttccacattttaaagtatttgaatggctttttcccactcacaatagctgggtgcaaagttagaatggcaagagagtgatcaaagaggccctcatttaggaaaatggcttcaacaaactcatatttgttaatccaagcttgattagccataatcctatcgattttggaatagattctgtccatgcccggtgtttattcgtccaagtgaaaaagttttccacttgctttgacatcttcaagattgcaacaattcacacaatttaggaagtcagagtcaggataggatttgaccctatgcccaaccctctcctctttggccaaaatgtcattgaagtcttccatcaagcaccaattttcaactgtgtacaaatcacaaatatccttccataattgccttctttctcctctactgttagaagcatacaccacggtaagaaagctagtaaaacctttaactgtagagatttttaagtgcattagttgactagtgcatttgagaataattcaagtacaaggctccaagctttggagcctttactctagtctcaaggaggccaacaaagtcaatcttttgtgtattaataaattgctttattaattgttgtttggattggctattggctcctcggacattccaacacaatagtttatccattggaaagagagggaacccccctcctgtattgatcacagaatccatctttatttggtcttcacagtctgcaatttcagtagaaaaaccctctgtattctccatgcttaaggcttgaaacgtgttctgtatttgtgttgcagtagtgatgtattggcctctttctttcctactttcttgccattagacaccttggtaaagccctcctcatctgtcactatagtcttcctactatcttttttaataacccactgctgcttaccacttgtgtgtttcttgcagttagttacagcatgaccaatacctgaacagtgtgaacaagtaattggtttccactcatatctaattccaactgatgtgttcgaaccatattcattctcgaattcaagcatatcaggcagttcctgatccataataacctcaactagcactctagcataactcagcctctccctctccttagtaatcgaatccaccattagaggcttcccaagctgacctacgatcttaaacaacgatctttggccccagtatttcagttccaattcctcaagctgaacccatattggcacacttttcacatcctctcttttgaaattgacattgggatcccatggtttcataatgacaggcctacgattgaagaaaatgtatcccccattcaggatttgatccctatattccagtaaattgaaccttatgagaaaaatgccataagataacattttcacacagtccactttgtccttccatatacgattgacaaacccctcaagtatgtgcaatggaggattcactccaagacataaaagacatagcacacaatcgagagcttccagaacatgatctcctcctcaatatcatccaaagtgattttcaccttcctgttagtttgttctgaatttctaaaggaattatctagatttcgaataacaaagttggatcgcaagatagggggaatcgagttcataccttgttgaaggttactgttacattgatcattcgctttaaggaattgcacaaaatcagtccgaacatcatcttgtctctatattgcctcaagagaggatttaggggaaagaggagattgaaagacatctttgagcacaagatcgtcctcctccgaaacaatcagcggctcaatctcagtaacttgttccagcatctcaaattggtccgtattagcgactttcttcccagctttcttcttcagaatcttagtagcagacttagatcttccatggttcttcgaccttgttttagccatggcaccgactattgcagccgcaagaccttgttttatctattattattattattattattattattattattattattttgaaatagtaaataaatagttattatgatgacagttatttgacattttattaaaaattaatctccacatcttgaaattctttattcattttttagaaattaatatttaatttattttatcaattttctatagaaattataatgtatgcattattttattataaatacacttttttattttatatagtgaattactgtat

SEQ ID NO: 305836 - DNA, 834 bp, Cannabis indica
acagggggtaaaaaagataattattcaattctttttcttttccttaaatctatttttcctattaattctgaaactccctttaggatatttttgcgttatatattttccactactttattatagtttctaatcttttacttttctttagtgtgaatacatagaaatttaaatattctttcaatcacgcacatttaggcaagctccaatgaaacgagttcaactctttgacttgcatgcacatgcaaataaaaaatctacacgtgattatgaatgtctgtcttctatgtctctctgttcaactaagacatcactaacttgttgggagaaaaatgtcactatacataaaatatcttataaagattaagaaaaaaaaaaaattacaacgactagatgtaatcacagaattatatgactatattaaaaaatttaagaaatctgactaaaatttttagtagaaacaatagaaatgcattatgtggattggtagtattagtcaaacatactaatactaattaaaaacttgtccttgaatatttgtttactagatgacatgcaactaatatttaaaaataaaaagcacaaagaataacactaaagtttttgcgattatttttaggctttataattgtcacgccattcaatttcgtatactaatgtcagatttgaatcattaaacttggggtgatatctttttattaatttttttaaaggtaaacaaaaatgtccaataaatccaacaaagtcaattacacatatatagggccgtttcaaatattttagagcacttgttctaatttttaaaagggaataattacatgagacaccattttttgt

SEQ ID NO: 305837 - DNA, 2008 bp, Cannabis indica
ttttaatggagggaactccatgctttgtattatgagtcagtggaggcaacccaagatagacctctctctaaaggtttatctgagggggttaccccataaacatgagaagaaactttgtaccaaaaagttttatgttaggtgacacctcacctatggcttctttccaacaaggaagcaaggataagatcgtatccccaaatgttgagaaatcaaagatgggcggaattagaaagttaccttacgcacctcctatgaaaacaacaaacagagtcaaagttgctcccgctaacctctgagggacaattaaaggaaagatgaaggagttggaagtggagatgctatacctacgtcgaagaataatagtcaccacaaaaggagactcgaatgatgatgaggaagtagatgaagaatgtcctttgtaaagggagattgaagtagaaccacttccacctaacttcaaagagccacaaatgacaccatatgatggtactactgacccaaagtatggtctcgatgcttttaaagaactgatgataatgaaaaaattctctaacaaggctagatgccaatactttatggtcatgttaaaaggggttttgtacaagtggttaaatggcaagaactcagaaagatcacattttacgatcaattctcaaaaaattcttccaacaaatcaggttgtatgcaattacatcatgccaaacacaagcatcaccaatgtgaaacaaggtgaacatgaatgtctgagaagatacatttgatgcttcaaagctgaaatcacaaaaattgagaaggcatcaaacggtgaaattaagatggacatagccacaggaatacgccccaggagaaaactttgatacatgatgaaggatgagtttaacaatctggatgacttctacaaaagtgcagagaagtatatctgtgtggaagaaggtaatacagacatatgagatgacatgggtaaggattcatatgataactcattcgacctctacaaggactattaggagatatccttgtaactcttcgattgatatgcttaaaaacacacctccatcctacagctcaaggacaccaagcatccaagaaattttaagaagtgaaactaccacattttccatgactgatcaaaatatattatatagtttagcctcttgaagtaatagcaagcctatcttatgtctttcaatatgtcttgttaaatcaaagaggaaacttaagttgactttaagtagtagtgagtgtacctaagtacttacctgtgcgtctatcattatcaatgaaatgttagatttttatcttacatatggtgttcatcactgtttacccatgcactctacatgtttactataattgccttttgaaattgacaaggtaacaaaaatagtagaatgattaaaagttttggtgacaccaacacaaacaattactaccgaccaaacaaaactctttaagaatgtaaagcttgtagtcaaagagagtaacaacgtggaggtacataagccacctccgaaaagtaagcctacaacgacttgagttggctagacagaaaggttatttaagagatgctaagaaaaatagtactatgccaaaaaagagaaggttgcttcacgatcaaaaattataatctagtaagaggatgactagcccacaaggccgatacacccttagccatacaaacaaataagagggtgactagtccatagggcatatgcaaacttagccttcaagtacaaaaaaaatattcaaaagcatttgtatgaatgtaatgaataataagaacgttgagcgaaggtcaagggacaaaaagttctttcgcacctgttacggaactaaaaagaggctgagaaggttcgaggaacccaagtcttacttaaattctaaaattgaaaagagggtgagaaggttcaaggaacgaactgaaaaatcgagttcttgtaaatgtcaattatatatatgaaaatataaaactgtatgcgtctgccgaagtagaaagtaattctattac

SEQ ID NO: 305838 - DNA, 1508 bp, Cannabis indica
agaagagaagttgtgctccgaattggtttcttttgaatgtttgtttcaattattagtacaattaattaagatttatatgatttcaattgtattaatttgtatttattttataaatttattattaatacaattaattaagatttatatggtttcaatgctatacataaattttatgtatagtgctacaaatatttaaaaatattcaaatatttagatatgttgaatattttatttatgtcattaagtttcataaaatttcgtaaaatattcataaaatattccgaaaatgaataaaatataaataaaacataaataattttgtggtttgatataaaaaaaaaatatgaaactgtaacaaatactcatatctagaattgtttttaatgatctttcgacgatcacactcggagcagtattgtctattatattaataacgaaattacttttagatagatcccaatacctaatatttaaataaaaatataattttaaacaattagagagtagctccaacatttttaattatataaatttgaatctcataattttcactctaataatgataaatttcataaaataattttagttaattattaactaatttaggaattcaacatataagtataacaaatttaatgcaactatgaattataaaatgagttgtacgaacttttttttttggaagaacgccatgttcattagaaagaaaaataaatggaaatcacaggttaaattcccctctccttgataggaaccaacaaactggcaagacaatctagtcttttttgctaaactcggcacagaattagacttacgattaataaagaaaaaaagaataataccgaaacttcttaattaaatctaaaaccatcaaggaaacgttcaaaagagaccgattcggagcacaacttctcttctgaatcagacaaaatagagtccatccacttgttctgcaaggccctctccaaagcgaacaaaccagcctttaattctgcttccaagattgaagcaggagaagaatttgttaaacaacaacccacgagtccttaggaggagtgatcataacagatgcagctcccataatcccctcgctccaagaggcatcaatgaacaatgctatttttgaacttaatctgctcaattcaaggccagaagtaggatccaaatttctgcctgcaccagaaaggaagagattgaccatctcctcaaaagaattatgcatctttctcaacataattcccacattaatctcatccccaaagatattcactctattcttcgcagaccaaactttagagaaaatacattccatggagataatgtcttttattatgcaattattaggagcataggaaagcaagttttctacaaattgaattaaagaggatgctggtatggattcgctcagaatcggtaattccccaaaaaaacacaaagccttgtccacactgcagtctttgaacatggtatggtggtgtgtatgtgatttttttcaattaaaaaaaaaa

SEQ ID NO: 305839 - DNA, 1578 bp, Cannabis indica
gtagaaaaaaaaaggaaaaaaaaatatcaattgctttgctagctagcttaattaaataaacctagttagtcattaaataaattaacatatagtgatgtgagaataagcttgatcgtgttaaatatgttatatatttatatgtacccatgcttgtgggtcgtagcataatttgtcttgtttctctatcgatattatagtttgttgaataagtttactataaagttttttggatattatatataaagtgatttgttaaataagttaaattttttgatagttcgaatagggaaatattatgcattgatttccttatgagttttggccttagttgaattaaagttgtgggcatttctaaccatgcatgtgagctccataggaagacgtgtggatttcgacttcgtggggtattgacttaggaactgtccaaattaatgtcctttagaattgtccattttattgacctttcattctttctttccctatattttttttttcttttcttcgaatcaatttaatttcttagtcacatatactcgagcatataaaatatttatattagttactacaagtatcgtttggtttgaggtaacgaaataaaatagaataaaaaaaattttattttatttctttgtttagtttaattttaaagtattagaacgttattctaattctaactatatttttatttctttctttcaactaaacatgacttaatagagtgtttgttacgtgaatttgagttgaagaaagtagagttggagggagcatacttggagagaatataagacccaaggattggagagtattaacatcactatcattttaatttaagagcattgttattaggcaccagtagtgtccagctccttccatggatgacactctatgattggttaacaatattctctaaaagttattttttaaagttatatgagatcggctacttaattgcaccaatagcagtatgatactaaagaaaatgctaggcactaataatgtcggctagcaattttctcaatttaaaaaataagagacacttaaaaatacaaatcccttaatcattacaatttaatttaagtttgacattatcattcccttcaagtttaaatctcaaaccaaatgaaacaataatcatcaaatggttacacagtattaaactatactctatacataagagtgtgtgcgtctctacaatctagattcaaactacaataatttttagcgctaatttggtataattttttgaaaagttgaaagcaactttctgaaagaattgtgttacaagggcctatttggtacgtaggactggatttgattaaacaaactcatttgtctagttcagtgtttgggcatgttgaaagtctagataactaatccaactaatctcatctgtttaggattatttatctcatccagtagggtgggataaataatcccatccaggtgagatttttttatcatttttttaattttgattttgttaatatattttaaatttaataaaaatttaaatgaaataatgattacacatttatttataatttttttatcaaaaacttattcattaaaattagtgaa

SEQ ID NO: 305840 - DNA, 966 bp, Cannabis indica
tctctctctctctctcactcagaataagcaggtaggcctaagtatttttcatgactcattgatagggatcccaaggatacgttgaaaagagcgattagcaacctctatagtgttaggagagaaagacaatattgatttgtctaggttgatttgttgaccagatgcacgatggtttatgtctaaggcgcacatttgatagccccatagcacctgtcatcagcttggcaaaagagaagactgtcatcgaaaacagtaaatgggtgatggaaggagcacagcgagagacagcaaatcccttcaaacgaccaatctgctcttcaaactgtaacaatctcaaaagaccctcagaaaaaattaaaaaataagtaaggggagagaggatccacttgcctcaagcctctttgaggtgtgattgaacctgtgacagcaccatttaacacaaaagagaaggtatttgtttgcagacacttcataatgagggaattccaacgaatattaaagcccattttacccatagcagccgccaaaaaagactactcaacccgattaacagctttgctcatatctaatttaagagcaacatacccttttgaaccctttgtacgatgcttaataccatggatcatttcaaaagcaaccaagacattatcagtaatcaagcaattaggaaggaaagcattttgagtttcagttgtaaccactggaagaacatcttttaaccaaagaactatcatcttggaaatgagtttatagatggcattacacaagctgataggtctaaaatccttcatagcgcgtggctttttcaccttagggatcaaagtcagcaaggttttattaaaagcagcagggttgctattgggaatattttaccaggatctaaatttactaacaagtatgttgaattaacatcctaaatatgaattctgtaaaacaatgaaaataaacacataagggattaagaaa

SEQ ID NO: 305841 - DNA, 1193 bp, Cannabis indica
acgcttaaaataaaaaaaaaaaacaccttaattatattaatttacctaaaatattctaacacaaaaaacatctatttaagattgttttcattaacttttcttttctgcatgcctaattcatgctagcatcattccattcctgctaaatttgagatataattgatctattccatgtgtatttgggtttccatgtattttaatttaaatagtaatactcaaaaggcggaaactcttgtagtgttgagcaccaccaatagcattgtctgtaattttgcaaacattttttattttgtgtgtttatctatttcatccgactatgactgggctactcaggcccattggtaaagcccaaacccaaaaatgcattaaaatatggaaaacttacaaaaatactgcgatacaatttttttttcttcaaaaatactgtatttttataaaacaacagtggaatacaaaacagattaactaaaaataacagtagaacaactaaaaaataattgtagaacaatagtaaaaatttaacacactatacagtatttttgaaaaaaaaaacagtgtttttgaaaaaaattctgctccagtaaaaaaattaaaaatttcagtatgtggtgtaaataatctttaaaatatgttatacctatttcaaggctgtcaagaatatttttattagattaatttgaataaaaatcaggaaatgaacaacactttaaaccacttagctaaattacatcaattaagactctaatgacatgaattgcccaatgtatttagttcctcttagtatgactttatttaactaataataattttgataaatgtatcaatgtcatttgataaagaaaattcattaaacttcactcttccaatcatggctattttagaaaaagaaaaattgaaaaagagaggttagttagtgtagcaacttttcttacaccccgacaaaaaggccaacaaagaatagaaatcaatgcaatgataggccatcttgttgaactaggattggccctaaacaacccaaaagaatcaaagaaaaaaaattataataataaaaaagtttgggtagtagaatagagtgatctttaatacaagcatttctatatgggctatttttaaaaatatggaaaaaattattaaggttatgataaatatgacataaaaagtaaatgacactaaatatggcattatttaaccaa

SEQ ID NO: 305842 - DNA, 2539 bp, Cannabis indica
aatttagaaggaattgcttggcaacttcatattgtcggctctaatatatcacttgtagcgtgagagaaatgaagttttgtgggctaaaaaataatcagattagacattcttattagaaagataaccaaaagtgtaaagaaatagagttttattggtttggcctaaacatattggtaaagaggatgttaaaatagtttgagaatctttattaatagtgattggtaaagattgtataaattttttcaagcctttattaataacggctagaaaaagaatgaagcaatagagtaatatatatatatatatatgtattttagtgtattgaatattcttgttctatttttcttgcaggtacacggtacaaatgggtgtatatataatgcactattcacatgtgctaattagttttattggcagaaattaataaaggattcaaaaagtaggtaaaaggattcctatgctacgtacccacttgagcattaaaaacatgtgtttaaaatgctattttcaacacgctccctcaagattgacttggttgtgacaccacgacaagcttgtcttttaggtaggtgaactggtttatagaagtagcttttgtgaatacattagcagtctgttctgatgtaggaatgtgcctaattttgatgagtcctctcttgattaagtctctgatgtaatggacatcaacctcaatatgttttgtgcggttgtggaagacagggttagaagcaagttgttttgcacctgcattgtcgcaccaaatgacgacaggggtattatgtttgatgccaagttcagtgaacaaggaaaagatccatgctaccttggttgctgtctgagagagggcatgatattcagcctctgttgaagattttgccactgccttctgcttctttgagcaccaggtaatgaggttgcctcccaaatataaacaatatcctgttgtcaattttcgatcatcaatggatcttgcccagtccgcatcgctgaagcattcaacactttggctcttcgatggattgaataggagtccttgtcccactgtgcccttaagatagcatagaagccgcttacaggcattccaatgcatttgagtgggattgtgcatgaattggctgagtttgttcactgtaaaggcaatatcaagcctgcttaaggtgagatattgcagtcctcccatgacacttcggaagaatgtgggttgatcaaagagtttgctgtcgttggagctgagtttatcgccttggcttatgggtgtggggctagacttccagtgtggcatgttagttttcttgagtagatcaagtgtgtaagtaccttgagagagatgaatggcggaggtgtctcgagtgatttcaaagccgagaaagtagttcatggaccccaacttttttagggagaaaaattgttggagcttgtttatgatgcttcagatggtagtgtcattactgtttgtgaggagaatgtcatcgacataaacaaggatatacattttggtcccttcttgtttataaaagaatatggaggaatcagacacagagttggtgaagccaagggaggttagaacctgcttgaggcggtcgaaccaggcacagggtgcttggcgaagaccgtacaaggccttgtgtaatttgtagacttgatgagggtgagttttgttgatgtagccggcaggtttggtcatatagacggtttcagtaaggatgtcattgagaaaggcattgtctatatcgacctgttgtatatcccaattattgtaggcagcaagggcaagaataacgcggatagtagagcttttaacaatggggctgaatgtctcgaagaagtcaacgcccagttattgttggtaacctttagcaatgagtctcgctttgtagtgattaatactaccgtcatagttacgtttgattcgaaggagccatctgttgtcaacaactcgcatgtctgccatacgtggaacaagggaccaagtcttatttttaacaagggcgaagaattctgtgtccatggcacgtttccaatgaggaatttttagggcggcaatggcacattcagggatagagtcagtagcaagggccatgggggatggagagaaggcatggaaaacacgaggtttgcgaatgccggctttagcccgagtgatcatggggtgagatgggcagggtgagggttgagtggagggtcgtggttgtgacggtgaagtggagggtggtggggacaggggtagttgaacgtgtagggaaatggtggattaggatgatatggaatcggataagggtggtgcgggtgtatgagaaggaatgttggaggttgcttttggtgtagatttaggagatggagaagtagggtcttcttgactggagggtgagcaacggacagtggcatcttgcacatcaccagtagtagagttggatgttacactaggaatatagggaagccactgggggtattgagtggatgtgatgtaacgtccctgcttcaagcctccattgggcccttacacccacggaccgaatggctcttatacacgagtacgtca

SEQ ID NO: 305843 - DNA, 1597 bp, Cannabis indica
caatacgacctaatacggcgttccaaacgaacccaaaaggtgtattaatgtaatggttaggctgtagagtattatataatgctcttttcaagcaggtgtcaacccaggaaaccttcttaattagttgtaactatgccaatcatataatacatttatgtatatattttatatgttagaactaataattaattaattataaattaagtgtgtgttttattttgtgtctttaattacttagcctcgcagcaatgtttgtgtgtttcgtagctgattctttagtagtccactccagtccagatgggtctaattactttgttttcactttgaaacataacaaactcatattgtatatattcatgtaatttacatgtaagactggacaatgataatatacttaaatattattttggattctatattttacaattatctgtttcgttaattgataatttagatcttgtgttcttaaaacctaataacttaacgagaaggtattatgacataaatagttatttgttcatcctaaaaactagtgttagctaggttgttttgtttttaacaaaatttaacagaattggagttaaagagtctattttgtgtcactttaaaaaatatagagttgaattcttatttaacaaaagaaataatctaatcaattactgttaattcagaatttcattaatattaattgagacttgataattaatatttctgaatatgtatctctatttaaacacaatgaatttaataattggattataaagaaaagatagggacttttaatgtggctttgtagttaactttacatactttacgagacaatctttttttgagattttatgaacagggatacaattcggcaaaatttctgtaagtttgaaaattgcccttttcttttcataatgtgagtactgctatttatagaattaggataccagttaccacaatcttatctaaattacaattatgaaatgtagatattcatcacgtttcctttatctacaaataagtgggaacattttatgtatttttatttgaaatgaataactgccattctatgacacagatcttcatcatgctatagttcaagatgacattttgtttctcgaggaatatgctaatggatggacacgtactgagcagtgagcacaaacttcttcggggatcattgagatttgaaagatagactctttctagtgatggccgagagtgaggcttggatgagtgacccctctcctcataagtaagccttttcaaattgtacctcttatatgagctgagtttagagtacttaatcttgcaccaagcttgacctttcttatgaaatgtgcgatgctcattattaatttcacatataactcattgataattttgtcgtacttaacggttaccgagaaagtctttgtatgtctttttattcgcgagaagatcatttaatacttttcatttgtacatgtattcttacataagtatattaacaatacatatataatatataatcctattatatataataattttattatctaatcctacaaatatttaatataaattctattctctaatacgatttgttggataaattcccatactactg

SEQ ID NO: 305844 - DNA, 1831 bp, Cannabis indica
aaatcagattaaattgaaatgggtgcataaaatcccaacaccttactggcctaggaggatctttttcattatgggcgttaccttgattaccatcattggtcgggttatcccgacgataatcacgccatcaattatcattacggggcccactggcggccctgccatcattcctgctagggtatgactgcccactctaggaccttgaatgaccttgtcgaggttgttggttggcatactattctgaccatgaacttggacccctttcatcctgattatatagccccacctccccgagaacctccagttggccgatgaggtacttcttctctccttccctcaggtttggatcaaaatttagtctagtcgttccttctgaggtagtgactaggcaaaacttgatcatctacagggcgaccaatggtttaatcctggggtctagaactagaaggttcatagtttatttggcattcctccagcccatattttaatcctttgctcaggacgtagggaccttctcctctactatagcgtctcgtctgggtgactggacctcctgtctttgcccgcagtttgttgggtaaatttcctgatcaagttggttacttccctagagcggcaatttatttattgttgggcacgcgttgactgagcttggcagtccatcactcttggaactcaagctgttgctgtttgaatgcatggttcacaacggtatgtgtttcctcttggttatggtggagtgtgctggtatgcgtctggacttgtcttagtgcatctctcaattccaactaaaaattatccccaaatctatttggggttctcctacaaacggctaacaaatgctgggtccagtctttgcagcatattgagtactggtcctcccagtttcttgaacaccaagtgtgaatccaatgatgtggatagtgaccccaatggttctggtgttagtacttgtagggactgtgggttggtggccttgaggaggtagtcgagtattggggttgtctacccctgaaacaacaaatgcctgaacgttaggatttgtagccataggatcacgcagttcagtcaatgtggatcttcttgtcaaaaccatggttgtcgaatcaagtgtcgattggaaatcaaatgtttatgagagaaagatgatatttcaggctctcaatgaaagcaccaaaatgttgacctcatttctagtcgaggatgcggagtcaataaaatgataatgtaagcatttgaacaataacaaagattgtgaaaaatgtaaacgacacacgaaatttataaaggtccggtccctttcagcggtaatagcctactccccttattgttgtattgctttagaaagaataccaaaatcacaaggtcaggccacatgaatttcttaatttctcttaaaaagtttacaaatatttcaaagtattctctctgttctcaatgcataataagataaattaggaaatgtttgagtgtaaatcccacagttttctctatctattaaatcaaattccataaaaacaggaatactaattggtccattattgtggaatcacttaaagaatgtctggacatatcttcggcgaatacctatggttggccattcgacatcatcatatgagttagttggaacaaactggtgtcatattctacccagtgtcaatctccttgccacatgtcaacttattgccaagtgccacgtcatctttgcaaatttcaagataacaagtaacatcttttctaatttaagagtaaaaggagattagagttacacatttttattagagtttttttgcggctaaaccttctcaactattactgtaacaccctaact

SEQ ID NO: 305845 - DNA, 1854 bp, Cannabis indica
ttataataaaattaattaatatagtacaatattataatttttccattttttattatcttcttcttcaatgaaaaccttcaaataaattttgtatattacttttttatatataaatatttatcttttcaatatgtcattacatatataaaagaattctatttaatatcagcattttttctctcataagttagtgttaattactattttaatcttttgccacatcaccaatcaaatgactaatataacaaaaagtaatataaggaggacatttttatagttgtaatatattgagagatattttttgtaaactagttaaagggacaaaaatattaattattcaataataaataataaatggactgaaaaattaaaacatgaataaaaaaggggtggtaattaataaaacaaaaatggaggggtgagttttgagaattgagaattggaggcttttcgatccagccagtaaacgttgttgctatgagggtgagttgtgtaccgttggatctccggataaggtgggctacacacgtcaacgtgtggtgcggagtggcgtcaaaacgacgacgtcatgcatggcatcatcagtggctacggtgcggcaccttacgtcggctatcgtgggacccactttttgattgccacgtggaatataaggataatggaggtatttttattatttttttttttctgggaaggctatgtggtttgttgcacgactgccatacaaattggattatctttcataacaataaattaataaataatagttaggcaagaacaaaataacaaaacttaaataagatttttttttgttagagcaattttatcaacatcaattaattaagattaatagttttcaatttaatagatatttttgacaatgattaaaattagaattagaaaaacgagccaattgaataattagttgtctaattttcaaatcgtttaacaaaaataaattaaaaccaaaatcagattaaaaaattgcaacattacagttaattttaataacttttatgttcagttttatttaccgctcaaaagacacaacagtagaaattgttgcagcaggtttattcaacttataacttgagcactcaattattgtgcaaggtacataactgcactactaacagtccccagcgatttgaaggcgacccatcaaataaccaacaacgaaataaaaaaaaatgaaaaaaaaaaaaaagacaaaacaaaactatgtcacagacatgactaaaatacttaaaactatgtcatagagataacactaatcacagtaacaaaaattaaatcacaatagcaaaagacaattctgaccaagccacatctatgcctaagaaaggcgaagggtctattcggagaaaaatataacctcttgacatataattttaagaaatcctaattttttaaattagttcacaactctatataatattgatgctttaaaatttatatgtatttattttatagtttctttattatttttaatttttgtaatgaatggagtgaggaatttgaatagaggattaaaaaaagttaaaataataaacaaagacgactaaatttgttttgagtcatggttcgttacacaccataccatagaaaattgtggtagctgagttgtagtatttcagtaattcatacgtaattcaatagattattaatttgataataaataataaaattagcctaacttggccttttatgtataaattgtaatactagtcaattgtagtagatactagatttcatttagaagatcaaagctgtcccctctgtggaaggggtggtgaatccatcgaacacctgtttctttcctgtgaggtggctctccatttctggcgttcgtct

SEQ ID NO: 305846 - DNA, 1319 bp, Cannabis indica
aagtttttttttaaaaaaaatgccatatttagtgtaattaagtttttatgtcatatatatcaaaacttatctttattttcccatatttttgtaaatagccccttttttttcctttccataaggcccaattataagtatgaacgggccaggcttatatctagtgctcccaccatttcccatatctttatagaaagactatggcattggcatatatgaaaccactccatccatatatttggtacaggtaattctttttcaaattgatgataaaattaacatggtctcagtatatgagtatccaacaacattctatatatgctatttgtgcaaatgaatattaaactccacttgtttaaatttaaattaaaacatatgaaaccccctaaccaaattattaccatagggtgttagaacatgctaaagtgccttatagcaacaatgctctaaacaaaacctcatgtgctgctcaactccatttctcagagtttgatttttctttccctttcaactttggccaaatgagctaaaacacaatgataggtcaatttttatttaatttgtatattagttttattatacaagtttattattttacataggcactttctgatgtttacttaattatgtctacaactaatttgtaccaactagaaaggaaaaagaaaaaagtggtacaggtcattaattctaaatatggtgtcaaaattcatagtggaattagtaaatagtggtatttatgaagtttaaatgagactattttatagactgccagcagtggactctagttgggttgaaaacgaactgaaaagatgggcccgtatggaaattacacaaaatattggaatttcttttaggataattagataaagtacagtactattttcttttatattttttacatttaattatttttgaagtgttttataaagacaatacgaaaatagtataaaaaataataaaaaaataacatcgaaataatattaaaaaaaatataaataactaaaaatcaacaacaaattaacaaaagtataacaaaaaaatacattaaaataccgtattttctgtaaataaaatcttaaaagttgtaaaaaagcttaaaattctgtacgaccatatttttatattttgttatttttgtgtatttatgaaattatttctttctttttttggctatttacaaaaatatgagagaaaaagtttttattcggggtgtttatcaaaccgtctataccgcacaaaaatataagttcaaatcttttgtggtgtagctatgatttgcattttttttaagttgcctggtgtagtacggtttataattt

SEQ ID NO: 305847 - DNA, 5407 bp, Cannabis indica
tttcaaataggagggtattatgggaaaaatcaaatgtagtcatatatgggcaattttaataaatatagatttagggaaataattttagagtgttttatggatagtttttcaaatttcccataaaatatatggtagatagcaacataaaattatctctaataggagatgtaacgttgagctatatttgacataaaaattggttttctgatatttctatatcaaattttattattgtgttccattacataactgtaaagattaacgtaaaatttaatatgtcatttaatgtaaaatttattaaaaatataaagtaataataatgtaaaagtaaatatatgtggggtttatacacttctgcaagttaaacatttttgttagttaaaatttgtttgttaagttctgttaagttggttggttcgtattcacttatactgggtttatacataaagaccaatgttactattcaataggaagataaaatagtgagagtgagtgtcattgtaaaggcctgagttgttcaaactcttgtcccttgagagagccatttcagtaagagcaagattccattttgtgcatgtttttgtcatggtcatgtatcaactctcagcaccatctttaatcaataaaggtaaaaagctcaaggcagttctacctaaggagtttctaacttgtgatcgaaccttgtaatccaaagtgttcatactctgttttaacattttcttattgtgcttttctgattttagttttctttgttagagcaactccaaggtagcactaaaacttggatttatagtgtataaaattcatttaacgtagcaccaaagtttacagcatatatatcgtgttagtgaaagtgtttgtacaaagtagttagtctgttagcttttctgttattgtttgttactgtagtctaactaactctgtaactacttcttgctttctctcctctgtatataaactctgtaactgttgtattcaattcattgattcaataagacaaacactttcttctctgttctttctttctctccaattcaacatggtatcagagctcaactcgttttaatggcgtcgtccgttgattccactcgtcgttcaaatgtccaatcaattaccaagatcttcctcaatttcgttcaatcacagtctttcaatcaaacttgatgagaacaattttctcccatggaaacatcaagtttatgcagctattaaaggtcatcgcctactcaagtttctcgatccaacatcaacaccttcaaagttcacaacagcagcagacgaagcagcaaatcgaatctctgaagagtttctggaatgggatgttcaagacagtttactcgtctcctggttactttcatctatggcagacaaaatcctcacgcgcatggtaggttgtaataccgctgctcagatctggtctactctcgaggaatattattcagctcaaaacagagcaaaggtcggtcagtttcgcactcaacttcgtcgaacgaaactcactggcaatctcaatgattatcttctcaagatcaagcatatcgtcgactctcttgcctccattggtcacaatctttcaacgcaagatcatatcgaagccattttcaatggccttactcgtgaatactcagtgtttgtcacatctttgtctacaagaaaagatgaatactcagttgctgaagttgaatccctactcatggctcaagaagttcgaaacgaaactacagaggctgatcttgatatttcgaagccagaggctaatcttgctgctcaaccaaatccaagcagacctcctgctcctcgaggtggacatcagaacttttcaccacttcaatttggcacttttactggtggtcgtggttcttatcgtactccctctccattctttaatggcaatggtagtctctcccatcatccatcaggttatggtaatttctatccaccatattatccttcttactctaaccctcgtactcctagaggaggctttcgtggtggattcacaggtgctggcagaggttcttccactcccaaaattcagtgtcagttgtgccataaactaggccatactgtcaaacaatgtttctataggtttgacaaatcatttaccggacctgaatcgtttcaatctttcaatggtactgctgccacagctgaaatgcaagcttccattgctacaccagattcagtgaatgatcaatcgtggtatcccgattctggtgccacaaaccatctaactcctgatctgaacaatttgatggctcctgtggagtttccaggcacagatcaaatacacatggggaatggctcaggtttgcatattcaccacactggttttactacctttaattcccccttcacttctcaacctttagttttacagaatctccttcatgtacctgatataacaaaaaatctgatgagtgtctctcaatttgcaaaagataattccggggaatttgaagttcaaccctccttttgtgttgtgaaagatcaggctactatgaagattttattggttgggaaggttgacaaagggctgtacaagtttgacaagcctctccaatcatctctttcatccaacacaaccacatctgtcacttctggtgcctcatcatctaaagcagcctttcaatgtcagcaatctagttctaatgtacctttttctactttccatctttggcataatcgattaggtcatccttccaagcatattgttcaatcgattatgaccaaatgtaatatctcttccattaataaaaatgcatttgaattgtgtacagcctgctgccttggcaaacaccataaattaccttatccaaattcacaaactgtttacacagctcctttacaaatgctacacacagacctatggggccctgcccctatggtctcttctaatggatatagatattatataagcttcgttgatgcttatactaggtacacttggctatatcttcttagaactaaagatgaggctttacctacattcattaagtttaagactcaaatcgagttgcaacttaatttaccaataaaagctttacaatccgattggggaggggaatttagagcattcacttcacttgttgagtcttgtggtattgtccatagagtatcttgccctcattctcatgaacaaaatggtgttatagaacgcaaacataggcacattgttgaatcaggtctaactttgttagctcatgcgtctatgcctctcaagtattgggatgaggcttatagaacctctgtttatctaataaacagaatgccaaccaaagttctcaacaatctcacccctcataaaaccttgtttcataccaaacctgactattctgctctaaagaccttcggctgtcaatgtttccccaatctgagaccttataatcgacacaagatgtcctacaggtctacatcctgcacatttattggctatagtctcactcaaaaaggctataagtgtcttgccaatgatggtagaatatacatgtctcgtgatgtgttgtttaatgaaactgtatttccattccagcatataatcacttcacctgctgctatgtctactgctgctccaactccttcattacctactgccactcctcccaccctttctaccatccacattccaccatcatcatccatttcatcatctgctggttctacaccagcaacatccactccttcatgtcatccttttccatcttctaccactcaacaaaatcctctcacctcacctgctcctaccttaaacactgcccccacacctataatcaaccaacaccctatgcaaactcgagccaaagctggaattcgcaagcctaaagtgcttactgcttcactaataccagctactgtaaagacagctattcaagatcctaagtggaacaatgcaatggggactgaatattatgctttaaagaaaataacacttggatattggtcaggttaccacctggtaggcagtgtataggatgcaaatggatctttcgaatcaaagaaaatgaagatgggagtaccacacaatacaaagccagacttgtagctaaaggctttcatcaacaaagtggatttgacttcaatgaaacattcagtccagtagtcaaacccgaaacaattagagtcttactcacaattgctgtttctaaaggttggaaactaagacagttagacttcaataatgcttttcttaatggagatttggaagaagaagtctacatgtgtcaacctccaggttttgtagatcctcaaaatcctgacttggtttgtaaacttcaaaaggcattgtacggtcttaaacaagcccctcgggcttggtttgagaaactgtcagtaactcttcttaagtttggattttgccatgctaaatcagatacatcattgtttcttcgaattcttcctcaacacactacatatattcttgtatatgtagatgacattatagtaattgggagcaatgataatgaagtttccaacctgatttcccaactcagctctcactttcctcttaaagacctaggtgacttaaactacttcttgggaattcaaatcaagcacactgctactggtcttcatttgtctcagataaaatatgtccaagaactcttatgcaaaacacaaatgcaaggagcaaagtccagcagcacaccgatgacaagtggtctcaagttatctcaatatggcagtgactctgttttggatccaactctttatcgatctgttgttggagcattacaatatgctacaataacaagacctgaaattgcatattctgtcaataaagtgtctcagtttatgcaatccccactagagtcacattggattgctgtaaaacggattctaagatatcttgcaggcactcttgactatggaatacacttgcagaaatcatctcactttgacatatccgccttttgtgatgctgactgggcatctgatcccgatgataggagatccaccagtggctattgtgtgcagtttggctcaagtttagttgcctggaagtctaagaaacagcaaacaatttcgaggtcgtccacagaagctgaattccgcagccttgctgcagttgtaacagagattacgtggctgcaatctctcctatctgagctgcatattgtgtcttcaacacccacggtttggtgtgacaacttgagcactgtgatgatggcagccaatcctgttctacatgctcgtacaaagcatatcgaaattgatctttactttgtccgtgacaaagttctgcagaatcagcttcttgtccaccatgttcctgctcaagatcaattagctgactccctcaccaaagccatatcaagcagcatatttccatttcttaagagacaaactcaatgtggtttctctatccacactgagtttgaggggggctgttagtgaaagtgtttgtaca

SEQ ID NO: 305848 - DNA, 4517 bp, Cannabis indica
ttttttttttgtttttttggttcttaattaatattttggactccagtccaaacttagacctttaaacccagaaccggagcccgaccccaagcccaaacccaaatcccgacctagactccaaactcgaatcccgacgcggaccctgaagctgaacccaagacctggacccgaagttcgaccccagactcggactagatcccgaccccagacctggaattagatttttagcctaaccccaaactggactcccgacccaaacctcagacccgggcccttggccctgaccccagactcggaccccaacccagacctcgaactcggaccctggaccccgaccccggccccggacccacccagacccagaccccccgagtcaaaccctcgacccagaccctagaccgtgacctagaacctgacccggacctcagacttcggacccgaagcctgaccccaactctgaccttgaactcgaacctctcggtcctgcatgcacctagccccagacctagatcctttacccgaatcctatatccgacataaataaaagtaataaatgaaaataaaatttataaaacacacttttgttttttatttttaaaattgaaaaatagaacatattattattttttaaaaaaaaaaatttaaaagtaaaaattttacttttattttgattaaaaatttaaagataaaatgttacccacattaaataaattacggaaaaccccaaagtggataaattttagtcaaagtacaaaaattaatatttgaccttggtttcacaaattggaatcaatcaaaacgtgccagcggtagcagtaatagtagccatttaagtcaaattaacacgaagaaagctaagcatttttcaatatcatatataacatcagtgtgaaataacctaacagccatcactgtcaatttttaccccactgaatattttacgtagtaatatctttgcatgcggcttacgtgacctcatttgacatcgatattaagagagagaatattgccactgttcttttctttgtttttctttttttttttcctttaatttctcttcttaataattattaaattttaaaagtttccctgatatgaagacacgtcttcctataggggtgaagaaaattaaggccggttccaaatatcattgacaaatagttgtttttctcttctataaatacacaaactcagcttcacacgtattccaagctaaaacttctgtcattttttcctttcacatatatcacagagctcaaaaaacacttttctaacacaacaaattaactagctatctaattcattactcttcctattgttgtatctcttgtgatcactatccacttttttgtgaatcactcgtatttttcgatatatataatcaagttaagaatttagtatgggaaaaataacatgttgtgaaaaaaatggactgaaaaagggtccatggacaccagaagaagatcaggctttgattgatcacattaaaaggaatggccatggtagatggagaacccttcccaaaaatgcaggtagacatatatatataagttcgattatagtttgttatttatctctatatactatgattaatcacaagtactttttcattaatatgtttattaattcatgtggtgtgtaagttatgtattgatttagttgattataatatattaattattatatacaggactgaaaagatgtggaaagagttgtcgacttcggtggactaactatttgagaccagacattaagcgaggaaggttctcatttgaagaagaagagaccataattcaattacacagtgtcttgggaaacaagtatgtggtaacatatatattttattttatcctatataattgtagaaacatcatgaagacttatccttttccatactttccatacaattatttaaaatataggatataattttgtacaaggactacttaactatatataactagctagctaattcaaatatatatatatatatatgtatatgtttttgtttcacacacacacactataattttattattttttttgtagggacacacacactaaaatttgattatatttaattgttcgcgaaagtcaaatgtattagctgtcttgtcaattattttaagttcaaataatgaatgaccagcattgtaacatgaaaaaaaaataacctccaatattcttcttcatgattaacttgttatacctaatgtaaacacattttttatatatctttaggtggtctgcaattgcagctcgattgcctggaagaactgacaatgaaataaagaattattggaatactcacatcagaaagaggctactgaagatgggaattgatccagtgactcacaccccacgccttgatcttctggagctgtcttcactcctcaactcaacactctacaactctcacctcagttacttaattaataattataataataatcataacaacaacaataatctgcttggaaacatgggaccacctcttgtgaataacgaaaacttgcttagcttggcctcagctctcttatcatcatctaaccagccaaatattgtgccacaaaacattgttcaaaaccaaaaccaaatctatgataataatgatgatcattctcaatattgtggtcagctcccatttctaagcgaaaccccattcatccaatccaaaatggagcaattccctcaaagaactattcatgatgatcaatctcaacaaaaccatgatttatatcatatttcaaatcagggtctagccacagctgtagagagttctactattaccactactgttgctcctatggaattgattgatcatagcggatatatttcagctcaatcttcgtcctcttccacaacatcattgatgctaaactcttcgccggtaaaaagccaacggccgggacttgattattccggcaccggtaataatggtattggtcagatcactactcatatgaatatgatgataccaaacaataatattaataatacaatgagtacttttggtagatcatcacttctgtcaacgccttcgtcgtcaagttcagtaccagtgaatacttataataatttgaatagtggaagcactacaacaacaacaacaactactactactactcaggaagatgagagggatagtttctgtagcaatttcttgatgtatcatgatatagcgaatgcctttaatggcaacgaacttattatgtagcaaattatatatgtactacttaatttcttttcttacatatatatgccttaatatgtcttgttctttgttctgtattatttgattttgtttaattatattaattgcgttatcagatatatataatgagaaataaaagttattaattagtatttactattaatcatgatcatatgatatgtatatataatatggtgagttaaatttcggcatatatatgttatttataattatcaaattatatatataactgatatatatagataatatataattagcatttactaggaaagcacactaacacagagtctctagctatctttttctctagtgttttctttttcagtagttgaaagaatgtttggtttcgagttcgccggaattagtggttcttttgagtattgtatcctggaaaatagttacttgccattactctagtaaaaggggcaaatctacttaaaaaagagtatttcatatgtttatctatttaatttattgtgatttgcatattctcttcttcaactaaatatattttggtattatgtttttttgtttattagtatacaatcaaaattactataatataaaaaattgtgaaaaaaaaaataaacataattataaaaaatctatatgtccagtttataacatttttgaaacattatacactaaaatctttaatgaactattagagtttatgtactgaatggcttgtaaagatatttctaagtattataataaagagctaaaaaatttaatatatgcaaaaatgttaaattttttaatatttaatattaaataatttatatataaatattgaaaaattatttattaatatatgaggttgtgacttatagctgtacggagaaataatatcacttagaccataaataaaacagtcaacaacatatatattaaagcttagaaatatttaatgaatagttgttagtgtatgcatatatatttattttagtgtttgataatatatacatatatttattttaatatttttttaaagatcaataaagaattaattttgtaaatttcaagtttatatgtctaatcaagagaagtgttttgagcaagcactcaatcatgacccaaaatcaaagaaaacaaagaaaaaatgaggaactatccaaggaaaatatacattgaaaatgaaatccaaaagaattcaacaaaaggtgacatataatagaagatcacaacctattgggaaaggagcaacaagctactctacttattcaggagccttagcacgtaatggatgggttcttattgatcttccaaattggcacaatgc

SEQ ID NO: 305849 - DNA, 1924 bp, Cannabis indica
aactaagcggtctttacagtttcattctcttcctcgtcagccgttaacacaatctgaagcaatttttgctcacactcatgacctgggtgaaatttcttatcacatttgaaacatatgcctcgcgatcgcttctcttgatactccgcttcagtcaaccgtttgtacgaaggagtagtcacgggtcgattgttggtgggtttgtatgccgtagatgccattgatcctgtcgaagagcctggtgttttgggctgaaaaggaaactgttgggttcgaggtccaaaggagctgaaagtggatctagtgggtgataacgggccgaaattggatctgtttgggctgggcttttgggttgggcttgaattcatcaaatggtgtccttcttccactctttgagttgtatcaatgatttgggctaaccctttgagctgcaacatgtggagggctgccctaatgtcttccttaagccccttaacaaaactaccctcaagaatgtggtcgggcacgtcggggacccgagacgccagcacctcccaccggacgcaatattccttgactgagctggtctgaatcacggacaagaattcctcggaaatcgaccccaccggtaccgcgcggaatcagagaaggattaattgtttgagcatagcccaagaagtaattggcctgcgttggttctcccactggaaccaagaaagagcgtctccgtcaagtcctacaatcgctgtgtttagcatcatcgtttcattcattctacagagaagaaaataccgctcggtacggtagatccacccatctggattttcaccgttgaacaaagggatctccatcctcggtggacggaagtcttgactgtacgatcgtccggaatgaaatgacccaagttgtatctctggtcccgttggaatgtgtagaggagataccgccattcttgctggatatttcgaaggttgtagctccgatcgttcgcccaccgcactggtttcgccggtcgaatttccattgccgtccactgctcgttgctgcctatctgcaattgcagccgccggatcaggagtggtccttcccgctggaatcaagagctgagaaatttgactcaccactgcctccatctgcttagtaacaactttctcgatggtggtttgaagctcttcgtgcagcttcgagacctcttcttctaccttctcctctataatttcagccatgttgtctttcttaggccccatgaaagtggagctctgataccaaattgatagagaaacaggtatagaatgcaatatttaggaacaacaattagtaagaaaagagagtagagattgtattgataaaatctcaggtaattcgagagcctggtccctcctcacattcaattacagtttagtcaaaagtgccctcttccaataaacaatcctttatttatatctaataccacagggtcttaacatgcaccccactctacccaaccaacacttcactaactgaattacgtagcagaataattatctgttgcacccccatctttagccttcctagacctctttctagcatacacaaaagttagtggaggcttatcaatttgcggtaatgtaagcaaaagttataactttagcggttacattaaattggtctcttatatttgaattatttattagttcttctgattattttgaccgtgatttatgcattgtctaagagattctaattttgttataatcacttaggatctttattagagaatattattagtttatagtgtaatttttcttagacatctttgatttatgtacgtagcacataatttaacaattagtgcactcgggtagatgtcaaactaacttagatttatcaaattcttattatattcaatatttattgttcaaaaaaagaaacaatatttataagaatttttttcattttttatattttg

SEQ ID NO: 305850 - DNA, 2060 bp, Cannabis indica
tgtatatgggcaacatgcatgattacaaaaacacaacatacacatgacatgtattagagttgcacctacaataatgagagataattaatgagcttttaacatataaaaaaagtgaaaaacaacacacacttgaaatcatcaaaaataaaggaataatcatatatacaattagttcaataacattttttttatatataaataaaatcattgtattgcttaattaacattctatttacaacatataatatagctccaacttaaataatctatttttttttatataaatactagaaaatcaatctctctaatctcaatctctcttagaagccttctttggcattacaagactaattctaataacaatctcattcaccatgctttttgtatagtgtttttgacaagccaaaacttctgtgacctaagtacatcattcctagctctccaaatgtaataaacaaaagccacaagaaccgcatacataatattctttagaactgcacttttttgctttacttacccaacggatcaactcattcaattccaagaaagaacatttccatcccaactaattttaatttctttgaggcaagctctactataggagcagtcaaaaaataactgtcacgtatcctccggagcagccccacaaagaaggcagtcttgatccaccaacatgttcatctttcggaggttgtcttttgttcgaatcttctacaacaagaccacccataacacaattctatgttttggaatactaagtctatcccaaactactttacttcaagttaccttttgcgattgatcaaataaaaattgcagccatgtttgatacaatattttgaaccagtaaaggttagattattcgttctagctttaaatgtatctctgatagcaacaagattcttccaataccagctacaatcgttgggggcgactggtatttacaccaatttttattagttccttttcaaaaaaaaaagtagataattttaaaccctgatgcatcaataaaatagagacaaagtcgctatgacaaaacaatagcaaatcatatgcaaaatacatgatttagcttcaaattcgtacatctatcatggaatttaaagcctgccaagtgttaacttctatcataattttagacatatattccatactaagaataaataatagaggagatatcagatcccttttacctcaaacctctctttgactcaaaaaatgcacgcatctcaccattaatcaataaagagaatttaagagtttttatgcaaaccataatgagatcaataagttgtagaggaaaagaaaagcaatgagcatttcttcactaaatcctcaatctatagtatcataagtcttcctcaagtctattttaatcatacaacttagcttgcaattcttcctcccataatgtcgaacaatatcttggcaaatcaaaatgttatgagcaatatatctcccatgaacattgtacattactgtaatgttatcaatattgtgtacattgtagttatagtagacataacatctattttaaaaaaaaaaatagaatattttattgtgttaaaaagagggtttcaaacatttagttgtaagtatatattaatgctacaacttcaagcttttattagacatatcttttcatggttaatgactctagcttatacacgggagtatcatttttcatcgtactttgtcctcactcgcacgctcctagaggttttccaagaagtcatcactcatcccgaaattgcttcatattaagcacgcttaactttctagttcttaaaccctattcaaatgtgtcttacataatcttagaatcattccacttgactttctccaagcaatatacagtttttctggtcttttctcttacaaatcacgagactttaattgtcccacatatttattctttttgttttttataattaattatgttgtaactttgtttttaacaacaaataatatctaatttctaaaagataagtagaatatatacctattataattatagtataaactatcatatatataaaaaaatgaattataatttattt

SEQ ID NO: 305851 - DNA, 3453 bp, Cannabis indica
ttaatcaaactatcaaggatctttttacagtcttccaccacagaaccgaaagacgaaacaaagacctctgcatttcgaatggcttcagcactaacgaggctatctgtctcaactgtggcctgggtgtaggtgtgatttttcagccaactcaaagcctcccttatgcccattatttcggtccgatcaggtgatactttgccatgtttaacccctacaaaagcagcacccaaaatgccatctgcatttcggacaacacacccgaaaccatgcttggaagagtgatcgaagatggctgcatcgacattgagtctgatacctgcactcggctttacccaaagctccgaaccatctacatctttgagaggagacaacaagggaatattaccctttccttgagctttcaaccattgatcaagactcacattagcaaatgtaaccacgtccttcacgcttcgagatcgctgctgccaaatgagatcatttctagcacactagatggcccagcacaacatcacggctctggcttgggaatcaccttgcaacaatctgaacatatcagccaaccattgcccgagagaagaaacgtctctactagcagcagccaaaccagcaaactcccaacaagaccaagcaaaattacaagacaccaagatgtgtcattcagtttcagcaaacacaccacacaaaggacatgtgttttcaaccaaaacctttttggtacacagatttactttagtagcaagacagctggaagctgccctccaaataagatcttttgctttgggaggcacttttagggaccaaaatttcttccatatctcattattttctgaaaaaaccgatgagtgcttcaagctttggagcaggttgtacgcacttcggactgagtagaaaccatttttctctgcaacccaataccaagtatcagcatcacccgaatttagaggaattctgaggataatgacagcatcttcaggagaaaacaaatctctcacaacctcaacatcccagcttctactgttagcttggaaaagacaattaacagagaagttttcaagcccctgcacgacaaggattggtgttgctcgatcactagtaggaagccacgggtcagttgtgatttgcacagtcaaccccgcaccaattctttttctcaagcctgctttaacaacgtccgttgcagcaaaaatgctgctccaaataaagcttgggttcgacccaagttcagcagaaagatagtctccttgcgggtaatatctagctttaaatactttgccaaccatggagtcatgtcgaaacaataacctccaaccttgcttgctaagcatggcaaggttaaaatccctcaaacaccgaaatcccatgccaccatcaaacttatgttttgtcattctttcccaattcatccagatgatgtcacttccattgccattagaactattcgatttccaccaaaaattggccatcatccgctcaagttctttacaagtgccaatcgggaaaaggaatacattcatagcatatgagggaagcgcttgaaccacggtcttgatgagtatctccttcccagcccgtgaaaggaatttgccctcccatccattgattcttttcctcatcttctctttaaggaaacccaaaacagcatttttattgcgtccgacaatactaggaagtcccaaatacatactgtccaccccagcttcttgaatgcgcatcaaactacaaatacgactccttgtagccgtactagtgtttgaactaaaaaatgctgaggatttatggagattaactttctgacccgaagcttcctcaaaaaaccgaagaagtgaaagaacatgattagcttcttcattagaagcctgacagtaaacgtagctatcgtccgcaaaaagaagatgggatatggtaggtgcactcctagccaccttacaaccggccagccgtctagtggattcataagaccttatcaaagaagagaatccttccgcacaaacaataaataaatacggagataaatgacaaccttggcggatacctctggtaggggtaatcggccccaatttctggctactgttgataacatgatacctaaccgagttgacacaactaagtatcaagccaatccaacgagcactaaatcccatcacccgaagaatggcctccaagaaaccccacattattctctttacttcacaaaatgtaatgaaccaatttattaaagagacaaaaaaaaattgaatatcctcaataataataccatctacaaaattatcacaccaaacacttaataacattaatagcattaaagcaatcactctcaaaaatatggacactaacttgcttcctatgacaccattgaaaagcgtccaagatagtcttaagctccgtcttgtttccaccattaaataagtttaattgcattaaagcaagagtatagagaaaaaatattagacaaataatctaataatagagtccactatttttgttatttatttcaaatatggataaaaatgaagcacgtaattgatggggagtgcttccttatcctaattcctattaaatattttaatacttattggaatcaacaggaggaatccctgttaggacaagtgcacaaaaatttaaatatattatacatactatactaataatttaaaatacaaaatattatccaaaataaaattaaaaatcattaaaattaaagtagtacatactataaatacataaaaaaaatatatatatatattacaaaataaataatatcatacaatatataaaaataaaattagagcccgcgcgtagaaaatgtaatttccattctagcccgtaccaattttaggcaaagaatctctgcgagtgtgggatacctagagggcatctctactgataattttcatccttgatatcaaaagcaagttaattaagttcgaaacaaacaaattattattactagaaatgtactcttaatttagtagttctcttatcctaaataaaataaacataaaaatgacaaatggaaaagtgacaaagataatgaaagttctttgttctgttcaaaaagcaaataatttgataaataaagtagttcaatgatctatatatgtgactttagaatataaaagaaaagatgtattacaatttgagaggaaagagactctctaatagcacatcatattggatttattagccttaaaggctttaatggaccacaacattaaagatatattttcataatgttttctttaaaaagaagaagaagatactttttcatgatttttgtaatgctaaatttataaataaaaagacaacacataaacaaccatgcagtaagatgtaagatgataaaatgaaaacacaaaagtataaattaacaaggctaatgattgatgaaaagatgattctttataataataaggctaattaggatttttgccctctgaactttgacatata

SEQ ID NO: 305852 - DNA, 1084 bp, Cannabis indica
ctttctgctccatctgatttactatcaattgtaagggatgattgcttttctagttgattaataaaaattcccttttcaaaaaaaaaaaaaaaaataatgtaatcagatccattgctaattaagaaacgcgatttcccaatgaaaataaggtaataaatcattttatataattggccgacacgatcgccatttttctcaatgaaatatgaataatattgtttttcatcactttcatttttaaaagaccaattataatttaatgatctatatctcacaaaatataacattgatgattttcaatataaatataaataagtaatgcaaatataaaatatagttcactttgtaaaaataaaatctactcttatagtgtaataaaagtaatccaaaaatttagatcacaatatatacatagtataaaatatacatcacaataaatattatgttttatatttttattattatgttatttttaatattttattattaaattttagttaatatattctttatactaaatgatttgtattattattattattattatatttaattagttttgcatatataataatgaaagtaattaaattaattcaaattaattattatttgcatatgttatatataattaactagatgattaactatagcttgatggcatggcaaatcgctattgatgtattttaatatcaagttttatgagttgttacatagagaaactttgctcttgttttatcatttttatgaatgcatgtatattacagaaattagtttgccttattaaggcaaaggagggtaggtagcaagaatttgttaataatcctaaccacctaagctaactattataacagaatttatataatcacatgtctaataggccccacaaagtaaagtgtacaagttttgtacacctatcttggagataatgtttagaaactgagagggaaacaaagctttggtaaagacatttgcgaggttgtgcttggagggaacatgtatcatcttgagtaggggtatgatagtcagtgatatcgtgatctgtaaagagaaatactgggtaagctgtgcaatctcacaccgcctg

SEQ ID NO: 305853 - DNA, 995 bp, Cannabis indica
atcagaatttactaccagaagataggtagtcgtcgctttgtgctccagataggatactattaaataggctccatgatcattgagccaagtccttctcggatcacactaacctgctaccttcctggaatactcatagctttgaatgactctaatcctccctagttgtggatgaccggttagagtcttggagccccatccttactcactagcatcggggatccttgactgccttccaaaatatagtaccctccataacgtcattaagcaaaaagtacatactgattgcagatagtctaaggtgacacccttccgtgattgtcacacagtaagcatctgagaacacagataacagatgtaattaaagataattatatagtttatatacatcaaagtaaagaagatgaatttcaccgttttatgtgttattttaaattaaatataacatttttatcaaattatttgaaataataatgactcgtcatctaattaatgtcaagtcaacataataattaaagattaaaaattaaaaaatatgtagataactcacaaaataaaaaatctataaaagcataacaaaaaatcttcaaaactcttataaacctaacataatacttgaactttcatgtttgtcatatgatttaatttgttatgaccacttaaaattttattataaccagcaagaaggaacaacgaaaaaatagcaattatttaatatatatatatatatatacatatatattgttaataaattttataaactgcccaaactaaaccgaataaactaacaaaaaatacaacctgaaataatacactgaaaattcaaactgcccaatgaatatattgagtggtttaaaaaatattttaaaccgcgctcaattaagccgaataaactgaattaaacccatttatatattttatagtaaaagtgtatacattaatatattacataaataatatttattagttaaactattttgtatttaaagtttggatat

SEQ ID NO: 305854 - DNA, 1475 bp, Cannabis indica
aaaataaaaaataacagaatcaaatcttatataccatatgtgtatagaaaaatatgattaattacctcatatactattagtaaagttttttttttttaaattaaacataagttcttactcttatatatcaagaaaaaaaaacaattcttactctcttatgcaaaaaaattaataaataccctaaattttaaaaattaattactctcagtgagtcccatatcccacatcaagaatttgactacctaggtataccaaaagaactaaaatcttctttctctttctttgaaatttctcatgttcacactccaaaaacagaattattaataaaatatcaattattgtataatattttttttggttagaaaggacccttaaaaagtgggggaaaagattgatgtagtaaacattgtatttgtctctatcatttttgtgtgatggtgcacattatctacaaacaatatatataagctatactacacacataagaagttgatattattattaataatttcttttaattagacacaaaattaagtctacagactctagagtatatatatctcctcaaagagaaaaaaaaatcctagagattaggttcaacatcagactatgtatattaaatgaataactaaaaataataaaatgattctttctttaaaggtggctaatcaaatgatcttaaaacaaaagtcaattgtatttttcattcccttaactcacaatacctaccctacagattttattttattgaaaaggaaaagaccattaaataacaaaagaaattaaagtgggtcgactagaatagtccttgattgttccctttgtatttttattttatttatttgtattgaaagaatttctcaataggtagttcgatggtttaaaaatatttggtgaccaatttttatgggcactaacttccactttatttttgggtagttgcaattcgaattacgtaagatcttaacacagtaatattatattaatcaacttaaagcctccctctcttctctagcctctattctattcctctttcttcctttgattattgaccacttcaattcaagccccaactaaaggaccactcatcaattataaatagcatagcatattttgtaacctctttttaaagaattagacatatcttaagactttccaactatgacttggaaaatgggatcaaagttgagattatagtggaaaaaagttaagaggctatttgctttacaatttaaaaattattttctgttttttaaaaattaaaaacagtttttaaaaactaatagaaggtcgtttggcaaaattttttaaaaatagttttttaaagttttaaaaaattaaaaaacagtaaacatcaaaatactgttttacaattttcaaaaacattttttttttagtctaatatattatattttgtattttactcacattactcagatcccaaatctgaaaccatacccaaacttggacccgaa

SEQ ID NO: 305855 - DNA, 1193 bp, Cannabis indica
tttttttttttgtctatagcacatttcaactcaaaattgccctgactaccaatatatcgatttctcttcttacacctacacgatctcttttggtgcatgttatgcatgtcaaaacttcatatgtttgatttgctatacattttatctctttttttagagggaaaacactcttaataagtttcattccatttgaaaatttactattgcgtttattttactttgttaaatacttatgtggttagtcctagttaccaaattatcttacataaaaaatttaatatccacgtgacaaactaaaaactaaatttaataaattcaaaaaaaaaaacaacaaaaataaaaacaaaaacaaacaaactttaatattttttctttttttttcttcaatattttttctagttttgcctccagaactttagcattataaaattgatattgttaaacttaaagactttcatacaattttactaatggacatctgacatgtggataaaagtccaaagggcacaattttatacacgtcaaagttcgggggtgtcaagtgagttagttaatgacagttggtgatttagtgtgttagcttgttagttagttaagctgtcacagtttgttatttggttgtaacaaattttacttagcttcttgcttactttctgagcttgtatataagtcaccttttggtagagtatttcattaagaaattccttttcgatttcttcatctttctctctttcatttcttttgtcctaatttcaaaatatccaagacaactaacatggtatcagagcatcactgggctccgttgacagcgaacgtagtgactagctcaaacaatctttcaaactcagataacaatggcgaacaaaattagactgacttacatacaccaagaagaagagatgttgattactcttcttcaatctatttcaatcacaacttatcgatcaaactcaatgactataactatcttttttggaagcagcaagttcttgctgcaatatatatgtggaaatcgattgttgcaaggtcttggtatattagagagagagtgaaagtgaggataaaataaagggataattatataaaataccattttttgttaaaaaaaagttacatttttacgttgaagatttttttttttactatttttacgtatttctaatgaaaactaacaagactacataaagtaacag

SEQ ID NO: 305856 - DNA, 1411 bp, Cannabis indica
taaaatttggcagaagtaccaatttacaacacccttaaataatttaagaactagttgtaaaagttgaaaaattacataataatacatatattataattcaggaacaaaaatgttaaagagcctaacagtaattatggcccttttattagcttagccctctcaaaataaaataaaatatggaatcgagttggtgagggaccacaattaacgtagctgtaggtgggaactgggaagtgggtaccactatagtgtgactaaatttgtagtattgtttagatattttataatttgatgacttaaatggtcaggaaacactgttggtcaacttggttgcaaaagggcttaatagtctttgtagtattaaatacaggagcaagttgattcattgccgcatccaataaaaagtggtgcaaaggacccaaggaagaaaaaaaccaacgtgtatatgttaaagtttttgtcgtacgagtaatattaaaacaattaaataattatatttgtaaaatcacaaaatattaattgatgtgattttatttaaaaatatgtttcactgaatattatttttgtgttactattatatatattagcttttggattttattattattttgtatcttctactggtgtacttatttattttgtaatctgggtgttacatttatcatcctattaaacaagcttgaaaacttataacaaatgaagattatattacatttttttcttgttttatttctaattataaagaaatactataattaaagtaattaaagaaataaggggacaactgtaaagataaagactaataaatgcttaattaggagtttatgtggactcgaataggaaaaaattgaccattgtttcttaaagagaacatggttgacatagtagacttagactattcccaattttgaccatctttatgtactagccatcaatattaataagtcagtattcacgaatacgcatctgctccatgtgaatattatcaaagcataataataggaacctgattcgactttcactgtagtttttttttactatagttagatcttagacctaccgtctatatttctttttttaatgcatataaatatagctttatgtgtgtatgtagttttatttaactttttttcttgtttggtaattaatttaactttcttacatttaatacaaattatctatagaacagaccacaaataaactgtggtgaataaacaccaaccaagaacataacaaacattaacaagatcaagaacaaaccagttagaatcaaaccagaaacataaaaccagtaaacaacaatatcagcaagaatagaaataggaatttgcacacagagttacaaggttcaatcacaagtgaggagcacttggatctaatccttgggaggaactgccttgaggctttgcct

SEQ ID NO: 305857 - DNA, 1519 bp, Cannabis indica
ttaatgaagaagttcatataatgttatttcttaacttgaaaaagaaaaaataatcgaaatatatttatgaaaataagcttatataattattaggataaataattctaaatatttaatgggtaactcttttaagacatttatttaaagtgtacttaatttttaataaagaatctgaaagtacaaatttatttagcgcagtcttttctctttaaaaataatattaaatatataaatggagaaaagtttagataatttttcggataaataattctctttagttaaattaaatggaaattccccgcagacatttttattttagtatattttttattagagaatctaaatttaggatcaaatgttagtttttgctttattttctacaatgacttattttaagtttatatctttatacgattataaagactttaattattgtttcgagttgacaattttttgatgataaacattgtaaacattaatatgatctcgactacagacattctttgatgtctcttagggcaacttctaaagacatttttatttgtgaagtatattttttattagagaatccaaatttagactcatatttagttttgctttatttactacaatgatatttattttccgtttaatcttttacacgattataaaactttaactattgtttcgagttgataattttttaatgttgaacaatataaacaacttaataagtacgatcgattaaactacatcgctataggaaaggtaaatttttgtgtgtgcataaaattactcatagtgaactatattgtatctatatacaagatttttttcaagatttgtaacgttatattgtatttatcttttggacaaataacttaatgcaatccaatttgggatataatacagatttttgatatccgcatttaagaggtcgagattacatactaattgtggacttgtgaatagcctataaaaaccactatatgtcaaactaaggtcattacaacctaattagagctttaggatgaaggcagcgaaactcaaatgagtcccaaccccaactctatcttttgtcatcacttcagagttcaaacctatatatatgtagctgaaatcagcaagagagttagattaatattgtgtttgtctttatataaaaataaaaatatatatgatatatatgttttcattaaaaaaaattgagagctctcttagccccaacaccgaaaggtactatggaaagacgacggctgctagttcatggataccccaagttgtgcacacacacgattaattaatgttgcacaatttcagggtttgcatgaccttggagacgaggtctttttcaccgttttggattggggtgaagggagctctcaattttccacttgttgttgttgttgttattgtcgttgttattgttgtttttattatatttttttattaagaaaggttgagagctctcttggctccaataccgaaagatagtaatgaaaaaaccacgactgctagttcatggataccccaagacgtg

SEQ ID NO: 305858 - DNA, 1823 bp, Cannabis indica
ggtaggagagagagagagagagagagagagtgaaaaatatgaccttttttgtttgggggtctaaatttaacaattgaattagactcttaaaaaactcccaaagtctttttcataattttctcaattttttcttctagtacttctctattgacgcctgttatagctttttaattttctcttttatagttttaatttttggttttatactgaaggtaacaagcttatatcaattaagtaacttaattcatcaaatacggtgacatgaaaattacatgtatggttttagttcctttgtggccaaaatgaagcatttatgtttattcaatgttttttttaatagtagagttcattaaagtagtcaaagagatatgcattgactagtttcataaaagaaggtggaagtagaagtctaaaattgggtaattaggtactattttatggttcatttcaccaccccactccacttctttatcatccaaaaatattcctatctcatacttaaaaaaataaaccaaacttcatttacacatatgaatattagtgtacatatacaaagatagctaaccaattaccaaactagtgacaatatttgaacaagtcgtttgacttttcaatggcactaaaaaaaatcaaaattttctagtcaattgaaagaacaaatagtagtgctccacttgtgacatgttcaaggaatcaagtggtcagatatatagaaagattaaagaccatttgatcaaactcttctaggaacatataaaatccaataacgctaccactaaatgagagttaggtgagagacaaaggtaatggatatggttgatatattattattatttattatttattttttttgacaagcttgagttttgacactctaatttaactcaatgaactcttaccccttatttctttttccaactttttagatgattaattaagttgagtctgagtggggtggggggtctttgtagtgtaaaataaactgccaaaaggactttttacacaactaagctcaacattggtagattaccatcttcatccaaaactctttcttaagagttacaatttacagtgcaggaaaacattggggtcagcttgttttcaaaatttagaggataagagatttggagtgattaacttcaatatgattacattatttaaaaaaaagttacaagcagtgggggccagtccaaggcaggcccagcattgaagcatagtcatgtgggttatgttgtaaatacctaaaaaaaataatctcaaatcccaatagagctagcacctaatcaccacctgcttttgatttaggagtcaagtaaaatctgatttcaattctatgtttgttcaactttttgtcctatccaaatgttttattttatattaattaaggttgtcctttccttaatccaaatttaaattttgaattaggttctttatttaaagattgcaaaatcccttcttttaaaaaaggtttgcaactctaattcataattatatttattaatatattaacatattgatctgtgtgtcatcagcatgcctgctgaagctgaaccatcccagttgatatactcatttacctaaaatttgggcttcgatttatgcaaagtgggagctcaaagtcaataattccagcttggacaaaatgattaaaattgaatgatttctatgttcatcatgaccattgatgggattccttcctgtggtttaaagggcttaaagtgcactaaaccacaccggattgaacaataattagtggttattatgctaaacgtatattaattgtttgtgtataattgttatttatatatatgtagagagagaga

SEQ ID NO: 305859 - DNA, 1818 bp, Cannabis indica
ttagacaaaagtccttaaatttaacaatttcaatagttcgaggggaatttttaacgaccaaaaaagttcagggggcacgattagtacatgtcaaagttcgggggaaaaaattactaattagccttttttttaatagatatatttttttaccgtatttataaaaataatatcaaaatattagtaaaaaaaatacataaaaataataagaaaataaaattaaaataacagctaaataacataacaaaaaataatataaaaaaaatcaataataaattaacaagagtacaacatacaaaaacatataaaaaaaaacgaattttatatataaaaaaagaaaaatttagaaatcgtaaaaatatttaaaattctatacaaccgtatttttgtaatattgtttttattatttttgtattttttttagaaataattccttatttaaaataatatactatatttatttatcccacaaaaatatgaatattactttactcattaaatattattaacatatttttggaagactaaaatattattggagactacatgctaaaaatagtcacactgatgcatcccttttttttactagtttactaggaaacatacccgcactttatgaagttttctaataatgtaaatataatttaaaattttatgttttgtaaatgttgactgtgaatttagccaactgacatggagtctgactaggatccaattttgtttatgattgttacatgtggaaagataataaatataaaagacacaataatttatagagatttgacccctttgatcaagtaatgacctactccctttttgctgtattcactctttagataataccatgtaaagtacaggctgaaatcttgtaatttctagctatggctctctacagtattataatgatgagattgtgtgttagagacttgcaaagtgatgagaaggaaagagagagtttaatgtcttagtgcttttgagctcttaagtgcatgtgtagaataaataaattcaggcccctttcacgtagggttaagaccttttatatagtgttaggtttttcacaagttgttattcaaaatacataacagatggaaaatatccctagaaaataggacagttacattctggcgaagctttcctacttttgtgggcagttcaagtcgttttgaagttgtagatgtgttctggacgatttggaaacttctagaaggcttatggaaaaaacacagctgttagagcatgatatgtgtattggtcggtcagctatatttaggctgtccggtatatgagttgtcacccttgccgacaagttagaggtacgaccagggtcttgctaatgcttatgtatctttgtcttcgttagagattttgatatcaggatgaatttgtttcagaaccttgaagatgagcatcttcttagtctccatgttcttcttatcttgagtctatctctaagatatttgaaggttagggggttgcacgacactaccctggccagttagtactggcttgccttacacatgttgtacgacactaccctagttggtcagtgctaacttacctaacacatgtcttctacttttggccacgtgtagttgtcgtgtcatgtgagaaaaaattgggataataattaccccccaagtccatgtttgaacgtttgtctggatagggactttacattctgcctagtattgtgatgccctttgccatgcacatatgtgttgaaaattaattttactaggatctagatttactaacatgtatgtagattataattctataatcttgcatcctaaatatgaaattcctaaaacgataaat

SEQ ID NO: 305860 - DNA, 2771 bp, Cannabis indica
aggcagttatatcagattagaaacaccagatacgacttggacttactattaatataatctagtcaaaataatagacacttacacactttgtgaaatagaaaactactgtatatatatatgtgtgtgtagagtagaagtacatagagagtagggtagaatctaattatgtatatatatgtgtgtagagtggcgctttggctcatttatttctcacttaatgtatagtatagagtggaaactctagtaagaattttaatagcatgtagagtgtgagttaattgaatatatatatatatatgcatcctttttttagattgaaaaagtccttttgtgtagggtggaacatgtttcaattttttttttatgtaggccgaaagtagattatataatatttttctcactcatatgtagtgtagattgaaatcttgtatttcatttgcttaagtattgtagatcgaaatgttgtgggtcattatctaagtagtatagatcaaaatattgtaggccatttatctaagtagtgtagactgaaagtagcgtataatttgatgagtgattcacatatgtatgttctttttgcctctttgcatgagtttatttgttgctcacttgtgatgtaggtagtaggaaattatccttttacctttggattagtgttgtgtagactgaagcaaaggggtgtagcctggaagctgctgctttcattttcttgctcgtagtttgatcatctagtaagatctagccacatggaggtaggtaactcacctttggaccctatataagaggagacatttttactttaatacttgggtaaaggggaggaggtaaagggagcataggagagcaaggaagagctaagaattctaaggtaatttctatctattttttattttttctccttaaagtgttcttggtgttcttgagtagtaaaaagtgtgtttctatgtgatctattgttgtttatttatttgctttgatctctagaaactagaattgttgtataatttgtgtttatgggctttgatgtttggcttgaatgatgaggttatatatggtaaaaaatgactaagtaggttgacaaggcttttgattcgcaaagactggtatgatataatgtaggatggaattttttaggttagatattttaacttgaacttgtaatctaaggtgtagattgaaatcatatagggtgggaatgttagatgagcacaatgtgacgattgttggttctcattcgtgtgatgaataagaagaaggtgttattcatattccatcttcacgtgggtctccaatccctactggtgtacgggttgctgagtcttatgtatccagacaagaggtttattccgctcaggaggatgaaatataggtagaccacaatgtaccttgagtttgaacccttgttccatccttagggagtgtgacttaaataaaataaagtcttcttgccaaatttttgagtctactagtttgagattactgggcccatacgaaggaataattgattagtggatgggagactggatttttttttatgagataataatcttagaagggcttaggctcctaatccctgatttggtaattgatgtgtcagattggtatgagattggtacgagtcagcttatgcccaactcgtggagattgcttctagcacttcaacgtttggctgaattgcgtagttcggaggttgggttgcatgagattcattattcttattttctcaaagatcgtgatatagataaagtttgttaccagcttatgatttgcaagtttcaaagtcatttgattactggttttacttccaatgttcacgggaggtggaaagagagatacttctttgctaaaggaagtttgatctttagtgataggagtcctggtgacatcccattttgttggaagattttcagtacattgtcaaaacactttgttgttcattatgttgcaattgttttttgaacttattattatgtatttttcgtagatcgagagttcaataatgccagaacccttaacactgcagttaagaagcgaactaaaagtatccttgatatacagtcggaagagcgctagtggagagccattttgaaggattgcataattgacaagtgtgagaaaactatagactaaagtctcaaaggtattgctcctccttcaagagagtatgtgatcaccattcgatctattgagaaattgggattttaattttcatttatctcaccattaactgaggaggaacgactttttgcagacatagttgtaatggagggaaattttaaggttccatcttctagggatgctaaagaaaagctcttggagtctcaaggtgccaaaagggctactaggcgtaggtacccggacagggctgcttcgaagaaaagatgccccgagcagcagtcgactagtgagagatcttggtcttagtctactggttagggttccattgcttttttgttcctgatagacacttgtgtctactcgagccctgggtccattttgggagaagtgggaaaatgtttgtttcctccagacaaggctcgtctgaatgagatgggtttgggtgcgccaaactacatgattgagaaccagtttaaggtacattcttgagctgataaatttttgttgatttgtttatatagtgtgctaacaattgcttgtgttattgaacattgtaacaccctaactagcataggcgtgtttacgtgattttaaacgtactgtccagctcgttgctaatcaacgagatttatggaaatcgtgattaattaaaa

SEQ ID NO: 305861 - DNA, 7088 bp, Cannabis indica
agtatttttgaaaaaaatttcgtgtgacagtatttttgtaaaagttaacctaaattccagtatttttgtaagttcccctatattgtatcgatatcccttgaacatggcccattattcataagttgaccagtaggttgcttggttgtgtgggctgggcttggtttggcaggatgaggattttggactatgggcttggtttggcatgataagtatcttgggctgggctgtgttggagaaatacatgtttatatgctgctctaattaatcaagcatatgtttactggtaactagtatctcattagttattagagatatgatgatcaatcatgaccaccacaatacattttaaaataacttattttatattggtaactaattattttaaaatttgatggtagtagtatatatcattaaaatgtaaaaaaaatcaaaagaaaatacacagttgaaaatcctacatttataaaacttatagtaaaaaatacacctttttcttttgaaaaacaaatgtttttttatttttttgtaacaatcaagcatatacttaccttacataatagttgaatactcaagctaccagattgaacctgttgcaacagtttgtactgttgtgtcttctgagcggtagatgaaatagaatataggtgtgcttaaagttaactgtgatgctgcaatctttttcatttgattttattttaattttttgttaaacaatctgagaattagaagactgatcatttggttagttttttttaactctaatcatggtcatgtctcaaacgggaagatatttcaattaaattgcaagctattattttaactaattgctattaataaaattccatttattcaaaaaaaaaaaatgaacggaaatgttaagtcaaaatgatagattcattataacaaaagtaacgctttatatatatagattgagtacatggtatgctcattgatttatttttaactagtggatttgattaatgaaattttttctcttcattaaaaaaaaaaaaactacaaagattgtatattcttcttagattgagagaacattaatttgttttcacttatttaaataagtttaaatattgacggggatcacaatcatccaattctaatacgatattagtttaattagtttagtgtgttaagcttgtttattattggttagttatttttgttacacagtcagttggtctttcttagttagttgggatatcaagaccgttagcttggtctaaactaatcagagttagttttatttttgttttggttgaaacaatatacgctcctcttgagctagatatatatattgaccatactctatatttttctcattcattttttcaatacaattacacttttgtttcacctttttatttcgcaatatggtatcagagcggggaagaagagcttcccccaatcttgatctttccttcctcatcgttgtgttttcctctccagcaatgttctttctcgggtcttggagttctgtctagaactttttttcttcttctcctttgttcttccttattgattagttttcccttcctgatcttgtaccgtttcttccatggcaactgataatcaagccgtgacactaggaactaacaacaatggtgtggctgctattgttggaaaagttgtgaatctgattatacagagcaatcagatgcaacagagaaatccccttgaagatccttcagatccctattacctcaccatggggataatttaggtaacattcttatttctcagctcctcactggacaatacaattacatgtcttggagtagggcgatgcagttagcaatttcagtcaagaataagttggaattcttggatggtacttttcaaaacctcttccttataattgaattatgtacaatgcttggtatagaaataataatattgtgagttcttggatcttgaattttgtttctaaagagatttcttctagccttttgtatgataaatctacagctgccatttggacaaatctcaaagtcaggtttcaccagaaaaatggacctcacttatacaataaaaggaaaagtttaatgaatctgaagcaagaaaatcagacagttagcatgtatttcacaaagctcaaaacagtttgggaacaactcttaaattacaaacctaactgtgtctgaaatgggttcacgtgtcaagaaactttaagaacacaatcacatggagtatataatgtcattcatcatgggtctctcgaattctttctcacaagttagaagcaacatcctgatcatggatcctttacccaaagtcaacagagtttttcacttagtaacccaagaagaaaactaaaaaggaaacatgaaccctgctgcagaacccaattcaggtataacttttgctttttgggggagataaaaataaaaaataataaacctaattctcaggaaaataaatcacatcctccaaaaaagaacatgtccttttgcacacattgtaatatacttgggcacactataaaaaaatgctacaagatttatggttatcccctaggataccacaagaatgacaagggaaagatgcttctgccaatcaggtacaagcaaacaatgacatcaactcaattggtgaaaaatcaaagccttgctacctcaactcacaacaacacagtactaacagttgctcaacctgttagttgttcaacaatctagtatgcccaacacataaagtggaaataatacaggtaatacaagtattgttctcttaaacatgtctagctttccaataagtggttcttgaattttagattcaggagctactagacatatttgctatgacataaaacattttcaattaatgcatatgcagtttcaatcccactagactgttattacctaacaatgaatgtttaattgttaatcaaagtggcaccattgccatcacatataaaccggtcttgagtaacgtactctatgttcctactttcaattacaacattatctcagtaagctgtctaacttatgatgacaatttgtatgttaagttcttcactcctcactttgtcatacatgaccaaatcaacaagaagaagattggcggaggtaaatccaagaatgagttgtacatactggattcaagacctcatgattcaccaatccttgtagtttcagttgatgtctagcactcgaggcttggacatccctcaaacaaatacttgatacttttagacagtaaattcaattgtaacatttctaatttacaaaataattcttcttgctatatttgtcatatggcaaaacaaaggaaacttcctttcaaaaataataatatttttgctgataatatttttaatttgattcattgtgatatatagagtccccattatgttcaatcacattctagttttagattctttctcactattgttgatgtgatcaatgaagattcacatgggtataccttttaaaacaaaaatttgatgtgcatactgttatttctcaattcttgacttatgtttagaaaacacatgcaatttatcttctcattataataatatgcacacgctatattcttcaactcaagtttgatcttattttctccctaaaaaaggatcaaatttgatcattttaacaactcaatcatatcaaggattatttctggttataaaacacacttaatgaatatcactcattgttggttactaaaaattaacttaactataaatattgattttaaaaatattaactcattcgattttgatctaataacgaaaagaaaaaaatttatgcttaataacaattaaaaaaaatattatctttttcagactattgtttatataaaaacatttaagttaaattcaactttttttttatcttatatttttgctaaataatttttttttgaatacaacctcatataatataaaaatgaaaaattttcttaactaaagagaaaaattaagtttaaaaattcaattttttctaataatactcattcatgagtatagtaggtgtgcacacccatatatacagggccggccttaggtataggcgggctaggcccgtgcctagggcccacactttccgggggcccaaaataaaaaataaaaaaaaattattaggcttttatttaagtaaaatttaagtgtaatataaacaacaaatatttatagcttaccatgacactctttttatatatactctgtttaatattattgaaagaatattactataagcaaaatggcctaataaacttaaatattattatgtatatatgactttctaataatgaatatatgtaatactacattaattatattacttaaaatccaacaattaattgatatatttttcctcttatcatggggatgactcgtggttgagatatctcactcacttgggtgatgatatatattcccatattgaaggtcaacaattttttttttttgatatttttttcttagttcttcccaattattattaaaaaaaatatttaattaattagtacttaacactacccatgtgttatttattattaatctctccaatatctataattaaattattaattttgataattattggtgatctacaaagagatatcatatcgaaagtacggcattaattatttcagctatatatatacatatatattccattttctgtattttttttctctttcattttttgtatgtatatataattaatttttagttacatacaatgtagttgtagtgatcatgatatagtatttaatcaatagtaatgggtattctcacattcacatgagattcctttattaaggtcatcactcataatcatgaatgtatattatatagctatacaaaattatataaatatatatatattaatgtcaatataaaatcccattttcacacctaaaaatgtgtaacatatgattgtgtatactcatatattaaatttgtattgagtcttccctagcttctgaaaataaataactaattggtgtacattttcactatattatatgcatgcatgtatataaatatatatatatatatattataatattatataagaagcatcatacaatgaagggtagaagacctaccaattgccatgtgagacatgtcccaaaaggagacaaagatgtaagattttggacctattcacatgcctatttaattatacatgatatatattcaaaattgacatgcttactatatattatataattatatgtatatatatatatgtgtgtgtttttatgtctcctacaaatattaatgcgcttaatcatttagtttactttgaaatgagatggcctaatagttattttggtaaatatcattcaaataattatttaatattctctcttgtgatttcaaagcttcatcccaaaatattcatttgcttgaccaaaagtattatgataacaaaaataaaaaaaactactaattaggggagatgtaacatgcaaatttctattttataaattacttttggtcccgttgtttggtatgtaagcttaaaggaaaatatgaataattatataaaaatgatttaagttttatcgaacatatttgcagaaaagattgaaatactatatttttgagctttaattttacacgagttttggatctacaaaagaaaaaaaaaaaactagttaatatgggtattcggacttccaagcactttttactctcttagatgaattttattaactgagactctatatttataggtgcgatattccatcaatatctgtgtcacattaattgtcataattttttgataattaattcaaaaaattaaatcaagaaatgaattattcggtgaattgaaatctgatcatatagaatatttatctttatcacacatgttagtttcaactcatcctagtcacatgccacatgttcctagcttattggtttcaaggtacctcactcgattgcctacatggacaactttgattagttagttaagttaggttttttttttccaaaagatatgtgctccagaggagttgggctgagaaaaaagcacatcaatgatgggatctgtggatgtactctggtagacaggcatgtgctctggaggagttggcctgagaaaagagcaataactctcgaagtaaagtggacggatggaaggcttttttaagtgagttataaggtgtggtcctttgtttgagggggaggattgttgggtgtgcaacaaaagtctcacaatagctaaaaataggaaagatcatgagtatataaagatgtacaatatctttattagtataagatcttttacggtgccaaaaaataaattcacgagcgcttaagcccaaatcaaaaatatcatatcaatgtggagatagatggtatccgacattcaaaaaaagcgatattagagctcaagttagaacaatatcaatctcaagggtgtgataatggaaagcaggatcttggaaaattttccaagaagatgacttctgtcaaggtagacattgagaaatttgtttatggagagagaagatgagagctcatgttgaaaatttcagattggaaaaagctttatcaaaagatgcaaccaagctaacaatatggaacaaaaagattggggcatctctctcaaaaaggccagtacatcattctttgtgttgaagaagattactaatactataaggtctagattggaacagatgtactgcatgaccatgatggtaatttatttgttaagtatttataagagacataatatatttgtagtaatttatttcctgtacaacagctaatagagttaagtatttttagttttcatgagataaatattgtgttagctctatcactgctgcatacactataattaatggcgattgccaaaatatatatgtttattatagatatatcgtccatattagttttcatcaatattcatttaattgattaatcactttgtccacgtacatatatatagaattttgatgattcatgtttaataggatagacatctggtacctaggacagaccttcgtgtactcattggggcaaatgcatggaatataatatagaaaatatttagaatgcacccttttaaaatggatatattgatgcactcctatctgttttagcatccgaa

SEQ ID NO: 305862 - DNA, 2168 bp, Cannabis indica
ataaattaaatatatttttttatacaaaataattaataaagtagagtattaatttttggttttaatagaattcattcattcaataaacattacataggatatggcaaatcatattgtataacatgtctcgcatagaagagattaacctcaatccatatgatactaattttgttaatcaaaatttcattggctaatatatgagcaacatatattacatgtctctcatgattatagagaacagagctcacgctattctcgctcttaccagtgttaataccagcatcaacgtttagcttcaacatcccattgtttggaggagacaaggtagctttatcccgaggtgtccctatcgttttactggtgtggattccttaaaaatctgccagaaaattgttgcactagtcaaggatttctctcgcatgcggataactcgtactccttctgactccataaacaggacactcccataagaaaattaagaacatcttcctgtccctgtctttgtaattttccatgaaaaccactcatcttcgaaacatacttattaacctgacatccccataaagagtgaaacacgttctcatacgcacctgatgcacattaactacaatttggatttgtccgcactcctctgcatgcaagggctgagttggtaggaatccaggaatgagctattttctacacaaagtatttaactttcggtggtatctttaacttccacatcctcatccaccacgcctcctccaacttgagatcagattgcatctccttaacttgtgagcttgctgccattttatacccactacgaactgagtactttccattcttgctataatgccacataattttatcctcaatgttccattccgaagtagggattcgcaagattaatttagcatcatttggattgaagacaactctaatgaaattctcatcccagtctccattactttactttaaatcgatgacatacagttgttctaagagtggtggtttgtcatagatcttaaaagttacgggtctcggtaaccaagaatcctcatgcaatctaactgatttttattacctaaatgtcatctatatccctgttggatgacttttttccccaaactaagcttcgccaaacaaacgaagcatggttgccacatttcgcctccaacacccctccatttaggaaataacactccttcaaaactttactacaaagtgagtcttggaaccttatgcaccgccaaatttgttaagccaagagagcttgattaaacaatcctaaatcccaaaagcctagccttccttttttcttaggcttacataacactaactattttcaccaatgactcttcttgtctttttcagacaatccccaccaaaatcttgccaccattctatgtatgctattaatagtactcttcgttaactggaaacaactcatgatataagtggggatggcttgaataatagctttaattaagacttttttccgaccgctgaaaacaaagttcctttccaaccttttaatttattccacactttatttttgatttcagtgaatagctccttctttgttctacccacaaaagatggtaaccccaaatatttcccataagtttcaacaactttaacttccattatagctgctactctagctctaacaatcgctgaaacctgtttgccaaaacacatttcaaatttatgaaattcactacttgtcctgaggctttggaatacttctcaagcaactctttgaaatatcgacattcagcttcaattgcctcaaaaaatataaggctatcatccgcgaagaaaacatgtgacacagtcaaccccgtattccaaaagtgatgcctcgaatagtcctagtgtcttcggcatgttgaataagattggagaaagcctcagcacaaaacagaaacaagaagggtgatagcatatcaccttgtcggagtccctgctgtgttaaaacattaccttaaatttctccgttaaatcaaataagaaaagtggactgaagtaacacaaagcattatcttatggaattattacattgaaaatataaattgacattttatttacaaaaaaacttccataaggtaaagacaacatttataccttttatgtgattttaattaccaaaataccacttacactatcatcacttacacaatcag

SEQ ID NO: 305863 - DNA, 1432 bp, Cannabis indica
ccccaccctctctctttatagccaatttttttattttattttttttgttgataaaatccacttaatcgtgaaagtggtggaggtggagaaaatatctccttaattttctcttcctttttggctgacccattcctataataataataataataataataataataataataataataataattattattattaaaattttatcgttcaacaatattaatatatttatttattttatatcaaaaaaattatatttatttcaataaaataataaataatttcttttaatttataaaattttaaaaatatatataataaaaataacaaataaaaatataattaaatatacatcttttaatatatatataagctgtcttgttgtaaaaacacatgtttgttgagtatatatgcatgctagcttttaagcaagagcaataattttgggcggtacgcttctgtatttatcaataaatttatctttccataaaagataaaataaattatttaaatttgtccttttacatgacagtgcatgtattttattttaggataaatactattttagattatttgtattttgtaaaagttattaattagactatttattttattaaatgataaaatagatcttatactttcttaaatgataaaaataagacaatgatctcaattttgaacagttttattttttattataaataactttaatataatttttaatacgaatagatacaaaaaaatataatcagttttatcataacatctatagatcaaattattattaagttttattttgataaaaaatcagttcatcagagttttatttgtacaattctaaaaaatataaaatctattctatcaattaataaaataaaaaatctatttgataatttttacaaaacaaatagttcaaaataatatttagcatttattttatcacttgtacaccgacatttagggaaagaaaatatttataactctgatggctacttgcccttcatgaaaaacagaaaaagacaactctgatgttacttgccacctaaatatatatattattatttgctcaaaaaataatatatctatattattattattattattattattattattattttgaagtggatcgggtagcattattagatatatctaaactaaatattttcatgcattttattttcatgtctaaattaaatattaaatgtatgtatggattataaatctcgttatatggtaattgtaagtaaattattggtagactatacataatgacctataagaagaattgttaatcaaaacttaattacgatgacaatattaatagtatatctattaatatctatataacttattaatcactccaaacacttctaattattctctccttaattctctcactttttaattttttattagggtaaaattatttaaaata

SEQ ID NO: 305864 - DNA, 3647 bp, Cannabis indica
gcagccagagtgacgtactcgtgtataagagtcattcattcgtgggtgtaagggtctaatggagacttgaagtggggacgttacatctatggtgaagggttgttcctactaattcagagactattctttttaccaatactttattttgaagtttgtttaatttgattaaaaaaatgagaacgaatttgttattcaagataagctcgagtatttactcaaacagaaagtaaaagcataacggaataataataaatttaataatccactcgaatatagaaagtaaaaataagctaaatcataataaaattaagattttttttatgagtaaatttagaatcatattacatattttactttaataagatgtataataatacatatacgataaataattattgatataatttaatatcgaatgtaactatactacaaaatattgcattaacataaatataataagagtataatccaatatactttcacatatagaatatacaatctacaatatacaatatgatgttataacctaatgtaaatgtaattttcaagatttttttatacttcaaaaatttactcaattcaatttcaattcattttaaaaaaaaaaaaaaaattaaagtaaagtagatatatatatcattgttttaacccttcctcatcctcatgagttgagattgagatcatctcaattcccaattctctaaactgaaaaaatctagggctttacccaaaagcttttagaattagaagccattaaggactgaaattgatcatcatcatcatcatcgatcaaaccccacaaatgtatcatcgtcgtccggagatcaagtggatgttcgagaggaggaagaagaggaagattgataatagtgaaagtgaacccaacgtgtttgatgatttgcctgaagagttaaagattgagattttacgaagattaccaacaaagaaagctgccatacttactcttgtttcaaagtcatggttttggttgatcacaacaaagatctttcccaagacaaacccaaagcttcctttcatcggtgttgtcctcattggtaactatgattcacgtcccaatacaaccatattgatagaggcccttcaaaattcagactcacattcagtgttgcctagcaatattgaacgtgatagacactatccttttacttttttcacttctcaacataaagttttgatgaattgctgtaatgggttgatcttgttttctggttgtaatgagtctaagaggagttttaactattcatatattgtttataaccctttgactaatcaatgggttgattttgattatgttgttaataagccttatgttactgctaaaagcacaatgtatgctgcattggcttataacccttctgagtcttgtttttatagagttgttcagtttcagggatttaggtgtttgaatgtttattgttcagagacaaggagttggaacaagcttagatatcgtctcccaactcgggttagtacttgcaaaacaaggtggcttaaacagactgtgttttaccaaggggcattgtttagactatccacctctggccatttgttgaagtttgtgattgataaggaagctacttcaatcaaggatcaggctcaagcaattgatttgcctaagtttcaggcttccaaacaccctccaaatagctatggccttaattgtattgggctaagcaatgatcagataaacttcatggcatttgacaaggaattgagtttgtgcatttgggttctttctgatacctatgaatggtctcttagaactaagctttcgaaaatccatgaaaagtatggtatggagaacaatttctgcagacctttggctttccattcatacatggatacagtttttgttggtgcaaagtctcctcatttaggttcattattcttgtccttaaattttgaaaaggatgtttgttctcaacaggaagataactatgtcatagagactttgaacttagaagggtttcagtcattaaattggcttgatgttgctccttcctcttttcactactctcatgtccctttcgcgaatggaatggcgaagaaactttctctgcaagtggaagaatggaagccagaacacacatgatttgtacatcactatgcttgttttttagtttaaattttggtgaacatggtattatttgtcattagaacaaattgatttagtgttcaatctttttagtttgttttgctcaacgcgcattatggttgcgcctacacagattctatgccctgtcattgttagcttccttatactaatgaactaatatttgcttagaaattccttccctacagcatgttcttactttaattactctgtatttcttttttacagaggaagaaaactttcaaaagcttgttgaaatgaacactatgtgcttgttctaaacaatctttgtatttcaaacctttgataaattaatcagtagtagagtctttttggtttctattgcttaatgccaattcacacaaccaagattctttagtgctttgttcactcatacaatgcttaaagaacaaaagcatgagaatattctttctttgtattattgcatatatatttacatatagattattatatgcaatagaaactggtcaatttgccactttgcatcttacctgaaaaagtggaacaacagcaatgtgttgatgtactaagattttccaaaagaatattggagttttgtgttttcttcatcttagtgcacttgaatgaatttcagaccagttacttgattcaacaacatttcatgtcatagaaatttgagatcaaagcctaaactcccaagtcatgtggatgtaagtagttacaaatctttaaacaaaatgaaatacacaaccattgtaactgtccaataaagtcccacactagtatgaccacaagatcagtattgtcaagtcagacactaagataaggcccacaacctaatggtaagtcaacattaaaccgacgttgaattaatcagttaaatctatcgcgaaaacacgagttagtctctgaaagaggatgaagaatgctatatctctattaaagccattgtatgagtgaaacaaaatattgtcattatactcaattgcttgcctagttatttcaaaatattgttctagtttatcgttctttacggtcaaatttactgatttaaacgtcggagttcttttggcctacactattcaagtattccaaaaaaaaaaaaatggacatcttttgctttgttttgtaggttgttagtgagtggaaataatcaagtgaaactatcagtctcaattggttgtgaattttagcatctacatttattttcatttctttgaataagtaaatactattcataaaactaacattaaacttcatttaaccaagacaacaataacttcattgtcatatacctagttacctactgtcaaatgacggtaaaataataataattaaaaaaaattaagatatactctgaaataagagtgtgataaatttggaagaagacaaataaatgtaataaacacatagaaatatactaaggatatatttggtaataattaagctggtaacactttatttttaaattttttaattacaaaaataaaaataaaatttttgtttttaaaattttaattttaaaaaataa

SEQ ID NO: 305865 - DNA, 2361 bp, Cannabis indica
tgagcggtttgagcggtttgatgtacacccctaatatagggtataatagagacatcattatagtagatataattttaaagaatatgataagagaagtaaaaataaaaacaaataaaataaagtggtatacaatataatttgtattttgttggagcgaacccatcatatcaccctctcaatccaatagtccacccctatttgtcttcccttcctctcctttttcctggactgagcaatagaggttaattctctctctctctggttctgattattatttctttcaaatgaaaccctctccgccttagcccaacccttggttgaagaaaaagaacggttgcagctacacgtaaggttacgattattctagctatatatgtacattcattttctttctaaatattgttgtgttaaattttgcatttggaattcatttgtttcctcagtagttttattatcgtgttataattgattatatgtataacatatagttgtctttttctccctctattttttttcttctgggttttctgtttgtttttacagtccaatccactttgagtggctttgaactcatggctgaaaagagcactgtaaagaagggtggtcttccagagaaaaaaagaatgaagacaacatcgatcgctgaggctgaggacagaatatctcaactacctgaggcaattattgtacatattctctcatttctacctactatgaatgtggttcagacatgtatcctctcaaaacgttggaaattcatatggttttcagtcccaaaactctttttctccgatactagtactactgctcccaaatttcaaaggttccataattatgttgataattgcttggaacaccgcaagagaggtctatattttattgcagattcagctgtaactagtttcaagcttcagctaaaatgctgtctaagaagcaagactcgcagcctagataaatggttaaattttgcagttctcaataaggtcaaggaattgagtgttgacttaaacccaggaaaaggtaagaattatggctattactactactgcttacctagaatagttgtcaacttaagagccttgaccattttggagttgagtggaattgagttgggttactcatttagttttccatgtttgaaattactatcattaaaagatgttcggcttgcagataatgtgaaaaatgatgtgatatccaagtctttgttggattgcctatcccttgagaaattgtttttaacttcatgtcatagcttaagtactcatcatcctctccaggtaaaaagttcaagtcttaagttcatgaaaattagatctgatgtatctcttcaagttgaagccgataatcttgaatctttagtgatataccgggcttcctatggggaattaaatctctctgcatgtaaggcaattagaaagctcgtactatattgttgtgattttcgtatgacagaccaactaccggttcaagatctcattacaagcctcccactccttgaggaattgacttttgataattcttattgtaagtggcagtttgagcatcttacaatctcgaatcaacacttgaaaagcttcaaattgattaatgtgaactgcgagagtaaaatgatcaaggttgtcacaattaaagcatcgccaaatttagtttcatttggttatgaaggttatatcaattgtagcatatcagtggagtcacccaattcgttgaatggaaaatttgtatttaaagatcatcatcacaactatgatacaaattggtttatcagtatgatagatttctttttgagtctcaattgttcttggaatagtttaacactgcacctttcttctgataaggtatgtccattacttatcttttatattttggcttcttttttttttccttaatgttatttgtcttattttatttgatataccatacattgatatatctatatgtttcttgaaattataagtaggctctcatcatgccagataattgtaaaagaatatgttgttctgttttatctaattggaagcatctcagagttattatggatcgttattcaaagaagaggcaatcaaacttgagagatgtgttgatgtggatatcaccttctttagaaacattatttgttaatggagaggacatattctagtggctttacaatattatcataactaacgctatataattagtctgattgagcttgtatattctatattagtatcttgttactaataaaattggatactttcattttgcccttgttctattgtattctggagggtaaagatatcccttttgtctaatgtattttggtggcttctttgttttttgagaccccttgttttaaatgaagatccaagttaatca

SEQ ID NO: 305866 - DNA, 2168 bp, Cannabis indica
gcactatacccaaacctattttaaaaaaagataggtggtatactccggccaccgattttagcggagaaacgttgaatctcaacgttcattaagtataaatatgatttctattcattttattaatgtatattggtattatttgtttttgtttttaactaacacaaagctattctttaccatacatagtattatcaagtagacttaccttgttttttgtctacaaatatataaatgactagattaactaaatctcattaaaatgtgtttatatataataattcgttcaaatatatatatatatatatatacataataatgctatagtgatatatatattttatgcacgcattttaaaatagcaatcaaaacgagtattgagttgattgaattggaatacaaaagcagagacaatgtcaaagctgctgcaatggttgactctcatcaaagtgaattggttctgacgccaagtattttcagtaacattagcagcgacaatatccttatgatggagtaggaatgaggctctttggacgtgcaaatttatacaattgatgtaattgtaaaaaaaaaaattaatatgatgttaagagtagagtcaaaagtaataaaacatgatttagaatggctttcatatttgtaaatagaggatgttggcaaaatgatgatgttaagatgtaaaatttattttgtggaatacatttatttaattgactagaaaaagaagtattgagaagtaattaaaaatatctgaccaaaaaaaaagaaattgctaaaagaaagtccatatataatagttccttacaaaaaagaaaagaaagtcataatagttaaagaaataggaatattaatattgtggtggggttttgggaatgttgttgtgagtaataacaaataataagtgcatattgcttgctattaaatatcagtataagtatgccttgcaataatggttagaaattatataaaatctaatatttaattataccaataacaatataatactataaatgtcctacctagcttttaaaatttatctagtaataataataccgatcaaggtctatacatctatgtagacagtggaggtttcgaaaagatcaatttctatatgtactccaggcaataatacgaatttcaggctctttatgagataaactctagctaggtaatgttatatatttatccatcagtctatttaacttctttatcagattcccactggcatgaaagtgatacatctttatgattcccttccatgcattttggattcactaaagagtatacaataatagaaaacgttaaatgaaaaaaaagaaaaaaaaaaaaaaaaaggaagaaaaaaagcaaagctggctatttatgttgagactggacactgtcaaagctggatgttcatgcggttctcactgtgagaatctcactgcttgttcccttttaattatttggacaaatatcgattatattcacatatacacatctaaatagatatatgtttatatcatgaactcattattactactagtatattgtattattagaacaataattggtacagattattcaacatctaataaatataataataatcattaaaaccttattgttatttccctttgttaattattatatagggttctatgattaattatttagttataattttgtcgtaacatgggttatgggattgcatactgcccagtaattaattaattgaaagactataaactaggtttgatttgcaagctagcacctcgatacaatttatttcaaattattttctttgctatatgttataattagaatataattaatcacattaataagcttaatatatagctgctcctttttcacataccacagatctgcatacaaccttttctcagacatttcacagagagagagagaaagaaaaaatggaaaaagaaatgaaagaattataaaaaaaatgtgctttaagataccctttttaaaaacgccaacccttcttctttttttttttttttttcccctctctttcataatggtaggaaaatgagttggcaaacataagttaagaaattaatataataaaaactttttttttttcttttttaatgggaaatattataaaaatataattagcacaaattatatgtgaattgactaatggatattatttttatttacat

SEQ ID NO: 305867 - DNA, 1480 bp, Cannabis indica
gtataaaaaataaagaaaaaatatcttgatgttatttttttttttaatttttaatatattttattaattttttttttttttacattagaactagtgcctaattgcaatagactaatatatagaatttaaaagtattatatttattatttttgtggattgttgcataagagatgatatcactaacttcaccaataaataatccaataattaaaatataagtagtttaataaatgttgcgtatcctatgtacttggatttttggattattattgctattatttgcatatgtatgtttttattttaatcactatctatattaaataatctttattaggatttaatgcatttggtacacgaaaggtgcacatgtaaagtaatgttaaattattattttattccttaaaaaaacaaaaaaaaaatatatgtttattttattaaaaaaaaagcatctttaacttatgtctcatatttacaaagtgtatttgaatatgatagtaattaggtataaattaataatatcttgttagccaaaatattaataattatacaagaaaataatattttttagtagttaaatattttaaaataaaaaaattgtagtaattacactcaattctcatatgggtcagtagaattaaagagtgtaattggagcccctcaattacctcaaattacacatttatactgtaattacacgaccaaataaaaattaaggatatctattttgtttggagaagtattatttgggataaagatataaatttaggagtcagatgacgggtgagtgatggtactcaaattcatccttgtatcgatcggcttctgagattaattacttttcgatctatcacaagcctttatggtcttggttctctatggtgtgtggctgatttcattaaagatgggcgttggaatgaaggtcatctgaagcaaattttttgggaggttaattacaatctcagacactctttgcagtgaggtggctactgtttgtttagctttagaggtgacaatggaacaagaaagtaaatttattattgtcgaaagtgaatccaaggcagtaattaataccatcactagggtgaaccctaggcgggagattgaaattactcaattattttttttgtaatagagccatatcctctttttcgctagttgtacattttgtaatatttctagaacttgtaattatatggcacataatgtggctacgtaggagtttatccacaacccatttggtcgattatctacctcctccattcctaagaacatattgtttaatgactgtgaaatttaatttttctacctaatgaatgtttcttagcaaaaaaaaaaaaaaattacaacctcatcgtagatttatctttgagttgtaaatataattttaaggaaattactcacttacttttcaatattatatataaaaataatataattttaaaggaatcactttatatattattttcttaatttttttttt

SEQ ID NO: 305868 - DNA, 2223 bp, Cannabis indica
atcttagttggactcggtactacggatcgattaaaatatatttgtctgatcatattaacttaactcctatggggtttgaattcctcaagttcgattgtctcggattgacccgaaccaataaacgcaaacaaatacataataataataattatagtatcgacactgctactgctactgagaaagatgatgatatcgtcataatggaagaccaggcttgtacaattgtcaaattcagctgggatgaaattaagaggttcaccatgaatttttccacctctagagttattggatctggtggttttagtactgtttactttgctgatctcacctcatcatcatcatcatctacaacaagtactagtaaatctcatcatcatcatcatcaatttgcctctgtaaagatgagtaacggcagccgtagcgttttcaaacaggaattagacatcttattccgccttcaccatcgcaacatcgttaacctaatcggatattgtgacgatccaggtactattaattgttaattatcaattatcaattatcaattctatgctatgcttgttattaattactttgaatgaatcaatgaaacagaggacgagataggcggtggtggcgcccttgtattggaatacgtctccaacggcagcttacaagagaagctccatggaaatgagaatgaaaagacgttaataccctggagaaagcgaatggccatagcagctcagcttgcggaggcattagaataccttcacgacaagtgcgataccagtttaccagtcgttcatggcgacatcaaagcttccaatgtccttctggaccataatctgaatgtgaagctgtgtgattttgggtctgcgaagatggggttttcatctactgtagtactcaacagcagcacgagaagtaatcggccacgagtgttgatgggttcccctggctacacagaccctcattatctgagaacagggataccttcgaagaagaacgacgtgtatagtttgggagtcatagttctggagctcatcactggaatggagccattctcctcggagagaccgacacagctgttgacgtctttgctgggacctatgctgaataatggtgatgttgaagaggttagtggagtggtggacccctgccttggcggagagtttgacccagaagaggccaaagccatgctttcattggcggctcagtgcctgcgtcacccgcccactctcaggccttccgccgctcagatattggaaacaataaacaatcatattcccatttacatgaggatcacaaacaccaaatcttgaacataaaatataagttattgaattattattcaccatttctgctctgctcttgagttgaattgaacccttcaaagttatttttaccattttcttctttttatacttgtataattgtattgtatacacagttacacacatccacatgttcaatttaagtggcacttgtaaataattttagagcttaggatgcttggtgtgtcaaagacttatttttatgtattgttgggagtgacaaacaatagtaggtaaggtacgttttgttttgttttgttttgttgcgtctttgtgtggctcgtgtgtgcatatattttgatgctagtctcatcaaattatgatcttaaacaagccaaaaatgtggagctagctaagctagcctagccatgtgagatgtgagaggtgagtgtgagtccttaattaggccagggtgacgtttgtcgtcattaatcatatgacccaataattatccaaaaatgcaccaattaatgaagcatatgacttggccagcatgcatgttggtggtggcatggcatattggcatatatattgccaattgcattgctccaacattatggcataactaattgtgtatatatacagctgccttagtttaaaatcatgagcacgtgcagtcaacctctctcatccgtgatagtagctgtatgtagtggccacttcggagctgtagctgtacatgtactcattcattagcatttctcagacattattggcatggacatgaaactttatttctttttgttcactaaattaattaatagtaataatgaaagttaagcccacactgagtagttccataccaaatatttccttgacagttaagtgacggttggaaaaaataaaaatataaaaataggaatgtgaatgagaatgcaaattagaatagaaattgaatggaataaaattt

SEQ ID NO: 305869 - DNA, 1585 bp, Cannabis indica
taggaacattaactataaaagtgagtagaaaaaatgaaatattaaaaagagggtaaaaattaaaatgattaacttaaagtgggtacctcacgcaatttcctctaattataatatgtgtatatatatatatattttgtgggccaaaaagtggtttgatggtgtttgttttgggacaaggattgaataaaagagaaaaatctcaattaacttttaaagagtgtagtgagtgatgttgaagaaacataaaggagaatagtttgtgaatgggtaacattataattattatgccacattgccacgtaaaaaattaaaaataataattaatattaaaaaaacttatattggtaccacaacgtctattatatgcacccaaatcaattatggctctatttttgctacaatttttcactaaataaataaataaaaatattctatttatatcttgtagttgaagaaatagtagtattatttagcagcgtgcaaaaccagtaatgaataattcaactgttttaatttttgatcataattgtgtaacggccagatttttggtccaacgactatattatacttctcaaatttattaattattttcatgtttaattaactctaatttcatacataaccatgtgcgtgttcataattattttggagaaaattattcaccttgtaaatctaacttttattcgttgcctaattttattctttttaattatataattaatcatcttagattcagccttgttccttggcaaaaagtgaaattaaaacatatcctaataattaatatacaaattaattaaattaaagtaaatcctatttattcatatcataataattaaactcataacggtctttaaataactaatatttattatgttgattcttcaacggaataatcacagtacagatttgtagtatatcatttatttattttatatatatatatatctttaattaatattttggtaaatttttttttagatatggtttgcaccgtccaagggaataagtcataaaatcatgattttttttcttttatcaaaattcactgtcttattattataacaaaggatcttaacggtattgaatatactttcttcttcttcataattattactatatattataataactctaaattattggaattatttttaatcacttacttcacatatacaatgttatgtcacatcaaatgtttttctttttaatgtttatgctttacatttttttttttttgtaatatataacatatttgtcaacttaaatataatatatataagaggttaagattgtttcgtatagagattattattaaattctatttctataacggttaatgaatagtttggttttttaatatgaaaacttattgatcaattctttatttgattattattgttattaattaattactattgaggggtttaatgtatactagttgtttattataatatcatccaatactccaagttacattaatataactttggcaacttattatcatacaaattttttagcaaactacctaatttaaataaaccatccaaacaaaaaccggaaaaaatacgaaaaatgttacatg

SEQ ID NO: 305870 - DNA, 1637 bp, Cannabis indica
ataatttcaaaggcaatcattatattattagagacgagcctaccgggaataaacgcactttgggttggcgagatgacatgatcaatcaaatctctcattctatttgcaagaacttttgagagaattttataagagacattgcaaagggcgatgggccgcaaatcacccattgtagagaaatgcttcttttttggaattaagaccaggtgagtgtcattaaggccaagcagtaaattctcagtaacaaagaagtcagtgacaagttgcacaatatcgaaaccaactgtgtcccagtgtatctgataaaaatcgggtcccattccatcaggcctaggggctttatcagggtgcatttggaagagtgattgcttaacttctttagatgagactagttggagtaaagcatcattttgttcagttgtgacagagcgacgaatgccattgactacagagccacaaaccgcacaatcagtagcataaagagatgagaaataatctatgattacctggtcaagcccagaattccaacccttccaatcaccattgttattttgaagttgcacaatttggttatcccgtttacgagaacttgcagtggcatggaagtatttgctattcttatcccccgcgtttagccaaaattgtttcgatcgttgctttcagtaaactttttgctgggctaggatctcaaagtaattgcatttctcacccgaaaaatcttgagccgaggtaggggtatcaatagatttgaacttcgcctgtttaattttacttttagttaaactttgtttgcccagtaagtttgtgaccccattcagtaaggttggagaggcatagattggttttatccgcaagagataggtaatgatttaaatcccaaacatatataatatatttgtgattataatgataatgttataatctagttcattataatcacaaatatatattataaaaaatatgatataaaatttttaacttttatatatttttaattatttttttatataatataaatttatatgcatttaataaaaatattttataatatttttacaaattgtagtttataagaaagttagcttaatgttgtttgttaataatataaatataattttttaaaaaaataaaataaacaataagaaatttaaataatatttttttaaaatattttttttctttaatttttttaaatatataataagtaattaaatatattttaaataaaaaataattcattataatcttttaataaattttttttttaaaaaaaaaaattaagttgtactaagtttaacttttttatatattcttcaataaattatttttttctatcacaacttttaaaaaatataattttttagttagtatgataaaatctcttcgatgtaccgttgacgtgaataaacattgatgtatggtatttacttgatgatgtttgactttattgaaacaaactgaaagaaatagcaattgactaaattcgaaaataacgtgtagaaatgcgaaacctaacagataaaattaagggccaagatgcaaaatggctctaaatctaacaattaagttaataaatgttaccttttttaaaaaaaaaaattaacaaaatgtacgttctgttaaaagtttgataatga

SEQ ID NO: 305871 - DNA, 1017 bp, Cannabis indica
ataacaattgaattttgatgattgaaacaactgtgcagccggactaagcttcgtctcctccgccgacccccaatcttcatcgccgcccccacctcatattttcttcttctaatttctttcttcttcttcttctttttgtaattattacatataaaaagacttttcttgtcgttcattatatatttatatataaactagttatattattatattctatacatatgttttaatgtattgtacttgtacacatcgattcgtcaaatcaaatgatgggtgctttaggtagttggaaaatttttattatattattcatttagctaattactatatgtattttttgtggacatcatatttttctcattaattttttttctttccttcttttgacttatcaaaggtaagtctttaagttccaaatattgaaagctattttaaattgatgacaaaaaaaaatggaattttaattttgacaacttttatttaaaaaatattacttgaaaattgactaacttgaatttataagttaaagataatagtgataagtacattttgattagcttagaattcaagtttgggggtgtagctcatatggtagagcgctcgcttcgcatgcgagaggcacggggttcgattccccgcacctccaataagtcagctatgttttttgccatttgagctagaatttggaacgacgagatgttgcaatagttacgacaattttgaaagatcaaaaatgagttttgagcagtgaaaacgacattaatttataaacaaacaataaaggtgcaaatccaaattaggtgaaaaacgactatagtactcaatcgtagaaaaaaagatcataaataaacaacaaatataattgttgttctcagcaaattttgctgaactatacaaatatttttttatgcgctattttcaaaaataagggaaaaattattaaggttatgataaatatggcataaaaagtaaatgccattaaatatggcattatctaaccaatcaaactaaatatat

SEQ ID NO: 305872 - DNA, 2036 bp, Cannabis indica
tatcattatttaaggttctggaatagctctggaagatgggcattggttagcttagtcctcttgctgatttcatgcttcttcttcttggtcttgttcttgggggtaacaccttggacctgtgcctgggccctcctctttgcagtgttggttgcaggcttcataccattcttctgcagatccttctcaatatcaagcatgtcgcgaggtaattcaattcctcgaaacagcagtttaaggtcatcgtctactttaatgggaaccctggggtcatttgggtacgcaatgtcctcctgagagtccaagtttgatagcagccagatctgaccagcagctttcagactctggaaaagaacagtttcttaatgttcattcctccaatgtaatgataaatctacttataatctgggagctattttcataatagagttgcttggaaaaacgaatttgtttttagtcattctgcacaataatctctttttgataattctttgcaaaataaactttgacacactcgacaataataattaagaccattttgcaaagtggctttaagaattgtctattccactaatcactcttccataacattaatataccaacacaaccactatcttggttcataaaccttatcatagaatgtatgctcatagtttggctaaaaaagagaaatatggcattcttctctggtaaggtaaagccattaacatcatcaaagaaaatcggaatcattcaaatgagaaaaagaaagagaaaaaatgctaaaatcccatttacatttatcaaatgtccctttggtcactgaaactaatgcttctcattcaatccgatccaaacataaagccatgctggaagttcaggacaagaactttcaacaactacactatcccattaggatgactgaggctggtttctatcacaaatcatcacaacctctaacatgaattggttaatcatcaaaatcatcatacccgacaaagcaacataagaagaaaaagggaaagtttatatatgtgtgtgtgtattcacacaagttaaaaaaaaagtttaaatgatcacacctaacagcaatcaattagctaagctcaatagggtattgttggtccaaatcctcataaagtaaaaatcaacataaaatgaaagagcatttggttgacaaataaagaggtgggaatggaaggatttgtttacacattacaggtttctttaatgtcccaccaatctttttattctctctctcttgaacaaatctttttatactctataaattttgtgacgagtcagatggagaaaaattgcagtatgctcaatacatgatggccaatatttttacaacaaaagaaaagaatcattgacaaatcaaacaaacctgcaagtcctccatcacagttgggtatgaatccttcagatcaataacagcaatgccctctggaaatttccgtactaagtaaagaagctggcttttgtcttttaagtcatgcttagactatacatcaaagaaccaacacatgtcaaattattttcttgaaatgaatgaatgacgtattaattttattaaaatgcaaaataaaataactaactgacactcttctaaccttgtaacaaaagcgtcttccatcatggctcactttaagattcttcctcaagctgtcaaagacagttttatttgcattaatatccacatagcatgcttcatttatttgctctggtgttagggctagccttgtctgcaaacaaatataaccacagcaagtcattaactcatacttctagactagttctacctagatttttttaatccagtgataatttcaaaaattataatactaataagaagaggaaacccagtgataatttattaggaagctagaaattaattatcatagggagatgtttactaatttgaaatgaatagaacttatgaaggaatgacaaaagaataaaagctcaagttatcactttctattctgacttattaaggaagaaattcattaaaacccatctttcttcacttatttttattacccatcacagtttat

SEQ ID NO: 305873 - DNA, 883 bp, Cannabis indica
aaaaagtggctgcataagaagaagctcaaccatatcaaaatcagcaaataagcaaaatgcaaagaaagaattttgagatatgttttaactaattttgactaattttttttaagtaccaaaacaatcttttaaaggagtcgactccaaaaaatttcctattgtatgacaaatactatatagatcgttttcagcctaacttattttcttttggtgcttcaacttgtatatcttcaagctttggtgtctccccaattccccaacacaccacacctaacaacaactcaaattcaaagtcattatttgacttcaatcatagattttgtttttttttttatctattattattataccttttaaaattagttgttgtatttataaattaatgggtttgatctttgtcttgtagttatgggattgttgttttatattagctcttattagtagtcaactaggctaatagtttataatattttggacaaccatttattgtaaattactaatacaagacattgaaacacatctcttatgaacttttttttggtaagtaaacaaaaatgcaaaacttttttttaatggaaaaattatctttattaaccaataacttatgttattaggtaaggtaacaaatcggttggaaattactccaaactaaagctacaattaggatataaaattatagctctaacaattaagatataaaattatgagttgccatattagttgatccactgttattaggctaataatttataatattttggctaattagcaatttttccctccgaactgtgacatgtaccaaatcatgcctcctgaatttttttagcagttcaaaattctccctgaactatagagattgttaaatttaaggacttttgtctaa

SEQ ID NO: 305874 - DNA, 5127 bp, Cannabis indica
gaattaatagattccacaaataatcaaaatatgtcaatttggtttattaaaaaaagaaaagcatgtcaatttgcttgctttctcaagtagtgtttttgttgcccaagtttgtagctaagtgttttttctaacaaaaatattgaaagatataggaagcttaagataaaattaaattttagagtcttacatatatagtttaattattatcgataattctagtgctttattgtaataataaaacttataaaaactcttaagagtttaaagattcaacccttcatattaacatatttatattaatctcttgatctcttagcttatagtaatactctttactactatactaaataatatttattatatttttttattatttaatattttatctatataataataatttttttatatattttaatgtaattttttcttttgataataaaatcacacaaaaattttaaaaccctatcataaggttgtaactactaaatgtaatataaaaacaacacattattcatacatcagtaatgtaggataaacacatacataagttttttttttttttttttttttttttataaaatcacaccaaacatagtatttatttaaatactaaaattttattatagggttaaactataaacaccacacacatgcaagtttcgtttttatacatataaaaaaaaacttatactacatagcatttattaaattactaaaattctattaagatttttcatgaaattttttgatgttgtaattagaatgaataaacaaattatagttgtaataaagctttaaatatttaatgtgggtaaatatgatagtgtggttggaaagtaaccaatctgtgaccaaataataacgctggcatgtttgagttaaaggtcggccgcttgatgagaaatatatgtcccaaaatagaaaggaatgggtaaaataagaaacaaacaaccaaagggaaaacctactcattaatgactttcagttttttttattttctgttaattatatataaaaatatatatattatttattatatggcctcccactaggtgataggaagaaaaaaacacggactgcaaaacaagggccacaagcttgaaggcttcctctttttctttttttccttttcttgaaaaagatgtaaagaaaagagggtttatttgagaaagaacatttttcttaagtaatttaaggtatctaatactatattgatgtaacacattgtgaatggttaatactttttatattatttattagattaaaaaaataaaatatataattacatataattttaaatattttataggttttaaaattttatttataaaaagtacgatattttgatatttttattatttttatgttatatttttttattttattttgttattatttgtatatttttttaatgttatttttttttactatttttatataatttttgtgttgtgttttatagaaaaaatgtaaaaatataaaaaagaaaattgaagtttaaaatgtataaatattatatctaaaataatagtataggtaaattttttaaagagtaatttgtggttaaaccctcccaactattatttcatttatacttaatctttcaacctcaaattttggtggtaaaatcttccaaactgttaaattgttagcaaatttaaggcgtcatccatttatctcagttaattgctgacatagactcactatgtgtaccatcatatacacgtggcacatttatattggtccacctaatataattatttaaaaattataaatttttttttgagaatttattttaaaattaaaaacttaatttaaatttataaaattattaacaaataaataaataattttttcttatattttttattatctcctgactctctctctctctctcatcgatctctctttctcactctctctccatgagtcttcttattccttaccaaatctgaaagctcaaatctccttcaagctcttatctccttcccttctcggcggcgactggtccaacagagaccaaactctcttccacgctctccctctccctctgcaactacctctctctccaacagtttccaatgcagaatcaaacccatcagatcagatccctttttctcccatcaccagatcttcctcagagccacgcttttctctcaaccggagtcaaaaaagctcaatctacaaagaaagagaccaccatacactacaagaaatgtcacttttgccagcacatttttgtactgacaaaagttagtattgcgctggtaaaatagaatttacttgtgatgtgttggcaaaaagggactggcaaattaatgttggtattagaacttttgccagcataaaataaaaagtgctggcaaaaattgactttccagcgcgtaaatgtgctggtaaaagttagattttagccactgcaaatgtacgctggtaaaactttgacctctttgccagtgcagtttgtgaatacttttaccagcgcagtagcgaactgtgatggtaaaaatgacatttcttgtagtgataccttcgatgctctctcttgcgcgcgatggaagatgactcagggtggttgaagaaaaaatagtattactttgaatttttatggcgaggcggttagaggtgactcggatgcgtctttctctttgttttgttttggatttgtttttgtaaatattgtatgtagtcttttttgagaataaatcatgttattataaattaaatagatgtatatagttagaatcagatatataatttttgttttagattattttgattttattatggattattgtgtatggttttttaattttgctctgagtttttagattcttggttatggtttcagtgcttggtggggtattgaattcaatggtgatggtggtaaaggtaatagttggtaatattggtaatattggcagtataaagaatatgatgaagaatgaagaaaataaaaatcaggaaaagaagtcaagaggaaacacaaagaagaaaggaaagaatgtaaataagaaaaaaattaacaaaattaattttctttaacaattttttttaattttaaaatgaattttgaaatgattttttataatttttaaataattatataagatggaccaatataaatttgttacgtatgtatggtgtacatgtagacagtccatatcaatatttaactaaaataatagatgacacattaaatttattaacaatttaacagtttggaaggtttcaccactaaaatttgagataagaaaattaaatacaagtaaaatgatacttaagatagtttagctgcaaattacttgaatcttttcagtgatgtgacactttaagggcccacaaatcgtgcacatagtgcaaagcccacttactcttaccactcaatttatctaattcttctacgtatatccccaccacagaccaccatttttcttttttatatcatcaccatcattctctaataccatcaccaccatttttcccaccaccactatcaacttcttccaatttggatattctattccttcctttctttttttctttttggtttattctttagagctatagcttctatttaatattttcagataatttttaacaaaaacttataatagagagaataatagtacgtacaatatggagtgaagtgaagaaacaaaaaatgttccccatatatgtacacattttttttttgtatatttattaacatctagttggtagttcagtcgcaatgaatacggctttatatacacattgatatatctgtgtgtgtataatacacaaaagaaatgttaaaagctgaaataaaatcatccttgaaatattcgatctcgaagggcatgcatgactatatatatatatattgtatatgagcttacatttttaatatacattttatttatatgatacttctttaatattctttaatggatttattagatgaattaatttcttattctttttcatatatatttgaggagaaatgttaagtgtgtactttaaggcctcaaatataataatcataatattatataataatattgggtccatatattttaatttaataaaatattgattatttacagattgttattttggtgtgttgttaacaaataagaatctcataattaaaagatttctctagttaactagccaattttcttttcgcttgtgtatatttttcctttttcttataattaattttttcacgtgagggaaaaaaaccaataaagtactgtactttgaaacaaaagagaactaagaacataatttactaagatttatgaagaaatgagatcaggatagtattgattctcctttatttataatgttaacaaaaagatctcaaaatcccatatagatggttatgttcattagtgcctatggcactaactagaatggtccagagtagaatcgattgccccgcagtagtactagctagatattatatatatatgagattcttacagtactcttataaatatacatatattatttatattgtggatctaattcgtcttatatagtggatctatacaataagactagctcgctagtacgtaattaagttttagatttcgttttgtataatataattgataagttctagctacatattttaatgatagattggaagatactgctaatttggctgttttggctgatatatgttataattatttactgcatgtacatagcatatgaatctgactaagcacaagtgcagaacccattatttggtacttcccacgttatatatattatatatataatctactagaagtttcatgtgtaggattatacaaggtgcattattatatatggttttgaaaatatatactttgagtttgaactcaagtcttatatgattatataaatatttattgatatatataaggttttgaaaatatatactttgagtttgaactcaactcttatatgattatataaatatttattgatatatatatatatggaagaggtttcaatggttatatttttattgtaaccattatgattacatttttttaagccattagattactattaaatggttgtgattaatttgaaaattaaataaaaataaataataaataacttgtaacctgaaagtaacctaat

SEQ ID NO: 305875 - DNA, 948 bp, Cannabis indica
aaatattaatttttaatatttaattaatgattataaatatcacccattagatatttgatccaatgatcaagaataaaatatccatacatgggtaatacccatgagcatacatatatatatatatacattaattgtctaaatgctaaatttggtatagtaactatacgatgcctacttctcgtgttaaaaagaaataattaacaccagctagataaataatagactcttacttgtttttttgtactggacagaagtaaaaggtaattgttgtatcacagaaaagcacctccttttatattgatctgtgattctgatctagggcagagccctagagtaatatttgtaactatttcagttgtaactgtctttatttgtattagttataaaattgacactattattttgtggatacataaaatactaattttagagaaataccaatttgcatataatattaattttttttcttaaagtgtgttggttagaacaaataatttccaacagtaataataattaataaaataataaaaaaatctatccttaaaaccatcacatatttaaactctgcatgcatgtatagaaaagaaaactatcctctaatttatgtcattttatgatctttctattctatgcattttgaatattttgtactccatagtgtcatgaataacagctataattaaagataacataagtaactgaactaattttgtcaaaaccaaaagaaaaaagtccgaaagagaaaatgatccaccaaccaactgctaataaaatttaacatgttcaggtattgtagcagaggtagtcttattaaaggaactgtccccaatatatattactatggagcttcttatatatattaattatcaattatcaatatatatatatatggaagaggtttcaatggttacatttttattataaccatcatggttacatttttttaag

SEQ ID NO: 305876 - DNA, 2079 bp, Cannabis indica
taaaataatttccaacacaaaaatggtgggtcttggtcagtatttgtacttgtgcagctctgcttgctttgctggtagtatggatacaacaatttttttttctttaaagaatacagcagagtaaactaagtagtgtttgaaagttttaaaaagatagtattttttattcttttatattgtagaaagtgattgatataaatattaaaataaattagttaaatttttaaattttaacttttaacttttcctattctctttgatggtagtattttattgaaattttttaataatatatattataatagtaatgtatagtaaatatgttgtttttctttttgataaatataataagtgcattgtcagagaagtgagaagtctattcacattcttttacaaaataataataataaaaaaactcttaaattactagttttatctatatttggaggaggggggggggggggctactctataaaataacataaaattgacaccatgccccccaattatactctacatctgtccctgaatacaatatatactaactttgggccaagtaggtgaggcccaattgaagggtaatcgtcatccgtacgggctcgtacaacttgatgttgacaggtggccatgcgccaccaattatgtacagttgttgttagaaaggtaatttgctttttgtgttgtgcgcctttccaaggattgacacatgggacaaattcctaattttgtgagatctagagtcagttgtatgccacgtttgagtatacccaaagggttgactttcctgacacgaccccttggactacttgtctggctgtgttagccttccagattcgtcgatttagctttaccggtaactaaggcttgagaatttggacctctcatccgacttcattcttgggttgggtcgaggtcgttatgggctttgtgaatgggcccgtaagttaatttaggacacaaaacacacgtgtctgctattcaaaaaatatggataagatttactcccaagtcttaggggctcgagagtcgtggaggcttgtagccaccatccagattcgttgtagtgtgtggggccatgagcaactaaggccttttaaaaatttcaagatggaaggtcacggaggtttgtgagcctttcatattccatgagtggaatacacaagccatcaatatcttggtctgtgcgtgtcacgcgacatggggaagtgtgtgaggcctcagtttacaaattgatgactggtgacgtcagtgagattgtcgaggcaaatataatcatcattacaccttaattccgtacatcgcatttaatgacaacctttagtattctcgcactgttgaaaggtgtgtttccttaaatgtgatatacgcaaatcaccattttgaatataaatatgtgaggggctcatttgtaatcactttttgctacttcgaatttttgttcaagctttccgagagagtaaaccacccaaaacacccaaaaaattttggtggacgtctaattacacgatcggacttccccaccatcttctccaactctggagtactttccagaagcagactcactcttagagaccaattgacctactgtattattgtcggcagacttccacgcgaacatcgataagctgataaggtgtcttaaagctttttcggtgaaggttcatcccactgaaaagaacctgacactgccaatatcaactcgtacatataagtgcttctatcttgtacttgcaatacaactgttttatgggtagcgtactttaggttatgatgccatgcatttttgagttttttttatggttttgacggtgacagtctactgcatgattcgttgtgtagggcaacgttttaggttgtttgcctgtcagtaacatagaaattgatagggacgatggaacttagaaaactcggccatgccttaggaaaattaaggggttgattggttcgtgatttaaaaactgtgttttcaaaatttggtattctgaaatgaaaattttaattttgtgattggaaatatgtttttgaaaatgtgattggcttagtgtctgtaaacagtttttgaattttaaaaaattgaat

SEQ ID NO: 305877 - DNA, 2132 bp, Cannabis indica
aaaataaaaatggaagaaaaattccaaaataaacattgggataaaatccccaaatccctaattaaattgaatatatgaatgtcaattacttgagtttcgtctgcgttttaagaaatgagtgggtagaatatataaacatcattcaaacttgcatttgcagtaaaaaaaaagataaagaagaagaagaagaagggattgaagagacggagagaaaaatatgataaagtagaaaaatcacatgtttctcaaaataaaaaataataccgcgtggtactcttttattcattgaatgatacccttatacatggagttttttttatactcctatattaaaaaaattcctaaatttatattttaatattatatagttatatgtaaatagtttttttttttttttgagagaggaaggatgcccttaaagagagagaagagcgtaaaattacaaggatcatctccaatttaaattgtaacttcatctaaccctatattagcagtgtgcttagtgatcgagacataagttaatactaaatatgttatatataaatataagttaacactaaatatagtaatataaaatacattaagtaaatgtgtactacttactactatttaaccaaaaggataaagagtaagaaatgaggagagagagctacaaatgaataatatggctgcatggcggtggatctgaataatcatgaaacgttatgtatgtaacgtggcagcataattaatatgagagtgagaatcttagtacaactaagctaaacaaaatatattatcataaatttggtgccaacatattatatataattatattattaatatatataataataagacaatgctgagtgttttccatttcggcttgtgtagaagaaaacaaactcatgttatatatgtccaagtgcaaaactagcatccccatatggcacccctcctaatgttattatattcttctaattatgccattcaacaatatattttaaaacttaattaattaatcaacataattgagtactataagtaggacgagcacataaaagtaatatatatttatatcatgacatccaatgtgtgttaattaaagcctataatagtatattctccatttgtttaacttatcttttttggtaacgaaagagtatatatagaagatatatattccgatacccaagaatcttacctcgtccaagattctatttattaatttatatataaacgtaattatcagattaattaattaaaagtgattatatatagtatagctatagttttaattatattaataatggccgggcctacaaagtagtacgtatattgtattatcttgcttgaatagtacatgtattaattatatgtagtactatttgaaatctcaacaaataaatcgaggattaattaaattcaatgtgatttgagggatttcatttgttgtaaaataaataattatttatcggtaataattataggagtagatatatcttgatggattattattacctgaaacaaataccgttagatcatcatgaggcacaccgtgatccaacagatatataaaaattattaatcttttttatagttaggtcgaatttttcaatagttgggtcaaaggaagaaaaaaaaacatagaaaatgatcaatagaagaaatgaatttattggaaaattaaaattattatattattaatgtttaatttagaagaaagaaaacatggatccatagaagatggagttggacttgagctacctgcctctaaaggaaagacaaaaagagaaatttaagaatgaaagtgtctcttcgagtgaatctaaggccaaacgactcttccaactcttttgaaaaaccccattcgcatttatattttgcattaatatgtatatataaaaatattgtataaatatatgtatgaagatgtcgatgcactatggtcttaatgacaaaaatgtcataatgaagattctgggcatattcacttccaaacatagcataaatcataatttatgacccaaataaacaagaaatccaatttttattctcatttcaaagacatgcatatctgttggtggtcgactattcatatatatcttatatattttattacatgaatgtatcatgcctctctctctctctct

SEQ ID NO: 305878 - DNA, 791 bp, Cannabis indica
acacaaattcaaggatcataaagtaaatatgggattcaattaacctataggcaagtcattcatcttatatatcacaatttatttccacacattaacaaataaacatggaactaactttaatagccttttcatcatattagtcaccatttaacatttacatattgttgtttaacaaagaaaaacatttacccattattattcaaaaacagtcatataagatagcaaagtggatgaccaaaacaagttacatgtatataatatatagttacaggtgaaaccgtgatcatctactatagttcatcaaacaattggaattactttatatatctcttcggttctagacaaataaagttaacacttctgttgagagagattaactaattagctagtgacaatctatacatacgtaacgatgacaatggttgtactaacattaattttgataatgtaaaattaaatgtaaagcaaaaatatcaaacgtcacatatatatgtatataataatgttatatatattctataaaggaaaatatattcatttgtacatgtaacatgtcactatataacatttacgtccctgtagcgcaggggaggaggccaactactaaccaatgttgtagctaaacttgatcacattaccaactttctcaccaatctactgtatatatttcaatgtttcttactttagcaatttaaattaggaataattatataaggtgctatttgttttgtaaaatatttatatttttacgttcaaaaaatatttttttacatttttacggttttctaaaa

SEQ ID NO: 305879 - DNA, 3283 bp, Cannabis indica
gggatcaccctatctcaacccacactcaggaactaagttgctcatcttaccaccattgaggtgaacatcaaacgaagtagtcaaaatacgctggcgaatccaattgcaaaactttttagggaccttaaaactgttgagcacatggtcaatgaattgtcagctgagtttatcataagttttcaccaggtcaatcttaatagcaaacaaattctctttaccttttttaagcttaaaagagtgaatgatttctaggaccatcacattattatcaataaaaaattcatattgaaaattttataaaatgtaaaatctcttattgttacttctacaaaaaagactttttgattcggttttaagtgacacataaagaatttattttcattagtataatcgacgctataggcatcatagacgcaaataataatatttttttactttgattatgaaacgacgcgcattgattaaaaaaaagttttgccgaagtaaaaacaccagtaactgaagcaaaaaaaatttaaaaatctagtaattaaaagcagattgataccacacgattttttcagtttcactaaacaaatctcatagctcaaatttacaatattagatgacataattaaattttagcacatgtacgctggtgtacacaatgacaattcactttgacacttaacgtacccaaggggacgaaaggagtacagagcaaaatgattttgtagattggagagttcatccctaattatttcagtctaaggggttgatcgtgccaaacttcaaagttcagaaaatttggttgcaaattatgctaaaaaaattaattattacaatgtataatatattaatgatattatgtagttaagtatatataatgtgtattaaatgctcgtttggtaagtcgtataagggtcgtatataaatagtaaataacactatgtttggataaaataatgtattgtattaattattacgaccaaattttttaatataatgtaagttgtattatttaatacataataaatggtcgaggtcaaccccaatctcttacccaaatccagggacctgactcggaccagacacagacccagatcaaacccaaacccaacttggaccctatccaaacctggacccaaactcagaccggactcgaactcggacccagatccggacccgagactggacctagatctgaaccccaaacttggacccgaagccaagactcagactcgggacctagacctcggacccagacccaggactcggaccggatcgagacccaattcgagtcccaaaccacggacccgaacctagaccctggatgccggatgtcaaacgcggatccggacccatactcggacccgacctgtaatcagttttgcggttgagtttattgaaaacatattataactttacataacttattaatacaatataatataatacggtgtaccaaacgagacctaaatgcacaaaacaatacatcaaagtaactaacatagttatattgaatcacaattttcatttttattaaatacatatagcaatacatgtcaacaatcatgatcattaatttgatacgtgcatatcttgagtagaaaacacataagttactaatagagtttagtaggttttaattaaagaagaattaataaccatataattatttttttcatgggatgaaatttggaccttaattaatttatcaaatatcttctacatacaataggggcaatccttttaattaattaatagtagaaaaacaagatttttgtcttggcatgagagttgatagatgatagttggttcccataaccataacaattggttagccaatatttgagttttgtccccactcaaacttagttggtggcatgatctaagggaaaattaaaaatgtttaaaaagaacaatgattatgagactttaaggaatcaacaaacaaatgtgaaaacatatttggctttgaacatttgcacacctattcctcaattattactatgagttttggacccatatctctattctctatggcttcaatttaatcttatttttggctaaacaaacgcatttacatttgtactataataattttatgtattgctatttagtctaacaacatttacaacactatgaggggatactttacaattagttaataaaagtataacactccataataatgttaataataactattggtgttctttagtaatttactattataaaaagtgagtttgaaaaattattatagtctagtaaaaaaaataagagttgtcaaaatgtaattatatctaatatatgaatttaaagctaattataaatttataatagtaatagtgtttcaccgaggagatctaacaatttaaatacaaattgatcatgttggaaaaaattgaaaataacatatcttaaaatgattattattttgtttaaattaaacacatttttctttaataatcaagggttataattgtagatctctgccttttagtttagtttaattttttttttctataattgtgtgttggacttatttaatactactagtaaattttttaaaaaaattaaatgctaaatcaagtagagagtaattattattattattattttgtttgttagccttaaagttttcacaatactatattatttctctattaattaaaacaaaagaagaaatgttcatactaagagagttttgctacatcactatatggtatgtcacattagagagtactttgtttttatttaatttcttattttttttatctatatatatattttaaatctcttttagtgacacaatacagacagatggcacctttgacaatggacctaaaatgtttaatataaactcttaaattaaataaaacaaataatgggatcccttacgtacatttcccactcttcaagcaaggattttcttttttcttttaaaacaaattttaaataattaataatccaataaggtcataattaactacatcttgaccactaattataatggcctatatgtacgaaactagacaaagattgaggagtagtgattatggcttaagcatctttattaataaccactaaataaattgattcaaactttccaatatatcttttaaaaagctatgccgacccaaccattgtataaattagacatatatatataattataattataataaaccattaattattatgttatattacaagggaaatttcaatttttgaccctaataatacaacctatatcaaaatttataccactttataatttgtacaaatttagtccattaat

SEQ ID NO: 305880 - DNA, 2034 bp, Cannabis indica
gctagagaaatatcagccttacttaatatgcgaagaatgaaaaaagttgccacctatctcagtctccctttatttagatctttcaaccgatctaaggacttgcaattcttaaccgaaagggttctccaaagagtgaaaagctggaaatctcgactgctatctaaagcaggaagagcttgcctaatacaagctgtgggatcctctatggcaacttatgtggctgcaacagatccgataccgctgaaaatttctcgtaaaatggatcgaactctgagagaattttggtggggtgatactgagatcaaaaggaagttgcaccttatcaattggggtgtgctgtgtaaaccgaaactcagaggaggcttaggatttcgaagtgtggaagagattaataaagcatttatgactaaatgggcttggaaggctctcactgagaaggagagtatttggagttccatcattaacgcaaagtacatcaaaagtggaaacttcttggatattgaaagcaggggcagcgactcagggatgtggaaagcggttctacaagctcggtggactttacagaaagggctatgtagatcaattggtaatggcaataatacctcaatttggtatgatccttgggtgccttcttcgaaccgtacccccattccccttaaagatgctactcatggggtgtcatgggtaagtcaatttattttgccaaacaatcggtggaatgttgacatggttcgagactggttttcgcactctgatgcggatgcaatattgaacgttgatttgcctgaggagaataaggaagactcctggatttggataggagaaaacagtggcaagttctccattcgatcaacctgcaaacttattaagggaggcacttctgagaatgatggaactgaaatatggaaattgatttggcactcccccctccactctcggctgaaatttttgtggtggcatcttttacgtgatgttcttcccacaaaaggtaagctttctacgtttttggaaggaatttctgatagttgtattctgtgtaatgaagcttcggagtcttctctgcatctgttctggttttgcccgtttgcgaaagccctgtggtttcatcttgaatggagcattcgcactgaacttgtgaatgttcaaagttgggtacaatggacagagtggttcaaaatggattcaaatagaccatccagtgtgtcattcaacgatttcatggcccatacattatgtattgtggagggtatttgcaacgagcgaaaccgaaggcttgtggggaagaaagaaaacgatattttgcgtgtcaaggagatgatccgcctcaaaaccttagatcatatcttggtctcttcgaaggttgtccctgacattttaagttgggcgccgcctcctccttcatggctgtgttgtaactcggatgtggcgatttcttcggctggaagtatgttagctgctgtgtttcgtgatgagtggagcaatattattgcaataaaaacttccaggactaatgtcaatgatccgttgcttgcggaggctctggctgtgagtatggctgcggatgaggcgaattctatgggagtcaacaacatcattttccagagtgataatctaaacgttgtgaatgagttccaagatcagacatctcaagtgttcaactttagaattcggtatgccaaagctcggttttcgaattcttgttctaagtttaaggaatggggtattattcatattccaaggagatgcaactttatggcgcacaatatcgccaaatgggaaacttgttacaaggtttctgggaggattagctctgacgctctgcctccggcggtgcttgatgacctcattgagtgggatcctggactttaattagttttcttggtccagttctttgttgtagtttttttttcggtttgttgttttttccggattttagtttgtttgttttccctgttttggggtgttttttgcaccctctaagttatcaaaaaaaaaaaaaaaaaaacctacgttatgtggatgagatataatgac

SEQ ID NO: 305881 - DNA, 2152 bp, Cannabis indica
tatctgcaaaacacaaattattcaacttaagcttttcacacttgtcatgaaatcgaaagtcctccttcaagccaattctcatcagtattctcgatagatactccatccctaacacaaatagtagaggtgacatggagtttacttgtctcaatcctcttttagcttcaaaaaagtcatgcaaggagccattggacattaaactaaatcttgaagttcttagacaagtcatgaccaaccaaatgaagtcttctgggaaactcaaagcatgcaatatctcttcgataaagtcccattctatggtcttacaagcattccccaaatctagtttgatcatacattgaggcttggcctttcttctcccataatgtcgaactaaatcttgacacaccattatattgtagccaatgtacttaccttgtacaaatccacgctggttttggactatgatatctggaagaacatttcgtagtcttgaacaaattagctttgttgcattttcataaataactttgaataagctatcggtctgaaatccatcactgaaattgggcatttaatctttggaatcaaagtcaaggtagttgagttaatttcttttagaagcttacctgaatgtaggaaagacttcatcttcgaattttattatgatatacttgtacctttgtttgattacctctgtaaactaggattcctctgtcatgttttatgttaagtgttgatttctttctcttctccttgtttcctcgcccagaaagacaatatcaggaaccagagagagaatgttgttctgtccattgcaaatgcacagacacgacttgaagtacctagcgaggctgatccagtgagttcttttcatcctctaaccatgccatattttcaagggtcatttctgctattattgactgaatttgctaagcttagggcaatcagatttatgtgcaatttattttctttgtagtactcattgtaaactgtaatcattataatctagataatttattgagaatacatattctatatctatttttaataatgttggttgttattgattacttctaattttctattctactgtaaattaaaagaaccacattgttatatcatatgcagtaagcttcacagcggcaagaaatttaggatgtttctctttcattaattactctagctggaaaacacactttgtttagtttcttatttttggtttaatttgtatttttatattttatattctcgtggacaccttatctccccttgtttcgttttttgatgattagtataagttttgtttagtattaatagagaaaggaaaaaagtgacatatttcaactactgaagttggttttgttgcactttctgagttccagctgcttcctacacaagttccagtttatatttagtattaaaatcgtaattttttttgtagaatcttcagaatgtcgtacttgacattgtaaggtactaaggttccaggaagaaaatttggtgggttcagtcttgtgttaacagctggtacattaattttgttggtctaagttattgagcagatggtatcttatttgattagcaatataggtagttgacaagttagttatagatgtaagttgctgttatttcttattgtttactttcttccctgttaagttggttcttcattttctgttgtgcttgttaactctgctctctatacgagttccttgctaagctttgtagcttcttacaaagacttagaagttctcattcattattgtgttactttcatagactttgtattgataaatctcttcactattgcatgcgaagggagccccaaaaaagatcactttggtctcataacctttttgtacaattcttgtttcaatttcatgctgaagtatatatctcgtgatcatgcaatgtttgctgtacagattcacaaagacagtgattggcagaacctgtgtggtgattttaacttccttaaaaaatgtttctatgtttcagaaaatagatgagaaagcaatcgatgaggtattcttgaagctactggataattatatcaaatggtgcaaatatttgcgtacacgcattgcgtggtttaggtctcttttacaacctgtttctttttcttaaatttcttgcttcagattttactcttcttatttcattgtttttt

SEQ ID NO: 305882 - DNA, 1880 bp, Cannabis indica
gcttgtaaatggacaagaaattatctataagtacaacatatctatcaatcaataatactttcaccttgaatcctattatgaaagaaattgtaaatagtccaatcaaagtgaacagagtaaatattttctttattctatctaaataaaagttgtgctgaaaaatcacaactcaagaataaaatgaaaaattaaaactctatctatcaaaattcctattttttttaacattaactttcaattttctaaaaatcaactaaaggtggcactgacatcatttgttaaaattttttatcactcataaaaatatgcaatatcaaaattgatttcatggacaaacatatcacatgttattataagcatagatctaaatgaaatttttgttgattcaaagaaaataactcaaatagcagaagtatacctcaatctattgatataggtgatttatgtggtaattttgagtaatgattttccataagacttgggttttttaattttctctcttaatgggggaagaagagattagattggctcttgtttcttggggaccactaccaatatataacctcatagctaggttattaattttaagtatttctaatttaacccctcaataatttagaaatatcctttaatgtatttatacatttaacctatgatactttaatatctatgacccactgttactaaaatgatcggatcaaacttgaaatagcaatacactaatactatactatggaagactccaagaaagtttagagtggaagtttggctatccaagctatatatattataacaattaacctttgaagaatggatgcaatgtgtaagctacaaagactaaggcatatatagtcgagctatgtatgactcaaatgagtttaatttctccctatttcaaaatgaaagaaaagatataaacaagtagtatactaacaagtagtaataagagtagtatttttataaataatctatgtgtgtgctactctatatatatgtattctcacatgtgacatgtctaagaatattaatattatacaattattgaatgaccagtaatcatattcgtgggtcgttattctataaatatatataataatatattgtaaataacactgcacatgctagctgaatttaaaaaatgacaaaaagaaaagaaattaattgaatttacatgctagccgaaggctgttctttgctcttcccagacctccaactcggatcatcgtcctttgtgtctgttttctggtggtttggaagaaaaaattagaagatgttttaagtttgaggaagcctggactagggatgagaggagaaaattagtggtcgaatctgcttggaagtctgtaattcactcttgggccccggccaggatctttaagaaaattggggctactcgggttactctcatgcattggaatataacccaatttagtaaaattgacactcttatcaacgatttggaaaggagacttaatctcattcaaaaatttattgtgagatcgagagagtgggcgactgaaagggacttacgtcgctctgttaatgaggcacgggtgaggaaagatttgtattagaaacaaagggccagggtctcttggctgaaggaaggtgataagtgttccaagtttttcttcctctccgcatctaccagaggtagaaggaatgccattcagagcatcctgaataaaggcaatatgtggatcaccaaaagagagctaattgtcaatgaattcatggagttctttacaggaattttcactggtacagagaatggccatgaacttaattgtaacgacttaacccaggaaagaattgttaggttttatgccctaaataaaactccatttcaatgtaatctattttattcaacatcaataaag

SEQ ID NO: 305883 - DNA, 2173 bp, Cannabis indica
acttatagtaaaatggtccaataaccaaattaaacttttcttgatattccatatgacctttaaccttgatactcttaactagttcaaagcaaaataataaagtgtcatcaatgcaagaaacatgtctccttgttgatttttcaattgatttgctagttagttgtatcaacttgtatttatttatttatttatgttagtagcagcaagtaattgttagaaactgattccattttaaatttaagaagatagatattttggatgtgaatattgaatttttaatattgtatttttcgttacgttacaacatgatttgaatattgagatattaagttttcttttctttgtgtgtgtgtgtgtatttctatagtttagtatacttgtcttaatttgataataagcttattattagttgatcattgtggtagaaataattaagaaaatcatgttgtgggcacttgctgattctatgtttcagtttaaattgccaaaagaaataattaagaaaatcattttgcttgtcgaacacatagaaatatcgaaatggcaacctatgcagctgaaagagtgaaagagtttgcttctcaaaagagtggaattcatgtactttttccaaacatatatgcatttgtggagaaagtgaggccgcattagaaggagaaagagatcaccaaagtgtccggtacaaggctaatagaagttaatggaactattcatgagttcatctctactgatgatagtcaaccaaagcaaagtcaaatttcacatatgctcgaagaataaatttcaggcctagagatgctggccatgaacctgatttggctaatgtcctgctttagaagaaacatttttactttgtaaattgttggctccattagtaaattccattgttgggtctgatatagcatatttgatttctcacagtgaaattttgcatcattttctggtgttcccttatttgattaagactttttttcttctaaatttgatagcaaaagaaaatgattatatccaaaacaaaattaatacaacaacaaagaaagggctttttacaaacagttggccatcttttaaagttcatataccatttgtcttagaaattttatcataaaacagtgttgttgatattcatatacacaaataaaataaatttacggctttgcaacacttactgatcaattcatagaatacttaactatataggtagaccaagaaaaaactcaaaaataataaccaataattgatgatgataaataacatagaggccaacaaagcatctgtatagagagaattacctacctagctggttcttaaaatgctctaatttaccatagtatatatgttgtaaagtgtattacatgtagtttacatttagtttatttggtgttagaacttgaattaggtcttttatgtagatgaggagttaacaagcaatctggaaagtttggtcaaagatgatgttcagttggatagaagtttcttcctagtttcatcacaagattcatcgactaaattgtaaaacccaagattctttttgacatatgtataatgtgaggacaatatactttatttagaccatgtatttggagcagttgggaaggacttaagctagagctatagttattacctgaaatgctcttctgtaagaacttatgataaaagagtgcaataactaaattaagcttttcttgatacagcatatgatctttaacattgatactcttaacgagttcaatgcaaaataataaagtgacattaatgcaagaaacgtgtctccttacttgttgattttgtcttgtatcaaactctataaatataagtttctctcaagacttaaattaagttttacaaagtctttagaagttttttttttaaattgtgtcctgttaagactttgtatagataagttctcattctcatgcagtaaatgaccttcacaataaatgaccttcacagttgtattggcttgctggttcgtaggcgcacagtttcaaagttcactagtgtattttgcgaccatattcaacgtcccacaacctcaatcttgaatcaagaccagaggtaaaatcaaaatttcatgtcaattcaatgtagttgctccaataaccagtagcggatttaagatttaaaaaaaaaataagaaagatgcaatactaaattaccatagctgagtgaa

SEQ ID NO: 305884 - DNA, 2079 bp, Cannabis indica
ttttatccctattaagccaagctcgaaggaattatcatttttagttctatgtccagacagaacctatagatttcgtatctataattagtgctcccactcaattgaactaccatgtccttaatctgtatgtcacgagaagatccattggtcaactttaacaaacaaattaaagaatataaataatacaactaaactagaacctaaccatcttaggattaagatcatttgatctaagatgaactatgtaatattgaattagatttatattacattaagtttgttatatcttatccaagttcaattcggtccctttcgatgcatactccatacatccaacccaagcttactttaaccaataccttagaaatgacatatcacttatctaaggtacaagtaaactacattgtagattatcatatcagttaaatcctgtgtactgataaatcataagaattcatttaatcacacaatcttgattactttccactgtgttgatatcacaataatcaagaatatcaatatgataaggatttggatgaatttaaaaatcaaacaaatgatcataaaataaacatgtgaaccaaataacacattaaacaagtaatgaaataaatctatttctttattgataaatgaatatagaagattacattgaaatagagttttattcagggtacaaaacccaacactctacttatctggtcagggtattaatggtcccacaccacgagctccggggattctgagtggtcactactaacttctaaatcctcaaagctcaaattcaaaaggctttcaccagatgaagatgaatttgcactaagctaatgatgattctcgtataggatttgaaggagatcctgttcgatatgatgttcacctccctagaactcaccacggttaatctataaaaagagggagacaaaaggtgagagctggacaagtaaaaagaaggagaaacatgtctgatatttgggagttccattgagttccattccaaaatggaactcccaaatccaaaattttgaaattacgaagaatatttggaatttttttttggaaacctatgaatgggtgaatttagataatttcaagccaaaatggtaagaaattagaggcttaaagttctgtgcgtatgttagttagagttaaaagccctagtacctctactctcagattagttaagaacaattcaagaacccaaaattttgcagtaagaaattcataatataatgcatgcatttaaagaaaattgcataaaagagaagaaaagataacttactcactattcccagctttctgaatgtgctcagagagtttcagcaatggagactccaagaagatttcttcatgaatttgggaatgaaaagagagaatatttttgctcgtgtttcctgaaaaataaaatgcctaaaagagtttcaatgaagctcaaatcccattttataagcacttaaagggataattaattaattcaaattttgaatttttagggtttcttctcaaaaaggaacgttagtactcattataacagtacgatgtcacgcatgatgtatcaactgtcagtgcaagattcgaggtacatctttcaagatgatattaaatgtcccagatattgaagagacattcgctcagtcacgttagatcaaagataaaattagaacacacgtcacccatccgatcagcttcgtggttgagtaagtctacgtgcaactaagaagatcccgctcaaacttgaggggcaaatgttatccaaatttctacacaaggtgacatgtcatccatctaggtgacacatggaacccattgtgggattttatggcctaaataaaacctaattttattgtaatcttatttacttttaataaaaatcaaaaaatataccttgaccttgtcatatgctttgttcatatattttatacatgattataggtttaatatataaattttattaaatcccaaatatataattattcataattacagtgatgtcatcacagtgaaaagtaattgtgattatatgcttcaaactatttagtcctatgatttatcaatgcattgaatttacactaacatgat

SEQ ID NO: 305885 - DNA, 2193 bp, Cannabis indica
gtgattttaaaactgacggtataaaattttagtgttagttttgaaatagcacaaacgattttgcatcatttctaaatcgacacaaaatattaaaaagatcattgtatattttgtgtcaatttttaaatgaagagaataattttttgcatcatttaagaaacgacataaattaaaaattatttgcgactatgacatatacgtcgcttttgtagactgacgcaaaatttttaaatgtcacttacaaactaacgaaaataccccttttatagtagtgctaccttgattcctttgcctccttctcaacaatctccatttagattgacgagagtcttgggggttatcttgtagaaaattgtttgatgcttaagtcggaataggctcttggcttagagagagagaaagcatagtaaaactaaaatttgaatttagtgagatagaatttgatcgattcattaactaactcattttcttactatttttgtgttctttaaggaagagctctaatgatggcagaaaaatcactaaattcgctaaatgtagttgactcagcaagaatttgaactctagaccccaggctttctgcttatgctctaacccttaggtgcatggatcgatgacgtcaacattacacattttttattttagattatcaatgatgtcagtacactactacaaaaaaaaaaatattaatttcgtcagtccttaaatcagtttttcttaagactgtcgctaataaaagtaagtgactgtttaaaattattgacaatagttgagtactctcattagttttaaataatcatttagtattcctaaaattttaaaattgttacgagacaaaaattgaaacatagattcccatatttatataaaaaaatctagctatctccacattttaacctaaacctaatatatatctctcaaaacctttctctcttcacttgaatctaacacagtcccacaacacatgtaaacctaactttcaaagcctctctctcatgttaagactctctctctctttctctctcaatctgtccctctccgacgccaatgtagtcggcatctcttgctcacgatgatggtggctctcccttgctctagatctcgcactcgacaacaatgaaaactctctcgttctctctctatctcatgttctccatttgggaaaggcagcgagatcgaagacagtctgatctcactctcttgtttctctttctattttgctctctgtctcactctcgttctttgcttccttctctttctcgtttttgatggcgacggtcgtaagtataatattccttatgtatgatatatatatatgtgtgtgtgtttgtgtttataaggttaatttattttgaatagatgacaatgatcatgatgatgatgatgatgatgttgttgtgtttgtaattaggaaccattattgattacggacaaggctagaaactcgtccaaagacaagactttgtaattattgtatacatcatgctttgttggttggttgtgattctttagctcttaaattaatgtcaaattttgtatgatatgaactgatcgacaagaaaaaatacgaaatgtacaactgactatgcaaatcgtcgcttattgtaataccctaaagtttaataactagattagcaaccctaactaggttaattaagtgttaatgagaaattatgttattatatgatttaatatgtggaaatattgtgatttattgcactttaacacccctttagtaggtcaggggcatttttgcaattttgacctgagatgggtaaaatcataatttgatagcatattgtgttcatggactatattattatatagtatatttattttttccttctgcaggtattttctgacaagtcggcacagcatagtcacaaccgggtattttgagtcgaactgggttcgagacccaaaatatatttttgagatttagcttatgtgattaatgagaaaatatgatgtatgtgatatatgtgtgtgagtggaatgaaaaaattgacttttttatatgcatatggtaatatatgtgccttaggggcaaaatagtctttttgaccaaagaatttatttctaataaaataatattttagccgaaaataaactcattttctggattctttcaaccccagactgccctctctctctctctctccctctctccattttatagttttcaaacacaat

SEQ ID NO: 305886 - DNA, 1018 bp, Cannabis indica
tggtatgttatatatatatatatatatatgttatttgttaggaagagtagtactactaccttttatctatttcctttctatatatagaggttagacttactattaattacctagcccgaacagggcccatctcaaaaacttgctgtgtgcctaacaaaaataaaaaactttcaagaaagtacaatacttttaacttatacacattttattaattcaccttaattaaaaggattgacttctagtacatcctctatcctctatttgttttaatattaagaaatgatttttagtccaatttttatgttttatttatttaagattatttataattttagaataatttacagtgataaaaataaaatttaagtaattacttactaaacatataaaaaaaaaaaacaaacatgtatgcaaacaaaacattagcactgttcgtggggaatttttaacggccaaaaaagttcaggggacacgatttagtacatgtcaaagttcggggaaaaaattactaattcgcctaaatattaagagagtttcaccacaaatatctcaaaaaaaaaaaaattaatttatatgtttgatttaaaatatatttatataaaaaatatttaattcaaaccctatgtttaagttttttcattgaatatatttgcatcattatatgttattttaggcagttttatatgtttggtgtactatatcaaatatgtattttgtacatataggaatgttatttttgatataaaagaaaaactttattattaaatatatcattactcactaattatatgagtcgaaaacattttttcactcactccaaaattcccacacaagaaatttctctatatcatatttttttttcttttgaaggtgaaaaaccgtgtttttgcaaatgtcagttgtatataagaaaatataaaaactgtaagcgtttgcagcagcagaaagtaattctgctacagcaaaactgaacaggcagaatataaagtatttgcagaaaaataaataacttgacaca

SEQ ID NO: 305887 - DNA, 4037 bp, Cannabis indica
tgattcatgaacatgaatatagaatttgatttgaatcttgataataggttgtttgtttgtggttgattgattaatgcattttttctcaatagtagatactatgaaacaaattgttatattatatatgtttaattaataaaataaaaaataaaaaaaataattatttgaataaaaattaagtttttttaaagagctgaccgagttcactgagttgaccgggcaacccgccaacccgctaaacccgaccaaccgaaacccgccaacccgtgaccctgccaacccgccaacccgtgcactattcgggtccgggtttggtttcaattttttgaacctaaaacccgtgaacccgaaacccgccaatgtgaaactcggtaaacccgctcgatgttcagtcctaataaaatacacaaaataattaattaaccgaaatcaatatcaaaataaaattgattaaaatcatctcacgaactaccatatataataccaaacaagcagcaattaatagtaatattaacttttattatagctaatttgcatcttcttcattgaagcacaactacaaaaaataacaaaatataattttatggtatattttggattaaatttaacccaaaatttgcacattgtgtattagactatgaaaatactatgaggcttattagtaatttgtaaagggtgtgaaatttatatataattgtgtagttattattggatatggaaataaaaaatagaacttttgttcaattgaagtttattactgactcgaaaaatatattttagaaaatttaattatactgtctcgaagaagattgttatctaataaggagtaagattgtgatagaataattgggacagatgattttttttccgaaccactgtgaagtcataatattcattttcttttcgtgagtttgatgagatcaaattgggcaacggcggtagtgattaaaatatgaagagaaaaattgatgcaaggtaatatttgtgaaaaattcaatttttaaaattagtcaaagaataaagattattattataaagtttgaaattcaacaaagttgtatcatataatttatttagagctcgtgtggtacgttgtattaagttatattgtattgtattacattaaattagattatatatatatttttatataatacaatgttaaattttaatttatactaaaatattatatatttaagtgcccataaaaatcaataccacgtatagttttacataaaaatattacatgaaatacaattcaatataatcttatacaatacaatacggtgtaatacggcatactaaaggaacccatattgttttaaaaataaaataaataagagaaatcattcacgaatgaaaggtgtaagctgcttcctgatttttaattttttatatatataagaaaaaatgatttgtgtacttttccttgcatgaagttgtatataagaaagatctcaattcatgctaatgcaaaacatataaggcttaagaaaatgaagtactcatcagtatcttggtttctttgcaaaatattattagtttatcttctttcattctctatccaaacttctcaagctaatcctcacaacaactttcttcaatgcttctccaaacatatctccaacaacaatacatcacttgccaaactcatacacactccaaatgacttttcatatatctcccttctaaattcaaccatacagaaccttagattcacttcaacaacaccaaaaccactagttatcatcacaccttcaaatacatcccatgtccaagcctgtgttttatgttccaagaaatatggcttacagattcgaactcgaagcggcggccatgactttgagggtgtctcctatgtgtctaaagtcccatttgtgatattagatatgagaaatctacgttcaatcactgtagacgtagataacaaaactgcatgggttgaatctggagctacccttggagaactttattataggattgctgagaaaaatgagaatcttagttttcctggtggctattgccatagtgttggggttggtgggcatttcagtggaggaggctatggagcattgatgcgaaaatatggccttgcagctgataatgtcattgatgctcacttagtcaacgctgatggagaattcgttgaccgaaaatctatgggagaagatttgttttgggccattcgtggtggtggtggagcaagctttggaattgttcttgcttggaaaattagattggttcctgtgccatctaaggttactgtattatcagttagtaagaacttgccgataaatgaaactgtgaaaatttataataagtggcaaaatattgctcacaagtttgaccaagatttgttgatggtagttaggttcttaactgtgaattctactgatgagcatgggaagaatatgacaacaatacaagctacattcttttctatttttcttggtagagtggataattttctttccttgatgcaaactaactttcctgagttgggtgtagtaagaaaagattgttttgaaacgagttggattgaaatgatctttttcttcaatgaattctcaagtgaggataaattggaggttttgctcgatccaacaaatgtagtaaagggttatttcaaggggaaactggactacgttaggaagccaatttcagaaattgttatggtcaaacttttggaaaagttatatgaagaagatgtaggattggcatatattcaaatgtacccttatggtggtaaaatgagcgagattcctgaatctgcaattccattcccacatagagctggagttatgtacaaaattttatattggtctcagtgggaaaaagaagaagaaagtgaaaggcatatgaattgggttcgaagtgtttataattacatgactccatacgtgtccgaaaatccaagagcttcatatattaattatagagacctagatttgggaacaaataatgaaaaaggtcctataagttatgaacaagcaagcatttgggggaaaaagtacttcaataaaaattttaagaaattagttcaagtgaaaaccaaggttgacccgactaatttctttaggaacgaacagagcattccacctttatctccacgatttctctaaatgcatatatatatatatatatatatgttataatttactattaattaatgttgtattgtattgtaatatttatacgtacggtttgtttcttcatgtatctatacaataaattaatttgtgtttcttcgtcatgatttataaaaaataaaaatgtttgctttcagtatcaaatggtcttacatacaaattagtctatttatttatagttattttattagagataataattgaccctaccttatctaatagctgcagttttactacatttatatgtgtcattagaaatgaagtttcgtaatattgattacaaccagcattaagggagaaataaccaacttacgtatagattcctcactctaaaacaatagtgtgtataatattaagtctatttatttcatattaaattaggacgatttgtttgaacagccaattgtacttatttttataataatttagttacaattttttattaattaccatattattaaattccaaaagtccactaatattctaattcagattcaacaatatatatatattgatttgagggtatataacataacaatcttagttttaaatattatatttttttattaaatttcaattaataaaaaatatttctaactaaatttcgtaaattctttcttttttgtttatttggctaattagtaatcccccgaattttgacatgtaccaaatcatgcccctaaatttttttggccgttaaataaaattccccctgaactattgagattgttagatttaaggacttttgtctaattttagtaaaaaattctaacatggatgaaagttcaaagggcatgatttagtacatatcaaagtttaaggagcatgatttggtagatatcaaagtctagggagcattgtttagtacataaacaatcactgaaataa

SEQ ID NO: 305888 - DNA, 1771 bp, Cannabis indica
aaaaaaaaaaaaaagattaagattatgaaagttgaattaagctattcaatataagttcagaaattaaagagtggctttggaccacattagtggaggaatagtcatatcatatggtaacataaatgatatttgagtttggagcgtcgtaaagatttgaccctctcaccagacagaccaattccacttaataaagtttggtgtgctaagtcggtcatgggggtgtactactactaaaacgtgtaaaagtaagtttccatgatatatatacaaacatatattatagttatttatatcaatggctttttgtgcgttgttttgttaattaaggttgtcgacggctgcagcttaagctgtaatcgagtcatttgcttgcaaaggcagccatgaaaatgagaggggccaagagtagttccaaaggcaaacccaattgggtctatgtctcacttttccatccccaccaagctctctctccccttgtttacaagaccagtagtttgaaaatactgagagaagagagagagagagcaagagaatggtgacattctgccatattaaaccaaaaccttgtcatgaatccaaatatcttaccaccatttcagctacaatatttggatacagcccttcagtttttttcttccattttcatatctttatttccactaaattcaggaaataagatcagcatggaagatatcatcaacgctcccatgtgttctggcatcgtcatcattaggccaaaagtcaatagtaaaccatatgattttcttaccctccgattgcagatgaacatggacaagacagtagattttagaataataataatgctataattgatactagttaaacaacacaaaagtccccataaatcagatagcatccatccattaaaacacaattcgatcaaaaagacaatgatgaaacagaaggaccaagaagaggtgataggagaagcttttgggggaattcccctgtatgtctaaacaggattgacacggcataacaaaccatactttgcatattgaaaatgcaatttgatccatggatatgtaagctactagaagtaggtaccttccggaggttgaaccaacatccagttatgtggcgcagccatctctttcttcagctgtatcagtatatcttccatggtgtgtactcacgctgccaattcataaggagtccaaacttcttcggttccacctatcatgttcacatcaaactagaaaattcttatctaattcaactgcctctttgaggggaaattacaattagagtaggatttggtcttgattcgaaaagggggtcgcaagggaaaatctagtagtctcatgtagtcagttacaatgcaatacagataatgtcaaatgggaaaaattgtaacctacacacatcacaatataactttaaagaaggacaatgtaagtggaaacataccactcaagtcatgttgcagagaaaatgaatacagctaaagaaacataatcactcaagacttctttcaataaccattcagtataaaaattaaggcttcaacaacatatattttaactaacttcatcattaacaaatatagcaatggatgggaagaattgacttttggagacgaaggttacaaaagaaactaaccatgtttcaaaatcaagagatacctcttaaagaacacgattaactcacaaataaatatataatcatatgaaatgaatgacgcaaatggcaaagtccaaagaaacgaagagctcactttggggatttctcgatgaaatccataagaacc

SEQ ID NO: 305889 - DNA, 1225 bp, Cannabis indica
ttcctaaactttatatgtgtttacttcattgttttagaattcatattaggatgttaatgaaacatacatggtagtaaatctagatcctggtaaaatatttccaacaattctccactttccaaacttgacatttaatctcatctttccatataaaatagaaaccacccgcaataccacaagtgggaagaaaagaactgccatcgcagcccaatttcctagccaaatcaaccattaccaactccctcactttagtttccatcaagaaatacaatcaggtttgtacttgttttcctaagcaaagatctcttgggttgccggggatctcgcaagagcccaaaagttccctataggattctcattgggaagtggagggcttcgtaagggctgcctcctcgcccatgagaaaatttggatcaacattcacttgaacttccaccaattgactaagttccacttccaaattttttgcaatgtcattacctgattttgaaccagctcccttattcttcgatctcttttaatcttcgttattagtcctcttctttctctttttatccttttttttttacagtgaagaagaagcaccactaccaagcttgaagttactctggttaggggagaaggggggtaaagaaggaatcttaaggttctttttgaaaataaggttatcactttcttttggatagtaataagagggtataaatcccagactgacttttctttttctcggtccagtgacaccgtggatctattctgaaaggtcagctgggtcatgaaataagttggggaggggctcatacttgtccacttgaataggggccataagatcctcagcaatatacccaatattattagtaatgggctaggggaggggagtgggctcaggatgcctatggggggtacgagacttgcaaacgttttcatggggcactttaatcatttgctcagccgaaggcccaatgttgggcatgcgagaaataatgattccctcgtcattgggatgaggagcaggcctttttgaaaatttttgtagaatttgtgtttcgggatcagtgggaagattacctgaaaaaggattctgacttctactaacatcatctaatcgagttggcttaataatccttttgtcatttgaagtcaaccgagactttcttggaccttcagtcacgtcttttcctttacaactggaagaaccagtattttctgtagtgacaaattatgtcca

SEQ ID NO: 305890 - DNA, 3364 bp, Cannabis indica
atggatggtcacagattgttgttgagtcgaattgtttaaaggtcgattagcaaaagttcaaacatatggcttctccttatggccatattctttatgattgtataattttggttgctgattttgattttgtttcttttaattttgctaagcggtctgctaataaggttgcgcatgtcttggcgcgatcttctctttttgaggctgaccggacttttagtaggaactccttaccttttgtttttgaatctttagttttgaatgttttagtttaatgaaatttaatcattattcaattagaaaaaatatatatataatatttattaatataaattttatataatattatattgtgatttaaatttaaatatcttttattatataatatatttacattacactttaatatattattaaaataaatttttaataaaataagttatattttactaaaaaaaaattataattagagattgagcattagtgaagaaaaaaaaactaaaaggtgaggaagtgagagagacaagatgtcgggttatgattatggtgtcccacgggtgcgtgctagctgtcccacgtgttccccagggaagacacgatacccaagatcacatcccaatcttcctattttagtcaaaaatgtggccccttaaacctctttcactacccgacaatccatcattatggccctcctcttctcttctcttctcttctcctatcacctctttcctaatcctaatcacaccccatgtgattcgcacgtgaattggtcccccatctccatcatccccttcttttacttcaattaccattattgccccttctcttttatataatatctttatttttttaaaatgaaaactgccctaataatatcatattaggcttataattaaagaaacttaatatatttttggtcttttaaaatactaaaaaaatgtcatgcaataaaacacctttgagattttttttttaatatgttatcataatataaaaaaaaacttattattaagtttatattagtagtataggattatttttaagtatttttaagtattgatattagatattaatagtatctgatattttttataagtggtattagttagtgatattttttaaaaattattttcttaattaattatataaaatctaatacttaattacactaatagtattataacactaaaacaataaagtacatttaaatatttatacatattgtaatttaaaattaataaccaaaacttaacttacttaatatttgtgaaatacgccaattttttatatatatatcccaatatatctctcatttcaaaactttataacatctctctatttccctattattctttctctctcactggctctcattgaaaaatttatcgaaaccccactaaaagatccaagaccgcgaccattccaaccattcgacagagaccacaccaattcgatcgatcgagagggctccattttagtttgaccgagacctcgcccccttcttcaactgtgaatggagagaccatcgccactaacgcaaacaacaaacacaaaccacaaacaaagagaacatgaacgaagacgttctttgtaattttttggttttttttggttttttgagttggtctgatagtgtctaatataggcctaatataaattcgataggaggtttcaaattttaagtttttgaggttgatggagaatgttcgatagtggtctgatataggttcgatggtggtccgatacatagtgactgattggtgaacatgtttcgtgtccgttgagatgtccgatactgtccgaatggggttccgggtatttgaaatcataaaaagaagctaaaaaagcgactccatataataaaattagaaagaaatataaaaatttcttctttaaactgtacctctccttaagacgaagaaaaatcaaaaaactagttgaaacccacgtcaaaactctaacgtgagaaaatagatcattaaagttgagcatcgattacttacttaaagagattaaaactataatataaaacgtaaaaaaaatttatatatataatcacggatgggcctattaacattgatgtgggagctatagcatagccccactaacaaaaataatgccttttaaaaaattaaatgtaaatttttaatttaataattataaactaaaataatagaaaaactcccacaaaattagataaatttactaatttagtaagagtgattataaatttataatgtggctaaaaatatttttttataataaataagcccccacaaagtaaaaatcctgaattcatcactgtatataatatgtatatatacacacaacaatatatatttaaataaatataataatattttacatgtattcgaataagaaagagaaaagaaaagtacatatttatatacataataaatatatatacatatcggaccccatttagatagtatcggacacgaaatatgtccaccaatcagttactatgcatccgatcaccatccaacttatattggaccactatcgaaccttctccatcaacctaaaaaacttaaaatttggaacctcctatcgaacctatgtccgacctatatcggacatatattggacactatcagacctataacgaacactattagacatatatcggacaccatcaaaccaactcaaaattaaaaaacaaaaaaaaaaaaaaaactgaaaattatagagaacgcttttgttaatgttctttccattcgtggtctatgttcgtggcagtggtctcttcattcgcggttgaggaaggaaaaattgtcatgggctcggactgaatgaaatggagtcgagagggttggtcaattagttttttagtgggtcgagtggtcttggatggtggcggtggtgttggatggtggcagtaatcttggatggcaacagtggttgtggaggtttggttctgttgaagagagcgagcgagaatggagagagagacatgagtgagttgaaaaataggagggataatattgggttgaataaaaaattgatctaatctaacaatatttgaacattaatgattaaagaataaattttggactaataaatgtatataaaaattaaatttttcaataataatattttttaacaattctatatatttgtaagtgatgtgaatttttttaaaaaagtaaatattaggattgcttaaaccactaaggatagctcatcggtggggagggatggttaaaaaaagtttctagttataaattattaaatgattataaaaatattatatataaattttaaacttcttaataaataattctaaataattataattaataaaattgtgcatttagtttttaataaataaattatttataataat

SEQ ID NO: 305891 - DNA, 1426 bp, Cannabis indica
acatattcagaaaatatatggattgcactctataaggcaacatcaacattagcaatcctctttgaagaagacatttttaccaagttcttcttactacatgatcttcaagaaaatgattatattggtgtctaacatattcaatcaggtgtcaatcatgcatacttattcacaaagttattatagacatctaaagggaagtgttataaaatattatttatatggatgtctaaatcatccaatcttttttattaattatcattaattgtaattactattcatctccttagttttctaatttatggctcacatgtataaataaaagattaccatattgaaataatgtacttaaaaagtttcactctctcattttcttcttctggttatcttatttcttttactatttctttctctattctatattattttataacaatcttatcctaatctaaggaagaaaataattttcaactttcactgatagtttcattcttaataatttatattatgaagaagaataatactcaaattcaagttgtcaaaatagtgtaccgtcacatactttggtctatttcataaatattttttgggaatcaaccatttttgttaatcatctttccttatttatagtatggagtattggagaaaattaactataatcgttaactgatttggtggttaggcagttcccacttagtgtgtgataagtgaattttctgctcaaattcatttaaagaaaaaagagtactcatgcagattgatgatgtcatcagagttttactctcgttcgtgcagattgatgacatcaggaaagctcaattcaccttactacgagctcattctcgagttcataacagatacttttagccatttttaaatggatcggaatattttaattttggacttttgtaaacctttctttataagggaatttttgtgagccaaaatattttgggcacaaaaattgcccctcaatttcagagcaaactgtcctatatgtttatctggatcgataatcaaagctcaaaacgatttttctctttccctataacaatgacaactctaacgacatttcgatgacttctaaagtcgataataacaccaacaatgtaaagacactatctgctgacttttctaaagtcaataataattaacaactctggtgatgtttaaacaacttctccaatatcaatgacagctctgctaactttccatcatttaagtctggcagtaattcttctttgtgatcttgtttagggaaatttgaatttctatgcttacattagggaataatttttttcctaaacttaaataaggaatattggtaaaatgggataacattttcttaattcccacaactacccccctcccaacttgaaacccgatcgcctctctctcttcgctctcttctctcttctctcttctctct

SEQ ID NO: 305892 - DNA, 1944 bp, Cannabis indica
caaacaacagtcgtaaaacgacatttatgggcacagaaaaaatcatctttacttttgcttttctttccaagaaaaacatgtgattttacctcgttccttgaatttagcatctgatttaaagtctcatcaatcttaacaatttgatttaatggaggcttacatgacaagataatacatttaaggactaaatagtttaaatttaaaaataataaggacctaccatgtcactgtcaagaggaagatgttttgggtatcgagggcctaactacaaattcgtcaaaatttgcaagtttatacttctctctttctctctctggactctcgattacgtttcggatcagaagtagaagaatcacaccgacatagagctccaagctccatcaatggcgtcctccacagccaaggtcaccttccgaatgctaatgctgttcctaatcattttggtccttttctacgtcggtcgccccctctattggaaaatctccgccaccatccacgatatccgccagaacaaacagaccgtcaaacaaggttcaattctcctctccttttcttctctattattggatgaattagggtttttaatctctattattcttgaaataacttcttcattgttctttattttggggatttaggtatttcgcagatcgttatggaagctcagagaacggttggttggtaccacgatgagtcggattcgggtgcccgtgaaactcggatcggaaagaagagcgggtcatccacgacccggaaactgttgagctgatcaatgatgatgaggtatagataattcaccataaatgtctgtaattttagggtaatttttagtctttaaaaggaaaaagcaaagaaatcaatgccagtttgcaataaatttagttcctggagaagcccaagaataaaattaaaaaaaaaacttggctttgtatgagtactgttaactattttttttttttttaccataaatgtaatgttatgtagatttgttagtgttgctaatttgattggttttttttttctttttatttttcagaatgaatggcctgaagaaaggttttattaaatttttttcaagtattaaaagggtttaaacttgaatttatgtttaatacaagtcacgtgctacatctatattatcaattataaaataggttagataggataataccagttaaaatcagtacaaaataaacgagtttgagttgatttggatggaagtaaaaacatgtctaatttgtttattaaacagacaattttcaggttctcatgatacatctcttatgttagtcttcatagtcagcttgtgttaaatcctattctttttgttaagagatttgtacttttcttaccttgcattactgacattgagaaatgtttatatgactatatgagggttgaaacatcctaatatatgaggggtttttttacctagtaattatatgcaggttatgagggttatatgtatcaaatttttgttaggggtattcatgaaaggaaaattttctaaatatatcccattctaataatttttattttgtataaaatttatatctaagtttttttaattttttttttccaattcatattcttcaaaaatatacttatcaaataaaaataaattatattttaaatattatgacgacaaaattaaaataaaaaattaacatgaaattttcttagaaaataaaaaaaataatatacatgagttaaaattgaaatcaaaataaatattgaaaataatataaaataatgtgagaaaaaaattttaaaaaattaattggagtaattttaaaaattatttaaatttatattttcttaataatgggtgtatttatcattttatggggtgtaaatagaatttctcttcataaaataaattgattcaattcaatctgcacgatccaatctaattcaatatgcaaagtgtggatattcgcactt

SEQ ID NO: 305893 - DNA, 3191 bp, Cannabis indica
gaggaacatatcgagagagaattggatttcacaattgtatatataaaaatgtgtgttggggtcatcaaataaataagtgaaatttatgtggtctattttggaataaaatttatgatttaaggatataattgtcatgattttaatacgtgatcaataccaattagatagtttctgatttgatgaggggccaaattaaaaataattaataaagtttgcaaaaatttgttatgactacccattaatgagagactatactatcaattttttattttttactttttttaggaaaaaactaatattttaattacctacaattaggattgttctctagactatttagcttaatattttaattattttgttaaatataattttatgaatatatttatatatatatatattttttgataattttagccgatatacttagtgatctatatatagttagcacgaacttaacataacataaatgtacgaatttttctaaagcttttgataaggaagtaattaggccagttcaactaagttttttgctgttaagactcattactaattttagaaatacatattatctcatcacatgatatgtttttttgttgattttattttattacttcaattttaaaaatttagaaaggaagacttggtaggttaacaatgtattaatagtatttattatttctcaattatctcaatacatagatggatgagatatttttatttctatattattcaattactcaaagtgttctaatatgtatgaaatattgtatcctgcgttttgataaatttctaacatgtcaataccaaaacagaaatactttatttatatgttcctacaaattaattaagaaatacaatataggctttcactccttttcattttttataattctctaaatatttatgtctgtttgttgtttgtctcatccaaattcataaaatattctattcaaacctcactcatgatttaagtagtactatattaagaaaaaattaatctctccaagtctccaagaaataacatcaaagaaacagtgtttaattaattgttctgtaaacgtgattaacgttgtgtttaattagctacattatacatagttgaaattacaaattttaattgtcatagatgacgccatcataaattggaaatcacatcaaataaataaatacaatatttccacaataatcatcattctcacctctaatttaatcatcaagtcaatattattaacttttgtcataaaggtatatctagttaaggcataattcatataaatacacgttacatgagttagcattaatctaggttaggtatgaatccatagtaatttcatgttttgtgattaagagattgcagtcatatatatattgtaaaactccacaaaataatgcttttttatcttctaaaaaaaattctaaaagtcataaaaaaatttaatatatagtaagcttaaattatttgaaagaccatattaacattttcatatatattttttaaaatcaaattttgtgtgaacttactacacaccattcaactttgatgagcaaccatcttgttatttattcggttaattattacataatatttctgaaaatttcctatttctctattaacaaacaaccaaatcgaattatattaattaataataataaaactaaattattgttattgtaaaattcgtacggtacaccgtagatggatggggccagcattcggctcacgccattaactagtattttgacatgaagtctaaagcaaaataggtcagaatatttttacttctcctaaaatgaatactaggttgagaggtactatgataaggaggtgtccaagatcagtggtttaattgaaaattactacttggtcaaagacatggatgccgaccacctttcctctaagcatattccctcttactgtcatcctccttttaccttgggtctatggtcaagagcccaacccattctctaactatcagagtcagctcataatatttccctcctggccactacagccaattttctcaagtacgggctttacccgttcacggagattcaaggatttgaataggcagctgagggggtcattactgagttggaggctcctattaagaggaaaaatcccaagaggaatcaggtgtcgattgaacgacctatcaggattagagatgaccctgaggaagctgtccgtcctaccatccaggcgacaagaaagtggaatgccataacaatggaagatgatggggattcttttgatgaagattcctcgtcttttcttatttgggagggtgcacccctgaagtctagggtagttattactttacccaattttgcttattcttacttgtttagatttttaacaagtgttttcttctgtgcagccaagttggagaaaatgaaacgagcatttagaaagaggaccggtgatgcatctggccaaaagtcaactgtcaaaagatcaaagatggatgcttatcttcccacaagcattgccccaagctccaagacaccccaagtagaagttgagaggagtacgacagattttgtcatgaacgttcctgagttcattcctctagtcaagaagtctttgaaaactcaacctccagttgctccggccaaaagatctaaggggaccaacactgagtagcccgacttgccaaaactagctagatgttactcctcccaccatccagccagagagaaagaaggctaaagaaatgatcagtttctatcaggattgcctaatgcctgaggtcaattagcagcttaccggggtggaggatatgcatgtggaaatattggtcaaaataaaacttaatagatctatagatgttattatgacaaaattagttatattttttgtatctattcatgttagaaattgtcttaattaaagttggttataataaaaaataaaattcttgaaaattaagcttagtgccatacttttattattttagaaaacatagggtccatttcttcatttataacaaaaacagagagtctaattagtaacttttgtaaaacacgtagtccaaaatagtattatgtcactcctcccaccatcccgtcagagacaaataattttaaaaaattcttctaattttttcctttaatataatttgtcttgttgttcccatatttatgctcttccttgtattttcaataacgacattgtcgttattgatgat

SEQ ID NO: 305894 - DNA, 2407 bp, Cannabis indica
acataactaggtatttaattgcttgaatctatcaactataattttttttgaaaaatagagttatttaagtgaattgtaataacttaaactattttagccgttaatatcccttatacgcataggtatatatatttacatctacataagacaaacatatatttacatgtacataacttaattattttaggacctgttttttgttaaaacgctgtagtcttgtttggcttggcataatcttaatagaatcaccattgcaatttctattatttgttttgtttagttggtagatataaaaatataagaatgtgaatgaaaatgagaatagaaataggaatagaaatggagtagaatgaaataaaatttgaaatgcataaaaaaatctaatcaaaaaattattatgcattgaaatagttttttcatatgaaatagtcatttaattaaaatggtagaaagatcgttctagatctattggaatcacattgtaattttttaatatgcaaccaaataaaataatgaaatgaaaattatttaattttcattctattctatttcattaactactacaaaatgccaatgtaatcaccgctacaccatttattatatgaataagaattgcagctttacacctatgtaatcatcattacataatttatataacaatatatttttatacctttaatttagagaaatactaaagattattattagtgtctagcactctcctatgtatcaatattgctattggtgcaattaaagatcgagtttcccatgatttaatatagtaatttttattgagtatcgctaaccaatcgtaaggctacacgtacgtttagaaggtgctagacaacactaatttttaataacaatgctctttattttataatctttcattactaaaaaaattattcaaatacaaatatatttatcaacatatactactcactcttattaccattctaaaaatgaagaaacatatataaccacacaccatttttatatatacttttttttttttaatttttgaaatggattatatgtataacttaaaaatcacatgaaattattaaaaatcaatatggtaacaactaactgcttatatatgaataataagcaaaaaaaaaaaataaataataaatataaatgatgaagatgagtagttgttagaaactcattttgatgaagtaacaataactagcagcaagcttaattttatttattgtgtctaaggaactgttggatccttagtttatttttactatgctttggcgtaaatattacatgccttatgcataatttagatcaaagctatttttgttcaaaaagcataaataaaacgaaatggtacgtatataggtatacatacatttaaatagtcatgtatagcgtgtatagctaatatcatttatatataattaggagcttttcgagagtaatattatagttatacacatagttataactatacttgttgatttaatgaactcaaaaattgtacttttaataaactcaaaaaagtataatatatatattgatcgaacttcaatgtatggctcttatttggggtgttctgatctattgattcgggttacaataggatgtgtgagttgtcaacatctttttttctttttcttctttcttctcaacacttctccaatcttttatcaaaagctgttcggtagctatcaaactataaaaataaaaatactgataataataattttgccaaaattaaatgaggtatgggcatttgtatctataaactccttaattatatcttgaaagcaacacgtgataaatttgatagatattttctccatattgttataatatgtgtgtagcaatattatttgattatatggatcgacagagaccaacttacggagtcgtaaagctttaggaaaaccaaaataataattaaataaatggttttaaatatttaaatcatgattttcatttccattattaatggaccctggccaacctttttctgatttgattgtaagttaagtaatgttacgtattattttttcggccttcattttaatttgcaaattatttatgtcactaaactattaatgttttctttatttgtacataacaaatatttttgtaacaccatatatggatcttcttatacttttacaataaaaagacattaagcaaatttataaatgaagaaacatatgttaataaagaatatcactcacgtaccaagtagctagcaagtactctaataaaatgttcggacgtgttgggcctcattcatccagtttgttgggccacatgcacacattaactcacacactaatataggggaacttacaaaaatactggaatttgggttaacttttacaaaaatactgtcacacggaaattttttcaaatatactgtgtttttataaaacac

SEQ ID NO: 305895 - DNA, 876 bp, Cannabis indica
tgactaaaagttacttaattataaaaaatttatattaagactaaaatgttattactaaaaatagtagttttttgtagtatgattttcaaaactcactattatattttaagtagttttgaatattttcaaatcatgtttgaaaattgtacgtttgtaaagtaaatatcggaatgttacattaatgcactttagcaaaaaaggataagtggctaatagagtgaacacgttcaaatattttggtcattaatattgttaatttattgtagatagatgggtaagttagatatggatttttgggatataattgcaaagacaaataccaaaaacaaaaaaaaacatgtctctatcattgaaaattaagaacaaaaaacatatgcctataattaaagaggggggaagagagaaaggtggccattaaagctcaaaggcataggtgaatagtgaaacagctgtaattggtgggcaacatctagtgatggatcaaagacaattaaagtaacccaactagctagctagggttttagtacgtgatcaatggtaccgttcaaaaatggtccttatatttaagttgcacaaacaccatattcacacacacccaaaaaaacaaaaaaagaaaaagaaaaacagagatgaccaaaatgaacattccagtgtaaaatagattgtagagttagttgtgaaatagaaaacattgttttgttgttagtgctgcaaatttgtgaattccagtgtaatattctttcttcttttatgaagatctcaatttccaaaaaataattaaaaaaaaagtacaaatatgaatcaaaaataaattatacaaatgtggcaatatttttttttttaaaaaaaaagattatgaggactcatgacttaatc

SEQ ID NO: 305896 - DNA, 2573 bp, Cannabis indica
ggtaaaatatattccaacaagaatatcccaagattccttggtagtaccattttgaaagacaagaggcactagatcttgagaaaaagccccaactagagcaccaaaaatgagtcaatcttgatggatctaggttaaggctgctgggttggggatagaaacacccacagtggtgatggattgtggaggagacggaaatgtgctataaatatattttcacaagtcatagccaagtagtgttgcctgcaactgagttttctaagctatgtaatttttgggtgttagtttgatggtgttttgcaattggagaatattgacaggcctattgggttcagtagcattaagaatggtgggttgttcatttgtcattgactcagaaaagaaaaagaaaagaaaaaaagaaaaaaaaggagaataagaaagaatctatttgccttttgataaatattggaaaagtgatttcacttagccttaatataggcaaatataagaatctttacaatagattttgttatccaaatttttttccacatgacgttgcatgcccacataggcaagattgatgtcgtgcggagtacaacctgttagtaggaggaccaagtcatcatgcacaacttaccagtggatgaagagtttgaataatcaagtaggactaagatactacaaaatagctaaccataggggtctgaccgaccacccctggccggccatagaggaggatgtgtcggccagccctaaataaggggtaggtcagtcaacttttatattaacaaccacgattgttgtttctgtagccttcaccttggataggcaattgcttgttctcaactgcaaaattgctccaacaacccatgaaagtaggggttcaacttcagatattaacctattccttaggaacaattaattggctattttctgtatatttaatatgtgaaaaagaggtaatatctcttcattttaagggatattagcctactttgaattagattttttgtaagctctcatctatataaagagcatttgctcaaactaaaaacctaagttaaaaacactaagtcctaagtgataagctttcatctcaaaaccctagatctctctctctctcacacacatgtcacttgcatcatacaagtcactaggtctatttctcatctcacttattcgagatctgtgtaacattattctcactattcatagagaattaccttaaaaattacaaggtataaacctataatatgagtggtattatctctcaattcaatacaactaaaaagggagtaggtcattacccattaaccaagggggccaaacctctataaattgttgcgcccatttatttacttgctttaattgtttacatgtggcgatttttatggcttcgctgtcagttgacaaaatctaaggtcaacattttgtttttttcattgagaacaatatttattaattcgatcaatcatcatggttgttgcaaggagaactttagctataatttctacttcattgggtcttcctcaagaccccatcaatgttgatcctaatgttcgtgttccaaccaccactggagttcccacgaacccaacgagtgtatcaaatcgtggcaaccctgccaaccctataggcccaacaaactcgaccaatacaactagtttggtcgaccctactaacccgacttatcccattgaacagtatctgctacctagagtagatccaccattagaacctcgaacaaaaggttttgtcaatgtggaatagcccccacacaccccaactcactttgttccccagtactatataggggaaacaggaccaagaattggtgaacaaactattggtgagcctcatatggacctgggagaaggctttaaattggccaagcttagggaggctgtaggcaaaataggccaaactgaagaatcacacgtttttggttacgatgcttttgccaaatagagatgcaaaaacttgagatggatggatgtctaggaagccatcctccgggcccatcagacagagctggatcgttgtaatagggaagctagtaacctaataaggtagatcaatgagagaactactgggagaggtcaatatctgattagagatcctctacaatggaggcttatcgatagatcgagtagggtctacacacaagtagacaataggcaaaaaatccaaccaagttcctcaagaacaaggacagacttcccctttcctgaagatggacaaatcctgccaaatagatcttatggcatgaatagctagactttggcactaggtgacatgggggacaaaccaagtatttctggcttagtaatggccccattcggccagcctctactcagccaatagaatgatattcctctctaaaacattcatgaggaattcgttctaaggcttatctttaacatgctaggtccaggaacaagcggaaacacccaagagaacaagtggatccaccaaacttgagatatgggtgtgatcaacaccctgtcaatgttgggttttgtgccctaaataaaacccatttcaatatactcagatttacttattaataaagatcagaaataacattttatgtt

SEQ ID NO: 305897 - DNA, 1824 bp, Cannabis indica
ctagtgacaataatatttttatgttaaggactaaaaattagtacctaataaatataataaatttgtttattacaaaatttcgaaaactacttgtttatataaaggcgttatagaggcatgaaacacaaacatgttacttcttttttgaggtcacaagtaatgatttatctaataggtttaaagtatcatcctttttaaaaagttcaaatgcttaattttttattttttacaataattatctcaatatttatccttactactatgtacccctcgtatctattccaaaagtaaaagaaaaagaaaatagacccaatttatattttattcctttcttctatttttggttttttttctctttattaaggcttgattccaatgtgaatcacaaaatcaatgatactttcaccacttaattgggacaagtcataagtattgagttaatcagataatcaccatttaatagaagttaattgttcaaaaaaacatgaattataaatttagcaactttgagagtatgttttgccgttaaataaattatcgagtttctactaattacaaatataaaattttgagcaattataccgcaaattaatatccatagtacttatttttttggtaatcaagctataaataaataaataaaagaaatttaacatgaaaaggttaacataaaatggcttgtaatggcactcaaaacatgtcatagcaagcttaatgtaatataaacaactaaattaatatgttataattgattgtgggtaactataatattatatatcaaactttattattgaactctaaactaattatttaaatttggagagatgattagtataatttccatccaaacttataagttggcaataaataataaagtgataggtagagatgtatactttctactttataaaatattaatattggtacttttacttttattggcatatttaatttattagcttgttggacaaatgattacattcttttttcttttcttttctttttggttaaaaaccaacaaattaaattgtcatatataaatagaatagaagacaagaaattgatgaagatatctaaacataaagaaaaaaaaaatgtcttctctcttattagatgataatgatgaaatgtatagtacaaagaaagacctcttcaactacgtgatgaaaggaaaatgggacaaagttgtggagctatacaatgataagccaatagctcacaaggcaaagattaccaaatcaggcgacactgcgttacacttggcgatatccgaacatcaagaaagtgtcgttgaagatcttgtaaagcgtataagagagaaaaaaactgaagatgtcttaagaatccaaaacgagataggttgcactccactccatttcgcggtgtctatggggagtgttagaatgtgcaaatgcattctagaggcagatgaatcgctcgtagaagtccaaaacaacaaaggggaaacacctctcttctggtccgttctctacggccagaagaaggtttttctttgcattgattattattgtcagcgccgttgtcgccgccagaacactgacaattgtgatgatgaggtcactaacaagctgaaatatgcttattgtcggaggacatatgatggggagacaattttgcaatgtgccatcataggggagtattttggtgagctatatatataatatagataaaataatttattatagtaaatttgtttaaaagtaatacaatcttgctaacttactaaaaaaataacagatagtccatcatttgttgaaaattttaaattaaataaaatcatattttttggcaatagtaatgtta

SEQ ID NO: 305898 - DNA, 790 bp, Cannabis indica
cataaaacccaacaattaccacctgtgtgtttgaggctatttggctatgcaaaaataattgtgtctttcatggcatggtcccttctatcactgatactctgaacctaatctccaggagagcagcagacttctctgctattctcaacagggatggcaacttaatcactcaggtgggtgagcctttggctccatcacactcccaggcaagtcatgggatacagtttgatgctagctttttagtcgatgcctctgtccttgatggtgtggctgggattggttttgtcctaaacttttcgggggttgagaatgcaatcaccatccattctcattgattggcttctagtgtgcttgaagcagaattggtagcaattctgactgctacagagtgggcttgggacaatcgctgtggatcaattctaattgaatcaaactcgaaggtggctgttgaggccttggagttgggggagttacctctggcctggggtgcttaccctgtttttagaaaatgccttttgtttgctactaagtttcatgttgtttctttcaagtttattcctcgtgagttgaactccttggttgatctcctagtttcccaagccagagtgaatcgtttatgacaaacttctgtggttagggagtaagccccctttgtggctgacacttgagactctgtttgtgtgttttttcttgttttgttttaatgaaggcaagttcaaataaaaaaaaatagaggactcttgaatagttgtactccctgttgggttttgtgccctaaataaaactcattaca

SEQ ID NO: 305899 - DNA, 1220 bp, Cannabis indica
aaatgtattggttcaaaaaaaaaatttgaacatttttaagtatagaaaatcaaatttccctatacaaattacaaacagattcataaaaagcaacatatcttgttaagcaagaattacctgtatcagttgctgagcagcttggacttgagaagcacttccactaatttcaactgtcatttctgtaggattacccctagtctcttgaattgtaacagtagctccactggctcgtctaatatagcttatgcttgcaccagaagttcctatcacagcatcagcataagatagtggaatttgcatttgctgtgtaatctgcaacaaagaagattacataattatgcttctacaaagaaaggaaaagcaatgcctcttgtaactgttcaacaaagattaagcaggagccaatatttaccagtcgacctcaggtttttgagctcaaagaaaataaaaagagaatatacaataatgtgtcaactcaaacacagaagtaaaaaaataccgcatgcataataacccaaaagcaatcataaaacctaacaaacaaagtgatcttacaaaatatcatcacaatgaatttgaaaatgcaaataaggaaaaaaggaataataacctgtgtaaccattgaaggtgttgtttgagcattagaagttgaatgtacacccataggagcttctcttccatatgctaatataccatgatgaggctgtttatccatgggtggtggtgccatgtctgcaggtggatagtaattttcatgttgtcttggtggtggcatgtattgaggatgagaagtatgtccatatacaggacctccaggacctccactgcttgggacagctccctgaggtggaggcccccatgattgatgagactgatgagactgatgagactgatgagattgcatgtgctccatagagggattcggcatttgcatctggtaaacaatataagataagattgttcatttgaacattgaaaatcaaataaaaactgggacaattatgaaatcaggaaactcacatgcatctcgaaaattggaattatgctacggtcaactaaaaattttttaagatgagatgcaatcagttcaattgctttgtgcacgccagcaggttcaccgacaacttccacaaccctatcatcttgaagagcaaaaactggtaggtcttctgcagaaaccatttcaacagaaataagaatgaaaatttaaaaaaaaaaaa

SEQ ID NO: 305900 - DNA, 1444 bp, Cannabis indica
aatcaccaaacatacactatagaaaaatttgtacaattcaacatataaattaaattccatggaatgtacagaagctctttctgattaaattcgaaggtaaaaaaatgcatcatatcatcaaagagccagtgatccaagattggaatgaagctcttttgctcttgacaagaataattgtcattatgggcttccccaatcaataaatgaaatcatcatcatttaaaaaagtcaaattttgagagaacaacctttattatcagaagttgctaaattggaatgtatgatgattcaagatttcagatggaaaacaagagaaaacagtcctacttaggtttctgcagttcatttccagccactgctcattcggatttgattagagcttattatttgaacaaaaagctataaggctatgtcagcgcattacaagaagcacacacaataccaacaatgcaaaagtatgatcaaataaactttatgtctaggcacataaaaataaaaatacatacaaataatgcaatgaacctgttgatcttaagtttctctttaagcacaagattccagagaaaagattaatcacataaagaaaaataagaaagataatattggcattcagatgggacctgatcactacgaatgtcccgattgataaagtgtcggctcacatgcactggtctgtccttagatgcatgaacataaacagaaaattttccttcatgaccctgccaaatgtaaagaaagggaaaagagagaggaatatgaatacttatgatacttaaaagctcactaagcttttttttagaaatacagtattacatattaacattggaaatgtcctattcaaaattaaaagacctagtcaaagtctcaaagaaatagatactcaaaagcctactaccgtcatttcccaattgggagattcagttaccctatattatcgtgaaacagctaaatccacataaaaatatgaaataaattgcataattatgacaaatcaatcctatcaataatgcaacctaacttctctctatcaggttacatctcttggtgcgtctcataagcatacacagtattatggcaatattattccaattattgatatgaaaacttgtcttttcaggttggtatgcaaactggatgagagaatttccaacaaagagaaaagttattatcaattacaatgaggttcaaacagatcaatttaaaaccccttacatctattcaagtaaaagtcttagaaataaaactttttacaacatacatgcaagaaaatgcaagaataaaatccataagagtagcaaactatatcaaatgtaatgattttctttttgcgatattcccacttcaaagtacgcaaatatttaacataaatataagaggggtaattaaagctcataataatttcctgcatcatgtgtgtgtgtgtgtgtaagagagagagagagag

SEQ ID NO: 305901 - DNA, 811 bp, Cannabis indica
tatgtggtgtaattatccctaaattaatcaaatcataaatactacaaagttggtttttaattaccaattaatatgagctgctgcaaactaattaaagtttggtgaaatagtgcattcaaaaaaaaatgttggtgaaatagctcttttcaaatgtaacttataaagtccatattaccggccattatcgacactattcttcacacaggcaaggaataattaattagcaatgtttatgtttacaaattaattaattaatggctgaaaaacaacttcagatgaaactcaattatatgttgtttattattagctaaacatatttcaactgggtatattaatttctttgatcaagtaaagatcttctttttctaacagttccaaatttggtatatttgatttgttatatattgttgttggtcatgtatttacgttttctctaattcttctttcccttaattcttacctttctaaatatattcttctctctcttatcttattttgttaatctttactctaatggtataataataataataataataattaaattataagttgttatagtgagatttctctcacttagaaactcgagaccagacccctctttgaaggacacgtgtatccagacttccagtgaaggctgaaatgtccaggggagacttctcgaagtttagacctcacccaggataaaaccagcgaggtatcgcggatgcgacttaattcataccgcgtaactgtaatcctcatcatacagggtagacccagctcgcatatgtcagaacatgtgcgagtacctccctctatacctccgcgg

SEQ ID NO: 305902 - DNA, 2001 bp, Cannabis indica
attttttttctaaaataattaaataaattaaaatatttccaatcataaaattttatcatactttttaaataataaaataatatatcatattaaatctataaatatattgattaaaacttaatatatattaatatgaaaaaagaacaaatctaggactctttaaacactaatcaaggggaaatgatttaaccttatgtatttcattaaatgcaaccagcagaacatgagaacaacccaaacatcatcacccacttatctataaattattatgaaaaagctttttattcctatagaagaaaatttgtgtatccaccaactaaggtggccctccctccaatcttttggagacaaatcaaagaaaacccacaccactatttctacttagaaccatttgctttttttattgcttttttttttttttattttgattggcatattcaatcctatatatgtttttctctcttaaccccatgtgagagagagactcaaataagtttaaaaaattatgcattatataatttgatataaaatgatgaattattgtaattatgtgagttggataagtactttggtgggattcttccaagttggaaccattagcattagttatagtggaatgtattaggaccactttgaaatcattgagaccacacctcactcttaggattatgtgctgaatttgggtttgggatcttcttgaggattcttattcttctttctttattttattgtttttttcttcctaatttttgtacaaggaatcttaatttgctcactctctttttctattacaaaaaaaaaattaaaattgtattgtttgtgatatgtatcatgattcatacatatatagctaagtttagtttcattggtaatttggagcccaccctaatatttttagaggtctagtaaattgtatttgaggatgtgattttttaaattttttttttttagaaatttcaaaattttaacaaaattgggtaatttattaatattattattattattacaattttataaatttaaaaacctttaactaataaattagcacatgtgtaaataagggagaaagttgggtcgggtcttagttaaagcaggctagatttgcacctagagtccatccaatctaaaagctcaaaaaatatttttcatttaaaattattcatatattttagcaattttttaaaatactacaaatttttaaataaaagatctaatattttttcctcttaaggtcctctaatctctagccgacttgagagaaagtatacgatacaaaaaaattctctttgaaaaagattacaatttaggaatcataattataattagagtatcattttcccatatgtacatgaatcaataaaaatatttatctcttgttatgtgtttttttttaactaattacatgtatttcaaataaataatataataataaaaaagacccatagaacttaaaagttgattatgtacacatgagtgagtatttttcacttttcaagattgcataggaactatcttcaaattatatttaacccatagaaaattctcttatttctccaacttctactatcatatttatccgaacattgttataaaatattaaggtacttaactccattataaaatggccataaaaataattttagccgttttcataatttttattaaattaaaataaattaatattaatattaaattatactaatacaaatattacataacatttaacatatctcaataattacttgacaataacatcaattccatcacaaatcacaattatacacttatcttattttaaagtgtaaaataataataaatatgacattaaatatatatatgtttttttttttcaaacatttgccgtttggtaacacttttatttttaaaatttttgtttttaaaaaactaaaaatagcgttctgtaatcacttttgtttttctaattttaaaaaactagaaaacaaaaatagtgttctgtaaagttcatttttatttttattt

SEQ ID NO: 305903 - DNA, 3299 bp, Cannabis indica
tacattgaaacagagttttatttagggcataaaacccaacactattaacctcagcattagtgaatttatccatccaaatctgattttccatagccctatcgatcttcaaaaagattctttcttcaccctgctgtttattgctccaattaaaagagtttccacaagccttgacatcctccaattggcaactagaaacacagtcaataaaatcctatgaaggatgatatttaactctattcccaattctttcttctttggcaaggatgtcattgaaatcccccatgactaaccacgcatttgatcttgctatctgatgtaagtctctccataatgctttccccccctcttcatcattataagcatacacaaaactgagtacaaactgatgcttcccatccattatattgtttcaaaccccacatgtatgagttgacttgtacactttaaaatacttacaatataactgtttggattccacgcaaccacaattctaccccctttatgccactatatatttgttgtaaagcaccatccttgaaaaaaatttaagtacaagactcctagtttaggagccttgactctcgtctcgaggagaccaaccaaaccagccttattgttattgataaattgtctaaccatgtgttgtttttgttggttgttgattccccggacgttccaacttagaattcttatccattggaaagaggaggatctccccctcctcctatgttatccttctttctctttcctaatgtatcaccctcatgtatactctccatctctgcctcttctaaaatttgatacgagttgtctgttacagtcaactcagtttgtcgagtttcctttggtgtccagcccttttgaactggttgaaaaccatctgtatctgcttcattagtctgagctttatccttcccagttggttcatcaacctttttcttcacaatccattcttgtgtaccacctgtcttttccctacaatcgattgttttgtaccccattcctttacaatgctcacaaacccttggtttccactcatagttgactccaacagatgtgttgtagccatattcatcttcaaaatcaataagatctggtaagtcctgatgtatcgagactttaataggaattctcggatacattagcttacctctctctttggtaattgagtccaccattattggctttcccaattgccctatgattttgaacaatgacttctctccccagtatttcaactccaaattttccaattgaacccaaattggaatcacattaaggttctcctttttaaagttacaatttgggttccatggtttcattacaacaggacgtttattgaaaaagatataccctccattcagcagattatccctgtcttctatggtataaaaacggatcaagaatactccatatgaaatcattccaaccttatcaatcttatctttccatacacgtcttgcaaaaccatcgattacagacaggggagggttagctccaagaacatagcaaacgattgctgagttcaaaaaattaacctcctcttctatatcatcctcagttatcttcactctttccttctccaaattcttaaaagaattatccaagttttgttgaatattaccagatcgcagaattggaggaatggaggtcttaccttgtcagatgttattgttacattgagcatttgcctccatgaaagtagcgaaatcatatctaattttttcttgtcattgaatcgatcggagtgaggattttggagataaaggagcttgaaatagatcagcacaggttcattgagtcgagtatccccttcgtctgcactctcctcatctgtgaaattaatcggttcgataccaagcaccacatccattgacttggttttcttgacatctccagtagaaacggggcctttcttacgaacttacctcgctttcattgttgttggttgtctcccttgcaccttcaatctcgtctttgccatggcactttcactgtttgttttctttagtgaaaagaccctgttgctacctagtaaggaggaaggtgaaaaactacttaatattgttaaattctaggatttgtaattttgaagagagtggtcacttcattctaattaaaaaacttcattctaattgtagggttgaaatacaaaatgaatattagaaaaatgcaaactatacttgctgtccctctctctcataatatatattatttgttatttaattatttctatatatgaaattgtatttgaattgcaattctatgatttcctaatatatgcttgaagatgaatctgatatggtaactattgtcaagggtgctattttctattggtgcttcaaatttaaaagattaaattacatgaaattcatggaataagcagtggctggtaagatttaggttaggtgatgaactgagagatgaagcgggcttaggagagagtcatattgagaggtcgaaattcaaaatcgcagataaaactcaagaaaaagaaaaaaaaagaagagggagaaggaaatagaagaaaatcgaagggagagggtgaagaaaaataaaaactttaccttttttcctttaaaaattaataatggcacaaacttacatatcggtttccaattttcttttgtttttactcttacttcatagtgcttatttcctcaccgttggattccaaacattcacatctttttatcatccaaagaacataatgttttgaagtgttaaaaacctcaaatcccaagtggggttctacataatcggccttcttttttatgtcaaatgctgtgaaatttaactttttttaaataaacattacaaattttaatgtaattcaataacatattatttaatatttaatttatttttttagaaaaataaattaaaataatatgtgaatataatattataatgcttaaaaatataatgtggaaatttttaaagaaaaaatttaatctaaagtagatataaaataatcattagtctacaatatatctcataaaaataaatttaatcttgaatgtatcatcgaatattaaaatataattgactaatttctattgttataagtcgtccacattgtttgggcaatacgatctcgaacacgtggcattgccaaaatagatttgtcagacaaattaacttcacatcttgacacactggtttcagatccttctatattgtcttcactctttgttatattattcataataatataatatatagattaaatatgtgtaataaactaataatatgtaacatatgactatattagttgtcatctttttgtaacatttggg

SEQ ID NO: 305904 - DNA, 1624 bp, Cannabis indica
ataatgaactttaatgttacatcatttgtgtcaacttagtgaatcaaaggtacaaaatagctaaacaagcatatagatgattcttgaagcctttctctcttttactattgattacacatctatttgctttcttttaatatttataatcaaattaaaatcacaaaatcattggttactattatcacttattattaaccttttgtttttatttttctaccaacggttttgtccataatcaccttcttgtggaatcgactgcccgatctatactacaaccaccgctagtggaagtcacatttgggcgttaaacaccatgtctacaaaacttcttaaatttatcagctaagaattctaagccattatcaggtctaagccttttaagcttcttcccatttgagtttctagcaatattctcctatccttaaatttttagaatgcatcattcttgttctttaaaatgtataaccacatatctcaaaagatcatttacaactaagagaaaatacatggctcctcctcttgagggtgttctggagggaccctatagatctgagtgaacataatcaagaatgtctttttaggtatgcttaattttaacatgttgccttccctagcacacattgtttacaaaagtctagttcttgaattttatcttttccaaaaacaccattcttttctagaattttcaggcccttgtaaccaatgagagctagccttctatgccaatctaaggttgtaatattattttttggtgtaacaacattcacttgatctcatgttgtcttaccctgtagaagatacatgccattttctttgattcccttcataacaatccttgagcctttgacaatatttattgcaccattttctaccctcaccaaatggccatcttgatccaacattgcaactgatattagattttttttttttttatttttaatatcaggaacatatgtctaacttgttttaattctgtaatagttccatcattcattttgatcaaaattgagccaatcccttcaatacaacatgttcaattttctaagtttaacaatacctttctcgaacgattgatacttgatgaacttggtttttatttggaaaaatatgaaatgaacatcctgagtttaacacccaattatagtctaagaattcatcaaaaactaccaagactcctgcactattgtacccatcactttctttggaagaaagatctgcatttccatgagtttgaaagtagttcttgaatattaattggatcatatttcttgatgtgtgagaacttgctacatataaaacacattctcttcaattagaaccagtcttgttcttgttctgacttgtttgatccttgttctctttcttcctgaactttcctctaacaaacaatccatcaccattcaagtcttcttcggtcatttcctactttcttttaaattctttagacatcagagtattctatacttcatccagtgttaaagtactctttccatactgttggaattaaatccaacaaagtctttcctaaccataaatcagttataagaaaagcaacttgcacatctacaacaacctaaatacggttacaataaaagaatcctaactaaaataaacagaacaacag

SEQ ID NO: 305905 - DNA, 1661 bp, Cannabis indica
aaaaaaaaaaaaaaaaccctaatctttattatatctaaaatatgttgtcttatttcaaaaatacccttttgataataatatgatcatctaattaagccagggaagaacttttggagaagaccattgttataattataatctcgggaatattgttgtaattttatccctaaagtagtttagaagactagtgaggccatataaaattagaattcgtatgctagcttcaaaacatagtaatatagaatttcaagttggtgattatgtctttctcccagtttcactaatgaaagaagtgaaaaaaattggaaagaaagagaggttgaactattgattcggtggtccatttgaaatcctggaaaggaatggttaggttaggtagcttataaattggcattgcatctagcattgttgtctagagttcgtaatgtacttcatgtgttaatgctcaaaaagtacatatcagattcaacacgtgtactaagctatgaaacttcagaatttcaactgaatttgaataacttgttcagatttttaaatcggtaggagaagaaagtcttatagaataagtcaattttcttagttaagtactattgaaaaacaacaagattgaggaaatgactcaggagttagagttagacatataagatcggtatcccaaatttttttggtaaatttcaaggacaatttcaaaaaagaagagacaattatagtgtagaatttatttaacatgttttagggagcttgagtaaataaacgggactatattattttataactagaaaattaagctgctctttgtgcggctatttaaatttttatttttaaaaaaattatactttatacgatattttttatggtaaaataattaattagaaaaatattgcttaatttttgtaaatataatttaaaatatgtaaataaaaactatctttttagctaaaatgacttatatagaggcagtgacggacccaatatttttattatgtgggggtttaattgttattaaaaaaattaagtttattttattttatttttttattttgtcgggatttttttaattttttatgctataattatcaaatgaaaagaaaaatatttaaattttttaatacaattttttattttactgggggactatctatagccctcacaattctataagtgtgtctgtcattgtatagaggtgaatcccgagttcagacttctgaggtaagagttatgcctgaaatacttaagactgattattataatccctttggcatatatcatcgaaactaaacataaattcaaacttatcacttgatgtgcaagttagtgaaattttaattagtttagtttttttttttttttttgtaaaataagcgtagatttatattaaaagaatttaattagtagttttttcaacttgaatatcgtctcaaatttaaactttttcggcaatattataattaattaactaaaaaaaagacgtaaacacaatattcaaaaccaaatcttattatattcaagttcgtgtgactacaattattttttcaatcaatattacaaatatgctattgaacacaattgtcttttaaattgtaaaataacattttatgtaaatatattgaattattttttaaaaaaaataaccttttgatagaaaaatataaataaataaa

SEQ ID NO: 305906 - DNA, 732 bp, Cannabis indica
caaaactgagcttaagcagagacataaagattagattcaccattaagttgttgaagaagcttataagcactcttaacggtgtacaaccctgacaaatccttggaccagcttaacatatctctttctggccgtcgctaaactgggatcacctgcaccagtagtctatctcgaggcaccagcagttcctccaggatttcagcttcccaccccgagccatccacagtcaggaggttacaaactttaggattataaaggcttgggtgtgaagacataatcaagggattactctcatttgggaacaatagttcttccataataggtatacttctaccatccccaacaacctatcgggtacctttcttcactagtaattgcgcttccaaatactgcgccaaagaaagctttgatttgaactgatggcagctgatagaaatgaactatgggggtaatttatggctttcaacactccagcaacaagggattcgggattgaccatgagtcgccacccttatttacccaaaaaagatagattaaaatcacggaggttgcaaaagcccatacctcccttagttatatgactacaaaggcgcttctaggacatccaatgaagagaatgagttatttgataattgccaccaatacttagccatcatgctttccatgtctttaataatctcaagagggagcaaaaagatgctcatagcatagctagggagtgttggaaattatttt

SEQ ID NO: 305907 - DNA, 4082 bp, Cannabis indica
ctttcactagaaaatgtgcatggtttagcattaacaaatggcatttattgttccagggggccacttcaactgacaattgtagcttttcaccattaacaacgaaagaacaacaaattataaattattaataaaatcaaattaaactattattatattaaaaaagaagaaagtaagaaactgtttttcattattaactaacaaaaaaaaaaacaaaaaagatcctaaaacacaaaattccctttttacccctaactaatagctaattcccctcatggagttaaatctcgaaatggggaattcagtaaaattaagctcgtgcaatactagcacgcgttggtcttccgtttcgttgcactacttatagaagctgaatttccacgtggtctcttcgtagccgttggattaatattgtagtcaaaccccattccatctccaccgaccatttctgcgaacatcttctggagatcctcaaagctatcgccctatatacaaagatagttttccccaataaataaaaattaatcgtgtaacaccgcacgataaaattacatttttgccctcagagcagaaaaaataaaaataaatatataaaaattattctctttctaaaaagaacataaaaatgtgtacctcgtctttcacattattcatcattgagatcatctcttgcatgaaatcacaaaagtcctgtatataatgatgaggtataatgacacgtcagcctttataaaaattattgaaaaaaaaaaaactaatcgaacgataaggaactgaagaagtgaaactgtaaaaaatgagaatctacaatttactgttatcagcattgacgacgtcgttttagcgtatacaaaattgcgcaaaacgacgtcgtttttaactatttaatttttaaaatttgtgaaaaaggaaaataaaggagagagtacggacttcatcttcgtccttgaaaggatcgtaaagcccagcgtcgtacattgatctcttggcttggtcggagagaactgcaaaaaccggcgaaagaaaaggcaatggcggcgtcaattaatattaaagacgaaaattcttcataattatggaaaagagaaaagaaaagagtgaggtagtgaattctgttcttaccagaataagcttcttggatttgttgaaaccgtcgtttagcttctccggcaacgctcggtttctgagtccatctatccggatgccacttcttcacgaatcaaaacagagaaaaaaaaaaaaaacttcgttaattataaagaaagaaagaaaactaaaacgacggcgttttgaagataaatttaccaaagcaagtttccggtaagccgtacggatatcagaatgggaagcatctttactaattccaagaacggtatagtagcaagatccaccgttggatacgccatcccgatccatgatcaaacgatcaaaattaattacacgtaatcaaacaaggctctccaaaaaacaaacttcgaatttgatcagaccatatggaaaacccaaaaaaatatcagagagagaaagaaagagagaatgaatggaataaataaggagagagagaaaagttgggtagagagagaaaaaatatctaagggggttttaaggagggtggcgggtgagagaagatatgtgaaaagaaagttccagacatttcatctttttctacgtttgaagaagagagtgtgtgtgtgttgttttttcggttttttttttcttattgggatttagatttagatattttcttttgcttattattaattcaccattgagttttaaaaaattacgattacttgccattattttttttttattattttagttttatatatgatattcctttggtgtggtggtggttatttgttttgttccatttttttttttgtctattaaatttcttaatatagtaattatttatattttagtagattctagaaatatatatatatatatatatatatgagatgaggattgagatcttataatataaaataattagtattttttgctttagaatattttacactaataatacttcttataatataattttttaagtaatattattataagaggcactcagttggataaagagacataatattattatttacatcttagttgttcaagctattcttagttcggtagttatgcattttcttttagtctcttcgttaaagattgtcaatttattttatcttttttaagtaatgtttctattggtcatgttaaacggtctgctaacaaagccgcgcattgtatggcacgtgctgcttgttattggtcaggtcgtcgttttactgagagcgatgctcctattgctcttcaagcctttgtattagcggatgtttctgtctaataaaaattattttcattcaaaaaaaaagtaaagtgataaatgatagttaataaatggatataaatgaaataaaaaattatataataaatcaaaattttgaaaaaaattataaaaatacattaatatacataatatatttttataattaaaaatatatttttataattaaaaattttagatcgtaaaattataaataaaacataaaagaagggtatttttataaattttcatcaaatatttttactctttttgcgtgaatgaataatagaataaaatatttttatttttctataataatttataattttacttttagtattttaatccttaaagtaaaaaaaataaaagatatttaatttacattcatttatcaattatcatttacattgtcaatggtttcatgatatataaaagtgaataaaatatgataaaaagactacattactctgaatattatattttaaaatgtgttattgatgagtcatatattataagaaatacaattttatagtgtaaaaaatttaagaaacaacactactaattgttctataatataataaaaatatattttatataatatatagttatgccaccactaaattttaataatactttaattctaacaaaagctagctaataatgatatatgtagggcaagaccagaattcaattaaaatgatttggtttgggttggatttaagattaacatgaactcacttcataaccctcctccaccccctttttcttttcaaaataacaataataataataataaaatttccattaaaaaaataataatacaacaaaaatatcattgttgttagtattattaattattcatgaataattgagatgtcattgtgatttttgagaagtatattattatgcaagttttattcgttgtaacttgtaagaacctataaaatcttttaatcaatcatgttatgagtatttcgaaaatagagaatgaaaatttatagtgaatttacacattctttttttattgcttgagacctatttagtaaactttctttaatttaactgttttttatttttttttttatttttgagttgtgataagaaatagattttataattataattattgtggatatttataccatatttgtgtaagattatatttgtaaaggtctaataaataatagcaaaggagtgaggggagagagaaaaaagatgtatcaatagtcacgcatctataatttgttagaatatctccaataaagtgttataaaaatagtgtgtaattatatattgttataaatattattaattatgcggatgtccaaattttttatttattaccattaatgtaatcgatatttcttttttcttagttttcatttttcttagtttcttaatatttaactgtgtatgtgtataaataagagatcttattggaataaaacattaaaaaaattctatctcttctctattttttttttctctaaattataatattacataatactaatatttcataatacatatgtattttttgcttattttcataaaattaaacttcaataatagtgtataatatggtgtaaaatttaacatatgttaaagttgtaccaaatttgacacaaaatataagatctactaaattttacactataataaatgttactttttttatttactcatttgccacttatagtacctttaatgattttttacattttatttatatatttaattagatttt

SEQ ID NO: 305908 - DNA, 3193 bp, Cannabis indica
ccatatggatagcaaacaagaggtcaaaatttaagaaagtgattgtgagagaaacttaattggcatattggtattgagataatttaatatgggatgtatattgagataacttttgctaaataattacaatttcatactctaaaaacaaataataaggatgccacttttaagcatatatttacttgacattcatttagattttaaggaagtatctagtaaaaatgtgtcgacttctttcagcattctataattcactttctattagagtagctctaataacaatatgctcaattataaaaagaaaaatactaaaaggtaattgtactatagtattatttaatatattatattattattagtacatttaaatattaaatcttacataatttaaagtaatattttttttaaataatacctctagtcaatgataagtacactttttaaggtactaaggctatgttcgatgagagggagagagagtaagatggatggagaggttagagaggagagagagtaagatgaatagagagaattgttgatctcctttatattgtttggtattaggtgtagaaggatggagaaaaaattaattagtaaaaattacaaaattagccttttaaaaataaatttttattatattttaaggataattattgtattttacaaaatgtgttttgtctttttttaaaattcttctaaagttggagggattaaattttgaaagtttggaaggagaatgcctccctccatctctcctctccctccttcactccctcttgccaaacaaataatttagtctctccttctatcactctccctccacccctctccatcccacctatctccccctcctaccaaaatagtttaagtgttaagaaatactaaaaaacagtcttagtatctaatactcttataaaatataatattattcttaatacaatttaatattgacttattcattctaattttaatttaataaaagtgcttactaattataaaatctcaaatcacatacccatgatatagcaatgctcctcaatgttgagaatcatgagattctatttcaaaaccaattgacaatgagtggagtagcccatgtatttatttcatgtaggacaatgtccacaatattctccctcaagatgatggctattttttgctcatcaatcttgaaccgtattagattggatatggttactatctgtataggtacagatcggatcacttacttgcaaggaatatgactctgataccatatttagaatgatggaattttatctcaaaaccaattaataataaatagggtatctcatatatttattctaagcgggacaattttcacgatacctcgcaacaatgcttttcccacaccctgtggtttaagctgagatctggtcccaccaagtggtaagaattttcgtccgtgataaacacgatcagatggcctacaactgacgtgtgtgtacgaattaactcaggtggacccacttccaattccatgcaaactaattgagaaagaaagcgacggaaaatttcatttatttggattccggttgttggaggagtttcgactactactgccttggacctcgaaaccacggttttctcgggcccggtggctttgaccaagaagcgccaaaaaccaaaccctcggaaacctcagccacagagccactccttcttcattccccctccaaccccctcaacccaacacagaccataataataatatacactacactccctcttctctcttcactcttctttcactttcacaaaaccaactaacccaaaaacgcgcgccagtcattactctctctgccactttgttttttcagttttcttaactcttgctttctctgccgttacatttctaatcttttttatgggtttctgagcttataaagtaagacccaacaaaagtttaattcaagaactcaatggccaaaaatgagcgtttcgactttgacaacctggcggtgaccgggggaactagtttttcacagttgttattaggagacgacgacgttttgggtctcgatgtgaaccagattttcaataagtgtaacaatagcagcatcaatacctctcttttttcatctgttgagaaaacgcccagaatgctctgttttgaaaattttcccaacagaggggaaatagttttctctgatcagtcgactcagaaatcaggtattacctgtagtgactcgtcgtcttctacttcttcttcgagtaatagcgtcagcctcagcaccatgtctaaatcaaatgtcagtattagttttgtcttattgctagtttttttttattcccctttttctcgcttctctttggttaaaacttattaatgcatttggccagagaaagcgaaatggatcggaccaagaatctgttcactgtgtgagtaccgccaccaccattacatgtacagtcccaaatcaaacactccctaaaaagatcaaaacagtagctacaacaaaggtaaattaattaatttttcattcaatcattttctattgtcttgttttaaaatgttaatgtttttgatagagaaaagagaagctaggagaaagaattacagctcttcaacagctagtttcaccatttggcaaagtgagatactattttgatttacattaatactaatatatgtgtatttatataacataattggcataattttttggggttaaattttgatttgagcagactgatacggcatcagtgcttcatgaagcgatgggatacatcaggtttctgcaagatcaggttcaagttttgtgctctccttacctgcaacgtttgccttgtgtacccgtaagtgtcagaaatttatgatcaggactcaacatttcgttttcacctcattcttatttatttatttatttatttaaatatggacccttgtatcacgtggtactagaatactagggagtctgactagaatttttgaggtgggaaatgttaaaggatactgtcagttatattggtatttgggcaatttaataggtagtattggggcactatggtgcctttgccttactatcaataacaatcaataaaaacaaaaaaatatttattgtgttgacactgtgccaaattttagtatcaatccaattatagactctaaaattgcagttcaggctttgtcaaccaattctcttcctgactggagagtagctagtgtgtttta

SEQ ID NO: 305909 - DNA, 704 bp, Cannabis indica
ttttttttatttttattacattttttgcgacatgatttatttattctctttattccaataaattgaagtcgaggtaggaaaattcaaagattttgctcagaaatagaatattaattttcactctaaaatttatttggtatactatattatatcgtataatattttaagttttacatcataatattatacaaaaatataatatataatacaatttaatataatataataaaatattatacaatacaatataatttaataaagcgtaccaaatgaaatacttctcatgttcgaactggggtttaaaactaaactttctcaggggatagatagagctattcaagtaaaatttaatgtagattcaattttctataaactagtaagaaccaggcaattcaaaaagaaccaccacgactcttattttcttgagaatccatacatcccttatcactgaattggcagctctaataactcttattgaattgaaggttgatccaaagtcaaaatcaaagtcaaaagatcaacgtggttgattttgcaaatgtagaaaaaggtaattgagaagtgtagtttagtgtcaagtcaaagcttttaatggaaccttgatggagatgttccaataagctttggaatcacacaagcgtcaatattattaatcctataccaaagtaccacctacgcttagaaatctctctctctttctctct

SEQ ID NO: 305910 - DNA, 1019 bp, Cannabis indica
tgcattttaaattttatttcaattttcattcttatttccattattaatattttcaattcttgcaaccaaacaccacttagttgataaattttgacaagtaacaatggattgaatatatacttataatcatacattgtgatgattaggagacaccaatttacattctctattattagatatatattcactgtttcttgagaagaaaagggaaagaaatattccatattaggtctagttgtaatagttactgtttgaacaattaatatttcaatatttgccatattattaaaatgaaagtcagttgttattttttcccttggcaatgaaattcgaacttaaacttattttattcatgacaaatgcaccattttgtttttggtataaagtcctttccttaaacaacaatacttttctacactacacgcttaaaaaaacttactattaaagtgcatttgtcaacaaaatcatgttgcccttagaccttagtcctaaatattatttaataaacaaataaatacaagagtatattgtatgggcatatgggtaatttgaattcactttgaattaaagaaggaagaaagaaaggtgttggatttggagtaatatttcattattgataagcctcttttttcttctgaaaatgacccacttttcttgattttgttgcaatgtgaatgggacagccatggtcttactcgctccttccttgaattttcattcatctacaattgaacaatgtacatcattttttttaaaaaaaaaaaaactaaaatgtattattataatttatgtaacgtctctgcttcaagccgctattgggtccttacatccacggaatgaatggctcttatacacgagtacgccactctgactgcttcctggattgatgacttgaccctacagaccaacacgagtgtttctagcgtactttgtctgataccatttgtaacatcccgcttcaagcctccattgggtcctcacacccacagaatgaatggctcttatacacgagtacgtca

SEQ ID NO: 305911 - DNA, 2473 bp, Cannabis indica
tagctattttaattaaaatttaataaatagagtatggttggagatggtcaagagtacatccaatggtattctttatttttttagctaaaatgctaaaataaagggccatattattgttgctccaatcatgctccttacttttgttaatatttgattattttaacaatattttaatttagatttgtcaaacataaattatttttaaaataatgaaaaaataatagttaaaatatataaaaaagtttagcaaaaaagtaaagagctcttacatttagagagcttcatatccattttccgttatagagagtcattttttgtatagttggagttcattttttcaagtcacactccctattttagttaagaaagtatggttagagatgctttggatatgagttatatgtttacatgaatttgtatgtgtatattttatgattttgctagtaggtttatgtatattttttttttgaataagtaggtttatgtatattagttatgcatatgttacttttaatattttggacttcaccaaattttatatagtctcaaattgtacttaattttaaatttatgctctgttattattttataagcataccatatgttcgttaaaatggctcactcaaatatttttgtgacacttttttcttagataaatatcctgttatcatacattaatgtaagtcatttacaacaatagactatattagaagaagaaatttctccaaccaaaagtaagtttcatccaactctagagcatatttagccaaactgtgagtaacgatattggtcatttggttgtacgcttgacatgttcaataacaactctagaaagaaaggataaaaaattagaaatatctacaattaagtctttaaaagaagaaattgtggagtaattattatttaaagcatttgaaactatcaaagcatcaatctctttgtgtgattggtaactccatttgtagaacccaatttaagctatggaacatacccttcgcttccagctcatgtgaagtaaagttaccaacaattggcttcaaaagagtagctacaacagcaccaatttatttctagtttcatctaaggaagtgtccacattcaattttaactcagctagagtaggggtagccacgacactggcactaaagcaggcagggagagtcttgaagtagcacacttaactaaatttaacttgtgttgtgcaaaaattctataggtagtacactgcatcgaagagccctctacaaacgatcaacaacagcaaaccaacaaaacaatacactggatgcccccaccctacagaatgttaaagctcaatgtggataaagcataagacaaaacctcaaacaagatggggctccgttgggtaactcaaaatagtgatggcaaagtcctagtagcaattgcaaaatcctagaatggctgctactcaccttccatcatcgaagcacatgccccattgcatgctctcaattagtgcaatgaaaaccattttgacattgccatcgttgaatcagattacaaatttcttgtggaggctgttagatcaagcaatgcaaacaacctcgtcctccaagaccttattgaaggcataaatgcctctctttattcttctcctcaaactattttgtccttaaccctcatgaagctaatgttttagcttcacaatctggcaaaatatgctttaggcatagagagagagcataaccacatggggattatcatctttatgtaattgaaacctaataactttctatcttgtattctatgtttatttatttgtgatgcagtgttattcttaaaaaaaataatatataaatacaataaaaaacattaaaaaaatgggaaatttatcgtttttaatatttcttgatcttgatcggtactcgagccgactcttatgttgtgtaagttcggctactgcatagaactcaaaaaataaaaaataaaaaaaatagagggcccaatatatatttttttaatgcttttttttttaataaactcaaattttcaagggactaacatcttgtcattagtcacttccatcctaattccttgaaactcattttcaatgttatatctatttttaagcgaaaacaaaaatcaattactgttattatagtggccaaaaattgctctaagcccaacgaaaaggcccaacgatcgaagtacttacaaagcccacttataagtcagaaacaaggaacccgtaagcccaatggctcacatgggccacacccaatccatgccttttggctgatacccatattcgaatgtcctgttgggttttatgccctaaataaaactccatgtaatctctattattcaatatcaataaagaaacagaagtatttttcattcatttgtgtgttatttggttcatgttatcaattacttgtatatttgatttataaattcatccaaacccttttcacatttatattcttgattattgtgtcgtcagcacagtgga

SEQ ID NO: 305912 - DNA, 894 bp, Cannabis indica
ctagcccgcgcttagggcccactcctattagagacctaaatgaaaaaaaaaattaataaatatacatttttttaataatttttaaaaatactatttatttttaaaaacatgacacctctaaaaggtactatacactattaatgatcaataacaatactcttttatcacatagctaaaggtataagagatggactgaaggagggtccagctttgttaagagctttgttacgaggtcacaaaaaatggaagttgatgcgacttgctagcttcctccggttgccccatatctttccacaaatcaaaagactcaactcaactattttttttctttaagtatatcctaaaaatgcttctttatatttattattatatgcatggcatatatccacgtgctttcacttcatgggcatgttttaaatttttggtaacatgtttacctcctctccgttcaaaatggaagaccttttgtttgtcaaattagtccttggccttcaatttatatctaaaattaaggtgttcattcaattcaatttgcactattttgttcgtagtgcatgcgatccacattaagtgcagattttattttttggatccaattcaatccgcacaatagttcaaatccaatccaattcaatctgcaaaagtgcggattggatcagttattttagattggttactttttaatataaaaataattaatatttataaaaaaaaatattttttcacataattagcaacaaaataaaacaaattataattattttatgctctaacaacacattaaaataaataaaattacatattcaaaggaaagaaaaaaattatatgtataactaaatgtttacttttattttaaattgtatgtaaaaaaaaattatatataagaatagaata

SEQ ID NO: 305913 - DNA, 1611 bp, Cannabis indica
aacaaagcaatgaataatcatataactatattagttatagtaaaaattaaaaacgttagttgactaaaaataaagcccggcagctgtctgtcttgtacaaccactcgaagcgataataccattgaaactttacttcgtgtttgaattctcttttaaacaaacttattcctttttcttttgacatttaacttacctattaatgactaaacgtggtttatatttttcaatatctatacaatataatgtatagtaatattaacaaaaaatgaatcatttggcatttactctagtgatctagtggtagaatagtatcctgccaccatacagatcggtccggtttgacttccccggctggtgctattttgtttttttttcagtgtaatagtattttacaatcaattaataaagtcttgagaatcgatgagctcttcctttttttcattcctccctcatcactaaactagctttagtagcttaggcttgtgcatttgttttaatttgttttttttattcaataaaaacacaaataaacatttggtaaacatttacttttgtcaacaaatcaataggatttctttggacattagcagatatgggtcccaatttcaactacttccttttctgcctttgcctaattgctttatctctattttttcgaaaatgagaaaaaaaatctgtgaacaaagaatttttaatttcatagtacagtttacatacatatttatatatggagagagatgtactataataaaaagaagatcaatcaaacaacatgaaagagctgcaaatactaaaaaatgttctagatcgatcgattagagtgacgttaaactaaactataggtgaccaactatacattcatgatataataacttcgacatcgagatttggttatcaaataaaataaagaaaatcattttcatagttgaccatttatgtgtatagtttctttttttattttatttatatcatatagttttaaactactattttatattaacttttataattttatgtttgttgactcataaatttgaacacagatatctaagttacacccgcttattcgattatcaagaatttatcatgagtttagtataaataagagaaacacaataatttgtagtaattcactctttgtatcgtagcagcaattcgagtattatttcttacggccgggatgaaatataaaaaaaatagttaagtcttgatgctctaatttttagaaagaatctagagagagatattctgaccttatgcctacttttccgaacataaaaaacgagcttgtggatctctccttttatagggaaggatatcctattaacatagcaataaaataatctaaaaaaatatagaaaaatacatataggctattttttactgtatctgatgatctaacgggaaaattgactttggaggtcgatcatgaaatttcgaaacttcagtgatcgtgtctgcgggacccactttgagtaagttgtagcttaaatttataactctcttgagggtgaaatttggagttgataattttagaactgcgattagagtgtgaaatgttacatgatagagcattaaaatagctttgaaacgaaagttaaatctcgtcaa

SEQ ID NO: 305914 - DNA, 917 bp, Cannabis indica
ccatcctcaagggtgatggttctgatgaagttatctcttctagcgaagccttatggtggaaaaatttagtatttttatcactagatttgagccagttaatctacatatttgtttctaatagatctcatttttatgcaaaagattatccagattagattgaagggttttggctttggaaatatcactctctctaagactgttagtgtgaagcaacctatccaactcgcgctctatgttagaaatcctatctctcaaggaattctgactcgcactccatcttttgatatcattaacacaattgttctgtttggagatgaactcagggaggatagtagtgatcctactcccataacaatatttccaagaagagttaaccgctctaaagaaatttttatcagtgagctagtgatttttgaagatatttttttgtttctcctaggtcctctaaggtcatcctctaaaatgaccttaagggctctatgaacagagccataaaaaccaaggtggaacaggatggaaaaaggaaatagggactgtcgggagctgttcacaacacaccaatctagatgctcaagaaggttaccatgttttcaagtatatttattgccaatatgtgtaagaggtaaaatgttatgcttgtgcaaaaaaagagtgaaaatcagtcatggcatgagcagggggtctagtgacagtgtttttatcattaacagaaagatagtcattgaaatctctaaaaaataaaccatggcattctaggagcaacatcaaaaatcctatcaagaaggatccaagtacacaatttattatcaagatagggagagctgtagaaacaagtgaaatgccatttcgttccatcactaatgtgtacaatacagtcaatatggctaagagaaaaaataaaaaaatttatactacaa

SEQ ID NO: 305915 - DNA, 1263 bp, Cannabis indica
atcatgattatattccactgtgctgactacactataatcatgaacaaatatatacatatttatatatgttctggacttaatagaatttatacattaggcataatcatgaaatgaatcatatgaatcatgcaacataaaagcgatttctgatcttatattaattagtaaatctaattatattgaaatgagttttatttagggcacaaaacccaacatactatacattacaagatcaaatttaggacctaaaccgttgaggagctacaaaactggatcttaatttgtcatatgtgatcaagcaatcatcagagcatcaacaatcgattgagattttttgacatattcagagatcaagagattgttcttcatcagatgtgagaactatccttttaattgaagaagacgagctttgatttggcttgagaatcgttgttccaaagcacgccaaacagtcaacgatgtactaaagttggctactgatgcaagaactggttccatcattgataatcgaagccatgagaggaggagctggtctttctttttccactgagcatgttttggatttggtgctccagtgactagagtagcagggggggacacgtgtaagaacagaatttggtccaaatcatggccaatgactgtgggagcaacccgagacttccatgaaaggaagtttttgtgatcaagttttagggttagggaagctgttagagagttggagaatagattttgggtgtttgtgagctgagtaagagtagcagcgagaatcgtagcttgaggatctaaagtggaagaccccatggatgctagttaaaggacgatgataccatgtcgaaagagaagaaccaagaaaagctagacaacaaagaaggaagaagaaaatagagaatggaagagaagccttgctcaacatagtagaccaatgcatttatttatataatgagactactacaatacaagaagatgaaaaccaataacaaaaaagcataacaagaataactaacaataatacaggctaactaactgctagttacactaagtgacatcactaaggaatttgttagcatcaacaaacgtattttttaaatctatggttatatacttataataatatgtaatacatttatccatgaaattaaatcttaggaaaattctacaatgcacacccttaaaatggatatattgatgcattcctatttgttttagcatccgaaataatttttcagtcaatttttttctcatggttatgtacgttatagttat

SEQ ID NO: 305916 - DNA, 635 bp, Cannabis indica
ttttgcctctaattatctgcagaattttcgcacatccatgggtaagtatgtcaggaatcctcgatcaacttctactctccaacaacgattgcaatcatgtgtttcatggaccccctactgccggtatgctcaagttaaatgttgatgcagcttgtgataaaagtagaaatataataggcgcgcgtaggtgccattgttagagatgcaacaggaagtgttattgctgcattatctaaacctttagtaggtaatttggcatcaaatgaaatggaagcaaaggctatttttcacaatcttaattgggccctacaactgcaactttcactttcacaactgaaaacagatgctctaatggttgcaaatgctcttaatgtacctactccagcaatatcctcctttcatgatttaattatagatatttttattcttctgttctttttcctaaagttaccattgttcatgacaaacaatcggctaacatgtatggctgcacaatatttggctcgttatgctctagaattgaatgaagcctcttcttggttgaggtatttaccctcttctttttactttgttattgtaaatgacttaggtggcgtttggttggaggtaatgaaatggaatggaatggaaaggaa

SEQ ID NO: 305917 - DNA, 566 bp, Cannabis indica
ttggttttgtttttttttttttggaccaccatatttcaataatgcatatactatagacatttgtaacaatttggtgtcttagtcttggaatactacaaaaacacatggtccaaagttttcattgctttaagtttaaagctaagccatttgggatctacacaactcatggggacaaaatcttgaaaggaggttaaaagctaagccaataatgacaagaataaacatacccaagtgaatttattttttctttaaaaaaattccacctttggttcacaaaaatgaactttgcaatggagagtccatttataaaggtcattccattgaagagttccatatttatttggtttgacttgaagaaaagtgtcttctttttcctttggaattataattctatttttaaaggaatatttgtcacaatcttcaactatttcagaataagattttcattttaaaacggttaaataaaagaaaattattggattactcttcttatttaatagtattttttcattatatagataaagctttcttaaaagtaataatatttttatatatttaattttttt

SEQ ID NO: 305918 - DNA, 1040 bp, Cannabis indica
ctctttaaatttgtttgctagttaaaaattaattcctccaaactattaccatgtcgaaatgtaggattttttgttaagttttatctcattgtttaacaaagtgttgatatgactagtgtcttattgccacataagtgtacaattcgataaaactactttaaaatttaaaaaatctatcttcttatggaaaaataataagaaaaattaaaattacttattatttattcatatttagttagaaaataaattttcaaaattttaaattgcaaatgtagcactgctatagtgaagaataatatcagcatttttttagtcaggtgcgattaaacttaacacactactataaaataggctttttgcattggtccacgccaaaaactgatgcaaaaaagtacattaaattttttgtcgatttgggaccaatactactttccgtcagtgtattacaaacacaatgttgcgactattataaactgaagcaaatattataaattaaaaaaaattccaaaactaaggcccatttacactaaaaaaattcctcctatgtaataaacattataaccctaatcctaaaaattacactcattgacccctctctctctcttagagttatgtcgatgatggagccaacccgcatcgccgcgataaagaccgtctaattttaatatgttgaattattaaataatcagggtttaattatgagattgaattaataattatgatttttatatttgtggagacttatttaaatttagcatgtataaaatatgctatttatgtaaatttcttgtttttccgtgtttgtgtcaatatcagtggaatgcgatgttgggctattagagagtcaagttttcacatggtttagaatggtttattaaagaagcatcattgttaggtattggactataaggaattcgacgggacttggaaatgagcaaattaccctttggtctcattagtatatgtgttagtggtcaagggaaaaatggtcattatggtgtaaagcccgcttagttaatttggaaattagcagttgttta

SEQ ID NO: 305919 - DNA, 2602 bp, Cannabis indica
taaaactgttccaaaagacacaaatagacgagaaaatgctaacatacccgaaacataggctaaatataacctaacaaaatactcacctcgaagggccccattccaatttttgtccaactaactttttaagatttaagccttcgcactccttttagtgtgctcatccacgaaaaaattatgtctggcaagtcaaagttgcgtgtgagcctcatctgcgtgaaccaaggtcaacaaatggaaggcaccccgaggaaacaattgcctttgaggtgattccagaggtagatgtattctgggagggcactgaagatttagacttcttggatgagactgacttggagtatgagtgttccttgcgttttcccttttgactctcaggcaggactattttgccctcctccagtaggatcacctttgagtcattttgactagcctctattggtcctcccagagtcacgatcacttttgggacctccgtagtaggtatagctttagccccctcgagagcatccaccatatccagcagggtgaaggtctcatccatggattgatctacacaataagagtgataaatcttcgtacgtatcaaatgcaaagcaacacaacactagcagcaagttagtcaagttaaacagatgttattagaaggaaccaatcctaccctggcaccctaattcctctctaacaaattgataaatcaaattattggagtcatcatcccctaagtagctatctgaagggaaggaccaactagagatgatgtaggaagagtggtctagaaggataggagcaataaggcctaacccatttgagacctacctaaaaaatctccaatatacaaaaaatatctctctttttcctattaccccaccaataatggggcatccttaacctatacagtctcttgccaaaacctattggtctaacacgagtatatccccggacatagggtacataagttagagataaaggagacttacaaacaccaaatgaagtggctctaggagtcctagcattcagcattgggaacaagaagtgagagcgaggggcctcaagatccttatttgctccccctgttgtctcctagtcagtgacaccttgggcccgggctatctggtcctcctcttccttcattctgcgaaaggcatttggttgacctacgtgtttcctcctccgtagccttatctcgggcgttaggacaaacaacatttgagaggtttgagtcgttaacactttggggagctttcaggagaccaaaccttcggtaattggcggtagtcaccaaatccctaaaattcatctcttccttgctaaaggtttgaaattctgctttgtgattcctaaagagttgggttggggccgtccgcaacggaggagggatcctagtccattcggtcaagagatttgggcgttcaaaggcgaaaaacccatatgaaaaaaaaaaactagtgctgacaatccttgaagttcttttaataattataagggacctagcccttattgtctaggtgttgttgcaaagaataaaaaatatctttaaatttatctctcttctttatgagtaaaacaagtttgtaaaaatataaaagataatattttaaaatgatgtgtgtacttttggcaactatagatgttgctcccattcaagatgctctaatgtgagtgctcttagcatatctaatatcatagaagagttgatgttagaaaaaaaaaaacaaaaaaaatgactaatttttgtcttttggggttttttttttgttgaaaaataatatttgtaatctttttttagggaaattatttttatattattattgttatatgacactttaagatgctcaataccatatcaatgtggtacatatttccaaatcagttattaaattaaaatttttgggagttgatattgaaattcaccaataaatgtatgctaccttttgtggtgcttgataccttaatgtgatccttaacattttcgttattaatatataatatgtacatatctttattaactggtatgctatcttttgtggtgcgtgacaccttaatatgactcctaatatttttgttagtaatatatacatatttttattaacttcaattaaaattttaatttttttttcttaagggctcaatactataccgatttagtacctaataattaattattaattttttaaatcatttattaaattaaaatttgtgagaactgatattgatatacaacaatgacagtatgcaagaattttaatgtgtcccttaaaatttttgttattattatgtatatatctttattaacttttattagaattttaatatttttttaattatgcataagtttgcaagaacatcttcaaagagagatgtaaatattgtactatatttggcaaaaaaaaaagactttgttatatatttgtattaatttttagcattatgctccaatacacaattgtaaaacttaatgcaaaatttaatatttttattacaagtataaaaacattataattttatcattaatttgttaatgtaaaacaagaatataaatagttcacaactaattagctaaatatactaataaaatattaaaagtaaataataaaatttt

SEQ ID NO: 305920 - DNA, 3247 bp, Cannabis indica
ctaatccaaattactaaagcggtcattacaacttttgtctaatttcattcaattttactatttcagtgattgtttatgtactaaatcatactcctcagactttgatatctaccatatcatgcccctcgaactttgacatgtactaaattatgccctttgaactttcatccgtgttagacttttttactaaaattggaaaaaagtctttaaattctacaatcttaatagttcatggggcatttttaacgaccttaaaagtttaggggcataatttggtacatgtgaaaatttaggaggcaaaaatcctaattagaaaacttaattaatagtattgcattatcatcaattaaatatatatttaattatttaataattattagtatgttttagattatatagaattttgtatctttctttttttgattttttaaaaaggtttatctcaaaagagagattgtatttaaagaaaaaaaagaagaaagtgttaaacttaatactaagattttccacgccgcccaaagatggaattttaagagagataagagaattagagagcttaaattccaaggaggcaaagcgatcgatcagagccaccgacttaaaacccaaagcggcccacttccatctcacgttctcaaccgtacacacacgcattttttgatcaaaggaattccaaattcaaatccaacaacccttttttttttcctttttctaaagccacacacacatacaacccgtcaaaagggacacagtttaatattatcataataaagaaaacccaaagaagctcacatcgaactatcctggaaatgaactctctctctctttaatttcctttctactttctctctatatataatattattctcaaccaaaccctcaatactgatgcaaaaaaaaaaaaagaaagaactaaacaaaacaatatacaactctctccctaaatataactaatagttaatggagaacatattaagaagatctaaagacgccattttgggcaacctcagagggcggaggagtaagaccaccgtagatgggcggtgcaagaagcacccgaaacaccaacagtcaccgggcgtttgctcactttgcttaagtgaaaaactgtcccagataaaccatatgaaccccacctcatcatctcgtagaacatccaccaccaccggctttggctctgcctcttcaacgacatcttctttgtcgtcgtattactcctccgaggatgacgatgatgatgatgatgaagactcacaatgctcatctcccatgcaaaattgtagtactactaaaaataataattacgtgcttaagaagagcagatcgttggcttttgtttcaagaaataaagaggtacgtagtagtaatgttgctactactcacgatcatcatgatgatgagaagagagggttttggtcaaagttgattcaatatccaaaggttattaattataataaaaagccatcgatgagtagtagtcatcgtgatcatcaagctcaagctcctaaattcatgcattccagaacagttggagaaagatcatcgttacatcaaatggtgtattgatcatgaattcatgaaaaagagattgtcatgattatcatgatttagtgttattcctttcaattttttttttaattttctgttaataatgttttgattttgtttaaagttcagtatacatatattgtaatttaaaaaatcatgcatatatatatacagattgagattaattaagaaggtaataattatcgatcggtaatagattaataaagaagcttaaaataatcaatctacactgccgatatattaataatttaatttattatataattttaataaaattaattcagtaataaatatatatatttacgatttgaatcatatagttgtttatttcatagctgttcaattgggatcaaagttgttgctcatacttgttttggttaagacaaaaataatttttaaatatttaaggctatttgaaatgaacagcagaaacaatctggcatagcttggctgtattagaatataataagttaattatataattatctctctatcgaaatgagatgatcacctcttttaacttttcattttcatcaataaacaaattaaaatggtcattctttgttttttcgttttttttttttttgtttttcatgaagaagaattatttgaaatatataaacttttaggatacgttatgatttaagatttctttctatttattataaaaaaaaaaaaaacaaaagaaacaaagcagtacgtcggttcaaaatctcttcatgactaaatcaattaatatataattaaagtcagtccacgcgaggtatttagggttgaatttttaaacatatggttttttttagttaaagtatatgtattttaatttaattataagacgtagataaggaaattaaagcatgtatatatatatggtgatataatgataaaattaatttaatataattataagacgtagatacaaatacatatatttacatctattctatataaagtgtgcctatataaccgaattcttggtttatgagaaattcgtgggagactttttatttatattaaaaataaaataatttattattaaaaataaaatagtttatgagaaattcatgggtcactttttatttatattaaaaataaaataatttattattaaaaataaaatagtttatgagaaattcatgggtcactttttatttatatataataaaataaataaaataaatcccattaaatctaaaaaaaatacgattgggtttttgctgttgtacatttatgatttttctcttcttctcttcttctcttctagaattaccattttcctataaaaacactcattaaaagaaaaagttatattttagcacatacagtataactaagaagtcataaaatttataatttcgtcttctgttaaataaaaataatagcaacttgaagcattattataattatgctgctttgtacatgctgcgacaaaaaggaatgtcaatcttattaatttctccatgttctagctattaatgcaaaccagaaaaagaaaaacatttactaaaacccaccaaaacttatcataattaaacttgaggcattagatgacaaaaaaaaaaaaaaaaaaaaaacaaaatcagagagtacattacagcattttttttatcacgtgctcataaattagaagcacaattaaatatattagcgaaatagtgactaacatccaaatttcaga

SEQ ID NO: 305921 - DNA, 1173 bp, Cannabis indica
aaaaacgggaacacatcccaccaccatacttcaaagtttttattttttttataagaattgttattgggcactagtagtgcctagcactttctaaatgtattcttgcaattggctagtgatactttctaaaaattattaaattaaattatatgagactcaatacttaattgaaccaataacgatattaacacataaaaaattactaaataccaatattttgatatttctcttttcttatttaggataaattaatagtcaaaatattacaatagaacgatcaatgcttttattggagctaggtggtcagctttttcacactttgacgctgtgattttctctcacttattttcagattatattattattaggtattagtatattcaatatttttgatgggacacgattttatttcgtgatgtattttacgaaatatattttatgatatattagatgggtctcagattacattagatgggtctcagggtacgttaccattttttaactctaattactcctaaatcaactccagttctcagatcaaataaatctcaaatctaacagctgtcgtacatcacagaatacattccgtgaaagtatatcacgtcatatacctactatttatatgtattttagtaatatttttcaaaagcacttttttaagatatataagacttaatatttaattttacaacaacgataactgttcactagtccactcctaactctctcttatttgaatgcaaggtcacaaataaagaagatagaaaacgtggatattataatcagtaaaaatatcttctagaaaagagatatatatatggctatccagcatataacactttcccatatttcaaagaaactattccatctaccgaccacgtacactatgatttcaaggtttttatttttttttaagaccatccattactcttttggaaacactataacaaaaaagttctattaatttgattttttcggtaatttttcggcaactatgccaattccgataagtaattccggcaactttctaagtgccaacaactactttactttagtgacttttcaggcatcgccagcaaactccggcaccagtaataacgccgataatcactgtaattttatttatttaatttttaaaaaatatatatatagaagaaattttaatatttttta

SEQ ID NO: 305922 - DNA, 1647 bp, Cannabis indica
  modified_base (16)..(16): a, c, t, g, unknown or other
catagggggggtttcnccgcaaattgctctattttgtgaggagaagtgtgaaactatcacattattattattattattattgaaataaaagatttcattaaacatattattttaaaaagttttttttagagagcctgttaaacattttttaaaaacctttaaaaaaaaaaacacattattatagtttcaaaaatataattaaacatttcattaaacatattattttaagaattaattgtgctacagaaaaatataattacaaaatttaatattaaattaattctctttttaatattttattcaaaatataaaataataaaacgtttattatttaatactatagttacatattattataaaataacaaaaataacataaaaatagatataaaagtaaatcattatttattatgatgtaaatttttatactatgctaaacttaattggcacacaattttttgtacaccatatatgagtttgtggaatttgagtatatttataagtagagtttaaaattatttcaattttttaatagagataaattaaagtatcatgatagacataactaatggaaaaatatgtaagagttgtcatgtctccattggtggacatgagacataacatatatgtgaatgacctactaaaaacatgcttatttattttgagaaatgtctttcatatacctaaaatagacaagtatttttaaaattgcaacttatatttaccttgtttaaagttcatatatatatttcttttgtttttcccttccttggattggatttttaactgtactttattggagtggtccatagtaagagaaaagcaaacgaaaggcatgtgcttttaaccttaactatgttagttatatcattaaaaggaacattcgtttgtattatattgatgtaaacaagacaaacatatataccttacataatctatatctaatctattgcatgcacaacttaaacaaatataagttaaaaaaacataaattagaaggaaaaatactatttatttaccattatattaagtataagcataattaatgtctctgcaatattgaatatcatataaatggacataacttcttttaatgaccataatcaaaattgaaaagggtcacatactagcaaaggccaaaacctatatatatataattaaataaaaaaatggatacatgatgtatattatataaataatgataatttggtttgaattgtggataggatatgatagtaggtgcatggttatggatatgtgacaaagagattaattaaacacacactaccttaccctacagtgtagggaatgttaaaagtatggaaacttataactatattattgttgttattattgttagtcttagtagtccccatcccattcttttctttacttcaaacataacattatgtttatgtcccatgcattgtcccaactccaaacataacatctttaactcaaccatattataaatatgataatgaaagtgaccaaatcacaaggctcatcacttttgaactttttctaagtacctaaataaagatgtaaaaatgaggtgggagtggcttatacttgctttggttctcttgaattgatgaccataactcaaatttcccaacttctaaagaagtgtagaatattccaaaat

SEQ ID NO: 305923 - DNA, 1686 bp, Cannabis indica
agtgtatatacttatcaattcaatcttgtctttcaaggctttgaactgagttggaaacaaggacttggttaggatgtctgcaaccttctctttagtttagacatgtgccgttttgattactccttgttgaacattttcacgcacaaggtgacaatcgatttctatgtgtttcattctttcataaaaccctggatttgaggctatgtgttgtgctgctcgattgtcacaatacaatatagctgatgccttgtgttcgatttttaattcctggagcaaggaaagtaaccacaggacttcacaagtcgtataagccatggctctatactccgcttaagcagaggatctagacagtttgttgctttttgctcttccatgagactatggaatcaccaatgaaaatacagaaactagttgtggaccttcttgtatcgatggatgctgcccaatccaaatctgtataagcctttagttgcaccttagatggtgtagcaaagaacagtccctctcctgggggaagatttaacatactgtaatattctttgtgcagccaccaagtgtgttgatataggagtggcaagaaattggctcaacttgttaaccgagtaggctatatcgggtcttgtaatagtcaagtattgtagcttaccaatgattgttttatacaatttaggatcagctagagaatctttaccattgtcccacaactttatattagcctccattggtgtacttgctggtttgcatcccaagtgaccaaggtcttccaataattgaagagcatagcctctttgtgacataaaaattcctttattggatctagctatttcaagaccaaggaaatacttcaaacctcccaggtctttgagcttgaacctgctgtccaatctcgtttttaaagtctgcatctcagccaaatttttgctcacaacaatcgcatcatccacatacaacaataacaagataaaacttgtaccaaagtgttttataaagagagaatgatttgtggccgagtgtttgaaaccttcttcaaccatggaattagagaatttctcaaaccattgcgtagaagcctgtttcaacccataaagagactttttaagtttgcaaacgacattagctggtagagtgtgccccttaggacaataccctggaggtagtgtcatataaacatcttcatggagatcaccatgaagaaaaacgttgttaacatcaagctgatggagaaaccaatcatgaatggcagccaaggcaataatcaatttgatagtaaccatcttagcaactggtgcaaaagagtgaaatatcattacaaacatgatgagtggcacctgtatcaataatccagctagctttagaattagaatggggaaaagatttaccattgaagtgtgaaaccagaggaggacaatcatcttgactccttatggcaacatcagaggttctttgagatagcattgccaagatttgttgatactgcatggacaaccgattgaccaagtcctgattgtcatctatgttttccccagatttctacttaaggttgctgatagtgttggcagctgatggttttcccccattgttgctactttggcattaggtttttcaacaggtgcaacatttctgttaggaaatctaccatacaaacgatgtcctggtggatactgttggaaatattttatcaggatc

SEQ ID NO: 305924 - DNA, 1756 bp, Cannabis indica
aattaccgaaacaactcaaactataaattttttaaaaaaaattaaaacataatatacaaaataattctcttaattttattaataaataaatatttctcactattatcattattaaattatttaatgtatgatacttttgagtttatctatttatgtttacgtgcgggattgtgatttcaatttcatggaaatatttatttactttttttttttttctaaacttcatggaaatatttcttattttaggaatattctgatttaggtttcttttttttctttctcatcgaataagtcaccttcatgttagtggatgggtcccacattcacagttcacacttccccatatatcccatcctttctcccacaataaatgaaaaaaaaaaaaccaatttttattattatatacaatttatttaattttttgcaagaaatacttaaataatttttttaataagtaagcaaatattaataaattgaaaataaaataagaaaaaaccaaattgaagtacttttttatgataaaaaaagaaaaagcaagaacaatcatgtttagtttttgaggtaactccaaaagtatttataaacttttgatttgattagagagagagaagtcaaaatagtttagaggtcaatttcaacaagcctaaaacgcattcgaattccgaactgagccatctctcttcgtctctttcgaggtcagccaccctatatctctggattgttttttctttttgaaaaactatatctcggaattttgtgttgtctataatgggttttgtttaattcccccttcccaataaaatagcatattttcatttgtatgaaaattttcccatgtgaagatcagtccttttttggaattgaattctgggattttaagctccgagcattttcactctgtcatatcataaaggtgcaatttttattttattttttcattgtttaattgaaattttgtactgcttttgtgcatgtgttattggcttttgttgaatcctttaatacatgtttattaattaagtgaattaggttgcatgcaaatgagtgtaattattcctataattttggaaagctaaagtgggatttgtagttcatttgttcttatcggtttatttatccttttttattttgatttttataaacatacaaacaggggttttgtgattttacattcttctgataaatttctattgtttgagtttcaggattctttaaattgttaggtcttgaactacatttctatagctctacttggagagatattctgttgtggcttgtacagaggctgtggattgaaaatgagagcagtagctcgaccttttcgccattttcaatcaatttttaggcctcaaagaaataggtactccagtagtttaccttgttatagagggcagctgattgatctacattctaggtctacttacactttcaccaaagatgcacaacttatccatttcaagaccccacttttatgttatcaagaactctgtcaacagaggttgtcaaagttacaaatggaggtttttttctagccaccacaaactattatttatatgcaacattatagaacatgatttttgacctttctcattttgctgatttcgaaattgaaatgtttaatgctagatacagatagagcaggccctcttgtagagtatgaaagaagaattgcctcaggtgaacttgttgatggtgacttgtgccaggtataattttaaagagttttaagctttcaaacaaataatatagcttgtta

SEQ ID NO: 305925 - DNA, 2791 bp, Cannabis indica
taggtattagcatgaatgggtaaaattagaaaatttaagtttttatgcttcattttttttatctaattagaaaaatctcttatttttacatcgtatggaccgagattgttctatcggttgaaaaaaaaaataaaaaaaaagttttttagccaaaaaaaaaaaagaaaataaatgttaagtttaacttaaatattttaacatgaacatatttttaatatagtgtaaaaagagatatttttttattttttttttaattaagtagttaaactaagtataaaaattaaaatttttcttttattatttgttgttaggtcaaaaggtttaatactttaaaattaatatttataataaattttttaattaacgtaacctattaagatagatgtgccatcactatatatataaaataaaataaaagtagataaacaatattattgggaaacatatgcaacaaaacacaaagtccccacaagatgaaccccacgatagcagaacatgaaacatgtgtcacatccattcggttgatgtagggtaattataatatatatatatatattgaaaaagcatataaacacaaaaacaataaattataccatcataattaaaacaatctttctcattataaatttgcttgccccacaaccacaatttatgctttactaattaactcgtgttcaaagacaacaatcataaacgtgcatgcacttctatatgtacccatctatatatatatatgtgattatactcatggaaagataaagttaataccacgatttaatatattgggatgatttaagtcaaacatattttatttaaatatttattttttctataatcaaagaaattaagacacaatacatagaattatgtttttatatatgtttacgtagtcgcatcgattgacctttcttttttcttatttaatcttgcttctattttttgaattatatttaaaactattaaatatatatattttgggtacatttatttttacatatatattggagttctaatataataaatatattacaattaatgtgtgtaagtactaattatatatgtatatctaattccattgttgtaatcaatattgcaacttttttgaattagattagattttgccatatataaaaaatcatattccaaacagtagataaagtgtgtacggtgagattcgtatattgatttttatgctattaattatgatcacttaattaataatttcaatttggtacttaattttaaagaatgtctaagatggagggaacacaacaaatcaaaatattaaagaataataattaaaccaataaaaaggcttcttcgttgaatataatttctctcattagccgcctaatcaagtatccaaaaagaacatgtacatcaataaaaacacactaatattgaatgcatcatgcagattcaaaatgaaaatttcaaattaataataataaaagtaatatattaatattatgcagtctactttggttttgattcaaagtatttgtttaactggtttttctcaaaaaggcatagaaagaatatgaacttttgtcggcgacatttcacgtcagcaaagttttaccaactttttcgccagtaaaagttttacggttggggaagaatattgttttgtcgacgaataatatgaaatttgctggcattgttgttttcactggcaagaaaaagttgttggtgaaatttgtttgtcggcattaattcgctggttgagccacctttgaaatgtttttccgacgacaaaatatgctggaaaaactttccgctttaatacttattcgtgagaatgcattattggtgcatcaaaatgcgtcagctatacatttttaatttttttttttgttggcgcaaaaaacttgactgacaagtcttgtaattttttttttgaaaaaataaatttgtaaaattaaatgaaatataatattaatttaaattaaaactaaaatttcataaataatacactaacataatcctgaacgtatattataataggaaatgtctatcgtagagatattggttttgtccctaaggtagggatacttttctagtccttgattgttgataaagtggtaataaagttgagaaaatatgataataatagtgaaacttagcttgtaatatttttacaccttttttgtctttctacactattgtcttattcttcttcctttttttttttataattttttttctaaaaaattaaattcaatagttatttcattttattttttagtacacttaagtagtaatttttatttattttttcatattcttctaaagataattttttttagtatgttgctttcaaaaaaatatttattttaataagcttgttgatgattaaccgtttttaaaatttattttctaaagattatattttatgtctttcttagatttgttttctttatataatataataagtacaataattataataaaatataaattaatatgtatacatcaaggtacatttaaataagcatataaccaagtaactcatattaaaataaagaaaaatttacgataaaaatccccaaaaaaatcattttgatgcagattagtccccaacctcaaaaaatagcagcaatagtcctcaaggtcacaatttttatttgtccgttagtcctaattttaactgagccgttttcttttttaaattgtccacgtgtcaaaatattattggtccaaattattattttaattttaaaaaataaaataaataaataaattatttaaaaatattttttttctttttctttcttttcttcttcttcgt

SEQ ID NO: 305926 - DNA, 1389 bp, Cannabis indica
aaattttaataaatctactatgttattctcaccaaatatacctgatgatatgcaatccttatatacattaacgtttcatatgcaaatcattaaagttattgagaagtatttggggttgtcgatgttaagcggacaaaataaacaaagattgtttaatgatgttaaaaagaaagtttgatctcgactaaattcctagaatagtaagcttttctcttatggtgataaagagatacttctaaaaattattattcaatctatcctcacctacgtgatgtcttattttcagttacctttgaaagcttgtgaggagttgaaagggttaatgacaagatattggttgacttcttctgcgaatgaacaaaaagttcattagttggcatggtataaattatgttttccaaagaaacaagatggcttaagttttcgttcatttatttttttataatcaagccacatgttagcagctcgagcttggaggattcttacttgtccaaacactttaccagctcaaatttataaagtaaatattatcaccatactaccgttttggaagcttcacatttgtgttttaatctataatgtataattcttagcacaaactaaatctgaggttaatttatttcctcatattgtcctatttgaataggattacagttccttttaaccaactgaattaggagtattttggatcaatgttttttatttttttatagcttttcgtacgttctctttatgtgttattaagataggtaacatctatgaccaaagtttaactattatttgattgctattttatccttctattttcttttttccaatttaaggtttaaattgtttaataaagttgttgactaataatattattcttggtcaattttttttattattgtatagttttacttggttcattactactactttatttgagttgtggtaacattggatatttttacagttgtaaaatctcctagctatatctagcatagtattatttggggtcactctctcttttaaaaaaggcatccgaaaaagaataggaactggatattctattttggtatttaaagatctttggtttcctcgccaatattcacttttatcttcatccattagtagtagacatcctaatttactggtgacagacataatagatgattcaaggaagggttggaatttacctattctttgacagttgtttaactgtaatgaccgctctagtaatttagattaagtaagggcaagtagcactaatttttattattttattattatatgtgaattaatttaattgtggactccaatatttagaaataaatattagagttataatttctcaatttcagagattttattaaactctaggggtattatttagcttatatgtgaaat

SEQ ID NO: 305927 - DNA, 1632 bp, Cannabis indica
taatgatatgcataaggtaaagcaagaaccatattagtcttatttgttcaatgaagtaaccactcgacaattgcgacaattcagtgcatacgaaaattctcgcattagttgagtccctttaactttatttgttgaaaatgaaaattaaagatgactagactctagaaagtctatagttataagaaatgatccaattcaggacaaagtaaaaagaaaacttcaaattattattcatttttactgatggtacatgtggacatgattaaaagtaacaaaaaaaaaaaaacgaaagaaatagggaaaaataacaattagcagagaaagtgcccaagaacagaccacttatggtcatgatgatctggttgttaattctattaattaatttgaattttcggtaaccaaacacagtaaagaaccaattcagtcgctttccgaaaacggaaatgaggagttcagtctatcagtattaccatctttttctaacaattgagcaccaatgggagatttggtttgctctaacgacattctgttaaaagatatatttatttatttatttatatatgcacactctaatatcaaatattatttgagtacttctgtataaattaggtagcctatcaccaaataattaatatattactttactctaattttcaagaagtccctgtctattcatctaagtatatatgctatttttttttattcatatgttttacgccttatttatttattgatatttccaataaaaccatataaattaaaaataagtgttacgtgttctgctttttattttatattataattttattaagtgaaaatatgttaatctttgtggttgattaattgccataaaaggtttaggaaacaaaaaagatacttgttatttagtgagcctatgactatagtaggtttgatttctacttgtggttattttaatggatcattcatgagtttttttacaagagatagatactattttcattttggagttgctgaaagaagtgagacgtgtttttaacactattatagtgatatttttgaggcatgatttgacgaaccagaagtaaaatataaactttccaagtagtaaaacaaacattatgaagtttcttactgctaagattaaacgtgaaaggggaaaaaaaattatatagatgtcaatataagtgattttgtggttcccgtgtatttagaagggctaattaaagagtagaaaattaactttcttctttgatatatgagaataagaaatatgcatgatttatagccttaaacatattatatggctaagtcatgtctaagttatagcacttttaattagcaaaattacttaaagcaaaagcaagagccaaatggaattaatttgatacttctctggtaactttatggcttttcaaaggaattgttgtattaatttcaacttagtgactaggcaaaactccacaaggaaaatgtggagagtgacatattggtagactctttgaatctaagcatgtctgataatatatgaaagagagattaggatttagataggtgaacaagaataaataagaaatgttagaacaacttaagtttaagttggtatggtttgttaaagactgtatcatattattattatttgttaaaataaaa

SEQ ID NO: 305928 - DNA, 498 bp, Cannabis indica
gccatggcacagagatcggaagaagagtgggaattatgtacggcggtacaagacggagacttgcatttaacggtggagtttttgggtattttcggcggcggaaaagttgcagagggttcgtatttaccttcacagagtatacattcgaatggagaacaggggaaccagacgaggtcgcttccggtgtccatgtagagagaaattggttgaggtgggtttgttccgatggttaaagagagcgtgtaatcacttcccggtgaaagggggagagagacttggtgactgtggcggtggtggtgacgcgctaaggagcgagtggtggttgatttaaggaggttgtgagttgtgttgaattgggttttggatagagaatgtgttaatggaaaaagaagtgtttttgaaattgaaatggagaagaagagagtcaaacagagcaaaaacagagcttttgatgaagccatgaatggatagagagagagagagagagagagtagtggt

SEQ ID NO: 305929 - DNA, 3132 bp, Cannabis indica
attattattgatagaacagtatactaccatgtaataacgctgaagtgaaccccagacctgacacccacttgagctggattctaagtggactgtaattaaaactatacaaataataaaaacttaaagaccgcatttaccgtggctgaagctttgggtggaccaagaagccttgcaaatgatgtgtgaagaattgcagcatcatactatggaagataacgatatgtgtatcaataaaatacacatccataaaaaatataaatggcagaagatagcatattagaaaaaaaaaaaaaaaaaaaagtctctacataaattcaataaaaactaaaggttatcgtgaggatttccaaattaaggagttcagtttagagggccataacaataatcttagtaagtatattatatatgagcctgagtatgcactattatttagaatactgcgctatgttatacagccttgggaaaaacatttcaaattacagtggccccaaaccacagctgaagtacgaagagagaaaatgagaatctgttagccaacaaagactgataacaacaagaaaacaaatactctgaaactgtggagagagagacagagacaaatgtcacaatcaatgtcaaagataatctataagcatgattgatcataacctgttgaaagaaatcttaattcattggtttctgtgtgtatttcacaagctattcacaggtttgtactctcttctcttttttggtttctgaatgagtttaataaaaaaaaaagatagaatctaacaaaaataattaggatgttaatatgctccttacaagttgcttttctggtgcacggggaagtgcagttcttagtttggtacgaatcgttactggatctgtcccagaaactacctacacaaacaaaatattgatttagagcttgcataatgcatggaattttgacaattcactcaaaaagagcttcgtcacaaatcgttctcaataatccttacaagataaaagcagcgcacaaaactttaaataaatcgacaatttttatttattgatgatgcagagtgagaataccaaattagacatgggaattcattaaaatgagaaaattatgtaaacatttatattatacaatttgcataggaagatcaccctatactgtttctattgaaaaaaatgacagatataagaaatgagtgcataaggtataggaaataacctgccagcaccctagaagcacacctgttgatgttaagaccactctatccaaaacaatgtttaaagagcatagagtctttgcaacatctttaacagcagttgcctcagtttcaatctaataaaacaaacaagacaataattcaccatagttcttgcattttctttttaaacaatgaatgaaaaggttctgaaggaaaataaacctcattctcagtagcaggaactggcgcaatatgatgcgaggcatgaaacatactgaaatggtacaaacttgtgttctgaaaccagatagctaaccagaatttgtgtaagcatgcaaaaactgatgtagtaacttaaaaggaataaattatcctcattatgtgtattatgatcaaattatcaatccttcccacacaacttctcaccaaaaggaaaaaaatttgtttgaaaaacttatgccatgacaaagcttggtacaaaagcttacatttgtcaaagtagggatttattattcgttttatagtctctctgcatcaaaagaaacgtgaatccatcattaaataaatgtgcatactactagcgaaagcaatcccataatagtaaaaagagccctttttttttcaagaatcttatcaggggaaacagcacaagtctcaacaaacacaattgtagtcaataaacaatatggttcacacttcacatggtcatattctatgatatgacatcattttatacataaaattctgtcgtttttgaaagtggatttattcatataagcaaatgcacagaagacaacagcattcactacatgaattcttataacatatatacacatatatatatataaatataaatatatatatatatatatatatatatattttaaggcttacgagataggcactgagtactctgtgctgagatacaaaacattagcacgaacaggtggattagctgcctacaaacaagatcatataccccaatcattaatgacatttcaaataaggaaaccaaatgtacaattgtttaactctattgaacattaaatagaatttaattaccttaagagcaggctccacagctccatccttgagaataaaaatatccgagagtgacaaggactgagaagtctcaccatgcttcagaaaagccggtcccttctcatccaaatcccgagccataccatcgtacaatttcgacctccgatcctcatttaaagccatcgagactgcacaccatcgttcattatcatcaccaatttcagatcttcaacaaaaatcatctcgaaaactaaaacgagaattttttaaaaaaatgaaagtgagtgtaatgtgacctgaagatgtggaattggaaatggaatttcgaagagccatttggaagagagagtagaagattatggcagtgaggaaccagagtaggacaacagtcttggagtggctccactggagaaccctagccatgaatgtgatccgtccggccgcagcttcgggtctgagtcgtaacccaggcgagttctcaataccactagattcccaggtgatccgtagggaagagtttcagagggacacgtggctttggttcgttttgctacgtcacgtcactattgttttttatttatttatttatttataaacttaaatactttatttttaagacaaaaatacgtaatattacaattatcacagtgtactaccactttcgttaactcataaatacggacagggtttagatgtattacatttatttttattttattttaaaacttaatattcttaatattagaaactaaatgctgcttttaaaaaaaacaaacttgttctcattaacatttttcacatgatattaggacttcaattcgataattatgttccatatgttatactggttcgctcagctatagtaatttagtattacatttctcttttttttaaaaaaaaaacttaaagt

SEQ ID NO: 305930 - DNA, 2198 bp, Cannabis indica
ttctcatgaattaattagggctatatacagatttacagtattctaacattttcagcaacaaacaacacgaaaattgaatttttaactacttcaaatttcgtagtaaattagctacacaaaggctattctttgacatattgtctattgtcatgtgtatcaaatattgtaaagtatgtaacatgtaatgaataaaaaaatgaaaaactaaatttttaaacctctattaagaaacaaagagtaattattaaaaatacccaatcttttttttatcaagaagaaagctttattaatcacaccaaaaccaaacaccctcacggctctccaaaggagaccaacctcacccctcacttaattacaaatcaatctctttagtaaatctatctcaactttggatccattcatattcttgagaagatacaatttatatttgacatcttttttaattttgctaactatacaagtgatagtattagagtaattcaaaaaaatacaattgttactcttcctccaaatatggtaaattgtggctgccaaaataacaaccaacaatcttccaatcatgctagaatgtcccagccaaagccaattattctagctcccatagtcagctgaccaacttctgaaccccacccaagcaaagactgcatcaagaacaagctttcagaacctgcaattgaagaataaatgttgatttcttcactgtcataaccacaaacagcacaacataaatcagctactggtatgtgaaaaatggtaagtttatctcttgtgagcaggttagagtgggatgcttgtcataacatgaaactctgttttgaaacattcagcccacaccagatggccctagctgctgggtcaaggctgttgcataatcagagagttgtagaatttaaaaaaaattatcaaatataattttcaaataaaaaaaaggttgtatttaccaattaaaacaagtcataaaaataccaaaatttagaaaatgtaaataaatggttataaatataaatttaaataaaaataatttgtatttataaccatttgtttacattttctaaacaataattaccctgtaaatgaaaaattaaaacaaatttttcaaaattgtgaaaaaaaaaactttcatctgtatttttataattaattactttaaattgcgattcttttttttttaaaaaaaaaaaaaattgtgaaaaaaaatctaatgtatacatcgtggtatgtccccattaagacagattcaaaagggacagaaaattacaaaaaggtttaattaattattagtttggtttttaatcattattccctcttctcatctattttgagcaattatttaatgtgaactatatcttaaatcaagatttgttgttctttaattaatgaccttctcatctccaaaatttatatggtctctctaaaggaaaacaaaacagtagttaaccaactatgattgaattttgaatcaccaaatcttattaggtcataagttactaatactagtaaaaataatagtgacagaagaataattacagctacatgtggtaggttgtttgttgttgttgtaaatgataattttggagcatctcatttaatatataggcccaaagaaccatgaaataccattgggcaaaagtcactttcattatcatagctccaactagatctgaccataaagaactccaatttttctggcagggaccgccattgatattctccttcctaaaatacaagagactttggctatgtttgttcaattacatcacattaataattcaacaccaaaacaaaaaaataaaataaaaaagtgacgacatatctcacgctcttataaaattttgcatgtcacttctttggttctaacgaagtggtgttgtagaaatacaactaaagggagtttgtatgggtactttattttttgtatttaaaaatattataatccaaattattttgataaattataggtatgtagacttttttttaatcaaaattttatgaaatttcaagtaatttatgatctcaaaaacaagtttcaaattaattatatttggtgtaaatttcaatactacaaattattcaaaatatcttaaaatttaataagaaaatttaaataactaaattgtgcacgaatataaatataggcagccgattttgtgcccatatgtgcaaaatacgaattggaatccgttgtacggcaggtgggt

SEQ ID NO: 305931 - DNA, 2610 bp, Cannabis indica
gttaccttgtgtcctaacacccctcaaaatacctttaagtattgcaccttcatggtggtggattgccctaccgcctataacgccatcctcagtaggccagccctagttgactttggagcagttacctccattcgacacatgtgtcttaaatttcctacccgggaagcaggagtgggaacagtgagggggaaccaaggagaagcaaggcaatgttataacgctgcagtacatttgtcggtcctgatggtaagaggggtgaagaacctttggcagaagaacaggacgaattggacccccgtattggatccgaagtgattttagaacctatggaggacgtcaaggaagtgagagtgtgtgacctcgacccttctaaggttatccgtctagggaaaaatctagaactggatgagcggagtaagatcatagacactataaaggcagctacggacgtctttgcttggtgccatggggatatgactgggataagcccctatgtaatcactcatgtcttgaacatcaacccagacatgcctccggtacaacaaaaaaaatgctcgatagagctagtaaaagctgacgccctggagaaggaagtggataagttgttatctaacggcttcattcgggacgtgtactacccagaatggttggccaacctagttctggtacttaaactgaatggcacatggcgagtgtgtatagatttcaccgatcttaacaaggcttgtccaaaggattgcttctcgctcccccgaatcgatcagatggtggacgccacctcgggtttcaagttcctatccttcatggacgcctattcagggtaaaatcatataaaaatgcatgtcggagatcaagagtgtattagcttcaggactgacaaggtggtgtactgctacctggtcatgcccttcagattaaagaacgctggagcaacttactagtgcatggtcaactaaatgttcaaaggcctcctggggcggaacatggaagtatatgtagacgacatgctggtcaaatccacaaagtgcatgggccatgcagatgacctcatggagtgttttgaagtagtctgggacatgggatgatacttaatcctaagaaatgcactttcggcgtcaaatcgggaaaatttctaggattcatcataagtcagcgcaggatagaggcgaaccctaaaaaatacaagccctataaacatgccctccccgaaaacacataagggcgtacaaagcttgaccgggaaggttgctgccttaagtcgattcatctcccgctcgactaacaaatgcatcccgttcttcaatattttaaagaaatgtcagaaatttgaatggaccaagaatgcgaggaggcattcaaaaaattgaaagagcacatggccaaaccaccaatatgtcaaaaccagttcacggagaatacttgtttttatatttagccgtcttcgagaacgcagtcagtgcagccttggtctgagaagaggaaaaagtttaacacccggtatattatgttagcaaacgcatgataggagctgaaatttagcatcctataattgaaaatctagctttctgcctcctgattgcttcaagaaaactcaggcgctacttccaggcccattccatcaaaatatttacaaaccacccgcttcagcaggttctgcagaagcctgaggcctcaagaaggctcctcaagtgggccatggagttaagccagttcgacatacaatacgttccacgcatctcgataaaaggccaggcactgcctgacttcttcgtagagtgtaacgagatggaggccaatgccaatatgccaacccaaaatataccagcatggaaggtatatgtagatgggtcgtctaattaaaaagggtcgggttccagcataacaatgattttaatcagatgggttacgactccaagtcgctttgcggttcacgttcccagcctctaacaatgaggccaaatatgaagccttaatcgcaggattgagattggccaaggctgtaggagctgagaaagtagaggtccatctgtcatctatccactctcagtttgaagtggaacaaataatttgtactctttggacaatttggatggaatgaaatcgagtagttcatgggcaaaaagccaagccagctagggagctgtcattttttgcaaccaactatatgctgaacttccgttctgtacaattaaaatacagccagcctattcctgctgcaactcaacctcctcccccatcatgcgaaccggttagatggaaaccaccaccagcggggactttcaagctcaatattgacgttgctttggatcgatcgaaaaacctgactggtttaggtgttgtgatacgtaactctactggtatggttatggctgctttctccaagcaactaattggcaattttgatcctcatgaaatggaggctttagctatgtttcatggtctatattatgctctacagcttcagcttcctcaacttcaaatcgagactgatgctctgtgggtcaaaactgctttatccaaaccatcagcagccttatctacttttcaagatattattatggatatttctagtcttttatatttttttccaaatgtaaatgtatctcatgt

SEQ ID NO: 305932 - DNA, 1832 bp, Cannabis indica
tttaaaaatttaaaaataattataacgtgtataattataaaaaaacaaaattaaaaaacttgggtagatgttaaaacacatagtgtatatattgaaacacccttcttgaggagtgtactagacagttttccaataaataactcttatgatcaaaaaaagaggaggctagctaggaagtttccattttgagagagaaaagaaatccttaaaattgaacatcaaaagaagatttattatggcaaaaatacaatcatcatcatgatgcaaatttaatggagtcttctccaaccaatggggtccaatcctcaagtcatcttatttatcattaatccaagttgtgtagccgcttctctcggattatcaattattaaaaaaaaatcaagagagagaaaccctagctagcactacttattaattagtagtaatggtcattatgagattatatatatgtaatatgatcgatcatcaatgtcatctctatgatcaaacagcaaaaataatctcttttttttattatttctaatgaattattaataaagttgcagtagtgtttcgtatatgtatatttactatttctatataaaataagattttgccattttaatatgtaaagttgccgaaaataaaccttcagccattgagcatttagtacatatatggccgtttcatctgatgcagttgcttcgataaagtgcttgtttttcgaagagtaaatgcctgtcaaatcacaagtacagagagagaacattttttttaagcccacacgttatctgtggcctgggtgcagtgaaaaaccaaatacttgcaatttttgtttatttccaaattattaaaataacccatttttcaaattcactcactgctttaatttgttaattccgtataattaattagctagtcacaaataaataaataaataaataaatacattgacctgaacttggctaactccccttgaaaaccctagcctctgccatgctagctatatatatgtgtgtgtgttaaattactacattaaaacgtgttgacctcttaagtgcatggcaacctttcgattaatattattaaaaacaaaaacaattgcttaaatgtctatttctaaatgttttaagtcaatcataaaatgattactgggagaatttttagtggaatacgaggcattttgacaagaaaattttatacgtacatctacagccccgagaatttcgttaaactcgaaattatataaatatatatagattatttctagaaacttgggaaattaatttattgatcaaatgatgacacttatcattttcgaaagggctagcttgtatttcttagccgtaggatttgggtcgtatcacacgtgtcatgcacttaatcaccgatgataaaattaatatgtagttgcatgggtgagtttatcaaaagtttttttctttctgggtatgtattgtattggattattgctccgtggacttcgagttgggggtgaaaatagtcttaataacagggaccggtcaaaatataaataaataaaaataaagttgtagcgggttttccggtgaaaggacgaataagcaaaagccgagccatgacacgtggacaaacaggaaccgcttgatagagattcaacgtctaatatttaatcataatcggtgagattcattgaaactggaagagaactgtagagaagtggccagtcatagattttcttgttcatctcagtcatactcatacacacacactttctttctctctctctccctctttctctttcaaaaacccagttgcacatgaaagcgagatagagagagaaagaaagaaatagacagagagagagagagaga

SEQ ID NO: 305933 - DNA, 2170 bp, Cannabis indica
aaaaaaaatatacatataaatattaaagtaatgaatatcaatattttataatgctattataaaagtgttgtattcgagtgataattcattaaccctcaatactaaataaaaaatacctcctaaatcaacttcctatgcaacttttgtcttattatccccatcaattggctcaattcacttttgcctatactaaaatcatgtaatttttttttattattttcttgcaaaaaaaattatttaacagatgtgccactactaatatatatacaatatcttttatcttatcttactactactaataataatgtttattaatatttctcgcccttaatgaccctatgcaatttaaagttatttattgttggtttatattcaataaaaactcattattatcaattattaattatttattgctgcaatatgttagaacggaacaaaattataattgaatccagattgttaatttagtttacaccatttatcctaagtgggtaccaaataaaatataattgaatatatcgagtattaatttataagttatactataattaagtataaattttacacagccaaatcatgtaatggtgctttacgattatataagtgatttttttgagtgcaaaggacgttagacaaagcttatcttgttcgatcattactcattagaaaaaggttaaaagtaacagatcgagctttatatatgttcataattggtatgataaaaatgaaaaaaattagattaagaccagctaagtgtctgctttttaaaaaaccaaaatacattaattgttatccttaccaatgatgagggatctaacttaagttgagaaatgaagtggtccaaatcattagcatagaaacttttattgacaatgcacctaacttaaagctatgtagattgaagaaaaccaccccaagatccaaaattgcaatcatcataatcaccatttaccacataaactatttctctactgtgtaacaaattttatgattaatatttgcaggtatatttatagtataccttcttaaatggttgtttcagtagattcttatttattttgatatttaaaaaagtttttagtctaattttttttttataatcgcgtacgttataaattttcaaaatgaattcaaatagtttatggtactgaaaataaaatttaaatattttgttgcattcgtgactattttttcttatacgtgcggtaagcaattatttgtattttattttcggtatgataaactattcagaattttttgaaagtttacagtaaatcctaaataactacacttgtgtgattatgataattaattggactaaaaagctctcctaaatatcaaaatagatagaggagtgtacctaaataacttttaatatttgtacaattatagtaatttattgtagaccttaatccaaaggttaatttgctttttaaatatatttatgagttttaaggtttcatttactgaaaatatggttttttgatgttttcatattatttttatgttgtactcttgttattttgttatttgtatattatttttatgttgtttaaatattatttttatgtgattttttattgcttttgtattatttttataaaatatcgtgtatatatataaaaatatatttaaatataaaagtgtaaaaaatttactataaataataatttatgtaaattttctttaattttttaacatgaaaataaatctaataatcaaagacataagtaggtgatcgagaagatctctagtttttgttttcataaattgcagattgttgtacgttttcacattgtttttaagttatttttatatttatataatatatatttttatggcttccatagaattccatagaagggtataattataaaataaattattcataaaaaatttaatcatagtaaaaatatttaaactttcatgatgtgttagtaaaagaataaaaaatatatgtcactttaagtagtatttttaagtaaaaatcgaaatattgcacccataacaattgttcctactccatgaggagatgttacgtaatactcagttacttgtgtgactcagacagaatttgtgtgataattgtctttttcttttcagatttaaaagggaatttaatttctatctaaaaaatcttaatgtttatttttaaaccaatacatttcaa

SEQ ID NO: 305934 - DNA, 2606 bp, Cannabis indica
tatgcttaatttaaataaaaaaaaaaattatttttgaaaaaaataatttttttaaagagttgactgagttgaccgggtcaacccgccaacccgctaaacccgaccaaccgaaacccgccaacccgtgacccgccaacccgccaacccatgccctattcgggtccgggttcggtttcaattttttgaacccgaaacccgtgaacccgaaacccgccaacccgaaacccggtaaacccacccgatgttcagccctagcctcagctaccactgaacagatgtttcttacactatcggtggccatttgttatccttaatccaattgagagcctctctaatgcccataattttagccaacttaggtttcacccacatccacttcacaacaaatggtatgagcttcaacgagattgctcacgtgatcacaagctactaagcaaatgtcaaactgatgagtcgcaacaaacaatgcaacatcaacatttatattggtttacttggacattctttcattgttcaagatacaatttgctaaagtaaccacattattcacacttgaaatcttcttgttccaaacaaatttatatcgagctcaccaaatagctcaacatatcaaagctaccatgccttgcatcttcttacccacccgaactccaacctataactagaagattaatacatacattatgtaagaagttataataaaaattaaaaatatttatttctcgagtgaagggtgcatgtgaaactaaaatccattttaatgagttttgttatcactatgggattgtattatttggaatattgactaaagattttatggatgtcgaacaaatataggctagcagctaaaagatttgtaatttgggattggggaaaagttgaatagaaagaaaatgcacaaagaaatataggatccatttagtatacaagatttgactggattagatataccaatttatcatgttaagtgtttgggtatgctgaaaattttgataactaatcgagttaatctcatatgtctgagattattcatcctatctagcaaagtgagataaataatttcatccagatgagattttttttattatttttttaaaattttaaatttgttaatatatattatttttaataaaaatttaaatgaaagaattagtatagatttattcatagatttttatcaaaaacttatttattaaaattagtgaaaaaataaattagtatcaaattaagtaaatatagaaaaaaaaaataaagaaagaaaattataataaaacatatattttcaagttcttgtatcttagaatgacgaagtaagttaaatagaactcacctatataagaaacatataaaattaatgggtaaatataagtacctaaagttttaagtttgtaaatggcatagttttaatatttatttttagcggtataagtacccaatatttgtaaaactgtaatttttctctaatttcgtcagtacaaacccttttattttcttaaacaggccacatataatgtaaagaccgcctaagattaacactatgaattattaaatagggtttaattatttaattgaattattaattataatattgcatattgatgaaaaattatttaatttcaaactaagttaaatatgatatatgtgaatttctcattttctgtgtttgtgctcgggagctgtggaaagcgacgttgggcctttagagagtcgcattttatatgttttagaatgttattaccggggtattaatgttgggtattggaggtattggaaatttgtcgggatttacaatgactaaactgttcttggatggtattgaacatttgagttatatttaggggcaaaatggtcatgatattagaaattatttctcttgtcttttgtggacattatgggctgattattcatttggttttaatgaaataaagtgattattatttaatgttagaaaaagataagagaaacctggaaaattctcacctattctcatcaatttcctctccctttctctcgaactactaaggaccagcaagaagctgggattttgttcagcttgatctagtgaagtctagttgatttggtgtgccctaatccaaggtatacactttagcttcttctttttcattctccttagctcaaaactaagttttgatgcatgattctagtgaaataaggttctgtggtattgaagcttgtttgattttgtattctcatattgagttaggttctggagggttgttttgaactaagttgataggttgtggtatggtttatgctaagtttaagttagagaactcaacttggacctttaatggtgatttgataatctgagaatattgttgggatttattgcttggaattggtttgttggtgtataagcaggtatactgaaagtttttagaagatttgggtttgaattgaattaaggggaagaatttcgggttcccagctcaaaaccggaattccggttcctgggtgcctgctacaatcggtcgaccggttggtgccaggaaccggacttccggttggaaaccggtttgccggttggggctttttcccgaaccttagttttcccgtttttacgtaatttagagtattagcatcct

SEQ ID NO: 305935 - DNA, 2055 bp, Cannabis indica
tatagtgtaggaacaaaaactagtcgtagtcgtttatagccgttagcacatttttcaaaaagaaatacttggaataatggtctgccatttttaaaatggtctactgtttctgtgaaaaatggtctgcagttttaaaaatggtaggctgaaaaagaggcagtggcaaagtgtaatttttttgacttaaaacacgcatgactcttagctcgtttatccgatttcaaaaagtctagttgcgttatcttagttaaaagataaataatcttaaaattcaatttataataaattatatgtcattttaaaaagtaacttgtcgcacaagttagtaagctaaacttttaacttataaactctaatgtactatgcatatcgctttaacaagactaaagtaaatttataccatttgattgtgtgtagtcttgatttagatgcacctcctaacttgatttgcatgatttgatccaaagatgactttgactttcaagttgacttttgactttgagcttttaaagtcatcttttggatagagtcttgaattctcgatctcttgttgaaacttttcctcttatgaaagtatgaaatagttgatatactagttgaattcacttatttgattatgtttgattttaccgagaaaatattgatacttggtatttttcttgcaaaatgttcaagagatatttagtaacaaataataatcaaatatgtttttatcatcaaaataagtgagtgattgactttttgtcaacacacagtggcatgggtttcctcctacttgtggtggagtgtgttggtatgcgtttagacttgtcccaatgcatcccccaagttttctaaatcagagttatcccccagatcaactcaatgttctgctacaataggctgaccaatgtcaggcctagtttctctaacatatgcataagtggtagtccttgcctcttggacatcgggtgtgactctagtgaaaggtgttgtaatccttatagccttggggttaacattagcagggaccataggttggttccctcgaggtggcagtcgagcattggggttgtcaagccctgggtcagtaggtgtttggacattgggtttcgtcaccataagatcgtgagactcagttaaagaggatcttcttatcaaaatcatgattgttgattcaaaggtggattcaagattgtaggttgatcttcttctcttaatgaaagtgccaaaatattgatctcacttttagccaacgacactgagttttaaattaatagtaattgtaaagaaagcaatgaggatataaaataataaatggcacacaatatttatagaggttcgatgacccctgattatggtaatagcttactccatttttagttgtgttacttatgagaaactatcaagatcacaaggtcaggttaggtgagtttctcaatagctctaaaagagtaacattatttatgccgagtgttttcactttttagaatgcgaaaaaaggtccttgaatagtaagatgacttcactatttatagggaaatacgaatacattgtttgctaaataattggtcataataaatttgaattccaatattaaaggaaacaaagtggcatgggaattcaaatatgaaattgaataaatttctctactgcttaatcaaatcccacataattagggatttagttgagctataatgatggaaccaattaaggaaattacgttagaagatctttacttattgggtgcctctgatcagcaaatggcactactcgacacacctgtctattcaacaagttatgaggtttagaatccgttcagatgatagttgctgaaggatcagacttgatctggacggtacaataaagagatatgtcctgcctaggtccaaacatgttcaacatgtgtcaccttgctgagtgccatgttaactgtgtaaaatttgagataaaacttttttttaaaaaaatctctttctaaatctctcactctctaactcgctcattctccagtgttgaaccccgaaccagaatccataccatcgaacccagacccagaaccccaatcacaagccc

SEQ ID NO: 305936 - DNA, 1853 bp, Cannabis indica
accttgtaatattttcatggagctacctctttagaaattgagttatacatgggttgaattgtgggaaaatgttgatttggttgtcttgattatagaaacacggtattattaattcttgtcgctctttcagaaccatcacatacatccgcatctaacaacttcttgtacaaagcaatggacatatattgtatctgccttgtagtgtttttttgagcatgctttgcctcttcttagcaatagcttcttttacttaggttatttgtcctagctctttgacattgcttattctttctttcgtattcctttagcttgtgttcaaaactgttttgtatattagtggctatggataatttcatatgatgtgtgtataagatgatctatgctgtcgatgcagttttgtctatgtgaaacatagcactgtgctaagtaagacttaaaagtttccatatatgtatgtgtaggatgatatgaactgcgcagaggcatatgtgagatttctttgccagtggttacttgacaattgctgtgatgatatggagtttatggctgacaaatttgataaaggttgcatcactcgattaaaaatggttgcttcaaccccctttgaacggataacatatacaaaagcagtagagcttttagaagaggctgtgaagaatggtaagcagtttgagaacaaggtagagtggggaattgatttggcatctgaacatgaaaggtatgcaaattttattacaactattttccttttgtttcattaattatttgttgaggtagttgatttcctggtacctgattttgcagatacttgacagaagttatgttcaagaagcctgttattgtttataattacccaaaaggaataaaagcattttacatgaggttgaatgatgattgtaaaacagttgctgctatggatgttcttgtgccaaaggtaggctgtttttttccttgctctatataaagctccgcaagaacattgtttaggcattttgttaagttagtctgtcctgtatatcagttaattcttgtcttaaattttcaggtgggagaattgataggcggcagccggagagaggagcgttatgatgttattcaaagcaggtacgagaagttgtctttcacatttttagtttcaaaattattgcaaccttttcgtgttgggattatctctctgatggaaagaggaacagtatgtggatctttttcgtcttaaaccaagtagatcaagtttgatggtgacacattccatgaattgttgcaggatccaagagatggggctccctaccgagccatatgaatggtaccttgacttgcgtcgttttggcacagtgaaacacagtggtttcggtctcggctttgagaggatgattctgtttgcgacaggcattgacaacattagagatgttattccgttccctagatatcccggaagagcagatctttgattcttgtggttagtctttgtatttttgcctatgggaagtcaaacacacaaaagtggatctttaggatccctcactctaattttatatgattgcgagcatgaagtgtttttttattattattattacttttgttgttaaaaaaatgaaagcttaatttataaattatcaagcaataatatatatctttatagggactttcttctatgggattgaagaagtactgaaagttgaagccatatggaatgatttgtagcagatataacaattgattttttgaaaaacaaattaatttatgtcgtttggtaatttttttattttttatttttttaattatataaataaaagtaaaatttgtgtttttaaaaaataaatatgtgttttataaatatttttgttttttaattt

SEQ ID NO: 305937 - DNA, 4739 bp, Cannabis indica
attgaaaaagcactgtagcgtgccttagcattagggtgttacacccaccgagtatttttctttcttgctaaaatatatgggcacaatactcaatgcaagcttagcaagtcgatcaaactttgttgtgtattttgtcactgacatggtctctccctgaactagtttagtgaaatctttcctcttagcactgcaaacaacttcatagtaatatttagcattaaataaatctcaaaattcttcctaagtcatagtattcatgtcccgagcaagggataccaactcccaccacacgagtgcgtcttcttgaaactggaaagtggcacaagtcactcggtcattcctgatgacactcatgaaatttataattcgttcaattactgtgagccactgcttggccttcatgacgtctggacctcccaaaaaaatctggaggcgctacttgtgaaagctttcatataaaggccccatacggttgccaacaatagtttattctgctagcactgctggaaccaaggtagttggcacttgctatggaggcattgcagatggaccctgttatctcatcctctgaatttcttcctcttattgattaattcaggcttgcatttctacaaaccttttctccaaatcttaaggagcttgtggcagattttcatgaccacccccttgaaaccttccacgacctctattgcgtccatagggattttgagaattttgacctccccgacttcctctagtctcaaccatattactacgacttcttgtgttttgttgggtgtccatgttataggacttagcctgtaaacccataagtcaggtaggtcagactacaattaaatatattctaaataccaaatatatggaatttaaggtaacgcattcaatgaataacataaaactatcatactttcctaatcagataacttactaaacaattaaaggcttactaaacagtgagtcaagtctatctttgacgatgattgtacatgtattgacgattttcagtaaataacctagcggctctaatacaaaaattgaagtgtcctaataattaggcaagctactgtgactttttaattatagtgcactcatttgctaactaaagggttatcttaagaatcatgataaattaaaacttttgattaactttcaactttataaacatttacacataaccatacaaaaacattgggatcccactttttaaacttttgtacttaatgaaaataaactttacctctttgtcacacgatgactacaaaaaaaaaaacccacgtcgacacgagatcgtactctttaggccataccttcttgacatgtacaaccatccctcagctctggactcattgttgctcatctttagcctttcctttaccgatacatggaaaaaataactatgagtcgatatactcaataagaaaagcatacaacacataatatattaccgacttgtatttaggtaccgatactcctatacacaaggcttaatagatgattaagaacgttcttaataaaagtacaacctctgtggcacatgcactaagtatttctactatactactgtttgtagggttgaaccgtacaccgagtactgctgagtgttgtaccatatgcactacacatttaacagtactagtgttggtaacacaggatcgtaccctttgaacaacatacattgtaccaatacactcaattctgctaccctactagtgttggtagcatatgaatcacataaatagcatgcatataatacacatacacatgtacatatatatatatattctatgctaatcttaccttattttcgaatacaagcgtgtcgaccgacctgaatagaaaattatgcgctaaatggaggccctatgccacaataacgtaaaatgggtaaataactttctaagacattttcagggatctaaactcacaactacaagtttcctttcaataaatagcatgggaaagccctaaatattgagaaaacaagagaaaaataactaaacggggaaactacctgaaaaatgacaggctgtttttgtaaaaacgacaagttatatttttgggttctctgccagtaaaaacggtagaccgtttccacagaaacgacctgccattttctggtgcagaaaataaagagtccccaaattgactcaaaataaccccaaactcttaagctctagatcatctaataatacaataatagaccaaaaccaagtaatagaacctcagaaaatgtagaaaatcaaataagcttaaaacaaccttactaaactagaaaaaacacaacaacccaaaccctaatttgcagataaccaactcatgaattttgcatgctcaaaactaaagaaaagatatcaaagcttaaagaaataggctctagggtttaccttagattcaagcttccaattccccttatttccccgcttaaaactacagaaaatagctgagcaaaatggttttgttctcttgattcttctagggccgattatgggggagagagttgggggggggggggaagagataaatttggtttttcctcttcttaattttcttattattttcttaataaatcaaatcaaataatcagcataaaacagagcttaggagttaaattccaattttgcccctagttttacacttaagcaatctataggtctaggggtaaaatagtctaaaatcaaaatccaacctaattttgatattctaaatatcaatatatggatactccgctaaataaaaggttctaaaactcacctatgagactctattggccatcagtatcattttccatcattaccaagtgaaaaccataaaagttataaatttcgcatatgacataaataatacacttatagtttaataaaatctctggagttaataaattataattctaatgcccattttctaaaaatggaaccaacaacatatataatcatgcataatcataaaatatcaataattaatgctaatccccctactaatccataatctaatcatgcggtcattacaataggggttgtagaaaacacatctccactactcataccatctcagtaccaggccacgctgaggacgtggacatactcggtctcatacctctcttcttcaacacgtatccaaattctcccttcacttcatatttctcacactcactcacgaatctctcatgacacgactataacacgaccgtcaaacacaccacatacagcttgcatgcgagcccttcacacaccacatagggctcgcgtgcgagccccacacacctcgcatgccacagatcacatgtggatctcacacaaacgtctcgcattatggctcgcatggacatctcgcatacatcgtggcttgcataaatgctccaccacttcacaaaggctccacgattcacataaatggtccctgacctgcaaaaatgctcctctgcttgcatgaaggcacaatggctcacacaaaggcacaccagctcgcacacagacgcaccaactcaaacaaaggcaacctaactcgcacaccccactgtcacatttcagttgtcttagtattttggccataactttctcgatatatgtcagactttgatgaaatacgatgaaaagataagaaagagatctatggattttttgttaaggacaagatctaattctaaatgcatcattatgaaaatcctccgacaattaacatttagtatgttggtcttactaactctactcgtgctcgttgacctccatcgaaaatacatcaaacaagtacatatagatgatggaccttttcaaattttcatagagtgatgtcacctctgttttgctttcccaacttacccaacacttttcttacgggtgaccatgagttcggtctctgaaatgcttggaaaagtctccaagaatcatcaacactgattcttagacttaacaccgggttaactattgacttatcttaaagggtagcttttctattttttggggtttttttagttggtatcatggtcgtagtccctatgaaagtgataatatttagcggtgtctctcttgctcatatcttttttgattgtaggtcttttgtatggcacaatggactgagttgccatgaagatcctttctctctcctcagtaacgatagtgaaggtagtgaattttagagctctctctcgaggatgttgttggtcggggtcgttattgaactttctcttctttccattgccttgattatttttgttgttctaccttttaccaccctaacctaaaatgctactgttttaaggctgggagttataattacagtggatgggtgtattagcagcagtgatgggatttgggttgatctttttctaaccaattgtgtccaatcaccagactgcttctttgagctttataaatctatctgcgcggtcaaggaattctcccatcgaacccacagtaaacattttagtatatttctataattcttccaaaggttcaattccttctaggatagcggtcaatcttctctccttggccaatcccttcatctttgttgccttagtcataaatcgactgatataatcttgtaagggttccaccaatatctattttacttcgacttggtctttcaaactttcaaaaatttccaaccaaggtggaattatgggaggcgttgcatcgtgttctttctgggttgttgaatcatttcccttttcctggcttgagttacttgtgtgtagtatcgtgacatctttgcagggttttatgccctaaataaaactcttt

SEQ ID NO: 305938 - DNA, 1320 bp, Cannabis indica
ttttttttattaatatactatatatacattaaaattacataaaaatagtgcatattaatgatatattttttataccctatcacatcagcactatatactgcccccccaaaaaataacttttcatcattggaagcagcttagacctccaaaactctcattcctaaaaacaaaaactaattcatagtaaatttgaattttctctgctgtaaacaacttatggtgtaaaaaaaataaaaataaatcataaaattactaacataaaattttttattatagaattgaatgagcatcagctctataaatacaagattcgaatgaaataacttcaattaactacaactaaaattagtaaaagattgtaattgtacaaaacatatttcttaaactaatataaactaactaattatctacttaacacccccaacaaactgagctgggataaagaaactagactcaatttgtctcttaagtgtgcaaaacgagaagtagatggacctttagtgaggatatctgcaatatgatcttgagtaggagtatgcttgacataaagccagtgactaagaatcctttcatgcataaagtatagataaagctcaatatttttggttctagagtgaagcacaagcttggcagacattagtacaatgctttgattatcacaccaatttgtggaaatagataattaagaaagaccaacttcagtaaccaaggactgaagccaaactattttagtagtagcattgataagactcatatatttagcttcagtgttgaatctaaatattatcatttgcgttttgagctcctagagatcatattggaacctaaatagatagagaaacttgattttgatcttccatcattacactataagaaaaaggatttttacaagtgtagttcattaactgtgccgacaaaaatcaattttttcggtgcagttaacaaacctcatcggcaaaatatagccaattttttccctcagctaatacttataccaaccacttatttcgtcgacataagttacttttgtcgactcagtaccttagtttcgccgacaaaagttgataaatcaactgccaaaaggtgggaacttttggtggttcaatttcacttttgtcggcgcaagtacgtgcaccagcaaaaggtaattaatttttggcagtttaattttatttttgccagtgactaaatgcaccgacaaaagtattgaaaattttgacgattcaattggcgcagtaaaaatacgcccagaaaattaggggaaaatttttgcaggcgagcttaaatgcgccaaaaaaaagtttttacaattaatgaaac

SEQ ID NO: 305939 - DNA, 2476 bp, Cannabis indica
tgtggcttgttttgttttgtacgactaatgtaactagttttattttgcacggccaacgtggctagttttattttgtacgtacgatcaatgtggctatagttttggtttttgtgaggctagtatgactagttttagtttttgtaaagccaatatgactagttttgtgtttgtaaggctaatatgactatatttaattttgtaaggccaatatggttaattttagttttgtaaggccactgtgactagtttttggttttataaggtcaataccactagttttgattttataaagctattacatgcctagttttaattttataaggtcggtatggtctaatataaacacatctatactatagccacctttagtattagagacgataatagataagttctaatctttacatcagagaaatatgagtgacaatattatataaaatttaatattttatatgttaaatattttttatttattttgtaagtgttttattggtggatcggaagttacaaatctcagtttagaggttttcttttatgatatattaaggttttattgcctagttctctatctttagatgcccttaggatagacaattaattttataatattattatatatatttaaaaataaaaattatatagatatttgtgttaattacttctaaaatgacatgtgtcattttctaacttgtttaatttagaaaaattatgaaaatatatttaaataaacaactaattatataaatttagaaaaatttaaatttaaatttaaaatacttgaaataattttatattagacaattccactcaattgggcatacaacgattcacgagatatctcacttgagttttattgtacatataaaataagtatatatataatcacatctaaaagtcataccaatgtagctgcaatagctaaaaaaatcatcaaagatcaaaatctcaaattccatttcaaaaataaaaaaaaaatacattacttaattaaaataaattaaacatacatgtattacacttaacttcacctaattaaacctaattaaaaaaaaagaattatacgtacattgcacgtaacatcaacttagtagatatatatcaacttacattcaaattaaagaaaaaattaaataaatccaaaatcctttccaatttgacccttctatcaagaactgttcatatcttaaaaaaaatttataacctaatctaattagctatatggaaccgagaaggtagaaagagggaaagaattctccttattcggatgaaaagaatgagtacaaactcaatttatactacccgagtaagtaaagaattagttacaaattagtacctgtaaccatttactaacaagttgtaaccacatcaactactttttattacaacatacttttaatatattgaaacttcttctcaagataaattgacatactcgaaattagtattatagtgaagatgtctaccatttgctcttgtgtagctatatgtgaattttgataagattggatgggtctttgtgcgcctttactaaatgacaatcaatctctatatttttggttatttcacaaaacacaaactcaacatgaccattattcaattaaaaacttgaggctgaatttgacttggacattaaaaaaataacttcaattagattaggaagcctatagctagaggcatagatatgtataattgtctaatgtcaaattatctacattttgtaaatgaaaaaacatgttaatgaggaaccacagtaatgtagttttcggataaaaattctttgttattcttattaatttgtctgttacccataagagcatctagaaaattaaatcgtttttggtttattacctatcttaaatttgtcgtttttttattaatatgaattattgattcataaatatgtgtatgtacgtttctgaggatagcacatggagtgtcatcatctagctaggttcctaataaaactgtatttttcaattacttaattgattatataattaattgaaaggctgaattcgactcggatcaatgcatacatttgtttgttattattaataataatatttggtttagaagcctcctagatcgaattagtctatatatatatattgttgatcagtcttatctaagttgtattattagagatattcttgctttttgtaaatattttagtgatattttttttatatactgtcttagaattgctaacagtgtggatcacacttttatgattaatgttattgtctgatactcttttttctcttaaagttttttccactgaatttacttttaaagttttaataaggtcgttttttctcaaaaaagaactagtctatatgtcgtcctaaccgatttcaattaaaggatttcgccacaaataaatcttttaagatagttacaatatataccaattacatcatatatttaaaataaaatttaatttatctagatatgtattattttttttttttgaaaa

SEQ ID NO: 305940 - DNA, 1365 bp, Cannabis indica
tcttcactattgagatcctctcattttttccaggcaaagcctcaactataagaaaaactcaacaacatggttttggtttttccaagtgtgactcgagaagaaagaccatgtaatgatttgattatgtgggaaaagagggtcagagactcacaagatagctaattactttggtgttctctctcaagttattgacatgattgatgagaaattgactcatttgaaaaatgcatattggaacattcattctcgtcaatcatcactgtaatgtttgatatgaatataatttggttgtagagtagttttggataagtatactatctaagttggagggcccttatatgattgcctcttgactattgaagggtcatatatcatatttttctctcatacttcttatctagataagtaaactatattaaagagtattataactattgttgcatcatgtaaagttggcacctttttatatctaatatagatattgaataaaaaaagatttttaaagaataaataattcgaattaatgacttgtgagcccttactctagtagatctttattcataacgtatcttagcattgattgcctatttattaagcaaagaataaaatagaaattattgtgatttattgctaataaataaacagaactaagtcgaagacaagcgtactaccagaaactgagaaacacaatatttaattttaaactttatttatatttattagtttactgctctcttttttcattagttttactcaaatatgctataaatttattactaatactaaaatgaggttctttctttcaatatataattaaggaacagtatcattaaaagatttgtacttcacaagaatcacaacaaatgacatttaaatcttttcatctacaaataaatattagtatagagtattgttattggataaagtcgtgcctaacactttatataagtgtcattttataattatttaatgttattatctaaaagttatttttttaaattatataagagttcatactactaaacactaatgatattttttaacaattttattgtagcactttctatgcttcaatcacatgttgtggttcaattggtaaactatacaaagattagtgtcttttttttattttttttattttcgtatatataaaatactagtatgtaataaaagaagtctggtgagagtgtgtgggcgagtcaggtgaaaagtgagaaaataaaataataaatgaagggtaaataccattttagaccctgtgttttgcaaaagttatagattggaccatgtgttttgttaaatgacaaaaaggaccctgtattttccaaaatagtaaaaataggacctgagcttaatttttgacaa

SEQ ID NO: 305941 - DNA, 2054 bp, Cannabis indica
gaaatagagttttatttatggcataaaacccaacacttcctaccctagtaacaagcctattgttatgcttaacctggcttctcagagcagaaaggcacccaagcctagaggtattggtagccttatttttctgtaagggttggttggctgtgttcatgttgtttttgggaggtaacaagacagttccaagttaaggctcaactaccttttccttccccttatcctttataggagctgaggttcttacatcagtatggtttgctgtttttccctattaatgggctcctctggagcgtcttctttggagtcctcatctatatcaccaagtttggcttgcagccataccatcattttctccatttgtcaagagaaagcttcttgttctgccagctactgttgagtttcagctaactcaccatatacttgggccacctcagggtcttgttcataatagtatctatctttgtagtatccatctctgatttcactatcattttctttctcctattcttcatcttctaggttttctcaacgaattgtcttgatgttgggttatttcagccactcggtcttcggtctcagacacttttctgtcgctcatatttctttgctaagcgtgccttggaaggagcagattcgcatcgtccatgatgacatcctggcctggaggaggggatttctcgatgacggtcttcttggttgcctccatttttgtagatgcaaggtagctttgattctttctacaactctcaataaaagcaccaaaatgtttgccgaaatttttggaaactaaattaaataagagcttaagaaattaaataagtaattaaataatgagatggagaattttacgtgatttgagtataacaaaatcctagtccatgagtcaatgtattggcctaaaaaggcttattgtattataaatgggtcttacaatttgaagaaccctgattcttgctatatatttttctctctaggtttctcttagaagaagaagaagaaagcttagagggaacttagaagtatttttcctccatcctccaccatgaaggggtaaagggggggggggttataggcttagagtttgattcgggtatacctatgacccatttaggcaacctgttgcatagtctgaatccacaaagccttcaatttcagcatgcgtatctcttccttcagctccaccatagactagacaccttccaagtgaccctctaatgtaccttagaatatactttagttcctaccaatgagcctttccaagatctgccataaatctactcaccaaactgactgcatatgttatatcaggccgagtacataccattggatacatcaaggagccaactacattttcatatgttatactctccatgtacttctattcatcatgaaatcgatcaagaaattcaccacaaaacacgaacaagatcactatcttattctagtgatgagattataaaattaaactaattgaatactacagacaaatacatagatgaaactcaaacacacacaaatttaactacaactaccactttgtttcatttcatgaaactttatctcagagtattacaattctctcactcttacaatctttttagttctaacatagatacgagaattcgatcacttgtttttacataaaaaagaatttacatgaaaccaatactttttccatctcgaggttaaaggtttctatttatagaatcttaactactaactactaaaataagaatggaaacctaactaacaccctacatgacttggaccaacatggaccaacaggaataggacttcatgattagaccaactaactaacatttatagttaaacaaaatttatcgtggtttttattttaggatattggcaaaaaaaactacctaaattgtatgttttttaacacttaaccacaaaaattattaatttttgacggcaaaacctaccaaactcacattttattttgctcttaacacttttgtccaaaaccgttagttaagtaccacgatggactgcctacgtatacacgagagtacatgtaaagcccgcttagt

SEQ ID NO: 305942 - DNA, 5031 bp, Cannabis indica
tatatagagaaccgctgactaattataaggctttatatcagtgtagtgttgagtattctcatttaaaaatagtagcaataataatagaaatctaagtatataaaaaaaatattaatcatttgatactttataaagtaatgtgttgtataaatatctaagtttaactctcagctgtaaataatacttaagtttaatttttttgcgctaatgatactttagttatacttctgaaactctctaggtacctggttgttaaatattaattaaattttcacgtggcaattcttgattggtccaggtcttaaatttttaattattttttaaaaataatttatatataacaataagaaaataacacatgaataataactttgacatttaataaataggtactagggagatttaaaaatataacttataactattattacagtcaaaaattaaactttaagtatttatttgtaattggttattaaacttacgtattgaagtatgtagtatttaagacataaattaatctaatttataatataaaaaattagaaattaaaaataaatttgaaaaattaagaaattaatcagccagctcacctcacctcacatcgtatgagaattgtattattataatacatataacaaagttaggaggtgtctccgaatgcaacgagaaaactagcggaagagaatcaaaatctgacccagtcattaattaaccctccaagttcctcaatttattataacactttctgtctctctctttcggggtttcctctgaatccctcactttttcctcctgtcagaatgcggcaacccaagaccgccgcttctgaattctcaaactcttccttacctctttttgcatctccaaaataaaaaataatcatattaatcatatttttaccatgaaattacaacctccattactctataaggtactattcctagctctagttcatatcttcctcctttgttctgctcaggacaacgatgccggactcacggcaacggctccgccacctgctctggaggactgtaatgggattttcgtatcgtacacgtttatttcaaggacgaaggaatttccacgggtgaaaaacgtgtctgctcagtcttgggcgttcaagtcggaggtttccgttgtcaatgccgggtcggaggagctccaggcatggaaggtttttgttgggtttcagcaccgtgaaattttggtttctgccgatggtgcagttgtcatggacggaggagattttcccgtggatgttgcgaatgggacctacttgtcggggaaccccattacggatttgaaaacttccattgatacagctggagacttttcgcagatacaggcgacaattgcgattaccgggacaatgtttgggcttcggcctaaagctattccaatgcccaaaacaatcaaacttgagaatgatgggtttaagtgtcctgctcctcatttacaaggcaagttacgttctggttctttatcttataatattcttccgttaacaacaactttcgattatgtttgtttttctgaaaaaccacttattatacgtcggtggttttcaaagaaaaagttattatacgtccgtgccaatggcggacacgcagacatatatagaaatatataaatataaatatatatctaattaagtaagaaaagaaaatgttctcttcgtagaccatcctctgtaaaatatttctgtccattttcgttgactgtaaacttgctttctatatattcatagtttaatttaaaatgcagtgggatctacttataaaatatttttatgtattattaattttcttaaaccgttccttattaacaaagttttttttctttgagaaaatagattgttatcaatatatttacaattgtttataatggcatgtcctaatgttatatgttcgatgagaaatggacaggaatccaggagtcgagtccgctatatttaccatattttttattaattataaaccgttactataatttgctttagtggtgtccttttctcgcattttctcgcagctagagagaattgaaagtttgttgcaacaatcatatacattttaatattatttattatttttatattatgtggatgcaaatggctcccatactggatggattatgagtttaaaatttagctgtaatgtgattttttttgtttaaaaccgtggacaatagtaagaacatgattgtaatggaaaatgtgtttcgtgttatcctaaataaataatatatagaagattgattttatactataagttttgcaacagaaatatatttatcaattgtttcattaattgtcgcttttacagggacaagatccatgtacgtatgctgcagacctgatccaaaatacaaagcgaagaaatcgaaaaggacaaagttcttacctcgtcgaaacggtgacctctcctttacgtacgatatcatgcaagcctatcggcggaagctacctagcccaagtaaccatggaaaacaagcacccattgggtcgtctcgaccattggaacttaacctgggaatggagccgaggagagttcatcttcaacatgagaggagcttacacccgcacaaaagattactcgcaatgcatttatggccctgccggaaactactacaaagacttagatttctcccaagtcatgagctgtgaacaaaaaacccatcatcgccgaccttcctgccgagcgagctgaggatgagaaagtaggaaagttgccattctgttgcagaaatggtagcttacttccgccatcaatggacataaataaagcaaaatcaatcttccaattagaggtctacaagctcccacctgacgtgggcaacagaactacgatatacccacctcagaaatggcaaatcgatggtgttttgaatccagagtacaaatgcgggacgccaattcgggtcgatccaagtgaatttcccgatccaagtgggcttcaatcggtctcatatgccatcgctagttggcaagttgtgtgtaacataacccgaccaaagcccaagcagtctcggtgctgcgtctcgttctcatcttattacaacgactctgtggtcccgtgcaacacatgcgcctgtggttgttcagaagatcctcatagcattgcgggaacttgtgatgctgacaggcctccgatgcttcttcctgcagaggctcttttggttccattcgccaataggtcagagaaagctagagcttgggccaaactgagacactttccaatgcccaaaaagttgccctgttccgataactgtggggttagtctaaactggcatataaactcggattataggagtggatggacggctaggatcactctcttcaactggagacctgacccatttgaggattggtttgctgcagttcagatgaagaaagcttaccctggttacgaaaatgtttactcctttaatggaacgaagcttaacattaaaggagcaaacaacaccattttcttccaggggttgaaaggtttgaatttcttgatgggccagagtaatggatcgaaccccaaaattgatccaccagtccctggtaagcagcagtcagtgatctcttttttgaagaagaacactcctgggattaatatccgtcgtggggatgggttcccgacaaaggtttattttaatggcgaagagtgtgagattccggaaagttttccaatagaaaattctggctataatgcagccactaatggactcttgtcaactttccttgtttgtgtgttcactttcatgctgatgattgaccatggcttccgttgatgatgattatgaataattttttttgtttagttttggtaaattctgatacacctttacgaaatattaataaagtttaatttactcgcaacatttgttgtgtaagatttttgttattatgataattattcctttctttttcggacatatataggtgggactgtgggagataatacgtgtttcaggatgatgacgcaatgtaactagaattaagacgctgaacatttgaagaagaggatatatgaccatcatgggattatgaaaggtttctctttcctaggaaaaaatctaacatatttataaaagaaagtttaaatactacaagtatctatgtacgggctgggctgtattcattggatttgtaaacatgttttatttctgtggtgtcttttttattttattttttacaaagagatgttttcacgacataaagtttaatgtaggaaatataaaatgttgactatttaggatttttactctcctaattataactctgttattgtgtcttttaaactatttaatctattacaaatggtatctgaacaatttacagtttgtaaattggttattttgtgaacttttatggtatataataaataaaataatgacatgactacttagctaattgtcactttagtatcacgtgtataatttaaaattttaaaaataattatatattttttaaaaattataaaattaaattaatggttaaaaaaatgagaaaaaacaagaaaatacaaattaggaaaaaaaatttactaaaatacattgagccaactatttaagctattatacagcccacaaacaaataattacaaaaataccacctttaaactttcagccgcacaaaacagaacgataaacaacaaaaagcttcgatcgtacaaacctgcaacacaattgaaatgaaaccaaattcagaggaagaccaccattaattcaaacgaatttcattggaaaagaagacacgaaacgatttaaacggaaattaacgaaaaaaagatcaataaaattgggacaaaactgaaattaaacactatttttcggttttatttgatcaaaacaactcatcctaatatcgaaattcagattcatataatgtagatctctaacaaacagatctggagttctcccatgattttaaaccaggtataatgcaaaaaaaaaaaaaaaaaaaaaaaagagtcatgaataatagatctaaggtatatacagttgcatttttgttgatttttgatttccaatatggaatatatt

SEQ ID NO: 305943 - DNA, 1679 bp, Cannabis indica
agggtgatatgcttttgaaaaggctcctttttatatataattgagagtttcatagtttacttggtcaaagcaaagcatgggcttttggtataattttgagacaaatattattccttttctgcatgagagagagagagagagtttacaccttcaaagggacaatatttcaattttcaattcccttctcatcttagtctaaagtcattcaaagaccaaggcattacattattgaggctacaaaatagaaatatataaatattttttaaaaaagaaataaatataaataaacaatatacatatatgaatctcattcatattggtatttgttggctaggtttttaaaagttatttgaagctctaaaatcacttacactatatttggtgaaaggggaggaaattaagaaggtaggagaatatgatggaatgataggattagaaggatggaaaaatattttttttattaaaattactatattatcctcttcaaatatatattatttatttgttataaaatgtatttaagacatttaatacattaattttgtccttttctccatttctttcacttatggaaggattgaattttgtacatttagagaaaaaaaatatatttttctatattttctctctactaaatacatgatttattctctccttctaactctttttctattactctccttccactcaaaactcattcctaccaaacatagtgttatgttattaattggatagcaaaatcatatcccatctaattaaataagattttttttcttctttaatttacattttattcaaaacaagtttattgctcacttctataaatatgaccacttttcttatctagtatacttggaactagtctaactataatgtagtgcttttcttttttcttttctttttgtatgtattttttcccctttttgtagttagtttcaagaatatataaataaataatcaagatctaacaaacaatcaatctccatcatcaaaaactttatccatcttggactgacttttttcacactcttttgatcatattttcatttatttaattttccctattattgacttgaaagccaaagtcaacatattcaccatccaccccacttagaatgttcctcatcatataaaatataaattatatggaaagtaattaattagtgaaatacattttttttattacaaggttattttgtatttctggatagctttgataatttttaataaaaaatttacttttaatttcgataaaatttgggactaaaaatgaaaaaaaaaaagactaattataaataataattcttatgttgcgactaaaaaatctttagctaaatgtattagttacaaaaattacaattttttgtgactaaatttaattttaatgacaatatttattatgactaaaattaaattagtgacaacttatatataaatactatattttagttacaaataactttttgttgtgacttaaagtcacattaagttataaaaaatttatattgtaactaaaaaattgtcactaaaaataattttttttatagtaattatttacaaataataaaatttgattagctgtctaaatatttcgttcatctgataaaattggatcaatatctccaattttgaaaactagttattttttatttttattttttttaaaaaaaagtaaacac

SEQ ID NO: 305944 - DNA, 1677 bp, Cannabis indica
tgaataatttcattgaaaaaaatcaaactactccagttcaacttgatcaaaatgatacattcacaagaagaaagatacaacataattgatattatactattaaaacctcaacttcagataaatcaaattatttgtattgacaaatagattattttatgttagaatttaggaataagttgaatgagatttcatcacaaaaccaacaaaaccaattagcaatgggaggagtagcacattctcttatatattctattatctttccatacaatattggactctctaacactttagcatgaaaaattccgttctcatattcatcttctttttccggttctcgcgcttgtattcaaatagaactacttcaattttattttttttttcttttgaaaggcgaactacttcaattctaactccaaatatttctaagaagtgatttgtctaatgctaacaaggtcgagtgaaaaatcagaagtattaccacgaaactatagcaaatttatcgagatgatgttattttgtaaagaaacaaatgcgaatacctttccagaaattggtgacggcagatatgggagaagcggtagaggaggaggaggaggtgtacttgtctcggtctgatccaggttggggattctccatattcgcaaatccgatcccgggatctctatctctgtctagagacgaatttggagctcccgatcactcacacgccgtcgacttgtcagttaattggatctgacggggtttaaagcgaatagaaaatccgactgatgggaaatttacaattatataacctgtaaattaaaataattacaaaaatactttcaactaacttaattatataatctttgtaattaaatatacattttctaagggaaacattaaaaaagcagtcttttacatatatatgggtattaataagagaagagcagaggacttaaaagcgcgagtgaattaagcaattaagtcttgccagttggcatgtgtgagagtcttctctcaagtttcgaaggtctggtttttgcgtttgactggttcttgcggctgtttgtttcacgttccgattgctgcgttttcacatgcgaagcttgttgtcgactgtgtaggttctttctttgtaatgtcataggtttccaaggctgcgtttgggaatgattctcgtgggttctgggttgttttctgcacccgcgactgacttcttgtgactgggcgttcttggttctgggtgttgcgttctcatcggtggaacacggcgtcgatagtgtaggttccctcgtcgtttctcctgggtttccagaaggatctaggctaagttctggggttgtttggcttgcgtcgagagtgtcatctccctcagcgactggttcttgcggtttgagcagagagttgcgttttgggattgcatcagtgtgtagggtccctcggtgactggttcttgcgattgggattgtcttggattgcgttttgagaagaggattgtgtgttgggactgcttttcttggttctgggttgcgtgaatagtatctggttttttctatcgttcctgagattgtggagttcagttaccacgttgtttcagtcgtcgctggttgtctcttggcttcgtatttttttttttttttttggtggataatggcatcgagcagtaccgcaatggagcatatggagaatcaatatggg

SEQ ID NO: 305945 - DNA, 3970 bp, Cannabis indica
tttacgtttgaaatttttatatataactagcaagaaactaaatatagccaaatatatgacaaaaacagtaatattgtagttcatgttcagccaatcactgctggacaagttgaaaacaaatagaaaatatagtattttagaaattaaaattaactgagattgaagatgaaaatcaaaacagcattatcacaaacgtacattaagaggattcaaagaaatggagggaagatgcttaaaaagccgcatgccaagaaacatctccagttgtttttgacgagagctgtcgacaattgcatttttatatcttctctgcagggtgattttcatattctgagctgcggaaaattgtttaaacttaccagcatcctcgctgaaaatgctaaggatttggctatgcatggctttcgaaccagtataaagtgtggcatgaatatcaccagcaagaagaaaaagatcagcaagctgggatactggtgataaaattgttgacctcttgaactcctcaaatgacatgtcaaatcttttccaaggtttatcaggacacgggtgcgtccatgtcgtggtcctagtattgtggtcaataaaatacactttccctgttactgcatcagatcttttttcccatcctggcggcaaaggagcattgtaccctccataattatttactgcctgataaccaaaggccatattactgtcaagtgatattcccagccgcctacactgctccataaatgcctggagggcgccaaaataactagctgcatttgtcctgtctaaagaatcagcacagttgaaacgtgtcactccattttggcgtgatcttaagcagtaggcgccttctaagttatcactatagatgatttcacctttgcaatccttaattcgttgccttgaaggcaaataatctccttcagatatgcctatagatacagtggggccttttagaagtctccataacccctcaattgtttgctgctcaccttttaactttgtactggcatgccaatcataattaattagatgaattcgagtatgaggaagatttcctgttgatctaatataattcaaagattcctcaaaatgttgaactaaaatagcctctgattttccctcgccgcttcttaagaggttaatgcatacaattggaactatagcttttctattctgactcaaaccaacatctacatcaaaattccgagcatcatatctcttacttaaccgctgataatactgtgcacttcctttgtatggatcacgattggaaacatatatttctgcttctgcagcagtaatctttaactctgcaccccaccacattggaattgtacctcgtctccagacatatgtattaaacggaacactctgaccacccttctttggaacccatacaagctgctcacactcaacttcatttcctgttaggacccacattataaataagttttggtagatcctttgtaataagaacagttaataagcaagtcagacaataaattgcacacgttaaaataagtgttggcctaaatactatataatgttatgtcatgccatctaccacaagccagccataactttactttcagtgatgtgctaccatcttatgcgtgtgaagatgataggcaactgtagaacgataattgaggcacatatcacagaatggatcctactaaaacgttaacaacagctaacttatattctgaccggttaagaataggccatcttaagttacctgtgctagaacatgaatttaacccccttgccaaataccgagtaccaggatgcaacctgctacgacgagcaataagagcaacaattccttcttgttgccctgagcttccaaaacttcgacattctgcaaacccctacatattaataaactataagtgtggtatgaacccaataactatgataaacaagatgctactttaaacgtggtataaatagacagcaaatgaaaaataatggggccaaataatggaggggaagtagcaaaagaattgattaaatatattgaagtatgttcattcaaagaaagcagaattgaaatgacacttggaaaaaaatatgaattctacaaatcttctcctctctactcttatagagaagggcatagatttgctaaagtataggcttttctttggcgaacatataaacggagcaaaatcaaaattctggaaggctatttatagatgtatgtcaaattgctaaacatcaaacgacaaagtagttagttgaccacatcaatgggagttgtgaagaatgaagtaaaacctgcagaagaatggcgcaatggcatggcagtccaatgtttttgaaaggcaatgaaaaccaaccattccaaacaaattcatcatcaggctcattgaaggacatacggctcggaaaggggcgagtaatatcccttgtatcacaaaagtagtgttttccatcaatgtcaagatcagccaactcttgaacattcttcaattcacctttcccttgttgttgagggttttgaagtggaatcttaatccattgacactcagtgacagtatacacacaacccccaccaggaagattgggaatggtggcggttaacttagtggcaataagaagcaaagcagagcttccaagagcagcataacccaaaattgccctggcataaactgtactcttgcacagccatcgtgatccattagtaatgaaattcaatgcttcattctcagatttgaaaacatcaaaaccgagctttgcattgtaacgaagtgcacccgttgttggatcaacatatatgacctgagtatcgaccgtagaagacaagctcacgataatatacacttcaccagtatcgagtgtaacaacaacaacagaagtgtccctggctgtaacaaaacatgccaaatcataaattacaatcaactgtagataaatttggatcttttagagaagaatagtgaggtagaatacaacaatttcgtaactttccacgaaatttcgtttcgaaccttttgtacttctcaaaaattactcaagaataaatctttcccaacgaaaaaatgaaatcccaataaaaagaaagattttttatttctttatagacctaatttgggtttaatcccttaataagacaagaattcagatatgaagattacaaaaacagatcaaagaagaggaaactgacctggtgacgccatggtggtagcgaaggtcttgttcgatggtttcaaagatccaaatccaaatccaaatccctatcgaatgaagactttttcacaaacaagtatatatacatacagtatattatatatgtacgtaaggccttaaaccatctcattcagacattcttccttccttccttccttccttcccctttgctattctacatttgtatttacagattcatcgatcaattcaatgctttatttctttatgattcactttcctagtttccctttcttcttttatttttttccaaccaaaagaatcgttttttttttccttccttactaaatttgtaagaaggaaaaaaatggtaataaatccgataaatttgatgttgtaaatgtaaaaagtctgtctctgttacaaatgttaaaattcagaattttccaacaaaaaaaaaaaaaagaaaaatacagaaagaaagaaaaaaaaataaggataacctatactttgcttaaacaacacccaattcaatttcacagtatttccctcaaaaagaaaaaaacacccaattcaatttcaccaaaattgaacaagaaccaaaactttatattaatcgattaaatcataaatttcgttgaattgttaatgttttgtgggtagcgtggaacattcttaactttacgaattcctgattagtaaagcagtgacttattagttggctttgatccttttgtagtaatagagaataactcagaaatggctattaagacactaaggtgacgtttagttacaaaataaatatagaataggaatgagaataaaaatg

SEQ ID NO: 305946 - DNA, 1352 bp, Cannabis indica
gatgatattgatatatatatatatatatccatctatgtatatctattcaatattcatctcttttttcttataagatttatataattctatatagtcagtggtgttgttgttcttgtcttctttcattaatacaagagggttatatactcattttaatagatatatagtatctaattctattgagttggaggttgtacattaaaatatatagattttttttttttttattttatactttaaattttttttttggtatttttacacaaatttcatagaaatttacataacaaccaacagatcagcaacataaattgtaaccaaaattcacataacaacctatataaaaaccacttgagcagctaccaaaacaacacaaatagtaaattttaaaaaaaaataatatataaaataattctcctaaaatatatgagtattgctattaattaggagctaaatattattataaggagggatgttagtaaattttcataataaattattaaattagaagatataaaacttgtatttaattatattaataattacattatatattaatataacataatgtcggcaccaatgattcccttaataacttttaatttattatataaaaaaattaaacataaattaaaataattataaataagaataactttcaaaatataatatatattatatattttcagagtttcatataaaaaatatacatttatacaacaataatcgtcctcttagattttattccacaattaaattagatgtaatatatgtatatataatattatatctatattgtattaactcaaaatgattttattataatatcatatactacataaaaatctcctctaattagcttcaatttttttttgagtatggtttagctacaatttttagaaaatttgaaacaaggcattctaggtgaaaggggtcgaagaaaacagaaggcaaatggcctcttgcggcttcagttatttgctaataattgaaaccataggagcttatacacgaattcacaactcctatagtttcggttattagcaaaaacagaaccatatagcccctaattatttttgattatttgctaataatcgaaactttaggtccattttttcatttagttcgatatgagaataatgagtatatatgtagagaggaactctgcattagccaagagaacaaatataaaaatactatagttcaaaagatattaacataaacaaaacaaatcttaaatgaacattttttatattaatacaaaccaccacaacactacaaaaattattacttttagtgacaactttttagtcataatataattttttttgtgattaaatgtgacttttagt

SEQ ID NO: 305947 - DNA, 1424 bp, Cannabis indica
caaagattgcacaataattgaaaaagcacttttgcgtgccttagcattagggcgttacattaatggtaacactgtggggaatataaaatcttctcgtggtcttcgacaaagggattcattatctccatttttatttctcatttgtgcttaaaggctttcaacgacctttaatcatgaatgttaggttgggggtcttcaggggttgccatgtggtagaagagggtcggtcatttcccatatcttatttgttaatgatagctttttcttcatggaagctactagggagagttgttctcagtttcaagaaatcatggagtggtatgaatgtgctttaggccaattagttaacttatctaaatcttcagtttgttttttgcctagtatagatagcgacatggtgtcctctttggcttccttgttaggagtacagagcattccttgtcatgaaaaatatttgggtcttctttgttttgcgggacagagtaactctagtttattccaatctattcatgatagagtgtggaataatttatttagttggaaggctaaatctttttttttttttgtcgaggatcgggagattcttttgaatcagttattcaagctatcccaacgtatgatatgaatcttattcagctaccagttaagcttgttgaggaaattcatacgctttgtgcaaggttttggtggggcggtgatgatgacaataggaaagttcattggtgtacttggaaaaggctttgttggcataagacggatgagggtatgggcttccaagacctgtttgtgttcaatcaagctcttcttgctaaacaagcttggataatttattcggttctaaattctctagcttctcgtgttatgaagggcttatactttcctaatggagattttttgaatgtggataagtcatataaagattcatacatttagaaaagtattctttcgggaaaagaactgataggggtcattggattattggagatgggagtacggtgaatataaaagatcatgtttggattcctaaacctacttcctctctatcttactctttccatggtcatcctcacgttgtgatgattagtaatttgaaggatgctaatggtaattgggataaggacctggttgatgaactcttctctgttgaagaagatgagcaaattttgtacattctgaggtcgcatcatgtttccaactatttaatttggcattacaattcatctgacgcctactccgtcaaaagtggatattgaaatgctattagacttttttggttaggggtaggggtgttcatcaaaccgctcaaaccatccacaccgtaaaaaattgtagtttgaaattctttgcggtgcggtcgtagtttgaatttttcctaaactgcgcggtgcagtgcggtttgtcgttttgaattgttaatatgcggt

SEQ ID NO: 305948 - DNA, 2256 bp, Cannabis indica
tagatttttttttactaaaattagattaatatccttaaattcaacaatcttaatagttcatgaagcatttttcactaccttaaaatcctaattagccaaatcaaatattttttttccaaaatatccttattttgctactagggcactgttaagtctgaacgtctcagtaagattttgatgatttcatttttgttttcactagttctaattatgacgtaatataaacaaaaaataataacgacataagaataataagaagaggacatagtccagcttttgccaataaaatgacgaaccgcatgaagtcacctcgaacagtgacgtgtcacccgttacaagttacaactgtcaactgcaattcttctcaaccgtcaaaatctttctctcacacacacaccgcgcgaaacttcagctctttcttttctccctttttcgcttcgtctcttgacttttttgggccccacctgatattttaataacactaagataatcccacgtgacttaccacaccccgtgttcgaacggtgttacagctgtccgcgtaatactatataaacccctcttcacccatctctctatcttaatttcaattccaaaataaacccaaaaattgaaaaccaaataacacactctcttcactctctcttcactatgaataagtcatcaaaacgatccaagctctccgattctccatctccgccgccatttttggaccctccgactcgtcgactcactaacgaacaagagctttccattatagtctctgctcttcgaaacgttgtctccggcacagcctcagaagctccttttgatttcaacaacacagatgatcagtactttcaacaattccatggggatgcgaatttgattggaccttccgatttcgacacgtgtcaggtttgtaagatccaagggtgtctcgggtgtaattttttcccgccttcacaagatgaaatcacgatcagtaagagtaatggtaataataagaagaaagctattccgaaaaagagggtgaagaaaaattacagaggagttagacaacgaccttggggaaaatgggcggctgagattcgagacccgagaaaagctagtcgggtttggttagggactttcaatacagctgaagatgcagctcgagcctatgataaagccgccattgaatttcgtggaccacgagctaagcttaattttccatttccagataattctttgcttgatcagaacgtaaattctcagccagaattaccagaacagagtaacactgcaactacaacgacaacgacatcgacatcggcatcaccgccaatctcatttcatcaaaacaatattaatgtaataaactatgagaatcatcaacgaagcgatgacgcgggaatcggatcaatagaaaatgaattcttctcatttggtgataatgatgatgatgacgaacttcagaaatggatgacaactatgatggattgtacggccgatcataattcatcggattcagggaatggttctggacttttttcattattaggccatttttctgtgtgtgatgaattttaggtaaaagtcacaattgttctttttaaaggggttgaaaaataattatattttcttcccctaactgtttatatatattattttctatttctagtccaatcaaattttgccaagtttcaatttaatttatttatttttactaaaaagagaaaattataattaactggtttttgatttgaaagcaatgtttggctgctgagaaagtgtgagtgagtggttaggacccacacgtggcattatcagtacatataactacaacgagtgagagtaataatcgtgtgggtggggtcacatcgttttatatagtaggaccgcgtctaagccttttaataaatgtaataacacctgggtggggacaccgatctctaatttagcacgtgcatttaataatctgatgattaaactaattaatttttttttcttggaaaggctctaatgattaaattaattaaaaagaatggaactttacttagttgcccactcacgtttacaacgtgattaataacaagaatcaaaatatattggtacgatgacataatgagagagagagtaatcattttgctttggttattaaattgaaaagtaaataaagattattattattattactataatttttctcctgaactttgacatgtagtaaatcgtgtccccgaattttttcggtcgttaaaaattctcctgaattattgagattgttaaatttaa

SEQ ID NO: 305949 - DNA, 3265 bp, Cannabis indica
acatatatatacacagactctgaaatttggtgagccataaaaaaaaatatttttgaacccttatttaaaacaaaatgtgttatttttcaaaaattaaaaaaaatatatataatttaaaaaagggaaagaaattggagtcctagactaggtgagccttaggtgtaaaaatcccaaaaaaaggtttttagaaaaatactgaatttcagacaaaaatttataattttactgtcacacgaatttttttacaaaaatactatatttttataaaacaagcataaaccaacaaaacagaaaaattaaaacaatagcggaacaaccagacaactgtgaaaatttaattcagtacacagtataaaacttacacagtattttaaaaaaaaaattctgccccacaataaaaaaaaataaagaagttggaattttcagtatgttgtgtaaaaatcctaaaaaagattttaaaaaatattattgaaattaatacaaattaatgtaagaaaaatgaaaattgaaaagttaaaaataatagtgttatatgatttctttaaataattatatatattctataggtgagagtatcatcgttaataatttctcctaaaataaaaaaaaaattaagatacatttttcttttagggattgtaatgtagtaatgtgagtatataataagttataatcatgctttaaactttgtctaccatacatatggaaggtgcccagattgtaagggcgtcctatagatgactagagaccgtcttacatgaaaagacatatttaccctagcccttaggcccatttctctgttttgtgtagggaaagataaatttgactttgccacaggggtgaccatccgtatatctgcctacaaatatgtgccttcaatttctggacaatatcttttagggcaaaaattaaaaaaaataaataaataaataaattggtgggtctaattttattttcaattgtttctatcgctcccttctttatttatttatttttttctgaagaaattttaaagagaaaaaaaattggtgtgtctggtctacatagtaaacaaaggggattgaattatgcgttttgtaggaattaggggaatttttttttccttattctcttctcatcatgacggcaatgagtgtataattggggacaaaataacggaaccctagaatgttgaaattagtgcataatcatgggctttatactatgatgtggtagaaaaatatgtaaacaaaataatcttttttcaaaagaaaaaaaaaattaaaattagggtttgtgaaaaagggtataaataaagctgaaataaaggttttctgttcaaagagcgtgtggtgggttagaaaggttatagtgtgggtttgctgagggacaaatgcacacgttaattaaagttgatttcccttcaaccaaaaaattaaaaattaaaaagaaaagtagatttacatatttttttatctctaaataatttcatatatgtggtaaaaaagaatcaactcccgaacttatttaccttttatgttatttttttctctctctttttttgttttttttttctttatcttgctttttctccctttcttacactagtacccctaataaggcctaagccccacgtccacccaaacatatttttatttttattttttaaataactctctattctttctctctcatatagcttctcaagtgtcattttctcacatatacttcacacaaaagatacaaccattcacttcataccttgtcatttctttctctttctctttatttttatttctttctctttttctcttctcttctctctcctctcaatctcaaaatttgcaactactctctcaaatttgatcaaatcccatctgaaaaagaaaacccagaaaatctcacctgaatttccaaaacccttatctcccaccctacacacaaatccaatttaccctaactacttcttcccacaaattcacttcaaacacacacacacacacagatatatatatacataagcatatatatatatataatctttgagtaagaacttcttcttctttcttctttttaattatcttttgtaatatataactttcccgaaaaagtaaagagtaaaagcgtaaaaagcttcatctagtgttggttctccctctctttctttttatttttagaagatggagctgtttcctgctcagcctgatttatctcttcaaatcagcccaccaaacgcaaaacccacacccagttggaggagaagtagcgccggcgccagtgcggccgccacctcaaccgatgaagaagttgatttggggttttggaaaagagctcttgactcccaaaacttctccatatcttcttcaatggctgccaaacccgataagtaccatcatcagaataataatagcaataataataacaatatcaccaacaataatcatagtagtaactcttcctcgtgctttttcgacctctctctttcaaacaaccatcgtctagtttcgaattcttcttccgaaaataacagtactactagtctttttcttcaccacaaccacaaccaaaaccaacatcatcatcatcatcatcatcatagcaataataaacatttctacaaccacggtaataataatattgggaacaatctcttccacagtaacagtgccagcactagtggtagtactactagtatgagtaataatacttatccccaccaccagaatcaacttctgctccatcaaaacgcaccgtttcatcacaaccttgttcatcatcagcaacaaggaggtggtgttggtggtgggttgggtcaagagtttggattcttaagacccattagaggaattccggtgtaccaccaaaaccacccgcctgctccctcatcctcatttcccttctctcataccctagaaaccacagctaattccttgtcttcttcaatgaatggaatcaacaacacaacaagtactaattccaacccatttcagtctcatcatcatcaagccgccgccgcagcagcagctggcttgatgcgatccaggtttctttctcatcgtttccctgctaaacgcagcatgagagcccctcggatgcgctggacgacaactcttcacgctcgttttgttcatgctgttgagctattgggtggccatgaaagtaagcagctcctctatttcaatctctttatatattccatcttaattaattcacacccgtgaatgcatagttaaaacataccatcatttttcgaacccccctcccaaaaaaaaaaaacgaaaaaaaa

SEQ ID NO: 305950 - DNA, 1701 bp, Cannabis indica
ccattcatttcattcatagcacgcaattgctcactttcttcaccaaacctgacaaacccatatcctttcgatcgtccagtggccctatcagtaacaacttttgcaccttttacagagtggtagagagttctaaatgtctcttgcaaggtgtaatcagtaacatcagcagccaaatctcccacgaaaatcgtataatcaggcccatcatcctgacgcctttcaccagcaccaagagtggcccagtttagacggaaattctgttccgtatttggcataattgtgccattaaaattctgcaaaattctatccgccaccgcccgagaaggaaactcaataaaaccatatccttctggcaaacccgtttgtttattacgaataaccttggctgtaatagcctgtaaacatccatttaaaagcagtaagacaagattaaacccccacccgacaaacaaaaaagaaagaaaaaaagaaaacacttcgcctatatatattacaaaatagttaatactacacaactaaaataatgagtgatgatgtgtggccgtacaaatttgataagggataacacatttcaccaacaataaatacatatatcctagaaatctaataaccatccttcgcacgtatctcaaacaagggaccaatgaaaaataaaatatttacatatacgaagagaaaatcagaagatcagattcggacgtgtataactttgccagcgtcaacgcagattcgatatcacacaagtactttggccttcatacacaagataaatacaactacgaggatacttcaaattaaacggaacaaacaatattggttttaacaaatacaaacatgaataaaattaaggtaatcatacttttcataaatcttccctacacccaaacagactccatacaaagcaatttcagtattttgtacctctccagtatgagcaaagcagctaagaatatagttctcgtccatccattgctgaaggtctccgatccataacgaacggatctcttcagacccaggactgggggccccggacccgtactgggcctgagatgacggctgctgcggcggcccactctgaggagcccagccagacgaaggcggggcaccagacgccgtttgagacgaggcttgttgttgctgcggcatcatccactgctgcggtggctgctgctggtactgagcttgttgatccatctgcatcgacggtggcactcctcccgctgatggctgctgcatcatatcgatacacaaacaaacaaagcagaaaaggaaaccctagaaaattcggggatagataatagggacaggtatatccctgggttggataacacaggcaagggttactgagatcggagtagagagagacagagagagagagagggataggatgagagagaatcctaatcccaaaggacggtccggagaaaagagaaaagagatatttctaaggagtggaggaggtttatatatagcattgcacaggtgagatgaggttcggtttttcatatgatttaccaagtcggtttcggaatgcattggttgggttgggcttgctgtctggcccaggttctcaaaactattggaatggacctacactttctttccttccataaatatacaaaagttacaaacttcttttttcacaataccaaagggaaatttgacattctatgctaaaaaattagacatggtgtttaatta

SEQ ID NO: 305951 - DNA, 4992 bp, Cannabis indica
tattttttttcatatataaataagtcagtaaattgcattacaaaaaaaaaattacacccttaaagaatatatcaccctcactttctctaacacaaattttcccaccaatctatattctttgctcctatctttatacgagtcaaattatagaacctatttacaataactttctttgtaccatgaatatttataaatagggttttcatctcttaaaaccacaaagctctattttttcctccaaatatgataaacacaagcattagaaaccaacatataaacctcttttctcaaagagctcgctttaccttctatattaagtattaaatgatcatttttaatgtttggatatagagattagaatattcttagtttagtttgacgtgtattctagggttgaatatctctccccctataaagtcaacatttattgtaataacacaattagtttttcatttattacagaataataaagccttttcctaatatggtatcagattctctctcttaggagactagatccactttagacgctcagattcgtttttcacggttcatcttcttccttgcctaattcaatggccagaacagacagtgctcctctccctccgaccagaccttcttctatgactatgctggctccctcttcattgtttcctgacggagctgttgagtccattgccggagctgttgctctagatctcaccaccggtcccatggtgcttccaactttcaagaaaatgtcaccccttcattgacgttgcgatcaaacgagttgatgtaccctctgatctccctcgctctgctccgatgactgctccgttagctcctccaagatccgtttcgctaagaccgtctgttactataagtgatgttcatctcaccaatcttggatctcacattgttgaccctatttccacacaactctcttctcatgaccgttcaaccaataaagataatccctattttgttggcttcagcgatcatctcggcttgattctcgtgactctgcctcttttggaacataactttcagcagtggcatcgggactttcatcttgctcttggggctaagaataagactggatttatcgatggaactctaccacaacctactcctactagtcatctatttcattcttagattcgttgcaaccaaatggtattgtcttggattattcactgtgtttctttggatattaagagcagtataatgtttcttgacacaactcatgagatgtggactaagctcactaatcactttagtcaagggaacggtcctcacctttttgagctccaagaatcacttaccgatttacgacaaggagacgagtctatcactgcttatttcacaaagctttgggccatatgggacgagatcaatgagctctgacctcgtcttccttgcacttgtgaagcatccacgacaatgccaagtttcaaaaccaggaaaagattcttcggtttctcattaggctcaataaatcttaccaggcttttcgcgatgaagcgttgattactgagcctttcctgtctctttcgaaggttttttctaccatcatacaacatgagcgataaaggaaacttcacatcctcccaaacctcattattgccactccatcccagccttcgaatcttcctcacaataagaggatgttcattttgtaccaactgccaaaaactagggcacttgaaggagaaatgctatatcctccatagctttcctccaggttacttcgataaacaaaaatctaaatcttcacagcgttccactttgaatcatactcctcttgtcaaaggccttgctgctagccaagcttccgcttcgccttctatctcggataaactcacttcactaaatgatttctcagcttactcagcagatccaacaaactcagggttaatctacaactaatgtcaatatttcattggcatctcacttcactagtaactctgtatctttctcaaataatctttgaatatttgatagtggggctacccaccatgtttgctttgacaaaatatattttacttcttttgatgctattcccactgcttctcatattatgttacctactggtataaaaattccagttcacaaatctggtattgttcatattaatgccaatttttgtttaactaatgtgttttttgtacttgcatttcaatttagtatcatgttagttacatctattatccagaatccgaaatattttattttattcttacattccaattgttttatttaagacacaactcggaatttacagattgggattgctaatcgcgttggacaacttttttttctccaacaagaaaagatttcgccatgtaattctgttcattctgataaaacttgtactaatgttctttctagtaagccttgtaatgatgttcaaaaatggcatttacgccttggacacccttctttgcgaattaccaaatctttgaataaaattcttcaatttcatgattctgattcacctttgttaccatgtcatgtatgtcatttagctaaacaaaagaaattgttatttaattcggctaataacatgacttcaactacttttgacttaattcatttagatatttggggaccttttcacaccacaagcatagaaggttatcgttattttcttaccattattgacgatcatactagatttacttgggtttacatgtttaaatgcaaatctgatgtaaaaactattatatctcaatttcatgcttatgtgctaaatcagttttctacctccattaaagggataagatgcgataatgcgaaagaacagaacttgacttcttttttcgcaattaaatgtattcttccttatcattcatgtgttgaaagacctcaacagaactctattattgaaagaaagcatcaacacatattgaacattgctcgttctcttgcttttcaatctctcttatcgcttggatattggagttattatattagtgcttatgtatatttaatgaacctcaacagaactctattatcgaaagaaaacatcaacacatattgaacattgctcgttctcttgcttttcaatctctcttatcgcttggatattggagttattatattaatgcttatgtatatttaatgaaccgcacaccatctcttttacttcactttaaatcttcttttgagttgttgtacaacaggttaccctcttatgatcacctttgtatctttagttgccttgcttatgcttccatcttggacaactcaaggcataaattttctccaagatcttgtgcttgtgtgttcattggatacctgactggtattaaagcttatactttacttgatctttaaagtcaccaaatatttcactcaagagatgtcattttctatgaacatattttccctcttaaaaatacatgttctgccgacattattgatgctttttttttctcacactaatgtctccatttgtggaaaatcttaggtgccttcccaaatagcggtttcagttcccacgagcacctttccaactgcccacaacagtgtctattccagccactgttagcccctttctgctgcccgaacgtgtggctgttaccgcaaccacaaatgcaccattgctacagtaaaaaatgaccattccaaccactacaaatgcagtagtaccaccgccactagcggttgttccagcccttatgagcggtcccaatgtcacaaaaaattttagaagaattgttgttcgtccaactcatctccaagactatctttgtgagttttttactacataccccatctcaaatttcatctcttatgacaaattttctcctaatttttgtgcttccattttaagtgcttatttggattctgaaccaacaagttattcccaagcttgtaattccccgtctggagaaaagcaatagatactaaaactattacacttacagccaataaaacttagactgttgtatctcttcctgctagccatcattttattgattacaaataggtatataaaataaaatataatgcgaaaggtgaaattgaaagatataaaactcgcttagtagcaaaagggtactcccaatagcttgggatagaatacttagaaactttttctctggtagcaaagtttaatactataaaagtccttctcgctcttgctgccattaataactggcaattatatcaaagggacattaacaatgctttcctccatggtgatctcactaagaaagtttacatgctatacccccaggctacaaacatcaaggagaactccctccgaatgccgtttgtaaactacataaaagtatctatggccttaaataagcatctcaacaatggtatgctaaactaagttgtagcttgattaatgatgggttcaaacaatcctcttcggatcactctttgtttatatgatcttctaataacatttttcttgttgttttggtttgtgtttatgatattttaatttctagcaatgaatttgatgatgctgaactgtttaaaagacagcttgattataagttcaaactcaaagatattggtcccttgaggttcctccttggtctagaagttggcaggtctactaatggtatttcggtctctcaaagaccctttactttgcaacttttaactgatacaggctatattggtgccaaaccagtctccaccccaatggaacccaacaatcaactaagcaaggatacaaaggagttactttctaaacctacaagctatagaagtttgattggaaaacttatttattgaactataacaaaacttgatatttcgtatgctgttaacaggttaagccaattcctttcggctccgtagcaacctcatcttcatgctgcccaatgaattcttcaatatttgaagggctctctgggtcaaggactgttcttccactctatttcttttatccaactcaaggcctatgctgaaagtaacctgtctttcaatgaggtacaacttaaagttttttctgatgctgactggggtacatcctcgataccctac

SEQ ID NO: 305952 - DNA, 2153 bp, Cannabis indica
ctttaaattgcatttgcatgccctattttgggatgatattagagtttcttttattgtgcgattgccatcttaggtagaattaggcaccacgagtcacataatctttcaaaattttcgcttaaatttttttgaagtagatcaacttgtggcagaagtgctggtaaattcttcctttcccccaaaatccatatggttttgtgtttgatgttaacttctgccatctctcttcctgcattgttcctgacttcctatctggaacgagtacctcttgtgaattctcatttttggatagttagtctagttgggacctctccaagcaatttatgggggaggacccccaactccctttctatgctaggtagttagggtggctaactgcttggattctcttctttttatacggaaactatgcttaagcgatcctgtcaaaaagaagttgactcaaaggaggaagcaatggaacaccaagacgctctaaaattggtcctgaatgacagtccatgggaattggaccaacacgtcaacatgttcaggaactaaaataacctgaggaagtacgaaaccttgtgtgggctcgagagtgttctaagataattctagaaaaggctctccatactcaaggagaggtctagcaagtgcgcggaaggaggtttcatcgtctgaagttgggctcacattgaaatggggacacatctacccctgaggtgctattttgatgagttctgtgttgtagtcagaatagcatctttctagcttattccataggcgtatcatttgttatcggggtggtacgtcttctgtgttaaacatggcaaacccatgccaatgctagaggaaatcttatacatctacaagatcaagtttcaacaaatgagaggtcacaaagagaatgtgggcttctttaggttaaagcgatacagtagaagcattccctgccccaccagctccacaaagtacacgcatgactttagggactactatttcttcacctccggcttcccactgaagaggtttcctatccttaatttggattttaatcttgcaagttagtcttgttccctcctttggattttaagattctgccttttcttctgtttgttatattccgaccctttacttttgatatttttttttctcaatttatatagcgaacaatttaaaaagaatccaataggcaactgccaataaaatttatatgtagaacccaattatgataaaatcagttcatacaaatataaagttgtgaatgtgatatttcatcaaacaccttaagagcttcattttgattccatgtttttttttattatcagttctattcaaaacttgaaatcagtgtatgttttctaaaactgacagagaactatagaaatgagaaagataacaaatttaaaagtgaacgttgaacatatgattaacaagttatgggacccataacattccaaatcctccaatttgttttggtgtgcaaaaagaagatcataggaaaaaagaaaaaaaggagtaccaaactattttatataaatacaagaagtatattttgtagtataatgaataaatggtggatttcaaagtaaaagggaaaaaagatgattgaactaacattctttctcaaagaaaaaatgaaaaaatgttaaaaactagaactgaaaataaatataaatataaatgtatatgcatatatttatatatatgtaccatttcatttacgagcaccttgatttggtcggatcttccatatatttcttgttgatcttcttaagttgttttttttttttttttgtaatttggtcttgtgtactgttgtgttgtgtttggttaaggaatattaatatatatattatatatatatatatgatatctatatttctcagaggggatagatgccttgaaattcaaacagaaaaaggagctccatttgaatggaattaaagatttgtcttctatttattaagatgcacttaataaactgtatagaattcgatatctctagaggtattaatgcatattgaaaattatgttgcataatatttatgaacatgaaggaagtaatattggaagaaagcatttacttactattgacttacaattcctgtaattagggtttagtcaaatacactatacttggtctggatatcaagacaatggattgattg

SEQ ID NO: 305953 - DNA, 2766 bp, Cannabis indica
atttcaaatcgcattttttttgcggtgcgggcggtttgatgaacacccctaggggctatagcccccacacttttattactgtgttcgtctctgatcaaaggtaaatgcctctctattggtgatgcctctgtggcttcggttccttgtgcttcggcagttaaggctctgtcctctttttgcctttaagattgtggctcccatgagtgtggagacttctactatgcaagagtacactttgaatacgtgggaaagacatgtaacagtgggtgctttggaaggttttaagaacattaactgctatgtctttggtttcaaaaatgctgaggacagtaaatgggcattggataatggcccctggtacctgggcccgtgtatgaaagggttggaggtgagaagggccttagtggcaatgttgttggtgggcttgaagctgacaattttaattcggttggtaagaagcctgttgggcctattgccgagttatgtggtgaggccagcttgggatttaatttggctaatgggcatgggagctcatctattaatgcccaagagaccaatgttatttttgatgagggtagggccttgtctaatttttttcaagcccaagatactttccttcaagagctaaaaatgtttggtaaccttgagataaaaaatttgggtggtgatattggagtaaagacttcctccgagcaaaatgagagaactacacctatcaagaagaggaaaataccggagtcttctactcctcttcactatagaccgtggaaaattcagcgtcctcctccgaaggttgttcgtgatttcccttgggatagggaggctaggattgttagtggtcatggtgcttctctttctgaggaacgcagtggccaggagagctctgataatttgttccttagcctgaagaaggactatgtccaagagaatgacttgtcacaagtggaggattctggttcccttgtttcttctggtacccttgtggaggaggataagtcatctcctccacaggaactatgagaggagtggcctggaaatgtagagggttggggcagacctctacagttcgcgaactgaagtccctggtgcggtcgtgctcccctggcttcgtcttcctatcagagctcaaggtggacacgtctcctttggtacgtatttttaattctttaatttttatttgtgtttccttctgctggcactgcgggggtatcatccttgcttggagaatggggtttgattttgaaactatttctatctccaaaaatcatattacggggttagtttattcggatccttgttcccatccgtggcttctttcgtgtgtgtatggacctccatatttttatgcaaaaaagaaattctggtctgagattattggtttgggagatcggtttggaggtccttggttaattttgggtgacatgaactttattcttcaagaaattgaaagagaaggctcaaaagggagagaccaatttattcctgtcattgatgggctggttaattctcggggtcttatcaacctcccgattcagggtgacaatctcacttgggacaaccatcgttcggggaggaatcatgttaaatcgaccctggacaaggcgttagctgaccaggactggatcaatttgttccctagagcaactatctgcttgttccaaacctgcaactctaaccaccgtcccctgtgcttatactcttgtggtttggctgataaattcaaaaggagtttcaagtttgaagaaggctggacgagagatgattggagcaagatggttgtcgaccatgcttggaagtcgatcttgcacttgtggcctcctgctagaatttttaagaaaatcggtgcgacgagggttgctctatctaattggaatagagctcaatttgggaatattgacagtaccatatcagatttagagaaaaagcttgatgctttgcaaaagctccttgccggttcgagagactggagggaggagcaggacgtccggcgctccctgaatgtctactgggagaagaaagagttattctagaagcagagagcctgggtatcgtggctcaaggcgggagacaaatgttctaaattctttttcctatttgctgctttaagagggaggaggaatgcgattgaaagtatcttaagcaaggataatatctggttaactaggagagacttgattgggcaagagttcttgaatttctttggtgagatctttgctgggtcaagtatcagacgggacattaactgcaataatctcattcgtgaaagaatctcgtctttagaaagtgaggaattattaaggataccatcgcatgacgatatccgaaagacgttattcagtatggggagcggtaaggcccttggccctgatggtatgtcggctcttttctacaaacactattaggagatagtgggaaatgacttctgtgaggctattcaggatttctttgtttcaggtcgtatgcataagggatttaatgatacaaatatagttcttatccctaagactcgaaaagaacaaaccattatagacccatatccctctgtaatgttatgataactctaagatttagagttatttttatatctttaagcttgcattttaagttgaattgtggagcaattaatgtcgatattatgtaattgtgtttagtttgttgtgtctttgtaataaatggaagtgtgtgtgttagtaagtgttaaataaacttatgttgttgtttttatgtgtattaagcagaaaaaaatgcaagaataggtatttggaa

SEQ ID NO: 305954 - DNA, 1710 bp, Cannabis indica
aagattgtttcctttccattccactttattacctccatccaaacgccacctaagtgggcttatttttgttatttataattcaagctatctctttctcttttctggttccttatatcacaatattgattgctttgtgaaataatatttaaaatccattgaactaatcattgaaatattttgtgattcaccgattgtcattcgatactttcttttccctcttcttactgtttgaacttatttttatagggacaagattgctttacctgcagaaagagtgggcaccgtgctaaggactgtcctgataagtataagggtagctccacgagatcaaatatatgtttaaagtgtggatatggtggacatgatatgttttcatgctggaatgattatgaacatgatgatctcaaggtttattgcatgttttgcatataagttgatagaattttgtagagctcatgatatgtatttaattttagttttataactttgatctttttggcttccttggtggtttttgtgagcaggaaatttgttgttatgtttgcaaaaaagtggggcatttatgttgtgtcaagtatgcggattcttgtcaaaacgtagtttcttgttacagatgtggtcaagtgggacataccggcttggtaagtactgaatgtacaatgcttgtgctgtgatgttctccatcatcaattcatgttattaggagttctctctgtctgtctttctttatgctatacatataattatatatttttttagtccctcttaatttgccgtgaaattacttatgagctcagaactcttaaacatcttgcaagttaagataggttttatatggttctatttatttgcattttttctttttcttaaggtcttccatccacatatatgctcttgtgattgtcaaggactcaaaggcaccaaactagttcacccaacttgcaaattttgcatattatatataaaaactgttaaactaaacgagtccttgtcatgcagtcctgcacagggatatatggtgaaaccacaggagctaatgctgtggctagctcgtgctttaggtgtggggaaggtggtcatttcgcacgagagtgcacaaactcttatcaggttagtattagtgtagattgaacaattgttggtgtgccagtctagttctttttctctctcactaactttggtaaaacaaatgcattgacgccttatctacttttgaaggtgggtaaaagggaccgggaaccatccaccccaactttgagagttcacagagaacagaaacacaaaaagcaattcgcgtctgctcctcatgaccttggcaaggctgctcataaaagaaaaaatctcaccatcatgaaccaagtgttactacaccgcaaaagtcgaaacatagaggtggatggataatggatgatcctgtggacttctcttatgacaacggcagaaataatagttggaggtctccagcaacaccggctggtaattatcgaggtagatggatgacagaggatcttggggacttctcctacgatagtaggagaaaacagagctggaggtctcctgcatcaccgtatagccagggtcatagaatttctactattactgctggtggtcatgtatcaaattctcagtcttctaaacgaacaaggaagggttatgcgaacccacatttccaaggatcctataatgcatggtagcttttttttttttttt

SEQ ID NO: 305955 - DNA, 1047 bp, Cannabis indica
ctgatgttcaaacgaactgacaatctagaagtagttggctactcagactctgacaatctagagtgtgtgagaataatttaagtaaaaactcataaaaatggatatattcaaattaaattttgtttagattaaatttgattaatataaaagggtattttttaacttttcccttaaaactatgacaatcctaaaatgtcacctagtcttgttcgatagcaagttgatgccgtgtgattttacttttttttaaagataaaatttttaatcatactcttaatatttatttagttactaaaattttaatttattgatttactagtattaatactaaacaaagttaattcaggaaaaaaaaaacgatttttaattagtggactcgtgtatttctgattattttttgttttcacatttcaaagcatatcgagagggtgctcaccacgagtttggttgttgaatccattacttcattcctaatactctgtttaattggaatttggatattaataaataaaagctccagtgttgtgtaatcatgggtctgcagcatttttcttttccatatcactgtactgcacttggtactttttatagaaaatatcgtgcatgttcccaaggctcttaatttttattattatttgctttttgtttttgtttaaataaaaaggaaaggttaggtagggatcgcaattgcatttccatacccaaaaaaggtaaaaccaaagcaacccaacataatacagggaaaggaatacacacagaatagagatgaataagggaactgcaacaaagagttttcatgcatcattcatttctctccaatacatttttttttatcttgagataattcttttcaagatttttttttaaaaaataaatatttattcaactattaaaacttataattaggtatgaaactatttttttttttccctattgttggcatctccaatgataaaatttaaatttggtgttaaattaacaataaaaaattactatttcaacactaatttttttttttaatttcaattacaacactaaaaattacac

SEQ ID NO: 305956 - DNA, 2017 bp, Cannabis indica
gtgtaatggttatgatggtgcaaaagaagtgaaagggtcccctcttttaggctattattattattattattatgtgatagtcttttatttcaataacaaaatctaatgaagatgatatgcagtttatattagatggttgagttttttccttttttaaaacaataattacaaaaataatgatataattatctgtagtggtttgtacggggatagactagtgaaagaaaaaaaaaaaaaaaaaaggaggcaagtcacatgtgagtatttttaatgagaaaggaaaaaggtcaactttttttaatttttatttttgatgcataataaaaagaaagtactttgatggaattttgttttttaggaacattttctgaaaactggggcaaaaaaatagagatttttttaagagtaatggcccttgggagatgaaaaataggaagaaagatgagttaataatggtgtgagtggggccattttgttcagaaaataagtagataatttttttaaatagatttaagtagataagttgttggtagcttcaccagatattttaatatgaacttattatgtgtgaaaaaaaaatagactctgtttggttttcatgggcaaataaatagtattaggaagtaataaatacggtggaattcaattcaaaaagaaaaaagagtggattttggagtgtatattttagctagaggaaaccaacaacgccttttcccactgaacaagagtattttgataattttttcactcttagacaatttcaagaagagaaatgctaaatgatactagtggtgcctaccaccttcttatgtatcagtatcgctattggtttaattaagtataaggtctcatatagtttaatataatagcttttagaaagtatcgataaccaatcgcaatgcaacatatcgagaagatgttaggcactactggtgcctaatagcaatgctcttttaaaaagatactttcgatggtaataactccataaaataattaaattttcggtattttctagatatgtactatgtgtatttacaaatgagcataaaacatctatttacagtgtttagagtagacattaactattaaaatttaaatattttaagttagttatctaaatagatgtattctaaattatgtaatgtaatatataaacacttaaataaaaaataaataaataagttgattctctaaggtgtatgtcatttggtatagaagaaaaagctcaaatagagcaaggaataaccagttcaaatgaccacaagaggggtcaaatcctcaaaagaaaccaaactagaaaacgactaactaaacgcccattaagaaagcttatgagccaacatgtttcgggagcaaggaatccaaacgacatccaccttagatagagaatcaagcacctttatatagacttctaaaacaagtatgccatgcgccaatcaagggccttctgagcttgaattccaaacaccaacgcttgacaatctgaagcgaaccacctgactccagtcacaagcacgacaaagatttaccgagtggaacaaggcccaagcctctacttccagcggctaactcgaatcgatactcacagctagcgcctcggtcacaattccttccgactcaatcaccatgacgccagaataggcacacatatccttacaagctgcttccacaaatataaccattcttccatcattaagctcctaattaacaactttcaacgagggaagatagttcaaggaattccatgcagcagcaaggcaagaacaagcataattgattcttgcaaagacgccacaacaagtagggctaatttgatcatggaatgcacggtccttgacagaccacaattcatcacacaaacatatgccaaatttattaaactcaccaatttcatccacaccagctcctctcaagaaatctaggagtaaaatctaaggttgagcatcggtcggtctggtcggtattttttctatataaaaattcaaaattcgattttcggtctggattggtgtaatcc

SEQ ID NO: 305957 - DNA, 3088 bp, Cannabis indica
aatcacgtaatacgcctatgctagttagggtgttacacatattaagaatgttgaataaatatttaagtaaccatctaagaaactttcggtatgcagccaaataggctataagaaatttaaggagaacaaaatacgatatgttcacttatcagaaattagaaaacagaaaattttggagatcctttagattttttattctaatcttataaagattttagttgcgagatttttgtcatatatggctgcaaaattaggaatgatattgaaaattattaaaaatatatgttgtgacaataaataattttggttgcattttagtaacaacatgagctctacaaggtcaaaggcacattgactttgagctaattgttattaaaacaaagttcagactaataaggtgtgtatagaacataataaggacaaacttcatatttagtgtgatccgaatcatcaacgatataccacttaagggtttttcaggagcttgttgctcatatatggatgtggtattatttaagatagtgctagtttagtgggagtttgtatttgagatgatctatcaagctgacacatatttattgtttgattctgcagaaaaagaatggacttaagtttgagtactctaaatgtattctttctattgaggtttaagtataagggtagaaagactaaaggattgatctcaattaaggaggaccagttgtaaataggcatgctaagattacatttgcatgtaatttccatgctatgcatccatgattgatctatgtcatttggctacagtgatatacgtgactattgatgagttcagctatgcaaaatgttgcaaaagccgctttgatcctatgttagtataatcagtggacgagattgttttgaaatacttataattatgatagcaaaagttaagcgcttataaagttacacactatcagaaaatatatgtagcctaagtgggagattgttggattaaaatctcaatatgggctcgtatgtatattagtgtattgctatttgaaatttgacccaaaataaagtgatcattttagtaattgtgggtcattgggcgttaaagtgtcatagactaaatgtatagataccttaagagatatttctaatttattgattggctaaattagaaatactcaaaagtataacctagctatgatgttatataatggtagtggtgtccaagaaacaagagtaactctattctcattttctcccattaagagagaaatctagagaaccttatgtcttgtattcttggaagatcattacttaaaatcacaataaagatcatctctacaaggttgattaagatcatcactattcatggattaaagtaggcttctgttatttaagttcttctctttaaatcgacaaatatattctttagatctatagttatacacttataattatatgtaatatatttatttattgaattgaatcttgttataacatattttactagtgatgaaaaattctaatatgaaaatgacttgaatcaatgtaaaatcacttttttcttgtgggttgttattacatattttgttacgacggtaagatctaatttttttttttatttatatataaatttttatttgaaagaaaagtatggatagaaagaaacaagataaccaccaccacgagcaaaacagcactacatgtatagagtacgaatttttatgtgtgcaagggtgctttaacttcaggtcatcactagataaatatggtggttagcttggatgcacacacatttgtgcacatgtgctgcaaatacaatagcgtggcgtaaaaccaaagggactagtgcctctgtaattaatgattttgtacaagtatatatataatatgagaaatgttaaaaggtggtgtatacaattctttaaagagttaatattagagcattgttattgggcaccagtggtgcctagtacccttaagacgtgtcgctttgctattggctagcaatactccttaaaagctattatattaaactatatgagacccgatactaaattagaccaatagtgatattaacacgtaggagggtgtttggcactactggtgccttttaacattgctattaggcactagtggtgcctagtaccttctcgacatatcgcgttgcgattggctaccgatactccctcaaagctattatattaaattatatgagacttgatatttagttggactaataacaatattgacacataggagggtgttaggtaccactggtgttctttagcatttctctattattattattggtctaattaaatagtagaataaatataatttaatataataatttttaaagaatattagtaaccactcataaaataatattttaaaaaatactaatcaccactaaccactagtagctaactcaataaatttactaggcagtagattagttagttggttgactaagtagtatatatggtattaaagaatgcaccccatgattccatatgtcaatctcaatcttaccaaacttagttaatatctcaatttatctgctgtgtaaggacaacatatgggccccagtgctctcatctagttgctgccagataaatccaatgagctttcgagttctttcctcgaattctcttttgacaaatcatcaatctaccaccccatgtgcttcttcctctctctacccaaattccaactctctcaatatgttacgtgtttgttcatctctccctctctctctttcttctcccttttgttctatagacagtcacacacatacatataatattaattatgataaggttgggctgtaatgggtgtagcggccatgcattcacataaatgtagaaagcttgcacgccttaaaaaagtaaataaatatacatgaaaaatatgattgaatagaagggttcagataaagtagcggcaaatataacattgcagaatctcttatgttttagaggtgttgaacaaagcaacaacaaatgaaccaacaaccatagttacttaattactagtaaatattatatgcttctccaataatatataaaatattttaaattatatataaaaataaaatatatattttagattttttttt

SEQ ID NO: 305958 - DNA, 990 bp, Cannabis indica
agagagagagagaagaagattatttaaatgtacattaattcactatatgacttttttttagtgttacaatgatgagaacatgtgttacacatgagaagtataagaagactcgtgaagtgatgagaagaagagagagtccaatactttagtgcttctaagctcttaaatgcttgtgtagaaaatgaaaagagaggtccttttacttgttggtgaagaatccctacttaatcgtgggtagtttgagctgttccaaagttataggaaagcttggaagtcttcaagaaggcccttggaaaaaccacagcccatacaggctgtcgggatgtgcattgtgagttggccgaccatccctatctagaagctgctcgattgtcttcattccacctctgatcgggcagttgatgactcggctagggtcttgtcaaaatcttattttaagcttgtgttattctttcttgaaaccttaaaactttgtagtcatggagttgcctgacattaagttgtcctgccttctacaagtagtaagctatctgcccatctacaggatgtaagctgtctggtcttctacaagttgtttggcctgctggtcatcctgccatggtcttgttaatacttgtgtatctctatctttgttcttgacttagaagctgaacagaatgaccctgtttagtgtaatggtttcatccacgtggaagtgtcacatcatatggataaaaattggaataacacaaagggtcttggattcaatagtgtgaagcctgtttgggcctatctataaaagtcaaacattgcccatccaacttgatcacataaggatagggttacatttacagagaagccaaaaaaaagcaagagagtgagagataaagatacttaattcttaggttttctttttattcttgtattaattacttatttattaattaattttaatatttatatttataaaatttgatagacttgtttttttttttaaaaaaaaaacctcac

SEQ ID NO: 305959 - DNA, 1628 bp, Cannabis indica
ccctgacccagacctgaacccggacctagggcctagaccaggacccaaactgagacccgaactcgagaccccgacccaaactaagacccggacctaggaccctaactcggactcgaattcgaacccggacctaatcccgaaacccggacccggatctggacctgggacccagacccagacatcagacctggaccttggacccgaacccgaacccgtagttggtgttggggttgagtgtattgaaaatatattataattttacataacctattaagaaaagtcaataccaaacatagtattgtattaaataatactaatacaatataatataatacaacacaatccaacacaatacaatgcggcgtagcaaacgagttctaattgtaatgtaaaataatgactattctataatatttcaaataaatgtaaaaatttatattcaaaaccgtgaaggtgatataaggggtagcttgtatttgagaaagaggttcccacgaatatataagaggttcgcgcgtgcttatagccaacaagcatgtaatgatcacatgaatgtacgtattgtagagtagtatttgcagtccccccaagttggcaaataaaccttcccctgagcagcctcacgaagcttgatatatgcaagtgaagttaaaataaactaagtgacgaattggcccataaagctattgtgtttttttttttctatccttcactagtaactttctttcgatctttcactcactccgaatcaattctctccaaatgcacatcgatccacaccaaaaattctgtctagctaccttgtttctgtttgctttttctcaattcaacttttctccagcaataattgaaatgccattccaaaatattcatatccatatgttattttttcttttctatctctctctctctctctcctcaaatctcaattctaatctatatagatgcatatcaatattatttgtgacaataatatactatacatataaatcatgacttcttttttaaaaaagttatatatatttatacatcatgattcatgacttgacttgtgcatacaaggttcttcattagtggcctcatcatgacacgtgtgtggtggagcatcattaaatatcacaaccgggtatggctagcaaacctcaccaacgcttctcttgttgttgttgtttctatctttttaaggaaaaagtagggctataaagtaattgagtagaataaggataattggaatataaaccgcggcggaccgacgctggtcatgcaagaatgagctggaggaacctggtgtcactactgttacattggagagagtagtcaggctcatctggcatgttcataaactaatataataaaaagtatattgccataaaacaaataaccctacagtcccaattttttttttccaaatccctacccttcctattacccttgctaaacctcccccataaatttatataaatatatatatatatatatatatatattaatattatatattaatattaggtcaactgtgcaggtatatatttttagttgtatagttattattattttatatatatttttacttgaatgtattcaaagacaccacaagatgcatcactttttattaaaaaaaatattta

SEQ ID NO: 305960 - DNA, 3152 bp, Cannabis indica
aaaagttcaaaaaacataatttgatacatatcaaagttttggaggtaagtttaaattaggatatataataataatacaagactaaattattatacaataataacatatacatattatataaagtggtgttgcatgcacataatattaaaaaaattcaaataatttactattcctaaaattgtgaaacatagtatttaagtcatggagaaaaagagaaggcacatggatttgaatccaacacctctaaattacaagtatattgtaatatcactacattacattaaaaaaaatatactatttcacgcatgctttatttttactctttattacacgtgtaaaataatttatttaaaatttgttgtcactacatattattattaaaaaaaactacatgtattctaactagtaaatctacataaccaaaagtaaaaaaaaatagatgttagatgcatttttatcaagaaaatagtataaacacgatgaaataactatacattacacaaaataaattaataagtgttgttatggttacaagttttgtcttttgtgatgaaagttgttaatatagagagtagatattggaagtttagtgtgaatttggaaagtcctgtgcagaaggtcttgtagactccagaaggtacttctacataagcttgtactgcgtatgggatgtctctcccaaatagcttaattattaatttgaagactcccaaaaaaaattactgttagtcttgaaggtccatccaagaaggaagtcttgtacgtatccggtaggcttgtatgtttatgaagcttccagattgtttgtactgtttttctaagatgacatggattattgttactggtaatgagttggatcatttaaggcagtgtaaatgtgtcacgatgatttaggagataatttttgacaatactaaaaatctataaatagttgtgaatctttgtaacctgtgtgagaatttgactagattagcttgagtgaaaattgtgacagtgtaaagttgagagggagtttaaactagatagagaaacttcttctcgtaatctcggaaagttgtgaggattcttataactgtaaatactgatattaataaagatagtgctgctatagattcgaccaagatgtagagcattgtacatggctcaaacttgttaaacccggtgtcttttctgctttactgcctaattcattacctaaatcttgagatctcttggatattatttcttgatcgtgttacatgtttgtttgtttcgtaaactggatcataagtcattgattgttttcattttgcataacaaactggtatcacaacttggtatgtaatcatggctgctacgatatacaatgttgaaaagtttaccagcacaaatgactttagattatgtaggatgaagatgaaggcttatttagttcaccaaggattgtatgaggctctactaggagataattctcttcttgattcgatgtctaaaaaacacaagaaagagactcttgcaaaggctcatagtgcaatcattttgaatcttggagataaggttcagagtaaggttgcaaaagaagatatagccgcatgtgtgtggttgaaacttgaaagtttgtatatgactaaatcattggtgaatagaatatatatgaaacatgccctgtattcattcaagatgatggaagaaaaatctgttggagagtagatattaatgagtttaacaagttgattctcgatcttgaaaatattggtgtcgtcattgaagatgaagatcaagccttgtttctcagttctttaccaaaatcttttgcacatattaaagatacacaatgttgtatggaagagggtgaaatcaaccttgaattcgaaaatgttaaatcagaggagtgagtcaaagaagtggtcgctatttgatcaagaatatgtatatggaacatattttgatgtgtttgaaacctacttaattagttttggtaaacaatcaataattatatataaatagatcttcatctaattaaccaatgaaaaaacatcatgattacttttggtaaaattaatatatttatagttatatgtggtggtgacaaagtggattaagggtccctctctctcgagactaataataaattaattaggtttaagaatgggaccatagatctttattcttttgctctttctttctctctaaataaaaaaaatatatataaatatttatcctatatatacatatcattatctcactttttactattttatgatcatgacggtattgcctttctccaaccttaattatttaccacctttttcttttcctcattgttttccctcactccattataatatgtattttgaaatacatttttttaattattattttatctgcaatttcatttatatgtgtatatataatatattatataaatatatcttattgctaccaacgaattatgagtacacaacaaaataacgccattattttttgctcagaaattctatccatattatatttgattgtcttctatgtgtggtctcccctggtttctgagtttaatattgttattaattgattgagcttaatattcaattacaaaagtgaggttgttattatatatcttttattacttgcatgttatatgttactgaatgctcatattatatatataatatacatatatgaattaaatgaaagagaatctcagatttagtttatatacatgataaatacatataaacattgaatgtttctgccactaattagtacaatatatatgtttctagttaagcacacagctcctttatatatggttggttgtttttattattatgttgaccataaaaacatcaattattgaaacaattaatgttggaaaatgtaagtgcaggcctacatgccaaagggacctcaattaagtaagcattacagacttatgtatcaaaacaatattttaacatatagtgggtgaaatagactttgttttcaaccaaaaaaaaagtaatttttacaccactcaaattttcaatttttttctgtggaacgaaatttttttaaaaaatacagtgtaaattttatattgtgtgcagtgttaaatttttattgttggtcccaccttattttgagttgttttattgttatttttaattgttctgttttattattttacggttatt

SEQ ID NO: 305961 - DNA, 1605 bp, Cannabis indica
ggagagagttgaagagaaggaagaatcagacgaggtaagctcttttcatttattaagctgtttggttttgattgtttagtaatcttttgaattttcactaatggtgtgttatgtattgttttgtttcaggatgatatgattttcagtctctttgactagaagctttgattgggagattttgaggttttgctattggaacttagttttttttatcctatttttatttagatgaggaggaagagaaatttgagacacagtgaattgctagttttccacagtttaacctttaatatgagtacattgtagtattttccttttaatcttgctttggccacctttgttctgtgctcattttataactcttcttagttacttagattgtctttgttcttgttaactcaattggtttgttatctgatgttgttaacggctttaagtgaaaacctagttaactggattcgaattatttctaaacaaaacctcttaactctactgtatttggtcaactatataagataaagaataggtaatagcatgtgctattttcttgaattatctttcatcagcaccaagtcttgtctcatcactataaatacacaatagtgtcaatttagtttaatagtaccaactttgtcaaaatgctgaaaggctcagagtgtccacttcgtccttatcgcatggtgcaatgtaacagccccttgccctcaccctcctgtcacatggtacatagcaccataaagcaacatgaaaatttaggaagagacaccactgtggggtccaaataaccatgcatgcaaaatttaatggttcatccataatatagagacacttacttttattatttaattatttttaactgtaaaagatttataatttagggatatttacagtgaaatttttaatatttgcaattgttaaatatatgatactaatagagaaggtgatgctagaaagattttgccattaatttctttataatttaataatttaatgcaatatttaaatttaattatggttaattagaatttttgcttcatatatttttacatgtattaaattacattcttgaactatatttttttcttctaagtattgagattatttaaagatttttgtttaattctttttctttttattttattaatttggtgattgtttatgtattaaattatgttcttttaaattttaatatctattaaatcatgtttttcgaattttgacgtgtaccaaacatgtcccctaaatttttcaatagtttgttttttctttaaggggaacataatttagtatatgttaaagtttgttagtaaaactcataacaagtttttatttttttttgagataactcataacaagtctttaattataagatattaaaaatgatataaaagtagtaatataaaagcatataggctactgcaaattttgcataagccatattgttgtgatttatatttagataaacttttctcatgtcgcaaatttggataacttttggcacaccatcatattttacaatagagcattgctattaggcaccagtggtgcttagcacctttgcgacatgtcgcgttgcgattggctagcgatactccttaaaaacta

SEQ ID NO: 305962 - DNA, 2341 bp, Cannabis indica
ttttgctccattggtatgctaatgttgctttagattaaacttggctaatttatttttttgtatcaaatgttcaatttttttattatcttatcactgtgaattattgttattatctttgattgctaaaaaatagaatagtgtcattaataattttctttttgaaaattttatcaactctaggagataccgtggattgcatagagcctaggaagaagatgtgggaacaacttgtattgtagtattgtagatgaggatggttacgagttcaaaactcattgttcaacagtcatctaatccgttggaaagaatataaatttgtatattctatatacagagactaaaggaaggtaaatatcatattattttttatagacttaaaccaatcatttgaattgagatggattgtggtatagtacagtcgacaattatgtgttttatcaggatgattgcttttttttttcttgctggaattaaggaactgattgtatgctctgaaggatccattggtgattttgtaatcagggagagaaatctcctcttgaaatagatagattttgatcatcattgcctcgacataattcaaaataaaataggaaccacaaagaaaatcaaactacttagtacttactaaaatgttggttagcagcgaaaccaactgagttagttatctggattattgcttgatttgttgaataatgagttgatttggattctatatttattgatagacttttacatacttcaacaacaaccaaagcttgacatacacatataatttgatcattttttacggtacaattgatttgattgtcattttctactagacaaaatcttcattctattttttattttttttctcttatatgataaatatggcaagttgttttccattgactttgtcttggtgattctttttttcttttttaaagaaataatatgacttgtccgggtaaaatcatgtttcctgtgcactcacatatgaaacacatatcaactattaaaatcttaaaccttttgacttttttggagctgccttggctttagccatcttactcttacccttccgagcctttacttgaagacctttttttgctaccacatatattcttgtttaggctttttaagaattgccttgttgtatagtttatcaatcatcctattcttcgatatgttggcaatttctgtctgctttgatatggcattggccatcttgtgcacttctggagcttcttcattacaacatgtttcttccgagctttggcctctgccactttatttgctggctgagcatcgatttctttgaactgagcttatttcgaggcatattcacctcttctttggttacaggcttcatgtgtggtcaacacttgttgtcaagtatctcagtctttgcacaacactttgtataagttttgttttgtggtgtttttccgtttttcctgtgatttgggtgttttataaatttttgttcttgagtttcttgtttgaatacttttaacttgtgatcttgaatatattaaatgatgtttatgagtttttagctagagattttactgttttaacatttgagtattaaacttgttggaagttgctctacaaattgagaattaataaacaattctgttatgaccattggaggctttactaaaaccattggtccattaactatataaagtgcctcaactatcatttgaagtgaggagaatacaaggttccaagaaccaccagagagagtcatagtgagaatagagagataaaagaaaggttccaaaaacattgatggttttttggctgaatctaaggttttttctatttctcaatttaagacctatgttgtaatttcagcggaaataaccttgaggattcaatcataaaatctgcaatgaactcacaactttgacagtaaaatgaacataacaattaatctccacaatgaatcaaatccgaaatcaaacaaagaacaacacacgattttatcctggttccggtcctagagatcaatatgatccctggccatactccagctgagaaacatcaccaatcttcattaatatgtgaataagagagcaacagtacaattacaataaccagagcaatcacagctcagatggtactcgatacacaccagagaaaacagtcacagttttctctctatcaacccgagtacaccccttgttcttgaccctcttcaagaacagaactctcagcttagaaccctaagcaattccctctaatcctctctcttattctctctctgtcttccttatgttctcccctttagaagtgaaaagactagacttatatatagtcctaactcaaacaaggatagcaccaactaact

SEQ ID NO: 305963 - DNA, 1544 bp, Cannabis indica
aacaatctcaatagttcggggagaatttttaacggctaaaaaagttcagtgggcatgatttagtacatgtcaaagttcagggaaaaaaattattaattagcctttaaataaatatgtgaatgataagaataattgagtccttaacattttaaagacaaaaaacaatactaggtttaccattataccaaatttttatatgagggttatgatgcaacaagccccaaaattcccacaatctaagcattttagtccttatttaattttctatgattgtcttaaataatttattgtagttatatagtaaaatgccccaagtgtgtccatttaagcaagctctacccatatacactacaaaatataaatgtaatgtattatagcattttatatactatatatatatagccattggacataatttaatggttaattaagatttttatcttccgaactttaacgtataccaaatcatgctccttgaatttttaagatcgttaaaaatatttcctgaactattgagattgttggatttaagaaattttgtctaattttaatagaaaagtctaacatggatgaaagttcaggaagcatgatatttagtatatgtcaaaattcgaggagcatgatttagtagatatcaaagtctagagagcatggtttagtatataaataatcactgaaatagtaaaattgaaataaaattaaataaaagtccttaaaatctaacaatatcaatagttcacgggtaattttaacggccaaaaaatatttaggtgtctataatttagtacatattgaaagtttagaggtaaaaatcctagactagtttaatagactacatggtcattgttgccgagtacactaaaacatatatggatgtactaaaatatgtatataaacttagctattttgccccttgccccttcaggttttgtgatactttctaagacttattaaaatttatgtcatgataatcgtttcatgatataactaataagtaacattgtttatcttagtttgtagaataatataattaaactttaatttaatgatctatattccaggaacctacctgtacgccaacgctagctttttgtaaaaacctaatccaataacatattatatatatacataccacatggacttatatgtttactattaattattattttaattataaggagtcgactcttgactcttatggtcataaatatataattatatacaataaccatccacactacctttatgtaattaatttgaatgttgagctggccaaagggagtaaaagcaaactttatgtgagttggacatgaataatgcatatattaatatatatatacagtagaacctctattcaagaatacacttgggaccaaaaaaataatattctaattgagaggttataactaaatagagttacacttaaaaaaaaaatcaaaatatcaaaaaatatcaatataacaaaaataccaataaacaattcttaatactatattatattaaaattattttcaagtacatataatatttatacatgtactata

SEQ ID NO: 305964 - DNA, 1932 bp, Cannabis indica
  modified_base (332)..(332): a, c, t, g, unknown or other
ttcaatctaatagtatgactttaacttaaaaaaaaaaaaaaaaaaactatatacgtttaaaaaattcaaaattatagtaattgtaaaaaaatgaatgattcttaataaatttatttttatattttaaatgtttctcctccatagctaactatagaatgtgttaactttataattatatacatctagctagctataatataaaattatatacacatgtacgaattacataataataacatacaaaaaaaaaatcatatctgtcaaaaaaaaataaaacaataaaaaaatagttgttgtgtattgtttaccaaaacatatatagctcacactcnctcaaaacaaaataaaataaataaataaaataaaaactgaatagatagctactatatgaggccctataaatttaaatagatatgagccatatattttgagagatatgagggacctggttttgtcaagtgacaaacatacatacatatataatttccaagagcagttggagatggatgatatatatcatgctgttgcaatgtgtttttgtttggttttttcttggttgtgcttagaccacttagttgggtctagttggtttttatatatatgcttgtttcattctctttgtttaaataagatcattgcatatatatatataataaacatgaattattcatgtggggttatgaataatttacacaaatttgtcctttaacaatatgccaagaatcttatttatatgattaagctgaaagacaagttttcaactttagcaaaaactttattgtataacaatttacaagatatattaggatttaaaccttttctttatctaagtttgttgaaaaatcgagggccaacatgcaaatttactttaaaggaaaaaacaaagaaaaacaaacaaaagtcatatgtttatcaaattaaatctaaaaaattattaatcaaataataaatataaccatatataatataaatagctacttataaactaactcacacactcccttcaagttagtatacatattaatcatgtctaagtttaatattattgtagactaaaaaattataaatgggatcctctattttattaatgacagattagaccttatatattttaaaatagtacaaaataatattataaacttaatttttatcaattttgtttttcaacataactagttccaaaccagtttctaacataaatagatgcaaaatatataaatagtgtggtcataacaataaatatcaatatcaataaatatcaataaagatatgcctggtgctattctaatcgagatgtagaatattacacatggctcgaactcgttaaatctcggtgttatcttctccttgatttagcgctttaactcattattcggttcttgtgattctttgatagtattcttcttgattgcgtgttcgttgatttggtattctttcatcgtaagccattaattgattcacaacacatgcttatcaccatggccaaccaaattctctaaaatagctaaaaagctaaaatagagctctcaactatttttatggttgttgctcaattcatgcttcctactttagttagtatttgattatcttaataatattttataatttgaattcgtcaactataaattaattttataatataataaaaaaagtaacaatacttttgattaaaatattattaaaaaattttagcaaaaaagtaaggaactccgtatatttagaaaatttcttatccattctctattatagagtcattttttgtagggaaatttacatgttatactaacccaaattccaatatttttgtaagtttcccttttttgtatggttgaagctcatattttcaagtttcactttctattttaacttaaggaatgtgtttatagcatgattggagatactcttagtgacaataaataaaaaataaataat

SEQ ID NO: 305965 - DNA, 1524 bp, Cannabis indica
atcatgccagtctaaatctagtgcactgacaaatcatgggaattaaacttttgaacatataatcatgattatattccactctgctgatgatactataatcatgaacaaatacatatattttggacttaatagaagttatacattaaacaatcatgaaataaatcgtgtgaaccatgcaacataaaatgcagtttctgatctttattaattagtaaatccgattatattaaaatgagttttatttagggcataaaacccagtaaataaaatttgagccacattctcaatggtctgagcacgccaacagagttttccccaaagaaattacaagtctcatccttagaatcttcctccgacaccgataagacatcaacgctcaagatctatgtcatggatttggtttttaaaactacaccataggaagacggatgtttctgcttagccagaatcttccattttccttctaaatcggatcttccttctttcccaccagctctctctccctgagtatcacttttttgaggtcgaccccgacaagccatatcacaagttcaaagaacttcaattggaacccttacatgaagtatttactggtgttgaagaaaaagttaaattttggataaatgtccacttggtcgcattatgtgtaaaattacgtaatcgagaaatcctaataaagttacaactcactaaaagtttagaaaaattaaaataattactaatatagctattaagtttccatcttaaagtaatccccctaagcgcattaatgactatctctaagttctctccactaccacaaaattgtagcccatattattgagatctcaacagaaagcaaacagcagcgactttacaaataagggggttaaggaaatcgtttggcaactacccccacaatcattgttagagtttcatgttactaagatgtaaaaatataataccatatataagatgcatgagctactcctttcattgccaattagttttgaaatagaactccatgcaccttaatcacatactttctaaattctaatgtcgtatcggagctaaactaaattctaacgagtattcgatccaaatccaataattgttccaagacaagccaaaagaacctcttgtgatttgttgtgagttcaaagtatcgttggtacaaaaatacaagccaaagagtcgcttatgattcggggatagtgagctaaaaagtgccgccaatccaaaaagatgagctaaaagagttgcttgtgattcgaggatagtgagccaaaagtgctgccggtctttaagacgagctataaaagagtcgcttgtgatgcgttaagagcccaaagtgttgccggtccaaaaagacgagccaaaaaagaaccgtttgtgatcttgtgtgagccaatagtgtcacttgtgatcgagccatctaagattagtaagtaaaaacttagccaccatcttgaggggatgttagagtccaacattgctaagaccatctccaataggagatataaaaattgtgttatatttagcaca

SEQ ID NO: 305966 - DNA, 647 bp, Cannabis indica
aaaaaaaaattaaagtaaaaaataaataaataaataaaagataacatgatgacttttttttcttgactgagaaaataatggtaaggtaacagagaataatcagtgagtacctagctagctacagcttcgaaatatatgttagtctgatgatcaccaaaattttactcaatggaaggtgaatgcaatattagatttccatcggttaatgtgtctttataattagaaaataagagaacaaacgatcataaagacaaaaccctggacaaaaagcaaaatctaccctattttagctgataataacatttgattctctcactctctctctctctctcttataatgttatgagcaaaaagtatgtcgactttccagagatggcccttatggtacacaataattcttgtggtaacactaatagcaaagcatgtaaacagtaatttataccgtaatctatagtttaaggaaataacaacttagttcagaaaggaaaaccatcgtttccattcacaattagctgcatggcttatttggcttatttataaatgtaaacgtccagtttcaatcactcaaaactgtacatcttaactatatatgctaaaaaacttaaagctaaatgagtgcatatatatatatatttatagaataaata

SEQ ID NO: 305967 - DNA, 1102 bp, Cannabis indica
atataaatatatatatatatgcagtgcacgcacgcacgtatatgtagtcatgtacagctttaatttgttatatatgaataataaggtgaattatatttcacactaacatgttcattagattcttaattagactgaaatttgagtcaaaagtaattcaaaacctacctacttaggtaatgatttatttatttatttatttattcaaagggagagagatgacgagccttaattatatagtttatatatgcatacaatatcaatatatatatagcattatatacgtatatatattaatattactcattttagtatttatatatatacaagtatatacgtatgctggcgaaaagctccaagaggtaaggaaaactaaattaaaaattaaaaataatatatttttcaataaattaatcttcagttgacattggtgaatttttataaatcaattattttgactaaattgttgtttttcttcaaattatgaataatattgtttttctcgtattcactttggaataaaatcggctaataattattggtggtgtataattagagaaataaagagtaatatggggcttaaaacgctatatcaaacaaatgagccgactttgtttgtttctgaaattgacttatattttagaaaaagcagcccttgaattataaaattaatttttaaaaaaataaaataagaattgtacttgggtttatttttattatgtgttgctgctgacctggcaattagaattccagctatgcaaaatgtcgttatgtgtcaccaaatgattgattggtagaccctcaccatcataatttggtaaaacattctatttggcaacaaaaataaatagaatggtgctggtttctaatatatgctccatctatataccatattataattttgtgttattcatatatgctccatctatatatattcaatatagttgtcttgttggtttaatccatcatatgagattattatcatttggattttctattcactagaatttttatactgtgattacaattttttgcgaggataagataaatataaattttgtcttatttttactgtttgcataattattatatgaagatctttttt

SEQ ID NO: 305968 - DNA, 778 bp, Cannabis indica
ttagaaaaataaaaacaaaaaaattctttagagagccacctatacaccacttgtgtgttttcctttattataaatatatagatatagatttttgttgattttgtcataacaactttaacttgtagcctatcgattcaacatttcttttctttattgcgtaaaatcatagattattctttctgatacaatattctaacagatattaaacggatagtaatacttataaatcatttttattaattgacatatatacaatcaaaataggccattgttattgatggaactctaatttgaaggtagacatgatcgtagttttaggacctaatgcattttctacatttatgtttttttttttctttcttttgaatggggaaaaacataaaacaaatcaactctgcattaacaatagaatagctcaatgagggatatcctcaaaccaagaaaagttaatttttttcaagccaactctgcattttcatgttttaattatcacctttttttttattattgaattagaaaatcatccttcaattaatttacttaccacataaaactaagtacaaataaatttatttttcaaattagtataatttcaagggagtaaaattagtgtttattaaccatgcatgcctaattaggaataaaaaaaggggaaatttacatgatatactaacttttgccatttttttacaaaaatactgcaaggcggtatttttacttttttacttatgtttttttataagtttcatactgcagtatactgtgttaagtttcactg

SEQ ID NO: 305969 - DNA, 1143 bp, Cannabis indica
aataatttccaacaagaagaacccaagaaagaagaaaaattaacttgaggttggattttttctattactcaggctgatgctaaggctagatcgtcaatggtgataggctagctctctatcaacgactctttacactcagtattatttaatattgggagctatagactcttatgctgctagtggagtgatcgataaactagataggccttgtgatagttatgaattagggtttggaaccctattaactattggagaattagttatctccaaaggtggattaggtctatgccggttagagtggatggtagagaattgagtgctgacttagttaacctagccatagaagattttgacatcatcttaggaatatgtggcagctattgattgtaaaagaaagatggcaacctttcaacgagagagtgaggaaccatttgtgtagtgggatttgttcagggttctcgtatcctaatcatttcagttttaaagcctagaaacctatagcaagatggatgcatatgattcctagcagtagtgatagacactaatagatctatgatagttggacctatagatattagagtgatgaaggagtttttagatgtatatcataaagaattgtctggtttaccaccatagcagtagatagactttgttattgacttagccccaagaccagaaccaatttctaaggcaccttataaattagctccgtagaacttaaagagttgaagttacaacttcagaggatgcttgacattcgatttacctgacttaatgtatcaccttggggtgctccaattttgttcataaaaaagaaagatgaatccctccgtatatgcattgattactaagaattgaacaagcttactatcaagaatatatatcctctttctagaatcaatgacttgtttgataagctttagggaaaaacattcttctccaaaatagatctttgattgggttatcatcaatagagtatctaagaggaagatatcccaaagatttcattccatacaaggtatggtcactatgaaattctagttatgtcctttgagataaccaatgatccttctgcctttatggatctcatgaaccaagtattcaaggattttcttgatacatgtgttatagtatttattgacg

SEQ ID NO: 305970 - DNA, 1527 bp, Cannabis indica
ttttttcttcttttttgaataaaattatgtagttttttttctagtttatctaaaatcatggtgttttacattaaaataaaaaaataaaagatttaatagtatagttgtacttgaaaagatagtgataatctattcttaacaatctttttttcctctttgttgttgtgcgtgaaaacaataaatagttaaaaatagtaataaatttatacggtagatggtttgacaatttgcctattttgcgagaggcaattgatattattaaattaagtaggaaatatataaattacagatacagattttttactaataatatctcttaaagtgttttcctaaactcactaaagtgtttctccaaactcactaaaaatgtttcccaaagtttcgctatacaaatgttctttctctcagaaaataccataaccacaaccatctaaggtctcaaacaaacacaaatccaataaaaaataaataaacacgaagacgaagatgaaggaaaattttggtgggcttctagtcgggcttggagacgaggtcgccttctcggtatggacggcgcttgtcggcaaagatattggatacggaggtttggggcctttggttttttcaacgctcgagtgttatggaggtcagggttttgggcctctgtgtttcgtctaggtttttggatagatgaggggcttcaatggtggaggagaggaggttcagtagtgtagtggtggtggttggtgttctcggtgcttgggtgtgggtggtctcagtggtgcgagaaagagagtgaggaataggaagagacagaggtaaataaaaggaatagtattttggtaaaaactgaaaataataatatttaattatataaattaattagggatgtaaattttattaagaaatattttttaaaacatgtaaaatgaatttttctaattcaaaaaatgaaaaaacaacaaaaggattataataatataaagataagatttactattcatgaattgtaccaaaaatgtagatctcatcacccttatatggtatataatttataattttgtttctatatatgatgttatataatataaactacttttatatagcttaattagctataataatatataatttttgtcatcttaaatcattttaaaattattttctaatatttaaataattaaattatttaaacaaataatatacacatgaacaatctattctgtgttgagtcagttcattgtaactgttttattttctttttccctttcttttatttttctgttaatgttagttagctggtattgctagctatatatattaagctctataaaattatgttagttagagttatgagttgtaatcagagatttagagagagtgagttctgtaaacaccaattttattggaataattacataaggcactattttttgtaaaatatttacatttttatgttcaaagaatgtttttttacatttttacggttttccaaaaaataacacgaaaacaacataaaatcaacaagaaaacaacataaaagtaaca

SEQ ID NO: 305971 - DNA, 650 bp, Cannabis indica
atccaatattttagattcaatatgtattgaattagattgaatccatccttttatttatttattacaataccgactgaaggacaatatgtggccaataccgactgattcaattacaatcgaatcgactactaaatattagaaatacaattgtaatcggatcaaatttgatgttatttcaccttttatagacttaattattattatatgatttgtgaataaattttttatacatattatatgtttatcgattataaatattaatgagttgtattaattacggaatattatctttggaagaaattaataatatatatttttgttgcttttcttctaattttgaattttgatcactgccttttatttagatttaattaatctaatatattaatatgtatctccaaaatttaatgtccgcaattttttttttctttaattttttaatctggtgatacgaattctgacttcactaaaatatcttttggtcaatttaatgagaaaatatttaaattttaattaatataatacagattttatgtattaatttcatataattaatctaatttagtatataaaagccatatctaatcatttttatttatttatttcatttgagaaaatctcaaacgtagtatctttcaatttaaataaac

SEQ ID NO: 305972 - DNA, 1072 bp, Cannabis indica
aaaggggaacttttttaatcatcaaaacacaaactacatgcatggcaactctattttattaagagtatatgcacaatcagaaaaagatcccaaccaagaatgatttaagcttcttaccaaaagaaaagtatcacaattgacgttgactatgtgacagtcagtaatcccgtgatctataaagagaaatactgggtaaattgtgccatcctattttgcttagaaaagatcaagtgtgactacataattgaagagggcttaaatgtattgattgatactacctatacctatattaataatctacatcttgttttctagtagaacatcacaaaagaactccacagttaagtgtgctggactaggagtaatttcaagatgagtgaatactcgtgttgatctgtagttccagttatcagtccaaaaaacagtaaaagtaatatacccgtgtataagagttataaattcgttgaaaaatacccaatagagacttgaaagtgttacaggctatcattttgttttcttgcaattctcatcttcaaaatgtattttggctagatcattattttgttttttaaataagatttttcttacaagaaaagttatttcttaaacattttcatatgatgactagtaatagaagtcaaatattgccgctgtcttgattaatcatgaatttatggcttaactacaccacttattatgctacctctcatgttgaactcaaaattaaatgagttttgtgaggtttatattaggaaatttacatagtatattaacttttgttaattttttacaaaaatattatttagacggtatttttacttttttattgtgctttttgataagttttatactgcaatatactgtgttaagtttttactattattctactggtgttttttagttattctactgttgtttttgagtttgctctgtgttgtgttttactggtatttttaaaaagatttccgtgtgagtatttttgtaaaaattaccccaaattctaatatatttgtaagtttccctttatattacacttatagatcttatatagaggcgaccctcaatacactag

SEQ ID NO: 305973 - DNA, 1170 bp, Cannabis indica
aaaacccaacatgtttgacatgtggacctcactaacaaagtagcaaaagtctaggacacttcaggaatgcttcatgaaagaatgtcaagaggccagtccaattcatggctccgagacgatctcaaatctagatgaaggtagcaagcttaagtgactcttgagccacgaaggctaggggtacatgttatccatgttttcgaacaactatatgtgggccattatggaggcccaacaagtaaaccaaacatactcattgaatccataagggttaattactcgacccatccatcaaggatgggtaaaattggacacttggtctagttacctaaagatcagtgctcaacaatgaagctaaacatcaagtcccagatcaacaaccaacacttaacatgcgaaatgacgtgaattaaaagaggatacccttaggggtcatctgggaataaaatacgaaaggacgtccaatcagttagtgtctcaggagctacctgtgtggtacttctctaacacgatcccgagaaatcaggcggcttgtcccttgtgtcagaccttggaaaggctcacaacaaaaagaaaatcacctttttgagcaaaaacccattattctgacacttcttattccccgcgatggctcacgcccacctatcactgttaacattatgactgtatacgaacactcggttaatctagattgggcctcacctactcggtccaatagctcaaaatatgttatattttctccatcagtgggcattttttactaacaagaaccctaacgggtttgggtcagcccgattaatcaacaatctgcctataaatatggcttttacctcctttcatgtaagaggttggagattttagtgttcaaaaaactataaatacaatgtaaaactccatagccaatagcttaataacaatgactcattgactaaagtaagttaatagccaagagcttaaccacataaaaaattaacatctctttttcttctcaatcaaactttctttagtttaatatatatttaattcaacttccgaaagtctcggtaaatactatgaggttgtttggctttacagtttaaaaagtgaaaacagtttttaaaaactattaggagtcgtttggcaaaaaaattttaaaaactgttttttaaaaattgagttttaaaaaactagaaa

SEQ ID NO: 305974 - DNA, 1485 bp, Cannabis indica
aaaaaattgtatttacattgtgagatttacaaagacaagagatcaaaattaacctcaaagtatccaaataaaatgaagggatcatgtaacacataacaaaacagtaacagaaaaaactactaaatgcagaaaatttaggaatcatatattttgtcagactgttttttcttctgtttttatgtttgggtttaattttttcaaaccaaaaaacatatattttacagggatggacttatgggttggatggaccacttgttaaagctactagaatggcaggaattcagaactttaatgaaaatgtatgtggtgttattgtcattgcaataatttcttatgaaaattatctaattttagtgacaatatctagcttgtctatttggcaatggtgagcaggaatttgggctaattccaataagagtagctatatggggaccatttgttcttcttaatatggatcaaaaagttgacagtaatataaacgtgggagaagaatggcttgggagttgctcagaactactgactaataatggagttgattcctcactaagttatatttgcagacgagaatataccctccaatgtaactggaaggtatttataaacttggttctcatgaatttatgtggtatgataatgttcttctttgcaagccccattgctctattttgtatggtagttcatcaaaaatgtttctagagaaaaaagaagtgttggaccatatagtctaacgaataaataggatatgtccctcataaactattttgtttgttgcaaaaatttcccctaaactataaatttcgttacaaatatcttctgcagttgtattatgctcatttctttaaacaatcgattgatgtagcacgagcgtgttgttaatagtccaatttaagagtctaggcaaaaaatacatgcataatagtaatttgatgatgaattatggggaatatgtatatgtattcttagaactaatatttatatgtttaatgtcaaaaaactgaatttcggattgcttaaagttgttaaatagactttcatactgcaactgtactagtaactcatagtcacataagtaaattgttttgacaatgagttgaatgtaattgaaggggaatgtttgcaacgattcgtatagtttggagggattttcgcagcataaaaaaattaggaggcaaaactctataatggttataatttaggggaaaaaatctatttattttatttaataatttatttatttatttattatcttctttgtttggaagattctcatgagtgatgatgctttctttcttttgaattgctgcaggtgttttgtgacaattatttagatggaggatatcatgtgccatatgcacacaagggccttgcaaatggtcttaagcttgattcttactctaccacagtatgtcttgctatccttttattatctggaaatatcgttaaggtactgcggagtaaggttgtgtttggttggaggtaatgaaa

SEQ ID NO: 305975 - DNA, 3725 bp, Cannabis indica
aaaattacaaggaggccaacatgtatatggtattgccagatccaatttatgcagttgagtggagactggatgaggaggctgtaaggcatgttccctaaccattatcatcaaaattggacaagtgtatcctgaaggagttgccatctgacagtgatttagtatcacatgtttttgtcaatctagttggccatcatgaccctaatgataatttcttcaacaagtttgtgcagtggggtaatttagcatcacagtggattgatgaacaagttgaatctcgtaagtgcaaccccaacctggtaatattgtgcctgagacagtgattatatcatcatcctcatcatcagaatctaaggaagatgatgatgatattgttggaaatcatattttaccaggatcttacttttactaaataagtatgttgattaatactaatctaacatcctaaacatgaaactttaaaaataatttaaataaacatataaaagattaagaaatcttacaattgtgcagcataaattatgactcattccatttgaattctctaactcttgttcctttctatcgtagagtattatcaagaattcaaacctgaatattcttttgatgtgagagtgtacacagtcttccacactaacctgagtactttcttgatttgagtgtgcaagtactcaatacttgaagcacacaaaaataagtgaggaaaattgtttgtatatactataaaattatatctctcaaaatcttacctttctgactataatctatgatcactcaaaattgtatacaccatatatacagttgggtatatgcgtgtagactagagaaagaagagatgaggaattcgaatcctctatagtcatttgaaacttgtatctcaagtttaaagatgaagaaatgtgtagagaggtgtgtataactgagagctataagggtctatttatagtaatgtcttagggttaggattagaattaaatggacttaaaaaagatataaaatggcctttaatttgaagccttggtggaaccctataggaaagcccaatggtttcatattttccattttaattatacttatctttttttcaataatactatttttttattctaaacatttaaatgttaattttgtctattttataatcataaataattattgaataaaattatcatttaacttgtttattaattagacttagtaaagtctcttaattcataaataaactattaatttcctttttagtctcaaattcatatttgcttagtagacttcacaaataagacctagtctcatttagaattctaattgattatctaaaaccaattaattgagtttataagaaaatatgatcctaggtagtgtggggaccatggacctatataatcaagctctcaataaatagttctagaatttactaagtaagttctatcgtattaattcttcttgattcttctatagattcgaaatgacactcttgattacatggaacgctctattctccaagaatagacaggctattaatcatccgttatttcactttaaataatcaacgatcctctatagattgtctacattgaatagggactaaaattatcgtgttacccttcaatgtattttatccctaaaatacttggcttcctataaataatattttgagaaactaatataattgtcaaaataagagctattacatttatgtctattagtcaagctctaaggagacatcatttcacttctatccagttatagaagctatagattccatgtctatgattagcgctcccactcaaatatactaccatgctcccaagatgtaagtattgagtcaaacctactggtaggcttcgaacacacaaatcaaagaacaagaataacacagttaaaccagaacctgatcatttcaggattaagatcattgatctaagatcaaatattagagatttacctagaaaagatattacggtaagtttacgatatctcttctgttataaatatcggtcaaattcgatgtatagccaatacatccgatcttagcttactccactaatatcttggaaaagacattctacttatccaagtgtgagtaaataatatcattgattatcacgtcagtataaattctgtgtactgataaatcgtgggactaaaattttgaagcttatgatcacgattattttctaatgtgtagacaacacaataatcatgattatctttaagttttggatttaaatagaaatttattaaatatataatcacgaagtaatcatgtgaactaagtaatataaagtttgacttctatatcattctttaatagtcaataagattaccatgagatggatttatttaaggcataaaattccaacatactccgattcgcactaacataaacaaaagtgcatctctctaaatcttataagcttgatgtataaatcaattgtagtgcatgtctttatctttgtcaatagatcctaaagtttgtgttcatcatcaaacttttctattttcaatacttacaaagacttttattcatattaggattcaaaatctctaatattgggtaactctatctgtgtttaccttttggtgactatatcactagaacaaattcaaaatctatatttgaatctttgtaagtcttaataatcttctggttgcactaagcaacactattatttagacaaactgatggactttagaactttcaaagatagcttttacaccaactttgaataactgctccacccctagaatgaggtatttcttaattatatattatcttgcaacaaatacaaatctatgtttaaaacaggtcaaatctaaaatttgaagaattgactggttatgtctttattttccaatcttgaataagattcttttactccttattcctccaactcaatagtaaatttctggtttgagtatgccaaatcatatttaagacctcttactattgatctcttttaagagttacttttatggtttatcatcattcttgaaatagtatcaactattccacgatgacaaaaaattctaattatggataataaattatttccttagggtttactgttaaaattactctttagccttttacaaagtaatatgcatatggaaagaatatttttatctcttctcttttttgatgattctaatttaacattacattgaatgtttgaatatcatctatgagaaacatcaaacacattgtacagtctttaatgctaaaataatttcctcaagtcatttgacttatcttggaaacatattttttatcttgaaacctttaagcattaaggtctaatcatgtaaatgtttagaccatagtcttctagactatagtttgtcattactagtatagaagactatagtttgtcattactagtattttcttagtgacatgagtaaggtttttacaaaccctcccactacttcaaaatactatgacagtaaaggagatgtcttagttgtttttaacaaacatgagataacgtaaatatcgtattcgattgtaaataatgactaaacatccatggaataattctacttactaatggttaaagaaagttgataatcatcccccacccctaattaggtgtgacagtcagtagtcccgtgatccgtaaggggaaatactgggtaagctgtgcaatcccacaccgcctggggaaggtcaagtgggatgattctgagactgtgtaagtatgggactacacagttgaagagagctt

SEQ ID NO: 305976 - DNA, 2176 bp, Cannabis indica
tttttgatgtgtttacaatatttttgtagaaaatcctaactttatactctcagtatctcttgaagaagaagaagaccaagagtaatattagcagagttttagctatgtaggttgtattacctccttcgtttgagaatcgaagggtatttataggctaagtggcgggtatggacaaactcatgacccacctaagatttttgctaaaaacccattactagagtaaattacatgaaaaattagagctgactgttgggtctcgttggagacattatgctcgtgcgtgctgcagctagataatggggaccattttatactatatggacacgtgtcatctaaaggttcaaccgttcaaagtagaggccatgtgtcgcctaaagttttctcctttacaagtaggggtttgtaatactcgcctagcaaatatgcggtggaagtgtgcgtattagcatgctcggatgtgggagacaagcataactgtcacttggtgatctggcatgcgtaaaaggtagacatccgcaacactccaaggtggtcgacattcgcattaggctcgtcgagtacccatccaggtattgtctgcgcaagcttccatgtttagatccctcctagtccgggagaggcaatttgccttccgcgtcttgaaaaccaaggtagggtcgagcaagcttccatgtactcttccatctcgacctattatcggtttcaagaggcttctccatggccgtattgcatcaaagggtttttaatttgagaattattaagttgatcctcctcattaaatgccacgtgtcatacatccaaaaacacggataacatttacccctaagctcgggacgcactgcagtttgagagcttacaattattttccgctccttggagataagtctttgacacgtggtatttgttaggatcgcgggtgtatcccatgagctattatcgagtaaggggtcattaaccgtaggtaccattggtgtggcatgcatccggcacctttaatgaaatcgttagcgacacgcgtgttgagggcgtgtttcttgggcggagttgctctgatggcaggatgattaatgatccctccttcaatgcaaacagtacacgagacgtgcaatgatgaataataaacgccaagtgtgagtattaaatgcaatcttttcaacttcgcatccatcaaatcgaaagatgctatttggaagaagagatctgaaccatccatgccaagttgcaaggatcctgaccgaattgactcgtgggtactttaaaacaataaggttttcccctcgttttgctcttgtagcttctagctggagccatggctaaaacaagatccaagatgcatggaaagcctacatatgcaatcaagaaatcaaagaaaaatggaccaaattttgcttctaatgctattcgaaccaaatctatggatgttgtgattggagttgctccttggagcattcggaggatgaggaagatgacattatagaacaacaggggagaaggagtgtggattcaaatcatgctcaacacgatctgttttagcctccactgtctcctcgagcttcactgcaggagattcaaaggattaaggatgcacgacaggacttcatgaaggtcattcgagctaatgagcaatgtaacaatacacttgctcaaggtatgaaatcgactcccccaatttttttaatctgcttttgtagttcgttacctggagaactctttgaagagttctggtagttgtaggaaaatgaaaatagagctggaatatatcaaagaggaagtgaatttttggaagccttctattgtatgctatgttctgggatcgaaccctctattgtatatcttagaaggttttgcaaaaagaatttggaaagataaggtggatagggttcgaatgcttgcctatggcattttcattatcaggttttgctctgttgaggacagagactctattttgaatggaggttacatcttcttcaatagaagactggtaatcatgaagccttgggaccctaacacaaattttaagaagtaggatgtcaagctcattcctatatggatacaacttgaatatttgaacctcaaatactggggacaaaatgttgggttttgtgccctaaataaaactaatttcaatataatcagatttatttattaataaagatcagaaataacattttatgtt

SEQ ID NO: 305977 - DNA, 2078 bp, Cannabis indica
taaaactaaaataaataatattaaataataatgtatggcatcataataataaatttaaagagtatttattattagaatactttaaaagtaagagtgtgatgttaaaaatatagaaaataattaaaatattattttttcaataatgtggaaacaaccattgaagatactctaattagaccatcttcaatgcactattttggtctacattttttttttcaccataagaaaaatggaagaaaccatctttggatagatataaagctcaattagtttagtagctaaagaatataatcaacaagagggtattgattatacaaaaatcgattaatgtcaaattaattttggctctagcaacaataaatggttggcatctccatcaagtggatgtcaacaatatatttttacatggagatttgcatgagaaaatttatgtgactttaccttaggggtatagtcctataataagggggagattctacctcttaatctagtgtgcaaactctaaaaatctctaatggtcttgaacaagcctctaggccattgtttgctaaattttcaagtgtttttctttcttgatgaaggatacacccaatcagtcgaatcattccttatttactaaacatatacttatgtcactttcacctcattactggtataatgttgatgatgtgatcattaccagtaatgacattgctaaaattgatgcactaaaaacaagattaaatgataggtttcaactcaagaacctaggaaattcgaaacacttcatgcgcattgtagttgctcgaacaaataagaaaatcctattttctcaaagagcttatgcactgcaattgcttagaagagtttggcgaagttggatccgggccaatcaatacggcctataaagcctaatttgagacttgacaataaaaaatgtgagatactgcctgatgttcagaaatatcgaagggttgttgcgaaactttagtaccttataaccataattagacttgatatgcagtagataaattgagtcaatacttgattgttcctcgaatacctcacatgttagatgcagaaagacttttacaatatgtaaaaggaagtcctgtacatggaattttattttctacacattccaaggttcaacaatcactgcttacacaaatttatattggggctcatgtcaagatacacgaaggtcaacaataggtttttgtgtctttcttgacaagtttcttatctcctgaaaaagtaagaaacaacaaatattttttaggtcttcggctgaagtagaacagggtcggcccaagcattgggcagcttgggccattgcacaagacccccattttttaaggcccaattttttttttttaaaaaagaaaaggcctatttttcttttcctattatataaataaaaaattaataattaaaaatttatgaacgaatctttaaaaaaaaaaaaaaagctagtaataaaattgtagttttaatgtacacaattttttttttgtaaggagcccaattttaaaattttgcacaaggcccccaaaatgcttgggccgaccttgaagtagaatataaggctatggctaatataatatgtgaaatcatatggctcattttcgtgctaaaaaagctcaaacaagattatcttattgctgtggaaatattgtgtgacaactaagctgccgttcacatagttgccaatccattttttcatgagcgcactgagcatattgagatagactgtcatgttgttagagaaaaagtctgataggaatcctcaaaacttccaatatctcaactcaagatcaaatgacagatttacttaccaatgcaccatttcctaaccaactaaactacctcaaaactaaatgagtttaaaagacatatatggcctaacttgattagaggaagctttagaatagcttagttggtataattctattacagtgctgctatgcaagtaaggttgaccctgagtttgaatatgccttaggaaaaaaaattagatttttattataagaatgaataatatttttaaaaattatttaaaaaaatatatttttaaaaagatatttttttttatttag

SEQ ID NO: 305978 - DNA, 1550 bp, Cannabis indica
tttaatttgttactaggaaaaatttagtttgagtaaagaattttttttagtgtaagtttaatagtttagaaaaaaaaaattaatatagtttattataatcttagtatagtttaggtaatgtttaatttaaattttaaatttacaatatttatttgatattggaataattaaaaactttgaattttttgtgttgatgtgtttgcaatatggtaggatattatttgcaagtcttacgtgcttattcattaattatattttaaaatgtgacggtatattattaaatatttctttggaacaatactagatgatatttgaagctgagatcttagaatttaaagagtgtatttcattttataaacactttttttatttcatagttaatgatgatagaattagaattgagtataaaattttgtaaacctaaacaagtacactatatatattgtatttatatgtgttgtgaataatttttttttatacattgatgattatgattttgatatgatgttaattatgtgaataaaagataaaattaataaaaccatttctatatagaaactacactagaataaattagtgttatataaaataatatataataaaaatgtaagattattaaaattttaaaataatacaaaaaatgggttattatattataggatagaatttaaaattgttgataaacgacggttttaaactatgccctatagtataggcgacaattttaaattgtatcctatatattgctcgttaattttacgacggtcgaataggtaataattataaaaatcaatgaaaaactatttttttagtaatgaagaatatatatatatataaatatatatagttaataatagtaatccagatgtgttaacaacttgaattaaatttgattactttagttaaaacaaaaagaaattcctaagacaaccaaaaagtggaatttgataagtttgaggtttagaagcttaatgaagacttaaagcactaatcaatttcaattacacgttgtggaccttaattgagtggaatcaaaggcaataaaagttgaaagtgattctatatgttataaaaaggatctatctgctttacaatatttgctttttattatttttattttctcttaaaaaattacttggtattgtatagaaacaagggttgtctttttcatgatccattttttttagtaatagacacatttttaatgtatatatatatttagctatacaataatgaataatgtataacttatcctaattatataattaggatgatatcacttatacttgaaaatattaatgacaggaaattcctacccttgcccaaagttaagaagaaaaaattactgtttgttctaaataaaaaagacttggtgcagcaccatatacacaaaacctatcactaataattaataaaggcgtgtaaatgataaaaacgaacactaataatgtgtaattcgtgtggtcatagatttgaattaagcttccccgttaaaaattggtgtcttatgttaaaccaattaaagtttgacacatcaactaatctaattt

SEQ ID NO: 305979 - DNA, 2197 bp, Cannabis indica
gttttagggtttatatgattataatatgaaattatattttgtgtattttgattttattgtttttgatctaaaattgattatagataactcattatcaattgtttaagattgttcctacataattaatttcggatttaaactaagattagcattacaatttttttttgttgtgttcttcaattttcggattgcttttgtcatgaaatctagagatttaacctttaatacccgaaattagtagcgtagatcaattagaaattcaatcccgagcaaaacccattgttttcccgatgttgtccgtcgattttttggccggaaaactgctccagacccgaatcggaggaaccgggtcgcgtgacccgactgtggacccgctggaggttgaagacaactcccagccgcgaagcccactcgcgcaggcggcgcgtgggggcgcgtggggccggctgggaggtccgttttcgacgatttttttttcagcgttattagaattaaattagtacgaatttgttaattttcaatctaaaaattttaagatcaaataaggggaagatagattatagtgatcattttaggcttaattttctataaattaaattttatatataaacttttagaatattttatttttgcttctataaaatttatatttttattaattatattgttatatatatttatctttattcatataaattttatatttttcatattatcccacataattttattttacattacataattttactttttttaatttttatcttaattattttcacataatttaatttttatatctacaaaaattatatttttcattattacctttttaataattttttttgcccccactaaaaaaatttatcatgtgtaatacaaattaaaattaattagttctagaaaatgtgctattctctttatttatataaaaaaaaagtgatagctcttttcatcaacttcacgcaacactaaatatatttaataatacgtaattataaagaggggaacatacatgattatttatacaatataaaaagaaatataatttatattaataataattaaattggaaaattcaagtacaatatatatttgatgaattacaccatacaattaggagttgttgccaagtcttaatcttcaatcttccattattaatattaattagttttggccggtgtgtactcaaggaaataaaaatcacaataataataaagcacacacacccaagtataataaatagttaccctattgtatatatatacaatactatatattataatggccccataacaagactttaggtttatttaattaattcatttcatttttttttctattgtttagtcagctgtaataattatatgtatatatatgcacatatatttttgaaaatcttaacttgttttagtggtggaaattaattagtaccctcccattaataatccattttgaaaggaaccatatataatcgacgtgtgtatgcatgagattattcatatcactttatatatagtaatgcatttggaaatttatattttatttcactgtaaatgtttctatataaacatagtgaatagaagtcatgagaaaaagttttctcaatagattgaagaaggaatacaagtacactatatatatatagcagcttgattccagctgctgtaactaattaaatagttacatgatacaactgtacataactaactcttactaatacagttcattcttaactaattcttcttctgatactgagcatgaatatcaaataatctcatcttgtctttgagtagtttgatcaattgagctggaaacagaggcttagttaataaatctgctatttgatctttggtgaaaacgtgtaagattttgataatcccttcttgaatcttttcacgcacaagataacaatctatctttgtgtttcatcctctcatggaagattggattagctgcaatatgttgtgcagccttgttgtcacaatgaagcattgtaggccctttgtgatcgatctttagataaaatctacactatttcctatgtagtgtttgccataactctgtactctactttagcagatgatctggatatggttgttgctttttactttttcaggacactatggatgttccgagaaaaacacaaaaaccactagtagactttcttgtatcgggacaaactacccaatactga

SEQ ID NO: 305980 - DNA, 3496 bp, Cannabis indica
gtgggaatgtaaaaacaaacctatgtttggtatagttttagtagagggctttttatttttggggttatctcaaatgcttttaacacttgagagtttgagatgccttaattttaactcctctcaactaaaacccgccgagtaaaaactcttaaaccaaacaccccacaagttttttttaagaaggttttccccaagggccttgtatcttgtttcagccaagtctgtgatcattaaattggatctctgagggactagtatcttgttttggccaaatctttgggcattagttactaagcatttgctattctgtgatcattgcttgaaggtactaagttttactcaatctggtgtgttcattctctttaatcattatttttcatgcatttcatatggtgtaggatcatggctcagtttcaaggcttcaatttttgaagaaccatttcctgttggcatcaataaacaaatttggacaacttcattatcaggatgtaactatgggggagatggtaggtaattacaagacggggttaggccgaactgatgtgatgcaagtgaatccattcaattcaatgccgttgttgctttgggtcattcgggtggtactgttagcatgtggaagcctacaagttctgctcctcttcttaagattttgtgtcagtacattagatacatgaaccattctatagtgaaaggataccatatgaagatgttttgggcataggacactcgatgggctggtctagcattctcatatcaggttctggagaacccaactttgattcttgggttgcaaatccattcgaaacatctaaacaacgacgagagaaggaagttcgttctcttctcgacaagctacctcctgaaacaatcatgttgaatcccacaaacattggttcagtgaggccaatgaagaagaaaaatgtaacgaaacaggagaaagaggctgctattgaagctgccaaagatactgagtttaagtacaaaacaaaaggaaagaataagccaagtaagatgttatcttgattgcattgtaaatcagtcctttcctattgatggttttccatatgttttacttgtttgaaatgaattaaatctaaatcaaaaatcatgctaagatgatctaattctaatacaaaaccatatactatttatgttcagagcaaactgtttcattattttcaacttggaaagaacattcagagaaactaaagaataaaattaaatataaaatataccttatttgcaatatataacataactaaataaacctacttagtctaacttggtcggaatatgtataatccatcttcaaagttctcggactcatggttggtttaacatagtcttatccttccttgcatattatagcactcgtgaatcaaggtccagcaaaaaaacataatcaaactcgtaatataatcacatattagttattattatatatttcaaatgaataaatataaatttttatgatatagagaaaaaataaaaaagttaatgtatggtgcaaagtaaaaattgaaggtaaaataaataaggaataatttaataaaatattattttttgtgaaatttttataattacgttcaaagattttttttttcttactttttaacgatgttctataaaaacaataaaaaaactacataaaaataataagaaaataacatctaaataacatctaaataataataaaataataaaaaaaaatatacatacaaaataacaacaaattaattaacaagagtacaacataaaaatatcgtattttttataaataaaattatgaaaatcataaaaatgtttgaaatttcgtataactgtatttttataatatttttttgttatttttgtataattatgaaacaaatggggttttggtgatgtattttaaaaaatagagtaaaatattgatgtgagtgctccaattcttcttctgtatccagtagggatgcacatttctcctatgaggatgaggttctgcagggattcgctcctaatggagcgaccattctccgtctaaatggagaatgaggcggggacagagattactttttgtccttgaatgttacatgggacggggacgaggatcatactctccgtctcaacggtcacccgtttagtattttttagtaattttttataatttataatttatgtttatttatattttttagtatattagtattctatgaattttaacttgtgtttttttaataataattagtttattaaataatgatcaatgtgtaatattctataatttttatacaatatttttatatatttaaatttttattataaattttatttttttattaggtgttttctcgctccatacccgctcctattaggggattccccatcccatctccaatagaaaataagcggagacatcgtgatagtaattaaaattcttgacggggatggggacggagagtgcactcatagaaaatattgggcttgtcaaagcgtaggtccaatgaaggcccaaaatatattgggcctaaattatttgggcttgaaatgtagacctagtaaacccttgtcctatataatgacacccttcgctatcgaaatctccattctcatcgccggtgcagcataggttaacttctttaactcaatcacgctttttctttcttctttcaattaatttttgttcttgattattattatttgtgagatttggtttggttgcgatgattgtaaaaattcctcgtactgattgccatatgggcatgacagacaactttacacccatagaatatgagcaccaaccatttgatttctttcattttatatatttgagttgattcacatgataataatcatggagcattttattttacccataatgctttgtggttgaacaactcgttatattaatatatgggtggtgtttaaagccctaatttaattttgtggattagggttacgcacgcctccatattctgatttgaaaattgtggtcgcacatagatcatccttgggagccatgaaaatggttttctagggttttatttgtgcgtataatgaaatatatatatttcgttctgcttgagtcttctccttggattttaatcgaatcagtggagttgtctccaatgtaaacgaattacattttacctatttactgtaattgcatagttttactgattagtggagttgtctccaatttgggggtattatggatttgatgtattgttaaggttatggaccataggacttaggattgaactataaaaatggaggagagggctactagtgtgactccctctttgagctttaccaagagagcttcaactctgccctacatgtttgataatgctcaattcaagtggttagtttggggaatgggttaacacctaaaattcacatataagccatattcatgtttgattgaaagcatggcaataataattaaatacatacattaaaatatttttattatgctaataaaattatatgttactattatatatatcataataaa

SEQ ID NO: 305981 - DNA, 1197 bp, Cannabis indica
ttattattattattattaagatattttaattagttagccaattaataaaaatttaatgccaaactgataaatcttaattaaataaatgaaacaacaaagaaatctggttgtgagttgatattaacctaataattaataataacacattattaattaatttagcatttttttatggtctacatcataaataatcatatacataacttttctacgattataagtagtcaagaattattttcaaattttgtcaaaataaacctgattttctatgtcatgtcaatttttaaataagaaattaatcatgaattaatttcaagcataaatatctattgaaaatagaaattaatatagagtattttataatcttaatttataaatattgcttttttaagaaatatcatatgtatatatttcttgaattttttagagttctctataattaagggcgtcaatgttttggatgattattttgcaaaataaagttaaaaatgactataaaataatattgtatcatactacattagtttgttttttaatgttatatttatatattattatcagggtcgatcctaaaataaaacgagcaacatatgcaatttaagtcttttaaggctcagacactaaaattatatgtataaataaaattattattagggaacgaatcaaaaaaaaaaaaaattattaattattaaaataattcaacaaaattatatgtatagtagaatggtagatcgatacgttaaagttaaatagatcaaggatttaatttctaatctgatatttttaaattctttttagaaatattaaaagaatggttatgaggattaaacctgaatttttttaataactttaattaagactaggtttggtatgaaagaaagaaaatagaagggaaagaaaatataagagaaaaaaaaaatagaaaatctatttcattcttaggttgtttggtaggtaggatggaaggaaagaaaattaagttgttatgaaattactctattattcttaaatttccaatctaattatattaaaaaatatatattatatatgtaaaaaatatatttttttctacgaatattttacagttaaagacaattaattacaaaaatacagataaaatttgtaataaaaaaaaatgtttaatgaaactctaatttcgatattttctcatatttatgtgcaccttaatttcgtctg

SEQ ID NO: 305982 - DNA, 2387 bp, Cannabis indica
attaaccatatacggtctttacagttcttgccgaggagtaggccagtgaatcaacatcacttgttcgaaccttgtaaaaccttactgtgtttgatttctttctcctacttcaattgctcttaattgcttatttatgttagtttaaattttggttcttgccactggttattactggttttataggcttttgttcatagctgcactatttgattttcaattactttgttctgttcttgatcattttctttgtcttgtgttgtttgcgaggtgagtgatcatgtattgatcacatcaaattaatttagaatttggtgtcaatctaattacatgatttataaaattaaaccataattttaatccaactacagtgaagaaaataatactttaaatctcgaatcgacgctcttaaagaatcaattgcctccctttcttggtctattacttttagatgacttcttcaagctatgaaaaagagattagattttcataaaacacacgatgaagaattaaaattatattgtgttcaagatctaattgatttagagaaagacctaccaaagaaacacattggctacttcggaacagaaagagagaaagagatagaacactgactagtcaccatattgccagaggtgaaggaagacgcttgagaaggaagacatagtcaacaagggagcaggtacgacacacgagtcaaatttggtctgatatggatttgataatcatcaattcgatctaggattttctctgctactttgggtattttaatttgtgggcttagagaagacaagaaaagctaataaataaaaggaaataaaatatccccgataaactattacgaggacatgtccacggtataggaaattttttcaaaaaaaaaaactacaaattactcctgtgtgcaaaagtactaataactatgacaggtcctcgatatatctcttctcgttacagactcagttttttttagtgacagctacaacattgactgtgtaatacacttgcttcctacattttcacaccttactccatcgaatccacctgagtaaattttgaacattggttgttgaaactctccaagttagtcaagctttgagctttgttaaataggcgctgctacacggatacaaaataaataaatgtgtaataattttttcatttaatccataaataaggtaacaatcatccgtgcttatattgcatttaagtagcttatttttggtcagttttctgtcaagcatagctaaccagagaatgagcttatgtttggaaatacttaatctttctcaaacacttgaacaccaatacactttaacctgtgattacctcaactttacatatcatgtatcaattcaatatagttaaaaagtaaatgattgtacattaatactatctttgaaccaatttttgattgttaaagcatgtaatcagttagaagttggttagaattctgttagagttcgttagtgttagttacagttggtgttttacttggctgttccagctataattagtttcactttctattagagattgcttctagttaatgttgtatataatggttgtgctcagctcattcaattgaactcactttcttttcctttgtcctctgttttacctctctttgcttctctttgtttctcttcttttctttcttgttctctttcatcaatcaagaaagtttaacatggtatcagagcattttccgccattaatggtgaacattgtcactggaatctcgaactccaacaatggagttgccttaaaagctaaaaatagagacacaaatgactcttcgccaataatgttcaacaacactctttcagtaaggcttaatgatcatacctatcttctatggaagcaacaagtgcttgctgcaatttgtggaaatcgacttttgcaattcattcaacacactactccaccacctaagtttctttctgatcaagatcaagcttcaaacaacctaaaccctgcctttgtcgagtgggatgtccaagaccagcttcatgtctcatggctcctatcctccatgtcagagaatcttctaactcgcatggttggttgtgagacctcaagacagatctggaaaacactcaaaaaatacttcaccttgaaggtttttgctaaaatcctagagttcagaaccaagcttcagaacctcaagaaaggacatctttctttgaatgaatatctttgcaaagtgaaacaaacaattgatctattagcatctgttggtgaagttttaactgatcgagatcacatagctaccattttcaaagagctcccaagtgaatatgacacatttttcatctccactaacacttgtcttgaaggttatttcagtaattatattagtttattgaaatatcatttataggaagcta

SEQ ID NO: 305983 - DNA, 1452 bp, Cannabis indica
ttttaatatttatattattaatattaggtggatcaataaaaatttaccgcgtgtacacttgtgtacactgtgatagtctattttagcactcaactgactaaaatggacgaaaggagtacaaagcaaaacgattgtgaaggttagagaatttatctataattttttcaatttaaaagtttaactgtggcaaactttaaagttcagaaagtttagcatcaaattactcttttttttttaatatttattgtcatagatagttttatgtgagaacacatcacttttaattggtaaaattaattacacattttaagttaaaagagtgtataatttgagtgtatgtaacaatcattgcagcattttcaaaaattagtattctacggaataatatttcagactcatacgctaaataaaaaaataataataatacaaatttttagcagttaaattctatcaattatcgtttcatttgtacttaatactctaattttaaattttagcgataaaattctcgaaactatggttatgctttcttagtttattttctttgagagagagggagagatatgccttagaagacactacaatccaataagcaataaactcacaaaatggacctataactaaaaatatcattcataattggcctcagccaaaatatatttagtgaactactaaagcaatagagaaagctaacatcataaaaaccattacaagaactaatagtatcttataggacatgatcaaaagatgaataaaaggaacaatgagattcaaaatgaattttataaaacccaaataccgtgacttcatcatataataatcacactattacattacgtaacaaaataaataaagcacaatatttctatacttgataaatagataaaatggacaacaacaaagctcaagaataattatattgatctttcaatacgttttagttctttggtagacttgaatcattagtggtctatcttctctaatagcttcaatacatctcaagcccaatttgagaaaatcttcaagttgttgcacttgctcttccctaacattttctatgcccctaaactcttcccgaatttcagtgtcaacaatttcattgaactttcccgctagctccaaccaaatctttaacagaatcacaaatattatcaacgaatataaaaatttcggctaatgagaagaacaagtagaaacactccaaattataaacatcactcttttcgttaacattcccttctataacactccaaaagtgatttatgctacaattttttcaaactgaaaagataaaatatttatgccccaactaccctgagaaattataatataaaagttgaatgtatgatgcagataataagaaaactataacaattaaaattgtagatagaaaataaaacaaattagcaatacaaactacaaattaatatattttctttattttatttattt

SEQ ID NO: 305984 - DNA, 965 bp, Cannabis indica
tgattacagactcaagacaataccaaagacataaacacagaagtagagtcgaacatactcttctctacacaacaaagacattctttattaataatatgaatgaaattcaaagtgaataaaagatctaataaacctagctgctaatatgagtatttataatcattatattaggcaacacatacacgatttagacaggagcatgaatcacaagaaacttccttaaaacatatcttcaatcaatctagaaattttcgattttgtactttcagaatcgtgagtagtaagtacaattttcgttttatataacaaaaagtgaatgattttcttcaaatattaaaatatttgatttcttcattaaaatttactatttatgtctaacttttcaaaaaattagaaaagctagacacttaatacacactattaacgaaataaacaaataaaatatttatatggaaatacacaaaacatctttcgattcaagatgaaactattgaacatcttttttttgcttgtaaatatagcatggattgttggctgaaacttaaagattggttagcatggaggactaaagacgtggatataccaagcatcattaagtggttggctcgatcaaaagtttcaaagacaaagaaaaattagttatggcagctgtcatagctgctcttgtgtgcagcttttggatgaacagaaatgaaattttgtggaatgataaatgtttgacagttgatacacttgtaaaaaaaaaagtaaaatatgatgtcaaagctaaacttagtttagtttttaaccaaaaaaaaaaaaaaagtgagccaagtggatagagtttggattaaaagattgtaattagttgccaggcttttcataagggccagatagaaattgtaaagatgtttagagaattagttccataagaaaaaggaaaaatgtttgttgtttcagataaaaaaaataaaaaaattgtttgt

SEQ ID NO: 305985 - DNA, 1153 bp, Cannabis indica
aaaatctcttttactctctaatgcattgatattgatatagtaattagcctatcaatcttcaaagcaaggcaatatgagagtttattttctttgccaatgtaattaaagaaaaaaaaaatggaaatagagtaatatatttgtcaccttttttgaaaaggggtatttttatatgtatgaaaacgagatagaattttgtaaggtaataagaaaatgagaattattttttttggtgccaatgacatgttctatttgtttaaaggttttagtgtagtccaaccattaataaatggatccattgttattttattattatttggttcatttgtcaatgtggaacaacaagtggcattaatgatttgtggtcattgtatttgtacattttgtattttataaaatggtgttgaactttgtatggttgaagccttgaattgaaggcattgaagaagttggcctagttaaccataccaatgactcatgctagaataatagttcaatgtgctcattttacatcatctattatatgttccaccaataatgggtgacaccaactcattggtatggtggtatagtttattttgtgcagtagcattgttgttatcggcacattaagatttatttttaaaatatatatattaattattaaactaaaatatgtaaaatttaatattaaatcatattaataatgatatgatattttatattctaatcttttgttttttttatcattgttactaaacacaattctttggaagatttaaaatataattgtgattcaagtgtaagattaacttaaaaagttaacaaaatgctttaaatttttactgaaggtatataaaaaataagttatttgcaaataaataattacctaagtttaatttctagttgcaaataaatactaagtttaatttttggcagtaataatactaagttataattttggaatttctatatatacctggttaagtatattgccacatgacaatcctgattagtccaagttattaaatttttattatttaaaaaaaataagttcaaatataccaataagaaaatagacatgtggatttaatggcttaatatttaatggttttgtacctacagagttctagaaatataacttaagtattattaccgctaaaattaaacttaggta

SEQ ID NO: 305986 - DNA, 1151 bp, Cannabis indica
aaatcacgtaatacgcctaagctagttagggtgttacattcctattcaagttataaattagttatattaactgatttttaatcattccatgtggtcattccaggcagtgatagcacaaaccttgggtctgagacaactgatgaaagagaagcaaggttagctgtccagttttccccaattaatgtaaacaatatttagaatgtagtggatatacagagaatcgatactaattgtgaaggagaaaagaatatagtcgttgagggggttattggagagtcatccaagaatgtggcccataacctggaaggcccatttgcttttggcccagaaaggaaaaaggccccattagataaaagccaagtataccaaagcatctttggctcccaagcccaacctcttaagtggccttcacaagaatgttggaacctagcttttgatcaacttttgggcgcaactactcgagacaagtaccaccgtgagcagactttgttcaatccaattctggacatcgaagatttcagatgttatgaagcggagcatggccctaggaagcgcaaagctatggatggtttctttatgttaccagccgaagatagttgcaactcttttgatactcctttgaagattaacgattcaaccagctctcctcaccatgtgcaacagaatttaaataattctcccctggatactggatgtagtttctcccctggctcgattgagaaaaaagtttcaggccagaaaagaggtagaccgagaaagataggtgacacagatccaatcgaagttaaatcatcaaggagaagaggaagacccctgaaagaggcagcgtccttgtctgcgaaaccggtcagtctaaagaaagaaggaaaaggaagaatctcgaaaaggataggaagcactatagtgatccttggaatgcttcggcagtggagcttgcaattgatttagataatcattttgtaataattgacagaaacccaaatgctaccagcagctgtgtaatttcagagatactggagaatgaagatcctcaacaacagtccactgaggacgttacaattaccaatgaaaaaaccactgcaccggttttttgctttggggctatggagacttgccctcaaaagtctccaaatgctcaatgaagattattg

SEQ ID NO: 305987 - DNA, 4273 bp, Cannabis indica
attattaattatatcaatctattcatgaatagaaagttgaataaacaagttgtattctttttttttttgtctacgaaaattcacgtgttacaatttattttgtcagtttattcattttttatttgtatatatatacggacttttttaaaaaagtatatcatatactttaatttgaaaaatgtgttttacattttgtcattttttttacattctcatgtaataattctacaattgaaataaatcatttattttaggaataatttaaaaaaaaatgaaaaacaacaaaaatattataaaaaatagttgtacaaaattttaaatattttttacgatttttaagattttatttacataaagtatggtcttttaatgtatttttatgttgtactcttattattttgttattgatttttttatttgtatattattttttttatatgttgtttagatattatttttctgttattgttatgtgattttcttaatttttttttatatttttataaaatactgtaaatatatatttaaaaaaaatgccaattaggattttcgtccactgaactttgacatgtaccaaatcatgtcccctgaacttttaaggtcgttaaaaatgcccctgaactattcagattgttagatttaaggattttttttccaattttagtaaaaaagtctaatattgatgaaagtttatgggccataatttggtacatgtcaaagttcgagaagtatgatttgatagatatcaaagtctgaagagaatgatttagtacataaataatcactaaaatagtaaaattgatagtttagtatatatgctaataagaccaaattggtttttacactatgatttgatggttttgatgccttttacaacttttatactatttattatagtttgcccctaattgtttagttttgtggtatggtaaataagcaagagaattgattaattttatgctcataacttttaataaataaatatttcaagtctttttaagtctctttatatttaatatggattgttttatattataatattaattgttttgccattattctttcacattatttaatttttcattaaattatgtggtgatagagttttatttattgttattctgtagtttggttttgtgaaaggtctacgattataaagactttgttaataaatttaattttttaatataatctattggatatacattttcagtaccttttttgctagtcatatttagatttttttagtaatgttgagctagcgaaatgattgtgtgttaaactttaagttgtatattaatttttattctgaatattatcattctaatataattttagtttcactagttctagcaacaatcagtggatttactaatattaatatgggggctatagtccctactaataattaaaaattaaatataatttttttaatttgataattataaactaaaatataaaaaaattcccacaaaattaaataaattaagtaaaagtaattataatgtattaaaaatattttttaataataaataagttccacaaaataaaaattatgacttcgtcactgacaacaattattaataatgaacaggtattttttaaggtattgagcttgttatttgaaaacattataattttattgtttaaatttaacatgtttttcaattaaacaatcttacttcaagaaagatcagtaaattcacaaaatcactacttagcaaatttaccaccaaaatggcaagtattgatactaaaattctgtggcaacgttttgttggtggtgtattatgggcttggttgttttgtggttcgtattctcaacgctgacgtgtcatgtatggggtttggagacttcaactgagtcggagctgagtcatgtgactcgggagctattggaatcggcgaggaagcccgagtttttagattggttgaaaaagattaggaggaggatccacgaaaacccggagctagcttttgaggagttcgagacgagtcaactcattagatcggagctcgattctcttggaattgggtacacatggccggtggcaacgaccggcgtggtggctcacattggaacaggagctcagccttggttcggcctaagagccgacatggatgcccttcctattcaggttttttttcttactaaatatattttattgggaataaagatttgaggtaagtgtggaactagaaatgggtcagatcaaccttttcatttggggaaggtctaattttctcaattcaagttttgattaacaaactttttcattattaattatgagctatgatgataataagagtggtcccaaattaaaagtataggaaaaaggccaaacctttttacttattgatgctcaatgtcaatatgcattgtggaacttggccatttggaataggaattggttgagtgggagcataagagcaagaagaatgggaaaatgcatgcttgtggccatgatgctcatgttactatgctgcttggagccgccaaattacttcagctacatcacagaaccgaccaacttaaggtatgcaattaatcaagttttattatgctatgttatgttgtcaatcttcaatgtctcttgctttgtttgagttttaaagggaactgtgaagcttgtttttcaacctgctgaagagggtcctgctggggcttatcatgtactaaaagagggtgtacttgatgaggttcaagctatgtttggattacatgttgacccaacattggctactggttcaataggttccaggcccggtcctttcttctctggctctagtcgattttcgattgtgatagaagggaaaggtggagatgctgctatgcctcatgcatccagagatccaattcttgcagcgtcgtctgctatccttgcccttcaacagattatctcaagagaaacaaatcctcttgaggcaggggtgagtgtattgtcaataggcatagctaaaccatgtttagaagaacaaaatttgtaattcttttgtttgtacgccctaggtggtatcagtgtcgttcatcgatggaggccaagcagcaagtattattccggagaaagtaatatttggaggcagctttcggtgttttacttcagagggtttatcctaccttcaacagagaatcaaagaggtatatctatctatctaaccaaaaacagattttgtcttgaattgatcataaatcttcaatgagaatggagtgtgagaaatacttttggtatattgacacaggtggtagagttgcaagcctcagtgcataggtgtactgccaaagtagatttcatgctggacaagagaagagcatatccagcgactattaacgacaaagcgatgtatgaacaggtaaagagggttggtgaagttttgcttggagaacctaaggtgcaccttcttccaaagattatggcggctgaggacttcagtttctatgcacagaagatgtcagctgcatttttcatgattggagtgagaaacgaaagctttggtttggatattaaggacttacactctccttactttgttgttgatgaagaagctctcccagttggagcagctctccatgctgctgtggctatttctttcttggagaatcattctgctcagattcaataaaatttatgccatcccttttgacaatataatgggatgttgtgaaagataacaagtaataaaatagaaagtagaggatcgtttctacgaagattgttactaattaccaattattaattttcattttctatttagctaataagaatttgattttaaaagtaataaaaaaaactaaaattaacaattgaaaactaaataaacaaattatacaattaatttaatggataaaaactagggtatgtaacttcattttctatccactctattttttattaacacaatatgatggtctgagaataaatttgtattagtttagatttgaataggtgaatacaaggaataagtgtttaatagttgtgatgataatgtagtgaagtagtgatgttggttgtgtattgtaaagaatggtgtggcttagaagagaggattgtttgtatgagaaggtagtaagctttatttatagttttgatgttagtttttgggtgttagttaggggtggacatccaattcaatccaatccaatttttttttcttcatccgatccaatctaatcagtatttggatttgaaaaataattatctgatctaatccaattagacctcaaaatctaattacacctaaatttcaatattaacttaaaaatatataaaaaaaa

SEQ ID NO: 305988 - DNA, 1879 bp, Cannabis indica
agatcctggtaaaataaattccaacacaaaaaaggatgtattccttttggtgtgcacgtactaccatgttctaacataggagacaaaatctgattggtgggaccaggcgtcagaggtcagccacgtcacccctcaaaaggctttcggaggcacctcttggaattctcctgtgggtgcatcccaaggctcatccagaagtcttcacttattacatcttttggaaggctagaagccttccagatctggaggagcctcgtcttctgaggtgaggcttttgggcttcaaatgggctcgggcccatcctccctctagattgggccttcctacgtggaaaggctttgacctaggccattctcgcttaatcatactctgtagagatcccacgtgtcacccttccagaaatactgataacatttacagtctaagctttcgggacttgagagtggtagaagcttgcagtctttctttcgaattgccttaaacacgtggaaaactttggaaaggaaaagatcatttcatcttgtatgctttagaatgtggaaagttggggacttttagattacagctagcattgtaggtgtgtcctcgtcctcttggattgtgagttctacgcatcttaggagaatgtgtgtacttggggtatcgtggtgacgactgattgatgtcagcgcgcatatcaaggtaaatatctacgatgaaaaagcctcagttctaatgaagtgtaatgaatgcaatccctctgactctttaactgttggatcaatattgtgtttttcgagatgaaatctaagcccttaattggtgaacactccttaactgttgcaatccccccatgcgtgggggttttgggtaaaaaattaaaattgtctttcataaaaaaaattaaaaaatactccataaactctcaaataggtaccacaaaatttattaatttttttttcttgaatttttagggattatttcacaaatacacaaaaacagcaaaaaaaaaaattacgaaaacacggtttcactgaattttaaacattttcacgatttttttgattttatttacagaaaatacggtatttttatgttgtactcatgttaatttgttgttaattttttgttatctgtatgttatttttgttgttattttgatgttatttagatgttattttcatgttacttttatatagttttcttgttattttcgtgttgtttctattaaaaactgtaaaaatatataaaaaaaattctttaaacataaaatataatttttttacaaaaaatggtgccttatataattattttgtttgagtacatatttatttttctataaacatttattatgtatgttaaactttcgattatgagctaacaaaaacacattaaatgctaatctttattactcataatcattaaccaagatcaatatttatttagagcatcaaattcataaatacacatacctcccaatccatccacatgagtcattttgctttaatgcctccaacaagaatcaccaacaagttctcaagattgaacgcaaacccttagagccacaatgtggagcaatcccttcttttcttattaccatacaccttaaaaccactctaccatcaataacatatatatatacatctcatacccttataaccctaaggggttactcactaataggacttaagtggtccttttatggtatactataatttaatgggccaattataatataaagggtgctctcatgtgcctctaatacataattaatttatcaaccatcccattatggttatgaacaaatattgggcacatagtaatgatgtgtttatggtattaagcttatgattatattagtccacaatattaattctaacattctcccacttggacaata

SEQ ID NO: 305989 - DNA, 2038 bp, Cannabis indica
accaaacaaataaattatttgatgaaataaaaaaataatgatttattctgcccaaattaacaaattgaatttttttttttttaaaaaaaagataattatttataaaaaaatttaattaaaaaattaaatattatttttttagaaaaatatttaatgtggtggcactctttgtgtgtcactatatcttcaaaattattaataaaaaaaaaaaagaaaagatatagtgacactttatttgtgttgctgatactttttcagtctgaccaaatttgactttatacacctatagtgacgcgcaaaaggtgaatttaaaagggtttagtgacacttttgaagtgtcactaaaaactgtctttccagtcaccctcattaatgacgcgcgttgaagtgtcactacacagttttagagttactcaatgtgggtcagtaaaactgtattatccattaatctcatattaatatataatatatctcattttaatattttaatctatcttttattataacaatataatataacagattctactttattctgtacgtagcgattattttgattctttcaatcagaaatgtagtccatctcttaaaagtgacccaaattctccatccaaaaatgttgtctcacgacccaagccaaggactttaaaccttgttaaggaaaaaaaattccaaatgaacttttaatttatattacaaaatcataataaatacatttaaaataataaaataacttatataaataaatatattattagtaatagagtagcatcattcattattttatatagaacaataatattactataattatatagtcagcaaataattaaactaattatagttgaaaaaatacaaaaaataatacttaggagttatcatattcctcatctcagattgagattgttaagtgaaacaaaccatccattattaattaaatacatattctatctttaaaagaagaattaaatactaaataagataggagtaagctaattacatcattctccatccaaccactttcttttatctagctacaagtattaagctgaattcctaagagaaaaatatagggtgtgagcttattaagcccaataaaaatacaaacaaatatcaaagaatatgagaccacaaaatattcactacaagaaaagcaacttttgctgacataatatatgaattgcgcaagaaaatgttactttttaccgcgaaatagatgttaagtcggtaaatattggatgcccaatttttttaatttttgtccttgtccaagacattttccagctagttaatttgttggtaaaagtgagttatgttgacaaaactaacttgaaaaaagttggcgcgtcatttcccgcaagatgaaaacgtgtgtaaaatgtaggtagaaaaataattttttcggcataattaagctcgccaacaaaatattttttccttaaatgaaatggttcgtttttttatttattttcttttaaaagctttgtcggtgagcttaattgtgcccgtaaaacgtggtaatgaggtgattaaattctcttcttcttctgcccccaatgccccgaactccattaccacgacgtccacaatctccaatcacctctaccacctccctctcccatctccaccactacccatctctctcttccctttaggtttcttctttaaaaaaattaaaatccacccattatgctctcatcggagcctccaaagccatcgaagttacctttccatctctaatttaagataatttgaatttgaattttaatgttatatacatatttgtatttgtattttttaatttagataggtatggatgtatgtgcatttgtatatgtatgtttgtatgggtacgtgtgtacattatgagtatgttgtttgtatatatatatatatgtatatatatatgtatgtacatatatgtatgtgtgtatatatgagtatgtatgcatatgtatgtgcagtggcagagacaaacagggtcatgtcggggcacatgaccccactcaacttctattttttatagatatatatatat

SEQ ID NO: 305990 - DNA, 1333 bp, Cannabis indica
tttgataagtttatttgattgtattggagtgttgattaatgaagtactttcttcttcttgatacaaaaaaaaaaaataatttaaaattatttttaaatttcaatttttgtaattaaatgttaaaaaatttaaagtgcaaatgatttaactgctaatatctctacatattttataccattattaaaacttaattacttttaaatgagataaaatatataaaaaaaaaacaccacattctaagtacatagttttagtgaataaaactatcaaccaaataagcctatctagattcattcaccaattaactctttcttgcaataactcagtttagagatgcaataaataatggaagataataataaacattacatgaagcctccatttatcaatcaaataagagaatccattttatattcagattgacaaccaaatcaaaaaccatttatttttcagatgtcatatgctgaatgaaaacattcagaaataatccatttaacatgatttgttcaattattaattatgataaatcctacaaataaaccaagtcttgacaactgttgacaccactagttaggttttattattattagtataattaatatttttatataatttaatgtaataattttatctttatatacaaaacccaaataaaataaatataaattttaaattatttttatcaattgaataaatattatataaatttttttaataaaaagtattatgtaaattaaaaaataaaattaaaaattatataatatttaaattttaaaatattttttatccaaaatcctgctttttttttttctataacctaaaatagaacttatataaccaaaaaggggctacccaatttatatatttatatgtttggatattgcctcaaatatgtagaagcgttattgtaacgtgagatttcctctaacaaactcaactatgccaagaggaaaaaagaagaaaaatccaagtaaattgaaatgatgaataaaacttgatagaatgggtatgattaaactccatccattgtatcttatagaagataaataaacagtttttcaagtagttaaaaaataaaaagtgaaacaatgaaatcgaaaatattaaaagttatgaggcactcagaatgaaaaggactttgaataaagtttggtagaatatcaaggatctttcgatctcataacgataaaactcctcactgtgccaaattcgtaaaaaaaaacaaatataaattatctcaaaaaataaaaagaggagtcatcagaagaataggatatttatcatcaatggaaaatctcagacgaccgtcgtgagaaatgacatccatattcat

SEQ ID NO: 305991 - DNA, 2250 bp, Cannabis indica
tagaaactaaaatctgtttttataatttgtgtttgaattgaggtaataatatgatcattgatcaatattaaattgcatccattaatacttataatacccttggcaattctctatataatatatcatatcccatcgagcatcacatcacatctaaacacttttaagagttttaactttacttcattatttttaaaaaataatatttccaaaaatggtatacttctttagtttatgttagttaaagttacaagtactagagtttacgttttcatatctctcaacttgcaactacatttaatttacacatattatttttcattttaatatttaatacccaaaaaggggttattatttgaaaggtcaattaggattagtagagagccatatataataaaactgtccatgtggattcagaatggaaataaagatatatatcaaaatatagcatattatatagctgcaagtcatcacataaaccctctatgcaagaatatactcaaatataagctagaaacatgtgatatgtggggtccatattaggtgacatgttagttgaatatgagtccatgcaagcatatggtcgataaaaagatgctaacttcttgacctaggatttgataaggaagaatctttaataatatcatcacaattattattattatttttttaccagacatgatgaatattccaattggcaaaacaaaaccttagacagtgccccccttacagtctttattccccatatgtgactattttttaaatgggggccatttctcttcaataatacttggagaatccacatcctaaccccattatagagcaacaaatagccctgtcttttgaatttttgaatattctttttatgaaattgatattttcaagtagcaaatttatacaatgctcttgctagctagaaaccttaatttaatcattaaaattttttaaaaaaaactcctcatgttttaactgaaattatacaaggcaacttttgatgtagatcacactggctaagctactttgttttaagtaatatgagagatattttcctatctaaacgttttggtcatacatatatcttgaaaaaagttttggtcccaccataaagtcccctttctatttaggagtttttacactatatattaaaattttatttttttattgtgtactgtgttaaatttttcacagttatttttagttgtttcaatgttgttttacaattattttataaaaaaacaatatttttataaaaaattcggtctgacagtaaaattataaacttttgaacaaaatccagtatatttgtaatccaccataaagtatactttctatttaatttacaccatatactaaaatttctacaattttacaagatttcaaaccgcatttttcttgtttaattgttcaaactttattaggctaatcttttaattttattttaatatttgatgatgatattagtgtaaaccgcctaaatcgcaccgcactgcaccgtatttttgcattgtggtgttcgtgattttaaggtcttgtagtgcggttgtagtttgagaaattgtaaaaaccacatatgtagtttcagtggcggaactagacgacgaaataaggaggggccaaataaaatatattttcatctaatttttttagtatgtagtattttataaattaatataagagttaattagctttatacatatatataaaataatgagaaataataaatggcaccttatgatactaagtactataaaaagtggcatatcgttattggtgtaaaataacatcgagtcctaaatattttgatttaataaataatataagaaactgataaccacttgtaaagtatcatattaatatggtattagataccataaaaatacatatataaagacacctatatatatatatatatatatatctcatgtaaaagtactcttcaaaaataaattatattaaacatttttttgtcactttttaccataaaatagatcattaatttaaatggactattgggtgggtcttttttttttttttatttttttcaatttcaacttcacaatttattattaggcttaataataagataattatcacatttttttaataagtaaaatctaattatcctaatttaatttatatattatgtataatttttttttctaaaagtttagggtgggccatggccactccatacatatatggagttccgccaccgtgcggtttgatttgaaaaaatagactaaacctatacca

SEQ ID NO: 305992 - DNA, 876 bp, Cannabis indica
attatttataattagtcataactttttatttttaatcattagaatttttttgtacaatagttttgagttttgaatggttatatatttttctagttattatatatatagtaaccacatgtacaactatatggggtcctagctattagtgcactctctgtctcaaaaaataataataataattattattattataattatacatggttataatattatgttgtaacttttccatatatataatttgaaattggaaagagactccagcaaaagaaattggaaagagacttgtcaaatagtattggccatatcaagtttatcatactccatactttcatatattataactctaaaatcaaaccccttattgtgtgttgttttgtggttcaattcaactattgcaattattattattattatttgtcttttttttctcttctgaatttcataataataaaaacacaccaaaactatcaattccaccccattcttctgaaaattgtcagccaggcccctctctctgcatgaaaatatttcaacaaaaaaacaataaataaataatcaatattttctcttttgtttttgtcatattcaataatattttctctttgccccccaaccctagctacctattaacacaaataaacaaaaaagtactacatctcctctcaataatgccatacctatatatttaggttaattgattatcatctacttactaaattgattgggaggaatcttaattacaacctcttattaaaatcttttagtcaattttcacgtttgaaatcacataccgaaatatttttttccaaatttttttccataacggtattcgttatagttacagtatcatttctgtaaatttttgaaaaaatt

SEQ ID NO: 305993 - DNA, 3988 bp, Cannabis indica
ggttcggtttttacaattttataaccgaccggtcggttacggttttttattttacgaaagctgtaaccgaccgtttagaaattataatcgtataaaaccggccgtactgtttttggtggttttcgatctggcgggttttggcggttttaggcggtttttggcggttttgacagttttttggtaaaactatttgttatttcaaaaatcaaaaccgaccgccatgtcaaaaaaactgaaaccgaaaccgaccaccaaatttggtgatgaagtggaaccaaaaattcggttacggactggtcagtttcggtttttcggtttttatgaacacccaatatctatatatttgttcatgattatagtgtcctcagcacaatggaatataattatgattatatgtgaaaaagtttaattcccatgatttgtcagtttattggatttagactgacatgataatggacgataaggtatacttacaccttggataagtgttatgtcctttctagggcattggcaaagttttccagcatcagatgtatggagtatacattggaaatgattgatattgatcttggataagataacataaacttaccgttatatctttccgagtcaatatcaatggttgatcttaggtctatggattttaatcctgatatggttaggtgttcctgagcaagcaccgataatcctagtcacaatttctggaatttcacaatatagggttaatctcaaaatttaattccaaattttacataaattacatttcaaatacaaattatcatataaagctcaaaacgagctttccaacgatataaagaatgccccaaacagagtcctgagtcaaaagttatggcgaaaataaaaacctgaaactccccaaaaaaagggcctcgccgcggcgaggggccctataaccccaaaaatgccatttttcacgattttaaattcttaccaaaatttcaaaccaaatcaaaacaaatgatgcataatcttaatttttaatccaacatcaagatatcaacaatttgaaactcaaaagtgtaccattaagctcaaaataataaaccaagctcaaaaagcaagcacaaaatacaattcacactatcacacaaaattcaaacctaaactcaatcttcaagcattcaaaccctctagagcaacccaaaaaatttagagcacatacccagaaatggaatcccaaatctcaacccaaaacaacctatatgcattaaactcattccactagctcaagcatacataattatcaagatatcaccaaaatccacaacaaataccacaacatgcatccatagctcaagagcatcatgcacacttataaacatcacaaaattcagcccttaaactcagaaattaaacataacaatagaaagattagaagcttaccacaagttctcttaagctttaagtgcaaaaccacaccaattcaagcttcaaatccaaatgatcaagatttcaagaaaaatatgacaaaggaagagggagaggggggttcgacctagggctggaatgaaccagaaaatgactttcaattttcttaaatttggcttttgttgaaaataaaacaattggtcaaatgaccaaaataccctccatggccaaaataaatatatctgtacaatcaagggcaaacaagtcatttcatctcacccatatataacacataattttagattttcaaaattattacattaatgccaaattaaatcctgaaaatttatttcgagccctaaacccaatttggcccaaaatactcagttgtgactataccgccccgacttgtcaataaacacctacagatagacagattaaacatactatataataatattgttcataagcatggtatatcatgtaagttacaattttacccttcttgggtgaaaattacaaaaatacccctagtacaccaatggggtcgtaaaatgcaatatatcaacatagtttcacatattaaattatataatcatataattccacattagtaaataattaaactagttaggattactaattcagtttcttaaccttaggatattatatctacaatgattgcctaattgttgtgcacgcttttgctaattaaagattttctaaaaaaattttgtgtaatttaaacttttaattaaacattaagtttttataaatatacaaccatacataaaattcgagatcccttcttaaaagttaacaacaatattcaagatacattttataaaagtgttgctccgcgagtacaaaataaaggcttaagtcgtcccgagactaaatacttcaggtctaatcatcatgatatgtacaatcatcctcaagccctagactcattatttctcagcctttgccttgccaataaaaacggtagatggaaacgatcggccgtattctactacggaaacataccaattatcatttgcaacctaaatcaaccctaatttttataaactctccataatgcctaattaaacatcaataaatatatttcaagcaatagtagcagctagaacacacagaaacctaatccactattattgacccaagtttgaagtcttgaactcaaacttgctcaacaactcaactatctaccaaaaccaacataaaaaagcttcaatcaactcaaaattaacctagaaatctatttccaaactcaataattcagaaaaaacctattctcaataatattgcatgtttcaacctaaagaaaacctccacaaagcttaagaaaaaggactaggatcttaccttttatattcaccattggatttcagttagaattagtcaacaatggttgaagaaatctttggttttcttctcgtttgcttcagccgaagctaagagagagaagggggtgaagatgtgtttggtttcaaacttatccttaattcttaatttaataaaatgagataagtcttaacatatatctactaaactattctattgaaaatcaaaatttactaataaattctacataaatcatcaaaataaactaaaattcaatttaggcaaaattccttatttgccctttacttaaagcttaagcaatccttaggcttaggggtaaaatggtctcataccataatcctgccgactctcaacattccaattatcaacatacatattcttcgctacataaaatgttctaaactaacccatgtgactctaacgaccaaccgtcacatttctatcgttaccgagcaaagattacaaaaatattatttttcacatatatcacattcaataaacttaaagtttaaaaaaatcttaagaattgaaaaattgtaatcctaatacttattttttcaaagtaggactcttagtatataataatcacataatatcatgctctataaatatttagtgctaatcacatctttaatctatattctaagtatgtggtcattacactcagtttatgagacaacgattgtccatatggaaagggagtatctgatagtgacaggtggcttgcactgccgatcgtgtatagtatccgctggaattatgaacgttggataaaagccatattttttggtgatgtgcgcatttcccgagtctaacttagaggacaaaatcctaattttgtgggatctagtgtcagtaaagcaccacataagattgttcctaggtaactctccagctacccttcccgaatcaccctgtgacgacttctggatattcttggttgaaccttcccttttcttgacgaatcgtccttccggaactaaaaaggttcggccttaccgtgattcctattagattaaaatttggcttgggactttagtctagattcgttgtgggctgacctaatagcttaaatggcccatgaatgggcccgtcttagttattcttggactttagaagtacacgtgttacatatgtagaaacaagggcaacaacgtattatatttatatttacatatatataaagatgggtacactcttaatgggtattacccatgaatgggtaaaacta

SEQ ID NO: 305994 - DNA, 1067 bp, Cannabis indica
tgccagtgaggcatcctgctcgaactgtgctttccgagcagatgttccaaatagactccacgtgtcaccattcatgtgatgccatgtcaaagtgcaaaaattgggataacagataacaaatcagattgtattgaaatgggtattatttatggcataaaatcccaacatttctaagggtacggggaaacacagacaggatgtagcgtagctcccggacaggctaaaactgaggtcccagactctagcgcaggacactcacggaataagagagggggtaaaagtcacaagcacaattacttagtaaaaaaaacaagaaaggaatatgactttatgtacactaaatacacaagcttgatagatacacgggaaaatgtttacaaggcaacatgcaacatggtccattactgaaagcctccgcgtatgtcacatggcgggaggaataggcgtgaccagaataaacaatgcaagtaccatggagagacggttgatactacaaacgaatgtgagtatttaaaggatgagattgaaaagtttgtctgggcgggacacttgggacaattggttagtatcccgatcatttattccagacaaggggtggttcagggacacatgatagttttgggaaagcagggaactataaatcatttgcatgaggtaggatgctctcaaggtccatgaacatcattacctaccccttatgatccaccagcttcgattggggtggcattgctttccccgagaataggaaccctgtatcctctatgcttgctctaccacctgtggatggacacatcacaataattttaagagggcctcattgttggaatatgttttaccaagatctagatttactaacaagtatgtttttaacatcctaaatatgaatttctaaaacgatgaaattaacacataaaaggtatgagaaaccttacagtgattgcagcggaattaaatgactcattccgctcagatctctaacctttgtgtcctttctgtcgtagagtatcaccaaaatctgagcccgaaactccttcagttgttttgattcttcacagtcttacatacta

SEQ ID NO: 305995 - DNA, 792 bp, Cannabis indica
aaagaagaaaataaataaagttagttttttaaaaataagtataaaagtactgtttatccctcactgctgcatgatctggtgcctcgactgcctactctgaatttttccacatgtcgatgtctagaaacttgttcagagatttgtattatagactttgtataatgtatgagccccatatccattttgtatattttgtataatgtaatactagactatataactccattattatttctattatctaaagtccaaagtctttttctatttttatctatctttattaaaaaaaaagaataatttttaaaagaaagaagataaaacaaagtgaatagaaatttcactgttgactttttttttcaaatgtcatatgaagagaaagaagatgaaaaataatttatttattaaaaaataaatattattattattaatgtttgatgggtgtaaatgaaaagacacaaaaacaaaacaatatgattagaatttatatgcacgtttgatgtgtgaaattttgtgaaagattgagtcgaaaatattaataattgatgggatttttcatgggcacgtcccactatgctaaataagtaaatcaaaatcatatctcccatctttctctgtctgtttttctagttttgattttctcggaaaatcaatactttcacctagtcattactacatcacaccatattttctttaaactctttcagaagtgactctacaacataatccacaattaggaatatcatcattattcaaactaaaccctcttaagttatttagctcctgaatgacaac

SEQ ID NO: 305996 - DNA, 1327 bp, Cannabis indica
tttcaaataacatagaaaaaaactaacataaaatttagtatacgtgcctcgcacgtaatttttgctagtatatatatatattttgtactagttgcaaaatagataacaaatcaaatatttccaccacttgtataaataaaccatttgtaattaaatcactttttgttgtatgaattaaaatggtattaaaaattaagtagttttgaaaatctagctgattatgttaaaagtatgatatttaatttaatgcttaattggtacttttagtgtaatcttttttcttttatatcaatattatttcaaaaaggacattcagatatgcattatgtaatatatctagttttaaataattacaagtaatgattatttataaattataatccaagtagtatgtaaaacttcaagaagatactgctcatgatgatgatcatgataacccaaatgttaattattattaaaactattattaatattattattattttaactgggaaaatgattaaattattattagctatatatataggggtgagactctcatgtggtgaacagagaaatatccaagtagcttccaaaaatgtaagaatgggcatgaaatggattctaggtgatatatacctcacatgggtcatcacaagattctttttctctaatattatacaaaattaataaacaaaatattatatctcatgatcgatcttcatgtctctttgccatgcatgatactaatcatatatacatatataaatataaatatcaaaggttctgatgctctattaattaaataaatcaaagatgtatatagctctccctttgtaatttttgtctcaatgatcaatcaattatgagttagctaggttatatatatacacaatatgtatatttatatatgttagtgtacataactacatatgttaccactagaatagcatgtgggcaagtcaatatatgctcacgtgacacccacccaactccaataaattaacttgtatatgtgcttgaaattttgttttattataatttattaatcttttttaggtagctatagctgtaattgttgaatattgttatgcattatatatcacacattctttcaaattgatttgcttagagaatacctagtttcagtgtgaatttaatttattgttaattaactatgtaatattgatgacttatacaaaaaaaattaaattcatattgatagcgcatgaaaaatatacgtatatataaatatactagtaaacatcccgcgcttcgccacggatatataaaatattttaaattatatataaaaaaataaattatgtattgtaattaataataatta

SEQ ID NO: 305997 - DNA, 667 bp, Cannabis indica
cccggaagaagaatcggatctggctaggaactttctcaacaccagaaatggcggcgcgtgcacacgacgtggcggccttaagcatcaagggtaactctgcaatactcaacttccccgagctagccggatcattaccccggccggaatctaactcaccccgagacgttcaagccgcggctacaaaagcggctttaatggagtttccgaacccatctccttcaccttccacgtcatcatcgacaacaacgagtacttcatcaacaatgtcgcagacttcatcttcgtcttcttcgtcgttggtggcaacttcgtcgtcgagctacgacgtgtcgtcttcgccggaagagctgagcgagatagttgagctgccgagtttggatacgagtttcgagtcggggaacgagttcgttttcgaagactcggtagaggggtggctgtatcctcctccgccgtggtaccatcatcagagcttgtttgaagaaaattatgggtactttagggaagatcagatagcaatgtcagagccagagtctgctattctatcatcttttgagcctttattatggcaacattaatgaatcatcaaccaaccatggatattggaattgccttcttttttagcttagttgtcttgtgtgcttcatctccttcttttcttttcttttct

SEQ ID NO: 305998 - DNA, 2766 bp, Cannabis indica
ggtaaagtgctaacttagaaatacacaacatattaaataaaattaaaaaaaatataattgtgtatttttgagtgtgcacttatttaacgggcttaattagcacttcacaactaaatattcttatatattattacatgcatgttttgttttttttttccaaaagtacataaggatagttgaaatccatgtaaataatttttttatatatatattgtaattactattaataaagtactgtaatttttctaatgtcaacatttatcataaattctcagtgtaattatataaagtactatattatgtactatattagtgttataagttttgtctttctcagtaagactttttatgtcaacatttaatcataaattgttagtgtttatgactattataagctttaaacatcacaactataaaattactcaaattgaaattaaagcaagaaattgttttgacacaagaagttataatgaggtttcactagtttattagtttatttgagccaaagatactacaaaacaggtcaatttctcatcatctttagtacaaaagttaatgaacttaatagccttttataagctacggttttaaatgttatttgcttcctattaattttaatttaacgatagtattttctaatacttaatattttggtgttgttttttggttttcaaataatatttcattattccaagtcgaaactttaactctcttagtaatacttaattaagctccttcagatagaatatcaattagaaaaatttattcaaatttgttttctttggtgacagctatcaacaaaagaaaagtattctttaacaaactggagtgctatttaaaaatattataactttgttatttaaattttcaaagacaattttgtcccatataactcgctataaaaaatttacaactcatgatttaacaaaacatgtcttttaattagattatgaattatcccggtccaaaaaagttccccagtcaattataaattactgtatcgttaattcataagtaattttgttcaccacatcaaaaagttaatgaacttgaaaggcttgcaatctacaagtttgtagtatagaacaatccaaaggtcaatttcaggcccctaatgaaaagcttttgcaagtctaaaatataaaaacaaaatgaaattagaagctaaaaagaaccttgactcgtatatgtgaaatataagatattacattacaatacatggtccagtacttagcagttaaaacaacctaaaataaagtctatacctagtaataagtaatagctccaaacatatacaaaatgagatgatactcatatttctatagtcaaaatggattttttcagcactgattgaataagatgatagaggttaacttacttataccatgtgcaagagtatgatctcaaaaagggtcatataaactagtctgagttaggagcaatcaaagaatgtcattggtttttcacttggttaatagaaaaaagctcttcagattgcttttgccacatataatttgaggcttcaatccaccttggatgaaccagaagctttttctttttctgagcccatcgagacttctctgttccaacgtctgtcgagaccacatgagtcactgatggatcgagttctgttacacaagtagcacccaaattctctgccatcttccagagatgatgattctcagcttgacatttggtgggaaaaactcggctaaaaacaattttacatcccttcaagatttccttccgaagagttttcagcacctgtagaagatcatgttccaaaaattatgagaaatcagttcataaactctacattggacttaaaaatctgtacaattcaagctgggacagaataacataaaatgaacagaccagatattttcaggtggtagtagtgagggacaattttctatacatattacctatcctaggctaagaaaataaataaaaaagagaaagtggtcaagggtaactagcatacaaaaagtgaaaatgccatttacctgcctcacatctctgtcgataggatctccacccgattcctacaaaaatattttccatcaataaataaaagataataggcaatcacaacttattccataagcaaccagaagatggggaacatacatcgaaaaacatactgtgcacttgtttaagtacattgagaactgtcgcaagagctccttcgacctcactttcatcactcttcaactcagagagggacttacaattgaaaccaaattgctggcagcttgatctgaagaaatgatatctttccataagtattaaattatctttgtgcttcgaccaagcctgcaacagttaaacaaatgtaacataagcaaagtaacgagtaaaatacatattattgactcacattctttgcatcatcaaccattcatgtacttacattttctgtatcatcaaggatcaagacagcactttcttgacctagcaccacatcaagacccttttgatgcttcacagtgccatcatcccttgatattattctatcgccaaaatattcttttttaggatcaagcagcttggccattgctaaggcataaggccggtctcccattgtatatatatataattcaaacatattccttgcttcccttaaaaaactccgaacgtatggtcttaacttcgtcatcatatgcatagtctccaacatgaagatactcccgtcagagacatctaagcattcaaagaaaaagagatttatagaccacatattatcatgagttcaacaaataattt

SEQ ID NO: 305999 - DNA, 3662 bp, Cannabis indica
atttggcattttggacttaggcaaaacttatgattcctttttctcgtcaacggggtgtattatgcgagatgatcttccctgtattgtgccttcatcactcttttatttaggatgagaaaatattcatcttttattcgagccgatcttgagtactttaatctatcgctggtaaaatagaatttacttttgatgtgttggcaaacggggttggcaaatcaatattggtattagaacttttgtcagcacaagatgaaaagcgctggcaaaaatgacttttccaagttagattttagccattgcaaatatacgctggtaaaactttgacctttttgccagcgcaatttgcgaaatacgctgctaaagttacttttacccacgcagtagcgaactgtgctggtaaaagtgacatttcttgtagtgctagtcgctttagtcgtagcgaccgatactcacttaactagtattcttcaagatgtatatattaaatctgaattttttaatgagcgagctgaaccgtcagctcattaattgtgagatttaatacacatattatgcggctacacccatatttttttgaatggagactatacattattagaataaataatgtgtacgagcaagtacatctaaagaaattcttaatttgccttgaggtgatgttttgttgaagaaaaataaaaacataagaatatagaatgagaataagaattaatggaataaaatcaaatttaaaattcaaaaaaaaattcataaaaaagattattaaattttttctcatcttgcattagaatcattagaatgatctttctttcatttgcaaaatggaatagtattctactaagatgatggaaaagtctttctattggaatcacattccaatactttatgttaagggtaccaattcaatttatacagttagagatggtagttagtacttcagttagtttgttatagtttgttatggctctaactgattctcttctccttctctttctgttgtaacgtgtatataagctcatttggtactctttgtcaattgaatacaattcactctttccctttctttctctgtttgattctttctctttctttctctctcttttgtttctttgttctgctgcaatgtctaggaaagttaacatggtatcagagcttgagtttccgccattaatggccaatgtcgttactggcaatgagaaaagagttactgctggagatcactctcaacgtgctgcagaacaagaatcctccaatcagacacagagtcttcaacgtcctagaaggaaagatcctgatgatgcaaccccgatttacttcaatcatagcctttcgatcaagttaaatgatcacaacttcttgctttggaaacagcaagtcttagctgccatacgagggaatcgccttcaacacttcatcacagggtccgatcctccattgatgtacctcactgatgaagatcgaaccaggaaacgcttcaatccagcttatcttgattgggaagctcaagatcagctgttggtgtcatggctcttgtcttcaatgactccgagtcttcttactcgaatggtaggatgtaaatctgctagtcagatatggtctactcttgaaaagtacttcaccttgcaggtctctgctaaaattcttgagtttcagacgaggctacaaaatctcaagaaaggttctttatcccttaatgactatctgctcaaagtcaaagaaaccgtggatcttcttgcttatgttggtgacactctttctccacgggatcatgttcgtgcgatcttcaaaggcttaccaagtgaatatgacacttttgtcatatccactaacaccagacttgagcaatattcagtagcagagatcgaagctcttctattggcatccgagtccagaatcgagaaaacggattgagaaggtgatttgagtgctaatatggcttccatggagtcggatcctacttttgaagccaatctagcaaactatggtcgagggggctacaagccatatccaccacaattcaatcgattcaacaactatgcgaattctggcagaggtaacttacctattaatctcaacaacttcagtccttatggctatccttactttgctcatgctcgaggcaactttaattctggaagaggagttcgaatgccttccaccaacaataaactccaatgtcaactatgtctcaaacttggacatactgtccaaaattgtttctatagatttgacaagaactttccaggttcctcaacaactggcagtacacttcaacctcctgcagcacctcaagctaatgttcttaccactacaagtgactgggacatgacttggtatccggattcaggggccactaatcactgtcaccccagaccctgcaaatcttgctcaaagctcggactacactggacaagaacaactctttgtaggtgatggctctggtctatccattcaacatataggtcagacctttctcacttctaatttgtcttcatagccacttgttcttaataatttgctccatgtcctactattactaagaatttactaagtgtatctacgtttgctaaagataacaaggttttctttgaatttcatcctgatacatgttgtgtaaaggaccagggcaccaagcaaattctgctgcaagggagacacatgaatggcctctatactcttgaaggtctcaacctccttccaacatcctctgtcactccaaagtctgcacacatagcaacacaggactccataaaatccccttccattcatagtacttccctagattcttgtattcattgcaataatcccaggcaattttctgagtttgatatatggcacaaccggttggggcacccctccaaaccagttgtccattctgtactcaaatcttgtaacctctctattgataataaaacttctagttttgtttgtcctgcttgttgtttaggcaagatacataagttgccatttcctaaggttaacaccactgtctacaatgcacctttacaactagttgtctctgatctatggggaccctctcacactttatctaacagtggctatcgatactacattcattttatggatgtctattccagattcatctggatttacatgctcaaagataagtctgaaacaatcaaagtctttcaaatgttcaaggcagaagctgaactccaattaggaacaaagattaaaatgattcaaacagattggggtggggagtttagaacatttcctaagtatcttcaacagtttgggattcaacatagacatccttgcccaactacccatgagcaaaatggcctagctgaaagaaagcataggcatatagttgaaaaagcttccatgcctctcaagttctgggatgaggcatctaggactgctatgtttattcacaacaggcttcctacacctgtgctcaacaacaaaaccccattagagatactgtttcataaacaaccagattacacttggtttagaacctttggttgccaatgtttccctaacatccgaccttataacaagcataaaatgcaatttaggtctaaaccttgcacatttctgggatatagcctcaattacgaaggctataagtgtctctcttcaaatggcaggatgtatatttctagagatgtcatctttgatgaacatcaatttcc

SEQ ID NO: 306000 - DNA, 3574 bp, Cannabis indica
cgacagttccaagctaagatttcatggcgacattggagacttttccgggcaagtctccatagccccaaactgaaaatctgaacagttaatccccatcgtctcttgtcgacattctttaatttcagtgattgtgtagctagtgcttggattttgctgtttctcaatgataacaaaatggttgtccaagtttacctggagatcgaaggttctatcatcccagtgactggtagttgtaaattttccacccgttcttgctttagcattctttccccctttaaatgactttggcgtggcagctaggggggattgaatttttgggggtctccctcttcttttacgagagcccatttcagaaatgaccgcccaaactgttcctttcccctttcctctcctcgatgatggcttcggttcctcattggatccatgtgaaaagcttctaccattcagtatttcttcagtgttcgatgctcggatgttctttgtctgggaagcagcttcatcgtgtacatcgcgattgctggggacatcattctcatcataattcgtttgggtggatagagtttgagttgggtcgggctgagcattaggtctgtatagtattccatccgaggcctttctctttcttggcccatttaggtgttcatggaccttgaaatcctctatatcaaggatatggttaaagagtgttggctctctatgatatttatcaacagttaaagcacccaataataactcacgggccttaggttgggcccaacactctttagaaggccaattaatgaattgggcttgtgatcccaggagagagtcgttatagtggttagtgggatccctcgattctctcactttcgttttggacgaaagacttactttgttcctcaagaatttttggcatttccccagtcaacttctctattgggatatttgtttggttgctttctttgcgataagtaatggtcttctctaaagaggaattattctcagttgtctccatctccatcgttgcagcttgcatgctagatgacgcctcttcacctacactgcaggccttattattggccttcgtagctgcaaatttctcagccgcctcttgcagctcttggatggatataatttttgaattatttccttaaggggcaatctctccaatacctgggaggtaaactaggggaatttgggtaataaccaaatcggacttcgggtcaccggtggtctcatcctcctcagtgacaatcctcttcttccccgggtattgtcttctacactccctcatttcagctgcctcactgttctgtatagccttatgaacttttatctggtttctaagagtgggatcattggataacttcttttgtagtacccaatcctggaaccatttagtgagaggtgctgtgaaagtggatttttctggagcatcactctttaaccaaaccccaaacattgggtagaaatttttattagcatccttgatgatagtttgggatttgaaacagatactccgatcgtgcgttaatactccgcatttgaagcacaacttaggaagtctttcatatctgtaactgtagccacagatcccttgagacgctggcacctgagaaagaaccccgagaaaatagggtttcttgatatctatagtggctcagaagcgaagggtactcatgccaactgtgtcctcaatgccagagggagttcatagacaggggaggcctttgaggctaattctttaaggttagaaaggttccaatagaaaggaggaatgctttcaatgcgcacccacatcgggattttgtcgaatctgacttcagttggggataaccaagccggccatggcatgatgacaattagtgcaccagagacgaaccaaggtcgcctagctaatacattcaacgcatcctctctgcttgcaaatgtaaattgaatgatgctatcctctatttctttccatttccagccctttatggagttccaggagagtttgagagacccttgaatggctgcttttccaaacctttggcaacttattatctttcccagcaagccttggttggcctcctgaggttcatctacctctcctggattaagtgcgaaagtaatgtcgttgtgcggtatctggaccgagtcctcaaacaagttactaaaactggaaggatccattgtagaagttgcagaactaccgatgaactacaaagcagtgaattaagagcaattctctatcacttcaacgaagtaagctcctggagagcacgatgcgtgagcgtcaaacaacagcatgagattgtgcgaacttttatgcttctctttgtcatcttgtttctccactatttttttcttgcactggtcttctatctcttttgttcagtttcgttactgtctgcttccatttttttaagtgcttggtggttggtgtggaatatttgtctaatttgctacttctcttgttgaacaaaagaaaataagcaacaactcttctcttgagagttggtggacaactttttggaagttaaaaatccctcttaaaattcgcatcttcgtatggaaagcttttcatatggtcttatatattgctgcaaaattgaatcgaaagcatattgttgcaactccaatatgtcccttgtgcaaaacacataatgaaaccatcaatcatgcacttttttatgtacaagggccaaagaagtgtggcgcctctctcacctgtcctttaatattaagctggcttcaacaacaacctatgaggaatttttactgtatgtttctgcaaacatttcagcataagactttgaactttgtcttgtactttgttgtagtatatggtatgaacgcaatgctgaataccatggtaaactagtaaaatagccacctgcaattctcctttttgctactgcatatctggaaaaatattatgttgttaaggctcacttatgaattcttcatcacatgctattgctaaatatgcctccagctgatatcacacaggtgctccaacacagattcaatggatagctccaccaacagggaagctcaaactcaacattgacgcaacctagaacaaaacgaatgggattgtaggtatcggggcagtattaagatattctataggctctatcactgttactttatctaagccccttagagttgtttcaaacctgaagagatggaagttctaggccttgctctaactcttaaatggcttatctctctccatctatctacagaatacattgaaacagactcacttatggtggtttagggattgaaagctactaataacactgtctggaaagatattaacttttttagtatctttttttacacgagcacaaatcaatcatgtttctagatctactaatacttacggccatgctatggctaagtttgctcttacggtggatactgactgtttttggttagaggaatttccacctccacttatgactattatgtaatttattacaattaatataatggtctttctctctctacaaaaaaaaaaaaaatagaaacctcctacaataattaaaaaaaaatcaaataatttaagaatgaccaaaaaaataaagtaaagttgggctagagc

SEQ ID NO: 306001 - DNA, 711 bp, Cannabis indica
ttattatttttttaaaacatttttgtaagaattcttactgttatttacataaattatgtggacatattaataatattagagcattttctactagagaaaagtagcaaaaaataaattttatagttgtaatgtaactcgcaagtagactgcctattatattctctaagatattttttttgttatttagatctttcttaaatgatattattaattaattatctaatttttaaagacatttctaatttatatttattgtatatatgaattagcagttcatactttgaaagtgtgtgataaactaatttgaatatattaaactcaaattttttcaatgaattttgtttgtttaaaaaaaaaaaaagctcaaagatgaatacctttttttttattatttattattatttttcaaaaagtacaaaaaagtgatgagatattgttttggtgcaaaagagttactgatgagaaaaccaacatcttctacaacatttgactcatatagatacttcctaaaactctggcgggagtagcacgtggtggtcgatttggctacttagccaggtatttgttggattttgtttgatgttatatgtaatgtaacgcactgactctcagggacgccacgtgtgtgcttttataaacttattattactaatcttgtaattttagaaaagtgtggtttaattaaaaccattaattaaattcaaaataaag

SEQ ID NO: 306002 - DNA, 3508 bp, Cannabis indica
taacatcacttgcctaatccctctacatctgtcccatctcacactccataggttgcaccaaattccccagcatcagttcatctaaaacagtcatctcaaaatcatacccctgcctatgagtcacaaaatgagtcccaattccccactattaaccaaatacatagtccactacagtcaaacagtgataattctttccattcagtgtctcaccaaccaccctcccaccgccaaatccaattactcaccctatggtcactaaatccaagaaaggcatattcaaaccaaaactttatttagcagatgttagaatagaaagagagccaactactgtcaaacaagccgtgacggatcccaaatggaataaagctatgaatcatgaatgcacagcccaagaaaacatggaagttagttcctcctacaccagatatgacagtatttacaaacaaatggttatttagaattaaatacaattctaattggcctgttaacaaattaacttaaggccaggctggttgcaaggggttttcaacaaacacatggggtggacttctttgaaacttataaccctgttgttaaaccatgaaccattagaattctattcatccttgctgccatatacaattgggacattcaacaattggacattaacaatgcctttttaaatggtcagcttagtgaagatgtgtatatgacacaaccctaggggtttgttgacaaagattaccatgattatgtatgcaaattgaataaggccatctatgtttaaaacaagctcctcgagcttggtttgatcagctaaaaagccacttgttgcagcttggttttcaaaattccaaggcagactttagcctgtttgacaacaaaataaatgaacatcttttacttctccttgtatacatggatgatatacttgttactggagcggatactcagtaggttcaaattcataatctacatgccaaatttggccttaagaaactagggattgtcaactacttcctagattttgaagctttcaaaaatggcaataaatattatctctctcaacaaaaatacatcagggatctgcttcacaagactaatatgttggactcaaaatctcagtcgacctcaatgtgtgctacatcaaaattatccattaattctagccaacctcttgaagatgctcaataatataggagcatcattggtgccttacaatacctcactatgactaggcctgatatctcatttgctgtaaacaagttaagccaatttctaaagtcccctactacaacacattggggagcatgcagaagggtactgagatatcttgctggcacaattcatcttggtctgtcattttttcctgcttcccacattgatcttcaaggatacactgatgtcgattggactggcaacgatgattacagaaaatcaacctcaggctactgtgtgtttcttggacaaaacctcatcagttggtacttaaagtaagaaagtgttgtagctcgcttaagtacaaagtctgagtgtcgagctttagctcttgccactgctgaattaacatggatctagtctttaaaaacagagataacaatcaatctccctcaaagccctatactttggcgtgactatctaggagcagggtcacttgcatcgaacccagtttatcatgctcgcacaaagtatatagaaaacgatctccatttcgcttgtgacaaggtgttactgttagcaaaccagcttgatgtttgatatgtggatagacactatcaaattgctgacatactcactaaacctttgtccatcactcaattcaactacttaagggacaagttaacacttaggtgcccaagtgtaacttgagggggaatattaggataaagttagttagttagttagttaaagaatttgttttctgttatactgttgtaactaactcttctctcatctgtaacaaattatgtttaatggattcaatatatagtggctgagctcacatatcttgtgagcctgtctttttcatctttcttcttctctctcactctcattttcttacaattcaaaaaaaaaaaagccaaacatatgctggttttttgtttttaaaattaaaaacaaaagatactcatcattttttatgtttatattttaaaaataaaaggaaacgtattctcattttcgtggttaaaaaattcaaaactattttttttttcaaaaaatacccttaattagtagatgtttactaaaataagattaaatatttaaggtataattcggagatttcaaattgcgagaacaaattattttatttcttcattggtaggctttttaagtgaattgaaggattataagggagtgttagtaatgtcaatgacaatgacaactaaaatatttcaaataccatattaaattaggggtgtatgttgatcgatttggtcaatttatgctacattttatttaactcaatgtaaaaatcaagttacaaaaatttaagcgcaacccttctgattaaggaaaaagaaaatagtacccgcctaattaatgaaattggtcagtttggttggcttaacccatccatactgaccactaatatatatattatattttttttttaatttttaacactccatttgttatattttagttaaatgagacaaactatatatagattgaattcaaagtttaaattaaccaccataaaaaaatacatattagtttgaacttcatattttttaaatagtcatataaattatatgatatataaatatatatttaaaaatatatatacatatatgtataaaatcatcttaatcaggttgatcgagttaattcgagttgattgagcggacttgtattatttttcaacttgttcaatataaagattgagcgggttatatttttttttttttcaggttttacggtttgtatttttcattgtgttatctcgctttggtttgagcggattatttaaattaggcggtttactaaagtttatgtactatcctatattaaataacttaattagtgaatcttaattttcaaattagttctcaagatgcgagtacaactaatgtgattttctcattaggtctcccaagtgactacatgagatattaattagtatattagtggcatttgacataatcatatattatgaattttatataaataataatttaattagtagatccttattaaattagttattctgttatatgacattagctcaacattggattagtgagtacaatttatttattagtaatgctctcttaaatgaccaacgagattattgggtaaatagcagcataagtacctaacgttttatgtttgtaagcggcataaaccaaaagtttatttttagcggcataagtactcaatgtttgtaagactataatttttctctaattttgtcagtccagactttattatcgtcttaaacaggacacatataaggcccgaattctagatcattgggtctagatagaaatatgtattaggatttttatcccctgaactttgacat

SEQ ID NO: 306003 - DNA, 936 bp, Cannabis indica
tattttctcatttttctctctgtatttggaggccttttttttttttagtaattttccatttatttctctttctcatctactttttatttcaacaattcaacccgacccccccccccccccccacccaaaaaaaaaaaaacaaaaaattttattatgtcaataaaaaattgataatagcagtaacagaaaatgtaaactcgatcgcgactttgaattggcattttttttaaagaggttgattttaaaacaatgtgtagttccttccgttagcattatttgcatgtttaattagatattaacgatttctcacgtagtgttcattaattcacataccaatttaaaaagtgcaaagaaataaaagagatttttgtttcttttttaaaattagaaaaggaaaaagaagataataagcttttaagtttcaagacttgaagaaatgagatcttactgttactggccgagtgtaatagcttcctgttgaggccagtactgttgctactaatttccttgaaaatgacctgtttattaatgccagtatctcctgtactcgttgctttaaactcaaagaactccgtcactgcgtgacattgacacgtaacagagagatttcaaatttagaaaacacaatatgcatagtatacaattatatactccatgctgtatatccacatgcataaggagaaatataagaattagctatagctagtatacataccacataagaaagtaaacatcagaccacaagagactacaaaaactcttgggtcactaacagggcttcttagtgcacctctcatgatcacgtacgtagcaattaccttcgatgatcttaactatatttatatatagttcacctgcaatatataccacattttagtatacatgaaaacagctttcaagagctttacactacctgtcagagagagagagagagag

SEQ ID NO: 306004 - DNA, 2326 bp, Cannabis indica
cgtgcataaagtggtttaattgttagttaattgcattctatggtttcatgagctaaatgaaaataaattgaaatctgtcaagggtgtaattgaactgaaattctggattatatgcataagtgaatttttttcataatcatgttattgaagctacttgaaaattactcatgttttggagattgacttgtttaatgtttatttagtgttttactcgaggacgagtaaaagcttagtttgggggaatttgttaggttatttttagtattaattttagattaagtttagtatatttttaattgagttttaatcgtgtttggagcatttttacgcttgttatcttttatttttgcagatttaaaatagaagaagattagaaaaatatcagagaaaaagatgggaaaaaagataaaaatatctcacaaatatcatgatatttaaaatagagaaaattgtgcaagaaaataaagctgaaacttcaagcctgaattcgacggtgttctgattagattttggaaaaagtcaaaacatgaaagttctagatctctcttttatctttccggaacatcttgaatcgttcaattccgagcaatattgagagagttatggtccaaatactatcagtcgacgcagcagaaaaaaatatctcgcaacacaaataaagttgaaacaatcaattattctaatcgtcctattgcaagtaatcaagacaaaatgcttaataattaactcttttagctaagtactaaatctatgaaaatgcatacaacttaaataaagctttaaaatcaatagagacaaaataatatagacaataaactaatgaagcatataattaatgaaacttaagtcatgaacttacacaattgatcttccacaattaaaaatacctttgacaatattaagaattgcaattgttatactcatattttgagcagcaatatgaaactgacacgtgtaacaaagttggaatacaaaccagctcaaattgtacatcattaaatgcattcagatgactcgcctcgggaaatacagttaataaaaatactcgaactcgctatcacataagcaatgacgaaacacgagtaataactaccgattaatgagaccagcgaaatgaacgaatctatctcgagataaccagaatacattatggaattattcagaataggtagataatgagttttgtagctcattaacccacatatccattagtatgttaaaaggataaagacaagaactttaacattattcatctcgcttttaacacactgaaataaatgtcttgcatatgcttcacccaacattagtaaaagagtgcaaaatatactataactatacagtttaacattattctacgaaaatgtttaaaaaaaatgttgattgaatgacaagaataataaaacacaatcaacataactatttatagataaagacaaaaggtaattatacagttatttataattatccatatttttaacactaattaattcacatacaaaatctaacaaatatgctataaaattacagtgcaggactctcactctctttttgtggctttaaagtcatgtgtgtttgattgatcccgaaagctcccctaacttgtactatctcatccaatttgagcctttcaatttcctttaatttaatcacctatatagcctaatggtccacatagtactccaccaaaacccagatcaaccatctcactatatttattgacagttttcttttctcattgataatctatttaattagtgtttgtttcttgtctcactctttaagaagactaaatattgcttctttaaaaaagtgtaagttgtagactttaaacacttcccccaccttttgtgtttatgcaaattatggctttgattattttatttttccccaaatcacagtacaccatctcccaataaaaatggaccccaaggtggaaccaaaactagtttaatttgtcgaagttttcatttatcaataaataaatataatttgtcttcctgaactataactatggtagaattttgtttcttgatttttttgttacaaattttttttatgaactataaaaattaatgcaaatatctattttttttaagataatttattcatctaacattaaggtaacataataaatttggttcagtttaaaaatttagataaaaaataaatatataatgaattatgttaatatatatagggatatgattttgtccgtgattgtactttcggaatgcattccgtgatgtacggcagccgtcagatgagggacttatgatctaggggtaattaggattaaaaagtagaacgtacctgacactcatttaat

SEQ ID NO: 306005 - DNA, 1747 bp, Cannabis indica
ttaacggcaaaataaatagaacctaatagaaggggcataattatgtaactgttatattttagggagaatttttaacaagccgtatattttaggggacaatatcaggtagtgccgaaagttcaggggtcaaaaatactaattattcttttattaattacaattagatagtttactaaatatgtatatttatataaaaaactgagttagttaaaataattagttaacagtgagctgttctgactaacattttagctaagatttctaagttctaacaataaactaacttgcactaacatcctcctccaatcttatggtggaagaattcttaccctaagtttgatcctcaatagaacaaatctagaacaagctaagactttatttaagataatatccacttgacctttgaaggcatatgttgaatcacaggcagcttattcagaactttctctttaacaaagtaaaggtcaagttctatatgtttagtcctttggtacaaaacagggttgacagacataagcaatgtgcttaagttgtcacatcttgacaccacaagattggagctcttgattgagaaacttgcacttcaaagaggagggattgaatccaaatgatttcatttcagcagcaagtagggctaaacttatatacttggcttttgtactagacttagaaacaatatgttgcttcttggaagaccaattgacaaaattattactaagataaacacaaaatcttgaagtggaccttcgatcattaggatcagaagtccaatcaacatcacaataacacatcaaatccatatgtgaagacctctttaagatataagccatgctcaagagtgccttcaaggtatatatctttaagatatctaagaattctcttaattattttccaatggaatttcagtggattctgaaagaattagcttgctctgtttacaactaaagctatttcaggtctagtaatagttacaaattgtaagggccctaccaagcttctgtagagttgtgaggattgaataggaccatttccttgagctgagattttctccccacctatcataggtgtagtcaaaggatttgcatattgcattttagctcgacaaagaacatctttgatgtatttctgttgagtcaagatgattccatctaaggtaatttgcacttgaatactaacaaaattgctcaaaggaccaaggtccttgagagagatactgaaactagtgttgaaataagagcaataatctcactagtagaactcccagttgagaatatcatccacataaactaacacatatataatgttttgagaagtgattctgataaactaataatgaatagaataatttttatcatatcaaactaggctttagtgacctacttcaagccatagatggctttatggagtttgcatactaagtggaggacttttggatcttcaaaatcaggaggctaagtcatgtagtattcttcttgtaacatgacattcaaaaagatattattaacctcaagttgatgcataaaccagcctcttgctaaagccactgttgaaatcaccctgatggtaattggctttaattactactagactaaaggtttcatgaaaataaaaaccatacttttgatggaaaccccttgctaccaattgggccttatgcttattaactaaacctgtaacatccccgcttcaagcctccattgggcccttacacccacggaataaatggctcttatacacgagtacgtca

SEQ ID NO: 306006 - DNA, 2157 bp, Cannabis indica
aaaaaaaaaggcctccaaatacagagagaaaaatgagaaaatatttttctaagtatatttgaaccaaattatttttcttttttgaacaattacccttattttaattttacaattacaatttttttcccttccctcttgcacattttaattttaccaaatatgaatgagagatcttttgcattctaatttcctatctctctccctttcaattttctaattactttgaacacaatttaatgaatagaatgtaaaacttagacagttgtttggtgtattttaaatttattaccgaagacttaaatgctagaatgatacatagttgtgccaattagtctatagagtcacacctaccgcttccaccattaatgcaagggaggctccgtttcggtagttaaagcagtttaataaacaaaacaaaatctaaaacttggtggttgaacttgacacagatggagttgacatggatcgtatttcttcaagtacatgctcaaaagatgacattgcaatcttccaagggtcaacagccccacttcctaatgggattccctcctacgcagttcagatcctaaacgcccgcaattcaggctgcagcatctcccacattcatgtcaaatgtggatggtttagctctgtccgtttggtaaatcctacaattttcaggagaatttactatgatgattgcctagtcaacaatggtcagcctcttggccccggcgaaacactctcattccagtatgccaatagtttcccttatgctctctctgtttcatctgtcgtttgttgctgaacttatttccctttctccttcgtttttgccttttttttttaatgaaatgtataatatatagtgaaatcttaataatagttgtcctatattttcactaaggctatatgtatctaagcaataaaatttaaaggcaaaattgacagctctgatattattaaactttatgtttttgctagtattgaaaattaaacagaaacaagataagcctagctaataataactataaataagaaaaatcagtgacaccaaccatagcagaaccacttgggaaactaggtagaatccacccctggccaaaatgagaattgcagaaatgggatttttcaataactcaaatataggcaagaagatggtgtatagggctccagtactgacagtgagagcataaagtgcatatcttcttacgttgtcccaaaactcttcagccagtggcccttctggacctaaagctaatgccttttggtcatccaatcccatcagaaacagcagaactccaacagaaaccgccccaactattaaagaccttgaatagtctatctcatttgtacaaacatgagccatattttgaccctttgacaaattttggcatctggggtcaacttcttggatcaaaattgtattgttgaagatttcatctgatttgactgtgcattgtggcgcagtgtgtctctgaatggtaatactaacttttgaaagcaaagatgaggcagcgcgtggatttgtgtggtacttttggtgtgagattgggaagagtggtggacgaattgagatagaattggtaagattggtgcacctgagaaggttgaattgggatttcaagctacacattttgaccctcagcagattaatgagctcactgttctgttttggtacaatgcggtgtcataccatcagattagctttttttagtttgtggctgctatttgctgctcttttcatatccttatcttgttttcaattgcctaaatgaggtccaaatgtaggtgaaattcacttttgacttttcagtcatgttaagtatatcacctaatttcactcacaacgcccaacggtatacagtatcagaattgaattcctgtacaaaatatcaaaattagaatttattgtatccatcgtgtgaaattacccctcctaaaaaaagtatttttaatttatatttgtaaactctataaatttgagtatttatatgggtaaatactgcatgtgcccgtttggtacgcaggactggattggattagacaggctaatttgtccaatccagtgtttgggcatgttacaagtctggataactaatccagttaacctcatctgtctgtgattatttgcatgtgagattttttttttatcgttttttaatttaaattttatta

SEQ ID NO: 306007 - DNA, 809 bp, Cannabis indica
tcaacttattttatttttattttcaagtattggcaagatctaaggattgtcgagatctataactatcgtcgatggtgatggtggttattgagatttattaattttttgttatttctgggtttgttatctaagatttgggctcggggtggttcatgaccagatttggaatttttttcttcaattgcgtgaatgcaaaaattgatgaaaaaagtgtaaaaaaaatcaaattttacatatttgcatctattttcccattttttcgtcggtagatatacatcagttcttgcaactgatgtagtgtcggttgaaaactgatgctagttttttgttgtagtgagtaactaatttaattagatttagtagccaattgcttttattcttaaacttttgaaatgcaaaacttagctaaaatctctagccaataaggtgatgctcgatggcccgagcaaaaaccctacaaattattgagaattattttttatttttaaaaaaactaattaatatttagggataattgtgtaaaattttctatgaattttattttgagtaatttgtggcataaatacctaagtttaactcccggttgcagataaatacttaagtttaatttttgacaataatcatgcctaacttatatttctgaaacttccataggtacatggtcgttaagtgtcaagtcaatggccacatgacaattcctgattgatctaggtcattaaatttttattttttatttaaatttttaaaaatataccataaaaaaataacacgtgaataatgacttgacacttaacaatcaggtacttata

SEQ ID NO: 306008 - DNA, 1080 bp, Cannabis indica
tattttttatttttttaagttaataaaatatataccgatattatatttaaattacataaaagtttttaaaaaataaatttaatacatggtgtaatataaaagtatgagttaaaaataaaaaaacaaaaatttaataaaacattttaaagaacaaagtagaccacattaaagttacattatctcttataagtgtaaaccacgtgcagaaaattgattaggcaaacaaagtatataatattaattacttaggtcatatattacaacaatattattatttcaaattttggaaagaaaaaaaatgtaattaatcccccaccaaattataaatgtattaactgtcgaggattaaattatggattcctccactgttgtgattgttaatatatttttttttctttttgtattgttgttgttgttataattaattaaattaaatgactacaatttaaatcagatccacgaaggtttaagctaatccatcaaacatcatttgggaagaggcatttgcactattggagccaacatcgaattctgcggtggccggtaattaaatatcaaaccaatttttcttctaaataattaataatatttcttcaaaaaaaaaatatattcaatatacttttattaaattaaagagaatttaataaaattttgactaaattgcagatctgctttcttagacaattctataaatctgtatcaaaggtggattatttgactctaagacatggattcatatcggtattatctactgtcccaatcaccagttatactctctggttgtacttatgttattttaagtattattataaatttataaagattaatgaaattatattatcgtacgaacatcttctaggcacattttgatgaaggaaccaactttgatttccaaaaatatataagaagggctttggagaatgattttcgcgtggttgtgggaataaagtaagtttaacttataaattaatcttatatacgtagtttatttcttttcttaacgaaaaatgtattcatatagaagaggaaattagatggggtttggttggaggtaatgaaatggaatggaatggaaaggaa

SEQ ID NO: 306009 - DNA, 1132 bp, Cannabis indica
gtaaaataatttccaacacgacataattctatgatatctctatttataatcttgtggatacaatttagtccataaatttgttcatttttagtctacaaaaaattttagcagaaaaaatcttacagtggcaggtgctcgttgggcaccagtggtgttgatcagttagtacttttcaaagtgtaatattgttattagtgcaatcaagtattgggttctatataattcaatgtaataaattttatagagtatcgctattgtaagatgtcatcttctctcttaatcgatgctagttatcatggtttttacgtgtaagtgtcactcgatcgggtggctccacaaattttgagcatatttatgtgtgaacccttcaataggcaagttgagagagcttcccaatcaatgtattacaacattttatttgcatatgggatttgaaagctgcaagaacaacttcaaaattgttcaactatcaaagagtccaactaaatctccgaatggtcacaaatttaatgtgtacttaaattttccgcctgaatgagaaagaatagattgtgaaaaaggaccaattcattgttgaccatatagataaagattagcctaaatctaagagattctcctatgaaacacattatattttttaccatgaaaatttttactcaatcgttaaatttttcactttagttcacccaaaagcaactctctttgaatggccaacacataccatcattgcatttgacatctccaaagttcttaaacgcacatgcaactttagctgtaatagataaccaattatagtatctttaactattaaaagttcatgatatttttttgtgggatggaatttgaagcacaacataaaggacttggatataaatttgaacaattttttttttctgatttttagaattgaaagcaataatatatcatcattgttcggacaatgatcatgaaaaaacaaagtattgtgtaataaattttcttgaaggaaatgatgaaggcatgtttcacaccttcgttttaaagtttattggatacatatgcacttatcacaaaacttttaaaatgggaaattttacaaaatactggaatttgagtgaatttttacaaaaatactgccacacggaattttttt

SEQ ID NO: 306010 - DNA, 2726 bp, Cannabis indica
ataaaaataaaaataaaaaacatgcctgaaattgtatgggacaaaacagagttgaaaatgtgatgtattgccatttgccataacacagttgaaaatgatcatgaaggacctgttttagatatttagatgtaagaaatttttctttctttcttttttttttaaggatcatattgaagattcgtttaataatcaatcactataagtttactaccaaacaaaatatgagcaagtgtacccgtaagtaaacaaaatatgagcaagtttacaaccgaatcactataagtttactaccaaacaaaatatgagcaagtgtacccctagttgaaaatattaagattgattcggttgtaaactatttgaagtataggtttaaataaatttttttagagctattgtacaaatatttttctaatcaaataatattatgtaaggttgtttggtatagggataaaaatctttttaaaagtgataggaatttcttaacactttggtaagaacagtagcaacatataaagaaatagtgatataatagctattatattgatattagaagaaaacaataggtacgtattggagagatccaatgctctctcctaagagtaaaagctcacttaactaaataattcactaatcagcctttccaatacactcatatatactactttaataccacattacaatgactcatttacttttattatgtaatatcctaaggtttaataataccaagctgcccaaaagtcactttgtcctcaaggtgaagagcaacaagcttccacaacagtctttgttcgtcctgtatcaaagtaccaagttagcagatgcacgttattcacactgcggaagagaagataccatttaacaagctggcctcactcgaaaaattagttgagcaaagttggagtcccacctttggtaggatgaacaagttatctttgaaatatggcggcatggttaggcgtcttcaaattggcatgtcgatggtcccccaatcaaaatgtacgtagttgctagctttaaaggcccagataatgagcatgaaaaacacgatagtctctccaatagcaaaaatagagttgacgagctctaattttcttgttgcgctcgtcttctgtcaacaaaccaatcaagtaagggcactccactgcgataattaattgtgatagtctccaaagccactttttgcttccaattttgtccctaataattgttaccttgaaaagtgtcaaaagagtcatttatatagccttctagtagggtttttatttttatttttctaattaaatgaggcaagccgtgatattgacccttcatgttgcggcctctgaaggctatttttgggctgcaagcttcctaatgcaatgagtgataatattttggctataactctttcaatattacttgaaaatatacgattcaagatgttttggaaagttggaagagagatttagaacttttattcatgatattttttctcgaagtgaacgcattacagacttacagtcaaaaattaacttcaaatatttcagacttgatttttgatcacaaacaaaacgtgttgatcatcccaaaacttagaatttttcaccaattatatcctagaactccaaattctatgaaaattcatcatattcatctcatttaacatgattcttctcattttcaattcatattatgaatttaccatttaaacctaaaacaagtacaaaataaatgtaattctgtacaaaatgaatataatcaattgaaatacacatctaaaatactttataaaatgaacggaacccccaaaattaacctttacttgccctcgagtaaagatcgacactaaactaaaaacaaatgaacacatagcaagccttacttcatttcacaccacatcaccgctactcacaagattcaattgttataaaactaaattttcattctaattgctcccaatactaactttagcactcaactttggaaagaaaaatataactcacaaatgacaaaaattattaaaaattaatatacgtgctcaaagtcaatccaacatatccacaaattgattattaataagcttgcattattcaaccttatccactaatatcaacgacgtgtgctttaaatcaaaaggacttaaatgggttttaacattagacttaggtaagggtagatgaaaaatatcatttcggctcacctatatcataaacttctctattaatatcaccctacaatttttataaatgatcccaatatctcctttttctataaaaactagagaacatttttttttaataactttccaacaactttccctttttttcaatttacgacacaatattgccaaagtttctcttctttttttcaatcttttttacgttgttgcaaaaataacattttgtatgaatgtttctcaataatatctttatgtttcacaaaacaacacaaaattctccattacagtccctctgaacttataatctaattatagtataggtaaggacaaaggaagatggtaatagattcaagattttttctttcttaagctcaatgtatgtataaaaacaaaaaataacaagttaaagctcaaattctatgaaaaatcatcatattcatctcatttaacaagtttttattaatagagagcagggtcggccctgacttttagtgggccatagaaaaaaaattattttgggcccttatttagaaaaaaatatagtattttcaaaatcagtaaaaaa

SEQ ID NO: 306011 - DNA, 1359 bp, Cannabis indica
aaaaatatatttacctggaatctacatataatatgtacatatatgtcttggtttatatattgatatggtaaataattagctcaaaattgtattccataatatgcaatatttttaataatgaataggattaattcatgacaaaacacataattaactgatgccatccctgcgatagctataattaataattatctaagaatggacaacacataataactaattaaatgatcttaatttgtataatacttttttaatagctcttctgtaattatatataattatgtggagacctagctatagctagttcttgctattaagtagtatgataattaagtaattaatatctcgaaaaaagtaaatatacatgaaagaccgtgcaaattgagatcccatgctaattaacttatcatgaaaatgttgttattaaaggctaatctcgagagaaattaattcagttaatttggcaaagttaattaaacaagttttatcacttcaaatgttgttacaattagtacatacaatattgtgcaataatttattattatatttagcagaataatgaataataagtatttttaaatcagtaaaaagatatatagattgcttgaaattaaataattgtttaattggaattacaaacattatgtaaaggaaaaactgctcaattagaataagatatagttattagttaatgttctatcaaaccaaaaaaaaaaaaaaccaagcaaagatatctatttccattaataataattaagtaatgctctcgctaatcaattcatgttaatattcaaattctataaaatagtatgtataccataaagtataaattatgtatacctacattaaatgttatatgtaatttcataatattgtttctactccaattttgtatatgtataataagttatagccttctatgaatgtatatatgattattatactgctacataaactttgtagcctaatttaattaatattactggctaacaactctgttcaccaaatccaacccgccatttaattatacacatatacttcttgtatatatatacatatagatgaccctattaattactagacatgcatataatatatatctaagtgtacacagcccaaaaaataaaaggcgtcctttaacttaggcccactgatatttggacaatgaacatatatatactacagtattatattttattgtgcccatgactatatagtatatatagatccaaaagaaactgaaaataccctacaaagcctagttagccccccttttcttataaagtctttctttttggaaagatgaaaccaagcaaaaaattttaaatatatatatatatatagtagagagagagagag

SEQ ID NO: 306012 - DNA, 2283 bp, Cannabis indica
gtttaaaaaaaacatcaaaaaacaacttgtcgtgatgtattattggcctgaaaaaataattgttgcaggggtaagggctggctctaagttaaggcgagctaagtctgtgtctagcctactcaatttaagagccaaaattaaaaaaaaaaaaatcttttaaaaatattatatatttttttttaataatttttagaaatactctttattgtaagaatctaaaaaaatttttacctactacttattttaacttagggccggttctataaaaagtattgcatgatgtccattgcttgatagacatgttatatatatactaatgaataagatgcctgaaatttcaaaaaaaaaaaaaaatagaataagatgcctgcactttaaaatatgtactaaaatattacacttaatgtgacactaaatatattttttttttttaaaaaaaaaggtatggttatttgaaaaacctgtcagatttagtgtatatttcgagtaaatatatatactaataatttactattgaactctatatattaaattttaattaaaatgtgtgatttataattagtttgcaccaacataatataacaggttattgtttgtattggacaccagccatgcgctttcaaataatatacgtgtgagattctgctacccttatatgagaaattaatccatgtatatataaacatacccaatttatatatatagagagagagataagtatttaatctgtatttccatacccaatatgcagcagtgaaaccagcaacaccagaagacaagtgaatgacatatccaccagaataatcaataattccattaacagaaaaatacccattagtagaccatatactgaaagccacaacagtatacgaaaacgttagccatagaggaacgaacaacatccaagcatagaaattcattctccccaacaatgctccagcaataagaatcaatgttatagctgcgaaaacaaactgaaagtacaccatagttgcatttggtatcattccaagaaacgctctctggaagaagtatttctggtccaatgcaacattggcttttccccaaagaggaaatagtttgtcaccaaaggacatttggtaaccccaaccaacccaacaaactagaacgcaagcgaatgcgtataaaaccatgaaagccgaatttacagcccatttctttttcaccgcaccaccgtacaaaattaacagccccggaacactctgcatccctactaaggttgccgcggtcagttgccacgcgttgtcggctttgttcatccattctggacttgcaaagtctggtattaggttagaaggtaatggaacggtggcattgagattggccattttttatatttttcctcaaaagataaacaaacacaacactactacttcacagtactcaagctttgttttgttgtgattttgtgtgtttgaattgttaatgtgtgaagtttattatataaagtgccaaccaatgtccttttaaacatagagttttgtgtttggtttctcaggacaacaagctgtccaattgatggttttttggatggaattttcaatgggaggattctgattttgaagtttaatttattttaattttgttgatttttatgatttttttggtgaagctgtcactgagcaggattctctcaggcataacttataattgaattatgtgtttttattagttcttgacgttattaacgatggtatcttgtttggctttggtgatagatgtgttataattccttgtttaatactttattaacaatgtttaatgatgttgggtatgagcacaaggtaaagaaaaacattatttttattaattaaaaggcaaaacataatattggaaagaagctatcgacgcgacgccatgctaattaataattatgttttttagtggtgtttaaatttatttaatatacttatatcttcatcaacattagtgtatataacaaatgttgttgaaagtataaaataaagagaaatttaggcatagtgtcgtaaatctcaaatttattagggcttttttcataaatgtacaacaaaaacaacataattataaaaaatgtgcaaaaaaaaattattttaaaaacttatatattttgaaaacttattacatgaaacaatacattttaatcattaaataataaactatgtttattaaaaactcaaaataaacaatttcctaaaataattaaacagttttataaaaataaacaagttaatttttttttattaaaagataaatgtttattatctattttagtatgaatta

SEQ ID NO: 306013 - DNA, 1562 bp, Cannabis indica
atttggcattgcaggaatgagttccttcaccacaggaagggtcgtggcaccatcaaattcatactacaccagattttttggtgcagtaccagcaaaacaacagacatcaaagctctttcaagacttcttcggtggctgaaacggtgaacagcgatgcttcctcaggttttcatttgaaactcacagttgacgctgcccagaatgtgacagcaaacaaaataggtcttggctttgctctttacaacaacaatggggatccgattttgactgttgcgtcaccttggaatggaattcaaccacctctgctaatggaggcacatggactatattttgctttatcttggtgtcaaagacacaacatagctccagactatattctttctgactgtaaatctttggtggattatatttgtaaggctgctacacattatttacttctgaataggtttgcaacaaatattagaagcttgttgtcttctctccctaatgctactttcaggcacatcccaagaccagaaaaatgaggatggtcattgccttgcaaagtttgcattaggcttagatcaggaagcttgttggaaagctcacaatttcactctgtaatctgtatcctgtacactatggtttattttgaaatggatacatcattcttattaaaaaaaaaaaagcggatttaatatgagatgaaccctctctatgattatcccatgttaaattgtcaccttcaatgggcaagtcaatcaaatcatgggagttaatcatctcagaaataaagagtaaaaattggtcctttctttttgacccgacatgtttcgaagaattcagaacaaaataaatatctccaagaatcttccaagagccaccaaactttacaccaagatttaaaatatttgaccaaaaacttttctttttataaaaataaggcagaccatacacataccctcacattaattatcttaagttaagcttgtttatactttatagtttcaaataggtacgtgaataccagtcacaacaactaaataatacattattttatttgttcatttaatttttcaaaatactcacgtctcttaaacctaaaacatgcaaaaagtttgaaagacaattaatgaaacgtggaaaatgtttgtttactctcttcttactttggctattatagtctctatctctcactttaattaacgctttggaatatctaatagtatatattcattcacatatatcctaagtaatgtattttgactaattattagttctctgattctttttcacatattacccattgatatttttctatatataatataatagcttgtgttctagacgttagggattctaattttttattttaaaatattaaatgatgaactcgtatagtatacgtgtccgagtgtttattaaatagactataggatgttttggatagttataattttagagtgattctacaatacaccaccttaaaaggatgtactgatgcagcctctacttgttttggtatttaaaaaaaagtttttagtcttaattttttttcttcatatgttatagttatttaagat

SEQ ID NO: 306014 - DNA, 1995 bp, Cannabis indica
accatcaccatcaccatcaccaacaccaacaccaacaccaacaccaacaccaacaccaacaccaacaccatcaccatcaccatcttcgttctcactcgactcatcattataactcgcaaacctaatcctactcgttgaagattcttcgccgaaagagttgacagatttggcaaatttatagcgccgattgtcatcgggaaaccttgtaatcgttccggcgaccatctgatcgtgagtacggctgcgcttgggggctgcggcgggtgcagaggagggttgaggggccatggaggcgtctatggcttcctgaaattggagacgtaaggcgaaatcgaggtcggactcgaagggttgggcgtccatggcgttggttggtatggttggtagagacacaaaccaaatcttctgaaagtggtagcatggcagtttggcttctctgttattatatatatattgtttggtgtacacgtgcatttttgattggtggaattaattaatattttattttttaaatttttggttgaaaagatacttgggtcgaaattatcgctcgaaacaaatttgggaagtgaattaaattcgagtaattgtttgtttgtaataaaaaataagaataaattcgaataattttttttagcaatatttgttcataaaatagagggcgattttacaatgcacccgtttaaaatgaatatactgatacagatttgtttcgacatttaaaaaaaaaaaattagtctaattttttttcatattcatgtacgttatagctatttaagataacttacaaaattttgaaaaattctgaataatttacaatataaaaaataatgttcaaacattctattttacacgcgtatgaaataaaatagtcatgcgtgcaacacagtttgaacgtagttttcggcgtgttaaactttttcaaattttttaaaattttacaggatgtcttaaataactataaagtacatgaccatgaaaaaaaaatttgactaaaaagttattttgggtgctaaaatagaatagggtacatcaatgtatccatagaagaaattgatatataataaattattaaaatataataaatttcttttgttgatatatatttttttaaatcacaccgaatttatctaattattaaaattttatatgaggttatcgtttagtaattataaatataatataaaagagaaacaaacatttttttttttaaaaaaaaatcacactaaacataatatttattaaaaatttaataattaatatcacttcgaatgcaaaaatgaagtgaatatagttgcaaaagcaaaaaagtttccatgatcaatggagatgtgctcataaactctcatattaagttgtcatggtctagtttccaagcggataatggagtggaacaatggattttaccaaaaataaatagtataaaagtcaatattgatgcagctttatttgattcgaatcataagtatgggttgtgattggttgttagagatgaaaatgaattgcttattaaaggttttacgttgctttcacatggaacaattgagtcgaagctaactgagataatggacattcgagaagctcttagttggatcaaagattgaggctaacagaatgtttgtgtggaaacaaactgcttatgcgttgtcaaagctttacggagctctatttctataatttctttgtttggtattgtaatcaatgattctaaagctttattttctaaacttggagttatttttatttattttgttaaacgatcaacaaataaggtagttcatagttttgttagagctttttttactctaccctaattgtacattcagtttggattgggtgttaactgatttgttaccaattttggtaacaaaaattaatgattaataaatatttattttccatttaaaaaaaatactaataattgttccttccaaaaaaatataggtaaatactattttggactatgtgttttgcaaaagttactaattggaccat

SEQ ID NO: 306015 - DNA, 1683 bp, Cannabis indica
gaaatgattttgactatcgatttattagtaaaaaacatttgctgtctctaaagtatatcctcagaaggacattggcagagtagagtaactaatgattaaccttactattttcattaatgtacgattctgatgttttgcaacaccactatgttgtggggtttttagggaggtaagttgagatacaatttcaagtttaactaaataatttttgaactgcatatccaaatattctccacccctatcagttcgcaagatctttaaccacttaactaactagttttgagccattaccaggaattcttaagacttctcaaacgtttcaaatttttgtgcatgagataaagatgtgaatatctagagtaatcattaatgaaagtgacgacgtacttataaccacctctggcttgtatattcaaaggtccgaagcatctgaatgcaccatcccaagtggttatgtagcatgtgttccctttgcagagaagaaatgtttagttattttgccttctagacaggacttgtaagctgttaactcacccagggtgagttagtttcaaaggtccacctttggttagtctttgaattttatcgtaactaatataaccaaaacgtgggtgccaatagattaattattatatcgttattgttgcaaaattcatatgatatgcttacaagtgtacaaaattacaagaaataatagtggttaagagattgatatcatcccatagagattaaaataatcaacacaattatttatagcgaatattaaaacttaattttaactaagagatcaattttgaatgatattagaaaagaatatcaaaaacgagaataaaaagttaaagttaagaataatcagataaaataattgtcaagatttcgatttcaccctaattaaactacggttttgattattaatgtgcctagctgtatacccaaattttaacgacgatgacatgtcaacagtagcaacacttggcacaaaaatatcgagactaaattaatgaagaatatgtaaagccatgaccgttgggatgaccgttaatcatgaagggtggtcatgaccgtcaaccatgaagggtgatcatgatcgttagaatggaagtcagacggtcacctttacccctagcttgagtaaggtgggagtctccaagaaggaaaaatggactaatactttcttaagcagaatgaacaatcagcacacacctacatgccaagttagtccaaggggtagatgacattacctccaccatagacataatgatactcttaaaggtagatgagaacatctacataacattataactactgacaacgtacaagggatctcggggggtcaccccgagatgacgattgtcacccttctcaagttgggtcaccggggggggggggggtcaccccgcgatgatgattgtcaccatcctcaagttgggtttcaggagtgttgcccccaagtatgggcttcatctccaaaggtggtcaacgaccgtgtcacacccttaggagaccctcgtcattagtgactatttcaaatattcaaatcccatgaaaggctcaaagacaattataaacccacgaaaataggggatattatcataaaaatcagacttcaaccacctccgaaaatcaaggaaaacggctgagatagcttcgcattggtcgcgtctcctgaagcgagaagcactg

SEQ ID NO: 306016 - DNA, 1411 bp, Cannabis indica
aacatgaatgaaagttcaggggcatgatttagtatatatcaaaatcaaagtttgaggggaatgatttggtagatatcaaagtttggagagcatggtttagtacataaagtcaaacaaaagttcaaagagcatattccatgtccttaaattactctatagatacatgtatataggtatacaggtattgtggagtggtggagcacatgcaatgaacataagcattaatatggtatagagttggaaataatggaagggtgtgtaggcacactgccccaaatccaaaacgtctgattctgattatattagcatgccatgcatgccctgcatggatatccatatttttacaccaatttcccaaaacccaacttaaagataacaaaaatactgcacactcttcttattccatgtgcacatatatctttatagataggaggattattattaatggccactaataatcttgtttttggtaaatgactacaacttaattacaaaataattaaaaaattataaattatttgaaaaactaaaataaataagattaatgcacattgtacatttttctaataatagatctatttatacacttatatataaataaaagagtaattatgttaaaaagtattaatagtgtctaacactcttttatatattaatattgctattgatttaattaagtatcgcgtcctatataatttaatgtaataatttttagggagtattgctaactaattataaaataatatgtctagaaggtgttaaatattactgatatttaataacaatactataaataaaagacattcatgcatgggtggagtcgtgtcgtatgtaaaattaaaatgtggaaaagtcaattaaaagcattaaaatagttgactacttatacctaattactaccatccaactactccttcatgggatcagtagtttatttattattttcctctcttgaaaattagattactcatataaatataattaaggtttaattttctcttcaattagtatctatctagtggtgttcaataactttttcagtctaataaaccccaataaattatatactattatgtcaccatttttcttatataggatttgtagaatttgctcaagtaaagcacacggatctcatatatatgataaaaaaacatgtatgtttattggatcacattcaatgtttttaggcctattcagattcaatctaattatttattagatgttaaattttaccatctgatccgatccagttgattacagtcatccaatcaattcaacatccattgaatgttggattgaatcggttctatcagttagatgtattttatatatatttattggtttaatatttagacttattcaatattttaaactagtattttttggatcggatcggattcatccaatattt

SEQ ID NO: 306017 - DNA, 1574 bp, Cannabis indica
atctaccgctcaaaagacacaataataaaaattgttgcaggttcattcaaccttgtagcttgagcactcaactattgtgtaaagcacgtaactacactactaacaacccccactacaaaaaaaaaatcacatttagtgacaactttttagtcactattatttttttgtgactaaatgtgacttttagtcacaacaaaatgttacttgtgaaaaaaacatagtatttagattcaagttgtcactaatttagttttagtcacaacaagtgttctggctaaaaacacattcagtcacaacaaattgtgatttttgtgactaatacttttagccaaagaccttatagtcacaacgtagaaatgataatttataattagtcacaatttttttttttattttcagtcacaaattttgttgtaactaaaagtaaaattatttgtagtgcccttcattcgtagagaacttgttattcctaaccactaacattgatttgatggcgagcctttaaagaacaaagaagatttgacaacaaaacaaaactatgtcatacagacaagactaaacactcaaagccatgtcacgtacagagacaatattaatcacagagtaacaaaaaacaaataacaaaacacaaccctcgatgggcctaatcggagaaaaaagacaaccccatataactataaattttgaaataatctttttctttatattctaaagcaataaataaataaaaatgaaagtatcttatttatttaatattgtacttctcaattttttattttttatacattatttttttattataatttctgtcatttttacacaaacgatcacttcagaaaaaataaaattaattgatgaagatgatggacagatattatgataaattaatatacatagaaataaatatttatagcaaaaaaaattgttcactagtcaccaatgatccctagattatgatttttaacgatagaagagagccaattacaaatcatatcagtttacaatatcgatctaattaaaaatttgaatatatattggtgtgataatatttatggataacttgtcaaggtgtgtaatatatttagttagttaagaaaatatgtagatgatattatatattattgtatacatttaataatcatacattaattgaggcactaaatttggatgatgaggatttaaattcttattaaaaaatatgtacttattgaaaatagagaaatctatcaaaagttgctagttcatttcattcatgtgcaaaatattatagataattctaaaatagaaatttaataataacaaataaatacaagtatacctaacaaagttgtaccattagtaatatatatctatagataaatgttaaaatagtatatgtatagtctactattatattattctttgtgtaattaaatattagtgagattttatatattttaatttaataaatattataaatatcactagcgatttttaagacgacatcttatatcgtgctgaataataatattgtctaatactaaattgtaggggtgttcataaaaaccgaaaaaccgaaaccgaccatcaaaccg

SEQ ID NO: 306018 - DNA, 1363 bp, Cannabis indica
tgatgatgatgatgatcagtgacattactactgctaatactactattattattattagtactactgctgagatcaccgggcttgagaaaaaagtgggcgtaatcatcattattaacatgattagtactattggagagaggactagtactgcttgttgtagtagaagtacaactatttaaaatttctgtgaatttcgggaatgatgattccgattcttcctcaattttcgctgcaaggttcatgtcgtacgaggctgattgatcatgagtaacagtagtagaagtagtagtagtagtagaaggattacaattagtccacggaaacccgaattcgaggttgaccatattggaagagttgatagaaataatattatcatgatgatcaatattatccctactacttttcacagcccttttactcgactctgatgagaccattacatcgtagttgtagttggggttaatggtgttaccaaagctattattaatattgctgcaaacatatacagtacacaataatataaacaatattttaatttcgataataatgtgtatatgcatggtagtactttcatgaggtgattgattttaaaacatcaaatcaacactaaagaaataaattagattccgaaaattatacaaatattttaatattaatgacaattaggatatataattaaatggtaaagtttatgaacacacaagagaaaggaaaagatgaatatatatatatatatatatgattattattgaggggagaagatttcgaggtgagataagagaaaggtatatacttacaaagtggatggagtagtagtagtagtagtgggtgatgaggaccaagtgtggtgagtggtgcttccaaatccatagcaagatggggtagcgcctaaaggtactagtagcagtggatgaggagacccaacaacctggtctgggagctgctgctgctgctgctgctgatgctggtggtggccgagatttgcagactccatgatgattataattaaagtggttttaaaaataaattaaagcttcagaatcccaatatatcaccaatataaaaatgtgcctaactatagagagagagagagaggaaattattagctttggtttgatcgatcataatcgatggtagagagaaaccaagtaagtagtgactcccatatgatggtctttctctttctttctttcaactttgcttttagctagctagccacttttctctagttttttttttttgttttcctctttactctttcaagtttcatcttaatatatatgtatatataaagtagccttgaaaagaaagttagaagagagagagagagaagaggagagagcgtgtttttagtttttttttt

SEQ ID NO: 306019 - DNA, 1336 bp, Cannabis indica
acaaatttgagctttaatcaatcacctctttcattcagaatatgcagaacaaatctagtcataaggtcaccaacaatacgccaatggttggagtaaaatgtcactgacattccatctggtcctgggctaccatccgacttcattgatgagagagaatcaaagacttcaatggctgagtaaggtcgagtaagggcttcatttgctgctgcaaattttatacaaggaataaccgaggtgacatgctgaagagcttcataatctattccatcagtagaataactttgctgaaaatacttttggataatgttacttatgcctgggagagatgagtgctcaattccttgatcatcaacaagcttacaaatgacattattgttctgtctactggtggccttctggtgaaaatatcgggtataagagtcccccgattttaaccaagaaatgcaagaacgttagtgccagtaatcttcttcttgggcaagtaaagcatcaagtatattttcacccgattttaactcttcatagtgtactgaactagtgttgttagagttattcaaagcagccactttctcttgagaaagttttattctttttagaagatcaccaaattttccatggtgcccatttcgaagtctgtttgcacaagtagtgagattttgaatcagttgaaaacctagattggtgtcagaatttttccaattacagttgatgatgtcgagacattcttcctccaacaaccataactttttaaatcagaattgagatttgaatttaagaggatgacaggccgaatcaacagccaacacaacaacctttagagcgtgatgatcagcttgaaagaaatcaaggtgagtaacagtcggggtgctgaaactgcttgtccatgagttgttgaaaaatccgtaatccaaccgttctttaatattaatgccattaatactattattgtgccaggtaaaatgttctccttcaaagcttaaattttgtaagccacagaagtcaacagtatctccaaaagcatctagttgaaactcatgatgtaaaggcccaccaaatttttcatcgtgtgaaaggattttattaaaaacacccttaaccaaccatgggagtaaaggagcagtattcttaagtttcttcaagagttaccgagtaacatgtctttgagaagtaatgggagctccatagaaaccagaaaaatgaaaagaagggccatcaacaaacgccatatagcagtcaacaaaattagtaccataattaaggatagttacatttacattagctttccatagaaaaagaagaccctgttgggttttgtgccctaaataaaacccattac

SEQ ID NO: 306020 - DNA, 2979 bp, Cannabis indica
cgtgtagtctgagggagcaagctgcactctctgcagctgaaataacatcagatacagtaaatgatttcactgctgactctgaagaggagagtgaagcagaggaactttctgatacccccaaaaggatacaggccggtgtggaataaattcttgcaaaaattgtcgaaatgtcatcacaaggaaatgaatccaaggcttcgcttcaaaatgaaaatggaagtgcttgggttcccaaagtaaatggaaaacataataagcatgtcaagtctgtaagtttgaacgttaaaggggaattatcacaaggaatcaatatttccaggatgatgcaagctaatattccaacgtacaagaggtcttgcctgggttagaaagctggttatccagtaagatagcatcttggcataatgtcgaagggcactccatccactggctttttgtggtttccattgatagaagaggtaattgcatttttattttattttttcaaatcaacaaggtgtggtttcatcttgcctttcagtgctgggaaagggcatgcgttacaactttatgttgcgttttcggtataattggactgtgttataccttgattgagtgccttacgaaggttgtagggttttaggaggacaagtgtaaaataaatgaataacaataccagctataatatactctgtaatgtgttgtacgaacttaatttgaaaatctcatggtaagtgcccagactgaatatcttgttatgttgatctaaatttttttcaggcatgatggccgaggtcacaacaacattgtcagcagcaggaattacaatatattcatgcgtggtgagtggttgaaagcatgctcaaacattacaaacatttggttgttgaatttgcgctgttatatatacgagtgtttcttaaatttggaatcccataatcacctactttcaaccttgatgaccaggctgagattgatggaggaagaggaatggctgtcatgttattccatgttgaatgcagcacagagaatttggtagcttatcgcgcacccaatacctctaaatcttttaaatcattttcacttgttatgtacactgtacattctagcttctgacattaacttttgttattcaggttaatgcttgctcaagcattgacattattctaggtgtattgggatggtctacgggttgcagttggtcaagctcaacagataacccagatattcttgaatgctaattgatctgcagtaccagccagccaacagtttcatcccagcaatggtaggctttggtatgaagttttgtccccagaaagttgagatacatcaccatgttcgttaagtagtagctttttttaattttgattaatttgttggacactcggtaacaaaataaaccagcagcagccagttgcgagcaaagtctgaattcagggcactgtatatagggaaaaagagtgcatagttaggataattagcatacattttgtaaaaacatacttgtgggaggacattgattcacctatactgaggttgtactagaattaatctttctgcagtacacatactacctcatttatcttccctctttgtagtaaaaaaaaaatgaaaagaaaagatcagaacagaactgaaaaatctgccttgaacaactgcaaaacttacatcataataaatgcttcttatttttactcgtaatacaccagtcatatacacggtcattttattttatcgcaattagctcgaatgttttacaacagtgctttgaacctccctgaacaagtaaataggtgcagaagtagcaataccagaagcaggggagaacgacggtaaaagagcagcagcaggagcattacgtacaaaattctaacaaaaaacctgtacgacctcacttcttctccagtaatctccaactcctttatcttctcctctgttcgtttgtcctgagttgttttcaactcttgcgcgtctgtattgttgaaaatgacatcgtttttattcatgtagtaggttcgttcgtctgtattgtcttctgctggacgtgctacctcttcggtgtcgcctttggctgattgcatttgcagatcaaccttaggatcctcctttagatgcagggcattctctaatgttatttccagttcagtaaaatttttcatttcctacaccaaaaatagttgtcaaatacatcattttttttttggcagacttgaattgaaactaaaatgacagctttaaattcacctgggtcgccaccaccgtgctcatggttgaagtttcacgatctgatgatttactgcaaacccaaaaagagaccctttaagcagtagacactcaaccccaaatgagatttatctatattatatataaaaccaaaagaaaaagattcgaccttgaactgtcaagaggggatgaagaagatgtctcaagaagagaatgcaatccacctgaatcttcatccttctttggcagacatttgaaaaagcattctttgggtgttttagtagtacaaccacccttgtttcttctgtatctcttgatagcataaaaggccactaaaccagccacagccaaggctcctccaccaagtccaaaggcagtagtagtaatagtggcttggccaatcttagtcctgtttttttctctgcttttggtatcacttttgtccatattaacttaatattaagatcccaaaatgttactggtaatgttttgggtgttggttttattagatttgataaagtagttagttggagggagcttgaagcggacttctttaggtgccagattcgctacttggcttaataggtttgagattctgctattctaaccgggtactaaggtttacaggctaatcagcatttgacatgtgttgcttcatttatttttcattatggtgctgttaattaggggtattcatcaaaccgctcaaactgcccgcaccaccaaaaaaaaaagcgatttgaaattctttgcagtgcggtcgcgatttaaattttt

SEQ ID NO: 306021 - DNA, 1662 bp, Cannabis indica
aaagattattacgtagacattaactcgacccttaactactgacattatttactgaattctgaaaatataacttacaataccgtctctgtatttatgagaaaagttattaaagtatatgtaaactatctacctcaacgtgataatgcaatatgcttgtttttaggtaaagtaatcgtaccaactcttgaacaaacatgtggactaagattcgatttgtattgaccatgacaagattgaacaagtcaccacttaaaagagaaagaaatatcactagcatcgttaaaatcagctattaatgatcaagtttaccataatgtagtataaagaatttaattaatcaggcttaatcaaaaagatgaaccaatgccatgtccttcactcattatttcaactgtagtactctacagtatatgcatgagtgacaatgtaaaacaaaaccctgtatcttgacactatgttcctctttttaatggtggagctctacttttgctcatcatttaatcaaagccacgaactagattttttctttttttctctttttaacttcttttgatgtaaatgtcaaagcccgccatagctaaagcttcaaagttggtatagctttctatgacaagcgactggtaaaaaaaaaaacaaaaacattatcacctttatgagcactatgtcctttaatttatatggtatagacgtgtaaaaaaaatcagcatattctacttgtatcgcagctgtttctagttgtatcacacacgaatatcaggaaaacacgaaatgggattctggattgaaattagatagacctgtgaaaccccaatttgctcctttaaacgccagatttggtgcaccttttcaagggaaaaacaaaaacccatctgcggtgagtagtcctaatccgtctgagtgggttatctgtttgtttataatccaagtttatgctctttctattaaagtcttttggccgtttctttgttttggggcttttctatgaccaattgtcaatattccatgttggcttatgctgtaattaatgctggttcagtgaatctctaggtgtggtgtgggggctagctagtaccaattttcgttatgttattatgcatgaaataaagtggcggggttctcatttgaagccattcaagctcatggaagcaggtgtttctaggcataagcgctctaaaaggtatcttttttcgcgcttaactttctacactttttttggtgtggctggtctttgaacgagaaaacaaaagaagggagaaaacgaaagatctaaagaacaaagactgcctcaatgaatatattggtttcaataattgggaggttcttaccaagttttatcttaatctcttgtctggtgagacatgctccaggattttcctctctgtaaagtatgtaaaacattttactctttaatgatttcatttgtgttgttattttcagtgacactgatccatttaaaagaaactcaaagtgggacaaaatgaataccatcctggaagctccttcccaagtcaagatggtaatatattcgttacattttgggcacctttaatatcccattgccatttgtatttaaaacaaagacagtaagtgtgtgtgtgtgtgtgtgtgtgagagagagagagagagagagagagagagagagagagagagagagtagtatac

SEQ ID NO: 306022 - DNA, 1061 bp, Cannabis indica
ataaaatattcatttatcagaatcaataatattattttatttccttaattagaaatattctaatatcttctacatggttctctacttatgttggcaaaacaaaaaatcttaactaggtgagcacactattagaaatagtctcacattattcatatatagaaagataataccatatataatatgcatgagctagtcttttcattgctaattagttttaagatggaactctatgcaccttatcatacacttactttcatcttaaattctataatggtatcaagcaattaaaagtttatgatacctccacctttgacttctatttgggaccttttgatcaatgtgtgccaaaatttggtgttggggtcctaacctctttcaaaaaaatctaaaattttcccgatgtgtatactcacaagtttctcgatttaactttatgggattctttcaaaaagtcacattcggttgtatcatgaactcttaaaagttgttcattatacccatactttcaagctcaaacgtgaagagagtgtattagaaaatctcacactgaaaatacatgtgaaacatcatagcttaatatagggattgagttactccacttagcaccaattaattttaaattggaacatcaatcactcacacttcactatgcacaccatgtccatagttcaaagaaggtttatagagagataagttctaaagtgagatttcggccatcatttttcaacaatggccaaaaaaggaaaaccaaaggaacttgcatcgaccagcgtcttgcattcaaataatgcatgaaatttatgtccaaactgatcgtatctaattaattatttcctctgaattttagagtaatgcacacagacaaaaccaattataccattattgacttctgtgtgagagaacaatcaatcagaaatggaacacaatattgcggtccacaatatatatttattctattttaaaatgattatataacaaaatttttagtttaatggtatttttaactttttatgttaattttaacaaaatatactgtaacaccctaactaacttaggcgtat

SEQ ID NO: 306023 - DNA, 3325 bp, Cannabis indica
tccaaacaaaaagaaggagaatcgggctcaaatcttggtgatactctgcgatagaaaggatacaagggttagagatctgagcagagggagtcatttaattctgctgcaaccaatgtaaggtttctcataccttttatgtgtttattttcatcgttttagaaattcatattatgatattaaaaaacatacttgttagtaaatctagatcctggtaaaagatattccaacattaagtagccacactcattagtagtttgctctacctctccggggtactaacacctttttttggtccctttcgtgcttgcctcccagaggcattcttaggagtttccagtaatggacatgttgcaggttgctttgtatacattctctcgaatattaattaagttggtgtactcaaagaattcagattcatactccttccttggttttttcaaagtctcactttgattctggttctttccaccccatttactcctacaatggcttatgttctattctggaacttctgcttgttgcttcaattgtctaggagcaatactacatccggtttgtgctgctccatacacagaaaaatgagtttggtaggtgcttgtctggatgtagaaggtctatagacagtcagagaatactaggttctaggaattgggacttgcgggatgaagctttgtgaggatgcagaaggagctagagctggaggaactcttaaagcatgttaataagcatcttctagatttatgataccttgtgctttggacataaactcaaacaaagtctcaaccctctttctttgcatctctcccaataacaaggagccaactatgagtatggattgaagggctacaagtttcatgtcgccgctcacctttgtctttgcggttgcctccatcatttgttgaatgaagttcttgaggctttcacttgcttgttttttgacattggtgattgacccaacttccatgtcatagtctcaggccgctacaaactgcttcaagaaagcagattgtagttctttccaactatgaactgatctaggagccagtcttttccaccaagcctccgcggacttggtaagtgttaataaaaaacacaagcacttagcatcatcgctcactctttccacctgcatcattttgttgtactttaacaggtgggttcacgggtccgtgcggccatcgtaaacctcaatttgtggcatcttcagttctctagaagtgaggcttctgcgatctatttgatacacaattttgggtcctcatcttttgagtctaagcgagccccactctgcttccgacaagtttggttagcgcaacaatttgctcctccagcctttttctcactgtctgcaatgtcgcatccacgagctttatgacttagatggttcctaagatcattgccacgtggcctcaactttttcgtacttagagtcaagatgccttcggaagtccatggtgggccaactgtcatcagagtattgtcccactgtcccatcgtcatgattaataaaatcacttgggtagtttttcctcccttgagcctgggtacttttgcaccaggccctttttgcatgacttagccttttggattagaagggcgtccgaggccggaggcatcgatggccttctacatctgtaagggatggttggatggattcacagtttttctaggaggtaagggagctgccaagctttgaggatcacttaccttcgccttccctttgtcctttgcaggagatgaggttttagcgttactagggttttctctattgtttctgttgacaagttccaacaaagaatcttcttcataatcctcttctaggtctccaaacttttcttggaggcgggccatcatcctttccatcttcagaaagcttctcttgacgaactaactttttcctgggtcttgtgtagctcattggatactcgaaccaaatcaaggtcttgttcatagtaatagccatctttataatacctgtctttgacatatccatcattttcatcctcctcttcttcaatgttagagtcttctttgacttgtttacgatgctggtctaggtcgtcccttccaatgtcagcctcggatgcatcccctcctctcgcattactcaactaggcatgctcttgaaaaagagggtttacatcataaatgacagcgtctaggtcgacctcaagagttttcttggtcattattttttgtgtagctaccatagtgtcagtaacctaatagcttgagtctttcctcggctctcaatgaaagtaccaaaatgtttaccgagattttcaaaaatgaattaaataagagctcaagaaataaaagaagcaataaataaaataaacaatgatttttatgtggtttaggcattaatgatctctaatccacgagtcagtatattagccttagaagacttgtataatgtattacaatgatgtttatagtagaaaaccttaagtttattctcttagttactcttgaagaagaaaacatggagagattttaaaagagtttcagctattactctttcttatctgcctttgtgttgaaataaaggagtatttacaagctaaagtacgggcatgggcatacccacgacccgtctagggtttctgccaaaaggcccactattggggtaaaatatattaaatatctgactattgggcctcaagatggttctttctcgtgtggcaaactcttcgtgtagtgaggaccattattggtgcagggcacgtgtcgggcaaaggcttgcacttggtagaaaaaatgctcagaggagttgtcaaacaaagtagagtttcaaatggtggtgtgcattatggtctgacatgggggacaagatctgattctgtgtaagacaagaataactgaatgattttttgacttgtggaaaatctctgttttccacaaattagacccttccgtgattaaggagatttaatcagtgatcattggattggtgtcttctattttttgccatgtatccttcatctggaaacatagataagaattacatgtataattttaaaatatatataggtaaaaatatgtatggaatgaattggattgaatagtttattttacatgtaaatcaacatccaattaacacaagtgcatattttagattttccaatataatccaattcgtacaagtacagatattaacactttatggattggattaaattgaatttggtattttatgaacacccctaattttaaagggaaatttgaattaatatgcttacattaccttataatttttcccctaaacttatacttaacataatttgttatatatgacattttttttgttttccccataataccc

SEQ ID NO: 306024 - DNA, 1402 bp, Cannabis indica
ttctctcaagtgtgaatctagtattaaatcatccattaataacaagactcgtggactaaggctcattaaccccccaaccacgtaaaatcctcatctcactttcttacaactctttacgataatcatattttaatagttgccgaaaatctcggtcaacaggtattaatctgcaactctaagataaacttaagtatttatactgcaaattactcttctttattatcattttctattccataagtaaacacacaattatttattcgtttcttattctcatttttaatatgattagaatattttcaatttaatttatttattttaagcacgtgtgattagtaaaacgtgattaaaataaataattagattatatatattttaatatttttatagattttttgtttggttttttaaagaaatattagttttttacattacttttgcaacgtgaaaaaaaaaaataatactatacatttttgtaaattaaatctgtaaaaatgtgaaaaaaaaaacatttataatttttgagtatgaatgaaataatcaatttgtgattttaaacaaaaccattggatttgataccggtttaaaaagagggctgtatgctgctctcctcctcccttctcttggaaccgagaccagagcagaagaaccatcaaccagcatcggcccgcctctcccaccactcgccttagcgcaaaatccaaccccttcatttttgttgttctctattttacctggtaaattattataattattcttctcttttcttagttgttctagggtttgcttttttattatttattttttaggttaaacataatgtttgtctaatttaatttctaaagctcgtcacctactcaatcagcttagtctatgaaggtcctattttgtgtaaacattcttcttctgataatattggctttgtttgatttgttgtataggaaaataggggaggtgttttgatgagcgaagaagatggaaatacaaacttgtgggaagcccatagactcattgctggagaaggtgctttgtatgaacattttatcttctgattatttcaaagagctttaccggttgaagacttaccatgaagtcatcgacgaaatctacaatcaagtggatcatgtcgagccttggatgaccggaaattgccgtggtccttccaccgccttttgccttctctacaagtttttcactatgaaactcactgtcaagcagatgcacggactcttgaagcacactgattccccctacataagagcggtacgtgttcatgtgtatgtcaatgttaatctgtatctaagactcattctcctaatctaccaagcaaagaatgaatgaatgaagtgatgcaactctattttcttgttggtcaatgccaatgttatgctattcttattac

SEQ ID NO: 306025 - DNA, 1633 bp, Cannabis indica
atatgttctggacttaaataaaattcatacattataaatatataatcatgaaataaatcatgtgaaccatgcaacattaaatgctatttctgatctttattaataagtaaatctgattatattgaaatgagttttatttagggcataaacccaacaatgtccaacccagttcactcccaagggcataaagtacttggctgcactattcgtgttgtatgctaccgaaggatggggccagttgtccgttcacgatactaactggttgttcgacttgaaatctagccccaagcagaagagatcgggatagttctatttttcccagaatgaataccagtggctgaacgatactataaacaaggaagtgttcaagatcattgggtttatcgaatattactactttgtcaaagatatgggtaccaaacacatttctttttagcatatcccttacttctgccatcttccttttaccctgggtctcaagacaagagcccaaaaaattctccaactcccgaagtcagctctgaacaattctcttttggccactgtgggtaatttcatcaagtatgggctctactcgtttgatgaggttcagcagcctgaacaagtgactgaggaggttacaactgagcaagaggcgctgaagaagaagaagacaaagaagattcctcaaggtgatcaagtgccaattgaacggtccatcagattagggatgatccctaggaggtttctcatcctttcaactaggttgtaaggaaggggaaggatgtggtggtcgaggaagaaggtgaggattcttctaatgaggatgcccccacattacttgttcggaagggtgctcctactgacatacatgttagttatttttcacttaaccttgtttgtccttgtttgtttatattttaactagtgttttctttttatgtagccatatcagagagaatgttgtgtgctttgaggtagaggtcgggcaatgcttccggtcagaagtctttggtcaagcgtctgaaggtagatgatgctttacctaagagcattgctctgagctctaataaaacatatttctagagactttgtgtggtgactgattttttgccatatatggtagctaatatgtaccttgatagagggttgattgtgccatgtttttttttaattttaaatttaattaaaatttttagactatctaaaagaaaatttggtttgatgaccatgctgattgtttgcactattttttgatagttttgatgtcttttatggtatttgtgcttttttttatggataacctgtaattcttatggtagaaatatggtaaggccgatgagtaagagaagtatttcattttgtactcatggcttcaacaaacgatatttaaatgtgataaataagtgtttcaagttttgatattataatatagattattttaccatctttattcacattatctattttttcattaaattgtgtggtactagaactttattttttattattttgtaggtcagttttgtggagggtctattgttatagagactttgctgatgagtttatattttacatataatttgtttgagagttgttatcttctaactattgagaaattcttttattagtttttaatatctttataggggtt

SEQ ID NO: 306026 - DNA, 2256 bp, Cannabis indica
tatatatttatataaatatatacgtaccgtacgttacgtataatgatatgacattgactatacatatgcatgcatatataataatttggttgaggcgtgttgggaaccatttttctttttcttggtgggttgggaagaaaggatgaatcactcttggattaacttaaggttcactacatataaaaatgaaaatgacataattattaattactcgtattttataatagttattatataaaattatgtatttaaaaatcgatagttaattatacctataacaatataatattttgattatagtgctaaacaccaccaatacaatttttaataattattggcgcccctaattaactggccttttgaagctctagaagcatttctagtgctggttggataatgagtgaattttagcttttaactctagaaagctttttaatatatataaagtaactttagtaattttttcaagaagagtttcttaagaagtgaaaagcaaaatatagatagaaatttaaccaaacagaactaataaaaattgctagatcaagtaaaataaaagagataaatattgtactagttatcataacagaaaaaacaacatttagtaacaatcttttagtcataatataaactttttgtggctaaattaatgtgaacttttagtcacaacaaaaaattatttatgactaaactatattatttagatacaagttatcacttatttagttttagtctcaatataatttttttgtgactaaatgtaacgtttagtcacaacaaaaagttacttgtaactaaaacacagtatttaaatacaagttgttactaatatagttttaattacaacaaatattgtaactaaaaatacatttagtcacaacaaattgtaattttagtatctaattagtacttttagtcataatatagacttaataatttataactaagtacaatttttatatttttaatcacaagtttaattgtgattaagagttttttttttagttgtattttagctattttgtatttgtaggctttgtttctctgatagattcttgtggtccatcttatttatttcatatttatcatatatatcagcaattttgttgactgttaattgttgaaattaattaattaagattattattaaagggtagtgatctgcatatagtactgtattgctgcaaatgcaagggtccagcccatatctcaggccgtaccgttttgttgtttagtttctcactatctccatttgactatatatataaatatatatatatatatatatatgtcatatcatatcatatgtagttatattctcatcccaaaaaaccacacacattaatgaactgtttcttgttcagtatcaactgtccctttacctctctgtcaatattgcagattagaattattaatgatccatcatcatgttcatatgtatctaaactaaattgttatacatgtttttaaaacaacaattgaaagtctattattccaaaactacagtcaataatccaaacaaatatatacgttaattgtaagagtagtactactgcatgcaatgaaatcaatttcaatttgtatatttatatatatgctaccattcttgttggggtgttttccaaaaaatatatgccatttgtttttaataactattttttttcttctttgaattgtaatatttgattaattccacaatcaattattttttatttttaaataaattaagtaatttcatctcctccatcggaattacgatcagaattagaattaaaaaaatgtatcaaataatcaacccgaattaatgtccataagctttagcggcctgatgatagttgggcgaattgggatacgagactcctggatgttatgatgaattatttcaggaaactttttgatccttctagtatcgaagccactgaggtccttaatgagattccttgttcactaaataatgtgcataacgaggttttgttgaagcctatttccgatgaagaggttaaagaggctcttttttagatgtatttagataagtctccaaatcctgaaggtatgacttctcgtttttataagtaatgttggcatgtagttggggttgatgtagtgaaacaagtttgttcttgtttccttttcggcatcttacctgaaggtatatgtaacgtccccgcttcaagcctctattggacccttacacccacggactaatgactcttatacacgagtttgtcactctggctgcttcatggactgatgact

SEQ ID NO: 306027 - DNA, 1449 bp, Cannabis indica
aatcacttattacacatatatattaaatttatgtataatttctgtgtacaaataccatatattcatgaaaataaagaaacaaattgaaaaacatatagttaagagcacaaatataaaagtataatctttattctttttatatacacttattacaatacaatttacatgtttaagcacgaattatacatagtactacaaatgtaaagattttgttggtattttttaatgggtgatatggtattgtcccttatggagtagagtggcaattaaggcaacaccaattgaaacaactaaggcaactccaattgtttttacattaattccaccactttgtttgaatcccaactctgatagcttcttatgtgatgcagcatagtcttcaaagaatgcatcctcattctgccacaaattgttaactagtttacaaaaacaataatataactttttataaataataagaagattactatggtccattttacaaaattagttaaagggggcatgttaggttttggaaaatttcattcacctttgcataatgttccacatatcggcgaaactcaagatcctcgactaaaaccttatcagtaggaagtttcaagagtcctttcgaatttctatctaaaagttgtctgcacacgaaaacaaagaaacattgctattcaaattacaaactattagtggtgcctaacaccaaggccgaccttgaaattagcagagtttcgggtaaaaaatattattagacctttaaatataaataaatatatggtacttttgaaaaacaactaaaaatatatattttaaaaagaaaaatattgtttttgagtcttgggctaggttgggctaggttcaggcctatctcgctttaacccagactccatcctgcctaacaccaccacgagttaacactttagtagttttctataatagttattagttaaaatttataaaactcaatattaaattacatcaataaattataaattaagagtagttgaagcttttcatatgttatcttacttgaagtatgagttatcgaacttcaaagggtcttttgtccatgctccctcaaagcctgatctttctaaatgtgcctttccctattaaaaagaaaaaagaagataataataaacttaattataataaaaaataacacaaatttttctttaaaaattgttggtttggtttcaccataaaaattttacataccaatgtatggccaccagaaagtactacaatgtccttatcatttaaacacattcgataaaatacatcccttaaatgtgatgcacctataaataaatacattacaaattattaacaattattatttaaatataaattatcttttaattattattttatatagtttattgtaaaatttaataattaaaaaaactaccttgagtaaatgattgtaaaatattattacactacactaaaaaaaaa

SEQ ID NO: 306028 - DNA, 3076 bp, Cannabis indica
agttatagattccatatctatgattagcgctcccactcaattgcactaccatgttcccaagatgaaagtattgggctgatccattggtcaactttaactatttaactctaagaacataaataatgtagttcagatcgaacctaactatatcaagattaaaatctattgacctaagatcaactaggtgatattgacttagatcgatgttacggtaagtttataatatcttatctaatgtcaatatcggtccagtctgatgaatactctatacatccaatactagcatactttgccaatgtcttgaaaaggacataacacttatccaaggtgtaagtatactttatcgttgattatcatgtcagaataaatcttgtgtactgacaaatcatgggacaaaacttttgaacatataatcatgattatcttccactgtgttgacaatattataatcatgaataaccatatattttggacttagaatttatacattaaacttataatcatgaaataaatcatgtgaaacatgcaacataaaatgaatactgatctttcattaattagtaaaactgattatattgaaatgaattttatttagagcataaaatctcaacacaaaaagtggcatcagagctgggtcccaaagttagccacgtgtgaatgaattctcaaaattccaaacaaaagtgatgagcctcggtgtactcttaggatgtccgtgaatgtgttcaattaggcagtgtgctctgattctagccaactcaggggaggcaatgtagtcccatgtttgagggaaaaattattgggcgtgcaatcaaagtctcacattgactaaaaatagccaaatatcatggatatgtagggatgaacaacaaaactgtgaggacaatatcatacaaagagtggagatagactattcaagtttatgatatgtagtatatttacgaatacacttacttataatgtttttgtatgtcacaaatattatcataacattacgcaaattcacaaatatttatactctttaagatgatagaaaagaagttttaattgaaactaagttgttcaattaacgacctgaaattcgagatatggatacagtagcattagagatagtagatgaagcagtagaggtggaattgtctcgtgacttttgactaacgtcaacgaacacaggcctagtcaatggctgagactcctccattatcgatgatgatgatgatgagtagtagttcttcgtttttagcaaaactacaacttcagacattgtaggcctcaaggctggggatgactggacgcacataagagcaatctctatgattttctttactgtttctttttcgtactcatccacctccaatttttcatccaccaattctatgtgcttcttattctcataaagattccatgcctgtacatatattttataaaaaaatatattcccaataaattttctaactaattaattaacatgttttctaatgagactctttgaattatatttttagcattataatatctataaaaaagaaatttttgtacacaaatttgaagtttataatttaggagcttataggctgcatcctttaaaaaaagtgcacttatgcatcaaaaatagtatttaaataatatattttacatgcgtagaaaataataataataataaacaaccataacaaaaaatattaactaaaaacttttcctaaaatactgaaatagtaaagatggatcaaattttctaattataatatatgaaatgtaattaggaaaaaggattaatgattattacccgttgaaggaggtattggctatctgaatcactctctgctctaatctcagtgctcttttggccacttatgatttcaagcacaactacaccataactataagtatcagccttttctgataattgcccatgaattgcatattcaggtgctgtatatcccctaatgatgataattaatatatataattaaatattataatgagttacatgaatcatttgaataattaggattaattaataattaataaagttaatttacttacaaagttcctgcaaatctggtgctgagatgagatcgatcttgaggcaaaagctttgccaaaccaaaatcagcaattctagggttgaaatcatcatctaaaagaatgttacttgttttaatgtctctatgtattatacacacatggaattcctcatgtaggtaagctagacctcttgctgtccccattattatattatgtctttcactccaacttaaatttctacttcgttgctctcctacaaatttacataaatatttaataaacaagaaaagaaagagtaattgtatgatgaataatccagattatttttttttaccccaaattgtcttttaccactactaattttggagatgtgttgtaatattaatattgcagctgatcctatatattttaaatttaataacttttataaaaaattactaactatcaccaattgttatggggttgaggatcagctaatagcaattccctaatttggtggtacaactacaatatatgtgatttaatctaatattttgtttgtgtgattattagaaatgttgaaataattagagcatctctaatggtaaaattttagaggatgtttagtgaggtggatatattatgtggcaaaacattgagatactataccattggagagaagaggatgtcattctagaaatttgcacggatgttatgttgtagcattgatgttattcattatttttagctaaaaaactattgtagctaaaaattatgatatatatattaaataataatgttgagatcataattgtaacatttttaaagagtgctatacattcaagtgtttttaaaagtaagagtaccaaaaatgatgtgtaaatttttagctaccattgaaaatgctcttagatagtgttctcgagaggagttcattgtgttcatgatcattgcaattttctttgggtatagacaaaagtgataattttatggaataattacatcaagcactattttttgtaaaaaaaaaaaaattatatttttacgtttaaatatatatattttttaa

SEQ ID NO: 306029 - DNA, 1533 bp, Cannabis indica
cttaacctcttcatcctacttaccacgacaataaatggatgatttagctgcacttgaaaataaacccgaggtttgagaaaagagtttgtgcccttcatcctactcaccatatgattgaatagtaaaacaccgtccgtaaagcaaagatgattaaatttaatatcgatgcaccgttcatgaaatttaaactcattttgttacccactttacccattattcttgacaaatattcccaagaacaaaaagcaaagcaaaggcgacatattggatctcctaattgctacaaagaaaccatacatgacaccattgaacataagactaaattgaggcattccaatgcaagtcattaccacttgaataaactctttaggaaaggcaagtaattgaaacattaaaagcacataagagtttagtagttagcttcactaattgtaagaaaaatgtgaaaatgtggaacactaatcgaacttgtataaaaatacaagtcggtctatttaagaaaaacagattgactcgaacaaaacacaacacagaaaatttcaaatctacaggcctaccttataaaatgctggttggacccctatagcaggcaagtatttaaacccatttattaattttgagaaaacaaacatatctataataagagtaaaggtgaagccatgcaatgcaatgcaaattccaatcacaaaatccatgcccaaatcttgtcggttctctcatatacatcctaataggcccaacaacactctttcaccaaatagccccaccaccccacaaaacataaaaatacactatatcttaattacacattaccaaaaaaaaaagatattttcactcattaaaatgccttacacattttatatctctatatataatatgacagtaagcacttgctagctggaacctgtaagaaaggcaatagaataagcctaatattctcataaaagttcaaacttttaataaagacaagactagacaattatatatctatattgagagtttcacagtagcagactcaccccaccaaacactaaccaaaaccgtgtctagactccactcctgaatttggttaatgctattttgacttggcataaaatgttgctactttcctaggcccataaaattagatataataaattattattaacaactggctacagcttcacacacttggagaacaagaaggtgagtgagaatactataaacacacacacaccttccttagctacttcctcttaaattactaaaccaaactataaataccacccaacttcttatatttttaaaacattcaatttcactacttcttccctctctctttctttctctttaagtttgatattcaagtccccataagaaaaaaaaaatggtttctttttctttttcagaaagttcttttgtggtgtttctggtgttttgcatggttgttgttaatgtctcagctggtgatttgaaccaagattttaagattacatggggtgatggcagagctaatattgtcaacaatggagagcttcttactctgttgcttga

SEQ ID NO: 306030 - DNA, 1921 bp, Cannabis indica
aaataaaattaataaattttttatttgaaatgactttttattctatttcaaaatggaattagtcattctaccaaaatagtaaaaaaatatcgtattagaataatattctaatattttaaaatccaaccaaataaaacaatagaatgaaacttgaatcatatccactatctattttattacatccgaccaaatataaccttaattaggtctaactctttttagattttttgagcttaaaggaaaaccaacatggctgctacttataatagtatgacctatttgcttgtttgtttaaatatcattcttggcagcgagcacataatactttagaagtatatcaagttgtaatatttttttaaataaacgtgcatagatgaaattagacttcacggtcattacagaggatattgttcagaatggaagacacacacatacgaccataccgattatgggtaaaaactcacttaaccacattatgggccataaagttacaagttctgctaacaaacgaaaaattaaaacaagcaactccagagccaagcaacaggctaccgcttctccacaaagagcatcaaagaactctaatctagctatatgcatcccacacaccactccaaggtggtttctagccacaactgcaatgcacatacttttcaacctcactttaacatcatagttaagcttaacccactctagagggggaggaagccaaccacctaccagacgcggagaaggagtggagaaaatagaagcactgtaatatgcataagagtaatgaatatagtcaatacactgattaacactagccatacttattgtgtaccttgtcattctaagtccgccaaattgtatcgacaataatcgagcataaagaaacacttcatctatattaatgccttgttttcttagtccacagatgaatttgacccagttccagacccagaaatgggaaacataccccacaaagaagaatgccacaaatgaaaagcccaatcaaaattgagaaataagtgcttcaacgtttcctcaccaccccccacacaaggggcatgccacattctctaaatggagtctcttagaaagaacaacacgaactgggagggccttagagaggatacaccaccacagtatcttatggcattccaatatgttactattccacagtttattccagagggacgatgcaacttcataatgaggagccctatctaaagcttggatgagataaattgatttacacgagaaacacccattaatctccttggttcaaatccacctatccttaccctgactagagagtcgaccccctttcaagatggtcaaaacagattctttgtcaaagaggtaattcaatttctgaagatcccaatccccataatccgtaaggagattgaccactctgctacaccccgaaactatagcaccattcgacttaggataaaactccgtaccatgggagatccaaggatcctcccaaactctcgtatcctttccaaccatgatcattttacaagcacatttcctcaaaatagctttggcttccaccacattcttccaaaactacgaatcagagtctttgtacttgtaggtaaggtaatctttttctttcaggtacttcgcttccaagaccctgcagcaaagagactgactcccagttaacaggttccacccctacttggccaggtaagcctggttcatttctttagttttccagaaacctagcccaccacaagatttaggaaggcatagtttatcccaagccttaacatggatcccatggttacctttctcattaccccaccagaaatctcgcaccatgccatcaatcttattaacaagacggttcgagagtttagtagtttacatggcataacttggcatggacagactgttgggttttatgccctaaataaaactcttt

SEQ ID NO: 306031 - DNA, 1718 bp, Cannabis indica
tatagggcacggttataaactgtgatacccagtaggcgacagtttaaaaccgttgggaaacccacattagcctattatgcccgttttacgacggtcgtataggcgacggttatagaaaccgacaggaatactttaaacgactattgaaaaacgtcggagaaacccatttttgtagtagtgttccatgagagaactaaacaaattaagattgattgtcacttgataagagagaaggttcaagaaaaaattatcaaaacagcatatgtctcaactaaagataagattacagacattctcactaagcttttgtttcctaaccagctgcaaactttcaaaaacaatataggattgaaagatattttttagtcgatcttgatgggggagtataaggattatagtttggttagttggttaagaagttagaccactagttaggatgttagtgagttgagctgttaagttgttgtagttatttgtaacaattttcattaattaaataaatttttttgtttctactctatttctctctttttttcttttattgtttccgcactaatacaaaataataattaaaaaaaaacttcatataagtttaagtaaataaaaaaaaaatagtaaaaatgaaaagaataaggataaatagtatacatataaaaaatttcttacaacaatataaatttaaagtttgaaaaaaaatatgatatatttcacgtcaatttttcaattagttaatacccactataagtaattaaagtctaagatactacgtttagaatcctataatttaacttaaaatcaattcacaattattgatgtgattcgtattgtttacaaaaagggtttactattttgctatattttatatttgatacatcctcatgcaaaactaatgtgtggttttcattatttatttatttagacagagaagatttagcttagtactatttcacaatacaaaagcagatcaagagttcaatcaacaatataattaaaaaaataaacatcatatgcataccgttattgaccaaacgactattgcattgaaaatagtatgaattagtgatcgcaaaattctcttcatatgtaaacttaatttggagtatttctatagcaccaccaatatgtgatctcatgtgttaatagtattttgagaattatacttttattttaataacagtatataaatggggctaatatcattagtgttttagaatttttctttaattaattagcaatgaaggaatatgcatgttttattttccaacaaaaaaaaagtgaaggaatgtatttcttgattttatattatgcatgttggactattttcttccacttggttcacaattgattagaaaagctaactaacttttgaacaataaaagcagtttgtataaaccatcatatacatagatatatatattttccctcttgtgggacaatatactttccctcttgtggatagaattgattcctgataaattgtgttatgttataaataatatatagatgtctaatttgtttttattgattatcattaattaaagatgagatttcaataattaagattatcaggttgtgattaatttagaaattaaataaaaatagtcacctaaaaatttatttccttataaaactttaatgaagattatattaataatattttaaaattaaattaattataattattaattaatttttataatttattattaaataaggat

SEQ ID NO: 306032 - DNA, 1030 bp, Cannabis indica
aatagtatttacccttaattttaaccataaaattaaaaatgatgcagctcacccatatactatttatagtaaaagttaaatatatattattgtatgtaaaaggtgttaaatattttttatgcgactataaatttaggtagatttaaatataaacttgaaatccaatgataaaattcatagctaaaacataaatagatcacataggtaggaatgttcctatttaatttctaccagaaaataaaaaagctaataatagtaactagtaagtattcttactttaagatatttgcttcgtacttaaaaaaaaatggcaaatcacacttttatttattaaaaacgtataatttgtaaataattaaataaagaacatgttcttattagtattgatggagatttaattcaaaggagtttaatattatagtaattatgatatagtatacaacttaaaatttgcacaaaatttacaactttgagtttaagtttagtgtaaatggttacaaatcaacttaattaagttaaacacaattacatatgagtaagaatttggttagagcatatctaatagagtgtgccaaaaatatagtgtattgttatattttaacacacttaactactactccaatagtgttttaaaatgtgtgctaaatttagcacaagatataacattttgctaaatttaacttacaataaatgttacttttctatttactataatgtcattaattattatgatttattgacttttactagattgtagattctttatttattatattactattatttaaataataaaagaaaaaaaaatatttttttctatattttcaatcaaatatttaataaccatcaatataattatttttttttttggtaaatggcggcaaaactctcaatactttatttttggtttcgctaaatcccacaacccaaatttctgcgggtaaaccccaaaaaccactactctgttagcaatttaccatttccgtctaaatttagctgttaagtgataggttggcttgtccacgtggac

SEQ ID NO: 306033 - DNA, 2104 bp, Cannabis indica
ctagcattgatttcaagtttaagattgacacatttaatgttctggcttttagcgattttgatagcagagaagaagaagaaaccctcagcttatcgatttttagctagcttatcggattttagctgacaacctcccaaagtaccctaaccataagaatgacaccaaaatttatgctacaaggtaaaaattaattttttttatatttttacatttatatttctaatttttacgattatttaataattttacctaatcttataaaaataacatacaaagttatgaataacataaaagacaaaacaaaaaaaaaatacaataacgtaaaaagaatagtgtatttttgtaaaaataaaaaattaataaatatataaataatctgtttaactatatttttataaaattttttaaaaattttgaggttaaatatgaaataatgcccaaaaaaattaaataaataacatgtgttatcccacattgtttatacatgaataatttatagggtttatataattatacttaattttataaaatttatgttacactttaatatcttccaagccttaatcccatttttatttttggtgtgctttccccaaataatattctacacataaaatgagaagtgaactaaagtttgaagaaaacaaagtagaaagtagggaatgcaatatgccaataattcaatagagtatatgaaggttttacaataatataatccaaaactttgtcaattttcaaacttgaaaagataaatagtactagaggaataaagcataggattatcatggtgtctcttacattaaaagaaaaagatacgttaaaaggtacgtgtgatttgttttatatattttaatttaataattattataaaaattcactaattatttataaagcgtcatcttatatttgatcgacattcaaatattaatacttatatgtaacgtaaaacttatacttaatgtaagtgtttataatatttttcagaaactataaatattttaagtgaaattagaaggaaaagaaatgaagtattttgacattgggatgttaattagcctgaatccacaacacaagagagtagtattaagctttgagccttcacaatggagttttttgtattagcatttttgcttgtctgaagtttttggatctcttgaacagtggtgcaatgactgtatttataggtagtcatgcactttgggctggactaatcctaacccaataagaatataactacggatcaactctctaatggagcttattacaagtaggatgctcgaatgtgttaatctaaggcccatggggctaacccaaggcttgttggacatttctagctgtttagtagtaatgtcaattgaatccccaaaaatatcttacattttgtgcacaattcattgtgcatgttggtagaagagaccaaccatcgaatttcatgagatgacgtcagagattaggtgacatgtttgtcttgctcatcttcactgggatgcaacagtgttcttggatgaatccttggtagatgggttcttcttattccctaaaaacaattacattcctttcaatgtggcaagcctgggaagtatcctagctagttcaatcaataaggacggatggagtcagagctactgtccgggtctaaaattgatgttgggactttacttgtttgtaacgctgagaccaccattataatgatatatcaccgtccggatgatataagcttgttctagtgttgatctggggaaccctaatcgaaatcttttctatggaataagtcgaagaatatttttttttaatatttgtatctattattaaaaacacttttaaaatatatttatttttgtaagcgggtgttgaatatatcattaccttcagttaaatttagcatataacttaagaaatataatggcacactgtctataaaaatgaatatatcttaaagaatataaatgaaggtaaaaattgttggaaattattttaccaggatcttagatctactcacaagtatgtctattaacaccataaatatgaactttctaatacgataaaataaacacatataaagtttaggaaaccttacattaggtgcagcggaacataatgactc

SEQ ID NO: 306034 - DNA, 2288 bp, Cannabis indica
aagagtataatatcattaccacaagataaaagacaaaccttcaagaatagctgcccagtccttggattaaatataaaaatagcaccattaatgggttttgttgtcagatttccttcaaatgtcttgtgaattgtgacacggtacacatttgtatcatccacaaaccatatgatctgattgctaaagatctcaccgtagttttgtgaggacaagtacggttctgtaggctctgaagaatacaattgcaatcctttccttatacgctccctcaacacatataaagcagggtttgactgcataagaaacagaataagctcaacgtgaattctaatcacgaactccaaaacaagcttacaaaagtactaaggattataagtctgaattaccttcatgattttgttcattgcttgctggatgagtggtttcgaaccagggaaccagttaccaaatgcagagtgcagattatatgccaagtcaagaccaatcatcacacctgaaagattcaactatgatcattagctgaacaaatagacaaagatgaaggaaaaacaagaagaggaagagccataccagtaggtgaaggataaatagacatgttgtcagttgtgtaatccatgaacttggcccttgtgtaacgctcaatatcatgagaatcataatctccccagcgaagttgtacatcaatccagtatttattgctggccttctgatcaaaaacatcttttggctcagcaacaagactaggttttgacatcggccatctatgggctgcaaagagaagaatgtcagcacaagaactgttcattttgtaactcttcctaggatgaatagtctccttttgcacagtttcaatttccaaggcatccagctcctgatctaaaacctgacaaagatccatgacaacactctcatgaatcttctgccacaagtgagcacggaatatctgaatcaatgatatcttcaaagtgggaatcttcccatgcatgaaaattccagtcaaatccaactgcacttgaaaaccaacgtaaacattggctcgatttatagtaggcgaccaccaaagagtaaatctacggttaggaatttggttgagaccagatctctgtgcattagtcaactttttgtacttcatggactcctcaaaaccagaagccttctcccaaaagagaccttcccatgttggaaaactgtatttgcaaaacacaatttagttgtacattctatatataaaacttgattgcataattacaagtttaaggaatgaatctatcttttatcagttttagaatttacaacaaatctattacaaaaaagctaagaatataataattactcatccagagtacttttcaattttgtttttataatcctttagctatactgtcagcaaaatattattcattttttttcacgctcaaaactaacaaaatttaggatattaagtaagtgtagcatatcctgtgaacaattttttatgtgaacaagaattaagaaagtgatcacaagaacgggaaatcatttagacaactgagagatgataaacttactatgttcctttgaacaacgtatgctccagaattccctccacacctccaagagcttgaataacatctgttctgtagttgttcaagttccatagtttaccatcgtgcctctgatgtgtccaccagaaaggattttgcttcagtacttggtactgcttgaaatctgttcgaaccctccaacctttatcatatgccagtgtgtgtctgtccttctgaaacagtgtatttattcgaggaattcctctatcccaagaatcctgtcaaattcaatggagtcagcagtttatacatgtgctcaaaacctacgaggtaatttcctatgttattccaaacaaaacagcaaaatcaaaacacccacctccaaatcttcaagggttagacgtctattttgtgcctgagcttcttgcctcttcaatgcatattctgcccaaacacgctgtgaatctatgaactcactttcccagggctgtcaagaaacagttaggtgaggacacaacagaaaataagagcaaggcatatagtgatagtggcatatgaaatcaaacttacttgaatgtaacggtagagattaggaatcagctggtcctcttcatgactcattccactcctaaaatgggtcaccccaacatcagtctgttggctgtatctgaggtcactctgtggaatcaatatgtgacccatactcaacatgccaagtcctccaatttcttttggtgtgtagaagatcacagggggaaatctgaa

SEQ ID NO: 306035 - DNA, 1714 bp, Cannabis indica
tattgccattctttttcatctttgtatatataattaagcgaatatatatgatttcccatcaagttattaaaaagagctcaaagattctaaactataatcattaattcccattctttatttggtaaagaaatattaatattatcacgcttgttgtttccaagtatatatacagatttttttaatatatatatatatatattagtatatataaaactaatacatatgacatattttgatgttaacgtttaaagcaaccaaacacaacaatttagtatactctatatattattttctattttcaaagaataggagataatcgataaataacattagaaatgcaaatttcatatatgatattattatatagggagatcaagggcaccccctacagctatttctaactaagataattaagaagaaggtatgatttggcatagctagctaggtttgattatttgaaacgataaatgattaaaaggaataataatctttagtgttggtggggtaggcctatacctatgaaaaacattttataagattggtatactaaaatattagttaaagataaatcgtggggttttgaaatggacatcttttgtcttgaattttaggggtctaattagaagaaaatgtgaggagaaagggcattggatgtcgttttttttttttttttttattttaatttttattttttataaattattaaaatattttagaataacttgtaaaatagattgaatagagatgatagaccatataagatgtaacgcattatcttttatatatatatatctttttcatagctaccaaaaaagctatagtactcatatttggtaatacattatattatattgattaatttaccaataataattaaagatataatataatatagaataatgaaagagcgttatacatgtttccattattatataattagattgggtggtatcctcctaggttgtaagtcatcatatatacataaatatatataattctaaagagtagtaactttcatttcatgagggaagtcatgaagtggcaacactataatatatatgtgattgaatatatgatcatcaatccatgaattaattaattatatcattctaataaaaagaaaagagaaaagtattaaacaaggaagaaaagaaagttgtgtaaacatcttttttctccttatacatgtatttgatgcgtgtacaaaaccatgaatcatgaaaaacttactacataatatacatatatataaccaaaaaattacaaagtaatgtctcaaaaatcatcttaattagaacttagtacaactcgtacgtttggctttttgacttaatatatttatttatttaagatctccccttaattctacaatattaatttgacaactataaaattgtaacatttattaggtaggtaatcggaagggactcgaaatctagtatgaaaacaaaccacaactataattatattaaatgttgtctgtttataatttttgatgtttttgatatttttatagtttttgtactttttatggtttttgtgccattttatggcttgttactacctctttaggataagtttggggtatgatggataagagatttgatccattttgtgttctcgttttctacttcaacaaccgtttcactttaacagataagtattttaagtcttttgagtttttaattttaatatggattggtttaccatcatt

SEQ ID NO: 306036 - DNA, 2532 bp, Cannabis indica
aaaaatcattgggcgggttacacattttttattttttcattagacgggttacaattagatatttgcaacccaacatttatattaggttggtaaaaatatactatagcccaaccaaactgacagatgtacacccttaggacttaatggccagattgacattttgtcaacctgggctatttccaatcagttttctcaaaaagtgtttcgagcatcttttccatttttagaaataacaaagatacaagtgatctcaaggagcgaacaagatcatctaagggtcgaaatagggacctagggcccaggtttacatgggcactgggccatgcgccaaggtttacataggcactgggccctgcgcccaagtttacatgcaacctagtccgcatgtttcaactcctcaaacataaattctgctgtgtgtattcttcttattttggtcgaaaatgggctaggagactacgttcgcaatctcgaatgccatataagtatcaaaacgagtcctagaaagtatcccgagaagcacccaacacccaggttgacgcatggccaagtgcattgggttctccttatcaaattttgattctgtcttaagtatctaagtatttttttttcttagtaaataagagctatgacttgtggcaagtcaatttcacactttgatattttaccctttcaataaggtagaatatcgacaaaattggggagtttcgagtctacccgatgtcacaaaaaaaaaattacatttctgagaacttgtgaacaacttcaccagaactaagaagttggatacgttatgtctacatatcacttaggcatcaaaaaaatacaagtctaggatattttttcactcacccagcgtccaggtcgacgatagaatgtcaatatgggcattgggtcctgagcaaccttcagtaaaacagctaaaactcccacaatattgatctaattgatgcaattcaacttgatttttaaatctctttcaagtcatgtctcacacccataacgcaatttcaaagattttgagtctaaaatttgtgcccaagacaagtgtgacttttttcgtagattactaagattcaagctccgaaaaatgaagatttcatcaagaattaattttcactatcagatcatcatcaatggccaagaacaaccccaagtaaatttttcatattttttgtgttattttattattattattattataatagaacctccttcactataaatagagagctccactagtttattttacacattcttctaagtccccataaggtcaaagcatctctctttactttctatctctagaaattagagctcttggctaagtcaaattgttgtaattctcgtgaacaataaaaacttgaagtagaagtagttctattaccgttaggacacagtggtgaactactataaatttcttgtggctctctttttatttacttaagctaatatttcctttactaatatagcgagcgagtgttgtccagatttttccgtcaacattttggtgctttaactgagagtcacaactcgagatcctaatcaaaatggttgtaacaagatcaacaagtgttaaaagaaacaccacaattagtcaacccactcggggcacgccaattgctagagctggtgatgggacaacacctacatcccagatgctaggtggaggtctcgaaaccagttcctcagctcgtcttccaaggccaccaacaactactgatgttgatgccagtaaccaaattccacttggtgaccctcacgtggagttagaagaccctaataaagtcaaccctcaggttaaacaatttagccaatcagtggctaacttacaatagcagatgtgagaatttcttgacaagcaacatgaacaattccaaacctggttcatggagtactggagaaacattgaaactcaacgtgctgaacaagagcaaaaaagaactaatcttgctcaacaaatctgtgaagaccatgagtttcttaacagatgacaaccctctcccactcactattttaaactgtgtttgtcattattaaaatcattttgaaaaaagattttactttataagtactaaccacttgtaatatattaattaaattactataatataggcctaaaaataatttaattaattctatattaccataattttcaaaaactccttttggaaaaagattagttaaaattatgtgactagctattagagaaagtcacttggtgtgaattaccaggttattacattatttaaatcaacctagtattttatgttattgatttctctaaatacaatacgcataaaatatataagacaatcctaaataatcatgtttctagtataagatgcatgattatcaaaatagaaaactgcgtgggattttatgtatgacaatatgcatgtactaatcaactattagcaaataattaattaacattaaataaaatatgaaccaagtaaatattgagtatttttaaaattactgttgggttttatgccttaaataaaactctttacaatctgattagttatc

SEQ ID NO: 306037 - DNA, 740 bp, Cannabis indica
ttttgagaagagaaaataaaacacaattaataaaaagcaagatcagagcttgacagaacgagcataagaaaagcacgtgaagatattagatgtggagtactgaactgaaccggtctcaccctatttataaccccaaaatatggagtgtgatggtgagatgctgccccccatgtgccttcattcatttcccttgaaaaataaaaagaaaagaaaatctctcatttcctatcttccaatgccacatgggtgcaccactttcgaacaagtggacatgttgccagccctaagccccttatgacacgtgtcaccatcctaaatctttgacctatgttttcggtggtccattcaatgtatgatcgacacagtagtgatagtgagtatatatatacatgaccatgtaaagactagtcattcttctctcttttaattgtccccacaacaacaagataaacggataaggcctcaacttgatcatcgatcaccttatttgctctaatttaaaatattatatatgcggatatgccattgctcgcctatcccaaacagttgaccattccaatctcattttcactctaccttttccttcttttttcattccattattttatttttcaaagtaattctatgaaatttctttactttcaaacaagtagtatatataacttattattatgttcccccaaatctttgaacaatcaaaaccgatcgaatatatacatatatataaattatttgatttg

SEQ ID NO: 306038 - DNA, 1203 bp, Cannabis indica
aaaaaaatattttgacacgtgattttgaacgtgaaagttgattaaaaattataataaaaagttataagtagtactcttagtcagaaatatatccagccaaatttttgtaattagtaaatttataccaaagccttcttatcgacttgaggatataaaaagtttcagttttttttttttggagagataaaaatttcaataatatcaagtttaaaaaaacataaaaagtggtaattaataatctttctcagatggccccagccaattgtttgttcttctttctagtaagtcaaatttaatcaaaagtttagctgttttgtttggtcaattgtttaaaaacaagttgagattactttaagagaaaagaggtacaaagttgagcctccaaaacaaaaaagaaacaaaagctaatcatgtatttgattgtaaacaactcatcaaattgacgcacgagggatttaaacaaaagagaaatattaaagatcacttaatatttttgtgtggtataatattattataagtgcaatttaatatcgagtctcttatattttattttaataaaaattataaaattttactaactaattataaaatttgatgatagtagtaaatatattagtgtccataacaatactctaaacaatatttatgatcaaaagacccatcactatcagtcaccaagttggctatttaaataataataataaccaagttggcacaaaacagtacaattaaattagatgaagtctatacactaaaaaaaaaaaaagtggacaaaccttagacggctaagaaaggtcacttttaaagtcattagttaaataaaatgtacaagattcaatcgcaacgaggacgacaaaactcgacgttatcgatcacgtgggggtcaagatttcacaatcaccaattctcatgccttatttcgtacattacgcctctacttctcactttaattttgaaagtctattgtacttgttttaacttcaagtgcaaaaatgtaactggatgtaattttttaacttgaggtaattttgtagaggtttcaagatttttaattttactgcccataatttagctaagtgggaagtttgtgcaaaatataagggcattttacaaaaatactggatttggggtaattgttttcaattttactgtcacacggcagaattaacatttatactgtcctccttttttttttttcctttt

SEQ ID NO: 306039 - DNA, 2643 bp, Cannabis indica
gtttgtgcccaaactcagcaaactagaaatccaactgtttggttaactgactgggcgcccgagccacgtgatgtatactggcaaaacatggcaatcccatatgtttcactcaaaattcggaggctaatcgtgggtgttgctttctttttccttaccttctttttcatgattcccatttcagccgtacaggcttttgcaagcatagagggaattgagaaaagagcaccatttctaaagcccatcgttgaaatgtgagtttttttttttctttcttttttgagcccatcgttgaaatgtgaatttttttctttctttttcttggacttctaaattttatcctgtggcaagcaactaaaccttatgatatgtatgtatgcaggccattcatcaagtcagttatccaaggacttctacctgggcttgccttaaagctatttctcatctttttgccaactatactgatgatcatggcaaaatttgaaggctttgtatctttatcatctcttgaaaggactgcagcatctaagtattatctcttcaatttcgtaaatgtttttcttggaagcatattgactgggttagcgtttgatcagctaaatacttttctcaatgaatctccaagcaagtaagtcacggttatggttaatctgtagggatttattttatttgaacaaattccaactctaggttttgttttctctcttttaacttattttcaagagcctccgcctttttcttatttatttatgtattttgcaggatccccgaaatagttggggtggcaatcccattgaaagcaactttcttcattacttatataatggttgatggatgggccggtatagctggagagattctcatgctgaagccacttataatgtatcatttgaagaatttcttcttggtaaaaactgaaaaggacagagaagaggcaatggatccagggagtcttggtttcaacaccggagaacctcgtatacaattgtatttcatactaggccttgtctacgctacagtgacaccaattctgcttccattcataattgttttctttggcttcgcctatcttgtgttccgacaccaggtaaactgttcatttaagtacttttgttttaaataaccaagtgattcggtttatgagcttctttgagtacgcatacttccgccctccttagctctgtggttgaggaagtttagtttgctttattggtatagcataaaggaaaataaacttctcagcacaaaaatcatacaccatttaaatgggttgaatcgacataatcaaaagatacatgtttgtgatggtttatgaaatttaaatatgcagataattaacgtttacaaccaggagtacgagagtggagcagcttctggccagatgtccattcacgcattattatagcactgattatttcacaactgtctttaatgggtttgttggccacaaaaggctctgctgaggcaacaccagttatcatcgtcttcctatactcactatatggttccacaggttttgcaaaggtcgttatgaatctgcatttgttaaatatccattacaggtagtttgaaactccccaagttcactcaaatcattaatgactcttcctaacaacttaaaccatcatattttcttctctaattatatgttgttatttcgatggtacaggaagcaatgatgaaagacacacttgaacgtgccagggaaccgcacctgaacttgaaaggctacctccaaactgcatacgtccatccagtcttcaaagctagcgaggaggatgaggaggatgatgatttggtgtctgaaaaatgggaaactgagagtacccttgtaccgacaaagcgacagtcgcgaaggaatacaccattgcccagcaaaatcagtagcaattcatcgcctactctgccgggtggttttgaagatcagccatagcaaagtttatgggaaagactcacttagctgtacatttgacctttagcaatggagaggagctatggcactgtaaactattgtataatgtccatgatattgtatagaggtatagaagaaagcacggtctcaaaagaagcaagtttcatgattttgttgcagcctacttggggagggaattagagccatatatcagtgagtgttgaataactagagattcaaaagtggtagttttcattttcattcttttgttttcttagaaaatttagttttagttttctgatttcttttttatttatttgtgtatctacatattgaagtccaaactgcacggacttgtcattgctgggctctttaaagtgcaaattctcttccactcttagaagataaccgtttccaagataaacactgttttggtgccactttttcatcgatttattattttatttttgtctcactttttcatcaattagataccgaacttttgtgatttttctttttggcagaggtgtggttaaaaaggtttaccttattattatcagacaaatattataattaaaattaatttaataaacttttaacattaaaacaaatatactaattaagttattgtaacaaattgtcattaaaaaattatagggaaatttacaaaaatactggaatttgagttaacttttacaaaaatactgtcatacgaaaatcttttcaaaaatact

SEQ ID NO: 306040 - DNA, 2625 bp, Cannabis indica
tttatgttcttcaatttgttcataaagttagccaattggatcttctcgtgacataaagattaaggacatggtagttcaatcgagtgggagcgctaatcatagatatggaatctatagctaatataagtatttagacgtgaaacgataatttccttcgagcttggctgaataaagacaaatgattgatgtctaatttcagtaattatattagtttactgaaatatcatttatagatagctaagtgttttaaggacaaaatacattgaagggttgaacagtaaatatgtccctattcagtgtagatcatctatagaggatctttgactattatgattgtaacaatagataatcatacttatctatatcttggtacatataatgtgttctatataattgagactaaaattccaaatctatagtggcgcaatgaagaattaataagttaacgagtttacttggtaaattttggatctacttataggaagcttgattctataggcgcattgtccccacactagttgaaataatactgcttgcagactaagttaattggttttaattaatcaattataattctaaaattagactgtctcatttatgaattttcactaagcaagggcttaattgtgaagaaaagaagttttagggttaatgtattaattaagagactttgtgtagcctaattaatagataatataaatagcaattttatttgataattaattataattttattaaataaatagtttttgtatttataggtttgaaattagaaaatatgaagaataagtggttgaaataaaaaggtaaaattgtaactagtaaaaagcctttaagttgccggccattatgtgtgatttttgctcattattttattctttttaatccatatagtttaaatctaagccctaagtgaaatactataaaaggagcatgatgctctcatctcatccaatacttttaacctgccaaatctagtttctaactctgtcagacaactagtagatgagcgacaccttctatagaattttgaaccgtccattatagttcttcacctatttggcatatagtgatagagtgtcatgccaacacatagcaagtaatgtactaaatcatagtgtggaagacggtggtaaccaacctgaaggagagaaagaggctcagatcttgataatactctactactgaaaaaaaaaacaagagctagagatctgagcggaatgagtcatattatttcactgcaatcaatgtaaggttttgtaaactcttatttgtttaatttcatcgtattagagatattgatatttaggatgttaattcaacatacttgttagtaaatctagatcctagtaaaatattcccaacaatctagtgttcatctttggacaacctcctggcttttgtggcttcgacgctgaacctctgaatataggtctttaggctcttggtctctccttgcttgatattggccaaccacatccttggaatgatatagtctcgggaggcatggtgtttggctaaaaactcatcagtaaactacctgcatgaggtaattgagctgggggccaacctcttaaaccatttttatgttccgcctctgaaagtcattgcgaagaattgacatctcaccttgcttgtaacctttttcattttcatgatttcatggaaggagcccaaatagttcttcgggtaagtgattcatatattagggagtatgttaggctctttgaaattgggaggtagttgttcaaattaaatctctctagagaagggtgattcatcataaaaatcatcttcgctctaactaccttcttttaacgctacggatgctatccttcaccgaagatcttccatttccttgtccaacttctactttcttatgtgaagtttttctcaaaagtctaatgcagtgcattttgtgccatctttaggacaaggggtcactagcaacgatacctgcttctcgatggtggattttcggttgagttttcctctttaattgccctggactacctgtaattagattttctttggctaaaatgagggttccaggtccttttggggtgacccttctgtggtgaggactctggtgtgttattcgtggagtacttcaacatccccttctcctcttgctcacctttagcctttttccaggcttcgtgctatctttgtttgattaaaggttcttcagacgcccttccaagagttcctccagcaccttttgcttgtttgcaattttttcttctaaccgcaagttattcatcttcaactcgttcatttcttcattgtgtatgcaagttcaagagtttgaggtcacagaataaactcacttctcttttcctgacctatggtgcgaggttccacaatcttttggtatgggtggcagaggatgccttatagtcgatggggccttatgcctttgtgccccaccttcacactcggttgtgatggaggcagtggctttattacactgctcttctatcgagatctcttcacggtgatggtctctttgccttctaataagcagatctataatttaccaagtaaattcactatgatttacattgcatagggattaatttaccgttacactcttcaatgtatgttatccttaaaagacttagc

SEQ ID NO: 306041 - DNA, 571 bp, Cannabis indica
attttctttataataacaataagtaataatagcttcatcgtgtggctatgttatctctaggatattgtgagatttgataatttggaaaatagaaatgttgtgtgctctaatgagattatgttcttttgataaaaagtcatatttgctcagatataaatgatacattaattgttgggtagaagatcgtaatgcatggtggtaataattttttctataattctttcttttatgcttctaatgaaaagagtagaagaatgagtctttggagagatttgttcagccttcaaactcatcttggttcttgaagattttaatgcgatactctctcaagaaaaaagaattggggatagagtgtgtctcttacattcaacaacttttagtgttaatttatttgattgtggtttaatggatgtgaagcatagtggcaattattatacatggacaaataaacaatacgcccggacagaatcttagctaagtgttgcgaaaattaatatacgtaaggatacacaatcacacaagtaataaagtgataagtaagattgtctccacagggattacaaacaaaata

SEQ ID NO: 306042 - DNA, 2503 bp, Cannabis indica
tttgttttatttgtggtataatgggtcactcaagacgcttttatagtaagttatacgacattccgttgaaagaaatagagaagccttacagtatagcaatgtgagccccaacgagaaaacaaaacttcataacagcctctccatggctgcgatcaagcacaaccgaagcaacatcatattccgtcgacaagaattctgctccgacgacttttactccagcaccatcaagtaaggttgatttggtgggatctcgacagctgcaaaataatacccgcggcattcatggcaagattgtatcatcatcccaagattcaaggaatgttggtcaaaggatggttaatgccaacaatgatcctacttttattgtgattcagaatcaatccatgtttacctctaacgtggatatggacttggtggagttgaaaaggaaaagaatagaaaatgactcatacaaagctaataatgtggctatatctaaggaagtggaccatgatgatgagcccaataatgttcttaatgaagatagtatcggtctttcaaaaaatgggagttcggtgggcctggaaacccaggcccaccaaacattatgagtatcatcaactagaattgtcgtgggcttgggaacccgcaggccttacaattccttgaagatatctgtgtcagtaagaaacccaaatttttattcctttgtgagactatgtgtaaaaaggatactgtggaaagcgtaaaaaataaattgggctttgaaagttgctttattgttgaagcccgaggaaagaaaggaggtcttgcactctttttgaaaatatcaagtgaggcccatctcttaagtttctccaacaatcatatagacattgagatttctaccaccgacatcaataactggaggctgaccgttttctatggtgaaccgcaacaatctctctattcaacaacttggaacctgcttcgtgatcttgctgcttattcgactcttccctggtgtataatcggagactttaacaacattactactcacggtgatgtgaaaggcggtcgcccctaccctgactctcttataaacgggttcaaccttgccctctgcgactgccgattggatgaattgatgctctgtggggtaccagtatatttgggagcgtggaagaggaggtcctacacatattgaaatcaggttagacagagcttttactaatcatgactggttctcaatatgtattgatgctaaactgtcaaattttaattacacctcctccgaccgtacacccttgcttcttgaaccagaccctgctatgaattataaaccagtaagattatttcgttatgagaatgcctgggctcgcaaacctttttgtggccagcttgttaaagattgctgggaggttaataataatattccccttgttgaaaaaatttaactgtgtagctctatcttaactgaatggggttatgaaattactggtaactttaagcagcggttaaacaaaagcaaaaaaagactgagtcatctaaagttgactactgtgtcttcctctactgatgatttttctgcagaacattgtatttattttaacattttagctcaacaagagatttattggaagcaacggtcgaaacaattttggctccacgcgggtgacaaaaatagtaaatattttcatgctactgcaagtgctcgaaaacgtagcaatgaaattgttcaattgcaaaacaattctggtgaatggaaggactggtcttcgggtcttgaacatgttattgttgattatttctcttctttgtataatgccgaaggtaccacttgtgactatgttgtgagaggtatcaattgctctgtttttaatgaccataatgaggctcttttgcaatcggtaacatctgaagagatcaagcaagctctctttcaaatgcatcctgacaaagctctaggtcctgacgatatgggcccaggttttttccagcaacattgggatgttgttggcactattattgtgcagcttgttttgaaattctttgatactgaggagctcccacctggtataaatgacactcatctagtgttgattccgaaaaagaaaaatttcactactatgggtgatctgtgtcctattgccttgtgtaatgtctcttacaaaattgtgaccaaagttcttgcaaataggatgagaggcacgattgatcttattatctcttccacccaaagtgcctttattcctggtagactcatatctgacaacattacggttgctttttgaagtcatgcattatttaaaacagaaaagaagaggtaaaaaaggttttatggccttgaaactcgacatgagtaaggcatatgatcgagttgagtgagactacttgaaagctgtcatggttaaaatgggttttgctagcaaatggatcaatctcataatgaagtgtgtcacctcggtcacatattctgtggttcatagcagtcatattttgggtcctattactccttctcgtgggattcgtcagggtgatccac

SEQ ID NO: 306043 - DNA, 935 bp, Cannabis indica
aaaaaaaaaaaaaaaaacttgcgcgcaacaagcttttaatttttctttttcgatactgtaaaatatttataatttttcaaaatcttagaggaacttactattactacaataaatactataagggaacaaaaaatttggattacaacactttaaacttactatattaatttgtagatctaccaatacaaatagaaagtgttatataaccacatatactctttcttaataactaaataataataggtataaatattattttgaactctgtattttataaaaattattaattaaaattctcttgtgtatattgaatatagtacaaaataattttaaatcaaattattaataaattttatttgatgaaaagttaacttacaatgtattttagtaagttcaaaatttattgtgcattatttgaaaatgtatttagacaataataatttagtgttgaagaaaaggaaaacaaaaacaagcctacataatttgaaaatgtctcttagctataacctggggccaaaagtgatgggtatatataaagcacgtgaaagaggatatctatattctataattttatgataaaatcccttcaaaagcaatcattatataataatggcaaacaagtattctatatcaatcccaattaataaaatctatataaatatgagtaatgaataatattaaaacaaaattgaatattttataattaatttttttatttcattagaaatttcttttcatttttatattatatgagttggggttgttctgactaaaaaaaataaataaaaaaaaagttttcggacaaaaaaatgataaaaaaaaattgaatttgacttaaatattttcatataaacatatttttatatagtgttaaaataggtatttttgatatttttcttaattaagtagttaatttaagcatagaaattaaaaat

SEQ ID NO: 306044 - DNA, 580 bp, Cannabis indica
gattagggttagtgacaggcctgctcatgcaatgacaccaaccttttcattcaaatttccacgaagaaagagcagcacccacttggacagaagagactctcacgcttccgtttaatatttatatgtatatgtttaatattgcttgcttctccctgcattgtaagccttaataaatttacatattataaataaaattgtaatcttcttttgtgtgttttataccccttttccaatatttacaaatgtataaaatcaacaactctatgcttaacaagattataattatgcttatcaatatataaggagtactataataaaaattaaataatgttactaactcttgcaaaaatacatctaaaatgaagagaagaacacaattcaaagcaacaagtaaataacaaaaggttgcacaattatagggatgtgaaagtaatctcaacaccaaaaccacaagcgacaagtaggggaattattatcaaacttgctaaaaatcttacaccttcgtctaaaaataattattttcctcatcacagcacttagggaagaaaagaagtagaaataactttctaaatttatcaag

SEQ ID NO: 306045 - DNA, 827 bp, Cannabis indica
cttcctcttcctcctcctcctctcactctcgctctcctccgtgcccgaaccctcagacaccgactcggactccgattccgtaccactatcctcagaatccgagtactctgattcggagcccgaacttgtttcctcccgctgctgtatcgtctccgcgattttcgcttccttctttggcttttctcgtgttttacgtcttcaccgtcggaatcggaactttcccgcgttttccttttggatttgctgtgttttctttcatcttcggattcatggaaagaattttcccggagtttcctggattttctgtcactttcttcttctctctctacacgcttgtcatctctctccggcatcacgccgtcccgatctttcgccatttagctatcactgcgagaacgaaacttagttcaaggaggcgaaaagaagcgtacagctcagtcgccaatggagaattgaggccacttttgcacttctcttggaccatgatcataccaagtttcattaaaaacagtaacttaggcccacccttacatgggctaaattattaaacccaggtacacaattcttcctttgtttccaacaagctttaatatgggccttaactactcaatccacctcatctctcacaacaataagatattgtgtatgggatttcataacaaagttagaaaaatatggcatttttaggtttgccactcttctatggtattttttgttaggctaaaattagtctaagattcgggtcatatttcggttagttttcactctttgtttctagttttagggctatattacgcttgattcttttgtttcaggtcctcgggcat

SEQ ID NO: 306046 - DNA, 2988 bp, Cannabis indica
aaactaagcggtctttacaatgggcctcaatcctcctttatcgagtgggctaattagtgacgatgcttgattattggcattagcctttttgttgagttttcccgtagatcattgtggaccaacttagattcaatctttttaggatatgacgaggattcttgatcctttcaggattgaaacttcgacgatgaggatttagggtgttttttgttgaatattttgaaatccttcatctctttctcatcttcgtagttctctttggtcttcttctctcttcgttggtctaaaggtgcatcaaagcggccttttaagacttcatcaagaaccctttgcatgttggcaatggtttcctctaaccattagttgtccatctttagcttgttcatctcctcatggtgaacatgagttcataatcatgaactcactaagtcaaccctttcctcttttttgggtcggtcgtgtgagattttaggatcttgatgctagcagcaaggggtgtctaattggcaatgggagtctctaccttgactcaccttcaccctcaatgtgaggaagcggtcgctctatcacgttgtatgtctactgggacattcttaagatggtcgtattcttctctcacttgagtccttcaatcattagcaccttcttctctagagacatgtgcttggggcctcaccttgaggtgattagctgagtgttatctaggtgaatctccataccttgaagatgatgggagcgtctagacattttatgatgattttatgtgaggaagcaacttagcttgagcttatcgattccagagatggcgtcaagctgtttacagtgaaaactcaagaagtaacttaaggtcaaaaaattgaaactcaaacactagacccagaatgaagatgaaaatgtgaaaaattcaaaaacaaaataaatgttcagagcaaaaatggagggagagaaacaactgtatttcttggcatgaagtgttacaatgattttccaactcacatttgagaatggggtagttataggctctaatgttcaggggtatacttgttgtcctcatatacaatgtgacatccatgagctacaagttgcaaggtgtaggtggtggtcttgcgccttataccctcgtcttgtgttaggtggtcttgagttgctggggtagtggctgtgtgctatattgatcgagatgttagcacttctagatgtggtgcctcaacaactcgtacatccttggcatcaaaacttacagacggcgtggttgtacacactttgcatgcacgccttatccttgcaattgtaccttcattccttcatcttcaacacttttgaaaattcccacttgacatggttgtatcattaacaagagctttgtcgggtaatgtgtaagcttgacacatggacgaatgacattctctcttgttcatgaacgagtgaccttctctcttggctatgttcaagtgatttagggccaagcttgtctgagtgaccctcttcattggcttaactgagtaacttcaaggtcatcttggctgagtgaccttcttcttggcttgatggccatgttttttctagggttttgccaagtgactttctctctatcatggtcgagtgacttcaaggccacaatgggtgagtgacattcttcttggtcatggctgagtatctagggccacgcatggtcgagcgaccctattctttagcttggtcgactgacttcaagattgtatgtccgagtgactttctctcttcgccatagccgagtgacctagggccaagcatggttgagtgactttctttcttagcttgaccgagtgacttcagggatttatgggtgagtgacttccactcttggccatggctcagtgacctagggccaagcatggccagccatggccgagtgaatttctttcttggccatggtcaaatgacctagggccaagcttggccgagtgactttcttccttagcttgttcatgtgacttcaaggttgtatggtcgagtgacctagggccaagcatggtagagttactatctctcttggccatggtcgaatgacctgggcccaagcatagccgagtgactttcttccttagcttggccaagtgacttcaaggttgtatggtcgaatgactttctctctatcatggtcgagtgatatctcaagcacatggccaagtgacatctcaagcacacggccaagtgacatctcagggctcatgaccaagtaatctttcacctaatcctttggtcgaatggcttttcatcaaccctagccaagtgatcacccgagctagggtttggtcgagcgaccccacgacatatgcgtcgactcggtcattcctcagccgaatcttaaaggtgatgtctctcgcttcttgagactaattttaatctaattttaaggatcaaccctgctgattttttgggttaacaactacaacagctgaatcctatcatgaaagaagttgttcgaaaagaaattatcaagtggctagactacgacattgtttacccaatttcagatagctcatgggttagctcggttcaattaacccctaaaaagggaggaattacggttgtggctaatgaaaacaatgagttgattcccgtaagaacaatgactagatggtgtgtttgcattgactataggaagctaaataatgtcacaaggaaggtgttagggtttatgtcctgaaaagcctgtcaagacctttcctgattattaaataaagagttcaacacttgatatatgtatgaatgttaagttattaatattatgattgaataattatattaaatatcagaaagttccttattcatatatgaggttgttgcttgtagttgtacagagtactaagacccattaactatgaagaaaatagtcaacaacatatttaagtttgggaatctgtaatcaatggttgctagtatggttcactaatgcccgttctttagtgcaagtaatcttggtttggattacggatgtagtatgac

SEQ ID NO: 306047 - DNA, 1705 bp, Cannabis indica
ttgttaatccaacatacatgatagtaaatagatcctggtaaaataatttccaacagttcctccctagttgttttctgaacatccaatttaccatttgctggtatgtagcccatgtattcttaagctcgaatggtatcattttatagtatttaaacaacccttttcagtcttgaagctgttatgttcctcatctgcaatgtgcatcttgatttggttgcacccaaaataggcatccatgaacgtgagctcttttgatcgattcgcgggagcggataacaatcttttaggtaggccttgttcaagtctataaagtctaagtaaaacctccatgagtcattgggttttggaactaacgcttgattcactacccatactagatacaatgattcctagaggaaatcatttgtagttaacttatccacttccgtttccaccacttcggccttgatggggtcaagaggcctcgttttttggcgaataggggtcgcatcttctcagatattcaaagtgtggtagattgtgtttcgatcaatcccaatcatatcagaatgacttcaagctagcacgtccttattcctcttgaccgtatctataacattttccttgatggctagggttagaattcttccaactctaatggtcctcgtcgggacttcctcactaatacttacttcctctacctcctccatcagctccaaatttctttcaatcctaaatcatgggtttaactcatctagaaactcttcccagaccgtttatgtgcccattaagtcttctgtcctagaagcaacaagggtctcctcgcggatcatgaacacggtccgtgatgaaacattgtagcaatttcttgcacttctctaatcaccatttattatcccaatgcatccattgtcacaaggaaatctcatgcataaatgctagatagaggtcactgccccaaagtccaccagggtttgtcgtcctaatatggcattatatgcggtcgtctagtctataaccacgaaggttgagtgcttaaaagcactcaccttgttttccccttcgatagtgacgggcagctagatcttacccattggcattaatgcataaccattcaagccttgtagttggatagggcatggggtgagatgtgcttcgatgagtccaatcgcttgaaatgtaaacttgaacaaaatattaaaagagctttcattgtccacgagaactctagaaacttgtttattggtgatttgtccatcaatcaccaaaggatagttgtgggggatgtgcacatttctagcatcaacctctacgaaggtaattggaaagttcatcatcctgggatggtgagcgggagattttaccagtgcacatacttccccctcttctacttccatcaagtaccttttttgtgcattgtgagtgtgacatgtccgtccacaggcggagaaacgagccctagaggttaaagggctcccgatctcggggcaagtaatataaccctagccgaagctggcggagcagaacggtaggtaatgacgtccataaagcttaagagcgacctactgttggaaatattttaccagaatcttagatgtactaacaagtatgttgtttaacatcctaaatatgaacttctaaaacgataatgaataaacacatataaagtatgagaaaccttacagtgattgcagcggaattcgatgtctccttccactcagatctc

SEQ ID NO: 306048 - DNA, 3086 bp, Cannabis indica
gttagagaatcattcatagctgaggtgtagtgtgttggaatggtgtctaaaacatggttcaaagcgttctctgttactgcagttgcagaaaaaagatcctcaaagtagatgtaatgatggctgtcataccagtttttgaactcaccacatgaccattatgatcaaccagggatttaatgggtattatgttgttttcgggaagaggcatatgcatgaaaaaacttggtattttggctccattttgcatccaatctactcatgaacgttgttgccaatacatctcttcttgagctagcaagtcatctagaacattttcttggcatttcaggtcattcaacacaatagggatacgattactgatgttgttcaagtctgtaacattttgctgcacttttgaaatcttttttttaagattcctgaacttgtgtctatgccactgctgtagcaaaccagcacagttgctgatatttttgttaaaaattgcaccagcattttcggcatcagcacattgccaattttgtttgatgatatcagtagcttcttcctcatgtaaccaaattttttcaaatcggaaccttctttgcacagaatgttgctggtgtgtagccgaatgctgcaatactttgacagagattgctcgatggtctgaaccatagtaatctaggtgctgagttaaaattggttggaaagtatcacaccatgaagtgttcacaaaacaccagtcaagtctctcctttaaagcatcaagtgacagcctgcccttaatccaagtgaatgaatcgccttcaaaggcctgctcatgaagatgacaatggtcaagaacttgtctaaatttgtccatttgcgactctctacgaagagctccacctgacttattggcatttgacaagaattcattaaagtctccaattactatccaaggtagtaaaggagcaacatccttcaatcgttctaagagtgtccaagtgagatgtctattatgagcagccggttcaccataaaaagcagtaaaatgccaagtcggaccatttccacaagacatatagcaatcaaagatatttgtattatagttcaataaggttacatttacatcatctttccaaagcaacattaaacctccactaagaccaacacgagggacttcaagtccgttattgaaatgtaaaacattacgaaagtgagaaatagaattagaacctagcttagtttccataataaagagaacagtcggggattgctcttttacaagcaatttgagatgacagaaagcactcgggttccccaaactacgagaattccaacttaagattttcatggctgcttgcggagctgagattcagactccgtagaattgtccttatcaccagtagaatccatgtcatcaatggaaacatcaaagtgtgattcattatcccctgacaaagaggacatgaatagtgcttggttacccctgcatctctttagagtttgcctcagacttaagctctcagaagttctcttcgtaagtctatttggagatagattttcctttcctatgtgtggttcagcagaagcagtgataatcgattttggattgtggtaaagccgagttggtactggagaattcaactgactgaatgtagaggaggcctggacagtagcgtttgttggaggatatgttgcaaaaaaagtttgaagacacatccatagcagccagaggagtaaaaacccgtgataggtcaaccacattatcattggaatttggctttgattgcgcctgggacattgctgcagaaaattgcagcacattgcgatgttgttgggccgtaggtacaactggtttagagaccaaggttggggcagtattcatggacttagaaccatttatggcaacactactagacatagcagtgttggttactgcagggatactaactccagtcgatgtagcaacatcaaaacccgattgcacagatctattaactccagggatactacctccagttgaaatggcagaggaaacaacccttggttgtgaagattcacctataagtaagtgtgttggattaggactttcacgattttttaagtttgttatggccgaaatgagtgatgtttttgccaatcgggtaagtaatggccaagcattgcccttggaaaagtcagttctatagcgatcataattcgaaatcggtagtggtgcacccttcattgtaggcctatattccaaatctggtttaataccattatccaacttctcaagatagactgagcacttgtcaaaagggtgtcccaatcggccacattccatacagtattcaggtaaccgttcataccgaaattccacccaaaattcctctttcgcttgctgtaaagtgatcattttgcctctcaaaagtggtttagtaatgtcaattttcactctgacacgcaaaaatggtccccaaccttcactaagagaatcctcaaatacatccacatattcaccaataatgtttccaagagcaattgcaattcctttagtcttgctaaggaaaggaagtctgaagatctgtacccaaaatggtgtataaatgagtgaatcagagttaactgtttgtccttgagtgggagagtacagcacgatgtggtgattttggaagtgaaaaggttctcgaaggagagccctcactttatcaccctcacagccgaaacttagagaaaacatatctgaagattccgtgattgttactgggaatctaccattccagtgctgcgccatctggtttttgaatgtagataaccaagctttctttcctgtaagaactttagcatagagaacaagatcagaagcctcttggtgtcgagaaggaatcagatcagtaagatcgaataccccctcttcatcctcagttaaattcataggctttttcatcttttgcatagcagaatctatgagtacaaggagataaatctatgaaatgcagatagaggaatgatcgatttagtgttgtgatgggaaggagagatagaaaactcaggaaaaaccataagaaaactgtcaagaaaccattaaaaaccacaaactgccacagagcactaaggagggcagacgctcaaagaatata

SEQ ID NO: 306049 - DNA, 1036 bp, Cannabis indica
gcaagttcttctcttctgaatcaataaaattaatatctgaaagaagttgacaatagtcagtgggaggtctgtggctcaatgcttagatcaatttaaaggtatcaatctcatgccatggaacttgcagagaaaaataatgcagcatccatccatgttctgattttcaatgaaacaaggtagaagtagagaatttcatgcaatgataaaaaagtatgaagattttagagagtgaaacagcttggcaaagaagggggttcaatgttcatcgactacaggtgcagtcatttacaaatcaaatgttatatgcagcaagcaccataaaatatttgagaaagtagtactaattaaggagcgtgtgaaattagaggctttctttcttgacagccacttccctaaaaatagttgacccttttttaaacttgagaagtcacagttctcctaccatataacacaacaatttgaacaaaaaactcatctcaacttgcatggtgatgatgatgaagatatccatctttttaattccattattcttctgccttcaaacttttttaatcctgagtaagagataattagtttaatatggttaaaatcatatgcagaatgcttatactaaatctactagaaaacaaaaaggtttcatacaaactcttggaacctaaagtcatacagaacatgtctaattcaactattgtggctataaattaagaataataactcctttgtcaaatgaacttttttctcatttttcttgcagtatgttgtcttgaaatttattcctatttccataaaccatgactttggataagaaatttatcataattaaccacttccatgacctctgacaaagtgacgaattggccacaaacttaagacaactactcatatttctctcttattgtctttgctaatgaagtaatatgattttttttaaatatatatatatatatatataaatacaatggggatttgaaccacccccacccctctcctgccgcctaagggtgttcatcaacacggcaaaaattgtccacaccgc

SEQ ID NO: 306050 - DNA, 3573 bp, Cannabis indica
gaagaccgattatccgagagaatccgattgtgtagcttcatcatcttcatccattggatcatcattttttttattcccatcagcttggtcactaccctcagtctctgaatccgaaaccgttcctcttttagcaccacttttagcaccaaccttgcttttaacaacatcactgtccgtgcaactctcagtatctgaatctgaagcagaacaccgatccccctttagaagattatcattttcacccatccttccaccaaatcgctccttcaaatcaggagcaacaatcccaatcatttcacacaaggcctgacgctcatgattccgtctgacagcaatggcctcaggggatggattagtttgactctctgccacctgaaggttggaatcatgtagggcagttccacctccatcattgttgacattattgtttcgaccctgtgattcattgtctccatggaccgaaggggcggtgctgcaagcccagctaccggcaacttcagaagttaaaagatctgctgtcctgattgtgcctccagcttctgtatcttccatttcgataaccctttgattttcaactgggctattagattgagagcaaggcgcagtctcttgacaattcatttgacgctgttcatcagcttcttgggcttcatcaagttgcatcgtatccccatgcaaagtgccactcttgttcaaatcaataacttggtcctcattaattccagcaggactttctgtttcgggaacttgttcagtactaatggcatatccctctacaggtgcagtgccaacaccatcaatatcagaaccaaagccactcttcaaaccatgattggttgcacttgtaaactctgcctcttcggtattttgatgtccatcttggcttcctatgtcgcaatcatgcttttcagtaacactgtctccatcacttgaaggttcgacttgaattttgtcaaaatgacgggccgaagtagctgctgagcctactatttcagttctatttgtaaggtactcagttgcttctatgtctcggtttccatttatatgccctacaggcatgttgagatcaatatcaattgatgtattgtcataattctcctcatcttctaaagtcctctgcattgcttttaactgttcttgctgcttggcaaaaagccctgaaatctcctcagttgtggaataaaatgctctaagctgagtctctctgcacccaaaccataattatcaccataagctaatacttgaagaacagcaaaccaatgcacacaggtttcaagactttagctattagaacagaatattttttccctctctttttcttggaagaagactaacaaaatagtttggcagctataggaccaataagaagtaaaatttcataattcagaatacataccgaagcataattctctctttggcagcttttaaccttcgtctctcataatcaagatcccgcatggcagactttatctcaagttcaaggacagaagctttagcccacgcttcctcacgagctgcctgctaccgacagcaggaaatacctcagcttaaaagttagcaactaaatgaaaatcctaggtaagtacacttgtaatttgtatactcagttcttatatgtcaagatcaaacaaaaaaggcgtagttcctacctttgcactttcaagctcattccccaatctttttgtttcaagttcaagttcttctactctctgtccgaacaaccaaaagaagcaatgtgaagctatttctcaatcaagaaaactataatatagtttacataagaaggcattgagaagcacaattacctttttcccactttcagatgtcaattgcacttcgcatacttgggtttctagctggcgaactttagtgtcagatataactaatctttgccttgtgtcttcctgcacagacaaaaggcaatttaatacacaatacctcaaacggttcatatcatgtaaaaacttaaatttaaagatgaaacgtgaaatgaactcccagcaataccaatttggatcttaaagtttccaccagtaaacacctttctctctctgattcctgttaatataagaaatctccatatcatcctcaactccatagaaaaataccaacatataatatgataagcagtcttatttcaaataaaagtatatatcagacctgaagtttgttaatcacttcttgttgctctttttctcgccttaaggcagcatcagatgatcgtttcaattcctccttagcctctgatagagctctctgcactgctgcttttaaatctgtggcagcattttctcgttcttctcttctttgttcacgttcttcatctagctgttctttgagttcagctattgatgatttttgactattcaagaaatccagttattagtatattttgcaaaatattaacattactccacttgtaaattattgcatcaaactgagtagcatagatttctactaaaatgaagcagataattaaattacttaactggtcaatgatcacatgaacaagagcggtagagaggaacaataaattgtgctttccaaaactagtaatcaatcctatgttcctctaaatgctttcaatatataattataatctatctagtcaacctgtcaaagaatctagtttcatagagatagcttacacattcgtccaaatctttgaaagaaaaattgaaaccaaaacatgtgttaacagtcttgataaataatttttttacccaataagaaacagccaattatactattgaaatattcattacaaaaccaatggtgaaatagcgtccttacctattcattatttcatttgcttcattacatgactgcagagaagcactcaacctttcattaaggtcttcaatagcatgcttctgctcagcagatattctattgacatctgccatttcattttgtttcacctccagcgtttcacgcaactctttaagttggtcaacataagaatttgaaattgattctttcatctctttcatttcctgaagaattcaaaatcacatgaaagggggtgtgacttcaaaataatacaaatttaaagaggggaaaaatgctaaaaaatacttttgtttaaatttgtattttacaaaaaaacagaaagagaagtcgtagttcatacattttcatgacgctcaatgacttcacgattctcattctgcagtttatctattgtaataacctgattttccaattgcttcctcaattcctacagatagaatattaatatgagattatacagatagaatattaatatgagattattttgcagtgaacccttgaatgagaatttctgtgacgaaatctgaaaacctaaagcacaagaaattatctttaagggattcttctattccacaagccaaaaattctacagctcactttgaagtccaagatatatgaagaaacatgtaccgtattcgatcgttgtagactacgaaaatcatcaagtgatatagggccctctggagcaccaatgccaatgcctttcagtctcttgttttcagtaacaaattcctctgtaatatatatatatatatatatatatttatatatatagaaaga

SEQ ID NO: 306051 - DNA, 2031 bp, Cannabis indica
tcctcttcctcatcttttgggtttttctcaacaaactattcccgatgttcggttgttttagtcgttcgatcaccaactttgaacacttctccatcccttacattgctcagttggacgtgcccttgagagagtagattagtgtattccatgatgacatcctggcttggaggaaggggtttcttgatgaaggtctttcagctaggtagcaaccatttttacagatgtaaggcagcttcaaatcttttctcagctctcaatgaaagcaccaaaatatttagtgagattttagaaactaaattaaagaagagcttaagaaattaaatgaatagttaagtaatagatatggggatttttacgcagtttaggtgttaatgaatcctagtctatgagtcaatgtattagcctaaaggctttgaatgtattacaacagagtcttacaagttgaagaatcctagtttatggctatagggatatcccattgagttttcccttactttgtgaagaagaaagtgtaaggaaaaatatacccagagttcttgcatcccccttttcatgaaggtatagaggggtatttataggcccacttcatgattctggctcatggggcaaagctgtccgtacagatggggcacatgcagtctggacaggtgtcacacgtgggttctactataaaagacaaagatttcagacatgtgttgctggacaaaaatgatgtatttattttggtggtgtgcgcactgcaatgttctgacataggagacaaggtttggtttagtgggactgggcattagagggcggccacatcaccccttaaaggcttctgtaggcctctattggaattcctctctgagtgcgtcccaatgttcatctgaagggtttttcttattttgattttaggaaggtgtgaagcattccagattcaagtaagtctcctacttggatgtgaggcttctgggcttcagatgggctcgggcccatctcccgttaagaccaaccttcttatgtggaagggctttggcctaggtgtttcttgcttgatcattctctggaaattccatgtgtcatccttccaaaaacatgaataacgataaccaaaactaaaggctttgatatttccttttaaaagaaaaactgaggttaagactcaaaagttctctaatggcgaagtcaaagaacaatggaaaaaaaagcttttatacatatttctcctctcagatcatcaactatctatcatcttccaatcttcattctctcattctctctcccaaaatatcatgaagaaaaacttataggagaccaagattttgttttccatgtttgtgcgtattagaagtcaaatatggggcataaattcaagtgagtttaaactaaagaaattggatatgttgccacaaatagttttagtatgtatgatcacctatctctaataaatacatgtaagttatatatattattgcataagtctaggggtgaagtcagaaataaaatttaggtagggcaattatctattttttatagtaaaatgctaaaatgtatttatggtgcctagcaccctttatgaagtgtcacaagctattggagctatttattatctaatcccacctattgtagttttaataatgattatagaaaactaatgactatttatagaacaccacctcaagtgatgctaaataccatagtgcttaataacaatgtttatttttatttatgtggacttcaaaatttaataaaaattatagaattgactataataaaatagaaaataatacacaattatgttaaaaaaaatcttagtataatcacattttacattaattgattggttcaattccccaacaattatacaaaaaataaaatgaaggtatgaagttttgaacttgtgacctcattgacttttaaatatactcttaccaatgttgggccctatttttctactttgttgggttgccatcttatctcaactcctaaaaagtctcatactaattgtaatgaccgctttattaaattgaattagtaaaggcaattagc

SEQ ID NO: 306052 - DNA, 1113 bp, Cannabis indica
aaatctgaaaatgtaattggccaaacccccaacttagttgttaatttattcatcataatctctatttttttacaacttaaatgacaccaaattcatatcattaatcataccattagaagtggtctccttcctaatctatctgttaatagaacacccaatgcagcaccaggaatctgcaattgaatgagttgttatttatgtaactaactgagtttctcttccaaaacttgttttcaagttatatattttaaagatttaagtacctgaataatagcaattgatatagtcccaataccaagaggaacacctacacaaaaaatcagtatcatgtatatagagaatgctaaaatgtagtttatttaattgattttgaacaaaggttttttttgagttaccagcttttgtgaaaatagagcctgaataaaaggctagtgcattgcttcccccaaattgttgcagcacagctagcccaatccaacctgaccccaaatttttcaaacataaatatgttaaaaaatgtttctaaaattgttatttgaaatgctttgacaaactcattttatggttatagtaacttacaatgagtggataagtatattttggttggaacaaatctagaagtcttgctgagtcttgctcaatggcttctgtataggtctgtcatatcatgagaaagccttgtatatcatttcaatgtatatttttaaggagtatttgcggcataagaacctaaagttttgaatttctaagcagcatagacttaaccaatgatagtaaaactgtaatttttcgttcagttctgtcaattcagactcaattagggtcttaaacttgtaattagactttaattttttagcctgtttaaagaagatttacaagtaactgatactacacgtttctgtcctgactcagtgacttagaatctagaccttacatatatccaaatttaaaacattattactaaccagatttgaacgaaaattacagctttactacattgggtacttatgccgcaaattatttcttttcttagttttagttattgagaagttggcaaagagaggagagaaaatcaccttaatttcaagtgcttctgggtaaatatcagcattc

SEQ ID NO: 306053 - DNA, 1669 bp, Cannabis indica
gtagaaaatgacaatgacactcttcttttatttgaatttgcatcttcaatttcactaagccattactgacaaaaaaatttctttacgtataagtagtattaaccaaatagatcattaaaaaaaaaaaaaaaaatagatcattcagaaacatacaaacatagttaaattgaggataatgattaccttaaagaacccataatcaagtaacagcaaaacatagaaaatgaaaaacccaccgtgttgaaactagagcagagctcaaatataaagtttattcctaaaactagagcagaacaacaaatgtagaggttacaaattcttctttaacagcaaggcttaacaaaacattgggccgataattgtttgatcaataaattgattaacatacataaaatgtagcaaatccacctcaatctccaaccaacttagaagaaaatagacccatatattatcaaatgttttcagatccaagcacaaacatcgatacaattccgtccaccaatatagtagagtacaaataaaacgttacctattttgaaatggtcattctcagaagcggtcatcaatctatccaacagatattgtttacagctcaatatcaaaagcacataaaacattctttttaatattaaaaaaatgatataatttcggccaacattatgtccgaatctccaatgcaaaatctgctaattcaaaagcaacaaaaaacaaaaacaaatctagatcgaaaacatcacatttaaggtggaactgtaattggaaagaaaaaagaagattcatgaacctgagtttgcttgaccttgacaagcagctccctaagaacagtaaaagcttcttgaagaattgcggtaacctcaaggacctggcccccaatcttctctgcagcagccgagaccctagccaagtactggcccaagaggtcgtcgaaggccaaaatcgagggatcaagcggcgcgtcgtcaccattctccggcaagctcctggcagtgaaaccagtggagagcgcctctaagcgggccaccgccgattccaatctctgtaccaacttctcttccatagctcccaaaccacaatctatgtgtctattcagatctgtctcagtgtttttaataatgccttcttctcttttcgttttgctattttattttattttagttttatttgtgtgacgccgaaagtcgataaggagaaaaatttgcgggggtaaatgtgtgtatcactataatgtgttgttttgtaggagtctaatctatggggacacgtggcggaaggagaaacaatcttggctggtcttgactcttgcacagtggaacatctgtacgaacataggacaacttgtgtatcgtggagccggctccgcttgagtggggtggatcgcatcagatgtatcgtgcgacccaattggcttctctttttgatccacacttaacgtgcctctcaatcttcaattcatgataaaaaaaaatcttcatggatcattgatctgttaagaaattattaaaaataacataattagtgaaaaataaatgaacaacataaaattagtaatagttgatccctaattttagtcatggaataattgtaaaggcaaattagtttgtctttaagtggcaaaataagagcactctttttttacttattctatacagtaaatttttttaaaaaaaaa

SEQ ID NO: 306054 - DNA, 1950 bp, Cannabis indica
ataaaataaattattaaaatagggtgtctttagaaatttttgaggtgtaaataaaatttccctattttaatcatttctcttaagaaaaactttacatttttagtcctaaattttgaagaattctctgtaaaattgttgttttcacaataaatgtaatccagctaaaattagaataagttataatttatgaataaaaataaaaattatattaatgttacttcaaaaatataataactaaatattaacgtttaaatattctaaacctaacttccatagcaactttaatatttacataattctttaaattcactacaattatcaatatagaacaaaatatataattctctaaaaaaaaataaaaatagtatcataaaaaatgtaacagaaagagattgtttgaagtgttttgttacgcaaaacatttgaaaccaaatttttcaagaagcttttctaaattttatatattgatgataatctagattgaaaaaaagattgtgaggttaatcaagactctcataatcatattttttttattattgttcgattctcaaacaaatcatgcatgttatttatcttttagtataataatgccatttggccgacgtcttactcaattacttggattggctttggtagttgaatgatcaccgagattacagtcttcttcagtggaatgttgcaactatttgtactatattgcgaattgcggtttattttatttagtagaatctaaatacttatattttgagcaaaatgtttttataattccttaagtgaataatttgattagagatgatcttaaaacgagattatattaataggagggatccttttaagagagaccaatatatttttgatattatttgtaatatgtaaataaggctgttttactctatttcgatcaataaatttttttgttataatcaaaaagagaatgtttttaaaaatttataatttattatttgatatttaataatgataaagaaatgaaagtagagagagaagacactttacacttttaggtagcacccatcaaaatagccaaaaacacatgaaagacaaagtactccaaaatacaaactggaagagaagaattgaattgaagaaccaaacgaacaaggaagaggaagagtatgatgaccaatacaaaaaaatggaaatggtggcattcacttactgtgacagagataggaattgaattggccttttatttcagctatagctttacctgaacatcaagatgccataggtgtgttcatactttatatgttattattatttaaaataaaagagtaacaaaaatagaatagcttttgttaagtctgaatttgtgttataaaccaaattttagagtcttcatctcaaaaatttgtgtgctctacaaaattagtgtttcacttccattttgtccttgtatttcatcaatatagtcattttgtttgttctttagaaagtgtttttggagtagtgggtaataaatattaaataaatattttatgtttgggtatagggataaggttatgtttaattgggtttggtgtatattctagggttggataactattcctctatataaatatcatttttgttctcatttatcattatttaatacaataaagtctttttcataatagtgggattcttatatctttcttgtgaaacaatattggagccaccttttaatctcattcttatatcaatttctacgatttgtgaaatcttccatccatttgaaaataaaattccaagttcttttagctatacaagtcaaaatttctgttctaccctttcttatacaaccctcaattaattttgtttccatatgatgttgtaccatgatgagagaattatggggttatctcaaaaaagggaaatttgattttttatacttaaaaaatttaatttttttttaaccaatacattttacactacaaaaaatatgacactttt

SEQ ID NO: 306055 - DNA, 1340 bp, Cannabis indica
aactttctctaaatacttcgccattatggtcatcttttcttgatattcacccaatacatggttcaaggcaagttgagattcattaaaacaaagaatgaccctcgtttttaacacttttacaattcgatgtctggatggcaaagcttcgtattctgcttcgttattcaaggcttgacacttgaatttcaggaaccgaaactgttcaggtgataagagagtatttctgccccgagccatttttgtttgaagatccattcataaacaatttccaaaattcttgtataggaccttgttcgattccttcgaggatggtaggtaatctcgaattgtcctaacttagtggaccactttattaatcgactcgaagcattgggtttagaaaggactagtcacacagctaattagttaagacttgaataggatggacctaaaaataaggtcgcaattttcttgaatcatgaactaaatttaatgcaagtttctctagaggtggacatctcgtttctcctccctgtaactttttgctcacataataaacttggttttgtactttgacctcttctcgcactaaagttgcactgatcacattttctgaaatgaccaaataaagaaacaaaattcccttgttaaaggtttagataaaacatgaggagttgataaatgtttctttatatcatggaatgcatgcttgcatgcttctgtccattcaaacttcttatttcctcgtaataagttgaaaaatggcaaacatttgtctgttgacttcaaaatgaatctgtttaatgcggccatcttggccctatatttcccttctcttccaccattgcttcaccaaggtcttccatcaacttggccttggtaggaagacagataacaacatcaccatctttggatacctcttcaaggttggcttcaaaggtagctagtagtggaatcaaccggctcaagtgtccactcctgcgctttctcctttttccttttgttcaccaagtcatccagattggcttttttcttccccttctactccatcgttgcaatgggtttctactttaagtgaacattatcttcctcctcattgtaaaggtttatcactttgttagtggcgaccttcggagcagttaacgtctagtcaccgtgagcaatcaactgaattagaatagtcggagtcacatcccttgggtgcaggagggtatcaataagggtagaaggctgcttagccttcttactctggttgtaacgccctaaataattaggcatgttacccaagttacttacgaaaccctaatcccctagatgagattactaatcaaaatagcgcagaatttaaacttttgtaataa

SEQ ID NO: 306056 - DNA, 1311 bp, Cannabis indica
atccgccacttagtatataaggagatctgtaattattttatggagtttgattaaaaataattagtagaataaagattaaataaaaagtgaggatggaaaaattaaaaaaaaaaaaaccttagaactttggattatacattagactagtttcacaaattttgatttcaatttttttttaatatcttgaagtttttctaaactacaacataggctaacatagatgatcattatcatcaaattataattaagataggtgagaaattgtacaaaaattgtgcttattctttctcaccaaccaaacaccaaacaatctcaattctatctataaaaagacactacttactaatagaacataatcatatgcttaagatcaattaagaaagaaaataatatggctattattactaaccattttaaatgttttctactcattactaacatgttaatcatgttgagcttcattagcactatccaaagagttgaggcacgcaatcttttggagactacaactactactactacttctgatgatgaagatgaagtgccacaatcattagtacccgaatttcccggcatacctaatctcgccgaccagctcccgaagtttgaatggccgccgttgccattcaacttgccgggatttcttggcagtactaatcaggacaagcaagaggatcatcatgatcaagtgccaattgttagcaaagacaagccttcactcactgaatcacactcagcttctaatccttgatttgatcatacatttatgctatatatcattaagaaaatactagtttgctatgttgaaggagtactactactaatgcctcctttcttattatagtttatctttatttaataaaatatttatgtgtgtttttggttgatgtcatttcatgcatgaaggtggtttattttatatgttgcaattattataagattattttaaattcttttccatttacatggtttggaattttttttggggaaaggtttagagttttgattaacttaatatttattagagttaattgcggtataatccttaataatcttatttcactagcaattaactctcaaaacttaaattttgacggcaaaactcacaaaactcgtaatctgttaacaattagacattttaatccatttttatctattaactgtgagattgacagtctacgtgtatacaagatagtgcctacatgaacacagtgtacacatggtacaatattattagtccgcgtaaataaatatataaaataaaattaaaaattaaaaaaacattaaaaattttaaattaaaaatatatat

SEQ ID NO: 306057 - DNA, 1264 bp, Cannabis indica
aaactgtaaaattaaaaaaaaaaataaaaaaaaatagtatatgggataattcccctattttatttaattaaacttttagtattattttattggtttgaattaatatacctataaatcctaaatctatatatacttttatttcagaaaacctaaaaatgtaaggcttttcatcattattcactgagagaaaagaattgttcttgctaatgtgttcagaaaaaactcaataataaaatatacaattttatcataattagcccacactaattcttgtatgtggtggtatatctggaagattgcagtgtgagtttgtcatcactatcttaaggatacaacttacgaaaaaattcgaggatactttgactcgttccaagagataaatatatccttttattttttattccaaatttaatatatggacataaggatatcctagggtgtggtacaataataatcgttattaatacttctgtcgcgtacctaatttagtactacaaaactaataattacatgtattgattcttgagttatcaatcattcttgtaataagtagcttatgtttctactaccaatgctcataggaattgttcaaacctcgagattgggatatagtttcactactataaaataggcttttttctacttgtcaacacgacggtcaaagcccagaattgacagaaaagattagcaagaacatttatggtcgattttacaataacgcacgatagcatctattgaaatagacgtaagggtctttaccgtcgattcacaattgacgctacaaactaattttttacctctcagttgttgggccaagcacgtttaactaaattaaaccctatatccctcataactcaaactttaaaaatatctgtcgcccactcatctctctctctcattgtgatttttgcagatgtggtgttcttgggtgaaaacggtgtcattgaagacaatgctttggcatggttgctcgagctctggtggtatttggtggctctggttttttctccagtggagagctatatatatttttttaactcgtgataaatgttcacttttactggttaataggtgcccaaattttttgcacctacatagtcgtcgatttggagaactaactaaaaaacgttatgcagttgattctaaaccgatgagaaaaccaaattttgcagtagtggaatttgtttggtttttaagggtaaatgccattttggaccctgtattttttaaaagttatcaataggaccctctgttttgttaaatg

SEQ ID NO: 306058 - DNA, 1427 bp, Cannabis indica
ataaccggcagaaccaggtcctccaccataaccactaaaagggccaccatatccacccccagaaccacccaaagacgacgccgcttgattacccactgcagacattcccactggattattatgatgatgaatgactcatagaaggaggaccagaaaagccagcgtaagatcccattcctcctggcccagaaaattgaccaccaccaggttgatgagccgaagcattccctgaatgtccaccaccaccaccacccccactcgaagactgattcccatctgaaccagacccaccaccaccaccaccaccaccttgcttccctttcttcccatcaatagccaatttacaattaagctgtcttccttcaatagtcttaaccggatccactaacgccgcctgagctccctccggagtcttgtaaacaaacaaagcataacctctacacttaccagtctgcttatcaaaccctaacggaccttcctcaatctcaccatacaaagcaaaatgagctaaaagcttatccgaagccatttcataaggcacattagctacgtaaatcttcctaagcgaaacatcagcaacagaaacaggcgcagtggtgttcgtacctgaattaccagccgccgctagctgagtcaccgtcatacgtccatcaatcttcttactaggttctttaagagcaagaaaagcgccatcaacgtgcctaaaagtaacgaatccatatcctttactctttccagtggttttatcgagaataacaacagcttcttctaactcaccgtaagcggagaagagagaacgaaggccatcggttgtggtgtcccaaccaagacctctaataaaaagcttgcgctgagaagtatcggaatcggcgatcgaacgaactgattcaagaacatcggggtggcgaatcattgcttcttggagaatatcgaggagttggtcgggagtgaatcggtcgatgattttgcgagcgtcgtgaggggagagttttgaattggaggaggagtcgtgtacttcgcctgatacgacgccgttctcctctatcttgcgtttcttcgagaggtccattgaagaaggagaagaagaaagacgcaactggtaaaccctaaccctaaccctaaccctagattgtgatttatttggtggagaagaaaagagggaaagattttgtgattttggttttaagagggaaaaaggaaagctgtaaatagttgagtgaagtgaagtgaagtgaagtgaatgaatggtgagatgatatattgggattttgatcggacacgtggacggtcagattttgttggaccaaatttattcatttattttttttattagttttattttttttaatgaagaaattttatattattatttaatatatattaagggtgcgtttggaaagtcacaatgtaattggatttgtgtgtaa

SEQ ID NO: 306059 - DNA, 2065 bp, Cannabis indica
tcgtatatacctcatcactattatatagccgttacgttcaaacggtttctattttcttcttcttcttcttcttcttctttcgtcgtcaaggtccaaggaagttctttactttttgataagtctttttatatttaattttttaaagtttcaaatttcccttctgaaggtttaggtactagctatactagtattggccaactttaaatgatcaaaatattgaaactgcaaaggctgatcatgggacctcttctctggtctttttctctgttgctaagtctttgctctttcttgcatactacccttgcacatttacttttgcagaagtctgtacagacaatgatatttcctttttcttttcctttttattattttttgttttgttttcatcaaatatattacttaattaaaattaataatattgctaatgtagcactacattattcttcatctaataaactgtgttataaaacagtgttatgttaacacaaaataataatctgtcgtacaacgtttatattaattttgtggtcacctagataaggacaagctaagctgaaaccattattttttctttagcatataattattaaaatttatttaggggatataatactaatatcaaaagcctctctctatttggtttttctgttgggaaggaaagtatgcacacaacacactagctataagaacagttgcagtactaagtaagactgttctcgcgtgtaaactcaaatccaaatgttgtagaaagttgatcaatagatccaaaacgaatgtatgtatagatatatgtgtgtatagctaggttgctcgtattaatattataatgtataaaagggaacatgtgggcactcccaacagcatgaaaaattcgcatttaataaacaagagagggacacacagcttttgtctgtaaatcctcaaccactatactcacttgagatgaagattcaatcctttggtccatagaatccatttcgattccaagaatcttaatttattgtttttatgaattcaacattcaaaacacttgcgcgcccaattaatactattattatttgttatatatttatatgaatgaacttgttgggagaaagatggctttcgtgtcccaaaaagggaaatttcttaagcattcgtggtagtgctatacttcattaatgatctaataatgagagggaactgatcatttatatctatctatatatctgtatgtatatttatatatatgtttgtctgatgtaacaaaagggacagcacatggatgtggccatgtttgagcttgattttgatgatatatggaacctgattcgatctttctggggtatgtgtgtgtgatttttttattggttctttttacagtacaagttccatttatgggatttgatgtttcacatagcaaaatatatacttgttaatataacgtaatatgttgtttcaacaaactaatatatatccagaagtaactctcttgattaagatgctttgcttgttttggtgcaagtttagtaaaagttgtttggtagactggctactggtccatatgcggaaatcttggtcaaactttagttatataccaaacaaacacacttgctactagtacgttactacttaattaatcagattactatattagtgtcaacaccaatttttaaaatttattatattaaattatatgggaattatacttaattgcaccactaatactaggcagcagttattaggaccagtgttacctttttattaattaataattttatttgtaatatttcaaaattcgaggtgcctaattattacatcagatcgatcgatgtgatcgcaaagtgggcgatgcgatgtggatgagaattaattgtgatttaattggtaatcgcttttgtgcatattatttaacgttgagccttgtcatcatcaatgagtactaaccactgcttatttttagtcacctcatatcgaaatcgaatcatcgatcgatatcctgaaagaaaaattaatgctacagaaagcaatatatatttttcatctctctaattgtcgtcgctaactatgtaataatcacgaataa

SEQ ID NO: 306060 - DNA, 1383 bp, Cannabis indica
cacaccaaataacaatgcaatatttatatattagattttttaattttgggtttttgctctttcccaactccccacattctctgaaagagtaagctgaagtgaaattatggtgtccactacatgcgtactactttgtcacatgccttatgtcttggcctacataaattccacaaattcagagggcttttttgtaataaaaatatgatacacaaaacaacttttaatgtttaattacccaaactatgaagaaggtacctcggtaataaacaaagtaaaggaaaaaaattaagtgaagattagattggttataatatgttttggctagttgtagtgtatatagttatttatatgtataaagtttagaaatgtgtaaaaactcttctagttctaggtctttagtgaatgtcagaatgtgaattaatagaataaaacagtttcatgagttgactaaattgtttaagacttagtataagtaagatactctggttaacttagaaactgaccaaaagaaaagtcacttaagattaaagtaacaaaaggagaagtaagtagtaataaatgtaaatgtgaaagggaatggcttggctccatttttgtgttttggagctgataatctctactggagtgggaccaatattgtcagaaatttgtttatggggttctctggatttttggttacttgctattttatttatttattttgttgtttttttagagcgggaggttgttttgtttttctcattgttattttcctaaaggaagtttcattaaatgacagaagatgcaaaagagaagaggagaccttttgtttctttcttttgggatagttttgagcccaaatgttattctcttttttctttttcttctctctctttatttatttttcttttgccactgccaatgtgttggcataaattataattgaaagtttgatttagaattattattgattggccttattatcctaatttgttggtctattgaaagagcctcaccttcctttttgtactctctttgtatttagtgtgtgtacattcctttaattgagcactcactagcttacattgattgattttatcatgtcattagactcattaccttctaaaattctaatctcctttatgcgaacagtaggagtaggagtgcttcgctgttttatttatttattattattattttgttgtcacattaatattttcagccattaaattgaacacgaaaagttcttcttttttctttaaaataataatagtaataataataataataataatttttacactacttcatgaatttaagattttaaaatatgaattactttttcataaaaataaaataaaataaaataaaatggaatgtataagaaaccgttattgttacatt

SEQ ID NO: 306061 - DNA, 2172 bp, Cannabis indica
cttagtttagtttttttttttttaatcaaagagttaataaaaaaaaaatgaaaaagaaaactacattattaaactaataaaatatagagtatatcataaaaagtaaaaaccccgaaaaatagtcacacgttttgactaaaaaatcgtgtaactaggtaaccaacaatctcaaaaagaaaatcgtctgcctcgcttactgatcagatcatgatctcatacagttctaccacgcaatctaactacattctataattataattttttttaaaaaaaataataattcagtttaaaatggtaattagaaaacattacaccattcttcctatttatttccctgaggaaaaaaaaacgaggaaaaatattttactataaatgaggggatgcatacctttctttgcgtttttccaaaaatctctgcaacgatttccgacgtgcaatcggcagatctgtaaaccattaaataaataaatattcaaaaatatattaattttaggattgatatgaatttgtgaaaatgataatcgttttacctccattgagaggatcaagtaggtgtgtctggtcgtttgaaagaggtggtgttggattcggatcaactgtggttgattcaataacattgttgcttccttctatggcaatctttagaatgttctcagcctattcagtcatttttattttgttttattaaattctaatcaatgaattgttctacaaataaattcaaatcttgaatatttgcgaaagttaacttgtatacaaaatagactaaccttatctcgaggaacatcgaaaacagagacgcttccgttatagaaaatagttaatggagttgtttcaggaaggttctcagaagttgccctgttaaaggatcattcactttttaatcgtttgaacaatagatataacagactttaaagaaaatgaacggtcgaatgaatacctggaagcgttaggcacaaaaacaggcaaaacaggaaatagtgtcttatccgatttggggctagaaggaaccgaaaacgatttcttcgagtcttcaaacggaacgccattaatgtctaatttccggttcgcaatcacagatttcagaacctcagggttaatcttcgaaatggcgctttgaaaacctgaaatcattctaaaaataatgttaaaaaaaaaaaaaaaagaaggggctagagaaaactggtgaagaagatgaagagaggaggagatagtgagtgacctcgaaagcttcgttggcgatggagaaacttctggaactgagatatggaagaggactgatccctctcgatgccgaagaaatcgagctcgacggtagtcctggccatggcggataggaagaaatatagaaaagtataatattagttgaaatgagaaggcgggagggaggtggagggggggaagggaagagaggtataaattagagaaaggaatgaagaaagtggaagcacgagatacatatgatgtgatggtacaaatcaagagtggtaagacccaccctaataactatgatccccaactcacacgacttccacgagctctcattacaacacaacaccacatcaacttattttatttacaattaataataataatcatggttgctggtcttggtcacacttagctaacttttttattttatttttcttttttggcatgtttttgtttatcactaaaatacattagcataacataatcatatatatttaatatcaatggttagcattaacattttataattattgtcaatctcctcgtaatcatatttcacttttcaatttgtatataatctccatcaaatccaatctatactgttttgctagtagtatatgttatattatttataaataggaatatttatataatatgcaatctgtggttccaaatttcaactaatttggaccaaactatttgagactggactaaatgattctagtgtgaatgatttgatcaatccaaatatcgttttaaattctctggttaggtcgcggttttaaaagtttaagtagcagttcaaaccaaatcaatccgaataattattatatatataactaatatttttgtgtagacgaaatgttgatatttaggaacaactttaggtaaaatattgataatgagtttatattgttatatgataataattttttattattatttatgtattataaactt

SEQ ID NO: 306062 - DNA, 3353 bp, Cannabis indica
attatcaaagttattttcaaatttaaattttttacataatctattaatgttttataatttcagatactacaacaaaattcttttttttagaaaaaaagaaattattttttgaataataaaaaaaaatgaaaagaattttagtcataagtgggggtgttgcgagaatcgaactcacgacctctcgcacccgaagcgagaatcataccactagaccaaacaccctttacttgtatatgttctttttttaaattatataaaacaatacaaatgattaacttctccatgaaaattctaatttttgttcatatttcttcttatatcttattttctccatataacttcttaaatacagaaccaaatacttcttaattcttattcttattcttatacccatttcatataattaatcaaaagaacccatttctccatgaaaatataattcaagagaattaccccccacacccaaaaaaaaaaaaacaagaaagaaagagaaaaggattggggtccccaatggtggctgaaaatccaaaagcccataataacagtttccaaggcatacatcacaaattcttgtttgggcccgctttgtggtcggtgtggtgcgcacagcgcaccatgtgagcgcaccgaaaagccttagctcatccagcaattgtaattggccaagattccttttttaatttatcactttttggaccgtttcttatttatatcattatatccatccataatatgtaccaattctttagctcttatctctcacgtgacggcctaatccactaaccacccgtgccattacgccacgtgtgacttatgtccagttgggctttctaatgggccttgatgctaattcatggcccaaaacattgtaaatagagatttgatcacactaataaaaagcttgatttttttttattggaaattacaagtttgataagttttttacagtatgagaacaaatatggttttttctcaaaaaataaattacttaataaattattttttcaaaaaaaaaatagcttataaaatatgccattattttataaaatggagaaaacagtagctcccatctaaaataaatataattccttaaaaataaactaggatatcatttgggtgtaatatttaagtgcacatatgactaagtatacttatgcatgaagaaaaagaataagtacgtacgtgtgttattatttttcttttatatataaatcacactaaactgtaggctctatagcacgtgtattggttatgatccatcgatgaaatgagatgaaatcaaaccaaagcttaaaagaaaatgtctctatcggatattaatattatgtcattgccttgcgtgaaacaagggaaattaattttttgagtcaaaaaatgaaacttccaatttgctttaatatattcatcatagacttggcagtattattaatttattatatatcattaattataggaaatttttgtagtagacttctgaaagggtcgtttcggtagttttttatctgtttcggcacttaaaaaagttttttaaactagtttttttatcatgattgtatatattgtagctatttaagactatttacaaatttttagaaaattctgaatagttacgcgctaaaattaaagtttaaacagttatttgtcacgtgtataagaaaaacagtcatgtgtatacaataaaatatataaatcttatttttaacattatatactcaaatttttaaagattttacatatgatatcaaataattatagcatacacgtttataaaaaaaattaaattaaaaaactatcttatatactgaaacaaataaatctatcaaaacacatatttgaagagcactataaacttactcttaattagttaattataatctaacaataaaaaaaaaagggatgttcttttagataacatctaagtgttgtatatttatataaaatataggatatattgtacatgtaagttagagtccaatttgttttgataaagaatcacatgcatattgtaattttgcgtgttactttctagctacttaaaaaaataaatctttgttttaaagagaaaaaaaaacaaaatattccaagaatccaacttttgtgtgttttatttggtctcataccaccaaaaataaggattttaaagagatcacatagtcatgctgcatcttgctatctttgttttaaaacaaaatatttattaagagtaaaatatactaatttataatgttattatgcaaattaataacattcttttgggagagaaaattagagactcaagagatttggataaagtttgtatatatagttatttgggctaatatatgctcataaattaaaataatgagcattttagaagacaaacatacatatacttaatttattttaattaattaatgttgttgttttttctttcacttaaaacaaaatataccttattcaaataaggtgaaaacatattattagtacaaaattattgtgagacatttagcaaatgtagttgtttaacaatactaaatattctctcactttctctctcacctctcccccttcccaaaaaaaaatcttaagtgtttttttttggggtcgttgggcgccaccaatccttttttgatgctagtggtgtcctaacacctgcgcaagctctctttgtagaggtgttaggttatatttagcctatgtctcgggtctaatagttaagtattttctcgattattgttgtcttttggagcggttttacgcttgattttccttgtttcaggttcccggggcgttagagttcaaattcagtcaattgacgaaaagacaggacaaactggtgaaaaatcggccaaagctgctcaataggagtcagtagtcgcgaccagcttgaagcctagtcgcgacccttttatctggtcgcgaccatggtcgcgacttgagagatttggcagaaactcagtttttcgagttttgcctgtggtcgcgaccagcctttaagtgggtcgcgaccaggtacggaaaacaagatttttgacctaattcagattttttttcccaattagaggcacacatttcattcctatataaggaacacgatacagaaggccaaagcaagcagaaataggcctgaaaaagtgaatgaaaagaggagaggaagcaatcttgaagacccggagcgatatcaccatctagtttctttcttttaccctttatttatcttttatgtctagttttgtttcagaattaatcatggatgtttatattatttttatgaagctaaatttcccatttagggaggatgatgaatgttgtttaaagttttgcctagttaatgaataattgtcattcctcaatcttgatttgtgaaattatct

SEQ ID NO: 306063 - DNA, 5121 bp, Cannabis indica
ggtaccgatactaaaaataaaaaaaaaaaaaactctctcaagggttaataatagaaaaaaaattaggatttctcgttcttaaatctttagctatcggaggctgtcttttttctctggccatgcttgttggccttccttgtgttttgctattgcaattcgattttttttattgcaattaatcttatctctgtgacatgattttaagtattttagccttgtctctacgacatgattttaagtattttagtcttgtatgtgtgaaatggttttgttttattttgtttccttgttggttcttctttgttcttcgatggctcgacatcaaatcattgttagtggttggtaataacaagttctctgcgactaaaggagttgttattagtgcagttacgtaccttacacaatagttgagtactcaagcaacaaggttgaatgaaccagctgcatcagtctttactgatgtatctcctgagcgatggatgaaacggagtagagttgttcttaaggttgattgtgatgctgcaatcctcatctgattttattttagttttttttgtcaaacgagctaagaattaggtggctgattatttgactcgtttttctaattctaattctggtcgtgtctctaatggagaagatgtcccgatcgaattgcaagctattattgtagttgattgtcattaataaaattcaatgatttattcaaaaaataataaatagataaacaaatttaccaaaaatatagtctgtataaatagaattagcataaaaacttagtaaaatcacaaaaatttctctaccattttctcacgcaactctccttctcaccttcgaccaaattttaagattcttcttcctaaacttattctttattaatcacacattgttgattgttcttctacaactcggttgtcgatgatcttttccaactacggtgacctgaaactctggttctctaatcacgatctacaactctagtcatgcaagaccttctctgattataaccatcatctaacactaagaaaaagtgtcgcaataataatcattaacaaaatagcatctacctcacaaccacaaccaagaattcttgatcaaaacctctaacacaacagaaaatattttaaaataaaaaaattaaaaaaccaagaacatttatatatatatatatattattttagagtcaatccaaaaactaaataaattttaatgatatctgtatgtatatatatactttatttaattctcaatatatataatcgagtttgatactattatctttaattgtcttaatgttagttcttgaatcaatgttattagttttaactattatttggtaaaaatattttgattataagtataagtataataatttgatatatatttgaatgttaaattattaatattttatgtttagtaatttatatatagatatcaaaaaattccttattcatatatgaggttatgacttgtattacatagagaactaagattgtcattcatgtttctgaacaggtgacacgaggcataaaaagaaagggataatctcactaattaaaatcccccaatataacccagtcgctgagaagcttcactaatccaataataggtcaagaccaagacatatgcggatgtctaccttacctgacctcggcttcgtgaacacgaaagacatattaccactccggaacccagagtggcccaaactggaagtctgtccaactaatacccagatggatacttgaaaggcttatcacagacattgattgcccaaaagtatcacagacgtgtaccttggatactacaaccgaaatcgcccagcgacagttatgttttttctaatatagaattagatcttgtcccctgtgttagaacatggtagtgcacacacctcatacacctttttgccaaaaggttattctaggcatctacttttaaaggttgaaccttttggcgacacatgtccactacgtacagttgtcctctattgtctagctgctgcaacgcacgagcacaattccttccaagggacccaacaatcatttcttttttgcatgtatgccaccccattagtgggctttttgtaggaaccctaggcagaccatgagcatgtccatacccgccctacaccctataagtacccttctattcccatatgaggacaggatgataacctagatagttgaagctctactcatattattctaagcattcctcttcttcaagagaaacaattatacagagttagagtttcttacaaaatattataaacacatcaaatgtgcccttagaggccaatatattgactcatggactaaggttaatcaacacctaaaccatgtaaaattctctattttatttatttttgcatttcattacttaagctcttaaaaattttgataaatattttggtgcttttgctgaaagttgaagaaagacctaaacccatagtgttgctaaaaccattgtgtttacccaaaagacaattcctaaaaagactcctccaagtgaccttgacactatcatggagtaagtaaaccctctcttgccagagcatgcccagctgggtgatgcgagaggtggagatatgtccaacattgacaatcgagaggataacttgaacaaccagcacgaaaaatttgacgatgagagagttattgaaaatgaggaggaagactatgatggataatatgttaaagattgatattacaaagatggctaccattacgagcatgaccctgaagtagtttgagtgtccaaagagttgctcaagaccaaacaaaagttggcccatcaagagaaattttatcaaagaatggagagaatgatggctcgcttctgagctaagtttggagatctggacgagggagattcagacgatgacccctcggtggaatgtgttagaggaaataacaaggaaaaccctactaacactggaatctttgctcttgtacaagacaagggaaaagctaaagtaggtgacccacaaaaccctacagctctcgtacaagaaaaatagctaagtttacaagctctaatttctagagaaagaaattagaaagagatgctctaaccttgtagattactttctgaatgtgaaaaataagttagaggagctctcttttcatagggaaagatgttatattaaaataataataaaatattccaaaaatatggaaaaacatatttaggatatttttgacagatgatgatgatctaatagtgaaattaacctcgaaggtctatcgtcaattttttaaaaattaagtagtgtccgcgggacccgtaagtaagttgtagcttaaatttgtaactctcttgaggctgaaatttaaagttgaagtcttcaaaatttggattagagtgtgcgatatgacatgatagagcattgaaatatcatcgaaattcaagttgaattgtgtcaatcaaattaatatttagtgagttatgactaatttactataggttgctctgataccaatgcccaggttaacatatgacgtcaacttagacgctgggccaaggaaaaaacatgttgaagatgtaattcgatgcctaatttatattttgacatcacttagctattttatgtgctctagtgaagccattcactagttctcgaagatgttgctatttcatagaatcgggaaactcaaaaccactcgattcgcaactaagtcactagtttgccgaaaaaaatgaaaatatgaagttatgaatttgacttgtataatttcatatctctcatttaccatgaaaaactagacaaacacttgagacggaattaaaattggataagtagaacctagcgcactaggtcacctgtgaacctaggcattggttgctccttctagagcttccaggatgcagtttttatattttcaaagttcttgaaatcaaggatgaggttccataccccatttttgaccatccggagagaatgcttagagcataatttgtatttggatgattgaaactagcgcaccaggttgattgtcaacttgggcgcttggcccagcaacatgagcttagttttttgccccttgggattcccgttttctcctcgagtttacttatatcttcgttatttcattatatccagaacactttttcaaaaacatggttgtatcagtgaagtcgatgcaagtcctccacttttcgttttgtttagcaccaaaacagggttggatacctaaatttggtagaaatcttccttcatgaatttgttctctcgcaaactttcaacttcttccttgagagatttagagtgctctttgtcaaggagtctgcatttttgttgcatgggtctaaagttttctttttctatgttgagggcatgacaaatgaccttggaatcgatcccgatcatatcctcatgcaaccaagcaaagatgtcttggtttttcctatggtaagccatgagacttattcttaaagcctccgtcaagttcttatcaatcttcaccatcttggttaagtccatcatgttgaggggaattttctcaagttcctcagttggactaacttccgagtcaatttccccaaaatgatggtcgttgtcctccacgtctttggaacaccttcaagtggttttaagtgttgtctccatcctctccttggttacaaacttagaggtcttaattgtcaggctgaccttcgtgggagaggtcttgctcatccccttggatgttggaacaatagaggaggtcttctttgcaagagttagtgaatcgttgtaacacttcagggtcgttcactgattaccaaggaggaaacccatactagttgctgtcaaaaacttgatagtaaagtggtatattgacaagatggctcgaagattgcatagagttggacttttaagcatcacgttgtatgaagacttcatgtccaccaccatgaacatggccatgatggtggtcttccttagggtagtggctatagtaagtggtagcttgatcttaccatatgaagctatacctgctacgttgaagctatacatcaattatttgcatggctttaactctttaagtaacaaacctatctgctctagggtttgtttaaacaaggatgtttgtgttgggttttataccctaaataaaactctttacaatctgattagttatc

SEQ ID NO: 306064 - DNA, 1439 bp, Cannabis indica
gtattatgccgcaaattactcaataaaataaataattctacatgtgctacctcatgaataacgaaataaactataataaactattaccattagattaaaaatcaaaagtttgaaaaatacccacacacctaaaaaaaattctatgtaaatgatgaaagatatttatggaccatagtttttatacaataaagccttgtcgcgttttaggagaaaaaaaaagctatagatcccacagattggaaaaaccactctcaacaatgaagaagttgcaaatgataaagagttccaactaggaggtaacaaaaatacaagcaaaattttgtataaatcattttttttttggggtttttcaggaaaaatcaagttaattgttccttaacaataataatatttcttccttttattatatgtatttagctagtttaatattttttccaataattattaaattatagcagccaggtaggtaattaatctcatagttttgcaagagcctttgaggatttttttttttgtcttggtttttaatttttgaaaggtcaagatagaggaagttaagaaattatttgggaatctacttttgccaaatatcctttccagtattataggcttttgtatatagtgctacccatgtttccaatttattattttcttttctttaacttttcatgggtcggtggatgtcaatgtctaacagtacactaatatatattatctcaagtaaattttcatgaaaagaaaaaaattaataataaaaacactatacccatctttagaaatcagatatttaggttggaaaaaaaaaatcgaaaacaaaattatttaaaatgtgatgagaatatatttttcataaaacaagagttcaatttgataaaattttatcaatatcagatatagttataaaatatttcaacaggagaaatgatatcaaaagatttcacgaaccacagagttggcttaggggactctttactttgtaagaatggtactcaccaacatgttatgtactactatatatgttcaaaaagaaacatgttatgtactatatagtataattgtttttttttttcttgaatacatattatattgtataattcaattgtaacatgtaataatataatggattaaataaaaaaattaatccaccaaaatatttctctctttcctctattactttctctcaaatattttctttaaatatgagatccaaacaaaggtcacgagctttgagcatttgggaactcagtttttacttttgcttttagaagtaaaatattaggattagtgatttcttaaattaattaatatcattctgcttatagagtatcataccctaaataaaatagagataagttgaaaaatacctctttttatatccattaattaaaaatattccttttttttgagttggattgcttaatataccctcactctctact

SEQ ID NO: 306065 - DNA, 1229 bp, Cannabis indica
taaacaactgctaatttccaaattaactaagcgggctttacaagaaccagccttctgtgacttcttcccacccggctcttcaacaagttatggtgtgtaatttgatgaacatggataggtcctcttgggatgaagaaatattataggatttttttgatgatagggagcaaagattgataaaacagatttctgtaagctcaaaccagtccattgatgttctctactagtttaatgagcctactggtgtgtactcggtgagaagtgcctaccaattacttcaagcattgaaagggctgtgtaatgagatagatgcttcagtgttttggaagactttgtggtctttgaagctgccaccgaaaataaaaaatttaatgtggagggccagttctaattgtctcccaactctcgcacaacttgcttcaaagtgtgtacctattctcgctgtccattgtgtgaggagattgatgagtccattacacacattctgctcacctgtagagtggttcaagaggtatgggagagagtcggtattggaaccttggtggttgctgcaggtggtgtttttctgggctgctgcatagatgtttcaacactttgacagcagaaaaacaatgtcttgctgctgcactttgttggggagtatggggagcaaggaacgatgttgtatggcaagggaaatcagttaacatttcagtaattgtagctcctgctaaaagctatcttgatcaatggcaacatgctaaaaaaaactcaaattgagtcatcatgggctgatcttcagtattatgatgggatggagcgttggcttaaaccacaggttaacatcatcaagatcaatgtggatgcagctatttttgaaggacagaaccagtttgggggtgcttttgttgtacaagaccgtaatggtctgctcattgaaggccatacgaagctgcacatgggtaatattgctccggctgttgctgaagctttgtgctttcgggaagctctaagttggattaaaaaccaatcgcctagttctgtttgggtggagatcgattttcttctgctcgttcaagctttaagaagttcagctagcttgtcttcttattttggttgtgtgattcaggaatgcaaagccatgttggctaatttaagtaatgcctatttttgctttattaagcagtcagctaatagagtcgctcatgagtttgcaagagcgtctttttttatcctgattgtattttcag

SEQ ID NO: 306066 - DNA, 3354 bp, Cannabis indica
aatacaaataacgaggattaggctattaccaaattgctcagggctaaacctctataaaattcctatgtctttataatgctttactatatttcaattgttataaactacttgttgcttatgaaattagactcactgtcgttgcctaaaagcgaggtcaacacctaatttagcgtccatctaaacaagattaaaataataatcataagattgaacatagaaggatagacacaatttgatataatgaaaactagaaattaacattcaataatgaaattaagaattcatgtttcgggttttgaaataacccttaactaaaatcataatatatattaaagtagaaggagaacaaaagagctataatgaagaactcttcgaaggagatctctgtctcttccttgctctctctttgagtttctctctctaatttgtaggtttagaatactctgctatttaagtgtttctaagtttgttttgagctctgaataacgtgtttatataggctaataaagttacattaaagatactaaaaagatttaaaattttaaaaaataaaaatcgtaaactctacttgaaaagctatattttttttagcctatctttttaatctttttttttttacttagaattgaacgattcaagatattctggaaagctgaaagagagatctaaaacttttatgtatagactttctcccaaatctgaccagaacatagtctaattttagattttaatgttttcagcttttattttctttcttgcataattttctctattttataaatcatctttttctgaaatttgaccaatttatacattccacgtatcgaaacctaaaattaaagaaaacaagaataattctattccaaaaagtgacaataaagaagaaaattaactctaaaaataacataaataataggcttaaaatatcctaacacttgaccgttgagtgtcaggtcagtaccacgtggtaatctttctttggtccaagtcatttaattttattttttatttaaaaacttctatttaaaagagtaaaaatcatttaaaatacttataataataataaattcaaaatgaaaaaaaaaaacaaaacaaaacaaacctaaatcatttttcaaaaacaaaatctaaatctaaaataatagaaaagtaaaaattaaaaaattattataaattcttatgtataattttacaaatgagagaacacatttttcttcttttctaatcttgtctcatgctaaaatttttacttaggtattactctgtaattagaagataaattttagtatttacgctacaaactactatatatatatattaaaaaacgaaagagttacattatatattattaatggctcatttggtatgtcgtattgtattgtattgtattgagttagattgtattgtattgtattagtattatttaatacaatattatatttagtattggcttgtagtaatagattgtataaagttataatatattttcaatacactcgaccccaacactaactacgggtcgggttcgggttcgagtcctaggtccgtgtttgggttagggtcccagtcccggtctgggtctgggtcctgggtcccgggtctggggtctggggttcagggtccaggttcgagtctcgggtccgggtctatgtcccagtcccgattcgagtccttggtttggttctgggtctgggtccggattcgggtcccaagtctaggttcgggtttgggtccgagttcgggtatgggttcaggtttgggtcccatgtcctgggtccgggttcgggtcctgtctgggtctcgggtcagggtctgggtccgggtttgggtcccggtccaactccgagacctaggtttgggtttgggtctaggtttgggttcagggttcaggtccgggttcgggttcaggtttgcatccaaggtctgggtccaagtcagagattgagattgacctcgaatcctttgtaaatattataatacaagctaatacaaaccatttgttatgtattaaataatacaacatacattgttttaaaaattctagtcgtaataattaatacaatacattattttatctaaatatagtgttatttattatttaatacaatacgatccttatacggcgtactaaacgagccctaacagttttatttatatataatgaaatattaacttttttattgtagtatttttaattatttaacaatgaaaatagagttggatttttttagccaatggcgatggtttggtggcgaatatgatttgatcgcaactcaatgttgtttgctcagaagatttcaaggattcagatggtagaggtgctagctgggaatactttaatggagtttcaggatctaaatcagtgtggtatgagcagggtggaggtgtcgcgaggagcaagggggagagattgttgagatgggtttcgccaatgctagagttttttctgtaagcattgatgttgttgtggtgctgatcagggactttgtcgggcttggtggggtgatctgagatggtgaaggggtgctctaggcatgttgggcggtcggggagggtttcaggtggatgtggttgagttgatggctttgaggttgggccttttttgggattttctatttcaagggttgaagtttattcttcaattgtgtgtagttgggtcaataattcagattctaatattattttttgacttatttgataatgtaatttcaatagtagctatagttggtggtagctcttgttatgtcatttcacgttctatgaatagtgcagcccacacactagtaaaatctgttactagtcatttaggtttcaaattgagagagttgcttgttttcaattcttatgtacttctgtaacaaataatttttaattaatgaacacctttcttttaaaaaaatagagttcaaattttgatgtatatattaattggacactgagttacattatgattactaattagaaaatgtactccaagtgtcatgaaatcacattatgcaatgacacaaaattagatcatctccaatggttatactaatttggtgtagaatctacatcaatttagtgtagaatcttttagttttgagatatttatggtcaaactcctctatatttgatttgttatacacataaccctcttttctagtactttggtgggaaaactaccttaaagatctattctatttgcaaatctacaactctgttcttttatctccattaactcattagataatttgattcaactcagcctaatttttcaagatggcaaattggcaaattatatgcccaggtagcaaataaatcttatttttgtgttttaaaataaaataaaaaccattaaacctaaaaaaaaaa

SEQ ID NO: 306067 - DNA, 2107 bp, Cannabis indica
atcgtttgtgtttagacgaagtttcaggaggctgccaaactccaacattctgctttgaagaacctccagtgatgagttcatcttcaacccaataattcacaccctaatctctgtccatgagaaaattaaaatattgaaccccaaacccaaaaattatattttacatataaaatcaaatatgtgaaagtgatacctttaatatagatttttctttctttaacaggaatatatgtttaataaaacagtcgacccctaaatcaaaaaggggccagccaactactgtaattagatgcatcaaaacgtttgaagcttggtctggccagatgtgtagtaagcaaaaattgggtgttcttttttccagcaactgttctcgagccctgaagagagaccattaccaacaatttgagtatgggggacattcgtgaagaagaaaaatacttggggcaatccattcttatttggccatagcaagaggaaagacttcaactttctacagtaataatttatgtaaaagacttgagggatggagactcaaatctctgtctaagattggaagaatggtttatgtcaattcggtggcacttgcactaccggcttactccatgtccacttttccaacttcccctttcaacttgcaaagaactcgatgcagtagttaggggattttggtggaacggttctcccgaaagcaaaaggtattgggcggctgcttcttggaacactttgtgtcagcccaaacagaggggaggattggggcttcggagattccaggatatcaattaggccctgttatccaaacttgcctgggagcttgcgaacaaagcgaatagacctaggtgtcatattttcaaagggaagtactttcctagagaatccttttggagtgtaaatgagaagaattcagacagctacatatgaagagggattttggctgctaggaagaccattcaagcggggacttgttcaatcatagcttctggtgaagatattgatgtttggtgccaaccgtggatttcctggctcgagtataatcagtttcctgatttgatagagtccattcggcataaagccccaagccttatttgcgtggctgacttgttataccgtagtatcaggagttggaattatggctatctgtgttttttattcggtgaagagattggtaaagagaattctgggatttagattgacaagaattcggcccatgattgccttatctggaaggactccaccaatggaaaattcagtgtcaaaggagcctattggcttgatcaaaagactagattccgtgctcacgaacctctgtggaaatggatttgggattccaaagtccatcctagaattagtatgatgatttggagagcttgtatgaatgtcctccccactggagacaagatgggatcctgtagggagtgtcctttttgtcactctgcgactgaaacacctgttcacttgtttgctcgctgcaattttgcttcggctctttggttttctaggcctttacctgtgagagttgaggtgattccgggagacacaacatggctgctgttgtcagcaatttgctctcctccttggacccatcatcgagaatcaaaatgataactctctccggagtactgattgactgcatttggaaactaaggaacactattgtccacaacgaagatgttaatcccaacattgaaggcgttaggagagatatttccaccaaattctctgaattgactctggattttgaggttgtgtcgaggatttttgtgtcaatttcccctgctatatgccctcggatcacaacgaattgctgtattttagtggatggttctttccatgatgggatatttgggtgtgccatgttaagcctctcaaaagactcccctgattggtggacttgcacctcctctggatcatgcaattcgtcacttgaagctgagttgcaagccttgctgctgggacttaagtgagcggctgagaatcagaggaactctgtgcaatgctcgtattttatattaacaaactcgaaagttaattttaatagtttatagcttaataaccatatgggtcgggatcccgagtataaaaatacaagttaaaagtattttactaatat

SEQ ID NO: 306068 - DNA, 1279 bp, Cannabis indica
ataaaaatcaagtcttgtgatacctcttctgtgcagggtgtattttgttagctctctctctctctttctctctctctctctcactatatatatatacacatatatatgtagaaaaaaaaatgtgtgaattattagttttgttggtaaaattctagtttttctttaaatctgggtgtatttttatttccctttaaattttagtttttctttaattcttgcttattctttaaattatagttttttttcttgattcttgcttatttgaatctatgttttgcagcctgatacagtaacaggagatatcgtctttgtgttgcaacaaaaggagcatcccatgttcaagcggaagtatgatgatttgtacgtagaacacaaccctagcttaactgaggcactgtgtggttttcagtttgccttgaatcatcttgacggcagacagcttcttattaaatcaaatcctggagaagtcatcaagcctggtatataaataaataatatagttacttgaccaatggaagtattcctcggttatatgttttcatgtttgtttatttaatgttctggttactgcatgaaggtcaacataaagcaatcaacgatgaagggatgccacaacaccagaggcctttcatgaagggccggctttacattcaatttagtgtggatttcccagattctgggtttctatctcctgatcaatgccggactttggagaccatactttctccaaagcctagtaagactttgacagacatggaagtggatgaatgcgaagagaccaccttacatgatgtcaacattgaggaggagatgaggcggaagcagcaaaaccacttccacgagtcgtatgaggatgacgatgatgacgagccctcaatgtcccgtgttcagtgtgctcaacagtgatacctcgtagaataatatttactccattgggccctttatttcttttgtatcggtatcgcaattatctagcttaagttaatagtccaatcgtttgataaagttttgctcgttcaattatacgtactacagacttgtcagttagaattttgattaaaatttattctacagttcgattttatttatttatttatttttttcgattttatttatttatttattttttgcttaatactacaattcgaatttaaatcatgttttctggcctcatgcgatgctcagtacacaaactaatttttgctggtgcttgtcatactgtcacacggaaaatttttcaaaaatattgtgtttttataaaacaccagtaaaacacata

SEQ ID NO: 306069 - DNA, 1251 bp, Cannabis indica
aatacgacctaatacgacgttccaaacgagcccttaattactcatatagtgcgatctaatattcatcttctgaacttagtaagctatttttttttggtttatatatatatgcactttttctttcaatattaatttatataatatatatacgtactattacatacatctaaattaattattatgcatgctttattagtgctgcatgccttaatacttgcagcatataagtatataaattattcactatgtatatacatatatggaaaatcaggatcctataatattttaatgtaaatatattagcaggaatagtgatatatattaatattatgttaatatgttaattacttgaatttgcagaaagaaattatataaattagcaatcaaatttgaatggctgaagaacagttttccgagttggtcaattatgaatgcagcatcaagaagaatctagtgatcatcaggtaattagttaatatttattgatcattatttatatataaataaattttacaactaaattatatataattattatattataatttataaattaattaattaattaaattgattaaatagtgagaaggccgaaagtgaaaaaggtgaaatatctgatgatgagaaggtgatttgtgaagtgcaaaatgggcatgatggcaatagctgctgctttgatcctgttcagagaattgtcgatggatttaaccactttctctctaacaaattcaagtaacgatataaattattatttatatatagacaacatatatttacttattattaatatatgttatacataaaaaaaaaacaagaacctagtcaatcaatttatttgatgaaatgattttgcagcaagtatccatgcttgtttaatgaacttgccgactcccaaagtccaaaggtatgtcttgtgtgaaaaaaaaaactaataaatatatataattgtttatattaaaaagataaaaataaactttacataattatatatacaaagcattacttatttgattaaatttaattaattttaattaactacttaacagtttctggtgttcgcatgctcggattcccgagtgagtccttcccatatcttaaattttcaacccggagaagctttcatggctcgtaatattggcaacttgattccactttttgatacggtaattaattaatcattaaaatttgtaatcaaatttttcattcaccaaaaaaaaaattaatctattttattactgaaactatctcact

SEQ ID NO: 306070 - DNA, 1722 bp, Cannabis indica
ttatttaattttatataattattgagtttatttaaatcatccaactggataagccattcgtcagttttatctatattaagaggaaatatagaagctatgcttttgtatttttttggttttgctgtgtagctggtagtgtgttatttggtttagtttgttcttctgtttgtagagaaaagtcagagttactttggactagggggtcttttgaatcaacttgtgcatgttttggggcttcaatcccaagattggaacccttgttgaatagagatcgtgttcattcatttctagacatctctagtatcttctcacaactgtgctgggttttataggcatctagaagtactcctctttgtaatcaaatttgaaactattgtaaaaacccagaagctataagcctgattctcattagttgcataataatttttgtaatcaatccccgcgtacattcttgcagatgaagaatcagcaaaaaaagaagccaagaaacacgttcaagatggtggatcaggttactcaaaagcagatgttgtcgtcaagttccagggctgtgatacagatcatcatgccaaaagtttggctcaggcatgcttgagtgccctcaaacaattaattctagctgacaagaagctcccaggtactccatactaacctattatttctcttgccttaccggttagttttggcacggtgatacttgttcttctcgttctttactgctagtatatggtgaagtgagataacgaaatataattataattcaattacttgacgattaaccgaagttccatgccctgatgaaacagtaaacgaaggtagagtaactttgaagtcaagtagggcacactatataaactgataataaaaaggtttatgaataacttcatttatagtaaaacatctatttccaacttcacctgccatattgtggttactattatgtttatccatagttaaggtttatgaacaaaacaaccttaattatgtattcataatatgtgatttgtttataattttttggtcgtatctggccaattacttgtgtgtgattttgaaggtaagaagagcctgtacataaggttaggatgccgtggcgattggccgaacattaagcctcctggttgggatccatcatcggctggagatggagtatctcctactacattgtaataaagagttaaatgacttgagttgggaaatctaccatgcacagttgagctttcatttccacatgtacattagttgttctgtaagagtcaacatatttttcttattattattagtagtttccgacattaactaagtttctcttgcaccacggaaagctactggacaaattgcacttgttcattttgttaatgcccaaaaagagagttattttcatccctaatataaatagtgttatgacataaatcaatctaaaaaattcaaaaggtaaattagtctatggtgtttaccgagattttcagaaactaaataaatagagctgcagaaataaataaaacaataaatagtagacaagtaatttttacatggttcgaacgttaataattcttagtccgcgagtctgttgtattggcctcttaagcaagtattttgataatacagtatgtgtttgcagtataaactatagctctgcactccttttttttttttttttttgtaagtaactataaagagggggagattaggaaaccacaaaacagctacaggagatggagg

SEQ ID NO: 306071 - DNA, 1487 bp, Cannabis indica
aaagaaatgataaactaccttaacaacatccccaccaagaatcgaccaacacttctagtagaaagctagggtcttaatatcatgtcccaaactcttatctgggggcatttggaatattctatgtttgacttcctcatcagtaactggctattttaattcaacattcacctggatagagataaacttctgaacacagtcaatcacctccctaaagttagcccctgaagaaaagaataaagagttaaagtaacccactatcacgatggagagaccatgatctcaatcaatccaatctccactatcatttttttaattactaaaattgattagtcgtccatctattattagcagcaacatggaaatattttctatctttatctccttctttgagcaaaaattgtttgcctttttgtgtccaaaaaaattccctttggtcaagtacctcaaacaatcatttttaacctcaccatacctctagacagagatataatctctcttgtttttcagaaaattcacctccattttgcactgctaaatcctttatttaaaattactcgtttactccttccccaaatagccaatcttttacacatttctctcatttttcctaaaaaaaactttcaccttcctacccactccaacaatctctacaatttggaaacacataggctctttaagccaaggatttttttaaattaaaatgataggagggaacgaaatcctacaacacaacaagctctagaaacaaagggcaatggtttgaagaagaggtttccaaattaaagagattagcttcaggaaacaaaacggactaatatctacttaacaaagcacaatctgaacgaattcccacctaggcatcagtattgcaccttttgtcccacgtaaatgaatatcccaccaactccaagtcaaccaaatcacaataaaaaaacgcttgttgaaagccttcaaccacccaccatgggtatggattaccacattacttattttcttggcaaatttttttattgaaatcacctatgacgcaccattgaatggatgaaacaacaacaagtgactagagcaagtcttatgaattttgccttaagctttcttgtggctcaccatacagagccacagtgtccaccaagaattcctttcaatctcaattgctaaatcaatatgatattgggagaaagtgaacaaacgaccttcctccccatgttttcaaagcgcaaccagcctaccaatcttaccttgggctttaaccacaacaatcccttcaaagcccaactgcctaccaacccaatccactataccttttaaaatttatttcacataaaaaaattaggcttcttttgagtaacaagctcttttaggaattgaaaagtccagaggttcctaagcccacgaaaattccaactcaaaacatttatattgtgtggcaccattaagtacagaggatggcatgcgattaataagaaatcatgatgtggaaactgcat

SEQ ID NO: 306072 - DNA, 2598 bp, Cannabis indica
gagaaacccaatactgaatcaatcagatccaacactcacatatctgatggttctataagtaatttcttagtgctcaaactcatttcttgatttctattttgctaagtctacactccattattgctgtcttttgtcattactagttgaaatgatttgaaaaggtttctatattcagtatttgctaaagcttcttggctagaattctatagtcatttgaggtgcattttgtggatttgaaaagaattattagatggtcttaaaaaaaggaaaatcatgctaccgagctacattcttctattgttcttttgtgcattaattttgtttgaggggcttcttcttcttttaatcttatgttttattatcagaatctcggcttaaacttgcatcggctattcagggtgataagcaacaaattcagtcattatatgccgcttgtcaaggaacttctcaggtaccatcaaacctggatatattttatcttttgatgtttgcaaaacaaattttaagaaaaatatatttgttgataattatttttgtatatggaaaggatttgtttgtatgcacatttgaaattttatagatgaattatgattggtgattttgtacaatttcttaagtacaagactttgatgtttaggggttttgttgaagctttattataggggcaatacaatagttttaattagaatttttccctcataaacttttcatgtcgttaaaagtttctcccgaactattgagattgttaggatcaaggactttcatttaattttactaacagtattatgtggacggaaatttgggagagcaacgatttagtacatggacaatcgttacgttaagcgttcgttagtaaaattgaacagaagtccttgaattcaacaattttaataatttgggaggatttttaacaacctgaaaagtttggggacgcgatttgatatatgtcaaaattcaaggaaaaaaaattctaattaaccatagttttattgttacggagctacttgtattcctcttcgggttgtatgcattttgtaaaaggcaaactgtctttgcatttctttgatatcattcaataccgatggttcaaagtgtttactatgtcacttgtctgctgatatgaatctcttatgtcacttgtgcttgcttcttgtattgctttagaaggataaacattcagtataatatgtcttgtttaacaaaggtgctatgttgtttccaggttatgtactcctcagctaatcactggaccgaaaattcagtagcagctgcagaattggcaacatcatcatctggggttacaccactgacttctaattctcacgagacgcctgaagagtccaacacaaatggttggggaacgtcagcgagcaatgacagttacaatgattgggatccagttgttggaacccgaccttcaaagataaacaccggtggatggatggatgaacaaccgaaagatgacttcaacggttggagtgtggacgattctagaccacctgggaatcgaacaaaacatgctcgaactaacgaggaaagtacctcaactggtgacattaatcaaagcgtttatgcatcagttccatcagcaccgtctgctcctccaattcccgaggagcacttttcgaagggccaatccattatccgtcaatagatgtcgccacagatgcttttgctcaacctttagacaatgaagcttattcatcgaaagagagaaaagatggaggcgattcttcttcctcgtgcgtgatatgttgggaatctcccattgaaggtgcgtgcattccttgcggtcatatggctggttgtatgtcttgtttgactgaaatcaaatcgaaaaaaggtgtttgtccagtatgccgatccgttatggatcaggtagtgaaaatctatgctgtttgatgattaaaattttatattacaatctcatatttacataaacattttgattctatgagaagtttggttgtatagagcatcaatagcaatagaatttcagggtttatttaattgcttcataacctattttcagacaaaaaccagatttctcaatggaaaattagtcataaaaccaaaagaaacccctaaactaagagagtagagtttccatttataagctcttttaatgttttattaatcaataagaagttgagaaagtatcgatacagatcgactgtaggaacattttaattctttttttttttcacgatggtgtacattatagtaatagtaggctttctttaagttttatgaaaattctaaatattttacagtgttgaaaacagggtttaaaaaactcgttgcactcgtgctctttttgtgttttgtttcttatacgcaaaaagttttttgaattctatttgcaatactgtaaaatattcgaaactttttaaaaacttaccagaaacaaatcaagattaaaatattttacgatttttagaaataaatctataccgatatatattaaaagatttatgtattactcacgcttcttaaaacgtttcgaggttgacacaagaaaattgtaatgcccctgcttcaagtcttcattgggcccttacacccacggaataatggctcttatacacgagtacgtca

SEQ ID NO: 306073 - DNA, 2056 bp, Cannabis indica
atagacaaggtataaataatgtttagtttcatcatacaaaactgtgtaataactagtcttccactcacacaatacaattataccataatacaagtgtacatacatatatgtatcattattatatgacatgtataataataataataataataataataataataataataataataataataataataatatcttatatatattatattataattaatagtaataaaagatgacatgttgaggtagtattagtagggtttatggcaaccctagctagtagtgcacctggataataaataaataataaagctataacattaaaaagtaaatgggcaatttagttagtaattattattattattatcatttattaattaaaaacaagagatgaaaaaataatgcaaggatttgaactttaaatctgacaatcacacacccaacatctgaaaaataatttattaggagatttcgtataattgtattaagggaaaagtatatattaatttgaccaaaaagagacctttgttattatatattaatttatatatatatatatttgttgaatgaaaaagacttgttatattggtgaaagcatgattcctgtaagatgtctaatttaatttaattttgtttatgctgaaaaacatgggtacacaagtcatacatatactgtatatatatacatatattctgcataataattaatttgtttttttttaataatataaagtatgggcatatattatttgatcataataataattaggtgagactcatggttttaaggaggcttctctttttgtcttctttatgctctccactatttctagaactatgctttaattttttatttatttttttgtttagaaaataatgttgataataatttattaataaagtttaaataaattgacatttatatatgttactaattattatgtatacactatatattccatgagaccaaatagggtttggggctcaatgaatcaaaaaatttaagaccagaaaatgccaagaaagttgtcctaattaaagtcacattccactatatattaacacttgatacaaaatcgtctagctatatatagggacattgtcccattaattaatatatatatatatacattttatttatttatttattatttttttgaaagaaaatagtaacttattaactcattaataagcttcaatcattacaataaataaaaaaaatcaacagacgcaaaacttttactgaaaataagatctgaatacgaacaaaacaatacacaattttatttatagaattttatttatacaacgtttaacaaaatataagttgacaaaaaagtaaagagaccaataaagatctacattcaaacacaagttgactaaaaggagaaagcatatccataaatatggtgggtgattgtttgaaccacaactaatgaatcaatttcgagcaacactctagaccatccttttcgcttaatccgactcaacgcctccaattaatccccacaattttagctatagtcgcatccacacaaccgaaatgacagacggtaaaaatttcaataaattgctaggataataggcattaaagaagctttgagttggattgcaactcattcgtgagaaaaaatcatgttggaaacagatagcttggtgtgtgtcaaagcgattcagagcggtatttttatgccttcacagtttagtcttattgttcaagatgttcgaaatttgcttttggctttatcttttgttgatttgtgttttgtaaaacgatctgcaaataagttggttcattacttggcaagagacttttgtttctctacagattgtgtgcttcagttggaggactgatcctttgaagtgcgttctattgttttgaacgatttttttttttttttgtaacaaaaggataattttattcaaaaactgagcaaatacaacctgaacaaggtagagccgaagcccaaccaccaaagcctcaccagctactaattacatccatgattctatcattagtattagtatgtttacaagcaaagcctaacaccctatactt

SEQ ID NO: 306074 - DNA, 1900 bp, Cannabis indica
aggtagtaccaataaatccattttaggccctcttcaattgtgcagtcccatacctacacagtctcagaatcattccatttgaccttccccaagcagtatgggattgcacaacttacctagtattttcccttaaagatcatgagactactgactgtcacaatcaacccctattacaaggtctaacgtcctcatcaaccacacttccagctaggtcaaggctctgataccatttgtaacgtccccacttcaagccttcattggacccttacacccacagaatcattgctcttatacacgagtatgtcactcggttgcttcatagaatgatgactgaccctacagaccaacacaagtatttttagcgtgatttgtcctctcgcacgcttcttgagaaaacttcccaggaggtcacccatcctgaaattaccctaagtcaagcacgcttaactatggagttctttcatgatgggctactaaaaaacaagatacactttgttaatataggaagtaccaatcaatccattttaagccctcttcaactgtgcaatcacatacctacacagtctcaaaatcatcccacttaaccttttccagggggtatgggattgcacaacttacccggcatttccccttatggatcacaggactactgactgtcacaaacctgatctcgaaccttaaccttgacccagacctagactccaatttagatctagccccagtcctagacccagaaccaggaccctaactcagacttcagagcagaccctaacccagagctcctagaaaacttgaacatatgcaaagagaaagagcaagtgctaaaaaaatacatcctcaaaaaagagatttgaagaacaacatcaatgatcaaatccagggtcgagaagttgttgattatgaagttgtatcctcttgaagataaaaggaattattttcctcttgaacgtattagggtatccttgaatatttttcgtaagttgtatccttaagatggtgatgaagaactcacaccttgatcttccaagatctttcaccacacataaggattactgtggggtaatatgttaaaattgtataagtattcttgatttaatctcaagtcaggagcaagaactcttttctttggagtgaccaatgatacgattaacctttttagattttctaaactagacgtatataatagatttaagattataccagtataacgataaaactgacataattataataaagattttattaaaaataaatatttatattttaaatattaaaataataatatttaattatttgaataaatatgtataatcgattctattatagatatttattttgaattagatatttaggtttgagttaaatatctaataaccgattgagagaatatctcaatcacttggatagaatctctcagctactttgagaggatatctcaaccactattaatatctgcaactacttttaaattcaaattaaaataaatatttatctattgaattaattaatcaataaaaaaaataccaatgggactcactttatctaataggcgcctatcactttgtcttaacactgtgattgtggcaccatcattgtcttaaccaaatagtggttgtgtctttgtccagataacactttgtctttttcctaatttattttcatttattacaaaataaataattattaatttgacaattctaaatagactttttgaacatcattatacaactttatccattcccttgatagtgtttcaaggttgcgatctagggaccatggacctataataataagcaccaataaattagattatttattgaatcttttcaactaaataattttatttattaattttatgatcactccactataaatatggaattgagctcttagtaattat

SEQ ID NO: 306075 - DNA, 2145 bp, Cannabis indica
tttttctattattaattaataaacataaacagaaaatacaaaaatagaaaacgacatcgcataggggttgttattatttaaaaggagtggtttctggcaaagaacactgcttcttcttcttcttcgtcttctcctctctttgaaatcgcagagaccacaaaaaaatcagagaagagagagaaaaaaatcgttgagaacctcagctatggcggtctccacgtgtcctaaggctttctcctcctcctcctccttcgagtgtcgctcagatcccgacttcaccggctttccatgccatgaaaaaccggcttcggctcgcttccgaatgcgtgtagacccatcggcttcggctcgcggctctcacggcctttcttctctgatcctaaggtttcctcctaacttcgtgcgccagctcagtaccaaggcacggaggaactgtagcaacatcggcgttgctcagatcgtcgccgcttcgtggtcgaacaactcctcttccggtgttccggcggtgccggcggcttctgctgccaccaccgcagctgttccggttgcgccagttgaggagggtgcgtccggtgatgatgtggtggtccctggaaatgggggcttaccaccggttgacgagggctttcctgctttgaaggagtcctcgttcttgagctccgatgggagtctcactattcatgctggtatatatatatatctaaactttaatttttctgcaattttttcaaaaattattattatatttgttttttagcttctgattattttcatttctgtgttcttgtacttttcaaggggaacgattgggtcgcggcatagttactgatgcaattactaccccagtggtcaatacttctgcttattttttcaagaaaactgccgacctcattgatttcaaggtaatcttttaagttgtgttttcgattttaggactgaaatcgttttttggtttattgataaattttctgaaactccattttcgtttggttgaaatttagtagcttataagagaagagtaattagtgggcatctttctttgttgaatggatatttaatgatttggtggcttaatgttcttaatgctatggcaggagaaacgagctgtaagttttgaatatggtcgctatggaaacccaacgacggttgtggctgaggagaagataaggtttgattatgatacatgatacatctactttttttgatgccttttctgattccagtacttcaatattttgtggatactaattacactgtgtattattgtctttatcttttttcatcagtgcgcttgagggagctgagtcaaccatgatagtggcatctgggatgtgcgctagcacactcttgtttatggcactggttccagctggtgggcatattgtaacaaccacagattgttataggaagactaggattttcattgagactattctacccaagatgggaatatcggtatgggttatacacgatttggaaatgatgaactatttctagtggatttgttcttgacttttgttatcaatcaatatgtaggctacggtaattgatcctgcagatgttggagctttggaggctgcactggataagaacaaggtcggtagaaattgagtgcttttaattagtttttatgtattatccgggataatcatggggatttaaagtgagtggcattttacgctttatacaggtttctttgttcttcaccgagtctcctactaatccattccttaggtgtgttgatattgagctcgtgtctaagctatgccacagcaaaggagcattggtctgtatagatggtacttttgccactcctatcaaccagaaggcacttgctcttggggctgatcttgttgtgcactctgctacaaaatatattggcggccacaatgatgtaagtcagtttgtatttgtcaaccatgacagattagagtatgatcatttgttgattatgaaaatgagtgctaacaagcttgtatcttactccaggtccttgctggatgcattagtggtcctcttaagttgatctcagaaattcgtaatttgcatcatatcatgggtggtgctctcaacccggtgagttctcttcataatataatgataccatgtagtgatttatttcattatttgtttaatgtttttttg

SEQ ID NO: 306076 - DNA, 2341 bp, Cannabis indica
tcttcttctttcttctcatctactttatattatattatattattttataacactttaatttatgttgttatttttagttttacaatttattttttgaaaatcaacgtttatatttaaaataaaagttagacctcgtagtcattacaaatgatagttcctggtagaagaaggatcaaccatgccagtaacattgttagaaaacgcccatttagctacgttatgggcaacaaaattacagtctctaagaataaacgaaaaattacaacttaacaaaaaagtagcgagatgtttacaatgctatacatagttatcaattccccaattgaaacatgttcccttcagagtcttgataactgtctcgaaatcactctcaaccaattagttttataacttagtgttacgttatttttatcttatttagtattagtgtttttgttattcttagtttgtatttttaatatgttagcgtgttttaaatcatttatacttttgtgataaattttaatttgagcactaaaatgtaagattaatttttaaaataaattaaaataaaggctacaatgcaaaaaaaaaaaaaataaaaataaaataaaataaaaataataccgaattgttgtagactcaaaatccaacattattagtggtgtagaatttagtgtgcactatttattttttatttttcttttttttggttaaatcaaaaagtgtaataatctaaacaataatttatacaacctaagagcatccataatcagaggaccactaaatctaagctctataatctttacatatggtttacaatgtattaaaccaatgttcttctctactagttatattctttggccgtatccacactattctatttttaataacagcttttactttagacacaattctatcacaattttcaatctccccgttccaataataaaatcacttatagaataataaaagcacatgtaattagtattcttatagagtactgtaggcattttgattactatacatctctttacataagacttttgctgtaaagcctgtaagcctccacataaactactgtgagaaacctaaaattgtatgaacattttaaattgtgaaaaataatatagagtttatacaaaaaaaattatcccagggaattgtcaaacaagcatcaaaaacgaaaagctattagaaacaataatatatattagagaaatgctaaaggcacctaactatgtgtgaatatcgttattggtcaaactaagtattgggtcctatataatttaatataataacttttagagagtatcgctagccaatcgcaatgcgacaagttgagaatgtgctaggcaccacaccagtgcctaatagcaatgctctatatattaactctttaattaacaaataaaataatatcaactcgtcgtggatagggcatggttattccatacactattatgccgattttatataattactataaatcaaatcgtatatgagatttaatattacattatttagtatatgggccacatcaaatagtattgaacacgatatagatatataatataggagaacactaatttaatattttacaagctcaattttttacgagttgttccgtatctgcgttaaacataattttagatttagttatgttataaagattacttgatcaaaattgaaccctctagaatttcattcattttgcaaaaacacaattttgaattgacatttaacaagcagcagaacagatatatatgctcaagtctcaacacgtgtcaaattggtatttttttacttatagcctctcaaattctagcttgtgtatatatattgtgttaaacacaagtgtgaaaatggtatttttcttatggaatacttagcctgtcaaattctagcttgtgtatatataatatatatattgtgttaaacacaagtttgaaaatggtattttcttatggaatacttagcctgtcaaattctagcttctttatatatttaaagaacgagatcctcggacctcactccaagggtgttcctttgcttaacatatatacttagtgttaataagacacgtgtcgtagaaaaacgtttatatggattggtcctgtttatttgccaaaaaaaaaaagggaaagaaacaaataacataatcatctggagtgaaaaatataaaaataaataaatctactaccacaaacgtaaagttttactttttgataatagagatcctgttccatattttagggtctatttatattagagttagtcccacattgctaatgtgtggaaatgaattgtgatatataagatgaatgggctactcctcccatagccaattggttttgggatg

SEQ ID NO: 306077 - DNA, 2010 bp, Cannabis indica
ttgttgtatcatgttgtgtacatcagagtagtttttaatttatttatttttcttttaaattttgttgttcagtaagatttgagatgataacattggtcagtatctcagattaggacgtacgtattattgtagcgtatagcttcattaagcctatacctacccttgtaaccgaaatatatagatataattatacagccaagtgtgtatgttgttaattagtatatatatatatatatccttgtaccaaattattatacttaaattttaatggatatattcttcttctgtcattaatttctgtcattttctcggttcaaaagtccacatcgtttcaaataattctatgcattcccatatgtgtgtatgtagaaaaatatgtacacaccctttcattggttcaaactggattttcgtgaattatgcatacgatcaataaatttgtaaaatattagtagtcaaattattgttagaaattagttggtattaattaattaaaaagggtctttatttttttattttaatctaaactaataagaagaagaatctttaaaaaaaaaaaaagaaagttgtggatgagcttattgtatattccatataaagatcgttagtagtcctaaatcatgatgaggaatgtttcgcttaaaatattgtggtttgctaggctagctatccgcattaaagatgaatttattaagttggtccttatctggatttttctaagtcaatattccaaagattaactgaggaatggtccattcaaagtctgaacaacccaatattagagatagagtccactccaattcttgaaaatccatagtagaaaattgtagtcttaaatggttatgggccaacctcctgcttcatttccgaacttgtaccaaaccccactcagtgcctaaaattgaaccttatacatatttgtccaggtcttataaaaataaataaatacatatttgttgcggcaagtacaaggcaatctcattttatttttatttttgagaaaagtacatgataatgcacaattttgggtgttatttatatcattcctcagaaaataataaaatgaaattaataataaacttgattggcctatttagacaataagagacaaaagtaaacataattcatatatataaattaatacttaagaactataataagtattgatcatccaaaaatgcgatgtgtttttccgtactttgatggatcagattttcttcctagtgttcattaaaatatcgcgtacgtcagcttcctctattacgtttgcaatctcagaatggtcaactgaagcagaaaaagaacaaatattaatcatcataaatcataatcggccaaatacaaatacactaattcaattttcaaatgattattgggcttatatatcttaatgacccaattgggccttgttcgttctgaagtccgataattatagggattatttcacaaatacacaaaaataataaaaaattacaaaaatacaattttacagaattttaaatatttttacgattttttttttatatttattttatgaaataaaaatactaaaacacactctaaattatactctaaaaaatcataaaaataaacctagcaccaacaatataataaattaataggcatacaatttgttagtttattttatggattaatgtaattagtcaatttcttcttcttcttttaattcaattccatacaatttgttgtaattgtaattatttattactcatctataattcttatccatgaatttaaattaaaattcttgaatgtgaaatttgtatatgttttgattgttatggatgcaacttgatttaggacaaaaatacataggttatttgtataattttattagttgttatgcttaatgctatctttgtgattaaacttaccataggaatatagaaaattttcatataaattgagcttataagccttaacaaaattataatcttcatagctcaacttatcaattgaatagaaagaagagaacttagttaattgcat

SEQ ID NO: 306078 - DNA, 4589 bp, Cannabis indica
tgtaagccgtgagtaatggttcccttgagatatcgcataagtcttttgcatgcttcccagtgaactgtagtgggagcatggatgaattaactgagtttgttgagaatatatgcaacatcagctcttgtgagagtaagatattggagggcaccaagtgtacttctgtacaatgttttgtcagcaagtggttctccttcggttaatgacagcttggtactggcacttgtgggattcgaacatggtttttctccttccatctttaatttcacaagtagatcagttatgtatttggtttgggaaaggtacatcccagttgtatccctgaaaatctcaactcccaaaaaatagtgaacatgtccaaggtctttaagcttgaaggactgatgtagttgggtaatgaacttgttaatgagactgtcatttggtccagtgacaagaaaattatcaacgtatactagcaaaatgatcaattgattacccgagccatacgtaaatagggagttgtcagattttgatgtatgaaaaccccactttgtgagtgtttctttgagagtttgattccatgccctaggagcctgtttaagaccatagagagccttatgtagaaggcatacatgattaggtttgttggggtcaacaaatccttctggttgagccataaaaacagtttcattcaatgtcccatttagaaacgcattactaatgtctaattgtttgtcagaccagttgagagagataacaagagttagaattattcttacagttgctggttttactactggagaaaatgtctcttcatagtcaattccgggtgtttgtagaaatcctcttgccacaagtctagatttgagtctatcaaggctgccatcagcatttagcttcaccttgtggagccattttttgcttacaacaggcatacctggtgtatagggaacaagggaccaggtaccagctttctttaatgcagcatactcatctttcatagtcttgaaccattgggggctttttattgcagcaacaatattctttggctcagagggaataagagcttcaggaaggggaaattttgtagctaagtaggatttgggtttggtgatcccattttgacttctggttctcatggcatgagtcctaatacatgcatttgtttgtgagggaatgtcatttgtggcattgtggggttgctgcatctgtacaacaggttgagttgtggtttttggtggtaagtgttgattgtttgagcctggtagaggtgtcaggggttggtcatttgtggttgttgttggttgggttgttggtggagttgttataggtggtgggatggttgttggatagcttttgatatttttggtgtctgaggttctttcgacaggttgtataacaggtgtgtgatttgtgtggactcggtttagtggtgcagtggtggcatgcatatgagatgaagtattaatattagtatgagaaccattatgagaagtatgaaaagtaaatgaaggaagtgagtgaggttcatttacctgattggtctcaactgttgtcggttgtgctgggacttgtgtttcattaaaagaaacgagagatgatgattctgccatcacggtttcacacaagtaccctttgtggtgagatgagtaacccaaaataagcatggttcagatcgaagttccagtttatgttggttgtatggtcttaggtggggaaaacagcaacaaccaaatggtttcagaatattgtaatcaggtcttttcttgaatagacattcataaggactaatgtttccaatgactgaagttggtagtctattgatagtaaacacagcagaagacatggcatgccaccaatattccatagataaaccagcttgagccaatagagttaggccggtttcagtgatgtgtctgtgctttctttcagcacgaccattttgttcccttgtactaggacatggatgttgaaaatggatcccttgatcagctaggaatcgagcaaatggtctatattctcttccccaatcagcttggacacttttgattggtacctaaaattgcttctccacaagacttctaaattttatgaagacatcagaagcttgattttttgcggtgagtgggaatatccagcagtatctgctgtaatcatctaaaaaaatgaacatagtattggaatccctctttagatgtaatgtgggagggaccccacaaatctttgtgaattagagcaagcggttggttgcctctacttgtggagtttgtgactcttcccttgatgacatgcattgcagaagtgcaatttttttaaagaaccagtgtaagaaatgagtgggaggattttttggagagtatttaatgcagggtgtccaagtttacaatgccaattgttaatgtcatgatgtttggtaatattgaacacctgattcaaataattggtaaaaaatcacattcacttttattgatatcagtgacattacaagaggacatagatgaactggtatggcatttacaactacgcttattctttacatcagagtttgtagacagagttgtaaggtgacattgcagcgtggtgttgggaacttcaccaagttgatatagaccatccttagctctccctatgagaagcactgtccctgtttgtttgtccttaacaaaacaatatgatttgtgaaactcaagaaagacatcgttatcagaagtaattgagagacacttataaggttcttagtcatggtaggaacattaaggacagaatttaactgtactggtttagaaggtaaggcagatggaaaggaagtatggccaatgtgagtgattagtaattgcttaccatttccaattgcaattgtttcagtaccattgtaagtggcagccatatccagattagatgtatcaaccgagacatgatttgtagcacccgtgtctacataccaagaatcatcatctccaatttcagggtacatagtggtagtagcagcctgtggatcatagggaaagtcagattcaaccaaaaaggcttgagtgtgagaattaccgtatttgggagtaacccaattcttgtcgaaacggtagtgacacacggctgtagtatgaccagttcgaagacacacttgacatagaagtcttgcaccaggagctcggccattgcatctgttttgattattttcattgattgtgccacgattatttgcattgggatgcctgtagggaccatttcttgctgcaagattagcttgcatctttattgagagatctgtgacagagttgtgatgctcgatgcgtgtttcatgggagaggagaagagcctgaacctcttcaaaggaaagaaagtcacttcttgaagtgatgccagaaaccactagatcgaattccggtccaagaccattaaggagctgtaaaattaaatcttgagtggacactggtgagtctgcaatcatcagagtatcagcaatagattgtgctttatcaacttattcatagatcgtaagattgttcttaaggagatgggagaattgtcctttgagctgtaacagacgggcctttgtttgacttgagaaacgttgttccaacgcacgccagacagagaaagaggtgtggaaattcgcaacggacgcaaaaaccgtttctgtcatggacgcacgaagccatgagagaaggagctggtccttcttcttccattgagcatattcaggattcaaaccacctgtaacaagattcattggaggagacacattagagaagaggatttgatctaggtcatggccgatgaccgtgggaatctcctgagatttccaagacaggaaattgttgcgatcaagtttcagagtgagagatgcagtgagcgaattcgagaaaggattctagttggccatgtgattcagaggagcagcaggagccgtggtgtgaggatcggaggttgaagactccattggcgcaagtcagatgacgatgataccatgtagaaagtaacaagctaaagagcaagaaaagaaaaacagagaaatgaaaagaagccttaactcaactgagtgggcaaaagctttatttataggaatccagtatatacaatcaagagaatgacagttaaaacaagaaacagaaatcaactaattataacaaactaattaacagaatagagttagttatttaagtgacatcactaagtagtttgttaacatttttaaaaattaaaaattatactttataaaaaataagtataatgccaatggaataatgttacttaaatattttggtactttgaaggagtgatttataattctcccattccaatattttattttttgttaatttataaaatatatttacatgctgcgcgaagcgcggctccgtttctagttatatatatatactaacatttaattttgatttttccaaaaaaaataaaaataaatatatttggtaactaccatatactatctggtaactattttaaacttctttgacatttaaaatattacactaatagtttgttatttttcttttcattttataatatctttaaggcataataattattcttcttaataatacggtagaacctctatctaagaatacacttgggaccaagtaaattat

SEQ ID NO: 306079 - DNA, 1942 bp, Cannabis indica
ttttttttatttattttctattatattataattatattatagtagatattctttttatttttatttaattatttacaattacaacgctaaaaatttgattgaaatgaattgaatatatataagcatatatttttttatatatatgggtggagttaattaataatttttaattttattttaaatattttaaattattttgatttttttaaatataagatgtctgttataattattatatcaacatcacatataaatataaatatatatatatatatattattattattaggatcaaaagtgatactactactttgttaaaaaaaatgacacctacatgaaattctccttatatatcatgttgtgggttaagttgttaacaaactaagccattgttaataaattaagtagaaataataaataaataaagaaaaaaagcaagaagataagagtaaatattatacaaatttcagaaagaataatgatttggacacatttaaattatacatacttcttacatataataatatttaattaatcttcactatataattaagagtacattttaaaatatatatatataattaagagtaatgtgatccctatttaaaaatataaataggtaatttggagtgtcaattaatcttaacaatacctaacccatttaataaccatgtcgaaaataaagccaaactcaacccgttttaacttgacctgacctgtttataatatttaaggaaatgatcaacccattaacatgtttacaactcttttatgaaacaattataggtcgtattatttttgagttaggtgtatcattcttgaaaatgacccatttaataaataggattagccgtgtcaacttaaaaatgacttaaatttatttaaggctaatcttagtatatttatttcgtgtgaattttaagtcgttttatcgtgtttaatcaatcttgctactctgtgaaattattagtgtgtaaacatgtatgtaacattattgtttccgaaatatataataataatagttaattagagttgattaaagtcgtgggaaatattcaaatattaaaatgaattttgcatgtgagatatccttgaaaaaggatttggaaagaaagtcaattagagaaataaataataataataaaatttgcatgcatgtgatattagttagttgacctatatatatatatatgagattaattagcttaattaatattatttgttattaattcccatgtgacagatcttaacaaatgacttgtacaagagtgtgaaacatagagcaatagtgaataataaaagcagaagaatatcaatagtgtctacacatggaccacaagaagacacaaaggttgtaccaatacaagagcttttagaggcacatggccaaaccccatcttataagcccattccattcaaacaatatatgcaaattctacaaagtccccaagtcttactccaaccccctcttaacctaataagactctaatatataatatcattatcaaacactttctatgtatatttcatttgcttgtgtgtttttataatgttctaataaatgtcatcaagttgtattgttgtgtattttgtatatggataatgattgagacacttttaaattacacacacctaataatgatgaagtagctaggtaagtactagttgaaattctatattttaaaattacttacttaattaattaattaattagagcattcccaacaatttttctattctattctttaaaatactttacaaaaattttactatttctattgggaaattttattttgtatgcttaagaaaaataccatgtatcaaaatttagacccacaactaatttatacaaaatagttcttttgtttacatattttctctattttacccttaattaaaaaaaaaacttgatgaactaatcacacatactctctctctctct

SEQ ID NO: 306080 - DNA, 2677 bp, Cannabis indica
gggcataaaacccaacacttcgacctctgcctgaatatccagtgttttttatgatgtttaagagtcgatagttggaactaggggtggtgatcctggattcgctcgctcgtgtatacgaagaagaagatgaatgcaatgatcaatgtaatactccagggttctctcgtttgtctttgtctttctctctaaaaatgtgaattctatttcaaatttgggaaaatatgataaattggggactttcaccatatttatacataaaggaggtgatctgcgtgatccaatgttaatggctaagatcatgtcaaagaaaacacaagacaaatctaatggtccaggaaaactatcagatttgcatttaatacgatgcttggaaacaagatatcccaatgattatattctcctcgatacgcatactgacgcaatcaattgttgtttcacaaaaaccttgttgaacgtgccacattaatgaaagtaagccccacgagccaaagatataataccacgtgtcgctttatttcaaaaaataagaagctttcaaccacaaacaagttttgtttggaattaaaaaagatttcacctttagcctccacatgtccccacatcattcaagaagaagggtgcaaacttccataacccctagagtcccaaaagcttagagggtaaatgttatccgtgtttctagatggagacatatgtaattccaatagcgatcacaactcagatactttgggcccaacaacaggcccaaacagaattattgattggatctattattgaagtcaagtcttccagatgaaggataggcaactcgtctaggttatataaccctccagtatagtgaaaatctaaaagacatcatttagagcatctgaaatagtagtcaacagatgttcagacaaccagctccatatcgtactcattaattaccagatctcacgatataaggatttaactctcaagatctcgtgcgcggattgtatcttctcaaatatgagaaaataacaattgagtatcaagaatttaatatgtctttattatctatgattctaggacgcgaattgaatagctatcaatatgatgtggcatccacatcagcctacaatcagcatatcatgggttgggctccaccagataggcctaaagtcaatatattatttctatttaccccattagtgagaaaatgaaaatgaataagaaccctagcactataaatataagagcaccaatccaagcaaaaggttgaaatctcattcctcaatcacttaggcaaattctagggttcaaatacttgtgtaaatcctcaggcttttccagtcttagcataataatattgactcgtggactaaagttcattaatgtcccaatcacgtaaaagctatggtgttatttcttcattatttatctatttctttagctttcgtttatattttattagtgtccaaacatctcgactaacaattatattattcaatctcatttaataagccattagttttcatgtgattgttattatggttaagaaaagataattacattggattttcttgagcattaacatttgctttcgaactacttcaaatgtatttcttttcttcaatttcttaaagtcacacttgaatgttaaatccaacagatattcgagaggcagagaccaagatggacatcactgggtattagctgagtgtgatatcttcattaggcctggatggttttggcatgcatcagaatttccaaaatttgctttgactcttgttgacatatactacaaatcagcgggaagaaattgtctgttgttactaaatgtgcctccaaactcctcaagtctaatttcacctgaagatataaaagtgattcaagagcttagtgagatcaatcaaagtattaatattcccacataacctagctacaaatgttgtactttctgccagcagcataagaggggtaaaagactcgtgtttcaatgcttatatattgtcgtttgaagaaggtatatacacaatacacagtggcacctgtacctaagaagaatttttcagagtggtcttagtttatagactttaaagaactagtctccttcaatgttttacgaattctagagacaattaaaatggagcagcagattgttgagattaaccttgaaatatttgatgtagatgatgtgtggaagaaggtagcaaatggcaccatagtgggatacagatgatgttgcaatttcctactgtaaaatttcagcaattgagatttgtcattaacaagtcgagagaaaatccattgattttgtacttggaaagttatatggatcaatattcatacttgagcaaccatgtattcaatgtaaccataaatccacaaggaagaaactacaagagcaccacttcatgttattcaacccaatgttgacaaagcttctcatgccacaatctatattgggcttttatcattcttaaataaagtattaatttatattttctatgtaataattccatatatattcttagaaatttctaagtaagcatcttcaaatgttttctatctcattcttaagaagtacaaaatttttctctaattttttttaaaccataaatacatattttgacctattttttttagttagttgacatttttgaatagatatttaggtttgttaaaaatctaattttttaaatttataggttta

SEQ ID NO: 306081 - DNA, 2173 bp, Cannabis indica
taggaaaacagaactaatatgtagtttgaaactcaagtgtgaattcgttatgtcctaatgacaattaagaatctaaaactccgcgttgaaaagcattttaaagtcttatccagaaactaaaaaatgaaatgacttgagctgtttaattaagacgatatttatatataacaataaagaaaagaattttagaattgtgtccaaataaaattaaagtaaacctctgttttaaaactaggattaataaggcaaggcgtaagcgttcacgtgtcgccatgtggacggctttattcccaagataagtaattgcggctcctagacggccagatatgtcaaactctctcctttcgccacatgtcccaattatatacgaagtaccatcgattatggtaccctaaactaaactagtactcaaaaaacagcatattcttttttatttttttttaaatttaatttgtatatatggcaagcctcttttttcttttcttttctccttaaaccgaaggtagatcacaaggccaaaaaaaaaaaatagctctgcttctcacttgcttttacttctgtctatgtactctgttccatggagtggaaaagaggacacccgatcggccgtggagccacctcaacagtctatctcgccacggacaacgattcaggcgaactattagccgttaagtcaacggatctttcttcttgtttggttttcttgaggaaagaaaagagttttctttcaaagctaagctcttcttacattgtaaagtacttggattattttgtcactacaaatgatcaaaacaactgttctcgcacacacaatctttgcatggagtatatgaccggtggcacactttccgatgagatcagacggcgaggagggaggcttgatgaatctttgatcaagctctacacgtatcagattcttcaaggtttggattaccttcatgggaaaggactagctcattgtgacatcaagagccagaatatcttggttggtgaagagggtgtcaaaattgctgatttgggctgtgctaaattggtgagaagagttgattggatcgaagatgaagatttgtacgagtgggatgctgcatctaaaatctctgggacaccggcttttatggcaccggaagtagcgcgtggggaacagcagggtgttgaagctgatgtatgggctttaggatgtacaataattgagatggccaccggtggtggaccttggccggagttgaatgatccggcttcggcgctttaccatataggatataggaattgcttgcccgagcttccaagttggctgtcggaggaaggaaaggacttcttgagcatgtgtttaaagagggactcaaaggaaaggtggacagctaaggaacttgttggccacagatttgttcaagtgttggatttgggacaatatgaggcccaaaagacatctcctagtggtgttttggatagagacttgtgggatttgttggaactgtcggagtctaatagtagtagtagtaatgaagaggttcaacttgatgtctcgtttttgagttcagcagctaaggaaaggataaaggttttgattggtagtggtgacacattttcttgtcttccatgtacacctgattggggttggagtagtgatgataatgatgattggttcactgttagaagcaatgattttgaagaagacccagttctggattctactacttcaacatctttcgattcaatttttcacgaacaaggagagattgtttatccctcattatttgatgaaatgtcgtttgattattattattctgttgaatctattattagttgtgaaacaagttttgttatgacatgtaatgatgttgatctccaactccaaaacgaaagtacaaataaagaaaagaaatcaaatttttcccactgtcactatggcttcataccttttactttcttgttttctcattctcaatattttttatttgagttaattacgggaaaattttcaaaagttttacttccttaactagcaattaaacctccaaactcaagcccattttgttagcaatttgtcattctatttatattgggcattttacaaaaatactgcatttggggtaattgttttcaattttactgccacacggcagaattaacatttatactgtcctccctttttttttcttttatactgtcaaca

SEQ ID NO: 306082 - DNA, 1929 bp, Cannabis indica
tttttttattacatatatatattagtaggtaagaacatcactttatttttatcgcgattgggagtctctttttatagtgctatgtcactgtcttatacgattctatttaacatcactgatcagtagccatattggccgtgttcccagtctcatgtacgcttagtgtgaacctagccagagggaagtcacctcgcggcctactgtaggtggttgtgtattaacttgttcggggtttgtccctggtggtcccctcgtgtttccaggagtttgcacgtttggatctgtcaccattggatcaccttgatcagtaaggcctcccttttgagtttgtacaactatcctgttaacctgtcaagattaagacaaaaacttgtgtttttgctctcaaagaaatcaccaaaatgttgagttcacttctagccaaggacagtgagtcagaataaagtaattaaataaagtaaacaatagaaagcaaaaacagtaaaaaagaccaccaaattttaatgaagttcgaccccgtaagaatggtaataacctactccccttgtctttgtattgacttgagagaatgaataaagtatttttcctctctaaagctcttacaatagatctctgagttattttctctcttagatcggtattctctcttgagtgtttctctggattaattcttttgtcctcctcaatagtgtgatcatgccactatttataggagcttattacatgaaaaatggttttccttaatttttaataaataaaataggaaactacattaattctataattacaatttaaagaaaaggaaaccaatgcgtattgcctttattctcttactaaatcccacgaatataaggattgtctttgtgtcttagaagcaatcactacaagaaatgtcacttttgccagcacatttttctgctgacaaaagttagtattgcgctggtaaaatataatttacttatgatgtgttggcaaaagagggttggcaaatcaatattggtattagaacttttgccagcataaaataaaaagtgctggcaaaaatgacttttcccagcgcgtaaatgcgctagtaaaagttagatttagccactacaaatgtacgctggtaaaactttgacctctttaccagtgcagtttgcgaaatgtgctggtaaaatttacttttaattagcgcagtagcgaactgtgttggtaaaagtgacatttcttgtagtgaatgagaccgatctctggaattgccaacttatatggcttgctcggtacgaataagtttttatcttggtcggacatcttcttgattaacctgttcagacattcgagtgttacatatattttaattaacgattcatgagctgctaagaatacttccctctgcccaggtagcaaacaaatgtaggacacctgtcatccattctcattgcgacgtccaggtgcaaaatataggatattaatacccaaactcgaacttctcatcttcaattccaccccaaatcacactaaactttctagaacacctaattagagaacattaaacataaatcatctgaaaactacaacatcaaacttttgaattcaaaattaccattgttgagctaaatttgagtttgaaaactcaaacctagcacaaccatgctacaaccaccaaaacttctcaaaacaaacaccaacaatcataactcaaacctcagaactcaattctaataacatataacattaaaagaaccgaaatcccaaacttatgcatcaaaacccaacttttcttacaaaaatcaagagaaaaggatgaaccagggttaccttgggttctttgcttgcaattcctactagaaattacccctgaaatcttgttgaattgatctaaaacttgttgggttccttggattctttagaggtcgagagagaaggtgaagagagagagagagagag

SEQ ID NO: 306083 - DNA, 1120 bp, Cannabis indica
gaggctagacagacgacaccttaaaaatgtaaacagaacagtactttgaaggatttttccaccaaaatatgaggttggatagttttttaaaagtaaattattaattggagggattttgccacaaattactattattatttttttaactaaagaaccctcttaaagccaatttacaaagtgatatgatcacaaaaataacagctaatattaaatcaagtcgattagaataatgtaacaacaagcattaacatagacaaaacacttgaaatggaatagtttgattgtgaatccaaatcatgcaaacatattaatagttagtctttcaaagatcttgcaatcaagtaaaactgtgtttcaaattgaactaggaaacaatcaaacaaactaaattaaaattgacacaaaccaaagtatgttacaacaacacaattaattcgaatatggtaaacactattgcacccactcatattgatcacaaccaaccacaaatctatttgacactgaaacaaccaacccccatgtcgtgaagagccaagagagagccaccgttaagaaaccatggaaaagcacgagccaaggcaagcaaacatcaaacatttggagccaagcccatcaactaatagataatgctcatctcttgggagtttctccagtttaatgaagtttctttctttcaaaagacaaaaggtgaaatttgtgaaagataaattataagttcttgtttaaaaagtacagactttcaaaagacaaaaatttcttaggaatgaaggaaacacaaaataaataaaggaaagtgtctaagaatatatttctttttaaactctttattggattcacttttattttttcttaaatatattttggttatcttaatttatcttattcctcatttttattatcttaatttttgttatcatatttgaaatagttgtgtaattaaaaggtaatataattattagagtagtaattacacaatataataattacactatattttaaaatgcagagtgtgtttagatatgaggtgaaattacttatgaattcctaatgaggggtgttcattggatcacatccaatggatttggacccatccgatccaatccaattatttattggatat

SEQ ID NO: 306084 - DNA, 2280 bp, Cannabis indica
taaataaaatattaaaagatgttctaaaaaaaagtgaagttctaactgtggtataaaatatttaatgttctaaagacgggcaatgtcatcgtcgttgttgtatagagtctcgggaggatgcgatgacaatccagcaccaggagcagtggggaatgatagaagatccatcaaaggcaagttaaaactcggcacaacctgagagagatactcaaactgatcttgaaatcttttgagatagagttattgtatttcatattgatgcctcgtatactgagttgtctactctacaccctccacttttttttgtaaggcctcgtactgttccatagtaacagtcggtggggtagatgaatttgtggtaggtgctcttttggccccaactgccttcaatctcaggagatgggcaaagcctcttagatttttagattgctccccgagtacttgcgtcataacaagaaagtctagggggtactgtgtggaatctacaacagtctcatcaggctaatccttagtgggcgtttgttgacttgcagccaattcaacaatttgatcctataaaaacaataaattaaatagttaatttgaatcaaaacaaattgaaagaaatttttagaaatcaatatatgggtaaacttacataagcttgttgtgcgtacttgttgcgccaagtgttatctttatggtggaatcgttaaaagtttttacagtagttggaagttcttctgtctcggggttagcctatatttaagaaaaaaagtgttattattgtatttttagaaaaaaaaaaataagacttatcgatgacaatttattatataaagttaccccagcgacaacatgtgaaccaataggctttgtccccagcctccttgaagtctcatccaatctgtctagtcaataaattgactccttcatgggctggactttacgagaacaactcaaattatgtaatttgatgtaaattccacatttgaggagaaaatggaagctaggtatatttcttagaataatataaatacccaacaaatccttcggattaagggttaaactctcttgcaatacttgcttaagaaaactaagagaacttgtgctcattttattcccaaaggcatttccagcttaagatacataataatatcgactcgtagactaaagctcgttaacgtcccaacaacgtaaaaattttgtgtgttattcttatttctttttctaaattgtttgtttcttaattttaatttattataattgattttttaaaaatctcgggaaacaacatgaaaaatctaacttgacacttagattgaagagttagagctcaccttgatttttttcttgacaaaagtcctagaaagccttgatgaattattcttgattgaaggagaatgataaaaaatagtggttgttctttgaggttccaaaccaagagagagaatgagaggataagggttatatttatttattttttttcacttaatgaaattctaagaataatcttgtcttcattggttttatttaaaactactttcaacttataaaaactaaaaaataacactagaaactccactaaccaagtttagtaattaatttagggaaaagacgaaaatgccctttatcaacccacataacaaacaagaataactaggggcaaaatagccaaaacaattatcgataactcttggcattctcaatgtctaactatcttgccccgctaattctaagctactctactatatctatgtcactaaaattggtcgaattaccgctttccacttttgtcgaacataaaatataaaaacataatatttcacatataatataattaatacacctagaattcaaatatatatctgtaattgtaaaaataataacttaaagcctatttctgactaaaaatcctaaatatatggtaattctcataataaagctaaacggtcattacaattatctattgggttttgggtccatgtttatgagctaccgttcttaagcaagtccaagccactagcaactgttataggcgataccattggtgagtttgtggatgtccatgaagactctcttgatgagggatggggccctttcacgtgaatccgagtgaagctatcggtacccgaaccactcccttatggtcgaatgatcaacctagcgaagattaaagatgaattttggatagaatttatgtatgagcatctccccaaattttgttttaaatgtggttgtctaggccatccatttgaaaaatgtattactgtaactgtagggttttgtgccctaaataaa

SEQ ID NO: 306085 - DNA, 1069 bp, Cannabis indica
gccgaaaatctcggtcaacagagtgcaaattggattaacaattttataaatatccctatttacatggaggtggagttttactaaagctatttttctatatttaaaatattcataaatatgacaattaaaagatatatatgataataaaattttcagagaaaattgtgtaatttttatccaatttatatatatatatacataattatatatataactaaattttactgatttgaaggatactttaatgagatttgtcattgaaataaataccatcttcaactatataaaaactaatttttatagtagaaaattctttaaaatgtaattactttttttttttttgttaaactaatagtattttaatactattattttataaaattaatttatattaacaaatttaaattataaattaaatagtattaaaataattaaatacttactatagtaaaaaataaaattagagtattaataataaaaataactttcaatttaattttttaattattttaatttaaaataattagaaaatatataattagagatgctctaatatgaaaaatattttaatctttttattcggttttcacacgcatacacagtaaggtagcaacctttgaaaaacaatcacattaacatttggaaactaattactttcgtttcagtccagaaataagtttaaatcacattggaaattattactttggaaatgatatgcaaagtgcatcctcattttaaatattttaaatgagtaaaataaaagtttgttggtattaataataatagagtgagtgtagtctgtacgaggggagggagtgtaaaatatgattaggctgagaagagtgaaagaggggtgttttgggtaattaaagaggcactgcgtagggcacgtgaaatttcgcattatatgagatgagaatagagaattagggatagagatggcttttgtggggcccacatccgtatccgcatccttctctgggccccacacgctctgtacactgaattctgaataatcatcaaataaaataccatctcccaatccaatcttcctctctctctctctctc

SEQ ID NO: 306086 - DNA, 591 bp, Cannabis indica
tctgagttattcattaacatgtttgctgagaaggaagagcatcttcctcatctcaaatcttataaagatttgattgttctaaacaatgtcatggtaaatatacttaataccccttttgataattatttgtctttttcaatgtttttgctttaattttttactctcttttggtcagatgaaacactatgttgatggtgatgaaatttgtgctgtttattacaaacaaacttcatcatttgctttatttgatgtcaaaactactacaaatactccttatcaaacttcacctggttttcatctacaaaaagatgatatcccttgcattacctcaatgagagctttgagtagtcactatgaagttagtgctggtaaattttaaacaagtaacaatctttctcttttaagtaaataccattttggactcaaaagttaccgatcagaacctttgttttgttagatgataaattaaactgtgtgtttgtcaaaatgttacaaaatagtactccaactcaatttttgtcaattactttcttaatcaatctattcataatactttcgggtcaggttattattatgttctattttgaaaaa

SEQ ID NO: 306087 - DNA, 4353 bp, Cannabis indica
cttaatgaggtaaatgtccacctcatctccttctctcttcttcatcttcatcttcttattcatttttgtttttagattcatctttttcttttccttttttatttttgtgtagatttggattctctctttgttcactgaatctttgagtttttttgttttatttgtctatagatctgtggttgttctgtgttaggagctcgcaaatggccaagcttgtgtcagagttttaggatcacagttggtcgaatttgtagatcgaacctgaccaactctaaatttagtaatttgaaattttaaattatgtgtttggattttttttaattttgtgcatctgtttcgtgtatttttgtttgttttagaaatgtgtttgtctggtttgattttggtagatatgagcaaatctaggcacgtgtagcttagatctggatgttatttcatgtggcaatttaaagttggtaattcctttgtcgactgttctaaactctcagctatagtgtaagttattgtcgaaaattttaaatagtcaggacataggcatacttgatgattttccatcaacgcctattccacccagttttgcgactgtcaaataggcgttagtcatagagattgacaaaaataaaaaaaaagttgggaaatccccttttttagtagtgatatttcttttgagagagaaacaaactagtgcagtttcggtgaactcgaacacccaagaaatagtttagcgaacctaattccttaagagaaaaggtgaaatttagggtctgagttagaacagataccttaacaaaagagcttccaagaactataatatcattaacataaaccaagttatagattgtatgatgagatgttcgtctaataaagagatattgatcagctcttaagttgtgaaaacccaggagaagagctatctttaacctgtcaaaccagacccttgtagtttgttaatactttctgtagtttacacatcatattaagtatattggtcttcagaaccaagtggttggaccatgtagacctcttcttgtaaaaccccattaataaaagcattgttaatgtctagttgatgaattatctagtgcttagataggtaaatgatcaagataaatcaatttgtagtcaacttaataattggactgaaagtttcttcaaaatcaaaaccatacttcttggagaaaactttaagcaaccagttatgttttataatttgttgactgagccatctccattctctttaagtttaaaacacccaacagtagacaatagctttcctatccttaggtagaggcacaagtgaccaagtattgttctttcgaagggttgcaaactcagttttcatagcctgaaactgatttggatgctttaaagagcatctttcacaacaagagattcttgagaggctatgtatacttttggcttatacaccaaaactttggatctagtaataatagtgtgggtattcataagagcttaaggtggatcatttgatagattttgagctggtacaggtgctggagtagagttggtatgagagttgtgagatattacagagaaagattgtgtgcaagtaggttgtgatggggtgaaatagtagccatatcataggaagagtgaggagatgatggtggactagatgaggaagtggtgggagtgtttaaatcaggtagtgtagttggagaaacaagaaggatagagatatcagaagtgtgacaagcttgtggaactggggtaggagtatgagagaaaccagtagaataagggaataaaaattcattaaaaattacatccctagagatataaagtctaccaattttggaaagacacttataatctttatgtttgagactataccgcaaaaaggtgcactctttagacctgaattatagtttataatttattgaatggtctgatattaggaaaacatgaaccgccaaacacttttagttgagtgtaatcaagggaaacattttaagcttcttaagaggggaaatgttaccattaacaagtgttggtaacctattgataagaaaggctcatgtcctcacagcctcatcccataatttaagggctaaagaagcatgcgctatacgtactatagacattttaatcaggtgttgtgcttgcgctcaaccgcaccattttgttcctgagttgtaggacatgacactctatgagagatgccatgataggaaagagttttcttaaaagcttgaaattcacctccctaatcaaataagagatttaatcttatctcaaatccattttcaacataagcttttaaattcaaatacgtttgtaaagcatcagatttgcgtaaaaccacccaagtaaatcgagaaaatgcatcaataaagtgaatgtagtacttatagtcattacaagacaccaaataggagaaggttcccatagctcaaagtgaataagttttaatggttttgtataaacaatgttagaatttggaaaagctaacttgtgtattttgccttgacaacaagctaaacaaaagtaaaaaaaaaactattttattagttgttggaatattataattgtgtagtataaaattgacaacactggcagaagggtgttctaacctaatatgccaaaaagaaactaatgaaacaaatgttacattacaatgaagagaagaagacaaaattagccagtaatcattattgctatcagcgtgaaagaagtggaacaagtagtagactaagcaagcggaaagatagatggatggaaagcatataaacatttccaagcttgtcttccaccatagtagctttggaaacctgatatttcacaacacaaaagttcgtatgaaagtaaaaaaaaaaacaaaattatcacaagcaaactaagagacacttaagaattttaagtaatttatgaacactgagaagcttattgagaataagatatttagaggtttgaggaggttattgaaagatagagttactaacattttggatggctagacatgtaccatctccaacatgaatctgttcacgaccaatacattcatgtttctgttgaagattagcttcatttgaggtgcagtaattggtggcttccgaataccaggctgaatcactcacagagtttacagtggaaatcatagcttgcataggaagagattctttgtcaacattaccagcaccaaggctaggaaaatctatgatagatatctgataacacttagaagagacatggcccacctttgtacaaagttgacatgctggttaagtactggtattagaggaactaggagtactttgaatacttgtggcatagggattctaggagatatttcttaaaggatgagcaccaaaggaacctcgaccaaaaaaatgaggtggtggagtagatccataggaattggaatttgagaaaccagatcttggtcgagaattgttgtgagtgagccaaatttgctaagagactcgaatcaagtttaagaccatgcttctcaatcctatgatcatgagtcaacatcagagattcaatctcagcaagaatgtatttttcatgaagataattgatggagatgataaagatatcataatcttgatgtaacccattgaagatagcaaaaaaatgtgttcctttgtagagaaatatggccaacagattcgagcttgtgcatcaaatatttgagatgtatagaataacacattaacagaaattgagacattcttgaagttgtgaagctgagtttcgtgctgatcaaccttggtcaaagtttgagatgaaaaatattgctcaaagcaccttccaaacatgagcacatgtcttacaaccaacaatacgagttagaattaggactaaacaattttattgggtttgacccagacctggcccacccgcccagacccgacttaaatacactgctgatttcccccaaaaaatgtgtagtttatttaaatttaaccaaatgtttaatataggataaaaattgtattcaaatataatttttttttttatatttgttttaaatttataaattattttatattagtttctacttcttagttatattattgtctatattttaaatgaaaacaatttgcttttttttttaatgaaaaggaacaatgggcacaacaaaagtagtttctgatagtgcctaaatggatagcagatgggcacattacttgaatgataggtgccccacatagtcgtgccagtagaggattcttttggcacgtcattacttgtcgttagatatggaaatttataccgcggggatgggtaaccgcggggacccacccctaatggagtgggaattccccatcttggtggttaatggggtgatggtggggacaatttcaatacccgaagcggagatggggc

SEQ ID NO: 306088 - DNA, 4108 bp, Cannabis indica
cgagagaattcgatgcatacaaaaacactaataaataatagttggtcccacacaattacacgtacatacatacgtggttaaaaatgattgaacaactagtactatatatatagtttcataaatatatttattagaaactatatagttctggttgatttataatcattttaatttatgaacattattatatattgagtatatttagtggttagtatcatttagaaatgaaattttatatgattagttagtaatattttatttatatattattatctacatgatatctgatacttaatagcactaataataatatgatattaaaaatatttttctttgaataaaaaataatacatcttcattaaaacaagttattttttttttatttttttaaaccattaaatcaacttattcactacaaaaaactgcaacttttagtgataattttttagttacaatataatttttgtatgactaaatataatttttaatcacaacaaaacttgtgacaaaaaataaataaattgtgactaattataaattattattcttatattatgactaaaaggtccgtgactaaatttattagtcacaaatattacaattttttgtaactatatgtatttttaatcacaatatttattgtgattaaaactaaatcagtaataacttataactaaatactatatcttagttagaagtaatattttttgtgataactcaaaacaacatcgatcaagcacttaagagaaaattgttaattataataaaattagatgagactattatagattattttttgtggttgtcctaattttattttattaattataataaaacaaagatgtgacataaaatttgaggaaatatatataaataaatattttgttagattcgatgatatgatcatttgagaacattaaattgttgtggggcattaatgttagaaaagtgtacgtaccaattacatttttcaacgtattcagtaggcattcattcgtacatgtcattctctcaactgtaagcaaaccatgtcgccacgtgtaacttagatacacagagggtcggatctaaactaagacagatatagacgatcaatttcaatttcattcaacagcaacaagtactcttaagcattttttttagtttggattaaaagtttaaatctcaccctctttattagaaaagattatacttggcctttagggagattatctagtagtggtattattcttaatgggataaagaacttttgagggtcatactgagtactcaattaagacagaatgaggtataaagtagtacgtaatctccaaaattataaaagctatcgaagaaatggcgaagtgatctacaccatatcccatcaatactcttgaacagaaaggccaacacaatctcttcatgcatatggaagaaaacacagagactataagcctagaggcaagccaaaatgggcagggctggccctaagtatagacgagctaggcctgtgcttaggattcattttagggactcaaataaaaaaatactttttagaaaatatacatatatttttaataatttttaaaaatattatttatctttatagtaagggcaaaaaaatttttttacctgtggcccatttcaactcaaggtcggccctgcgaaagggatgaagaccaagaagtagttgcacgttagagaatctccaataaagtgctataaatatattgtatatgtattttttgacttaaatttataaaattgaactctaatgctaatgtataatgctatctaaatttgacacatgttaaaaattatatcaaatttaatactaaatatagcacagatcaaacttttcagtaccacaataaatattactactttttatttaccgtttttaccactcatttatataattaataaattttttatatttcatttatatgtttaatagagtatgtatttatatacttttaataaataaattaatgtttttgatcatttttttaatataattttattaaaaaaatgttaattttactactcaatgcgtacaatttgtaaaatttaagttaaatataatattgactgatttttaaattaaatttaccacaaattttaggaaagttttttaaattaaatgttacttcttaaagatgaacatatcattgttaacacatcactaatcactatctcatcagtactaatttatatatggggtttgataaaatttatttttcttttattatagactatacccttgataatctattaaattataattactccatttgctaaataaaaaattattttacaaataaaattggcaaaaaaaaaaacaattattactttacaaaaccaacatatatattaaattaattttcattatcctaattaatgtaattgaagcacaactaccaccaactaactctcccaaagtaataattaaacccacagtactttgtttttgcctataaattaagagcacaagctagctaattttcactcagatcgttacacaaaatttacacattgcttctcaatttcactaagtcccaaacatacaccttttgatttttctattcaatcctccaataatctcaaaatataccacacatttttataatggcaagttcttcagttgtgaaagtactatgcttggtggtattggctatggtggtggcatcaccagtggtgcacgccaccataacctgtggccaggtgactagcagcctggcaccatgcttaagctacctaaaagttgggggagctgtcccggctgggtgttgtaatggtattaagtccttgagcggggcagctaaaaccccagccgatcgccaggctgcctgcaagtgcttgaagtcagctgctagcagtatcaaaggagtcaactttaaccttgcctctggacttccgggcaagtgtggcgttagcattccttacaaaattagcccatccaccgactgcagcaggtattttactaattaatctaaaattttatggtttatatattcatgttatctctaatgtttagtatttttttttggtatcagactgttattggtgtaattaagtctcatataacttaaactaacctttaaggaatatcgctaaccaattttaagatgtcacttataaaaggtgatcacactactagtacttaacaataatgttcattattattaggaatcaaatttcacatatttaaattaaggaaaagctagatattgaattaattacacttttttgtcttaataattattaattaattaattaatttatttatgtttgatgcagtgttcagtgatatttatgatggatatggtgattttccagcttatattagtagaagatgaataaaaagtgtgggtgtcatatgactataaatatatacatatatttatagctcaaatgcatccgtacgtgtatttggtctccttatttgagagtcctcctttgtattaatagttgtaatatatattatgtactttttattatgagcaatgaagttttaaattatatataagtatttatgtgattatataatataaatatatatatatattaaaaaataaaaaataaaaaataaaaatttgaagcacatgcataatatagtcataagatatgaacctttaaaaaaaaattagaaaatttaatattcaaaatagttttggatatcaaaattaaaattaaaatatatcttgtcaaaaaacgattttttaattatttttttataataatgttttcacgtatatatacatgtgttttaatatttatacgtgtgagcaaaatgtttaaagattagaacaatgaaagtaaagaatgaataataaatcaagcttttcttgataaaatttgtagacataatttagatttttgaaattctaatatagtgtaaaaaccaccatcagctcatccaatacattttcttttaataaatcatgcaattttattattagcaatcaactaaaataatagcatacaattcaatcggaacatcttccctgttagagacacgatcacgattaaaattaaaagaaagagccaaataatcagccgtctaatttttttagataatttcacaaaaaattaaaaaaagattgcagcatcatagttaaccttaaga

SEQ ID NO: 306089 - DNA, 1484 bp, Cannabis indica
aacactcgtgttggtctgtagagtcagtcatcaatccaggaagcagctagagtggcgtactcgtgtataagagccattaagccgtgggtgtaagggcccaatggaggcttgaagcgggaacgttacaccttgcaatgcaacgacgataaagataacaatgtttgatatttttgctgaatctgattgagcatcatgatgattccaaaaatcatgacaagtgttttgtgtgtcaatcaatatggtcaaattcattagcctattcttgctcctctccaaattgtaagaattttcttcattactcttgtgcaaattttccatcgaaaattgatcaacatccttctcattcacaccaccctctcatacttcaattcagtaagcctcgatcttgcaatgtatgttgtaagaaagattgtaggcttattttcaagtgtgacaacaataggtgcaattttaatttgtgcacagagtgtgttgttcttgatacaacgataaggtgtcaaagtcatgatcatttcttattgtttgtggagaaagcgttgttttatgaaggtgtttgtcatgcttgtcaaaaatcgtatacacaatggagtggtgatcatcttattcctaatgaagtcaatcaaactcaatccttcttatttcgttgcatggaatgtgattttaatctccattttatatgtggtcctttgccatttattattaaatacgattatcatatacatcctttgacacttgttgattatttaagcgaagaagatcaacattattattatgatgaattatactgtgatgtatgcgaacagccaaggcatccatcatttcgcgtttactcctgtaaagattgcaaatacactgcacatacttgtcctctatttgatcatcaattgcgatcaattgaaaatatttatcaaatcagtcatttcccttcttttaactcacaagatttggagaactattggaggaagcttcgattttatagacccgaaaaaggattgaaagttgatgaagagtacttaagacaaaagattgtagatgttaatggttacaaggtaccaattacacttgcccacatcttaaacactctgttccaccaatacggagaatctcttctatttggtaaataggtctcaaaacaaagacctggagtgaagagtgtattggctacaacattgtgtgtggtttggtttgtgatcaaatgtgcaggactaagatagaggacgtgaccacaaatcttgttgagaattggtttctctaccttaatgccattacaggatcaacattctcaaataggatgtgtccctagtactttcatctacaaacttgttaagagatttttctggttagaagcaattcgatataaaaaagagattaaggagaaactagagttgaggattgtaggaattttgtagataggattttactatcttgcccctaccaccaacaaacaaaaccaaactcaagtataaggtcaatttcgacctttc

SEQ ID NO: 306090 - DNA, 1774 bp, Cannabis indica
aaaaaaaaaaaagaaaactaagtatgtataaattatagaaaaaatctatattattccaaagaaccgatatcattctgtctagaaaaaaattttaatataattttttttatacttatttaagattaacggtaaaaattatgaatagtttacaataaattaaagttaaaatagttatttattagaatttacacatatatatatatacaactaaaatattttcctaaattttctaaaaaaaaaaaaaaaatattttccttaatgcgtaaacaaataaaaaaatataccaaaataattttgtttaaggttgtacaatcaaattaacctaaattataatatatgatcaagtaaagtatatatctttgtgcataaaaattgtttcttcttgtgatttttataaacaaacatggttaaaaaccaaagctaattaaatcaattatcttcatagacaaaaatgcaaccttcataattttattttttaagaaataaataagaggataaatattattttggatattaaatattttataaaaattatttattagatcatcatttattttgttaaatgacaatttaaatttgtattttttaaaatggtataaaatagtactctgaactcaatttttgttaaaataaaatttaataataactttattagagatgttatgaccagattaattatattttttttgcatatattcttgctagaaattgatcgattttaggttggtaatattgaaaaaataattaaagaaaattgaacttaatgtattattatataccattttataaaatacatggtcgatttatcatttaacaaaatagaaagcctgatcattaacttttacaaaatacaagatcaaaaataatattaggtaagtctacataacaccccctaaaaggatatttcatcaatagactccttatctgttttaatatacaaaagagctttttcgtcatttttttttaccataattgcgtacattatatttatttagatcacttataaattttcataaaattttgaatagtttacaatgccaaaaataatcctaacttacatattttgtaacacaagcgactattttttttatacgcatggtaagtaactgtttaaacctaattttcagtattgtaaattatttataatttcttaaaaatttacaagtaatcccaaatggctacaacgtatgcaaacataaaaaaaataactttttttttttctaaatgataaaataaataaagaatttagatgtctactacaaaatttccaatagtattttttaataaataatttccaataaataaaaattcaagcaagcgttcaatagatagaaagagctagatctcgcggtcacaaaagatgttcttaagaataaacaagatagataattgaccaaactgagacccagtttaccacattatgggttataaagttacaaattctaataatactacaaaataaacaaacaataaagagtattgttattaagcactagtagtgctcagtaccttctataggtagcgtcctataattagttagcgatatttcttaaaaattattctcttaagctatatgagatttaatatttaattatactaatagtaatataatatttaaaaaatatgataaacaccaataatagttttttagaagagtattgctagtggtgcctaacactttctagacatgtcacgttgtgattgactagcgatattaagctatgatattaaattatatgtaacccgatacttaattagatcaatagcaatatta

SEQ ID NO: 306091 - DNA, 1880 bp, Cannabis indica
ctgggagcttgtttcaagccatagattgaattgtttagcttgtatacccagttttcctttcctttctcctcaaatccttgaggttgtgtcatgaaaacttcctcttccaagatgccatttaggaaggcattgttgatgtcgagttgccttatatcccagcctcttgagacaactatggtgagtataattctcactgttgaaggtttaatgactgggctaaaggtttcaccataatctattcctggtctttggtgaaaacctttagcaacaagtcttgctttaagtctctcaacaattccatcaactcttagcttgattctgaaaatccacttgttcccaatcagattttgatcatctgttggaggaacaagcacccaagttctatttttcttcaaagccacaacttcagtgtccatagcattgttccaacctgggtgttgaagagcttcttcaactgtttttgattcagtataggtggctgtagttttagttgagctaaggtagcttttgggtttaaaaattctagctttagctcgagtcatcatctgatgtgtgggctgcaaagctgtggctagagtaggttaaggtgattcaacagttggtttagggatatttgtgtgtgtgtttcagtgactggctcaagttcctgcgcaacagtaaattgatcaaaattgtcaaaacagggaccaaaagtggttttattatcatcatcaggaaggagactttgatctgtatcctcccctgcaggactttagtcagaacttgtattggataaggaagaaggaatattgggagatcttggtgatgcttctgaggttgctacagactgagttgtaacagacctggaaagggatcaatcttgatcatcaaaggtgggaaaatggagtgtggactaagatgagctatggataatgacaggttggggagtttgataattgttaaggaaaccttgcttaaatggaaatttaagttcattaaatactacatccctcgaaatgtaaatgcgacctatgggagtgagacatttatatcccttgtgagaggtgctataaccagtattgacacatttcaatgagtgatgttgaaatttgtgtgtctgatatggccgaatacaagggaagcatgcagtgccaaaagttttgagaaaattgtagtctggtttgtgttggtacaaaagttcatagggagatttattgcccaacataggggtaggtaatctatttattaaatagacagctgtgtggaaggcatctgtccagtattttaatggcatttgagcttgagccagcaatgtgagacccatttcgacaatgtgtctattgcgctcaactcagccattttgatttgaggtatgaggacatgagtgttggaactctatgccttgatcgtgaaccaaggctgtgaagggatggtactcacctccccaatcagttctgagaaatgtaatcttcctatcgaatttgttttcaaccaaacttttaaattgcatgaatgcatctaatggttcagacttgaatttgagagggtacaaccacgtgaatctactaaagtcatctaagaaatgtacataatatctatagttgccattggaagtcactggagcagccccccataggtcagtgtgaattaaatctaagggaaaattagcatgactagtagacagtttatagggaagtgcatgagctttgccatactgacaagcattacagaattgttgcatttcattcttagatttctttacattagcagaatctgttgggttttgtgccctaaataaaacccatttcgatataatcagatttactaattaataaaaatcagaaatcattttttatgttgcatggttcacatgatttatttcatgattataaattttatta

SEQ ID NO: 306092 - DNA, 1428 bp, Cannabis indica
gggcataaacccaacagtcaaccaccgttctgatttcactttcattcatacgactgcagtaaattgcttatttgcttttgttggtagaaaccagaggtgtttgaaaatagctttaagccttgaagcagtcgatatatgctttttaaaagaacagtagtttttgtgtattgcagcataattttccctggcttcaaaatcttgcttttgtagcagcgcgttcatggggtcctgttgaagctttagttggttgtcaattagctcctgtctagccttgatatctgcagcatgtatatatgaaaagtgattcctgttcagctttttaaagataggcttgagagcttttaatttggtcactacttgaaacatttttgtgccatgaattttctgcttccaaacatcagaaaccttcagctgaaaactgggatgagatgaccacatccctaactatttaaagggttttcttccactttccatagcaggatgtatggttacaactgcatgagtgtggttaaaaagcccttcaggtaaaaatattgcttcagcagaaggaaataattcaacccaagcttcattcgccaatactatatcaatcttagagtatattctatcagctgcactttgcttattgcaccaggtaaaaaaactccccgagcatttaatgtcctccagctgacaacttgcaacacaatcactaaatgcagtcgagttaccatgcttaactctgtccccgattcgctcctctttattgagtatgtcattaaagtcaccaagtactatccacagatcaacactaacatgatcttgtaaaccttgccacagttgtttccttccattttcatcattatatccataaacgaaggttgcaaagaactgataattattgtgagtagttgtaacccgagtatgaatgtattgactagagcaactaattatatttacattatattgtatagaattccaagccaaaattattctccctcctttatgccatgctaaatttgtagtaaaacaccatcccgaaaacatgtttaagtataaggcccctaattttgaggccttaactctcgtctcaaggagaccaacaagcccagccttttgactagcaataaattgcttgacttgattcttcttttgctggttcttgattcctcgaacgttctaacagagaatcttatccatttgagagaggaggatctccccctcctcctgtgttcttcacttctgtctcctgtcctgattccacaagcactgtcattgtctcatttgctatagaattcattgctaaagcttgaaatgcattagaggtagatgggcctgttataatcttttttgctttccctttccagcccttcgtgacctgttgaaattctcctggcgctgtcactattttttcatcagtcttcctcttatcattttttaatctaccca

SEQ ID NO: 306093 - DNA, 612 bp, Cannabis indica
aaaatggtatttacccttaataactatataatacttatagccttacataccttaaggtgctttttgtgtatcgtaatttattgcatataatattttacattaagttggaaatcagagtttaatttcaactgttactttaaatagtgtttggtaccacatatgatatcgtatggtttgttttctaaggccttagacaaatctgaagaaataagttacttttaacttatttaattttttttaaaaaaagtacttttgagagtgttttgagtaaaagctaaaaagatgtttttttttaaaggtgtgaatataagcaaaagttacatcaaaatggagggttagcctatttatactatctttttctttctctctcatacaaattgtatgttaatacgtgtaatggaatgagttttgaatttgaagttaacattcaaattattgtttttgattttgaagctaactatattgaaaaatactttgtttagaaatgtgatattttagacaattgaatgggtgcaagcaacgatgttcacttggacagcctagcctagcatttagcttacaaatgagctttttgggctcaaggtcatactcttaagaaaaacccatgttcac

SEQ ID NO: 306094 - DNA, 1853 bp, Cannabis indica
attatcaaattcttctatccttaagaggcttaaaggaatgcttcgtggtcctgctaaagcattggagaccaagatacttttccagggaattagtggaggggatgtacatataatatgaaatgagagcttggtatgtaagagaagtgtttggggaaaagaaaatggaagattctcgaaattgacaagctggccagaaactttctcatattataatataaaagtgtttccttcatgacgttgcaagcttgaatgttagatttgtagaagagaatactatcatccacaaataaaagatgagagagtttgggagtagatctagtgagtttgtaatgaccacatgattaaaatatggattagtagaataataaatataattatatttattttataactaaatacgaataattatattatgggctctaatttcagaaataaatattagatttataattttttaattttgaagattttattaaattctaagtgtattattcttgatatgtgtgcaattgataatttttataatttttgctcggtgacgacggaaaacgcgatggatggtcattagagtcacatgtgatagtttaaaaccttttatttagggggacaatcgtacgttgttattagaatatcaagtttaggctagactatggtgttagacaattttatccctaagtcattttattatttaagcactaaagttaggttaaattggtatttttatcttagtagcaagtggattattccactaatcctacagctagccatttcttggtgagaagataaacttaatgttatctttaatcaccaaaatcaactaagtaaatagaaaaccctagcatgagacaaaaagaaaacttttctagccctttctctctttctttcctacaactgaagcaaactaggggagaatcaaagattttgatcattcaatctcagaggtttagcaggttttagggggaattggaagctagaaaccaaaggtaagctttattactctctttgtttgagttttgaaagttttggttaggtttgatcatgcatatatggaatttagtttttgtctaatctaggccttgttctggtttgatttctgagttatatttaagatgaatttagtttatttgggtgagttttgctggtttgtggagtggttgagcaagttcaagtttaaaaacttggctcaacaatggtgttttgagtttatgtaaaaaattgctactgcttttgcttgaaatctattctaggatggtattacaggtgttctagaaaatttggttgagttttggattgatttgagtgagatttgggatttttagggttttctgcagagaatcgattaacaagttctgtagaacaagttaactagttctccaggcaggaccctaaaaactggtttgccgtttgggaatctggtttaactatttaggcaatttcttgagccttagttttgatatttagggtattggcatgctatttatcgataggaaaacttatagttttgaatttaggtccccaaaaatggttttagcaatttttttacccatttttgtgattgtgacaagggggtccgttcaacttgtgattttccattcaagtcaaccgacacacttaaatttgaaaataaggtaagattagcatagaatatatatatgtatatgtgtatgtgaattatatgcatatttttatgtgattcatataatactaacactagtacggtaatggtactgagtgcattggtacagtatacgatgtttaaagggtacgatctggtgttgccaactctagtacggttaagtacatagtatagggattttatctcctaaataaaacccatttcaatgtaatctgat

SEQ ID NO: 306095 - DNA, 4590 bp, Cannabis indica
agtgtacaaagagccttctgagaagcaaaaggaaaaaatagacaagcgtctttccaagcagacctcaagacccacatcaagtaatacaatttgataaactactgataatattgtcttaattttttgaattcttacactcatttttcttctcgcagatatgactttcttgaagcaggctctagtcttcaaccgtaagccaaaggctagtactgcgactccgtcatctgcgacgccttaaaagaggaaaagtgaagttgcctctggttgacttgtcaaagaagcagcagaaggttgctcaagacaaaggaaagaaggttgtgatcgaccctgctgtcaaggctcacgacttcacgatcttataggaaaagtttgtgagcgatgagtctgtcactagagtcgagggaattcctaccgaggacctcttatcccattcagctgaactttcatcacaattcatgatagttttttttttcgggcttttgttgcgagtttcaaagatcttgatctcctaaagaaatagaatgtagctctttaagagggtctaaaaaaagcaaagttagacccgactgccaaagaccaggaagttgacgatctcggcaagggcaaaggtcaagcagaagagagggccatcaagtctgaagaacaagtcaagactctagatgagcaagccaagaagctagaggaagacaatgctggtcgtacccgtgatcttgaggctgaaaaagagaacgcaaagaaggcttacgaccaggctgtctctaactacatctacaccaccctgactaagctgccagactttaacttcgcacttttaggactagaggtagttgagatggctaatgcttttcgcaccatgttgcctaccgagactcaagggttaggtggaaatcttttccccaatgatgtcgaagatgcgactgctgctaaagtcgcagatggtacaagcaaggttgcagatgatcccaatgcccatatcgcctaatcttttttcctttatcgaactttctttttaagtgatacatgggtactcgtgttttgtacttggtaatattttaagataattgttttgcctttttatgaaaaatgtatcccttcgaggatacaccttttgtttggtaagaccaagtacttttatcatttaatttgatgcgcatatttaattgcaacttaatgcgtcaaaagacttagacttgcataattcatagtcgccttttgcccatgcgattacttttcacaacttggtgtgatgaacatttcgatatttataatcataagacaaaattttagaaaattttctaagtataaacatgtaaaaaaatataaaaaacttcaaaaattgtactttgaaaattgataattcattagataataaatagtacaatatatggttatgaaataaattaactaagtatatatatatgcgggtactattgataatagtactttaaatgttctccattccaagctctatcgaagactgagctgttgagatcagataattagtaagttgcgttgccaattttttcaatgattaggtaaggagcttcccaattgtctccaaatactccatgtgcagaattgcatgtattgggcatgactttttgcaataccagatctcctacttgcagacttctttctttaacctttgagttgaaatagcaaactttgcactgttgatagactttgtttttgatcttggcctgatcgtgcttttcttctagcaaatcgagttgaagcaactagtattttgcattggctttgatgttgaaaatatctcttctcagcgattcagctcctaccacaactggaatcatggcttcgcacccctaaggagtgaaaagggggtttcaccaattgttgagcgaggagttagtttgtatgacaataaacttgcagaagttcttctggccaaacgccttttctctcttcgagcttaccttttatggtatgcttgataattttgttgattgcttctgtctgaccattactttaaggataagcgaccactgaaaaagctttttaaatccttggatcatcgcatagcttttccattttcttactatcgaatcgcttcccgttattagagattagttttcaagaattccaaacctgcaaataattgctcgatagacaaactcgcataactttgcacttcttagtgttgctaaagcttcggtctcatcccacttggtaaaatagtctactgcaactaattcatactttactcatcctcttccttttcgtaacttgccaattaaatttatgccccagactgcaaatggccagagactggtgatagaatttaactggcttgaattctgttaacataggtggcaatctgttagaatttatcacattttcttgcaaaactgattgcatctgcccgaaaggtcggccaataatagcattgttgcataatttttagggccaaggaattaccaccggtatgattaccacaaataccaccatgtatttctcaaagaatgtagtcgcattcgcccccaccgatgcattgaagtagcgatcgactgaaactcctacaatatagcttgtcgtcataaattacatatcgagcagcttaatatcgaaatcttttagcttcaagattatctttagggagttcgccagattttaaataagcaacgattggggtcatccaagtgacctgttcaataacgtcgatctgcatagtttcttcgcgattaataatcggatgagccaacacatcaacgggaattacatcgagtttttgcttctgttgttgaggtcaaacgggccaaagcatttgcatgagaattataagaacgaggtattctactaacaataacttttttgaatttagataacaactcacaagtataagagaggtactttgcgaagcgtcctcccctagccacatattcaccattgacttggcaaaccattatttgggaatcattgaatacttcaaggtacccgactttcatctgaagagcaagctttaaacctacaattagagcttcgtattcagcttcactgttcgaggtaggaaattcaaaccttaaagtagcatgtactttaaacttgttaggacttatcaacatggttccgtcgcctgaacctttactattcgatgccccatcaacatataaagtctatccttctcctgatggcactcgatcttctctgatgatagccacctcgttattttgaaattcaagaatgaaattggccacggcttggcctttgatagccgatcatggtttatatcttatgttaaaattggcttaattcaatcgaccatttgaacagtcatcctgacgcttcaggtttggctaatacttgtcgtaagggatagtttgtcagtacttcaatgttgtttgcttgaaaatatggttgcaactttcaagaagcaaccactactacaaattccagtcgttccatttgtggatagtgagtttcagcatccagtaagcatttacttacatagtacaatgggtgttgtctaccttggtcttcacagattaacaccgagctaatcacatattcggacactactaggtagattgacagtacttcttccaagcatcgacttggatagtatcgagggttgccccaagtacattttcaatgcttgaaaagcgtcttcgcatttatcaatccattgaatctttttgttaccttttagaatttgaaaaaattaattacatttgtcaaaagaatgagatacaaaaggatttagtgtagcgactttacctgttaggctctctttaggtttgatgggagatcccatctccaccagtgcttttattttagctgggtttgcctcgattccccgttggtttaccataaaaccaaggaattttcctgacctgactccaaaaacgcactttaaaggattaagtggcattttgtagtgtcggaggattctaaacatggaatctagatgagttacatggtcctttgcatgttcagattttacgatcatatcgtcaacatacacttccatggtcttccatagtaaatctgaaaacatcatgttaactaatcattggtacgttgccccttcatttattaacccaaaagacattactttataacaatataaatgtcgatcagtaatgaagaaggtatgctcctggtctagctcatacatcaggatttgattatatcccgagtatgcatccataaagctaaggagttcatgatctgcggtggcatcaacaagtttgtcaatgcttggtaaaggaaagttgtctttgggacaagctttatttaaatcagtaaattcgatgcgtgtgcaccatgagccattacgctttggtacaagaataggattagctaaccacctttggtaaaatgactcccttatgaagccacataccaacaaatgatccaccacctctttaagcacttggtacctcgctgggtccattttgtgacactttcgtcgtactcctcgcagttcagagtcaatgttcaactggtgacgcatgacctctggtgatatttcgaccatgtctgaattttttcatgcaaaaatatccagattctatttgagaaaagtgcaagcttttctcgctgctgaaaagttagtttggaaccaatttt

SEQ ID NO: 306096 - DNA, 3516 bp, Cannabis indica
tttagttcaagaaaaataagcttcttacaaaggcctattttttgcttacaactacttggttagttttccaaaagaaaatatcaaagaaacaaatttacaataaggggaaatagctaaagtctaacctttagcattaagaggaattgaaagttcacatgacccaactaggagctgaaccttatccctcaatttattacgatctggttcatacagccagacattcccttcttgtgtaacgagatctttacaagtaaacagattcgagattggaaagcactcgattacaaaaagcacatgaactggatgataccctttggccgatgaagcaagccttgctgcttctagttgcaaatgcaaacgagccacatctctcgaacatttacagatagctcaaaagtcatcaacgagctttcctaaaccttgaaatgtaaaatgattcagataacaatcaacacaagatgaataacagaaaatagaagattttaatattgacaatgggtttaaaccagattcggtccagttgggaagaagaagaagggaaatggtggaagagtaaaattaatctaggaatttaaggttttttttttaatatctgaacccgaaataatatataccggaccgagctgggagtccaataaaagcccgaataattcgggccaaagtcgcctcgtcgggctaggggccgacccggcccacaaaaatggccctaattgccatccctacattcaactataatgttgagcaagatgacgagcatcttcaagaggggcacttatgaccatggctctcagttgatctaaaaccaggaagcatatagaacatagtattttgattctgtatcaatattaatcatatagaaaatgaactaattatcttatcatttagagtgcactgtattcataataaatttagaaagttacgatactaaatatgaaaagtgtattaaatttcataaaaattaaaaaacagtaatgccaccactgtaaaaaataatgaactattgcaaatatttttgttttcattcccgatcagtgttaatcaattagaatatggtattggttgatattaaaaatcaacaaataaacttaaatgtttactacatgtaatatatctttttgataagtgtgcctatatgggtagcagcttgttaaattcttcttgttatttctccacatgcttgcaaacatcaccatatatagatgcagctttagctaatatgtagtcatcaatgtttttggatccatatctacaacaatcatctgacagtttggttcctaattaccataaaataataaagataataaaaataaccacaaaaaatcaaggtacgaatcatattctatgtgactagaaaatgtcactcaatcacagtccatatttaacctgtttcaacatgtttgattcctatggctattaaggattctgctactctaaattcttttcaaaaatcctagaaaaccacaataaaaattagcatggattagaatataatagaaaacaactattgctaatcaagaattttgataatgagaaaaagtggagtaaatttgataaatgtgtgagcttggaatagaagaatgtgtagtaacaattcacacagagtaataccctctatttttaaagctaaattcctatcaaattttccttcaatcacaactttttgaagaaaaataaaacttgaaacactctagagacagtgtgaatgcagcaataaactttggaaagttagttactcaattatctattattttgacgagttccaaaataatttagttgaagtttttttactcaattgttgaactcggagctccttatctagctctcttgtatggattttaaactaagctcgtagatggcacgatatagaattttttgttctaatactttctttactcatacaattttttttcctctctttctcatcttcaattgttagaaaaataaataaacagtcgcagaaatatcttggctatacaaataacttgcactatactacagtcctcatttattgtaaagcaacaacaataaacacatcctcctactatgtagtatacagtctaatataatctaacaaaaaaattatttgaaaagtaaaaggctctcaaatattcttccatgagggagagaaagggtagctcttgctactgctgctactcgataaacggatatgggaaagagctctacactacaagatttatttattgttaataaaacagagaagagagtacaatcaatgaataggtagagaaagaggaagaagatggcttgtcctactgttatttatagttgatacaaaggacacaggccatgagaaagtgggcattgggccatttctcatctgatttatatagataaaaaatgtttttagctacacaagctcttgtttcatctatatatttatatgtataattaactatattgctatttgtgtcattgtataatttaaaacgctttttgtcaaaaaaaaaaagaatatgtaatcatcttctttcaaccaagttttttataatctataaacaatgaaacatattgaaaaaaaaaatagaaattacaacacctagagaatatttcaggaaaattaatgcaaactaatttttcagtaataagttcttccatagcactaagtaaacaatcagcaccatcctttttttcaacctcagatagtttaactatcgttgcaaaactacaacattttaacctttatcgcatactaaaattcctaatttcactaacaatagtatttcaaaatttaggtatcaaattttggctaaatctaaagggttcttattttatgtattaaaaacatgaaaattaaactgtgatagaaacactaaaattacataataataataatacctttatgaaatgagtggatctataaagtttctcaagttgttgatttctctgcattttaatctcatctatcaccatgacatctgatctttcatagccagtcccactaaattgctttatcacagcctaaaacacgaacaatatatttcataatataatataaacataaatcatactacaatacaatataatctacatctttgaacctaatggataaaataaattcactacatattaacattaatatacaaagtagaatttttatatcttacaaactttcttaaataaataaattacaaattataaaaaaaaaaaatcaaagaaaaactaacctaaggaagaagatgagtgccattttcattgctggtatttttgttcgagattgggaacggccagaggaggagcagatggctggggatcggctggaggaggcgctcctgctagtgttctagtgcggctggggacagggacgaacagaagaggataaacggctgacgaatggaggaggaaagatggcggctggggatgtggacgaacggaggaagaagaagaagaggggttggatcaaaagaagaagaggggctgggctgggcttgttcaagtgggtttttgtgtttttgtttaggaataccatttttttttttttttaaatatttacatttt

SEQ ID NO: 306097 - DNA, 1846 bp, Cannabis indica
aaaaagaacaaaaaatttaaaatctttacaattaaatcatgaaaagataagatcccagtttgtggcttgttcaaagcattcgataccattaaagtatttgtttcaatttgggcaatagatacctctaattgaagaagcaaatttagagcatgaaatatatccatctcatacgattctaagctcccaacacttggcttggatagagcagccacaacgtgaccatgagcatctctaacaacaacactgacaccaatgatactcctggaagcatccaaagcagcgttcacattcagtttaaaattacctgaacttggtggcagctacgactataatgcaataggcagctgagttgtggacgaggaagtattaccttgtgttgtaggtgcggctagactgtgtttgagtctgacagatctaaagttttcaagaaaaattacagtaaactcagatagtttgtcatgaataacgttatttctttccgtctaaatacaccacagagtacatataatagtttccatttcaacctttgtgagaagtgtagatagatgaacaagataatctcctttggtcatggaagaagaaagatgccaatcaaagaccaaacctatgcaatgccaaacagaattggcatacttacagcctaacatagcatgtcctattgactcgcaagccgataacaaaccaagcaagcaacatcagttataaccttttctctagcaagatttgtggtcacatgtagagcattgtgaaccacccgccaagcaaagattttgattttttgtggtaagttaagagactagaaataaccccaccatgatcatgatgaaacaaaggtagaggagagatggacatcttcaatcaaataagccaagtggaaacccgatttaacagtgtactgggcagcgttgtgatgatgccaaataaagatattcgagtttaagaaaactcaataatatagtaagaattcttttcacaccaagagagaaaataatattattgcaacaggggtatattctattggcgctcctctgttatcaagtttgctaccacaccattcataggcccaacataagagaaaggaagaaaagaagtgtgacctggatccaaggaatcgaaccacatctaactgatctcctatcacaaattttccaacgtaaactaagttccaacaactcacgacgtcataagatcagaagagtaccctggttatgcttctaggaaagcattgtgcgggtgttattgactctttaacaccttgctgagaagagaatttagattttgcgaaattcgccaagcttgcttcgccaaaaaatcttgattaaagtgaatgaaagagcgaaattccataccacctgaagctttggatttacatagtagattctaattgtgccagtgtatcttcgtgtcattctcagtgtattttttttagttttttttttcactccaacaataaacttatgttaaagtgatagtctctttagagcatctccaatggtagcattatttaaagatgctaaaaatttacacatcattaaaaataaaatattttattttatttctcttccacattatttttggcacttttacttctaaaaatacttcaatgtataacactctctaaaaatattataattatgatcttatacattattatttaatatatatcttaaattttagctacaataactttttagtagggttgagcataaaatccacaaaactaaaaaaatcgttcgacctaccaacactgttggaatcgaaaccgacgaaaacgaaaaaaccattgacagttaaaaccgccattgaacggtcggtttttttttaggtaataaactgaccgaaaaaa

SEQ ID NO: 306098 - DNA, 1348 bp, Cannabis indica
atcagtagggtttagcgttagggtaaagagagaaaaaaaggctctgcttgatcaattatgggaaacctaattgagtttggggatgttataaaataagagccctttaactttagttataaatagaagataagacttttagcgtcgggtataaatagaggtgaatcatttttgttttaaattctaaccgacgctcactacaaaaaatcttacttttagtcactacaaaatttactacaacaaaagagattttttatcctactttgtatacatgaaaaagtaaaaagtgggataaatgggatcatgttaactttaaatcctacttttacatttggaacaagggccttatttggcaaacaaaaaaaaaaaggtgttgtaagggctatttatatgcattttccaaacgctgccttagaatttcatgtgggacttatcccggttgttatgtaaaaactgggataaaatctccactttttatcccaatttttaagtaaaaaccaagataaaaggtcccttatttttttattttttttattgtcttttaatagtacagtttatttgctgggtatttttttttatcaattatatataaaaggtccttttttattacagttttgctggatattttttttttatcaataatgttttttaacttttaagacacatataaaagaaagttttagtttagggttatatcttattctcacagcctctttctcttccaccaacctctttctctctctatccttccctgagcgttaatggagactgagtgttcgacctcccaaggctcgaatgggcttcaatcctcctctcttgtcttcgtgaagcagcccaagccaacaacccttctccacgcgttctttttttcgtgcgacgtgcaacccaacggagttttagatctgagccacgacctctgaaatctagatatttccatcttcttcctttgttttttttggctgaaatgtcgatcttgttcttcgtgtacttctgatctctctactgctctcttttctcaggtggatggaggttcttggtgttttgttaacctcggtgcttctagatttggagctttgtcgttcatgttcgaggaagtatttttggttcgccgttgtttgtggttgtcgagggtgtcattattttgggtttaaaatttggttgcactttgtatattttatcaaaaaattgtaaatttttggactaataataaaattttcattctctgattatattgatatatttttttttattatattatatacatttaatcccgatttttacataaaaatcgggattaaaagttctttttcatcccgattttataagaccttttatcccactggcatatatc

SEQ ID NO: 306099 - DNA, 2448 bp, Cannabis indica
atttggtacatgttaaaattttgagagaaaaacttaattagtctattatctaatattttctctaatagtagttatttttttcattaatcttgaataatgttattataaatagtgtctatttgataggtgtagatgaaaattaattgataatgaatagactattctcttgtatatgacccaacatttttatatttaattaatataaaagtgatatcattcaatacactgttgtaatccaacggttgagatattatatacagaagattattatgaccaggcttaagaggaggagatgaggggtattaaggtcaaatgatcacattagtagtagtgagctcactgagtgaaagagtggactagaacaatgaacacgctaacaaccgttaaggacacgacacgcaacgcgcttgtttgttttaattttaggacacgtggcagcatggattcacatgattggagtaaccgacaaaactcgatcatataataaacaattgactaagttatcacgccgtccatttgtttcggagttctgttaaaaaaaattgccaggtggagtgaaactaaggcgcagttgctgatgttgaactctgctactgccacgtgttgcttttacagattgggattccactcttgagtattctactggctcttctctctctctctttttggccaactgttttgagtacagacctaactaagcaaagggtggatgcttttagctttatttttcttttaataataataataattaaagaaaaatttgtggataataatggtttgattaaatgacttttattattggatgatgatgatgatgatgatgaacatttttaggtgattaaattttttttgttctaagtttcaactctcaccacgtaatgtgttgttccacatatatattgtgcaagtgcacgtaatatatttataaaaatataagaaataaggagagttttgactgtgagccaattgattatagaaaaacgggtaagtagacatttggtatagcaaatcagttaaatttttcggtcattactttacatgataggtttatagggatagtatttcagtggaatacaatcaaatctgttgtgagtaaaaactcacttagccacattatagacggcaaattacaaattctattaatattaatattagtaaaaatacaactaataaatgaataaggttagtttaaggattaataaatataaataaaaaaatattgttattaaacagtggcgtcttattaacgataatttttaaattatataagatttaatatttaatataatagcagtatgatacgaaaaagaatattaagtaccaatattatctattacgaattctctaaataaatagagtggagacgtaagtgaaatggtccaaactttaataaaaagaagtagcgtcaaggtttggtttggcaattggcatagggtgaggaatagtattagttagtacatgttgtaaagggttaatttgctgaagtcatggctcacataattaaccacttcttccgtctcttctttcctatatccaatatatatataaataggtatattacttgtataagtttcttcttttaaatacccaaaatacagattttcccaattttgtgtttacaaaaaaaaataataataataataataataataatacctaagttaaaaaggatcaaaataagtgagttcgaagaaatgagattggcatttttctttttcgagtgtggtcaacaccctttaatattgaatattaattgtatggtcagtttaagtctacggttttaaataattttcattaatgaactaattgggttattaaattaggcacttcgtgttcacatgcccaccagggtttgttttccattatatttattgagtttttagtggatactattgtatagctaaagtaaagataagagtttgtggcttccaaatgattttgggccctaagacagtttttgagattatggcacatataacactttttagtcgataaataccactttctcattgcttgtcccatgcactgtgcaatctcttggttttttcatttattttttatattgggacttgggaaatttgaatttgaaacaatttatttgaactaatattttatcttgagcaaactaagtaatctaattaaatgaggcttaaacattttatttggtaagaagtttgtaatttgtaatacccaaaaagttaataagctctagttagtagttagtttacataaaaaacattataggttgatccaaagctaatctctaacaactcttctcctataaaagaaaattagattgtagaaggtcataaaggtaatcttaataatctgagtttaagatctttgtatgcatcaaaatttagttctatctcgcacaaatagctttttgtcaaaattagattaaataccattttggatcctgtgttttgcaaaagttacagattagac

SEQ ID NO: 306100 - DNA, 639 bp, Cannabis indica
gtaacaccaaatttggtgtgtccttggagatgctcagcattatagtcttcaaagaaacaaaagtacagccagttttcgcactgaggcagtcaacgacgttcatggagttttttttttagagaagttgatatatatatacaattgttttgtttttatagttcttcaggggttatcgtctttttggcaacatttctggtttttatattatatttttttgtgtgtgttctcttagatctgatttgtgttgttgttgttgttgttgtcagattagtttttcttttactttatttcttgtcattatgttatgtttagctctcctgagccgttttctttcactgatctcacttgcaaattgccaaggtttggttgtgtttggagtcaccgaagcagtggctgactgggcgatagtggttttaggtttcttttattaatgctaataaatggatttgaaaatgactgatattttcgaaaaactaaatggattcgaaaaaaaattaagtgcatgtttggcatcataactaaaaaaactgtcttttgttttttaaaaaacagaaaaattgttttttaaaaaataattttggcttgttttggccttgtttttttaaaaaacagttttcaaaaaaacaaagttacaaaaaa

SEQ ID NO: 306101 - DNA, 1493 bp, Cannabis indica
ttctaaaaatggaatttttacttattgttaacctgctattgcatgttaaaaaaaaaaatgtaaccatatggttacaataaaaatgtaaccattgaatagtcacccatataaattaacaaaagtagtagcaacaaattatatctcgaaggtggtgctaaaatctcatctcgaaggccttgcacaacttgatcaaacaattaaataaagtaaaagaagattcgatggcaaatcaaattgatttatcatgattatcatttaacattgtttatatttatgtgattacaaattatgcgcctttcatgggattattagcataccaaaactaaaacatatatacatatattatataattaattaataaatagtttgagcaaaaaccaaagcaaatatacataattaatatattgtttgtgagctcatggaagacgcacaaattgggacataaacataaatcaaaacaaaagtatataatatagcaatatagattatatatatggtattactttataattccactactaaattatgaattataacattaataatgatgttattgttaattattatagagttgagagagacatctcctcatcatgattcgtgatgcatttcatgtagtccttcttttgtttaattattgtcattataatattaaaaatttcaaagccaccgtatcatcatcatcatcttcgtcataatataaaatcattatataaaaacacactataaaatgctatatatatacataatattatcagtcttaatatatataacacaaaacaagagtaaagagaagaaaataaaaaaatggaagtctcaactttgaagccaataatcaaagtagcagcattgtgtggttctcttcgtaaaggctcctataactatggacttattagttctggtaattagctagtactaattaataatttttattttcttctctctattatatattattaatattatgaactaattaataataataaataatataattcattgtaaattttctttttttgtagcgattgaaatgagcaaggagtcaatattcaaagggttattagagatagagtacatagacatctcgcccttgccaatgctcaatactgatctcgaggtcaatgggacttttccgcccgccgtccaagctttccgccggaaaattcttgaagctgatagttacatctttgcctcgccggagtacaacttctccgtcaccggtgtgtatactccatctcttaattaactttgttttattattaaaagaaagtatgaaaattatgtttttcttttgaacaatattgctataggcaacaatgtgtcttataattggttatatgatctttaaataaaatatatgatacttaatattgaattattaacaatattatatatgataaggatattaagcactatcagagaacagggttctttttgtcgttttcaaaaattatgatttttttttattattattttgtatataatgttatatt

SEQ ID NO: 306102 - DNA, 2014 bp, Cannabis indica
tgcacagtatgtttaaaaatcatgtaatacgcctatactagttagggtgttacaggccattaattgctttccacgaaataaatttgtgttttggaacagacaacctatgccaaacaatcttatgatagctcacttcttctttgttaaggagcgaaagatataaatatattaccttgtagtttccattttagtcagcctccatcaaagctttttttgtctatgcaatttcaaagtttaattagttttttaaagtaccaactagcatcaagactcgaagagaattgctagaatctaaatttttcaaatacatcacattgatccgacacacctacaaacaatcttgcttagaaaagatgacccaaatatatttaaacatcaacgttatgtttcacttcttcctttcatgaatgccaaggctaccaaaattcttaagcaagcaaattcgcttcaaagaacaaagatgtattttactacacgtgctattaccactccagaggtaaccacaacataatttatcaatggctgtagttactttttgaggcaagatgaatatactcatccagtagttatgaatacccagcaggactaaatgaatcaactgagctcgaaagttaaatgccaactagcccaaccatgaagtttctttctaatcttctctaagataccttcgcaatttatgactttccatttagtaggctgcaagagtgcttattttgatattttacgttattaaaattaaaattaactaactccaagcgtgctcatttgatatctatacgttatccctatcttacattattttaaatttcttgaaaatctgtcagaagtctcatgcaacttattcatgtaccaaaaatataaaaaatacctcagatagggattgaaaatagccactactatacatacagaaaagacttgacagtacagattttgaagtatacattagctatgaagcagtttttgacattgacataggtctgttgaataatctacacacagtaaactctaattcctcgtggtcctcttccggccacgaggcctgctagtctgagcatcctttgaagtccctgtgatgttctttgaagactcttcctcacttatatcatcgaaactttcagttttgtctgtggattcatcttcctcttcttgcggcaatttccccacagcagcaccctgttctgtaagttgatctcgcagatctctgagttttgctttcttcgaattcaagactttgagaaactgatagcaagaaaagcgaagatttaaatgaaaaggaccattctctgtctcttgtgaacagaagtaatcattaagttaataattaacaaaaattaaatccaacgctattattttgagagaactatatgtagtaaagtatcaaatctcctttttcaactcctaacaatttagcaaagaaacatttcagtatcaaaagtgcacacctttgcatataatgcagattcaaactccactttctccttgctaatcttctcactctgtgccaaagacttctcagcttcaactttcaacctctcaaaagattgagtttttatgacaacttcttcctatatgaagattggtgcttccgttagtaattcatgataatgcctagtcagttaccaaatgatcaaagtccatggctttctgtcatcccacaaacttagaaacctagacaatgtcagcatgttgattatatggggaaacatcataacaggacatagtaatttggtaacagaagtgtagaaaatagtgattcgaattgtatgtatatttcatagaatagtacatatttatatacaaagctaggagactaggaaataggaaactaccaacaaaataggaaactactaaatacaagttaccctaattcttttacacctaatatacagctaattctctaacactccccctcaagctggagcatagatgttaatcatgcccagcttgttacaaagatagtcaatccgcaccccattcaaagcttttgtaaaaatatctcctagttgttctccgg

SEQ ID NO: 306103 - DNA, 3437 bp, Cannabis indica
taaatttccaatttgtagaaaaaaaaatataaagtttattattctgaagcttaaacaaccctacaatgcaattgtatgatgtttgagagtcagggaatctcgtgtagatacatatgtgcaactctgaaaatactaaacattagaaggatcccaaatacactactcaagaagagaaagagcaagcttgccaaggtaggtgtacacctacaacttatccaatcagaaacacaacaagaaagcctttatgagctagcaaggtccgagtctctaaacttacaaatgggcactatgaatttctatgcagcaaaacattaaagctcatattaccaagccagtgaagacattgcaagactaacaacatattttacacatttcaaagaggacttggagtttacctccaacctaaaaggaaacacccgacaacctggcaggtatcgtgagaaccctaacattttaagacaccctgaacttgtcagaacaaaaggcacgagaaatgctaaagaatgattgaatggagaacatgtcctaagaaactattgtcgcatgtgtcgctcctcaacccatgactatcgtagtaggtgcccgaaccgcaataattagaacactggttctcaaggtggagaaacaagcaacaatcagcctaggatggagacacatgatgagttcggagatgcgtacgtaccagatcctcaatcgacataggaatcgtaccaaaatgattacttccactaatagatcattattctctttccaactgaattttcaagttaagtcgaaagctataaacattatttaattttatttcctacaatataatcttatgttatactgtaattctatgtttttaataaaaaaaaatcctatgactaattaagtgagaaaataattaataaacggattttttataaaaaaaaatacaagtaagaacagtcatgcatttcagttagagaaagaaaaaatttgaacgtactaagcgattaacataattttttgcaatacgctaaaaatgttatttgtacaacaatcggcctaaaattcactggcaaagttggcaaaaactgtgtaagtccaaaaaggatggcagattgggtttccactgtctggttcacttcaatcaggctctccttgctaagcaagcttggcgcatcttcaaacaaccaaactcattagtctctaaaattctggcggccagatattacccaaactcctctttccttaatagtgcgttaggacactcgccttcttttgtgttgcgtagtatttgttggggaaaagagttgctgcagaaaggacttatttctaagatcggaaacgggcagagtacttccattacaggaactcactggattccaggattcagacagtttaccccttttgatacagctcctcctacggttgccgcttttattaccccaaccatgacctggaacattaccctgttagagagatattacccttcccatgtcattgatgcgatcctctctatccctcttccgctccagccatcgaatgatgagttgatttgggaattaacaaagtctggcatctactcagtcaaaactggttaccacctcagtttctcctcttttacgcctcctgacattccctcatcctcctccccttcgccttggtggaaaaacttatggcacctaaaaatcccccccaaggtaaaacactttgcctttcgagccaccaactcaaccctccctaccctcaaaagcctagcatctaggaaaattatcccatcctcggtttgtgaacggtgtggaaacatggaggaatcggtgtctcatgccctgttctactgcaatagtgttcgaagagtctggaaaggtacgcttttctatccctacattttttcataccctcatgagattgattttcacgatattgctcatatggtttttgtttctttacccaaagaagaagtagaactctttctctacactgcttggtttatttggtttaacaggaatagagcacgtaaagaacaggtacaagacaaagcccatgccattctgactctggcgtgaaatttcctggacgactacaatctcccatcatcagggcaatctcccagagccacacacagcagactctcatctcctacttcgtggacacctccagtgcaaggatgtctcaaactcaatgtggatgcatcaatagataaggaacgctctaaagcaggtttcgacggtgtgatcagaaatagtgaaggccttgttgtagctgctttggcctctccttatttaggcggcgggactgtggcttcgcttgaagcaaaatcccttcttcggatgttacagtggtgcatcgaggagcatttccatgtgcatgagatcgagacggactgcaaggcaattacagatgcgctaagctcttcccgtgaaaacatctccgcttttggagacattctgaagcaaattaaggatgctttatctcttctccctgctgcccaagtttctcatgtactcggtctgcaaatacttttgctgacaaacttgctcattgggcttccgggttagatgatgctgcaatttggattggcgatgacccttgtaatcttcaagtctttctttctctcttgggctccctttccctcaaaaaaaaaaaaaaatgtaatctaattttattacagaacacccgccaaaagcaatgtgtgacaatacacttctactctcttaaaatacgaactgggaccacaacctattgtacgtctgtcagagtacatatcaacttttaagcgatttgtacttgatattattatgttagcattatcagaattgaataaaataaaatataaaaaattattaaataaccagttacaattacctctactaactggtttcacacatattaaaatattgataatattcactaaagtatgtggggcccactgctacaatattacaaaaccattccgtgttctacaaaacacgacacaaaatcgaccgtcacattttattttttgtttcgcaaataagttagcaattacataaaaaaaaataacatcaataatctaaaaatagtaatattttaaaattacatttaattatcgtggtgtaccatgaaaaagaattaaaaagtataaatgagatcatttaattatttttattatatgattatttattaattatctgatttaataaacacatgaattttcataagtactttaaattgcacacaattataattgtacagtgatttcataagtatcatttaaaagaactttaatttttagaagatatttttttatttgatcattacatatttttacattgctcttgctcatatatatatactagtaaaaagttacatgcgaagcacgtatactaaattttatactagtttttttgtatgttatttgacagtgatacaattaaaaattaaagaaaaaaatattattagttaataggtgagattattattatgtgtat

SEQ ID NO: 306104 - DNA, 2930 bp, Cannabis indica
actttttaaaaaaaaaaatatttatatcaaagtccagttatttctaattaacgtaagcaatttacaattattattattataattattattattttacatatttacgaatctaatcacaatattttattatggcccccataactgataattgttcaatattttaatataatttttgaaaaatagttttgacaaatttgatttttggcccaattcttatcctatcttattccatttccctatgaccgatgctaggctatgtccaacaaaataatgacattttgtaatattttaattgcttgagactcatgcatgtgaagtaggactataataatctcaaatgaatacaaaaataataataaaaaaaagtaagtattatttttatgttggggtaatataatttttgctttaaagattcaatatactaaattatgccctttaaaattttcaggttattaaaaaatattttcgaacaattaaaattattagatttaatgacttctatatatatatatatatatatcttattttactaatgaaaggtactgacgtagatgaaagctcaggggacacgatttggtacatgtcaaattcgagggaataatttagtacatgtcaaagtttagaggatacgatttagtacaaggataattgtcacgttagtaaaattaaataaaattagacaaaaaccctttcaataattcaagaagaatttttaacagtctaaaaaaattcagaaaatatgatttggtacgtatcaaaatttgaaaggacaaaatcataattagtctattatttttttatcttgattatttggatgtcaaagagatcaatcaggcttcaaaaaaaaaacataaaatatgtcacatataaaaattaaaatgaaagagtgttcccaaataaaatatttgaatattgaatacttgacaaaatttgagtcaacatctccaatatataattcatgaattcatacaaattattataatttacttatttgtaagagtcaagaaaaattataataattttgtacatatagacttgctgaaattaagcattaaaggggtccatagagaaaacctttatgttaaagtgatgtatgcaaatagtataaagtcttggacttattggaaatgtatatttactttaattaataaaaaaaataataaaaaaaaaaagctaagtcaaatttatgactacaagaagaaaaggacccctaactccaaagtctaatttgttaaaataaaaaagtagtacaacaacatatactctttgagctttatgagtaaacatatgaatgaataatgaaatagttaattttacctctaaaaaatatacatgctttaagctctaattataaccatcaaaataataagagaggtgaggccctttcaaaataattaataataataataataataataagttaataacaaagaggtgaaggtggccaaaaaaaaaaaaatacattggtacttaaaaagggcattatagtcaattagcacccaagaaaaatgaaataagcttttccttttgtattgtttgcaagggaaaatgaaatatagtttgagaagctctaactatataatcacgttataccacagccaaaagaaaatgaccaaaaggtcattagattggttacgtacaaaaataaaagcttgtagagatgaagggcattatggtcaatttacatccatgaaaatgaaaaaacatggtgtagaaattaattaattaccaactatatggaccgagatgatgaagactgaagaagaatatactagagagagcacaagaaaacaatctatacgtacttatcaaacatagggatgagggtgagcaggggtattttggtaattaagcaagtatatacatatatataaagatatataattgtatgtataattaacgaatatgattaacatcataataatattttatacctgcaaaacggtctctctgtccactgacttaaaatcatctctaatgtagagaagagctcctgatatcactcctgctcattccaaaataattcattatacatatatagagagagtgtatacatataatatatgtatatatatatatatgttataattacctgtgtcatagccaaaaagaagaccaccaattccagcggagaaagcaaggcgaagaacataagggttcttccaagccaaagagaaacaatctctgaaagcagatgtgtctgttggatgaataactccttccatattataattttctcaccatccaaacacactatttttactataatattatttatataagagagtagaagagaagagaggagagtgatgatgagaagaaaaataatgagagagatataatatatatatgtgtagttggatataaggactaaagaggtgtgtgtgtgtggggagtgtttgcgtgttttaatttaattttatttttatttgtgtgatgagattgaaatgttttaaatgagtttttctttatttatttttttataaaaatataaataaaaggggtctctggtctaccacacaattttgtcgtctatccttattatgattaagtactagtacatcacaatgaatcaaatcttgatctcccccactcttgttattgtgggcaattgtcaggtgagaattgttatttcacaattttaagtgtgttcaaacacttgggagacatttgatattaaattgtactaatattgttactataaagttatgagattatttcacaaaaacataaaaataacaaaaaaaaattataaaaatacagtttcacagaattttaaatatttttacgattttttggattttatttacagaaatacggtttttttatgttgtaatcttgttaattttgttgttgattttttcttgtctgtatgttattttttattgttattttcatgttacttttatgtagttttcttgttgatttta

SEQ ID NO: 306105 - DNA, 2695 bp, Cannabis indica
ccttacggaccacaagccgaagaaagtcttcaactgtgagtattcctgctttagtaagcctcttcgtggaactgacccatctttgccaatcttctccaatctccacacctcatcacccaatgctggtgggtaatgtttcttgtatactgttacaagggataatacaaagtaaaaaaaccgaataaaacataaaatggtagactaaaaaaaaggaacaaaagataggacacaggatgacaaaaacatacattcccctctgtggtctttaacagtaaaagcttcagtctttgcttcacgtatgcgtataccctcacaaaaacccgagacaacctttaatccaagtctgaatttcctgcttcttatccaacttgagttatctgtaaatataaagtcacctaatgttcctaccccatccttaagggtcagctgaagctctccgtgcagcaaaggtcttttcccttcacgttctttcactacgtgactttcaaattcttcttggctccaaccttcttcatcttcattgttaaagtcaccttcaagcacaacaacctcaagtttcacagaggcttcaggtccagttgttacaagttgaccagtgctgccatcaatcaaaacaacatgaattgcagcaccctgctctccttcaacttttccacccgtgaagagaggaagagacaacctagacctgaaatgcagctgcaagtttcgaccatctggaccttcaattcgttttggggaagacctgaaaactcccatgttagaatttagaaacagattatacattttcagaaagttaaaccggctacacaacagacaacaatttctcacaccttccattaagcattgcaggccctatcttcgccaaagcacgttcaacttcctcactaacctattaaacatcataagaaaaagaaagtgtaagacaaaggtgctgaaccaagacagaaaataaaaaacaatagccagtatattcataaaaatatatatatatatatatctttgtcctgtttcatatgggaatataggttgattaagcaaaattatcagaaaagttcagccacagaaaataaaaaactgggtattaatcacttgcgtgcaaaagtaccgcatacaatcattggtaaacgagattagatatatctttcattatattacaacagatattacataaattactagaatctcaatagccaaatagaacaatgataacaataattacaactttattaaagcaattcaagcacacggtggggaacaggtagcagccactcctaaggtaaaaactagaccacatagatagggaaatcataaaggcataagtcttacaactctccgaagaataggttccaaagatgagcagagcttctgcagactgtccactttaagagcctcgacaataacactgcaagccatatgtttcagtcaaattaaatgaatctatattaccaagaaaaaagaaaaaagtatatatagccaagggaaccaaacaagcgcatatttaagctgatcaaactttgaactatattaagcaacaaaatatcttaaattaatcagacccaagaaagataacaaaaagtgagaacaacaacaaatagaaaacatcatatattgcttgaaaacaataactataacccacgtgaccacgtttatcacataatctagcttacaaaacatcacatgaatcttggtaatgaaaagaaaattcagcactttcattcattcagttcaccttttctcaaattcattatgaacattgaaacgtttcaaaaggaagtttctaccaacttctatcatctataactcttaaaccacaaaaaatcaattgacatataacataaatgactacaggtctttgtccataaataatttcatgtttggaatggtacttcagttacatactgcaatagtatacttgttcatggaaaagagatcatcattcacttcatgtctcctatttcaattacatattatgacattgataaaaggttcaagtgaaaaggatcaaaattcacttcatgtctcctctacatgtgtaagacactagtgacatggataaatttctaatggaagctcattgttgcaacctaaagttctattcaaaatcaacgaaaaagaaaatgttggatcctaaaccagatatataattgagttatctgcagattattttagtctccaccaactgagaaatgtgagcaatgttgaaaatcaatagtgatacctgattaatccataaaaggctcatattgttaagagtaaatttggaattacaaagccgcaaacttttagtttcatattgtgctccatagccatacaaaactgctttacatatcttgctaacacattagctatgccaccaaattagacaagcaaagagaatgaacaaactgatgacagctacaagactatccaaacattaaacaactaccataactaacaaaactaagcttggcagatatgtatttgaatccaactaaagtcccaaaagaggacaatcaaacaaaactacatttaatatagcccacagttagctcatgaagttcattaatgctatagcaaccttggcagatgctgcaacaaattgacccaactaacaatccaacaacctcaatcaaacaaaacaagtcacacccaattaaagaacaattatcttaatttcaaaaaatagaataaaaaagtaaaaaagacacgagaaaaa

SEQ ID NO: 306106 - DNA, 1860 bp, Cannabis indica
ttttagttttttaatttaatttaatttatttaaattatatatttactaatttatatattattttatataatttaaatttaaatgagatatttatttttttaaaaggtaaataaaatattatttaaattaattttaggattggccaaaatatctaatttcatttcatagatgtaattaaatattacacaaatattgtaaaattagtcaaagtattaacaagttaataaatctcactacaagttaacctaaaaaaaaaataacctagggaagaaaaatgcttgggcctttcagcatcaattgttaaagccatcatgaatcactgccatcaacatttttattcactgtcgctgtattggtaacaattcagttttttgattgtattgacgcttatctccaaactgttaaaaaaagtaaaaatttatattagtttgtatatatattatttgttattataataaatactatagtcaataattaaaacttactgctctttgatcttgtacgtaacagttggggtttgcatgacgatgttagtcatgtattacaaaacataaaaactacatttttggttttcaggttcactactacaaaaagggtttttcccgacagttttaaacagtcgggtaaagtattcccgtcgatttctataatcgttgcctattcgaccgtcgtaaaatgggaaaaattggcgacagtttgaaaccgtcgctattttgtcattcgtgacggtttaaaccggtcttataaccttgtataggcgacgattttaaaccgtcacctataatgtaataacctatttttttattattttaaaattttgataatcctaaatttttattatatattcgtttatatcataatcataatcattaatcacatcaatcatgaataaataaaaattattaataaaacaaatataattattaataaataaataaaaatttgtaatatatagtgtacttatacttaacttattatcaaaaatataacaataaataatataaacaatttttttattacatacaacaaataatctaagaatctctttaattatagctagctagacaccaaaacaataagaaatacccaaactaaaagtaatgagtaaaatgacatctcgacaaattcttccttcggtaataagttctttggagtattaacttatttcttcaaacttattaagttttcctacaaacaaaaaatcaaacccaaattatcaataataagacatacctatataattataaaagataaagtttgagccaatcataaagaatataatattgtgccactatcattcaaattccaataacaaaaaacagaatcactcactacaaattgatgtatacatatatatagggataaatattaattaaatctcacaaatttttttaacaaaacatttagaatggtaaaaaaaattaaagagatctataatttggtaatacaagcttagtgtttatattttgagtgtatttttcctaagaaagtaaatatgcttaaataatatattgagaacttaaataactatctcaaaataaagaaaatttcaatctttctatctaagacaatatgtatataccattgtacaatatattgtatcttatcgacaacttatactaaccaaaagaacattttgaatatcaacatatatattatttttcttaaaatttgtataattagttaaaaaactttggccaagatgttagaatctaaaatttcttaaaattcacactttatggcacttaactcaacatgttagaatctaaaaatgtgatcatacagttgcatacaattaagaagttctcacaagtcacgtgggaactgttgggattttatgccctaaataaaacccattac

SEQ ID NO: 306107 - DNA, 2144 bp, Cannabis indica
atgacctaacatatatataagtgcctttctttaggtaaaaaaaaaaaggcaatatcaacccaataacataaattcactctattggcaattttttatatctgtaaagtagaaacaagaataacccaattgtcaactagattatcgatcaatttcattaattaattataataatctatactaaaggacaatttgttatgttggtaggtgaaacttattttgtcgatcatatatatatgatttttctttttaaaaaaaaaaataaaaaaaaaataaaaaattgttgggtcaaaacaatatatgggtacagttcattataccaaatacctaacttatgaggatgaaatgcaatggctcgtattctgtcaatgcactgacttatcaatacagtaataattaactttaataaaccctagctaaatttttatttttaatttttttttattatattggtttcttacgtatgcattttccacaaatttatgtttgcattttttatggctaaaatgtcaccttcatgattttgttttatttaaaattgagagaactactcacaatatataaataataatttgaattaattacaagagtagtcgacacaaaaaagaagacttcaacttatcatcttaggccatatacgtcttactcaatgctacattattattattattattatttaaattttattatatttttgggtaaacctaaaaaagtctgcttctacatgagtgtcagatcccacttacctaattattcaaaattttgtagtatgaatttatgaaacatttatttatttatattatagtaaaataatatatttgatttgatttgagagaataactatagagagatgatgaaaccctacatgcatatatatatatttatcatgtaaatttaaccttattatgtgtcctatatatatagctatagttacatcatcatcatgatcagtgttccatcaactggcatatatatatagcatatacatatatatattgaggcagacaatgacctgtttttagtcctctcctttagacaccacttttctagaaacttattggttatgttattctatgtggtgccccatttaaggggagcaattttttcctcaatttttatttatttatgtacatataaaatattctatagctactgttcttttggaagtatatatatatagatatgattttgtcttgttattgtactttcacggattgtaattcgtaatgtacggtagccgtcagataagggagttatttaatctgacggctgagattgatctaggggtaattagggttaaaaagcagaaacgtaccctgagacactcatttaatgtatcctgagacccatctaatataccacggaatacatttcgcgaaagtacatcacggtacaaaatcatatccctacatatatatagtaaaatttcgttacaatataaatgttgggaaattttatggtgcactctcaatagggtattgtttttgataattagataattttaatcttaaattttttatatctattacacatcttgattatttaagatactttataaatttttcaaaaatttaaaataatttaatgtattaaaataaaattcaaacagtcgtgtttattttattttatacgtgtttgaattttactttttatgttttgtaaattattttaaatttattaaaaatttacaaaatatcttaaataactatccatggcctaattatatagtcatgagtatattgatttagatttttattgatgggagcttaaagtaaaaattatatgtactaagtacatgggtcaaggcctgccctaagctaaggtaagaggacttacctatcttagaagcctaaataaaaatagaaaaaaaaattaaaaatattatttatttatataataaaaatagatcttttttttcttaactacccattttaattaggatcggccttgattaagtagtattaattaataaatataaaaattataattaccatttctcaacaaaatctatgtgcacttaatagttgtaaaagtatatatatttttatgggagcttctaattaatatttggtgaataattaataaattaaatcaatatgatacatattttttttttaatattttttaaatttaaattaatataatat

SEQ ID NO: 306108 - DNA, 1223 bp, Cannabis indica
gtaaaataattccaacacatattgaccatttcctcaatctatgtcacttttttagcctaatagtggaggttttagaagggtgtcttcttagtctatgagtccaatgtacagtggtcctagctttgcactactaggtttctcacatgccactaatagagagtattttagttctggtaaaggttttgctagaatttatatgactcaaagttaacaacaatcccagttatgtcttaaggttggtcatactgctttgataatttctatcgatttgacaaaagcttcatagcttctcaactcaattagctagcagttcaactacttagaacactaggtctcaagctaatgttgttaccaactcagatggctatgatttaatttggtatctagattttggtgccaccaatcactgcaattagatcctaacaatattgccattggtttagactacgatggcttgagaaaagagttgctagtaatggcacaagtttgtctattcaatgtataggtcaatcttaatttatctcaaattcttcttgcactcgtccttttctcctcttaatctcttgtatgttcctaaagttactataaacttgctcaatctatctaaaatttgttagagaaaatcatgtttactttgaatttcatgctaacttttattgtgttagggactatggtagttagaatattctaataaagggaaagcatcacaatgacctatatatttttttatccttcctagctctgaaccttatcatcaacacagcatgcttcctcactagcttctagtgtccaacgacatatctcaacttccaactcgattttgtctactcatacctcatgtgtttccaatatttttactaataatgcctcacataaagaagcatatgcttctagttttggttgtaactctaccatgtttgatttccaactttgtcatagtagataaggacacctttctcagagggttgttaaaattttccttaatcattgaaatctttcacttagcagcaaaaatgatacttcagtttgtgtgacatgttgcttaggtcaaatccataaattccaaagtttttagctgttaacgcagattttcgttaacgataatgagcctattttagcaataggtttagcacagaaatcatagaaattcaagaaagaataataaaagcaaaaataacaccaggttttttacgtggttttgcagttaactctgcatagtccac

SEQ ID NO: 306109 - DNA, 1204 bp, Cannabis indica
aaaataccgactggcatttttgtaaaaaaataataaaagttaatataccatataaatttcccaaactatttgttcattgctgatgacctattaatattaagcattgttaccaaatagattttcatgtaattaattatgagttaatgcaaccattaactgagtttatgtttaaataaaaatgagattcttcatctagtttactctttttagtatatttaaccgtcttatttgtttttcaaaagaaaaacaaataacatcttatttgtgaattgtgatagcgatgggacattgtcaatgtcaatgaggtgtctcatatgtttttgaatgcaataaaattaacaaaattttttctttttaatataaaaatgtctattatataaattttaaagaggattggatttgatttcatagtgttggaaagttcactttcatggtaaccctaatggggtataacttggtgataaccaagggaaagacattgtcttctttttctgggcattattctgccattacaattgactatttctagataagaattatttttatttgattttagttcttataagtacccatcaaatctatcatcacgtaatattcaagaaaaaaaaacagaggaatctctctttaacaaagacgcatgcatcaatggaggtatggtcagtgggcttgatttataaatgtcatttcataatattttgtcaatcatccatttttggaatttttatctttattttctcatctcttttttggcgccaatttatgatctctaggtcaccaaatatttttttttgtaagaaaaaatattttacaaatataaaaaattataaaattataattgtatggttgttattatttttataattttattttttattgtactcttatttatttataatgaaaataatctttattagatagagacatccgctaacacaatggactgatgaagagcaatgggaacatcaccctcagtaaaacgacgacctaaccaataacaagcaccacgtgccatacagtgcgcggcttgttagcagacagtttaacatgactaatagaaatattacttaaagaagatagaataaattgacaatcataaacaaatagaccaaaaatagaaggcatagataccgaactaagaatagattgaacaactaaaaggcaatccgtctctaaaatgacatttgacttgttattcttctttatc

SEQ ID NO: 306110 - DNA, 919 bp, Cannabis indica
aaaaatataaaaaaaaaacattctttgaacgtaaaattgtaattatttttgatcattttcaaatttacttgtctatcccgtttaataaatagattatattttggttgatacgactaatataaaacttgttaatgaattgtttaattaatttaagattttaacaagtcataaaaaagatcataaagatgttaaataagttgttaataggttaaggggtcgatgtgtttgatccaattatagaaaaaatccatttatgaaaggtttacataaattgtatcttatcgtgtcaattcgtttataaattagtcatgttggttatcattttttgatacaattattatataataagtcgtgttaatttgtgttgagcatatatctatattaatatatatggatctcgacataacatcaatataaacacaaatggccaccctctacacaaggccactaggtcaccatctcgccaggctgcaagatcaccatctcacgagactttatttaggcttggaaggtccaaaatgttaagtttcccaataattagcaataaaataataaataacttaaaatccgagatgtattgagaaagtaaaacgccagaggtacaccaacattaaaggacatgaacgaacaagacaaatcaaatctacgaccacaccacataacaaggcttcaaatgaggagtgacatcagtgcaagaaggtatacgaaagttgtagcatctcgacgcttctaatagcatgcatgcttgaaacccgactaccactacctttttcgctctattagtatctccagcaaagcctcggatctaatagagcttacttataaataaaatgtcaccctctttgtaaagtagttggaaaattattgtatcaattaccaataatccaagagaaaaatacattttttattattactctga

SEQ ID NO: 306111 - DNA, 2695 bp, Cannabis indica
ttgaagtgtaaaaataaaaaactaaatataatgatgattcgaaataactaattttgtcaatgagtaagtcatactatttattaaaatttggtataaagtgaatagagttttatctcaaaatcaattgacaatatggtaatttatttcaacacgttagcaatgagggactaactcagggccaaacgtgatatttgaaagaatttgtttcgaaaacccccaacactaaaaactggcagacattggccgaaaagtcccaaagtttttaagctaagctcgtctttttggattgccagtattttggactcacaacggctcacaaacgactctgataccatgttagaatttggaataacgtgaatgaggttccatctcaaaatcaattggcaatgggaggagtagctcattcattttatgtatggtaatttatttttacacattagcaatgtgggcctagctctaatactattagcaattctagaaggctaatttggatgtttacctcctgaactttgacatacaccaaatcatgcccctcaacttttatggtcgttaaaaattcatctcaaactattgagattgttagatttaaagacttttaaagaaagtctgacatggatgaaaattcaggggtcaattcggtacatattaaagtctagggggacaagattttgtaaatttcaaagttcggagggtatgatttagtatatggacaatcgccatattagaaaaattgaatgaaattagacttaagtccttaaatttaacaatctcaataattcagagagaatttgtaatgtcttgaaaaagttcaaagagtatgttttggtacatgttaaagttcaggggacaaaaatcctaattaactattctagaacaattaagagaaaaaaattattaaaatggttataataaaccaaagtatctctaaaagtacaaatataattgtaatttgttttaaggtacaaccatatatatacatacaactatcactaactataggtattaattattttatttaatatttttggctgaaaaaaatcaagtggtgcacattgtagagaaaagaaggagggagaagaaaacacacgaaaaaggaattggaaaaacctcactcattaccattaatgatcattgtatacaacaagaaaacagagcattaagctcataacagaaagtttaactaccttaactaactaaacatatttaactaacctaagctagcagcaaactaattaagattagttaatagtgttaatattccccctcaaacgaaaaatggttgaagccattttcagtttggacttaaggtagatgaatcgattcttagacaatggtttggtgagcatgttagccacttgatcacgcttggaacataactaactgagagcttcttttccagaatttgaacccttacaaaatacaagtctatctcgatgtgtttggatcgagcatgaaaaattagattagcagctaaggcagatgcactcttattgtcaacccaaataacagggcaatgagacaaggtaacctgtaacttagtgagtaaagatacaatccattttagttctacaacagtgtttgctaaggcataaaactcacttttagtgcttgagcgagcaataacattttatttcttagcagaccaagatattaggttgtcacctagataaaccacatatctaccatttgaccttcgatcatcaacacaactagcccagtcagcatttgagtagctttcaagagtcatgacagctttgagaaattggcttagtttgttgatcacaaaagccacatcaggcctagttaaggtgaggtactaaagagcacctacgattctcctatatagagtaggatcttcaaatagttctccatcattcaatgacattttagtggtgttgcttataggatttaaacaaatcttagcaccttccatatgtaactttaccaataggtctgttatatatttggtttgagacaagaacattcctatagaatctctgaaaatttccaccccaagaaagtagtgaacatcaccaagatctttgagagagaacttattgtcatgatcggtaattagtttggagactagatgctggtttggactcattattagaatatcatcaacatatacaagtaagatgataagatagttaccatggccatgaacaaaaagtgatgtgtcagatttggaagcagtgaaaccccattgaattggacaggttctgagtttgttattccaagctcgaggagcttgtttgaggctataaagagccttgtgtagaaggcatacatgatcaggtttggattgatctatgaagcctcgtggttgttcatgaacatagtttcagctcgcaaaccattgagaaaagcattgccaacgtctgactgagttactttccaatttgaagtgacagccagttcgaactgtgataggcttaacaactagagaaaaagtctcctcatagtcaatttttttggattatattttactaggatctagattatatgaatttctaaaacaatagaatttaaacacatataaagtttgagtaactttacattgattgcagtggaatataatgacttctcccactcagatctctaacccttgttcctttctgtcgcaaagtattatcaagatctgagcccaattctccttcaggtgtttagattcttcacagtcttacacactatg

SEQ ID NO: 306112 - DNA, 1535 bp, Cannabis indica
tgcaaatacgaaattgtaacctataccccattaataaaatatataatttaacatgctcaataattaacactaaaatctaacaataatatattataatctatgtatgtatgtatatagatcttacttgcaatattggggccaataagctagagcatcctcatcattggtataaaccatactaacataatctttccactccaaagcaacttctttctccggcacaaagcttgtcccatacttaacatgtggacttggactaaccccttttaaaaacacagccttcttctcagcctcttgttcaaaaaaccgaaacgcggcctttttaagcgattcgagaagctccaacgacactccatgattcaccacttgaaaaaatcccacactctccgccgccctaaagatctcctcggccgcttcctcgcgatcaggaccgtccaatttcgacaggtctatcgggggcggcaatgtgggattatcattgttattattggtcttctctatgcgctccttgggtggttgcacgtaccgttttggtacttttgtcacacctaaatcgactaggcctttcacaccatttccatctctaacaacaaaattgaatagagatttttcatcgttgaaagttggttccatttttttggcttgattttgtaagaaagatttaataatttattagaaactgtttgatatgatatatgaaatgtactgaatttgtataagtatttatatagtagagcaagtgtgaatgtgtgattattaagcgtgtaatatcatgcacattattttgcttcataagcggcggtgtttgggagttaccaccaaccgcaacattattgttaaaacaaatatatattgatatacttagttaaaagtagaatttttgtatgggtaaataccattttggaccatgtgttttgcaaaagttacagattggaatgacaaaatggactctgtattttctaaaatagtaaaaataggaccctgagcttaatttttaacaacttttttttttaatacaaccaacttgaagacaatgcttaatacgaacagatacaaaaaaatgtaaacaattttgtcataatacttttagatcggattataattaaactttattttgacaaaaaatcaatttagggtcttatttgtactattttagaaaatacaaggtccattttgtcatttaacaaaatacagggtccaattgataacttttgtaaaatagagactctaaaatggtatttacccctaaaaaaaattaattctacacgtgtcgtgcaaatatgaggcgtatgattttagtttgttttcaggcaaattaattatatgttggtgagacaagtcaagtaaaggtagttggtataaataatatccataagaaacgacactaagatactatactcgctagctaagctagtcaagaatttttgttgattctccaaccacaatggtcgaacatatactagtggtatattaaaagaaaaaaagtctatatcatttacccaacataaattacataatcttccaatatactacat

SEQ ID NO: 306113 - DNA, 2855 bp, Cannabis indica
tattatgactaaaaaattattactaaaattaacagttttttgtaatatttcagaacactcacaataatctctttataatttgcataaaaaaattaaaaaaaaaaggttttctaactttattttaatataatatataaataatattatatatatatttaaaagttattattttaatagtgtagaacataaaaataatattaatttaataatattgaaaaaaaaaatataaattattaatgtataatgcaataaaaacatgtgtagatagagtaaaaaaacttttgaaagagctcctagtggggggcctcttggtcttcctctgatctatatctccctttttaatttttttttaatcttttgtcaaatcagatttccccattttcaatagagagtacgtacaagaagtagataagagctaactaaaataatttttttttttactgttaaggtaaaaattgtactacaaaaacaaatagccaacgagttattacgcaagccctatctataaaagagtctcaacatatggtcaccgcatcttcccaataaaagcaaaaaaatagtactatcctcgcgtggctcaataccaaagtaactttcattatagttatttcttttggtagcattgttattgggcatttttagtattttttttttacagataacgctttattattagttagtaacatgactcaatacataattacacaaataggagtatgatacataaagtgtttaagccttttagcaattttcttttgagcattgtttttatacaccaatggtgcccagtacctttcgtaggtggcaccccacgattagttagcgatattgcctaaaagtaattttattaaattacatgagactcgatgtttaattataccaatagcagtattatacggaagagggtgctagtaataccttttagcaattctcttctctttcctcctttggctataaaatggaacacttgcattcatagctaaacgcaccagttcttctactattactatacttttctccatctttgtttcttttttttttttcgttgtaaaacccttcattgaatcttatttctttaacaaactaattaattataatgtcgtcacttagtgtggaaacagaaacaagtgacacaagtgttactagcttattgcagagtcagactgattcatccttgtctcgtactactactaaaactactactaatgttaataataataataataataataatactaattataataacaccagtacgagaaccatggaagggatgatctggaaagacatagttacagaaaatgatttattagattcctcatctgtctcaggcgacacccgccaacacagtcgcagcatcacaaaccgaatgttgtcagatgatgatgattatgacattcgagcaaataatgctagaatggaggaaagtactatatatttgatattcgagattttttgttaattataaaactatatatttgatatttgtttaaatttgtttcgtacaggcacacatgaattacttggagattaaagttggtgtattggctgaacagaataaaaggcttcgactaatgacagcagaggtaattaatgtttctataataactctttttagggttataaacttatatattatttatttcttttatttttttaattactcaaactaatcttttttcagatggacagtgttggagagactcatgctgatcaacaagatgcctaagtgtacatgatgatcagtgtccaatataagaatataaatatatatatatgatcaaagtgtgtgtactaagtctattgaattaagtgtatttttatgctatttcctaattatagagaggctggagctagcacttaatatatatgggcctcctttgctttgtttgttaaatgtaattagttatggttgttatgtagtctactgtagtaatagactaatagtcaagtgtgtgtggtagttaagactgttatttgggttgtataaaaacataaccaccactttatctttgtctgtaacctatcagtgtggtggttaagattataatttgagcaacttaatagtcaagtgtggtaattaagactgttatattgatcagttttatctctaacttctcttgactcattcaaatataagggtttcgagaaaagaaaagaaaatgcttattactgttgtagctagcaagaagtaatagaacaacaataagagaatgctatgaagcaaaaaatgaatgaaaaaatgattctgtattgaataccatagaaatggttacaagagtgtatatcttatgctagtttacaagatgcaagaactagtaacaacttgttattttttgttacaactaactcttataacaactaattccatcctagctcaactattttgaaactccccctcaaaatggagtgtatatgttatgtaaatcccatttcctcttaagatgagatgtgtgaggttttaattagttgttggaccttttctctaaccaaatagtcaatttcaatatatttgtcttttcttgatagattggatttgctgcaatgtggattgcagcttagttgtcatagaacaacttaacaactacactatgatcttgattcagctctttttggaccaaaaagttgtcaaaaaattttacaagttgtattggtcattatcctgtattcaatttcagttgaggacctcgaaacagtgtgctatttcttgttcttccatggaatcaaggacataccaatgtaaaaacttctactagatctcctcaagtcgtggtatgatccccaatctacattagtgtaagcacttaggtggcgttttgtaacgactcggtttttgaccgagtcaaacatatata

SEQ ID NO: 306114 - DNA, 1265 bp, Cannabis indica
tttactttcattgttttagaaattcatatttaggatgttaaataacatacatgatagtaaatctagatcctggtaaaacatattccaacaggaagcctgttgcatgttctaggggttcagggatggttctactggatgggttggaagattcttttccaaacatccgctccaaggtatccctgtaaaagtcatggacaaccctcataccgcgtatgagacgagtctgttgagcatagttggtttccaacaactgattttccttctttaagccctcaatttgaagtttggcctcagtaagatcggccagaaaggtgtcattagcattgcacaggttgcggttgtctgcccttgcctgctctagctctgtaaccagcatatcggcttcactagctgccctctctgccagcaaagccacctactgtaataagcaaaaataaaaagttgaataccatgttcgggggcatatataaaaaaagaaagaagagaaggaaatattttagaactttaccctaactgcctgttgtttaccaacatgggctaaggcaaaggtgtcgacactgctgcacgatgcccaaatgtccaagggtagttcgaaggcatttatggccatctggtccaaaagtttggtagaaaatggcacaacttcacttcctgccttgggggcttgacgcttccctaaggcctccacttctaccgtaggcccagtttgggttaaagtatgaaggccatctgagattttagctttccttacagccgagagcataatagcctgtctgtgtaccaacacctttttatgcttccagacgctccctcaaagccttgttcacttccttctcccttttcatgacaagtgggtcaagaggtatggtcttcttgggaaattcaaacccaacagagggtatccttgggagggtagaagggtgatacgggcggggatggcccatcctcaactgtaggtcgtgacgtaaggagtgcccttgttccaaaaacaatagtttggtgggtcaacacatgggaagacctcaagtctctctgtaatgcccaaacgataaggcacgctacgctaactgaatatgaaaccacaatcccctaatctgggattactagaaagataagtgcgggaaatttacaatttatttgaaacagaatgaaaattaagcttgtagtaaccttaaactttacaaataaccaaaagatacatgttttgggatcccgtaaatattttcacaaaatattacaagcctttttcacgagccgacctaagc

SEQ ID NO: 306115 - DNA, 1233 bp, Cannabis indica
acccaaagagatacaaaatatagacacctaagataaaataaaagacacctgtcaaaatatgtaaagacacctcataggaagtaatagacatatgtcaaagtaaaatcttgttaagttgacacctaagggtaaaagaatgagataaatagaggatgtggtgtaaaagaaggaggtgctcaaataaattcttgttacttttttttgtttttttttttttattcaatgataaaactatttttggtttgctttataagactgaaggtatttattgctatttcttaatctttaaagtgtaatagtgtgaaaattttacaatgaaatagtacaaaaatataattgtataaagatttacaccaatttagtagaataatgcttaaagatgttcttaaaaaaatatgtctccataatactactcttgagccaaacaatcaacaatgttgtcataaagtttttttagattaaagatctgttatggcaagccaaatcaaattctgctgctgccatcgtgcacattgcaaagtcagtcttgaaacaatggaaacatgccgtgaacgacattttgattctctttgggtcccttctgaagttgtcaatggtggtgtgaaatggtctaaactagaagctgactgtattaaaattaatgttaacggtgcgttatttgttgctgagggtgcatacgatagtggtgctcttgcccaatatactgttggccacatcattgaaggatttgtaacgtatatgattggtattcctcaaccgattcttgctgaaattatgagtattaaggaggccttaagttgggtggcgtttaagcaatgttattgtggagacagatagtttaatttcaatccaggcacttaatagttcaatacaaattcattctctttatggtttacttgttgaggattgtaagctcttattaaactcttttgttaatgttgtttgttcttttttttcgtgatctgtgaccagagctatccacttcattacttggagctctcgttccttgtcaggttgttagattaatgctagtaatacttcggtattactttgacattgttacggctgatttagtttaaataaagattacttatttttaaaaaaaataatgaaaaaacttttaaaaatattaaataatgaaaacttagaaaaaaataggagaacacagtatcatatgtaattaagtataagattacttaactcacaaaaaaaaaaaaaaaagaaaaacaatat

SEQ ID NO: 306116 - DNA, 1220 bp, Cannabis indica
tataattgaaagaaaagtatcacataataatactttaattatatgccagaaatttcaagtattaaagagctatatgtgttgtcgacaagagaccaaaccttaactaataaaaaaaaccgaccacaaaccacaattattttggatttggattacatcggcagctaatagtggaataaaattcataaagaattataatttgaggatgagaaaaaaaggagttgttagaaaatgattggaggaatgatatgataattagatagttccaaagattttttaaactatgaataataattaacttttgtgttgtaaattatgaataataattaacttaatacaatttttttttatgttgtcctcttgttaatttgttatttattttttgttatctgtatgttattttttattgttgtttaaatgttatttatatgttatttccatgttacttttatgtagttttcttattattttcgtattgtttttatagaaaatcggaaaaatgtaaaaaaaaattctttaaacataaaaatgtaatttttttacaaaaaatagtaacttatgtaattatccctgtaacgcatggtatgagaaataggatacttagtttattattctgaaataaaatatttgttattataatatatgtgactttatacaagaagagatattcaattttaaaatacacctcaaattaattaaattgagaataacttaatttctatatccaaacattaaaaataatcatttaatacttaatatgttccctcgagatgaagtgtacaaatttataatatttattttggcaaataaattcttgaaatggaatagaaaaagaaatttagtaaggagatcgacaagattatgtttggtgttgacgtgaaggagcttcaacttacctttgtacccatttacggacaatgtggcaatcaatgttgatatgtttagtctgttcgtggacaattgggttctcaaaaacccaaaattttaaatagcagctttgttgttacaataaataaaggttggatgtgaatgattaacaccaaaatcttcaagtaaagcaagtagtcatatcaatttgcatgttgtgttgatcatatctcaaacactttattattttgaaataaaatatttgttattataataaatatggctttatatagagggatatccaacgatggaaatacacattaaactaaattaagaataacccaatttctatatcc

SEQ ID NO: 306117 - DNA, 3052 bp, Cannabis indica
tatgaggatatttttttattaataaagaaaaaaaaaagtatccctcaacttatccctacttattttatattagacactttaaagggctaacagctataagcttctccaaatttatccaaatttaataataaatttggtgtcacactaacgttaaatttagtatcaaaaattcgtttcgcaccaactacaatacaaaaaattaaactaaaaaaatactttattattatattattattttaataaaatatttattattataatatttaatttacaaaaaatatcacaattattatatttaatttaatgatttaaataaaaatactaattagttacatgaaaataatattgtaaattattaaaacctgataaattaaaatatcatattgcatgtagtaacataaattaaagcaatgttcaaacaatatatttcacaagcatgtaaaagagtaacatatacaatagactgtttgaaatatattttcagcgtattaaattttttcagaatttcttaaaattttgcaaaatattttaaataattacaatatatatgaccataggaaaaaaggctatgagtaaaaatttcttccaaatgctgaaacacctcttttagctaaggattgcactgtataatttgcaatatacataatattattatatatgaaaagatggataccatggactatagtacacactctataatagtgtaagatatataagtatgtcaaaaaagatctatttagctggatcgggtcagagctccgattcgacagattatttctgatctgaaacattaatatacttattggatcttataatagatccgctctgtgccacttaattttttcggatcagaactgatctgatctggttttaatatattaaaaaaaaacttaattgaagacccagagtcggtctcgagacccagatcacctgaacctaaactcagactcggactcgaacccgaattggaacccaagacccaagactcagactcgaacttgggaccaagacttaaactcagatccggacccaaactcgaagccagacccagaccccggacatcggacccaagacccagaccatgacccaaaatcggacccggacccgagacccaaatccagacccagacccgagacccaaatccagacccggacccgggacccaaacccagactcgtacctaggactcgggacccaggacttgggatcccaaacttgggacaatagactcgggacccagacccgagccccggacctatgacctgggacccaaaaccggacccaggctcgaaccctggacccgaacccaaacccgaacttggacctaacctgtagttggtgttgaggtcgagtttattgaaaatatattatagctttgcacaatctattaatacaagttcataccaaatataagattgtattaaataatactaatacaaaattaaaatggatataaaattacaagtttagatgtaaaactaaaattcttaaaaaaaaaaaaagataagaggtcggattagatccaatccaaataagtcatgtcagatctgatccgatctgggtatgtgatctagcgaagttgatcattatatgatatggattgtgtcggaccatagccggatcaaatctgacccaatccatttacactctttagatatatagtgatacattagacctaatttttgcaccaaacctaacgttggaggtgctctataacaccataatattttatactatttattaaattaaactggatgtgactcaatattaaattaaatcaataatatgctagtgccccttggcatttctttatctcaatgtataaagtgttatttgaattgcaacagcgagccactgttggttgtaagtaagggtgaaaatcggttggttatagtcagtttttacaatttaataactgaccggtcggttagggtttttattttacgaaaaccgtaactgaatgttaagaaattataaccgtataaaattgaccgtacaatttttggcgatttttagtggtttttcagtttggcggttttggatggtttttggcagttttttagtttaactaattttttatttcaaaaatcgaaactgaaaccgactgtcaaattcgatgatgatgtggaactgaaaattcgattacggtctagttgcactacaaaaaatcttatttttagtcacaacaaaacttgtgactaaaatatccgtggctaaaagtattaaagtcacaaaaattacaattagttgtgaataaatgtatttttaatcacaatttttgttgtgactaaaactaaattagttacaagtaacattttgttgtgactaaaagtcacatttagtcacaaaaaaataatattatgactaaaaatttatcactaaaaataacagtttttatagtattaatttgatggtcgattttaattttttagattgtatgaacactcctagtaattggaagccacacaacaacctctttgctcggatgtattgcagtccacgtccaccaactcaataaatccccactaattgatcttatttctgtgaaaaaaaaaaattaacaagatgcaaattcttacatattttgattcaagaagaaaaaaaaataccaaattatagaaacttgaaaaaagcaatatatattatcaacgttcatgactagtatttatttagttagaaactttcgacgaaaattgaacaccttagaaaatgaagttgcgtatatcttttccaaaaattctctttttctggataactttttgattatgaataaagttccacactataaattcttctgaaagttcaaagaaagaacatatttattattgggtgaacaacacaacccaaaaaaaaaattaaatttttttttttaaaaaaaactataatttttaggataataatattttgaaccttgtgttttgtaaaagttaataattaaacactctgttttgttaaatgataaaatagatcttatatttttcaaaatagtaaaaataggaccatgaactcaatttttaataaaattttattttataatataactaactttaaga

SEQ ID NO: 306118 - DNA, 1936 bp, Cannabis indica
gccataagttgagaccattattttatttttaatcgaattagagatcacattgagactatcagattctagcatcatatctgaccaacttggagctttgatccagttttacgcctccttgatgtccaatgcttcaacaacatacaactcaaaacttcccaacttacttccaaatttatcacttaacaccatcccagtcgaatctctagccacacaacaaaaattaaaccatactgccccatgtctttaggaattgctccatcaacattcactttgattttaagaaagtatagtttagtcaaatgctcgataaaacccccatcagaaacatgggttggaaacacaaacatcttttgagcattactttagtcctcaaagctaagtaaagcaaacaaagaaatatcctccacacacaacagtctctctttccacagtaattggttctgatgatgccaaatggaccaacataacataacaacctctatcaactctacctgactccaatacctcaatccttcctcaaaccaacctagaaaaaccatggtagttgcacccacgacaggaactcgagacttgtgccagcaattctaggcaaacgtgcaccatattagaatgtgtaaagtcatctccggtgcaccattacacacagggcaactagaatcaaccgacacatgacgaacaaccagctggaacctagttggcagattatttgaacaagctctccaaagaaagtttagcacattcgggggaactttaattttcaacaatttcttccaaagtccatcttgatcatggctagaccaatttcattgatgagtttgtaacacattataagcggatttaacaaaaaacatacttgacctttcttttgcccagaaccacgagctatgggaagttttactaatcagaactttcagaaccaaacttgcatctcggtctgaaagtacatcatcgatgatctccccatcccaatccgcaccattcgctatcataagagcattaccttagtacaaaccaacgcaggtgagtagactcaatacacagattaacatcatcaagaagccacaactcatttaaaatactcacctcaatcttgttatcgctaaaaaaattaatagtgttaatttttctttggatatggaaagaccataatatctcaccacaaatgggggtcctcccaatgggggtcctcctaaatgaggtcctcccgatggggtcatccaccctcaccaccaatggagggcctcatctcctcatgggatctcagaccaaggcgtctcttcacctcctcatgatgtcttggcctaatagaggggcctcacgcctccattatctcgacccaaaaggggcctcacgctctcatcacctcaacccaatagaagagcctcacacctccatcatcttagcctaaaggggacctcacgctaccatcacctcgacccaatagaggggcctcacatcttcatcatctcggtccaaagggggcctcatgctcccatcaccccagcccattaaagcggccttacgcctccatcatctcggcaccaagggggcctcacactcctatcacctcagctcaataaaggggtctcacctcgacacgtgcgtctcacaactcaccgacatgacttggaagacacattcaaattttatcattttttagatatttattttgaaatgtgattttttatattttaaacttaacatgaccatagttacgagaaggagctcctgtggttaagagattttaaatcctagatgaaaacctatataagaggagtgaagtcacttgtaaaggaagtgcaattttgattctcatgaaattattctcttgagctcccattctctcattctaaaaattcacttgcagattgaactcttagagaacataactctagagaactctcctcaagcattgagatcaataacactccaagtg

SEQ ID NO: 306119 - DNA, 2669 bp, Cannabis indica
aattaatttgtttttaaataaaaattgctaagaactcggcacttttcaggtgtgatatcattaggcttaaacttacgaccatatgcaatttaatattatgtttgacttgatatactaatggtgtgcatatatgatgcccattaaaaattggactttccacaagaaaaccactaccataattatttatgtataaaccttagcaacaaaaaaaaaaaactatgtatgaaaacataagcaatcaatgcaaaaagtgtcctatccaagtatatgattctatatcaaccaaccttctagtggtatttatattttttccagaaacttaattgttatctgacattgattggttgggacaaataatttaatgaaaatgtatatatacattataaaaatatagaaaaatcagaatgtgctttcaagatacttaagagacaactcaaatttatgtgtcagttccaaatttgaccaaaatgaaagatatttgacagtcttttaaaatttcactgtaattgataataacctttgcaatgctactttttttttaaatgaaaatatcaaaatgtaagtaattttaaataagatgatattagatagtgtatttttagaaatttaatagcatcctgatatgaaaactgaaatatttaccgtatgcaaagtttgatatatcactttttcatcaaattaccaaaatttaaaataatttttaatatattaaactttgacatatatttcctaaggagtaactttttattcaaatagtaaaactgttatttctttagtacattaattaactttagaaaacgatgtatgtgattttttaaaatatattttctattgaaaataattgataactatagtgtaatcaactaatcattttctatttgaccttttgaagtagtgctaatattaggcaaggccccacctagaaaggattataatgaatataaagaagccacataattaattatgtatatatataagtacatgtgcgtgtagtatagtgtagtgtgaaaatatgcatgatacaatttataataataacaacaaaacactaagtccattcgagaagaagacactcgaacgagaccaggatttttctggaccagacagatataattctacctaacccattaacctaaacagagatgcccatttcctcctaataatttataaactatacatacatactcaaatcaagccccactttattctcaaattattcattttgttattgaactatatataactagtatcatatataagattttacactaaaattatacaagcatctccatattaaaggggagaaaaataaatactattaaacaaaattaatgcatttttatgaaagaataatattaatatataaaatttgtacacacctcagcagtgccgtttctaaagatataagcaccgtagtcattgccggcgacggtgactaaagcgacggcggattcaaggtctttgggagtgaaaacagagtgactaatgaggttattgaaggcattgatctgaacagtcatgtttgggtccataaccaaggtgttgaacacaccagtcccaccatgggcaaagttcattccatacttcaagtgcttataacctacaaccttcctccattggtatggtattggagatttcactcccacaaacttggctgatcacaaaaacatatccccacatccaatttttagatataattttaatttgagaaaaatgcttaatctaatcaattatatttgtataatattttgatgtacattttgtgtatgcataatcaatatatattttcttttaaagcaataaataaactctataaggactaaccaaaaattatttagctaaacaagttaatcaatcctaaaacatgcgcaactaattataattttttttttttttttgaaacagtcaactaattataatttgaattatgtaaataaataggtaattgatgttacaatcaatagtttatttaattttgttaatatattttccatttttatatatatatggtagcttagttacgaagtgagcgtactaagtattatcttattgtttgtgatcggggaggaaaatgctttttttgatcaaaagaatctcaaaaaagaaaagttagaaatttagaatgataaagttcttttaagaactaatatttccaattttttaaaacttcaaattatgtgtcaaatacaattgataatgactggtgacagaacataaagctaaccccaaaaacaagaaaaaagacagaatggcgctggcaatatctaataagcttttgatttacaatatactaaagtaaataaaacttatctctaatagtttaaatttaggctaattaagatttttgtctacggaattttgacatgtattaaattatgccctctgaatttttaaaatcattaaatgccccttgaacattgagattgttggacttaagacttttgtctaattttactcaattttattatttcagtgattgtttatgtactaaaccatgctctctcaactttgatatctaccaaatcatgaccctcgaactttgacatgtattaaattatacccctaaattttcatctatgttagacttttttactaaaatttaagaaaaaatctttaaatccaacaatctcaataatttagggggatttttaacgtccttaaaagttcag

SEQ ID NO: 306120 - DNA, 1249 bp, Cannabis indica
tagtataaattaaagtttaacatagtattacatgaaaatatgatatataatccaatttaatataatataatacaatacgacttaatacagcgtaccaaacgagcccttaaggatcattaatacactagtgtatttttaataaataatccaattataaatttgaaattatttaccgagatttttgaaaatcgattataaaataatcaagcttaagaaagaaataaactaaagaagaaaattaagattttacgtgtgacattaatgagctttaattcagttttagtccacaaatcaatattattgagcttgaaaagtttcaaagtatctttacacaaatgttttcgccctagatgaagaatcctaattcttagctcttagtagtagaaaaatgatttctcaaccaatctcattgcatgaggtatcgtgttctatttatatgctagaaccaggaatgggtgagtccaaacccgataggatttagaggtgtcaactaggcccactgatgggttaaaatacaatacttactaactttaggttaattgggtgaggctcaattcatgagataatggtcgttcgtacaagtggggaccgattatgatgtaatgagtcgtgtgctgctgcgtcagtatcgggaatgtcaaaaaatatggcgttagacaaaaatgtggttttcttttggtggtgcacgcactccctaagtttgacatcggggacagacccttgacatggtggggccatgtgtctggaggccgctacgtaggatgatattcaaaggcttccagatgtctcgttaattgtctatccagattaccccatgagagcacccgaatagatcctgacggacccttcgccttttggaccaaacaacattccccagaccaaagtggtctggccttatcgcgtctgtaagttggacttacatccagattcaaagcctagcttgactccgctggtgggtcgatctgttaacttgattgggcccaaaaatgggtcagctttagctgaggttgggtttggaaaatcatacatcatttatctcaaaacacgaataacatttactctcaagccttcggggctcgagagtcatggaggcttccagcctactcccaaattcattgttggatgtagatccatgaataggtgcaactgttggaaatattttaccaggatctagatttactaccaagtatgttttattaacatcctaatatgaattctaaaacaatgaaaataaacacataagagttta

SEQ ID NO: 306121 - DNA, 930 bp, Cannabis indica
acaatgttatgttttagtatgtacgcgtatatatacacaataacaacgtcgtggtatattaattatctatgcataaactttgattttaatttcattattcaacttttcctaaatttattattttgtccttatcatgcatatataaactatgaaattttggtcacttaattataataatgccttaacgcctaatgaaaatttcaatttttatttttatttttttattattaaaaactgtaaaagataattttataccctatcgaataaaattatacaccctaatcctagctaacaattcattttcttcttcttttcccaattacagccactcaagaacatatcaagtatcattaacattgatatatacataattcatatcctttctttgtgtttgcactctatgcatatttctattgagaagacgcatatctggtatatacatatatcatcaacccaattcattttttaccaatattactatttttttatgtgtctgtatatatgttatattttatattgataatatctataattttattcttcccagtttctttctttcgatttgatctatatatatatagatatatatatatatatatatttgtttatcatccattcaatgtacatgatcaatattgtaataagcgcttatgcataaataaatatttgaagaggtctcagtcaatcattatttgtaatgagagtctgtaacacttaaaaaacttgcatgatttagcatatataagtgatatcaattgtgtttcacaactgaaaatggagggagaaacatattaataaaagttattgtagaaaatagtgaattaaattgtgtacatttaataaaatagtacatatttatgtataaaattaggagactaaataggaaactaccaataacaaaatagaaaactactaaatatcagttaccct

SEQ ID NO: 306122 - DNA, 1371 bp, Cannabis indica
ttgccgaaaaactcggtaaacaataaggttttatgctatatttttatacaacaaattaattgcaggcttttattgtatcgagaatgaataagaaaggccagcttgttcaaagtttacaaaaggatgcgattgatgaaagaagacgtgaagaaacccaattaacaatcactcataatcatcaatctggacataacaataataatgatgatgatgaagatcatcaacatatacagcacatgcataccttgaccttaatggtgtcgactctaatcgcaggtattacatttcaagtaggcattaccatgccagcagcagggaaatacaatactccaaagggcttggaaactttcgaaaagttcatgcaattcaattcccttgctttttcattgtcatcgtttaacatgttcttacacttcattgtgagtactctttccaacaagttcttacggggaagacaatataagaggtttattagtattgcaacaattcccataatattttcatctgttattgcatttatatgcgcctttagtatgggtacagaaacacttatgcacgagaagaaagagctaaatagtttcattgataagaattctaatatgtttagggatatcttaaccacttcaccaggggctgttgtactggctgcaatcatttatacatggtacaatagactattttgacttctcctaagtatagtactggtattgtttttataaggtccctggttactttttcaatgtattatatctatttttattgttattactgtgttttgctaattagttatgctattttgttatattataaagcttttttcacctcaactgggttattaattaattaggaatgtttattaataaataatttggagcaacataaactctttattactttgcgtagacctaaaccaagtaatagctcggaggaattgtttgttacgtacattcttaactagtgactgttagttatagcagttggttttagttgttagagtcggttagtcctagtcagctaatgagagctaagttgtttagtttctgctatgacttcggttattagtttgagcatgtatataaacacttgtatacactgaaatgaagcaaaattctttctagtgatcactactacaaaaagagattttagaggtttttttttttttcacttaccgttgatcttacaggaaattgaactgaataccgctaaattagacttatatttttgttaagtcttttttgacaaattagttgaaaatataggtggcgtttggtaacacttttttaatcagttttctatttttaaaagtagaaaagtgaaaatatttttcaaaaacatgttctataaaactgtttttacttttcaattttataa

SEQ ID NO: 306123 - DNA, 1158 bp, Cannabis indica
ctcaatccacatcttcacagcttcgctttccctggctacaatgataactagtagaatacttttcccaccaaccaaacacttacatatatctgtatttttttaatttccttcttctatagatttacttttttgtttttgtcatgtagtgatatctgaaccagtgggttctaaagggttcgacgtgaaccgtttaccgggggtcgggtcgacccagccggaggaaaccgaagatggagtcacaatatcttcgccaaacagtactttatcgtcttttcacatggatttttgcgtaagaagtagcagtagtggaggtggattaataagaactaatagtaataacaagagagaatatcatagtaataataacaatattatcgagtgtgagactgagagagcgagttctagagcgagtgacgatgaagaaaacgggtcaactcggaagaaactcaggctctctaaagaacagtcagcttttcttgaagagagtttcaaagaacacagcaccctcaatcccgtaagtactcaaactatttatatatatactaattatcacttctggttgtaatttcttatattttcaaagtatacaagcataactttttatgtatattttgcagaaacaaaaggttgcgctagcaaaacagctaaatcttcgtcctcgccaggttgaagtgtggtttcagaaccgaagagcaaggtaataataattaacaaattcactaatgtaactttgtttctcggtatttggctcattacactttctcggtaaaataaattttctttttattaatatatttgttttttttttctttcctcaggaccaagttgaaacaaacggaagtagattgtgagtacttgaaaagatgttgtgagacgttgaccgatgagaataggagattacaaaaggaacttcaagaactaagagccttgaaaacctcacaacccttttacatgcaacttccggccaccactctcactatgtgtccttcttgcgagcgcgtagccacctctggtgccgtcaccgttgccggaaccgccgctaactccggtaaacctactcaacaccgatttcctcatggccaagttgggaaagctgctccaggaaatcttcaatagttaacttataataatagtcgtactatatagaacttcgatttt

SEQ ID NO: 306124 - DNA, 2320 bp, Cannabis indica
aaatagagctaaggaaagaagcttcaaaagtaaagatattatcatgtttgaaagaggagaaatgaagactagaaaccaaagacattcagttcaacaatatagactactttatggattatatgtaaaagaaacagaaatacctctccaaaaggtaaggcatcactttcgaagaagtcgccaaaatctccaaactcatgaagaagagctagaatatctgtacccacatctctatcgtcatcatcccagtcccaataagatccaatctgctcgtttccaactcctgtaaccactgaattgttaacttctccaggaccaagatcggacttgtacgaatcttgcatgggaaaatttgaaattgcacccatttgaccgtatgaagctgtcatccctggtcgtgaacgcttggaaccctattgaaaagttacagtttctttattcttctgaaactaatagattgatctaactaaacaaacttaaatttatataacatcacaaaattccatgttctttaggattgataaattgatttacacaaacacattgattttaaaattgttacctcagctgttgacagtgaagcaggactgaagctaattaaaacaaataaattaaatatattcacaaaaaagacaaagaaacagagacaaagacaaaaacaaattcaaattttcttttttcgtattcaattaatatatttcgtggaaaaaagaaaatctttactaccccaaagataacattcaaattttactccccaattcctaccttccccaccacaaatacaccaaaatccaactattttttaaaaaataaaataactagaacgatttcctagttgattgcaaatcattttcggctctgtaatatgaaaaactcttcctcctgcagaaaattgtcttcccaattttcaggattagttaatactaaacacgtacaaaacagtttaccttagcttaatttggatgtctaatttcgacacgtcatacatttaaagccagagagaaaatattacaaaaacgaaagtatcacaattagctagcaataaagcataagaagttccaagcatattgttcccaaagaaaatctaacgaacaagagaaagaggtcccaatttggtacaaaagtttgtatgcatttctgtagccagcaaatgattttaacagtaagtttcatgtcttaataggggtccctacaattatttccaatttgatacttataaatttctgtagccagcgatgatttcatcagcataatgttataacagtaactttcatgtcttacacagaagctactttgtaaattaagaaaccacataccaatttggggaaatccatatccatttgatcattagatgataaaccagattgtccacaggtcaatgaatcagcatcagcctcaagttcacttgtgccagtgatcatcttataatcaccatcactggagctgctgcttaagctactaatgctgctgttattactgttgctgctactattataaccatgctgtgagcgtttattattgatttcattcaatccttctaaactatctacatcgtcagcactgcatgaaaaggaatagatatttaagaaatcattataatgatcagattcagggcatatatacaaaattttcaagacaatgatgtgatgataacacatcattgtcaggccgaaagaaatatgtaacggaaaggcaattgttgtgaggagtattcttatgaaaagagcagcagaatggaaatagaataaccaacccaaaacatataataaaaataaattttactgaccattgcacaaaaaaagctgagccagataatgagggtcctatccaattctgcagccaaaatctgcaagttcaaagcatgacataattcaaaaaccagacaaaagtaatttacgacttcagagtttctccttatttttttgtgctacaggaatatgttcggctaccaacatcattaggctacatgattaaaaagagacctgatacttcaagaaagttattgatttatataattattgaatgaattcactattcagaaaaacaagacatgaggaaactcaacaaaaagttaagaaatgtttggtatcgatactaataactgttttctgggacttgttctatgagaacaaataggagtacttcgcattcatctcagagaatattttttcaaaaacaaagctaaaggaaaataggaaactataagaacaaaaatgaagtttatagttgtttttttattctcaaacagaacttgtatttaattttatattaaataatagccgaaagaaatgtcacttgtgtttcctggaaaaaataaaattat

SEQ ID NO: 306125 - DNA, 1829 bp, Cannabis indica
aaaaaaatattgaaagtgattttttttgtttttaaaattttgatttctaattataaaattgaaaagtaaaaacagttttatagaacatatttttgaaattttttttcactttactatttttaaaaacaaaaaactgattaaaaaagtattaccaaacaccacctaaattattactttttaaaataagttttcaaagtgtgtaattaccacaaattttcctaatgttatataaggacataaactaagtttttaaataaataaataaaaaatacaattttttgctggaaaaaaaaattacacttacaatatttagaatttaaaacaaatatttacactaatttttgtacacatatattattggaatttatagtggttctctatctataaaaatgacacatatgtaatgggatacttcctatgatgagaaagatttgttacttagttacataatgatattttggtttgatgtagaaggaagtttcctaaccaatcataatcttggatttacttagtttttaataaattatatatgtacataaatttattgagtttcttaaactcaaagcttaatcatttaaaaaaaaaaatgatgtagtagtaatttgcactcttttcaaaaaaaaaaattatttgaaaaataatacttgtctccatgtgacaatttctttttttatttgcaattttaatttgtagaatattctattatatacataaatataaaaagtgtttttgattgtaatttaattagcacgggtctaattcttaaaatataaattatataatagaagagagctgtctattgttgagtaacatataataaaataatttataactaaataaatataagtaatacaatcaaacatataatcaataataagactcattgtttttcttgaattatgttttttattttatataataaataaataaataaacaaatattagaagtcaaatgatgtgtgattctacttatcatgtgctcctatacatgggaaagttaattgcactatatataattaagaacctctcctttttccaatgaataaatggaatatttttcatgtgcttagtggaaatccaactagatccaatgaattaaagtaacataccaatggctcttaaagcacaacaaaataaatatatatttattaaagaaaaatcccataaaaattagccatctttttgttgtataattttctattaaagtttgtttgcaccttccaattctatcctaaccatgtggaatcttatactgaattaattacattgccaaatatacattataatttcttcttgaagattaaaaggttacatttttgtccttgaaaatagtttgacaaaatagaaagaaaaatcaaccaatatcatatttttttcattggaaaacaacaaataattgtagggttttattttgtctagctagaagtatgcttttgtgaaagatgatgcaatatttgtttgagtatgagtcattaatgaaaaacatacccttattattgtgtataatatagtttttccttctaataattttataaaaagtaattaagctttttgttcctaaattttgacatgtactaaattatgctctttgaattttttaggttgttaaaaaatctcccaaactatcaagattgttaaataaaagaaatttcgaccaattttaataatggatacctgacgttgctgaaagttcatgagacacgatttgatacatataaaataatttggtaaatatgaaagttcaagagacataatttagtacaaaagcaatcactatgttagtaaaattgagtgaaattgaacaaaagttcttgaatctaataatctca

SEQ ID NO: 306126 - DNA, 4573 bp, Cannabis indica
cttaggtccagaggagtggatactgatggtttattcttgtacgcttccattgtggttgacactatttggagggctcgtaatgacaaggttcataataactctttgggtaccttggtacattatattgattctatatattattgttacgcagattatggctcctgtttgttcaagtctcaccgagttgaagacacactggtttggtccccgccgcctgaggattggatcaaaatcaattgcgatgtcagagttggagaggaaaccatgtgtgcagtggccattgcaagggatcatcaggaggcgattttttgggtggcaacgaacaaaattcacttctctgacccttttttaggagaagcggcggcttgtttgttggccttggagacgacgatctcgatgcatcacccttttgttgtggtggagagcgattctgcgattgtgatcaagaatcttaaaggtgacgagtccttttggaggattgagaactacacaagtcaatgcaagcagctctttacctttttcactagttgtaatttttctttcatttctagaaaatataattttgtggctcataatgtggccaattgggcttttgccaagaacattaatggtatggtagaggtatctactattccgaatgctatcttttgtaatgaccgtgaggtccaatttcttctcttaatataatgaacgctttattttcaaaaaaaaaaaagaattatgataatagttatgatagatcgtggacgtggtttatgttctcttcaatgatttggttgttaaagaagtaaaatgcccaattaaagcattaatatagaattatctttgaaagtattctttttatttgagtatttaatgtaaaaataagttacttgcacaaatattttggattacttctttgtagacaaatattttttatgcaagttcggtcttccatatcatcatcgacatttactatagtcaattcttctctagtagaacttgagagagtgcaacctatagttgaccatgtgtgaatacttgtttaggaagatatatgtcgactcgtttaagggattgtcttggcttttattgattgtcattgtaaagcattatgccagaggaagttatcgtttgttagcttgaatggccatcttaattcattgggagacattattattttggggattgtgacattctgaccaatatttattcttgagatgatatcaccccagaatggactatttaccaagatgtgtgactatcaattgaccttctatttgatttagatttatgagcaacattacaggcggagtgcaccttccttaagtcgtatgtcatgattagggattccattgaatttcaagttgtgtaaaaattcaaatggatacaaaagatcttcatcgcttgtgttgacacttgctttgcatgtgttgtcggagctaaaataagttcttccttcaccaagtatcatagtcatgatcatctcgtttaattcaagaaccattttattctttggtattaatattgctctttcttttaaatatacaagatcattgtacatttttaaaagtgttgggtagatagctttgacaatagatttcattggatcttcaaatgggcttttgtagatatcatcaagaattttaattatttaatttttgatgtcattatagaatgatccattcccaatctgtaacaatcatttgtcgaaagaagctattgtagttgcttctggacctgtcacattttctttatggagcctcatattatggttaagttcaaatatattgaaaaatggccacatgtaagatgaattgagagaagcattaacaatgtcagctcttgtaccctttggcacaattggaaatatttgtctaaaattaccaccacaaactatttttagtcctccaaaaggtttgtttgagctattttcataccttattctcgaaatttcccttaataccctattcaatgcttcaaaacaaaacttatttgttataggtacttcatcccaaatgattacagaaggttttagaagaagcccaactaataaggtgccttgtcagatgtcacatgttgactcagctgtaatatccaatgaaatatgaaattgtgaatgagctgtccttccattgggcaataacaaagccgctatgttagaagttgcaacatgtaacactatttttgattgtgatcttagctttgcaattattgcattccacaaaaatatttttgcaacaccaccatgaccattggcgaaaaacaaattttcttggtcattctcaactaaatgtattattctttcataagctactttttggcaaggatttagagtgacaaaagatttttggtacaacatgtttaattgatctcgatcataatccaactctttagtgaccaatctattatttgaatctcttatcaaagaagcatttggtaaaggcattccatctatttctcttaagcttttttccattttcaacatgatactttctatttcaaataatgtgtatgcttccacttgttgtttagttagctgaagatccttcattttgaatctcttcctttataacatggttatgtctttaaacattatagaataaatacattttcaaagttcagatgcattcaaaactagcaatgaatgattatcgatacaagtagatgccttaatctatttctagtttcctggtatgcggctttaatcaagcagttgatccactctttgtcatcgtatagtaattccaaagtgtaacatgaagctttgaaagtgggggtatgttattccatttattgttcttatactttgaaagaaagtgcaacctttcacaaaattcaggaacattctgatgtagaagcattcttcgattgatggatgagcgaagtaaattcttccaattgatatcccccttttcctcctagtccatattttctcatctaagttccgaatccaatttgtaggaaaatcagaataagttaggtctcgtccatcctcattattcttgtttgcctcctaccaaagagctttcctgtaacgccctaacatagggacgtcatatgtgtgaatttataaactagtttattaatagataactaaattattaaaatttatgataatattaaaaactcaactaaaataaaacccgcaacggacatcataatgacactaaaattttattccggagatcactgttataaaaattttacaaaaggactatatacaataacaagtcaaaatacacaacacatacaacccaaaataactcctagcaactcagcacacaagacagtagggtcaatatgtacattgccagagaagactgtcacctcatggctgctctaaatttttcttgcccttacctgcaccatagagcaccagtgagtcacaaggactcaccaagaaaagtaataaaggagaatacatgtaataattagttatccatttcactaatataatttaattaaataataacattcaaaagagtgtataatataaccaaccgtatacatggaagtaaaaaagaaccatatattgcattgcctcatcaagcaagcccgtgtcataatttgacacccatatatcgcatcatcgcatcacctaatcaggtgagcccatgccaaaacttgacacccatgtatcgcatcgcctaatcagataagcatgtgccttatcttggcaccaatatatttcatcacctaatcaggtgagcctgtgtcatagtctggcacccatgtgtcgcatcgcctaatcagacgagcccatgccctatcttggcaccaatatatcgcatcacctaattaggcaagcccatgcaaaaacctggcacccatgtatcgcatcacctaatcagacgagcatgtgccctatcctggcaccaatatattgcattacctaatcaggtgagcccgtgtcatagcctggcacccagtgttgcattgtctggtcagactagcctgtgccctatcttggcaccaatatatcgcatcacctaatcaagtgagcccatgccatagcctggcacccatatgtcactattgctacctaaacaagataatcgacaagtaaaaaacctaactacagtttcagtttatagtcatgacttatcaggttgtctcacaggaacaacccgaataccactccctagtattcatatatcctattgcctaatcaggaaagctcatgccatagcctagcatccatatatcgcattgcctaattaggcaagcctatgttatagcttggcatccatatattgcattgcctaattaggcaagcctacatttctcagtcattgtctaataagacaatcataactttaacccactttaatagtaatcaccatttcatcaccacgatcataattgagtcgtaatgatgataatcgtaccttaacattttatgtgatacatatatacttttcttacctcaagttttggttcatgtatgttggccaatgtaacgcctagatacttaggcacgctatagtgattttctaattaacgtaccacctttgctaaccaaaggattttccttaaacattgtgccaaattaaatttttgatttaaaatattaaactttataaacatatat

SEQ ID NO: 306127 - DNA, 1200 bp, Cannabis indica
agtttggtttcccaagtagaaatctgttgaccacctaattggtttccgcacccgtcaaaagggtagaaatcactaatatttatattcaagcgattaaataataataaaaaatgttgtaatattcatgtcctcctatacaatagaagcttgtattgtgccctgtgtcagttgtgttagacaaatataaaaagagaaatatatctataaaaatcagaggctacactatatggatcaaaatatccaactacacatatataaatatatatgtattctgaccacatctgaagtaattgatcatcaaatcataatttaagaaatgagatattatataaatagatagatattctgactctcatttcttgttaaaacattctgacaaaacgcatattagcatttcacatataatttcttttttgttaaaggatttaaacttttggtgcgatttctatctttctcattagagttttgtttagttaattatgacacattttgataaccaatactaaaatatatatatctgtagctgatatagattcccatatatatacgtaatcaacatatatatatatatatattatacagtacccttatgatataatattgttgagtaagaaaattgatcgagcatgcaaaatcccaaattttatatctctcgctatgcaaacgaatattctagtataaattattctttgacgtacaaactgaactgttgatcaaataagtttcaaatgtcccactaacacgcagaaaatgaatagtatattgtctgcattgaaaaaaaaaactatgattaactacaaaataaaagttatacataaatatcaccttctataatattataagcagcttctttgactgatgtgcaccactaaaaggaggcaaaacacacttctctcgatgcgttcttcaatcctattttaagtctttagactcagtaaaaataaagaaaaaatcagatataaaagcaaaattgataattaagaataatatatataaaagaaaacatatatactaaaagtaaaacaacctatgatcgatctcttacaagtttttggaaaatgagtatctagtcgatgaataaaaaaaaaaacaaagaaagtgatacaaactcatcaaactatagggtttataaatatatatgaaatgttcaataaaacgagagagatagagagagagagagaggtctttgtttctctctcc

SEQ ID NO: 306128 - DNA, 1065 bp, Cannabis indica
atcttttgttgtttaatataaataccattattttgacaaacatacgtgaaatgtggtatctttttatatttaatcattgtaattatatattatttaatagtcacatatttgtattaatgaaactatgcatgtattataatttatctataaatattactattaattaaaaaaaatagtcaaacattctaatttctttgtataaaaaaaattaataaaatattctaacttttttttataataaccgtaatataattttaattacttcctatgagtaattatatatattagctaataattacataccaaatcatataaataagaaaaacttacataaactattatttggcaaattttttacacatttacatataattttttttacattttacaatgttcataaaaataatatcaaaataacataaagatttttttttatttttataccttaaaatagttattttttttttattttgtatttttacggaatctcatacagaaacacctataacaactaacggagcaaccaaaatccatatagcaattcacataaaaatcattgaagcaacccaaaccgtaattttttaaaaaaaattaaaaaaataatatataaagtaattcctaatattatataaaaaatatttataaataaacaaaatatattaaaatataaaaactcataaaactgaaaaaataaaattatacaaaattgtttataagcattaaaaatgcccaaatcataaatcaatgaacattgtacattaatataaaatacccaaatacacaaatcattactaaaacaataacacaaacatgtttatcttcatagaataaatgtgtacaaaaatataaaataaatgatttggtttataaaaacccataaattcctaaataaacataaaggtaatcttacaaaatactcatttttttttgtcaattttactgtcattgtaacaccttattacttaggcacgctgtagtgattttttaatgggaaatttacaaaaatactggactttgggttaacttttacaaaaatactgtcacacggaatttttttcaaaaata

SEQ ID NO: 306129 - DNA, 1209 bp, Cannabis indica
tcaaattttacttgaacaatgaaaatttgttcaatcaaaaaggcatgaagccttatttgttgcgactttaacaattagagatgagtgttggaaaaaaaacaagcaataaattaggtgaaaatcaatgtggataggactctctttgctgcaaattgtcattttggggtgagttgtgtggctcggagcagtaatgagaatgttttcttgtggtaaggttggtcgagttgatcctgtcattattgaaatttttggtgtcatggaagtcttaagttgggttgatagaaataagtggtcaaatattgtttataaaaatcgatagtcttgtgtgagtccaagctttttatagtgatgtttctatgctttctcaatttggtcttttggttcaagattatagagctttattgctcatttatcgaatttacttttgttcaaagttatcaatgttattgttaggggttttttcttttcccaggtcaagttatccaagagttagagttcactcttaagattgtgtttgttaattaaaaatttatcttttattaaaaaagaattctaatgtataaattaaaattcatgtatttttattaatataaatatagacataaatagcaattttttttatatagggtgcattgatacatattttttaaggcactgtaaatctttcatatgttttaatttcatacattaaatcgaataataaataataaataataatagttgaaaaaattaaaatgtaaaaattttacatttatcacaaactgtcccattaaaataaatataaatatattaagtgacatgatttcaaaactagtgttataaaagacaattaatacaaatttaattaatagcttgtcaaatgtaataataatttgcacattaaatagtcaattaaataattggttgaaattattattttataagtttttttttaattcttgtttggtggcaattttgctagtgattttctaccaaacaaataattgaaaattattttttttttcaaaaacaaaaatagtgaaatgaaaagattcactagtcaattcattttgacttacataaaattttgtatttattagaatattgttataaaataatataaaataatataaagtagatgagaagaaagaagaagaagatgaagagagaaagagaaagtgaatgagaatttctgagttgtttattccaatggggtgaacccctatttat

SEQ ID NO: 306130 - DNA, 1659 bp, Cannabis indica
tacaaaaaaaagaaaataataaagataaatgattatgtattatcttaatttataacaatttactttatttgaaatatagttctcctaatcataaatttataaattggttagcttgtgagcaaaagtttcaaactcaagatagattaatcaattttagtatcatttttgatgatacttgtctcttgtgtaactctgatttagagtcacataaccacttattttctttggctgttggtatttcaaagttcaagagagatgtataaaatttggaaactaggaatattgctctttgggaggtaaagatatataaagtttcaataaacagagttaagattgaaatttatgataggttttctcttttcaaaaaagagaaaattagtaaagaggatttagattagtttgataagttgagaattctcaactaatttgtacatgttgtaatagttttgtacatttgatatgttgaacaatacatttactcatttaccaaaaaaaaattatagcaatttaatgtaacttttgcataccgaaagccaagtctttccccaagagagtatttttgttacactaccatgatcgaggatccattttcttgctcttgcacaagcattatctttttcaccatttttaggtaattcttctccgagaattcgcagacaaatgtagttaaaagctgtaccgaacattgaactttggcctcctacatgtaatccccatccaccatcttcattctaaatattgtcacaaaatgatgttgcttaataagcttattttaaatacaaatgaatgtgtagaataataaaagtgtcattttgagatcaatactataaccaaattagttaaaatacttttacctgatggttatacatatgacgaaaaatttccttacgatgttcactagtaaaaatggtattaaggtgacctgtaatgtataaacacataacctacaaccaaataaacaaatgttatgttaatttattaacataataaagagttgatactctatgttatataaatatacaccttctcaaaataacattgtattcgagtactttctaatatatgaaattgtaaatactttataatttgaaattgtataaatactttgatgcccttaatttgttattgataatggtattagttgccctataatttaaaaataggttgtaagataataaaggaacatatcttttaagtacctcataaattattagaaacaatagaggaactaactctacatttatttgaattaaaaagtatcaagaaaaataattggcaaaatgtattggtggaaacggattgtcttatggtagtacaagctatatacgagtcattttgccatgagctcttattttggttgtgttgtggaggattgtcgtaagttgttgattgatttaaggacttgttcaattatttttcttaaacgtgatgctaatagggtacatagcttattattatcttgctagagtttcttatttttctgtaaatcgttctttttttgaactttttattattttttatttttgagatatacttttaaatgatattatttaatgaagttttcttattattcagagaaaaaaaagaggaaattacattgtatacccattatattttacatgttttaatttttacctttatttatatatttttttaaga

SEQ ID NO: 306131 - DNA, 2485 bp, Cannabis indica
aaaaaaaaatcatttgggcccctgatagaggtgggccttaggcgcaagcctagcccgtgcgccttagcctagggtcgaccctctcaaaaataggtgcactgatgcagcactttcatgtttttaatatcttaatagtattaatctcaatttttttatatgatagtgtgtattgtatttatttatgacattttgtaatattttgagaaattcaaaataatttataatacataaaataataaaattctaattgtctatataaaataaaatagacgtgcgtgtaatagctcgtttagggctcgtttagaacgtcgtattaggtcgtattgtattggattatatatcatatttttatataattactatgttaaactttaatttatattaaaatattatatatttaggtgtacataaaagttaataccacatatagttttatataaaaatattacataaaatataattcaatataatacaatacaatacgacctaatacgatgttccgaataaactcttaagttttatttaagtgcgttaaattatttaaaatttcttataaatttaaacgatgttatatataattacgggatatacactgtgatataaaaatattaaaactaaaatcatctaaatataaataagatgaaagaagtacttggatacacagtgcaccataaaattttcatatactagttaaacaagaaagctagggtgtatatatatatatgtgtgtatcaacatgtccaggatgctgatcttttaaggccaggtttaatttgcttgtcttcttcgagtgatatcattcccaaatgagaagggtcttcaagcatcattttagccaccaaatagcttgcaatagaccatgtttggaacttacgagcctgttttcccacgtacctcccagcccttaccgcgtagtactccggccactggtccttcgacaatcggctttcggctaattcaattgcacgccttgctatctgaggacgaccggtctttatactcgcggccgttaacagccatataagcactgtgtacagtactcaaaagagtagtatattattgttattgtgttattacggataataaaaaaagcttaattaatggcaattaaattcaagaattataaaaatatttgtcaaaataaatttaccaaaaaggactttacacaattacagatggagcgcatgatcatcaactcttttctcttcctatatatcatttattattaatggttgatgacaataagattatcctatcacttcattaatttagcaccataaatcaataactgaaaggaagaatactctttctaaagtaaaggtaaaatcgagctaaaaggggtgtttgtttttggaaaagtatgaagatagtaaacttggtgaggcattgatcaaactctagtctacaaaaagtttcattttcccttttaaattcgctttaacactttcccacttaatattcgtctacaacaacaccctacccacttaatggaatagttttacttgagtattgtattaagagtactcgctatttttttcttgttttttattgttactaaatttcttaaaccacaatactacataataataataataatgttacctggccaagaaccggcattgtgataactccatcttgtgttcttaggatcacaaccagttactatttgccattcatgaccttcaatagcaggataacatattttaagtggcatttctccaaccaactcttcccaacgggcttcaataagatccataatagctgaagcttggtgaagagtagccaaagaagaaataatagcaacacaattgcctaaacaaaaccaacgaaaatccattctagcagggcttacattcccaatgaagtaaccaccacgtgtaggcatgaaatcaaaaacccagtcaggaagagaatcgggcatcacattgaatttgtttacagctgtgtgggagtactcctctgttttgtatcgatatatatcgttaagttgcttaaggtccaaccaaaagtaactccttatatggtaactcaatgcttggagacgatcacctattagtttcacaaactctttattccccactactacatgatcatcgtcttgcttaagcaaaacttgagcacatcttaatgccatgaaaaataatgcttgtatttctattgggtaaccataaataccctaaaaaaaacatgttatattagatatataatttgtacaaattaaaactactaatatccaacactttacaaagttaagtttggcgggtgttgaccattttttcataataattattaaacaaaaatgtgtgatactaattactatatatgggcattttacaattttgtatacattattttaattaattacaaaatatgtgcaaaaaaacttattatcattttctcatacacttttatatataattaaaaactttttttacaattttttttataatatatatatgtaataattattgattagtatatatat

SEQ ID NO: 306132 - DNA, 4969 bp, Cannabis indica
gtgtaaatatcccaataaaataagtatcattttagtctcagcacaattgaatccgttccattaccgccgcacatccttctgctgccaccccaattgaagcagtgatcagtttggttggactgtaaggaaacaagctcaccccattaccctttaatggctggagagggatcggctatcacagaggaggagataactctcactgtgaaatggagcggtaaagagtacactgtccgactttgcgccgacgattccgtcagtgagttaaagcgccgaatcagccaactcaccaatgtcttacccaaacgccagaagcttctctaccccaaactcctcgcttcaaagctcgccgatgactctgtcttactttctcaactccctctcaagtcttctctcaagatgaccatgattgggttctctcattcttttcgttttacttatattttacgcagacaatgtgtttggcaatttaactcatccaattttctattctgggttttatttgattgtgaaatgaatcattttcagtactgtggaagatgaaatcatagtagaccaagtcgagtctccggagattgttgatgactttgagcttggccaagatgaagctgttgatatcaaagacaacgaagttaataagcagaaattgaggaggcgcgtagatcagtacaaggtggtattacataaatctatgtaatttctttgaaatgtacattacataaatgtaaccagatcggcactttttgatggaatatagattgatcttcggaatccatgccgtgaggggaagaaattgcttgttttggatattgattatactctatttgatcaccggtctacagctgaaaaccctcttcaacttatgcgtccttgtaagtaattttacttttaatttctatttattgagtttatacaatcgtgtaagagacattttcccataaagtcaaggtctttgtctgatggtgaagtttaacgtgtcttgttagatcttcatgaatttcttacggctgcttatgcggaatatgatatcatgatatggtctgcaaccaggtcagatatccactcatccttttcctccctatgatattgtctcaaatatgtttttctacttctatatggcctaaagtggcagtacactaacactttgcaatgctgacattctatgtttatgattaagatatttgctacactatccaagtcaagacaaagttatgtagctgacattatccctttcttggaatagatacgctaactctatatctacccttatagttataccatagtatactacacatagcaatgatgacatttctcatctaaaagattaagatataatttagtattggattatctctgtcaaagactttctccttcttggattttccatttctaagagtgagtttcattgtcgaacgtgattaatcaaaattttagaatcgttattggagtcttaatattgaacgcagggtgttcatcttagcctttacaatgaatggaggctcagtttgtatctcagagagaattagactctctggttaaattagttgttacatgcaaagaggatacaatagtaacatgtggttcaaatatgaaagggaagcagataaagggggaagaagatattgaaaaagcaattttaaacgtttataaatcactttaggctttagcagttcttggagacaggagagtccttttagtttttgtttttgctcagaccagcatggcatccttcagcatataaggttatctccaaggtgctatccttaaaaaccacataattcctatattatatggtgtagaaacacaaggatggagattttttagcaggaagacagatgtgatcttaatggccaataaaatagtggagtgttgtcattctcggaagggaggagtggtgttcaaaattgatattgagaagacttgcaactttttagagaggaacctggaagactttatgatacaatcaaaaagtgttggaaagttttggtggtagtggacaaaagcggatgtctgttatcaatggtaggctcgaggtaagttcaatggtattaggaaagggtaagttcaatggtagtaggaaattaaggcaggtgatcctttatccccctttctttttattctagcagtggatttgttgggttgaatggttgaacaagctgagggagtgtctcaggtccaaggatttatggtcgatagagaaagtggacattactcacttttcttagaatccactgaacaaaatgttccaaatctgcttagagtattgagagatttttatgtattgaggactacaaattaatttaagcaagagccagagtttgggatctcaatgtggaagaggggtggctaagtaatgaagctgataagataggttgtgtgatctattattggctgctggaatacttgggtatgcctttggatgataatcctagaaattcgagtttttaagatctagttggggctgaagtttccaattgtttagatggttggaagattgctgacatgtctagtgaaggtagattgacatatacaatcagtctttccactttaccagcttactatcttttgtttttgctccattgccggttgttgatacttttttttttcgcaaggacggttgttgatactttagagtagttggtgaggtattattttctttttgggaaggtggggactcggctggtggcaagcttgcagtctcttggaagagtgcttgtaggcccaagaacaaaggaagactgcacattcggcactctaaagatataaataaggcacttctgatgaggtagttctgaaagtttcctaaggaaaagaattatgtggcgcagaataatcaaagcaagtatagactaaacgataacaggtcggactcaaatttgggtgagagaatatcctttggatgcccttggaaaataattgcttctctttataatgatttcctacggcgggtgaggtttaagtaagaaacgaagataatattagattatgggatgaaaaaaaataataagagtaagtatgaagatttggaagacaaaaaggaaagactttaggacaagatacaacattgggtagctatttggctttatatgaaaaagagtttaaaggggtttctttctattctttattcggagaatgacaatactttttgtaactctaaccttttcagttttatcatttttaatgggtgttctcgttcacttttgtttgtattatatttttaatcttttaatacaagttgttttgtttttgaaagaacaaaaaaagtagattaagatatatgttacaatattgaagtcaagacaatgaaatataacagatattatccctttcttggaatagcaagggcacagtggtgatactctaaatcgacataacccttactcgatttgcacacgcaaaaagcatgttttttttttttttttttcgttgaatatatcagtagatctgatttttgaagatactcataaatctatgtagttccacaagttgagtctatcttcttaattaattgattcatctaagtatttagttggcaagtttgaaatgaaaaagatagatacaattcctttggttgttagcttgtatggatgttttcgacggtattattttagtcaagtgttaactcatctccccaagttattgtatacacatctcattcatacaatttacttgtattaattttgcagcatgaagtgggttgaattgaaaatgggacaacttggagtactcaacaatcctaactacaaaatcactgctcttctagaccacttagcaatgattacagtccaatcagattctcgtgggatcttcgattgcaagcctctaggcttgatttgggctcattttccagaggtatgcttgtctatttatctacatccaacctccactggaatggaggttgacaacagcaataggaaaactaaattgtgaacatttagggttcgaacgaaggaagaagcatatgatacttgtttcgttgagaccatgacacatggaaaatttaaactgccaaagtaaaataatgcagttttatttataatgcctcgtatatatggatatttttcgtttatgtatgctaccctaccccctgtactgcatatttgactattttgtctgctgttttatttcagttctacagctccaaaaatactattatgtttgatgacttgagaaggaatttcgtgatgaaccctcaaaatggcttgacaatcaagccattcaagagggctcattcaagccgtgagagtgatcaagaacttgtgcgactaaccgaatatttacttgccattgccgaacttgatgacttgagcaccctagatcatagtaaatggcagtattttaacgaggacggtgtgaaaagacggaggcatgcttgattgagattaagagttttggaagtctagtttgttggtcatctccactatttgaggtacattttagtgcctttttccctactgtactacatatttgcctagtttttcattgtttctgtttccttgacaatacatgcaatcatatgatattgctaggaacttctgaaatcgattaggtatcgagacatgcatacatacatacatgtatatatatataaatttataatatttgaaagacacttaattgtttaacagtaactatagatttaggagaaaataaatttacattgtgtacttatgttgtgtggttactccatgcgtaaatatttcgtgtgtacactcatgtattacaaatatatttcgtgtgcgaccatgttacaccaagcactcatggatgaggaccatataacatagagacatttctcttctacaaatataaaaattgaggagacttcactgccaattatattgatttgcttgattgaataattgaaaatactaattagtataaatatccaaattttttaataatataaataaataataatgagtgcttttaggggaaactctttaggtggcgtttggttagagataatgaa

SEQ ID NO: 306133 - DNA, 3300 bp, Cannabis indica
actccaccgctcagaagatacaacaatagatttgttgtagcaggttcattcaacccattagcttgagcattcaactattgtgcaaggtgcgtaattacactactagcaagcccacccacagattacttgttacagagttaaaacaaaataaaaccaagtcacatagatatggctgattgtaataacctaaataaaagacactcaaatccatatcacaaaaacaagagtaatcacaatagcaaaatcacagacaatataaaatatttagaacaacctcaagtgtctatgaatttaataagaaaaaccttaacatacaatataaaatatttagagaaactatgttatatatataagatgtttattaaacacatgaatacttataaataagtacatgaaaaaataaattcaaattaattttaagaaattattcttaatattcttaaaattagtttcaataattttattttaatttttatatttttatataattgctagctggtttcactttttttttttaatttaaatgtgtactactaaatattagtattttttttaaaaaaacttaatcatgtccaacacaatcatttacttgattatcaaaattgaaagtgaaatataaatttcacaaatcactcaaataaattataatataaactcacattttttttcttttttatatataaatataattacaccaaatacaatacttacaatatgtttcctaaataaataatttttctatttcttacaacatgttatgttgtctacttgcagaacataacaaagaggatcatcaaaccctaaactttcttcccggattttcatcatttcgagtcacagatttaccgttgggaataattattccaccgggaaaatcagaatcgcccttcgatatcatgctccacaaaatggcacaaactctccccaaagctaatgcagttgtcatcaattccttccaccaaatagactcacaaatctctactcatctcaaaacccaatttcacaaattcctcaacttgggacccttcacactcactaacacaaaacctaataatgaatatgacccaaacaattgcctagaatggttatcaaggcaaaaccctagatcagttgtctatattagctttggtagcctagtggttccacacgctgataaagtcgcaatattggtagaagccctaaaggaaagtggattttctttcctttggtcatatagaggagaaaataatacaacactttttgaagaaaccctaaatggaaaattggtgtcttgggcaccacaagtggaggttttgaaacacccttcggtcggggcttttgtgactcattgcggttggaactctattttggaaagtattgtgggaggagtaccgatgatttgttgtcctttttttggagaccaaatgatgaatatgaggacgattgaagatgtttgggggattggtgttggagttgaaggagttgcgtcgaaacatgactttttaaaggctttgagaagtgttttggtggaagaagaagggaagggaatgagggagaggattggggttatgaaaaagcttgcttatgaggctgtaatagttgatgataatgttgttgatggaggaagctctaggagagatttcaatgacttggtggaaattattactaaagggtaatttaatttaagttaattagaacattaattaatttgtttagtttccaaggaattacattgctaaacatttataattagcctggcctaaattttatgttggcagatcataaaagttacatagctttctatttgatttctatgtcttgtttcaattttggaaattgcattgcttatataataagatagtaaataaattttgggtctcatataatttatgtaataatttttaaagagttttgttaattaattgcaaaataacacgtctaaaataatactaaacaccactggtatcaaataacaatattttttttataataaaagtacatttataattaagaaattttaatggatattaatagtgcttatcactataaagtatcataatgatggtgtaattattatgaaaaattattagtcatgtacttaaatgctaaaatgtatttataatgctgagtacttttgtaatgtgtattattattgttattattaatgtaattgaatatattaagtccctcattttattttaataaagatgagaacaattaataattacaaaatatcaccttatatattggtacaccatataaaaaaacagttgctatagcaattatgggcgacaactaaccttcaaattaattatattatttaatgagcgtagaaattttcaccagaaatgctaaaggcaccatatgtgtcatttagggactactcgctaaccaatcataacgcgaaagtactaagacaccactagtacctaatagcaatactcaaatttttgaaatattctttttcgacatgtaagttaatgcaaaatggcctatatttattaattaaagtaaccaaaaaataaaaacttgtccaatgaagtgaacactagtacttaataacacacacattaatttggaactcaatattaatgaatagactattaatatgagtaggtagtgctaagaaatgattttttagttatctcttgtttcattttattcaataaaagacgtgcaaactattatatacatgcaaaaatgtcaaatgtgcatgtgaagaaatggttacatgtaatttttcaaagagagtgtgacttttgataataataatatatatatttttgaaaatggtaactttcattaagaacaaaaccaaatagtacaagttaccacttaccatcttaaaaagtgtgaaatattatccttctaccttcctaccaacccgatcgatgagcatccatatattcaacaccctaagagtatatctaatggttacattagaaaaatttgataaaagaattacaaatttcaaaaaccatatatgctaatacagagagagatccacactattaattacatatgattttgtaaagtaaatttgaatctgattcaacaattgaaatagaaaatctagtccaatctgattcaacaagtaccaggaagaaccttcttctgagcaatccagcaaccgatttttttttttttctaaaaagcttattatttcttcttcttctttttttttttccaaacaagccataataaaccacacaccaaaataattctcaaaagcacaaagtataaatgacttgtttgacataacttatacttttaattttagacagtagaaaaagagaagtaaaagtttgagctttttattta

SEQ ID NO: 306134 - DNA, 4078 bp, Cannabis indica
ttttttttttttttttgctaatattatatattaaagagaatttcattatccctacttgatcataagacatgggtccttttcctttaaactcttatatcaaaaaatcaacgagattatatgtatatataaattcttaggcttgaaaagacttgcctcttaagaagttctgcagggagtgcttgttacaggaaaaatccaattcttatagactactgctgacatttccatagcatattttcctggaaaaactgttatttccaaaattcctccagcattgataagagtttgtcttgcaagtgcatttatattcatagtgtcccgaaaatgaggttgcaagagtttatgaattgggtggagtgcacttagttgtctgtttgttgctatcacaaatggctcaatcacggcatgagtattcaacctataaacaaacaaaaattaaggcactagaccatgttacaaattgaaacaaataattggggcaaactttccttcaaatcatcataccagtgactaatgagttgatgatagcctgagtcatttacagctacataagctttagcaagttcccaaatggcactttcaacaccttctttagatggggtgtatactttgctaactgcaccatattggtcaccatttggatgtggtaagcttaattcaatagccaacggcttcaaagtgccatcatctttgagaaacaggagtgtcctactagcataagtctttgtcaaagttgagttaatcctcctcaagtatggcatgaatgaatcatggtgatccaatataaataacttgttgttattgagtgcctatacaaccataacacattaataattaaacaaaaatgctcgaggtaatagttactaaattagaaaatgaaatctagcacaaaaaacaatatgtcacaaaacattacctcgaatacaccaagtccatccaaattactttgaatatggtcttcaataattttactagtttggtcaccgtacactttagggtctagcgtactttttggtgggaattcctgtaattaaattggagaaaatactaattggaaaaaaatcaattaaaataacctaaattttgcaatatttgctttaatcatgtttattaattttagtatgtaatcataaattacctcaaggcgacgaatgacaacagggttaactccagccaccatttctcttccaaactcttcatcagtcctccacccagatttattctctaagccaaattattaagacaccgaaattagatgaaccaaattaacagtgaaaagatgcaatctaatgatttttcgaatggtataaaaagtatcattgtgaacaagattgaatgtgacttatgaataaataaaaacctttaatcacatgaggtggaggatatttaaggaactgtcccctgtcaattttaaacatttcctgaagcaactcagcaggaacatttttctcaatattgtcaactactgttgttggtagcttaagtcctcctttatacaggtcatatacctcttcaaagctactaaactcaccaggggtctcaccaaaataagattccaaagcaggaaaaatgccttgagctaaagactttagtccataaccaagaaagtcagccatcttaacatgaccaaaccgttcatctcgtggaacataaacatttaaacttgtgataagactcatgctgctctcaatgttagcatctattaagaaataacaggaaaaaaaaatcacatctttaagagcaagaaccaaaattcaaactaattcccaaatcaccactctagtttgatacaagtaacacacataaatgtctaacctgtctcagtgggtggccttccggttcttcctcttcgagggtaagggaagtcactagatcctccaaggatttgacgaacataatcttgacccttatcaggattacccagatcattgtagtaagcatagtcataaactctatcccactcttggcgctctccttttccatttcctctcaagttcactaactcttgttctctcaactcacgcagtggttcgggtgtttcacttggaagatatgactacaaagataaagcccaagaacttaagataataacacaaaacaatgaatttatccttaaagaaaaaaagctctgatttttcattacgtactttatacaaacagatggagggctatcttaaaaaacaagaaccaataccttgtttctgaagaaaacacgatcgtagtcatatttggttgctgggtagatccaagagttacatacaaagtggatatcaccttcatcgggaacatctttgagtgtaaaggtcttaagaaagaatttttcggtagcgtgattatttgtgacgatcaaagctcctggaactccaactgacacgtccaaatccaaagtaacattaaaagcattgtcgcctggtgctaatgaaggaaaagatgaggtaacctcattctccaagcaagcttcttttcctactttcccttttaatccatttgctgtaacaccaaaaattgtaaatgaaattatgcttgtgatgatggcaaatgtatacaaatacaatgtggtatttttttaaggacagggatgaatgataaatgatagagtaatgctagagagacatgtaataatacaatttttttttttttactatattcaatttctaacatagataattatatatggaaaccatgtgttatttttaattctgtagttaagactaattatacattattatatgcaaaagcagaactataatttgatgaaaatgaaatcgaaatactctttagctttcacaaaatcctaaattattttgtctactattaagaaattatattttcttacaactatcaaataaataaattattattgttgtgacttacattcaaaatgtatcatataatgatatcattttaagttttgtggaaaaaaaaaacctcacattagtgagtactatggcatttggatacaccaagtggtgtttggaaatgacaacaaaagtttacatgttgtatatcaaaatgataaataaatcacatgaaactatctttgagttcaaatgaaaattcaaagtcaccaaaaactattgataagtcacgcaactcacaaagtttaatatttcatcaactaattggtggtgcgtacgacaaatagatttcaagtgtagaaattttatcgaatagaacttagttattaactgtgtatagctttataaatagataaaagggagaagacaagatgatttagtaacttgttctttattaaaagataaaaaagaagatctacggatttttgtgtttctgttttttttttttttttaatcaagaataataatctttttattaatcaaacaagccatttacaaccaaataggaaatacacctataaatttacattaaaacttacaaacttttagcatttctaataacaattctctcaaaattagaaagcttcatatcttgaataagagacaatctagttttgagattctctttaatgtttctatctatatacattggagctatacattttctttcaaaaccacacaagttccgattgagccatataccatatatggcactagctagtgtagcatagtaaatttctattaataaacttctcggtctttttccttgaatccaatcaagaaacaattgaaaatgtattagactctttaattattttttcattatagcataatagtattacaatcaactaataatttaatagcagtgagttcgaaccatgccttctctttttctcaaccctccctcaccactggctttacactctttaattgttaatttactttttaacagttcaatcgattcgtaccatataataataaaactctatgtaccacttctctcatttaatatataatattatatataatatatatttaattatataaatatagggatatgattttgtcctattattgtactttcacggattgtaattggtgatgtacggcagccgtcagatgagtgagttctttgatctgacggctgagattgatctagggatattagggttaaaaagtataaacgtactctaacactcatttaatgtaccctgagaccc

SEQ ID NO: 306135 - DNA, 2936 bp, Cannabis indica
gaacaagggggtgtactcgggttagtctcatctaagctgtgattgctctggttattgtaatcgtattgatgttctcttattcacatattaatgaataattggtgatgtttctcaactggagtatggccagggatcatgttgatctctaggaccggaaccaggataaaatcttgtgttgttctttgattaatttcttttgattcattgttgattaattggtttatgttcataattactgttcaagttgtgcgtttattgcaagttttatgattaaatcctcaaagttatttccgctagaattacaacagttttcatgttttcatttaaaaaataaaatgcgtacgtttctttggtattctacaatataattaacagaattcatttatttatttatttattgtatataatattgcaagcgccacagtcacacccaacatataccaatgatacgccacacaaacagagttgagatattttgtcattatttattagattttttcaaagcatttctttattgagatttgaatctacataattatagtctatatcatcggtgctgttggtcgcaatttgcagtgctcattctctcctgaagaatcttttttccttggtaccttccaagcattaagagtgtggccattggatttgttcctggtgattcagagaaagttgagccgtccaccactctcagtccattaaccccgtaaaccctgtattctttgtcaaccacagatccgacattgcagcctccatggtaatggtaaaaggtcctcacattgttcttgcaaaactttttcagctcatcttcagaagtcatattcagtacatagttcttgtgtttctctgtacccaaaaacaaagcaattgagtgagatctctcaaccttttgcagcaacttggccactcttatacaccctcttgagtcttcttccctggctagatagttgaatttgactgatgggttatttctgggatttgtgttattcaattctagcttcccttttgagtatgggaaagcaagtttggcagatattcgaattctagtttggttgaaactaactggcacaattcctgattccattataattttgaacttatcaacaatgcccacaacttggggtgtatctggtaatcgtttctggggcttagagtccaccaagatggaaagtgcagggttatcttgaattccatgaccaactctcttcaagtcagtcactaacgttaggttgaaattctttaggtgcttataagaaccaatgccacttaacattagaatttgagggctgcctagtgccccagctgctaatataacatctccccatgagctagaatcatttggttggttgagataaactctatgaattatatgtgagcttccatcacttttgatgaaccttattcccaaagctattttctctgctgttttacctgcgaatttggagtcactaacacaaactctcgaaacaacaataatactataacagttaaaacaaatgtatgaacaataaattaataaagcgatggaaaatgtcacaacaaagagaaatgatagtgaaacaaaggccgtagattctactcagcaattaatgaggcctacaattacttttcctccaagaagatctttcaccatgaaagtcaccaaacaattcccttttataacacaattaggagaaccaaggtataactacttaactttctaactactggaagaccaaactgatttttgtggattgtataaacaacctaaaatttggagttacgaaaagaaaatgaaatagcatgtaaaaaaaaggtttttaaagaagtttaccgatatatcattactcaccattatttccaaagattacatccattactgtggtatttaaaagaattgtcatgttttttgaattgcttgccattagaagatcagctgaggtgtgtctttttccacattgatcaaaaatactcccaccaacctttgtaccttcaatatgttcaagactataaccattatatggtaaaatcccagtttcaagaaagctagattcagtagccctctgccatggagtcaacttaggtttgaaaactactttagattcgacccattcataagcatctttcaccatctcctcattccacccaacccgtttgacaaaatccccacttgccctactgtaaaaaccagcgttcaaagctgatgagcctcctaaaaccctgccacgaagatttggaatgccatcgtcggagacaaacctttgagcaaccgataagtattcatcggtttggattaaggataatccatagaacctcttgtctattactaaaggatttccgtacggtgaaccacctcgttcaactaagagcactgaaaatctttcagacaaggttgcagccaagggacagccagtggtacctcctccaactattatataatcaaaggattttccagagacttcattgacatttgaagtcatatgtggtaatgttttgtctacaaaacaaaatattataatctcattattcttaaagacttcatcttcatagcttctaagtcgttatagtacagttttgctaaaatagagaagacactataaaattgcataccttgacgttgagtgtgtgtagaagaacatgtaggacaaccttcaccaagtaacggaagacgaagacaccaacatattaacaagagagatacaacaattttattgtcttgaatgactagagaaatcttcatttttctttttgcgtttttcccctaaaaatatgaggtttgatagtagacgtggttggacaaatataattaattggcaggaaacttggtggatcagtaaatcatttagagtctcttagtgctaatgtatgtatataatcattaagagtcacgtttggtttggtatatattagtatactaggtgaatgtacgtgccgagccacgtattgctagtttcatttaa

SEQ ID NO: 306136 - DNA, 1703 bp, Cannabis indica
atccgtatttaggactcatcccggagttcttcgacttgatccagagcttctaaatgtgaagaagaagagagtgtatgtgtaagtgagtaatgggttatctttgattttaagatgcaacaaaagtcataataaattattcaaagttagatggcagaacaacaagtagtctttattagaaaatgacctgaccacaatataacatgattattaccttcttacttctcttacttctcaccaactcaacttctccatcaccacacatcaatataaatatgtatatatggtttttgggtcaattgggaaaatcatcaacacactacatatatcagcatatatattccaaatttaggcctttaattaggaggagaagaattagaagaataagaagaataatatatatccccaactaactgatcaacatgaccatgatgattatgtacataattattaattaacacaccaaacaaagatacgtatattgagaattgatcaggtcattactttattgtatgtatatatatggtcactttctaagacacattttgcgtgaaaaatgtaatcttgagtagaaacactatatatttcttataatggtaattatggtttgcaaagatatcaatggcctatactgtaccccatttcaaagacaagctacatagaaatgggtttcaaatctcaatcctctcaagttttcctccctatttatcattacagtcaagtcaagccttagagtagactgttgcattaaaattgtatatactatattatatagatataataaagttcatatttattatgtttattacaaaatagaagtggaaaaccataagagataaagggcctctaaattatgttgcttttgtaatcattatatatcttcagacaaaatttgatgagaggtgatgtggaagactggaagagtatacctttcttaactatttttttttaaaaaaaaaatatttatataactcattttcaaaatttattcttttaatttttctttctttcttttcctttattgaggttgtaaaaacacagacagaggaagtatgcatgttaagattgaacttaagattccacaaaggcataagctacataatcaaaagtctttataagcaagtttactaatcaagatcttctcttaaaaaatgttgtcccataatactaaccaaaaaaaatgaatgttcttccgtattaacgctttactgacttgcccttttgaaaactaacaaatttaaaagccaattaaggtctatgaactaaaatgaatgtaacaaggtcaagggcaaatgaaaagaagacgatcaaagaaattttgttttcctagcttcttaattgctcttttgtttttaggaataggggaacaaagatagagacaaaatgtttatgtttgtgttaattatatatttatgtcattagactatagtccccatgaccatgaagaatgagacagaaatacacgtgggtaattccaaaattatcagaagggtaatatagtcatttcaacacaagccataataatacctaaaaaaaaaaggcaaagagaggaaaaaggaaaccatatttaataacccgccatgtcgtttcccattctattcttcaaaaatctcataccaaaggccaaaactcatatcatacccagtgtacacgcattaacacggagatgaaacctcacagatagatatatacatatatatatatat

SEQ ID NO: 306137 - DNA, 2022 bp, Cannabis indica
tttagaaattaatttgtcaaaacatatatagtttaaatataatttgtaaaaagtgaatttataaattcaaatacatatataatcctcgttcaacaaattaagcttttgattttatttgaagatattatatacaaattaaattgaagtgatatttccatttaaagaaaaaaaaaagataaaagaggaaaatagaaaaacaataattcttttaaatctatataaatttaaaattagatttttttccatgtaaataatatttataaatgatattttaaaagatttacaagggtacaaatgtaattaaatataactcccaaacacaatatatatcaaagaatccttgaagttgttttactataaagttgatcaaattcaccggttctaaccctctcaaaaatattcaccatcattactaaaacatggcagagaaagttgatgatattgaagaaataattataagagataaatcagaaagtgcatcatcaaaattcatgtcgaaaatcgatgacgatacactctcagaaattttggtcagagtctatgattatcaatacttaattcaatgtaagttggtatgtaaacattggtattctctaatatgttctgatcactttattcgtacttttattcatgaaagtcataaacaccaacaacaactagaaaccttaacatatgatgtttttctcaacttacttcccataaaacaattgtttatagagaaatcaaatattcatgatttaagttggttttctacaatacttaaaaagagagcaacaaaagagtatggatatgtggatagattttatgatggacacattagggctacctacaatgatttgttattgatttcttataccacacaagattgccacgattactacatatgtaacccttttactaaacaatggattccccttcctccaccacctaaaataatgtccactacaaattttaattacattgactattttgaccctttcctttatggatcatctatccctatattcattagatttgtgtttgaacctagtaagtgttgcaacaaagtacaattgatggggtgtaattgtatgaatggtactagtactaggtttagggttttgttggttacttcttgtagaggttttcatgatcctgatcttttgttttgttcggagactaaaaaatggagcaaaattaccctttctttcaaatctgaaggaatgatatttgatgtggttgcaaataatgggattttctatttttttgaaacaaacaatatgaagctagtagctatggatccctttaaagataaaaaaaattggtttcgtgtcattagcttgccgtctagtttaataaaaacacgctgcaaagatcaatttttggtaaaacacttcagcctggttagaaatcaagtgcgactgttatttactattaatgatgacaatgattatgacaagaaatttcatgttatttgggaattaaataccaatggtgatgatgatgatggtagatcaacaaagcaagattgggttttgaagaatgtgataactactttgaatacatcttggtgttatttctatcctgggaatggcgatcttatgttcttcgcagataaatataataacatatatttatttgatattaaaaagaactatcgatttgaaaaatctgatgaaaaatattgtataagtaaaattatgaccctgaagcatcctgtttggcctacacctcttccatccacttggtaacttattagctaaagtcactagcaattactatatatatagctattctatgtcttagcaagatgtttgtctatgaaatgtggtgtgtttcagattatttagttattatcaagattattagttatgtttagcaagtcgtataaacttttcgtttatgtttattagaaatctggaattaaatgtgaaatgaagattgtttacactttttcttttattatattattatttgtgtgaatagaatgtgttgggccgtattttctctctactatcagaaatttggggtaagttgaaaaat

SEQ ID NO: 306138 - DNA, 2443 bp, Cannabis indica
agattgaactcggctcgtggttaatgatgagttcccttgaaaatcttctgaccccatatcccttggacttggtaaaaatgagcctggtggtcctggaattagtattggatcaacctcaggaaacctacttgcttccccatcttcatcggattcctgttcctcccctatattaacatcctgcacaagcatgccatcatctcctaatcgatcagaataaaacgtctcttgctcgcttacaaaacttgttccacctggacctgttagtccttccacatcaaataaagcccccttgtattgtagagagtttgataggatcttagaacgatttcccggtttgtgaacttcaggatcagcagatttacgccaattagcaagagcactgtccctaatagggtcatcttgagagcattgaagatcctcctcctcctcatcctcacatgttggtcccatatcatcatcagctttgtccaaagtagaagaaaataagttctccgaaactttggctgcattcctaccagctatccctaaaactcctgtgttttgtctgacttcaaatccagtgcttctacaaagagaggtttcattattcatatcatcatcgctttcagattcatttccagcaaattttcggtgaaattcattgctggcatcagaattccatagtgctgcttcatcatctgtttctgtttctgtcatcaaatgcacttgagacttcttaagggctgagaagttattagcaacgtcagaatcgtcggcttcagccacaggtgatgatcgctggctagacaacaaatgttctctagctgaggagattttccttgcttttgatctgaacttggaggcatgactaggtggaggttcgaaatcctcaactgggcttgtacatttgggaggtttcagcatgcgataatcattcgcagaacttggaggcatgtcctttctcaactgacggggtttcattgtcccaaaggatctctcaacagcattgcctctactcgtggcgctggataaagaacttttcgctgatctctttaacccagaagaaggaggtggctgctccctcttgtgacaagcccgggcttcataaaatactttctccaacctgctgtcactgttctcaggagacaaatccataacatcttcttcctcaccatttcggtccaaacgtgattgaagactctcaaccccggaatcttcatttccaggccattttcgttgcacttgttgatgtcttgcttcactgttgaccttcttagcaaccccagttcttttcgacacacccaccttcctaaagttacaggattgctgggatttacctgcttctccatgttacttctctcagctccatactgttttccttgaccaccattttctgttccaaaagctaaagtctttcatatcattttgtgtgcaacaaacaagcaagtttctaactttgaaacacatgcactttagagtagtaaaagtcaatacacaccaaatataaaaagacaaggttcacttctctcagtgaagcaactttcagaattgttacatacactatctctatatatagtacagtgttgaagaaatgaagaaagcaagtgaaggaggagaagtaaaataaaagtggtgaaactaataatagcatgatgaattgtatggcttaccagaggagaacgaggagactttgatgaagagagtaacttcctttttgtttgagcaagtttgttaaggtacttgttatacttatactgacgcctctttttctttctggtagaaagaaatttggttcctttaatattattattattattattagttgctcctttcaaaggtttccttggacgaagatgctcaatgagctttgacacagaagggatatcatcagatttggataatatcctaagtttgataccattggaatcaatatagacagcaccaacatcatcatcaacatcatcagaattatgatgatgatgatcagaagaagaagaaggtccagatgatgatgacactcgttttgaatcatcttccaagggcattatcatcatctcatgatgatcagacttgtcattactctgctgaataggaaagcttgaaacaactgtggcccaatttgatccatttcttctatcaagatcttccaaagtgcaaggaatagcagttgcatagatatcaaccatcagctttgtcttccttggtttaattctatgccttgaaagtttagtactactgtccactgtccacttgggactagttgactccacagagaggcattggtcaatatgagcattcaaagtagtatttgatgatgaggagagactttacaaacgagggcaaacctttgaagccattgactctgatgggtttgaacaatttgaagcaatatcttcagctgagcttctatccaaaagttgaaaccgtaatttcactatcaatctgcacttttttacacccgtaa

SEQ ID NO: 306139 - DNA, 2747 bp, Cannabis indica
atgggacataaataaagttaattaatttatgatcagtgtaacaccaaaaccaaaattgtgggaaagattcttcaaaaatgttatggaaagagtctgtctttgtaagcctcactccactccgacattcatcaagtcatttcaagtatatatgtatttactcctttggaaacacaatgtctaatttattgaaagtaattataacattattaattatattgtaaatgtgtaattagagataattttacaaaaatataaaaaataataaaaatatttttttttatagtttttagataatatttgacataaaaaaaatgtcttttggtgtaattttttttacgtagtattttgattttttttattttattatttgtatattatttttatgttattttttgttattttcatattattttttttgttatttttattaaagtatcgtaaaaatatataaaaaaaaacttcaaacgtaaaaatataattttcttataaaaattagtatttcatataattatcttattttaattaccctctataattctaatgaattgagtgtaattacattgtaaaatattatttttcttattttgtcaaataaaatattagaaatttatatgtaattattattttatatctaaatataacttatattttatcactctaataattacgctgtctaatagggctacttcaaaacacacttaataatattgtaatgtatacatttaaatcaaaatattatttaagctaatgcaaacgtttattgttcattttgtatttttctaaatgcatataaataattagggtttaaatcatacaattttgaaaatatagtattacattaacagattatttaagtaatgagcgaaatataactgaaggggttttgcgataatttttataattcaagaggaatttttgctaaaaaaaaaaatcaaagagctaaaccgtacaagagtgatagttcaggaaaaaaaattctatttattctttctaattatctaattcagtcacaattttaaaattattttatgacatctaattaatttttatttacttttgaaaagaaaaatcgaatttaggacttctctttctaaaaagaaatgtagaatcaatagactatacctattgttatggaattcgaaatatttattgcttagttggttaaaatttattgcttacaatacacttaattttacttaaataaaagtatttttctcaaaaggtgtgggcctaagcacgggcctagcccgcctatgcttagggtatgcctaggcccggccctgcctattagcacaattattttttttatgtactcaatgtatcttttggatgcaaattgatattgttatgttgctacgcaaaatagtgatataaatttaaatcttaaaatatactttattaccttgttcatttaaaccctttctcttctttctaatatccattctcactaccaactaagagggtaaaagagcccaataagaggtaaaagagccaaggatgatgatcctttaaccaaaagaaaagttttaagtattctatttatcattcaagagcatgataaataaatataccaaaaagtcccatttgaaacacatattaaacaaccaacaacaacaacaacaacaagtgtttaaatactctctatttcttagccacattaaactaaaaaagaaaacattaaagtactacaaacaagtacaacacaactctattttttactctccctgcataagaagcctctcctttttgatcttctttttcgatttcgatttcggtttggtctttcttggagggagattcttcatagcatacttgtatagtatgaagtttccaacaagaaagatcactaatagtccaacaatgataagaagaactatcaatcttgagctgtacttcacttcagatttagcatcttttataaaagtgtcctataaataattcattaacaaataattactacttcttattaatcaaacataaaccaacaacaaaatcttgaacattgtttgtcaagaatttacaaatatttgttgcttgagactagtttaactatgtcaattaggccaaagtcattgatctctaatttactacttagccagaccaaaatagtaactaaattttctagcatagtagaaaatatattaaattgaaactagtcacaataatacaactctggcataaagaaaaggaaaagaaaaaatcataggcataaagagagagtagtagtaccaaccagtaagggtttcaaatggggtgggagcttgtccaacatcacaatatcatcatccattttctgcaagaattttgcaattgtatcaacttttgtttaagtatttgagtttgagtcatttctcattgtcacacctaaacttattataactcttacttaagctttgggatatccgcttctatcattatcaatatcaactcgtgtaaaaaaaacgacaaatgtcaaagaataagaaagtagtcgtgtgaaaacgacatgcgttttattaaattaagcaaaagaaaaatagaacgcccaccgtggggctcgaacccacgaccacaaggttaagagccttgcgctctaccaactgagctagacgggctttttgctttgtataacctttttattataagatatatttatatgacaaaaatattaacaatgaaataaaatgaaattaattatcggttaattaacttcatcttctcctatttttttttgggttaatttcacaaatgcacaaaaacaacaaaaa

SEQ ID NO: 306140 - DNA, 1420 bp, Cannabis indica
tttttttttttttaatttctcaacaattgaagttttacaaaacattcatttcattcctacataagaattttcacctttgtgaaaaaaaaattctttaatttgatgcttcccctaattacccatttcttcttatcttcccctaatcccaccccctaattttgacaagttctttttttcaccatttccttctgagaaagaaaaaaaaagaaaaagaaggaaagaaattacagaaactcatgtaggaaatgtccacctcaaaatagctattttgcctcttttaagtttccttcctttttctttttctctgtcaaaaatctgcacaaaataacatatattccaataatgactgcattagaattataacccaaaaaccaaagttttcatctttcttatgaaaaattcaaaacaaagagatgaaaaagattcaatctttattttacataccatcatgtttcttcatcaaatttcttgcaaacaacatacaaatgactagaaatccaactccagctgctcctcctaatattatagccacagttttgcctgtatttgctccaccaactgaatcaatcaaaaaaattcaaaccccattacagataaacacaaaaaacatcataaagcaacaacctttatttcatttcatccatggttatatatatacatacctgatgaagatgaagaagatgatgaagaagaggatgatcttcttggaaccccatttggataataactataactaatgaaacacttatggagataaatttgtcctgatatagaactcccacactcaacctcagatctctgaacagcagtcttaacacactcactacaatctgagtcaccaacatcaccttcacactgagccaaaacatatacttgttgatagtttgttgtgtagaaaccatgtcctgaaacaacaccattttccatgacattaaaagcagtgtctcttctctcctcaaagccagtaccagccacattagtactcccacatgtcttgtaaagcatttccatgcctgaaatctgagcaaagccataaacttcatagagcaaatagcaaccataaagctggactcttgcagctactgtctttccacagagattgtcagccattgaaggtagtttgctaacacagttgtaacaatcagcattgcttagatctcctctgcattgaaataaaccagtgaatgaggtttggccactcccagatgaggttttgaaaaatttggtctttgatgattgttgaactagagaacccaaaagagctaaaagggtttgggagtaaacccctgttggatctgagaaaacttgctttgaacaacctttgtaaaccagagaagtgtaatcagctgcagattcagtaagtggaacaagctcaaaaattgttaggattggaagaatgaagaggatgagaagagaaaag

SEQ ID NO: 306141 - DNA, 2058 bp, Cannabis indica
cttactatagtaaatgattagtagtattcatgtgtcaattatattaaaggtaagagaatgtaatttagtagaaactagaatttatttagttaacaattaaaaaaattaacaatttacttaagtaattaaattacaaaaataaataattgtaagaaaactaataaatttttagtttaagtacaatattaaaaaaataaaaaaaaaaaaaagtaaaaatattatagtattctcatcatattattaacattgtaggtaaagaaatttttgttaaacaaatattaacttgatatataatactaattataatattgattagcataattaagttattaaaccaagtcatgtaaacatgaaaaaagtgactctaagtagctctaaaaagacaatttaggagagaaaggtcagagtagagatactaattaagtatttaactaaaaaaatatatcctaattgggtttaagtacaatacttaaatactagctcatctagacgttgaccaacacttattagaattaaaaataattttcccatcttcaatggtgaattatgtataatttttaattttagaacatgactctttatgattagttagcaatatttcttatatattattttcttaagttatgtaaatttcgatacttaattacactaataacgatgaaaaatcgaagagagtgctaggtaacattttagcaattctcttaattttataaaagaatgaatatacaagcttaattaagccggaacttaattggttattaaattattaaactaatatagagaataaatatcatataattaataatgtccaaaggagtttactatttgcaattaaagaaatagtccaccttatgattattaaagaaaaagttattgattagacatatagttgacactattttatagccattaatacatagagagagagagaacacacaaagaacacaaaaacatttttctttttcaattttaagtaattaattaatctctaaaaaaacattagaaaaattattgcaaaggccataaccaaagaaaaaattgaagaaaaaatatttaatctttctcttgaaaaaaaaaatgtaaatactcttatatatcttcttgtaatatatatgatcatgtcaatatatatatagaagaaaattaaaagaagtagtgtatgaattaattaatgcttactcgtccataacgagaagaagggtcagtttcaacataaccagcaacctcagctgtaattttaactcctccattcacactccttcttgatgatcttctcatcttttatataaatatatttatagctagagaaataattataactaataagtttgtaataataataataataatatttagtatatagagtgtagtgttggttttttgggttaagaaatccgaggctttcctaattgatgatattcataagagaaaactccaaagagcaaccaaaaaagccttgaataatcaacactaagcataatattattccaacccataatatcttttccaaccatttattaattatatatatatatttataaatttagatgaagaaattaattaataataataagaagaagaagaagtattggggttaataatctgaatttgaaaaatctgtggacacgatttggttgtaccatttgtggtttgagatattgatctatacagaaagaaagaaagagaagaagaagaaatttatttgtttgtttgttaagaaaaagaatctcatatgaaaaatattgtgtgtgagagagagaactaaaaatgacaagtttggaatgatatatagatacaaacaaacacatatacacatacaacaacaaaaataaaaagttgaattaatatgttcatattatatggtgggtactatcatattatataccatccaccaaacaagtttttattatttatttatttattttatttactcattgactttaattatctctttctctctctcttttatatttataataaattaataattgagcaagtagggccggccctgacttttagtgggccatagaaaaaaaaattattttaggcccttattta

SEQ ID NO: 306142 - DNA, 2656 bp, Cannabis indica
tataaccatgaaaactgaaaaccaaattttggatattttgtataaaaaactaaccaaaccgaccgttgcttacccctagaccatggtaatgactgaagaagaaaaatgacaaatgagagtccaacacgctgtcgtcgtggatctactgtaggtcctactgttattcaacgtgatagagttgaaggtaatgaaagactttatcgtgaatattttgcagaaacaccaacatttgatcctcatttatttcggatgaggcttataatttaaggcattaattaaatttaataataaaatattaaaatgacattcaaataaatataaaaattatgtatttattgtgatgtaaattttatattatgtaatttaaatttggatattttactgttatgtgataaatttggattaatttttgacacattattgaaggcagcaaacattttataggatatagctatattttaacaatagatcaatgaagatgctcttatatttatcaaaattctccagcaaaaaatgttaaaataagaataataccaacaaaaaatttcattcaaggatgacaacttttttttgtaacttttttttgcagcaacaatagcaactttagttatattattattagggattttctttcttggtcaatattagggatttttttcttctcccaaattaaattttgttcaaactccatcacattactaacacaacgcctcaatatgtttacctgtataacacactattcattttctttgttcacgtaaaaatgaacaacatacaatcccttccttcttcattgtcttcttattcccgacaaacagatttctttgctcatttactagttcagtttcaatgttgccaaccaaaagtagcatccacgcgccgagaaccaccgcataaaaaaaatagaatttgtacatatatttatactagataaatgttacgtgtcaagccacgtatgcttaattttattttaggttatattttctttttttaaatattatattttatattaaacaatatttaatttagattaataatagttaaagcataatagtaatttgaaaaaaaaatttaagtaatatattgtctaaagttttaagaaataaaaattaaattcaaaatgttagtaaaatatattaaaaacaataatagtgaatttaaaattgtaaacaaaataatgtgtaaaatggacaattttttttttttcataaaaaaatctagttcttaagttttgatgatttcaataaaacaacatacaaagtttgcaaaattaaaagaaaacattgtagttttgaaattaaagaaaaataattcttaaataatttttttaatgtaaagttatcaattaatttcttttaatttataaatgaaattactaaatttatttattataaaattaaaattgtatatttgtaataatcaataatataaaattaaagttatttcaaaattactaaaaattatttacaattttgtacagtcaaaattgataagagttgcctcaagtttttaaaaggatctctaacaatcattatgggagaatacaaacatggtttgtactatcttgttggagaaattgttactggtgttgccacaccagccacctgttctaagaatggagctaacaagaacaatttgactgatcaaaccagactttggcattaaaagcttgggcatgtgaatgacagaggactcattaaacttgagaagcaagggattttgaaagataaactgtttgggaaactagattttggtgaagaatgtgtattgaggaaaacttgtaggctaaaaatcccaactagcatgcacacatcaaaataacccttgggttacattcactctgacctatgggaccattaagagttaagacatttggtggagaaaaagctacttcctgagtctaattgatgatttctcaaggaaggtatggatcttcttactaaaaaacaacaagatgaagcttttgatacctttgtgaattagaagaaactgattaaaaatcagattgggaggaagattaagaaactcaagacaaacaatggtcttcaatattgctccagtatgttcaaagaatattgtgtcaaggaaggaatagaaaggcatcacatagctctaaagactcctcaacagaacagccttgcagaaaaattgaatagaaccctcatagaaagggttagatgcttgctaactggagctggtttggaaagacaattttgggagaagctgttaagatagcatgctacttggtgaacaggtgtccctctactacaattgttttcaagaaacctcaagaaaaatggactggtaaggttcctaactgtgatcacctgaaggtgtttgggtgttttgcctatgttcacatcaggcaagacaagttgtaaccaagaacaatcaaatgcctatttcttggctaccctgaaggggtaaaaggttacaaattctggtgtcttgaaccagatttcaaaagacccatcatcaatagggatgttatcttcaatgagaaggaaatgcccttgaatctccagaagaaagcatatgcacaaggtacagacaacaatgttagaactcaaattcaactcaaccagaatacagtgggtagaagagagattagatgtaatattccgaaaacctaattatgaataattaggatttatta

SEQ ID NO: 306143 - DNA, 950 bp, Cannabis indica
aatcatagtagaaaataaataaattaagaaaactaaaggctatggtattattgttcaatataacttgtacgtgttgtgtactactaattactaattatttaccaccattccttaataatattgataataattaataataataagtaattttgcttaattctatattcttaagatatttctagagggacacctaatcatcatatatacaatttttgttttttattgaattagttgtactacttctactacacctaacctaatgtacacaacaaatattattagacactcttccttatattatgttattccaaaaattatacataattagctaggttttaaattttctagaaaaattaggtgagttaattaatacagactaccacatataatatatatatatataaataatttatgaatattaataagattactaattatatataagtatgtacgttctataaaactgtaatgaactatttataataagatttttaatgtctatccatagttttgtggagtagcaataatttgcatgtatggatagttaaatagcattaataattaacaggtgagttaagtgataaattaataatgcatgaaaaaactaattaatgagttgagtgtagaataaagcaaaatattggtgatggattatgtgagattttttggtataaatttcatctcataaatagttccaagtgctgtgctgtctaccttaaatgcaacagtagcatcaaataaatttgaaaattcataaaaagaagatatatgttacaaaaaatgaaacacaaatttaggggcctcctttttatgtaggaagaaaaagaagaaaaatgccactctttctttataaagaaataatttccaataaataacaatagtattgaaaaaaatattaaaacacgccaatatattaatagggatatgattttgtcctgttattgtacttt

SEQ ID NO: 306144 - DNA, 1699 bp, Cannabis indica
tccttcattcaaacattcaattacaaggattaggcaaatcttgccgaatagtaagatttgcacaagggggaggaacaccaatccacatagcactagctttgtttaacaaagcgtaattggctaatacatacgccaccttattagcttccctatacacaaacaacagaccctttacattagcataggacaacaaatatctaatatgatcaagaaccccatcaatatctcggcagccttcctccttgttttggattaattggatagcttcaagacagtccgattcaatgtagaattgttgtacaccccgctgtatacccgtctgtagtccaccatgtatagccataagttccgcatgaagaggctggtactctcggtttagaacagtagaggaagcataggaaacacccccattactgtcacgaatcacacaaccaacaacagaccagcccctacccttcttaacaccagcatccacgttgatcttccacacaccagcagccagccaaacccagtttgctgcctgtctcttccccgaagtgctaccatttgggccatgaccccgatattcgtcaaggtactggacgcaccactcaaacacctcagcaaccttcggccgaagtcccccatgctttgtattgtttctaatgtaccacagctgccatgacaccacaagaaacaattcaaacgtgtccttctcccacaccttagacagtctcatcaaaaaggcaagaacgtcttcattcccatgtcttttaatctgatgttgaaagccaaacctcttccaaacatccttattatttgtacatctccatgaggcatggaatatattttccctcacaccagtagaacaacttggacaactaggatcaacatccatacctctagaagcaagggccgaatgagttggaagccaagagtttgccattttccacacaaaatgtttaactttgggtgggattttaagcttccacatacctctccaccaagccatcatgtcagtttcattcgactgattcatctctttcctgagttccaaggccatatgatacccactcttgactgaatattccccattctttgtgtaatgccacataactttgtcctctatatcccactccatactcggcagcttaagaataatatcagcatcatcctcattgaacacagcccgtacaaactcttcatcccagcacccattcggcctcttcaaatctacaacatacagcccccccagaagacttggcttgtcataaatcttaaagtgtcgtggcctcggtagccaaggatcttccacaatacgcacactattcctattaccaatgcgccatcgataacctcccagtataactttcttcccccaatataaactccgccaaacaaacgaggcatgcgtaccacacttagcatgtaagacatccccattcggaaaatagctagccttgagaacccgtgtaatacccgataaaaatatacatatattttaaattttatttgttatacaatttgtatgagaataagtattttatttatttctactaatagtgaatagagataattgcttagaatagtattgatagatttctaaacatagttgaaattatagtaagtgtcaaggtaaaattatggtgtttttacgaattaggataattactcaattaaagcccaatatgaaagtctattagagttttatacattattt

SEQ ID NO: 306145 - DNA, 1256 bp, Cannabis indica
atagtatttttataaaaaattccatataatagtaaaattgtaaacttttatcacaattcaatattttggaaaaaattcaaaaaaaaagtggtagatattaaaattattaaaaaaattgaaaaagtaatcctaattagaatcacattgatgtttagtgaagtgtaacttctataatatatattgacatgatataccaataagaaagaaaagaaaatctgtcattctcaaaaaaccatggtagagattatcaaactaccataatctctcaaaaatttccattggttgttatcttttaggctctaaaggatatgtttatacaataattataatgtgtacattattcatatatataattattcttatttttgtgaagataatattgggttgggtaatatgataaatattatttgggttatttcattaacttatatttttatttttctttccctcttgcaaatatagttcttctcctatgttcttcaagtggtaggatggagctctaacattaaattatttctcacttatatgctctcagttattatttttttacttaaaatgatagtgaacaaggtaaattaacagactcatacattctatgttgtatacagtttttttgcttactcttactaatgcacatgaatacataataatgctaatttttttcctttctttgcggtggtcataaaatggataagtgcatatatacatttgacaatcaataaagatgagcaacttcaaactttcaagagttgaacatttatatacttaaaatgtttaattattaatatttaatattaaataatttatatataaagataaaaaatttatatctgtgatttatattatacggagaattaaaatcacttactataaataaaataatcaacagcacattaaaattatgaaacttttaattaatggttgttagcacgattcactcatgtccattattcagtacaaataatctcaaattcacattgctaatataatatgacatcaaaattttggtgcatattttggatattatagagggatgataaatttaaaaggaatcaaatgagaatactttcacaatcaactttcatttgcgatgtgcattaatacaattcacgtttgagaattaatcgaatgatattaattctctttgtttgttaaattttgtaataagaaaattagtaggatacacaaaaaaaggtccttacttttagaatgaaacattcgttttttagattctttattttaatttttttttaatt

SEQ ID NO: 306146 - DNA, 842 bp, Cannabis indica
aaaaaaaaaaaaaagtagatttttgcacaaatttcatgaaaaccccataaaaattgaaattttttgcacatcataaattgatgacttgtgtgactctcaactttgtactttaatgagtctatgtcactgcaatgagctttgtacatataattactaaaagattaattatgatttttaccttaaattttgatatacattagattatgtcttctaaactttttagacaattaaaaatttcttttgaactattaagattgttagatttaaggatttttgtctaattttactaataaaagcttaatgtagatgaaaatttacaggtataatttagtaaatgttaaaattcgagagtacgatttaatatatgaacaatcaccacattagtaaaattaaacgaaattaaatagaattccttaaatcaacaattttaataactcgaaaaaaatttaacagactaaaaagtttaaggacaaaaattagtcttagtgagaacaaaaacaaatgctaactaaaataatgtatttgagagatgataatcacatctatttggtacatttgttatttttgtgaaatcttacttctatcattcatctttgaaatgtaattattacctgaataattctcaaattttacatgaatatatataggcaagttgaataattgttaaatatttttaagcatatcaacatttctatctcttataaattataaatctaactgttgaccgaggttttcggcaactagtaaaatatgaatgtaatgatgagctgtaagaaagcgagatgaagactttttacgtggttggggcgttaatgagccttagtccacgagccactgctatt

SEQ ID NO: 306147 - DNA, 2241 bp, Cannabis indica
ttttttataattgtgtatgttaaaatattttattagacgagtgactatttttttatacacattaataaaaatttgtttaatttttttgttcaacactacaaaaaattattcaaaattttaaaatttacatgtagttctaaataaacacaacgtatactaaaataaataggggtaaaagttttccaacatttataaattttcaaaattaattataaatataatctaaatgtgcaaattaaaattcaaaataacttgttaaacacatatttttttcccatacactgtatatataatcataataataaaaaaaattataatatgcataggtattataaataatgtttttttaaaaaaattaatgtttcagataaagataattaaatctcatagtcatcattgtataaaatattttctggtagagatgacacttcaatcataccagagagattgttggaaaacgttcgtagtttagccacattatgggccgcaaagttacataattgagaatttctaacaaaattacattccaacaaaagttttaaaataaatatagctatcaatctcccatcttggtgcacttcttctaagagcattgatggtgacttccgattcactttcaactatcacaaacttgtagcccaaagctattgaggtctctaaagcaagtaaacaagcacctacttcatcaatgagggggtctgaaaataaaaaattattgaaagctatcctcaaaagagcccatatggtcacgagccacaactgtcacccacatggtctccctcttgtttctcacgtcacaattaatcttaataatccaatcattagtggggggaccactcagtcagagcaggatcaacaaatattgggagaatagataaagtataatctgcatacaacaatgattaataaagtcaatataattttgtatgctagctatattgttgttatgtaccttatcattgtgagctctccaaattgtgtcaacaacattggatgcataaaagaaaatctcattaacattggctctgcttgagttaagattctataaaaaatttatccaatcctgcatttttgctccagagtcagtaatcgaaatgagcccccatggggacgaccgccaagatagtaagacaaattataatatagaaaaagatgctccatgattttatcatcactttcgcaaatagagcaagcagtatcttcaattgtcattcattgcccaagaattttgtgaatgaaaagcgcattagacagaatgttccaccatataactttatactgttctaaaattttactattccacaatctgttctaaaagtaagaaacaacaacacactgatcaggagccttgtccaaagtttgaatcatgtaggcagacttcgtacagaattggtcgtttgcttccttagtttaaatttattaacttgactacttgggtacttacttttattgcacgagtgactatttttttcattcgcatggtaaaaaatttatgatttgtaatcgtaccacactaccatatataaatttaacactcctagtaaaagcataagttctagctagaggctccaatatgaaaatctctattatatataacaacaatatttattgtttataaggttgtagcacagtggtgaaaatgatgaactcttatatatattactatatatattgtttttggttattaaataatataggatacgagtacaatgtattgaccagtgcaaccttcttttttgctagggctttattataacattcactgtgtaattctgtaagtgtaacccgctggatacgtaaacacagtttggtgtaaaaggctgtatataaatatatatatatatatatatatataaatataaatgagatgatcatatgtatatacaccgatgggtcacttcattgcacgtaccgttaattaggagcagtgttatacatattacatagtagtatagtagtatataatgttgttaaacagacagtttagtgacaaaatttcactttagtaaaagggttcttaatatgattttagtattctttgtccgttcttataacaacaatataattaaaagaggagtatattagaagggtaagagttaaaataattatttcattttttttaattatatgtatatatgttattattttttgagttttttttttatttttatattttaaaatagtttttttttttattttttttatttttacagaattttacacagaaactcctatagcaac

SEQ ID NO: 306148 - DNA, 1442 bp, Cannabis indica
cacaacatggtgatctccccataattatatatatatatatataatttcaatatatagttttcagagagattattttctcttaattttcccaaaaaaaaaattgagacacaaatgatggttttataggtggtaataagagggttatgaccattaatatattgatcaaatattatacaatatatatatatatatatatattattttttttcactttgtattaaaatattgtgtcactgaaatttatatttgatgttggggaagtcaccacggcattggattaattgtgattaattttcaataaataaaataattaattttataaattatggtttgtgtgtgtataattaataattacaaatgaatggtaccaaaaatcatatcttggattaggtagcgtaggtgtcattaatatttggtgagtgagatatgtggtaaatatggttgaattaattaatttcaatatttatatttataaatatgaatgaaaatttatgaatgatcaatctcttaaagccacacattattgagtcttaatattataagaaaataaaacacttgaagttgcgtgggatttaaggttatgttatgagagggattatttaaatataaggaaaaataaggaaattaatgatgaatataaagagacaaaaagaaagaacaagatcatgatattataaaacattgtactatatatatatagaaaaacataataaaacattgtactaataataattggataaagcttatgatttttttttatgtatatatatttatatgttattttaatttcatgcatgtaatatgaggcatgatggtgtggcaaaatagagcatttttcaaagtgattaactttaagataaaatcaatgataactaatattttgcatttggagcatattttataagactagtagtactatttattattatgtcctatagttgaatttgtttactctctttaaatgtccaaataatttgtttacgattactatttattattagctaggttatttttatgtattttcatagtccattttagtattttagcagtttttatttattttcgtacaagtttatgcttgttttctttttatttcaagttttcatggtcaaatacatcatatgggttgaaatgagagaaaataagatgagcttgatggatttagcatgaatttcggagttgtaataagatacaatggtgaaaaattctaagttttagatgctcaacacactctgtttgtaatcgtaaataaagtttgaagctttaagctaatttttgactatgatccattcactttcaggaaaatgttttgaatgaaagttttagatcgttcttttacattttcaaaacatcttgaatcgtctaataattttgagttatatctgttggaaatattttaccaggatctagatttactaccatatatgtttcattaacatcct

SEQ ID NO: 306149 - DNA, 1182 bp, Cannabis indica
aaaagtttaaaaaatatgatttagtaaataacaaatttcagataaaaattctaagccaaattaaaatgactatatatatatttatacatataattatgtcatattgtactgaattggcaaatatcaaagggaggcatgtagagcatttcttaaagaaatgaattacaaccattatatatgtcataaggtgcatgccatattaattattaaacaaaataatgatcaatatatacataaattttgcttaaaaaaaggtggatattattaaaaataaaggtaggcaaagttggattattaaaagtaaatatatgacagcctaaaatcactttcttaaaatgcagaaagaagaaaaaaaaggtaagacaagaagttggtaacactggctgtgatgatagcaaataataatgaggacaaagcccttttctttatgaacctttttgggataccatttttagaggggacaaaaatctaagtattaatgaaaaaaatatgtatatataatttttaggagtaaaaattaaaatatttatatatataacttttgtggaaaaaaaaaaagaaatatgtagggctaaaattgaaaagaagtaaatatattgagataaaaataaaaatatagagaataaattttgtccctttatatattctgtgatagaaggtggattgtactctaaactcgagttagtatactttaatattcaactgttatatcaactcaatcttgatccaataattatagtgattattggatgacactacagaactatttcgtgacagaacaaaatccattccataaaaatatattagcagtttgttcattgaattggaataaattcgatagcggatcacgattttgaaagctagttgatctcgtagacttaactacaagtgttggatttgtaattttatggactctgctgcaattttgtggttagtttgcaaataattagttttcaaaaagatcataaagtaatttttagaaaaatattctttttgttgctgctctattgatgagaaaaaacaaagaaaaaaaaaagatgtcatatttttaaaaagtggtataatgttattttcattttttaaggtccaataaatggcctagcctaattccattggaggcttcctaaaatctagagggataagttgaaaaatactttttttttgtgtccattaatcaaaaat

SEQ ID NO: 306150 - DNA, 4575 bp, Cannabis indica
ttttttttttctttaattagtaattacgaagtaatgaagctgtaagtttggatggtttaaggtatgtatacccacaaacttgacttgaattgattgtttgatttttgttttggttccctgtaaagtctaaaccacttcagttcaccttcttcttcttcttcttcagagtttgggccttagtgagaaacaatccattcctgagttgatatagaagaagaagaagaagagagcacccattgccgtaccagagggtagtccaataagtaaccttttaatctcagctctctctttcatttatagggtttttgatatggcgatggctgagattttatttatgtatttatttgttcattaaatttgatttgtgtatgtttattactctaatatttgtgcatttcaggtttgaaaatgggactgggattgattacgggattgggaagaataatgaggagaaaaaggacttcttcccttgatattctttcttcaaagagggcaccaagggattattacaagggaaagaactgcaaaccaactgggtttcatactcgtaaaggttatacctttcttcttatttcaatctattcatctgttaagtttatgctatgtttgtggtttgtagccatataatttttggggaagaaaggaaaatcccgtttgttcctcaaaactatgttgaggaacatgagtagattctgcattcattactagcttagccagtgattatgtcttcaaaagtgtatgtaattgtaaccatgttgccggccttcaacgaggcattaatactaaaagcattactaacatggtattcatgctgtgattaatataacgcaaaataaacataagaaatgatcatgttctttgtgaagaaaataaaaaatggggtgggagtgggagtggggtgtgtcctgaaagattaaaaagataaattcttaaagattgttttcttaaggcttttaaggatttaaaggatgtagatttttcctgctgagaatttttctgcaaaacaagatactgagacaattcctgtgaaataatttttcatagcatcttaagagctattattaccttgaactgggaatgtttagcggtttgatgggagttcaacatggtttattgtggtttgaaattcttatctattgaaaataattactttgcatgggaaatgtttggcagtttgatggagggtgaacttggtttattatggattgaaagtcttatctattgaaaataattaccttgaatgagaatgtttggcacttagataggagttgaacatggttaatggttcattatggactgagctataaaatgtaatcacttgtatacccatgaataattatgtagaaccaagtgggtaagaataacagacaagaaaaaagaagagaagaattcaaagagagaattggagtagggaaaactgagtagtttgtactttctttacaagttggaaattgattaaaatcactaaatagttaggtgaataaaaggacattaggtctaggaatccaaattcggctaaattttaaattactcacaattaaataaagtccaataaaaataaagaaatgctttaatattttgggtctatatatacacctataacacgaatgtaaactataactgtgaattcctcgcattatgcagtttcattatacatatgttgccttgcaattaatatagaaggaattttgctgcaggtgggtatgttgttgtgcacgaaaagctgccaaactatgttgtccctgatctaactgacttcaaggtaccgtcatttcttcttatcacaaaatttacagtggcatcattctgttgcttgatgcctatacttggacgaagagtatctcaacaagaataataacttgaaagaaatatcattattgtttctgactaaaaaaataagcaagatttcatggagaggataagatatcgtcaaagaacaaatataagaaaataaattgcatgacaccttgaatattaagtttaaaagcaacttaaacaaatgtttctacagatgagaataatcaagaatagtggaaaatgcataaaacttctttgctgcctaagattaaacctaagaataaaaaattggcatggattacatgtttagatgtcttgaaaattctttcccaaatatgcgttgtgttaatatcattgtttagctttatatatttgtagtctggctaggtactcacttttgtttgcttgtttagcctgaattaatgggaaagacatgatttttatactctgttttttatgtttgaactctggttatgtatgcaatctattattgcatgcttacttattccaaggtaaagtcatttatagttaagttaggttttttatcttcaaagaactgtgagcgttgtcgaatcttgtgatcgggaatatatatgtatacaggtagttaacaagcaatgcacagacccacattatttggctagcccccacccctcaacttgctatgtaattaagatcgcagattatgagttgattttgggttgagtagtgctagagacacaaaatttacacatttgatgtttttttaataaaagtttaaaatgatgaggtcccacttggaaatattgattttttaaaataataatgcatgtgtaatgtgtaatttgttttttgtgtaatatacgagtgttcttagctttattcttttggcttacctgtttctaaaatcacaaacccaaaattaaactacaaaactttgctactagtactaaaccaccaaataaaccagtaaactgttatgtatcactatttgaaatccgcatttttgagtttgtaacgtaatacatagaagttgaattgtggataaaaaactatttgatatgtattattaatttataacacaaattttaattattgtaattttgaagataagttatatttctattattgtctagttttaagtatgtttaattatttataagtttattctttaaattctgaatgaataactttactcttatcttcttaaatttgagaatttatactgacgcttttaacactgtaaaaattcaaatgaaaccattcatattgtttttataaaacgtgtacacttttcaccatccaaacaccccgtacaaaaaccgtccaactctccacattaaaaaaaatgcacagcctgtggttgtgcacactcataacttgttgtacttatatgtctttcatttttcttcctgtatttcatttcctactaagaactcatgtaatccccttttcatcgcagctaaaagcatatgtctcgcagtgcccattagaagctcaaactgccgaggcaagtgatgcagcaaagtaagccaatggtttcaacaacaagttctgttacttgatgtaactttcaggcctaggagtagtcatgaggaacgctcagtaatatttagtcaaataataaaaaactatgggacactttttgaaaaccaaagaaacatgttagtgcctgttcttcgattttgctttccttccgagcattgacttttttatgttgaagggaaatttttcatgggggatctgaaaagggttctcctaattctatagaacataggtaatggtgtacattgttggtctggagccccggcatgaggggtaggttttgggttccgagtgattattgatttggattttgccaaattgttgttgggaatgaagatggtccaagttatgagggggattttggagacacgagctcccatgaaaggggctcctgcaccttgttatgtgcagtcagaaagtatggattttggaatttgaagatttatccaatcccatctgtttctattatattattttctatggtttggttggaattgtgttgaatatgctgtgtagatcagtgctccaaatagattcactttcccctactgccttaggatacacgggtgtataccaatgtttagtttttttaaaatataataaaatctcaaaattaattgaatttacttcaaatttcggcttttagtaacatagctaagtaaaggcttagcctaatgtctcccccatctctattctctcttatgtccaaataaataaatatgatggctaaactttactctatactagggttttttaaaagaaaaataaaaattttacgatcattataaatttgcaagcaaataaaataaaaaggcaatctaatttaagatgtaatggaaactcatttggaacatttccaatggttacactaatttagtgtagaattttttacttttagtataactaacaactctaacaattcacactaaatatttcactaaataaatatattttacttaaaatattcatattttatactatttacatcaataatccaaaataattaaaaaaaaatatatcagaaaaagagcaaatcttattcaaagatttagattctatagttgatcttaatatacatgactattttcaaaatgagcaaacaagaattaagtaaaaaagggctcaccaactatatcaagcatctcaagaataacaaatttatcaaaatacatcaagtctatatagccaatattttgatattcttcaaggctaagattttttttttaagatgaaatagcaacttcattgaaatat

SEQ ID NO: 306151 - DNA, 1486 bp, Cannabis indica
aagacctgctctgttttgtactcattcattcgattcaatgagaagtattcctctctttcattctttcctctttttctctctttgataatatggtatcagagccaagtggctctttccccttttagttttttatctgttgtcagccattgccatggctcgtggaagagctcgtggagccgctcaaactcgaagctcaagaagtcaggagaatgttgcagatgactcgaataggttctctgttcttgaaccaaacaatcattctggtagtgatgatcctcggagtccctattatgtgtcgaatggagattaatccgtttcgagtttggtaccaaaaatattgactgggtgtgaaaactacagttcttggagaaggtcaatgatggtggcagttgcagctaggaacaagataaagatgattgatggaagattgcccgagctagacaaagatgatgatgagtatgatgcctggtttagatgcaatagtttggtcatatcttggattctccatgccgtgccaagtgaaattaaaaatagcgttatgtacctggataatacaacaaaaatatggtctgagttgcaagagagataccatcaaaagaatgccccaagagtttttgaagccaagagatcgatacagggtttaaatcagggttctaattctgtgaccacctatttcactcgactgaaatcctattgggatttaattcaagagtttagaccacaacctgtttgtagttgtggtgcaatgaaggttattcaagaatatcaagatgaggatagggttcttgagttcttgattgggttagatgagtcctatagcaatgctagatctgctattttaatgcaggacccttttcccaatattaacaaggcttttgcctctgttgttcaggaagaaaggcaaaggggaatcatatctagaaatggtgaaaatgacaagcctactgagcctcctggtgcgtcgaattcagggcactttgctggcagtgtacaacccaacaagccaaagatgatttgccatcactgtggggtggctggacatgttattgccaagtgctataaactacatgggtacccaccaggttataagctacatgggaaattccctaatcgtggtgctcctacagttggaaaaggaccagcagctaatttcactggtgcacaaggagaggagtctgctgcaactggtaaaagtcaaaacatggagcatgatcttatggccacctttggccaatgtcagaaactcatgagcatgttgagccagaaagttactgaacaaaccaattcttctcaggccaaccagccttctgtttcacaaatttccggttgtaacgcccttacatacgtaaaataagatgccataaataaactggcgttaagatactaatgttgcctttattaaaaaaaataacacttttcaaaacatgggtacccagttgaaaataaagtattaccacttagggaaaagtaatagaaaatttaaacg

SEQ ID NO: 306152 - DNA, 2286 bp, Cannabis indica
aatgcctcacaaatcacgtaccaatattgttaactattaaattatgtgccaaaacaaaacaagtcatcactattcacttatatatatttccgaaaattaattgtagccacaagtccaactcaatattgattatataatataatacaaaatatatataaaaatgatcattcattataatatctataaaacacgtagtaattggccactaattatataagtataattatataaaatactaattttaaaaaaaattatatttttacatttaaagtttttttaatatatttacggtattttataaaaatactaaaataacttaaaaataataaaaaataatataaaaaattaaattaaataatacacaaataacaagaaagcaaacaccaaaataataagtataaacacaaaaacacattaaaaaaacacattttatgtaaataaaatctgaaaaatcgtaaaaatattgaaaactcaatatatactgtatttttataatttttatgttgttgttgtatttttttttaaattctcttaattataattatcatttaattagtctttggaagattgttatcaaatgatacttgtttgacatgtggtgagaattgtgagtttgattgaatcatatcatatgtcaaggtcctcatgaatatgatatgtatgtaaatgtgtataatcctaatttaattcttgccgacacatatcaatatatctagaaatttctatgcattgctgcccctaaaatgaaaacgaaagagaagttcatagtgcactgccctggtcagtctcactgatcggtttctatctaaatatatatataatctattattatatagctagatagctagtctttcagtctttgctttgagttggattacttcaaatttatttagtttctctcgctggtcccacaaacccataacctttaataaaggattgtaaagttcatacaaatatatatatatatatatatatatatactatatagcgtggctatataatagaagtttatagaaaattattgggtgtattttttaaaataaaaaaaataataaattattagatgtatttatcacgtaaaggtcagctcatgtagttagttaaacttaaatataattaatccacgttaagatgagcatttttattaattttgaagataaatttaggacgaatattaatttttttagtataataataatttttgtttttatttaaattactattatgctctcaaatttcaatgattatcactatattgaatattattaattttaaaattatgatattaaaaaaaattaaaaactaaaataaaattaacatacatgacttgggaaagttgcctttaattggaagaagtgaaaaattgaaatagaaataaaattaagaataagaatagaaatgcatagaattaattttaaatacataaaaataaaattaataatatagttattaaaaaaaatttacaacttgtattaatttttgttattttaaaataaaataatcattttactaaaataataaaataactattctattaaaatgatattttaatattttaaaatacaactaaatataagaatggaaaaattttattatctctaatcaaataccccttatattagttttatttaattatttatatactgaaaactgtacagtacatatatatctttatatattaaaagtgcctatctaacggcaattcttggtttaacgttttgttattttttattccgttaactttaacggagactatagcgtttttaattaatgtcattcaaaccatattgcgattcctctttcttctctaacaaaaccatattgcgattttcaatcccagtaattctccatccctacaattgtatatgcgattcttcatccccatttaatgtgattcttcttcttctctcaaacccaaattttgaaaatcttcacgggacaacgattagttatctctacataaccatccccttttctacatacatttcacaattatttactcactctcaattccaaccccaatcgatttttttttatttgaacccaatttaattgactgatatactctttcatagcaacgaaattccaatcacataaatttaaaggggttaattccagagctggttaagtcgtagcctttctgcaacttcggtggtgacgtcgccatctcaggcgctggtgaagccactggttcaatgcacaaatacagcttggatactatggttcaatggcggtaagataatccaaactttctaaatttcataaattctttcaaattacattcac

SEQ ID NO: 306153 - DNA, 1166 bp, Cannabis indica
aaaaaaaaaaaaaggaaaacaaaacaaaaaactcttggagtcctgtattacatacccatcatcaaagtccatcatcccaactcaagagaatcacagtgcatctccacataatgtagaatcgtgttctttgttccttgacgagccttgaacacttctgccataatcgaagctttggggctctattggaggagaactgacccgtcatgatatgactatactactttacaagctaagaccttaaaaggaagagaaaataaagaaaagaaaaaggtacaaatatagacacttattgatgagaagcacttgaaatgttagttgaaatggcttatagactatatatagataagtgggtgaaggagatatgtggaaggacaggtgtcagcctaagacagggcttgaggagagggtcgatcctgcttatatatatatgagcattgctattacatcaggtaacctaccacattctcgacatgttgtgttgcgattggctagtgatactttctaaaaattattatattaaattatatgagacctgatatttagttggaccaataataatattaatacataggaagatgctaggtaccactaggcaacacgggtgctctttagcatttctctatatgtatatataaaaagataatgacaaacaccaagcacatcagttttgcttccactacttgatcacctggaaaatgactagtctatcttccttatcataaaatggaggcctacccttgtctctattattggcttgaaatttgtcccacttctctgtttaagataccataagtaactgttccaccaaataaggattcccttttacatatatgtgtaccactgtatatgtcagattaaaaaaacaggttgatgagttagaagttgcatgtgaaagtgagaaagataggttttgggtttagtttgaatgggcttaaacaaagcaatttgaactgtagtttaaactttaaagtatatgtttgagtcaaaaagaaatatttatattttaggccaaacaaggaggcaaagtacatatatgcaaagcaaacatgaaggttcattaattagtgtttgttttgactcaactctactctctctcttccaactgtgtgttgttgaattaaatatgtatatatataaatagttattatatttttcttttttttttt

SEQ ID NO: 306154 - DNA, 2449 bp, Cannabis indica
ttaatttgggttcttttgtactatttctctgaaactccatcatggacttggtaagatattttctctaaaggacatatatactacattgtaatctagactctagttgctaacatatctgcaggttctatccctttcactatggaccatttgtttctgacttcaagggcttatctcagttcaaaccaaattttgtgaaaggcattccattcaaaccttttgatcaattattgagtgttctgcctccaaggaggtaaaaccgtgcattgctattaattgttctttttgatgagacaaatatgttgcaaaatagttaacaaaatgttttcttcttcgtagcgttcatgtacttccggttgcatatcagacactaatgaaggatgatagtcctattattgatttttacacaactggtatggtctaatgtttcatttgataagtttccaatttgattttgtcatagtatttttgacttaaaaatattgttctatgtttagattttgagatcgatatggatggatgtcgttacacatggcaggtctgctgattcttttctatcaatttagagaagcaactttatgagattacattttgtttttagtaattaacagctatgacaaacctctgtacttctcatgttctgttcattagggagtttgtaagcttccttttatagatgaaagtcgtcttctttctgaaactaagaagttagtgaaggatcttggggtatgaaagtacatttgaaattaaactcggatgattgttttatttataagtattgtttctcaagttatgctacttgattcaggttgaagaaagtgagaggaacatgcataaatgtgatcagctactcgttcgatccactcacaagttaggatcacacatccttttggtttccacacagggcaattccaacctcaaaggcactagcttgaggtaaaaattggatagtataaaattattggcaatgtgatcgattctcttctcataatttcctctcttctcagtgaagaaattggtggcattttacggcttagccacaagtacacagttatggatgaagaagttcatactagcaatgaagactttgttctgtaagctaagaaagaaatactaaattggtttttttctttctttctgccaagtcctgttgaattagttcttataattattattttttccttgtagatgtgctgattatgagccatctgattgtggtgcacatatcccgcgcctacttgatggtgtaaaactaccagaaaaggtatgattagagctaatatgttaccatcagttcaatttcatcttctactgcttattaatttggcacttgtttgtagataattagagatgaagaccttaatgacacaaaactatggcatgaaggctattcttttcttcgggttaaacaagacaagaggttctcaaattcaattcttttaatgttttccatacctatgttagttgataaacacaactaatagtgtgtgttatctgcagatacaacatcaacattcatgacaggttaagaaaagtgagtatcaatagtgaacatatgcacaatggttatggtagggaaaagtctattggctttgattatgattcgaaagctcataacatcaatgctacaagattaagcagagaaaatgggaatttccattgtgatcaagccaattctgtacaagcatatggttcatgtgaaaagtggaagaaagttacaacaccatgggggacttccttaacccaacctaacagaattgatcagccatggaatagtaatgtgtggacgtctagacgtgctgcttcgagccataatatttcccgggctgatgttagtaacaattggcggcgcggttcatggaaaaccaatgattacagctcaatgcaagccaaggagaaaaaccaaagttttcatcatagttaacaatatttatagtcaatattttgtaagcaaatggtgtggttttttgaacaaagcaaatgtgtgctttagagaagtaaactttcgtacgtttttcttttgcattgtgtctaacattagctgaaagtggaatatattggctgatttatgtcctgattagatgtgaaatgatagaaaattctcaaacatcttcttggtattttatccattattttcactttgaagaaataagactcatttaatcaatggtatttgttcggttgttctacattgtgttagacatttatatgtttaatataaaatatatgtatgtgtatataacatgcggaataaataaacatatacactatatgaatataaggatcgaaatacctccagccattgattctttaagcattaatcccacataagcttgatctgcaaaagaaaccgattgatgtgggtaatcgggcttcctcgctctctcaactctctttagatggattttgctgttatgaacagaatgagtgaggagctcggggaccgagaccc

SEQ ID NO: 306155 - DNA, 1960 bp, Cannabis indica
aacacccttaaaactcttggttcctgtacttctcagcaaacatggcttctcttcttctcttggctgctgcttggacaaactcagtgattactggaacatcatccagtggctcctgaagccaattaaacaaatacacaggcattagaatcaacccaaaaaaacaaaaacaaaaaacatgtagtctttattataatatttgatgtgttgttaagttatatttaaacaggcttgaattgtgagtgtgagaagtgagaaggtaagaaagagacctgctgtgaattaaaatgtcgttgaacaacattgatcatctgctcccttgatggattggaatggttacttgcctgcatttcaacaatagtttaaatcactgatgcctcattttgcacttgtcaaactgaatcatgacttttctttttccgtagaaactaagctcggccgactaatcctctataatgtttaaaagaagactgtagtaattactaaatacttggaatagacaaataacagagaatatgaatatataacaaataaaagaaaaccaaaagatattgtctattggaatagacttttgtagtttaagagaagaatagtagtccagccaaatggtagaaaaatcagaatagcattgcaatgtttgaaattgaaaccaaagacgagaatgaaataaacaatgaatccttttttcatgtttgaaatttaaactaaaataaaattgaataaaactcaattcttttccattttattccattcattcaaccccaaccaaacataacctatgaaaattcaatgccatgcaaaataaaaatgactgagctgtaaaatttaaattatgttctgttatcttagtatacatttatatatgtttaatatatatagacatagatacatactatctcaattggtaagtgactaaggggaatgacacttacaagattgaagtatctgcaatatctcctcaatgagtctgtttctactcttgccatgttaaggctctgtttataatacgatgatttgatctagtaaataccaaaatatatcagacaatgaaaatacaccaatatatacaaatattatattaagaacctatgaactgccaaatacacattctatcaaatttcaatttcatgcttaccgatctagatttgtggatcgactggacttctttgtacaaaccgcggtgtattgattttgctgatgttgacagtgccgacgacttagcatgcctaactctcggcttaaactgtttgtgaaattcgttactgctacctgataaaatgacacaacaaaattgccaagaaacttcagaaaaaaaggctcaactcaacaaatacagttcagtggagtagtttacaaattgacataacatgatattgaatgcttgtaatcaacttactgaaatcattgtccttgtcattaatctcagagctagtgctagagttgtcgtaatcatgatcatcgccttcttcattcccagtaggatgttctaacacactcaatgcgttcctttgaagtttcacttcatccccatttttcagaacctttatatgacaaaaattcataaattaagacacaaaagaaaaaattacgggtccattcaaacttcgtaattctcattctcatcactaaattatttggttgtttagtcttcctttctacctttttatgttttgaaaggattattaagtcattcaatgcagaagaagatatagataaataatcaattttttcaaataactaaacaaatctcagcaattttatatcaagtacagctaaataaactcagtccactcaattgcttgactacacaatataataataaataattcaaatcagaaccaatcatccagacagattcaataagccaaaatcattgatcaaaataattagtccaattagagaaaaataaaaaaaatacaatcataaaaacataatttttttttttcatttttactactaaaaa

SEQ ID NO: 306156 - DNA, 855 bp, Cannabis indica
cataccatattgagaatactccttttacaatagcaaattctaacatgattatttcctaaaaatatgtggcactaatcccaaataagggagacatcattcacaacaaacattttgttagaatttgtcaataatgtatttaaaaaaaaaaaagtatatataataattttcttatataataggttttaattttgatcaatgcaaaattcataagtttacatggtgaagcacgatgtcaataaaaatagatacacaaaactaaataaaataaatgcattctacactattgactaaacactaagatgtgtattccttgaaaaattaaaattgtataaaaatggattgattataaaaaactacatggttgacaatctataattataatactaaataaataattgaattaattttaaagacttgaatttggcatgatgtatatatataacttgttagagagttgactctagctaattctacattatgaaaaatgaattagtaataaagttttctcatgtttcaagctacacgcctatatatatgtctaatttaaaaatgtgttgtaattgacttgataatactcttatcaaacacgtatcatattattatttgtgtaattaagtatcggtttttatacaacttaagaaaataatttgtagagtatatcactaactaatcgtaagacatcacctataaaaagtgttgggcaacacaggtgcctaataatagtgctctttgtaaatataattaataactacaaaaaaatcttacttttagtcaaaacaaaacttaaaactaaaagtaaaaaaaaaaaattataactaattataaataataattattatgttgtgattaaaaagt

SEQ ID NO: 306157 - DNA, 2171 bp, Cannabis indica
ctaactcctcaaaatagttaaggagtttttttgtaaatacactgtgaaaagcccaaaaaactattctctctttcataaggtttatagatatattaattagaatataactttgaatcattctaatgtctccttatatcgatccccattttacaattatctataatccataaatgccaatgacttaaaccatatataacaaagttttatttattaattttgagtggttgaaatcagtttctagatgttgcagttgttgacagttgacttgattaatggcataattgtttgtttgtattgtatgtgattcatatatttataatccatagttaaagctctttgttttagtgggtggactgcatgtagcctataatatataatttaattaattctactaattaaacttatatatttataatcatttgaagttgtatatatgtgcattaaaattaaaaggagtaatgcatattttaatttacaggagataccaacctggccatatttcgtgtgacaaaactagaagcaacaacagtggtatcagccagcaatgtggaagaatctgatcaagcagaagagactccttctagtaccactgtctctgagactactacctaaaatatatactaatactagtacaatacaatgttgttaaatcacattaatcggtgaaacaaattatgtattttctcttcttcccctaatattggcaataaaattaaaatatttgattaataaagctaacatatactatagattatagattatatgttttagtataaatactattttaaattttatattttgtaaaaattatagattggattctctattttgttaaatgataaaatagactctgtattttctaaaatggtacaaataggaccatgatctcaattttcgacaatttttttttaatataaccaacttaaagacaattcctaacacgaacatatacaaaagaaattaactaggtttgtcgtaccactttaggtcggattattattaaattttattttgataaaaaatcagtttaaaatactatttgtactattttaaaaaaatgaagtttatttttgtcatttaacaaatgaatagtttaatttataaattttacaaaatacagaatttaaaatagtatttactctatgttttaactattctgccgctcaaatgctaagagaaataatcaacaaagaaacttttgttaccaaccgatcatattaaaatttaagcattgtacatgggttttctttctatattaatattttgttatttgtttttaagaaaagggtgtacttgtatttgttttctctttttaattctgttcccacgtgaaaggaatttaatctagagggacctgtctgtctttttgtcaaacaaatttgaggaatgattcttcttcaaaagacttgttcaataaggatgataaattaggaatattgtccctttcatttataagatagaataagtttcctacacataatatatacacaaattaaacacatacaaaaagagaagagagtatttaatggagtagaaattaatctgaacaattacatattctaaggcaatatactctttaggtgaaagtattgtaaacaaacaaaatcattgtcagtgtataatgttaagtaacattaaagacgtttagtaatagatgtaattgatttagtctacaacgtacgcccctttcacatttgggtgtttatatagagagggttggactggttagttagtataacttagtaagcaatccaactcaaaaactactcgcatcagggtcgggcttagactaaagtggactaagtttactcttagaaattttattgcagcgtagagaggtgttcgtaaaatagccgatccaatccaatccgcacgatctaatccaatccaatccaatccgcaaagtgcagatatctacactggtgcgggtggattggaaaatttaaaatccgcacttgtgcagattagatgttgattgacatgtaaaagtaaccgattcaatccaattcacacatatttataaaaaaatttagaaaactatatatacaaataatattttaatgtaaagaaaataataatttaaaagtttaatacatataatacaattatatttcaaaacttaatagatcaaatgtatattctaatcttttttttttttctacatacaattt

SEQ ID NO: 306158 - DNA, 4472 bp, Cannabis indica
ataatttaaaaaaataaaaaaaataaatgattaaataactttcaaaactaattaattaattttttttttttatcttttctattatttttcttttttcttcttgttcactccctgcccaacctgtccaatcctaatctgctctactaaaactctccaatttctattagcaagaggggtcactacaaaaattgtctaagtaaactttgaactagaaaaagttgaggtcaaagaatcagtcaccaaaattcaccacccaccactactcatatctctcactctctaccacatactgtgtttctagtgtactttgtcatcactcacacactttttaggaaaacatcccaggaggtcacccctaaaattacctttggtcaaacacgcttaattgtgtagttttttcatgatgggctactagaaaacaagatacaccttgttgatacaagtagtaccaatcaattcatttaagctcttttcaactgtatagtctcatacctacggagcctcagaatcatcatactcaaccttcctcaagagatgtgggattgcacaacttacccaatattttcctttatggatcacggtactactgactgtcacactctcagttttcctaaaaacataaagaaaaaaaaaaaaacaaaaagcttcatctctctccaagatctcaatcccaatccctttgacatctcctcttttttctttttcttaattggtttttttgggatagttcgatgggtcgagaaagaaagtggagatgaagggatagtactggttgacagtaagcctcctccaccaagaagagtgcgtggcaaatcgtaaaagtttgtaaaaattttttcttacaataagattttttactctttaataaaggaaaaaaaaaaggttattaaagtttttaatcatttttttatgacgtggaccaataaaattttgacacttggtaattttaagaactacaaaccaatcagttaaattatctgcatcaaagtaaactttgtagggacttatgtcgtaatataatatcaacacgtgacattttcggaacaactaaagaatctatcaaaataagaaccaacagactaacaagaatctcaagcttggagaaaattatcactattttccaaggctaaaaatttatctacatcaaaataatttttttagaaatttttaccgcaattttccatcatttaaatgttattaccatagttttggaaattacttgagtatattcttatttttgggctgtaagtgaagtactttttttttgttaagtgtcaaattattagccatttaagtccttcccacattaccttgagagaaaaaaaaaacattaatttccaatatcatattaaattttggaaaaattgtattgacgcactttttatctgttttgacattttgaagaattttttagtccaactttttttataattatgtacattatagttaattaagatatcttgtaaaattttgataaatttaaaaaaatttaatacaccgaaaataaggtttaaacagcttgttgcatgtgtgacttttttattttatacgcttgtaaaataaattgtttgaatactgctttctatattataaattattttgaatttctcaaaattttgaaaaatatttcaaataattataacatacacaactataaactaatttttttttctcatgccaaaatagcaaaagagacacatcagtatatcttttttggaaggtgcattgtaaaagcacttaattttgtgagaaaattacaattacaatatgccaaaataaatttataagtttatttaacataaaagagtatagacgtatctgattatatgatatttggtctgatcatcatctttttattttaaaattaattattttatcaaaagtaaccaattggtatcttatcgaaatcataattaattggtccaaaaaatatgtcttatttataatgatttaaaagttaattgtaacttgattctttatttaactattcaaaatgcatatattaatttatattttaaaaaatatgagtgacataaacattcatgatatatattttcttgaaatacagtttactaaaatgatagcttattggatattgataacaactcattatttttaaaaataaacctgaaagttactcaaatgtattaatgtaacctaaacaattaatgattattaaagtgtatacacgtaagttttagagataactaaaatgtatctcacattatataatataaaagtgatacttttttttttattaaaaaagttacttattggtttcttatcaacatcataagtaatcaaaagattacatttgaaacgcaggaaaattaaaaaaaaaatcagaattagtttcatttcaagcatattattttagaattaaggtattttttaatgacgtggcaagatattattgtaattgagatttgttaagttattttttgtaattattttatattttatatatatttttaaatttaaatcctttttaatatgtgtaccacatatatatatatatatatatatctaacttatgttagcttaaaattgagaggctaaattataaatacttaaaattaataatctagctatgaggttatatactagtagtaattcccaagaagtaatagccaactctattctcatcttttcctattaagagaaaaaattagagaaccctaaatcttgtattcttggaatatcattacctaaagattctagtttatttagatcatcaccaataataaattaaggtaagcttctgctattcatgttcttattctttttgaattataagggttatttttaaatttatgtttatacacttataatatatatgtaatatttttatttatagaatggaatcttattataacatattttataagtaataaaatttctacaatttattctctttcttctttaattataaaaaaggataatagtcatattgctaatcagttgggattgaacttaataccattgcaacctactccctagatgatcatttaaaaatgtgggaacacatattatttcatcaatctagatttaaagtaaccatctaattgcttacgataattgattgctgattaattacctttcaacaaactttattttagccaacaattcaagtttatttttttgagtaatttgtggaataaatatctaagtttaactctcagttacaaataaatacttaagtttaaattttggctgcaataatacctaagttatatttttagaactttccaggtacttaattgttaaatgttatgtaaattgccacatgacaatctttgattggtccagattatgaatttttattttttataaattaaattaatttcaatatactaataaaaaaattgacacgtggatgatgacttgacatttaactgctaggtacttacagaattctaaaaatatgacttaggtattatcaccgccataaattaaacttaggtatttatttgcaactacgagttaaactaaagtatttatgccgcaaattaatctttattttttaacaaaagttgattgatttatgctacacataaaaagtaattttatagttgcttttgatttattatttgttataaattataagtaattttaagtttttttttgtttagtaaatcaaaatatctttatatataatttacttgtcaactatgatttttttttttttttgtttaaatctagagaattgtattgctcaaaaataatctttacaaactaatagcaccccatatttagggcctatttaatatctatacatttttccttttgcattgtatgtttacacttataaggcttgaaaccatactctatctacatgcttgattttttttttttagtaaaaacatagtaattcttagttttaagttccctttgaattcttccaagagactgctggaggataattgttcatcttttcatatgatggcatttctagttttccaaatgctgtaaaccatagaagcaacagctgctaccagcacttgcttcttaaagttgcttatctttgccttgcctatccatctgaccagttggggaagattgttattccttgcattccatggcagccagcttttaatctcatgaagacaatgatcagcaaatctgcattcaaagaacaagtgctaaccattttctttctgctctttacataggctgtaaatctcatccatttggataccaaatttaaccaatctattcttggtttttgttaagcattgccaaccatagtatgaaactatgcttaggagtatttaaacttgcccaaatctcatgactccattgtaacctattttgagaaggacaaagcaatttatatcctactattatagaatatctttgcacatgaaaaacagcaacatcactttcatcttgatcttgtctacttcactccttagctttcctatgatcagtatatcatcaacatataagagtagatatacatgatcattgta

SEQ ID NO: 306159 - DNA, 1977 bp, Cannabis indica
ttccgggtttgatcggaattctgtaaacatgttgaattatatcagaatatgagtccttctagattgctgattgtgaaaatttatactttttcagggttttcgtttttgggatatcttaaaaaccctaatttggggtttgttttggtatcatattcgaagtgacaatttttttatgttattaaaggggaaaatgggtctcaaacaagctataaagagccttgatgcgtttcctcgtgccgaagatcatttgttgcagaagacacaatctggggcacttggtaattatgttgttttcacgtaccaacttctcttttcgctctaaatttatgtgttttgcaatgtgtagttgaatatataggttgatagctaaccgtgattttggtggaacactctgttaaccttgttctcggcttgaaaaagcttttgtataagtacgaagttcatgaactgcgtttgtgaattttggtgttaaaaatgtacttgcgtgacccaattttaaatacagtgagatttcaatgttaaataatgattaatgatgtactttattgtttctcattgaggttgaaactttgtttcttctttatttggtttgccgtgatgcatgttcaacagagtgccaacttatgcaaatgctcaattgattgaaaaaataatatgttcttatggaaaatgaatatttggattgcatttaatattttcttttcttttgcagtttctattgttggtctaattataatggctacattatttttgcatgagctgagatactatcttacaacttacaacgtccatgaggttagtattttatatgctacccatagctaaatcagaactggttaatttgtgaagggaacctttttaaatctgtacttgtatatatacatactaatagttatttatatttatataatatacattccctttttcattgtctgtgagaataagagtaatgtcaacgagcttttgaatttgacagatgtctgtggacttgaaacgtggagaaacacttccaattcatataaatatgacattccctgcattaccatgcgatggttagcacattcctttttgcttgtttcgtagtaactcccttttctttgcaataatctttgtattttgcagcacttttgtaataagaagattctcagttgttgttttctgttatcttgttcgcagtcctaagtgttgatgcaattgatatgtctggaaagcatgaagtggatcttgatacgaacatttggaaggtaatataacttcttggttataattaagtgtgtgtactcatttggtacttgtgttttcaataatggttatctggtattctgtactctgaaattaaatttgatcaaaaaattttattattatgattaaattgtctttacttatatgtgttttgaattcaaatttaatattaattacatataactgagaacggtcaacttcataaaattttattcattataaaattggagtttaaaatgccaaatatgtacaatttcaaaatatagtgtatctaataagcattatcgtaaacacaaatactaaacctttgtttttctataaaacataaggtaccatagagtatattccctctaaatgatgtaataaagttgtttttattgaagttaatacacacatttagggtgaaatagttgttgcatgcttagtaagcagcattttattggtgcaaaagagttgctggaattactttctgcaaacacttttggtgaagggtgatagttttagttttaactttctaaggttgctctagatacagacaagttggttatgatggctttagtttttcttcaataatgcattgctttctttatagtttgaaaattatcatattgccagtgttcctggacatttattctctgtgcatttgtagtggttctcttgtatatatttgatactttaatgactcttttcttgtgtgcttgttggataacttatcaatgactaactcttctctag

SEQ ID NO: 306160 - DNA, 1482 bp, Cannabis indica
ttttttttacaatttaggttgcaatgttagtacgcaatagggatttctatgtaaaatttcgcaaaaatacaaaaaaaattgttttgaagtgtaaaatgaaaaaagcccctaaaatcaatataatttgaaaattttactcaattgcgttaatttttaaaatgatgctaaatttttattaactgcatcaattaatgatgttattaataaagtcgattagcttcgggtatacgtaacactttatttaaaagaaaaaagactaactagtactattactacgacaaaaagagtattaaatcgacatgcatatcaacctattacgttggttacaacaaacgacgtatattctaccaaaaaaagtaaaaataagtaaaattttattcctaattttcatatatacctactcattttaagtataataacataaaactacttattcaaatcaaccaaattaaaatacgaattagttcaattagatattggattgtattggatttttagacgtcccatctaacattccaattggatattaaaaaataacatctcatctaattcgttcataattggatatctaatgtctagtgatcgtttatcattagatcggtctattataattgaattggattgatttaaatatactggtatttctaaccaaaattgtttaagtgactctaataattaattataataaactgaaaatcttagatagttttgatgttaaaataaaaaaagaaatataattttctttcaaaaaaaataattttatgggaaaattatagaagaaagataaaattattagaaaaagaggaattaacctcttagtcaacctccacgtccgaaatcacatgtcgaaatattttttttcatagcggtattcgttatagttacagtatcatccctgtaaatttttgaaaaattctgaatagtttacagtaccgaaagtaaagttcctgatattccagtttaccacgcgcgttcaaaaaacttcaaacgtattttcggcattgtaaactattcaaaaaatttcaaaaatttacagggatgatgttgtaagcataatgaacacccccttaaaaaaaatttgaaaaaaaaaatatttcgacatgtgttttcggacgtaaagattgactaagaggttgacggtagccctcctcttttcaactttttcttgaatttttttccataaaataactttttttgaaagaaaaactatatttttgcacaagtataaaaactcataaaatttgtatttattatactgtatagttttaagaaaatgtatagttaggctattttacaacataagcttattgtctctttctcgccgtcttcctccctctcagctcgatctctatttcttcttgtctctctcgtccatcgatctccacccacccctcctcccgtcggtctctctctactcttcgtcgcatacgtcggaccaccaccacctcccgtcagtgtccctctcatcttcgtctcatacgt

SEQ ID NO: 306161 - DNA, 835 bp, Cannabis indica
ttttttttgtatttatacgaaaaatttacataacaattaatggagtaatttaaatcacaatcaaaattaacacagtaactcacataaaaactatcaaaacaactatactgtataattaaaaaaaaaaaaaaaactaaataacatagaataatttctctaatattttatgttattatatacaaaattatattcatttaagttaaaagaaaagatagcattaaagattgcatttgatccttatacaaaataaaataataattgcatataaggaaataaaggcagggaagggctgtattattctctcatacaataattgattcactctcattatcttttctccttctgtcctccaatgaatccagctaaccaaacacaccactaaatttctgtcaattttttcttttttaattgatttctattaaaatcttctatacacacaacataattaatattttgggttactagtagcaaaactttcccttttttttttgaaaacctgtcttatatttatcttttttcacaaatttaatgtacatgttaaatattaacgttaaaaaattaaattactactatattgactttgaagtttattgtcacacttataaaagtacacaatagttttccacaataatatttattgaaaactcaaatttgtaaaagaaaaataaacttaaaaaattataccacacaaataaaaaaataaaaaagttaaagtgtataaaaattaaggtaaatagcgtcataagtattttaaatttataagtgacataaactcaatgtttatttttaacagtataagtatacaatatttataaaattataatttttctctaat

SEQ ID NO: 306162 - DNA, 1898 bp, Cannabis indica
ttttctttcaaacatatttcttctctatctcgacatatcttaactgaaatctctatatatacgtagggccaaccgtttgttacacaatcctaaatatcttttatttgtacctttttaatatatatacatatagtaatataatgtatatatatgactaacttttctatctaatattttgttagttacacgtacgtaatcataataatgaacgatagatatatattgctatgtaggttgccatatccatcatccatgcttcgtttcaactaagtagatattttcattaatatatttatatttatgatttggtatatatatgatactcatacgagtaatcttttatttttcttttgtatcttgtttatcttaattatccaatacaaattacatagtcaaaagataaaaagaaaaagaaaaaaatataaattaaataaacattggaaacatgacttttatatttatatatcttttgttttttttataataaatataaaacattcttttcatacacaactataaaatagcctttttgtgtatgatcaacacgtcggtaaatacctatatttgacgcaaaaaattactgagattttttctcattttggaattgacgcagctttgcatcggttaaaatatgatatattggtcttttgcgtcaattttaaaaagatgtcatgcagcgtcatttccaaactgacgcaacaccccatccaaactgcacccccattcagcttttctctctctcttctctcttatgtctctctcttctttctcttctctcgggatctctctcgcacacccatccaagttgcaccccgtccaactatgggctcctaccgcccaagggccaccataccactctctcgcaccactcctacacggtggtgactactttcgaactaaaaccactgtgcggcattcaagccaccatctatctctctcgttctcccaaagatctctctctctctcgtaaatatgatattttcatatttcttttgtaggcccaatgtggatggtgggagctcccatggtgtttgcacaattttttattggcaacgacgaggatcttcaatggtttttgatttgttattttgtgaaaactatatatttgtgtttctgatgtgtggagggatttgaatggagcgagaacttatctttattattattattattattattattattattattattattattatgtgtcagtgcaaaactgacgagaatatagttaaaattttgacttttactctatttctgtcggttccaaaataacgcgattttttaataccgacaattgaaaaatgattcaaaataatatttatttgcatctgcgacaaatatgtcgatttataaaactaacaaaaatattttaaatggcagttagaaaccgacaaaaataaacatatttgtagtagtgacattgttatattaggataaattttctctccccgcgagaaggactacactaaagaggattcgcagtatcgaaagtgacctcgcaattaggtaaaataagtacctcgcaatatcaaaagagacatgcagtatcaaaataaaaggtgtgaacacacaccaattaacagaaataaacgataaagcattcaagcttcattatatctaacattaaatttattctataatcgatgtaatcagtaaaattaagtacatgttattattgtaacagtctaattatgttgaagtcattagatccactaaaagaaatgtcacttttaccagcacagttcgctactacgctggtaaaagtacttttaccagcgcatttcgcaaactgcgctggcaaagaggtctaagttttaccagcgtacatttgtaatggctaaaatctaacttttaccagcatatttacgcgctaggaaaagtcatttttgctagcgctt

SEQ ID NO: 306163 - DNA, 3286 bp, Cannabis indica
aaagataaactttgtgatgcatgccaattcggaaaatcacgttgtgggcaatcttttttaaagtgtcatgtcactccacactaaaatcacgctggaccttacattcacccagatgatgcttcttacaactagggcattctgggaaagtgtaacaactctttgagccaccctaacaacaacctcggccttggttacctcggaacctcttgttttgacttgagtcaccaaacataaatggagcttaaattttttaatcagaggttgagtcactaccgccctactgaaaccaaaggtaggaggagaaatggccccaccaacaatttgaggctcttggggctcctggctaaattccactgtgctctcagctcacagtgctttctctaccataagagcataagtaggcgtgtcatctgtagtaattaacaaatcatgcttgattttaggatttaacccatccaagttgttattatgatgtcaacattaagagatcattacaatgtaatagacaagatacaagtaaaataatacataacacaaggtgctctaacctaatcatgatattgttgagatcctccagggctactcaacattagggaaaatcaatatgaaaatcaccattggaatacatgttggagcatgtataagtaccgaaattattgaaaccgaaacaaatacaaatttttcgctaatgatcctaaaagcaaatcaaaatacccaaaattagctgatgaattaagagaagagatattttatggaggaattttgcatttaagttcaagcttggttgtagttgagctcacttaagtacttcatcgaaaaattagaccaaaaaatacaataacttattcaaaccttgattcatgcttaaaaatataactacatggtggagattcatgagaaattaagaatagaggtgagaatcgccgaaagtaatgagtgagatcaaaaatattgacgagcatgatagatcgatgacggcataaagcaagagagatcgacgacaacgatagcaagagagatcgatcacacgtgagaggtagagagagagagagaatcgtggagtgagactctatttatatttatttatatttattttttctgattttagtttttttttgaaaaagtttattagtctttataaatgagaaagatttaattagaagaaagaaacaaaaattagttagacttttttatttaatcataagaaacacaaagactaatcattgagaaaatatacaatattaataaaaataattttaagagcgacaaaattcgtctttaaaatttaaaacatagactctaataatagttatttctatacaatttgcttttctataattattttaaatagaaaatatattctctaatattttaaggacttttcacccctaaaaatattaaacatcacgtgtatcaaatttttatattaaaataaaaagctaagaataattattatggacgattttttgtctcccctataattgttgcccttaatattctttttttttagtgatccaagaatacaaaataagaatatacaaatacatatgaggccacattagagattttaatccaacaaattcttataaaataaaaatctatgacatgaagatattctagtttgaaatagaatgtgtttgttctcatactgaaatgtaattagatgaatatataggtatatgtctatatgatgttataaaaagtacttgtaatttgacaattttccaagtactaccaccaaaaaaaagaaaaaagaaaccggaacttattttctcagttgtcactcataaagcgatgatcaaacagagtggaagaggtgccgtaatattcatactggcctacttcaggaagggtgtcaaggccgccataacagtcttcgaagtgctcatcaaagcttctccaccatggtgaaggctgacatggtgctggctgaactgcttcctctatcttcgtttgatcactagaaggcattccttcactacaacttattacgacgtcgttatagctaatggatgaagaatcattattattaccatattcgatgtgggacaaggtggtgtctagggtgttagcttcttgctgttccttgtggttgagttgttctataagcaaagctagggacacgtcttcctcatctctagccacctcttccaatgcgtcgtagcttcctgataaaaatgaattttcgtggtctgctgatgttttgctactagcaattgctttgttgtggatgtcgtagacctcatcactgcttgtagtagtactgttgctgttgctaagattgttgtggtcgtttacagtgatcttttggttagagaggtgtcgttttggtgagcattcggttcctgctttcgttccctttttcatggagatgtactacatttcctcgcaaccaaataaacaatgattagtcatatatattgtttttcccataaatggatcatacacgggataaagttagggtttttttgccagtactatttttttctttttcttcaaatgctaattatttgaattagcttcagtgccatggcatacatgtacataataatcatcaaatctattatatacactactccaatttcatgaacaaatatatatatatatatatatactgacatgatatactggcaaaaacataggaaaacatgatccgactcagactcacactcgcatgatataatataaaaataaatatatacagtgaaatatcatatagattcatgcaacgccaaattgaacttactttttccaagctaaattaatgtttataatctatatatatatatatgatttttgctattattagacagttaagaagaaggtgcccaacactacactgatataccactttactcattgtaaagtattaacaatttttttatattatttattaaattaaaatgtacgagattaaatattaaattctacaaataatatgttactttttatattacttggcactgtatttctaacaatttttcttatatatacatgtttcaattagattattaaatgaatggttatcattaatttagaaattaaataaaaataaataatagttaacttataaattaatagtcacctaataatttatttccttataaaatttaataaaaattaattatattttaaaattaaattaattataattattaattaacttttcataatttattattacagaagaaacttttagaatttttttttagtcccttaaacttattaaagtgaaggctgctggtttagtcagccctggtctactttaatctggcagacccgaaat

SEQ ID NO: 306164 - DNA, 2196 bp, Cannabis indica
  modified_base (2131)..(2131): a, c, t, g, unknown or other
ccacctcatatctaaacacaccttgcattttaaaatataatgtaattactacattgtgtaattaccaccctagtaattaccatacttagtaattacacatttactttcaaacgcactcttaatatttactattgaaataagcctaataaccattttagtagtcaccatactcaaattttaataaacacaaaacatatattttatttttatcattttgcttaacgttgagttatttaatgcgtgttttgtatcataattaaaaaattatttttgttaataaaaacagaaaattattttttgaaaataattaaggttgttgagtcttgttttttgaaagcagttttcagaaaataaagttataaaaaaaataaaaattttgaaaacatcaaaatattattttctgttttaaaaaacaattcgattttggtcaatattatttttaaaaaatactaaccaaacgtgacttgtgttttaaaaacttaaaaaattattttttattcttatttctaaaaacatttttttcaaaaacagaaaaaaaaaaaatatatcaatcatgctcttacgtttttagtcttttgttaggcaaataaataaaagaacatggttttagtattttaagctttaacaatcattgttaaaatttgttgatttgcacattttgatatgggaaaatcacccataaaacgtattttgttgaattgtaatttggtttgataggttttggagaaaaaaaagaaaatgattggggattggggattgagagtaggtcccatctcatctcatcccatccaatcacaaaggaacacagaaaacgacgaaacaatgagatgtgtcttctttatcctatgtaatatgtaattcgtccgtacatgggaacagggagcctgcttggtatgaaacggaccaaatcctaaacactctctctcttctatttacccatgtcacaaatccaatatttttttttgccagaattctattttaatttatattgctaaaacccaaaaacgccagaccctctaacctttatcttcttttgttttctctctttggacttttgctttccaagttcgatgtttatgattgactactttaattccaaaatcatcaatttgtttccatttgtttcgttgttgctttttgtcaattttcattcacctcttccttccttgttaaatcatacagataatttcataatagcaaagaagagaaagaaattaaaacccctatcaaattatgtaaaaccataattaatttataaaaataaatgtaaaattgtttgaattaaaaaaaaccatatgtgctgttcttgttgtaaaacggcaagtgaatttgatttgattattggtcaaagatttaattttgttgttatcttgataaactaaaaaaaagtagtaagacaaatgaaagagattagcttaactgtaagaaacaataagagcccaccctccttacctttcggtaagattgttttcttctcttttggaccatttcttccttcaaatctctactattactctttaacatataattattttactcttattgttttctatcaaaatcagaggagatagatagtcttcaattattttattttatttgtaaaaaaggcaagttaacgatttttatttaaaataaagtatatttagaaagcaactatccattataaatgaaaattgaatattttaatgggttttaaattttctatttggccaaagagacatgctccaaaaacattttgttcataacataaatctcacaatgaaaattgaacaggattgtgttttaccatttgtaactaaactctaaaaaaaacattttaaatgtgaaacaatacctcaaatgaaacagttttcaaagcccattaaactcattaagctcttgtgagagtaacaaacacttgttgtgtaagcccatatggacccaaagatactttggtttataagagcctatcaatcgaatgggccttactttcatcatgtgtttcacaactggagtggactggaatctaggattgtaccattatttgtataaatatgtaattttaaaatataaagtatgggcctgataaatatggcataaaaagtaaataccactaaatatggcattatctaaccaatcaaactaaaaatanggtttttttctaaaaaaaaaccatacaaaacattaaaaagaaatctgaattaaaattcataaaaa

SEQ ID NO: 306165 - DNA, 683 bp, Cannabis indica
atatattaaacatgtaatcaaattttatagtacgtaaattgctctatttataatgctatttctgtatatgtattgatgtatattagttatttaatttcttcatactatttttaataattattggataaatagaacgagcagctctggcatcatatatatgactgcgacaactatatatctaataaatggtgtgaaaattaatctgcgtcacaatcacgaagtctttgtactggacctactaacgtaaggaaaagtctgtcgatttagaacattaatttcatatatatatatatagcatattattagcattagcagctatacatagaaagaaagatatcactgcaactaggccatgttggaggaaaattaaataaacaaaggaagagtgagatacattattttattataatataatgtatgagatcccattttacttattattactggcggcatgctaatagtattagctactcttgaacaaacattttcctcatccctaattactatcatcatttacgcgttgagagattttacactaattaatagattaaaattcaaaactaattaaagacatttgtgaacggttgcaactccaattatatattgtaattatgctatagagtcatgttgcttaaatttataaacgctacgcaagtatacgcaatcaagtagtaaatctcaca

SEQ ID NO: 306166 - DNA, 1990 bp, Cannabis indica
cctgaaagtgaaatattattcaacattaccaacatggtaagtaagagaattcagtactggacagaattaataaaattaatgtcaataagctgtcataccatatcgataaagcgtctaaagcaatctcagcgtttttcaagtttccagtcatcagtatcagtattctataataccaattttccaagctgttgaattttccaaatttatacacaattaaaaagaatatatataattaacaatatcccaaaataaaaaatgtaacaaaaagagaattaatattaccagagcataaccccagaagaagtagagagtttggtaaactcccaaagaccagaaaaggcttcgattgagaaaccggcccaagtggtcggacagccaccgaagagtgtatagcccaaaagcccaaaaaccaaagtccaccaagagaagttgattgttaaagcggtgccaataacgccaagcttgaattggtacacaaagagccaactaatgaagatgtgcataatgagtgcagccagtgaaacccaagcgataactccagtctttagctggctctgcaagaatctctgtaaaggaaattggaaagcgaagctgaagtgcagcggaatcatacacatcgccgccacacctgataattccgccacgtcgtgaggctgtcctaacacttttaagacaggtgtggcgaagaggtagattgggagtagtaaaacacagcatacggataacactatccacgacctttgcatgtacacccctaacatatagtacttcttagccccgtaggcttgtccgcatagcgtttccaaagcactagccattcccaactgagaaaaaacaaaacatgatggatttatcatcatatgtcaattattgaaattggaataaggggaattttcataattatgattattattattattattattacgagtaggccgaagtcgaatccgacgatgacattattagcgattgagatagcggcgagttcgagatcgccgaggtgaccggcgaaggcttgggtgatgacgagcatagagtaagaggcgattcggctgaagattgcggggccaactatgtgccatagcttctttgattcaatcttaactctacaaggcagtgatagttcctcataatcatcattgttgttattatcttgagtttttaggtcttccaatagtggaactttattactcgacatttgttgttttgttttaaccaaacgcctttcataatactcaacactcggcacttttgtaaggactaaggagtgttagaagagagaaatgaaatagctattacttgatatagcagatgagatatgtatgtagggagaaatatgaatatgataatgagatatatggcttctaatttataggatttttatatctgaattgtgtgacgccacctatctaggagccactaggccactagtaacagtacaatttgtttattatttatgatttgaagaataaaagtcaggtttgtgttccttcttgatggaaaaaacaaactagtttttcttctccatcaagcaaaacttactctttttgtttggaactcagatttaaggtaaggaaaaagataaatatcaaagaatttcaattttattatctttggtttggaatataagaaaaaacaagaaagagtatatggtataatattatcagctttaagctaagtcctcacaaaattattttaagtcttattctcaaaatgtctcctactaaaaaaaatattgtccataccataatctttcttatttttaaccaatgtaggactttagttacacaccccaacatttacaaaaaagaaaaaagtgtcaaagccccaaacctacagaatcgttttggtcttcactactccattagtttttcaaaacgttatccagaagtgtacaagtagtaaattttattggtcaacatgatattaataatttgaatattaaaaaataatttttttttaaaaagaaagaaaaataattaaaaataat

SEQ ID NO: 306167 - DNA, 961 bp, Cannabis indica
ataggttgaaattttttgaacacgcatgataaattagaatatcaagaactctgtattcagtactgtaaattattcaaaaaatttcaaaaatttacaaaaataatattataactataacgaatactgttataaaaaaaaaattccgatatgtgattttgggcacaaaagttaactaagagaatgttgttattagcacttctgttttaaaatattgaaatatcatacttttcaaaataaagaaaagtccattccaattcaaaattagaaaaaaattaatgatttcttgtactaattttttttaatgcattttaaattttattgtgttcctattttaatttttcttccaactcaaccaattaagtacttgagatttcattgttgtgattattatttggcaagttaattgtacctttttggtcaatgcttcattgagctgtggaaggccttcatgaggtccatacctactagttgttggatcaaatgttatatgtttaactttttccaaagcctcttctggtggttgccagtacactgttccctgcatatcccagaaaattcactttaagaatatgtatatatatatatataaatatatataatttatgtatataacagagctggaaatcaaaccttagccagaggcattggatctttaacactattggtcaactcaagcatctgcaaaaacaacactaaacttttaaaaagaatccttataacttcatcacacattcattcattattcaaggaataccatttttttaactaaatttaaaactatgaatgaatattttaggaaggaaaaaaaaaaagaaaattaaaaaaagagttaaattaccttaaccatgattggaagatcagtgttgagagctctagtggccaacgttcttccctacttttccattttacccaaatagataggaaaaaatgaatggagtgagtgtgagagtgagagagagag

SEQ ID NO: 306168 - DNA, 1059 bp, Cannabis indica
acttctgtttctttattgatgttgaataaaatggattacattgaaaaggaagtttaattagggcataaaacccaacaattctgtctttgagtggagtgaaggaagaactttttgatctaccaaagcatttgggcaatccaagatacttatccatgtggttggtggtaggtatctgcaaatagtcttggataagggtctggtacattaggctagtatttggggtgaaacagatagaggatttttggaaattaacaagctgacccgaaattttctgatactgatcaagtgcctctttgatagcattgcaggcctgaatattcgatctacaaaataggatgctatcatcggcaaagagaagatgagaaattttgggtgcagtacacgcaatcttgagaccagaaccctcctcaatgcgttctgcaagctttaaaatggatgaaagaccctcagaacaaagaagaaagagatatggagagagagggtcgccttgcctaatgcccctggagggaaccacgtgccctagagagtggccattgaggttgaatttgaaagtagcagtggtaatgcatttcatgatcaaggatgtgaatttggggggtgtcatttaatgagataattatgtccctatgataaaaacaatatatttcatttgttaggactaaaagtgaattgaggtgtcacacactactattagaggaactttataattggcctaacatataaaccacaatactcatgatttaggaattgctccttcggggtgtcattattgaaaattcgtaccttggcatttttccttgttggatttgaagaatacgggtcacaataaattcctaaatacctaaactctagtcatcgtgttgcccaagtgctgctcaagtcgactggatgatcacctggacgcctagtgtactcccgatgtctccctggtgcagtttcttccaaatttgtctccaaggtttgaaacttggatgaggaatgtctcccatgtatcctagtgcaatggctaatctgttgggttttatgccctaaataaaactcatttcatataatcatatt

SEQ ID NO: 306169 - DNA, 2966 bp, Cannabis indica
taatctaaaatagttccatcaacactctagaatgagtgtttagttcataattacaaacataataaccacaataatcaagttcataattaaataactaaacaaagaataaagaagaagaagaagaaaacaactctaatgatgctagttgatgatgattgcttgaagtctcttctctcttgctcttcaatgtattttctaatctcaaagttgcttgtttctatctctctagtcgtctctcttttaatctaatttacatccttctttatataggtcaacaaagatagatcaatcctcttagaattaggaatttttaaaaaaaatgatacgtgccctggagaaaaaaatcccaaacccgtgctaaaagtatcttttttttcgtaaaaaatcattttttttccagccaagcactatagcgccgagtacaaaatttttctacttcaaccttgctcaataaagcatgcataacttttgcgtccggactccaaatgagatgagcaacatgttttggaaagctaggaacgagctctatcattttgggtttcataagctcttcgagaaaatgatgaaatcattgtcgaaaatgggctcaaagatcttcgtccatcacaaaatgtcttttctacacaaacctacacacttggagaaaacacatcaaatctatacaaaaataaatactaattcatctaataattgactaggaataactgtacaaatgtgcactcatcatgaaacaacaacaaaagagtaagaacatgaacacacattccaagatcaacaaaatagatgcaaaactaaaaaacaagcaacaaacaactatatataattataagttatacgagtggatttaaagatattaccgagtcattaatgaacatgttgtagtaagaaagatgaaaaaactaagtttgatcttcaacataattcacaaccaatttaaaacaaggagagaatttttgagcaccaacctcgtagacgttaaaggacctatatacaaaacaaataaatatgaacaaaacttaatttaaataaatgatagagaaaaaatcaaaatataaaaaaatgcataaaaaaacatcacctaggatatttaagcaataatttgctaattcattctcaaacttcgcctcatgttttgaagaaacgagatcaaaaaaagaatcatcaatagcataaaggcccttgacatatgtaacaatcttgaaatcccgctcatctcctgcatatggagaacctaaagacataaactccaatggagtggtcttcaaatcggaagaactaaaatcaacaaaaggagattttaatgtcggggcacactttctcttgtcaagaaaaggagtacaaggaagagtgtcatcctcttcttcttttgaaacattgccatctgttttttcaacttcctcatcaagaagggaagcaggaacttgaagaaaatgaaaggtaacaagttttcaatttgacatttttacaacttgaattaaaaatatttgcaacaatgtaacatgatcatcatcaatctcaagatggcttaaccccttgaaaaaatcatcaccctttaaatcaacttgttttcccttcacatttccaacatccttggacttatcatcttcacttgctacagcaccctcacattttttctcaccaacctctgaagaattagcaccccccttatcaccaaccacatcatcattatttttatcatctttaccatcaacactactatgatattcatgagaaccatcaccatcataattaacaacactatcaaaatcatcatcattcttctccgaatctgcacctatattatcttcttcatcatcgtcaaattttaacgctttactatttttagctaaattaatctgtaggaaaatcatgaaacaatccactaagaactaaataacaaaaacaaaatatgacttcaaattattaaaataacaacagcgtaaaatgacatattcaacatacctaaacatgagacctgtcacaaaaatgagtggcctttcacttcagttaaataattacatccaacaaacccttgaaattaaactccataaattaagctccattctatgaacaaataatttcattgactttctctatcaaaaactctatatcaggagaaaagttcttccccgatgaagaaccaacatcagcttaagacttaaccggcacacaatcatcaataaaaacatcctcgaaaaaaccatccagtggtatcttcttaaacacttcaaaagtgggcctcgagttcttaacttggacctatataaaataacattaaaaagaaacaaatacaaaaaataaatttaataagaaaaaaaagtaagagctactataaattaattgcaagcaaaatgaacacttacaatctttaaaggccaatagaatatcttcaattacagattttgcaaagctggagtaccctggccaagatagactagggtttcaaacttagagtgacttggaggatagaattagccttaggttttctaggttagagttaaggcctttatatagaaaagcctaaaccctaatttacacctgaaaccctaggatatttgtatattaaagtagttaattacaaaagactaaaatgcccttaaacatagatattttctagctattttatttggcactgagggcccaattcgcagtccgacttgcagtccacgagtgaaattgtataaaaaatcttgtcaggcccttccgtggccggccctgctcctaccagggtctgacaggtcatgttcctaccagggactggtaggtcatgttccttttagctttaccaaagggaggcctgttgggttttatgccctaaataaaactctatttcgatgtaatctctatcatttaaatatcaataaagaaacataagtattttcatcacttattgtctcatttggttcatgttatcatttatttgtttatttgatttataaattcatctaaatccttatcacatttat

SEQ ID NO: 306170 - DNA, 2002 bp, Cannabis indica
agggcataaaacccaacacctgtgtcctgacactcctcgaagtacatttaagtaatgtaacttcatcatggtagattgtccaacaacttttaacaccatcatgggacgccttgtgttggtggattttggtgctataacctcgatcaagcacttgtgcctaaaattctttaccaattctgtgggagtgggaattattcgaggaaaccaagagaaagcaagaaaatgctacaatgtagccaccaagcaagctgtcatcatggtccaaattgcaaaaaaaggatacctagtggagatacaggatgaattggatccccaagtgggagtcgaggcctctcttgaacctatggaagaagtagaagaaattcaaatatgtgatcaggatccaaccaaggttattcgatttgggaaaggccttaattctgacaaatgaaatgaaattttggagaccattaaggagtccgcaaatgtctttgcatggactcacaaagatatgaccgacattagtccaaacgttattacccatgttttgaacgtcaacaaagatatgcctgtcgtacagtagaaaagatgtccccttgacccagtcaaatttgaagctttaaaataagaagtggagaatgtgacgtggcacttagcagtgtagcacgtgtcaggtatgttaatagttggatgtgatataagcactcagggtaacgtccagggtagttcagagccaagctgagcaaggtccatgccttgcacttctcccaacgaattaaacatgccaagcttatccatactccatacagaggaacgcggtaagagaagatctcataagatattttccttaaatatctctacaactatagtttggttaaaatccctatttttatgagatttattttattgagataatctaggatttactatttagatctttgaattcttctcctattttttcgatacattacctcttgtattttttctataaatagtgaattacattccactgtgaggggattcatttttaaaggaaattttaaaaaaatatatatttttatatatatttacaattacaactttacggcctaaagttttagttacaaaaaatatacttgtaaagttttgaaattataaaaatacactttgctcagtaaaaaggaaaaaaaatacaactaaaaaataatgagaaatcaacatcacgacaactataaatcaactataaaataactagaaaaattatttattattttaactgaagaggtatttttgtaattaaaaattttcaaagagtaaaaatgaaatttttctgacgtatttttgtaagttttttttcttaaatttttagtctattatgttaatatttttttttttaactttcgaagagctattatgctgccagaataatagtaagtttttttttcgagaatgttaaaaaactcacttggctggaccttgtgatctgaataattctttaggctattatcataattattatggggatgaacctctataaattcttgtgttttattagtaattgatcattcaattaaatagttttaatgaataagtgtcattgactaaaagcaatgtcaaccatgttatggtctgacaattaatattttgaaaattcgaatttctctctccacggctgacggttgcactcgattacttttgatttcccatattcgcttttgaggcgagaaaccgaggcgtctatggttcctttatgtacagttacccttttgcctataaatactcggagtactggcacattactcatttttatcacccttcgttgctaagtaaacttcagagcaaaaagagagagttttctggcttcagagttgccgaagtgcctacagacgattgctagcttgcttgaactcggacgttcgactctttgagtaagtttctgattccttttatgctttcctttgcatgtttacgctttgaatgtaactatgctgtagaaagaatgcttaggaaccctagggttaaaaaacttctgcgattcttcttt

SEQ ID NO: 306171 - DNA, 3078 bp, Cannabis indica
taatttctaaattaaactaagcggtctttacaggatatatctctgaaatgtccaactcgcaccctctggttggcttatgcgagctgcctacacgatggagttggtcgggtgttctcgtacaccctgctcggatgttaagttcatacatacttttatcatcagatctctctacacaatttgttgcaggtggagtcttctgtccaagtcacaaaatctattccacgtgtcacccaaatggatgccacatcatcctgtataaaaatttagataacatttctctccaagtatgcgcggggcttcctagtcgcacgtggacttactcagtgatgaaactgattggatgggtgatgcgtgtccaacttttacccttgacctaacgtatttgattgaacgtctctttgctatctcgagcatttaataccttgctttgaaagatgtacctcgatatatgcaatgataattaaatgatattgggcgcatgacatctgccttttttaatgagtactaacgtttcttttttgggaagaaaacccaaaaatttgaattttcaattattttcagcccttttaatcacctatataaaagataaaaattagctttccactcttttagccatttttatatatgcatataaccagtgaaaaatctctctttttctctcaaaaccttcgaagaatacttcactgaaaattaatcgctgaaaccattcaagcacactcaggaatctgcgaataatgagtgagttatctcctcttctcttttatgcaatttccttaaaatacatgcattattctttgaactttttgctataaattttgggttcttaaatttactctcgactaatttgagacttagaagacactactagggcttttaacttctgactgaaatatgcactgatcttttaggttttcaatttctcactattttagccagaaatgatctaaaattactcattcctaggcttctgaatatcagtattcttttaaacttttaagtttggggatttcattatcagaatgaaattccttcttgtttctttaaatacgcctgattgtcatatcaaatatgttttgccttctataccaatgtccagttctcaccctttgtctcccttcttttgtagatgaaccatggtgagttctagggaggtaaacatcacatcgaccaggatcttcttcaacttctttacgaaaatcatcctcggttcaatgcaaactcatctttgtccgaggaaatctcttcaacttctaattttaatgacagggaagttagtagtgattatttcaagtcttcggagcctacggtgcaacatcattagtaccttgaccggataagtggagaaggctacatctaattcatctaggaattgaaaaaaggttggaaatgctatctccctgctttgtggacatagagggttcgacctggtactattgatacattgccaaagggccgaccagctccatcggccaagtacacttccatagcggatgttattgttactattgcgaggcacacttctagcctgaattcaccatgcaaatgtagaaggatgacaaagacaaaatagaccttgaggaaggctttagagtccgaccctcactttgctcagatattcgcgatggttagggtagagcaagctaggcctccgagtgaggatactgaagttgttgctagggacgtcaaagtccaagaaattaaggaccaggacaaggtccgtcttgctggtccttctgatgccgaagaagaataagaggaagatggaattcaagttcttccttttggcgtatataatgagtctagagaacctatctctgagctgagtgatgtattggtggagggccaagattatgtcaaggaggaatgcaagaaggcttggcccttaagtaccgaagaaaagaagggtcctcagtggtcccacctccatccatacttaccttcaaaagattaacaaatcttttggacgaaggtctcctcagaggagtagaggcattcttgccccatcctagacagttggcaactgacctaggagaagggttttgtgcctggtccaggccctatgctaatcaaggagcaatcttgcctttgcacccgtactttaaggaaatgtccaattattacaagatctacccgactcagttcactccaaagggtattaagtatttaacttcgttgttcgtactgtacaccacatagggatggggccagccttccgctcacgacaccaactggattttcaacatgaattcaagttcgaagtaaaacatgtcgcgatatttttacttttcccaaaattaatactattggctaagcgatactatggataaggaggtgtccaagatcagtggttttattgaagattactacatggtcaaagacatggatgttgatcacctttctttccagtgtattccctcctactgtcatcctcctttcaccttgggtctaaggtctagagctcaagtgattcttcaactgtcggagttggctcagaatatctccctcctagccactacagattttctaaagtacgggctttactcgtctgacggggtttaaggattcaaataggcaactgaggggattattactgagcaggaggctccaaacaagaggaaaacttccaaggggaatcatgtgtcgattgaacgacctatcaggattaagaatgaccctgaagaagttgtctgtcccaccgttcaggtgacaggaaaaaggaaggtcgtagtaatggaagatgatgaggattcttctaatgatgacgccctatctttgcttgtttgggagggtgctccccctgaagtttagggtagctatttctttccctatttttgtttattcttacttgttcagatttttaacaagtgttttcttctgtgcacccatgtcggagaaaatgaaacgagaactcaggaagaagactggtgatgaatctattgagattttatgccctaaataaaactcattccaatacaattgtatttgttattaatagaagattagaaatcatttgtgttagcatgtagttttcatttttatggtttaatatacaatttctgttaaatccagaacacatag

SEQ ID NO: 306172 - DNA, 673 bp, Cannabis indica
gacagaaaatcaaaacaacaaaaaatagtcaatttctagtttgttttagatatacagataaaaaaaacacacaattacaaaagaaaaacaaaaaacagaaacccaaaagacaaacttgaaatttcaggggaattctttgtcatagatttgatagaacacccctgaaacttcaattacagtccaaatcaaaacgacctgatcctaactgtcgttaattcaaatccttcaaatactcaaaagtagaagacccatcaattctgaaaatataacctttttcttcttcttcaacttctttttaccaccaccattattgatcaaaacttatcaataatggggtgtcaaaattcgaagttgaatgcagatgtgttggccataccaccaaaactgcgacccattttatggagaaaagttgaggagttaagaaaccgacgtcgaaacggcgtcgttaatggcactacaatctccaaaaaagagcttttgaaagatggtaaagtatatatgttacctcttctgttgatgaaaacgagagcagaaaatcgatatctttggaggatgatagtgtgtcttcttctgggtcacgaccaaaaccagattatagttatcttattttaaatattaataaaattaattatgataattagaattgaattaagaatagtaaatgtataaatac

SEQ ID NO: 306173 - DNA, 4570 bp, Cannabis indica
atcattttgtaacatatgggggagttaattgttactatgagtaacctctacaattatcactaatattaagtgagtaaaaatgtgttatacacatcttaatttgaaatttttaatgctaaataagttatggtgtgtgcatgagttacatttgagtccataacatccatgggaggtttatgagtttgaatttgaaatggtgatatcctaaacactatataaagagatctaaggtgctcatattgagatgagaagttttctttcaaaaaaaaagtactttgctagaaaatcctaagacttaataatttcaaaagctattatcatgggagctttcttagtgcttagagatagggaaaataagcttttggaataacgtgtaataccttgttcaagttatggtgatccccactattctacactaagattgtgagtgagtgatcttttttttcttcttcatattatatatatgttatatgatattgtgtaatttattcatctcttctacctttcatatatataaatatatgtaatgtataggtgttgtaacatttatttaatcaatctttttgttcttgtattattttacaattgagttgtactatatcttgttatcttctattgatatataaaaatctctagctaataaagcatcaggtcccatataatttaagaaaataacttttagagaatatcgctaacaaatcgtaggatgtcacctatagagcgtactggacaccattagtgcccaatagcaatgctttatatgagaattgctaaaaggcaccactggtgcctagcatcctccatagtgtcataccactattgatgtaattaagtatcaagtcccatataatttaagaaaatagcttttagagaatatctctaaccaaatgtagggtgccacctatagagagtgcaaggcactagtggtgcccaatagcaatgatctatatgagaattgctaaaaggcactactggttcctagcaccctccatggtgtaataccgttattagtgtaattaagtatcaggtcccatatcacttaagaaaatagcttctacagaatatcgctaaccaatcgtaaggtgtcacctgttgagggtattgggcaccactggtgcccaatagcaatgctcttatatttagagagagcattgctattgagcactagtagtgtctagcaccttttagacgtgtagccttacgatcgattagcaatactctcaagttattatattaaactatatgagacccgatacttaatttataccaatagtgatattgacacgtaggagtgtggtagacactactggtgccttttaacatttctcttatatgtatataaaaaatttatggtgggaatttttgaaagtaccctacctatgagaattttattttaattatattattggttggatgtaccaattataaatagtgtcgaatgcactataatattttcatctattactactggggaccagtggtgcccagtattctctataggtggcactttacgattgattagcgatattctcttaaattattttcttaaattatatggaaccggatacttaattacactaattaatagcagtaggatactaaggagagtgttaggcaccaatagtacattttaacaattctcatatatatttataattatatatatgcttcaaatgtattagccaaacaaaaaattgtatggcattattaagctcaacttaattatgttgtcagctcaacgatataatttcataatagtatatttcaaaacaaaaggggtatgtagggatattttgatatattagtggacatgagaactataccttagggggctaactaaaggagtctctattttgatcagatattaacatttgtttaaaatgtctttcaataattagatagaggttatgaaaatatggaatctcgtaccatgttatttgtgtacaaaaatatttattctggtctaatattttgtgttacaggtggactttcggcattccaaagcagaagtgttagctttgtagatgggattgaattgggttgcatgttaatgctattttttctaattttttaatgctggttaaggttttgcataatttcaatgtatttaataataagttaggagtcattttttctaagacattgaggtttgtttaaatttcataaagcatctctttcttatgttagtcgtaatttaaataagcggcttattgaatggctaatatattttttggttagacgataagctttttcaattagaagaaactccttcttccatttgtaactcgcttcaaagacatgtttaatgcaaatatcgtatttttcacaaaataaaaataaataaaagtaatagcaaaattttcataaaattataagtacaccacattttaataatttttattttatatacaatatatctctttaaattttatattagtttttttaatttttttcatccatctcatattcttaaaaatatacatataaaataaaaaatatatattttaattattaaaacaaaaatgttaaaacaaaaaaatttaaaaactatttatatgatttaaaattatctaagacaaataatttgaaaaagaaaatttcaaataatattagaagtgatttttacacattaatttatgatttcttttttaaataataggatgtccttatatggtgtatatataaaattccccaaattaatattgtaaaataatatttaagttattattattaatgtgtagttaatagttatcttgattgatttggcattatattgtacctaaggaatatattcacttaattatgcatagccggcgaggaactaagaaaacatctcaacttttgtgtttaacacacacggtttaatgtcttaattaatttgacttagactagactatttgaatagatatatcttaatctccatattatgtctctcatgttctttctataaaacccagctcgttttgcttctcaaatcccaactcaaaaaattaaacaatttagatctacatagttagttctctactctctattaagtacttacaaggtaaaaagactaattagtgcactaatgggctgtcgagtgttgctattattggtggcattatttgccatcgtttcttccattgccttggcatctgaccctagttctcttcaggatttctgtgttgcagcctccaactctccaggtatacatatataatttcgacagtttaagttctctacttattttgtagcacattagtatgttttactaaaattttccttatattatcttgtattgtaaacatggcagttctagtgaatgggtttgtatgtaaggatacaaagatggtgggagtccaagacttcttctttagtgggctacaaaaacctggaaacacatcaaacgcacttggttctagagtaactccagttggtgtaacccaaattccagggctcaacacattgggaatatccctagctagaattgattatgctccacgtggaatcaacccaccacacacacatccaaggggtagtgagattttgactgttattgaaggaagcttagaagtgggctttgtcacatccaaccctgacaaccgtcttattacaaaaattcttcacaagggtgatgtgtttgtgtttccaattgggctcattcattaccagagaaatgttgcttatggcaatacaatagccattgctgctttgagtagccaaaatgcaggagttattaccattgctaatgctgtgtttggatccaagcctgacatcccagttgatattctcgccaaagcttttcaattagacaagactctggttgcgaatcttcaatctaagttttaaatagaacatgtacgtcacttttagattatattttaagagtgtttgaaatcagtacttagaaaaatgattgtgtgcatcagtttgaggtttaagagctttgagatgtgtgtgtgtttttttttttacttagtttggcattaccaatatggttgtgtttccttgctaattcattaaattgtttggtttatttcatttgaaagatatggtgaattttaagttgtttctctattaaattgatttttactaataagttacactaatcataaggttacaaaggtctgcctaggtgggctaagcccatggagaaaattacctaaaatacccactttactttatctgttttcatttttaccttcattttcatattctttaaaatatacctacttttaaagataatatccttattaagccccttaggttaatgcaaattatattttaaaaaaatataatatgagggtaattttgattaatggaaacaaaaaaagaagtatttttcaacttatcccgatacttagggctcccacttatcaagggcccatttttttttaaaaaaataaagggaataattacataaggcaccattttttgtaaaatatttacatttttacgttcaaagaatgtttttttacatttttacggttttctaaaaaataacatgaaaataacataaaatcaacaagaaaataacaaaaaataacatacatataacaaaaaattaacaaatgaacaaaatttcaac

SEQ ID NO: 306174 - DNA, 1485 bp, Cannabis indica
attactaattagcctttagaatatatggcttattaaaaatttctcttaaaatataacagttacataatcatgttctttctgttaggttctgtttcttttaccgttaaaaatttaacatttttacccctgaacccattaggggttttgtaaatggaaaaaatcccactggttgggataaaatacattgatatattgatattgggttggttcaagtaggcccacggttgaggaaaatcttcattcgtacacataggtacgactgatagtgatagttggatcgtgagccgtcagttggttggggaatgttagagtttcgggcgttagccgaaaaaggtgatctcattatttttgtgcatctttccaagatctagcgtaggggacaaacccctaattcttcgagattcttgtctaggacgtgccccgtaggattggtcctagacggtcggtaatccctgacaccttttcgactatcatttccaggtgacacctgagggcatccatcttcatttcttcaactacttgttgactatgaataagtgccaaccttctagatctatacatccatcttattcatggaagagttgaggttaaatctgaaccttctacttggctttgtttgtgggtcgggccatcaattcgttagggcttagtgagtgggtctaggaacacatgaaattacatttgtgaccctcttggaaacacgaataacactctctattacataactttttggaatatcttataaggaacttgaagatttatagaatttattctaataaattcttcaaatttacgttctaatttggtagaaaatatccactggagaacttgtctcatttgatcccaactcctttaagctcttaagcttatttgggcaatataggttgctcatcaacctttgaacctttttcttcataagatttttcaacaatagttggttcttgaaagttgttatctcattataacaagttcttaacaaacttcactttaataggtttaatttctcattacacttaatgtcaaatagcctttagcgttgcaatttatggtattacctacaaatgcactctcaaaggcttagaaaccctgttggtcatgtttctatatgcttttgttattcacaaagtacccccacgctttaagataacattgattaggtttcttttatttttcataactcatgaaaatttatttcaaaagaatttcatatttatgacacttataatatgcaaaagtttcgcataaagtagagacaactcaacatgtacactattacataaaatacacatcccttcactgatactctacttacagatcataaaatattaaagatgtatactctcaagtaaacacacatgtaaacctagagcaatcatttataaagtgtcaagaagttttctccatatatatctctatatagcatgccaaataaatcatataaattattatgcatctcacaaatataagtgcatgtttggcatcata

SEQ ID NO: 306175 - DNA, 1700 bp, Cannabis indica
cattatttaattatgctataaaaaaaaaaagtaaactcttaaattcttaccatatctcttgtaatttttactttttttttttaaaaaactcaatggcatagtgagtcttaaacataagcttaacctgtcttaaaccaaaatcgactctgtacatttcctttaattctattaacacacaagtaacaatagtggaacctttccttcccaataagtatcattcctaactctccaaacattataaatggttgcaaaagtgtgccttgtgaatctactcactttcttcttcaaatccacttttgcaatggaagaatgttaggttttcataccaaacataatcttcctcgactcatcaaaacatctctagctgaaagtacatcttctcaaagtaaacatctctagtttaaagctagcctctctaatactactaaccataaaatcaatcaatgtttcgaaaacacaaacctagttcaaaaaattccaatatagatgacaaaataattttatttggtcgcacaaaacaacttaatttaaagagtaaaaaataattatgattattaattataataattagtaggttgctagcataattgtagttctactactatacattgagattatgtaataatagtttggttgggtttattgtggagcattatgactactccaaacttgaagctcagttcgatggtatggcacaaaccccacaagtgtttgaacttgatcatcatcatcatgatcatgaccgtccaatctcgacctcttttcttgatgatgatgactatctctattaaggtatggtagtgatgttgagtaggatgttccactacaatattccaattccttattaatcaaatgaccaacaaccttggttgaattctgctcatcattatgatcatcatcatgatcattatggtttttaataatattactaattgtatgatgatgatgatgatgatgatcatgatctgtagttgtagtattagtagtagtattattagtcaatgtgcctttggtttcaagggtgtggatttcttcaaccataggcttccaaactctaactcgagcattaatgaaccagtttgatacctaataataataataataatcattaaaaacaacatgtcattcatccatcaatatatatatataataataataatttttattcgaaatgatcacttgtccaagagaagcatatatgtaattgaaattttttaccttttaaaatgaatagttttgttgtgtaaacttttttttatatcgtctatattgtagttatttaatacatcttacaaaattttaaaaagttaaaaatattcaacactcaaaaaaatataattcaaacagtctatttcacacttataaattaaaatattcatgcgtgcaaattttttttaaataccgaaatatatataaacgcattagtgcattatttttaaaaagtgcactacgttttattattttgaacgaacttattaattaataaattttatcattcttattcaaaaatattgtatttgatatgattaaattttctctaatatttgttttcacacaccttaaaattcttgcaatatagaacaaaacacataaacattacttaaactttatcatgagcttaatggttagtagttcctaagtgtaatatgttagataaattaacaattaacccaagatctatttgtatataacatagaaca

SEQ ID NO: 306176 - DNA, 1911 bp, Cannabis indica
aaaaaatatatttttatttagtttaaaaattcaatgcaaaaagatttaattgctacgcaatagaattttagaaaaagtcttacttgctaaattaattataattttattgtattttttaattgatttttattttgtaaaggattttttttaatgtaattgaataactgctgaatacgttaaattgattatttttttaagcaggttaaatcgaaattcaaataccaacttaaactttttgcctatataagtaaagattttaatttctttttgagataaaaagattttaaatttgaaagttagaaaatcattttcttttaatcacattaatttaaaattccctaaaaaaagattattttaaaatattattaataaaattaatttcaaaataataaaacttaaaatctgttgtgtgaattaataaggccaatttcaattttaatattagtaggaataggaaaaaaaaaaaatatcatgatgatatgatcttgttcctccacattagtagtattatttcacaatatttcaaatttgataatcttgtacaatgtagtattgtaaagttttttaccgtcatttttggcataatttttgcaacaatattggtgatatggggcatttacatgttaacgtcggcacaaaatatggtatatttgcctaccgtctcagtcacaacattagtcacgacaatcaacgatgacaccgacatattcatactacagtcgagactaaaaacagtactactgttctagaataaatatagtcactacgcaaattggctcaactttaaaaatataacgctagctagcttgatgtttttacgggtgatcatatcggatatattgatacgaagtttagaatgttagggtttttgtatgttgactttgcgttgacttttgatgttgggttaatcaatgggtgaaactacgtaaatatgaatggtaactggtaactggtaaactgggttaaaggaagtgtagtgatcatgaatggtaactgggtttgcactagtactcatggctcatatatatggatattggtatgaacaagttgggatagaaacaatctataatggattcaattttctactgattatcattttcgttgttgtcgtgattgtggatcaaattgctaaaagaatttgtcaaaaattactttatatgattttgagtactagttatatatttttgaacacttttaaataatattagattgataaatatgttttaatgataataattttcttatatatacataatatttaattcattttgaaaacaagaaattctttgctaataataacaaaagttggccgaagatatttttttaatgtttatttattttttattatgtcatattaccatattgaaacaaacttgaaatataacaattgttcagagtaaaaataattattaaaattgtttaaaaacttatcaaacatattatatatgatacgaaaatcaaatatatcaccttaatttattatttcatattattttcgagttatgttgtgtcaagttttattttttgaatttatttatttttttattaaataagtaatttaaactttagtatcatccatattctcaaagtttagtccaatttaattatacaaagtacattcttatgattgaaaatttgcctaacaattattaatagggtgttttatcacttattcatagaaaatttaatattctccacacttctttatactttagaggtttattaattttttagttgataatactattatagtttattttatcaatttttacaccatatacttaaatttttaatttttgttcctttttattgtagagtggatttttttttttttcaaaaatattgtgtaaattttatactagagtatttttgtaaaaaaattcaaaattccgtttaacagtaaaattgtaa

SEQ ID NO: 306177 - DNA, 2744 bp, Cannabis indica
taaactctaattattcacaattatgttttcgaaatatcacaatataaaaatagttttcctattgttttcttctctaaattttgtgcgcatagtattattaagctttgcccgcacaaatcaagggagtactcagaatagtgtagaagactgtgtagtctttcacattacaaaaaagatccatgttctgctctcgattatactctgtgacagaaagaaaacaagagtgagagaacataatagaaggaggtatttaattccactacaatcactgtaaagttttcttaaacttttatgtgtttaatttgaattgtttaaggttccatgtttaggacgttagattaaataacatacttgtttagtaaaaataagatcctggttaaatatgatttccaacagaagcttatatagtatctatagccattaggtgaagttatagggactggaccccataaatcaaaatgaagcaattgtaatggtttagtgtaaacagtttgagaaattgaaaatggaagtttttgatgctttccaagaaaacctgtagtacaaagatcaaaagatgaaatatttttattgttgatttgatgttacatgatgagaggaaaacttgaacaactcaagatgaaggatgtccaagcctcacatgcctcaatgaacattatttgagacatacaaagtatgggaattacaactgagtttgatttctggtttggcaccaaatgaggaatgagatgtttgagaagtgaaggccaataaattgagttgagtggaatcgaatttgtaaaggcctttgtcaagcttcctaagcattaaagtcttctgtaaaacctggtctttgacaacacaaaagggtgaaattcaaagaaggcattgttgtctaaagtaaactgagaaacttgagtaaaattttagttatagaggcacataaagtaattgattaagaacaagatgctgagactcatatggagaaagaaaagaggaatgatcaatgttactaatatgcaaacctactctattgccaatatgtatttgttggtctctaagaaattcagaacttgtggtcaaactctgagcattggggtgagatgatttgtggcacctggatcagggtactaattgggatcaagaacactttctggtgcagcaaagtatgcctgcatttcagcaatgttagcactaacattattagagaaattttgattagattcaggtccaagaaagctcttatcaaactgatattaacactgttgaattgtgtgatcaactttgtgacaaagttggcattgaatcttttgatcccagacaacgaatagacccatttactagagagaccgcctctgaaattgccataggaaccacgaaaggaggcaaggtcacttctgaagtagccatatgcaaaggaagaaccatactgaggagtggagggaaaacctagtggaccatttgttgcagacaaattgtttccaaagttagttcgaggtcgaaacccaacagatgaagatccacaccctggaaaagatttggtatgatctagatttgcttcattcttggttatatctagctcccttccagccttgccaatatagacctcctaagccattagtaaaccttcaatctctataactgtgtaagcatctgttctggtattgatagatgtgatgaatacattatattcactggttagtccataaagatttcctctatgtgatcttgagtagaggtttagtgtcatattgaggctaaactgtcgattaggcttttgatcttgagcagatagtcattgagagggttgtattgcaaagtaaggttttgtaatgaccaatattagctcgattcagagtagtgtagtgttctctcaagatagtccagatttgtgcagcactaagagctcattcaaacatggaaaaaagtaaccatgacacaagaacattgtcttgttgctctcaatcttcaaaatctggattaagacgatttactctttgatcttcatctgtaaggaactgctgaggcacactatttggataaagagatttctggagatgactcctttttattattgcaataacttgctgtttccatggtagtttgtttcatccaaatgaacagactaagaataagaaaaagctatacaagattggtttcaggaagatgatgagctcctagttgttgaaataaagtggtaggattcaaagaaccacaaatgatatgttgaggcaagatccatagaaaaaatgatgatgctctgataccatgtaaggatattagattcaaagaatgagaagaaatgaaagaataatagaagaagagaaactgtttgtattattgaattgaaaagagtgttataattttatatacaatgctcaataacagaaagagaacaacaaaatcccaagagtgttataactttatgtacaatgctcaataatagaaagagaataacaaaatcccaattggtattagattgacctaggtcaaattctctctcatcgattcttgacgaaatatcctcttctttctctgcaatgacagcacctccaaaaaacccttgcctaaatactcagcctaatcctgattcaaacctagctccagtcctagtcatcccaacaaacactacaagaaatgtcacttttgccagcacaaaaatgtgctggcaaaagttggtattgcgttggtaaaatagaatttacttgggatgtgttggcaaaagggggttggcaaatcaatgttggtattagaacttttaccag

SEQ ID NO: 306178 - DNA, 3038 bp, Cannabis indica
gaaatttccaaatcacaaatccatacattaagcaaaaagctaggtttcaaaacatatataattttctgtttttcaaaacaccataaacgaataaaacataaagcacaagcactatataaaagtgcaacacactgacacacagatcacacatatctttatatattaaaagtgtctatctaacggcaatttttggtttaacagaataagatatctgttaaatttaacgattaggtttgatctcccgttaacaaataaacccaataattaaacccaaaaaattaaacaatcttttaaatattaataatctctttttaaattaaaaaaatcatcttagccacatatctctctaacaaacctatcttgggagaatattaataattttttttatttattttttaaaaaagaaaaatctttatatattaaagttaacctcacgttatctaatgttttctctggataagcataggaagcagaaataccacttctatctttgtgtgattgcagatataccacttctgtcattgacccactttttagctttataaatggagatgttcatataatattaacactttacagaatatttatagatataaacttacattacaatgctatgttaaaaaaagaactaaatagaataatctactactccaataataaatttatttacaattttataattacactaatattatttttaatacattattaaataatatttcaaatataaatatttaattttttcaaacaaaaaatttgtaatctttaaaaataaaatacattcaaaatcttaaaaagaccaaaatcttaaatgaaactagcaatacgtggctcggcacgtacattcacctagtatatatatatatatcataataagatttttaatttacttagtagtagtggtgttctttccaaaactacgaagaactttggaataaaaatcccagtctggatggttaggagttatagcaggttgcccaaatggatgcttttcaacataaccaggaatatcatcttctgctttcgccaattcatctaagtaaacacgaagctcactatttggacctatttgccaaaattaatatataaatatatacattgttaaaattaatataaaaaaaatatcatatatagatataaatacatgataagttaattttaatcaaagcacttacctaaagccacatcatcaacatcaacagctttatattcatgatcaataaatatagcagtgtttgactggagcaaaatcaaaacaaaaatgtgttaaacaagaaatatagtacgtacccgtatattatatatacaaattaataaagattaaaatcaatagcacaaataaatattcatatatatatatatgttaataaaattaattactggatttagcagtgctttataaggcttgtcgtctatcaagagagtgttcgatgaagaaaacactcctttggaaaggtacttgttttgccacaattttttcaagtccttcaaaaacaaaggtttttctttattctccaatgtacggaaacctgaatcagtgcattgattttgatcctgaaaattaataaaatataaaatatataagaagacaaaattaattatcacaccaatttgaaaattcatgtaaacaaaaaaaaagagtatttttgaagtaagaacttgcccatgcaaatagcagtttgccccttaatcctttcattatgcaatccagggcattgttcatgtaccatctgataaagaaaataaaataacatataacacaattatactattatcaatacacaaaataatatatataataataataataaaagatacaatattaataactgactctctagcagaggaccatattccgacttcaaatctttccaagcagaacttcatgaattcttcacaataaggcctcttgtaaactgcaaattaaagacacaaacaaattattacatacacatatatatataatattagaaatgaattaatatatagttaattacgtaccgaagaaatttccataagaagtatcaggacgacgagattttggagcactagacttgtcacggcggtagactctatggcaaagaagtccaccaagagcaagaacaataagcttcttctttcgttgttgaccaaggttaagtttctccaacaagtctccaaaatccacaacattcttttcttcagtttctttagtttcagtttcacgtactattagttttcctttcattttatgatcatcaccaacccttatttcttctgccatagtccctttcttactctctaaactagtatattgttgtatatgatattattacttgagtttgtaatatggtatgggtatatataagggtgcatgcatggtcagcttttccacttcttcattttttttttcttgttaaaagtggctttttgattgatattggttaaattcctaagattcattcactattagttatctttgacggttgctctgctcatgcatctattggattgggtttgggtgggagtaattagattagaagtgccttttgggagttgatgagtatcttggaaaagctaaccatatttattaataaaacccttttttaaaggagaatattaattcaaatgttttatttagaaattagaaatagtatttttagttattatatataattatttggaaaattctataatgtattcccttaaaaggaaagcaccgatacatctctattcgttttggtattcgaaataattttttagtaaatttttttcatggtcctgtaatttataattattcaagatatcatgcaaaattttaagacatcaaaatgagtgtattgatgcaaccctagctgttttggtatctataagaatttttttcttagttcacaaggttgttgtcacacactcagtcaggttgttaaagatcaaaggggctttggaccacgtatcgcaagcctcaaacaacacatgaactgttcaatcactaagggttgatcaacaacactagggtatgcataagaggataactctataaacttcatgtaaaactcatt

SEQ ID NO: 306179 - DNA, 1834 bp, Cannabis indica
gggcataaaacccaacaaacccgaccaacagaaacccgccaacccgttacccaccaacccgtgccctattctggtccaggttcggtttcatttttttgaacccgaaactcgtgaacccgaaacccgcgaacccgaaacccggtaaacctccccgatgttcaaccctaacttgagcttttcattcccacaaacgccgccaaactattaacagtagaaactcgtcaactaacacaaggccaaatgaatcgaaactcaaacacaagacttagaatgaagattaaaatacaaaaacttaatgaaatgtttacatttcttagagtaagtgttgcaatgattttcaaccccatactcacatttaaggatggggtatttatagactctaatgaactatggcacaattgcgatcccaaggaataagatgacatccatgagctataggttgcaggttggaggttgcaggtggtagtcttgtgccttgtacatttgtctagtgtcaagtggtccggagttgtaggggtagtgttgtgtgtacccttggtctggatgtcaggatttgcaggtatggtgcctccactactcataccctctaggtaatagaacttgcaggaggcgtggttgtactccctttgcatgcacgcctcgtcctttgtatgcatgtcccgtctttgcgatcatcctctgttgcattcttccccaatacttgggaaaacttcactaagtataattgtgtcatcgagaagagtattgtcgagtgacatgcatgtaagtattggccaagtgtcttgcatgctatcttggttgaatgacttgcatggtgcattggcgagtgacatgcaagcttaatgcatggttgagtgacttgcaagctgcatggtcgagtgactagcaagcttaatggttgagtgacttgcaagcttcatggctgagtgacttgcaaggtgcgtggtcgagtgacttgcatgcttcatggtcgacttacttgcaagctttatggttgagtgacttgcaagcttcatggccgagtgacttgcatcatggtcgagtgacttgcaagctacatggccgagtgacttgcaagcttcatgttcaagcgacttgcaagcttcatggtcgagtgactccttgtgcatgtcgagtgactagcaattgagcatgtcgagttacatattcttgtgcatgtcgagggacatgtacttgagcatgcttgactgagtgattcctccttgtgcatgatgagtgacatgcacttgagtatgttagttcgagtgactcctccctatgtatgccaagtggcatgcacttgagtatgccaatgacatgctcgtgagcatgctgtgtgacgtgctattgtggatgttgagtgacatgcacgagcatgcatggccgagtgatttctccctgtgcatgtcgagtgacatttctcaatgcatgccaaataacttttgagcacttagagaagcaaatgcaactatgcatccagagcaactctttgagtgcatccccgctaatctcccaattagtagtcgactaatcttgagggttaatcttgctaatttttaaggttaacaaaactaaaattataattaacaaattttgaatattattatatatatatttttaaaaaaataacactcaaattaaatattttttaacaaaatactaccaaaataaaaactaataatataattaaggataaattgcggcataaatacctaatgtttccgattttatacacttaaatacttaatgtttattttttgtggcaaaaatacctaatgttacaattctcttacactgttactaccacttctgttattaaatcataaatatagac

SEQ ID NO: 306180 - DNA, 1934 bp, Cannabis indica
tctcactaaacttaagtaacttctttgacttgcaaaatctcatcaaaaggaaccatcccattccagctgcagtcataacaccactcactaaaaacacagtcttggtagcaataatcataacaaatatcagaaaagatgatggaaccaaacacatgattatcaaaccaggtatcttcattggtactttataaggtcttttcaaagttggcatttttcttcttagccaaacaaaggaagcaaactccaacaacatccccaatgcatacaagaaattcgccgatgagattatgacggtgaagttcatgtaggataaggcgagagcgattagagtggagacaacaatgcccacgaatggtgtgttgaacttcttcgaacgagtggcacatagcttaggcaaaatgcctatgtttgccatgccaagaacttggtatgcactgctgcttagttgtgcttcaaataatccaattgctgataaaacagaaccgaattcaagccatatttttagccatttaccggctatgatttcagcagcctgagcatgaaaaccggtttcccatttactttgatcaacatcaacagctccaatcacagcaattagaggtattaaataggcagtgcaagtgaaaatgacagctaccaaaagagccatagggaaattcttttgagggttttcaacttctcctgctaaagtacttacattatcccaaaaattcaagttccaaaacaaacaattgaaaaacaaattccaatcccttttcactcctttttggcctaaactaatccatctatgaggcttaatcttaggaatagcaatcaaagacatcaacacaaatggtgaaagtgaaacaacaccaagtaccacagcagcataaccaacaattgtcaagccagtatagttaagaaaagaaagacacaaagtgaataccaagatagctacataccgaggccaacccgcctcaagagctggaatgatcttctccaagtaattgacacaaagaacagggaatgcagctatgttaatgacaccactaaggaacttccatgtccccattaaggaaccccagaaaggaccaaaggctttctcagcccaaatgacaaagccaccatttccagggaaagcagtagagagttcagcagtgatgagtgcttcagggacactccagataaaagggaatatgagaaaaccgaggatggcgaaaaggggcccggctgcttgaacagcaggctcctcaccataagggccaccagcaacctcaaagtaaattagaaagatcaaaggtatcaaagttagtttctttgagactgagattgcattattggatggtgtggacactggcaattctgatgtaattttatcagagtgtggtttcacttgacctgaaatgggattctgggactccattgttatcagggtaggaccagtccttttcaatctaataaaaacataatgattagaaaaagaagaagaacattattactctattaacataaaaatttcaactttatcaaaaatcaaacacttggtgatcaaaaaattcattatcaaaattcaatcaataaaatcatgcaaaatacttcttcataacaacatcaaaataatcataaaataattgaaaagattgaatttttaaagagcaaaacagatttataaagaataatcatgagaaaataccttacagtgttcttgggcagccaccaaaaaataaaaattgaacccagaaataattgtttgaatgaaattgaattattgtaactgaagtgaagagattacacccttatcagaaggctcaaaattttccctggttttatgggtcaaattttcaccaaactttcgatacgtttgtgacaatcatattataatattataaaaattaggggtgtacgtcggtcggtttagtcgggttatagcatatttttattaacccaatataaat

SEQ ID NO: 306181 - DNA, 1126 bp, Cannabis indica
cattgcttgattgaaagctttcattgatcagaaacctaggccgccatggaatttagatttgcaaaggtaggaccaactcttctaatgtactttcctgttgtggtcaattcctccccaccgaaattgagccatcatggactccatttttttgtggaagtagtgaggtaattggaaacaagtcatcgcatgggacagtatcgcttgaaccaccgatttgaagagaaattctttgcctccttttgagaagaaggtggaattccatctgtttaaatgggaccacacgcgatcttgaaggtaggtaaaggcttccttttttaagcggccaaaagattaagggagtcccaaatatttctcaacagagtctcgaataggcacattgagcaaataagtgatctgatttttaatcaagtcagtggtgtttggagagaaatagagcgataatttatcataattgacaagttgacccaaggccaggctgtgcatgaaggagttcattgatgtgggtggtagctacaggagaggcggcgctgaagagaatgctatcattagccaaaaacaaatgagatatgtttggtgctgtccaggcaatatttaggccaagagtgtgcttccttgggaggcgttgatgaactttttgggtgaggagtcatgagaggccctcagagcataacatgaaaagataaggggagagtggaacgccttgatgaatgccacaagatagaatgatggatccaagaagttgctgattgatagaaaaggtgaaggatgcggtggagagacaggttaaaagaaggttggtgaagtttgatgggaagtgaaatttttccatgaccttcctaatgaagtttcattcaacacgatcaaaagccttggccatgtcgagttttagagccatccaacccactttaccatgcttgcggtgagttaaataatgagtgacttattggccgatgatgatgttgttggagattaagcggttaggcaagaaagcactttgggatggtgaaatgatacagcatagaattggcttgagacgattgaccaggctgcaggaaatggatttatacattgtggagcagaggttaattggtcgataatcagtgatggagttgttgggttttgtgcc

SEQ ID NO: 306182 - DNA, 2132 bp, Cannabis indica
ttttctccatctaaaatgattaaagatagcatttttgaaaacatatttacagaatttctaaaacccctcactctctcacacacacacactttgagttcctaagccgccgccgacccttctctctgctcttcatttggacactctcttcttcctcaggtcagtcccctcaatcgttctcagtatataattacatatataatcattttttgttttgtttaatttagattttctcctatttgtgtggttaaagaaaccgttttggggtattgatctaatctaatctttaattaactcaatttctttaatcagtgtttagtcccttttatgatgatgtttttcatttttggatataggcattgacaggaggaagataaagaagatttatattcaattgggttcagaacaatggctggttttttagcttcaaagtgttctcatggtaccatcttattatctcatgacaccctttttggttttcactttgatccattcaaaaattattagacatttaaagatttgatttttgaactatcatggcttccttccttggacattgacctaatgtgttgagtcaatgtggaagaagataattttggtccaatttttttgggtttctgaatgcatattcatagttctcactttcttggtttttgatgtaatagttggccgttcattgttgggaggtcttgggaacaagttgtctgcaacagtaagcacacaacatgagatggcaaacaacagtttcttgtctcaggttagtgcatttgtttcggttttgaatttcgtggatagctcaaatggttaggcatgcgatttgctctcttgactgaatgaggtttcgagtaacttatgtaatataaggtgtttgattgtgttaggatagtgttaaaaactgttgaatttcttttgaattgactcattgtgttcattgttgttatcattgagtttactggatgatgatagaatgtagtacttatatggaagtgaggttaatgcaatggaatggaaaagaatcaatttacatcccattcctctgtttggtagtactgaaatgtcattctcattttcattcttgtttctgtgtttttattcttcccaaccaaacctatcttaaccgattttacatagtagaaaacataattcataatctgcttatcagttgagattcatttgtttcattccctttttatagcagattaggagttttatacagatgaggactgtactgaaagttgtagacaattccggggcgaagaaagtgatgtgcatacaagctttgaagggaaagaaaggagcaagacttggagacactatagttgcatcggtgaaagaggcctatcccaacggtaaagtgaagaaaggaaaggttgtgtacggagttgtagttcgtgctgccatgcaaaaaggccgttgcgatggaagtgaggtcaagtttgatgataatgccgtcgtgcttgttgacaagcaaggtcaacctattggaactagagttttcggtccagttcctcatgagttgaggcgaaaaaagcatgtcaagattcttagtttggccggtcatattgcctgaaacaccgattttcgagtggtgtggtgtttaatagttttgatcatccaaatggcaaagattttggcttgatgataatgtcacttgactctgttggaaataaggagttgaacttgaatgtaaaagcttatcatgaactgagtgagaagaagctaaagatcatagaactattgtagattggtattgattataattgtgaacaagaaaggtttctacatgttctaaatatgcccgaacaaaatttctgaatccgccattgaaatgttatttcagtgtttatgaataatttgccataccgaaaatagaatttaaactgtctatttctattttacatgctaataaaataaaagaaattgtcgtacaatttactgcttaaaacttatttttagcaagttaaattattttaaatctttttaaaatttacaaaataacttaataactatgtaaatctctttttatattaagattataactatttgggtaaatagtggcataagtaccaaaaattttatgtttgtaagcgacataaattcaatgtttatttttagcagcataagtacctaatgtt

SEQ ID NO: 306183 - DNA, 2768 bp, Cannabis indica
ctctactctctcactttcttttttaggattcataacatttaaagaaaactgttagtttgaaaaatttcccagccaataaagatcgggatgccttgaatcacaactaaccattcatcacatatcttagaaccaccgacatgacctccaatgtcaaaatcaaaagcaactctatcagttcaaccgcaattcaaaaccatgtgatttaaaaaacaaaagtagaactagccgacattgaaacatacgcaaatgtcaaaatgaaacatacaaatttcagacattcaagatagcataatgcatttaaacttaaaaaggtcagcatagctaaacaagatggcataatcaacagtggcagacagtaaaaatgaaagaatgcatgcacaggtgggaaatggttacatttaatcaacaacagagaaacaaaggacatcaattaagcaggaaaatgcttacttaccgggcaagatttagtcagtaccatgatttctttacttggatcaatatttcctcttgcaagaagacattccataacaattgatcgagctggtaaccacgatcttgcgtgaaaatttaaaatctgagatacagagatgtcaattcattacattggcgacttcaaaatttaaatgctcaacaaacatcttaaaatgaagaaaaacaaatcatacatctagaaactcgctgccagctaagttcattgcgcattggaaagcttcatcttctttctcagatgaaagatcatggtccaaccaatccagatttaatcttccaactctagaagataggtttgtattattgacatatttaggaggttggtctatgtcatattggtttattccattgtcaatagcatctattgcctatcccattgaacaatataacaatccaaaattaaacatcagaattcatgcacatcacacctcattgaaaagaagaaccaaaatttcatgaaacacagtaaatcatacctccatgaagctcttgtaaattgctagatataacctaaacacatttgggtgtccctcatcaagattaagcttcctggatattatctccatcccataatgctgattaattaataaaataaagggatatttacgacgaaatcctcataatatttgcaattattgtacatatgatcctaataaaaaaaaaagtgacaggcaaaaatgtcttatcttatgatttagttacaatcatactcttttgattattaagtttcaactaagcccgttaagtgctaactaagaaacacactctacatattatttgtaccacgtaataaataaaaaaaaaaactaaaatagccaaaagttatagctccaacaaaatcgtaagataagatatttttgttgcttttattagacgagtaacaattacaaatattaggggtttctccacaaatatctcattaataaataaacaaaaaaggttagaggattgaaacataatagacttttctctaagctatatgaagtgaaatattaaccttatagacaagaccggcgctactgagcttggtggtaaagccatgaccaagcacttgatgaaacccatgctggtggtgatcgaaacggtttctgctcgggtcataaacgccaccaacgtcaactaatgcctccaaggaatccaaaacctgtaaaagtgaagcattgtatcaatggtttcccggagaattttcgcaagaacaaaacagaaaattaaaaaataaggaagagtacctggatatcacgagtgcgaaggattttggcagctgagaatttattggtgagacgaaggaagtagcaggcgagagcttcatcgcaatgaaaggtgccattgtgagtgcctattaggttggtcgtcgccattgatgagaatgaaaaacgattcgaaggagtcagagattgccgccgaaacgacggcgtttgaggaaatagaagctctcccgcgttaatcgcagtcctcctaatcatggtctctttctttcttagaaagaaaagaaaaagggtatttatataaagaaacttaataagaaaaaatatattatttaaaataaaaatttaatatgagattgaattatcataaagtaaatattaaaaattatagtaattatcggagttgttattagtgtcaaaaaaacgcgtcggagtttgttgttagtgtcagaaaagtcactggagttactgtcggcataaaaaaagtcatcgaaattagtattattgccggaaaaatcactgaaaaaatattaagaaaccagtttcttagtgattttttcgatgacaatgtcaattctaacgacttttctgaagtttgttgtcggtaccgaaaaaatcgtcggagtagctgtcggtgtcagaaaagttatcggagttgttgccggcaccgaaaaattcgccagaattagcattgtcgtcagaaaaatcaccaagaatttggttccttcgttaagaaattgatttcttcataagaaacattacaaaattacggtcttacgtaattttaattatttttatggtttatagatctatttacaaaaaatataatattttaatgtattttttttatgttgtactcttattattttattttttatttttattatttatatattatgtttatgttgtctttttaagatttttggtgtgtttttataaaatattgtaaaaaaaaattataacataaaagtgtaactattttacaaaaatagccattgtaattttcgagacaaatgacaccatattataaagaggaaattacattgtatactcactttactttacttgttttaa

SEQ ID NO: 306184 - DNA, 3419 bp, Cannabis indica
gcactacacaactcgtgatatatgttataaatatatatatatatatatatatatatataaatatattgagacattttctatttttatttttgtaattgattttatttatagtataaaaataaaaacaacataatcttaaaataaaaacaagcataacatacaaaatagaaacaacttactaaataaaaataagtaaaactttaaaataaaaacaacttaaacttcaaaataaaaacaagcttttaataaaaataaaaataaaaaacgtaaaagttaaaaaaataaaataaaaaatatcgtatacgtacatagtaattctcctttgtttttatgaaattcttaatatatattaatttctaaattggagaaaggatacagctagactgctagagtatcaaagataacaaacataaggaaaatacatgcacagatgtacacaaatcaactattaaatttggacattgaccatatatatacaaacaattttctttgtttttgttttcattttttttcctttttttttcaattcttacaactaatgccccacaccagactctttaccgactaaatattctaaaattaaaacaaaagaaaggatttgtgactgacttgaatacaccaatccttccaataaactcatgtaaaatgagaagagaacattaaaagagcatttagctccagtacacattctcaggtagaggatccaatacaccaaaatgaatggttgttctaaggagacttcgtagatctcgttagcagatcctcagcagatacttggaagttgttttacaagttcgatcaaacattctttcagatactgaggattgctttaacgcatgggtcctcggctcaacctacccaatttgagaatgcaacacagaaatttccagcacacatggagctgtttccaataagcaaagagatcattaagcaacatcaagatgacacaattaattggtaatgcagtgttcgttgtctggaatcaaattagttgagaatgaaaccccttccaaacaaaaaaaagattgggtcctgtattcgccggccaattactctaatcaagtggaacccattaaaattgatacatgtataggttttttaagtaaaaacacaaatgagaagaggatggcaataaacctatcggttggttactttctaagtggccatgttagaaaaccaagtaataaagctattgactcatgcagcaccgaaatgagagtgataagtaaatgaaaagttcgcatgcaggtgcaggtgtcctaagaagaaaaatagtttgtatttgcgtgactatcagttcttatttcatttataagagtaaagatgacgaaaattaaatctcaccttaaagtacaaatcacaactaatggagagaaaattatctcaagaccgcacaccaaaaatataaggtgatgctgatccagaagatgttggaaggggcttcttcacaaatggatgttctaagagctgagcagcagtgagacgagcatcaggatttacttgtaggcacttgaaaataaagtcgcgtgcctcttcagagagagaatcaggaacagtaggtggcacaccctttccaattttaaataaggcctgcatctgttgagacaaaaggccatgaagcaataaatcaataagaaagccgaagaaaatctctagttcgagaaatctttgatccttgacatccaccatagtcgtttaagtaaataatgaagaaagaagaaatcaaataaaaaatatacatacccattccaaatcagagtatggtatcttttgcgtcaacatctccaacacggtacacccaagactccatatatcagctggaagcccatacccttgattctttcggttaacaacctgcaaatgtagttcaatattgaggcttaatacaaaacatcaatcacaaaccacaaaagaaatctatatcaatatttaaagaaataaacattttcagatataacaaggattatgtctatctaatctaatagcacacaaatcaaattccttcttaataaagaaaactcaaatgtcactggtaaaagaattttattagtaggatactcaaaacacgaggtaaaaaaactaactaatcacagtgtaacatatagccactttgctcctacgctatggacatattcctaattgtaaaatatggtgaatgaattgtatatcttattcaataaattatatacaaaattagagagactaaaaaagaaactaaagagaaaataggaaactaactaattacaattatttttaaattctacaactaatatacagctaatatattcatactccccttcaagctggaacataaatgttaattatgcacaatttgttataaagataatcaactcgcatcctattaaaaatctttgtgaaaataacttctaattgttctccagtcttcacatgtcctgtggagattaggcctgaattttcttacgaacaaaatgacaatcaatttcaatgtgcttagctcactcgtggaacacaatatttgaggcaatatgaaaaacaacttgattatcacaccacaattttgctggaactgaagtcttaaatccgacttcagtcaaaagctgataaatccacactatcttagacacagactgtgtcatagctctatattttgattctgcactggatctagacacaacattttgcttcttactgagatcagatttcccacaacaaagacacaataacctgaagtagatcttctatctactttgaaacctgtccaatctgcatcaagaaacactcaatctaggtatgtccatgatccttgtaaacaacacctcgtcctggtgttcctttcaagtaacacaaaattagctctaatactttccaatgatgaattgttggtgatgagataaactgactaacaacaataactgagaatgcaatatttagacgagtcacaattaaatgattcaactttcccaccaatttgcaatctctcaagttcgtcaaatagtttcccatcacgtgtaagatgtacaactggattcattggagtactacaaggtttggctcccattttcttgtctcagttaataaattaagtacatactacctttgagatagaaaaataccttctttactcagaatgacttcaactcccaagaaatacttgagcaccccctaaattcttagtgtgaaacttggtatgaatgtaagatttaagggatgagatgcctatagtatcatttctagtaataacgatgtcattcacatacacaacaaaataatatcaacagttgatttttcattaaacaaagaatgaacgatcttacttttcaacaaactaaatttctcaacagcctgactaaatttaccaaatcaaacacaagaactttattttaaacaatataaacttgcgaagacgacaaactcgccctaactccccctgagcaaca

SEQ ID NO: 306185 - DNA, 2042 bp, Cannabis indica
ctgctggttctgatttgtttctgtaaaattgtattctgcagtgatagaattacattctgttgctacaaagtgttacagttaaatatttattatatttctgtaataattattgacatttgtaaaaacttaattttacatagaattgtctttatataattttgacctaaagtcgtttgcaatattatatatgttactcattttaaattaatgttcaaaaatggtcaattatggttgttaggacagtcgctgttgtcaatataattaaacaatggctatcaacattacttatttgataataataataataataataataataataataataataataataatcatacagacaatcggaaaaactggatatataaaattaactatatttaaaattggtacgttacacgtacatagtttaatctagcgaagaagcttctatgatatcaaagttgttcctatccatacgatcatataaaaagttttaatattacctctttattaattttattattataagtattagtaaaaaagttataatataattaaatagatcagtttcaaaacagaaaaacgagtgaagaatagaatgaatttcgtggattggactactctcttcatttcacactagctataagctttttaactaattataattattttggactatatcaaatttgattgaaagagtagatatatgaactataggcttgagtgagttgagtccatatttatttgtaaaatgacgctaatatatcgatcatattagtcaaacttggtcaaataatattggcaaacaaatcttcaaaaagttatataagaatttagaattttcctatgtacataaatatattagatagtttaatttaaggattgattatatatctttttgccggcaaagactatatttatactcttcataaagtcaacgaagtattgttctaagggaatctagtttaatttgacaaattcaatgaaatcgaaattgatatttaatcttagctcaaataatagataaaagttttatattttgactattttctcttaagcttaatgattaatgtatatatcaaaatgatttacaatattatttctatggtttcgtgttgaaattaagattttaaactaagccaaacccttgtacgttgtgcttataattattatttatgatctctataataataattatcataactagctaattttttttttaaatgatactattagtacgtataatatgtgtgtttgcatgtatataatgacaacttaataatatccaattgcaaattgcgatcttaataataatttgctaaggattttcaattatattgagtagtctagtactcttttttttttaaaagcatagtagtctagtacttgccaacgcttaaacatatatatacatgcatacatatattcaaattataatttttattccacttgataataaaaatacaacacttgttaaaaaaaattaattaggtggtgggagtagtagtaacttggtcaaagtataattaatatccctatattacctatatttaacacaagaggaaggtattagaactgtcattcattagaaattagttaacttaaagtatatatatactattgggtattaactaatttatgggaagcttaattcttagttcggacattgtttttatttggggattattttataaataagaaaaaaaatataaagaaaatttgcattttttaaagatctacaattttattattattttttttttctacttatcatatttttatttctctaattatcatatttttccacttaaatttatcattgccaaattataccttccttaataaaagggagcacaattttgactcaatgtactgaaagttcagagtcaaaatgacatattatcagcaaaattactatttaccataaatctaacaaaatctagtaaaaatctcatattttactaacatttaaagttgtggaggaatattttacattactaataattcaaggagtatgatcttattagtaacaatgttcactacaagaagtttacttt

SEQ ID NO: 306186 - DNA, 1441 bp, Cannabis indica
acattaagaaaaaaagaccttttgaaatgtgaaagggaaacacatccaaaattagatgggcggagagggagaagtgaaaatcagtctcacctttttagttaaataacaatggtagttaaatataagagtgatattcacttatattatatatattaggtgcatatatcaatacatcatattattatattaattgaatataactatacacattaaataaatatatataacaaaaagagttaaatgtcataccataatgttattgcttctgtacttcaaatataatataaataaaattattattaatgtaaccaatcatgcatagatttctaatcaattattacttaagaattaaattataatcttttttcttaaaaagatgctttagaacagaacattatcatggataattatgtggttgataattaagctgataacaccaaatatccgtatgtaaatgaacccagctcataatttaatactaattaattaattaattaaatgaacccatgagaaacactaattggggtgtaaactctaaatggaatcttcatttttgtttatttaatattaaataagaacacagtgatatttttcaggaaaaaaaaaataaaaataaagaactacattgttgttttagacatgataaaatgttcacaagaattctgtcccactttttggtgaagagctctctgtctctttctcttatctatggcttaattaggtaaaccaattaatgtcgtttagagatatactgttttgtatacgtatgtacgtacgtatgtacagatgctttatttatttattattatttgaaaggaatacagatacctaattattaattgtttgtaactttctcatttttcaaaaaagaaattgtttgtaactttcatatatttcgagtaataatatatagaatagtactagctataattgcctcggccactttattattaatgatgtatgtgtgtccatgagaagccgacaaaagtgtataaacatatatatagatatttacacacacatacatacatacatgaaatattgttatattcaaatgagagcgttggccataccggattgttataattaagaggaattcaagaaagaaaagagaacctcccatttacaaggaaccatataaatcattcgtacaactattttgaggctatgagttgccttagtaagataacatttttttttgagaaagaaggtacccattaaaatagtaatcaaaagttgagaatatatatacaagataaaacattatggttatttctgaatgaaataacttctagatctaaccctgtagtgtacttagttaattgacgagtgattttatttgtttctcgagtagtttgaggaattgaagataacattaggtagtttgttgaaagaaataaaaatatagaaataagaatatgaattgaatcaaatttaacat

SEQ ID NO: 306187 - DNA, 2487 bp, Cannabis indica
aaaatatataattaataaattatatatatatataatatatgataagagattaattatatatgttaattattatcatgaatatatgtaccaaataatcattaattaatgactatatctacattatattcactaattaaaaatactttatttcacaagtacatatactcactacaaaaaacttgacttttagtcacaataaaagttgtgactaaaagtgaaaaatgccgtgacgaaaggttttaatcacaattttttttttgtgacgacgttgtggctaaaaaatccgtgattaaaagttttagccacaataaaatgttacaatatttagtcacaactaccatttaaccacaattatttatctttggtgacaatatttattgacactaatatttatttaaagacaacatttgttgtcactaatacgtttttagccacaacctaaaattgtgactaatatttatttaattgtgactaatatttttttagtcacaacataaagttatcactaatacatttttaatcacaaacaaaaatttgtaatgaagcttcttattaagaaagttggcaactaataccactacaagaaatgtcacaaaagggggttggcaaatcaatattggtattagaacttttgccagcataaaataaaaagtgctggcaaaaaagactttttccagcgcgtaaatgtgctggtaaaagttagattttagccactgcaaatgtacgctggtaaagctttgatatctttgcctgtgcagtttgcgaaatgcgctggtaaaagtaacttttaccagcgcagtagcgaactgtactggtaaaagtgacatttcttgtagtgtacatacaatccattactatctaatatatgttaaaatctaaagtagaaaccaataaggaaagataatatgagtacttcacatttcatgtcattgtttatttttaacataagcaaaacataagaatttacaatagcattacaaggtaaaactagcttcaacaagtttaagtataaaggaaaatagaaagatcaaagcttaattttagggatagaactctttctcccaagtcaatagcttgtttatcattaatcatgaaaatatcatgaatcaataataattataccaataagtaaagtctattccttgactcctcactcacttcatatagcagtgatatcttcctccatcacaatccaaatcaagaacaagtatatgaaagccacttcaattcctgcatgattaatcagacaagttagactacactaagaaaaaaatagcaaacaatatatatatattagacttgcatgattaattagacagaaataagaaacataataatgtagaggtactattaattaaagtaaattaggaaaatgaaaatggaagaaagatggggtacctgcatcatgatgagaatatgactgatgagcaaaactttgttaaaaaaaaatgaattcatgtttgactgacatgagtgattatcatcatcactcaaaattgggttttgacatgaaagaaatatagagtatccaaatcaattcaatctttttgtcaagttcatatttggctttgctttctttctatttcaataacctatattgtgtatgttttttccataagatcaatgttaaaacaaacaaaacacaaaacaagttaagcaaatatataattatgaattgtattcttacattattaaagtcagtttttgaatactcttatgttttcattgacccttgatctcaatttataatattcattgatagaatatgcaatgtgatatatatatatatatatttatatatatatttacatatatatatatatataaatattacagaaactaacttgttccatgacaaagaacttgagcaacctagccaattggaagttttctgaaatttcactttggtagaaggctcctcattatattctgcacttccaattgcagtttaaaaaaagtttaaatcataaaagtgaattttaaatcaaaagtttctcatttccttttattctgatgtacttgaaaattatggaaaatcaatctcaaaatcatatctggaatacctgttggaggttggaggaccaaaaataccgaaacaaaagcaaataccaaattgttgctaatgatcctaaaagcaaataaaaaaacccaaagttagctgatgaattaagagaatagatattttacagtgtttaaaatgtaagggcatttgagttcaagcttgggtgtagcacttcctcaaaaattacaacaataaacacaaacatttattcaaaccttgattcgagcttaaaagtacaactacctggtggagattcatgagtgggaggtcggagatgagtggtaactgaaaaaaccgtgtttttgcaaatgtcagttgtatataagaaaatataaaaactgtaagcgtttgcagcagcagaaagtaattctgctacagcaaaacggcacaggcagaatataaaatatttgcagaaaaataaataa

SEQ ID NO: 306188 - DNA, 1143 bp, Cannabis indica
acatttagtcacaacaaattgtaatttttatgactaatacctttagctaaggactttttagtcacaacataagacaactaatttataattagtcacaacttttttacttttagtcacaagttttacataaaaacaaaatgaacattattataagagctattatatattatcctaaaaaaatttacataagagaatgttgtatatgataccgacggagtcagctacttattcttctagtaggggcaattttattttttcaggtgaaagagtatttgtgaaaaatataaattttataagaataaaaattaaaaataaagataaaactaaaagattttatgggtacaaaaattgaaatgtataaaaacataaataaaacatattaatttgatggggcataaatatttataaattaatttgtaaaaagctgaagtactgatgataattaataatcaataattagctagagatattatttattaaattaaaattaaaaactaaataataaaatttatagataacaataaccttacccttggcattacataatagtactactttctgcctcatcagaaatgctaaatgcaaatgggcacaagtacacctttttttcgtttttcaaaaggacacaagtatacctgcaattttatgatacagaaaattgatccatattcaaaatacaccatttttgtggtgttggacaattgtacactgtaaattctagtccatatataattaatgttgatgagtaaattttaccaggtgataaccagcggtataaattagacacgagtgcacattaacaaactgtaataactaactaacaaatagtcaaatcaacgaacacaattacacattaattatatataatttccaaatgtaggttcattatatatgaattaattaagattaaaaaggaaaacaaaatgaacagccagccactacactacatgtatagaaaaatgatagaatgacattaatttgcggtacacaatgcctatatttgccaacttaattaaccaactttatataagtagtcctcaattcgaaggtctcaaccatagtttttcctctaaaaatctcaccctgctcgatagcagggggagggaaccctaaatatatatatatatatatagattttatata

SEQ ID NO: 306189 - DNA, 1276 bp, Cannabis indica
ataatttgttaatataatactaataatatgatgatacaaataatacaatataaggatacatacacgtgttataataattttaggctatttaaaatttttacatcctaaattatgaattatgtatgattgtgctctttaaatttttcagtccgttaaaaatggtctccaaacttatgggtgacaattcgagttggtaaatcgtattcgtatcgtgttgactgtcgaggcttaggtattacaagcaaatgtcaaccccaatccttatccatttataaattgtgtcaaaaattaaaactcaaatccaacacatttataaataggttaacctaacctgacccgtttatataaaaaatcatgcttgatttttgttaacttatcaactcattaatatttttagaacaagtttaacatgtttacaatctcttatgacatatttgagcaatttaacatgtttatgtcctattttattaaaaaaaaactaatttacatgtaataaatataataaatttaagagtatatactctcacttaggtcattatcgtgtcatttttgagttaaacatgtcaacctaaaaatgacccgtttaataaacgaattagtcgtgttaactcaaaaatgaccaaaacttgtttatttcatgtgaatttcaaatcattttatcgtgtctaacacagatcacaactcttacccaaactattcatagtatcgtaagatggtacttctgtcaggttttgttacatgtaccaaagagaataatgatatgacaatttaaactattaacatgtcaatgccgcatgtataattaatttgaaaaaatatttaattttttaatttagttttacttttttttttccagaaaagtcattaattgacttttttacttaataattttgaaaaatacattttattttgtttaattttaaattacacatatattgctaatgtggcatttatataaatatctacctcattattatatttgccacttgtattgtgacaaaacttaagagaacgaccattttacaacattaaaaataatttacctattttgaacagactaaaaaattgaaataatacaatcatctaaaaatcatagtttgttggtaaaaatgataaatagtaatagtcatcattttatttagccatgaggggcaaaatagtaaattgaccctaaatgaaggaaaattttatttacaccgcataaaatgataaatacatcctattattaaaaaaaatataaatctaaataattttttttgaataaaaaataatcttt

SEQ ID NO: 306190 - DNA, 3182 bp, Cannabis indica
agtatcttcaatgaaggaggctttcacccattcgacaccgacggcgatggtcggattgcaccgtcggagctagggattctgatgcggtctctgggaggaaaccccacccaagcccagctgaaatccattatcgccgaagaaaagctcactgcgcccttcgatttccctcgattcttggacctcatggctaagcacatgaagcccgaacccttcgatcgccaactccgcgatgctttcaaggtcctcgataaggagtgcaccggctacgtctccgtcactgagctccggcacatcctaaccagcattggcgagaagcttgagccagccgaattcgatgagtggatccgggaggttgaggtcggttccgatgggaagatccgatacgaagatttcattgcaagaatggtagccaagtaaaccattgttgtgttgttgatgatgcatttggtgtgtgtttttggctctgatgtgttcttctgatatgataaagtaatatgggtaatttttattatttgttttctttgatttttctttattattatcccctgttgtttatgtttgttttttttagggcttgaaaaaaattagagcttgtttggattctgttgtgatgataatggtgatgatattgaattcttcaagtaatactaattatggggattttgtttgcttttttgtttttgttcatattttgttgtagccttgtatggacatgatgggttttgatttaatttatggattttgttctcaaagatttgtgcttttgggttatacttgtgtaagtgtattctatagatgagctgaagatgaaaaaaaaaaagaagtctttttgctcttttttgtgtaaggaggacaaaagaagcttatttcaggttcaaaacctcttcaattattcaatggataaatgtttaaagctctcaaaacaggagatggaagtgtaagtagtaagaactgaacaaaatttgattgagccccctttttgatgaaccttgttattgtctttctcttattgtttgaaaaaaataaaaaagaagatgctagaggttggtgtggcatttgaaacttgaagatatgagatgaattagcaaaccattgatcatatatagatttctttataaacttcttttcttttatggaaattgattatgaaatcaggttgatgaatatttggcattgtatttttggattgaagaacaggtctaatgttgagacaaattcttttgctcagtgatggaccttgaacaaagtatcatgttgtgtaactatgatcactatcagtcttttgttgttgtaaattgtgatgacagttaaaatctcaatacctccaatagtaggagatgtctctatcaagttggctccttttaaggcatataggtgtcactttgatgtaataataattctagtcatgccaatttagttagtaataactcatcacttgtcaaaactggtttgattgaggtgacatgtatatcataacttagtttcacaacaaaaatattttattattattattattttgggtgcaattgtacgattgaattaaaagttgtaatcgagactaagcttttttctttatattattttactccacttgcgaattgtgatcatgttaaaaacaagggtaaatgttagtggatcaaaaattaccgatgctatatttgtttagttaactgagcattatggacagttgtgaaaaatgcaaaaccttgatttttttattttttttttctaataataaatgtatcattaaaatgaaaaataagtaaatagagtgtacaaaaaagatagattaaacttattcaaataagtttgttatggatgcttcaaaataatgaatatagcaaacttaaaaaatcaaaaatgaaaaattgaaaaacagtatacttaaagaaaacattcaatgctaaacgaacgactaaaaaataaaaaaataaaaagatgaccaagcgatgcatccataaaatctgctcaaagataatttggcctcaacaaatcatccctctaactctagccaactctagcattaagcaaagtgaaacatgatgtacaacctaaaaaaatgaatagagttaagaatatagctttttctaataaataaaattgtaaagtaaaatgttaatataataatccaaaaaagaagaaaacttagttagccgtgagatttaatacaaccttgatgataatattgtttaggttagattattattgtgttctattttgacgaaaatttagtcaaatatattactttataataaaggtgggtaacatctaatttgaaccgaactgaatcaaagagcacacaagctttatgacagactaaagcctatactgctacaaaaccatgccctccaggctaaaaaatgcagggaccacttactagaggcttgtgaacaaaatgatcaagaatttcattggccgcaatatggaggtgtatgtggacgacatgctagtcaagtccaaaaaggctaggggcatgtagaagatttagatgaatgcttcaagatcctctataagtacaacatgaagctcagcccccttaagtgttctttcggagtaggctcaagctaattccttggcttttagtcaacactaggggaatagaagcaaacccagacaaagaccaagcccttttagacatgaagtcacccacaacaatcaaggaagtacaaagctcgacgggatgaattgctgcactaagtagatttttgtccaaatctacggataaatgcatacccttcttcaacattctcatagggaacaaaaatttcgagtggaaaggagtgtgaaaaagcactccaagagcttaaaaaataattggctcaacctcctgtcctatcaaaaccgctagacaatgaagagcgaggcatgtacctagctatcatagaacattttgtgagtgcaatcttaacaagagaagaagatagtatacaacacctagtacaagacttatgggaaggcttgcaacaacggtattaatatagcaaacgacacttcaccaaatttatggcacaaatgacttggccatatgagttgttgtcctcaaaagtgagtgttttaatatttatactcgcaagtgcacgaatcgtttcggaatatagtgttcatgtaagtgcaaggtcgaacccatgggagttgactaacatcaaaagaaactatttcaaacaaaataagaatattctaac

SEQ ID NO: 306191 - DNA, 4573 bp, Cannabis indica
  modified_base (75)..(75): a, c, t, g, unknown or other
ccgagctgcagttgggcgtcaatggccgcactgctcgcacagcacttggacgtgaacggccgtggaacacggacnctgggacttgatagccgtgcagcccgtcggtggaacgtctgatgaaactgagctgagcaaagaatcatggagcttcatgtgtctgatgagcgcggtcttgcagttaagcctgttcttaacgtcattgatgtcattttccaccggcctactgctgacctacctcggatacaatcatcaggtatttatatatatatatatatatatatatatagatatttgttattcatacacactttactactctctgtctttctgtcccttaacttttagttatatatgtttttcaacgatatctatgtatcacaggattcagacactggtagggatgaaaaggctgtcatctattctgttgctaatcttcaagacattgtcgaaatcccttccaggattaccagcgcaatttcatgtgaggtaataaatatatataggaaaagagaaatattgttgtgccaagcacacaaaacattgcgtaatcttacgctatcccgttattttttgaaatacactatagacgtacctaaaatgtcatcacatatcataaatcaaaaataataaaggatgatcgactagttatgtagcaaattataatacaaacaaataagtgcatgcatgcatgtaataaattaataaaattattgtaatattttgtattatgacagattctaagcaagtgctcagctggggtagatgtgcacaccattacaatggaaatactacaattagtcaagcactacggttgggactcgaaggtgttgctagccttggtcgcatttgcagtcactttcggcgagtttcggctgatcctccagcaattcccaactaacccacttgccaaagcggttgctcttctcaaacaattgcctgaactcttagagcattctggagctctgaagccaaaaatcgaagctctctacgatctcatcaacggaaattcttgatgtgaccaagaaaaattgttgagttctatgatcttccaaggaacgagtattttactgctgactcacccgaaattctagctgctgcttctcatatcccaactgctgtttattggaccattcggagtataatcgtttcttcaactcaaattttggcccttaccggcatgggcatcgagtatgtataataatatggcttataatatatgtcttgtatagggatctgtgaccatattgacgtacgagttttgacatgtttgatcagatatctaacggagccttgggagctatcttcattggctcataagcttaacaacataaaagggcatgttgtggacattatccaacgttgtcacaagtttgttggtgagttttgcatttttcttataaaaattaataacaataattcagatttgatttattttaaattaactaaaacgtatgaaccttataaatataagtatatatttttttattaagagtgggccgtggctttaaaaaatgatttttggtttcaacattactgttatttattaatataataattttagtttaacttttaaattaataaacaatatattttagtatgtttcgtaattatataaattttttgtacgtgggttaaatattattttgtatatactcacattaatataaatgccatgcttttgttgatatagagaagaagaaggaggatgaagcatatgagtatcttgtgcgtatgctccaacttacacacatcgataactcaaagcctctaagggtttgttcaatgaagatccgaatgcactctacgatggcttaaacaagaaaagggtatgctcaaaacttaataatattaattcaatttcctattgattttaaatttggttatcttctgaacaaactatatttcatatttatttggtattttaaacagatcattattgaggatttgaagagaaaggtggtggctctattcattacagaactagatcctgaactcattcattcctctgaatttgcaatcttacaacaaatgtacgctgaaaagaaacacggcatgacaagatccgagagtcaatacgaagtggtttgggttccaatctcaaacgtgtggaatgatgagaagtatagagtgtttgataggctaaaagggcaaatggaatggcactcgattcaccacccttcagcagtgaccccagtggccccaagattcttcagagagaagtggggctttgtcaagaagcctatgcttgtggtgatcgacactcaaggcagagttgtgcaccacaatgccattcatatgatgtgtatttggggaagcctagcttatccttttactgccaacaaagaaaaattgttgtgggaggataatgcctggaccatgccattgattattgatggccttgaccccaatgctgccgaatgggtaagtctctaatcatgctataatgcatggttcacataacaatgactaattacatatgtttttgtttattgatttttatagatccaagaacaaaagcatgtttgcttgtatggaggagaagacattgactggatcaggaaattcacaaggattgctaaggatgtggcccgagaatcagggattcaattggagttgctttacgtggggaagagcaaacctcatgagaaagcaacaaggaacatcattgagattattcagaaagagaacttgagcagaaccttggattggaacctcatatggtacttctggatgcgattggagagcatgtggcactccaaagggcaactaaccactgctgaaactgtcaagcatgaccgtgtgatgcaagggatcattgccatgctgagctacgggtccagcagccaaggctgggctgccatcagcagaggttttgagggaatggttaagggtaatggggagcacatgtttaggggtttgaccgagcatggacagtggaagatgagagagacagtgattggttttgtgcctgctctagatgagtaccttcagaagctccatgtggacgcaccacaccactgcaccagccttattttgccagccactggtgcaatgcctgacaccgtggcttgctctgagtgcggtcgtttgatggagaggtacaccatgttccgatgctgccttgactattgatcattcatggtgatcatgtcttcatatatgaatgacatcaataaatatatatggcggcgcttcttgtgagactaaaggagtatctcgtcatcgatcataataatgagtgtgttaattttaatttatgatatctttttctgttatcatttttatatattttgggataaaaaaaattatatcttatattgcactgtgttgctcgctacaatcaagtttgctactattttgattatcaaataaataatattatttcttgcttctcatgcagtagtgctactattacaatactatactgtgactagtatataactatttttatactatttctcatcggtttgaaaaattgttgactacgtgagtatcataaaaatacagaactttaaaagaaaaacttataactgttaagaaaaattactttaatagatgacgatttacactgttgaaaaaaagtcactttaaatagatgtttatattggcaaaaatatgatgtaaattaaatttaattactttttaataaatattttaaatattacatttatattataatattaatttttatcaaaaaaaatattaataaaaataaatacaattaaaatatttttaaatttaaagataataattcattaaaactataccaaattacgcttaatgaaaaaatttcatatttcacaatatccataaaaaatatatatatacaaattaaaaataaattataaacataaatattacaatttaatataaacaaaaaaaattatgtaataataaaaataaaaaaatcagtcggcaaccaaaaccagctttcaggtgaagttctcccagttcactgtgaaacaggcgatcatccaggcactggacggcatggatcgcgtccacatcatcgatttgttccaggtccaggaagatcaggtccatgagaatcaccgggttcggatcctccaccgagttactcgagtcaactaggaggagactcactgatttcgcgagctcactcagtctcccctaaaaattccacccgctagaagggaaaatccaaagcattaccaacctaagccaactggacgtgaggccaaacgaggccaccgtggtccactagatgcaccactgcctgtacgacatcacagggagggatttaggtacgttgagattgttgagtttgttgtggctgaaactgatcaccacttgatggacctggttgtggttgatgaactcatgtgccccgtaaatgatgttgtatgtgtcgcttatctccctgccagaccatatcaatgtttttaccatcaacgagagggagaacccgagggccttgaagctcagaccagatgacgactcaattggatacgttgagatcctcgagaatagagaatgattcaccgatggaggtgttgggtccgcccctttattggtgggttggaccaataagggcttaaggcccattttattt

SEQ ID NO: 306192 - DNA, 879 bp, Cannabis indica
gagcaccgcacgtcgcgtggtgttcagtgcacccccggcagttcttaaaaattcataagaccgagtgtctctcatgcccaatcgtactcataactgcattaggtctaagtataacatgtacgaatgtttatttaattaattaagctaatcaaaacaattgacactaaaaataccaacatcaattcttaaaataatttacttgtgtatttgttatggactcttaaattgtttttttttttaataattatagataaaaaaaaaaatgaatcaagctcgtaaaagaaccaatcaatataaataggagtaaagtaaacatgatagttttcaaaacataattagatttggagcagttattttctccttaaaacatctctatttaaaccactctaagatatattatatttcttaattatgaaattttcactattactaaaatttaataaaaagtagaatctaaactaatattttaatttttttttgatagaactaatattttaatttgaataggattggtgcttgttttctaatatttaaatattttattgtcaatttttaaggttttattatttatcttttcagaattatctcccttacatgttaatgataacgtttcatagatgaatcatgttcttagaataaacaataaactttctaaagaatgctctactttttgcctaaccatatttctttgatctaacctattattaaattacccttaaaaaaaaacattagtaatatataaaaaaaaaaatagttttaaaaaaagtacaattaaaggacgacatttgtaataattttcctttatcaattaaaacaagtttatggggtaaaaactggtgccgtttggtaacacttttgttttttaattttttaatcaca

SEQ ID NO: 306193 - DNA, 1494 bp, Cannabis indica
aacaaaaaaatactatataaattggtcaaacttaaatgtgtcatatttatcataaaaatttttaaaatctcatagtaagtgtaatttcctcataggaaactatatattagttttcaaaaaaagtgttaaaattgaaataaaacaaaaataaattttaaaaatgtaaaataaataagtaaagtcaatattattaatagtagggacttaatgtcgctaaatatgtaaaagtttagggattgatttgccaaaaaatagaaactaatttgccaaaaattatacatttaggatctaatttagcaaacaaaataatttgggaaaaacctgctaaaaagaaacccatcacacttgaggctagctcaagtggccataggtgagtgtgtgtgtgttgaaggtcctgagttcgagtcttaagtaaaacatggttataatatataagcgacttaaaaaaaaaaaaaaccaaccggaaaaataagcctttaataatatattgtttagccattctcgtatgtgttaagcttactgaatttgtaggtggtgtgtcaaatccgacgtgtatggatcctaatcattcattgatgcactgacgttttaacttaattaagcaccatactttaggtgtatgtaatccaaatttgacaaaaacttttgcacaaactatatgtgttgagtggtgtatattcgatgtgaggtgaggaaggtttcaatgacagatttatggatatagagagaaaatataatgaaattagggaagagagtgagtgggacaactcatcgtgttaagttaagctagtgttttcatcaatgtgacttcttcaactccactactacttaaaagattgtttccactatatacaccagctgccactacttaatattgcaagggaactacttataatcccaaacaaatatcttaccaatttaactaaactatctgagtcttttacactaatgatacatttactaacacctaatgagaataattaaacatttcattaacaatcgatcagattcactctcaatcgaattgatgaatcggaataaaaaaaagcaattatttacttgacttgcaagaattaaaattgaaataaacagtattttcattgctatatgtttacattactttaaaatcgaaataggttacaaaaatattctccattcaaatttgatatatatgtaaaacttttctaaaaaaattataataataattaaataagggtaaaaataataattcataatttatgaaataatgagtataggaggattgccactcccactgctcaatcacaaattaaggtgggtttcacgtagtttgttcacattccttaaaaaatttatggcacgtttattaaattgtaattagaatcaaaataatcaatggaataaatgtatcgatttaaattcgaaaataatcgaaaacaatattttattatgctgtttactaaattgtccggaaagaaaaccaaaatcatattattttgtttacataactagaaa

SEQ ID NO: 306194 - DNA, 772 bp, Cannabis indica
ttttatatacataaatattcctacaactttgaggggatatttccttaaattctctttgactctttatatccaattttcttctctaccaaaaaacgaaaaagaaggaaaaacacaaagaattttttgcaataattgatttttttcttttaggggtggaaagtggagtgtttactgtttagtgtcagaaatgaattgaagttgtgtacttgtcttaaaaccaatttgcaaagcaaaacttcaaatcaatgttccaaccaataaagaatcacataataggcttatttctattggttccaattatttcaaactccatttatccaattaaggataattaggattagtcaataagatgacacattatggttaacaattgtttattatttattaaatttaatataaaaaagtattagtgtaattaagtattaagttttatatatatcaattaaataagtttatgtccaataataatgctctaaattacactaataacaaccaccatagccattttattagccatgggtcacattgagttagttttaaagtcaaaatagatttgagataaaaattaagatcttaatctaattattgaaaagaaagaaagaatataaagtcataaataattttaatacgtaatttgacgaaagagcacatgagcacatgcaactaggggtgttcatccgatccaatccgcactttttttgtcaaacaacatccaatccgcactaagtgcggatttcatattttggatccaatctgatccgcataagagttt

SEQ ID NO: 306195 - DNA, 948 bp, Cannabis indica
tggtaaaatatttccaacacttgaaagatttttgattgttagttctcttggttggtatgtggtatacttttgcagttggatcaacatgaacttggtcatcttagtctggaataagcacctataaggactgcctatacaagaaataagatttagaggaaagagagtttaaaatgaaaggaaatttgaagaagaaagaagtttgatgcgacaccaacatatcctttggaagtccacgaccaagatgggatatttctccaaagggaaattggaggagtaaagctagtaaaggcatagatttggaggatatttccaggatctagttggacacggagtaactttgtgattcactatcatgtagaagttgtccctccatttttcttttgtattaggctatggctcaagccaataataatataatacttatgcgaggtgggatctttcatcttttgatccttgcaaaaaatgagccaaccaacaagaaggcagtgggcatgcagaagcaactggaagggagctatttcaaagaacgtgataaacttagcaatgtattcatggaatgggaagtgggctctaacattgatgttgccactagtttaggggctgaaccctttcatgttggtgctagccttatcttccttcctgcccatcaaattccagacacgtccctttatggactcaaaccctaaggcgtgctctaatttctctagcatcaggaaattataatttttttttttggaatgagacggtcttccacgaggatagaacccatgtccacatcctcctttgggtacaatgtgtactcaagcattggtagtaatctggaaaagaaattgaataaatgcaaaactatgcagttagtacttaacccaaacaaatatggttaaagtacaagaattgtaactacctatcctataagaacgccacgtgtgtgattttataaactagttt

SEQ ID NO: 306196 - DNA, 1950 bp, Cannabis indica
gtggcaccaaagattgggccacccctctcaacatgttatgaataaagttttgaattccttaaacatatctcctacatcaatcaatgcgtgtcatgcctgccaatatggtaaactgcatcaatttactttcttgtcttcactacacaaaactacttccccttttgaaatcattcacatagacctatggggtccttcccttcatcccactagtgaagatttcaaatattacatatgtttcattgatgattttacaaagtacacatggatttttcccctcaaatccaaatttgacacagccacaacttttttacaatttaatgcctatgttgaaagaaacttttccaccaaaataaagagtgttcaatcggattggggggagagttcagactcttagcctccattcttgcaaaattaggcataatctttagacatccttgtctacacactcaccaacaacaaggaagagctgaaagaaacacagacgtgtgactgaaatgggtttcacccttcttgcttaagccaaaattcccctttaaccattggtgggatgcctttgtctcagccacatttctaataaataggctgcctattcaaaagaacaaatatatatctccttttgaaagcttgctcaatagaacccctgactacacttttttaaaagtgtttggttgtccttgcttcccttttctcagaccttacaacaaacacaaattcaatttcaagacttctatgtgtgttttccttgtctaaattccatttcacaaaggttataggtgtctccatccttcagggagaatttatatagctagaagtgttacttttgttgaaaatatatttccctacaattccttgtttccctatgttgcctctgtgcaaaaaccagcatctccactcactactctacccttccccgagttgaacctgactcctataaacctagtcaacactactcttactagaaccaatatccctccaatacatcagactgaaaccaagtccacatgcatcaatttccctacctccccagcccctgttgtgtctccaatatcacaccccaacaataataacctccaatcttcatttcagcctgagcaagcaactcaacaaccaacttctgcccccatcaatatccagcagccccccaacaattctctcttcatccaatgcaaacaaggtcaaaatcaagtattcgtaaacccaagattctagctactactataaatatttctaaccaattttttactaagccaaaatctatcaaaaaggatcttgcagatcctcaatggaataatgccatgatcactgaatttagagctctcatcaagaacaagagttgggttcttgttccctacaatctgaaatgaatgtgcttgacaacaagtgggtactccgaatcaagtatagggctgatgggtttgtggaaaggttgaaggcttgtcttgttgcaaaggggttccaacagacacctggagtagattattttgacacctttagccctgtgtttaaaccctctactctcagaattatgttcaccattgctctcacttataactggcacatacaacaatgtgacataaacaatgcttttttgaatggagatctaaatgagacagtttatatgcagcaaccaaaagactttgaccccacacatgtgtgcaaactacaaaaagccttgtatgggctaaagcaagccccaagggcctggtatgaaaaacttgaggctgctcttctctcttggggattcaagaattatgtgtcatataactctttatttttctccaacaaaaatggcaaactcttactcatagtaatctatgttgataaaatgttaataactgtggaagatactgttgggttttgtgccctaaataaaactcatttcaatataatcagattaacttattaataaagatcagaaataacattgtatgttgcatggttcacatgatt

SEQ ID NO: 306197 - DNA, 2347 bp, Cannabis indica
ctggacagatgacaccttaaaaatgtaaacggaacagtactttggagggttttcccaccaaaatatgaggttggatggttttttgcaagtaaattgatagttggggggttttaccgcaaattactctatttgttttagttttggttttggtttgtgatataggtgttgtctttgacatttcaaaaagaagcacttgtttcaaatctttttatttactttattcttaatgaaaaataacaacttattttagttaattaattattcactttcttacttagataaagattcaatcataattacaatgtgattatttatttattgttctttaagcaatttttggtgggtttggaaaatattaagaagtcaaatagtgttgtaaatacaagttggattttttgatacaacataattggtacgagcgcaattaagcatgaaaaaatataggttttgacacgacacaagaagcacaaaaaatatgatgcataagtgaaaagtagaatatggcatattaaaaaatactataatttattattaaataataagaatagaaagagtagataacttaacgatctactaataaaagttaaattacaaatttcaatctcattgattaaattaaactaaaaacacgactagaatagaaagactccataaaaaccaacaaggcagccgttatcttccagagaaagagtttaccaaaatccttgcatcagataaaacagaaatttaatttgttcagctgattcaatctagaccacaatttgaatcattttcaccaaggagatctcacctttattttatattgtccagtgtcgtttttctccttttgttgtcgttttcttatttttgctgtcgtttataaacaaagttgatgtattcactctcaaacctcaatagatttcttcactgataatcgttttacactccgcggcacccatttcacacaagatataaatagttataatttacatatatttatataatatacatatatatgtatattatatactactccaatttatctagaaggttgagctacatatgagaagtaaattaattataataagcatgaattgatcattgttacatgatagaacacgaagggtaaggctcattccaacgatccattggtaccaaaactagggtttcgcattggagacaagtgtgaggattgtgaattaatatttctgtttcgttacctttatttttattcttattcttattctcatccgagccatttttcttctcttctaccacaaccttcttttggggttccgccggttttggtggaggcccaatactcaccacatctgcatgttttccagcttttcttgcacttattataattttgtatggatcagcattgccggtaacacttagggttcccttggctccgtcaacttctattttatcaacgcctatataatttgtttaaccatatgaatattagtcacacatgcataaatatatggtaacatatataataccctaaatatattttatgtatatttatgtgatatgtaatataccttctagtgtagacactgctttgagaaccttcttcttgcattttagacatgaaagatcaacctttaacacagttttttgtaccatttggagagaagttgatctattattagtgttattgacctcctttttatttaagtttattttcttatataaaaatattaaatctggctgtatctaactagattgatatatgaaaggaataataatattattataaatttcaacatggaaatgtttgatgtattttggatcgatctttggccggggttacttatcctattctttaacgagtgcttatttatgcaaaatggcaagaaaataattaatatattaaactattttatttgaagaaaagaattgtctttatgtgtgcaaccttatcattaaaccccataaattgactttaaaacttttatattaattaatttttatggttttatgtatagagtacattgaagagtcggcaaaggtaagagaggccggacaatatagatttggtgaagtgaatttgttaggtaattaatatttggtgaagaaaaaaattatattgatataggtttgaaaaaaaaaaatagcataaacaagatttttgtccttcaattataataattatatataaatatatattttaatttttcattttgttttaactctgtaggatacgatttggtaatgataattgatatgggaaatttgaatttccatacctacataactttataatttttttcttaaatgcatacttattaaaatttgtaatgtatgactattttaccaattttccataactacccctcccatttgtaaatgctcagcc

SEQ ID NO: 306198 - DNA, 1019 bp, Cannabis indica
gtactattttttttttgtaaaattttaatatttttatatttaaataaaataatataaaaataataagaacattaacaacaataaaaaataataacaaattaacaaaagtacaacataaaaatacattaaaaaatcatatttcttgtaaaaaattattaaaaaatatttaaaatactgtacactataattttttattatttttgtttatttgtgaaataattacaatttttaattatgtgatagtggatggagtaattagtaattataaactaaatcttatgtatgagacatttgctataaatgttgttgagcatattattactactctagtgtattattagtgtgtgtctcttttaacaaattctctttgttttgagtgaatagagaatagagagggagacccattgacacacgtgtgacacgtggggttggtgtggtgtggtgtgggagagacacacgtgacacgtggctaatatagaagggagagaatttggaacataaacaagaacaacataataataataataatagaagagagacatagattacgttgttaaagagttccattttggagtgtacattgttatacaccactcatttcttacttaactgtcggctgagtcggttcggttggttggttggttgggtcaaccctttgttctcttatcactccaaactccgcccacgcccacgggtcgccccacccaacccaaccccaccccaccaaatcatcatctatatatatattgccttcttattccttataagatttcacacttaatatttactcaaaaatacactaattataagtaaatttataagaatttttttttgaattttaactaaaatagtaataattttatataaaaaattttaggcggccgaataaataaatatacaacctaataaaaaaaattataataaatatttcttacacacattcaacccacatgatccacgttttttgggattgaaatcttcgtgtgatgcaataaggttggcaatgataaaaaaattcc

SEQ ID NO: 306199 - DNA, 858 bp, Cannabis indica
tatatatatatatatctcttctcgagctccatagaaaccagcaagtgtttggaaatttttagcttgattctgagtaatttagcatgttttgtgtgtatccagctcaaggtaaaatctgtagcgcttctctttgttatttcttaagttttaaaataggttaaagcatgttttttaatggattaggtgttgtagagctgtgtgtggtttgtttctattttctgagtctatattagtgttgtgcaagctaatctatgtggtttttgttgcttggtgtgttgtttcagcaaagcttgagtttagaattcaaagttttgctcttcaatggtatttttggattatggtttgtattgtgttttattgcttgatttctatctattatggtgtaaataggtattctagaagttattgtgatgtttggggtcgaattgaggtgtgtataggttttgagtgtttcctgcattaaactggtcgactgcttcagtgggacctataagaaccagaattcgggttggtccctaagagccccatagaaccaaacttcaggttggggaactggtctgccggttagggcagtttcaggaatgctagtttttcccattttgtgatgtttagggtattgtcgtgttatccatcgacagggtaacttttagtttggattttaagtccttcaaaagtgatttattatttcactcacagttttacaaatagtttaatttaggggcttggaaatcgtcaagcagtagttccactctggttggccggcacacctaaatttgaaagtgaggtaagattagtataatgatatgcttatgtgattacatgtttagcgtacatatttgttaagcctgttagattaca

SEQ ID NO: 306200 - DNA, 1283 bp, Cannabis indica
aaaagtgatcattcatattttttcaattattaatttaaaaaattaatttaggtataaaaatgtatataaattcaaatttccctatatatccgtatataataatggttgctagaaaattggaaaattttatgaaaaccctaaatggataatacttacccataataaaaacaaattaaattgtgctaatataacattaacacaatattcttcttatatatactattattgacctagagataaaatcttttaatttagtcatcaaataaatagaccatgagatggtataatctatataggctatatatcataaatgttacattttcaattttattagtttgataatatatataagttctatatataacaattaaatagtatttatacatatatatatatatatatatatccacccaacccaagattcatatataataataataataataataataaatatgtgaaagtacgtactgttaataatgagcacatgcacgtacataattaggtaccatgtgggattgacaacaatctagctcagacatgatctgtgatatgctcgattctatatcttaatttatcaatgtaaactcatctcaaattaaattactaaaccaaacaactaatgctggctggcactttgttttttcacctacctgaataataatattatacatagacagaaatgatcttaagggtacttttcaccaccacaatatatatataatacttttttggtacgtagtttaagctgtttgatattgtgataaattttagaaaatagtatcaatgaccaattacaagataacctaaaggtttaggtgttagtcaccattactgtctagtaacaatatatgctctttaaaacaccaattctaaaaaatgatagctacccacaacatttattaattaataaatatattattacgttcgatcactttaactacaaagcccatattaaattaatataattggttaaatgcatatatatatatatatatattatgttagcagagtgattaattatagatcgattcttatttggttaataatatttgacattaaagaaagatatgccattgattcgatcttgatggccacgggatggcgccgtatacacagtggtggtaattaatagctagctagggtttaattaatttcacacatatataatgaaaaaatattatgtatttaaaatctaaaaccccatatcaaaatttcaaaaagttttcattttaagaaaaagaaatggagaaaagaattattgattatatgttagtgccatt

SEQ ID NO: 306201 - DNA, 2037 bp, Cannabis indica
ttttggagataaggtgacttgccaagcttcttccatcctaaactttatttatatatatatatatatatatatatattcaattttctttttattcattttcaatttataagttagatgaattttaaaaatttatctaaaataaaaatggttacaaggatataaaatatatactatgaaatttgtgatatacattatgtacttaataaacatatatggctcgtttggtacgccgtataagggtcctattgtattaaataataaataacactatctttgaataaagtaatgtattgtattaattattacgactaaaatttttaatacaatgtatgttgtattatttaatacataataaatgctctgtattagcttgtattataatatttacaaagaactcggggtcagcaccaatttccaatctggacctgagacctagacccaaaccccaaacctagaccctaatcccgaacccggactcggacccgatcccagaccccaaacccgaactcgaatttggacccggacccaaatccgggacccgaacccgatcccaaaccccgaacccggacttggacctggacccaaacccgaacccaaacccggacccgaactcggacccggacatggacccggaaccagaccccgaccccgaccccgacccaggactcgaaacaggaccccgatcccgacccggacccgatcccagaccccagatccgaattcgaacccacccaaacttagacccagacccgggcccagaccctgattaaataatactaatacaatatattaatacaagtcaataccaaacatagtattgtattaaataatactaatacaatacaacacaatccaacacaatacaatacaaatacaacgtaccaaacgagcccataatgtatataataacagcaacaaaaacatatagataatataactaataaataatgttacctgccccaatcaatttattatttttgattggaggttacattaatcaattcactacattttataataattaataaataatgtagattaggtaagtgaaatatgttggccatgaaatttatttgataaaaattacttggtttgcaaaggttatgggcagagagctgctttgtaatgacacaaagaataaacgcaatggctaaagaagatttcattatcctattagaagtttttaattacatgcttttgttttaaatattctctctgtgtttttcagcgctattgattcaagttcaataacaaaaaaagttaactctaattcgaagatcttatatgaagatttaagaatacaatcatgttctttaccaagaaaaaaatatggaataaaattatattgagtagtaattaagataaatagcatgtgtactgtaacacttatcttattgtttaattaattcactatatatgtttatttagtgtgatataaaataatgtttatttatattatatcttgtgttaaattttcgcacaataaaatcacgtgctaaatttataccatttttatgcactattattaaagttcaataagactaaaatatacaaatgcagcatatttttttacactttagagttgctctagttatggctcataaataagcattaacttcttatagattatgttataataggctcattagtaagttgttattactgttcagtttaaaattatgtaatcatttggactaaaagacaaagaatgaaatgagtgagaattactagtttttcttattaacgattggtaatctcaataaaaacaccaatcatgcaatcatgcaatcatgcaaaaggctagagttttttgttttgggagtttcatatttctattctaccaactattttatatataatataaaagataaatatgttgtttgaaagctttcaattatgaaatgtatagtttattaatatgtggcccgttttaacaccacagaacgtgattacatatatagagaagacatatcaactttttttttgggcaaaaaaacatcaacttttttttaataatgcaaaaaaaaaaaaaacgaa

SEQ ID NO: 306202 - DNA, 4011 bp, Cannabis indica
aaaaagtaaaatgtatataaatatatatatatatatatacgaaatttttaagtttttattcatattcttttaatctataataatttatctcatatttttaaattatttttaaaattatatttaatacaattaaatttgcatgctatatatataaaaaaaaaattgttttctatatttgtgtaaatagcctaaaataattaaaattaagtaaaaaaaaatagaaacataaaaacaaataaagaaaaagaaaaagaagttgattggagagagtggggagagaaagaagagtatattaatgggggagagacaggaggacacactccaagtgcgctagtcacgcagctgtcattcggaattacaaagcccacacccactctttcctcacatccagcaaatcatcgtttgcagctgtcggatcccctctctctctctctcttatatattgttccatttatttttatttctcttttaaccaaccaataccaagctctatatttctaacagctaaccccatcaaacaaaataaaacaccaacacaataacatcgttaactatagatatcccatatattatttttggtttctctacctcttacatggatcgtattcgaagatagatagaaaagataggtggtacatagcttattatcattaaacacaaaaatcacatatatggaggagaagcacaagccaaaaaaagcagtagtagccgatggaatattattattattattattagtgttaataataaacgacagtactatcatcacagcttaggcaacaaagcaacagcagcagcagcacaaaagttttgatctttattattatcgaatcgcctaaagcccaagttctcagtcatctatggcacacccacattttcggtcacagttcggagacacgactttcacaaaagtcttcgttggtggtcttgcttgggagactcccactgatgaaatgcatagatatttcgagcagtttggggatattctagaggctgttatcattactgataagaataccggaaaatctaaaggatacggtttcgtaagtaaatatattctctctttaaaaaaaaaaacaaaatttaataacttgatttgagttgttgatcgattgttatacatacatatatatatatatgaaaaagtaggtgactttccgggaccctgaatcggcgagaagagcatgtgcgaacccaaatccggtgattgacggaagaagagccaattgtaacatcgcttcattggggaggccccgaccttcgcccccacgaggtccttcctttatttatttattttattattattattgtctttctttatttctaacttttattattatggctgatatgataggatcaatttgcaactttttgagatattttacaacttttacggatatcgaaaataatcttaattaatttattaaatatttgttagagatattagaatatcccttcctaattgtaaccgttatatttaattatatgttaatatatatatttatatttgtaatggagcaggaagaaatagtcaaggtgggagtccctttcaaggagggtcaccacaaaatgctataccaacctatagtggagttccaccaacattaccgccaccaccaccaccacctccaccttctctagtttatcaaccatacgggtaagtaagcctcaataagtacctaaataaattgttaattcaatattatataataataaataaaattaattattagtaatagtgacgtggcctcaattggtcttcagctgactcagctccctgtttggctaggccaacgcacgtgacctcatgctaaattttgtttattaatttcaacaggttaaactcatccatttaaaatactaatgattaactaaaaccagagttaaaatatatgggaaattagactttgatcaatcaatgtcatttcctatataggttgcataatttttcctttttttttttttcaaagtacacagttggtatgtagctttattaaggtagcaattataaatcacaagaaattgacatggggtaatagagagaggtggggtttgcttatggtgtcctaattattggatagagtcatacatgtgtgctatatatgttggtacagctctgtgtacattcgatggacccgcttaattgtggatatatatatattatatgtacacacgtatatatatatatccaatattaattcttagctatagctaatatgtagataaaacttctctaataaatttagattttaatttctaggagataagacagagagatgtacagattaagttacatgtagcaataggaagaccgtaccaatcaaaatcgattgaccattaaaaagaaaaggagcattttaaaagtgattctaaagcaaaactaatatttgtacacataagtaatttaaaagtcaatggtcattaggtctaacgatcttagtgggaaaaatgaaaataaagaatgatattgagagtggtcctcatctttatacatctcaatatcttttttttcctctatgattaattattatgttataaattaacctctaatatttctttttgtagttttgatcagttacaaaacgtaaagcatcacaaaacgtagccaaatagcaacgttcaatattcaattatccttatatatgttattctaaatgtagaatattatatgtacaacaaatgaagacactcttatctcacgtttatcaatgttgtcagtggctgcagttattcactgatcaccacgataaaaaaaaagtatttttttaatataatatctacatacttgtatagttatatatatatctacctttctctttctttctttttttcttaatatacaatgaaaacagctatacataactaaagttttatatgtacgaatgcgcactcatcaatttcattaatttatttttatctctgcagctacccgacctacactccagctgattatggataccagcaagtaatatatagttaactctctctctttagaattattgtcaaaatattaaaaaggaaaaaaaaaacaaatgtatgttactattatgctaaagggtattatcattgaattgtcacacaactacaggcactatataacacacaatatcaacaagcacagtactataatcagttgtacggaacgccatcatcttcggccatgaatgctccatattactatggctattcttatcaacctcaacctcaacctcaacctcaacctcatcatcaaccaacaagaggaccatcattttcgacaccaccgccgcagcagcagcgaatggttgccggaccaccttcatatgtctactatccagctcatcacatggaaactaatattgcatcgtactcatctggctaccctaatcaatcacaacaccaaccaaggcatccttttgcctcttctcccactggtaatgattattattattgaatatataattaatgttttttttatggcacaacaataatgcatcatatatacagacacacatatatatatatagtagttataatagatgatataacacaatcatgtaaaattattaagtataggaggaaatttttgggtgtataagatagtgagtggggccagatgccatgtgaaatgagctgtctggggttatatggggtgtgaccagggtaataggtcaaacactggaaagtagtgacagacaagcatagagagagtaaactaatagtgactgcatgtggtttgagcagtgtttatgagaagatgataatatatgtttggtagattctcaatacatcctagctgggtcgacttggttgctgcccctctctcccggcccacatcttaataaataatcccactaataattataatatatttatgtatacccatatatatttctccatgcctagtactacgggctaataagtataactaatcaatatccatatttaatttcaatttttagtagatggttaagatgatcagaagaggaagaatatatatatatatatatatatatatatagtatcgtagtt

SEQ ID NO: 306203 - DNA, 1693 bp, Cannabis indica
ttatcaagccttagggttttctagcaaagtgctttcttgatagaaaacttcacatctcttacaaatgagcaccaaagacctccttttataatgtataggtgatcacttagaattcaaaatacacaacactcatttctctcatataaatgagtattaatatagtttgtaacaactatatttcataccatttgaatcctatcatcaaattgtgtaacaacccttttattacactaataatgtgtgatcaacacatgagttacaagtgacaacaaattgtaactcctctccaagttacaacatgtaggttacaaaagtgtaggttataaaatcataggttacacatttatttaccatacacttaatatatattattcacatatatttatcacattttaatctactttattattatattataaaataatataacactattttcataagtgtcattttacgatgattagtaagtaatataaaattattttttatagtgctatgatactgaggagggtgctagacaccgataatatattttagcatttttcattaataaaagcactatttgttgccacagtttcgataaagctttgagacaatcaaatcaagataatgttgatgttgcattgtttgttgagacttaccagttcaagttgggtttgggagctcgtgatcgcctaagctttcttgttgaagctcacagtgttgtgttattctagtgatgtgacatctgagttagctgaatagtttgattaaagatgaaggatggtcggcagtgatttttcttgagacggattatttagtaggggataaaactattcatagccatttaatgataaaatttctttttgtttagttgttaatgattgtagatagttaattatttgtataagttgagtctttttagtacttatttatcgttatgttaatcgtgtgactcgtaattttactagagcttgctattctttttcatatcaaattttcattaaaagtgatatttctaataagtttatgcttatgatttatttcttaatgaagttatttttcatcaaaaaaattaaaataaaaataataaattatgatcaataaatttgaaagctccattttttcgcattatatttatattaaaattttatataaacactctaatatctataaaaaaaagtaattaaaaagtaatttttaaaattgactatttatatattatttttacattaatttgagttaatttcaattatttttattattttcttcatatatatttttattttaataagattataattactttcttattttaatttttttaatatctaaatatattttatttcatacatctattttcctttaagagtgttacaaattgattgattatttttttttaagacaaaatgcttataaaaataatatttttattttaaatttctaatagaaagaacacaactttgaatgtctctttggaacaagaacggtccaagactccaactagggcacgtgccaaaacccaacacaatcctcacacgtgtgcatctcgggttaattaataaaaataataataacatttaacaacacaacaaaaagaagtgaaaaacaaaaaagacaaaataaaaacaaaatattttaaggttaaaaatctagaaaaaccaaaaataaaataaaataaaaattacctgtctttttttttttttctattttt

SEQ ID NO: 306204 - DNA, 2635 bp, Cannabis indica
tcaaaaattgaaatttccctaagaaaatgatatgtagataataatttgatatttaacggtcaggtacttacgaagttctaaaaatatatcttaagtattagtgtcaaaaaaattaaacttgaatatttatttacaatttagaattaaagctaataagtatttatatcgcaaattatcctttattttaatgtttattctttttccaagcttttaatttgacttgttctttccaagctttttaaataataaaataaaaaaaaatatatatatttacgtttcttaaagaattacaattgtgacgctgttacttgtgactaaaatattatatttagatagtagttgtcattaatttagttttaatcacaacaagtattgatattaaatatacatttagtcacaataaattttaatttttgtgattaatatctttagccacagactttttagtgacaacatatgaatgatgatttataattattcacaagttttattgtaactaaaagtaacatttttgtaatgaaaaaaaaaaagaaaaaaaaataaaagtaagttttattgtattatttggagaaataatgttgttaaagtgactgtgactgatgaatccactcagtttgtgcactgttttgttagaatggttggtctcaataaagagttctatgtcacttttgtctatggttcaaattctctagaagaaattaaggaagagacttttggactggtttggcccatctcaatcctagtaaaccttggattataatgggaaatttcaatgtggtttttgaatttggtgatagaagtaggggtaatcgaataaccaaagcagagataaaggatgcttccaattgaagtgctttggggttggctgacccattgcacaaaacaggttctttcttcacatggtccaataaccaaggtgctcatgacagcattttttctaggattgatcatgtgttaaagaatgaagaatggcttgatttattccctaactcttctgctaatatgagttggaaaattgtttcggatcactgctcttgtgtagtgtcttcggcctcagtttagaacatagggactaaaccattcaaattttttaatttctggagtgagcataaagactataatcgggtagttttggagagttggaggaaggagattagaagtattggcttgaaagcgatctacctgaaatgcatgagactaaaatgcctgagatctttcaataaaaaaaaaccatgggagatgtggaggttaattttgagcaggctaaaaaagattaccttgaagctaggctggctactcaagctaatccaagagatatggcttttattgagcaagaaattaatgcagcaaaaagattcactgacagtgagaagttgttataaagtttccttgttcataatagtaaaaccaattggttaaggaaaggggacgacaacaatgctttcttctatgcttgtatcaagaaaaaaagggaagaaaatagaatctcgagctacttgaatgataacgggatcttggtaaaagactatgctaatgtggttaagcacttttgaaaccattttaaaagctatatgggcagctcaaacactactgtggatacttgggattttcataagttggaaggaagcactctcactcttgatatgcagatctctctgttgaagccttttactaaaagagagatcaaaaaatctctttttagtatcccaaatactaaaagccctggtcttagttctgggtttctcaaatctatttggcatgagatcaaggatgaattctgctcagctatcctcaatttttttttgattctgggctgatccctccagaattcaatgaaacaaatataaccttgattcacgagattgaaaatccatcaagagccattgactttcgaccgattgcctgctgttccacgatctacaaatgtatttcaaaactgatctgcttacgactggttgctgttcttcccttcatagtgaaccaaaaatcaaggcgcctttgtgcagaacagaaaaattgttcataacatacttatttttcaagacttgataaaaaaactatggaaggaagattgtctctccttggtgtgccataaaaattgatttgagtaaggtgcgtgacacggttaattgggagttcttagaagcttggttgaatcacctttgttttccatcttggtttgtgaagtggattatgcattgtctaaagggaactacctataacttactactgaatgggagacttcaaggaagatttgagggcaagaaagggcttaggcaaggagatccgatgtctcctcttctttttgtcctggtgatggagttccttaccagaagattaaactaagaggctcaaaaaggcacatttaggtatcaccccctttgcaagagtcttaagcttattaatcttagctttgctaatgagttaattatattcagtaaaaggacagttacttttgttaaccatctcaaagtagctttagatagcttctactcaactacagggctcactgtgaatctgtctaaatctcaaatattttttggtggtgtctcggctgagaaaaaaaaaaaattgctcttgttgtggggcttgaagaggggggaattccaatgagaccaactaaatggagaatgga

SEQ ID NO: 306205 - DNA, 3500 bp, Cannabis indica
cttctagagagctttgtgtaattgatgatgcttttcttttcttttttatttttgtgattcgaggagaatcacttgcactagcactttagatttataaatttagtcgttatattcttccgtgacctaaagcatttatatcataacagtgcttaactctggcgtgcaactagtctgtatgtgcgcttgttcaacttaatgacttataaacactcacactagcactccagtattaagaaacttggttactagggataacgtcaacatttcattaagccgtagaaatactaacttaggtgtataaaatttttgaatgccactgcaacctctagctttcgtatactaggtgtaacgctccaatatttttccttattttacaaaatactaagtttgatgcattaattaaaaagattcaaaactgtttggaaatacacagcgggttttacaataaatatgcagaaatgtgaatgatcattcatattaaaaaacacaataagtagttgagtgcaaataaatttataacatcccaatgaactcaaattactttactataaaaaaaacaacaaaaccaaggctccaccgacgttctagaccgtctgctcgtccatagcccctcgcagtatacataccagaactgacccagctcatcaaacttacattcaatgttccctgtctattgcctgtagggagaaagtaagggggtgagctaaaagcccagtaaggaaatgcttatcatccaataccatacaataccacacaataacatatatcattaatatactaattaagttttaacaatatcatataccttagtttataacccttactaagtaattgcacacatgagacctttatcatatatgtccacgctaactattcataacatacataaattgaactcataactccaatatcatactcatagcgcataatcatatcaatactataaaatatgtcattaccataacataggcataccatagccattacatacataacctgggcctaacttggccctacgataacctgggcacacttagccctaccattgctatagagaaaggtatctctacattcaacagcaacatcgctgtatcatacctccctataacaatgtcatacacgaatcagacaaatgcagggtagggtatctctacattcaacggccttaccccgtatcattaccccaccatggcccctcataccccaccatggcccctcatttgtacctgagacgttaacatacaacataccatacatacaaatcatgacaaccataatatacaaccatacacaccataatgtacattaattcacaaactcctattgtgtccataccacacattcttagtaccatattcacattcacaataatacatctaaaaaattattataatacacaaataatttaaattgtacagttcaacaacaaaaaaaactacctaatttccttacctgattgataatagagagtatgaaagatattgctctatgatttccttaaaacttagagtgaagcaggcaatatcgttcccttagtctccgttgaacgaaacttagtccggtcctaacctgatagcaagcctcgatatactatgcttataataggtatgacggcttatgttcttcaaagtgtagaatagttgatgagtggaagtatgattaaagggtacttcgtttggctctccttctttagacttgtgtatggtaatttttaataaagctaaagcatataagtaatatatatcatatttcctttatcacaactttcggctttccactaactaaaacaatgtttgaaataaataactcattattcttattcaattggaaactaacttcaaatatatataatctatgttatatacctgacataattatcgaaactatcccctataactacgctaattaatgattctaagaaaatatccctaaccaatctatcttatttctctacttaatccattaactaactcaaccgcttgggtaagaagtttactaagtcatattgatattatttgatattttctcaagtataagccatgatgatatctcctgtcatattttaaattcataacttacccacacactcaaaaaacaaactaaaacttagaatattctaatcatttcacacttatttacaaaataaataaaagctaactcacacatgtgccataaaagaaatccaactaattaagtatgactcaactaaaaatttatttaaaacatcacccgtttcaaacatatagttcactcacatgattattgcagccccaaaagactttgaatatatgtcatattgtatccatacttaagaataataccataaatccatgcctataaatataaccgactctccagtataatctaagtcaatttaaatggctcagttatagcccaataggccggttacatcttacttcacctcattacgctaatgggccttaaattatatctcgggtctaaacaatgtccttaactcgtaagaatactaaaatcttttattttcccaactaatacaattttacttattttaagataagtagccaccaaaactctaataattatccctactcactatccataacaataaatagacaattatttttttttcgatacaattagtttatcaataaatctttaaatactatatatatatttttaaaccgggtataacactagggtaacacctatctatcgtatacaaaagtgtatgggccatacatggctctcgtgcaccataatttttttgtgaattctcatgtaacgttcatagctcccatatactatgtctcatttcccccaagagtgatcagaaaaaagccttcattagttagttgttataccaaatcccatttggctttcttgatcatgggtctcagggagttgctacatgtgtgagcacttgtcaactcatctagagattcatggattggaggcatttaattcactaaagaaataattgtagttacctcaagaccaactctacaagctttgttcagtgattgagagcgttgtcaagtctgtgagctataattgattaataacaagaagtaccaataagttttactcaatgcttttattcattagatgttaaattctattacatcattgtgggctaggttaaaagaaaaagaagaagtagttacagacttccatttttatcaaagcttagctaaagtgatacccgctacactaatgcaatgtttgactaatagttaggggccataccttagtgatggacctcctaaccaaaagatgacttcatgatatcttgtcggttcaagaggcaatcgattcactttcacaaggtaaattgaatctaactgtgaagagaactgtctagagaacagttgttgtattaataatatcatcttaaatgctctttgctccactacctaggtactgacactgaatttaagtagctgtcatagcaaaatgaaacctatttgtcccggttcgaatgcttttgtgatgatataaggtctctctctctctctctc

SEQ ID NO: 306206 - DNA, 2795 bp, Cannabis indica
tatattttgcaattgtcaatgataagcagaatggtaacaaacctgcatatgccaacttgctaaaccatttctatagaataatattctaacatacaagtatcgtcatttttattactaatcgctttgataacaataattatattcaaaagataaaacaaaataatgattttaagtccaagcatcataatcaagtaaaccacctctctttgtttaggttctccagtatattctctatggagccatgttgacggatgagcttcaatgcagtcagtcctccgatacctgtatcatatatatttctgggtattcaaaacttgatgcatcattataagaaaacaaacttcatagtgaagcttcgtgctaaaagaaaacacaatataaataaatatctaataaacaagaaagctagcacccaacggtaatgtgtgtgggagacacatttgtgggactaaattacctcgaatgttctcacaataatcacatccagaaagaatgcacagatcaatgaactgatccatggtaagatttagctcctccaaaatctagaaaaagatcataatcagaatattttatggtcagaatatgcaacaccccttagaatatattatggtgttaaagaagcacctttgcaacttcaaattccatgactgggatttttcttgagctgggatccatcaaatggcgtagaaatctaggagctccaaatgttagagaatccatatcttcagaagccacaccataaacctaaaattaaacacacaaaaaaattaatattgatgtattactcatcattgacacattcacgcagagcaaagcataattagttttatcaacgaaaccacatagacaccagtactaatgtaaacaagttttaaacaatcaaacaaaaccagtataatatccctcaaataggatgcatggatttgtcaaattgaaattcttatacaatgatgtcaaaatataggttctgcagtttctatatgccttcatattttttttccttcattacattaaatgtagtacaaaaaataattacaaagatagaagattttcttgccttccctgatttgcaaagtgcagcacactgtgcttctgcttctgaaggagcctatgaaaaccaaaccattacttaaaagcaaggcagaatttgtatatcctatatactcaaaggtcacatcagccaaattttactccaaaatgaactaatgttacctcaataacaggaacacccatgagctttaatagccttttacagtcatcattgtgctgctttgtaacctgccaaatataagagcacttcagattaaaaacatacacaacagacaatacaagtacgaatcaagttaaatgtgtagcagttgataagaaagcaacataagtaaacaatccaccttcacagtccgtttgctgaatttctcaatgtcttccttattgccagactacaaggacaagaaaaaatgactgcgttgtttaccataattttaaagtagaaaagaaacccaagtaaagtattagaacacaaagtaaacatggaagtacgtacctccatggcagccgccaaatcctcagtagcatctgccctctttgagtacctgtgtcataatcaagttgtaagaaaaacactaggagagaaagaaaaagtttttcaattcacgtttcttttcttgtttatgctgggtgttacagtttgattagtaagaaagtggtaaaaaaaaaaggcaagcttgatggtactgggaagtagtaccgtttcgccagttcttgctttttcatctctggaggtttcccgtcaaaaacataactgaatttaaatataacaaattagttcaaaactcatcaatcagccaatgcattgtgacacaaacacagcatatagacttacactggcttgattccggcctctagaagcctaattgttctcgcaaacataccttgcaaatgactgcaaaacgccaaggaaaaaaaacccatgtctttatatattaattgattatgccaaaacaacataacacaactcaagaaagttcaataacaaagtattggctttttagcaaaatttcaatcaaaatagcaaaagttgcttaagtgaagagtttgtcaaacctagtaacttcaccagcttcattggtcaacatctcagccccacttcttcccacaacaatctaccggaattgaaagaaacccgcatcaaaataaagcttaaaagataaaacaaaacagaacatgcatatgtgcataaatacgaagagaagaatgtgcatacaagaaattgatatatgctcatgctggcatccacagcgatcttacggccaaaatagctttcgaatttttgctctttcatggacttgggtgcattgtcggccaaaagcttcgtcaaaccctaaaaggccgaagaataaaaaagaaagacggaatctaagaatcggagtatgagccaaaatgagaaagtgatgtcagaaatgaagtaccttaatacccattattgattgaggtcggagaagaggatggtctgtagaatttggaggttagggatgagtatgacgctgtttcccgcctttttgtagaaacccgccctctcacttagcagtgatgtgcctcttatatagtgttggatcgcacgtgtatcatgtccataacctcaattaggttctctttagtttagatgccctttacactaacgcatttaacttttgtccttgaactttgacatgtaccaaatattaccccttgaacttttaagatcgttaaaaatgtcccctaaactattgcgattattggatttaaggacttttgtc

SEQ ID NO: 306207 - DNA, 1245 bp, Cannabis indica
aaaaaaaaaaaaaaaacaagatgggttacataaatattacagcacaaccctatagattttaattatttttactgaaaaaatatatatatttctaggtcaatcatatgagaaatcattggtgttattaatggtgggagacaaaaacaattctttttttgtattgagcagtgctcccaatattgcctaatgtgtgccacctttagaaaagtgaataagagtgagcttttatggggcagtcatgcacttttgttgtattcattttttagggagcctttggaataaagttgctatttaaatttgtttttattttttctttaaggaaaaggaaaaagggtactgaaaatttgatcttattcattgtgactcaacaatttattctacttagaaacaaaatagcttagttaattttgaaatttatatcattttggatgcaatcatgttatggatatgaagtacattttattatttttgctattagaatatgaatgccagttttcattttatttgtgtgtatatacaaatatgaaagagagttgtttatgctattttgtatgatttttagtagtacttgacataaaaatttccaacaatgactaaagtttctataatgaacatgtttacaagacatacttcagaagcaaatttggaaaaactgacaagtaggagctcattgacagagaaattattttgttgatattaaataaaacaaaataaattaaatgtgggttggtgtgattaaatatggatcagtggcccagaggtaaaagctaactcaaatatcaaatgataacatggtgatgatgcatgtcatattttgaagtattcaattttgggaaaaataaaaactataaaatcatcattcttgaatcttattaaaagattacccttaaaaagagtttttcttaaaagaaaatttataacaaaaataaatacacattgtaagcatgggtccaattgtgaaggtttatattctaagtccaattcagcatgggtttggcccaatagtctaagtccaatgatttttcttttatacaactttgatacaagttctttacaatgtgatattgtggacgtggtcacaaaggtgattcaccttaacaaatattattttattttatttcaaatttaaaaaaattacaactttttattttgaattattttttttattatatttatcaaaataaaatatatgaaattcaattttaaattatataatataacacatgccaataataataataataa

SEQ ID NO: 306208 - DNA, 2653 bp, Cannabis indica
acttaaaatagtaaagtcctccccattttggtttgattttgtgagaaaaattcattttatttttttatttccttgaacggttttggttctttgccaaattatgtatgtgagataaacgtgtgcaactttggatatgatatcatgttgtttatgtatattttatacacaccaaatgtgtaatatgcattttcttttaaacgtttgtttgaaagtttcggtctctagctacatttgctaactcattaacccattattgattcctgcctatgtatgacattgtcatactcctaatcattcatgtatatacctaatcttctaccttaatgtaacccattaattgattcatgcgtatgtgtggtattttagtattcctaatcatatatattgcttaagagtacctaaaaatatgtgaatgtttttcaactaattaaatttgatttaaatgacaattgacacctactgtttaaaaaagcactgtcacatcattaggtctagtgttttagtatatattttgtgtgtatattattaattactgattgctcaataaataccccttattgttatacttctgtaacataatttatctaaactaagtggagaatataaccactttcctaaggtttttaagtaattgctaggctatttggagcaagtttaaattgttacgcctataacttttcatctacacataaatacgtttttattattcatgtgtgatttgtgtacatgtgtgtagctttaattagttacaaaatcaatatttttaataactcaatatatattgctgccattgttgtaatgatttcggttgggttttaaagcttcaaattggttcttgagtagtttatgattaagtattctaattcttttgaatgttctatgtgggagggttttagctttatatatctaacgataatatttattacattgttagtgaagagctaatgatttgtgaagactagttaacaatttttaagttctagaatttcatgtggtgtagcattaatgttattgttattctctacaacctttgggttttgaatagagagatagtatatgggatttttcctttctacaattttaaagatgtaataatttccataacatattttctattcttcttttatgacatttcacctttacttgtaagagcaatcatgcattaatcaaaatatacattttttaagaaatcactctcattgattaaacacacaaattacataataacttataaattttgtaatttatgtatttttttccactttttctttaagttttgttaatttgattatcatcgagaatgataatcacattattaactatatttattgttatataaatttaaacagatatataagagatagatgtagtaccgtttcatacaatattattaaaacaattcaaaaataaaattacatctatgatattatacattattctgaattgcgacaacaccatataacaaaatggaactacacattcaataatatacacccataaactagccttcaaatttacaaaaatcaaacagaaaaaatacttttgaaaatttttcctttaagatgtttactcaaaacttcatgtgtacatccttataaatgttttgtcccaacaaagactacaaatttttttgagaaaatgtatgatttaacaaacaactccatgtagtgcacttaaaataaataaatgaaaaagagagataggggtgggatgggggaagagaataaaaaggagaaaaaactaacctctagccattttcagtgaatgtggtaggctttcttacagctttttcttgatttaaagtttaagacttggtctctaaaacctcacttcttatgctatttgttaagttttcaaatacctcacttcaagaagagagaaatagggagagaggaaaaacttcttataaaagaagaatttaacaattatatttagcaaaagtaaaaatcatctaggttcaaataatttactgtcaatttgctaatatacaaatgtagtccttaacttccttttagcatgaaatccaagtgtagcaataaaataaatggataaataagtggcaacaactcatttccactactgtcactctggactgtctacgtggtcaatttatgctcgttaatcaaattttgcaaaatgcattttgttaacgtttatattactttctacttatttaacggtaatcatttaatagtatgaaactcttatgatatggtcaaatatacgttataaaaataagaaataatctacatgccaaataaagaaatgataattttgaaattattcatattcaacttggatttctttgctaatatgtcatgaattaaattggaaataggcatttgaaattttgtttatccttttaaaaaaaaaagaagaaaaaaaaagaaggaaagacctaggcaacaagcttaaaagattaatttgatttggagacaatataccttatatatcgtctacgattttgttgaccatacttgtttgcaaacatattctcataagtttcaattttgataatgttgacctcgcttctagctaaaaacagtgagtcaagttaaagtgattagataaagtaaataatagaaagcaaaaataataagagaacatcagaatttttagaggttcggtcctgtgagaatggtaatagcttact

SEQ ID NO: 306209 - DNA, 2030 bp, Cannabis indica
cataatatgttgaaagtttaacagtggcaagaaagaaaatatttacggagttgagtagtcccaataagtcatagcagtggacctaggaggggtccctggcccagcgcccaaattgactttagaaactccgaaataggatgttggatcctaccaagttatttttaactcaccatccttcaatattctaaatcaagaagacaagaagaattcaatttcgagacctggaaactgaaaaagagacgaaacagcaactcgaaagtcaacccaagggcctaggaattttacccaatgccatgttgatattcacaactaataaggtttcaatttttgagtctatcttagtaaaaatgtctttaactttatacatatacattaataagacatgtcacgaacatgttagaagcaccagaatcagaacacttcctgtttggagcaaccaagcaccctgtgcccgggccacctggtgatgcactcggtgccaagtttaacatattgacaacctgaggcgcttccaaccacagtactaaagatgtatccaaaacatttttttttgtctaccaaaccaaaatgagaaaataagtgctttcgaaaaagaaacagattaacctggatgctaaaattaggacatagtgcccaggttgacctgttgttaatttgggccatttccagtagcattttgaaaaaaaaaaaaaatctgggcatattctctgttttcattagcaattaagatatgggtactttcaggaaacaaacgaagtcatctgggagtcaaaacggacctagcccctaggttgacatactgtcaacctggccatttccaaacatttctcctgagaagtcttcctaggtatattcttcgttttcaccaacaattgagatacaagtgtttccgggaattaaacagaagcatttagtgggcgaaattgggacctggtgcccaggttgacttgatgcctgcgccgccaagttgacattttgtcaacctaagtcaactccaagtattttcttcaaaaagtgtttagggaaccttttttgtttttaaaaataatgaagatacaagtgatctcaaggagaaaacgagatccattgggggccaaaacagggccctagcgcccagattgacattggtgattggccttacgcccaagttgacacaaaacctagttatttggatgttttcgctccttaaaacctagtcaagtgcgatcgattttttctcaaattacctaaaaacgatccaacgaacgtgatttaagctccgaaaatttacgattttcatccaaaatcaattttttccattaaataatgatcaagataatgcctagagtgatttattcatattttttgtattattttaatagacctccttccctataaaaggagagctccactagctcattttttacatcctactaagttctcataaggtcaaataatctctctctactttatcttactagaaatctgagccctttcctaagtcaattttcttgaaattctcatgagaaataaaaaatcgaagtagtcgtagctctaccatcacgacatgggaagtaaacaattataaatttcgtgtgtctctctttacactacaagaaaaaaagacttttgcccgtgagttttctcgtcggcataagtatacatatgtcaccggtactatgttgtcggagagctaatgtaatttgaataaatctaaaatttataatctacataaataattgtacaaaaatatatttgtcattcagtgctacagaacattctagaaaaatatattgattaagtttttagttttctaaatattttataaattatgaaaattggaatatgtttaatcttattcaacacttataaatcaagtccaataatcaagttgagtccctacatctcccaagttgttaaactttgtccaaaaagatgatcgtaagctctcaagttccgagttttaattatttagtccaatcctagatattactttcatctatgaccataaaatgactaaataattatcatcattgcattctatatttaaa

SEQ ID NO: 306210 - DNA, 1427 bp, Cannabis indica
attaaaaaattaatataataataatgaatatttttttagtgtaatttttggtgttgtggttggagtagaaataatttttgacaccaaatttggtgatagtgtaacactaaatttagtgtctctttggagatgctctaatagggaatgaaaagtgatctttatcagaaaagtaacaaccttatatccccagttttttattagatcactaaacaaccaaaataaccttaaaaacatctaatctaattttgcacctgattattaatatgtagttagatcataatattaggatattatttatttcaatatataaataagctagcatatataaatatattatatacaatatttaattttaccattgtacatacttctaataattagctgcaatctttttacatatatataattcaagtaataaataatatcatgagtacatcaattctcgtttttgaaaattaaaaagggaattatatatagatatatagagatatatattgttcctccaataaattgagacatatagatatggaggatcacattgtgaggcagacattggatcaaaaataaaagacatataatgttgtgggaaacccatgaagagaaataaaaaaaaacaacaaaaaagcataaaaagaaataaaaatggcaaacaaattttaagttcgtgtgtccacaatgaggacagagaaccccattgcttcaaattttgtcccttaaagaattaatgtttataaaattacattctcagctccatcaaagttcatttgagtatgataattatatcgtaacaataattaatataatgggagatacgctttttctttcgaacaaaaattgaggtgcttttgtgtatatataattaatatataatatatgatcttaaaaaaacatgtggtttaaagtcacttcagcagccaaaactgttggattccaactatgattggtgacctttgcaagctcagagtccgacaggatttttaactaaagcattttagggttcctttgtgcctcaaaatattttttatagaatatatatagtcctaatgagttatgtaatttttatgcaggattagttagatgaacttgagtatttgtcataattggaatggactgaattatattagtataatacacaacatagttaaaagtatataaatatatatatatatatatatatatattcgggtaaatatcatcatttttaatcctgtactttgtaaaagttattaattgggctttctgttttgtcaaatgacaaaatggatctttgtattttccagaatggtacaaataagaccctgaattgattttttgtcaaaataaaatttaataataatatgatttaaaggtgttatgacaaaactatttatattttctatatctgttcgtgttaggaattgtcttcaagttggttatattaaaaacaa

SEQ ID NO: 306211 - DNA, 1597 bp, Cannabis indica
tgtttaaacaacatacttgtgagtagatctaagatcctggtaaaataattcccaacaaaagattatctcttggatatgtttgtgactggaaggatgtgcagataatgttcaagatataattcataacgaaaaatgattttgacctggaagttaattctctaacaaatattaagcaacaaacaggagaaagccttaagaagtacttttagcgtatgatggatgctgctacaaagacaaatgttactgatgatatgaagatggtggctctaacatcagcaataaccactgggtctttactatgaggatcatttcagtggaatagagtagattctctatctgacttcttatccaaagcccaaggattcattaacttgggagatgcttatgctcaagcttatggtgtacttccatcaccaaccaccaacactacaacaactcaaactctgcagttgtcttctccatttattctttcttcgacaagcacatttacaactttagtagtatgtggaccaggtacgtccagacaactagttgcaaaagccagtttctctagctttggagtggcacaaactggatacagtgctgctcctggacaaacaaaacaacaagtaaaagtttcagaattgaacctgagttattcttggggcaagagaggatccaaagctccaagtcaaactgaatcctcgaagaaagggaaaactgaagagtccagatactccaagtatactagcttgatcgatactcgtgagactgtttataaaactacttgtgatatggtccactatagaaagcctctaccaatgtacaagggtggaaaacacaaaaagaatcagagtaaatggtgtaaataccacgatgatattgggcacacaataaatgaatgtagttactttaggataaaatcgaaggaatagcccagaacaaccatttatccaattgggtgacgatactaattatctatctcgaacaaggagtagcacatggacatctttttattcctaaatatctcaaagccgtaaatcctcctcaaagagtaggttttttgcaagctcatgaaatacaagctccagttatacaggcccctcaaggggtacgaaaagccccagtggcaagacctgttgttgctctcagaccaagcaatccctattcatctggagtttctgccacgtagaacccatatttggaggtccacatattgcaagaagtaccaaaaatgcacaaaaaagatacctaaatgagctacaacaggatgaaacatgtagtcccatcagtatctaaacttgtcataaactatcacatttcgacaacgcataattaattttttattaaaaatctttttttcttttaagatttttcataattggtatttatatgtcatacacaataaaatataaattataagaatctatttatataaccatgttattgtagcacatttggtaagtccttagttcaatcctttagacattcactttatagttttgttttgttttattttattttttgtatttgaatcattttttgtgaggttataatacacattttttttatttttttttttattttgtgtattagagaaatttaaaattatttaatt

SEQ ID NO: 306212 - DNA, 2820 bp, Cannabis indica
ctctctctctctctctctctctctctctctctctctctctctctcctcaacaaatgagtccctccaaccacacgaataaaaaccataaagactcaaattaaatacggctatagtgtagtagtactagagaaatagtatttgtctcacacttttatttttactttgtttgtgaaaaaaaatctatattattaattacatagtggttattattattaaatattattacatgtatatctattgttttttttttaaaaaaaaaaaatctcattattcatatatatatatacataattcatgtcatgcagttcagaactcttatcactgtttcattagctagctcatcgatcgagttgcaagtactgttaacctagctagctttttttaatttttccatgcatgcatgcacactgtactagtcattatatatatttatattatatattattaagtaattagggttattaataataatagtgataatgatcacaatatttgtggaaattgattttaatgacttgagtggttgacctgtctcgtatgtcaaaatatatggtgcaactttttcttgtaattagtaagaaaaaaaaaaaatatactatttgcctaactcgtgtataacggttttgtattcttttggtaagactagtcatttcaaaacatgtatttaggtgcaacatctagtcatagctagcaaatagaataatataattaaatttatatataaataaatagtataattaatattagttcctataataatatgctagtgattaaagtatatagtaacaagtacgtactgcacttttgtttctggagaaaataatgaatagtttcgtaataatccaactaaaaagatcgattgactactgctataattcaataatatatataacagccttattattatttttgacaaagagagaggtataccccaatatgggtctttttgtacacattcatatatacaaaataataaataattaattattaactttgttattattatatatatattcaggtttcaaactggttcataaatgcaagggttaggttgtggaaacccatggtggaagagatgtaccaacaagaagcaaaagaagaagaaacagtctcatcagatcaagaaataaggtcagatcatcatcaccatcatgaacaccaccatgatcatcagatgatcgatagtaatactaataataataataataataataataggaacaataatattattattaataacagccaaaatagtatgactagtggtcaccaccatcaaatgctcgcacaaactccaacgacaactctcgcaacgcaaacgacaacaacagatatcaatgccatggaaagtgacccttcactcgttgcaatcaataacaataatagtaacaacaccaacaacaacaacagcagcaacagcaacagcaacagaaatattattataaataataatattcatcggcaacccttctcggaaaaccaagctgtgatcatgcaacaacaacaggcctttcccacaacgacgtcgtctgaactacttgcgccaccacttgtccaacagagtttcgccgccgcagaagacacgtgtcgacgtgtcagcttagttcataataataatgcaggtgattttgggaccactacttctaataataataatatgaatattagtgggcctgggcctgggcccatgggtcatctcattacctttgggaccactaatactactgctactgctcctacggctggtgacgtgtcactcactctagggctacgccatgccggaaacatgcctgagaacaatacttctcctttttctgttagagactttggaagctgagattattttcatttttattattattcacaccattattatataatcccaaatattaatttctcaacatatatattatatatgttaattaattagcttcaagggggagaaaagagagagaggaaaaaaaaatagaattttgaattttaattttttttcttttcctttttaaccttttcaattatattctgtgaacaacaaaggatgaagaaaaaaatacgttactgagacgtagctttacttttacattagctagctgtatggggatattattgtaattgtatagtagatattgtttttttccttttgttttttgttttcttgtttttattttttcttcatattcatatccgcttcatcctttgatctcatgtgtactttaattaggtatttttaattactgtaataataataataacaacaagaaagttaacatatcatattcaagatgagaaacatgagttaagataaatttaggactcatttggagctaatatgtgttttaaataatgtacacttagggtggataaccttcaattcaatccaattgaaccgaatctaatcgattcaatctaaattatttataaaaaaattagatttaaaattacaattaaattaaattagatgttaaagtttggattttaattggattagatcgattattaaaatgtcaatctaaaaatacaattaaaaaatgtttcaatctaattacatttatatattaaaaaattatttatataataaaaaatacatgttaattatattttgagttttttgcagctaaacctcctcaattatcactccacttgcacttaactctctaagctcaaattttaacggtaaaatcctccaaactactaaactgtttgcaaatttaaggtgtcatccattttttacagttaactatcaatatagagtgcttgtgggtacacttttgtacatgtgtcaaatttatattggtatacataatattattattttaaaaa

SEQ ID NO: 306213 - DNA, 1059 bp, Cannabis indica
ttcgtattaagcattgtcttcatgttggttgtattaaaaaaaaagttgtcaaaaattgagctcagagtcttattcttactattttagaaaatacagggtctattttgtcatttaacaaaactcagggtccaatctggaatttttgcaaaatacagggtccaaaatggtatttacccgaaaataaattgtatgttcactatttacatagaaataaaatggttgaaaaggtgtgacctatttttcattatatatatataaattttttcagttatgcataggacaggtgtttagtggaaaggaaaggaaatgagacaacagattttagggccatttcgaccctttctctcctcaaacaagtctcagtgtctcgctcttttaattttcttctaacatttttttgagccgagctggttgtttaagcggcttcccttcattcaggtatttatatgaattgtgataactctttcaataccttttcttctctctttcttttctctttctctctctgtttttgctttctctttcgttttattgttcatcaatggcgagaccatctattatgttatcacagccatttccacgaatgatgagttctttcaggtacttattattatattttagttctaaaatcgatcatgaactgtttctctgtggaattttgctatgtttggttcggagataatataggtaaaatccagagatgaaaatattgaagcgatgctaattttttaaagtgcataaaatacattgaagtatcagtgcttagttagatactagttttctggttttgattctgaacatttatgtttgtaaccttgaaaagtgatttttctctatatttgctcttctctctagatccaatactgcaatacatgaacatggactcaaacaatccttttctcgaggactctcctctcactctcaactcgccgtgttttatctgagcttacttgatgatgttctgacaaatgatcaggttaattttaatctcagtattcttctaattgcaatgtatcaaatcaattgaaatgaaataaaagggaaagaagttttcagctc

SEQ ID NO: 306214 - DNA, 2078 bp, Cannabis indica
gagagagagaggtgaagtggggaagaagaataccccttcgggtcttatttaagaaaaaaatttaccagcgtttagttatgtcgatgaaagtgtataatgtgccaataaatctcaatcaaaaaacctaaaaattaaacgcactgttttatttagacttttaccagcgcatatttacaccgacaaaagttttttcacttaccaaaaaagtaggcaggatttttcccaccttttttggatttttcaagctcatatatgtactggtgaaagttactaggctctctagaaacaaaatagcactcatgaatttccccaccaaaatggggcaaaaatcctaaccaaaatttttccgccataaggcagttaattttgttagttttactagcgcagttcatgaattatgctgccataagtaacttttaccaatgcatatttgcgccgataaaagttatagcagaaaaatttgtctcttttatcctcctcctattgtcgataacttttttcggtgcatttgacaatatacgccggtaaaagttttatttcttgtagtgtttgttctaaattttttaatcttcttaccaatttggttctccatgagtgtcttccaatctaagaatattttgaaagcctcatccttcattttgaggaactgcacccatgtcttccctgagtaatcataaaaaaaatgctcaaaaaatagttttctccaccaaaacttgacaccttggaaggcccctataaactttgagcgtatgtaccttagtgcttcttttgtggtatgtacactaatattaaattttagcctgcaagtcttgccataagcacaatctttacaaaattcaagttcgccacttaactttcctttgaaaattccttctctttcaagttcagttagccccctttgacttacatgaccaagtctaaggtgccatagcttagttttaataaggtctaaatttgatgagatagtgttagcactttcagttactattttaccattcaagaaatataaatcatttttgaattctccagtcatgaacactaaagaacctttaaccacctttaaggacttatcatcaatcttggaagtacaacctctctcaatcaaaactccaattgataataaatttctctttaaatcaaggatatatatatatatatcatattttgtacttttcttttaacatcatcatgcaacttgagctatattgagctaattccctgaattttataggccttgttttaacctagaagcacaatgccacctttcttttctccaagatctcaagatagctccttctttgggcacatatcaaattaacatcaaaattcaagcacccattcttggcctaaattcacatttgaaatcaccaacacattcacaaatttataaacatctgacaatatatcagttacacattttcatctgcctttgttgttgttttcccttttgagttttggctttcgaagacaaacattcatccctaaaatgtccatctttcttgtaaaaataacattttttctttgtgtttcctcttgaatctccttttgaattggtatcttaacttttggttccccttatcccttgttttctctattctatggttttcctctcacaaatagccttcactattttcatcttctttgtccttagttctcttctatatctacttagaacccagggaaaccttcacttcggacatggtcaaggttttcttaccatacaacattgtatcaataaaagatgtatattttcagcaacaaactcaacaagataatggcttgatctttttcttctagcttcatgctaatatttcatagatcaagtataatcttgttgaaatcatctaaatatcttcttagatctttactatcatccattcttagagtgtacatatttttcttctagtatagcttgtcagccatggactttttcatgtatatggaaccaaatttgttccataatcccaatgccttgtcctcactgaagactctctcaaaacttcatttcccaatctgagaagaatggcatcatgtgcctttgtttctgttgggttttatgccctaataaactcatttca

SEQ ID NO: 306215 - DNA, 2005 bp, Cannabis indica
aattcatatattgtgtttgactcaaacttcgccaagtagtacttgcctgggatccaaatccatagttttgaagattattggttttatgaaatactattactaacattttagaaccagatcagtttttggaaaattagtgttgtgttatataatgtaatttatttctataagtaacattgaaaaaacttggagatgtattcagcgatgagaataaccaagaaactacgtacgcataatatataagataaaaaatacagttgcacattacccatacatattacaagattaacaccatacataaaatccgcacacccaatttgacagaaactgaggattacagtgaccccttaatcatatacacatatacatacaatacacatatgtatatatatatgttcactcccgcccacaatttatttaatatttagtacaataagtaggcttatataggagcaaaaatcaccatacactcacacacttacatatggtgaccataccactagtcctcaagtagatgagattctagatctttggagacatcagccacaaactggagcaaggtatgagggtctatgatttccccatggtgcttctcatattctaaagtccagtgcacggtgcagccctcttcacccttatcacttttgcagttggcctgaatagtcagtttgaagcttttgaagtgctccataaggtctccttcaattactctaaaagttattaaattcttttcatcatctacagcctccactatttccttagccacacattctttcccatctacacacataatataataatcatcaattatatgtctaccaattttgtatgcatgtcattataaaagatgaaattattctatattatatagaggtatatagatatcttaattaattaccatgaacataattccagaagatgacagagccaacagttccccattcgccttcgtgaatatcaacacctttgattttgtcagtggagtggtttgagatgtggtgtggtctgtgcttgaagatgtcatggaatttagaggctgaagctttgatttctacatcagtctctagtttaccgtaaagactttcttccacagctgtttccatatcttaatcaataattcaagattccaattattataatgcaaagaagggaaattaataagttttcttgggaaagaaaagggtgtccttgccttctttcttataaagatatcaaaggcacgtgattgccatctctctccttatttttctattccaagttgccaagcactgtcactaatagagatatgctatacatgtgacacgttgagaaatgctaacgataccttcaaacatcacaaggtatattattattggtgtatttaaatatcaatctcgcacatatagaaatatgttaataacttataatgcaccgtatatgtggtgcattaatactacactcattcatgattaatattatgcattatataacagtgcacctatttgtttatttttaatttatacatatttatttataagttgataaatgttataaaaattaaatttttatctactttaatttaacgtgtttataaatggaagcttttaatttagtattttcaatattttataggtattgggttctttgtgttgattgaagactacacaaatgtaactatctttattggggaaaggtataatcacttaatctttaaaattctttatttagtggagtttgaatatgttagatattcatctatagtgaaatatgttttgtgattaattgtattattaaaaaacttcgaattcctatcggttttacaccgtcgagtgaagaattcccgacagttcataaagtcgttgcctatacgagcgtcgcaatgggtatagaatagacgacagttgaaaatagttggggaaatagtatgagccagggtttaaaactgtcgcgtatagttaacactataggcgacggtttaaaactgtgacctatatataggccacagttttaaatcgtcgcctatagt

SEQ ID NO: 306216 - DNA, 1110 bp, Cannabis indica
tgtttttaaaaaacaaaagtaccaaacaaaaccaaattagtttttcaaaaattataatttttctgttttttaaaaacaaaattaactgctttttagttatgatgccaaacatgcacttatttttgtaactttattttctaaaaactgttttcaaaaaataaagtcaaacaagcctaatattttcaaaaaaacaataattctgttttattaacaaaaaactaatatttaattatgatgcttaacatgcacttatatatacctcatcctataagggactcattcattatctcacttaattgggtcatcaaaacatactttgaaagttttatcccattaagaatgatactgcaacaacaagctaactttccaaaaggttaaccataaactttcctataagaagttgtagtgggatttaaacccttggcctaagtaagaaatgatgttaataaaagcatttctatcactatatcagacaacgatgtgataatgaaaattagtactgatttatcgctaagtatatatattttaaatatatattaaaaaatttataatttaaattatttggaaagagaaaatctctttccaacatattaaatgatatgttttgtagttttcaacattaaatgttatttaaaaatcaattactaaactaaagactaaagagtattgctattaaaagtcagtagtatttaatactatcatgaggtgttataataattagcgatattttataataggaaccaatacttaattatgatctgacatcttaggcatacaaaaattacatactatttaatcctaatcatacaatcaaatgtgatttagtcccctaaatgagatcaacaaaatactttgggtggtataaaaaattctattagtaacaacatctaacaaattcatatttataatataatatataaaatttattcaattatttttaaatcttttttattttccaaatcaaatcaaatatataaatatataatattataattaattagtggtgaccacatatttatagtagatagattatgtggtccatatccctctttataaaaaagtaacggcatgcatgtctaattttatacacataattatttttattaatct

SEQ ID NO: 306217 - DNA, 2228 bp, Cannabis indica
  modified_base (2172)..(2172): a, c, t, g, unknown or other
tgaataaatttgcaagattgacacttgatggaatttgttgaataccaatatgcattttcttgaaacgtataaagaaaaatttggtgaaatatgttctaattctatctaatgtaaccttattttagttgagcgatgtaaacagtattatcttcatagaaaacatgttgatacaatgtatatataaaatatttatatgttcttaaagagaagcataatgactgatattgttaggaagacatatgagaagaggtaaaattatttttaacaaaaggttgtgaaacttgtggtgccaacacccacatatatactctcatttattgtccttatcatatgtgtgtatatatatattatagtcttatgtgattatacatataactactttgtaaacaaagtttggtactactactatctcaatggttggaatgaaaaattcttttccaaaggtggtaaggagattattctcaaagctagctatcatctaatctatccccctcatatgtcatgttggacatgcatgtttcaaactttctacttatctctatcatagtttagaaaatcggatggatcaattttagtggaattctgatcactctaatcacaagttacatcgaaaaaaagagttacattggtcgttgttgattagggtttcgaaagtgatttttgagctaatagctccaaaaacactttttatttagttttcaattccatttttttttttaacatatcacagttctagtagcttttttcaagaagagtttcattaagaagttaaaagtagtaacagagttaaaatcaatcaaaaataatattgtaagttgaaatctgagagggatctagacttttgtcttctaatccactttaattaatcaagttgtgttagtcaagcaggcttagtaatttttttttcccgaaatccactctaaccaaccctaattctttattagtagccaaggtttttgcagctacataccatcccaactcaaattttttgagcgccctactccacaaaccaagactccaccatataaatgacatatatattaatgattttgtgtttgtctagtatatgatgtctatataaaaaagaaaatggtaagtgaggagaaaatggaaattgacaattttttagaagggtatataatgaggacggttggtggggaacaaagctttagttttgataaagtttgactaatacaatatggtaatgatgaatttacaaaactgcccatcaaatagtggttttgaggaattgaggtatgggtctcactcttacccacaagagaaattagataaggcaaagtagtaaatgagaaagtttgaaaagtttcctactcaattaattctttctttaccaccttccttccccaatatctttttcactctctcctaaaagataataacaataatcaaataatattttacttaatcattatgatataacattacacaaccatagatataatcattataatataatgtccattaacataaataatgcgcgtataaatagggtcggttcaaattaggggtggtaattcgtgttcgcgggtcgtgttcgtgtcgtgtcgaaactcatgtataacaggtacatgctcgactcgaacacgatccgtttaataatcgtgtcaaaaaaatgaaactcgaacacgacccgtttataaacgggttgacacgacacgacccgtgtaacccgtttataagtatattttgtttaaacatgtcaatcaataacacgtttataaagtattcaacatgtttttaacctatttatgacacgttaaagtactaaaataactttaaatatgtcaataacgtatcaatttcgtgttagccgtgtcaacccgaacacgacccgtttattaaacgggttagacgagtcaacccgaacacgacctgaacccattttaggcaaaaccaaacccgctaactctcgtgcggattttaagtcgtgtcatcgtgtctgacctgttttgccggccttaattcaaacaatttagaagtgttaaacgaaaaattaaaattaaatcttttatttaaaaaataaaaaaaaaactattaatcaatactttataaatttaatttttaaataaataagtacatcacaaattcttttatcaattttgttaagtgcatgtttgttattataaatatttattatgtatacattatatntaaaaaaaaatctttattatgttatatatatatatatatatatatataatagaata

SEQ ID NO: 306218 - DNA, 1895 bp, Cannabis indica
tcatttttttgggcggggttgctccacaacacctgcctgatccgaaggagacacagaaactgaagaaacttcattgataacagggccacctcgagctcttttaaggatgtttctaagagaatctcccaccatgccagagtgtggtatgaatgcagaacgctttgcaccagtaatggctttacccttggacttctttaaagtcctagcaacatcctaacagtatcaggatcaacataacttggaatgtgcacagtaatagcagtagtgggggagctatttgagaggtatcacaatggacaccaactaaagcaacaccacacaaatccaaagcatgagtgaaactttaaacaaccgagatcctctcataggcagaatgcttaggagtaaagatgggaatgctatcaagaagcccttaagagttaatctcatcccttctgatagttgtgccagaggaataagaaccggccccaacatcctcagtggtaaggaattggctaacagcagcagctagactttggtcaacattaccataaggcaaaggcagctcttccaacgggaaagagttagagagatcaaaggggttacgcttgaagttagacttagtaggagctttcaaggggattttgtactgaagtggggtggataggcatggtcatcacactttttcagataggtaatgcatttagttaaagtgtgatcaaacatcccacaatagaaacagatattgggtaaattttcgtacttaaaattcaaccatttgtccttgtggatattccttaaatcaactaagatacctctagggattggtttggaaacatctaacagaactctaacatgcaagagcaggcctgagattttagaagagtggttttatcgacttcaagaaaatccccaacttcatccccaatcattttgtcaagcttataagatttcataccgaatggaatggaatgggcttgaatccaaaagggagaatacctgagttggttggaaaggagagtgtcaagctcagtgggattagcactagtgaccagatagtggtcaaagtgccatgactggccctcaatcactcaacgcatatcaccttcatagccaaactcaaccatgaacatcccattacaatattcagagaaagtaataggagctcgagtgatcaaggcattcctcattgcctcttcaaaccactcgattttgatagttcgagcagtaaggacacgaaaaacaaattagaaagctttcccaggttgttgatcccctcccatatcatcaagaagctcatggacagtagcttctttctcagcaagagttaaaacacgagccatatttttagtaataccctccatttcccataacagaataaagaagaaaaatttccagtatttttcagataaggaaagtaagagaaagcagaagagtaaggttctccagagaacccacactcttaaataactgaagttagaaaaatacctgcatgtccgagattcattaaggaagtcagctatgaagaacatcatccaagcctgcagaaatcgtaggccaaatccacggatcttaggtataatcatcggttcctccttcgaagaaccaaaatggtggcatccatttatggtgataggatatcggaagagagaagggcaaataaattaaagaaaaatcccctaaaagaagatatactgtagagatttgacgaaaattaaatgaagaaagaagagggaataggaagggatagagggtgaaacaattaatgagattgagaaagggaaagtagacaaaaactcattaagaatggtgaagtcacaatgaatgaggagagagaaacgagtaattaacaaagggaaaatagattaaacaaacaaacaaggatcaaattgttgggaattattttaccaggatct

SEQ ID NO: 306219 - DNA, 1725 bp, Cannabis indica
cctggacccaagacccgaaacctagacttgtactcgaacccggacccagacccagacctggtacctgggacccaggactcaggacctaggacttgagacacaaaccccgaacttgaatttagacccagggtggatctagacccgcgatctggacccagacctaggattgggacacggggctaggacccaaacccgagacttggactcggactcagaatcaggaatgggacccagacccaagacctgggacctacaccgagacttagacatggacccagatccggaccccgaacccaaacctaagaccagaactcggacttgggactaggacccgaacctgggaccgggactcaaacccagaattgggacttgggcccgagatccgagactcgggactaggacctagacttgggacccgaatccagacacataatcggatctgaaccacgttccctggacctagacctcagacccgagaccgggacccggacccagtcgcggacctagactgggaacgggaacgagaccagaaccgagactgagacttggacctgaattcggacctgggtctgtgaccgggacccgacctagacctaggagccattcctggaccaggacccaaactcgggacctaaacccagacccagacttgagacccaagacccagacccgaacttgactcgtagttggtattggggtcgagtttattgaaaatatattataactttacacaatctattaatacaagtcaataccaaacatagtattgtattaaataatactaatacaaaattaaaatagatataaaataataagcttagataataaaaaaaaaggtcgggtcggatcaaatctgatttgaataagtcggtcggatctaattcgatccaagtatctgatctagtgagacggggcaggacagatccttacatgatttggatgaggtcggatcatagctggatcagattcgacctgatccatttacactcctacaaaatatgataattttatatacataaaatgatatttttaaaagtttaggatcttttataatgataaagaatatgtattattgtcacaaaattaggagcattattatgggatactaaagtgcctagaaatagtgtcttataattagttattagtagtttaatttttattaaattaaaataagtgagaactgatatttgattataccaatagcgatattataccttacaaagatattagtcaccataggtgtcctttaacatttttccaaaactagctatggacctctcaaagtgaggattagctaggcttgtgcctaggccaggtccgccctacctgacaaagacattgtcaatgtcttgtcgaaagagagactgtctcgcttggatgaagaccattgcttgaaatagattgttgctcggttgaagaccatcactcgaaagaggcggagccaacataattgcctaaaatgggccatcatccaaataggtatagtcgtactgattcttattagacattttaaggtacttaatactacgttgaaagtgatgttttatgagtgattaactactttttatattattaatttattaaattaaaataagtagaactcggttagtcaatgctgtttactgatgcacatgccttgttattaagtgttggttatatatatattaaggttggatgtaaagtagatgttagacaatttatatgtataaactgaaatatatgtat

SEQ ID NO: 306220 - DNA, 725 bp, Cannabis indica
aaaaaattgaaatgtaaaaatagagaatggttttatgattggtaatagtgtaaaaacaaagtatgtatatatgtattaattgaggcttctagttgagaagtgctcttaggatgtaaatggtttgtgcaatacaattctccaattcatcaaaaaaaaaaatgtgtattgaataccacatggcaattcagattataatcattacctcaacaagtttacggttacgtacaaccttgaaaatgtgtgggtcattgttaattttttttttaattctaggccaaacagacatatttgcttctccaattgagttatacaatcttatacaacacaacacattcaaaacaattagtaattcaatcataaaacaagaaataaaacataagagaaatacattttcacaataactatataaaatgcaatattgaacaatgtattacaatattgtttgatatctctatgacatatacaacccaatggcactatatagctaacatacatggttgaccaaatcacatatagacaatcaaatcgataaggcattaatatagctaaaatgtagagttgaccaaatcatatattatgaagaaaaccgattctaataaaaaccataatcgatctccttaacttataacttttaaatcgatggattataaaaacgaaacgaatggaaagattgttggaatttattttaccaggatcttagatctattcacaagtatgttgtttaa

SEQ ID NO: 306221 - DNA, 1052 bp, Cannabis indica
aatttaattaattgatgaataaaagaggcatttttcaacttaccaagaaggtactagtcactattggcctctcacatttctcatttatttatgggagtctattaatttgttgggtcccaatcaaaagaagtaactggtctggtagttcagaatcgaccaattccaattcttacatagttttttcttttctcttacatagttggttctctccttttgtaggtttctttagaagggtaattatcgtgtacaacactcagacagcaataccatggtgaaatgactgtatggtccaataggaagaatgggtcccacatcagtatcttctgaaagcgatagctttgtgccttcgcttctgcaaagttactcgccgtacttgccacgtgtgcatatcaggagcttaggtgcatgattggacccatgtgctgactcacacgaagcttcctgtctattatttatttattttttacttaaaaaaaaaatccagaagccgtctttaatgggggcagaaaatacctaatctacggtataaccaatggtgtgtctctgtgtatttttaattttctggaaattaacttaattttttaatcttttttaaaatgtccaaaataccctttttcaattatgcatatatttatatttacaaatgtccatactcttgtcacaaagtaccatgtaccaaccaaccccacatgaagattgatgattgttttatttttaagtgattctttttatatgaatactatttactcccttaaaaatggcatatttcaaaacaaatccctttgaaataattttctctgttttcattacttattttcatctaactcataagtcttatccaaaatatatacttctataaatcttttgttgactcaaatggtcctttcatttaatgagtattcttttttggactgtgttggattatacaatacaggttcgtttggtacaccgtattgtattgtatagtattatatttaattatattttatgtaatatttttatataaaactatatgtggtattaatttttatagatacttaaatatataatat

SEQ ID NO: 306222 - DNA, 811 bp, Cannabis indica
aataaattttcacttattttttttttttctagagtaaaatattttttttgttgttacttttctatagcatctatgttaaaataaatattattttgaaacaacagaaaaataacaatgtaaaaaaattatgttattttctcataacatcaatgtgaaaacaacggttttacgcagaaaaaacaaataacactccgttatttttttaaaaaaattccatagaaatgtaaaacttttacacttttgtacctaaaaattattaataaaaatacaataatttatttttcatattggtaagaattaaagtgcacaaaaattcttgcaaaaatacatatacatataaaaatattcttaaaaatgatattaatgttttggaggtaaaggggtttgaatttgaggccacagtttgcaggtgtgttaagaaataatgagtcaataattaagtcaattagaatatgaataataataaaaggattttatttgtttgctttggaattaaatactgagaaaaaaaagtattttgtagatatatagaatgaaataataatactattgacaaaaaaattatagaccctacactttaaaagtaaatagaagagtaaaaaacatgagattggaatattattattttacgtttaattattttaacaatgaaaatagttttccaatggtggatatgacttgtttccattgaataatagaatattgttatcacgttgaaattattgttattccattattcaattcatcaaaccaaacaatggatgacccatgtgttagactatatatatagtgtatgtaatatagcatatac

SEQ ID NO: 306223 - DNA, 1271 bp, Cannabis indica
aagaaaggaatgaccattccagtaacaagaaaaaaaaattaatgatttttttatcaattttttttatgcattttaaattttattccattcctattcctattcccattctcattcctatttctatattttcattcctcccaaccaaacgcctcctaagtgttagttgtttttcagttaggattagtttgcttctcttggcttggtaagttaggattataccgaacttagctaagttagttatacctctaactaacttagctcccctgtatcactatatatatattcatttgtaacacccaacattatgaagtaataaactaagctcaatagcttttctcagcaatactttgttttcctcatatagtattaatggcgaggccctccacacgctcacaagatggtattcctccatccacaactgagcacaatcaagccgaatcacatcctgatgctacttccacccatattgtcaacaattctgttgctccacaataagttccaacttcaagatcgcgttctcagaacgctgatgacattgtcgagccagttcaatcttcgccaaaccaacatgatgaagctcatcccatcacctaaaaaattggtcaacatatcaacaaacctttccacttaaaagactgtctgtcatgctgcctcaacaacgcatccaattgaagaatttatttcctatgctaaactcagtccccacttcaggctgctgttcttgcagcatattcccaacttgaaccacagtcatattgaaaagcttcttaatttaagtattggctacttgccatggacaatgaaacccaagctcttgagaaaaaacttggacagttaccaaattaccttctggccacaaacccattggatataaatgggtgtataaagtcaaatacaaccaacaaggagaagtagaaaggttcaaagctcgtcttttatctaagggattcaaccaaaaacaaggcatagactatgtacaaacttatgcccctgtagctaagtttaacacattaaaaaaatttcttgcactagttgcaatgtacaattagaatattcaccaacttgatatcaacaatgcattccttcatggtgatctccatcaagaagtatacatgaaaatccccccaagatacaaagctccacccaactctgtttgcaaattaaataaaagcatctatggccttaaacaagcctctagacaatggtatgaaaaactcaatactgttgggttttgtgccctaaataaaaccctttacaatctgattagttat

SEQ ID NO: 306224 - DNA, 777 bp, Cannabis indica
tttaatttaaacataaacaatttacaaaatatatataatttaaattttaattatataactattcaattaaattattccaaaccacttaatctttttcacatttttttcgaaaaatataaaatttgaccttaataagtttataaatattgaaaacagaagcaaattccatgttgcttcttgagaaaatgtctgccttccgaaagcctatggaggattgagttttaaagatgaagttaaatggaattatgcgaatctccctaagtttgtgtgggctttatcaaacaagaaagatttactttgggttaaagggatcaataccatttacctaaagaaagttcctttctggttatatgaattaaaacccgacactagctggtattggctcaaactttgtcacttgaggaagaggttcactgagcaggaaatagaatcagatggtttctcaagtaaattcaaaaccagtcgtttatataacaactctttacttcaaaaccaggttcattgccataaaactatttggagttctcttaacttacttaagcacagatttgtgctatggcaagtggttaactctatgctcttaacaagagacaatatggctaagtttcacatccccatggactctgttgatcaaactgctagcaaaataaaagaggaacgatattaccgaatgaagaattctgggttgagtcgcggactaagtcgctctctttaagacgttcgcggcactgcccaggagtgtgcaagcagtcggaaattgccggtcgtccccaggat

SEQ ID NO: 306225 - DNA, 575 bp, Cannabis indica
ttaagtttttgaacaatatatattcatgtaatagattatatccgctactagttattgaacaaaaatatacccaaaaattatcatagttaatttgttgggcaatggtgctttgtttttgtgtttttaacaataattggtcatatttaatataaagaatcatattaaattgttgggcaaacttgtagtgttatgctataataacaatgttccttacaatatatgaatatgagcttaaatattacatagaatcacataatatatatattgtcaaattaattataataatttagattagaaatattattgtgtgtaatattattattatttagagagatggagggggccaatatataataggtatctagaaatgaattatggggtttacacgtgcgattgttgagttggcacatgtgtgtgcttacatagtgttttacaaccgtgttccagacttgagctgagctgcacccaaccacgtctgatgtcatcatccaaaacaaacaaaaatcttatatatgaacccttaattcccattttgttcctatatatatatatatatatatatatatattattcac

SEQ ID NO: 306226 - DNA, 1620 bp, Cannabis indica
atcggtcaatatatagagtatgattattcggcaccagtagaaatgtttattaatattttataatagttgtaaaattaaaatatataagatattatatttaattgtaggtactaataatgatatagcattttatgtagtaatgtgaagaattagtagtacttcaatgatgtactctcttataaagatataaaccctagctagctaggttgacataatagaaaaaaaaaaaataatctagagaaagaagatatacatggggatggggatggggatgagatcaagccaagtgatgcatattattatgattgttgttaaagtaggtaaggctagctaaggccattaagaagagtactactaatatagtaccctaatatataatggacccacacgtttggggcttatgtcctaataagtagctaggttcacctaacatgattaattagtcttctaattaatctaaattaatattattattgttatttttatattatcattacttatcattatgtattctaatatgaagacaaaatgttcccttgattggttacacatggctacatcattactacttataagcttctagttagaaaattacatttgatctattaatttattaaaaatacttaaacgtgcatacaatattgtgaaagaaaaagaaataaattaacaaagagcacacaaataagagtccaaaaactaaataatttcaattcttttttttttttttaatttctctgatctaattattattttatttattaaagtttttactattagaaaaagtgtggtcgacaagaatgttagacctcataaaaaagtaatgattatgacaattagaatattgtgattggcaagagaaagagtgactaaattgtgggatcacgcatcgtttaagaaataaagtcaagtataataattttaaaactgtataagtatatgagacaacacaattaaggagacattaaataaattaacgggtactacatacttatggcaaagtacgccttcttttcgatagttcatcacttaataactctaattaaagttaagcagtagcctcttaatgggtaatctcctaagaagtttattcaagaaacgtgcaaatgaaaaataagctccagttattgatttttgagctttacttccagcgatagcttcggtatgaaaaattaggttttcaagctctctcaactctaatttgctttttacacaaaatgagtggagagttcgagaattgagaccctatatttataggtgacagggccgtcttaaacattttagaggccctgttccattcttaaaaatttggcccttaataaaaataatagtataattaaattctaattttaatttattttcaaaaaagttcaatttttttatttatttttttaggtagatcaagtttaaaaatttacttctagaagttttagttaaaaaaaatatttcattcatatttgataatttttttaaaaagaaataaaatcttgtcattaactcatatatataatcgtgtgtatatatttttttttttcttttgtatattttcttttctttttttttttaaaattgaaaatttttaaaatttgaattagaaatatttaaatatatatgatgaaaaaa

SEQ ID NO: 306227 - DNA, 2392 bp, Cannabis indica
ttttataaaacaccagtaaaacacaaagcataacaactcaaaacaataatagaacactagtaaaacaccagtaggacaccagtgaaaacttaacacagtatactgcagtatgaaacttataaaaaaacacagtaaaaatgtaaaaaataccgcctggcagtatttttgtaaaaaaatagcaaaagttagtataccatgtaaatttcccaaataagatgccgaataaagtaggctcgaaaaggcctttgcgcttacaaatgttttttgtttgggtaatatataattaatatatattttacatgaatagataatatgttatttattttatggctcctaaaaactgcttaatgcgcacatgacaaatagagaggtaactatgccaaaaaggagctaaatttatttgccacttttatgttagaatgcatcaggattacattacatgacatgaatgaagatgattctatggcatattagaaaaatgagacaaaattataatttaacatgctaactcagattaacttggcattgtgcatttcttttgagaatgtcctaacatacgacacctcccacattgaacaactctctttggacgcttgaagttttctacccgtaggaccttcttcttgggtctaccaggaggcctacgagttttaggcggccgtatcatgatctcaaccttcgcgtttccaccatctgttccctcaccttgttcatgccacaggctcttatctggaataggatttattgcctgagagtacgcctctcgataactccctaccgtgaaacatgcctctgcaaatagatgtacattgtgcctgcaagaaataagggcagcagcagcgtgggcacaaggtaaaccatatatctgccagcggcgacaagaacacgttcgagttcttatgtccacaatatttgtcctttcggttgacacaatctcaaattcaacttcgttcgctcgaagtacttgatagcaacgggcatctgcaatagcctctgcaatccgtttctcagctgagggaacaagaatagaggtcatccgcaagcccatatctcgacgctcatcaaaccaagatgtcaattgttggcgaacatgctccatcatttgaacaattggaagctcatggcactcctgggcccaattatacaataactctgtgactcccagagtgaagtgaccataccgtactccctcaaaatatgctacagcccaaagttggggaggaaagtgatcaaaccaaggtatcacatcttgtgagatctctaccatttcattaatcttgctttcaaactcaactgttgtcaaggcataaacagcattccaaaagatattcaccaacttcgtgttcttgaatgtatcccgaaaattttcactcacatatcgcagacaaaatccatgaaaagcactcggaaaatgtgtttctactgcctctacaattcccctttgtctttcagatagtatcgttagtctaggcatgttttccgtgttcactccaagaagcttccgcaattctgacatgaaccacatccaattttcatcactttctccatctacaatagctatagccaatggaaacagagcatcatccgaatcaacggctgaagcacaaagtattgtacccaaatatttccccttaaggtttgctttatccagctctagaagcggcctgcaagcatttataaacccataaatagatgcacgataagaaataaagagacgttggaagcaattctcttgaccagttgcaaaaactgaagcaatgcttccaggattggtcttccttatttgctcacagtatgctggaagaagccgatatccctcttcaaaagttccatgaagggcagccatactacgctcctttccacgccaggcttgcatgtaagataccttgactccatgttcttcgcggatatcttctaggatttcctttggtttgtattgtggattatctcgaatacgagcttcaacagatctagcaacccagccaactgatgcttgctgatgatgaaggttccgaactccttcacaggtatgttctccatgcagggttctaacagtgaatgttggaactccagaacattttgctacatgcacacgccatggacaaccttctttggagcactttgctataaaccggctacgatctgatttcactattcgaagatcaaaatgcattgctatagcaatgtccttcaatgctcttcgacaagtttcaacatcaggaaattcttgtcctatggctaatggatgatctaccacaagaacagaagtatcatgaactaaatgatcattgggaactaaggaatggtcattgagaactaaagaatgatcgttggaaactagagaatgatcgtttggaactagagaatgatcgtttggaactagagaatgatc

SEQ ID NO: 306228 - DNA, 984 bp, Cannabis indica
ttttagcacactttaaaataataccaacgttgctctcttttgagtgttagagttttgttgctctgattagggtgttttttgtttggttcacgtttattttgttgtctttttgttttcgatgattatagcgtccagtggctcggtgaatcacacgctcaattccgtctccttgtttacaaaaaacataaatgacaaactggtgttatactgagccttacgccaataatcaagagttaccttagctgatgcaagaacctcacttagtggaaaaattttcttttaaaacgtggcattttgggcttatcataaagcccaacacaccatggcaacacaacacacctgttcatcgtcaagagtattaaaaagattatcaaaccaactgccaaaagttaacagcatctccaaaacaaagattgaacccaacttggtccaatatgagtgtgcaaacgcgcatgaaatgagagcatgcatatatagtttcagtatgagaattacaaacggggcaaattgaagagattttcacatgctttgtcacaaggtccaggcatattggtaaccaattagagaaggctcttcaaagaaaattttttactttgggagagatcattaaatgccacatcaaagttgttgggccttaagtgcttatacttttcgtattgcaataaagtataagcacttttgacttaaaaacaacattattagatggtaacaaaagttacctatgtacctcattacctcaagtgctttggactctatctaaaaatcaagatagattacacactaaactataactttatatattattagacaagacactataacaattaatcagattgtttattttattcttatgctgttgtataattacaaaacgaaacattgatattataatatcatcttatcaaaatgaaatggttaactttggaataaataaacaataatagtaataactaataagatggaaacaaagagcaccagtggtct

SEQ ID NO: 306229 - DNA, 2075 bp, Cannabis indica
aagttaatataaaatatgtgttacccttaaatagaaagtgaaggtatattaggcaacccactaaaaaaatagatatataaaaaataacatatagggtaaatactattctggacttgtattttataaaagctaccgattgaattatctgttttgttaaataacaaattggacttaatatttttcaaaataatataaaatagtgtcgtgaactgattttttgtcaaaataaaagttaataataatatgatttagagttgtctttaagttgattatattaaaaaaaaaaaaattaagctcaagatattattttataccattttgaaaaatataaaaaatccaacttatcattttacaaaataaaaagtttaatcgataatttttacaaaacttaatataaaaaataatattaaccctaaaatataatttggagacaaaatatctttcaattgtaataattagggatgaccaagaagaagaacatagtaaagaattacttgatttaaacgtttttttttctttaaaatggaaatttataaaacgtttttgttgtgttataaagatagaaagaagtgttatgctcaagtatttaattaaaaaacgtcgtcgtttcatactttctaaagtcaaaggtggctgcttttattttaactaagagttttttagaccaacatttacatctacactacatcattatttgccacgtcatcaccaccaacaaatatgagaacaattttttatttttttttctaataaataaaaaggttcataaaatgcctaagggatattcttttatgcaaatttacaattacaggtggaaatgaggtgggcctcatattattttattttaaaaaaataataaaaaattgttgcatgagaatggtattccattttggtatttttagatattattatatattatataataataaatataaattaattatttatttatgaatcatatgacaagaattgtctacctcttaggttgtgacacctaattccaaaaatataaataaatattactaattgttttaatatcattttttttaagatagggttattaattatgagaatcaaaccacttgtttttcataaactatgtgtaattaaaaataaattgtccactttaaaattatgtctaatttttacaattaacccaaaatgtcaatatcaaaagaaatataaataatggggtagatagaaagtagaaaactcacatcattattaatgttaattgttctatccaaattccaaattcactttttttaattacataaaaaaaaatacatttcataaattatcatattgtctattcttttgcttggactttttcttttcaagtaaaatatattatagaatttttttttaaacaaaataacaaaagcatctcacaacaaaaataataaggttgataccaaccatgttaaaaataaataaaaaataattataaaaaatcacaacaatcaaacaaaaaaatcaaatataaaagaagaagaagttgagtttataaactagtagtatttgaccttggagctagggtaaatctcattttattattcaaaaatattggtagttattaaatatatttaattataaatattaattttaaaaatattgaaaatcattaaattttaattcaatgatgatgaataataataaaaatttaatttatatgtttaattttgttatttaattaaaaaatacattttctttttacgttatattaaaaatatatttatatacaaaatatttaaataattttttttttgtcgaaaaacttctttttctttattttttctgataatagctattcatgtgtaataaagtacatatatatagtactagttcttttatttgatatttttgttattttgcatcttatttaactagggaaatttcaatttttgaccctaataatacaacctatatcaaaatatataccccctttataatttgtacaaatttagtccattaattacatgaacttcccattttacccttttttttttacaaaaaaaaaaaaagactaaatactgaaagtgtatttctctctctctctcttccctcttccctct

SEQ ID NO: 306230 - DNA, 2990 bp, Cannabis indica
aaaaaccctgcaaccgctttcaaactggtactacaaagaaaccatgcttatcctacacgcatgcgcaccctttgttcaagcatccgggcttcccttcctcctaaactcccgccactcccactgctttgcctcattccctaccattaaactccgactccgtacctatgctcagttcaaggcttctccgttcgcccccaaagtgagccacaacttgcagggagtgattgccggagatgaaggcccatacaacgatgcagatgatgtcgaagacgaagacggattctcgactcgtcgtgggttccgagggagaggggaagagagggattacgatagagaccctgaattcgctgaaatattggggagttgtctcgataatccagaaaaggctcagtctaaagtaaactttgagctttgttaatttcattataacccatattttatgaagttttgctttattcgcaaagttttacatcattacctgttgttgttaactgaatttgtagatggaagagaggttaaggaggaaaaggaataagattttgcatacaaagactggttcagccacacccatgaaagtaacatttaacaagtaagtgtttttatattatggttcagcaaattattcgtgatgttttaagatttttgtaaaaaatcattttgacttggatttgattggattggaattgcagtattaatgttgatcactgttctgtttttgtattcttatgaaaactacaggtttaatttctcgaactcatatatatggttcgaattttacaatgctcccttggagaaagatgtatcgttactttgtgatgtaagttagttactcttaaacgtagctttacatctcttgaaagtattgttaagtaaccaaattattttgatgggttatagtccattagagcttggcacatcgttggacgcctgggcggatgcaattccatgaatatgcaagtaatgtttctctttaatcatttttgcggcttgtgcaaaacatctcattctcataacaacaggccataataagtaaatactatatgtgttactctataagagttcttgttgtttgacagctccaatgaaaatttctgtatcatattgattcagaaaattgaacaccactcttgcagttgtctcaatctcctttggagaaaagaccaagttatgatgctattcagggtgcaaatgtgacaccaactacattttataacattggcgatcttgagattcaacagaacctggcacgtatctggtacgaagcatggactttactaaatattacaattattaagtcctttttatagcatattccttagttctttgaaattttcgacagggtggatattggtaccggcgagtccctgattctggatttgttgataaatgcattgactcagataagctcggagtaagcatctctatctctaactttggcaaccttttcttgcagtatctgacatcagttcactatgtttgtacacaaagataatgtgtttctacaatagacatgaccacagtctagtgctcatcttttagggttcaatctattttgcaataaaatcagcattttatgatttatttgatatttcattctgtgttgaccgtaacttaaaccaaagttaaaaatgtccttattcatcccattatttctttctcatgcacagctttgttggaatcaagcaagttgtatttggcggatctgaattcgagaattggaaggaaaatatgacatcagaggatgcagggttctctgtccacaaaatttagccaaactagctgaggattgtggtctcttagtctctaacagggcaattctattttccctgtgttcgatgtggattaagccttgtgaaaacaattgaagcttaaaaagtccatttttggtgcagagaatagtttgtggatgatgcttgaataatctgcgagaaagctacttctctaattatttattcataaatttttaatagggactagatgcactcgtttagatgatgggagaagagtaaaggttgtaactataatgtttgatcggttaaatagcaaggtaaaggacttttagtgttacaaatgagaacctattctgcagttctgtgatcaaatgcgtacttagcatacactacattgaataattttttcactcatttttagtcaatcattatgtacgtacattttcacaatttttaacactcatcagccaatcattatgtacttacattttcaatcatagttgtcatagtatttgcttaaccaaagaacaatgtgtgaatgaggttcagttcaattcgagtcatgtccaatggatgagctaaaagatactaaatctgtgagtcttagcaaaataaataaactgactctcttctgtatgttgtccattgcaagatacaaaggattaataaaaaaaattctttttctgaaggcaaatctgatgtagtatgaaattcaatacatcgaaaaatagttgcatgatgcaaattgattgaatgcaacaagactaatgaagcaaggaaaggctagattaaaacaacaaaacaaaacaaattttcttaaaattattattatatatatttcactactgaaagatctaaaaaccatcaattgcgttctgaatcccaaattaattatactgctaaacaaattaatgaattgaaaacatatataagtgagaaagattgagcacatgaaatgaaatggcatatcaagagctacagatactcaaattgatcaagaccttttagtccttacatataaatattaccaacctaagaaaaaataaactcaatgatttacaaagtcgcctatggaataccaattcccaaagatgcatttcaaacacagggcctaccattgcggctttgacacattgtcagtaagtagtactcatacacaatgggaagacactttctccgctactaacttgatctctttcattctctcatcaactaatttctggagctgctcttcctgatttgcttgactttcatctgtaa

SEQ ID NO: 306231 - DNA, 3118 bp, Cannabis indica
tatcagaaatgtgagattttcactatttcgattaaaacgatcgttagtgcaagaaatctaatttttctctcaacgtgtcctgtattgttttaattaagccccttagaataaatatttaccaagtgttagtttgtgacagttgcaatgatgaccaacaaattttctaatacttttgtttccagggatctgattttcctcgtttattctggggagcttttactccaaatacggtatgctgatgctattgatccttttccttttctattgttctatgtgtaaggactgttgagtactcatatttgatcatctctgagattaatatttgatcagaaaaagagaagatacgtttaggaggtttgatatttgctagtttagccttttggtgttattttagttgtagtagacggacagttctgccttttggttttttaattttgggtgctggagaaaaaaataattttcttttgtaagtcttatagtttgtcctttgacatttagaatgatgcgtttttttttttaattaaaaagaaatagacggttttagaaccactttttgctcaaaaatattcagcagaaaattttgtaatctcccataaattttgagtggcgtcaaaactacgatgcaatgtggtcacacaaaacttttttccggttttagagaaattaggttaattctattgtgctttctttatataataagatcacattgtacaactataaatttttttggagcaatgatgatactgcaaggcacatcggtccggtgcagttagatttatatgatctacttctcatttattctcatattaaggactattatgttctttcacaggtcatccgtcaagtttcttgtggagcagcccacgtggtggctttatcggaagatggcctcttgcaagcttggggtatttgctaattttgtttctttggttgtctttatttataatgacctgtcaaatagaattgtgctgtcagtttggttgagtaattatttggtttacttcttcgtgcttgttcaatttttatgtttgtattttttccatggttttctttgtttactttgtaatagatatactacactaacttggaaaagaataatgtagttgttaacgacttatctcttgccataataataagaatttaattaatgttctgaataaaccaggctacaatgaatatggtcaacttggcagaggggttacatgcgaaggtttgcaaggggctcgtgtaataagtgcttatgctaggttccttgatgaagcccctgaacttgtgaagattacccaagtgtcatgtggagagtaccacacagcagctatatctcaaaatggcgaggtgtaagtgatttgaaggactttgtagttggagactaagttcttcttagtttaggcatgacatgagaatgtggttaaccacatggcatatttcttggaagatttggaaaaatcttttatgggaatctcacatctaaataaagagaggatgtcgaggaaattggatgcatttcaatatgcaagtatttcttggctagtgtgctgtttgtgctgatgcattatagattatactattctatgagctttttttttggtactcttgctattagattgcaccttgctctatgactttccgcaagtaactgaatattaacataaggatttgatttgatttaagttttttttttgttagtaattagctttctagtatatatatgtaacaccaattgatagccctgtttcttctgcaggtcacattgtttatttaataatttcctactctaaggaattcataatgttaatgtttttctttggacctgtaggtatacttggggtttgggacacatgggtcaactcgggcattgctcccttcagacaggggagaaagagttaataccaaggagagtggttgcacttgatgggatattgattaaagatgttgcatgtggtggtgttcatacatgtgctgtgactgaaaagggagctctttatgcatggggtggtggtcaagtggggcaattaggccttgggccccaatccggattcttttcatgctcaatgaatgacaccgagtcatatctgcgaaacattcctgctttggttgttcccaaaggtgtgcagcttgtggcatgtggacactcgcacacgctcatctccactaaggatggaagaatacacggatggggctacaatagctatggtcaggcagccaatgagaaatctacctatgcttggtttccatcaccagttgattggtatggcaaaattatatcgttcattagctttatccttaacactgctttttcgttttctatgttcatggagctccctttgcaggtgtgttggcgaggtgcgaaaactggcagctggtggtggccattctgccgtgttaaccgacgcctgttccttaaaggagctctgcgaatttagactggcggatagtctgaatctaagaaacattttcgaggttgaggatgttgcatccagaactggatcggatgctttagcacgcctttgtgaaagattaaggtattgaattctgtaatgcgtcgtgaccgttaccgtaagcatttttacattcccttgctgatctgcagtttcttatatttgtctcagggttgacggtggatatggagatgatgatgagaagtgatcttcaatcattttgtcaagacagaactcatgtctccctccattactaataacgataataaagaattaaaaaaactgtaaattacattattaacttgaacctcttgtaactttacgagtcccaagcagactaacaataaataaaattcattcagtaggttgatggagaaatgtgcaaacattatttaatatcggtttgactgcatcacatagtaatgtctttgctgacctcatgtatgttgtctttgctgacctcatgtatatgtctctgcttttttgaaacctagtgttttgagacttagagcaaatagtaggaaagtccactaagctgtttgcttgaagattatatatgctttaaatgcattgtgagggtcttttcagtatcaaagtagactctaattttttaacatttaatgtgtaaccaattcatataaataaataaaatttcatgtatggataagttataaaaaaaa

SEQ ID NO: 306232 - DNA, 2451 bp, Cannabis indica
  modified_base (28)..(28): a, c, t, g, unknown or other
ctagttttagatggggtcttctccgtanacaatattttctaccaataaaacaatatcttatatatgaatacgaagaagataataaactttatcaattttatggattctgacaactgagcatcaaggtcattaaatttaattcagaaaaatgtactgatagggtctaaaccagtgatccattatccatctcagttaaaaaaaatatataaataaaaaatacacattctagtcccttcaattaaatgtccttttaaaattgtaatcaagtctcttcaattttaaaacaaccaataacgtgaatatttctaacattccaacttcttccactagtatcctcacagcaagcatttctcttgatgaattaaatcagcttacctaccaaactccaagtaattaataaagataaaatctcttattatatgattattatgtaccaaatttaattaaagatgaaataattaaactaaggcaactttaaataatacacgtagcacctattatacagtaaaaaacataacaattagtaaataatgtgctcagtcttatctctcatgtgtgtgtgtttcagtagagtttaaattggtctaaaacgtggtttacaagtaatctccactctatgaaatgaaacttacatataattccattcatattttttttgtgtatatatattttatatatgaaagcaacataacttaaagggggtgatgtgtttcaatttttcaccatataatctccaaaatacttgctactcaatgaaaaatcaatatgtgtcagccaaaattattaatattactatttactgtacgagtataaaacagatatgttttacagtaaatctagtgttgaaatgctaccaaattgtcataagtagaacctggatgagtttgaattaccaggaggaggggtaataggtaagtgtaactatagaatacagttgtgtgttttgattgtgatataattaccagcagtccttttgtacaactggataattactgttttcatgtgcatatgcagcattgtctccacgtgtcaaccatccatgggttggagctgatcatgaaataaatacaatctgaccacctcttcaattctttcatctgcttctctcctctacacgaccctttgttttattttgatttgctttacaaattttggtacagtcttctctctacttaaggagaggttctaaactaaattactaaagagttccaaccccacattagattctctttcttagccccccaaaacaatcataataatagcaacaaaaaaaccattcaaatcaatacttgcactcaatctagaaatattgactctgaaagggctatgtataattgtatatatatgcttccttgattgaaatataattggccccaatagtgtcaattctggactaaaaagcaaaagggtatcctaaatggaagaaagtgacattagatttaataatctgagattattttcagacataaacataaactgagatgatgaagacaacaacaaggatacacttcttaaaagtcttcttgctttggagttatttgaggagcaagaccaaattactttctgagtactaagaaatgttttctcaatggaaacaaacttggagactatagcacttttcacacaaaacttttattacctcgaaaagaaaatttccaagaaataatgtgttgttaggcttggctatagcctctgcctttttaacaaagtcaaacaattatatttctacctgaaaattttatattatatagttccatatctctcactagtgcatatctgacatgatccttatgatgataagaatatatataccaccatatctgtttggtaatgtatataaaacaatattttatgaagaatatacatctgcatataacataatatcacttgtaaagcctaaaataatatagcattgtacaagttggaatgtggtggttctaccaaaaccccatgagtgtattaatgtttgacagcttgtatatatagatatatatataattttaatatttaagatgtagttattattttccttcatgacatttaaatggagttaatttggattaacttttctgtaagaaattaagatcataataacaagtgatcagagtaatttaccacattcataatacatgttgtacaagtcagaaattgaaagattacattgatcatgtggtgctggtttggagccataacagagataaataattgggtgggaatcattaatttctttgttgtaagcaaatttcactacttaaaaaagggttattggggttggtagtttggagcctgaaggtgcatggggtgggttgtgattttatttatttttttcttctaatttgattataaaaatggatcattaaagtttataacttgctttgtcttttttagaatctaacgagatcacatgtacaagaagataataactcaactcaaaaatatttttttattatt

SEQ ID NO: 306233 - DNA, 4132 bp, Cannabis indica
tttttatttgtttattattatatattttaattttaatttaatattatattatttttattttaaaaataagttttctttttctaaaaggaaataaataaaatagtctagtctattcttaaaccaaatacaagattacttttaacataatccaatcttgtccagtctagtccaatatcctttttagtccaatccagtctaatcttatgtaccaaacagtcccttaaagtattttctctaatggggaaggagagaatacaagaaccctagtattttttgaagaccactacttatttataggctctttatagaatgagttttgagtatttataatttgatcccttaacaaattataaattaatttatggtatctatatactatttcatgataatttaatattttttgatacccacaacataattggtcacttaaattttgtatcactttataatagtatatacattatatatatatatgcctacaataaaattttaatccaacataaagtgattcaagtgaaggataaaatggctaattacatctccaaaacacagtaaatgaacgtttattttatgaggaacaaaagtggtatgttacttccatttggaaaagatattttgaattaaaacggttacaacaatcacaaattatcgagacttctttatgagaaaatttataattatcctaagttattttcatgactattatttttttttaaaaaaaaagcaaaattttaattcttattttttttttaactatgtataataatttttctttgaatggaaaataataattttattactgtttttgggtatattgtacttctttaatatttatatttaaaccattaataagaggaaaattgttaaatgttcttgattagtatttttttatggaaaaaaaactatcaatattgattagtagttagtttagtagtgagtgtacatcttgctatatatgcttacatttattgcttggttgacttcatttgaatctaaattatttatttactaattccaatataggcaaaatcaacaaaaaaaacaagaagatatcacttgaataaaataagagtagtgttggtcaaaacatttcatgtgaggttggtatctttccatcttagttagcagtgcattgatcaacaattttgaccataataaccactacttacaatagactaataacacctattagttatttatctaagtaattaattaagaacaagagcagattaattaaattattcaactcattaaaaagagttacaactaatacccataatcatcgcctcaaatatcaggcaagagagagggtaggaccaatttccactcaaaattccctaataaatctaaatctgtataatgtattttaataaataggggcctttagtagaataccaaaagtcaataacctccatatttgattccttttaacattatttccaatggagtaatattttataattgttaaaagagtattgctattaagtattagtggtgcttagatcttctcgatatgtcgcattgcgattagttaataatacttcctaaaagctattatattaaactatatgagatctgatacttaattgaaccaataacgatagtaatacatacgagagtgctaggcaccatttatactctttatcatttctcattgttaaaatacacacattattttaaaatataattttttttattttctctttcatcacattgtctttttttttttttaaaaaaaaaaaataaacaaaatactttaatgattgataactctaaaaattatccatcataatctcacatcacattgaattaataattttttaagtaaaaaaaacaatttatttctaataaaaattaaaaatgaaaaaaaaaattaattatgtatctgttatatatattgagtaacatttcacacaaatttacttttaaaaattaaaccacagcatatatatcaagaccaatcggttagagatgctctactatacttttgaagatgttgcctattcatttcaataattttattttttttatagattttatattaagtaatgtcataatacaaaggattttttacgttagatgtgaagagtgcatgataacataaatataaataatacatagatctaaataaaatttagtagtttttattgttactcctaaaataaagaattattcaattatgtatatatatatatatatatatgggattatgatatatttaccttgatgtcgaccactaaggaaacccttttgggtcatattttatgtccatctgtaaagcacttggatgccactgagaagaatccttgatggtgctttttaggggtttaagtaattatacatcttaatatatatatatatgatatatatgatatatataaaatatatggatgagtatttaatagtcgttagactataattttaattattagattattattgaatagttgaaattaatgattgcattttgactaaaagttgaattacaacaatgactgctagagtggcttctgctgtaataacaccacatcaaagattgatagggttctttggagagcacctataatctaaatggactgaaactgaatgtggatgttgcgctgaacatgaacaccttagtcttaggaattggagcagtaataagagatcataatggacatgatgttgctgtcttatccaaaccagttcaaatttgttttagatcgatcggacgagatggagagaaaagctcttttttatagcatatccaactacaaattcctatcacacacattatgctttaagagtctcaaatatgttatcaacaacatctttagatttatattctttttttagatttaatctgagatgttcgttatcttttatcctttcatcctagaattattgtttcacatgttaaaagatatactaatcaagttgtacatgttttaataaaatatatatactctagcgttagatgaaaatatttattggataggtgaaattctttatcttattttctttattgttgtaaatgatttctaatttatattaataataaaaaatttctccaaaaaaactaaaaatatttaacatattacttgtaacttgatgtcaactttatcacatttcatatactaattatatattttgttttcttataaaatactaattaagataattttatttaaaaaaataaatttaataattattaactaacttttgcaattagttattaaataaaaatatttagcaattaatttctttttcaaaacttcttaataatttaaaattattagacatatgccatagctaaaaaattgtagactataatcctttacattaatatttttttaaatatacctatttggctaagtaattgcatatgttgatatattattgggccgccaattagtttattttttatttgaaaagtattttaaaataaatttaataaattaagaaaataaaaatataaatttgaatttttttttttacagtagtcttagttaatctatcttaacgtagttataaaccatattaattttttttaaaagaaaattatataaagaagagactaaaatggcatctcccaaataaacgtttacgattagtttgtttttaacttcatatgactttattcaaattttaatgagatgtctataaattactttagagtatgcaatgtttaaatcaaatttactctcttttttcttttctttttctatatgactatatgctaaaatatcttgaaccgtccagtttcgagaaatattaaaaaagttatatatggccaaaatattatcagtcgtcatattaggaagctcgctgccaaaaattgtgcttcaagcgtttcgacattacttggtagtgtcgtggcccgcctatattaaatgacaaaaattagggttttaaccctactagaaggttatataatagacccttttgacacattaaaatcctaatttgtaaagggtgtgaaagttgaaattttgtattttaatattaccagtttattatttaattaaatacgaaataatgaaactgatactgaaaaagtttttctgtagctacagaagacaactctgtaactccagaagaaaccagaaaaacaaacagtgcagaaaagtaaaaacacacaagatttttgtac

SEQ ID NO: 306234 - DNA, 1643 bp, Cannabis indica
gcaaagtgaagaaccttgggagggactttagctttccatagagccctccataattcagactccaagttaaggctccatttatctttcaactcttggagatagtagtaagaactcttgaccgagttaaatttggtcttctaaaattgaattgggtgaattttcttagacttatttaggtattgatcaacctccgaaatttatcgcttcactacactatatataaattagtatatctttatagttatagtatcatgaatagtaaatagtgttgcacattctctccatggtattggatcccgctcttaatggaacgaaaaattgtataatggggaaagggtggggatgagaattaatttttattcccgaatattaaataaagtggggataagaataacactctcggactccacaagaacccatttaatagtttaagtacttttttttaataatattttatactttttattatatttatgtatttttctagtagtatattagtaatttttacaaaattttaaattgtatttttaaaaataattagtttatttaataataaataatatgtaatattttaatttttatgtaatttatttttttatataattaaatttttgtataaactttagtttcacataaatgggtccttgtagggatttttgcttcatacccgataaggaataaggcaggatgaggattaaaatttttaacgggaatgagtactgaaggagcattctctataaattctcggtcctgtgtgcatccctaattatgaattcaaattttattaataaaagtttataattatgagttgactctcaatttatgtgattaaaaaaattatttgaaaacaataaatgagtaaatttaaaaaaatttacctcaaatacttgaaacttcttggattaagagacattggatgatagtgactgattatgagagtaaagagtaccataaattttgcaaagagtgtagcagtgaggttgaagataactttaggatttagaacaacgagtttggtggagtgagaatagaacgataaaacttttagagttgtttgaataaaagatatattgactcttattaagtttagttttatggataataataataatagtaataatgataaaaataatatgataaattattaaataaattaatatttaactttaaaatttaaattgtaagctttccatcctttatttttgacctagaatttttttgaattatcatataactatttttacaaaatttatatatagatctttgaattatttttctaacactactagaatcacctcaatcagagttttacaactctagatttgatcattttactaaaacagtttctaaacatgtgaatttgtcgaaacctacaaaattattaaccttaattctataatattttttttatttaaaaccaccaatgcaaatcattaagcccatcaaatagtttctacaactctaatagccttttatatttgacttaactaaaaatattttttaactcgtaagaatatcacaaattttcatcttggagaataatacaacattccttatcttaggagatatagtcattaaactctaattattatctctattcaatatccctagaaataaataagacaattatttttatacaatta

SEQ ID NO: 306235 - DNA, 1146 bp, Cannabis indica
cagtatagtctcaaagtataatttgtaaaaatttatcatgtcctgactattatctatcaagtggaaccaataaataaaataacttaaaaaatagtaaataaaaaggaaaaaaaaaaaaaaaaaaaaaaaagaaaaaaaatttaacaagtaattatatatatgattactagctattttataataaatatagtagtaattgatttaatttatatatattagatgttctccattggttatagaaagaagattagtgtccactcccttgagagtgattatcttaaagctaattaagcattagcctaataattctgtaaatgatgtaattatcgttagaaatatccaaaaaaaacattttgtctatttggtaaattttttagttcacgtcaatttatgtcccacaattaattgtattttttttagagagaaaaaaatacttgttattattatgtcctgtataatttagagaataatgctcaatttattggcaaaacttagtgtataagatgatttttctcataatttattgttaggttatatttgtattacttaataaattgacgagaatatttctagaatatatttcttttgaataaaaatttgtttgtgtttaacaactccacaattttacattccttattatttaattatacaaactaataaaacaaacaaaatcattttttttaattggatttggtttcattcttattcatattgtaaaaatgaattatgttgttaattatgatatttttaacatatggtcgtcagtcaacaaaaatcacactgactgagcatttggtcaaacactctcaatcataaaatattttgtaatatgaacatataatactattaaggaagggaattaatcattattttagtgttaaccaccaactatgaatacatatatttatttatttactactcgaaatcttgaaaaaattaattatcaacttatataaaaagcattccaatttgatcatccataaatattttaaactgatcatagtcaatattgtctctgacttcatgatcttgattttctaaatcaattctcacaaacaaattatgaaatagtgactaaataaattgggaagccttatatttttatttggaattgatatatatatataggtgcactcttaatgggta

SEQ ID NO: 306236 - DNA, 1193 bp, Cannabis indica
tggataataatttgacatttaacagacagataccaacagaagttcgaaaatataacttagctattatataaccatttaaaattatctgtacccgataactaaatttagatatttatgcgacaaaaaattaaattaaagtctaatataaaatattatacaaaaacaattcctttatctattttacattagtattttatatttgtaattgctaattgtaatcttgaattaaactataaaagtatatgatattatatatttaaatcaactaaataaaaaggtgacaatacatatctaacaacaataaaaaaaaattactatacaaatattggttaaaaaaataatataatagagtcgtataatttagaaaactcaacgttttgaatttaaattagaattccattatttactctcctattaaaataatttaattaaaatattataaattaattactatcaaaattccataattcaacagatatattttagtattgatgtcgctccataattatatagtggctacaatagtaaattgattttgtcctatccatacaaaaattacaattaaaattaaatatttaagatgtacaatagaaactaatggcaattagaagaattaaaattaataaaattattaataaaaatggaatatcaaataaacagctcggtaaaatagagatgtaattatgtaaattgtattcttaaattaatattaattcaaaacacaattgaatttttctatgccattaattttaactagaagatacatatgataaaagagccttaattaatttatgttgaataaaataactgtaatttctagatgtagaagatgcattctagattaaaagtttttcatttttggtttcatggagtttcacattattaatgatcaactctatctccttatattatattattgagaatctttttataggaattttttatccttgtttttttttgggtgaagatacatctaattgaccccctcactttattatgtatgcatgtgtcgaccttgtttttggtcaacatgcggagtgtaaaacaacgattaaagtactggataaataataataactgagagaaaaaaataaatgacacagagatttataaaaatttggactagatatatattattaaagtaactaaggttactttaaaaaaataaacttttttactaaaaaaaagaaata

SEQ ID NO: 306237 - DNA, 1499 bp, Cannabis indica
ataatataataccgaaaaaaatattgagcattaataataatttttaacaattctccaatttaaattcatcttataaatcatgccaattttcattgaattcgaggtgaggtagatataatacctttgactttttctttcttattttatttcatttttaacaaattttggaaaagagatgatgataatatgttctttataaaaattaaaggcctttacaactggcctcttcaagaagatgttgaccaatgtctactttaatcactaaaacacaaacaaaatagtgatctttttctatagttgttatattgattacaaaggtggatggatgatatcatgatattgtgttatgtatatttttgttagatttttacagctatcctatttctgtccaaatatgctacattttctcattgaatatatcattcttctttacatgccattttaattaaatttcaatgtcatattagtattgatattagggataattttataatacacaaaaattataaaaatacgattgtacgaaattttaaatatttttgatgatttttataattttatttacagaaatacagtattttgatatattttttatattagttgttttgatgttatttttatgtaattttataaaatatcataaaaatatataaaaagaaactttaaaaataaaaatgtaaaaattttactaaaaataacaatttatataattttccctattattacacaattttgagcctaatcaaacaaaacattgagtggaactaattagttcttggacttgcacaatttggcattgggatctgtctagtacatttttcaaagcttaaaattaggaaatttcaaaggcacttttattaaatctaagtgtaataaattacatttttatttattacaaatttatggttgcaaatttatttatttttatttattaaaaatcatgtcttatttacttcccaattggcaataaatacatggataagaaatatgacataagttttttttttttggtatttattttggacagtttggtgttttacacatattgtagtcccatcacttattaaattataaaatcatttcacatggtcattcatcccattcttaagatctcacccacttgcctctatagctttcattactattctctttaatttcatacttacttattatgtaaaaataaaatactatttttatataataattagttttaaaattttgataattgaaaaacaatattaaaaaatatttcgatatactaggagagtcacctatataacacatttgaaattatgttggtattcattagacacaatatataaatatatatatatatatattttcaaatgatcctatttagttcaatgtacacaatgagaaatgcatttatttttatttatttttttaagtatttttcattgagatttatacatacacttacatttttctagctcataaaataataataaacaaataaataaaactctataacttgtttg

SEQ ID NO: 306238 - DNA, 2072 bp, Cannabis indica
atatagtatgtgtgtgtaatatagtgcatttaaaaaaaaaactaaagtagtagtggtatcagtgtgtgagtatcaaagttaataatagtgattgattttcacattagaattgttggtagaagtagtatggtaactataaactacatgttagtgatgtgttttggttaattcatgttctaaggttatcaacttatcacaatataatttatatatgtatgaaaacgtaaaatatatatttgtatatattttgtgaatgtaaattaaatatatttgatgtatgaaagttgtctcaaatttagaacatctttcaagaaatgggttaggtttggattatataaagttaaaatgtgtccaacccataattatatatctattactttttaacccaaggagccataacctactcttaacataatcctttactaccaaaaatagtttaaattggcggaatttgatggtttgactcatattttatacacccctaatgtgtagattggtccaaaatactgattttgtaattgtaacttaataatattattgatgcattttaaaaaaatttagtaactaatcgcaataaccaatagcaatgctatcagagaaaagaaaaacaattattagtttttttttctgttgctgatatgcagaagaagtattggttaaacttacatataaataagaaaaaacaaaaagatgaattaataaagttacaatataaaaataaacttgtttatcaaatttattatttgtgatcagtcgttgctgtagaataacaatatataaatacttatttggcaggagcataagaaaaaggtaagaatccaagtggttgattctgaaggagagcccttagcaaacacaacaatcagcgttcaactaaagagagcatcattcccatttggctcagccataaactataacatactcagcaacacagcctaccaaaactggctcacatcaagacccttcacagtcacaacattcgaaaacgaaatgaaatggtacactacagaaaagactcaaggcaaccttgactactcagccagcgacgcattgcttcaattcaccaaacgacaccgtatcgatgttagggcccacaacgtgttctgggacgatcccaattaccaacccaactggctcaactcactgagtcgaaaccaactcgctctcgccacttatagaaggcttcgctctattatgatgagatacaaaggccaagtcatagcgtgggatgtggtcaacgagaatttgcactttgactattttgaaagacgggttagtagaaatgcttcgggtattttttatagatggggtaatgaagctgaccaaacgacgccgttgtttatgaatgagtttaatacgattgagagtagtggtgatacgacgtcgtctccttggagatatatcaagaaactgagacagataaaaaagtttagtagtaatattaatatagtaagattgggaattgggggttgaaggccatttctctagcgaataaacctaatattccttacatgagagcagccattgatactctcgccgctgctagattgcctatttggattactgaattggatgttcaatccactcccaatcaggtaataatactaataataataataataataatatacattttcacacataataggattttttaaaaattatgatcatagcctacacactcaatctaatacaaattaatattatttataatttcatatattcaaattaatctagaaataaaattaaggtggggcggttacatttttttatatccaagaaatttaaattttaataagaattaatcaattgtaattaattatattaaagtaacttttatgaaatgaaattttataggggtaagttgaaaaatgcctcttttattaatcaattaatcaaatttgcctctaattttatatttatttgaaacatacatctttttatatttattgtacctaaaataccctcacataagagagtcacatggagagtatcttgaagtgacatgggcaaaattggtacaatgtttaaaaaaaagtaaaaatgatagactttaaaaaagagggtaaaaa

SEQ ID NO: 306239 - DNA, 732 bp, Cannabis indica
ctgtaaattgcttctggcggagattaaataaaatcttgcaatttgtttaaacagaactaccttataagaaattaaggtcttatatttgtcaagcttgaaatgtagtcttattgtggttttctttatcagccgattcagcactccaggtgtataattatgaacattattttgagataagaagtcttaggttgctatgaatattgagttcactgttccttttgttgcagattcttgtcattttatgtcatgatctcttcaaatatttttccatatcaaaatccaatttgctttctgcagatttgaaatatttccaaatctcagtgtatattgtataattgtctctatcttgattgtatagatagttttatagtgtcaagttgttcatagtttctcacagtcctcattaattaagttttgttaagtaaatattcaatttttcaatttgttgtccaaattttttaactgactttattttttataatgcttgatttccatcatgcaattttcaaatggcaagacatgcacatcctagtagttccttaaagttcatttgtttttttagacaataatcatccaccttttattatacaataataaagactgaagtatcatgtgcttttttcttctctatgaaacatgaaattgattgatgacatattaagtttttaggataatagtgtcaatttatcatcatggaaaaaacaaaataaagtaggagtgatacctttgagt

SEQ ID NO: 306240 - DNA, 1056 bp, Cannabis indica
atcaaattaattaatataattaatacaccttctaattctaatttttaaatataaatatataataacagtcagctagtgcccttttcgaaagactattcagtagcacaaccatggccttttcgaacgtagtcggaccacttgaggaaattggtttctatggtcatccaatggcttacctggcagcaaattcttacggccaagcaaatgtaagcattaatattattaattacacttacaaaaagacagtacgtactattattgagtcaaacatataaaagctaagtgatattatatttggctttctaataaaggtgttacatatataagaaagaaagtaattattatttatttatatgtaatttaaaaactaaatcgaaaaaaattggggaccattgccaacccgagctagtcctctacctatacttattattagctatgttgaagtatagtgatcgacatcttctataaatgttattcatggattaaaatataaaatatcaaagagtgtaatatttgaaaggaaatttataagtaaaaaaatacatactcttaatttacaataataatcctctataaaataatatttttttaggtaaatattattttaaactatatgtattttgtaaaatttactgtttagatcttttgttttaataaatgagaaattagattatgtatttcttaaataatagggtaaatactattttggaccttgtgttttataaaggttaccaattaaaccctttattttgttaaatgacaaaattgaccatgtatttttcaaaatagtaaaaatatgaccctaaatttaatttttgataatttttttttaatataatcaacttgaaaacaattcctgacacgaatagattcagaaaatataaacagctttgtcataaaacctttaattagatcggattattattaaattttattttgataaaaaatcaattcagggtcctatttgtacaattttggaaaatacatagtctattttgtcatttaataaaattgaggatcccattagtaacttttgcaaaacacagaatccaaaat

SEQ ID NO: 306241 - DNA, 1831 bp, Cannabis indica
gtggttgcagcgctagttgcaataggggtttctatacgatttttttgttgcaatttaagttgcagcgctagttgcaataggggtttctatgtagaattttgtaaaaatacaaaaaaaactgttttgaagtgtaaaaataaaaaagaccctaaaaaaattgtaaatatatttaatccctttttataatttttttgttgtttttgtgtatttgtgaaataatctttttttttgtcaaatttatgaaaaacaaattacattatatactcattttactttatttgttttaatttttatctttattttcatattctttaaaatttacccacttttataaatgatattcccatctcaattaaataatgtaaattagtactagagttaagtggagtgtgaggatatattaggcaacacactaaaaaaaaataggtatatatagataaaaaaaagagtattcaacttatcccgctaaagtccaccctcaattgtctcttgttttagttattttagttaatttttacgtcaaaaattactaccaagtgactctttaaaaatgcataggttctttgttaaaaaatgcactcacaactcattatatcaaccgtattcataagtgaaggcatcgggttatttttaaaagtaaaattaaagcgaaaaattcgactaccaggtaatttttctaaaataacaaggttttttgttcaaaaatgcactaacaactcaacagaatctaccttactcataagtgttggtatcaggttatttttagaagaaaaataaaagtctaaattaccactactaggattttgttttttgtttttaaatattagggttctttattcaaaaatgcacttaaaactcaacactctcaccaatatatataagtagaggcaccatgctactttcaaaagtaaagtaaaagcctaaaattcgattactaggtgacttttcaaaaataacaagaattttttcaaaaattcacccatagctcaacaaactctacttattcatgattgcatgtacgaggttacttttagaagcaaaataaaattctaaaatttaactactagatgattttttaaaaaatatgagggttctttgttcaaaaatacacttaaagcttaacacactctaccatattcataagtgtaagtaccaagttacttttccataaatcttaaaataagactaccaggtgacttctaaaaaaaatcagggttttttgttaaaaaatacactcaaactcaacactctcaaccatattcataatggtatttaccatattactttcaaaagcaaaataaaagtctataatttcactaccaggagactttaataaaaatattagggttctttttttttaaaatacactcaaagctcaacacagcataccttattcacaagtgcaagcattaggttactttcagaagtaaaacgaaagcctaaaattgaactaacatgtgacttttttaaaatatgagtgttcttcatttaaactttcagtcacaactcaacactctcagccatattcaaaagtgaaggtaccaagttaattttaaaagcaaaataaaagcctaaaattatactactaggtgactttttggaaatatgatgggttatttattaaagaatacaatcacaactcaactcagtcaatcttattcaaaagtgaaggcactacgtgttagaatttatgccttgaaaaacctgtacaaatattttaattttataagttgaaaaatttgatatatgtttgaatgttgaattatttattaataatttatatataaatataaaaaaaatacttattcatatatgaggttgtgactttgta

SEQ ID NO: 306242 - DNA, 1317 bp, Cannabis indica
atggatggtaaagcatccttgtgtccattttgtatgtgtgtaagttttggagtaagatatacatgagtgcttatcttaccatttttaaaattgaattttttttagggattattttgtgttctttttcatttcattgtataattcgattgtatacatatatataaatatattgcagtagctgattcaaatggtcgagggtacattcagctcagcaggtgagtgatagatagtgagattattattataacgaataagactctaggaggcctatcagattggcatggttggcaaatatgtgcctgtagttaagtcttagtgtataattcgtattgaagggattgtttctcttatagggaaatactgctaaattataacatttatattatcatatggggttttaaacaattttacttttgcaaagttttttctttcgaaaatatggctccaaaggaaaactaccctttacaaaaaaaaaaaaaaaaaaaaaaaaagaaaaaaagatcacccagacagaggcggtctccttcgtggtgcactaacagcaagtgtgaattctccaagtccaaccaacgcaaaatcaccgttgtcagcaatctcaaacaactagcagaaagatctcaacccgaaaatccataaacaaagagcctaaactatagtttttgaatttctaaaccaatgttttatttagaattcaaattaagataaaaaaaaaagtgttaatatagacttgccccccaaatttcaaatctaaatctcaaagaaataaatggagagcctccatgaacgccgatgagagaagaactagcaagagaagaccttcatgactaaatattttgagatttttttttaaacaatttgattttgtttcccgtttttactgtgattattttgtttattaactgttgttgtttgttttcattgattcacatattagttagtggaatttgtttatataattttagtttattttgataattttcaaaaaattggaataaaaaggattacagtgaatttttaggtattataatgaaaatagtaagtgtttaattttaatataaaaatatgttgttttcagtgatgtttgttttacgttgttatctataattttgaaagaaaaataacgtagatataacaacaaatgcaatttttttcataagaataaaaagtaatgaaatcaagagataggtttgataaccataaagtcacaatattttgactcataccatctaatgatcaaattatttattcactagtaagatcaatcttttcataacttgtaaaattaaaaaacataaaaaattgaaaaagttgaaaata

SEQ ID NO: 306243 - DNA, 1946 bp, Cannabis indica
ttttggcatggacagatattggtgtaatgagtggagcagctatattcataaaaaaggacctcaaaatctcagacacacagatcgaaatcctgatgggtattctgaacttatactccctgctgggttcagccgccgctggtagaacctctgactggattggccgccgctacaccatcgtacttgctggagccatattcttcgctggggctctcctcatgggattcgccacaaattactccttcctcatgttcggtcgcttcgtcgctggtgtcggcgtcggttacgctctcatgatcgcacctgtctacacagcagaagtctcccccgcttcttctcgtggtttcctcacctcattccctgaggtattcacaatacctaaaatcaaatattttcatcataatttcaaacctactaatttttcacccaccagttactataactatacaactttttctacactaaaaaataaaacgataccaatatcgtgtttctaacaactttgaaaagtgcaagtattatattaaaatgtaaaaatataaaaaaatctttacactaataattaactttacattatttacaggtctttatcaatgctggaatactacttggctacgtctctaactacgccttctccaagctcccaacccatttggggtggcgccttatgctcggagtcgggtcaatcccctctgtcctattagccgttggagtcttagccatgcctgagtcaccccggtggctcgtgatgcaaggtcggctcggtgaagccaagaaggtccttgacaagacttcggatagcttagatgaggctcagctcagattagcagacattaaagaagccgccgggatccccgaacactgcactgacgacatcgttgaagtcagcaagaaaagtcacggcgagggggtatggaaggagctcctggttcaccccacgccagctgttcgccacatcttgatctcagccattggaatccacttcttccaacaagcctcgggcatagacgctgtcgttttgtacagcccaaggatcttcgagaaggccgggatcaaatcagacgatcaaaagctactggcgaccgtagccgtcggattcgtgaagacgattttcatcttgacggcgactttcttactcgacaagatcggacggcggccgttgcttctcaccagcgtaggaggtatggtgttgtctcttgccacacttggggtgtcgttgaccatcattgaccagtcggatgagaagctgatgtgggccgtggtgctgtcaatcacgatggttttgtcctacgtggcgtttttctctattggaatgggacccatcacgtgggtttacagctctgaaatcttcccgttgaagctacgcgcccaggggtcgagtatgggtgtggcggtgaacagggtgactagtggggtcatttctatgagttttatttctctgtataatgcaatcactattggtgggtccttttttctgttcgctggagtggctactgttgcttggatatttttctatacaatgctaccggaaacacagggtcgaacccttgaggacatggaggtcctttttggtaaattttataagtggagggccgcaaatgcattactcaagaataaagaacagatggaattagtcaacggtgcttctactactactgatgaccacgtacagttagggacaaaagaacaacacaattaaatgatttattagctcatgtgaaaatatagcagtgttgtttagagataaatatatatattagctctggatattaaagaaaaatgagagccaaataatatagaaagcatattaagaaatggtcggcttttgtttgattaagtgagtgcaatatattgagaggtagagactacctacttatattatctttgtagtggtccctaagctagtaaaaagaaggaaattagtgaaaaaaaaaaaaaaaaaacggacg

SEQ ID NO: 306244 - DNA, 1456 bp, Cannabis indica
cataaccatttaatagtaatttaatggctaaaaaaatataactatgatggttacatatttaatgtaaccattgaaacctctccataagtatatttatgggattttagtatttctaaaccatgatcaacattatttcttctaatactagacaaatttacttccataaaaaaaaaattactatacacaatcaaataaaaacacctattataattacatagccaatatttaataatcaaaaagaaaaaatagaaattaaaaaaataaaacaatattatatataaattttattaaaaaattatgtatataagtataatattatacattaaaataataaattttaaaaaatcgtttaaaaaaaattaaaaattacataaaagattgtacatacaaacttcatgaaaaactagccatatcctagatgaacaaaatattttcttcaacaaatatttagcagatatctcatttaatttaataaatatatttatattgttgagttattttcaatattccaatatataggcttacaaattaagataatttatttgagttaatattttaaattaggctaaataagtggtctaattaaatgagtccaataaacatcttattcggtatgagttttgtaacgtgtaatacccaatagtaaacctaattaagatttatagggctcttattagtttgctatataaaaaacataagagtttggtctacaagaataatctcaactatttttctcctccattctcatcaattgaatgagaacacatagagagaatattagtctgtggaagaccatatacccacaatctcatctcatatctaatatcatggaatcagatatgttttctatttattgattcatagagtaatcttaataatctaacattgacatgagtttaagatccatatatattttaaatttaatttcttataagtgatatcacgagtcttggattattagggtaaatcatattgaaagtgattattaaattgatcaatttttgaattcgtattaatttaaaattttgattcatatgtgtgttttattaattatgatatgattatataattgttattatatatatttatgtatacatatttcgataaagttttatacatatttattttgtttattcttttaaattcaattttgatattcatttagtggataatttttatgaattaactttttaatatatatttttttctgtgtgagaaagaaagagtataacatcctatctgctacattagcaaacattttattggggccgaattaaggtattcccccattgagaagttagcctactgcttggtcctagtctctagaaagttaaggccatacttctaagctcaaacaatcaaggtgttaactgaccaaccacataagcaagttctaatgaagccagaagcatcaaggtgcctactcaagtggacagttgaactaggtcagtttgag

SEQ ID NO: 306245 - DNA, 3416 bp, Cannabis indica
ttattggcaacaacgctctcggatcgactggctgaatttaggtgacaggaacatgaaattctttcacgctaaagcatctactcgatggtctaacaataagatcaagattctttataatgacacaggtggtaaaatgcaaacaaaaactaacatggctgctgtcattaatgattatttcaccaccatttttttttttaggctttagttattgatgaatcagctcttgacttcactcttagtaccattcgtacattagttactaccaaaatgaatgctaaccttgtgaaaccctttgaagcgtcagaagtggatttggccttacatacaacagtttctgataagagttccaaaaattgatggcatgtcagcaattgttctatcagcaaaactggtcccaccgttggagacttagtcactaaaagctatattaaaagttctcagccaaggggctgatccttcaagcctgaacaagacactcattactttattctaaaaattaagaagactcaatgtatgaaagacgtttgacccatcagcttatgtaatgtgatttcgaagcttaatactgaagtgcttgtggctcgattcaagcaacttcttacacatgtaatttcagagactcaaaaagcattcttgccgaattgcttaatcacggataatattttggtagcatttgaactggtccataccattaagaataagactcggggacgctttgcattgcgtctctaaagcttgacatgagtaaagcttttgaccgagtcgaatggcattttcttaaagaagttatgcaagaaatgggctttgccaaaaaaatagatctcgctaattatggggtgcttaaccactaatagcttctcttttgttttaaatggagaaatagctagttctttggtgcctactctgggtctacgttaaggttgtcctttaactccctatctattcttaatctgctcagaaggcttatctcgacttttgcaatatgaagagaatactgaacacctcaatggtttcaaacttacacgccatgctcctccaatctcacatttactcttcgctgatgatagtcttctcttttttcaagcaaatgaaagatcctgtcttgcaatcaaagagttttggatatttatcgccatgcttcatgttaacttctcaatcgggaaaaatcgatgatatccttttcgcccaacacaacccttgctgcacaaatcttttttcattgacagttgtccatgcccatttcaaaatttcatgaaagatatttgggtctaccatcatactttggaagagacaagaaagaacttttcagtgacataaaggcaaaaatttggaaactaatgaacagctggaatgattttttttttcagcgggtgatcatgaaatgcttcttaaagccatcgtttagtccattcccacttatgcaatgagttactttcggccaccagtatacttttgtaattagcttgagtctatgatggtaaacttttggtggggtttaaatgaaaatggctctacaattcattgtcgctcttggcgtttactctgtctatggaaaactaaaggtggtaggggtttctgatcttttgtgaattttaaccaagctttgctggctaaacaagcttggcgtcttcttgaaaaacaagactcgcttctaagtaagattctaaagagtagatattttccccaaagctcctttcttgatataaaccttggtcattctccctccctttcttggcaaggtattcattagggtaaagaattactctttaaaggtttaagatggaagattggtaaaaggcaaagaataaattgtgcttcggatccatgaattattggatatggctctttctttctagtttattacttgagacctaatgatattatggtgttaagttttatcattgaagaaaggcaatggaattgcctttgctggaacaattcttctcacaaattgacattgacaagactcttactattcccttaagctactttccatatggagacaaactaatttggcaccatcatcactcatgtatttatactgtaaaaccagggtatcacttggcttctttttttgaggatttggaccttagatcatcatcctccactagtaaatcttggtatttttggtcactccaactaccatagaaggttaaaatctttgcttggcgagtctaccacgatgcattatcagttgccacctctttggtaagaagaaaaattatcaccgattcaacctgttcgatatctagaggagcatgggaaaccattggacatgcactatttagatgtaagtatgcacgagctatatggaaacattcacatctgtcttttgactggcagaaatcttcttccatgaaaagaggggattacttggttcatctatcatcgatttactctaagtctgaaatggaacacattatatgtacactatggtcaatttggacaaaacagaaccgggttattcatggacactcagctaaacctaccaagaatgttgctatcttctccaccaactacatccacaacttttgaacaacacatgaaccataccatctagaagttgctgcaactctcggtcaatcatcttcaacaacagcacctacgccttggcagccacctaactttgatgcgctcaaacttaatattgatgctacagtactcatataaaaaaatatcataggtgtgggtgctattgttcgcaacacttcagacatgttgtagttgccctctctatgccaattattagtaattatgcatctcatgagatagaagtaaaggccctctttcatgatttgaattgggcttctcaatagcagctcccgctcaaatacactgaattcaatgccttgatggttgttaatgctctgtgttcttctttgtctgtaatttttcaatttcatgatctaattgcagatgtttaatattttttttcctgatgtaaaaattttatatgtcaaacgtacagctaacatggctgcccacgagttggcaaaatttgaattaggggtggatgaagcttgcttttagttggagagtatctctccacctatttactctattattgtaaatgactcttatctttaatttatgataacaatgtttattctaaaaaaaaagtacaatataatatttaagtagtataagtttattaataaattaataaatagaaaaacataaaaaatttcattaaataaaatagaaatttctaaaacatgcatgacataatataccaaacgagaaatagaagagatgaagtgggggattttggtgaataatatttttttggaatcattgtcacgtgaataagcacataaggatatattaggtaacataattttcaaaatatcatttacctaattttctatgggaaattttatttttaatgcttaaaaaaataccctctaataaaattt

SEQ ID NO: 306246 - DNA, 1821 bp, Cannabis indica
ataaaaaatcaaatttccctttacataaatggatcttcatgatcaaaaatccaccaagtaactttttaaagacaaaaagaggctatgattctaattatcccaatttatcatgaattttaaaattaattggatcaatatgtcaaacacataacataattataaaatctatttatgtctcctttaagcttagcaataatccatatttttcctttgttcaaagtggccgacattccatttttgaagatatcttcatgatcttaagaagaataaatgattcaataattaataattaaaagaataatattattccttgctatacatattatattgaagagtaatattcttctatataactacacattttaatttgtaagattgaagaagttgttttatgtgtgtatgagtatgttattagagattagagaacattaatattcaatttatcaaattagtttgctcacattataaaaatttatcctaaacaaatttatgcttattataagcattttttagacattaatgatgtccacactccttaagaattgttaataattttttacactaattattaaattaaaacatttaaaattcgatatttacttatattaatagtggaatactactcataatgatattaacctttaaattactaggagtgaacattttcacctaaaaactcactcactcggtaaattcaactgactcgaaccaacaaaacttgtgaaaattgggttttgaaaaatactagacagatttggactcaactcaatactgtaacgggttaggttccagttctaaaattgttacactcaaaaccctacaagattcactcgagatacatttcaataaattacacatattttttacatacaataatatatgattaatctccacattaaaatcaaaattaaatttgagtgtgataggattgaatacacatataaatatagtatataaagtttgagtgtgtttctttacattaatatagacataaataaatgcaatgtggagaagaaggttaaaatacaataaaagtgaggaatgggaactttaagaaaaatgaggatgaaaaacgggatccaatgccaaggcgtgcagaatgaagacacacttttccatcttttacttactttctttctttcacttttttcaagtttgaataaatggttgaatgaatgaatatacacataattttttttgggttttgagtgcatatatatatatatgtttatatgagaaatgctaaaggccactactggtgtctagcaccctcttatgtgtcaatatcgctattggtataagtaagtatcggatctcatataatttaatataatagcttttagggagtatcgttaaccaatcgcaacgcgacatgtcgagaaagtactaggcaccactggtacctaatagcaatgccctatatatatatatatttttatgtgtgtaatattaaaatatttgtttgtattgttgtatgtgtatgtgtactaatataggaggctataggcgccgtataattaagggcaaccaaccaaaccaaaagagtgtttatagtacactctttagagtaagtgttttggtacattttttatctgttttgatatttaaggagagttctaacattgtagttaagtcatatagattatttgtgaaaatttaaatagtttatagtactgaaagtaaaatttaaatagttactcacctcgcgtataaaaatcagtcatgcatccaataaagtatttgaatattattttttaggagaattacctatatactacttttttaattttttttttcatatttacggtttaggtttctaaa

SEQ ID NO: 306247 - DNA, 1842 bp, Cannabis indica
ggtattcctcaacttatcccttataatttggtatcaaactctcttggttctctattacaagaaaagaagcccaaaaaaattgtccaaaaaaatcaaacataggccttaataagaaaagtgcatgtgcaccaaaatgctatgatgaacctaggtatgcacaaaaatagacctagagtatggaccttatgttgagcccaataaagaaaatgtacttactaaccatcctttatggtttggtatcaatctctctttgattcatcattattacaaaacataggccatactcataaaggtgtaatgtgcaccaaaatgttatgttaatggatgtagggtgcccatgtgagttcatgctaaataggtgttgtgttgagatttaggtatgacaacttgcaacttgcaagtaaatgttatatgattgacctaactcaatttgtttaactcatttatatgaagatgaataaaatatacttaattataagtaatttattaattcattaacatatttataaaaaatttaacatgtttacaactttttttaagaaacatttatgagtaatttcacatatttatgtccttctttaactaacttaatataatttacatataataaagttgcatcattttccaaattaggtgtgtcaaccttaaaataatatgtttaaatgcttcttcagtgccaaaaaattaattaaatttatattgtgtcaaatttagtataacaatgaatatatttttttatttacaatattgcattaatattaattaattaatgagtgattctaataaatatgtctactttaaaaatacaatagtgtcattaatttttcttttttgtagaatatctaattgataactactttttttttattctatttgtattttttatatatatataatagggagggattcgatctcttttatgtctactttaaaaaataccacgttatgcttatgcaatggagaataaatattatatttgttcattttttttgaattttttttggtcaaatttaacacattttttaaatcatgcattttagattatcttagataataaccaaatgaataaggttaactatgtttttttcctttcaagctgtaacatgttcttgttagtaagtaacactagttaattggctatgcaagcaattttcaaagttgtttaatttgggtttggtatataatatagtttgatgaaaagattcaaatgccaaagcaaattgtctatcaccaacattttgattcttacaagttttgttattatttatatttttctaattaaaattgtaaaaatgatggatgctttttaattcattaggatcgaactttcatttatgacagacatttgttagtaaaattaaaccaaaattgaataaaatcattaaatctaataattttgataatttgaaaaaaaaaaaattaacaacttgaaaagttcgaaataatttttttattttattttataaaataaagagcatttatagattcaacaaagttaggcctccttatcattacaaataataatttgaagaatgaagaatactgaacacttccaacatacgagcataaactcattttatgaactacaaaattaaaagatctattaatactaaagaaattacaacctaagaatgcattagaactccttttacaatgtgtaatataagtatttatttcccatttagaaatttggtcgttaagggtttagatggtaatattggaattgctttttaaaataacaaattaattacacaaattagacacaatttaatatatgtcataatttataattaattaaacatctatatatatttatgtaatttattaatgataatataaaca

SEQ ID NO: 306248 - DNA, 2292 bp, Cannabis indica
ggtaaaatatattccaacaccaactctcaaagtaatatacctgagatggtggtgatgctttccccatctcgggtgcaccttagagttattgtaggtgcggtctccattttgtcattggtctttaaccttagaggtcttcattgtcccttttgttgtatttataacagaagaggccttcctcttccccttggctgtctcgataacaaaggacgttttccacttcccctcagttgttatcacagtagaggaggtcttcttggcgaatgtcaacgatgtgttgtaacatttacattctactctttggttgccaaggagactgtcaatactagctactatcgagaacttgataaacaggtgatagataagtgagatggctcgaaggttgttgggttttgaccatccaaggagacttggtgtagatcactataaaggtagtcaccgtgatgtttaccacaatgcaattttaattgtgagtggtaatttgatttttccacaaggagtaatatcggctcacctgacactatacatgagtttcttgcatggcttcagatctcttagggagtgacccactcttgattagaacatttcgtgatgcttgattattaaccatcacctttgtctccatgatgtttgaaatttcgttgacactgtttgagctcgactgctcttgcccccaaggttgatgtcttaatgaccggggtgaaaaactttgaagtttgtatgttgaagctatctaccgtgagtgagatagaccactgttgaggtgtagtgggttattgcttctgttcttggcggtcaagcatgacctcactttatgatcataagtgagatgaatgactgtcgatgagcagtgtagagaaacctgctagatcttctgtataggtgccaaatcaaaggttttttgaagaacccggttgatgatttcgactcgtagaaccttgttaaagaaaaaatgctaagggagaaaaagaaaaagaaaaaagaaaggttagattaaactcgtgctaagtacaatgctccatacttaagatgagcttaaccactgaaagaataccacaatttgggcagcgtcccactcccagagggttttcttcgatcaattagaaaatatcttttatatgcaacgtcgtgcttctagagagctttctgtaactgggatgtttttcttttctttttgtgatctgaggaaaaacacttgcactagcacattagatttttaaactcaatcgttatattcttgtgagacctcaagtgtttatatcacaacagtgcttaactctggtgtgcaaatagtttatacgtgtaattattcaacttaatgaacttactagcattcagactagcacttcgggattaagaaactcagttactagagataacgtcagcatttcgttaaaccatagaaatattaacttaggtgtgcaaaatgacactgcgaccctttgttctcgtataccaaggtgtatgtgacatacatggctctcatgtaccatgatttttgtgaatgctcatgtaacatgcatagctcccgtatactatgtcttacttaccgcctgagtgatcgaagaaatgccttcattggttacttgccataccaaatcccgttgggctttcttgatcataagtctcagagagttgttacatgtgtgagcactcatccccttatctatagattcatgggttggcaatgtttaactcactaaagaaataattaccttaagactaattctacaagctttgttcagcgctagagagcgtcgtcaagtttttgagctgcaattgattaataataatgaagtatcagcaagctttgctcaatacttttattcattagatattaaattcaattacgtcactgtgagttaaattgaaagaaaaggaagtagttgttgcaggctttcatttttcatcaaagcttagttgaagtgatcctcactacactactgcactgtttgaataatagcataggggccatactttagagatggacctcctaaccaaaaaatgatttcattgcatattttcagttcgagaggcaattaattcacttaaacaaggtaaagtgaatctcaccgtgaagcaaattgtttagggcacgtttgctttattatcttctcagatgctccccgttccagtaacttgtagctggcactgtatttaagtggcggtcgtagcaaagtccaacctgtttctcctagattcaaattcttctatgacgacataaggtccctccctctctcttgggagtcttcaatgtcgatttctgttggaagttattttaccaggatctta

SEQ ID NO: 306249 - DNA, 2687 bp, Cannabis indica
cccatatttataaaaattccactttaataaaatacaagtacagaatcctgaaagaaataatctaaagatgaaattagtatttttccactttttattacttcaatattaattattcttagagtttatcttgaatacgattatagtacaataaacaagccacaaatatctgatccatcatgtttatttaatccctatggtactatctctgtaaaagaaattaggcatgaattggctaattgcataattgacccctatctactacatctataaataatataagaaaggaatatagtttaaaacaaacccattcaagcaatcctattattctactatccatacgttaaaatgatatttaacaagaatatataataaagtttttgtggagaaaaaagaatatacaataaagttatgcaatagctatctgtttcattaattaactactaccatatatcattattatatattagttttaggtcattatatatacttgtcagaggactttcgattttataccctcgaggattgaaatttgtgtttttaatatcaaactgtcgttatataataattcttagaagagatattatgacaggttttaccaatacggacaaaataaagcgtagcagaaaggataaagtcacgcatctgtatgctcgaaaataattgttctaatttaataaatgactcattttcaagtcccttaagctcattattgcatgataacgtaaccctttgattttaattcaattaattaaacaataacaaattaaattggtactacttaacatcgatatacatgagctgagaaggttatgcaaactgccaaactatcaaccatcatcatcatcataaataaaaatccaaaactttaaaagatccaaaaaagaaaatgtgaagaagcaatcgatttgagatattatttgcacaaaagaaaaagaaaaaaaaacaactctacattatctcatcctccctttatatctatctgcaagtgggagggtaattaaactaaaaaccaaaatgacacatcagaccaaaacagcttttttccaaggcaaaaagatactaaacaataagctaaataacaattattattcctaaaaaaacagatttaagtgactttaatcaagaattgtgataacttccataataatagtaagtatctcgagatctctgcttaaaaacaattcttgtaagcatcatcaaattctgcatttccatttccatctaacaccatttcttggtaacgacattcacggctacaaaaagccttttcacctctgcatggaagtaaaaaaaatacaagattacaatttattattttaacataaagtacaagattttaataaaagaaaaaaaaaaataacctgtaaatgtaaatatcaaccttctcctcgaggttcttcttgcaagtgtgacaaaagccaaggaaattactatctgggaaagtgttagagttatgattcgataaagaatagaagctctccactatgcagttgtcaaaaatatgtgttgttcttggcacaggtccatgagagatcacacaagtgtagtcctcagaattctccacatcactcacagagatccaaccaccaccagctgtgattgctttaggagtagtagtagaagtaataatactatcctctgttgaagattcaatacatgaagtattattcctggtcttgattccaaactcagctgtagattttggagactggtcagtggaagaatgtgtggaacatggtggtaaaggtgggatttgaactctaagcttattagtacccaacacaactttcctatgattattatcgttgttattacaagatgggttggaagatttgtctttgatgtgtgttgggtcagttagaacaaggctgatgccttttgcctctgttctttcccatgttgagcgttgtttgtttcccgggaaattaatcttgggcgatgttacttggttcctagaatatgatgagaaggggtttgaaagacaagagaatggttttgtgtctaggattgaagtgggacttactaataaaccgttgtctttttcagattgatgaccttttttagtaaaagctctgaactttggtgaaccaaagaaagaagatggagtttttttgttgttgtttggggttggagaaggttgagagctgtgatcagccattaaagcttgctgcttattgctggtcactgctactctagatctattcctcaacatagctcttctttataaaaaaatctgcaaaaataaccagaaaagacacctcaattactcccaagcaaaaatattcaataccctcttaatcttaagtagagatgagtgtgtgtgtaagtgtttatataataaattacctgaaaatcagatgagtaagaagcacgagcttgagattcccttctcttaaatacttgaaacagttttaacaggcctcttcagagatataaaaatgagtccttgttaaatttctgtggcttccatgtccaggttgaacattaaagtaaaataaaattcaatatagaaacaaagaagtcggttaatatgtctgactagctatctttattttgtttttgttgaattgaactaatagctaaaaagaagagaaaagaaaatactaaattccaatcataacaggtcgcatgcaagccatgtgatcaagatcagagttgatgcagaaagctctgctggcattttattc

SEQ ID NO: 306250 - DNA, 1373 bp, Cannabis indica
agcttatatggttacttccaagtgtagagctattggttgaaccaattatacatatggccaactcagccacccataaaatatataccttaataaagctttctgtttttggttgattaatttgccaagccctactaatctcttttatatctttgtgtggccacccaaaacttcccggctctttctctcgctctctcattgttttcttctctaacaagagagagagagatggaaggtgatggtaatagccttcaaaagtcggggcaggatgatgacgtggcagaggtggggcaggagaatagtcacctccggcatggtattgcggcggtgcttttgcgatggaatgggcttcagatggcagtgaacaaccattggggcggttcccgattctctccagaaatcccacaaactggcttctgatatcttctcttgcttctctcaggccaaaggtatacatatttattgaatctctaaccagtaaattgaaatgaagagggtagtaaaaaagagtactctagcttattcttagattaaaattatttatttaattagcccttattcatttttacacatttgaacttgataaattttagtttagaagagattttgtacgtcacttattacaaatgtatataaaattaataaatgataaaagttaattttggttttttgttaaatttcagcgccgctatacgtagaagatgttgaaaatctgcttcacgaaagcttgcttctatcttttaacacagatatagaagatggcagcatcgaagaggtatatatatatatacattcatgttaatttgtatattaacatataattaagtttatttttgtgattatttaatattatcgtttatgatgaaaagtgctacacatttctacacttttcttctctagaaaattctagtattaactacacaaaactaagaaaattagagaaaactagaattacctagaaactatatttgtaagctaaaaaacttaaaaaattctagaatatcttagaaagttaaattgtaatttaaaataagaaaaatctagaaagttgtagtatcatccttagctccctataaataccaagcttgggttgaggagctagtgtaacaaaataaccaacaccaaaaaaaccaaagttccaaactatcaataaaagtttactactttctcaaacaaccctctcttctaagccaaactacttttatatactaaatctacaactactcatcaacatcactacttcactacattaccacaacaaaccattaaccacatatctacttattccaaatctaaaccaatacaaatttattatcaaaccatcagtttaactattatgactattatttgcatacattttataaaaaaaaaaaaaa

SEQ ID NO: 306251 - DNA, 2755 bp, Cannabis indica
atttaacccaccaaataaattaacaaattttttacctgcatcatgaattttcttttttagtgttttttagttggaattttattagtactcacttagttttagcacacaatttccattttcatgcaatcttaccaaatcaatgatcctcctcttcatgtatttgacactaatataatctcatacatgcttattgagagcttgacctactagttttgagcaaactttcatgattaaaaataaccaatttttttaaaggtaatcttttcattttaatgataatcaacagttggagattattccacagttttttatacttttattatatttagaaaagaaagaaaaaaagaataatcatactatttttaaatgaaaataatagcacttaataaacattgagtgtcttttaaatatagaggagaagaatggatatttttttctttttttcttctccttggtaattcaatgcacatgtcctttactcttaataaatagcataacaatgtatgaaaatgatgcctctaaagtcccatcattctctaattgacccacaaagcatttactccatagaatcaacaattcaacattaccctccccctccccacttaaatcggtcatcatccaatgaagaatgaattcaatcataaacccataatccttacccggactacccataaaaatgtaaaaattgtgttatttgacttataaaatagttttatcatatatttctattaatttttaatattgttttccaatacacaattataaaatttgatagaaaatataatattttattaatattttttatttaaaatataaaataaaaatcattaattttattattattatattatatagaacaataaaaataaatgttaaaaatttataattaatacaataattaaatgtaataataaaatactaaaaatagtataaaaataaatataaaaataatgcatttattgtgattgaaatatgatgtcatgtcctatgtgatccaaatttggatcaaatttttctatgtgataattttgaatcaatttttgccacaccattagagcaaattttttataaagtgatttataatttcgtaataaatcatcaatttacatttacattggagatgtccttagctagtacattgttcaatttacatcataataaactacttcattgggaaatgtaaaattatgttatatttaagacacaaaaaatgattgtctgatatatttgacttcaaatcttttagaagcccatcttcttgctacttgatgcagatcaaatcattaggcttaatagttctgtgccttgacggagagaattgatcatagaatgcttgcttaagtgtatttcagtaatcgataaatcctagagaaagtttgaaataccactgctgtgttatttttgatagtgtggctagaaagattctgacactagaatcatctcgaatgccatgcaggttagtttgtactttaaaattgtgtatgtgagagaaagggtcttccttacaagtgtatgggtaccacactggatttttgaactttaaggggatctccaaagcgttgattccttctaagagaagtgaacgttactcccgttcaagcttaaactcaattttctttggagttgcaataatctttgctaaggttgcaagagtatcaaattcagccttgcagacatcacgtgtggtgatgtgcatatcatttggccgcttcttgttgttgttgctttacaggttctttcttcttccaagtcgatcaaagacgttgatcgacctaggccttgtagttgttgcctgatcatgtcgccttgctggcaactacagggacttatctcgtatgacgatagttatctctcgagcacttgctccaggagcggttgcttgtagtcctatactgactacttgttggaattttatgtcctaaataaaatttattttaatataatcagatttactaattaataaaagatcataaattattttatgttgattaattcacgtgattactttcatgattatatgcttattatataaagtctattaaatcctaaacatatagttattcatgattatatgcttgaaataccactgctgtatttaatcccataatttatcagtgcactaaattatactgacgtgataatcaacgataaagtttacttacacaagcataagtggaatatcttttccagggcattaacaaagtatactagtatcaatgtattgagtatacatcagacgggaccgatattaacagtgaaaaaaatatcataaacttactgttatatctttttgagtcaatatcacttagttgatcttaggtcaatagatcttaatcttgagatggttaggttttggcttaaatgaattatttatgttctttgacttgttcattaaagctgactaattggatcggctcaatacttacatcttgggaatatggtatgttaacgcagattttttaactaaatatatagcattttatgtaataaattttactacagaatttcataatagtaataataaatgaacaccaggtattttacgtggttttgtagttcatttctacatactccaccagccttttttattagggatatttatttaaatatagagttcaatcaatcaatatcaatatcaatatatataaataaaggaaagcacaatagtgatgacatgacagtttcaatgaaatttctttccttttttttgttttctcatattttcacatttttttttaaaattttttagttactt

SEQ ID NO: 306252 - DNA, 1140 bp, Cannabis indica
tattttctttttttaaaaataaaaagttaaaatatgaatctagaactgaggttgagagagtttaccatggagaatgatagtttgagagagatctgaggagaaaaaaaaaatgagagagacagagtgtgaaacagatctgaggcagagtgagaaactggttgagaaaatatatatctgagacaagttttttttttctgggtttcgtttctgggccagagaggccagagagattggtgggtattattggaaggagatattgtttcattttaaagttttgattggatattaatctgcatgctgagctaattttttgtgtttttcttttttctagtgtgaatgtgatatattaagttgatgatggaagtgtttaaaaaaaaaaaaaaagttgatgatggaaggattttgctgagacatatattgagatctgagtttttgtttgtaaattgtaattttatgagatctaatttctttgtttgattgtgagtttgacaattttgtttatgagtatgtgagtgttgtgaaagagtttggaatagattttaattcaaaactgaagaagaatggattgtttaggtttcttaattagggctgtgagtgttgggatgatttattttttatttaattaattatttatatttaattaaatatataggttgttattaaatatctgaataaatttggataaattttcatagatatagagatagatattataatttcttattttaattgaacaatcatatatacaaaaaaaaaaagcaaataatgattacatttaattaaaagtgaagctgataattaatgtatatgccaacttcttataaagtatttaaccacatgatatctttcaaataaattgtaacaatattaaatgaactacgatgaactacaatattataatcttcaaagagaaagagagagagtcaaataattaaatacataaaacaaaaagaaaaacgtaaacatatgtattttctataacactgaatactacaattacttttttcggaagcaattgaaaagagtggaaaacaaatttttacagaaaactttctccctattaacatcaaaagatcttgataattatcatttaggactaaagtaatggctaaatatatagaataatatatgggtgagatt

SEQ ID NO: 306253 - DNA, 1681 bp, Cannabis indica
ataaaaataaaaattatatttatatataattacatatatctataaacaaaatatatatttaaattttaattttacaacaaactttttatttaaaaataattaataatattattcaaaaaatgattaatgatataagtgcctcagcggggttagtttttctctccagtttccctattttccctgtctcccttgtatcgagtttttccagttttttttttctggttttgccctgttctttcgtcttcctcttcattgatctgtcgcccatgaacccacattcccactactatctaatagttcttcaatctcacagccacgatctatcattgttcgtggaatccccttacattcaacattatatatatatacaatctcagactctctttgatttattcctccattttttattctctttcactaaatctaacttctctatggactccataatcaacaacatgaactctaccttgactctatttgaaaaagaaagggagttccatacattctctgaggcagaccttaatgatcctactcaagtgcctaaattcttcctggtgacccggtgtctctccaactctatcaatcccaacacttttattaaaagaatgggagctttttggtccaacaaatgccgttttgaggtatctgtttcgaaaatgaattctgatcttttcttactaactattggttgtgcaggggatcttcatcgaatcctcactggagaacagtggcatttcaataactaattggtcctattgcactccccaactgtgcttagcaatgtcaccaaatctgaccttaccaaggctcaattctgggttcaaacttatcggttaccttttctcagcaagtctcgagccttagcaaaaaaagttggtgaatgggttggagaattcattgatgtgtatgaagactctcttcatgagggatggggtccctttctccgagttcgtgtttggattgatgtcactcaaccttttgatgagagggaaaatggtcaagctaccaaaattttgggatgaatattggctggagtttcgatatgaaaatctcccgatcttctattttcagtgtggcttaattggacatcctttcgaacgatgtgcctcttttttggagcttattgacaatggtattgatcctaatcttccctatggccctcagatgattggagataagcttccaaattctggttatgatagataccgtactgacttttctaaggctaatgtatattctttcctcacccgtataaccaaaaaagctattggacatgccatccctgatctaaattccaatcgttatttagcaatagggtcacttccacatctttctcctcttacgttggctgaatcttcatcaaacacaacaatagtttctaggcctgtagaaaccatacctaaaattccatcaccttttcctacttattattaggccatctctctctctcttttaacactcttgctcctactgattctcttaatgctcactctgcttcccaaccttatgcctaccatcctcccattaccactttaactcactccatcaacacctacccaacaactcaagctatttacactagctctacaattattgccacggaggctctttttggcaaaaccaggagtcatgttgttgttgggttttgtgccctaaataaaactcattacaatctgattag

SEQ ID NO: 306254 - DNA, 1059 bp, Cannabis indica
gaaatatggaaccaatctcacagcagataacacggtcaacattaatctccataaaagaaaataatttaaattgtaccctacctttgttcgttggactttgtccgacccactaatcaatgaatgaatcaagaagtaagcttcaacgattttttgcctaatcactgcatcgaccatttcctttcccacggcagtgagagactaaacattggggctttggtcagggacgttgataattcttttatttttttttcataaataaatttaattaatttaaatataagcaaaaataattgtagagtcatgctaataattaaatttaaaattaaagtgaagaaaattgactatttatttatttaaaaaatgcacatctatgattaatttgaaactagcttaaatctaaagataaacaataaataatcccaaaagaaaaagtttgagaaagttttcaatcacacaaaacactcattatgttgtttaaaaagttcttaactacttttttcatataaaataaaattttggcaaaaacattatgaattgaacaaaaccataacataatccactttcttgatcacgatgattatgggcttaacttgattagtaactctaacttatgcaataaaaaaacatatttgtatgtaactttcatttcttctctttgtcaactaataattgaagtttgtccttttgtctaggccccacttttccaacataaaattgttaaaaaacactttggtgtttagtaccacacgatatagtttatcatattattattagtgtaatttattatcgaatttcacttattttaatcaaggagtattgttattagacactagtgatatttaacactaccacgaagtggtactttacgaatagttaacaatattttataatagttataaaattaacgagtattgttattaggcatcatgatgactagtactacaaatagttaacagttgtttataattatatttaaggagaattgctaaaagggtacatctggtgactaacacttttgtgagatgtgatattcgctattgatgcaatttcataacgagt

SEQ ID NO: 306255 - DNA, 1259 bp, Cannabis indica
gtttcagaaatataacttaggtattattaccgtaaaaaattaaatttaaatatttaactaaacttaaatatttatgccacaagttactatatagaaatattgtcatttgcaaaatgtaagtgatttttgtatttatattatttgctctcaatctcttatactttttaccattttaatttatcctttttttaatcaattaatcaatttggaaaataaaataagttaaaatatgtctatatgttatatgcatgaacaatatatgttacttaatttgtcgcttaaaaagacttttattatggaggtactgaatttttatttttttttttttgagaaaactactattatattaatcattgaaacaaatgaaatagatataattgaaggtaaataatcctccaactaaaaggaaaaatctatatccagcaatagattagattaggccaaaacataagccccaagaaaaataaacctatgtacaataaagacttgtaaagtacaagattgtaaccatttcaccaacaagatctattgtacttagttttattgatatggtgtcttcttttgagttaattattcatgattgtaaggtgttataatatatctaagattcaaaaggtgtttggttaagtttgttaaactatttacaaactaatattgtcctatcaagtcttatataattcaatataataatttttataaaatattactaattaattaaccaatgcaaaacaataccactaaatggtatacaaattttacaataatgaactaagtcgattaccatattaaagcaaatttgatgtagagccaagctaaatacatcccaaaacaaatatgacaaaacaaaaatagtggctttagggtatgtttagatgttagattttaataagaaaaggaaaaaaaaaataagtaaatgtaaggaaaaaaaaattattttttttatgttgatatgaaaatttttgtttctttccatatcaagtgtgtgagaatttattattttcattttttttcctactttgtttttcgttactttttctttccctactaacatatataccattttttttcagttctgcattaataatcgtttactactatactaaaagttgataaattcaatacagtaactagttaccacttgtctcaattttgtagcagtaaatggtaggggtgttcacggattggtttggtctggattttcataatttttgaaccaaaccagtataacagttttttgaatattagaaaccaaaccagac

SEQ ID NO: 306256 - DNA, 2693 bp, Cannabis indica
ttcattcattagcaatttaacgtcgtagaatctcgatagataagtattattgtatgtcttttatttttagtaacgatcaccccaatagtggctcctaagagtaggtcttacaaagtatgaaacaatggtagaagctcatgaaataggaatgaccttgactctcgcctaaacggggcaacatcagattctctattcgatcgaataaaaggtcactccaaaggtcactcagaggtaggataccccctaaaatggttgtacatcgcccttcttccgttagacctttgacctttgtggcttcagtcatgaacctttagatataatctttcaaaggttttcccaaactttattttatttcaaccaagtcctccaattggtgaggtatttatttagaggatgaaaattgtgtgtaaaactcagtggtgaaagtgtcccaggaatcaaatctccttagggacagcttgaaatacaaatgttgtgcagtgtcagacaaggtcactggaaaaatcctgcagtaaacatcgtctatcaccccttgcaaatccatttggatctaaagtatttgatatgggccaagggatcttctttcgcagtatacattttcaaagttggcatcttgaacttgattggtagggataacacattaatgcgcgaagagaaaggccacccttgagccttatcaacttccagataagagagctttgggtcggatcataagcctttcatgtgcccttggttgatcattttggggcaggatgtatccgtcccaattatttattctttggttcaaattattctgaagatcttctcctatcctggggcccattctatgaaacattaaatccttgggccccgagtcaaaatgtgttcaatccatccagggaggagtgtcgttattgtgcccagtattattatgaattctttgggtagtgcgcccatcaataagatggctagtggcaccattctcattgaggttgggttaagattccccactgtgagacctacttcgatcttgcctaggtgggatattttccctccttctttcatctctaggcaggtcttagaactggtcagtcctgctgtatgcccttttaggcaagatttgttcatcattcggctaatcaagaggcggccttatctggaagcacttggacttgccctatggcatctcttagcatggctagctcagaatcatcccctagtctacatggggatcgttggcactaggttggccaactctaggcctggtttctctagtgtatacctaagggtagctcttattaaaggaaccccggtggtactttaggcatgttgtccatcattgaccaaaattttcctggtatttattggatcttacctggtattaactagaacttctggtcaaaacctacaaatgggtttgcctttggtggctgggcaatactggctgggttgtcaatagtggatggaactcggacattgggatccacagccatcaaatcgtaggatcaatggacacgtttctccttgtcaggaccatggtgattatcaagagaagagagatgagatcttcgtgagattatgaaggctctcaatgaaagtaccaaaatactgacttgaaaaattggcaactgacacagagtctaataaacattgattaatcaccaataaagagttaggaataataaataaatagaaagaacacacagaattatagaggtttgaccccgttagatatgggttatgacctactcctcttttagtttattgatattgagataacaatgtgcaaatcactaaggaagacaaagtgaattctagctacaactctcaagatgtttacagagaacataattcagcaaagtgctcttagatgcgagataatgatttcaggtcctttccccctatgaattcattcactatttataggggaggttgttataattagctccataaaaggagtaaccaaaaagtaaatattcctatattctaggatgcagttacgatcggttgaagctcctacaatctaagtgaaaaaaatccagtccgtatctgaaggatgtggttagagatatttgtggaagttgttgaagaagaaatcaaggctcgtgtagccttgtccgacctttcttgtgtcatttattctagctgacttgttgacaacctggccaggcccttttcgagacttgccttttttgacaagattactcatacaataatcttggaaggtgtactgatcttctcttatctggccgacatattgatggcccgactaggtgccatgtcagttgtgcaaaatttgggataacaaatcttaaatctagaaaaattgataaattaatttttggaccttaaaatatgacccacacgtgtagggcttaacccatacgtgtacggtgacatataaaggcccatgagaattttgtttgatattattaaataaattaaattaaattaattattatattaaatatattattagataatgtatttaaaattaaaaggataatattaaataaaatgttatatatatttatattatatatataggaaaaattttaggtgagagcatcacttttgctctcacatgtaagagcattattttagattttttattggttgaatagggtggttgtatggtattaacatatgttgttgtgtaggatagtgtttggtatactttttttttttaagaaaaaattatattgtgattttac

SEQ ID NO: 306257 - DNA, 1199 bp, Cannabis indica
tacatatatattgttaattatatatgaacacaattataattaatttgaatgatttcggaccaggcttcattcccctaaactcaaaagaaattattattgatcattaattatcatgatttttcattctctctactactcctccctcatcatcagctatgtatgtttatacaattcccttctcaaaaagtaagtttctctcatcttctccgtttttatatattataatcattatatgtatattttaatttgtctttatattattatatcatctatcaatatttcatatgtaataagcaataattaggtttacgattaatgatcaaaggtacgtagacttaatatcttttataatggagaaattattatcaattacgtatacataaaaatatacacagctagaatattatttagatgactgtttgtgacaaaaattagtaaagcatttatgcgctagaatattacaatatctagctttttggtcaaggtaggtagtttttaatttgtttttctgtaaattctataatgcaataatgattttaattattgttataatagtggttcttgctttgcagtaaacttaaattgtatataattttttttttattttactaaattcgttgaaaataaattgagagatctagagagagagaagaaaagagaggttacgttgtagtcatgagtgtgaaaatgtgacttaatattggaaaagtaaccaaaataaaaaagaaaagaaaagtaaagaaaaagagaaaacaaagttaagttttatgcatctttttggtagagttgaattttctccaaattggctttgcttgtggagagttgcaaagaatatgtagtaagctttgaatattgtcctttttggccatataagactgccataatcataacaatctctctttgtcttaccccattcttctccacttttcaagacccatgtgggtcacatccattctctctagtactcaccctttaatattacaccaaattaaccttattatatatatattttagtaaacacgttatttatctatacttcaaacactttcataaatatatatatattttgtcccgtgtaatttcacggaatgtattccgtggtacattatatgggtttcagggtacattaaatgagtgtcagggtgcgtttctactttttaaccctaattacccctagatcaatctcagccgtcagatca

SEQ ID NO: 306258 - DNA, 2755 bp, Cannabis indica
tgtaaagaaagaacggagttagaggaagaaggagggagggaggcgacattagcaaggtggtaagcggagttcgacagaaaagaatacccgaacgacttcataggttccgtaaacctaaaaataatcatccctttcgcaggccccaaattagggacgtttaagaatagaagagactgaaaagtacatcgaaataatgagtaagtttgtctctattccaaaagaccctcgatcatcaataaagaaactaaactgtaatcaacaagggacagatcattacttctaagacaagggaattttaactcagggatccaagggtcctgagagtcctaatagagcatccattaccaaccttccaccgcaaaccattttttaaaagatccctaccccataatagactagaccaggtgtaagaaggagagtgccccaatttagcttcgagaaagccattatgtcgaaagtatttagctttaagaacagtagcaagcagagaagtaggatttgaaaaaacacgccatgcttgattagcaagcatggcctggttatgggaaacaagagacctgaaaccgagtccaccaaaaaacttcgaagagcaaagcgtacgccaagatttccaatggattttagaacctttccccatcgaaccccaccaaaactgagccataagtctctcaattttatgacagactgaggtgggtagtttgaagcaagacatggtataagaaggaatagcttgaagacaacctttaaaagcacctctttaccagccttcgagaacaacttttcattccaaatagagagttgagaacccactctttggagaagaaaatcaaaactagatttttttgaacaccaaagcatttaggaatcccaagatatttgctaatgaaaggccttggctcaagtcctaaggttttaaaaaaacaaggtagtgatagagggaggggtagttaggtgaaaaagaagtaggaggacttagcagtaatttactctttggccagtagctagattataaatagtgagagcttcctgagggcatcgcaagatgaaggagaagcaatggtgaataggagggtgtcgtcagcgccactcaacacgatcaaaagctttctccatatctagcttaagaccaacccaaccaagctttccttgctttctatggtttatagcatgaacaacctcctgagcgatatagatattatcaaacataatgcgctcagacaagaaagcactttgagaaggggaaataagactgccaagaacaagcttgagacgattggagagaatcttggcgacgattttataaagagtcgaacaaagactaattggtcgaaagtctttgagagtggaagcatttgattttttaggaatcaaaacaatgagagtgtcattaatggaagagagatttgtactattgttaagagtttcaaggaaaacagtggtaagatcatgcccaagaacatgccaattcttttggtaaaaagccggattaagaccatcaagccccggggctttatcactagaaagttgaaaaagagcttgttttacttcattggcatcgaaaggggaatcaaggaaatgaattaattgagtgtccagagacttgtcaagggttgagagaagatggttactagcatcgacatcaaaattttgggactgaaaaagatccccaaaatagctacgaacctcattgcaaatctccccaaacgaggtaacaattctcccattactacatttaagcttacgtatgtaattactcttcctcctaacagtagctttattgtggaaatatcttgtatttttatccccagcctgaagccagtgaattttagatcgctgcttccaaagaatttcattcttatagagaagggagtccagttgggattgaagagtagtcacaagcttgacattagcactggaaaggggaagatttgaattaatagcattgatagaattttctaaacacgaattctataagacaaactgttaaaccctgcattccaatttttaatgtcattaacacaggcctgctgcttaataagaaaagaattgagagtctttggagcaggggtagagtgagattgaagccagctagtcttgacagtatcaaaaaaggaaggctctgtgagccagaaattttcaaacatgaatcttttatgcctcgggagagccatgctatcatcatcaagaacaatccgaaggactctatggtctgaaccataaaatcctagatgataaagagtagtgttggaaaaagtttgttgccaacattggttaacaacactccaatccaacctttcacaaagagtaccatgtttccaagtgaacttggaaccaatcggatttaaaggaaaaagagagaatttacaaaggaaacgctgaaaatgaaccatagcataattaggaggattaatattgttggaacgatcacttattgataaataatcattaaaatcacctaatataatccaagaaagtaaaggagcattatcataaagcctatctaagagaatccaagattgatttttatcatgaatataaggggaactataaaaacaagaaacatgagtacttatattatcattaaaggttataatacaatcaacatgattagaagaggagttcaaaatattaacaactgttgggttttatgtcctaaataaaactccatttcaatgtaatccattttattcaacatcaatgaagaaacaaaagtatttttcattcatttgtatatgttttggttcactttatcaat

SEQ ID NO: 306259 - DNA, 1453 bp, Cannabis indica
tatatacaatttataatagataaacttaggaaagttaaaatacacctggtaaatatttatattcattaaatttcgcccaattttcatatgaaaataatgagaaataaaaagaagtgcataccataataactacaaacaataaagaaaagaaagaatattgagaatttcgtaaattaatctcatcaacaacaataaaatctcaagtgttagtctagtttaatgtagaatgaaaatcttcaaatacagatcttggctataaaaattagaaaataaaaaatatatccaaaagtttaaggcacaactactatatcacttacaagccataacaaagaagtttaacaaaaattaaacaaagcatacgttgatataactatctacctagaatgctctttctgctagaaggcattggcaaatcagtatgtttgctgcaggtgggtcacaatgtacaaaccaatgcttaaatatgatttcataaaaattaagcttgactaaactgcagcatagaatacgtcattaatatttttgtaaactccaactatataagcatttttatttttgaggacaatgacaatgaagcataaaaaaaatatatacataagttgctatatgaccagttaattgttagaaggtaacttaaccgatcacgctatgcaactcttattcttgtctattcttctctttaaattcagcttgtaccttgtgctacatatggcagcttgtagttcatttgtgcttgaaaatttcccagcttaaataactaatagcataagcaaattgggaaaacagaagttgtgcattcgtactcaccaatgcttcaacttctcaacataatttaactatgatttatgttcgatactgaaataacatcacaggaagacaaatacactataaattatgatcagtatattaaccagggtccataagaaattcggtcatctctccatagatttaccttgaataatcaatagttagaatctataataaattttctttgttctggagcaagacacttacacaaagagcaaaataaataggatacctggaacaagttgttaacaacttaagttttaattcgaactatgatttgagatccaacagaatttccaagggtagtgatcccataattcaaacaacacaatactgaataatgtatgagttaaaatttgcttcggaggctatgtagaatgacccttttttttttgaaacgaggatccccacttaaccccctatctatcatacatgtgaatatatgacagtagtctatttgttcacgcatattatgtacttgagctgtaagtatgtgtttttatacaaatgaatatattatactagcaatagtgaagatgttgggttttatgccctaaataaaactcatttcaatataattagatttacttattaatatagatcagaaattgttggaattattttagcaggatcttagatctactca

SEQ ID NO: 306260 - DNA, 1122 bp, Cannabis indica
gatttttagttttacaataataaattattaataaactcataatttcataaaataataaagtagtaattttaattaattttataaaataatttattaattttttttcaaattattagttgtaattattatttccaattttataaaaaataaatatatttttttaaaaaaaataatttttagaaacttgccataaaaaggttattggattattagcttattaatttttttttagtttccatcaatgggtattactcattaagaagtgttccatatacatataaatatttattaatgtatatgcatatgcattaatttgctataataactactatatatatatagctatgttactctctttaattagctttcagcaaattattaaattaatttttttaatattaatttgatcactcactgattgattcgttgctttttgtgatgcggccgggtgtgtttagtgtttatgtttaatcaatcaataataatctcgatcgatcacttgaaaaattcttaaagcatcttcattattcatgagggtagtttggtcattttagtattagctggtaaaaagaaaccctaattatgtcattaattttgtaaaagttctatcctaggaagcgtaaagatcactatcacaatatttataaatttttctacatataatcaattgtctaatatttaaataaatatatatttaaaatgtgccttatatataaagtttgcctggtgtgcaaatttatgtaatgtataaatatttattatcaactttatgcgtaatcatttttggtggagagaaaatgatgtgatttaaaagataaactaacgtacttaggagaattttcgcttgcataagaaagagggggtatggattttcgagacttctatttgtttaaccaagctctcttagcaaaataagcttctcgcatttacaatgtcccaaactctatggattgccaccgtgttttaaaaggtttatacttcaggaagaggtagtttgttgaaatcactatgtccaagcgaggctcttttgcttggaaaaatattctctgaggaaggaaactcactacaagaaaaatgagcattactgaggacaaattttgttggtaaaaacccctgttttcg

SEQ ID NO: 306261 - DNA, 1753 bp, Cannabis indica
tacaaatattgattccgattattttttatttattccgttacatttctcctttaatttattccgattctgaatactgtatagtaaacgtgccattagggtagtaatctttccatcaacttggattctaaccacattcggccactccaaagagttgtagcatccctgaggcaatcgagtcctacaacccctttcagaaacataagtcttctagtgtatcgaaaaagttgtttggatgttcttagttgtcaatccacaataagcttagccttattgtagaaaaaatcattctaagttattcgatctcagagccccatttaatttgaaaccatgaaaatttattgacccgaagacatgaatggcatggtcagaattaggatcttcatagagagcaaaatcaccaacctctttaccaaagatttgttggagcctagcagtaaaaggaagtgcatccttataaagtttccacaagaacaatttggtcagctctagaatcttggccctccaaaagttcttaaaaagctaatttgttccatcaaatctagatgcattaaaggcctaataagcttatttaagagatcgacaaatgcctatcatcgtagctttccatagcagacaatttgatttaaggagccttccaatctcacattgaataatattattagctaccctcggatccttccattgacaagtgatctggtcacgaaggcttcccatgagaattcaaaattctatcaatggatttagctgccttccaccttctatcaaactcgtccatcaaaatctatgcacacactcatcaagatcattagtgaccttagaaggaaacttgaatactaacatttttgataaacgggtatagcttgaactacacttttaatcaaaatagtcctagctgattatgacaaaagtttaaattctcatgccccctccaattgaacttggaccttatcgatcacaaatttaaggctttgttttccctaacaaacattggattctcaagaaatttctcattgctctccataaaagcaaactcaagggagttggctagatcttgaaagacctctgaatcacaattttttgatgagatgatctttaaattatgcttatttagtctttgccccaaccatttacagtaagtgttgatacattctataacatgttccacattatgatggtctaccttaacaaaattgggcatgccaccagcttattgttattcatgttcccaaccgtttatgttactaagttttctaaaaaaaaaaaattatttaatcagtacgattattataagatacctagatgggtgttgaaaatatgaacaagacttcatgattacagcttacagacttatatactaataatcatcttcacaatataaattaaatcttttatgataaacagttagttgataaaaatcgatattaattcacatcggtctaatcatgtataattactattatacatagtacattaactaaaatgtctacccatattagtaatctgaatcaaaaccacttgcatcgacaatattgtgcttagtaaactgtactataatcattaattaaatattatttattttaatatgttaattatcatgtatgatcttaattatcatgtattcatataaaaccatacattcgaacatgaataaggactttatatataaatatatatttatcagggtaaatattactttagaccctatattttataaatattattgattagaccctttattttattaaatgacaaa

SEQ ID NO: 306262 - DNA, 1055 bp, Cannabis indica
taatttttattttaaagaaaaatagttctttgtaattaaattaatatgatatggcgtcaaataaaacgccatatcatatgcctagaaagccattttattaaactaaataacgcacaatattttacaaaaattattagctttgattttttgaataaaaaattattatatatagttgtgacaaatatacaaatgaaattgaaaattataggcatattaatttgacatgtgtatgcctttcaaatcatgtacaaattaatgattaatttaaagataataaattaaatatatattcttaaaaaaattaaagattcttagactataaatggggctgcgttaaatgttgaattaacagattacaaaatagagaccaaattaccctagtcgctaatatgtagaattggaagcatataagaccaatatatatatattaacatttattaattattggactttttagaatcaaaagtacactaacgaccattgacacaccgactatcgcgtataattataaattttgaacaatgagtttttacaacgttttctttgattattgtcaggcaaaatactatatatatatacattattctacaataatctatttaatatatatgttattaaagaaaaatagcggtctctttgaaatcgttcttataattaatttagttagaaaagatagagaggaagataaagcttgtgtaatgactataataatgagtaggggtgtttattaaactatacatccaatatttttaaagctatttacatctaatttaattatatattggatgttaaattttataatctcatccgatctaattaatttcaatcctctaatcaatgttggattggatcttaaatgtattttatatatatatgcattaatttaatttaaagtttatttagactcagtatcggatacagattacatctaatatattcagtatatattggattaggagatatctaaataaaaaaaaaagtaaaaagcttgtgggttctatttgtgtgcttatgatatgttgagccaaaaattgtcttttgcctatccctgaata

SEQ ID NO: 306263 - DNA, 1844 bp, Cannabis indica
tcctagctttgtatataaatatgtactattctgtgaaataaacacacaattcgaatcactattttctacaaaaataatatggtcataatgataaatgttgaaagcatttgggacaagattagacattgggtagccacttagttacgataaagatttcaaaaatgaaactaaacaggtaaacagttcattagctttctgttttttggctactggtccaagtgggagttctcactcactcttcttgtatcactttcaatacatcaataaaagtctttcctttcagaaatgtacatatacacacatacagatagtcatacatatatataactcctaatttagatagttgtctttgtatcagttttgctttgtctccaaaaaagttggaatgaatcatcttctgtcttagataaataaaagcaaggagcaccacatttggggttgaaaactgtaaaattaaaaaagattatgaaaatcttacccaaacaaccaaggttctcgtctttttgtgtcatgatgagcatgtgctctgaagaaaggatagtaagcacctatttgataccaacgaactaataattcgggctcaggattgccaaagaatccaccaacatcagcacctgtatagacattataacatcagttggtgttaacaggcaaatattgttgcttgattatcctaattaaatagttgtttctgacctgagaatgacaatcctgtaagaccaagagtcaaaatcataggaactgaaaccctaaggtgatcccaatcggctgtattgtctccggtccaaactgcaccatacctttggctaccagcaaaaaatgccctggacaacacaaaaggtctgtcgctaccatcacctcgctttacaagcccatcagatgtagccatgtgaaagtagtatccataagcattatgcacctcccggtgctcaacacccccttggtgtaaagcatctctaggcatcgtaacctggaaagtcaaaaagttttctaagtatgtagcaatgagattaaacttttatgcagaaccatctcttttatattttaaagaaaaataaataaatatataaatgagagagaggacagagaataaaaattagttagaaaagcatgctatgctgtactacatagtctctacaaataaaaagttaacattagttagaacagatattatatgctgcagcatcacttctctacctatgaaacatcaagggccaaattacacctaccttttaggcttcctataaatgtactttaactagattttgtcaaaaaattatgtactctaacaagatcaatctaatgagaagggaaaaggggacggtctcgacattttaatcagactatttaaataaacacacgtgcacgtacaaggcaccaaacactgtaaaagtaagggataacctaacaatcaatatgggaataaggaaaaggagaatttgagtttcaatgcattgtcgccccataattcaaatcaatcccatataatggcaccattactaaaatatgctaattttttctatacttccaaaactactcccacagctcacccaaaaccgccacctccaccaccagtctcgatggcgccacccaaccccctctctcaatttcagattctctcatttctcttaacttccattgaaactacaaaaaaataaaacccataatgtttttttataatttagaactagtagaaaatgatgaatcaattgtatattttattgaatagaataggatgtactgtatttatatacaaaactaaagagattaaatagaaaattagaagagaaaataagagcttgtttggctgtgttttcagttttcagtttttaaaattgtgtttt

SEQ ID NO: 306264 - DNA, 4766 bp, Cannabis indica
ggtaactttagaattgagattggagtttaagacatgacttggtagtgcattgaaataacttctaaattcaagttgaatcgcatcaatcagataaatattgagtgagttatggctattttactgaaggttattctggcccaacgcctaggataacatcccagtgctcaggttgacatccaaagcccaggttgacatgtgacataagcctaaatgttgggtgagtaggaaaatgtgtcagggatgtatttttgattcctaagtgatatttggcaaagctggtcactagttcttggagatgttattgttctgcggaaatgagagactcgaaactacccaatttttgagtaagccactttgctagaaaaacgaaaaaatatgaagttgcgaattggactctttcgacttcatggctctcatttattatggaaaactagatgaatggtcgggatggaatcaaaatcaaataaacagaatctaacacaccaaactatatgtcaacttgggcactaggtgatctttttagagctttcgagatgttgtttttacactttgagggttctttaacttgaggatgaggtctcctaccccatttttttttaccattttagagagaatgcttggaggagaattttgatttgagtgattaaaaccaacacactaggttgattgtcaacctgggtactagctcagcaccagatcaacatgggcactgggctcagttttgaagcccatgtaattatttttttctacccgagttcacttgtatattcatttcctgatgacggaataatgcccgaaatacttttttggaatacttattggaaatagccaaggttgacaatatgtaaacctgggcgttggactcagtgccatgtgtcaacttgggtgctaggtcttatttcaggccactcagaagttttttttgctccatagaaaaagttaaatcttcaaaaaaagaaaaaaaaaaactcctcaaaattagcctaggttgacaatatgtcaacctgggtgttggtcccgtattttggcctccaagttggtctgtttctcccccaaaaacacatgtttccccatttttgataaacaccaagaacatgcacgagtctattttttggttgatgcgtggaagtggcctaggttgacaaattgtcaacctcggtgctgggtgcccaggcaccgggtgctctgggtgctcaaaaatgaaagttctctaaatttgatactgatttctcaaatatgttcgtgcgatgtctagttcatgttccaatgtaaagtttgacccatttgcactaagacggtccaaaaaattgaaaccctggttaggttgtcaacttgggtgttgaatgaaaccctaggcgcccaggttgatttctgaggtgcatttgtgtatgttttcaactttcgaggcctagacttggatgctccatttcttcatggtacatattactgaaagatatttagttggaaacaacattttagaatctaaacacccattctggagttcccaaagtcaacttgggcgtagggctagggacccctcccaggtcgactgctatgacttgggactactcaactctaagatgttctctttcttaccacatgttaaatattgatgtctacatcaccagaaaatttttgagttaacaattgtgtaattagacaaccaattatccatccatctctggaagaacctaatgtatcatgaagaaagtaagcatatagatataagactctactggattagagacaagatagaataagggttggttgaattaaaaaaggtcagatcagaagatattcatgttgatgttaggactacaggctgaacaatcaacaagttcaagacatgcttaaacttgatcaatcttagaaattagcataccgagattcctaaaacactaaccatgatgcatgcatactttcttcatcaccatcacttttatttttaaaggaactaggtggaatttgtggtatagttcctttaaaataaaatgtcttgcgaaaagctagaagtggcccaaaaaggagttccaatcttggggcatttcagatgtagccttcacggaagctagttgtcctttggaaaagagttccagaaggctagttgttccctccaaaaagggcctctggatagtttgctccagctggctttgtatctatctagaacatccctccagaaagatgcttcttctgtctcggactttcatccaggaagtgtgccgctcattcagatgctctcgtgtgagctaacgttgagatattgttacgaggagtttgttaagtttattaagttgtaactgacttaacaacttagttgttatagccaccgactttggaatccatttcccaaacctataaacacaaccaccctcatctacaacaaatagaattaagtgagataatttagagagtgagaatgagaggtagagagagagaggtacagagaaaagacagagattggcctttaggatttgaatgaagaagcttttttgttagagagataaacactttaagagaaactaagcaaagaatcctcacaaatgtattgtacccctgttcttgctcaatcaataaagactgtttcgtggtgttccagaactggagtaaggtcatagatcacattggtctataggactttaactagtataattcttggtgttgcttttactgttttcttgctttgttttaattactctattctactctgttatttttgcaattcttgagttgcaatttcataaatcttgtcattgctaattatttgttgatttgtctttaagtttgatttgattctacagattagttgtaattttctcacaatatggttagtttccaatttgttgatttgttgtatttacatttgaatatgcattttggtaagtgtggtttcagaataaggggcgcgcatgggtttgaactcaatgactttaagagccgtttggttgatagtaataggctataaaggaatagaatggaatactaatgggcctgattcttttatttggttggaaattaaagttttggaactgaattccattgtaattcttattcccccaaactaacgaaattgtttttccatttttcatttagtggaattataattctattccactacttactaattcataccctagttacccttctttctcattttgcaaatccacaaattttctctcttccactctagccatgggccaagccgaacaaaccttagtcctagaaaactgaagtagaactacttactgttgtctctttttttttttttttcttctattttagcttaacttgctattgaccattgtgaaggtcttcttctcaactcacactgcaagtgccaactttcctttgttgcttcttcttagctaatatcagcttcaccacttacaaggtcaatttccctattcactatttttagactaattcaatttttctctcattcacaaggtcagatgtagagactagacaacctttatttttagttaactaattattatatttactcatttaggtttgatgctttttttctgtgtcttttttcttgctatggataatgatatatgacaacgatcttggcattagaattatttatgctgtttggtgcttttatttctatgttttatatgacactgtagatgtatacatgtatttttcttttttaatttattcttttaattaattgtggctaaatcagctatatgatatatatcttttgataattgctgctatatatttcctttgggtcttttttgacaattgtttctatatattttctttgggtcttttttgacaattgttgctatgtactttcttttgggtctttttatagctgtgtgggtcaaattaatatctgcaatatgaatttggtatgctgaatgttatgtagtttttaacaaatcaaattttattatagttaattattgatttcagtttttgtttttcaataagagaagtaaaaagtgggtaaataagctgtaattatattgtgattttagttagtttgagtactattgcattaggaaaaattgtagtaagaaaagaaaagaaacttaatgaggatagtaacaagcttatacctgaggatgatgatttaagattagagaaagaaaaacagagagagaatcttaacgaggaaggaaagaagggaaatattaaaaggtgagaatgtgtaagaataattagctaattgatttcaaattcagaataagtaaattgagagttttgttttctttaaataattttcttttttttgttttttttttaattttagaatcaggactagggggtgtttctttattattttagaagaaaatttacttgttgtaagaaacaagctgagagatcaaaagaaattatgttgtggatgagatctctttcttctcacattaatgtgtattcataataaaactccctttaattatattgccttttcaagttttctttaaatctgaacgaggcatgttttagctatatatcatttagataattcaaattattttatgcaacattttccaatagggaaatttacaaaaatacttacttttaactaaatctttacaaaaatactgtcatatggcaaaaattacttttatactgtcttggccaatttttttcttttatattgtaaacacccaaaaaaaaaatgaggcttccatcttccacacccacgaatagaaccaccacaggaacaccaaaacaatcagaaaagaaccattaatttcgatgagattgagaaaaaaaaagtgaaatcgacgtcaaataaataatca

SEQ ID NO: 306265 - DNA, 1038 bp, Cannabis indica
ttttttttgttttttaaaattaaatattttattttatttttgtgattaaaaaatttaataacaaaagtattatcaaatgtcacctaaattaatttttattttacattaacgtatccaatactaacaaaattttatatttcatatttttaggagtggttagtaattttttgtgtaacttattatattcaaatatgtgatgacttccaaattgtcataaaattcaaaagtttggtggtgatccatttattcatagtactatccaaatactatttgtattgagttacacatattcttgcatgatcatgtgtttaatgaggagaatattccatgtgttatataatattgtagcttaatttgcacctaaatttattttaaattatatgtacttaatttctatttaaatttacagttttaaatttcacgatgaaataccaacaattattatatgtacacgtgacacataatattataaggagaaagaaagcttgaatgctaacatgcatctattattaaatttattcgacccggtagcacctattttgggaacgtccagcgctgaatggataagtcgccaatccctaaaacgaattatgtaatgtacgaaaattattttaaatagttatcatttaacagttaaatttaacatacactctaaatttataaacagaaataaaattaaagggtattgccataaaaaagttagaagaataagatttgcccgcatatacataaattgtactaaggttgtacaaaaatttttgtaaaacatccaatttgaataattcgcccaaaccaaaccgaattaatccgataaaaaatataaacaaaaaaatttgacgaaaatataacatgtccaatttttatattggtcgggttaaaaataataggatttttttcatatgtatatttatctcattattacacttgattaaaatataaaaaattgaatataaaaaaaaatattagtggtcgatttgagcttgttaagtagacaaaactgaccaatagcaaaattaaatagggttttttatttttaca

SEQ ID NO: 306266 - DNA, 1124 bp, Cannabis indica
ttgagatctatttttatttattttagtattttagtttttttaaaaaagaaataataaaataaaaagaaacacaaatttaaagttttttatggcatttctcaagattttttcccatatttgtaagttttttaaaaaaatgccatatttagtataattaagtttttatgtcatatatatcaaaacttatctttattttcccatatttttgtaaatagccctaaaaaaaataatacgccgaaaacaagattcaaaccgtctatagtacaggtgtttcttttattttatcagtgtgtgaaatagactgtttgactatttttttctatattgtaaattattttgaattttttaaaattttgctagatatgttaaataattataatatatacacgaccataaaaaaattaaactaactttttttttataaatgtcaaaaagttagaggtgcatcaacgcacaaaaagaaattgcacccgtagaagctccccataatatttctacactaaactctaacaagctaactgatgataaaacttgcacctttgacatgttgatgactagaatccatatcgattaccttatttgataaaattataggagttttgctattttgctatgtcatgcacattgtcacctctcgattgaaatcttatataaataaagtgcatgtttaaaatatgtggccatatattggcgttgaatgtgtgtacatgtatgtaatcattattcaccactaaccaaagccatacatatatgtcgtttttcatattcaaaaacgacatgattgctttactaaaaagaatgttttatggtccttttgtcttgttattatatattagactagagatcaacaacaataaaatttaacggtaagaaatcaaaaaatagaaacatttacaatatgttgtatgatggtgtttataaataacaaagaaaaaaaagaagcatacatgatatcagggccggccctgggcataggcgggctaggcctgtgcctagggcccacctagtccaagggcttaaaaaaaaattttacctttttaaaattacataattttttgctgattttgaaaaataccatttttttctaaataagggcctaaaaaataatttttaccctatagccc

SEQ ID NO: 306267 - DNA, 2442 bp, Cannabis indica
aaattagagaagaaaaaaaattagaatcaaaataatatttaaatgaaaaattatgcgtcatcaatatttttatcaaattttatcgcaaagtatcgcaaacttaaaatatcacaaatgcatttgtaagcattgttttttgcatcaaaagttttcatcacaccattgtaataatgcatcattaaacatcattcatcaccttttactaaaaattaagattttatggaatcctcaaaaatgtatcgttaagcattgcaaatgaattgattttaatcaaaattctataatttttaaagtccaaattagaggaaaaaactacacaaactgcaaaatcaaccaaaaaaaaaaggtagcgtttgaaattcgtgaattttgtgattaagtaaatatttttaggttaattaatttcaaattggattagaatcattaaaacatgatttttcaggttaattaataaaataataataaatttaataggtgcttcaatatgagggaattttattgcttaaatagtgatgtgacataattatgtattgtgtggtgtagtggtaggattgcactgacgtcattccttgcttggttcaagggttcgaaacctaccatagcccctttcgaagggattaaaggcttgacctttttaaagactagcttgctgttggtggtgctatttatgtgatgggaatctttgaagtgattagtgatgatcgatctaattaaggtagattgaagtataaaactcctatagttgatgcatggttcccaggatgatcaaaataaacgaataattgaggaagggatctacaccacatagtctctattttagttagaaaaataaaaatggtgatatgacatttatggtatgtgttgtttagatgagaatcacaaacaaattgataaaaatgaagaatgaaagatggatttttggtctgaattattttcttttagtgtaaagtagtaaagtagaatataaagaagggaagtaaaagagaggaaaatgatagaaattatatgagtggcaaaaatgacaaaaaaaagttggaaggcctatattttaataatttgtatattacatattaaaaaaggaattgatgctgtagtatttgtaacacttatgtaactaatttttgtcaaaaatttctcacattagtgtttcgttactcagttataaactttcttgtttactgggtacctatttttcttgggacaaaataatgtgagtcaaaatagtaacatataataggaggttacgttattttaatacaattataaaaaatgattgcatatttttgaaaaataatgatcataaaattatgcaactttcttatttatattattattcttaaattaaataaaaaatgttgaatgtgaataaataataattacaaaatagtttggagacttgatttatttacttatttataaagtgtataaatggttcaaaataagtagtttggaatattttggagaaaaattgataaaagatgaaaaaattgattgcttgtaaaactgttttttagcatatcaattgtatgcgtttttaaacgatgggagcttttttaacagcttaaaatcatccaattaataccatgaatgcctactttatgattggtaacaactaagaactttatgatgatcattcatgttcatatatgtattgtttccaatattgattaccaacattcatatgacttgtatatgaatgtataaatagtggtagatcaccacatttgaaatcacacactcaaggtttgttagccagtcatattagggccttaaattacattcagaacgttgataatcaatattggaaacattctcagggaaatgttatgcgacgtttttcacaaaactggttacatgcaacatgtcacttggggtattttctgcacaaccaatttcaaaattacataaaacacaatgctcccataacgtacctccaggcgacatgtcgcccaaggtgacatgctgcctggagcaattccaacatgtttcaaaatgtgtttcataactcatcttccagccaattaacacatctacgtcattttattgaaataaatgagtaagatgaatgtttctaacagttagaaactcctccatttaaattcataatctcacgtatattttatacttaattatatgctattaaatgtgatatgcaaacaaatctaatattcaaatttgtaacttcttctatgttataataaaggtcagctcaagtattaggcaacatgagctattgcacaagatctcctatttttaaagaaaaagcattttttttaaaattttttttattatacatacataaataaaaaaaattataattgaaagtttaaaaggtatctttttaaaaaaagaaattggtaatagaattgtggtctaatatacacacgatttttttttttgtgtaaaattacacctaaatatgggattctacaaaaaagtttg

SEQ ID NO: 306268 - DNA, 1482 bp, Cannabis indica
atcattgtgaggttacccaataaaaaggagtttaaggatgacttcttttggaccactagtctatatctaatcaccacaaccaagttttgaatcatatgtacgtactaactcctcttaaattcttagttttgagttttctttaagttctttgtacttaactaattctgtccttttgttatgtttccggcgatgactaggagacccatccccaccccagaaattgagaaaagacacaagatctttcttggtcttccctatggtttgtgagaggctgacaatttgttgtacgacaataacttgaaggcatgggcccttcttggcagggatcaatgtacaaacaacttcaaaatccccaagtttccaaagtggcaataagtccatgtgcctaaggaagaggaagactgagattatgtggcttgtagtcattatcttaaaaatgggacccctcagaatgctgaagatgaggcctcccgaggtaataatcttggttcttgtggatgggctcttattgttcttagggctgaatgaacaacattagttcaatttaaagatagtcattataatttctacatttggaactgtgttgaccttatcgcccataggttcgatagttggtaccctaaacatcacgtctaattgagttgttatagttcctattttgggattgtttccttagattttcagaagcaaaataaaaacaataagaactaaagaaataatgactgacagagaaagtataataagagacacacaagtttttacatggttggggcgttaacaagtcttagcacgagtcaattttattcaataatgtattacttataataatctcaaaagtacacaaggtgtatgttcgtatattcgcctgagcaaaagtatgtaagagaattcaacccttaatccatgagattagttgggtatttatagtagttggggaattacattagggattcccttttttcctctattagggagtttataactgaacaatatctttgggcttactcatgaagtcgagcccatgaagaatgtgatctgctgactaggcagatcataattgatttgattgagtcaaagccacatcggattataatgagtaccctatgattgttataggaagtttcctcttatatcgtgatatgatattatggcccaatctgacagctggtgtttccttattcataggaggaaacaaatagggaaactggaagaatctttcgagaatgatgcatccttcccctctgggctcacaactccagaactatcttctaggctcgatctatagaaggcggaaagtatcccgagcacgaaaccaaggtaactctcggaaggacatatctagatgggcttggtccactttaccattgatgagggtcccactaaggggcgtagaatactaacatggaatccacatgtcccattccgaaaatgagaataacatttacccccaagctttcaagatgctgctcatgatggaagctt

SEQ ID NO: 306269 - DNA, 897 bp, Cannabis indica
gccaaaatgctaagtgttatcaaggggagagagcacctcttgttgctctcatttttcctttctagttggaaatgaaatttaaatttttacaaaaaaaaaaaaaaattggtgggacaatagtcataccttacaataaatgatccaattgtgaatctaaaaagaaagtgcaggctgaatagaaatatctaaagagaataatatatattagatttttgttcatcaccaagtaatatagttgaccttatcaataaaattattttttaaaagatgataaactattaatatatgagcaatatgatgtatattttggaagtgctaaataattataatttttatttttcataagatatttatgtaattttactaaaattatgtatatgataattaataattaaataattaagaagcataaaaagaaaaagaaaaatgaggtatacctacaatctcctcctttccaaaattggaataaagaattaagattaccactaaagagaaaacatttaattaataaatctttaaaaatatagatagaagctagcttatggaaactaagatcaattatacaagttttagggaaattatatggaattctttcaaagtgaacaatgaaataaagtggtgaatatatattgagagaataatatataatactagattttgtccatcacctcttttaaaaaaagaaaagtcaaccttttattaaaaaaaaaacttggttgctcattagttggaaacttaacatactttatacttgttggacgcttgatacttggtagatattagaattttaattgaagttgttgttagggtttttgtaaacaacttagtatacttatatcacatgattttgctatatgagtgtcatcttcatataatcactacaaaaaaatttatttt

SEQ ID NO: 306270 - DNA, 1094 bp, Cannabis indica
aaataatatatttttattttttatatccaattatttgaatactaaaaactaacaataacaattataaaaaaaataaagattagtttggacgggttaacccaaccaaaccgacaaaattattggaagagttaaaccttttctaatttttaattggatgggttacaattaaatatttacaacccactatttatgttgggttggtaaaaatatattataacccgaccaaactgattgacgtacacccttactagagagcatcatcatctaatccatctgcaacataaatattagcaaagttattatattgccaatgccattatgagaagagtgttcaattccattatcatctaccagtttgttaatgatattataattacgcctgctattagctttctaatgggaaaaacgagtattagagtcactagattccaaccatttaaagcgagagtgttgttgctagtaatcctcttcctgtgccaaaagatcatccaatatagcttcattggaccaaagttccttgaaatgggtagcactagtgtcaagagagttttgcaaaacaaccaccttatcatgagacatcttgattttcctaagaagctcaccaaatttagatatgtgtcatgaatggagatgagataacaaatggaaagattagtcattacttgggcaataaggtcaaccgcactagatttccaagtattgaaaataatatcaagacaaccatcttccttaagccataacttctcaaaatgaattcttgatttatatttggctaattagttatttttctccccgaactttgacatgtaccaaatcatgctcccagaactttttggccgttaaaaatttcctctgaactattgagattgttagatttaaagacttttgtctaattttagtaaaaaaatttctaacatggatgaaaattcaaggggcatgatttagtacatatcaaagtttgagggacatgatttggtagatatcaaagtatggggagtatggtttagcacataaacaataactaaaacagtaaaattgaaatgaaattacacaaaaatccttaaaatctaacaatctcaatagttcgaagggaa

SEQ ID NO: 306271 - DNA, 1941 bp, Cannabis indica
acaacaaatttttgacgttattgccggaacttttttagttaatattaaataattgaattttattctaatttaatttttctttccaattactaattctatcaaatttttctcatctcaggtttaggtagtatatgcgacaaatagccagaatccacgagtcagaagcttgagggactacatgctgcccactatgataggggctcaatcttgtataggaccattcgttattgatgctaataattttaaaattaagtccgccattcttcaaatagttcgatctaaaataatgtacgtgtgtatataagaattataaatttgtagaagaatgtcgaatgaaaacttgcaccggaaaagttatagaaattatgtatactagctagctagctttttttcttttaagaaatttttgtggttagctagttccgtgtttctttgaatttgtaaaagttattataataattcatggcctctattattattgtttgtagcaaagttcttaaaatgatgatcatttttagaagtcatatagaaaagtgtatcaatccatcgaccatatatataaatattttgtaattaataatgacataattgatcatgatcacgttgataaagaataattatatttgcatactataaatcggattattattcaatattttttctttttgaaacatatacatgatcctcacgatgatttatttttaataatacatatatagcttcttttggttaattagggcatatatatgtatatatgatttggagtatactatcctaaaagctagatcgatcatgtccgatgctttttagattcatagatcaacttttttatctacttgttcttcctttctatatattaattatgattttgttttctttggtttgtttggtgtcataatatttggagttttagacctatctcagtctttgacgttgatatttgataccctccaatattggtgataacaactcggatttaattgaagaggatgtaatatcttttttagctagtggaaattaaatatgaacattttgcaattcttgttatgttattattacacttgtgttgctcatatcatagtcataacatatgatatatgatcaatgatcagccaggtagtaatactttcctcaataaacattcaaacaaaaatatttaatgtatttcttatatatatttacttttcttattttcggcttttgctaatttgtataatatgtgtttgttttatttactaaacgaatattcagtattcactgtgcaatgtatataatatgtgtgtgtgggatcattaatttgatcatcaaaatgcatgtcactattaagtacgtgtgtaattaattattttagtatatacttgtatatatataaacattagtggttaaaaatatttcactaataattctctgatcgaaaaaatatatattaatttcagtgttttttttttttttgctggtagtaattttttttcacatatcctcgttgtttaattttattgaaaaaagtttacaatattgtcggttgctgggggatatatatataaaaaatatatatattagctaagtgctaagtgagtcaattattttttcttctttctttattaatgataattaaatcaattctttgaatgacattgattaaaaatattaagtattattatatagtgcatacttaattagttatcaagtatcttctataactacgtacgtaagacaatttatctaatcatataattatttctagaacttaaatttattaattaatagaggagaaaaaattaaaaaagaaaggaaaagtgtgggtctggttataaggtttgatataaaataccaaagcatattattagatctatcgctcaggcacgcagtaggatattacttatgactattgatggtttgagaataaatttgtattggtttagatttgtatgggatggatat

SEQ ID NO: 306272 - DNA, 2310 bp, Cannabis indica
tatatttttgtcctttgtattatttgtcattgagttgaaatcttgttggtttgatatttctattggagcacaacaattttccaacagaaactcctccattttggaaggtttatcaattttgggtatcaaggcaataatagtatcattaagattttccatgggggcattgttgttaaggatgttcaagctcacatttataatgtctatcttcgtcgtaggccaatacttttggaaaaacaccgcgggaagcccgtctctaccctaggccttaagggggttcaaagaaaacacgattttttcaatatcagattctgtaaactcggtaagtagccctctgttagttttcttagagattttacctttaattttccccactacttcggtgatcatcaaatccatcaagttgctagattgaaaaatattttggaaattcgctaatctctgcttgtttccttttctagattcattgtccattcttgatctctattttttttttccttctagcaatagctttgtggtggaagtattttgaattcttatccccgcatttcatccagatggcacaacttctttggcgctagtactgtttgtgtttctccataacaacattcaactgtttttctgcttctttaaggattcccacaattatgggcagtcatattctttgacaaatcatccactcttttcttgctttccctattccgagaatagagctcttttctcttgttgttattccaattcttaagtctatttccacaattttgggttttatttttgaaatcccaatcaatgttgcatgggtaattagaattccaaccttattcaataatcgtgctacaatcctcctcatcgcaccaagcatcttcaaagtgaaaacgagatctccacatcttcctaattttattagagttactcatatcttcagtgtctagtatcatagccttgtggtccgaacaccaccactacaaaaaatagaaggcttttaggttaggaaagaggttaacccaatcaggattggcacagtacctgtctagtttttccatcataaagttgttcttcttcccattacactagccaagtgtatgtatcaatgtcagcagtaagatccccaagatcacagtcttccaaggctttcttgaactcatccataactttaaaactcttttcttgacctccttgtttctctttggccattaaaatttcattgaattctccctcaattagctaaggccctaacacctcttcacttagacgattcaataatttccaacaatggtgtctttgactactcacatggtcactttaaattccaaagaaactccaaattaaaggattgtcatcatagattaaagtatgaaaatgaaacttagagtgggataaaatagttaccttcaagctcttgtcccaaagaaggagcagacccccacttaagccaattctatcaaccttgaaatacttctcaaaagtaagatttctcgccaccgaatctgcttgggaattagagagcttagacttagagataaagttaagtgttggtttcagctctgccactctggagtggagcgctttgaacgtcttagagttgccaagaccctagactttccaccacatgattaacatggcgttcgacgaccttgaaaattaaagctcgtcgctttttcctcgttttcaaagatagctaaatcctcatttttagaaatatctatctcaacaccccattcttcaccaaggcaggaacagtaagattaccttgggaggacgattccatatattgctttgaaataagtcttaacgattcttttaatgaaactttcttccttccatttctattcctttattttccttttgtcttttcgttccaacacagctggaaaacttccccttcgtccatcgtgaaacaactcaaaaatcccttttccatttccacatttgctcttttttttttccaaaggaaccgcatcaagatccatctcacccacaccattgtcctctgtagcttgtcttttttttgttgggatgcctcctcctcctcctccttcttcgttcctactttactccctctctgagagagaattttaatcttcccaatcttttccccccaaattaggtcatgacacaacactatttttcttaaaagaaatgacactttgtgttgtcgttttttcattttcctctccaaaagtgacatgtcggtcccactttgccacctcacccttatttaagtgccaagtgctacaaacttcttgctaggggtgagcatcagtcggtttggtcgatttttttctatataaaaatccaaaattcagtttt

SEQ ID NO: 306273 - DNA, 3175 bp, Cannabis indica
taattttttctaattttatccatccgtgggtaatacccattagtagtgcactcatacatatatatagtttacgtataacaatataaaatctaaactcatccaaactaaataaaaatactaattagtttgattagatgtattagatttttaaacactccatccaacatgcgatgatccaacatctaatgctatccaattaaatattaaaaaataacatctaatttcaatcccatcacaataaaatattcaatatttaacagtcggttataattaaatcggtcaattattattagattcaaaacatccttaagtcagttaccaatggttactaattttacaaaatttcatacccttgcctttcaacaaagatataccaataacaagattaaaaaaaaaaaaaaaataacattccctttggttcaaacaatattgaagtttgacattcctcaaagaagacagcttttacataatgagccttaaagaaaatgaaataaaatgtaaagctagattctgacccacctttaaagccttttcataagagtagggttcctcagttccaacatctgtgctaattaattattagtaatatttcaatagaagtacaagacacaccataacccaaaatttcattggtacaatgccacgatacagtacaacagtaattttttttttagaaaaaaattatatagcaaaagactgaaactaacttaaggaagaaaaaaaaaatagaagaaaaaattagaatagaatagaagaaaaaggtggtcgccaccgaatatttatataagcagacaataataacttcatttaataatcgttatgatgatattctacattatgtataggagaagaatcttattggtggagaacagaggccttacggtagtgtttggaccaccagatcattattaaaattaaattacaaaaaaaataatttaactcttctttccctcctcaccgccatcaaccaagtaagccttcttcctcctctcggcgttggcgcccaaacagatataaaaaaacacgtggcgtaaattgcgtggaccttccaattggtcttgggcggttgacgcaatactaccctatgaaacaccgagacgtagtaatgaagcccaacagcgaagcccacgaatgtctgggccaggcccaatattttcgatccaagcccacagtcggtggagaacacaaggatcaggtacatcaacagcattagaaggtacaatacgtatcccaacgtttggagcacttgtatgcagacgtaggtggactgcgaagtagcgtagaaaaacttcaatggctcgagccctgtgacaatggccgagagactgagaatgccgaagtagatggagaggtagacttggatgaagatgagaagcttttggagagagaaataagcttttatacggttgaagatgagagagactagcagaagagggattagtatgaatgcgaacgagaccaccgaagctatggcgggggcgtacttgttacccacccagggcttaaacccttttgtcatttctttattggctctgttcaggtaagcttttgaggtagtggagattctctcaaggtctggaatcagagttttttgaaacttcatgggcaaatcggagaattcagagactaaatctccgtcttcctcatcgtcgatccagctaggttgtactacagtttgttttttcacaatcttctgcttattgggtttttgatcttggctgtttttctttagggattcgatcttgcccgaatgagaattcagatcgtttgtaggagagttttgggtcttcttagttgtggttgtgggggttggttttgttgttttgtttttgggtgagcttgttttggttagatctaagcttttattggtagatgttactgaactgggcttggtggaattcaactgcttgatcttggaagtagtggaattcagcttcttaagatcattaaccttggtaggcaatacattggtatttatatttttaccagtactcttggtttggttcttacttgattggtttgaggttttggcaagtttggtctgatttttagatgaaaggctgtttttaatagttttgctttggtttttggaagaaagggtatctgcagccgcagttatttttttcttgggctttataattttctcttcactgtcatcactactactactactaccactttctactcccaacattttccttcttctaccatcaaaacgtgagcttcgaaaagggtccgaagaagcacaaagaaaaacagagacaaaaaggaaacaaactagataaagaagaagtacctttctaaaactgaagtgctgcatgagttgagccatttgttgttgataatgaatttggcctgaaagatctgatatatattgagatctccaaagagtgtgaataggagtgggagagtgagtgagtgagtaaaggaaaactgagtgtgtatgtagttttataggtagtagaagtagaagaatgatacgagtgtttcagatgtgaagggaattagaaggtaggaggagactttaatgctcaagagtcaagactttaatatattaggatatcaactccggtcacatggagagtgacaagtggagaagagtttaacgcggttttaccacctttgctctctttgttttgctttgtttggtgagctagctcgctctggatttccgttctttttcagaaaaaaaatcttaaaaaaggaaatttatatttcttattattatatttatttttaatattactatattaatactatattttaatatatcattaatgtgtataatttatatatatatttttttgtttattatataaaattaacatattttaaactgttttgtttatttaaaaaaaataaacatattgaaattatcttatttattatgaaaaatgaatagattttagagtgttttatttatctaattgatgattgagttttatactgtaaaatttgagtttttgagttgtttttgaattaaaaaataattaataaatgaacatggaattaatataattttatgaataatatatatttattaaataattttttcaataaaaataatacgccataaataaattattattactattaatatataaaaattaatcaaattaatcatatataaaaaaggaaaattttaatgttcatcaattttctaaattatcttacc

SEQ ID NO: 306274 - DNA, 1078 bp, Cannabis indica
aaacaaaaaacagaaaacaatatttaacatgcaaacatgctctaaaactctacaaaaatcataattcaggaatatgaatcatatttattcataaataaataaaaatatcaacaaaaccaattcgtaaaaaccccgctcaccgttcactaaagcagttcatagaaatatagattaattgtcttttttaaggatttacttattttatttttataaacaacatggtaatttgcatagtattgtatgattgaagaggttccaacttcactctataactctcaaaggtccctcggtccaaaatcactatttttaacaggataagttgaaatatacccatttttttcatcagttaaccaaaaatagccttattttaaattcaattgaaatgcaccttctttcataagtccattaccgattatacccgagtaatgttcagggaaatgacaaaggttttttttcattacataagggaatagtggggatataacaaataaaagaaggtataaattaaatatatagaaaagaaaggataaaaatgaaatgggttaacaaaaaaaaggttatagggtgcaatttccactatttttaacactcagcttctcttttcatcctttaagttccaagttccaacctcgacattttaatgtctttcttaattaatataagctgaacccaaaccaataagtacaagatggaaaaagataaaataaagatacaattactccacacacatcacaaaaatcacataaaacaaaactcgttggttttgggaagtataaattctacccttaaaatgggcctacttactctttgttttcttgttcttgtagaagatattcatatcacttacctgtatttatgaactgacttgcttcaacatattctttttttgacccaagaaaaacccaaattgtaacagtatagtattagtagtagcattgtgactaatttgccaagaaaacaaaatagggattaattaacaagtcaaactataaaataagagacaagaacggacgacaaaagaatgaaaaatcaaccagaaaataaaggtcaacaattccacaggtaaagtttgtgttgc

SEQ ID NO: 306275 - DNA, 841 bp, Cannabis indica
ctctctctctctctctctggcacatctaagtgttgtatgtcagaacttcgttttaagcagcatcttaactcaatgcttttgcttattgcaattttttttctgttatgcctaggttaaatttgtatgattttcatgccaaggcacctcttaaagttatcaatgcagttgctatttatactgataatcactttttccttattgttattatttaattgattgttgtttttttcttcaaagactgatacaaaaaatctattggatttgatgttttgtgagaaattcattctatttagctcactggtattaggacatagatcagatgacagactatgtttgtacttggaatgaaatctttaaaagttattggcacaatgatctttcctatgtgaggagaatatttatttcattttatttttaaaaaccattttatgtgagagcatagttataatcatttgatgtgccttggtataataaaaaggctgctggttcactgtttaattttataagtaaagaagtgcttatggtttcttaggttttcatcactttggagtcaactcccgattcaatgtttcgtactgagacagtgaagtatgcattgattgggttgatgagagaccttagaggaattgccatggccacaaacaggcaagtactattgaatatatattaaatggatttgagaggtctcgagcaattttcttaagatttaattctttgtttaatgtttttcagttcgcagaacttacgggcttttatttgattggctctatcctgcacacatgccacttcttttgaaagggatttcacagtggtctgacacaccagatgtaagggataatgc

SEQ ID NO: 306276 - DNA, 1215 bp, Cannabis indica
tttaaggcataaaatcccaacagctaggtctttaggatctaaatgtacagaaggtgcatccactgaagatgctccaggaacctcttcaagattcacaagtgccaactagaaatcactgtcttcaccaaacactataaaaatggaaagaaaacccaagcaatgaatatcccatatccaaatgacaaatagggtattggggaaggcctccccttaaactgcttggagaggtcccatctggactcatcatctacaaggtcatcttcatgaagtaacctgttatggtgatgaatcgggaaccgaaaaacacgacactggcaaagaagccaaaactttccctttcaaaaaataaaaataaatatatatatatatatatggagaagaaaagggcaattatcccaaaactagtttaaaaccagaaatgatcgatctaatcacctgaactaaaacattccaaataacggacattcatctcgacccaaactgaagggaaaatacctcagtagagccctagcccgaaaggtattaccccaaaattcatgcaaaccaatttcacatatagtaaccctaatttttaaacctaaatcctacgcatgcacaacaataaattactataagctcgagacaatatttcacaatcgaagcaagaaataacagtttaagttgaataagtgcttacttgtagatggattgaagggaaaatattggatgctagttgacatttgaagttcaacaggtcatgcaatgatctggtcacgccgtgcaccaatagaaaacttgttgtttgaatggatatctgacgctagaaaatatcagtatgttttggagaaggagaggaagaatctcgtttagaaaagtgtgtgagggcaaaggtattttctttgtcaaaggtttcttcttaagaaattctctgggtaaggatcattgcttaaggtgaggaagaaaaagtgagcccattcaccaagtctcccatttatatgagtggcaatagttcagagcattttgcaatagacggtcccgattatatcagtcaaaaaattactacattcggcagttggggactcaaaaggttttgcatttaatgtgccctaggaaagaggataaaacattcattactcatcatttcatggaagcctcctctgttggaaatattttacaaggatctagatttactacaatgtatgttttattaacaacctaatatgaattctaaaataa

SEQ ID NO: 306277 - DNA, 1945 bp, Cannabis indica
tttgaggctgattgtccgaggccagggtttgaagtctacagtgcaagtccaaggtccacgggactagggtccaagttcaggggccaagcttcgagtccagtatcggagtactaaaatatagatagaaaaaaatacaaataaactctaaattaaagggtaaaaaactacttaaagtttttgaaagtgacatttttctttaattcaaaaattttcaagattttaattctcatattaaaaattaaaactaaaaaaaaaaatattacacttcttaaataaaaataaataaataaaaaaaaaaaaaaagcgtgaaaaaaatgttatgaaatgcaccatatataattcgaattttccaaaacattggaatatccctttaatatcaatattctcatccataattgagaccaattcatgggtttttttacatcactgtaaactatgaactttacataatgttttaattatttacagcctaaagtgattttgcttttttaactatcaatatgaagaaaagaagttgtctacaatctgttacaaataaagctgactcatctgtagtcaaccctcacatatattgatgattttgatgtataccctccttgaagggaccagattcatgtaatagtttcataacaagcttaacctgcaagattaatctctgtatcagctaaactggcaacctgaaattagcgagaagaaaaatagcagagaaaaatgaaatcataatttgacatttgtaatcttgaatgtcaaaactgatactgaacaatcaaagtgaggaagaagtgaaaataataatcacttatttgcacaattgcttgggaatttcgctaagatgggagcattttgggttgttttgggacaaagccaaaccaagtgagaacactgagaaggaatgagagatgaagataacctttttttacttatatagtaccaaatacctaacaggcctaccatgtgggagtttctttaaaatgtttaattggtatctcttacctgagctgattcacggtccagaaagtcttttatggccgtcctgaaaccttcatccatcaggtaatgggagctgtaagttgtgacgggcagatagccacgctgaatcttgtgctcaccctgagctccagcttctacagtcttcagattgagttctatagcagcttctattgcctgcaaatttgaacacataagcattattaaagttacttacatttcttctcaaactaattattagccacatgatactaaaatattgcaacgagctgcaccatataatgaaagtcattgccagacctggtaatagcaagcttcaaaatgcaaacttggatagtatttccgtgggtgacacccccataggcgtccatataaagcatctcctcctataagattaagagctcctgcaaccatttcttccccttcttcagctatgacaagtagtacctgatctcccatctttgatgccatgatgtgaaagaaatccctagtcaaataaggagtgccccacctatagataattgataaagtatctaagatgaactaatctttataatcattaaagacacgaaaagttctaaaattagtggcatctatccttaatttcaccaaaatgaccaaatgcaaagaaagatgtagtataacaggaagcaaacttgttatctgtcgtgtttctgtaaaaattatagaaggaatcccaatgcctagcctgtcaacaagaaacaagtgaaaaacaaaagtaggattagacaaagtagatgaggaagtattgggaataatagttaatcttcaagaacaaatcaactttcataacaggcattcccaaagtaaacaatagaattaatgagaagatctaagagcagaaactagtgatacatttcattattgggtgaatgattcttgtagaaaatagtgaatcgaattaattgtgtatttcatagaatagtacatatttata

SEQ ID NO: 306278 - DNA, 603 bp, Cannabis indica
ggtgtctggtgtcaagagatggcttcaattcaagtttgagaaaataggtattttttctcataactgtggttgtttgggccaccagtgcagaggttgtaatttgtcttcttcaatcacggttatgaattggaatgatctcccattccttctatttgggtcgtggctgtttaattcatcttcgtacctggatgtgttctcaggtgccaattcgttcttaccatgtcgtgcatcttctacattgccagtgtctaaatagatctgccgttcttgccctctgacaattactggcaagggtgatggtgattcaaagggctcgatacccaaagctatttgtaacttgagacgtgttaagatggtgactagtcatgcacttgatgcggttggtacgttgaaacaagctgtgtggattcctaatccgctgcctaggcatcgcatgcctccagttgccaaaaatggtaataaggttcatgttggggtgagggtatggtaaagggacttgctattttacccagtttgagtttgaatatttctgactatttaattgacaaagagaagacatttaagggtttgattggtactgaggtggtcaaaggctcattgcac

SEQ ID NO: 306279 - DNA, 1707 bp, Cannabis indica
aaaaaaaaaaaaaaattattacaagataaatgaatactcaagattgtaattttatagtagagttaacgaacattatactatcttgattgagattttaaactgtggaggtggttacagctcaaccaattataaagttagtaacggcagttaacagacaagctaaagagaatctggagagttaataacaacaatattttattcaaaagataagagataatacagggatatcatatataacataaaaagttgtaagataaccaataaaactaaaatggaatatcttttaattggtgaaattaattacatatatatgtttccaaataagttatcagtggtatactatatcgaaataaaatatagagtattaatatactaataaactaaaagaaccttaaaatgaaaaaaatcaagtgacaatataccttttaaaaaaaatattatcgtattaaacacacaaatattagtcgtcaaagcaaaaatgagcgcacattaccatatttgggggattcaaattcgtttaaccaaatttattgtattccgattcagatacacattgcttaatgcaaattaaatttttggataacgctctctgagtctcccttttccaaactcaacctctctataaatttttgggtgtgataaaccaaagtccccacttttagtcctttagtcatcaatatggacaagtactcttggaacaactctggtttgttggtggtcttgatcttgctcttggtaactctgggtaaaaactatctcttctatacgattattattcttaattcttttgcttcttatatataattatatatatgtatgtatgtttagattgtgttaagtagtgaattttgcaggttgtaaaattgaagtgagtgaaggcaggagagtaatatcatttagatgcgcagtaaaccaagattgcctaaccatctgcaatggatgcgccaattgccaatgtgtcaacacttggtgccaatgcgttggtgactggccgccaccaacctccacaaactcatcacctccaacaccttaattaatcaattcgtcataatttcaatgaatttcttatttataataatacataattgatgtctatctttaaaagaaaaggaataaaaaaatcatgtatcgtactaagctaagtacctattatatataaatgcataacatatattgttgtggtttatgataatatactttttctttctctcataacagatttttcttattttctccagaaaaaaaaaaaaataaaagattcaagcaatatgtgtgaactgggaagaatcgcgtaactaggggaagaacaacatatatgtgaagattgaagaacagttaaaatccataacaaaaattcccacacatatattaaagaaagaaaaaaaataaataactacacgaccattcattactattattttgtatctcggtttcatttgtgagatgattagtagatatagaaacgaaaatctgaaacattacagaaggatttgctaagttttttttatttataaagatttatataggaaatatgtgatatagatatcaattgcatatggttcaaattttatatgtaacacattcgcatcattaactaattgttctgtggttgataacaaaacattgatggcttggttagaaaagcaagctttaggatctgtttgaatagattatttttataaacaattaataagaaaatatggaata

SEQ ID NO: 306280 - DNA, 2659 bp, Cannabis indica
aaattctactctttgtaatatttgtgacttgtgctatgattgtatcgcttcttacaactttttccttttgatccaacaagccctgcttaggtatttttgctgaagaatcttgagtaggaagatcgtcgtccttcctcttgccaatctcttggaacatcctggaagacatggttggacaataaaaaaaatgagacttagaagcataaacaaaaaagtatacaagaataaaaaaaaaagatttgcaataatatagtcatattataaatgccctcgactactcgaggtgcatcctcataaggctttactgttggttcatcatccaaggacattttcataagatcaaccttaacaacctttttggctttgccctctacaacgggcaaaggcgagcatagtacctcgaccacatattttattattctgatattggctgggcggagaggttgagcaggagaagcaggactctttgaggcatatttttcctttatggccttgggacgagcagatggtgccttttccttagacgtggccttggaagatttatgcctaactacaatcgaagtataaaatctgtatttttgaaaattctcttacatggccaactttcttatattctctcatcggctaagagttggagtattcagcgacatctctcccttagccttaaagtaagagttgaacggataaaagatccaacctgttggaaaagaaagatgtttggtcgtcacatcctgagtgaagaaataatctctaaataatttgtcgatcttagtattgtccaatgtgccctctagccagttgtaattaagcaaagagaaataaaagtatcccatgtcgtggttacacgagttggacttcagatcaaacagaaaattaatttcatggctggagggctcccccatcctaactttgcatataagatatacattttaaataaatatttaatgtccttaggactaatttgtgttggaaaaatattgtaataatccacaatcttcttgaagtaaggatggagggaaagtatagctccctccctgctcggcgtgaggctttgactaggcacagagtacagtgcaaaggtcattggccaatttttcagggtccatacgcaagatagtggcgttcttgaacaagccactagcttatatattggccatccactgatttattagcatagacggagcgaactgccatcaaatgattggcctagctccatagtactagatatggtgaccataatcgcctttgtaatttcccccttgaggtaatatacaccaagaataagacaccaaccagaaagggttgagggtttatctccctcatattcatcgcttgtcttttgtacgacctctcttcttcttcccttatccattggacgttctcttcgtcctcctcctcagagaaatcctaaacttcaagatcaccttccctcgaattggccattcttcgaccaatgtatggatcaaagctggggttttgacgaacggtctacttggtatgagccaagtttttccttcttggaaacctagccttggaagtgctctgtgcaactgtaactgcaagatcggccagaataaaattcccttgacgttgcacaggctttctgaagggtaaagtgtctttgatgtttggacggactatgtacgtgcaagatgatagcaaaaattgtctccaacctttattcagctcctagatgtgctggacgtatgtttcgcctccaatctaatcaaaatattgatgatgtcggtaatcagatttcgaataatcactcgacgattctccctctccagtggtcacaaaaaatattaacgacacgcttgaagaagatgagaagctagttacacagagagtgttatcttcaaataagagctggagcaggtcattgtcaatcgagtattcacctccccaaaagtcaattggatttatctacaaaattgaaggctagagaggggaaaccctaagctgtgcaactggaagaggtgtttttctaaattaaccactttttataagcataaaaactaaagctgaaagcttccttttgtttgggttgtgagaaaatgaaaatgaaaatgttaattttaaattttaattttaaattttagctttggtgatcctgacattgattgatcgagactcccttattacaccttttgttgagacttagagagagaatagaaaattgataggagaatgatgggattggaatggggtacaaaagtagccatgtatttgcatcattgcctaattgtttgctgcctttcacttttctttcttctttttaatttttgtgtcataatcattgatttttttttttgaaggaaatctaatttattcaaaattcaatgaattacttttactcttttgtcaattatcgaatgaccaaagagttaaggacaccaatgtaccaaaattcttatgacaaatggatctctgaaattagagcactcacaaaataagacctccattacagtaaatatcaattctattctacatgtggaatattttttatttctctttctttttcttggacttccttttccactaatataaatatatttatatatatggaagaggtttcaatggttacatttttattgtaaccatcatggttacatttttttaagccattggattattattttatggttgtgattaattt

SEQ ID NO: 306281 - DNA, 1263 bp, Cannabis indica
ctggtaaaatatttctaacacaatgtagagttgatagatacaaggtcagacttgtggccaaggggtttcatgaacaggttggttttgactactctgagacatctagtcctatagtaaaaccaataactattagggtggttttaacaattgttatcgccaagggctagccaatttgacaactagatgttaataatgcatttctcaattgaaatctgaaagaagaaatttacatgcataagccaccatggtttgttgattctgcctatcctgactatgtttgcaaacttaagaaagccttgtatgacttaaaacaggctcctaaggcttggattgaaaaattatctactgtttttttataagttttgggtttcagttctaataggaagatcactctctttaccttagagcttcctcagctagttgcatctatgttctggtatatgtagatgacattcttgtcatgggtagtgatgtctatcttgtttcatgactcatatcaaatctgagcaaaacctttgctattacagatctaggtctggttgactacttattagggatacaagttactaaaatcgaataagggattttactatctcaaataaagtatctgcaagatctcttatgtaaggctaatatgcacaatgtcaatactcaaaatgctcctatgaacagtgacctaaaattgtccaattatggcagtgaaccagtgaagatgcaactctatataggtctattgttggtgttctctaatatgctactactactagtattagagttagcattttatgtcaacaaaatttgtcaattcatgcagtctccattgcaaagtcactgggttactgtcaaaagaacactgagatacatagcaggtaccttggattactactactaatttttttttttttttgcctcggtcaatgcatctggtcagagttgttgattgacgcaaaattcaagcctcactttttttctttcattggtaactgatgcaaataatgagtaattcatgtcggttgtaactctgatactaaaataaaaatcgactcttaagatgattttttttcaaaaaatataaataggcatttagtatcggttagcaatcgaagcgaaagaggttaaaaaaatcttaaaaaatccaagttaaagcccattactatacacaaccctaatatatatacacattaaccaaaccctaacaaacaaaacactcagttgcccatctcttctctcccatttatctctctctattctctctctctctct

SEQ ID NO: 306282 - DNA, 1379 bp, Cannabis indica
atatatttgaagtagtttctatatatttattaaattttgattggtttgtcaattaatcaatatatatgtatagaaaaataaaacattaaatgacaataagaataagaaataattcataccaaaattaagtttgaaaaaattatttagtccgataaggtatttcttttttgatgtgttgcataattaaaaactagaaatttatttaatccttaatggacatttaataggttagctgtcatatgtacattttagaattattctaagtaatttgaaccatttttatgttacaaaaaattatattatttttaactacttattcaatttatttgacattcaaaaaaatattttactctattttgtatttgttttttcaaaattgtgtacaacataccacttaaaataataaaagtatcatttaacaaataataattaatacttttcaaaacaaaatatcaatcattaaggtgggtagccttattatgtactcaatttataattattagtagatttgaaagatgtggaaactttagtaccagaaataaacttctaaaattagagtatccttaacaacataaatattgtgaagatcttctagtgacattaatctcaaacaaccccatccatgacttttgccaccacttttgccaagactaaaacatttattaactgcacaatttgtaataaaaaattataatcatgaatctagataatatatatatatactaatttggttattaattaattgttaagaaaaacaaatgtaagtaataacctttaaattctttgtgtttagaattaagttgatcaattactcgaagacaaaactcaacataagttgttgattcttttggatgttccattattaaaaacattgccaatgattttccatctatgctttgttgaccgtttggaccaatacttaaatgcctatgtagaacaaaaacaattaaattaaaagaattaacaagaatattaattagtttgaatatctaccgatacattatacatttttgtatgtatttttatgagcttaccactctattttttcataagaaaacacttgagatttgtggacatattttttctattatcttagaaaattactttaatttcaacgaaagataggattatctatcaatcgacgttgaactacagaaagtgttgcagagattggagcagtttgatttatggtaaaaacttcaactccaaatacacacgagtcattaaccacatatccattatgcacatctttaaatgtttcgagtgacattatttgttcaaattcccattctttctttcatctcatgaaaaccctcacacttacaaatttcaaattaacaaaaaaaaataagtgtattatacaaattaaataaaaaccc

SEQ ID NO: 306283 - DNA, 1289 bp, Cannabis indica
agagagagagagagagagaggagagaggagggggccttggtattcattcatgggatgacacgtggaccaataagaagttgttttagaggtgaataacacttcatgtgtgcctgtctagaaaaaaactccactccttacctctttgccctttcgagtttggactttggatttggacccaaaaaaaccatcctttgcatccaattaagctgcttttgtagttgtttgtttatgtaacgcaataagagccatatataagtgtcaaattgattcctgccatataataatatcatatatatgtatatatatattcttttttgataatatttttgacccgtttctaattaatcagcccacgattaatttgtcctaataattatctcttatatttcacaaaaaagaaaaattgggtatcatgtatgtaagtgtgtatatttactactttttggccaacttttttgatacgtggtccgtgagtcgattatatatatatacatgtcttgatattagagtttgatcacttatagggaaaactacatattaatattattcattcattttattggttgttatttttatcactatatatatggtgagaatagaatcatagtatctttcatcaaaagataatttattgttcttttttgaatcggaatttacaataaaagtataattatttataaaaatacagtaataattttgtaacagttggtaataattgtttttttgttttgtttaatatctgaaaatattgtttacaaaattttaataaaagattataaagttacaaaaataaacttttaagtctatttattaaatacctttttttagtacttttttcttcaaaagtttatttttgataattctgatcctatgatgatttaatgaagaagaagaatgaaaataaataaagcaaaatataatttttgtaaaacttatttagtctatatattgctgtcttagtaaagagaaaataatgaataaacacctcaattttattcaaaaatcagatttaatatatttttaaatattacttaaatatcagtcaattcaagctaattaaaatgtctagtgaacaaagagaactaataaatctcatttacaaatgttataaaaaatcaaggtaggattttatatattaaagtgttatgtattattctttataaaaaaactttttaagttgggatatgtttaattaaaaggagaaaataataatggaaaattcatatcaacttcttaaaagaagtgtattgatgtacttttatctgttttagcatttaagagaatttttt

SEQ ID NO: 306284 - DNA, 1902 bp, Cannabis indica
tagtaagactaccttctttaccgcccaaaagtagaaacgaaaagtgcaataatcataaccaaacgctgcaccgtcggattccgaaccttaacaagaccgcgggtaaccaaagccagtaacaccccaacaatggtgtacagaaacccaactgcaaaaccctctgctccaagctgcattcccgagccctgatagaaaaatactagcttgtttggatcgtttcggtccgccaagaacatgggcatctttcgaattatgttgtgcatcgctccagaaacactgaagaagtaaacgaaaaccgcaccggacaaccaaagctttgggtcgtgaaccaaagtcttcccactgagaacctttttcacaataaatggcaaccaaaccagccacgcgataacggcgaaaattatttgattcctggaaaacattggcggacgatggatcggacccacaacaagcttagtcctcgattcaatgaattcggccatagattcagccaatcgggagaaatcgccctggtccatctggtcagaatctttgaggccgtgattgggtccgatgagcctgatatgagggagggcattgacgccaaagctagcaaaactattctgggactctttaaactcaatgtcgcaaaagaagatcttggcatgggaaggggaagatgggtcttgattgttggtgatgaatgaggaagcgacaatgccgaactccttttgcaagtccttgaggtggagctcctgcttgtcatgaagctgtgttgcatcgaagaagagaaggagcgagtacggccttggagttttgacggatttgaggaagcgagagatggagtgatcgtcgaggtggatcactcccgatttggatcgggattgcaattctaggagctccgaaactcgatcgctgccagaatcggaggatacattgtgggtcactgaagaaaagagaacgatgaagaggaagaaatgggttagggttagggttcgaaacgatgtcattgttgatttggggcaaaaccaattgaagagtaaaaatctggggttttgttacttctggttttgagggtcttcgtaatggtaactggtaacggaacaaggaggagttgaccaatgacttcagctagattattaaacggtgttagtggcggagccagccgttatcttaacgggagcaattttttattttttttaataggacattaatgaaaaatattagttttgttggaaaaaagattacaaattttatagaaataaaaaataaaaatattagtttttgtatcattgactctcaaatactatgaaccgtaacaagcaagtcatgttcggctttcttaaggagaagatgaggaagcggatcgaagggtgggataggttaggtgtcgagcttgggtgtacccatgacccgctagggtttttgtgtaaactaagcccactattgaggcaaatacgtgaaatacatgactgtaggcccactagcagagttctggctcgtggaacaaagacaatcgtacgtctggggaccacgcaaactaggacagatgtcctactggcatcgcacatgtgtattgtggtgtcaacgacatgttgttggacaaagggaaggttttcctttcggtggtgagcgcactatcatgctctaacacaagggacaagtcctgattcggtgggaacaagcatcagaaggcagtcatgtcaccctatactaggcttttgagacgcctattggaataccctctgcatatgtgctcctacgttcattcagacggcttcttttattccacctcgagaaggcaggagaccttggattcggataagcctcgatctagaggcgagtcttctgagctagggctgaacatcgggcgggtttaccgggtttcgggttggcgggtttcgggttcacgggtttcgggtt

SEQ ID NO: 306285 - DNA, 1596 bp, Cannabis indica
acgtagcttttttctagtatataaatatatatattatttttgtacaaaaaaattaattttatattacaccctgaaataaaaattattctggtgtatattttttatgtttttagttatttttttgttatgatattgtgtatgttatatttatttaggaccattaataataataaattttcaaaaaaaaaatttaaatggtttataaatattattttgcatagcaaataattgaactttatttttattctgataatgaaaaaatattcagaattttctaaaattttacaaataatcttaaataagtataccatacataattacgaaaaataaatgaattaaaaactttccaaaatactaaaacaaacacatttttttttctttaaaaggaatggttatttcttctttaaaaaaaatattaatttactatatgtatgagtaatggtagagatattcttaaattgcacaagtatgtcaaataatatatgttatgtgtaatcattattatttactatttcttagccgccaataaaataatataaggcataatttattagttacatgtgtgatgtcatcatcaaaaccgattctgtcatttgctatagagtattcgaaactggtaataaaaggctgctatctttaactatgtttttctcaatctgacaaaagagaaaactgtgtttctcaatgggacatatataacagcacttatgcatgtatatataaatatatatatatatgtattagtcaattacttgtggtttcttaacttcttaaataagcaatgaaactctaaatcaaacaacttatttttatattataataaatatatattttcttctaaattatatttttaatattaatctagtctctcctaattattttaagagttatatgtcatcaatgtattaaaataattgaacaaaaattaggtaaatgattgagattgtattacatattatttaagtacatatacccaaatatattaatgtcataattattttgaaataatatggctcattaattttttttataaatagtttttgtattccttcaaaacttttctttacatcctaccagcaccaaaaagaaatgttcaaaacatcttctttgttttcctaagcaatgttaccaacaatctattcttaacacttgctttaatcctctttagatttatgtctacattatttattattatataatatataattatttggaaacgacttttagataaataatgaagctattttttttttccaagaattatgtgatttaatttttttttttgaataattacatagaatactaatttttgtaaaaaattttatattcaaattttttttaatatatatatatttttacagtattctataaatacaagaaaataacgaaaaaatcacattcacaaaataagaaaacaaaaccaaaatgacaaaatataacaccaaaaataaacataaaaaaataaatatataaaataacaaaaataaacaaagaaatgcaaacataaaaatgatagaattttatataaaatgaaaatctaaaaaaacttgtaaaaaaaatattaaaaaaattcggtaacaaaaccataattttttg

SEQ ID NO: 306286 - DNA, 3086 bp, Cannabis indica
gaagaaagaaaaaaagagagaaagtaagtttctttttaggatggggtgggttggggttagtttagatatagatagaacatgaagatagctaggctcttcttttttcaaaaaaattggtggttaatttttttattaatttcatagaaaagctcctgtcttttccatttgttttatgtgcactagacaaaggctgtttttttgttttcatttttttcttgttttgaataaaattgtctatatataagtaaagtgcgatgaaaaggaatgattcttcacttttcatattcatctatttaatagtgcactcatcttatatgtgtgccacatcatgccacatcatctaatctatgctttgtttgtcattattttactatttttcattcctaaatatcattttgagtagagattaatgatcttatttcattaacattatcaataattaataatgcaggaccattcagttttgaagttggaaaggcaaaaggaagcctgcccaagttacatctaaatccatttagttggtcgaaggtcaaaattattaagaatatatgcacggaaattattaatatttttcttattttagtttattctttatataaacaaaccacacaatttaattattccaggtttcaaatattatatatttggattctccaactggtgttggcttttcttattctaaagatccaaccaaatacacaactggagatctacaaactgcttctgatacacacacttttctcctcaaggtagttaattagttacttaagaatttagaaagaataattaaactgtaattaaaaataattttaatagatcaatcaacttttacatgctatttttactaccagtggtttgagcaattcccagagttcatttcaaacccattttacattgctggagaatcatatgctggaatatatgtgcccacacttgcttctgaaattgcaaaaggtattaattaaatacatttcttaagtttgtaatttgtaatttgtgggattttaaatttaagtttgtttctcttatgtataggaattaaaaatggagacaaacctgtcatcaatcttaaggtacatatctataaattgagggcaatcaatcgaattaaagaaaaaaaaatagaactaattaaattgagctacttcattaattgttgtgagtagggttacatggtgggaaatggagtgactgacccatattttgatggcaatgctcttgtcccatttgcccatggtatggccctcatctcagatgaaatctatgaggtatgacttttttggttttttggtcacatgggcaaaatttcgattgtatttcacatcaaaagttacatgtttctggaattagactgattttagcacttcaaaagtttcatgtttccatatctatgaggtatgaaattatttgttattttctatttttttggttcacatggtttaattattatatttttcacttcaaaagttgcatgctttcatatctatgaggtatgaaattattgatttttttttgttaatcttctgtgttttggtgtcatgggaaattgaaatttgaaaattttgattgtatttcacttcaaaagttagatactttctcatgtttatatttttggaattgactgtttttaaaaccttgtgacaaataggcagccagagttgcttgtaaaggaaattactatgctaactatgatgaagccaattgcaaccagaaacttcagagagtaagccaggtatatacaaacatatatatatgtgatgaaatgaaaggaaaaagatgctaatatgtacatcattgtaatgggttgtctttttgttttttgatttgagggactaataggctattgatggactaaacatatacgacgtattggagccatgttaccacagtccagatactgccaaacaaaaggccaaaggaaactcaagcttaccactgagtttccagcaactgggaatgactgataagcctctcccagtcagaaaaaggatatttggacgtgcttggcctttcgaggcaccagtaagagatggcattgtccctttgtggcatacacttgctgcctcttctgctactacttcaagaatcactgttccctgttttgtaagtttatttacttacttctacctacttactttagcttacaacactatcagtaactgtaaaaatagaccatattttaatgtacattatcaaaacaaagttactgtacaagttcaacgggtcaaacacgctaacacgattcgaaacccgcataaaataaactagtttgggtttgccttaaataggtttggatcatttttcgagttgacacggataattcgtttattaaacggatcgggtttacacacttaacccgaaaatgacacaataattacttatataagagtatacactcttaaatttattatatttatggcatgtaaattatattcttagttaaatatgacataatcatgttaaattactcataaatgtgtcatagcgagattttaaacatgttaaacttgttgttataaacatgttaatgagttgataagttaaacaggtcaataggttcaacccatttataaacgggtcgggacggttgggtttgctttatagtttttgtagatactaataaatggatggggtttgggtttgatagttgcttgtaatacttaagcttctacacgaatcacgaacacgaattaaccccctacccattactacatactattctactattctctctttttctacatgaatgaccacttgaatcttgattagctaagctcaaatgtgtttttttttaccttctttttttatgtattctcaaactcctcttattttctcatcaaaccaccaaaaatgcatgtatcattttgtagttttttctttcttttttgtctttgtccaagttttgtttttcttctgtattgctgtgttttgattagtcaagagtggtacttttagagactaatgactctataatactattactgttgtttttggatgtttcgatgtgcctaagtttcaggtcatgcattttctgtcccatgccaaagaaatgtcagcagaaaaaaaaaaacgaaacaaaatcactt

SEQ ID NO: 306287 - DNA, 1238 bp, Cannabis indica
tccaactgtgtaattcttgtaagtttctacagatcttgatgaaagaggcaaaactacaaaacagaagaagaagaagaagatggccaaggattgaagcccaaaaacgtctcttttggtgatcacttccatttctcgaatgatgcttttgattttttttttaacatataaatacagttatgtggctcaatttcagaggtgatagtgactttttatttatgtatatatactatagcatgtgccaagtgggttgtgcctaaggcacgttccacccgttttatcattaatatataatctagtattaatattaatgtaatatttccattttttttaaggaaaatgtaatgtttcttttagtaatgaattttaagccacttcgcctctatgctacttactgatcatggcacgtttcagacttcatgacttgggatatcattacttttcaaagacatttcaccatatgatattgaccgtatccttcagactccgcttaattagcctttatgcgcctgaagatcttcttatatggcatcatactactactgatctacactattaaatcggaataccaccttgcgttatactacagccccttcgccatttcaatctctctctagctggtggtctaggttttggcatctcaattgttttgaatagttaaaatttttgattggggggaatgattcataataccttgcatcttgctgccaatctccaccataggcaagttgatgattctacatgctggagatgtcaacacccttgtgagaccttaaatcattgccttctttctttgttaccatgtgaagcgaatatggtaatcagggccgtctctagccatttgtaggccttgggcgagcttcaaaataaaaggccttatttataacaattttttactatatgtatatataaaaataataaaaaatcatgaatgataaacaaacatatacattttatgaatcaaccaaaaaataaacacataaaaatttatatttttagtcttttgagatgcaaaattatttattaaataatcatagtaaaatttatttaatatttttttttctaatagacagcattgctaattcatttaatttttttttaaggaaacaaatgatcttaaatgagattttataaattttaagttttgtaaaaattttctttatgcaatgcaattcaaagtagaaatttctaaaacaattctactgagatactgagatataagtaattggaaatagaatcaa

SEQ ID NO: 306288 - DNA, 1698 bp, Cannabis indica
tccattaataattaacagaatatatgtattaatttccataaaaagaaaagtaagaaacaaaggaaatttaatgagttagtttcatttaattaaatcacagataataacctgaaaaataactgtccaaaaagagaggctattagctccacctttaaagttcagagttttgaccagtagaagatgaagaagaataagaaaagtttagtagaagggtttaggtgtggttgggttgggttcgggtgatttggacaacaggggaaaattatagaacagagtcggcggctaattgtagctgcttaaagaaggtagcttggcggttgtcaatgggtggtggctgtgtcagacctcatatgaccattcactctctctctctttctttttctctctctttctttctatctctgtgcctctttcagtccaccactttgttttagacgactgttcattttgagtcttccattcacttactttttattttttatttattaaattattattattattatattaataaataatatttgctttaatggggtttcttcttcctgacatcttttccatttagaacaacttacgtttattattaccacacttattttttaaggaaagacattgatgtcctccctagctagctaattaatatcaactatcaagtgaatttccacgtaccagttccatcacatatagatgagatcatcatactattctaatctcgcaccctctaattttaactactttacaattgaaccatcaaagaagttgtttgattattctcttgcttatgacctttgcttattctaatcaatttatttaatatttttattagtgggatgaaagtttatggggtcgtcttatgctatttgtaaaaataaaaaatgaagtaggcagaaaaaaagatttcaagttatatgaaaaatgtcggattcttatgttttattatttatgctttgttgatgatgtattacttttttgtcatagtgattttaaataaatttatttacttcgtcaaggacttaaacttttcttgtaaacttctcgccatcaccgaaatgaataggaatctacaatttattgtacaggtatgagtgctactgaagttcagagggtgctagatgtatctggatttcatatcccgttcaagtatcttgagatcccaatttgctctcgtcgtctttcccaagtagaatgtttaggtttacttgaaaagatggtattaatggttagagtttggagttctcgacacaattcctttgctggaagggtaacactaatttactttgttttggcagcagtccaatcttattagggcagattataatgttgcttccaaaaataatttttaaagaaataatagctatttgtagaacatttcttttgaaaggtacatcaaaatttcagggtcttaggtatatatcttagaaagacttatgtagaacctggaaagaaggaagtttgggatttcgggatgtgttactttggaataaggcgactctaagaaaatatgtgtgggtagtggctgcaagaaaagacaatttgtgggtcaaataggtgcataatgtgtatatcaaaggctgttattggtgggactataaaagttctatacacagttggtatgttgggttttatgccctaaataaaactcatttcaatataatagaatttacttattaatatagatcagaaataacatttaatgtt

SEQ ID NO: 306289 - DNA, 1004 bp, Cannabis indica
actaagtggtatttgtgtaataaaaccaactttgtaagtaaaaatgtagacataagcgtgtagaggtatttaagtaataaattgtgcaaaataaatttttcatgtaaaaatttcttaaatatgcgtgcaatgtaagtaacaataacttagcatatataacaaaagtaagttaaaaatataaaatgttaatttttaataaaatttggtgtctttattgggatgtttttgttttcatttcataataataataataataataataattaatagtgatgtaataaatcaaagctaattattatattccgaaatcagccaccaaccctgaacacttaaaaatgtttgaaattagctcatttaattcggtgaaatttcctatctatatgatttcgactaaatgactatatattaatggttgagatctcccttaactccttcagttgtatttggtgtgtcaacatctaataaatcatcatctttgatttaatccctttcaccatatcgtcctaaaaatgaaacttttccatacaaaaatatatataaaaaaaacactatattataggatggtcagattgctctgttttaatatgtatattttagttaaatttggacatagttggtttgacaaatttctttgttttagcacacccaattctctgtctctcactctctcatacataaaataatcgaaaattttagaccactaatgcaattggtataatcttgtgagcccacatgctttgaatttagttaaatttactaaaatcatatccaaccttaatatacgattatctttgagaatgccttttattattatttatgctatttttttggttttgaaaagaaaaaatcaacaagtacaaagtgtaaaccatgattttaaatcaaaccaattcattttacgtggattggtttagtttggtctgatttgattttcaaattttaaaaagcgttatattcgtttggtttcaaaaaaatagtaatcgagaccaaatcaatccgtgaac

SEQ ID NO: 306290 - DNA, 1883 bp, Cannabis indica
aaaaaattataaattactaatactacatatgtttctctcaatttattaaaaattttgacttttcaatgggtaactaaaccgtgcaatgacagttttaaccgttagtgatttttttcaatttttgttctgttagtttcgattacaacagtattcggtaggtcggtttgaataattttttcaattttctaaattttatgctcaaccctaagaacaaacacacaaatttcaaactcactcttatattaaatttgaattaggatgagacttttctatcttttttcttaagtatccaaaaatcaaattgaaaataatttccatcatgcgagtccaatatttcctttttttagtattattttaggtgtgtttgtgtttataaagtagtgaattgacgacttttactttgccctaaaaatgttgatttgaaaagttgaatagtagaagtgatgatggagaaaagtgggaaagttgaaaaatagtaagaaaagaaaatgatgaataagttgtgttgtgtgtataaaaatacattattaattaataggcctcgtgaatgaaattggatgattaatttaattagagtttctttggttcagtcaaataaggtgaaaattaccattccaaataatatgttaaaacatccattgagaaaaagaagaagaaaatatatttctatgacataataaggtcatccgtgacatattaagaacattgctatctatttttcccaacatataagtacctaaccctcaaaatactaattaacttttaccattactgttactagctacttctttaatagccacttaccaacttattatattctcctcctaattcatatgactctgattcacataaaaaaaaaaaatcatatgactttgaggaaccatgaattttcaaaaatatttatgaatattttaaagatatatctcaatttttttataagaaaaagatatattgtttaagaaaattgagtatatgttaagacaattttccttatataatctaataagtatcacattattattcattgaatataaaatgatacttttacccacaataaattataacttaaaaccagatttaaatagggaaatttgactaattattaatttatttggccaaaattattttactcaacctaagcttttcaatattagtagaataggtcatttttttttgtaaaaccccattctacccctcccatttgaacatctctctctctctctaaactttaaacacgcacacggatgagcacacaatcgggccacctcgaccttgcgaccacacacccacagaccaccgcaaccacaccacccaacgccgacaatatcttcgtcataggtaatccctaatttttttcatgaatttttaacttcgttttatcttttcatgatttagagctaaagcaattaaatttagaattgggtttgtatttttagtaaaaaatatgtaatttttgagatttttaggctcgaatttgtgttttgggggagggggaatctacgattttcgcctagcccgatgtaggcgcgatatagggtccgatggtaggttaatggttggggggaggggggggggttaaggttgaagaagatagcttgataagtccgatattggacccgatagtagacccgatggtcctcataattttattttttattgtttattatcattggaaaactcattccaatatataggaatagtaattcagtaaactaggaaattacttttcttattcttaaataaaatgacttgaaaagccattccatactaaataaaaattacttttccttattatctagccttctcaataataaatgattaaaattataattatatgagtaacattttttattttaaaacatatatctacaacatttaatatt

SEQ ID NO: 306291 - DNA, 1586 bp, Cannabis indica
ttggagtaatctcaagatgaaaagtcttccaggaagttatctcgaaaggcatacgaataaggacaaagtatgctggaaagattcatattagaatgtaagatcagcagtcattctagaaattatcaagatgaaggtatgtgttaataagtaaggaatttcataattggatatccattagagcaaacattcaacttgttaataagttaaatcagtacattaacaactagtaagattacatcagcttgggaaattccataggaagaataagaagatgtaattatggatttggtactgtgtaaccttatgatttgaattgagtaatggcagtagaatgtactaagtcatcttgcagtctactagtgtagacaaattgtacagtaagtaagggtattgagttatatgttgaaggaatataatctagtaaagtttcaaagtcaaatcccataattattatgtaaagggttaaagaagattattgagaaccatagatattaaatcaaaaatagtaaaacttttattctcgaacagatgaataatctaaatggattaataagactctagaaaacacatcgtgggcatataggataaaagttagagtatcttgaaataatctcctcccttgacagaatatttgcctaagggtaacaattcactgtatcattgattatgtactttaacaagtgtggtacaggagaattattagatatttgttcactggaataacataagtaaaaggagaatacaatggaccggaaggatccaagagaattataaggctgtagggtgaatttgagttgtatactcacctctttgaaaacatagaaaagctatgttaattcaaagcgtaggaatattgagtttcaagtggaaggatttgtattgctttgagtatcatattcataatgtgaccttttgatactggagtaagtaaaataggtagcctataagttagctttaactcttgcgttatctgaagtgtataatgtgtttcataattttatactgagaaagcatgtattagacttgacccatattttgagctaaaataattctaagctcagacaaatttattatatgaggaaactacttgtccagatttggaactagaaagagaaagtactttgggataagacaatttcactagttaaaagtaatgtagaggaaacaacaagtttgaagaagcaacttgagagttagagtcgtaaatgaaagagtagtatcccgagttgctcgggtaaatttggaggacgaaatttctataaggaggggatagttgtaatatcctgataagcataatggtaaattattagagatttattatatactatgggttaatcaggtaattagtgggttatgatcctactaatctatttcagtaaaatttaattttgttataaatggataaataagtgtaatttattaattatgaaaacttatatagcatgtctttatataatatgagctatttgtcgaataaaaatatttttaagtttggtgaccttggtgactcgatcgggggccaaagatatcataacaagtttaattaatagatttgatgagaacattatgataagttgataatataa

SEQ ID NO: 306292 - DNA, 2049 bp, Cannabis indica
tggatattacttcaatatatattactattttgatatgcaaattcacttttatttattttattgggaggctctcagttattcaagctagcttgctatgatgatgtgttggattggtctttcacacttagtttttctctattttattttccagattgacagtttatgtcaaaaaaaaactaaaagattgactattggatttagttctttgtattctctacgagattccttatttgttttgaattaattaagatatttgttagaaatttttactagcttatttaccaatttttttgaggcgtcccttgttcattgttaaagaaaaatatataattgaatcaaatctcgatagacctgattaaaaacattcgatgttgtccaatgaacactcctacatgttcccatctcttttcatattgtttttgaaaaataaattgaattagaaatatttaaaattaatgagtgagaaataattataagagaaatagttattcttgattattattaataataataattaaatttgaaactaatacctaacctaacatataaaaagttgttttagtgtgaccatttatggagaaaaaaattgccacccatatattattattattatttaaataaaaataatatagagaaataagaagaaaaaaactatatatttttcattttcctcattcatatttattattaatatacatataaaattgactaatgttagaggcaagaattcttttttgattatatatattattaaatatataatcacagaatttcttgttttatcaaatttttaagtggttattatcaaatataataaatggtgacataatatgccaaaatgaattcattattctacaataatatatattcaatgatactgtataccaaatatgatcatgtcattaactgaaagaaactttcttcatctgtattttttttcaccaacctttacaaaagtcttaattttttttatttattttttgagtatggaagtctaagttctaattaattaaggctaattatatatttatataataataaataaataaatatcttgacttattagctggtatcacatttttactgtatcacaatagttttcatgatgatcataagattatatattatgatttatttatggtaattagttataattataacagatcatttccagtgtataagttattcgatgcattataagtcgtatataaataaatatatatatacttgatttatgctcataatttgtacttattagttaattattattattataattattaaatattattatggttacacacaagttttttttccatgttagaaatactattataataaataaacgcaatttgattttaactaattaattaaataaaagcaacttggttttacttattaagtgaagaaaaagtttatgataaaataattagccatactacatcaaaacaataagggtgagtggtgtcattattcaattttcagaatttatgcaagattaattaatatataattaatattaaattaataaagtaataatatatacaaatacaaattaaaaatatattatttttgcctcctcaagtttagctaatctatatcataaatcattttattttataatatcacacacacattatagtaaatgtaatttttatagtctataaaacatattaccattaatcatggccttttatatacatactatattatatatataattagatcattatattaactgtatatacattaattttataaattattagattaacaaaaaacacacaaaactcgtttctttgtcttggtgtctttggagtgttcctttcgctactacaaaaaatcatgttattattaagataaagatttgattaattaattaattaattaataataatctcaccaaggatatgattacgccatagaaagacatctctcaaccaatcaccatttgccaccttttttcttttattaatggctcgtttagaacgccgtattaagtcgtattgtattgtattgtattatattgaattggattatatatcatat

SEQ ID NO: 306293 - DNA, 839 bp, Cannabis indica
taaaataatttccaacaaagacccccttcccaatcaacccatatacccgaactattcataagagagtttatggaattatttttctcacgagccgttgccttagcatgaaaaaatttgctattatgatcaccttaacggagccaaagttgcttggaccgttggcaccaaaaaacttcacgttaagtgtatatttccccaatagcagcaactgaacgcttgtactgaacaattgagtcgttatcagtgcaccatttaagtctttgaatctcttttttacagttggcaatccgcctcttgaaattgcctgtgtagtcttgtccccaaaccatcagcttctcaccacagtattttattttttcagataacgtcaaaccagcacagacctcccagcagtcctgaatgacttgacgacacaatggctcatggagccaagaattttcaaatctaaaaagagcagccgactggtctaaataaactgcagaagtacgaagaaggataggacaatggttcgagacagtcacttcaagattaaaaagctaggccgaaataaatctttgaacctaatcataagaagctaagacacgatcaagacgaacctcaatccaactattagaaccgcgacccctttcccatgtaaatggataacccgaaagctccaaatctttaagactacaatcctccaaaactttacaagacccgtcaagcaaccattgtgggtaaggatgtccaccttttttattcgcttgggaagtaacattgttcaagtcacctataatataccaaggtaaagaagaatcagactttaaagtacgaatttgatcccaagttctagcacgaaa

SEQ ID NO: 306294 - DNA, 3424 bp, Cannabis indica
aaatttaggatttataataatctgaggaagtacaagacccaatgggggctcaaaagtgttccaaagctgttctggaatagattctccgttcacggtgaaatgcctagcaagtgcgtggaaggaggcttcgtcatctggagcagggctcatgtccaaatgggtgtgcactttcctttgaggtgctactttgctaacttttatgttgttgctagagtagcacctttttaattcattcccaagcatatcgcttattgtcgaggtggtacattttctgtgatcagcataataagtctgctccaatgccggaggagatcttgtacttctacaagatccagtctcaacccatgagaggccacaatgagaaagtagatttctaaaggatggaacgctactccaagagtgtttcttttccaaccagctccacgaagtacacacatgacttcagagattactacttctacacctccggcttcccgttgaagagagttcccaccctcagtttgaattttaacccaataagtaagtgttattccctatattgaaatatagaatttcatttctcctcctgtttgctgtactctgatatgtttttttacatatgtcagattgtcttccttagtcacccttgaccctagagttggaagagatgatggccttctacaaatccttttcgtctaaggagttacaagtagaaaaactcgtgaccagtgagaaccttcaaaatgtgggtctcatcgcttcaaattaggacgtcgaacatctttctgtgaaaaaaatgtccaagagtctctctgaggggattcagatgaggttaaagaggttattgcagtcataactgctgagcatgccttaaaggtagtgaatgccaatgagaaatggctggtggattggaggagacaattccttgaaatcttgagcaaggccaaagaactcactattagattcaaggaggtagtgcaaaatgaagtttctccaagagcgagcacttcccgtagtgatgagacaccctttcacataattaggctcccactttagataacttagataatatagaccaaggtagatttgatccatactttttgaacttagaccaaagaagatattcttgcagtagatacacagataaggtagacttcatcgtaaggagtcctaaccacttcgttccaccagtgcaccaatcattttatagtggatgtgcttagtaagatttacttcccaagcttcttctagcataagactaacttaggttgggaagacattgttcatttttctagggggaaagttaattttgctaaaattaacggtttggatccccctgatgtgctgtatgataatttgttgcaaaaatcatatatttcttcatggccacgtgtaatgtgtatttcttttgttctttgtagatcaaccagccaccttgtagatgggtctactcaataggttcttgggcaacatccaatcaagatctgaagaggtttgaaagatagccagggaaggcaaggacaagggcaagaaaggccaaacttttgggagtggaactcagcagctgctagcacctttggcttcgaatccagaggctgtttatatggctccaagcatggaagacttgtccacttctgtcaattgttctgatcgtgaaacccttgcagtaggttcctttggagaacactggaggggataactctgattgcgatgggttagtcgtgatcattaagaaacagtctagctcctcagacggtggagccaataaaaaggctagggtagagaccaaggaaaaggttctacaattggtggcttcgaggaagttggctgcgaaaggccactctgggaaggggtctgatgtctctgacagtggaagggtgcctagaaggagcaccaaaactaccagggacaatcaagatcctctaccacccctaatgcctaagatcattcctgctactaccacccaactatctagggagaaaactgttttgcctcaattgagtcctccacccttcaaccttcctattaggcccttattggtgacggaggaagataatacacatctggaagttgttgagcagttttaccaaaaaaggcatagcaacgaatatgattaattaaagaagttgaccagcaatatctctaccagacataatgttgaattttctgattatgataaatgggacgagccttgccctgcccttatgaatagagctgaaatggtagagagactccgtcctagggttagaatgacatggcttcatttctggctgatctattggatcaaagtgataccacaagttgcaggctcgaagctgaaaaatttcccatgatggcaaatagaaatccaatctatgtaggagatgctatgaggacccaggccaatgctgtaagtttgactttcacttaacttaggtaaacaatatgcctctcttagttgtttgattcatttgcactttttcatccacatgtgaacttaatggcagagaggaactactccatggtcacctagctagcttatgagctcgcagagcgtaccaatgctgaacaaaggagagaggaggctaccaaaactttagctgaggccaacaccaggatggagactatcattaaacaaagggtgactgaatctttggataaagtcgtagcatgcaaaaagaaggctaccaagactgagagggagcgtagagataaatataaggatctacactccaacaccctcactaagatcaaatacctggaagctgacttgaagcaagcaaagcgcacgtccaagagaaacaacaaaagcttaccatcctttctcaagagtatgacaaacaagttgaaatcatcaatgacaaggtcattaatgaaaccactctggggaaaagggtgaggcaccatatggagttgtagcagaaggcagaggaagctgaacaaaaggttgtccaatgcgctgaggagggtgaggctaagttggattcatttgagaaagctcatgaagagtcccgtaagaaaatcaccaatttggaaggagaaaactcaggactaaagggataacttcagcaagtagtccaggataagcaggagcaggaggtcgagaccacaaaagctttagaactgttatagtgagatttctctcacctagaaactcgagaccagactcccatttaaaggacacgtgtattcaaatttccaatgaaagctgaattttccatgagagactcctcgatgttttaacctcgcccagggtaaaaccagcgagatactgcgagtacgacctaagtcggatcgcataactttaactcacattatacaggatggatccaaatcgcatgtgtcaggacatatgcgagtatcctctctatatttctgcgaaagcatagagatcaactctctatgatgcgatttggtccctacgacccaatagccttgataaacctgtaagcccaagttcttgtct

SEQ ID NO: 306295 - DNA, 1687 bp, Cannabis indica
tttcggacaacacaaatattagggagtaatttattaaccaaaaaaaaaaaaaaaaaagtaagaagttggaatactacctaatcaaatttggacggtgaaactaggtagcacacagatttttacagctcatttcacaaatgataataattatgtatcttgttttggaagaaaattgtgtaattacagatgagttaataatttgaatattagtagtagatgacatctcaaataattcaatatcgtactatacttaatttcagctggctcatgtacattaattaccatgtaaattttcttaatcatgttgatgatcgatcgagttaatttgttatatatactattatattaatatataaatattcttttaaggaaaatgtagctgtttatgcaggcatgtcaattcaaaacatagtaatatgaagaggcaaacatatgtcattgtgacaaccttccaaatttgacttaattaattagtcgaaaattaaaataataataataatgcaagcttccaggaaaaaagatgttacttgtctcttatacaatgtgcactccttccccacatgcttccgattaatataaaatatatatataagaaggaaaatagaaaaagaagaaagaattatcgatacaaattaacaaattaaaatatttaaataagctatcgcctaccttcataattaatacatgattaattttttttattctgtattatacttaatgaataaattaattttaggctattgttttcttacgtacggagggccccctgttctcatctcatcacgtgaatatgtgaaattttttaatggctgtatacatataaatattatctgtatcttcttaagttattgtacatatatttcctcaaaaaaaatatatattgtacatatatataaacttttatgccaagagctcaaatatattctttgattagtatttgatttataatgtagcatattgtatatatatttatgtatagtgctatatagcaccttctttcttctttcttcttttgaattaatttctgagagagtttagctactcattctgaaaggattaatatataaaaactgatgatgagaaacttttgtgtattatataatttataaatatattaaagtacaagatgggtacattgtgtgctaagataatcacgttcatggctaatcaacttatattaatgaatcgacgctgttgatttcaggtataagatgctgaaaagtaaaacaatatatatatatatatagaaagagatgatcgagtacacactgcagctgtcaccaattaatataagaatcattttaattaccaaaaagtcttatcattacaattattatatatatatgaccttatacatgtgaacttgtcctataccatatatatatataaagggtttacatataaccataaaggatggccagtgttgatctgggatttttttcttatattcagaaacaactgatgatgatcaatattcaatacggacagttataatattaattttagcaagattaaacacaaattaattactacatacatatattttggtcataccaacaatgtataacgtttataacaagaaactgaagccttttagcggttgtctttttacttccgccacctcccacatgcaagggtttgacccgtgaatccagatttatgtgtaaatgtaataactttttatttc

SEQ ID NO: 306296 - DNA, 1717 bp, Cannabis indica
aaagttcagggggaaaaaattactaattaaagactatatagttttctgtggagaatattacaaagactagattgataataaaatatatgtatttcaattattattattataaaaaataaaataagaaaaagctaaagttattcctttctacatatatagttcttggaactttcctttttaagttttttcctttttaaggaacaaaagaaattataagagaaattaatgttgttctttaggttaattaagcaatgcttatttttaattttaaaaagtgattatattaataaattccatgacaactagacatataaatatatacataaagagtcaactgttccataattattggtataattaatatattataattgatcaattaatttggatcagatttaatctcttcattatcgatcatgagctgggtttattaacaaactcaataattaaaatgacatcatcaaagatttgttaattataaagcttcatatactaaatagtaaattagtagctttgagttgatataaaatgaacaaataataattgattgatttttgctttaaataaagctgagctagctagctttgaaaagatataatgatagaataaattggttaagtgtgacataaattatagaaattaaaataaataaataaaaggaataagatccaatctctatttaattgaaatatggccttaaattaatatctttatataattaccccttgattaaagccttagaaataatataaaatctcaagattgtatccaatatcatgtgcatgcaataataataataataataataataataataataataataataataataattcatgtgcaattaatatatgcacaacaaatagatccaagaatactatcattctatatttttatttaacaaaaaaaaaaaagtagtaattaagaaaaataaatcccatgagcacgttgtggcatgtgtttatgatttgtaatcgtggtttaaaaaccttaattagaagcaaataatttatacttatatatattataaataaatgaatatttatattcatatgattctttggtattccgtacaaaaaaaatgtaatagtactacttaactataataataaagattaaagacacaaaagaaccatagtttattaccacaaattgtggtccacattgaagtaatctaaccccaaaaaaagtgtaattaaattaatcaccacaaaaatatatattcttttttggtgtattattgttgaagcaatcttgataattgtgcaacactcttgttagttatatataataattaaaattaatttattagggattatactattaatcataagaaattaaccatctacctaagttttattcatgaagttagttaattgatgaagacaatttttataattaggtgattaatgattatcattttgttcaaagtgtttagttaattaacttaattatttgttagagctaatcttgatcttgttatgtacttggttatatgtatgtatgtactatagttgtacttttgtttgtttatatgatatataatatatatatatatatatattatatataaattcattgaacaatattaataatccctaccacaagtcacctaaattacaatataataattatgtggttaattttttcttttctcaagaatacgtttataaataaaattggagttagacctcatgatcattacaaaagatat

SEQ ID NO: 306297 - DNA, 4332 bp, Cannabis indica
cattgcccattttaggagtcttcttgatgactttggcttctgctacacttgacggagatgatggttagtcagtaccctgatggcgtgagtctaaaagtatggtcttaacatctatgaagcaattagttagaaaaggaaagcttttcaatcatgggatatctagactccgggctcagcagtcttttgctcacgtaatatacaagaagttgtacctctccttcttctttcactagggtggcacttatagcatgatctgacactaccaggtacacgaacaacggttctccctcaattggtttggacaatatgggagcttttgttaaatgttctttgagttttgggaaggcttctttgcactcggctgtccattaaaattggttttttttttgaagtgcattttagaatggtatgcatttatctattaatatggaaatgaaatttctgagtgctgcaatccttctagtcagcttttgaacatctttatgtttcctaggtgaagtcatatctagaagggatttaatcttctcagggtttgcttcaacgccatgagaatactgtgagacccaggaatttccctaaagaaactctgaaagtacatttctttgggtttagtttcattccatattctttgataatgcaaaaaccctcttctaatcgtcattatggctgatggaagtctttgactttaacagcatgtcatcaacataaacttccatgtttttccctagtttatttttgaacattttatttatcagtcaatggtaggtagctctgatgttcttcattccaaagggcatgaccttgtagtattaaaggcctttgtatttgaaagcttgtgtgctctttgtcaacgacgtgcatcttgatctgattataatcagagtatgcatccatgaagcttaagagttcataccctgaagttgtgtcgaccatctaatcaatttgtggaagtggaaaatattcttttggacaagctttgttcagatctatcaaatctatacacattctccatgtaccattatgcattgggaccaaaattagattcactagccatatgggatatagagcttcccagaggaagtgatgttacttagcttgtctactcctgtttttactgttgttgctctcactagatcgaaaggccttcacttttttcggactggatctgccttgggatctgtgtttagtgcatgacagattacatgaggatcgattctagtcatgttaaaatcactccagcctaatacatcagtgttcttcttggctgtggagacttcctttctataacaattggaggcaaattctttcccaccttgatgactttagtgggatcttcctcattgatgaatacttcttctacctcttccattggttcaatatttattccattcctacccatggatctagctcatcctctttgcggaccaccaccagtgctggctaagaagatgttctggcttctactatgtttccttctcgaaccatgagaacgctcttggttgaaacattgtagcagcttcttgcacttttttgtttccctttgactgttctattgcttccagtatcacttgggaattttagatataaatgatagatggatgttactactctcaagtcaactagaaaaggtcatcctagaatgacattgtaagttgttggacaatcaaccactataaaggtacagtacttaaaggaggacactgtgttgtttttagagactactccatttactatcagtggcagctgtatttttcctattgggattagggtgtctccattgaagccttgcagttgactggacaaggtgactgattggtttccacaatactagtggctttaaaagcatccattatcaacgagaattctagaaactcttttattcgcaatctacgcttcaatcacaaaagaagcgtatgaggaaaattaacatgatttgcatcgtcttccgtgaagttcattggaagattcatcatttgagggtgttgagcagatgactaaaccaaattacaagtttcatcttgatttagttcattcaggtaccttttttacattacgggtgctttcggcaatatgtggtcccttagaaatggttgccacgtggccatctatctctggctgagctgctccaagaggagggtatggattagaagcaacgataggtcttgctgttggagcattttgtaccccttgaggggcctgtgcattatgagcttgtattccaagaacttgtggatggcctgctccttaaggaggattaatggctccatgtttttcaggaatgaaaagctacccatgtgccaccgcctgttcaggataaatgacctgtatccttacccaattggataaatgaccatttcatactaatccttcaatctaatctctaagataatcacatttattggtggtgtgcctgatatctccatggtattcgcacctcttatttaggtctcttttctgttttacacccttgtataatggcgaaggattcttgtaatgtacaatgttacatgtttctttatagacattctcttgagtatcaacaaggttggtgtacttggagtatcttgattcttgagtcttccctgtctttgtagaatcacttttgcttacacccttgaaaccctttttgctctgattgacattggactctggagcttctgctttttgtttcgtttgtttggaagaggcacttattcagtttgtgccactccaaatttgaaaaaactaacatgtgcaattggctgcctagaagctcttaatctgtaagctttgggagttgtaaaggtagttgatgaagggaatattgatggagtggtcatttgtaaagtgtaggtagtttttgtgttagtaaaaggtgcttgaagtattccgtacgcttgagcataagcattttctagtttgatgaacccttaagctctctataggaaatcagtcaaagttttagctcttctacgttggagttctccccataacaaagatccagtggtaaaacctgatgtcaaagccaacatctcatatcattagtaacctttgtctatacagcaacatccatcatgcattgaatgtattttttcagtctttcccctagctgttatttcaccctagtaagggaactggctttctattcaaagtccttcattacaacaaactgctttttgaacattttttgtaggcctctccagttgtggattgatcccgacgatagccttttccactagtcctctatggatttggttagagtcagtgaaaagtaaagacactttacatcatcactagccttagccacttgcatcatgcgattgtatttagacaagtggtccctgcggtccatcctgacttcataaaattccatttgaggcattctgaagtgctccagtagcgatgcatctataattctcttcagacattattcggtgtcttcttccttttaattggacaccattacgttcaaattttgggaaatattcttcatgagcttcataactcttccaatttttattccaaatgctgagttttatcatttgaagattcctatccacaaatttgatcattgatgtgattcctcaaatcgtccccataaggtctgactttttctgttctagctttctctttcttttcatttaaccttctttgaagaagatttatggagagacttctattgccactatctgaaactggatgcaactcatcaacatcataactttgattgctagaatcattacaatgactcttgcccttctgggaagtaggctttttgataccagcatcgggcttatctttttgtgcacctttgcctctagaattagtctggtcaccctgccgcgaagcatggtttcctttctttttctattgattttggctaacagttttagatttcttttgttgttttgccaagaaattttgtttaaaagtttcacatattttcccttttcctttatccttatgaggattagaggttctaggatctttaggattagattttctggtagcatcatctatttgaatcgtttatttagttttgtttccattagtcagtgttgtcatcacaacttccattcgtttcattttctcaggcattatcacattgaatgaatcttctagagacaacttctttttcagttaactctaacttcttagccataatgaccacgtgatgtgtctcttcaggattgtctttctctctagcaccaccgtcagcaggcatgtctttgtgatcatcttctagtgtatcttggggatcattgtcacgcccgagccataggtcgtggcaaatatgtaatatccataactttggtggtcaaaggtcacaccttgacccttgtaggaagataa

SEQ ID NO: 306298 - DNA, 3104 bp, Cannabis indica
atgagacgacccggaatgaacgccgattggttttcagagataagttgagggagcaacggctttattctattagccaacacttttgaaataatcttatacaagacattacacaaagagataggtctcaaatcccccatgttactaatatttttcttctttggaatgagagtaatattagtacagttgagattagtgggtaacacacctgaatcaaagaagctcctgacttggttcaccacatcatgcccaaccacatcccaacatttctggtagaaccccggggtcataccatcaggtcctggcgacttatccgggtgcatttggaacaatgcactctttacttcctcttcaagaacaggccgaagtagttccatattctgagcctcagtaaccgaaggaataatatcagcaacaaccacatcagtgaatgcacttgttgaagtgaagagatcggaaaaataggaataaataacatcttctaatccagaattccaatccacccaattgcccacatgattccgaagccttgtaatagcattatttttcttcctcgaagtggccttggcatgaaaaaacttactattcgaatctccttcgcgaagccaaagttgatttgaccgttgtttccaaaaaacttctcgctgagtaagtacctctgccaatcttttctctgcttttttaaattcagcaaccgactcatcatctcgtagtctcttcaatctcttaatctcacttttacactgcttaattctattcttgaaatttccagtaaattcattaccccagattgaaaggctctctccacatctcttgatcttctctaagattgatacaccatcatcaacttcccatgagtctcgaaccacttgcacacaaagaggctctcggagccaagcgttctcaaatctgaaatgtcgaggagctgtatgcagactttgatttatcaattcaagtaacaaaggacagtggtccgaactagatacttccatattagtaagtcgagctgaactaaagagattaatccaagaggggttagccatagcacgatcaagacgcacttcgacccagttatcagtcccgcgacctcgttcccaagtaaaaggatatccatggagttctaagtccaccaaattgcaatcggtaagagctttttggaaaccatcaattaagccattcgggtatcggttgcctcctcttttatcggaatgagtaacaatattattcatatccccaattacacaccacggtagggacgattcatccacaattgttcgaagcaggttccaagttttaaatctttgagaacggttaggctcaccatacattccagttaatcgccaaggtcccttatcagcattaataattttaacatcaatatgactccctgaatatcccaaaacttccaagtcattttgatttctccaaagaatactaacaccaccactatgtcccctagcgtccactgtaaaaacaccttcgaaaccaagcatcacacgcattctttcaagagtttccttaagactcaaagtctcacaaaggaagataaaatcgggcttcttttgatacacaagatcttttaggaattgaacagtccccaggttcccaagcccacggcaattccagcttaatacactcataatggacggtgggcctggacaccagaacccaccacaacatcgttttttgaatccaaaggcccaataatactattattattatccttcatcaacacatcttgcccatgagtcattaagttactaacaacaggtggcccacttattttttccttattcggctcaagccctttactgacttcctcttccatacgtcttcttttggaatcaacaacattaagttgatattgattctcttccccaatcacagcccccattatctctttgtccactgtaccatttccaatcttattaatatcttgttgaccatccccacaatcctggtaaatgggattgacaacaacattattaccatatcgattcaagctttgattgcctcccgtattttcagcatttgacagactgttttggctggaatcttgtgcctcctgcatcatcgtgtcatcggaaaaaatggcgtctctttcactgccatcacgtagccactgggaaccgatttgataattccttcttctcggctgagcacgaaggaaggaaccatacggcttggtgatctgatcagctggtgtcgaaaagagtttcgggcagaaacgttcagtgtgaccaatgattccacatatgaagtagaaagttggcacatattcatatttaaaatttgcccagaaccattcactccctgttttacgtagtttcattcgtcgcttcagaggtaaagtgatgtcaatggtaactcttaccctcaggtattccctccatataccctgaaagttcttagggtctgtttccacaaaggtgcctatataattcgcaagatcacgtaatacctgggcagatttaaaacccgactgaagatcatgcacctggaccaaaatatccaagtggttgattgctacattctgtgggacatctccatttttcaatcgagtaaaaacaaattgcaacttattgaaagtccatggacttccctcaataacacgatttatatcaacatcatgataaaattgaaacaaaaaacggttaggctccaattccttaacatacatacctttccccggttgccacaaagacgccatcacatgacgcatgacatcaaaatcaatggctcgttttgttatgaatgtaccgactagtgcccatcggtaatccacatcctcctcattctgttccacaacatcataggacaactcaacttcctcctcatcttcaattgttacttgagcatataagtcctccaactgttttacagtaccacttgatgaagccattcgaaaaaacaatctcaacacaaaacaaaaatcagaaaacacagaacaaaactcagagaattctctcagacaatgtcattcgacatagggtgcgatcataccagcactaatgcaccggatcccatcagaactccgcagttaagcgtgcttgggcgagagtagtactacgatgggtgacctcctgggaagtcctcgtgttgcaccc

SEQ ID NO: 306299 - DNA, 3220 bp, Cannabis indica
tttttggaattatcccttgttatattagaaaagtacgtgcattattgaatgcttatatatttgtaaatatctgattttaattgtttgattgtgattatctaagtttaaattgatgttatttgtgtactaatttgaaatattaagctattatttttcttgttgagtttgtgactcactggtgctatgtggtgcatgtaaggtttagaaaacgtttgggcaacatgagatatggatcttttttagcaaatatacatatcaacttatccggcaagtgaaaccgagtttttaggattcatattttatgatactctgaattttaatatgtattttgttaaaataatgtaatgaaattttttgtaatattttaaaaggggatacccaatctttaaagaattgtgctaagaaattttatgtttcaagattaattagcaagattttaattaaattacaattttacttaaacagttagtttattattataaactaatttataaaagtatacatatgacgtccttaggagttagggtgttaaaaattggtattagagcaaccatgattttaaaggtcttgaagactgactgattttctgtgaagacaagctcgactcatagtatagtaagtattattttcttacctgttatgtgattaattgtttatatgataattttagaaatatgattagaaaagtatggtatattatgattatatgccagttaaaaaagcatggtagaaaatgtgtgtttgattgctaaagtttagtatagagaaaatgcttattagcgttattgtggcgtaagaattataatcggtacgatttgatgatcaatgaagtattgagcaacgtgtaatatctggagactagtaaaatagattagcagccctaattaaaataaattaactataattgagtagtcatattattatataattaattatataaaattttttgagaactatcttttataagaccctatttatgagttagggccattttcgtaattataattttgatgtatattatgctaatagactatattattatatatagcatgttcatattatcttactgcatgtgattttgataagttggcacggtatagttacaatcggatattttgggctcgaactgggtttagggttcaaaattagtgcattgcgtgattatgcataccataatttatttgggaatatctcaatgtgtatatggaatgaaatgcttgaattgccctttaatgatttttaagtggaatatagaccctaggggcagattggtcttttgaccacctttttacaagaaatgaactaagcaattcattttcagaaattaaaagaaaaacaaaaaaaaaatacatttttgtctttttctctttctcaagaactctctcttaacatcaccttgaaactttgttcatttatgtgaggaaaacttgcattaaaagtgttttggagttttttttcttgaaggagattgttgtccaagctgcgggttaagctcttgaggtagctttccctcttttcttttattgtttcaattctgaaattggattgtatttgagcattgcattttgtgtgtttggctgaggatcataggtgaaatattaggtttttcttggtgtttatgccttgtgattttgaatcttataagttataaattgttgtttattgtgtttatgttttgagctcagtatttcgggcatgagaatgaaatttcaggtttaccgtggtttttatttgccacgagataatttctcggcgtgcatttagtgttttgattattatttgtaaagtactatttacattggaagatatccaaaaattctatttatgctctgtaattgcagctttgactgatctttcacatcagaaaggaatttcggagtccccattgtattattcgcaaatattgatcctgaaagagaattgaaatattgtccattattcccaacataatactgacagcagatacaagttccccattagtataccgaagcttgtggtagatctcatatcgttcgcaaaggccttttaaaattagaatagtttcatcaacggttggtttagacacttaactagttgaattcgtctttctagatatatagatagtctattactacaataaatggtgtgttttacttaattataatatctttgtatcgagcatcagtgtacaaactacaaaacccaaatcctcattacaaaataattaaggcaacaccatggagcgattggaatttgttaatggctaaaaaattttatttcaatcttttgaatcatgtattgaaagacaaacttaattgagtcatcatcatcaacacgagaaacaactcggttcttcacgttgagatttgatcaggagtgtagttttacttcactatttgttgaaagagaagcatactttttttattattattgttttaataagcaagagatcgaacgagaaagcgaatagagaagtaattttattaacaaaatgttattttaatttataaaaaagtaattatataacttaagcgtgagttaatagctatacttaaaaaagtaaaaataaaaaaaataattaaataattttttttattaaataactacttttaatatataaaaaaaatactcctacacacatactctttttcaaatgacatttgagtcatcttattataaagggtaactctaatattatcacggtaatttaaatcacatagttgatgacttactggtaactcatccatggccggccagagggtggggcagctggggcctaggccccaggccccacaattttagaggccccgaaaaattaaaattaatattatatatataaataaaaatataaaatatgtgtatatataaattctggttttataattttcataaaagggctgtcaacacaattggtgagagagagattatatgttggttggtgggtgatgggtccgattcttgactttctcaatttatagaaagtttatttttttttaaatagtacattatttaaaaaagaataaatattatttataaatatttttggtaaggagcaaagattatattttttttttgacagaacaaagattatattttgtctaattttagtgaaaaagtctaaaatgaatgaaagttcaggggcataatttagtacagttaaaattcgagcggcatgatttggtagatatcaaagtctgggaagcatatttagtacataaacaatcattgaaatagtaaaatt

SEQ ID NO: 306300 - DNA, 767 bp, Cannabis indica
atactaaggcattgtttgttaggtgggaaaaaggaaaggaaacgaacctgaaaagttaaagaagtggagagaaaacgagctgctaatgttccacaaacataagtagctgaagtcacaccagatagaattccaaatgctgtcgttcttctttcctccgaaacattatctgcctaaaataataataataattaacttcaattttaatcttatttgttatagtaattaattaataatataaatatgattagaaattaattaattaataataagtaccacatatgcaagagccaaacacactgtgctgccatcacaaaccatggcagttagagttctgatcgcatagtatgcataaaagaaataagtggatcggctatacgccaaaatcactgcatgtccaaaaaatatatgtacaaaccatgttagaactaataattaaattcagtccatatataatcaacaacactcatattactttatatagagaattaatgttagaatgcttcatactcctttttaagtttaattaaatatcaggtcttatataatttataatataataatttttaagaggtattgttaaccaattatatggtgacacgtctagaaagtgttagacacaataacaatattcttaattatatctatatatatttgaaatatttgcaccaacaactattattattaaattatttaagaatttacccttacctattttaatactcacaatttaggcatttctttttgataggtataccaatgtatattta

SEQ ID NO: 306301 - DNA, 1169 bp, Cannabis indica
aaaaaaatggtaaaaaaaaataagacaatataaaaaagggataaagtctaatttccctatatatagagatattgtctgcttggtgatccacattttctaaagcccaatagtaaaatagaatcggtagcccaaaagtaaaagcccgattttgaaaggaaacaaacttctataaaagccaaagcaaataaaatgttaaaactatcagaaaagaaaattgtttttagataattgatttttttttcaattatatttacagtttgcgaaaaatatgaaaattatacctatgtaaagtttatgagaaattttaaaggaggaaattacactctataccctttttatattgtcctcttttatttttatcttcttttttaaaatctatcatttttacctcttttttaaacattgtaccaattttacccctgtcatttcaagatactctccatgtgattatcttatgtaagggtattttgggtacaatacatataaaaagaggtatgtttcaaataaatatagaattagaggtaaatttgattaattgatgaataaaagagacatttttcaacttaccccattttaaaaattacgaaaattttcacttacaaaattatgatttaaactaaaatttgtacaaaaatataagaaatttaaaaccatagctttagaagtttaattggcccttgactagaaagatagggaatgattggtggaacgagaataagcatccgacctagagattctttctagcttctagattcctgatttgtccgagcgattttgcgtcttgctttcggcttagtccacaatcaacatttctctatagtttttgaggtgtacaggctcgggcattaggtgaaggcaaattaggaatgaggtcgttcaaccaaaagaaaagcgccagcgattgatttgggacctatataggacaattagacaaaagggtgtttatcaatccgcttaaaccgcccgcaccgtaaaaaataagggtgcgatttacgattttgaattgttattatgcggttcaaactgcattgcaccgcacattataaaaataccaatttttatatttatttaggtccaatatgtgaatgtccaacccaaagtccactaattattatattattgaaacttaatttttatttcatatttattttcaaatcttatggtatttt

SEQ ID NO: 306302 - DNA, 2303 bp, Cannabis indica
acaacaaaactaaaaaaaaaaaaaaaaaaattccatatatgttaaagttgatttttctcttctcttttgaaaattcaaaagcttatccttaatacggcctaagtacgacaaggacccatgttcaacacacaaataccaatagtgttcacttcacttcacattatattttcaaacatatttagatctcaattgaacgtaggctctactcaaatattttctttctttgagaaggaacagagtataggtaacttacaaaaacataaattggaaaaatgcgtttaatttaagtgcaattggtaatataattttgtgtatgataatgatatagacctctccattgttgtcccataaagcaattccaaaagcctttagtttggccccatttttaaagacagacaaaattgtgtgtactaatgctttttgtggttgacttgcaaagtttttttcttttataacaaaaaaatgtatagtgctttctcaattgttattagtgattccgtcattaagggccacaacctaggcagactacagaagaaattataatttcaaaaacgccttaccagcggtggtagttgtaaaacataggtaggttatagtaagaagaacgaatcaagtgaacactctcactaacaattagaaaatcataatcaataaagtatccgaacacttaggccaattagtgtctcacactcatcactataattgaatattgttgctagtaatatactacgtgtccttatacaattagcaccgtacatttgagtccttaatgtatttatacatacccaaattgaattactgctctacctttattcttttcaaaattaatgtttgaatcaaatgatgttttgcctcttccattttgagataacttcatttgtcaattactttctcagtaagtatatatatagcttaatttgagacaaaattcactatttcttgtcactttaatacctaatatcatatcaacctctctgaaagtcctttatttacaaagcgaaagattaaaaaaatatatatattttctttaacattttgcctcttatccactgatacttaaaattagtataccatcaacataaagaaacactaatattacaccaaatgcaacctacaatgctacttttttgcatggatcaaggttgtagatataatagagatgaaggtgctggttatgaacgaatacaaagtttggtaaacaattaccaacaacctgaaccaacgtacaatattcaatcaaaaacatgtcatttcactaacttcattagtactggttctcagctttgttgttgttagcaccagttctctattgatgccaaaataaaggctcaaattcacaattatggctcatttattcattgattaatgatatttaaatacataaatcacatgcctttgccgcaagtcactttggatatcttaaataaagatgattgattgaaattattatgtgcgaattgtgtgtccacatgtcattactcttcataactatgtccgcaagcaagcccctgcactccattgagcccgaaaatgcgtcctctgcctctccgccaagaaccccctagcacgtagtcctctggagctctagctagttcgtgacaattaatttgtagtctctagcatgtactaggtactaacagcattttcaaggagatacaaattgatgatccattgctaaaatatagtttatattgtaaaaattttgctttttattaaaaattaatctaaatttgtcacggtaaaaattcatttaaattttaaatcaaaatataacatgatacaaaatttgtattataataaatacactatttatatatttaatttagtgtcatttttaaaattttattattaaacttagttattgtatgaaattataatttttttatattattttatataataaaattaatgataaagttttatttttatatatataattttaataaaaatattaaataaactttaaattttgtatcaaattttataattatttattggagtataatattaaaaattaatgtaaatactaaaatattttttatacagcataggttttatattttttgaggatggtctaaaaaaattatcttatgttcatattcatatttaccaaattggataaaaataatattactttgagaactaattaagtacatatgggtacaaaaacatttaattcattattatgttaaaatattaggggtaagttgaaaaatatcacttttattaatcaattaatcaaatttacctttaattttatatttaattgaaacatacctctttttatatgtattgtacccaaa

SEQ ID NO: 306303 - DNA, 1312 bp, Cannabis indica
aaatatgtctatttaaatattatttatttttcaggatattatatgaagtttgctcgaatattggtagatatggtgatatcggaggagccaccgaaatcgatttccttcatcaatgaaaggaaacaactagtggagcaacaaatagaatatgaatggatcccttttaagtgtgcggcctgtgggaatttggggcatatagtggctaattgtaacaaggaaaaacaagtggtttggagaaggaaacaaactagtgataacaaggctagtagagaggaaaagaaagagaagcatgagcaaaatacagtgactgaaatggaaaaaaaaacaatcaagggacaataaaaaatctggtgctattcgagagggtccgattaggaaagaaattgagaaacagaatgaagttgatgttgaggatgttggcacctcaaacacatggatcaccccaaaaagaacagtgcatgagtcaaattcaagcccgaaagaggttgctgcaactacagttaacaacaacgggtatgcgatttttcaatgagatgtagatgagataatggttcccgaccccaacctagttattaatggaagtttgtaacattcttggatggaatgtaaggggaatgaataagaaagaaaagcatagtgctattcttgagatttgtagagtgaataaagttggatttggttctttgtttgaaactaaggtgaagcatgaaaaagttcatcgtaaatagttttccaaactggaaatattattgtagcccagttctttctagtagaatcttgctgatttggcaggaaaaatttgttaatgttgaggttatagatgaagacaagaagctggtgcactgcagaataaaagtttgtggccaacaggacacttttatggcaacaggggtctatggaagcaactctatggaagagagaaaaagactttggcagaaactagaaagttttggtcagattcaggaaccttggataatttttggcgatttcaatgctatgttctcgtttcatgatagaagtgggggcaaaccgattctttccagggatattttagatgcacaatcttagctttccaatggtcaggtggaggaatttaaatgttcaggtgcttactatacttggagtaacaaacatgaggtgggagaaagaatttattcgaagcttgacagagtcttctttaataatgactggttgagatcttttgctgaaattgatgcttgttttaaatgggagacattatcggatcatagcttatgcttaattcgaaaccatagggtgaaacaaggtgttggaatttattttaccaggatct

SEQ ID NO: 306304 - DNA, 2318 bp, Cannabis indica
tatacgtgcctcgcacgtaactttttacttagtatatatatatatcttccctcaaacttcctttcactcaatctttcactcactcaatctcttctctcattcttctttttttttttttcggaatttttcgatttgagttgtgggttcgttctatttttggaatgttcttcaagcttgaagattaaatttgaggtatgcaccctcttcacctcttcatttcaattattttttttttaaggggtgaattttatgttgttgtgtgtatatatatatatataaatatatattatacatgtatacaggtataaggaggtttgtgaatgtttctaaatagtaaaaaaaaatgttatatgtgtgtgtatggagagaagatcaactccttttttaataaatatattttgtatgtattatatatgtataagtaaatgtagtaatcatttcttgtaaatttatatgggtatatatgtatgtgtatatatatatttgtatgtatttatatttatatgtgtgtatttaggtgtatatataaattgtatgtgtatgtgtacaattatatatgtatgtgtacaattatgtgtaaaaagatgaacaataagaaataaaattaatttgacaaaaattaagtacttaagttaagtttttgttaaaaaaaattggtagacttttgaatagttgaaaaaaagtatgttagtaataactaagtaacaatatttatgaatagtagttgaaaaaacttctaaaacaaactcttaacttttgaattgaaaaaaaaaatatattaaactaattattagctagaataataaataattagaaatagaaaatattatttaaaatgttcataatttaacttaaaatatcataaattttgtgaaaaattttgtgttttaattttgaatattatttgttatatagaggagcacgtcatcagaccatagaaattggataactatcaatagacgatcaactagatttggagaaggtgtggatgaatttgttagaggtgctaaagtgcaccttaattttactggacaaagtagatgtccatgtaagaaatgtcttaacagcagatttcaaactccaaacaccattaggatgcattcttttataatggcattcaacaatcgtacattgtttcgcattatcgtggggagtcttttagtaaacttccagagcaatatgaagacaacgacgaagagaagattacagatgtgttggtaaatatataagggaatatccaagggaattattcaatgacttgttgactgatgttagtactccaattgataagtatgatgatttgtttatggagatgtcgaatgcgttgtacccaaggtgcttgaaatcggcccttaatgttttggtgaagttgatgcattgccaagtgcttaataggtagagtaatcattcatttgacatgttactcaccatattgattgtgttgtttcctgaagggaaaaaactatccaagtcacattacaaggcaaagataaaattatgtaatcttggattaggttaggactctattaatttatgaaaacatgattgagaaatcttcaggttagagaatgaaaagttgaaatcatgtcatgtttgtggagaatctcattagaaaaaaaaattgtggtgaacgaaaaaatgtgccacataaagtcttgcggtactttttagtctctctgagattataaacgctctacagttctaggcatttagcagcagacatacgttggcattactctaaaagaccacaagaagaataggtgcttaggcaacctacagatggtgaaaatcgaaagtggattcacgtgctttattcgtcattcgcttccaaacctaaaaaattgagattgggattggctatgaatggattcaatctgtttggtaatatgagcaactcacatggcacggtgatagttaatttagtcctatataacatacctctatggaagtgcatgaaatcagagtcattaatgttgtctctattccaggtcaatgatcacttggaaaagatatgaatattttcatgagaccattaatagataaattgaaagacttataggagatatgtgtcgaaacttgtgatgtgtataatgggtctacattctgttggggattattttaccaaaatttatatttactaccatgtatgttatttaacatcctaaatatggatttctaaaacaacggaatttaaacacatataaagttaattgattgaattcttcacagccttacacactatgattgagtaccaacttactatgtgtgggcatgtactctatcactatatggttcaaaaattgaagagagagagagag

SEQ ID NO: 306305 - DNA, 1979 bp, Cannabis indica
ttttttttttgctgaatatattgatagtaaatatttgggagaatataactccgcttttaacttatcaatcaaaatcaagggtactgtttaattgtataattttctttaccccattttccacttgtttaagagctcctgcattccatttcattttttatttttatttttttgatgtaattgcccttaattggttgcagcttttttacatgagtgaagtgatgagatggtcgatacttaaagactatatggaagaatagttaattttaagaattagggatggcaatctatgtttttttctttattattatattattttttcttttagaaaacagagaaactccaccttcttagaaatgactctaagaaactacatggggcacaacaaaccttattcatttaaaattagaatgatgcatgagaagaattttaaggtctgtcataaaattatttattggttataagtaaaataattcatgttattatatttgatttaatatttttacatttatgaacaatgttgtcaatattctctcaaaatattattttttacttaccaattttaaattatcttataaaatataagtctacaaatataaataggtattaatcgtattcgtacatgtagtatagttcctttaagtgaaaaggtctctaaaaactttttattttcattcctgaaaagttgtggactcgcaaaagcagctcctggaaggctttcttatccttctgggaagggtcttcaggaaagctagtcctccttcagaaaggagttctggatgactacttattcctcctgggaggtagtctcggatagtcgactccagcagagtcttttcaatctgaaaaggtcctttagcgagagccttgagtcgtgactccaggagccctcatacttgctcttgaatgcactcttacttaggatgacgtggtgaccttgctcaaagaagagttagttaagttagttattacctaaccaacttaacaacattgattcttgtagtcaccgactttaggatcttgatcctaaacctataaatatcaccaacacttattatttttagaataacgatcagattgagttgagagagagaaaaaaaaaagagtgagaggtagagagagaaaggtacagagaagagagagagagattgagtttggattttgtaagaagaatcttctgtgaatgaagaagattcttgggtgagagtgtgagaattgaaacactttgagagaactcatatgagaatcgatatcggttttattgtacctattcttgctgaatcaataaaaaagatttggagtaaagtcatagattacatcgatctatcagacttgaactaatatataacttggtgttgattttttattttctgccttaaattgttttctagtttttcttactcggttcatctctgatttttctttgattattgtttgtgatttattaatctcatcattgctaattatttaactgtttaaagtttagttgattttattctagactattcgttataatctcctacaatgtcgtatcaagttttaggtattctaattaaatgctaaagctcgatttatttattaatcatctcgaaaactaaaattcaaatataaggcccatttaaccaattcatatcatctccatgtttacaacccttttatgataattatttgatgtatttatgttataccgaaattaaatacagtaaaattggaacgaattaccgatagaataatctggctgagtcgcggacaatgtcgctctctttaagacgtttcgcggctctgcccgaagtgtgcacggcagtctagcaaccacggcgtccccaggataaaacaacctctgtataagtacgatacgttctgcaccgaactgtatcactctgtaacaccctactgtttgctctcagaaaaatcgttcgtgggaggagttggatcgtgggaggaaaaggcggatcattgactgaataaataaataaataaaa

SEQ ID NO: 306306 - DNA, 2521 bp, Cannabis indica
attgtcatttgcataaagatagaaaggaaaatatattttcttcataattgtttggtaggtgtaagaagagtgaaaaaatgaattaatatgaaattattatattttctttttatataattaatataatttttttgtaggaaaaaataatttagtaattttatactcattataattaggagagttttatttgcacatatacatcccaataaaagaaaaaataaacttaaattaattttaaaaattacttttaatatatatattttaaattttttttacattattttcaatttttctttcgagtaaagttgtatatatatattttttattttaaatcttttgtcttaataattaaaataaagtttataattaataaaaaatatgtatattttatataaaataaaaattattaaaattgaagtgcttttattaattgtttggtgcaaattataaaacttctcttttaattatagaagactttttttctttacttttcttcccaattaggatgggaacgaaattggtggacccattcaaaatatatttttttttttttgaaagaaacattcaaaatatttgttaactctctttttttctcttctatttttattttctttctttcatttccacttttctcttctacattttccctccttccacatttcttccataccaaacataagtcatattaaaaaatttcaaagaaaaatttatcttgaaatttattaaatatttataaaaacttgtatgtatatatatttaatttttcaaatttataatttcattaatagaacaagtgagattacaagcacactaattaactctttatcttgccctaggctcctctttgttaaattattgccatgtttttccgcatgtctcggtaaaaaaggaaagaataaacctatggaaatgaaataaagagttttgtaattcttaattaaatcacacagaattgagtaatgttttgcaattcttaagtctatgaactataaattttgaatcttcttatacgtatacaaattagtcgaagtttctaaaaatttaccatgctgataatttcaaactactgttctaaatcccattttacattgattggaatcgaagcagcatccacattcattttaaaagagccttctctagggattaagtttggagaaatggccactaatcgatcaacattgcttaaccaacacatttgacattatatataggatcggtttataagtgacatatatgagagtaatgaaacacattatttcaacaacactattgtgttcttaaattataagtaacacggttgttaactacctaactcgaaccaaagtcaattgtgttggttaacactattcagtatttaccgacgcaaaagacacatttcgatgtaatgtcttcaaaaattgaagccaacagaagtcatggcctcggcaaaaaggttcattaaagtaactccaaaacataacctctttcaaatgtcataataataataatgataaatgtatcgacaatacaataaaccaaaatcaattattttgggccaaattccattattccattaattgtatcaatgtgtaatacatacatacatacatacccacatttgcaatacaaacaaacaacacagtacaaataagttcaacattttcattatgagtttgtataatatgtggttaatatttcaaaagaagcctttggtccaacagtactgtactaagtataataaagatattggacattatgacttcaagtcttctaaaaaccattcattttagtacgaaacttttattgcttttccttctttattcattctttttttcttatctttttcttcctccaatactttcattgttgactaagtatggagactttgcacctttcacaatattattagtgagtgtaagcagagccatttgtatacagtattattattagttatcagtagtgtttaatacttttttattacattaaaagaggatgcttcttttgtatatcatgcatatatatgcacatgttaattaatttcttaatcgacaaaatatattgtcgaatttggactaattgtcaaatataataatttgtgaagtgaagtttcttgtcatgaatttgaaaagggaagattgaagtgttttgtcatgaatttttagaagggaaaaataaaaatggactgtctcaattcattaattgcacataataagaatgatatgtttggattagatattgggaaattagataatgtatatattgaaattgtaaatctagcttagttttatcataatatatattcatcaagatagccttttgctccccaatagggaaagagagtgaaatgacttttaatgtgtgagaatgaagattaggccctttctttaagtgggctatatgttttgggctttttcttaaataagctcattaatatcaagggttaatttcacaaatgcacaaaaataacaaaaaacaacaaaaatacggtttcacagaattttaaacatttttacaattttttttgattttatttacataaaat

SEQ ID NO: 306307 - DNA, 1439 bp, Cannabis indica
aaatgaagactgattcaatctctcatgtcaactctcatccatatagtttcaaggttatattgataactccataaaggcatagagtttttttctttttccttttcttttctgttaaatcaatattcttcttcttaatactatttatttatttatttagtttgcatatcctctaaaataaataagtgtttaatccaatggttaaaatagtcccaaatttgaatctttaacagacactaaacaggctttgattgcaatgaaaatgtctctgaaaaatgtaaatgtcaaattgacaaatttacaattaaaggacaactaaaatagtaatgggattcatcaactcaaatcagaaagaaaagtaaaacaaaatttatggaaactagtagttatgtatattagttgtcttaagaataatttttagtttggtattagagcatctccaatagttgatgcttggaagagtgcttaatgaaattgtggtaactttgctataaaaaataaaacataaaatcaacatttataccattgctattgttgattatttcaccataattatttatttgtcacactatttcatacattcttcttcaattcatctattcttatataacctttttttttctaccaaatggattaccaaaattcccaaattgagacatacaaactcccaaaatctaaattttcactattctctattcaaccaaaattttcttaattctttctaacaatcctaaaattcaaaattctcaatattctctattccaccaaaatatttctaattctcaaaagtatcccatgtactcattcccttactactcttttgagacacctcaatacgggtcattcttcacactagaaaattcaccaccacgtgactttgaaatgacttcaaaaatttataggccatgtatgaacaaactcagccaaaaacaaagtctcgaacaaggcatacaatgcttttggccattgaatactcaactcagtaatgggggaaaaaccagctgaacaacaattggttgagattagaagtgaagactgaaagttggaacagtcaaagattgcttggttaaaaagagaatatgccagagaatgaataagtgggctaatttaattatatcagcatacaaaattttcttacatttgtaaatcgagcttcagatatcaatttgtttcccccagaaataaaaacaaaaaatttaaggtaaaaggaaaactgtggctaacaaaatagccgaaaaaaaggtaagaaaaaatgatttattcctcatcatcactgacatccatagaagaccctttcttataatccaccgtgaagtcataatcatcatccatagcatctccttgggttgatttggcggcctttttctttctcttcttttctgctttcttcaacttgggattaaaaataccatcggcgttgtataacatctcgttttgcttgc

SEQ ID NO: 306308 - DNA, 1637 bp, Cannabis indica
attccctcaattcatctctcactgtcaagttggatcgcacgaactatcttatggaaatctcaagtcatccccactgtcattggacatggcctcgatgatattctcttcactagcgtggctccggtggaatacttgattaatggagctgttaatcctgaattcatgatctggcgacgtaaggatcgactcctcctcagctgacttcgctcgtctatgtctgagacaattcttggatctttagcccaacatcactcctcctttacagtttggaaggctcttgaatagaggtattcaagtcaattggaggcttgccttcttcaaatcaaatctcagttatccacaatcaccaagggtaatctctctattttcgattactttgataagataaaagtcttggttgattctttatcaactgttagtcatcctttagacgaaagtgatcttataatgcatctacttgatggattgtgccttgaatttgacccagttgttgttcatgttacaagtcttgttgacaatctattgtttgaagccattctgtccctgttactcactcatgaaagtcgtcttgaacgacattacaatattggcgatctttcttcaaagatggctgctaatctttctgttagcaattcaagaatccctaatcctagcacaaatcgctcaaatggcttcactaatcatggtcactcctccaccagaccacctcacacattctctggcagaggcagaactggatacaatatccctcatcttctttgccaagtttgtcacaaactgggtcacactacagcagttttccattatcggtttgacaaagactttgtcactccaaaaacgggtgagtccaaagccttcctaactgagattgaagacaaagatactccacaggcccattcttccactaccttgcctgaatttgatagtgatcaggacttgtatgctgatacaggagctacaaatcatgttgctcaaggaatggagcatcttgatactgaatttccctactttgggtctaaatctttggctgtaggcgatggtaagaagcttcctatcacccgcattgataacacttccttaccttcttccccttcttctcaatccttacaacttagatctattttaaaagttcatgttattactaaaaaccttgttagtgtgtctaaactaaccaaagataacaaagtgtatcttgaattttactctacttgttgttttgtcaaggaaaaaattacagggaaagtgccgcttaaaggaagggagaaaaatggcctatacttgctctctctcacacatcttttcctctttaaatgtttcaactagttaccacagcacctagtactaataattcagtttcttgtttgcttgtttgtaataagcagtctgctattgcagactcaaatcattgtattacagttgctattaataaaaatatgcatgttctgtctactttaaatgcttcacaacctgttgagttatttcatttacaaaattcaagcaatatcaatatttggcactctaaacttggccatcctgtccctcacacacttgccaaggttctttcacacctacatattttagccaaaattaaagacttactgcgtaatttttttacaaggaatccaaataaactattt

SEQ ID NO: 306309 - DNA, 598 bp, Cannabis indica
gacaaggttgcagctgctggattctttgtggcagttcctgactttttgaagggagatccttttgttcgtgccaatactaaaagacctatgagtgtttggattaaagatcatagcacggttggtggttccttcaagctattattttgattcatcctttgttgttgtaaactattttaatactgttaaaacactgaggcttgttctgaataaacattttggttgttttaatgataggaggagggatatgaatttgccaaagtagtgattcaagatttgaaaaataaaggctattctgcaataggtgttgcagggttttgttggggtggtaagtttgttggggtgttccattatgaaattagattgtgttatttcaataatcttgagcaggaatgagtgagtttgttggttaagttgacaaaagataagtgttttgttctcagccaaggctgccattcaactagcaaagcgtcactctattaaggctgctgctatcttacatcaatcttatgtcactgtggatgacatcaaaggtactcttctgtatttcatcttcaccttcattaaaaaaaaaaacatgtatttctcttctatatcttga

SEQ ID NO: 306310 - DNA, 4189 bp, Cannabis indica
taagaaaaagaaaataataacccacccaataaaattgacaagtttggccaggttaatccatccaaatcgaccacttaatatttttttaattttatttttacgttcaattgttatattttagttaattgtaataataagacaaatacatatatattgaattcaaagttcaaatcaaccaccataataaaatatattagtttgaactttatattttttaatagtcatataaattatataatgtataagtatatataataaaacatataaatatatataaaaaaaattatgttaatcgagttggtcgagttagttcggattgattgggtgggttggtattattttcaaccagaccaatataaaaattggacgggttatattttcgtcgaatttctaagtttgtatttttcgtcgagttatcttggtttggtttggccaaattatttgggttgggtggtttacaaaatttatgtacaactctagttaagggggtttcgccgcaaatattctaatttaataataatttgatgttaatgtcttatgacaaaactgtgtatatttttttacatttgttcgtactaaaaattatcttcaagttggttatattaaaaaatttattaaaattgagctcaaaaaattattttatacaattttgataaatacaaggtctaatttatcatttaataaaacaaatggtctaatcaataatttttacaatatacatgttctaaaataatatataaaaaaaaagtcaattttaaggataaaaggaaatagtttcatcaatttatgtgaataaatattttgtctttttcttatgaagaatagactatttaaactctatcattttctatactttcaaattattttaaattgatttcaaaaaaaaatatatatattttaaatttttaaaaatttacaaaatattttaaataactacaatatactgtgatattaaaaataaaaactcttgcaacactctcttatgtttggattattgtactgaatattgtaatatagaatcataatattagatacctgttgttatccacatttctcgattaatgacatgtgcattttttaaagtctaatatcagccaaattaagcctagtcaagttaatgaattaacccacctacggagtcaggctacgactccagatctggatgcaagttagcttgcaaacactacaagctggatcactttggtccgggaaaggctatttggttcacaaggcaaaatgtccatcatgatctacccagatgctctcatggggtaatccagacacgagcaattgaagagacatccagaagcctccgaatatcgccccacatagtcccaccatgttagggatttgtcccctacgctagggccatggagtgtgtgcactaccaaaaagaaattaaatttttgtccaacaccatattctctgacattctcgttaccaacatagcagatcgcgacatgtggcatcataatcggtttccactcgtacagacgactattatctcgtgaattggcttttcctttgcatcatttccttttttctagcaagttaattcttcttccccacaataaacaagcaacatttaattaaaaaaacacaactaagataataatattatacaagacttaaaagttagcttactaaatagaaaatgaaactaaaactaattaaaaattaagcaaacaaacacattttcactacttttctcacaataatttcatgtcaaaaaaaaaaataactctataccatagagttatcaatcatacaaggtggctagaggattagataaccatattgacagaactcacaaaccattcggtccggaaataaagtggtgacgtattcgactcggaagaaaaagattcgaaaccatgtgcaaagagaatcattgaggcacagtgccaaaaaaattatgaatgctgcaaatggatcggtatgaaggcaaaacgaattgtaaggtccacctatcaaagtacaataggctagtgcaagtggaacgtgtcagtgaagatggaaaatgtctatgtttctcattggccttgtccaaaattatcgaagattggtggaaaaggttatcatctagctctatctgaaactagaaggatctacaatccatgttctagaagtaatttgtaaccatgaaggactttgatatggaggtcatcttgttgaccaaatcaagcattaagtcagggagagcctcaaagcttctttctagtggatgatggaggtaacaaccaagatgaaagttaacgatgacatgaagttagtgggcctgcagtcggggacttcgacatgatccttattttggaacgaaatgcaaagacaaaagtttgacactttattagactttttggcaaggaccaatgttttatagtctagaagaggcttaaacttgagtctttatggtggctcttaaaccccaatcaatttcaatagttccacacaacaactcatgattttgtctattctacctcccagaacccaatacacaactccaatcatctacgaactcgctaccccagggtatgagcctccacaaatgagtttctccagttttggaatggcacagactggatgcagtgtcactctcactagatccatatgaaccaacaagcaaaagttccaaagtcaggtgtgaaccaatcctggagcaagagaaggggaaatactcaaagtgaaagtgaagctttgaagaaaggcagaaaaggatatgatgcctaatattctgaatatacaaatttgatccacactcaagagaatgtctacaaggccgcgtgcaacacaatccattacaacattcccccttcaatgtacaagggaggtaagcataaaagagatcctagtaaggggtgtgagtaccatggtgacatcagacacactatgaataaatgagattacttgaaggatgaaatcgagaactcataaagaatggttatctccacgagtgggtgagagtcccaatcatatatatgggacaaaaggtagcccaaggatacttggtcattcctggatatcatggagccataaaccctccttagggtgtggtttaccaataagctttgggaatctaggcctctcaggggatcctaaatatctaggcatccagaaatatacaaagctcctaaaccaaggaacccctatcctccaggggctactccacccccatggacagatgcgtcgcgaccatctccagaggtctgcatattgtcaaaagtactaggaatgcctagaagaggtatcttaatgaactcaaataggtgggggaaatgtaacgccctattgcttaggcacgctatagtgattttctactttttatgcacacttttgctaatcaaaagatttctcaaaaatcgtgtcaaatttaattttttttattaaactttaaacttttgtaaatatttatattagaaaataaaagctgggatcctgtctttaaaatttacaatcatattcaaaatatactttataaacatgtcgcacaatgactacaaaataaaggcccaagtcatcttgagaccaaacactccaggtctaaccatcctgatatgtacaatcaccttcgagctttggactcactggtgctcagccttagcctttcctttacctacacatgcaaacaataactgtgagtctacagactcagtaagaaaagcatataacatataacatattaccgaattgtatttagacacccatacacctatttacaaggcttaatagatgatcaagaacgttcttaaaagaagtatgacctttgtaccacatgcactaagtactcgtcccgtactagtgttggtagggctgaatcataccttgagtaccattgagtgttgtatcacatgcactacgtactcgtttcgtactagtgttggtaacattggatcgtaccctttaaacatcatatactgtactaatgtactctgtaccgctaccatactagtgttgggtttgttggaaatattttaccagtatctagatttactaccatgtatgtttcattaacatcctattatgaattctaaaacaatggttcgaaaatttagagaagaaaagagaagggaagtggttcagcctatagagaaaagaataggaggctcaactttctgaagacaagaaatttcatcaactttaagtgtgagccatcactatctatttataggtaaccatctaggtttaggttaga

SEQ ID NO: 306311 - DNA, 2621 bp, Cannabis indica
tttgaccaaaaaagtgctgattggatcggatgaactaccttttttttcttctacttttatatatagtgtatatatgtgtattgtaacatatatttaatcaatctcttattttagttcttgtaatattttacaatagagttgtaatatattaattttcttccattttaataaaatatctagcacaaatatactatttatctttggttttttcttttaaaaattaaaaactcgaagataatttttttttaagactcatatcattgcttttagcctgacgccaattaaaattttgggtatatcttcgtttttaaaaaaaaaaattgaagctaagagggtcgaagataacctatatctctttggtgtcagtaatgtgtcgaagacttaggccctacacgcaagcctatcaaagaccctaaaattgaagacctatgtcttcagattttaaggaactgaagatatatgtgttaagttttatgccctaaataaaattttatttcaatgtaatcttatttatctatcaataaaagattagagatcatttttgactattgtatatttcttgattcacatgtttatttcatgattaattgtttaatatataaattctgttaaatcttgatcatatagatattcacaattataatattgtcaccatagtgtaaaatagtatttgagtttcaggatttgtgcactggatttacactgatgtgataatcaacaatatagttatttatacttgactaagtgaaatgtctttttcaaggtattagtactaaagtaaacaaggatcagatgtatagagtttacattggactgggccgatatctgtcagggaaaaagatatcataaatttatggttatatttttctagtgcaatattagttacttgatcatagatcaactgatctgaatcctgagatgattaagctttaagctaattgtattattagagttttttaattttttcgttaccagcttacccataagacaagctcatacttacatattggaaacttggtgttaggctttatgttctgaaaagtctgtaaagatatttctgtttataaacaagtttgtgtgccgagtttccagaagttgttttgggctatatttactgtgtattttgatttcgtattttgacgtgttattgtatatagttcttttgtaaaatttttataacaggaatccctttaacaaaattttaggatcgttataatgtctgtttttaggattttattttagtgaagtttttaatattattacagattttaatgattagtcaatctattaatactaaattactttataaaattacacacatggcgtttttataaattatagcattatattatctgtattagatttttaaatttccaaataaataagcactatattagacaaaagaacccaaatcttacaattcttagatctccaatagaggaaaagtactattaaaattgcccctgatcacattctgctcacaaaattaaatttatattttaacttcacaaatataatacattttaaaaaaaaaacttgacaaatagaatattgaactaatttattaagtgaatcatcaacgaatagaataagttaagtaagtagctagatacaagaaacttcaaacaataaatatagcactccaatgaccacatattttgaagcaaaacaattccagataaaattatatgtttcaaagatagctttgtatactcaaatgcaatgaaagtggggaactacatgttcaagaacctgctacgttaatccctccactgaaatcgtatgtcgaatcgtttcacttagctgaagaaccgtgcgagtttggaaatgggtgagaccaatggcaagacattaactcttcatactcaaacctggtcgactattctaactgttagaaaatggtgagttaaggtgtttagtagcacggcaccacgttagtcatgggtagatattagtgaaatgaaacttgttaaggaagatggcacctttcttttgtgaagtaataaatatttctgtgttacacaattcaatttaaataataaaaaaaatacaaggacaagggtggtttatcaatacaccaaaccaattttgttatatttcctttttccaataatttcgagaccatgaacggtcagggacccgaggcacgcctaactcgcctaccctcagaagtcatcctgtgtgtatctattctaagattttacttaattaaaatgtaaagttggaaaaggaaaattcgtgcattctaataaaaaaaaaccactcactaaaaacaaatacagtagaacctctatccaagaatacactggaactaagcaaattatattctaattgagaggttataactaaatagggttacactaaaaaaaaaattcaaaatataaaaaaatatcaatgtaacaacaatgacattaaataatcattaatgttatatcataatagaattatttttgagtaaatataatatttatacatgtattacaattttgaataaaattactaattctacataaataattttataaaatatatgtatatattttataaagatgtaattattcgtatatagaggtatactttgttactacgggacttaaaaattgtataactaattacaattt

SEQ ID NO: 306312 - DNA, 1490 bp, Cannabis indica
agctactgtcatgttttctatctgtaattctatgatcagggagtcattaatgtgtggataatgaacatgggcatcatcatcatcactaaatgacacactttatcatctttgcgcaactgtttgggagttagctccttcacgaccaatatttactcttttttctcatactggagcatatgagcatacctttcttgggctttgcccatatctctagcaatgtgtggtcctccaaccatgacttgtaaatacctgcctaggtggcatcaagcaattctagtagtcttgttagggagccttctggttttgattggactttacgcaccaattcaggtgtgttgtttcttcaaaagagaaactcaatttctttcttcgggttgtcacatttatttgtgtcataattgaaatatttgtgaaaacaacaaaacttggtggtatccctcttacttatatctttttttatcggaggaggtctcttatagggcaatgtctgttggtttttattgtccaaattagagtagaaagcgaaagcgtttttacaaaacaattttaggaaatcataatctgaaccataagccccaagatctcaacatatttacataaattaattttacattacatgataagaatagaatacctcttatagtttaccagagtatcctcaaatcttttcgtataaattaacaaacatccaatctttatacacacacaatcaataaacaatcaataatttatgaagaacatccaatcttttcgtataaacaatcaataaatgtcatccctcttgtaaaatacacacacacatatatatatatatatatgtgcatgtacttttaattggtattacccataaatagataatagtatgacaatttttgagtttttctgttttattttttttctatctaattaaaaaaaaaatctcattcttacattatatgggttgagattgaaaaaaaaaacacattaagaaaaataaaatcagcaaaaaggttgagtttgacttaagtattttatacatttatatatatatatatttttgatatagtgtaaaaacaaataattttggtattttttcaatcaattagataaactaaaattcaaaaaacaaaaaaaaattattatttgctattagattaaattttaatagtttaatatttttttcttcacatcctgtacttgttaatcagactgtaagcagccttttcaaaatgaattcacgagagtgggatgaagaggtaattaaggatctctttgatgatagagatcaagagctaatttttttctttacaattgagttctactgcaatatccgactattagagccggcagttcgaacgattggggtactactcggttaagagtgtctacaagttcttacaagaagaaaaaggagcttggcctgttactggacctactagcgtttggaaggatttatggagtttaaaagttccccctaaagtcagcaacttcttgttggaattattttacca

SEQ ID NO: 306313 - DNA, 1291 bp, Cannabis indica
cccttcagacaagggcgtgtctgaggccttccccccccccccaccctgaccgagatcccttgcccgtggaggctgcatgcagcctcgtgtctcgaccatatgcccacttccgcgcgcgcaagagtatgcaattataccatattatcgttcaaccaaaggacctgtatcgtccctataaatcataaactaaagaaaataagactatcataccatgtcgtacctataaccaaaataaaaactaaaacactatggagcccagtatcgtaccatatatcagactatcatcttcaacctagttatatctaacctgcaattgtatttctgaatattattccaacctgggactatcatacccttatcgaacaacatcgtaccttatcgttcgagttatatctaacctgcaattgcatttctgaataagggacaatcagacctatatcagacaccatcagaccactacgaaacccaaaaaaaaaaccacagaaatgcaaaattgaccaccattatcacaaatttagtttttcctgtgctaaaaatataagaaatctaaccaaaacctacattccactgtacacaaagcgaaattgaatctttatcactaaaaatcacacaaaaaaaattaccaaacattttcaaacactaaatattacaaaacataccaaaacaattaattaagactcacacttaacatcttattcgtttaaacgatgattggtggtgaatcgagagttgtgagtagttcgacgattgtgggtattataatttcttgcttcgatgtgagttgtccgtcacacgagggattcatgggtctctgaggtgtttgatttcgattttgtgggtaatctactgatagtttgggttggcacagtggtacgacggtgatggatttggttgccacagtggttcaacggtgggttaggtaagaaaccgcgagagggaaagagagagaacgacatagagggaaagagaaagaagagagagagagatagactgagtgtttgaaatgggagggttaatttcgagtataatgaaaagttgacccaccctactaattttgacatactttaattttggttattagttttaaccaatactaaccatggaaaattaaatttccatttggtaattgaataaatcacatgtttggtgtgattttatcaaaaaaatgaaacttgtgtgtatgtgtatatttgtccagcattgcttatgtgtgagtaatttatgatagggatgttcatcaaactgctcaaactgcccgcaccgtaaaaaaaaatacaatttaaaattcttt

SEQ ID NO: 306314 - DNA, 2923 bp, Cannabis indica
catataaggcctaaattttttattatccagcctcaatagaaatatatagtatcagttacttccaaatgttcttttaataaattcaaaatagagtctgtactgacaaaactgaaagaaaattacagttttacaaacattgggtacttatgccgctaaaaataaacattgagtttctaccgcttacaaacataagactttggatacttatagcgctatttaccctttaattatttattgaataaatgaagtgaatttaaatttaaagtttgtttgtttttttttgtttggaagaaattgattatattaattaaataatataaatctatacataaatgttttatgtatctttatatataaaaattggacatctaaaaaatggttaacgttttattatttttctccgtttactttaacagttaattaacaaatttgtctttctagaaaattcaaaatattgaagcaaaaagcgcgttaacaaattccaatcgattttaatcctaaatgatattaaaatcttatcttcaatttggtaactcggacaccgaatcttaatttgtcttttcgctccaaatatttgatcgaggcaaatggtgatgttccaccattgaagctatccagggtcggccctgagcataggtggactaggcatgtgcctagggcccacctagctcagggccccaaaaaaaatttgtccccttttaaaattatacatttttttttatcaattttgaaaaatatcacattttttttctaaatgagggcccaaaaatactttttttttttttgctatgacccactaaatttcaaggttggccctgaagctatcttagaaaaccgagttctctttttcttacctctacacccaactttcatctttctttgtctttgttactggtctcaaacatgattgatcaagcttaaggatgcacatttccccacgggaatgggcccgcggggaccccccctaatggaacgggaattccccgtctaaatggggaacggggcggggatgaggattactttttgtgtccaaatgttaaacgaggcggggacggggatcacactcctcgccttgacgggaacccgttttatattttatcttatatttctagtaatattttataatttatgtttacatttttttagtatattagtgttttttttttttatgaattttaacttgtgttttagataataattaatttattgaataataattaatgtgtaatattttaatttttatagtttaatatttttgtatattataaattttatttttctattaggggattctccgccccgtttccgctaccattagggaatttcgtgtctcattctcaatagggaataagcggggatgaagattaaaatttttaacggggatggggatggggagcactccccgctaatttcccgcctcgtgtgcatccctaaattcaagctgaatatttgaattttgattgtaatttatttttttggtttattgatttttaattctaaatttggtgaattcatcatctatcgtgacagtaagggaatgaagatggacttcaataccactactcttgagcagaagaaatctaaacaatgtgccttttttcgtcctgtattcaagttcactcttaacgattattttggacaatatctagtggtattggtatatgggaataatttggttcataagaacaccttgccaagtgcaccagtatttatgaaataagttcatgttatcttttgctgatttcaaaggtgtcatagctagtggactttcatggagtctcaacccaaaaatcctggcttcttgcttcttatgagagatggagaagagtgaattttggagaccatattagtggtgcgatgggggtttactgtgagcacatattgttgtgatgtctcagctcctattgtactagtggaggaggcaaaggcaacccttaattcttgctttgtcttaagccatatttaaagaacataagttcatcatcatttaagggtatgtctgaaatgtaatcaaatgacctaatttagtcgtgggagttaaatagtttcttgagtcagtgaatgtgctgagatgaaacaaaaagtccacgcaagaaaatccacgatttaatagtgttactttttataagaaaacatgtaaaataagttacttctaaatcttctttctataaattcaaaaattaaatttggttacaaattttaagacactaagaacattgcaccatccccaaaattagtagcgtgtggaattttcacactattccactataagaatatatcaaattttacaatttacactataattttaacgttataccaaattggtgtataagtttttctttacattttacctctttctctaatttgctataaaaatcctcataaattatttgttgagactatttataattatagtataaattaattattaatgtaaatagcataaaatacaaaattatttaagcaaaatatatttatttagtatcatatttgatatgaatgattggagtttctactgaaagtaatagattatatacaaaatttgtgaaaaaaatattttaaaatggtgtaactattggacacagtctaagaaagcccatagtgaccgagcaagataaaattacagttttataaatattacgtactttatttcctaaaaataattattgagtctatgtcagttacaaacttaaaatttaaatacttaaagcatttctaatatggacaacacttagagttgtcaaaagtgcatacatcattctaaaatatatatatttttttcattcacataagattcgacaatacaaaaatcaccctgatagttgacaactctaaaaattactcaccatggtcccacatgccactatttaaatgattaaaatttattaaatactataaaataatactataaagtatttttttt

SEQ ID NO: 306315 - DNA, 2295 bp, Cannabis indica
tttttttggagcatttagactgaaaggaataaataaatgcatggaacccaactaaagccaacaaatatcttgttgaattttgctatggcttatatggaggattataaaaatgcccatttccttgcatccctcgaatagtgatattaacaatgcagctgctgttgcgttaaacatgatgaataaaaaatgtggttttggaacaattctttgtaattccaatagtgatattattgcggctttatctaagccttttgagggatgttttaaactagaaattatggaagttgtagctctcttagtctccaatggttgattgactgaaactgattctcatttcaaaggattacattttgctgatgctttagtttctgattttcattgtattttaactgatattaaaaatcttgtgtctaatttttttggagtatagatctcatatgtaatatgttgtttgatttgctaacactaatgttcataaatatgctaagtatactctcttagtggatacagagtctatatgtttggaggatactcttccacctctgttaacttttgtgtaataagtctgtttttatgctaacgtctttttcttttctaaaaaatattatacatatgtatattagttttttggttttttaatttttcgttttttttaaaaaagacatagtctttcaagtttgccgttgaaaattattgatactttgtctggaaaagtataattgggccttttcttatcatgatgcatattgacttggcagatttaatttttattttatttatttattcattattttctaaagggaacggacggtgacccattttaaataattctacacatatttcaaaaaataaataaaaatagtatatctttgtttttaagaaaacaaataccttctcaataaaaaatgtaaaaaggaaaaaagaaagtagagtatatattgatagatttggtgactagaaactaaaaaagtttcaagagtcacacacaacacaagtcaaaaagagctcagtttacatttatcttattataagttacatatttttggccctacaaattttgagatatgaatatgattagattttgaccagtatttgcagaagtgatagaaacagtatataaaaatagtgagaattggcccaccttttaatgtatgaagatggagtacattatgtgtcactttattgtaatatccaaattatgggctcttcttcataacatgtattaacaattccattctggaatcttgattcatctttaaagctactaagttctgtaagcttgtctaatagaaattgaagattgaagaagtgttaccaagtgtgtaaataagtgccactattcttggttgatgttccccatgcttaggatataaaattaactctaataactcaatttattatttattcaatttgaactgagattcaaatataattaattcactcttgttaatggccaacttaatattgtttgttcctaattaataagggttaatatttaaggcatgtgaaggccttaaatcatacatttacttcagtctttgtcggtgcttctagcttaagctgagttaaactaattaattttattatatcattttcacataaatatcaacttatcaaggaaagtactagtaattaactttagtcacatggaatttaaattcatataatataatatatttttttttctcttatagagtagaagtagaacatacatataatattagctggagacatttgtatataacatagttttttaattaacatgtaactttttgtcccagcaaaacaaattaaaatgattgagtacagtacagtcatgaagtttgttttcatttttttgtctgtttttggtttttggatactatacatgcataatttgctgtccaattattccatgtaattaacgctgtaaatactgattatatgctcccttattggggtttccataggaacaatgatatactttatttgatgggtattaattggatgtactacttaactgcactgacactggcgatgagcagtacttgaattaaccaccaattattccttcccttttactattataattttattccagatcatccaaaaataattaattaaagaaaatatagtgtaaaattttaaagtaaagtactaaacaaattgaattattattatttctaattgttttgcataatgttgggtgcgatcatactgttaatgttggaaagtaaaagaataatagaaagtattagagtatctttggtattgttttctgttttttgttttcaaaaaattgtttttagaaatgag

SEQ ID NO: 306316 - DNA, 1649 bp, Cannabis indica
aggaaacttatttttcttgttgtgtttgttatgcaattcttgcctagttttcatgtcatgttgtcgtatcatcacctgaattgtcacctctaattttttgcgactttgaaaggagtcgcatgcgaaaagaatttgtagctaaaaaataacattgttactatagtatctattccattacaaaattcttatcataaaattaaatacttttaattaaaaattacatacttagcattgaaatattctataacaaaacttataaaaaaaaatatgtagataaaaaagacaataaataatatatttttaggatgatttagtaatttttgtcaagctccaatttttctataccttagtaaaaaggaactaaaactcataaacaattttttttttgttgctgaaaactcataaacaaatttagtttcaataagagaaattttttaacaaatatgaaaaaaaacaagagaaaattaattaatagtatactatatgatatttaaacttataattaatattaataaaaatcaaaactttcatatatacttaccactaattaatgaagacccaattataggcttgatcaagataatgtgctacatttatcataagtgatttgtggtaccgggttggaagtaagtccaattggccctagagttggatcgcttggggtcaaaaagggtgtcctatccagaagagggatgactctacgggatgtatctgaatgccttcaagaggtacttttggatggtaattcaagaggcaaccttgagctaaggctcacgtgtcactcctctgacaccatgttattccacaatatcaagaccttattccctgcgtcagactaagagaatacgcgcacaccaccaaggaagacatgccctttgtccaaccgccactttactggcattacttctcatcaggatgtacacgcatgccacctatcactatcaagtagtctcatatgtacagacgaccattgcctcatgggctgggcctcaccaaatcagccaaatgacaatatattacttgaatttatcctattagtgagtaatatttatatgctaatcctagcgggttcggatataaccatacccgatcctaacctataaatataactttaactcttcatgtaaagagtatgaaattcatatcttgcacaagaaaggctaaaagctagggttattaactagacaagaaaatttgtgtaatactcgaaagttattccaaccatttaatattaactcatagacaagagtttattaatactcaaatcataaaaaaaaattcttctcaatctctatatttcatctatttatgtaacttttatttcatttaaatctattttcaaaaattccagtaaataaagataaagtttgtttctccttgaagaaaaaatgattagagattaattaagatttgatgaccaacccattgaatcataacgtacgtgggcattaagtatataaatatatactagaagaaactatacttagttttatgttaggtgttctataatttaattgagaaatattcaataaataatcatataatttattatggtttaaaaactaattttaattagtgtgtggggttatttgaagatcaatagtgaaaagtacaaatttaaaatttacagaaagagaagaggagaatgg

SEQ ID NO: 306317 - DNA, 1917 bp, Cannabis indica
aatcacgtaatacgcctatgctagttagggtgttacatacttgacatagtaatcgagtgccatttccatgactaaagggacgaccacaaccattttcactagaagtaatccctcaaccagagccattttgtgtaggaagcccaccttttcttaatgaaccaaaaacaaaattggcttgcatctttagagataagtttgtgaaaacattgtggttttcaagacaaatttcatgggagagtaataatgcctgaattttttcaaaagcgagaagatcactttgagtagtgatgctagaaataattgattcaaactcgggaccaagatcgtttaacagttgcagcataaaatcttgagtgctaacaggggaaccaacaattgaaagagcatcaacaatcaattgagctttattgatatatttcaaagttggataaattacctttttgaaaatggaagaattaacctttcaattggagaagatgagccttggtttggccggagaaacgttgttctagagctctccaaaccacaaaggatgagtgaaaagggacagctaaagcaagaattggttctagcatcgataatcaaatctgtgaaagcatgagctaatctttttttatcattgcacaaattttggatttggagcttcgatgactagagtagtaggaggggagacatttgagaacaagatttgatcaagatcgtggccaattacactgggaactactttgaatttccaagagaggaagttgacatgatctagcttcagtgtaagagaagaagtgagtgaattcgagaatgtattcaagactgttgccaaaggagtagcaatagtagtagcagcaggaagcgtcgtcgtctaaggatcagaggttgaagactccatggacgtaagtcaaagacgatgataccatataaaagataaaacatgtgttgagctagaaagcaaagaaagaaaaacttgaacagagaaagaatctttggaatgaaagcatcaactcatcagagtgagttaggcactttatttatagactaaattttaatacagaagcaacaaaaaacaagattacaactgaaattaagattacaactgaaattagttaactacactaactaaccaagtaacaaacagttagctaagtaacagtttcactaataagttggttaacacataataaggcttgaaactcgagttgcttgacaatattgtcaaaaatgaaccaatttctggttttgttaaattcatatttagaacgtaaataattataatcataggcggacccagaagtattgagggagggctaaaacccaccataagatttgaaaatatattaagatatgattgctgcttacatatatacgcagtagttaaatggaacaattagttaagatgctttgagtttatatgggagaccatgttttgaatccccttgttctatttattttaatgtgtatctacattttatttattaaaaaaaaataacaaaatataaggtttaaactagattcaaacttatgttttaaattttattaaatgtataactaaattcatcttaaaattaaatcttggcccgctaattataatcatatccatacaaaataaagaaagtcaattctcattatcttttcggtgctatttgaattaatatttctaaatatccgaaaatattgagtgttaggtctaatatatccaatctaactctttaaacctatccatagtattattactagcttataaaaaactaaatttaattttccatcctcgtcctaattcatttgtttcacccttttcttcacatcaaataaataatcttttagaaagtagactcactataaaaaaaaacggctacttttagtgacaacataattttttgtgaataaatgtgacttttagtcacaacaaaatattacttgtgacta

SEQ ID NO: 306318 - DNA, 2014 bp, Cannabis indica
aatctcttgtgtcaagttatttattttttctgtaaatattttatattctgcctgttcagttttgctgtagcagaattactttctgctgctgcaaacacttacagtttttatattttcgtatatacaactgacatttgcaaaaacacggttttttacctataaatatgagtccatcacaaccaataagggacacactcatcttacctagcaagaaattagccaaatttttgttgtaatctcattgcatttaggaagctcttcaatattattcttgtgattttgagcataaacattatacaaacttaaaagaattagactctaccaatatttggggctggtcctctctacatcttgttgtgtcatgctaaaaattgagtgaatagtaatatttgtagactatcatgttactaactcagtcattaactttatataactatataatataataatatagatatatagaaaatatagactaggtattaaattgcttttagcacccaattagttaggaagattctaaattatttacaatatgtatttataatacttaagtaataaaattgcattaatttttaaatttaatatttttgtttaaattatatgagaagttacaccacatactgaaatttttaatttttttattttttttattggggcagaagttttttttaaaaaaatactgtgtaagttttatattgtgtactgtgttaaatttttacggttgtttcataagtattttttagttgttctattattattttaattattctattttgttgttttacggttgttttataaaaagatagtatttttgtaaaaaaattatgtgtaacagtaaaattataaatttttacccaaagtttaatatttttataaaaacctcattatagtatgccaaacttttctgagaaaagaagtaaaaaaaattataccaaacttttatttgtaactatcaataacacaaaatatcacctaatttaatatttgatatgtacacaccttgctacactatatatatcataaaatttcaatcttagatttcatcacaaattttaaataattatacaacattttctttaaattaaaatgcaaaacttacaccaactctaatatgaacacaggccctcaatatttaaaattgtaccttataaattctcaagaacaaagaatttattttaataattgtataaacataaatttgtacctaatcactacaatattaataatactaagtttttaatttattatataactactctagctacttactctatatgtcatccgttcaagaagcttggaagtccattcattttgagtttcactttatccatttttataacactacacaaatcaaatcaaataaaaaaattaaattaataaaattatatttcaacaactataaatataacaaaactaccaaacacaaattctttaagatattatctaataacctttataagagaaaaagtgtcatagctaaagcacaatacaacataaatataacaaatgaatggaaacaactagtggttatttagaaaatatataccctcacagtcaaatatgttagttccattttttggattttatttaacaaaaatattttgtattttttaattaaatctggttgtatataaatatgtatatatataatttgtatttattttatttaatttaaatattaaaggaataatttatgacaaaattttttatattggataaaaatttgacaaaaatagtgtcattaatatgattaaattaaatcttttttatcgagatatctttttcagttggttatctctttgtatctcaccatatatttgagtattggaaaatattattttggacctgtgttttgtaaaagttaccgatttgaccatctgttttgttaaatgacaaaatggagcatgtaatttccaaaatggtaaaaataggaccttgagcttaatttttgacaattttttttaatatcactgttgcccctaattttgcccaatatatgtggaccaatcagaca

SEQ ID NO: 306319 - DNA, 562 bp, Cannabis indica
ccaacgactacttcccctacctttttgctgcgtcatgaagttgatcaaagaccgacgttgcgagatcatgtagtgacgacagctcagaggagaccagtagtatcatcaatgcccactaggtttccattcaagcctggtgtggtaccattggttgaagggtgttgctaaggcaaaccatttttggaaaagtttgctgacagtgatctctatcattacgatgtaactttaacaccggagttacatcaaagaaagtaacttgagccattaaaaccagttaggaaatatctaccgaagtagcgttcatccgattggaggtccaagcctttgccttaaaagctgctaagcgccttgcaatccaccagaagaaatatgcctaggagatcctagggcgcattcccgaagcttaggagatgtatgcacgttgctttccatgcgtgaaagatcactgggggtacgacacgtcttcaaccctccttcctggaagagaaggactgcttgaagtctgtcacacgccaagtgatatttcaccctttggtcttttttaagcaaagtcattgcttga

SEQ ID NO: 306320 - DNA, 3714 bp, Cannabis indica
attaaggcagatatttagcgaagtagttgagatacactgagaaatccacagacggaatttctgggggattccagagcactccaaaacatggtcaatgaatctccagctcaatttatcataagctttgaccagatcgatttttattgcaagaaaccctccttgcctttcttccgattgaacgagtgaataatttcttggacaataacattgttgtcatggatgttcctacccgggacaaagatcttctagaactttgagtattagtgttgtggagtagtgaaaacataagtaacatactaatgtttcttttgctaaataataaagttttacccttttataacaacatcaaaaattagaagcaccttcagttcactcaaccttcaccttctatatatatctaataatacataattagaatcaagaaacactaaaatttagagaaagattagtactcgtgtatatatatatactcatatatatagtaggattggacgacaaaaaatacaaaatccacaaaagacattaaatcattaatgcggactaaaattgttaagctaaatcgtactaatcaacattaaaactctaccaagacactgaaacccttaagaaataccctacacgaaaaattatgcaccagaatttttcacacgccctaaaaatacatgatcaactatctaaaatttccagcattaagttatacatctgtttgaagtaaagaagaactaacgtgtcagagtgaaggttttgagataggaattcgaatgtcatgttttgggcaaatcgatgataccacaactggaatatgatccaagcattgaagcctcgacccgaaagcatgaacttcctcgattaatccctcgatttcagctggaagtccctcacgactggaaaattcgaaggatctatgttgagatttaggagaggtgcacatgggtattcccttgaataaattctaagaatgaggcgaagtacttcgtcgcaatatgcaaacattcactgggaagctttgggagttacctttctcttaaatgattttttcttctttgaaaaattctaggttaaaaaacttaagtggagaaaaaatggtggatggacgactcaatctatatttatgagtaagatgacaatctgtgtacttctgatctgacggtccatatcacatcctaaaaaaacacagatacatccaatggttaagataacagaagggtcaaaatttaatgccttatgtaggatcgaggtaattcaaaatgatgacacacgccttgagagtccgctaacatagaccaaccgtcaatttgcttcccctgattgcacgtgccttttcaaggcgaatggagtgcacaaaccaaggagttcacaacacgtatgcactaggcaaatgaaaggaccaccaacttccacctcttattgctttggaatttcggcaggacctttcccttcccaattccacatctccatacgtatccgaaacgaaggctacaagcctccgcgactcttaagccccgaagtcttggggtgaatgttattcaaatttctagacaaatgacgcgaataatttcaaagcccaatatcagctaagggaggcctaaacatgcgcccaacaactaagtcaaatcaaaactctagtctagtaatgagttgcaattcgctaaaattgccaaggtcgaatcatcttgatctgaaaaaggccatctagaccagaaacgaagagtctctcaaaaccgatctaaagccctcctggaagtaatttggaagagagtaatcgaagagtcactccaatggattctgaacctcaagctaactcagaatccttcaaacacggggtataccgtgttagagtttgtccccagccaaaagtgtggtcgacaagaacctcagacctcgtaaggggggtaattcggacagtcaatagtctcgtgatctgtaaggggaaatactaggtaaggtgtgcaatcccacatcgcccgggaaaggttaattgtgatgattctaagattgtgtaaatatgggattacacagttgaagagggcttaaatagatttattggtactacctataacaataaggtgcatcttgttttctagtggcctatcacgaaagaacttcatagttaagcgtgcttaacttgggataattttaggatgggtgacttcctgaaaagttttcccaggaagcatgagagtgaggataaagtacactcgaaacactcatgttagtttgtagattcagtcgtcattttaggaagcagccaaagtgacgtaatcgtatataatagccctcattccgtgagtgtaagggtccaatagaggcttgaagcggggacgttacataatcctaccaacactagtacttttagggtactaagtgcatgtggtataacaaataattgtattattaatcctaccaatactagtacttttgaggtatttagtgcatgtggtacatcgattagtcttgttaccaatcctaatagcactagtactttttggatactgggtgcatgtggtatagcgattggttgtgcaatcaacggtaccagcactagtactttcagggtactgagtgcatgaggtacaactgttggttacacatagtataaattgatactaccaatattagtacttttcgggtattgagtgcatgtggtataactatttatcatactatagtcaagaatgtttgaaacatttatgcgttggacgtgggttagacttgtgattaggtgtatgggtgcctaagttacaaattaggttatatgtttatatttatgcttttcttactgagtctgtcgactcatagttacgtgctttgtgtgtaggtaaatacaagacaaaagctaacgacattgagtttggagctccatgaagattatacatctgaacggttagacctggtgcattgggatcttcaggacaacgtgggctcaaattttgttagttgttgggcgacaccttttgatctgttgtaatgtttgaaaatgtttacgggatcccaaaattgtaaacttatatatcattaattaataaaatttattattattattattaaagtttttgttaatcacgtcttacactaaaatttttggttagcaaaggttagcatattaatttaaaaattactatagcacgcctaagctagtagggtgttacaaatttcattaacacacacaatatattttgacctaaaacacttttcacacactaaacgaaacatctcatattttttgaaaataccacaaaataataaattttgtgaattttatcaaatatgccaatgagaaactttacagattgttatgaagtctatattcgtgacactttaaattattcagtttattacaaaaactcgttggattcaaaataattacaatatacattattttataaaaaatttataaattttctaaatactaaaaacaaagacactactaccagtaaattacaccaaatatgggattctacaaaaaagtttgataaatatggcttttttaacttattcacccttatatggcatttatccaaatttaaaggtatatattgtatttcctttgccacatttttgtaaattcaatcttaaatcccatattgtgtattcagcccaatttgaaagggtatgtttgtaattttatattattttttgccaaccgttttttttcatgggttgttttttaaaaaaaaataaaaataaaagccagccttgtcttttcaacttctg

SEQ ID NO: 306321 - DNA, 982 bp, Cannabis indica
gggggaagttctccctttcttttctcccatatttaatcaacttctccctttcctaattttaataatgcaagtaaacaaatgtaagggaatgattaccttactattgattcccattacttattagtaaacatgccattaaagaattcttaattaaaccaccaatttttgcaaagatatattgaaaacacctacttataaaaatctccaatatcatttttgtgtgtaaattaaaagtaagacaatcattactcaatttactacaagaaaatcaaattaagagtctccaccatagcattggttgacactttttttattttttaacaaaggattattggttgagagtagagagaaaggaaaatcgcagatttgtatttctgtacggtaaagtacacgtgtcatgctaaagctggagcgtggaaaactgaaagtaatgcgcttggggaatagaagaatcataacctaggatactcagaaagaaagtacttgattcgtatagattgccgacacgtggaggcatttgaacaagggcagcttcttccttttataattattttaacccaaaatctaaacaaaaatcacatacaatatgatgatatgttttgtatccaatgtttatttagactgaaacattttgactgtatgtaatattattttagggtatttttttaagtacacatatcattttttttatatttatttgttgagctaaatgtttttctttagatttaataacactaaatatattacttaccaaattactcaaatgtaattatgaagttaagattagtagctaataaaccctataaatcattcatactcaattattaatatagctcatttacaaaaaatatactctaataatgtatcaagaagtgatgtaaatttaacacattgtaaaacttgtaccaaatttgacacagtataaaatttacataacaataaatgtattatttttttatttgtatttatatcatttgtatta

SEQ ID NO: 306322 - DNA, 2521 bp, Cannabis indica
gccttatgtgtttaatttcattgttttagagatattcatatttagaatgttaattcaacatacttgttagtaaatctagaccttggtaaaatattcctaacagtaagtgtgagagttgaatcactttatgagaactcaacaaagaatctcgtctcgactgtattgtacttattcttgctcaatcaataaagaaggacttcggtagtgttttagagctggagtagagccatagatcacatcgatctatcagacttaaactactatatatcttggtattaatttctttattttctacaattattgtttctagttttcaatactctgtttgcccctattttttattcgattgttgttcttgatttgttaatcttgtcattgctaattgtttgattgtctaaagttttgataatattgattcttcaccattagtcataattttctcataaatcagagcttggtaatcgatcaagaacgcaaaatcaagattcatttctctgtaattcctaaagaaacttttaatgtcatcaatggtgagattcaaattagagaagtctgatggaaccggggactttgtgctacggagaaaaagtctgaaagatatcttattgcactagaaattctcccaagttcttgaagacgagaagttattagtagaaaagaaactagaggaaaaagtagaaatggaggagatgacgtactacacaatcatcatgtatatgtcaaatagtgttcgaaggaaactcatcgtagagaagacagcaaaaggagtttggaacaagttggaagaactgtacttaaaaccatctatagctagcaagatcaatttgctagaaagattatacggttttaaaatgatttctttccttttttaaatgagaatagtaatagatttaatgagattattgtaggattggcaaatctaaatcatatggttgatgaagaaaatcaggccatcattttgttgagatcactttcaattgcacatcaagaagtgaagcagccattatggtagatacatgattgcattggaggatgttcttaccaaacttaaatcaaaagatttcaaactacagttcaccacaacaaatttgagctttaggggcgactaatttagaggcaacacatagtcgcctctaataatatggatattaggggcgacaaaattatgtcacccctaaaagaaattgttttaaatattttttacttcgtatactattaggggcgactgtgtagttaatagaggtgaatatgtcacccctaataataatgaaatataatcattccatgtaggcgagaattttcaaacttatagtattaagggcgacatgtgttgcccataaaaatcaggcatctgaacaaatttgagtattaggggtgacttttaggggcgacattgtcgcctctataagttgattcaaggtatttaaagaaaattagaaaaccctaatccctaaatcccctcttctcttttcttctcacctgatccccttctcttctctctctgtgcgtggaggcgctatactaactagacagaccaactcccatcgtcccctgcccacacagatgctattttcggaatccccatccctgaaaacttgagggcccgagaacatgcagcccatttcttgcgtcccccttgtcttctatctcaacaaacaatctctgtccctctctcactcttctctctgttgaccatgaaggctgacctaaagactgttgtaccgaaaatattgggctctctctgaatgggtaaatctcttctctatttttccctctcttctccatgtttatatgtgtgattaatgttagagattatcataaacatttatgaatcccaaaatacagttgaagtcttattaagtgtattttgcatctctaaaataattatagttgtatgtatatatattgtgcattagacattggttagtgtctgaaacgaaattgcaaataaaattgtttggggattgattatatcttttaattatttgctgatttttttgtctcatataaatgcacacaatctgtttgtttaaatgttttgggttcagtagttttgtttaatctatagtaaccaatatgttaaaattggaacttggatgttggagattgatattggttttttattttattttttgttttttatatatattttatacatatgtatggaaatgtatataaggactatatcatcatgatcataaatttaaagtcaatatacatgtgtgagtgtttcttaggtaactaggtttataatttgaccaagatattgagacaagatggaagagcatatatgtatctaatttttcatcgagtttttgttgggttttgttccttaaataaaatccattttaatataatcagatttactaattaataaagatcagaaaacgcattttatgttgcatggtacacatgatttatttcatgattatattgaatgtataaattctattaagtccagaacatatatgtatttgttcatgattatagtgttgtcagcacagtggaatataatcatgat

SEQ ID NO: 306323 - DNA, 2021 bp, Cannabis indica
aatataatagaaaatggatagggaactctctatcactccaactttttgcaaaatgttggattttaatcaaaatcattacttttttttcattattttattaaactaatctacatttaacaaattcaaattataaaaatgttattacaataactaattttgactgaagtggagaacataagcagagtaacattaaggaaaatggctctctacttttaacactgtagttattttagctaaaatttggctaaaaaataaagagtgctctcagaaaagccatgattcaaaccaagtatacataaaacagcaaagcaataagcattaaaaactctacaacacaaactagattcaatgccacagacgaaaacaataagcttaggaaagtaccttccgattggctagaacttgagcctgcttctccaacctcagcagctgctttcggtacctccaaacttattggctttacagtctcagatgtcttatcaacaaactcagaatgaccagttctcttggtgtgtaaatcactttccttcaagatcaaacaaatcaaaccccaaataacaataatcaacttcacatctttaaaatacaaattaacaacacaagtcttgacttttctactgtagaactaaaaattaaacaaaatcaaaagaatattccgaattcccctaaatgcaagaatattaggaatgctaaactatgctaatccattaaaaatcaaaccccaaataataataatcaatttcacaattttaaaaacccaatttaacaacacaagtctcaatcttttctactgtagaactaaaaaaaattaacaaaatcaaaagaatattccaaatttccccaaatgcaagaatactacgaatgctaaactctgctaacccattaaaacttaaaacccaaataataataataataataaccaattttacattttttaaaaccaattcaacaacacaagtcttaatcttctctactgaagaactaaaaaatcaaaccccaaataataatcaatttcacaactttaaaaaaacccaatttgacatctcaatcttttccactgaaaaactaaaaaatcaaacattcctaaaattctgctaatccattaaaaccaaacaaaaaaataaaacagaatcagcagtaagagagagtgaaaaagaagtaatacagtcttggatcggcaaggtttgccgcaagaagaacagacgaggttgagaacaggctcggttgattcagcaaagttggaatgagaagtaagttcagcgtgttgttgggcttcctctactgatctgaggagagcaccgcaatctccacactggagagaaacgcccgccattgatgacggtggaaagctttgagtttgggaaatcgataaaggaaaggaatgatctttcccttaccaaagaaatataaataaaagctgtaacgttttctttcggtaaagtatttttttttgataatcaatttgcgacataaatatttaaatttaaatttcgagaacaaataaatatattttaattttttttaaaaaaatataatttaaatattattaacgttaaaaattaaacttaaatctttatttataattgagaattaaattaaagtatttatactgcaaattacttccaaaatatatttaattaaatataaaaaaaaatctataatgcgcctctaatggcatttctaatagtaatattcttagaatatttgatgagatagaaaacttaagtgacaaaatttaaaatttatatagatgtcacaacacgataatattgatgatatatttttttaaaataaaaaaattaaatgtgtaatatgtatacataattttttaataaagaaaaaaatttatatatctttatctttatatataaaatatggttatttaataatttttattggtttgacaaaatattttaagaatatataatattcaaataaatttaactatattagtattgttagagttaattttataaatatatataaatattaatattatttattttaaattaattaaaata

SEQ ID NO: 306324 - DNA, 2051 bp, Cannabis indica
caagcctaacccatttttcttgaatttaaaagccaatggaaaaacaatttaatctccctataaaaactgttgaatttaattgggaagggaaattcaagtcattttctaagtttcttacacaacatggggatcactttcaacatctctattcacatgatcatgaacaaaataacagggttgaaagaaagcatcgacatattactaaaataagtctaactttgcttgttggatttgttcttgactatgttactaatagttgggattttagcgtgttgcctttgtaataaacaggctcccaacacccgttattaattatatatctccctatgaatgtttatttcataagataccagactatggattccttaaaccatttggatgtgtctgttttccacatctaagaccttatcaacctcacaagttggacctcagatatgagaaatgtacctttgttggaaactccatgcatcgtaaagggtatttatgccaaaatagtgatgggagaatatacatagctcgaaatgtaatttttaattagatggaattttttactctatcctcagtagcttccaagcaggtaactccctatcctacacctctctttccatccacaagtttcatcacttctcccttaaatactaatgttaatgttttctcaatcgatgatgcaccaagtgaaatggctactgaagtagcacctactccaggcttctctgttgtagttttcctgtgctgcaacaaccaaccacctttttagcttcttatggtaacattgatcctccaactgtggcctcttctgtgcatgttatctcatccaaatcttgcgcatcatcatcaactactcatgatgcaacatcaacacacgcttcaatagtatccactagtatcagtgatgcatcatcaccacaggctccaacaatatccaataacatcaatctcgattacatgtgcctcctactactgctaattctcatagaatgcagacaatgtctgcatctgagatttacaaacctaaagcctatcatgcaaccacttatctcctgtctgaatattttctcccacaggcacctaccactttaaaataggctcttgttgatccaaggtggttcaattcaatgcagcgagaatatttttctctagaaaagaatgatacttagacacttgtaccctatgacccccatatgcatctagtaggaaacaaatgagtccacaaagttaaactcaattcatacggcacaattaactagtttaaatccatacttattgctaaatgatatctgtagacccctgagtctgacttcactaatacatttagtccagtggtgaagcatgccattgttcaaattcttcgcacacttgttgtatccaataattggaaagtcactcaactcaatgtttcaaatgctttcctcaatggcttattacaagagacaatattcatgccccaaccacctgggtttatgaatccaaacaagccaatacatgtgtgcaaatttaataaggctctatgggttaaaacaaactcctagagcttggaacaacaaatcgaagaaatccctattcaccaaaggctttaaatcctctcggtcagacatctcattattattcataaaagtcatggagacaacttaataatgttactagtatgtgtggatgatataccagtcacagacccaaatgatgatgctatttcccatctaatcagtgaactcgatcaggtgttttccatcaagaatcttagatccctacactactttattagggtaaaaatttcaagagacaacacagaaatgtacttatcataaaccaagtacatctcttatctattagtcaaacttcatcttgatggagtaaagcatagtccaaatcctaccaattccactcacaagctttatcttacaaatggagaactatttttgatcacacttcatacaaaagtacacttagaattctacaatatcttacattagcaagatcaggtgtggttgttagaatttatgccctaaaaataaataattaatgaataatatagtagagaatatatgaaatac

SEQ ID NO: 306325 - DNA, 3560 bp, Cannabis indica
agaacaatatataatattgtatcctatgtatatatatacttgcatcatgtttataaatatagaaatatatattaatcgtgtggtatgtttatttctttaagtgcaaaatcatgagaaggcatgataattctttcatatttttgttctaacttgttataaaaaaaaaagagtgtatatatatatataactaatatcagttcaaatatcaaatatcagtttaaatggaatttgttttatttttattttattattttattatatataaataatattttattattttattaaatataaatagaaagtagctcatgaatttctcataaattaagaattcagttatataggcacacctgctggaccatatcaattttcgaatgtgagctgttaataaaaacatattcttatatatctgagtaaaataacaaaaacaatgtatatgcttatatatatatatatatatgtgttgtggttaagtaatattaattagggtttataaaagctataaacagtgtaaacagtttgagcaacagttagaagaagtaatactaaagcagcaaaagctgaaatgaaagaccaaggagtatcaaaataagtgtacttaaaaccagcccattgaacatgccaactattccgataatactgatgaacatcgtcaaacatatcccccaaataacacatatcaatatcaaacgcaacgtcttttcccatattgttgataaaacgcgccacgtcactgtcgtttccgtaacaattctccattatgttacggtcgcacaaaaactcaacgtccttagaagtgttcactaaacaatccaacagtgtcgcgtacgttgtgaagtgttttgtacacgacttatggcactgctcaaacgacacgcagtttaccaaaaacgacgtcgtaaaatcgtcgattgttatgggcggcatctctatcactcctctttcgaatttcacacaaagaaatgtatcgtcctttgtggctctcaggtttattccggctcggcgcagcttcgaaacgcagtggattatgtgagccggcgtctttcgtctgattcgtggctcggggtgattggttgggatcaaactcagtcggattaaatcgagtaaatggcgaggttttagatctcgattcttctcgatcgctccttctggtctctgaatcgcattgtcgaagaattgtagagctaagattgttagagctggttgttcttgtggtttagattcggagatctcgaagagtttttcgaggacgaagaaagggatctggttctctaaacgaaggaaatctctgtagaaaaaggggataatccaagccattgagagaatcggatcgtccttttcgaacaggacaagattggctgcttttctcagcaattcgataatgaaacagccatctaggaccatcatttcggcgaattcctcaggacttaagtgaatcgtctcggagtaacattctctagctttttgttcaagctcagccatggcggtcaggtaatcctctaattttatacctctgttcttctctgttctgactagtaatgaaccaaggtactgccacttgtgctcttcgatcattctgagttgagattctccccggtggtatggtccgatggagactatatgaggctggtagatcttgccgttgacttcgattaaactctgagggactctgaaaatggaacaggaaggtttaccggcgtcattgctgagtatccgcggaggctcagagatcttctggtgcattagctgcacatgatctttactcacctctggaattttaatgactaagttgatttcttcggttgatgatgagatattcttattatccatggaataatttcagcctttttttttttgttctcaaattgaattttcggtgcaatcataatatggtgtacactaattctgtttttattataataattttcgagctaatgtatacatataataataaaataattaaaccacaacaaccaagaatgaaaatactacaaaatataatgtttcacgtagttggtgtatgattaatgaagccagcaagtcataatattagagacaaaaatgatattcttcgttgctggtggaattttcattcgagctgagatggaattccagcattggataatttaaattctcaaaagtcaggaaaaggagacgccaatcgaaagctgctattgtgccacatcacatgtgtttgggttgctagtgtaatctactaatgggaggcccatgataattgaaacgccaaggctttgggccaaacctttcaattgtgtcatttttgaaaaccaaaaattcgtaatgtagtagtaaaaatttaaattatagcatttttggaaaaaaaaaagatgattgaatattttttttatacataaatcaaaaaagtaacatttctaaaaataaatttgatcattacaaagaaaataattgtatttttgtaataaatagtatatggaatttttagaaataaattgagatttttagacctgagagctttggacgattgccttgtctatcccacccttggaccaaacatggtcatcaagatgagtagggatttttacaccacatattgaaatttttaacttttttactttcattgtggagtggaattttataagtttcatactgtgtactgtgttaagtttttactgttgtttcacagttgtttttagttattctactgttgttttaactgttctactttgttgttttacggttgttttataaaattaaaagactgtaagtttgtaaaaaattccgtgtgacagtaaaattataaacttttacctaaaatctagtatttttgtaaaactccaaaaataaaagaggtaattacataatacactaatttttataaaaattttatatttttacgtttaaagattttttattacacttttcacggtattctgcaaaaacaacacgaaaataataagaaaactacataaaagtaacaagaagacaacatcaaaagaacaacaaaaaataacatataaataataaaaattaacaacaaattaataagaatacaatataaaaatatatcaaaagatcgtattttatatgaataaaatcgtaaaaatatttaaaattttatataaccgttttttttattttattttattgtttttgtgtatatgtgaaataatcccaaaataaaaattgtttaattttgtttttagtattgctaggacatacaagagatatctatccatgttggtataatttaatattagatggtgtcatccggttattcttattacttcaattctattatagggtttaagtacacactggagtacataattaatgtttatgttatacttgtctaagtcttttattcaattgagaaataaattatagggaaattttcagtaatatacgtaatattaaaattaattatgaaaatgataacaacaattttaatatgcactaatacgtattcttctaccgaaagtaatgaaataattatttgtcttagtctattcttatctttgctagcttatcattctatttttatctttttttttgttgataatgctatctaaactaacaaa

SEQ ID NO: 306326 - DNA, 1469 bp, Cannabis indica
atttaaaatattattaaaaaaatgttttttaaaatcgaaaacaaacataacacttatctaaaataataatggttactaagtatacacatataatagcaatatattgtgcatatatatttagtttaatttagaaaatattcttttatttttattagaaaacttaattaacaaatcatataaacatcaatctaacgtaattatttttaataatttgtttgttgtataaaaaaattgatgacaattgattaacataatcacatatataaaatgacgctaaaaattacctacacttgctcgctagagtggcaagatgagatatgagttaagtaagtactaaaaatcatgcataatttatagtaattcatttctcatgttgtggcggtaatggagcaacgtctacttcgagttttaattactcacgagaattataaaaaaagtaactaagccaagagcttggatttctagaaagtaaaactaggaagagatgctctgaccttttagggactcagctcaatttgaaaagtgagctagtagagctctcctttataggcaaggaggtccattaaaatattaataaaataacaccaaaaatgggaaaaatatttctaggttgatctagaacaatgaggatgatctaatggctaaatgacttcagatgataatcgtcaatttttagagctcgaatcgcacccattggatcattttcaagctttttgtagataaaaattacacttgactggggacgaattttcaacttgaaatctttagaattacgatatgattgtgagacatgtcttgaaagatcttaaaaatatctttcaaatacaagttgaatcgtgttaattgtttcatattgagtgagttatgataacttaactaaaggttgttcagcaaccagtgccgagattgacattctaatgtgaacctagacattgtatgagtagaaaaatgtatcagacttgtatttttatgccaagtaatactttgactacttagtcaatcttttagttttggtgaagcgagtcactagctataagagatgttgcatttttcatgaaattgagtagacttaaaacttctcaatttacgactagttcgccgatattccactttgccgaaaaggtgaaataccaaagtgtgaattttacttatcacaagtcgtagatctcgtctactatgaaaaaaatagtcagatgctcaagacagaattaaaatctgataagcaaaatctaacacaccaggctatacatcaacctaagcgctgggtgctccttagtgagcttctcaggactcgttttgttacttctagtacatttgagtttgtgaacgtggtctcctaccctgttgttgctatatttttaaacactacgcaagtatacgcaatcaagtagtaaatctcacacaggtgaggtcgatcccacagggaattggattaagtactactaaattatacttatgattctattcgg

SEQ ID NO: 306327 - DNA, 970 bp, Cannabis indica
ttttgggttgagattcatgggctccctactccttatcttgcttttcagaactatgagtttttggagtcaaatggagttgataacaggaccatcgctagatggggctttttgaagctggaggtggatattttgattgaccaatggattctgacagggttttatctgagtattactagaggaagaaaggagtggattcagttcaaatatcggaagctatcgaaaatctattttaagtgtggctatttggcccatggcagcaacgtttgttcgagtaaccacgcttatgcttatcctctgattggtaatgcggttcctttgtatggtccctggatcaaggctactgttcctattcgtagttgctttgataccaaaggtccttctcttctccgggacagggttgatcggacggtgaatattcaggggacttcgaatattcaggtgaatggtacagtgtctcttgagacgcaaggtgcggggacgtgcattgaggccactaccttaaatacgaaagtcgtacatacgaccgatacgaatgattttgctgagggaatttcaaaattctgctctgtgggtatgacaactggtgtgccacttggcattccaaagttatgtgagaaggagcatctgatgaataggttgggtaagaatcctgctgatgagaatgttattgcttgtatgatggcccatgttggccctgatgtggcccaagctattgagagaccacatcataaggtgtgtaagtcacgaaccccacaccgtcatcctgagaccactatcattgttgggcctatggagtcgatggaggagatcactgttggaaattattttactctaacactaagtaattttcgaaattgaagaggaagaagaaagagaaagggtcggccaaagatagggagagagaaaggctcagtttttttctgaatgaaaagtcagaagaaagtgtgttaatttcctgaagccttcacta

SEQ ID NO: 306328 - DNA, 1216 bp, Cannabis indica
acgtgattagtgtaattatattcatttttttataaatgaaatctgatattaaaattactgggatcactgtataccgtattaagtagtattggacaatattctaatcaagttagttgcacgtcttaatatcatattaatttagattattgtgaagagaaagatagagtcatagcaagtagcaacaacaaagagagagagggaaaaagaaaaaaaaagtcttcaagtaagatgggtgggtcttgaattgatcatagatcgacaattgcatgttgtttgactaggaaatgaatttactaaatgggtatatatgcatacagtatatgtaaactaagtctaattgtgctgcccctgctccctgcgcctgcaccccgaatatctaattatatatatattatatgtttatttttatttttttcctttgggaaagtttccattataatttgaacatgtgtgttgaaacaaaaaggtatagcagcttttgggttgggaaggatgcctccttgcctttctttaattaactttttatctacatgattttatctttgatatgaagttggatttcagtcagcttcaactcaactcattcttaacaacaattcatattcggttggggacctattctgtgattcaaatttacaacacgtagaaaagggagtggcttttaatttgttaacaagtggaaagtggaaaacactgtcagcagctatttcttaggtagaggaatatattcatattcattcatgtagcagatgtgcacaataaataaaacaataagaaaagaatgcacaaaatgtgtgagttatcagtaattagcattttttttaattttttattatgttgattttgtttgatgttttacgtgttgttcgattgtccgtttcatacataaaaaataataatatttataatgaatattttggatagtaaattatcataagggctttcccatgcctttatttattttgtacttttcttttattttccgtattactaaagggttgtgagaaatgatgggtgcaaatgcaactcaaagaaagaacaggtcacactcaccctaaacccaattccaaagaaaaagtcttaatttatggaaaacggagaagtatgtgtatgatgatgggttggcatttggatgagtcctacattagtttttatttatttatttatttattttgggtgggtaaatatattgataattacataagatactattttt

SEQ ID NO: 306329 - DNA, 1627 bp, Cannabis indica
ttttatttattttaattttactttatttgcgagaaatgaaaaaactaaaatagagaccctttaaatggaggcgaaaaagagagagatgagagagtgagtctgagtccctccctgacagtgatgaccttttcaggatcaccatgacccttgtattacccacccaatggaaggagcgcgtgcgtctcacttaagtaattgaacggtgatttggtggggtttggtgttcacgcagttaggctgcttatgggaagcgcgtgggtttggcgctcaatcccagagagatgcttctgtcaagtagggccgggtacttgatgagatgcggggcccattgcaaaatttccctccatttcctttccgacacacacttgttctcccatattccataataccatatttttatcctttttatttttatcattataaatacaaaaactaaatcaaaatcaaaatcaaaatcaaagaaaaccaaaaatatacagaaagagtatgatattttattattattatttttattattttgttaatacttaggttaacatttgattgatgtgtgggagtgtcccacatgtaagagtgtgtatagcataagttataggaaggagttagagatgggccattcaatgtaacactgttatttgaacattgcttaatttttgttattttcttatatatataatgattttttcttttagaaaaatgatattgtttgtattttttttacgtaaataataatgtgtttttcacattaaaaaaatattgtattttcttcataaaaaataataatatggtattgaattattagtaaaagtatattttcttgtaaaaattacttttttagagtaattttcctacaaaataattaaaactgaaaaagtatgcatgacagctattttattattttataagaaaatattagaaataatattaaaaaataattttgataactaccccatcatcttaggtagacataatatatagaaatgaaaatctcaaactaataactctgaatctctacttcatctattctccctcattattgagttaattatttttattaataactgtacaattttcctagtaaggattgtttgtaaagtctttcttctttttctgaagaagggttgcttgtaaaatcttagcatcatataaatttataacaaaatgaacagcatttcaaagaatatatactaagagtaatcatgccatgcttaaaatgcatcaatgtggaaagaatcacattaactaaggactcaagatataatgaatgaaaagtttttctactatctactatttcagggatatatttgttcaaaaaaaaaagttatatatacatagaagaaggattattaaaataagaaaagtggcttaaaaccaatataaaaatggaacctttaggatgcctatggcctattttgtatactttttgaccgtttgaacttctttttacctcttttctttgtacaaaatgcaagctgatcctttacttttttgtttgtttatttagaaaagttaatgaaagaatttgtgactcatctctagatcctgttccggttccatattgttcgatccatttccaaattccaataatatctgttggaaatcttgtgaatattttaacaaaatatat

SEQ ID NO: 306330 - DNA, 1537 bp, Cannabis indica
ttttttttcatagcagtatattataattacaatattattattgtaaatttttaaaaaatttcgaatagtttacagcatcgaaaacagagttcttgatatttcagcttaccaagcgtgctgtttaaaaaacttcaatgatctattttcagcattgtaaaccattcaaaaaaatttaaaaatttataaaaatgatattgtaactataaattaaaacatcgccttgaaaaaaaatatgacatatatttcacggagattataataggaggttaatggtagcactcatctaattactaaaacaaaattcatatattaattaaccatttcaatttatgtaaaacaggaccaatgtactacaatggaatatatcatttattctatcaatacaatccctatggtcctttatggggtaacataacatgggcacattcagtttcatacaatcttatcgattggattcacctcgacatagccttatccccaactgatcctaatctcgatatcatcggttgttggtctggctcaacaaccttgctcccgggcaacaagccagctattttatacaccggcggtgattccaaaaatcgccaagtccaaaacctagccttacccaaaaacctctcagacccttttctcatagaatggataaaatctccactcaaccctttactgactccgatcgatgatattgacccgagttcttttagggaccctacaactgcttggcggggccctgacaacatatggagggtcacaattggagctcgaatcaatggatttggggttgcattactttacaagagtagtgactttttgaagtggacaaggtttgagactccactttacttgtctaagaaaaatagtgtaatgtgggagtgtcttgattttttccctattggaattaagggctcagatggtgacaatcattacttgaatcaagatcaatttaagaagaaatatgttttaaaagcaagcttccaatttattagtagagagtactatatacttggtgagtattctcctaaaactgaggagtttaaggttgagagtgaatttatggatcaaaattgtgatttgagattagattatggaaagttttatgcttcgaaatcgttttatgattcacaaaaaatgagaagagttttatggggttgggtcaacgagtcatatagcgaaactgatgcctcaaaatggttcgggcttcaggtattaattaatttcaaccatacaataatttttaattattagttctattatatatataaataaaactaatattatttattttatattttagtcttttcctagaagtattcttcttagtaagagtgggagacagctagtacaatggccaatagaagaaattgaaaaattacgaagtgatgatgagaaagttagtcttcaaaacaaagagcttcgcagtgattcactctttgaaatttctggtgtcactgcttcacaggtaatttatcgaacaaaaattttcctttctaaattatatatatttttttttctttattttagacctaaactagttaga

SEQ ID NO: 306331 - DNA, 1480 bp, Cannabis indica
tgagggttattcttgaattttttataaaagtgtcatatatgttttattttgaaatgtattgatttaagaataaaatattaggatttttaaagtagtttttcaaatttcccaaaaaattattattattattgaaaaaatgaatacaataagttgtcattttaccaacataagttttcgtactcagttttcattcatttttgtcactattctctttttctcccacggactctccaacttttaccttctattgcaccactcagctggatcaattattatgtgaacaaatggacaaactaagggggcatcatcacatcttttcatcctactagttgtcaccatcaaatgccaacatctcatctcaagattttttttagtttttggctaaacaatgctaacattctcatttatttatgcataaattgaattattgaatactatattatccaagataaggtatcaaagtggatccttaccttatccacttatccacatcatcggattccatgtttttttctcttgtgctatggtttgtttcttctaaagttcttctaacaatatcaatctcatcattaatacaaaaacatactattttgagtattgagactgcataatatatcattccaaatacacaaaaataacagcattacacattgggtcaattaactactattcacattagaaaagcctcaagaaaaacatgaaatataaaatcctattttccttgttcagatgctgcaacaaacaggcttagattccatgtttatattaactagtgaattgagaatataaaatattaatgactattttccaaagagggatttgatccaccaaatgcccttggtgtccttggggccttcttctccctctggtggaggatcactctgtggagtcttgtggagtttggtcacatcatacccctcttctttggctttctcaacaagttgattgtatatctcatcatctatatgtgtcctcctggccaatatctacaaaatcataattccccaaaacaacaaattgtgacataagttatgactcaagaatatataactacaaaatgatcggtgtttatagcttaatttttaaaccatgggaatttcatgacaattttataccctccttctgctaataaaatcaccctatattccactattcatccaaaaattcaaaagcaagtcctattaacaataatttatttcgaccctaaagagacaaattcatatatattctttcatgaaaaagaagagaactttaaattgaaagtaagcatacccaaaggtacttcctggtgggctgtccaacgagagcaacttggtaatcttcatcaataaacaaaacccagtaatcaccagtgacagggatgatgggtaagaatggagggacatagaatttcactttaagctttgcctcatcactatttgggttagccttataagcagtgccctctatggaatctcttttaccatcactccaagtctca

SEQ ID NO: 306332 - DNA, 2581 bp, Cannabis indica
ttgcacagcttacccggtatttccccttacggatcacgggactactgactgtcacatagatacacactcgaattaataattaataatttaagtaggaaacacatcacttttaattgtgtaattgaagttaattatacctcattatgtataaaaaaaattaatgtatgatttaagcgtgttcgaacctttatttttaagtataaaacttggacagactactattcttcctctcttattcttatcttaaaaaaagagtattgttattaataattaagcaccgatcagcctactctacctaatgttaaaataaattttattaaacgatcagctaatcgagttgctcatgctattgctaggcattctcgattttcctctggttgtagcattttcgaacaaactgtttgggccgatctacaggctcttttgtattcagaatacttttaattcaatgaagttgatatttcatttaaaaaaaaaaaaaaaaagacaccgatcagcagtatctaacactagagtagttagtaattttacatattaaaaattaaattagatcaatatagtgacatataacactttaattggtagctataggaatgtatattaaaaggaaaggtcaaagtaaaaatatattaaaaaataaattataggtaaattagttaagtttgtttattactaaactcaaaagtaattatatgttaaagacttatatacatatttaccctgttacctaaaatatttacctaccacttaatgatatgactaagttaataatgagggtgggaaatgcaaatcacacacatatatataacaaattaaaaaaataataatataatcttgttatataattgaagattgaataattatagaagaaactaaagaaataaaagagttaaaacttctattttcaatagaaacagattgatattttccatgtatatataaattatatgacatattaattatcttaaagaattaggggggcctcccaatatgatcgatcagtaagtcagtaaggttcaatggatatatatagaaaactacttgtttcaatatatatactgctcatcttgaaattaattaattcatatataatttcattaatttattacatgctaatttataagaaaaatattgtttatatttatatagtgattttgcagtttcaccaagtaattaattataagttaatcaccactacaactatgtaattagttttactttaatttgttttttgatagagctatatatagcttattattaattactttaatgatatatataatatataattaaaagaaaaaaaatattagtgattgtaataatttcttaagtatgtaagtgggcatgtgtatatggcaacttattatttttggtgggtgatatataattacatgtttaattttcataagcttctccttaattaattccattattacacataaatatatataggacaatatagttaactatattatatatggtgtgatattaatgatatcttaatcattgaaatcggattcaatatggacaattaaatttcttttcttattaaaaatatatttatcagtggtttttttatttttacactttaaaaatatttttttttattttaatttttacaaaaatacataaaaaaaagactcatagatatagcaactaacagaattaacttagatcgtaactaaaatttatatagtaattgagtttcagatggaatcacatacaccttaactatgcacactacaaaaaatattatttttagtcacaacaaaacttgtaattaaaagtgaaaaagttgtgactaattataaattatcattcttatattgtgactaaaaagtccgtggctaaaagtattagttacaaaaattataatttgttgtgactaaatgtatttttattcacaatacttattgtgactaaaactaaattagcgacaacttgtatctaaatactatagtttagttacaagaaatattttgttgtgactaaaaattatatttagtcataaaaaaaattatgttatcactaaatctatatgtaacagttttttgtactgacacctccacatttaaacattattttataaataattttgtatatttaacacattagtttgtacatgtggtatgatgagtatattatgtaatatacttattatagtatttattgcagaattttcacacaaaaaaaaaaaataattattgtggattttttataataactattattattattataaaaattgtcaattcaaattaaatgaattcaaataagtgttactggttagatcgaaattagttattacttatgccattgccctataaagctataacaacaaaacaatattttgctgatttggactatattatatatatatatatactaggtgattgttacgtgtcaagccacgtagtgttagttttatttaatattttagttatttattttaattaataattaaaatagtataattatttgaacaatttgttttataaaaataaaatatgtgtcaatatatttagtaagtaaaacatagttgtgttataataatgtatgttattaatagtaaaatgtacat

SEQ ID NO: 306333 - DNA, 1939 bp, Cannabis indica
atattctctcaaggtagttgagagatttcctcgatcagttataggaaaaaaatatatataacagattttggttatattaattattcaaataattaaatatgatttgaatttaaatacttttattggtttttatatgcacactaaattggtggaagtggtagaagccattctttttttagtaggactccatttcatatcacataagaaatcgatatcatgaggagttggaatggaccaattgtacagatgatagaagataaagaatgtcgataaaatttggtaactatttagatttatctgataagggcagactctaaagtaatcagctattgacacgaaccacgagtgaagaggcaagaatccacccgcgttcatgtgaaaccttgaccatgcactgcaacaagggtttcaagagccactgggacaccatgtccttggttttctaacaacagtctcaggaagcaattactcatctcgtatcagttcaacttggtgctaagtaacataactaaataaaagaagtcttagttcaaaggctcggtcctcgggtcttcactttcaatagcagcattgaataagtcagtggccataactttccaccgcaggccttgtctaggtatttggagttgggtaccatgagctttgcctaaatgaattgagcagtatctcggtcatattcttcaggttttcttgtatttcttctcacacgaggcctttctactctcaacttgacttttctcaatttagaacagctaaatatcagctccacttagctcaaaactactttttccaagcaaattaagagaaactgcaccttgcaggaagggaatagttccgctcaagcggcttaaatgaaaatcatattttttggctttcgaaggacttccaatagagtttaaggatttctaacaagatctaaaatccttaaattgagcttcatagaggaggaggagaagaaaaaagtttaaaaaaatcgattttttttagaaggaattacttgaaaaattgaagaacacttgaaggattgatgaagcaaaattcttaggctcttagtttcttctttaggtgtgtgaagcaatatgaaaagtgaatagaggagttatctatttataagctattgatctcctctattcctaagccaataagaagtggatttaaatttaaatttcaaaagaaaagatagagagaaatcacgttattttttttaatctttttctcatttctttttatctttaaactttgaattttcttgttccaaagggaataggattttgaaattcctagtcttactagaagacatcgaacaacagaattaattgttcaaaattgcaaaattgttgcccacctggtagttttgagagaaatgagcttagttcacgtcatcaagttaacttcgcagaagtgtaaagttgactttgggggcaaatatttaccaaaaaataaaccctactgacgtggacatcaatatttgacgtgtggtaagaaaaataacaactcagagttgagtagtcttgagtcatggcagtcgacttgggaggggtccctagccctgcgcccaggttaactacgagaacttcagaatgggtgtatggatcctactaagttgtttccaatcactatcttttatattgttgtaccatgaagacataaagaattcaaatcataagtttggaagttgagaatatacgaatcaacagcctagaattcaacccgggtgcctagcccccatgttgacaaccctattagagttttgtgtttgggtccgtcttagtgataatgagtcaaaatttgtactaggacatgaattagacttgtcacgaacatatttgaggcaaataaattagaatcaaagcactttcaattttgagcacctagagcaccaggtgccccaggcacccagcgcctaggttgacatattgtcaacctagggcacttccaa

SEQ ID NO: 306334 - DNA, 1491 bp, Cannabis indica
atactatatgatgattctacaattatattgtattagtatatataaataatgtaaatatatatatacaataaaaataaattaaattaaatacaaatacaaacaaaaggggaatagtaatggtatatatagttgttagaacaatcgatcaattaatgtaaaccacaaatttggtcatccattgcattgcatgaatgtctattttactatttaccacctacaaatagacatatatatatatatatatatatatatacattatttgatttttagtggtcgacataaatatatatacaataaattataaaaaaatatttttgaactattacttaaaaaaaaattatagtattttttgaaattaataaaataaaagtatattttaaaggggataacatttttttcttcatgaattaggcctacaaacctagccaaaaagctagtcctatatatataaataaatatatattattatacttaattaattagagtggatcctatcttataacttttgtccaaaattttatttttgtgaattaattatatccaaactaataataactagttgtgcttatgtgatacgagagagtattaattttgataagggttcatagaaaatattattgattagactatttgtattgtcaaatgataaattagacctgtattttttaaaatagtactctaaactgatttttagtcaaaataaaatttaataataattcgatctagaggtgttatgataaaattaattatattttttcacatctactcgtgttagaaaatatcttcaagttagttatattaaaaaaaattgataaaaattgatgaaaattgagctcagtctttatttgcatcgttttaaaaaatatatggactattttatcatttaacaaaataaaagatccaatcaataaattttataaaacaaaaggcccacaataatattaaccattttttcaatatatcaattttcacattagaaaaaaaaagcttaaaacctcctaatcatgaattttatttaagcaattattattattattattatttacatcaagtatcaactcataattttataaaatagacttgtcatgcattgtttggtacattgtattagaataaattttattaaatttgattatatattatatttttatataatatattctgttaaattttaatttatattaatatattgtatatttatatatttatacaagtcaatattattatgagataataatgataatatatagagagagtggagagaaaaacgacaactcgaaaaaaataaaatgtcgggaaagtggcaaacgaatcctttctttagttaggtttactatgccccatatatattttctaattgtttcgattaaaaccaatgaatatattttttatttgagataaacatatattgtcattatatatatttgtatattatatttgaaaatgttatagtaagattatccaatgttattattttttttttttaagaaa

SEQ ID NO: 306335 - DNA, 2982 bp, Cannabis indica
aaataaaggatcaccttgggataaaattccagtccaatttgtgagcctggaaccatgccataataacattcattttttggactttgcaaactgtgtgcaagagggaaaaagagagaacacttaaatcagcttaaatttaaaaatagtaaggacaatacaggtaattttatatcacttaaattgtgcaagataaacaaattaccttactgaaacggtcaacttcgtcatctcttgataccctgaacaagtggacaatatctactgtataatttgaatgtgtttttgcatgagtgttctgcatatactttgcaatctgaagccattggaaacaagattagggaactaaacattcagaaatagagcaaccaatataaatttttctctaattttctagactttttatgaatataggacgatttaaaatattaaataccatattgaattcatcacaatcacaatcaagcggagtcagttcacaacgaaggctttggtactgagagtacagtggatcttcctgtaagaacgacaggaccataaataattagtggaacttctgagtggttcaaaaaaattgttggaacagaacaagctataatttgtgaataaagaccatagaagatttacctgacaaccgatgtcatccttcaacaattttgttgccacctcaatttcacttagtgcttcaaccttaaattgggataaagttaggaacacctcttaaaaaaactaaaagtagccaaaagtaaatgtaataatgtcccatatataaagttgaatgaggcagctcctttaaggtaaaggaaaatcaatgaaaccaataaaaataaaaggaaataatttaccatttctatcttgtttttcaacttctgaggggtgtcaattacaaaatcacctgtcatcagaattaatctatatgagctactaaaaaagagaaaacagcatgcagtgtcacaaacatatgtacatatatatatatacagagagagacagagagaactaacgcattttttaaatccaaaatcatgaggaatgatggtgtaaaattctctgcagaaaccagatgttaaatatataaattaagacttatatgaagtaaataaaattataaagtttctcgaataacaggaaaaatgtcagcaacatgacatgtaatggctggcaagttagaataagaaaatcatagccaggcagacaatctaagaaaacaccattccaaattattaaaacaaaaaacttacccgcttaattgctcaagcagtctcctatttgactgtccaatcacttcagcaattcttttcagaacttcatagccctacacgtcaaaagaaaagactcgttaacattaaaattaatgagtatttgatcagtaacaagcaaatagtgtttttcaggtatttcatctcacatggttcgccgtaaacaatagaggaacactaagatctttcagggtacagattcaaaagaggctcagatatggaagaaacaaaaatctggtagcagttcaatcctttaagacaagggcttttagtatgtttacttttaacaatgtcctttgagagtgggacctttggttgtaattctagatggtccattgacatcctctttaaagatgttacctttataatctttcttaaaccttttggttgcttctattctgtccaatgcaattttcatttcttaaaaaaaaaatacaaagaattactgcaaagaaaattcttccgattccgattaacttcgaaagaaaaatgataatgaagacaaaaacattacgagagatagtagaaagagaaaggggaaccatgatggataattggatactatatgtcacatgaccatattttgcaagaaattaatgattataatccttaggactcaattagcctgcaaggctgcaaccacaactacaaattacagactaatagctgggaggactatgctgttcagcacagttggccagaattctatatcagagcagatagttgagagcaagatattaaataaccagacactacggaaattcaagttccttatttgcaacttgatggaaaacttttatagctgaaaatactggcaaacattttaatttttatcatcttataagtcctactataagactatctggtatttatcttacagtgagtagcttctattatatttatataccctaagacactcatcactttaattttgagcattttttaaccaccaaacaaaagcctttcgaaacgataatttcatgaatggaaagaataaaatgcaatactctgaaaactataactcaaatatgataaagagatgattaaaacacagggaatgcataccttcaaaatcgttgatttgcttagtttacccagaggcaatttatcagcattgtatcctataataaaataccaaaaatatgtaaagaatacatgtccaaaaaagaaagaaaaaaattaggagagacaagatccaatcaagttctagtgaatcaaagaaactggggagaaaaagaaaaacatccagttgaccattgcccatagtttaattatcatgagtcatgaccgtaacataattgcagaatactattagctgaatcacaaacctatttccatcatttgctgtctcatcatgctgacattgcaaatcagagatataaatttggcaacacgtgcctcaagtttggtattccgggggtgtgcttggatagcagagacagactgttctttcacctgacaatgaattaacagggatcaagaaacaatagggaagataacatctcctccccgccacacaaacccacttcccagcgtgatttgggaacaaggtcttcattcaaacaaaattaaccaagttttaaatgtcctaaaagtaatgagaacaaagctgaagagtagttcttctgataagtacattcacaaatgctgtccttccacaaaaataattgtctttaaagtttttagtagatttttttattataattataagagagagagagagaga

SEQ ID NO: 306336 - DNA, 2061 bp, Cannabis indica
taactattttttatatatttatcatatttaataataaaaatattattttacaaaatcacattataatataataagttgtaagaaaatgacaatatttagcaaaattaattttgcgtgactaagaagaaaatgaacaaacttacgaaatctcattgctgtgaaaaatctttctacttcctttaatggcagattgaggaccttgaacctcatacaactcctcttcacgaactttctcgagatcccacttcttagcagctgcaacaaatacttgcgcgacacgtggaatagggtttccacacggtttaacatacacataaccactagaaccacacaagtaagaaaccaaagctacaagagctgagagaaaagagagagtaaatcccaaactccatttaccaatatcttcaaaatagaccaaaatagtgtttgagaaaagtgaaccaagatttaatgagaagtaaaaacaacaaaagtatgaagctttgttgttcttaacattttctttttcttttgaagtgtcaaattggtcagctccaaaggttgctaaagtgggttggtgtccaccatagccaaaggccactaaatatatggctgcatagaatatgactatgccaaatgttgatgtgggttcacattttgtatctctatcaccacaacctcttggtttaattaagaatagccatgaagatagtgatagtaaacctattccctgcacattatcataaatatatacatcacacatatacactcgtgtactcaaaatataattttaaggtaggttaactaaaatttaaaataatatatattttttaaaaataaatatatattatttttttttactttaatttcgaattaaattattatataggttggaataaattttagtatctaaataattatatgatttataattcttattcttgtttttgtttttatgtggaaacttgttttaattatagattaaacacaatttaaaataatttattaatataatagtttttttttttaaaatgaaaagttatttgtagtttaaatgctttctattaatacttttaaaaaagagtaaatttatatataaataaaaattgaagatagagctgaaggaaatcagataaatctaccaactaaccaacaaatacttataccaattatgttgtttaataattatgcattgtttatatatctaattttatattatgttttgaagaaatttgagggtgggcttaaatcttctttggactctatgtagatccgcctatgtatatatataagaaaattctatattgaaaatttttatagtaattttgtcggaactgtctatatatttagcatgcttaatgaaattataactaaaaaaatttatgtgactttgtatattgtagttataatagatattttatttgttctcgtaaatttaaaaaagtatttaatatcttttgtcatctgacatatataatatatattattattagtgtaattaagtattacatatttaatttaaattaaagtatgtgcactcacattaaatcttaccaatcttgggctaaggtagattagacttgtaccttaggtctacccaattaattcagaaacccgttttttgcgaatttatatagatatatttttttttattatttctcaaaattattatatttctaagtacttaattcaaattaaaacacatgtgtactcgtaaaaatgtattaaatctaaataacaatcatgggctaaaacaaatcaagcctgtgtctagggtccactcaattaaaaattataattttttttttatatatatatttttagtatttctcaaacttactatatttctttcaaagaaaaaattactcatttttatcctagggctcaaacaactaatgtcaaagactaccaaccttttagcaagttaaaacaacaacaaaaaaagaattatttcacaaatacacaaaaacaacaaaaaaattacaaaatacagtttcacggaattttaaacattttttacaatttttttaattttatttacagtaaatacggtcctttcatgttgtaattttgttaatttgt

SEQ ID NO: 306337 - DNA, 1234 bp, Cannabis indica
tttttttttccctatagcctactttgtttagagccgaccctgtattagagttatataaaaataaaattaggaaaaatgatgtaaatgagaaaaaagtaaattattatattttagaatggttggaaatttttagcaattttcggggtcttgcattgaggggataaagagaaaaatattttaaaaataaaaaaattcatcaaaacgcgtgtgcatagtagtaagtagtgactagcagtagcagaattttgattaataattatttaaaattaattatctcttacatgagattgtcgtcttgtgccacccatgaatcgaatgtgaaagacaactgtattttaaagaagtaatattgacaaattatgaaagaacacaaattgggagccatgacacatatagtacggtggagtagaatttgtcaaactcccagtcccacctggaaaaatggcattatcattcatttgaattttaatgtcttttttcaatgccggatcaattaatagaatattatagtgtccattaaacatctaatactctcttaaggtactaattttttctttccttcgacagcttttcagcaccatcaaatgagtttattttctatttcacacgttgattaactatgtatacaatacagctttagataatttgcatgatatttcatttcatatatgcattgcgtaatttgctgtaagataagaggatacaatacaattaataaccacattattaagaccaattctcttaaactaattactttttatacaattaagtagttttcaatcgtgggtagggttataatcccaagttagtgaccaattcacattattaatgcatatatcggaaccttacaattgctaaagaattccatctagccaaccttactatgagcataaaatctaagaaataaaaaaaactgttctaaccgacctactgaatattattagaaccgaaatggttaaaactgctattaaacggttaattttttttaataataaacttatcgaaaaaccgaaactaatagttatacatatatattaatgggtgattctacaatgcaccctcttaaaagggatgtactggtacacccttaacttgtttcgacatctagaaaaaaaatttagtctaattttttttcatattcatgtacgttatagctatttaagatatcctacaaaattttgaaaaattcggaataatttacaatatagaaaacaatgttcaaacagtctatttt

SEQ ID NO: 306338 - DNA, 1389 bp, Cannabis indica
attagtaacctgctattacaggttaaaaaaaaatgtaaccatatggttacaataaaaatgtaaccattgaatagtcaccctttaaaaaatatataaaaaaaaataatgtgacaacgcatcaaattcaataagaaacattttacttggaaaaaatgtgaagtaattaatgatatgataagaagacctataattattccattcatgaattagtaagaaaatttttactgaattccggtgaagtaaaaaacacactaagaatgtcaaacaaactattaaatttaaggaataaggtaaaaagtgaaaacaatatcttatggtattaattaaaaacttctaaatattccaacaaccgaaaagatgagaaggcttgcacgtgatataaccatatcatattaattaaaaacttctaattatatggtcatatttattattattaccttatgaaccaattcgttgaacaaccttttcaacccaacttagctacttgtatgagtttagtacctaccttagttataacatatctagaatactgtagacaaagaccttccattaattaatcaaagtaagttaagaaactagctagttctaaaaaaaaacatatgtatagtaaaacacaaaagaataaaaacaaaatgtcttataggtaagaaaaaagaagcttttctttttgggtgtgtttgtgacagttcaacaaatagatcagagacaatagaaaacctcatttgacagaacaaacatatatttgctttattacaagaagaaaatccctaaaaaaaaataacaaaacataattaatcaaagatctttaagttgtctgaggttcattggagaaatgtatcttttctctccatcaagtaatttcttggctattataacattagcagcctcactaggatgataaggatcccaaaatacatgcttagatcgatctgaacacatacttgaagtaggtccacatggaattattccagcaaattggcccccatttccacagcaagctctactagctgttgaaaaccctacataaaaatttcaaaaaataattaaaaaaaacccttaattttgaccattttccaattcaacaaacagctcatgtataatcctaatgtaccaacttttttgaaatttgaatacccttttgggagatagaaagtgggtcagtcttgtttaaggtaaatagtacatatattaatgaatattattgaagatttttacctaaatacctaaattcgtattattgttttacattttttcaaattattttttcttttatagatttttcagttacatttttaccgattttcacgttgcaagaaacataatataatatagtattaatataaaaataattattaattttatgaaaaaaaattgtaaatccatattttt

SEQ ID NO: 306339 - DNA, 1765 bp, Cannabis indica
tctggttctttcgcttcactcggatagggaggccacctccaaaggcacttgtgatagagaagtcaataagcttctgagagttaattctcataataaatgatgagatattgactacctgcctctcaaccctcagaagagcaaaagtaacgagtatttgtaagatttattattattatgtattattgatgaaattgcaactaactgaaacacataattaatttcaagattcaacaaactatttcattcaaaagagtaaatgtaaccatcattctaagagcaaatgtaaccatcattctaagataataatctatataaatgggatgtaactaggtaaagtaactagtctaatgtaagattttcttacacatggaagcctcagtgagatagaccactaactacagcaattataagtcatccacaaaatataaagcacacaaaaaaagttttataaggccacaattttctctaaaattatcaccaaaaaagaaaaagaacaagaagaataatacctaacctaacacaacttcacttgttctaaattagacaagtaattaggataaaagaaacaaagcaatatatgaaaaaacataaatggatggtgaaattgatacctaatgtggctttccttatgaaaagcaaggtggatggacttagccagcaggcttgaaaacagtttgcaatcccttgattaattcatggtcaagcacatgcttcaaactttttttaggcataagggcgtaattgatcattcattgttgcagattcaccagttgctgaacacagagagaatagtcaattcaatcaatcctattcatccagggtgttgcaataaaattaaaatatagtagagcaactgctcgagtttaacacttcatatcaacccaataattgcatcagtaaacataaaaaatagactagccattgtatcattttagtttaatactattatatcattctttatctcctattgatcaagaatcaattattttcttttgcattaattaacatggaaaaatattaacgttatttttatactcaatcataagctataaaatcctatgtttgctaggagttagctaaataatacaacaccataagaaacaaataccattgacaaaagagatccacattgacaatacagagacacaactgagaagacaattaacttaccatcgacaaaaatagcaagtggtggatgctcataagaaaatatggtggagaaacatcagcctgagtatcttcaacgattggaatccaagactatcttcactaacaaaatatttaatatttagactagttcataaaaaacaaaatgaagtcttcttcatgattcaaactttatactaaagcaaactttgcaattttaccactgtctagttatctaaaagttctcaactactgtactcatatatttagaaaacaagttaaacactaccctgcaatacaattaaaattgataattaaaataggcaacgtacttttaagactatataggtttgaataggtacacccccatcttaagaaaaggaaccaaaaggaagaaaaaagaaaaaagaaaagttaggaaacctatattagaatattttatatatggaaattattttctaattaaggaaatgattttctatttacatggaagataatactcgattcatgattcgtatgtttattatataatgaggaacgttgggtttgaatattttagtttaaatgctgacggagaatattagaatattttatatatggaaattattttctaattaag

SEQ ID NO: 306340 - DNA, 1693 bp, Cannabis indica
atattgtaaatacaaactgtcaggaacataacgaacttaacgaacataactaatcgcgaaacagttttactgttgttctgttaagttcttgtacaactgtcattttctgttacaaagtttgttgtaaggtctctgaccaaaccatattataaataacaaggtctttcctcaactgtgtcaagttgagcttttcattctccattgttcgctttctcccttttcactttcatctttagttttctctgttttctggtcaagtcctctactcaaagagttcttgtaaccaccaccagccgcatccactaaaagagaaacattatcgataatactattatatgttgggtactctgtaagaatagatcgaactttttgagataacatgaagttgacacaatcttaggagacatgagcacaatttgtcatgaaaaaaataatttggccagaggtgcatcaatacgatgagtttatgcagaaatcacacataaacacaaattaataatactaattaattcataacctaaaaacacaacatgttaaaaaaactccaatactataaaaattatatcaataatatataaagtaaaatgataataaatattgaataattataatgatttttaatatgaattgtaattaaaatttttttataaaaataattaattaaaattataaaaagtaaatatagttaatgtatattagctcaataatattataaaaacgtggagtacaagaatttgcgccctaaaggaaattataaaacgaaaaaagcaaacaatattataaaagtattaggcatatgaaataaaataacaggatatgaatattttttataaacaaatacacaataagaaaaaatatatgacactaataatttacttcctacctccttatataggtctaattatatatgcatattatttagagtaatgtattaattaaggcttcatagatgaatatcactcccacaaattacttttaccaattaattaatacatgtatgtatatgtcatcttattatatgatgtaagcatggtgtcttttttctttagttttctttttatatatttcattttaaattattgtatacttaattatatgagttggtcgagaagtaatgggcagtgttgtatggatgcatgtgtagttttgaatatataataactatatataattatgcaaattcaatattgcaaaattgtgttaatattaaatatatattagggtcaaactttgaatataaatatgttaaagcgtatttatagccgattaattagagtagtacctaatgtttaatgttttttttttgaaggaaaatggtaactttattaataagaagattcaaccattacaatagaaagaaaatcaggaggaacatcatcctcactaaaaatacgatctggatacaaacaagagctacgagcaagacaatgtgcagctttgtttacagaacgtttaacaaaattaattgagactaacggcaaatcggccaaaagagaacgacaaaccgccacctgaaggccaaaaggagaaggtatctccaccgtgctttggactgcctgaacaacgaccaaagaatcggtttcaatctcaacgggtccccaatgtttcctctttatccaacttaaggcctccttaacccctaccaattcagccatagccgaatccacacaccccactcgtaaaactgtgaagc

SEQ ID NO: 306341 - DNA, 1668 bp, Cannabis indica
actaagaaaatatccaaaaattagaacactaagtaaaaataacaactcagagagttctttgtttggtaagtcttttagtatattagctttctacaaacatcttgaatcttcctgcaaataaagaatcaaacccaaactatcagcaacaaaaactagtaaacatacatttatatgaaataatatgcacataaaatccaattcatatattcagagttcaataaaaatatgtatatgaatgcgaaaacagtaactacgtggcacttctgccacttcaagtaagttaaaaaagactaataccatgttgatgcttcttcaagaacatgctagagacaattaattaccatgtatcctggaacaggaggagagcatactgctggtagaaaaccttgatggaggtgccttgacatgttggaacttcgtgagcttcaaacacagagaagaaatgaccaataaagtttagagcttcatggtaagcccaagacttaaaaaatatagaaaaattaaatgaaacacttaagtctatgtgcataggctaagtggtcttaatcctatggtggcctaagtattttttaagaccaatgcttataaatagagagaaggcaaccaataaagtttagagctttaagtgtggaagatagaggttttagtgagtgagagatatcttaccacaccataagaggactttgtttggaagtttcttcatttcttcaagagaaggacaagcctttgattcaactacaaaaaagtttcccacagagacaccatatgcctgaaatgcatgaaaagattttaagcgtgtttccatattttattgctgaattacaagttctttgaaaatatttatatatatgcttacaatatcaccaactttgacaggtttgtatgatgtgaacattactgataaccaggtaataaaactatgtcatactgcatttaattactccaattaattattatttctcaaaccttgaggctataaattaccctttgatggctctgttgcatgttcatgattccttttcaatgtgccaaacaaatctcttccatcttcatcatcatgtgataaaaaagattcctcattgtcttgtaacgagccaacatcaccaaatcttttgcaaatagtttcctttattaaatatcaaatgtctaccaagtgtgacaaaaaacaaaagtaaggtctagcaggctatggaagtagttttgaagttttatcacattaaaagagaatacaattgacaatcacttcaaactactgacaataatgagcactgtggagagtaacacatccactcaacaattcaattaatataaatctttaacctttttatgggaaatgcataataacaaaactacttacaataatgaacttaaataattaattttgcaaatattagagtgatataccctgtctaagaaaaggttcctcttatcattactctagaaaagtaagacatattcaagtcattactctgaaacttgaatctgtatgaaattttgaaatgaagtgttagtatatttactaagaaaaagaacaatataagagggcacaaaagtcaggtaaagattttcccactctgaacttctcaagtgtgcatgctatatcttacctaatatataaaatgcctatctaacattttttgttatgcacttaacagaatataccaaaaa

SEQ ID NO: 306342 - DNA, 2003 bp, Cannabis indica
agatcctggtaaaataattaacaacaatgcttccgtaatcccggacaaactttcagtaatagccagtgagcactaagaatccccgcaattccttgagcgtttggggaaccggccactgcaccatggcttcaattttactgggatcggcaaccactctgtcttccgaaatcacatgcccgagatactccacttgtggttgggaaaatatacatttctttcggttggcgtatagcttgtggtctcgtaggcgctgtaaataagaatgtcataaaaaaaaccagcacgcaatctcgtgaaaaatctttgaatacttcattcataagagcttgaaaagtggctagtgcatttgtgagtccgaacggcatcaccaagaattcgtaatgtccttcatgagttcggaatgctattttttcaacatctcgggctaacattcgaatctgatggtatcccaactttaaatccaacttggaaaagtacttagcaccatggagttcatctaacagttcctcgatcacaggaatgggaaacttatccgccaatgtttcttgattaagggctcgataatcgacaaagaaatgccaactgccatctttcttcttgaccagcaatacagggctcgaaaaggacctgtactagtctgaatgatacccactcgatacatgtcacggatcatctgttcaatcgcatccttctaaatgtgcgcatacttatatgggcgaaccgagatgggtcccgtccctagtttcaaagtgatcgaatgttccccgagtgcggacggggggaagtccggggggcatctcgaagacatcttcgtattgttcgagcaactaagaaaccagtgtaggaatgggttgcgtattgctggcttcattagtattcattgctcccaattggaaccaatatccttcagcacccttttccactgctaacaccatggctttcaacaaaatcggtgacttacataggctgggatctccctgtaacgtcatccaatagccagccacttcaaatttcataaccatcgtgtgctagttgacttgcatattaccgagggtctcaagccatttgattcccaaaatcacagccgctccgccaagttctaaggagagaaaatcaatcaccgctcaaatggctcacaagtcaagttccacctgagtacagacccctttcgttctcaccttcccacccattcccaacaacactccataacaagtggttgctgtgattggaagaccagcagtattcactacttccatagacacaaatttgtgggttggtccactgtcaattaaaactgttaccagtcgctgcccaatctaccctgccaacttcatggtgtgagctgaggtgattccgatgagcgagtttagtgagagagtggctagtgtttcctcagaggcaatggtctcgcccgaatcgggtgaaggaggtgggttctcctccgttggctctgtgtcgtcgtcaggaatgaggacgatttggagaaatttttgctcacattcatgcccggggtggaatttcttgtcgcacttcaagcaaattcctctagtttgtttatccttgtattccgcttgcgataatcagcggtaagaggtggtggcgggtggtcggctactgtcgattttggaagccctggatgagatggaacaagaggagaagctatgcaacttggttttggttgtagtagtaaattgtcaaattggaaaagagttgaagctagatcgtgatggaatgatagggctcaaatttggtttagagctattgggccttgttgttgggtcggttttaatcaattgatatccttcttctactctctgggctgtttccatgatttgggccagcccattgggttgtaaaatgtgaagaagctcccttcgagtatgtggtctggtacatccactacgcgtgaagtaagtatctcccacctgacctgatattctttgacggttcccgtttgcactagcgatagtaattcttctgagagttgttgggttttgtgccct

SEQ ID NO: 306343 - DNA, 1569 bp, Cannabis indica
agcttacccggtatttccccttacggatcacgggactactaactgtcacaaaaagtaccttaacctgttcttcatcaaattagacttcaagtcaaagaactagttggcattgtgatgggatagttccccctaaccttgatcgatgtatagcacaaataaggcagacacgtatttaactcattcgggctgatttgtgtcggacatatcttatagtaatttgctacctcttgaaaaatggatgaagaggcagcagagtgccctgcttggcatggggactagaccacgaacaaaaaccctcactagaattgtgggctagtttcctagcacggggcaagaatacttcagtacctctgagcaggcctttgtcttaaagattcttcagcctcttggcagtaaggctggatggaggagatacccatcatgctttccacttgttcctcataaaaataggtaaatcctctatgaattccttagtaacgtagtcctcatcaagagtgaagatcttgcaaggcgtcaagataggttttcctgcttcgttgaaccctcatacaaattgtcattcaagtctgctttcctctcttcaccatccaactagtcaacgacccttatttcttcttgtccctcgggctcctccaacccctcgagatcctcttgtaccttaagatccacctatttctcatgatcttcaatgggtacgggttctttggcatgctccatggtagccatggtcatgagtcgaccaatgtggggatcctcggtagaaaccctccgagttgtttgtttggtattttccatccttctggccctaaacggaggaacaaactcaatggtgtgtttgggtaatgtaaccgaaatttctgcccgcatgaaattcctcctcaaaggccatggacgaccctctggaattgtatctaggacatctacaccacagaccctatacgtccacgaggcggacaagtattgtctccagcctctgttcaactatcagataaagtgttcatacccttctccactgatgtggccggtgtaatggtgatgttgcatggaaagttctggggagtcactcaaaacttcccactcagagaaacttgaagtagaggaaaatttgctcgaagatgaagatgatttgtctacctagtgtctagactgattcttgtgaagaagttgaagcaagtcgtcatctatttaaaaatcatctccctagaagtcacctgggtttatctacaaagaagaagaatattgaggtgagtatccgaacaagtttagaacatccttccaaaagaagaatatcccaaatacttcgaccaaggaagtttcaaagatcaaaatagggaaaaccatcctattgatagaatccttaaatgaaatgaattcaaggctctaaaatgctcagaaattccaaagagccaaaattaaaaggccgagcagaagataaagtgcaatcttgcaataaaatcagtgcaaattcaagtaaaaatcaataatcgagatttaatctctaaaatgcccaaaaaactccaaagagccaaaattaaaaggtcgagcagaagataaagtgcaatcttgcaa

SEQ ID NO: 306344 - DNA, 976 bp, Cannabis indica
aaaagaggaaaaataaaagaggaaaatataaaaagggtatagagtgtaatttcctctatataaactaacgggttcgggtggcattggcgagttgaccaagtttcgggtgacatatttacatgagaccaggttcgggttcacgagttttgggtatttggttcacacaggttcaggtgaatatttttaacaagtaagcaggtttgggcgggttcaccgagtttcgggttcggtgatttttttttacatgtgacgggtttgggttaaaataaataaacgactgatccttctttttctttttcttccacaccattacaaattcagaattatcagaatcaaacaatgaaaatcaagaacttatattatcataatttagtaaaagagaagcaaaatcacctgatatttggagcaaatttctgtagctttctccaaaagagctacagcaactttcttgttcctctcttggatcgaaacaactaactcaggagctacaaacattcaatcaatattcaagatctcatcaatcatattattaacataaaattaaatatgaatcagtatcattataaacacagagagaaagagaggtacgagcagagccgtaagatgaagcgaagatgtaaccgagatcgacggtggattgaacggtgaagattacgagtttggaatcgagaatggtgtggtggagattatcgagtgcccattgaagtgcgtagtggctgcaatcgctctcatcaattgctaccatcactttcttcttctccatttctgcaatttaatcaatcttttctctctctctaaaaattaaaataaaataacacaattgtgtttatacgctatgctttatataaatactacataatttttgttatgaggaataacccttatactatttttttattttttttttaaatttacggttttgagtttctaaagtgttgtagcgctagttgcaataagggtttctatacgatttttt

SEQ ID NO: 306345 - DNA, 2916 bp, Cannabis indica
atttttatgtaaaactatatgtggtattgacttttatgagcacctaaaagtaaagatttggtaataaattgtaaattgatttcaatcagctcaaattgagactgatagttaattcctcatttatagccaaaaaaccagtacagagaatcaatacaaagcaatcacactcttacacgtgtacactatgaataacagaaaaggaataatcataacaataatgaaaacggaatgatgtgacagctggtgatgattgcctcgtgattgggaatattccaataaccttggagccactaaatgatgaccgaattacccctgcatatactacccctgtatactctgttcttcaacaccacccctcagcgagagggtgacttcatcacaccgagtttgtcgattaagaactgaaaacgtgaatgtgacagacctttggtcaggcagtctgcaacttgatcatgtgagggaacatatctgatctcaagttgtttctgcaaaaccttgtctctaacaaaatggacatccaactcgatgtgctttgttcgggcatgataaacaggattggcagcgagtgcacttgcactcatgttatcacaccatatgagtggagcagcaggtaacttgaatttcatttccttaagcagttcttgtagccatgaaagttcagcagctagttgtgctaaagctcgatattcggactctgtgctcgatcttgccactacggtttgcttctttgatgcccaagagatgagagagtcaccaagaaacacacagtagcctgctattgatctacgatcatctgggcaacaggcccaatcggcatccgagaaaccaatgagagacaatctgtcactaggagtaatgtgaatgccatggttcaatgtcccctttagatatctaagcactcttttagtggcattctagtgaactggtgtaggactttttagaaactggctgagtttattaactgcgaaggaaaagtcgggtctcgtatgactgagatattgaagtgcccccacaacacttctgtaatgtgataggttcagccatagggttcgccgatcatgaatggactagcggtttactagcagtcataggtgtaggaattggcttgattgtgctcatgtttatcctctgtagtaactcagtaatgtattttccttgagagaaatacaacccggtttcatctctaaccacttcaattcctaggaagtagtgtaaaggtcccaaatctttgagagaaaaggccttgttgagtcgggttatgaactgttccagcatcatagttttgcttcctgtaatgactatatcatccacataaattagaaccataagaatgacatcagtatagtttgagaaatgaaaaaagaagaatctgccttagaattttcaaaaccccagttcagaagagttgttttaagccggtcataccaggcccttggtgcctacttcagcccgtagattgacttctccaatttgcaaacatagtgaggttttgttggatcctcgaaaccttcaggttgcaccatataaacatcttcatccaaagtgccattgaggaaggcgtttttatatctagctgccttatatcccaattgtttgcaacagctatggtaagaacaacacgcactgttgaaggcttaataaccggactaaaagtctccccaaaatctatccctggtctttggtgaaatcccttcgcaactagacgaggcttgagtcgttgaaaagaaccatcaacattccatttaatcttgtacacccatttgttgccaacaatattataatcgggtgaaggaggtaccaaataccaggtcttatttttcttgagagccataaattctgtgtgcattgcattgttccaccccttgtgttggagtgcttcttgcacagatgtaggttcacgcaaactgagatcaacacctgcagtatttagcagtactcggggtttgaatattcctgccttgccatgggtaaccattggatgggaaggttgaacatgagcaggtggaggtgatgtatgaggttcacggtcaggtgttggtattgattgtgttgtatcggctatgggactgacagcaggggggctgtgatcattttcaggttctatatctgaatgagaagagtgaactacagacattggtgagtgagtttcagaaatagaccatacctgatcgtgtgccaaaggacttggagctggtggttctgcattggattgtgaagtcagagatggaaatggtagattaatccaagaatgaggcataggaacagttacatgtttctcaggttgataattatttagaaaacctgagacaaatgaaaattctttttcattaaaaatcacatgtgtagatatgtatattctcccatgtggactcaaacatttataccccttatgaacttcactatacccgagattaacacatttaattgagtggaattggaacttatgtgtttggtaggctctaagtcaaggaaaacaagttgtgccaaacaccttaagaaatttataatctggaattttcgcatgaacatgttcaaagggtgttttattttgtaaaacatgagtgggcagtcggttgatcaagtacacagctgtctgaaatgcatcagaccagtactttaatggcatagccgcttgagccaagagggttaaacccatctcaactatatgtctttgcttacgctcagcacggccattttggctgatgtatgaggacaaggatgatcaaaaataatgccactgctattaactaactcagtaaacgcttgatactcaccaccccaatctgtcctaagcttcttaattttcctatcaaattgtgtctcaaccatggctttgaattgaacaaacgcagcaagtgcatctgatttatttttcagcaaataaagccatgtatatctactataatcatccacaaa

SEQ ID NO: 306346 - DNA, 771 bp, Cannabis indica
ttaaagaagcgaatgtagattaaactctcccttaaacttcaacaaagttaacttgatgaagtgcaaggagttgatacaggataaagtgggagaatcacctgacccttcctggatatcacacaacgagaatcaccggcatttgctacaacaagttgtttgttccgaatgactgcaacacaagctgtgctaccacaattcggtccatcaaaatctgagtgaggtccctggttgagacgaaaaacttacaacattttattttctcaaatatataatcgatactaattgaagcagtagggaatgaaacataactatttcagcacccagagaaagtatcatggatgagtagtctattgcattggcttcaaatatgaaactataatttaaaaagtgaacccataattcttctgcaatacttattacttattagctacatttgtatgaaaaaagttaaaattgggtttaataatgtccatatttctaccaagtctaaagaagtactactgtactacttgttcacattatctgcaaaatatcacagttaggaggcaaaatcaatgtcaccccaataaataatgaaataaaatatgcaatgcaagcgaggtgatcttagccattctaattgtccaatcccatacaacaacatttcgagaccttttcgtatcaaacatgtaaagcataaccaaagcatgaaatttatatatatagatatataatattgatattgcaaaaggcttgaaagtaaagtgccattcttaggtgcatcaagcataa

SEQ ID NO: 306347 - DNA, 851 bp, Cannabis indica
acatggaaccttcaagattgataatgtttttttaaaaaagaataaaataagtaagtccgatctcggtaggtccaactaggtctgctaagataaggtacaaaaagtaccctatctcgacggacccagttggacccgctgagattgggtcttttagataaaaaaactaaaaacccccagcctagcccgctgtagctctctcttccctcttctttttcttcttttcctcttcttccctctgccttctctcttccctcttcttcttctttcttctttcttcttctccctgcctcccacccatcagctcaccctctctcttccctcttaatctttattcttttccttctctacccagctagccctttctcttccctcttcttcttttttcttttccttctctgcccaacaaaccctctcgctttcccttttcttctcttcttctctcacccgtaagtagccacaaccatgagaacatgcaattcttatattttctttttctttctctttttctaaatatttattttgtttgaaattgttatagtttgaaatttctatggtttgatttgaaatgtgaaaaaagtttataagtttatttggtatgattgcaatttttttatttttattttttgttgaaattatttatactaatcagtgaatatttatgtaaattagtttcttagcttaataatgatttagaatgtgaaatgtattattttgaattgacaattttagttttgtgacataaaaaattagaaaaatgtattatttttaatttgttttgaactatgtatattattttaaaatcataaactatgtatatatactatcaaaaaaatatatatgtttatataaat

SEQ ID NO: 306348 - DNA, 1250 bp, Cannabis indica
taatatataaagatatatttttttaaggataaaaactctattattataaaaaattaatgaagaagtttatttacaataaaagagttaataagtggaggaacagtctccaattaatagcaagtttcattcaaccttagagcgtgtttagctaaaccatgagcagtcatattagttgtacgttttacatgaacaatagttgcactaagaagaaaagaaaaaagattagaaatatcaactatgaaatctttaaaagatgaaattacaaataaaggagcatttatagcatttgacaccataataacatctgtttcaatttggaatacttgcaattgcagctgtatagggaccaattcaaacccaaaagcatagcctttgcttctatttcataagatgtgaaatttccaacaatgggttaggcaagggcagctacaacttgtgccatatcgttacgtatagtagctccaatacctgtaatattcctttgactatcaacaacaacatcgacattgagtttgaaagcacccaaaggaggaggctgccatggtttaggcactgcagtaacagttgttggagtgttttttggaacagtagcagcagggggcgatatttagcctgggctactttatagttgtcgaaataattcctgctgaaaccagcaagagtggctgctgatttagcctgctaaccatgtaccacgctattacgttctgtccatatacaccataaggtgcataagatctgctccattttagacttgatgtaaagagaggataggtgtacaaggtagtctcctatgcatagtagccgatttgtactagtcaaaagataattgtgatgagcgccaaactccttaagcatatttgcaactaaagagtgcatgtcctatcaattcccaagctctatgaaaaattgagcatgttgagtccgtgattatgcaacgggtagggcgtcatgtagaacatgccaaacaaagatcttgactatttgtggtagatttagtgtccataaatatttccaccaagatgtaaccgaagatgagcctgatgacaaagaagattcatcgaccaaagaagccgcaaggtgatagccggactgtacagtgtaataaccagagattatgtgatgccaaatcaacttgtcttcattgtggaaaaagatgagtggtattgttaagattctatccacatcaatttgagaaaaatattcagtttgcaactgttgcgatatttttgcacacgcaagtgtacgta

SEQ ID NO: 306349 - DNA, 1363 bp, Cannabis indica
tttgtaaaagagaaaggtctcgtttcaaattttatcctaagcctctcaacacctcgagacaaccatgtagatatggtaagtatttatttgaactttattttcagtcttataaattattcagaattttctaaaattttagagataattttaaataattacaatacatacacgattatagaaaaaaaaaaaaagtaaagaaatgtcttgcatactaaattagatagagtagtgtatcaaaatattgttttgtaggggtatacaacttacccattacttttaactaatattaatatgcagtaattttttacactaatatattaaatttatattagaaggaatataatttataataatttgattggaatttaatgaatttggagagtgcggaccatgcaataattattggtgtaataataactacagagttgtttgtatcgtatttacattacacactcttggaaaagttaacttaggggaccttgttattaaaagctatctaaaagcatgcatgtgttagtgaccaaaattaattagtgccagcaacaaacttgtattatcttatttacaccatgcattgcatgtgatatatattgtgatagattccaaattgattttccaaatattattaagaaaatagaatactccaaaacgaaaaacatttgaaaaacaaaaatcaaagtagtaccatatatgtcttcatatacacgatatataattgttcaggtttgaaattataaaaggttaaaaagaaagaaaaagaagaaaaaattatcaagggctaattagtgtcatggtcatgttatttcttaatttcagaagtttttgtttattattattatgtgagtgaaatgaaaccaaaccaattattgtccaattccaaatgaaacataaatgttggtgggattttacttggaaagttggaaactaccgattaggttggaaattggaatatatataatatatagtatataattatggtgtttgtatatacatatactattaaattttggtttcctatagactggtccttataattattatatataattttctatatatatagaaaattaagtcccccaataattgcagggggaagaataataaatgaaggacttcttatattattcaaatgggctgtatctatatatatattctagaagaaagcaaagaaagtgtctgtcaattaagagaaaactcagctttgattaatgatcttcatgcgcttgtgtatggttagtagggggaattaataatatgttgtacttttctagggtttggttatggtttaactagtcaacaatctatttgtaatatattgtatatatatatatatatatatatatattaaagtgcctatctaacg

SEQ ID NO: 306350 - DNA, 4667 bp, Cannabis indica
tgttggaaaaccagctgcaattgtttttggaatgggttatgtcaccaattctgctattcttcccgtcctaatggggtaaggtatgtttgttttcatcttgttatccttattaattttaaccttaatcttggtttttcatggtttcataaatcctttaatgtaatttttcattgtttcaattcgtagggaagctttgattattagcgattcattgaaccatagttctatcattaatggtgcacgaggatctggagctacagttcgagttttccagcacaatagtaagtccacagcccatctttatactgtattgtattgtattgtattaaattatttatattgttgctctatgaatacaatgtttggctgtaaatgtattatatgagacataaaagtaatctaatacaatgagaagaataacaatgatgaatataattagaaaatggagaaaataataaaagaatatgagagagtgaaaggatgatgaaagaaattcatgattgaaatgaaaattgagaacacggagcttataacattctgtgtgttggaattttggtgtattggctgctaaattattgttcttgaccaccagacactaatacaggtgaacctcacaattaaattggcacatggaacccccacacttttattagtgtggtgccctttagccttagtgtatttctaaggatcaaattaagctatacaacttaagatttccaccaattgaaagacaataattgcattaacacaatataaaataggatgtttaacaaggtgtgctaaacaagatctacgattttggtattgtgtagcaaaaaattttactttactgtgttagttcatctatcacagaattttgttctcttataattttccttcttatcttgcttatagcacctgctcacttagaggaagttttgaaggaacaaatagcggatggacaacctaggactggcagaccatggaaaaagattatggttattgtggaggggatatatagcatggaaggggagctttgtaaacttcctgagataatagcaatttgcaaaaaatataaggttgtgcccacattgtagacttcataaattatatattgaatatcctatgaaatttttggtctattgattattttgatattttctttgtttcttctcgtttgtctaaatattttaggaacagagtttgctaaaatgaactctcatgtgccctaaatttatgaattaactttagaattcatgcttttcatggataacatggattctcttatgatgtgtgcacattaattccttcaggaatagttttaaggtttcttatgggtagaaattcttcatattaagagattcatatttgatataaattcttatataattacattaactcattacaggcttgcttaatctattatattcagttctaccaagaatgtgtcaaaattttaaactactgtatctcaatattctttttcttgcatcataggcatatacatacctggatgaggcccacagtattggagcagtagggaagtctggaagaggtgtttgtgagctcttgggtgtggatccagcagatgtagatgtcatgatgggaacttttacaaagtcatttggatcgtgtggtggctatattgcaggatccaaggtttgcttttacaccttgtatatttcgatcttctgttggtttaccttactataggtacaattaaaatattatattgtatttgacttttgcgctctttagttttgctgttactcagaaaaattttatctgttgaggagcattcgttagggataataaacgatctatcaaacagtttctagagttatttggccaaaattttgacttggcaacttgttattcaatgcaattctcagatataagtaaataagttacagtactagatttcatttagctcaacatgtactttacaagcattattctcctctttagaatgaatttaatcaatctcagagccatgaaacttgtgcttacttgtaaaaaaaatctgtttccatattaactgctttcgattttttttatttttcaggagcttattcaatatttgaagtacacttgtcctgctcatctttatgcaacttcaatttctccaccggctggagaacaaataatgtctgccattaaggtcatccttggagaggatggtactagcagaggtttggactctctttgttagtttgatttttcgatttctttttctcctgcatttagtatttgcggtacagtttcaactttgagctccttttatgctcaactgctgctcaaatatgaccaaaactttatggagctgttgctccctttcaggagcccagaagcttgcacgaattcgggaaaatagtaacttcttcaggtcagaactacaaaaaatgggtttcgaggttctgggggataatgattctccagttatgccaattatgctttacaacccagccaaaatccctgccttctcacgtgaatgtctccgccagaacgtgagttcatttccaggataaccgctctctttcaattttcctactacacattacatttgacactaactaaataattccactacaggttgctgttgtcacggtagcatttcccgcgacccctcttcttttggcaagggcacgaatatgcatctcagcatctcattccagggaagacctactcaaagccttggaggtaataatgcctgctgattaagatttgtaccttactactaaatctgtccctcaaaactttctttgctcaatgcctgttgcacttctgtttatatgaacaggtgattagccgagttggtgatcttgtcggcatcaaatacttccccgccgaaccaagcaagcaattgccagattcagactcaaaaaagtgtgactgagaaaaatgagagagaaagaaaaagctttcaagccagagaagaggagagaggttggtaaagaaaacaaaagaaaaaagaaaagttcatgttgctactttgattacttaggtttcatttgtgcttgctttgcattttaacaacatcttattatgtgagcctctaaaatgacctctcattagtattgaaacacacacacacacgagtggagtggtatatgttcttcttgtggcttcttcaattattgaattttgtccccaatttaaataattttgtacagatgtagcttgagcaaaccatattttatgctattattcttcaagggtagtcttttgtatggggaataataataatgataacattgtaactcttgatggtacatcttcaacaattttattttatttttggaactgtgaaattcatagttgtaattttatttgacttgtaattcttcttttttccattctcatttacttaatttaaatataaatctatgtattgggggtagataatagatatatgaaatgaaaggaacaaaattagatacttgactaataaattattaatttctttctttctttgtttgtttaggattgtgtaggattgtgtcggcagatactaagcaaacttgaacgtgaattttttttttttaaagaaaaaaaaatatgaagtttcgtatataaacttttttttttttgatggaatcttaaataaacttgagaaaggtacgagattcccaagtcattttgtttttatattatttaaaattatcagatagatgcatgtacttctggtaacacctaattatatttattttttatgtatatatgacagccttatattatggatatatatttatgataaaattttctgtacttaaaataagatttaaataattgattgtctataattaattattttaaaatttatttttaatacaataagttattgagaatttctaaataacttataaaatatctacaataataatatagtcatatagtagacatctcactaagaaataattatagtgaaagcgtcaagtactataagagtctgctataagtgtattttaatattgatttttacatattttaatttaataaatgatataaaacaccgctaactaatcatatagtgttgagtgttgagcagcttaaagtacttaatagctcttaagaatatctatggtaaattattttaatttttccaaatcatgtgaaatgttgtaactatatttaatacaatcatatttaaaaatttaaggtatagtttctcaaagtgctcaaaaataatccctacgtgattgagacagaaataatgtctacgataatttttctatacaagtaatatttttcacaaaatttataaaggcaataaatataaatatataaaaaatttaaagctagctggtaacaatttgttaatcagaacagccattaatacatcatttcacaacaggccaagcatgtgtgtataaacacataatataataatgctgatctcttagcttcttctccattataaaaatatgattagttataacattcaggattctattgacatagttttaatttcaagtgcagtatcagtttgtaacaattaccaacactacatttttgttaaaataaagaaaagaaaaataaacataaaaaaggaaacacatattattattatcacatttgtaaaatattcgaattattgtattaagttacaagtatattttgtttgcaagagagatataaataacaccacacacccaacatatatttatatacaattatcaaagatatgc

SEQ ID NO: 306351 - DNA, 2773 bp, Cannabis indica
aacggtaagttaggagctatgtattaaagctgttaaatcattcaatgatgtggacatttttaattggttagacaagaaaatagacagcaatattagacagaggatgtgagtcccttaatctacctaatattggtggaatattctatttttatgtataccctaaaataccttctcattccaaaattttctaacttctttctatttccctcttgctcgttctctctctttccctctcacagattctcattgaaatacccatcgaaacccccattacaggattcaagactgcgaccatccaccaagaccacgccaattcagctgaccgagagggctcctttttttattcgaccgagatctcgtcaatcgcttcctcaactgcgaatagagagaccaccaccactaacaaagaccacaaacagagaaaagacaaacaaagacattttctgtaattttgtggttttttttttgttttttcgagtcggtccgatagtgtccgatacaggttcgataagagattccaaaatttaatttttgaggttgatggtgaaggtccaatagtggtctaatatagattcgatggtggttcgacgcttactaactgattggtggacgtatttcgtgtctgatgggggttcgacactgttcgaatatcggacacgaaatgtttacaccaattagttagtaagcatcgaaccaccatcgaatatatattaaaccaccatcagacatgaaaagcctaccaatctgttactaagcatctgaccaccatcgaacctacatcaaaccactatcaggccttctccatcaacctcaaaaacttaaattttagaacctactattgaacatatatcggataccatcggaccgacttgaaaaaacaaaaaatgttgtagagaatgccagattgtcgtgggctcgtggtctacgattgtggtctctattcatggcaatcgtctctccattcgcagttgaggaaggatattggcgagggcttggaaggattgaaatggagtcgagagggtcaatttaattggttttttagtaggtcgagtggcattagatggtggcagtggtgttcgatggtggcggtagtctatgattgcagtagtcctggcagtttggttctcttgaagagagcgagcgagattagagggagagagagagagacggaagtaagttgaaaaatgggagggttaattttggatttaatgaagatgttaaattagatccccccctgtaatacttattattacaactttacaagaagagaagaaaaatacaaataaaaggactcggtcctaggtggcttcgcctctagtggatcaagatctagtagttagttacaaccaaaattgtaactaactcctaaacctttgatcaaccctaaactacaactataaaagaggaccagagacttaccaatctctcagttgagagataccagaaaaccagaagcgagatttccagatctggaagtttcagctccaaaagttgttgttccaagttcatgcaaagaaaaagaaaagagttagtgagtgagaaaaccaaaaataaaatacagaaaagaagtgttgagtgaatatcagaaataccagtcgagattgtgacttggatttctcacctgttttgtaataatcttctccaaatagtgcagatctgagaatcgtcttcaaggcgagctcgaaagaggatgtacccctgatttagggcgaacctctataatttttggtgtttgttttctttctaacctactgtgtttggtttgatctttgtgtgtatgtgttttgtgatgtttctgggattgttttctgggtaagatcgatcaatagatcgaggagaatctctagttctagggtttgagaaccagagagaaggcagagagaaagagagagagtctgagaactctcgaaggttcgaagtgagaaatgagctagggttagctctaatttctcttggttttgttcaaagcagaacgacaaatcgttttgtaaaacgatctgtcgtgcaggaaagaaattacaggtttctttgttgtttgatacatttggttaattggaatttcaccaagaaaattcctacagtggtatcagagctttggttcgagcttaattcaactcaagaaaggatcaagaaagtgacaaaggctggaagaagaaggagaaccacaacaagaagttgtggacagtggaaaagctgtggaaattccacaaattgataatcaatcaatttctataaactcaactcaatttaattttgatttttctaacatgagcaatatcaaagttgacattgattgttttgatggatctggtgattacaggatttggaggagaaagattagatccctattggctcaacagaaattgctaagggttcttgaagaccctattgaatggccagacaacacttcaaaaatacagcaagaagagctgttagaaacagctacagggatcataattttcaacctttctgatgccatcatcagattggttgataaagaagaaactcctgccaagatttggaagaaacttgaagaacaatttcaacagaagtccttgactaataagatctatctaaaggagagaatcttggggttcaagatgagtcatacaaaaaccctagatcagaatttagatgaatttctaaggatgcatattgaattggaaaattcaggggagaatgaagctctaagtgatgaaaatcaggcaataatcattttgaattcattgcctgattcatacagagaagtgaaaaacagctatcaagtatggaa

SEQ ID NO: 306352 - DNA, 2350 bp, Cannabis indica
cccttatttaattaagttctctttttttattaattttaataatataaatataaaagaatgattaccttaccattaattctattacttattagtaaatattccattaaaaaaataattttaaaaaatatcactatccaattataaaccgtcacccgaaaattatcaaaaagaatcgaaagtgagggaatggatttccacatgtgatcctctattttcaaataaaaaaaattataaataaaaatgaaaatagaaatcaaatagcttagaacctatttaacaagaatcataccatttctcaataattgtgagtgggacccatttttttgtggaacgtttcttcttaacccaaataggtaaaatataattattatttttagttaaggaattatttctaaattttaatttctttaaataaataaataaacaattttgagagggatttaattttcttaaaaaaaattgaaaattagtgaaataatttactaatagcatgatatttttataaacaaaaatgtaaaaaaaaaacataagaagagagagatcgatatcttctaaactaaccttctaacaataatagtcaagggaataaagtccatacattagacgatccagattgcccaatactaaactaaactagatgatcagaccacaaatcaatctaaccacacgattgtttgactttcccatctcatataatatagatcattttgaccaaaattcaaagaggaaaaacaaaagcaattgaaattttatacaaaacaaaacatagcaaagagggttattatattttcttcttcatttttgtttcaaaataaaataaaataacccataaaaattacaaaactatatttcatataatatttatataaaaaaaaaagttacgtagtaattaattacgaattaattaattataattaatatcagagagcaccaacttcgacgagcctagggatgagatggccactgaggtgtagagcgactagagattccaagccgccgatacaaacgccgccgataaaaacggctggagccgccgcgaatccatggtgtcctcctgcggaggcggcgttatcggaagaatcatcggagggcggaggcggtggtggtgagggtaagaaggggatctcatgatcgtctaattcgataaccgttggatggactcctatggtggctagaagcttcttcatgacgtggcacatgcaacaagagcttctggtgaagatgattacaggatgctctgatatgagccgttggattcgagtgtcgattgattcctcatcgtcgattgataaggaattagttgatgaggaagaggaagagaggactagatttgtggtggtggtggtgggacccaggtcgaggtgaacgacgtcgtttgagcaccgccgtaggccttgcatctcgggaagttagttatagagagagagaaagaaagagagtgtgagtttagagagagaaagtgtttgatgtcaacgcggggggtgtttttgggggaaaggaaagaggagtttatataaatgagaaaattaattttaatttttttaaaaaaaagagaaaaataaatagtaataatgataatgaggtttgagtagtagtgtgtggttgcttacatcacaaactactgttgtttacatttattatttatataataataataataatattaataggtgcttttggaatcgtaggtttgggaattggggacttcttttattactcaactccccacgcgcttattttttatttatttcatttttctcatttattgcatcatataagtgctacaaaaataactatctcaaaattaataaactattaaaaaaataacttgagatttttgttttttatttaaccgattatgtattacaatcatatttttatataagacttgaacccaaaatttccaacacacacctagctataaccacttgagctagcctcaaatggttaatatgagactctttaatatttactaagatggtagttatttttctcttaccataaacacattttttttatttattatactcaaatcacaaataattattttgctttactttttagattttcagtagttttttttacttactaattactatctttaaatcataagtgattcttctagttcaatttgttgaatcgttgctctatttttattacggtcgattttttgaaattttttttttattttaatttatgaaatatcaatataacaaatcgaaagatgtcacttttaaataatgctaagcattaataacgatgtcttatagcaatgttttacctatatatcgtttattataacaaactaaaaaataaaaaaaaaattgagaaggtaggatgcacataggac

SEQ ID NO: 306353 - DNA, 2463 bp, Cannabis indica
agagagagaagagagaagagagataaacaaccaaagtgattaaacttgggttttgaggaataccttaggcaatcagaagcggattcagaaccttcattcgaaaggtattccaaatgctttcgaagagtttgcaatatagaaacatgaacattatcaaacaatgaactaggacacttacacttcagagctgccacaaaatcctccacctcaaaggggctcaggaataataatgtactaaatgatcgaagaaaagcatagacagagaaaaggtcaagtatgggaatgtcacttaaatctataatttgcgaagaaggaggcaattgtagcttcggagggagcagaacacagggcttctcaaatactttcccacaagaagtccctggtttttcttctgttattgcactaacggcaggtgaagatggtgtatccatggcagtacacaatgtgattgaaatattattttgagcggatcctctacgggcacttcttcttaaaaccatttctgacggggatttaatgttatctgatagcttttttctcttactacgactgccctttctactggatggacttcctgaattgtctaggtgttcattgatcatttgaataccagcttcagaataaccatctctcacctgagcttctgtcaaatcacaatcccctactgagctagtatccacgacagcaactgaagcaacaggctttccatcttgaatggagccactacattcgttagcaacaacttcagcagagcatacatctttacctgaggtcacgttaacatcttcattcatatctaggtgaacttttgtcgaattcccatttaaaccaataccttcttctactaacttttcttcaacaccttcatcaccatcttttgtttggccatctcctacattatcaagagaagtaagttgtcgattcccctcactctctgcctctttaacatcttcaagtacctccaaattcaagtcaaagttacatcccttcctctggatacccaaagaggaaaaatgaaagtcccccgagttcaaattcttatcaaaatcgccattcacatccaaattaagatcaatttgatcgagtttcttcaaattttcctcaggattaaaatgcaaattagagtcatcacttagattcaaattaaatccagcatttaaatcaaacccatctttcaaatccccattaccagagacactatctgctaaaccctccttttccgacagggttttatcaaattcagacgtagagctaacatttccattcaaatcaccattgagctccaaatttctgccaactccatgtcccatttccagatttccctctttcccatcattcaaagaaacacaattatcattcaaatccccccaaccccatcatcattcccaagggtcccatcagttacaatatttcgaccagcattacctgaatctcccggcgcttggccacctttttccaaacgacgccgtttcttgagcctccgatcatgctgactgggctcgtcctcgtctacctccaccagctggagctcaccaccaacgagcaacgagacctcggccaagtccaactcctcggaatcgccatcttcgtaatcgacctcgaacaaaccagatgaggatttgtacgatttcacaagtcccgacaaaacccctcggcctttgatttctctcctcacggctctgcccacgaactccatacggagtaaaacctccgtgatccgaaggcaaaacccagctgggacacaaaacgaagaagaagaagaaaccaactaagccagtctctctccctgtagaattgctcttcctgaagagagaggaggaggagaagaagaaggtgggaaaggaagaaaggaagcaaaatacggaaactccgtgactttctctctctagaaaatgtttaaaacgtgttgaggagagagagttgggatgaaatggatttggattctatttctttcttttctccctgggaagggaagggaaggaggtcgtcgtgccctttaccaaaaactgctcaacttcggacacagtgcgagagagaggtatgctggttgagagaaatatcttgactgaagaaattctctctctctagaaatggagagtaaccattggaggaaatggcataaagggcaaagtaaaaattaataatttatttgatatttagattttttttttctttctttcttttttcattcttttagggaggagtgtttctgtactctctcttgcactttcctgctaaatgagtgtcttttttaagtaatcttatttctaacaaaatcattcactataatattttaccattttgtcatcattaattaaaaaatatataatattcaattaaaagaaaataaagtttattttctaattaattaattttaataaataaactaataataccctaaggagccgtttggtaacacttttgttttttaattttttaattcacaaaatgaaagtaaaattt

SEQ ID NO: 306354 - DNA, 1069 bp, Cannabis indica
tttctgttcaacacttagaagattattgtgttaacttgatgaatagagagatttggacattataagtagctagggttagggccaagctaggttaactcaaaagtctgttcaaccgctaaacaatacacaagtttcaaataacttacaaaatgttattatatattaataaatattagaagaagagataattaagatctccttttaagtaagtatattttgtatccactaatagagcatattttttaacttatgagcagcataaaagatctgcacgctttaaaaattaattggaaatatgaaatgtcaattagataaaaaacaatgcaaatatattaatatctttaaatttctaaaccattggtaagatatgtaagaattttataaggttgattgggttttatatcaaaattaatgaacaaatgaattttatatatgatattttatttccacacattagtaatgtgagactaactctaatatatttgcctaaaaaattgtgggtattacgaacggccttttgaagaccacatggtcgaacatcatgacattttaaaaaattggccgaaatgtcccaaatagaggttaaaggggagacattggaagttttttgtttgactctaatatcatgttagaatttaggattaaggacgtgcatgtagtttcatctcaaaatcaattagcaaagaaaatagcccatgaatcttatatatgatattatatttatacatattaatagtgtgagactaattctaataagatatagatttgttattataaagagctagggcatatattataatatattataccatatgcatgttatggcattagatataatctacttgaaatttcttttatatatatatctaaattagcttaatttttcaattagtttatgtacttttgcccatttgttttgtttaaagtttagttttccttttaaaatattaaagtataaaaaacatatgataaataagtattttcccaaatttgctaacatagtttacaagtttattaatttatagggatattttttatttttacaatttaaagtaattaataatttttt

SEQ ID NO: 306355 - DNA, 2675 bp, Cannabis indica
aatcacgtaatacgcctatgttagttagggtgttacaacttttgatgccaaagcatgtgatattaacattagtggaaaagattaaatgatgcaagtatattgaaaattgatttgtggatttatttgatttgagttaagcatatatggtggattccaattattatggttatttgtgaattacattgttaatttcccttattgaatattaagattaaattttgaaacggttagactgaaattcttgttaatgttgcaattgagattttatgagtaaatgaaaagcattgtaaatggtaatggtggcttagcttgtttgtttttgtgtagtttttgtcaatttgacttggtctttactcgagggagagtaaatgttaagttttgagaaatttgttaggtttgttttaggttgttttagagtctacttttaggtttattattaatgttgttacattttattgttcagattcacgcttattttttattttatgttattttaggtttgagttgaagagagctactttttggtgaaaatatggtgtttctcaaatttattggtgatgaaatgatcaaattttgcaaaaaaaatctcaaaattgaacttctttacttgatgcattttcggaggatgtaaagattcaaattttcatgattcagcctcaaaagtcgcaacctttcacccaaggtcgcggctatccaaaagatgcaaaagtagcttttgaaaagaagtcaagagctgtgagtctcgaagcaaggtcgttgcacttgagaaatttgaaaaaagcttgtctctgtaagaaaagtcaaaattcgcggctctctatcaaaagtcctggtgcttgactaattttggcaagtttcctatttcgacctaaaaacgattggagggtaggttttcatgatatatttgaagttggatacaaaatttggatagagaaggatggttgtaagcagaagacaccattggaggactctaattagtattctttctcatctatcttcagctttatatgttttgaattgaatctttattattagaatgaattttatgagttaatttacttttaagattgttatgtgaaccacttgaatttcttttatggattaatgtagctatttaattttattttcttctcttatttcaatttaacgcaatttgatttaattgtacaattattgattgatcacttataaattttatttatgaattcgaatcaaaattctgaaaagtcaatttaacatatgttttgattgtaatggattcaaattgatttaggataaaagtatctagattatttgtatgatttatgagtttctctgcttaatgttttttttgtgattaaactttgtcataggaatatagggagttttcacataaattggttttgtaagtcttaaccagattataaactatttgatttaatttgttgattgaatagaattagaaaatttaggtaattgcattaagaagtagatcataataattcatgtttttcttattattatttttctaaattttaattgaggaaattacactttatactcactttttgtttcatattttaatttttacctttattttactactctttaatttatacccacttttataggttatatttccattatgtgcattagaaagtctaattttgataagttttgtgaggttatatttggtactttgattataaaagagggtatttatcaattaaaattattttggagttatatttaattaatgtgtaataaaaagggtagtttccaacttatcccattttaattgttcttttgttttattcacttgtctccaatatttttattttatcaataagaaacgaaaaattaattattttgtaattgataatttgtgggatgacatttagttttacttagatttattataaattgagactggatgtacttgtatagcgtaattttcgaaataataatcataaggcatgttaaatgaaaaaaattatatagatgcaaagtgataagcttatgtatttagagttaattaaatgttaaagattattatcctaaattagttcaaactagcttaagtttattaaataagttcttgtaatataattaatatgtgtggctcataattacattaataaattatgtacaaaaaaatgaacaaaatgcaacctaatagacttgtaagtatttttataatttgagagaatttaaaataaataaataatttaaaaaacaaactttacatttatggtgcctaaattggggtttttctttttcacgggacatgacaagttgacagctctctgtttttacttgtacttatataaattttgagtgacaactctctgtaattagtacaattgtttgtattataacatatattatattttgtggcattataacctacctaattaccaaatctcttgctacttgggtaagtctaattaaggattttactttttaattttgacatgtattaaattatgtttcctgaatttttaatgtcgttaaaaatgccccctgaactattgagattgttgaatttaacgacttttatccaattttagtaaaaaaaaagtctaacatggatgaaagttcagggaacatgatttagtatatgtgaaagttcgaggggcatgatttggtagatatcaaaatttgtagagcgcacataaacaatcactgaaatagta

SEQ ID NO: 306356 - DNA, 955 bp, Cannabis indica
aagttatggatattacacatctgccacagcctagggctcgggtcgtgacattacttgttactcccggtcttactaatggagaacttgtggaggcaaacgagtgctcaaattcgaatccatcaccgttggatcttttcgattaccaggagcctacacaatgggatctgtagccaatggatcggttgattcaatggatcgggaccttctggtattcacgaccatcttttgacgatttagagagaatcaaaacgataaagcaattcttttgctctcaatgaaagcaccaaaatattgaccttgcttttggccaacaattttaagtctttaaagcgataagataatatataagaattaatataattaagcaataagaataccaatggttcagccccatgataatggtaatagcctactctcttttatgtattacttcaaagaattatcgaaatcacaaggagctggccaagtgatttttcctataattcttagaaaatgtttacaattattttgacaacgtagtagctctcaagaacatatgatttcgcccacaaataataaaatgactccactatttataaaaaaaatacattaattaagtttcccaaaaacaattaagaataaaagggggaactaagttaattttctgtaatctctctattaatgtgtgccaatcacatgagaataagaatttaattgagatataaatgcggacatatttatggaaaatgtccttgaagagttctctttctactgcgttaccatgcgcagaggattcgacatcgttgaatggtgaagacctgctcacacaacgtacaaatctctccagtcggactattgtggagaggctacctgtctgggccttaaaatgttctctacatgtcacttctattaaatgccacatcaccttgtgaaaaaataataataataatatctgttctacaaaaaaaaaaaaata

SEQ ID NO: 306357 - DNA, 848 bp, Cannabis indica
atgggctaccgaaaaacaagatgcactttgttgatatatgtagtatcaatcaattcattaacctctcttcaactgcgtagtcacatacctacacagtctcagaatcatcacacttgactgttctcaagcgatgtgggattgcacagcttacccggtatttgcccttacggatcacgggactactgactgtcacattaccagctgaggctcctcccatacatgaaactatcaaaattggtgataatgtatatttttgaattatcatatataggttattaaaattttaaaatgatattaattttgagttaacatgtatagtgctacattatgttttctttaaattattagaacttattattcgtgttttttgataaccaagaaataggtcgtttctaggcctaatatgaaagttaggcccgattagaagaccctccaagttgatttataaagaaggttcacccaaccgaggagcgaactcggagaatcgaagccgtatccatctgggatgcccactgttaatggacctgaagacatgaaactggacgagcttagggaggcacaacaatttcgaaggaataccaattcaatataatcctgcgtgccaaacagacccatagaagaaagtaaaattgtccacaaattaactggtctattttttttattttacaaatattttttttgaactaagtgatttttgtaaatttttaaaagcaaaacaaactagattattgactaaaacaaatactcaaaccaaatcaaattaatttactatattcgttttttattgatttttttttttgaaattttttacaccaaaatacaaaatacacattttattacatatatat

SEQ ID NO: 306358 - DNA, 1003 bp, Cannabis indica
ttttttattatttttgtgtaatgattattttattttcaaatgaaaagtgtaggcattccagtgtaaaatgaggaaaaaaaattattattgttattattattttctttatgtattttaaattttattttatttttattccaatttttatttctatgtattttattcaaaaaaaattattattttttatgtgtcctaaatttaattttattcctattcttattcaaatttgtatttttatttagggaaaattgaagtataagtcctcaaaaattgactttgatgcaaataagtttcgaacctcaaaaattagtagtaatggtcctcaagattatgtttttttttagctgctatgtttactaatttaaaatcgtcacatgttgaatattattagtacatgtcacaatttcaaaaacccaaataagctactaagaatctttaaaattgttattatttttttttctttttcattttcttcttctttaggatacattctaaccctagccacgtcctcagtcaatcgccgccacaaccaatcgctaccaccaaaatctttaatgccacctacaaagcccctttacaatgcccttagccttgaaaccttgattcaagcgtggatgaactacggtcatcacccttcttcttcacaaagacacaccccacctgcttaaaaaaagtacccaaacccgaaaaaaaagaaaaaacaaaagaagtatatctccccatctgcataaaaaaaatacacaaacctaaatttctcttacgattccctcgcctcaccctccatcatcatctgcatcaaacttttgtaaaatcgcacataaaatccataccacaccacagtgacgaagccagaaatttggcttagtgagggcttgaataaatattaagtcaaaactaataaaaataactgataaaagtatcttttcaaattttcatcttcaacaaaataaaataaaacattgtcataaaaaaataaaatgaaaattacaatctgcctcgacga

SEQ ID NO: 306359 - DNA, 3725 bp, Cannabis indica
aaaatatataattaaaattaatttttttaatagacataaaataaaaggtaaaaaaattatggtttggaattagatttggagttttgttagtcaaatatataattaataatatttaaaattaattataaataaatatattaattatggtatagttttcaagaattaatttgagttattggatgaaatcaaagctataaattattattcttattgataaatattttactaaattccttctgtgatagctcgtaacaataagtgtactacatgaatttttgtaatattttttttaaaattttttcgccgtgagaaccatacataatcaaattacaaattaggtatagaagcagtcttatcaaatatttttgggcaacgcatgtatatcatgctcatcatgctcaaattaacagttaatagaaaaccggcatatatattgctttattttatttagagagagataatgagcatatattttgttgatgagccatgaaatagacatgattaaactgccctgctctagcaattccaagcctaaaccaatgattccatttaattcacacacaacgggaactttttttcagatcacttgtacttttcaaatatatagcttgataataatgaactaagaattaacatatatgtatatccaaggaaggctctcttatatatctttgtgagtaatttttgtatctcttattatctagtgatcaagtaacgttgcttattaatttgtggtcatcatcgtttcctcccgctcatcccctcacatctgattttcttaccaggtaatcagctatattcgtattagtaattaattaaaaatgtgtatcattcttaaatttttggtgtgtgtattatttgtactttgaacatggcacttttggaaataattataatgtacatatacaatacaacaaaagaaaaggaaaaaattgtttgaaaataagtaagttataagtgaataataatgcagaatatgtatcatcattgataagatgataaaccatttcgtgtgtttgagatattaatatataaataatttctaatttgagatataatatattacctgattacaaatactctgcaattacttaatattgataaagtgtaattttgaatcgactatacatgtttgagactttatatcgctaggctaggactaagaacatatatagtatttacttagtccttttagcctacgatcaaagcgaggcttaaggaaataatcaccttaacaattttagagctgtgtataaaatgcaggaggttttaagcaataaaaaggcggtgaagtggcgccattgaaaagaaacaaaataaagatcataaaaggtaattggtggtctgactctaatttgatgaaaatgagggggaaagtcttctcagcaaaggctgcgtttgcgctttgcattgctagctttcttgccggttcgctcttcacaagccgtacctataattgggctcatcaagatgatcacgccctgtcactgccccaacctgatctgtctctaataacaaggcctcgagactgtgataacaagcaagtacgctatttccgcctcttaatctacactacatcatctctttatgctatttatgattcttttgaaatatttctagcagaaattggtggaaggaaagactgaagatgtcatggatgaagttaccaaaactcatcaagctatccagtaagctacacatatacttatatcatgatcttattaattattgaaaactagtaataattatgtattataggtcactagatagaacaatctcaacactggaaatggagctagcagcagccagaacaagccataacgaaagatcagattcactcacatacaattatagtacttctagtactcatagcattagtagaagtagtagtactgcaaagaaagcattcgtggtgatcggaatcaatacggcatttagtagcaaaaaacgaagagactcagttcgtgaaacgtggatgccaagaggggagaatctaaagaagcttgaaaaggagaaagggatcgtaataagatttgtgatagggtacagtgcgacacgaggtggagcactagataaagccatcgaagcagaggaagcagagcacagagatttcctgaggctgaaccacgtagagggatatcaccagctctcaaccaagacccgactctatttctccaccgccgtctcgctctgggatgctttcttctacgtcaaggtggatgacgatgtccacctcaatgtggctacccttctaaccacgcttgctaagcaccgattcaagcccagaatctacattggatgcatgaagtctggccctgttctttcccaaaagtcagcactctcattatttttatctacttaattttctgttttctcattcgtttgtggtttcgaatataatttttttttttggttaatgcaggagcgctaagtaccatgagccagaacattggaaatttggagaagaagggaataagtatttcaggcatgccactggtcaaatctatgccatatctaaagacctggcttcctatatctccatcaatctgtaagtaaataagcattcgattcaataataccaatgatatttttctcttgtaagaataacaccacgattttaatttttaaagaaagaaaaaatggaaaatctacacctacacacattatgcttaaaatcatttaacataaataaccaacattcaaagtttaattatccaacttcattatacctacttcaatttttttttttatttctataatgtatatattaatatactactactttccctactaaaatcttatgtaattacttttactgtcgtttggaacaagatacattttcttccataaataaatgtgttgttattttcaatttatattttggtattagatacgatttagtatactaagttcatttgaaattcaaagattgttagatggttgatagtagtttttgttttgatattggatacaaatttaacatctacttgtctgttttagtttgtatttggtattacataccaatttgtttatgataaatgttgtctttttttattgtgatacatttgatataatttgatacaatttagtattttaatatacaaattaatccatttgaaattgaaaaattactagaagattaaactaataataatagtactatgatagtatagtttttactttggtatcttataccatgtaagttcgattgtacttttgagtattcaatggttttctatgttcatttaaaataaaaatattactccttacaaataaatatattaatatttatatatattattaagtagttaaaattgaataattgataatgatgtatttataataagactttggtctttatcaagtttattacataatggtataataaatttataatgatgctttcatatattatataatttgatactcgttggtattctatacaaatctatactatttgacatcttatttcatttatataatattaatcagcctacctaccatattataacatatgatattgtgtactattatacagttttgtatccaaaataatttttttcttgtcctacaatatattcttattttacaccttcttctataatgtaatgaagaatcgcttaacaatgtttttatgagtcgggacgtttggttgggaggaatgaaaatataggaataggaatgggaatgggaataagaataagaatggaatggaataaaattta

SEQ ID NO: 306360 - DNA, 1533 bp, Cannabis indica
atatatatatatatgcatatataaaattttttcattgaattttatagtcatccttccgttgctttttgcagggtcgtaatagtgactggttattccagtgactgtgaagcagattaattagttaggctcatcattctggtgatgaaaatcgaattttgtgatcaatggtgttgaaacttccaacacttgcatcaaaatcatcatgtcattccaacgtacttttattttgtgatcaatgttacttttattttgtattatttatatataattttctaattttgggaaaccttgtccttgcattggactttagaacagtttgtgtgtccaatttttcaagtatggtgtatcattgataactcataggaaacaatttttataactttagatgttttagcctttaattaaaaatctagtgaaaaatataagtacaacaacaacaattttttgagctagaatagtgtcattgtctattgtgagaaatgttcagttctgtaaataccattttcaaatatcttgaagaaagtttaaaatgacttttgtatgttgttagtgcgtgcaaaatgtcaaatatttacttaaataagtatttttttttttttttgtcatggagtgatggatttatgaattttgacagtcttcaaactctgctttttagcactcttgtggaaagtatcaaatggattttagatagcccgatccagtcagatatagttaaccttgcttattttcagaaggtagtttttgatgggtatgtttgagtttgagattttacttaatgcatttatttccttgtagttatctgggcaaatcagttttgatgcaagtgttgcgcttattttacatactatgttttggtgtactttaaatgagttgtgagttgagattagcatttcatcaatatttagtttgactcgggtaaaagaatagacaattttaatttttatggtaggagcatgtctttcggcaccatgagaaagtaacaaataattatttaaattattttatatgacattgtaaagtgtaattatttaaaacctgtcacaaatttacttaaaattattagagttagtctcacgttattaatgtgtaaaaataaattattaaatataagatgaacgagttatttttttccattgtcaattggttttgagatagaatctcattcatcttattccacattctaacacgggagctaaactacaaattttttaacgtacacacccgataaaataaaatctttatgtatgtattggaaaatttttgtcctacactcctgatggagtattttggtagaaccttttatttgtttcggcatatagacaaaattttagtttaatatttttcatgattgtttgtgtatgttgtagttatttaaaattgcatgtaagtttttagagaattttgaatagtttatagtgacgataataaggttcaaatagttatttattacgtatataagaaaaattaattgcaggtacaatataatatttaaatcttattttcggcattataaactattcaaaaaattttaaa

SEQ ID NO: 306361 - DNA, 1325 bp, Cannabis indica
cttctgcagatggctataagaaaactgtttgacacatcttgggacattgttcctctagtgaaaaggaaaaccgctccatggaacgaactactcatcatcatcaggggtcacaaactcccttttgctcacattcaagcaaaatatacggagcgtcgagtatgaggggcgatggtgagaactcattgttgcctttctttgacgattattaatatcccaacgaggtataaacagtagtagtccgttactattgtaatcacatcagctatgttcgccattcattccaaaagccaggtttatcgccggtcttcttcttgttctctcttttttcagtttctctttatatgatgttattgttacccgtggcagtgtcgtgttgtgtcgtgtcgtgccttgtctccttgaaaattttacagaggttcgtatgaattggaagttatttcattggatttgtttatatgtgaaaaagaaaaatagcttgaaaaggaaaaaacatgagttgaaactcttttttgtcccttgcatatattaaccaaaacaataatattgtccattatttctgtgctgtggccttcaattggtatttcaatcaagctttgttttgtacatagttttatgttgaagagttgtatgaacttttattattataattattattgtttgtgtcgaaaaacatatgctcaagagattttaatgttgttgataacaacttaactgaagtcgttctgtttggtggttgagttcttcaaattgtattaagaacttattaatggtatctgatgctattgacagaaagtagggttagggttagtttcatcatctccataattgatcttaatccttgctgtgaatagaagtttaaaagggaaagaagtggaaattaaatcaataatataatataaagatcaatcttcataattacagaatcattaatgataattgtccaatttatttccatattattaagaacaattaacaatattctactaaaattaccacttgtaaatatgataatattgttctgtttctcaaaaagaaattagggttagggttagggttagagtttcatcattcatccttaatcctaataagttgaagatagtggttgatgaagttcttaagtcagtgccatcttctagtgatgatgttcattctaattagagataaaccatctttgattcgatgtagcattgcttctccacagtctactccattctcaatttgaggttaggaattaatccttaattaaaatagggtaaataccattttagaccctctgttttacaaaagttaccaattggaccttgtattttgttaaatgacaaaat

SEQ ID NO: 306362 - DNA, 2154 bp, Cannabis indica
tattacatacactatatatatagtctaacatatataaaaaaaataaaaatttgtaataatatatttaattaaatattattttcaacactataaactatttaaatttttaaattaaaaatttacatgtctaaaaaattctgataaatactaaaacacgtattttagagattggagtgtacttaaactttgtaaacttttccaataacataaacgatttccctgtattttaaatttgattgtattatatgtttgaatttcaatttgattttcaggccttcttttactttcctgctagcatttatgaaatcaatgggttcagctttggctttaatcaaagatgcttcagacgttgaaggcgacactaagtatgttaaattcttttatataaaccttataattagtttaaattaataattattattgatgaaataatttttatatatttttttcaattcagatttggcatatcaaccttggcaagtaaatatggttccagaaacttgacattattttgttctggaattgttctcctatcctatgtggctgctatacttgctgggattatctggccccaggtatctcatctatattatttgtatttcaatatatattgtgagacaattaataaaatttaatatcacaattaatatactctaatttaaatgaaaaactttttaatcaaaccaaaccaaacaaaacaaaagcctactggaataaatgcagcagctcaaagaaagccaaactaccaattttgaagcctactaatatgattggtagtattacaagtaaagtcaaaaatgcaattgttcctgttcaaccacaaaaattaaatggttgtactatcttgcaaattagtgagaggcttgaagtaccaattctttccactctttaaagtcttgaggccattgatacagaccaagccatcttcctatatcagttataattttgttggtaaaacaacaattcacaaacaagtgatggtgggtttctctataagcttcacaaacaggacacaaattagaaggaataggcataatgttgcttatgtgatccctagttaatagttaatcattaatagcttgtcagtaaataaatgggccggtgcttaggtataatattgagcttgtgccaaacttttggagcatattcaactttttttgctttgattagagagagataaaactctttgactttaaactttccatacctgccaactcgaatcaaagcctctatgtcaatggtggcccttagctttaagaatttattaaaaaaccaggtttgccatcatttcttctcatcatttcttatttaattacaggctttcaacagtaacgtaatgttactttctcatgcaatcttagcattttggttaatcctccaggtttgccattttgaattaattaattatctatttaaaaaaaacaaatatatcattatatttaaaaaaaaattctaaatatttttaattgtttaattgtactttacagactcgagattttgcgttaacaaattacgacccggtaatactcaaaatgactaccattaattgtgttattatcctctttattagtacataaaaataatactaattttctaatgaattaattttacatctgattatattttatattgggttgtacaatgcaggaagcaggcagaagattttacgagttcatgtggaagctttattatgctgaatatttagtatatgttttcatataattaagacacattaggtgtccaacacattatattatttatagctaaatattcgtataatttagtggtggatcttacctatttaaatttaaatgtatgcattatttgtttacagcaaaaataatataataatatagtgtaagacactaaattttatttaaaatttcactttcatatttccacatctagagttgtaatgacccgacaaatatcttaaccttgaattttttttttgaacaagaagaagatctttattcaaacagacaaaacaaacaagcaaacaacacccgctgcagaccgaaatctgccattaaaaccagctggaaattacattaaaaatgtgattatctagcttcccttttcccccattacaaccaattaaacatctatattttacacaagatttgatctctctacttaaggtgctagctgtct

SEQ ID NO: 306363 - DNA, 3247 bp, Cannabis indica
attttttgtatttacattaaattgtttcacatttaatgcttagaagttataatttcaaagcgaaagaaaatctattttttgttagaaaataattggttttattaatgattaaattatgagaatcaatataaacataaatatttttatatacacttaagtggattctgaacccttaataatatcttcaaatatcactgaaaaatatatttttaacgtttaaacactttattttaatttgttactaaaaacctaccatttttggaactaggttagagttttattagctagattaaataagtattttcttcaatttcacgcaattcccatggatttaacctcgttcttcacaatctccatactacaataaaaattcgtaaacttgcgaattgataaatgtaaaacgtactactttcggtacacaacacttggttaattttttttagtcaactggcattttctgttattcagttacaaatcagttagctcttcctacttattctagagctatataaatgtagcttcatgtatttggtaattgatcatcaataataacagagactctgttttttctctcttcttcttctttcacactaataaaattaaaagtcaataaaatcatttaaattttataaacaataaataaaaatattattaaataaatataatattaaatactttgaattaatttcaataacattaattagtcgcaaaagaataaatataaaaaaagtaattgttatttaagtataaattttatattttgtgtcaaattcaaccttttagtataccgaatttaacatattttgcattacagatggagcatcattttgtcaaaatatgcaaaaatttagttatacactacatttatagcactttattggaaatattgtagcacaacatgcaatcaagattaatggttgggtaagttggatgggaacttgtactagatatgtaggcaatatatgtcgataaaggtgtaacatcttccatctaaaaaaactattctaataactagtaaagtgatgaaactaaaatatgttagtgttaatctttatcctttaataaacattttgtactaaaaacatgtgaaagtatttacatcacatgcaatatccactcacacataagttcatgtacatgtacccaaaaaaaaacgttctttagttcaaatttggctcatgaactaccttttatttattttttctcctccatcacctgcattacaagaactaaatgagtataatcctaccatcaagcaatttgatttacccgtaatttctttgagaaagttcattacaataacaacaaacatggtgggtattctttcttttatgtgtgtgtgtgggcgtgtgcgactaaaacaccatttgaagtatacaattccctaccacgtcccttgtccctattcaatcgcaaaataggaaccacattacacaaacttcgttctttgaaaccataccttgtaagttgtaagcacttatgcataggatatagatagcttatgaagatgaagttgataatatatatattcaatatcatataagaccttatacataatattcttgcacactgaaagtgggagtccacataccttgtatcttagaaataaaaaatgtgaaagatatcccccactccaaaatgcttgatgcgccttaaacctagtcatgtaagtcaatttctgttagtttactctctcaaggatcatcatgaagaatacaattaacatgatatcactagcaaaaactaaagcagaactacactttatgaagccacatacctcgaggttggactaaattctttcaagcattttcttcagctaagatagcttttgctgcctcttgattaaatgttttgcaaaggattatatagcttttctcaattcccacctgcacaattagttacttcagtttaaaacataaccaagaaaacattctcaatagaactcctaaaaagattattaaatcccttaccagtggctcaattcttgatggtgacgtcattgataacatatatctgtagaaaaacaataaatataataataaagctaaccaattgagagcagggattaaggacttaaagttaataaacaaaaaatgggtgataactgtgtaacaaaatgtaaaagcattgtcgaggtctggcaatttcaaacacttggtagtacccaaaaactactccttcaaagagtgtttacatacagcaaaatacagttttctacttcatctgaatattcagtttggtaagtttcttacaaaaggccataagcatacatcttttataatttcaaacacttggtagtaccctaaaactactcctttaaaaactgtttacgtacaacgaaatacagtttttcattccatctgcatattcagtttgttaagtttcttacagaagggcacatacatacatatatacagatattttgtacacatgcttagcattgtagcatatattattcctcaaatacttcacaacggtccttaaaagtacaaggcaaaagtttttttatttgtttataatctcttctattttctgggttggatgggtaggtatagatggctttagtagagaaactgacatcctggaccttcaaggcagaagaccctcacctgttatctcacctggctggtgcacattgtgcaaacagcattaagaaaccagataatttgtttctacatggtaaatttagggttaaactaataaaggaatctagcttttgtcagtgcacctctcctcatttcacagatttattgactttccacgaaaaggaggcaaagataaacaaattgggtaactgcagtaaaggctactttctggacttcgtggaaggaaagaaacaatagattctttgaagatggagagagaactgttaactacatttgggataagattaagcagtgggtagccatttgatcatatgatgttaaatatttcaagggtacctctttctatgatttcatcagagactggcagtttatttgtagcagttagtaaatttttctgtttttttatttttgttgtggccactattttatatgaaattttgtcactcacttttgcttttcctggtatttagtcccattatgttaatacaagtctgaggtttatgaaaaagtagtggagaacaaaccatgggtaaaagctataacattgacacaatacacaaaagcaattaattttgtcattcaacccattctattcacagatagaaaatctgtttgaaaaagaaagaaaaaaaaaaccctta

SEQ ID NO: 306364 - DNA, 1375 bp, Cannabis indica
agggcataaaacccaacaagttcatcattctttaccattgagcaggtgactttactaaaggacaagttttgccctgatttaattcatacagatatcgcttctgtacattttgggtgcttccggcaacgtgttgtccacctgaaatagttgctagatgaccatctaggcaggtaatgcggctccaggaggatacaaatttctagggccgggggccactagctttttgcgctcctagaaggacttgtgcattgggagcttgtattctaggaagctgagggttacctactccttgaggaggatttatggctccctgctgtccaggaacaaataattgcccatgtgtgactgcttgtcccggataaatgatagggattcgcacctaattggtcaaatgtccattccgtaccaacccttctatttcatcttttaagtagtcacactcattagtagtgtgaccaatatcaccattgtactcacaccttttgttttggtctcgcctatatttttcgcccttgtacattggcagaggcttcctgtaatgccccatattacaggttgctttatacacattctccctgatatcaatgagacttgtgtactcgtgtatctcgattcttgagtcttacccttcttcgcggactccgattcggtcccttcaaactctttttacttcttgagtgggtcacattggactctggagcttccgctttttggtgaatttctttaggagcggcactgtattcgatttgtgtagctccgtacccgaagaaactagcctgtatagccggctgtacggaagtacttggttcatatgttgtgggagtagtaaaagtagttggtggaggataaatggagggagttaccacttgcaaaggttgtgcatgagctgcttcggcggaaggggtaggaagtactccatatgcttgggcgtaagcgtctccctgagcttgtactaagaattcacatagtgtctgcctttttacgctatagatctccccacagcagggatcgggttgcaagtcctaatgtcggagccaccattttcatatcatcagtgacttttattttagcagtcgacagctgaagtttccttatttataagagaaaacaaatagggaacccggaagggtcttccgagaatacaactccttttccctccgggctcgtgataccagagttgtcttctaggtttggtttgtcgaaggtagaaggcaatgtgagaatggaagtaagataacacccagagggtcctatctaggtggggttggcaaattgtatccccgatgagggttccactaatgagtcttaaatgtcaacttgaaggccacgcgggtttaccgggtttcgggttggcgggtttcgggttcacgggttt

SEQ ID NO: 306365 - DNA, 2115 bp, Cannabis indica
tgttcttaagaagggcactggtggctggaaaaaggtagtttcagcatttggagaagaaatcttacaaccagatggagaagtagatcggcctagacttggccagattgtattttctgatccgggaaagcgtcaacttcttaatcggtatgcatatttgaatctagatacaattattctacataaaagtctaatgtttatgaagatgtaaatggattagacgtttcactcatgttgtgcctacacaaaatgatttctattgtgtttttaaagaaaaagttgagtggcataaaggtaaaaattgatggtttgatttgatgtctttgggtaatttgtcatttatagaaacttcagtttgaatggactcttttagaattaattttaactttttatcgaaaacagaaatgtatcgtttaattttacaacttagaatgccagtacgaggtattgtatactaaaccatacacgaacattaataaaaacttaggacactagtaactgcatgaaaactatttgaactgattagcaccaatagctaggtatagatttgtaattgtaggaaattgttgagataatgcgacctctttccatttacctatttcttgttgagttactttcgtcaataattttaagttgaattgattcaacatcctttaacaggtgtccgtccctagcaaaatattggtccaattaattttaaactacaaagtgaactttaatgcttgtatgactttgacttgtacagattacatgtgagaaattttttcatttttcatttgttatgaacaatttggcctggattcttcttacaataccaattttttacgttactatttcattgtcttgcagcctactagccccttatatatcttcaggcatattttgggaaattttgaagttatggattaaggggtctaaggtaattgttcttgatattccactattgtttgaagccaagatggataaatggacaaagccaattatagtagtatgggttgaccctgaaacacagctccatcgacaatggcaagagatggttcgaacgaggaggatgctcagaataggattaatgctcaaatgtcactagattaaaagaaaaaaagcagacatagtaattaataacactggatcacttgatgagttgaatgaagagtttcagaaagtcctgtgtgaggtgacaaagcccctgacatggaccgaattcggtctttcaaggcaaggagccttgtctgttctcgcttccactattgttggtgttattttttgcagaaatattttaagtaacagttcaagactatgacttggtgcttaggattttatttatttatttatttttcaaaccagtatatctggttgttgtcgtgttagtttgtatgtttgagtttccaagcagttgtatttgtaaaagaattcaagaaagttttgtcatgttctctctgctttgtgttacctcattggtcttcagaattttatttaagcaagctattagttattttttaaataattcttcaagctaatccgaagtgtatgaatcactactttacagtttttatgttattttcctttttacattttcttgtaattggatgaccagcttaatgggtcactccttttagtgataatggatctatttattgtcccaagtgacaagtatagtcacaaatcactttagatatcatttataaagctttatcaaactcattggcttacctaaagtgggacataagtaaatcaagatccattatagcattctttttattgtgtttgatatgactattttactgataatgagtacaagagtattaataaaataaagaataaaaagaaaaagagaaatttaactaattatgtctacattagggggaaattaatattctaaactaagagtccgcacagttgtactatggggaaaagtaactgtaattgtgttgtaaaaaaagctagcaaaattatggaaaaaactgagtgtttggtaaattataaattttaaagtactaaagttgttaagattttattataatagtgataatatttttatttagttcattataattacatatatatataaataaatatgttatatataatttttatttttatatatttttaattaatttt

SEQ ID NO: 306366 - DNA, 1513 bp, Cannabis indica
aagtttttatgccatatatatcaaaacataggtttatttttccatatttttataaatagcccacaaaagaataaaataaaaattgattcatttttattccatttcattaccattaaccaaatgctaccttagagtgttggtatcaatttacctagtagagaatctattgctagtataagaaagacatgagagttaaatacttatcatatcagtcttgcgtgtagcttttgctttttttttttttttttttgattaaatatgccagctttgttagtgctgagactgagaagccaatgcatttttattaagttaatcagatcagtcatctacttttgcctattacttttatataccttgtaataaagttttctacccactgaactttcacatgggttatctttagatttgcttatagagaaagtaaagtgttatgcttcagcttcataatcatttgttccacttgaataatcattttaaatgtattagttacttcaacgttatactactttgaacctaatctcaatattgtccttcgttaaagtgatgctaaatttatcaacaaaccgaaattggatttagtgaaagtaatgtttggcaaacgtaaaatggtgaaacaggtcaaatttcttgtgggccagaagtcattgtttaaatatttggtgagttttctgcttcccctgctttttgttaagatgattatggaacatgcttatagtaagcatggtaggctttaatcataaatactaataaataagtaaacataaaaaagttggaatgggaatgtttgtataacgtgtagtggattttttggtcaaggcagaggttgcttttgtttaaatacaataaataatcttaaacatgttcttacaccttttccaatagctccacttcctctaattgaaaaaagggaaaggcaaccagcaaaaagccccacccaccaccatatctgttccaaattgtaattagaaaaatatataagaaaggttgatctgtgaaaacaagactcataaaaagataatccatattctttattaattaacattacacgaaaagggtcacaaaagtgtaacaggttagcgttttctcttagcttctaagccaaaagaagctgatggttacgtgcctggcatgcgaagttataattgttctggttaagccaatggcgggctttcattttcaggcatagtgcttttagaattgagggtgtggaatgtctctttatctctttatgctcacattaatttttcaatttctttgctttgagaagaaacttcttttgagtcttcagtcatagtgcttttagaattgagggtgttgaatgtctctttatctctttatgcttttttcaatttctttgctttgagaagaaactacttttgagtcttccctggtagtgaattcttttaggtaaataactctcacttttatcgttattgagtaaaacatttcctattttcttcgttcatgatcatgactacatgttttttctggtttatgtttgaatgagattttg

SEQ ID NO: 306367 - DNA, 1328 bp, Cannabis indica
cataatgagtgtaatttcctcttgttaatctcttttttttaagtattcagctcaagccaaacgacccaatattattagagaaaacttcttcttctccacaatataagctgccaatttttttttttctacaattcgaagtagctgcccatggagagttcatgacctttatatagcatgtgtggtcaaacctcctactcttttcataaaaaatgagagctaacattatacatatatatatatttatatatttgctcaactttttttttccgtaggacctccattcttttcttcgtcgtcgactttgcttcctccgatggcttttgccattcgacaggaccacgcctctgtctatccgccagtaacaagcctcctccattcctcgtcaacactctgtgtttgtccagcgagctccactttttctgtttggatagtccctcgctgtagttgccatttttgttacaaaattctagacaaataactcgaccagatgctattgacgactaatagagcaagtcgaacaagtcatattttctccaacgttgtatactttgagctcaagcgaaggacccctgcatcatctaaaatcattccactagcaacacctatgtacatggaagatgatcgaattgctcgatcgagaggtggcgagaccgtccgatacaaaatctttgatgaagtagaaagtttctcctccaacttcagcaaagttgaattcaacttcgcgagtgctttcttgccatctcaaattagatccatatcaacacgatgtctaaagcttccccatgatcatccaaatccatctagcttctcactgattcaacaggggcatcagtgtggttattgacctctggaaaattaggttgagaagaggaatccaatagtgcctccaccgatgagcagcaaggctcaaaaatggcataaattttcttcttctgagcatcgaagaattgatccatacacaattctatggatttcaatgtggatatcacgaattcatgaagttcttcatcagttattttttagagttcttaatgaaatctcttgctaaaattctctcaatgaaaagcgccaatgatagataataaccaagataggctaactctcctaaaatgtattcttcaagttagtgccaaactccaattgaaccaaaattttattctcattccatatatcacaatagttctacaattaaatatctaaaaggccttcacaccttttaccaatttactaataagcccctacactatttcatagtgtaacaaagggattttaaactaaaactccaaatccgaaatgaaagaaagtttagtgtaaagaccacttagttt

SEQ ID NO: 306368 - DNA, 1709 bp, Cannabis indica
ggcggttaccggtcggctattcgattagcacgtgtggtttcggagactgtggcgctgaaccactcggacgtgaggtggtacgtgtttggtgacgatgacactgttttctttcctgagaatttggtgaagagtctttcgaagtatgatgatgggctttggtactacgtagggactaactctgagatttatgagcagaacatcatttttggatttgatatggcttttagtggggctggttttgctataagccattctctagctaaagttttggccaaggtttttgactcttgcattgagagatacccacacctttatggtagtgattctagaatattttcttgcatagcggagcttggcgttgggctaactcgagagcctggcttccatcaggtatattatattgatattcgatttatttattcttaggctaaataggaattttatcgcccgaaacaactttgatatatgtacctattaagattgttgaatttaagcaattttgtctaattttaataaaaaaagtctaacacatataaaaattcaggggaattgaattaaattatataaaagtttttaattctaaccatctcaatagttcaggagtaatttttaacggtcagaaaagttcagaagacatgatttagtacatattaaaatttgaggagaaaaaatcctgattaaaacaacaaaaacatattcagtgttttagtagctaggtgtaccttatatttattaaagaataatatatttttggaaacacagatggacatacgaggagatatatttggtttattggctacacatccagttagtcccttgttatcattacaccatttggataaaacagatcccatcttcccaaacatgtcaactcctcatgaagctctaaaacacttattcaaagccacagaggttgattcccagaggcttttacagcaaacaatctgctacgacatatggtattcatggacaatcgtagtctcttggggttacgccgttcaaatctacccatcacatatgtttctgccggaggctcttcatgctccggagactttccgcccctggaaaatcaaccggaataataattctcctctttcggggctttatactttcaccacgaaacaacttaacccggacacgtgtcgaagacccaccatcttctttcttgatgacgtgtcatcttcaggtagggacgatggtgaagaaatcatgagtacgtacaggcaagcctttgtgaattgctcagtctatcctggttcgcccagaaaattgagggaggtcagagtcttctcccataagttggaccttgatatcaaccaggtaatttattaattcttcttaatttattaattattcatttttctatgcgtttataaatgtattatgggagatttcagcaacatttttgtctttattttttttgacccaacattttgtctttattattttaaagttatattaattttgtaagggttagtgtgaattgttggtatatttcgttataaaatgtatttcatttttattatataatatattattattcgatgatatatatttttttgaaggtaaatatcattttgaatcttgtgttttgcgaaagttattgattggacgttgtgttttgttaaatgacaaaatagaccctatattttaaaaaatggtaaaaataagactttgaacttaattttgacaattttttttttaatata

SEQ ID NO: 306369 - DNA, 2513 bp, Cannabis indica
ttaatgcatagtgcagaactcaaaaaaaaaaaaaaaattattgtgcaatttcccaaacatagaggtagatggttaggctcatacactactacatatacagatatacaatgaataaagtaatgacatgtaataaatttttacaaataacaatgtgataacaaaaatattctaacattaattcatgtaattagtgaaaagaactattattttaattttcttaggttagaaaattatatcactattaaaaagagaaatgtaagaggaaatgtgtcgagcattacaaaaagtgatatattgttattggtgtaatttaatatcaagtcttatacattttaatttaaaaaaatagcataagaaactgtgaatcactcataaataaatacaaagtaaggtttgttgtaaaatgatttcaccaacaatttggtttcgatttcaatgagacttttagtctagtggtcataccagttattattcgagttgttctcactccagcactgtcacaaggctagcaagttagacaacttgatgtaaataataattttcttaatggaattctccatgaagagatatacatgactcaacttcttggctttgaggacaactatgttcctaacctagtctgcaaactaaacaagactctatataggtaaagcagacacccagagcctggtttgaaaggctctaacagtctcttctcacctttggttttgtattagcatagtcagatcaatccttatttgttcaacattcatgtaaatccacaactctaattttagtgtatgtggatgatatacttataactggaagcaatctaaaaattgtcacacaacttatttcaaatttacacactcaattccttctcaaagatcttggagaactgagttacttccctaggtgttaaagttaaacatacatcaaaaggaccacatttacctcaggacaagtacattagggatccgttatgcaagacacagatgcaagggggcaaaatctaactcagcacctatgacaagtggccttagactttttttgcttatggcagtgatccagtggaggatgtacatctatataggtcgatagttggatctcttcagtacctaactgtcacaagacttgaaatctcattcagtgtaagcaaggtacaccagttcatgcaaaatcccttgcaagtacattggatggcagtaaaaaggatcattagatatcacagtgggacaatagaattatatggattgcatcttagaaaacttccacatcatgaatttttttccttttatgatgatgattgggccttgaatctcgatgactaaaggtctatcataggaaatttcatttttttttggttcaaacttggttgcttggtcctctaagaagcaacataccatctcaagatctagcacaaaaactgaatatagggccttaaccaatgttgctgttgaaatcacatggcatcactccctattctctgaacttcacataactattcctagacttctagttttttggtgtgacaattggagcacttttttgctcactaaaaaatccagttcttcatgcaagaactaagcatatagaacttgatttgtatttggtactacggaggaaattaagtgaagtacttcagacacaaagtatggaaagagatctagaactgtcgggccctacccccaacctagatggataagctaaataaaaacaaatagacaattagagagattcattacgaaattcctatttcggagatcctttattgggatgagtcgagtcaataggatgaaactaaacgagttcataatatcgaactatgtacctcgcacatcatttatgtggactccaaaaagtcagacaaagggtgttgcaataatatgttgaagtcaagcatgtgccgcctaagaccaactatctgagggtcactaaggccatttccaacaatcgcttcaagattctcagagacaaactttaaattgaagatgcttcatttatgagtttgagggagagtatcaagagaactgactctgttattttcagttagtaaagttggttaggtttgtcaaagtagttacttagctttctaactgaatctgttagaattgttgagttgttaccttagctcaattattcccttgtattcgaaacatgtataaattcaattctcattttttgatgcattaaattaagagatttttgtctttcaatctctatcattctgtatctctctacctttctcttgctctttcattcttttatcattgttctttacaatttcaattatataaggtttaatcccaacattactcccaaacgtccataagccctattttacctatttatgtgttgataacattcatggagtgtcctaaatattgaatgtgaggtgtgatcatcctaaacactataaatagtggtctaatatactcataagaagaaagacaccaatcctaagggaaatggacaagcaagctcttcttcaactggtcataagaatgagttttttaaagggaagtgcaactttt

SEQ ID NO: 306370 - DNA, 1337 bp, Cannabis indica
ttcaatttttttgtgtgtttgtgctcaattaattcatcttattactaatatttaaatcaactcatgcatgtcaacaatcaatacttatctcaaaataaatgtgtatttagaatgaaaataaactccataagcttagatatcaaaatattctccactaatataattacacaccatccaaaaattaataagacttataatgtaatgctagggtgaaagatagatcagaaggttactttaggctcaaatcacacacatagcatacatatacaacatattatctcaaataattcttgtttatattctccgatcacttcttttaacaattcaatctcgtatcttatttttttcctttcagcatgaaacttactattctgccacacttaaattgttgcaagtattcatatatttctcaaggaattttttatttttttagttagttttttaatgaaatacttgcaacttacaaatatatattctaagggaatagtattttttcacaacttatacacacccatcaatattttcacgtcaataaaactctcacacctttacacaaacataaacatcagtgtactatggtgtgaagaaggaaatttctttgttaaggctcaaaaggttatcgtatagggtcaaaagaaaaataagatttcaatattttaggctcaaattgggtaaaattagagaatttacaaacagggtaggcttgaaaagcttaatcgatctaagaaaattgcctatatcatatcacaaaatcatgtgtaatttatcaattttgcctaaaataattttcaaataagttctagagcagttgagatcaaatatcaacaatcaaacatgaattatctttcaaatattagcaaatataatgattcaattgttgtgcaaaaatttaaaaatcaagcttgagaagtcattaccttaaagttaagtacactgtagagttcatcaccttcctagtattatctccattaaaattagaagtctcatcatcgaccatcactgttaacttaactattatttaaaacacatctagacataacagttaaatataactactacaaataccaaatacaacatacataaatataagagacataacaaaataggaaaaaaaaaaacaaaaggagttcacaccacccccacacttaaacatgaccttgtccaaataaaatctattgaacaaaaaaaacgaaaagaaaagaaaaactaccctaaacacatgcactcaatcaccccatcgcacctccttgacattcatccatgccatcttcatcgttaagaacttgagtgccttgctcatcatccatgttaactgtagcatcctcatcatctttttg

SEQ ID NO: 306371 - DNA, 1622 bp, Cannabis indica
aaaaaaaaacttcaaaaatatatcataaataaattattaacaaggttaaaggaaaacgttcagtcatcgacaatgatgactctatataatttaaataatttcatataattttattattcaattaatattcatacatataatttataattactatgaacaatattctcgaaatctctctaaaggaatgcaatttaagattattttttgaggaagggttcgtgtttgtgtcctttaatatggtgacatagcaatgaagaggcagggtcatcttggtccatcaaaatggctaaattatttaccaaaaccaaaaaccaatgataatccactaaaattatttcttgaaatgatctcctttacctattttagaatttcccattgtcttgttttcttttatcatttcaaggttttctttgtttatttatttattttcaatttcaagaataatccaaagacaaatatagttgatttcagtgttattatcattactataaattattcaaaaggggaatggggttcctagcctcctccttgtgataaagtagcaataataagaagaataatgatttaataccagctcgtttcttttgaatcctttttactactaaaaaagctaagttttctaatttatacatatagttttcaattacattactccaattaatcagagtgaaaaatatatagttaataaatcactaatatttgaattaattcttaccatatatatagctctaaattaatggccataacaagatttagcatcatatactatgtgaactaaaacaaaaacaaaaaagtcaaatgactaatatgcttacaattaattactaacttcaaattaattattaagctaaaacatcggagaatgaaactaacattttggggttatttacgtaattaacaagggaaaaaaatatgagtaaaataagtagaataaatagtggtagagaagagtagaataaatgaggagctagggactatgaatgtcctcaaaatgattcgatttaaaagccaaaacaagaagagtgatagatacatgacacattgtaaaaaagggttagctggccagatgtgaagttgcaccaactcaactctttaaaaaaaaaatcttttatataaatatatatatttatatttataacctttatgcatttctcagcttcacttcactgcccccaaaaaaacaaatatcattgaatgtataattaatattactaatttactacaactactagtaactaggtctaccaatttactattttttttaaaaaaaaaaaaaaaaaaataatcttccctaaaaaaataggtgcagtttgttgccatttttcttttttatcataatttgacaaaatgagctccaagtgcaaaaatgtgtgctaaatttacatgagacagcataaccctatatatgttgttattttttcctcaaaaggctccaaccacactcctaaagctaacctattttcatggagttctacagtgtcctactaataatggtgggcactgtagactacggtatatatctttttaataattaaataatatattttaatatttactaatataatttattagatttgataaatatttaatattaaaatattcttattatattaataaaataa

SEQ ID NO: 306372 - DNA, 897 bp, Cannabis indica
tcccctgatgatgaaagtaaagaggaaaattagagtactggaaataacatcagagtttcaataatggaaatttagaataaaagtatgtataatagtggagttctccatcaacatcaacagctgtttggtataacatatacgttttgggataataacttgaacataatatgaagatggcatgttacatatcaggccaataatttacttctgagatgggaagtgaagatcataccattctccaagttcacgaccgaaaccactacgtttgttgcctccccacggagcctgacagaagcatggtgtgagcaattgacccacacaattcctgcttgaaaagcctgcacagagaaaaaaaaaatggcgcataaattacgtaaatgacttaaaaaaagacctgatattctatcatcattatgacagggtctcacctgagttacacgctcacatctctctagatcatttgatatcacagcagcacctaagccaaagctgtaaaagataggcataaatgttattaaagagcttttgaatcaaattatagcaccttagccataataataataaaagatgtcacctaccaggggtaggtgctttcagttgaaagataatgaaaacacttactgtgtgtcatttgctaattcaatggcttcatcttcagaagaaaatgttttcacacacagaacaggtccgaatacttcttctctccaaatttgcatggaggtggtcacctcactaatgagagttggttctacgaagaaccctttctttaaatgctgcaattcataaaataagttacactatcaggggaggagttttattatagtaattacactattattactaaaattatatcaagaaaaaacacgggtaaagcaggggatcatacctcaggacgac

SEQ ID NO: 306373 - DNA, 3211 bp, Cannabis indica
ataatatttatatacatttttttctttgttgacttttgattttgattaagatctcaattcctcaatagtcagtttaaaatgtgacctgatctcatatatggataactactactgcacactacgaaacttaggattaaagactacttatctccaatatctcacagaaatatatatatatatatatatatatttatatatatctggattaagtccactattcccgtagtaatggcgtactattattagtattattttacttaaaaaaagatattaaaatcttgaatttaattgtatatatatatttatataagaaaactatagctattaatgattttccagccatgtgcttaatgattcgccttatctaagtaagataaaataagcacgtatgtgaagtcaatgatgtctatgtgttaattttcatttattttttagcatttctctttttattttgtacgaaattgacccatttcatggccccccacccaattaaattcatcttggacttttttttttaagtttttgtctaccaaactagataacagtttttagtaacgatgatttattatgttttaaaaaatttttgtctctagcattttgtgtatgttcaatttgaccaagtggatgctcatcctatctttgtaacaacacaatatggaatgaataccaataaatgagtttaattatatatcctaaattggaagaatatttctcaaatcaaattaatgaccatgatgacttttttttttctttctaacttgcataaactagaatgcataaactaaaataggaatcatttttgtgtgaatcatgcatattaatttccgatatagtatatgatgattgtcactagaatttcatatatatctgtcattattagatatttaaacccttaacacaaacattattataattattttaaagtcagattaagaaaatacatcttctgagttttccagttccttttgtaatggtatttgtgcactgtgaatgaattgaatcattacgtaaacgacatgtcgtttatttcttcttttatacgacactaaatttcatatgagatattgtttgcattcatcttcaaaagaagaagaagaggatatcgtttatactcaatattctaattattttttgtggttttcaaattttactttcagggggttcctttgcttacctaagagtagagctcggagacttcgtggccttcatcgccgcaggcaacattctcctagaatacgtaataggcggtgcagccgtggcccggtcatggacctcttactttgccacgctatgcaaccacaaaccagacgattttcgcatcaacgccgtgggcgctctctccgaaaactacggccacctcgacccaatagccgtagtagtcatggccggcatttgcatcctagccgtgctcagcaccaaaggctcatcaagactaaactacgtcgcttcaattgtccacatcctagtcatcctcttcatcatcatagcaggtctaaccaaagccaacttcgataactacagagatttcgcaccctttggcccacgtggggtcttcaaagcctcagctgtactcttcttcgcctatgtaggattcgacgccgtttcaaccatggctgaagaaaccaaaaaccccggtaaagacatcccaattgggttagttgggtctatggtcataaccactgtagcttactgtttactagctataacactttgcttaatggtgccatacaaactaatcgacgaagacgcacctttctctgttgcgttcgaaactgttggaatgggttgggctaagtacctcgttgcggctggtgccttaaagggaatgactagtgttttgcttgttagcgcagtgggccaagctcgttacctaacacacatagctcggacccacatgatgccaccatggcttgctcaagtcaacgcgaagactggtactccagtcaacgcaactattgtcatgatcacagctactgctattattgccttattcacaaagctggatattctctctaatctactttcaatatcgacacttttcattttcatgctcgttgcagtggcccttctcgtccggcgatactatgctgccggagtaactactccggctaaccggaataagctgatctttttccttgtagtgattttggggtcttctattggtacttctgcttattggggcaccagcgatggttggtatgggtatgcaattacagttccactttggtttttggggacattgggtattcgaatctttgttcctcaggcgaagtttcctaacctctggggtgttccattggtgccgtggttgccctcggcttcgattgctatcaatattttcttctggggtcgattgataaagactcgtttataaggtttgggatttggactttgattattttgggatattacttcttctttgggttacatgcttcgtacgacgttgctaaggagtttgaaaaggagaaagcgcttcgaaacgacaatcaattgaaaaatgctgaagaaggtggtgctgttgccgtacccaataattagtttttttttaaggaaaaattaagttagatttttgtgaagttcgtttcttgtttttttttttaatctgaaatcttgtttgtagtaaatttttttgttatatagtttggtctacgtattactttgcaaaaaagaaaagaagtttggtctacgtattgtatggtttttttttttctttttaatttgaagtaaagtggtttttctcatttcagtttattttattagctgtttgttttcattagagaccacttccaaaagtatttgtttgactgaaattgaaaacaatagcggacaacgtcgttttctttaagatgttttgcggctctgctcgaagtgtgcacgaccgtctagcaaccacggtgtccctaggataaaacaacctctgtatacgtacgatatgttctgcactaaattatatcattctattacaccctaacttttgctttgaggaaaatcgtaaggaagaaatttttttttgatgttgaaagagatatattcttctgttgttctgatacgagtttagagtagttgatccaagaataaacaacagtaatattatcgtggaggagttggatcatggcagtaaaaagataattttgataatgttaaaattaattaattaataaataaaaaattaaatctttatttaattaaattatttttctttaaaaaatta

SEQ ID NO: 306374 - DNA, 2274 bp, Cannabis indica
aatatatataaaactacaacaacaaagggcaatggccttgtttcattaatattatcgtgtgaattggtttccgtatgggttttatttgaccgatacagatagagaaaacaatttaagatgagtggtataccgccaaatttttattacaattttttagttaatttttatttgaaaatatatatcagaatatatttttttttcaattttttttaaagacagtgtttgttatagttataatatcatctttataaatttttgaatagtttataatactgaaaaataggtttgaagttttttgaacatgcgtgatcgtaaactggaatatcaagaactctattttcggtacaataaattatttagaaatttttaaaaatttacaaggtggatattataattataacgaacattactataaaaaaaaaattaaaaaaaaataatttcaaactatgtgatttgaagcttagaaattaactaagaagttgtaactcttcaagttttattattactaataaagtttctataattaaggaaaaagtgtagaaaaaaaaaattatgagattttgttaattttgtttttaatatatttataattgttctaagttttataaactatatgacatttagaaaatatttttataaggattcacaattgtttatttgaattcaaacatgaggaaaataacatatttaaaaaaaattatcttttcaattcctaaataaattttttatattatactcaagttttattttattttttctaaactataacttttcaacaaaaaaaaaaattaagaaaatggtttttcttaacattctctttttcccaaatttatggggttttattttatatttttatatatatatatatatatatatattttgatccaataactcatggtcattggccatagttacatagtttgtaatttctgttatttgatgtccttttcatatatatttaggcgtactgttttgaagtaatgtaatgagaacaataatagtaataataaataataatgacgtaataaaataaaaattgtaaatgaaaatgatatatattataacatttggtttaactttctaatgaatattataattaaataagataagtggtatataaataaaaatatacttaaaattttattattttaatattgaaaatttaaataaaagtaagaaggataagagaaacatttttctaacaatataatcatataacgagggttctaatatataataatgtaatggccattaatctcattacaatataaagctattaaatagttttagaagtgtaaacaaataatgtaatgatattaataattttattatccttttctagttttaatatttcagttcagtttgttaaacgatctgggaaccaagcggctaactggttagctcgttcttctggttcatgtcctgatcgtatttccaatagggggtctgtcccttctggtttggaagctattttgttaactgatttactttaatgaaaattgcaatctttgtttcaaaaaaaaaaaaaaacttattacaatactggttgcattaaatcaaacatgcttattacatgttctcttcttttttatttattcattattattttaacttttgtaaacaattttggtttttcgttttttggaagaacaatgtatgtacttgtttttcaaataaacatttatatattacaatatataatttgagattcgaactaaccctccaaacacaacacatgtaccatttgatttaagttaaactaatccttaaccctcgtcaaataataatgataaaaataatttattatgttgcaaatgacatgagaggactgtatatataataagaatatgtattatatatatataagtgggtcctctacaaagctgaagaatgatatgctttgattatatttgcctatactaaaactagaaagaaaaagaaaaagctgaaaacttaaaaacatgaagctcttactcttttgcaagctcactgcacaagtgctttaaaaggctgccgtgtgtttcaaaacatagaaaaatgggaaaataatatattcaatttaattaagttaggcatttgtaaacattctggcataaatagatccagtcaaactacaattcttaccactatattaggaaactaatcaattattaccctagctaattattatatactttaacaaaaataatagtaccattaattactctatacaaacataattgccacctatatactttattatttaatgatgacatttagttagaggtaataaaa

SEQ ID NO: 306375 - DNA, 990 bp, Cannabis indica
gtctgaaagcttgtatgatcttggtcaggtggatgtattcttatttaattgtacctcaaataggcatccacaaagcttaagatctcatgacctttcatagcatctacgagctttttgatgcttggaagagtgaaacaaaccgttggacaagccttattaagatcgatgaaatgaatgcatatacaccatttcttgttcggtttgggaaccaagacagttttggctacccatccggggtaaaaagcttctatgatgaatttttttgtccagagcttttctacttcatccttaagtgcctgtgcatgttctttgtcaagcaatctctgtttttttgtacgggagaaaaactaggatcaatgatgagggcatgggaaattaaaagtgggtctatcccgaccatgttctcatgtaaccaagaaaaaatattaaggttttctttgagaaatttgattgaagcagattttatttcaagtgacaaacctttcctaattttaagcttcttggtcgccatagtgggatcgatctctatttcttctaattcctcaacttgcctgatgtttggattaggatatccaaagcaaggatccatgtcttcaaccccgcaatgggtcgatccctatttattcaaactttgctcaatctttggcccttggccggctagttcttcctttttttcctttgtcaaagtagggttgtagcattagcagacaatcttctagtctccctttagacatccgaccccattcctgatagggaacatgacgcttaagtggtaaattgaagtcattgctttcaaatcatatagggttggtcatcctatcatgacattaaaagaaaaagggacatcaggttttaggccattacaatgtttattgttggagacaaagaagaacatcaacacttgttcaaaataagcaaaggaaatagagagagatagtctcccactaggaaaaattaccataatcatcatctgatgatgaagaagaacta

SEQ ID NO: 306376 - DNA, 1081 bp, Cannabis indica
tagctgtgaaaggctgaagcagagattggttcatctcaggagtgatggctgagtgaatggtagagaggacatattgcaaagcctcattatcaacaccattagaagaaaataaacttgagaaataattgacaatttcaccactgatttcctcttcagtatgaaccattccaccattactagattgaagcttcttaattttattaactgcatttctagacttagctctggaatggaaaaacttggtgtttgaatcaccactttgaagccaatctacccttgcgcgctggtgccaatataactcttctttttcaagtaactcatctagtatttcatcagcatcttccatacatttcaaatgagcaattgagttatcattaatattattcaattgagatgaaacgttgtgagcagcagcaatatctttccccatttggccatattttttaccatgccaatcttgtaaggcagcagtgcatgctgcaatattctgcagtagggaagccgtgggttaactggatggatttgtgcaccaaaaactttgaacaatatccctgcaatcagcatctttgagccacatttgctcaaatcgaaacttggtacgcctctgagaggaaggtgctggcagatgaggatgcaacactgtatatgcaatggctctatgatccgaatggtaaaagtcaagatgggaaagagtggcttcagtaaaaaaattagaccacttatcatcaatgaagcctctatcaagtcgttcccaaacaacattcccatgatgatttttgttagtccatgtaaaaggatcaccagtaaaagggacaacccttaaatgacaacaatcaacacctcttctaaaattatccataagcatgtcatctcgaggaggacccccaacttcatcctcatttgaatgtaattcattaaaatctccaagaaccaaccaaggtaaattagaagcattaaaaacaaggctgcttaaaagattccaagtgttgattcgcaaatgtgtttcaggtgctccataaaaggcagtaaagtgaaattggtggcaattatccaacgaaactaaaacatcaaagtgattcat

SEQ ID NO: 306377 - DNA, 1668 bp, Cannabis indica
gtaaaataatttccaacaacaataacgtatggaagttattgctccaaaatccactaaaatggggcgtcctagtattgcgttgtaggtcgtggggtaatttactactacgaatatacaatgcttgaactagcattgctttctccctttagggagaccggtaactaaattttccccattggcatcaaggcatccccatcaaagccttgtagctggatgggacagtgtgacagatctgcttcagtaagcccgatcgcttgtaaagcaaattcaaacaggatgttcatggagctcccattatccaccaggattctagacaccctcttatttgctatctgggcttcattaaccaaagggtcactgtgagggaaatacacgtgttgggcatcctcttctgtgaaagtgacggtagactcattgtccaaggatgttgggcaggttactgtactaaacttcatgttgccccttccatgtccagctctcttctgagaattcctagtactccctacgagttgcggtccatttgagatcgttgctacatgtccatcaaccggtggtggtgctagccttggttgatataggttccctagtcccggagctatcaaagccactgcagctggacctagcggagtgaggagtgccagaggatatgttccgagagcttgagcgtgacctactccatgcggaggatttaagtaccccgctgtctgggaacaatcatttatctgtgaatgaccccttattcgagatatataatgggaatctgaatccattgtcccaaatatcctactcttatgaacgtttcaatctcatcctttatgaggtcacattcgttcgttgtatgtcccacgtcttcgtgatattcacaatgcttctttgggtttctctgaaattttcccccttgaggcattttgagaggcttcctataatgaaccatattacatgtttccttgtacacattttcttaagtatccacaagactagaatacttagtatattcaggtcgtactctttcctagatttcttcaaagcctctcctcaccccggaccttttccctctctctttttctaggagttactcaagtcttgctccggtacctccgcctttgatttcctaggagccacactacatccagcttgtgctactccatacccaaagaaatgggtttgtgtaggcacaggcacaaacatagaaggttcgcagatcgtaagggtgtattgcgttccaggagcgggagtagacaaggtcagtgcaagaatagaggttaccagggctggtgccggagagaccccaaatgcttgcttgtaagcatcttctaaaagaaggaagccttatgccttggccatgaattcagagagagttctagctctccttttttgcatttctccccattacaaggagccagctaaaagtccaaattgcaatgctaggagctttatatcatctattactttagttttggtcgctacttccatcattcgtagaataaagcttttcagggttttgcccgcttattgtttaatattggtgatggaccccatctctaaatcgtatttgttgaacgataaaaaaaaaaagaggaataaataaatttattattatttcattattggttttaaaataataataataattaaaaaaaatatcagtcaaatagagagaaaatagga

SEQ ID NO: 306378 - DNA, 710 bp, Cannabis indica
gaatcagctatcatgccccctcgagatggatttggtgaaactagtccaatcttgagtcaaaaatgaaggaagaatggatgtgagagagccagaacatcagctagttgttccctgataaaataaaatcaataacataactgagttgctcctacattattgcaatagattactggcaatcaggcactttgatatgaacatattcatgtatgctctgctacggtaccagtaacgaaatgatactgagctttggtgcaagattgagctactgcatgttgtttcttcgagcttcaggacactaagttgagaccgacataccggttgacgaaaaatcatcttcggcgtcagaaaatgcgtctttgctagtggaagagttatgatagagctgaagaccctcataaacagtgcctaccgaatatcgaagtaatctttttaactttgtaaattttaaaatgaagaatttttatcaatcacctattaaagttactttaaataagctctacacattttgccctgcgagaggccctcggcctcgcacctccctcccttgctctcactccttatcatgcgagaggacatgatatgctccacctagtcccttgtataagaagaggctctccttttattagttagaccatctccaatgtaaaaaattgaactattttttacaaaaaataatttggtaatatttttacatcaacttttactgttgt

SEQ ID NO: 306379 - DNA, 1447 bp, Cannabis indica
tatagtattaatgattatttattgttattattgttacatttatattttttgatttttttttttagtgtaactctatttagttataacctcccaattagaatataatttacttggttccaagtgtatttttggatagagattctactgtataaagaattttaacatatttgtctcctaaaatttattttgtttgataacagattttttttttctctggcaatcaaagtacttgaattttaaaaataatcactttttcacaaatgtttgttcaggaatgaacttttttcttcagattattaactacaatacattgtgtaaagtatttggatatgtataataattgaaattttttttaaattatctgttaaaaacaaacttagaattttgctaaaacccaataaattatacttccaagaaaaaaataaagtgatatttaaaataaagaagaaaataaaaaaaaaaaattatgttttgtggtttagagccctgaaccctatggttatataccctttactttaataacatcgggatgcatgaacagggagagacagactctctctctctctgggcaaaacctattatgtgaactatgtaatattccttcactttaacaactgcacacatacatatatatatataatatatataattgaatagatcttactggaatttccaatggttaattttctgacttgattttaaatagcagtggttgggtaagagaggactttggcattgtacgaaatgtagttaaaagctttcgattaattatggatcactttgatcgacatatctctccagtttccaaaatgacagtttctacaattggtttccaaggacatattattaaacctatatttatatatataaatcaatatctatgttgtatttcccacactttacaaaataatcatcgagccgtgggaaaaaaaacaagagcagatcatacaacacaacactacgaaagtttctataaagggaaattagatttgagtgtgataagatcaaaacatttatggttgcttgttaccagtcattttagaaccaaactatacataaacagtaatctctaaaaggtgtactacactactacttctctatcgaaacgtgttgtgttcttctttttaatacttagttatattatatagtttttgttggttgtgaacattaaaaagcttttaaagtgcaatcagacaataaccaactaaattttagttcaaaaaaagtcttaccaaactatttatgagagagtttgcaggcattatttgaacttatttaattttgggcatatcacttttgtagtatagtgacggtttttttttttgtattaattaaagaaagaataattatgtaatttgttttgtttgactacacataattaggctaattaagattttttttcccctgaatttttttggccgttaaaaattccccttgaactattgag

SEQ ID NO: 306380 - DNA, 4273 bp, Cannabis indica
agtcgtatctcatagggatgcctcgccgaggagggagcaaagatctctttgatagcgagcaactgcttgtcattttagcttcttgaaactagtattgtcttaaccctgatggttatacgttctggggtcgagaagatcttcctccatgcaagacatcttttagcgggataaatacctcgctgtttgttatcttgactcaccatactatttgtactcagtttgtatatcgcataatatacactaagtatttttaatgttgtcgctttatttttcacgcagcgaggttgaggcctcgtcatgagcgtatgcactcacatggtttctcgtcaatacataaattagcagttcgtatgtttctgtctcgtagaaggctattcagcctactgagttataaacctatcctgcgaattatatttccaacgagttgttccatgctaagcgtacttgtcgtttgtgtgtttgagttcttcccagttcgacacgtgtccccctcagatgtgcttaccgaactttgggtataacagaatttatacattaaacataatcatgaaataaattatgtgaaccatgcaacataaaataatttctaatcttttattaattagtaaatctaattatattaaaataggttttatttagggcacaaaacccaacatggtgaccacggtaaatctttgggaagtgggtctcattgccccacaccaggatataattcacctctccgtgaaggagtcagtccatgagtccttaaagggggacccaaaaagggttagagaatccatcgcagttattactgctaaggaggctttaaaggcagtgaaggtcgatgaaacaatggctggagggttggagaaaatagttccctgcaagcctgagtgaggcttaagaactttccatctgctttaaggatgtgatgcccaatgaaggtgctatgggagcgggcactttcggtagtggtgagacgccttttcgtataattagggctcccactgtgtttgattttgagatggtcaattagtgtagatttgatccctacttcatgaatttagatcttcataagtattcttttactagatatgtagatagggtagattgcattgtccacagtcctaatcattatgtccctcgtgtgcacatcatgtccaagtggatgcacttggcaaaatcttccacggattcttccaatacagaactaatttaggtcaagaagacatcactctgtttgctaggggaaaagccaattatgctaggattaatggtttggatctccctgaagtcttgcatgcttatatgttgtaaacttcatgcttcttgttataatttcttttaatgatgacttcgtgtgctttatgtagatcaaccagccactctctagatggagcttctgaacaagttcttgggtagtgtccacgcccgttttaacgaggttagggagatcacccaaagtgataatgttggaagaaagaaccaggcctccggaagtggagcccataagccagcacccccagtaccgaatccaaaagcttctctaaaggcttcggtcacggagacgacctccactgccatcgtggatcttaccaagcctatcctattcatggagcctctgaaccagattcccctagagaattctggagaagatagttctgactgtgatgggcccatcagacccaataagaggcgaggcagcatttttgatgatggagcaaacaagaaggcaaacataaaggccaaagagaaagtcctgtagctggcaacctcaaggaggcagatcacagattctcgatcccagaaggaggcaacttcttctaatgatggaaggccaccaaggcaaagtactcattcatcaagggacaagcaagaccttccttcgccacccctagcacctcaagtgcttcttgccacctcaacccaattgtccaggcaaacgactgagttgcctccaatgcccttgtcacttttcacacttcctgtcaggcctgtacagttgatagaaggagaagaagccagactggaggcagtggataaattctagtaccaaagacgcagctgcgaggtggaggagatgaggaagttttctaccagcttctcttctaggagtaatgctaaatttgccaattatgactagtgaaatgagatgacccctcccatcatgaacagagctgaactgacagagaggctccctcctcgtgtgaggaccgatttatcaccatttttggcagatttgttagaacagagtgctaccacaagttgtagactcagtgctaataaccctagacaaaagtaatacagtaagctttatcattccctgacattttgacatagcaatgtacaagcttaggagtttcagcaatgacaatcactttgacaaagctttttctctaaacaataagaattcggccttcaagagtagagcttgagaaataatcccagttaacaaacttattctccatcatctctttgattttattctccttcaactttgtttcaactaaggctcctacaccaactttattaatactacaaaactccaaaacaacatcttgtttatcctattattcacacccctaacattttaacatgcaatattgcaattatccatggttatgaacaattatacttgaatcctctgcttctttggacaccatttctattgtcgaacccttctcttcttcatctaagcccttaaactattagcagtagtctcaacagcttcaaaagacacatcagcagctttaacctatgtatgaggaatcatttttcaaggtgtaacccattttttatcatgggtaacctcattagacactttcttctgatctgccttcctaaaattagctggataatcattctcgtctgccttgttagccattttagtctccatctcattatttcttggttccttgacttagttaacaactacagtttcctacaacttcttcttcgcctctccttttcgacagtctgccattatgtgtccataccccatacagtttttgcacttaaccaggagccattcataatcaatactttgttcaaccagctgaccatgttcatcaacgtattgtactgatctaggaggagtatctgtaatgtccatttccaccgaaatcctagcaaattgaacccttgtgcaatccttagtatgttggtccaccatgattggtttcctaactatattaagtaaagcacttagataattatttccccaatattggaggctaaggtcttgaagacgaatctaaaggggtactgatcgaaacagctttacagcatttaaatcagtagaccatggtcttataatcactggtgtcctattaaattggattactcttgatttcaagacctgatctctagatgcttcatcactgaatttgaccataaccagtccccttgtcatctttattatttgaactatccaaaggtgtccccaaattcactttataaatccctcaaaaacagtcataggaggataagctccaagaaccatacaaatcactgttgtattccaacttgcagctttttctttgacttcctcatggtcgagttgtgaaatcttgatttcgttcttgagtataggttatgtatatgtcaatttgggatcacgatagtacttcttctcctccttaaaagatttacaatgattcaggttgattcttggaattgaacctgatcattttctgaagtagcttcatcttccacttccttagcccaattcaagtacccctattccacaacctggtttttagaaccagattgttcgatagccttaatcgtatcttctccatccaacatatcagcaatcagatctagaccattagcttcacctttagcttcattctctatcttcccctcttgcaaagctaagtttgaatcgggttccttcactcgagatactggcttttgcactattcttcttttctttgccatggaagaaagagaagagagagaatgataaaaaagacatattattaaaacaaaagaaaggttaatatttacattacttagcaattgtttaccatttttgtccatcggcgtattgaatcttgttcgctcatgaaaccttcaatgaatttcatggcatagtatctgttgggttttatgccctaaataaaactctatttcaatgtaatccagattattcaatatcaataaagtaacaaagtatttttcattcatttgtgtatgttttggttcaattaatcaattgtttgtctatttgatttataaattcatccaaacccctttcacatacttgatcatgtttattttgtggtca

SEQ ID NO: 306381 - DNA, 1034 bp, Cannabis indica
aaaaaattaaactaaaaaattctaccgaataccaaaataaataatttagagaacgtattgtagaattttgtaatagtatattaaaaaaatatactagaatgacatagacaaatgaaaaattggacattttggttaattaatgcatgaatgaagtgtctcaatcaaaatataataatctcatatgatattgctagctttttatttatatttttagttaatgtaaggttattggtcacatgcataaagagttagaaataacagccacagatctcagctgctatattgtcattattttgaaacacctttaaaattattttaactgatcatcccacacatatattattaaattaaaaaaaaatataatatacaataagtaggacaataaaatcaaagaatactagaagatattttatgtggctcttaagaacaaaatatatcatttttctttaaaataatattgaaagagaataagagcataattgtttactaaagtaaaagatataaataataatactcaattttcagatactaaatcttgaatagtttacaaaatatataaccaaatttctatatgagtaaatatgtgggagacaacaacaattctattccaaatatataaataaataaaaaagctcataagactctatcttaggtgaatggtttaatttaacaaaataattaattaatttattgaaagtcaaatcacatgaaatcacaaaccaatttagtcttaaaagaataacaaataaaatacgcaaaagatttaaccaattgatttgtgaaacacccctacacaacaagcaacttttaactcatgaatattcaaaaaaattaatttgctaaagaattttaagaaatagatataatatatatatagggatatgattttgtcctgtgatgtattttcacggaatgtattccgcggtacattagatgtgtctcagggtacattaaatgagtgtcagggtacgtttctactttttaatcctaattacccctaaatcaatctcagccgtcagatcaaataattctct

SEQ ID NO: 306382 - DNA, 2890 bp, Cannabis indica
ttttttaaatgtatcaaattttaaaaaataaattcgattaaaattgtgcatgcacttgtactgattgatttaacaagtacagtattgtggtatttattaaaaatgagaagatagtaatgcagtaaagtagtataatcctcattataataataatggctgtgctctgtcctaatttatgtttatttgatgcgtcttaggtgggcagccctctcgcagaaagtctctttttacctttgcatcattcatgattatattttccgcaagggttggcaatttcccagagctaattcctcttgttaaggcatcattgacaaataagacggtaatcactaacatttcttgattcaaaagttcatgggcctttctttgttttgttgtcctgtcaaattccttgacaatggttactgtaatttatttaacctttctcaatattgatatttataggttgatcctcatcttcaattggttgatgatgcatggctgcaagcggcttttacagggtatgataagggggatatatcatatggatcacaggacgatgaagtttctgcattggattctctttcagcaatagagttagatgaagaacggttaaaagaaactgtgatatccctcttcatgaataaattcacaaaactgtcagaggtgagaatcaatttttctttagtttattagttgccttttcttctggtttattaagaggcatttaaaatgtggaaaatccaaagtcatacagaactatagaaggattcaacaaatgaaatgctaatcatgtgggcttgtgaaatataggaaggttcttgtaaacaaagtatatcaataacgttgaaaatcaattgacgtagaacaaattcaagtttagtgtacattaattggaagaggatattgaaaaaaagttataattttgctgactacactggaaatttatgaactggctacactacacctgaatttttcttgctggttaaaagaaatcttatgctgattatgcattccaattttcactttggctggtcttggaatgaaggataggatagccggtcaacttagaaatgtgtcaatcctattgagtatatatatatatatctttgaatacgaagacaacatctaggtttgttttgcaatttgacactcattgttcccttatcattaggatgagttattgagcatcaagaagcaactctcacagggattttctcctgatgatgcatatccgttaggagctccattgttcatggaaacaccacggccatgctctcctcttgcccagctagattttcctgatcatgatgaggtaaatttcatgcatcttacttctatcccatggttgtagtaagctttaattttatttatttttattttttttttctgttccttccctgacaagattttctatcaggtgatgcctggaggtgcattgacagatgaagaagcttttccagaaccaagtggaagccagtctgatcgcaaaacatcaatctctatcagcagccttgacattttgagtgttaatcaacttctagaatcggtaagacatagtcgaacatggtatatgtttttgtaaacttgtataaggtataatcttatgacaatagctttagttacaaggatgtgtgagtatatgcaccaagggaaagtctaagagctgtttcccaaggatgttaatataccaagtgaaaatccaagagttgttttcctaatatagtatctgatgaaaacataacttaaatcacattaagtgggagaaagtctgactaatactcagtttcaacatgaaataatttataattttttgggatggtttatgaacattgtaaaatgtcgttgatctcatcaaatatttcttagggagcttgttgattctttaaactgtttcagtgtcattaaaatgggcactttgattcatataagcctttgacagggccaatctgtggtttgaatgaaatatgatgctagagtgtatcatttagtaaagcaatattccataactaagtcttacttgaaaggctagcattttattgcatgtaatgtttatgtttgagttttactgcaaacagtttgctgtaattttcaaatacactggataaacttggttataattttaccaacaggttttggaaacagcgcgacaagttgcaagcttcccagtttcttcaacaccaataccctatgatcagatgaaagaccaatgcgaagctctcgtaactggtaaacaacaaaagatgtcagtactacatagttttaagcagcagcaagaagcaaatgccctagctctttccagtgttaatgaaatcaactatcccacctttccagataaggttagcaagattttcgtcaatgaatcaggcaaaaataaaatgatgtcttttgttcactttctaacatcttgtaatgtttctgttttagacaaaccattttaatcattttcctttcagatgaaaattgaaagtggtcttgaactcctttggaatatggaatattatgcaatcttaaaatgcttagttattgttcaaccatgtacatgacttagattttctcccttttggtgttagactcaaaactgctatttagcaggcattaagctatttgtttgtgctgataaaaggcaaacatactgacacttttcgttgttattatgttagacaagggagtatacagatggcggcctaaagttgataaagaaggagcaaattgtagtcagagatcagcttgccctgtgttcacatgagtatggacataataattctttcaagctaccaccttcaagtccttatgacaaatttttaaaagctgctggctgctaattgcagatggacatgtatgtatgtacacaaacaccatatgtaactaagctttaattccctttgttataatattctctctctctctc

SEQ ID NO: 306383 - DNA, 1567 bp, Cannabis indica
tttttttttttttgaaatcatataataagaaaaagttaagaatcaaagcatatattttttttttcaaaaaaacatgcatgcccacggccgtgatatttattttaaattttgtgagactaaaattgttattttctatatttaaagatctgcttttttgccttcaaattattaaagttaaaaagaaaaatgtaattatattcttccaccaatattacaccttttctttattattaaatgtactttgtaatataaaagaatgaaaagaaaaaagagacaaggaacaaagatatgtgatcaaactgaaagataaaattgatggattatgtcctttaatgtggaagaagaaactactcattatatttttttggggttgtttttttgttgtattgtagaaaaattagtgaatttatgttggaagatctgcaagtctattgtgtgatttttcttgattttgttcataaatttgttgatctcttttcaaaagaaataattaaattggtcaggtcgggcactaggttaaggcgggctaggcctgtgcctagggcccactaaaactcagggcctaaaatttttatataatatatttttttgcattgtaaagcatttttaaaaaattttgtaaaaagaagcccaataatacttacatttcctttagataaaacacacttgaaaaatttcttgatcccattattactcaaagccggccttgtaattggtattggtgattctgtggaaaatttagttctagcgtaacaaaaaaattcataataatgatgagttgtctccagtagtgctcatcgttcattgggctcatgactatcttgggacttttcacaacaagcagcaggcgatggctagttctttcgaccgagggtggttgctggcggcctagcggtgaggtcgagctcagttcaaatcggtccccaaatgggctctctttcttggggttttcaaagtgaatatagacactgcaataaattcgataggtaagtgtagtaacttgggtatggtaatccgtgatgatttgagagttgttagagcttcgacaaattggtattttgatcgttgtttaggttttaaagtgattgaatgaagctttagctatttctaacactttgattcaatgtatctcttttagttttaggtatgataatattattattgaatttaattgtttgaatgttatgattaaaattaataacaatgtttattatcacttctttaggtctaagtatatattagatgatttcgttaatctatgtaatatgtttgatgttagttttgttcattgtagtagatcgagtaatgatgttaaacttggcaagttgtattgttatttggtgtggttaaggaatcttgataaatttttgctcctagtatttattattcttggtgtttgtggttgaattttttttaaaaaaaaaattaacattgaaggaaaaataaataagagtgatatgcatttatatgggacaagcaaagccctaataaagactaaagtgatccacgtggtcatcatatacatatgggagtttaaatgggaaatttgattttctatacttagaaa

SEQ ID NO: 306384 - DNA, 1698 bp, Cannabis indica
aacttgtgaataatattatgttgcagttgcgaatggatgtggtgttgatccagtaaattatttcggaaatgatcacatgactcccatgcttcggcctaataaaagaagcagggaaatagatgatatctcaaggcaacaaaagcttcaaatttcattgaattataatgtttgtcaagatgaagctgatcgttcaggaagcattccaaacccaaatcctgtatcgacaggtttaagattatcatatgatgatgatgagcgcaactcgactgttacttctgcaagtggaagcatgaccggggcacctgcaatcatttactcccttggggacaatgttagaacagagcttgatcggcagaaagaggagtttgaccagtacatgaaaatacaggtaataataaataccctccaaccacttccgaaatcctctcatttcggttatcatttttattctaactccctattcacacaggaggagcaattggcgaaaggggtaagggacatgaagcaaagacacattgcttcatttcttactgccatcgaaaaaggtgtgagcaagaaactacgcgagaaagatgcagaaattgagaacataaacagaaagaacagagaactagtagagagaatgaaacaggtggctatggaagctcagagttggcactatagagcaaaatataacgagtcagtcgtgaacgttctgaagagcaatctccagcaggcgatttcacaaggtgcagcagaccaaggaaaggaaggatttggagacagcgaaattgacgacgctgtctcctacattgatccgagcaacatgttaagcattcctggcacaacaataaattcacttccaaagaaccagggttctcgggacactatgacttgcagagcctgcaaatcaagggaggtctccatgttgttgatgccttgtaggcatttgtgtttatgtaaagagtgtgatgcctttattggtgcttgcccagtatgccagttgatgaaaactgctagtgttcaagtgtatctgtcttaatacatctaaagcaactaacttaaaaatgagaagtttgttgctgcttgatatttgttatttttactcactcaagtttaaagaaagagaaattgtaaacataaaaatatatatggtttggctgggtgaacattagttttatttcccttaatgtaattaattagtttatgtgatcatgaacatggcttgtagttttcattttcttgcattattttaagatagagtaattaatgaagaaactacaataagacatatcacgtgaaaaatcaaactagagtattccataatatgtggtgggtgggtgggtgtatgaataaatacttagggaatgtaattggactcaactcatatgttcacaagttacggtgaggaatacttaaagattgtaaacgaagctcatgtgatatagattttgtacgaactatatgagaatcatgaatcatgaggttttagtgactatttatgttttattcttgaagtttttacactacatacatactgaaattttttaattttttaccgtggagtgaatttatttatttatttttttaaaatactgtgtaagttttatactgtctattgtgttaaattttcactgttgttccatagttattttttggttgttccactgttgttttacggttattttataaaaagacagtatttttatataaaaaaaa

SEQ ID NO: 306385 - DNA, 2168 bp, Cannabis indica
tcttgattaatcttcttttgttattttttaattttctgaattgtcttacttaattcataaaagtattattttaccagatagaatcataagtataatttagtagtaattagtccaattccatgtggttcaacctcacctgtgtgagtttactacttgattgcgtatacttgcgtagtcatcataattttcgtaacactttgctccccctcttcacaatatccaaccaatcgaacaagattcttatgatgcatatgaccaatcacattcacttcagctttgaattccttttcgctgtcttgaaaagctcgatcaagcttcttgactgcaacttgctcattagtgtctttcaaagttcctttgtagacaatgccaaaagaacctcttcctacttcttccttgaagtcatctgttgcgtcggtgagatctttgtaagtgaaacaccttaagttgagacgagaaacttctttgtcatgttgagaccttgtgacccttttcttgtaaatgaaaaagaatcccaaactaactcccccaaccaacaaaaagttaacaaacaaagaagtacctaagaggactgagcctgcaattatcaaaacattttggctctttgtctttgaagatgaagatgaagaagaagaaggattctcaagaggaaaatcagatttcctaactttgatgaaagctattgcctcagcagtggtgtcaaatttcccattattgagaggaagctttttcttccaacaagcattcttcctataaatggcaatcgcgcaagtacaatcactcaaacatgcttctttgcaattttctttatcataaggctgaagtatctcataatcacctgatggccagtcaacatctttcatctcttcaattgtataacgactctcagctgaactctttgaatcttccacgcaactttgaagaaaactcggtttgcagcctctatactcatcattagaatcaactagagaaaatcctcttatgcattcacaaagtggtctcttattttgatccaatctacatactctattataaccacaaaccccactatttccatacgcaaaccgctgtaagcatatgttatctggtatggaccaaacaacagaccaattactatccttagtgggattcttggggtaactatatttggtaaaaacaccatcaaaatcaagagttgctctataatagtaatttgcaatagaagcactctttgtactaaacatatccatttcattattctctctcagtatatacaaactacctgattcattaaatactagctgcttaccagtattagtagtttcctttgtgtagtaattggaattgagatgctcagatggcaagttcatggtataaagaccaacattcccatctgtcttcaaagagagctgaaaccttcctttagaaaagtttgtagatgatatccttgaagacaccacaactcccttttccaatacttgtgttgtgttggtaaaaaagtgtcagtaggatggttaaaactttcccatatcttctcggattttctgtcgaaaagaacaaagttaccagtatcattgaaaatggccatatctgcctgacttacaatggtgccagacttccacaactcctgatttcgagggtcagtgagcaataggcctctgtctgcagtgagctctagtttggagccttttggggtaggattgttgggagtgtcagcataccatacaactgttttcccaggcaatttgttgaaccatatggctaacaagaacagatctttattgtgaggaagttggtgaaatcccaaggcaaattcacctgaaggagaaagccatgagaagactttatcaccagctgtgagagtagcaccaattttgatagtgccattgccattgctgttctgagccataatagttaaacaacatgggattatgctgataatgagataatgaagaaagcaatacatttttttaatcaagactttgatgatgctatatactagtatattgttacgtgcgatgcacgtatgctatgttttatattaagtattatattatgagttcggaaggaaataaatgaattaaaaataaataatatttaatttagagagatttgaataataaatttaaattaaatttcaaaaattgtagtttgttagagagataagtaagttaatcgtaaatattatt

SEQ ID NO: 306386 - DNA, 4828 bp, Cannabis indica
aaaatgttaaaagatattagcagtgtttatgtcaatatcattattagtcaaattaagtaacaagtcccatatcgtaagacaacatgtctaaaagtggtagccaccactaatactcaatagcaatgctctttacaaaatatgctacattttctgaagagaaatgctaaaggacaccagtgatgcctagcactttcctacgtgtcaatatcgctattggtttaactaagttatgggtcctataacttttagggagtatctctagccaatcgcaatgcaccatgtcgagaagttgctagacaccattggtgcctaatagcaatgctgattctgaaccttaaatctcatccactaacattaaccacatttatttttgaacattaaaattaatcacattcattcacggttaatatagtttttttttaaagggcaaaaagaaaagaaaatgatttgttatcccaagtctcaaaatagatttgcaagtctactcataaaattaaaaaggttgaaaggactaatatgtaattccattatttatttttctatgtttagctgtgtctttgaaattgaatgcatttactctaaatcattattaatcattaaaatctaatggtgtaatctgaaatctgatacatgtgaatttaaatctcataactaaatattccataattatcttccattttaagattcaatttcaacggaagaaaacatacgaaatttcccagaacatcacctttgcttttccaacctctttccttgatttctccgacatttttaaatcacccaaaataaaatataaaaatccattttttatttaatttgatttgttgtttgtggtcttaaagaaggaagagtctcttctactgtttctttcttcttctctttcatctcttttggggtgatttttaaggctaacatccattcaatgtgagtttttctttatttttttttcttgggatttgattcaatcttggtgggctttggctgcaattaatgaattttcaagttagaatctttggtttgtttttttttttcctacaatggaaagaaatggattgtgattttgggttgtatttgtttattgttattatatatattttggatctaaaagttggttcttgttgaatttgatgcagtttggttcaaaccagagatatctctttgtgaagttaagactattttaattgaatttgaataagaaaagtagccattaatggagttagctaatggggggtcaatccatggaagagaaacagaagaagacatggatagagagacctcagcagacactccattgagagagccttctcctctataccattctcattatgctggtactgttagacagagagcttatatatttgatggttcaggaaatttttacaataaagaatgggatcttgctgaagggagaggtgaagagttttgttggtaccatgttgagcttccaaaagggagtcagaaactctctcaatctgctcagtatctcattggtgttctttgcccaccattgaaactccaagacattctttcactcattagcaatggacccttttgtggacatgttgatggagctcttgtgtttagagttaactcacctggtcctgcttctagtgattttacctttaggattgctgctaggattactgagaattcggttattactgtttcgttggggcgtgttcctagattgggattttctaggatgggccagtctttgctctctgagattcctagtgtggagagtccaacttattatagaggtcagcagaaggaagggagtggaacagtgataagagagcatgttcttgagttcttgttgactatgaatcattctgaagaggctgacaatcctgtccccaaatctgtctcaaatcttgtggttcatatcattgacactcatgtggatcaacttcaagatatggtgaccaaacttgagattgatttagatgctgttgagcttgagttggataaaggtactttaacacttgtacacataatttttaagctctttcactgcaaatatctcactataattaatatgttaggaaggtgataatcattttaggagggctacatttgcaaatttaatcttcataatgtgtacaatggcagttggttagaactttagatcaaaatatcttctggtatatcttcatataagtcctgatataaatgacttggctttgtgaaaacttgttcatccttccaaccattattatcaaaatagaaactactttaaatgaaaccaaaggaagaaatgttgacagaaagttggaaattctgatatagtagaccttaaagtccttatggaaagctagtccttctacttgactcattctcattctttcattaaattaaccaaataaaatgaataagaatgagttatatgacagtatgtgtttgtgcttgacattgttgacaatgccggaaaacttgattgaatatgaaaatgtataggctacactataatgggctgttatttatttttgaaaaacttgattagaaagaaatgttttgctatcatcattgactcgaattgaattctgtgggatttccttggaatcaaagtaagcaaagttttcttgtaatttcaggtggttttgctctaaagaaacaaatgctagatgatagaagattccccaaaatgcatcttaatctgcagcgccttctgcaggtaattcttaggccttgtattatttcaatggctggatatgtaagaacagtcatgagtgattctgaatagcataataatcggtgtattggtagccaaatgatgcttttaattctactgtctcaggtaattgcacatggagagcaagtatttccccgagtcaaagaaaaatctacatcgaaacgttggttttgcagtgaagacattgttgcccttgaagagttaattggacggttaaggagactaaaggaaaatgtaggattcatagccaatcgtgttactgctcttcaggccggtctagatagctggcaagccgagcaaatcaacagaaagctctattatctttcgttcctctcaataattttccttccattgtctgtcattacaggaggtattattagttctctacaagtgttttagttagtagaattctgttccatttcaagctgaggcttttgacaccagcccactttcttcgtttacttttttgcagtgtttggcatgaatgttggaggtgttccatggactggacagagagatcctagaattaaagatggttttcgtaatgtaatgatactctgtgtagctatgctatttcttgttcttctttgcttcattttcccatatctttattcccggatagctgcatggagtaggagtagggccatgaagaaaagttggtctctaaatagaagatcattcctcaaaagaaccattggtggtagcggtgtatctcaggaaagaggcggttaccttaggctttgattaacagttgaaaatttcatattttatcatggtatgttcattctcttctgttcctcatattgtcatatagttataatacaaatgtttatcatctctttctttactttcccaggaacttttccgaaatttcaacagattagtttgattaaacgaacgccagtggatggtaactcgttcaatggaaccgttgattttttccctctaaactagaacaccctttgtctgaatttgataaagcaatggggggttttaatttgaggtgagccaattctttcaccgaattcgtcctgaataagaatagctttgtaactttgtacagttcttaaattttgagttgtattctgtctcccaaatactagagtccagttgttaaagtgtaccatcaacatagcatactgaattcatttgtagtacaaatttgtatattttgaaagatcaacacaaagcataatgttttctttccttttctttttcattattattagatgaaacttcaacttcaacttcaaccccttaactaatgtatcttgtggactaacattgaagacttcagagaaatgtgcacacactattcatttcaaacgttccattaaaaggcatcaagttaaaagattaggatacaaaagataggcaaatttaaacaactaaatcaggggcaagcccgaccaccacacccgagtctcatctaaatgtaacgctcgttttgcagtattcaccgtataccccatctgcacgcagcaagaaagcccatagagcagagctttggcttcggcaactcggtaggaaaacctcaagagggaaaagagtgtccaataaaatagattaaaaaatatcatcctaaaagacatcatagatacaattagggtagtcaggccactaaacatagtcagcttggccaaagagtgtgcaacactattagccatcttaagacaaaatttaaaagagataatagtaaaattattttaatttttacttttatttttatattctttaagatatacttatttttgtagataattttgctattatattcgggttaatataaattatgtagtaagtgtatattgctcttacattttaatgaaatataatattagataatattttattaataaaaatatatatatattagagcatctccaatggtaaaaaattaagagatggttgcttaggtggacagatgaagtggcaaaatattgagatgatataccattggagggaaaataatgctattttaggaatatgtgtgaatgctatacagtagcattgatgttatcattattttttgagtaaattgcggcataaatacctaagtttaactttcagttgtaaataaatacctaagtttaatttttggtcggtaataatacctaaattatatttctagaactc

SEQ ID NO: 306387 - DNA, 2382 bp, Cannabis indica
tataaaaactaacaaaattctatttattaaatagaatgctacaatgaataatataatgttcaaacagggtatcaacaagatatagtctatagataagcatagaacagcaatcagtgtaagcatatatcagaaatagaggactttttatggtttattatagatgagggttgatatatattcattaaaaaagaaaacatacacagaacggagcgaaaatattgaagcagactctgaatcaatttcagcaagggatactgatgaagtcccaagtaataatataggtaaatcagatggcaattcttctaacaaggtcagcaaaacagccctcaattgctcgtgtgcctggaaaattttagtagtgacaaagaaacattcaattataataccacagaatcagcagcattacagaagaacaaaaataggtagaatgactatacaggattaaataataaaacagcaaaatgaagtatgcactcacagtctcccaccaaagatgaaactggggcaaataaaggatggacggtgttgttcttcttgcttcaccaaatatatgtaccaatgcctcctcaggagtctttgcactgggatcagaaagtagagatgatagacccagagaatgaacagggaacttctctagttcgtgcaaaattgcaggcccaagatgatcctgttaaactaaagcagtaagtaaatttagtttttggcaccaatggttacacatatcgacagcaagaagttccggaaatatttaccagtccagaaccttcactcccatacaacagaagccggggcctatagacaagaggaattgccgatccataggaaagtaaagagagcttagtcaattcagaagacattgcaagggggggaaaattatcaaatatagagttcatggctttaagcaaatgtctttgcaaacacggtttaactactgaagacaacggtctagattgaacagtggcacctctgtgagcagcaggagtaatggctgacatggcttcaacaaaatgacacttctcaaccctgactgaatcaacatctatgacatatttgtcatcacttgtataaacctgaggatacttttcacggaatgcacgaatggcagcttcagtgcaaagagccttcaaatcagcaccacaatatccaacacaactagctgcaagttctagtttcaactcatttgaaggaggatgctgccatttgcgggtatgtatatctaatatttccgcacgtgcctcacaaccaggcaaaggaaagttgaactcccgatcaaaacgaccaggacgacgcaaggctccatcaatagcatcaattcggtttgttgcaccaattaaaacaacttgtccacgagaatcaagaccatccatcagagcaagcaaagtagatacgatggaattgtgaatctgttcttgtttgctagacctcacaggagcaagtccatctatttcatcaaagaaaattatggaaggttgattcctttgtgcttcctcaaaaagtagcttcaattgtctttctgcctcaccaacccatttgcttaagacatcagcacccttacgcatataaaagctcaccttctgcccagcttttgatgcagcacaagccaatgccctagcaatcagcgtctttccagtgcctggggggccacacaacaataccccccttggtggggtgatatgataactggcaaagaaatcaggatataataaaggaaagaaaaccatttccttcaacgcatcaatatattctgaaagtccaccaatgtcttcaaaactcacactctcatcaacctgtaaaggttgaatatcagcccctccctttgaacttggccctgcagtttgaatcccagaagtcaaggtggccaaagcatcaccctgatgaccccaacctgaggctgcagcattcaatccccatgttgttgtcccatgcatgtcaagcccgccaaagagccaaggtggtccagatctactcccaccccgtccccatggaattgcagggccttgatccaactcatccacaagaagagagtcatcagattcttctgttcttgtaatccggtgacgcttatgaacccgtgatccacttttcctaacatccctgctaaccttagtccccattccttgacgtaaaacccttcgagtagatctagttctcggctttccttcttctagagacatacgacggactcgattcctgagatcataccgccttcttccatcttgttcttcttcaccctcttcatcatcaccatcttcctcgccatcatcaccatcttcctctccatcatcgccatcttcctctccatcatcatccccatcagcttcaacttcagcttcaacttcagcttcgccttcaccctcaccctcaccttcaccttcaccttca

SEQ ID NO: 306388 - DNA, 513 bp, Cannabis indica
agagaaaacagagaccaaactcagagaagctgggccagtagagagcacgatcatgggagccaaagtacgacaatagacataaacagatctggggtatggaaccactgacactagttcaaggcttcactgcacaaactggacagaaatcacttggctgaattgggtttcccagcacaggttttggtctttatttagattttggaactgggatacaacacagttccttatctatactgtaaatcttatgcaagtcggctctatttttattttttatttttattcttttgctaacacgattttttagtttgcaaggatgcctattttgtattctttatataatttttggttcatagttacaccatttctttgtatttataattattcatttaatatattttacctttttttcccttttaagtgttgtattgttttgtattcttcaccctaaatgaaatgtaaaaaagtgttattagaaaaaaaaaaaaaaagcatttttcattgtacttttctttt

SEQ ID NO: 306389 - DNA, 5378 bp, Cannabis indica
tttattttatttttttttaccaaaaacctcaccattttcggaactaggttagagtattattagcttagattaaataagtattttcttcgatttcacgcaattcccatgggttcaacctcgttcttcacaatctccatactacaataaagattcgtgcgcttgcgagttgataaatgtaaaacgtaccatttcggtctacaacagccgaccatagcggtcccaagggggactagccgactagtgttgtggtttgacacttggtcggccttggaagcttatgtggggggttggccaaccatagcagtcccaaggggggactagccgactagtgttgtagtttgacactaatgttgttttggtttgttttcaggccataatgaaactaagctcagctcgtgatggctcttggggatctttagatgcttttcaagagcgcgtgaagaccttggaggcttctctcatggtaaaggaaatagtcaattcttacttggaagccctcttgacaaagaggcaaaggatggtttcaggcttggagaccatgcttggcgctgggaatgtagagaacaccgcccaggctgccctcatctttgtgttgcaatctgaccttgatgatcatgagaataagttgcaggaggctcttgatgtccagcaaaccattaggtaagagtatgtcgacctgtcctctgaacttgcctatgagttccagttgtacaacactcgagttgtactgtcatacatggacaataaggctttcatggagagaatgttagcccgtggaaaggcactgttcaagagtcgaatggagatagaccaagttggtgcctatcgagaggggtcatcattgaggacacatgatgaggagttggctgacccacttgtggaggaggtggctggccaagacattgaccaccaggccggccaacatgctgatgatgggactagcctggactctatggatctcgatctcgcgacttgagattcagctcattctacccttgcacacatttagacagtatttttattagtagcattcaacattatgtttgtatcacataaacaatgttttcatgttccacctaacctgtggctttttatggcatgtggcctttcacctttaaaacattactcacttttgtgttccatgtggcatgtggcctttttgaaactttactttcatgtcctatgtggcctgtggcctttctaaaacactactttcatgtcctatgtggcttgtggcctttttagtacactactttactttcagccccaaggccttcatgttcgtatcttttgtcataagccctccgtttttgaacactactagtatttggacctgttgcttttttttatcatggattgtctgaccaaccaatcagtctttaatcttggttgtcttcttatggcctcgacaagtaagggttcggatttactttgccaagctgaagtatgcctggatgacttagaggcaggtttagtagcttatactaagctttaaaatttctttgtataagttctttgtgctagttcgatgcattttacagtatgggtgcccccaagtgaccatgcagataagtctcttagtcacttgctattcaccaagtttcacaaacattgcctgggttttgtcttacaagggtaccacagtacgcatgtggaactaaaagactaactttaagaagttaatccatgcgcaagtggttcattgagacaataaacaagaatataaatattattattattattcattaattggtctttgttgttgtgcaacttacatatattgaatctacaagcctacattacataaaattagcttctagatgtcaagtgaccacccctgctcaactagaaaagtagaggccactgttgaagaacaatgggagaccatgcctatgaggccatgggtgctagcactttttgtactctaatgttgagtaggttaaaccgctaccttggagtagagttctgtaagctagttactgatagtatttgcgaaggtgctcttcattccagtttcttagtaggaggatgagctttatgttcttgtcgtaccttcccaacttttaggctcccttactagctatctttgtaacctgataagggccttcctagttaggtttgaacactcctgctgctaaatctttagtcttcaggaacactcttcggagcaccaagtctactataaatttttttttactcttgatgtgtttgttgaagtgcattgctaccttttgctggtaggcttgcagctttaggttggcctattctcttctttcttctacttcgtcaagggactctgccagcaggttttttgtttgttggtcataggttgttctcctgtgagatgatggcactagctctacacgtaacatgacctcatagccataagctagagcaaatggaattttcccagtggccgtcttcttggtagtcctatgcgaccataggacctctgggagcagtttaggccagttgccttttgcttcctcaaggaacttcttcagggtgtccttaagggttttgttgacagcttctacctgtccatttgcttgaggatgggccacgacaaagaagcttttgatgatgtcatgcctgttgcagaaatcaatgaacatgtcactgttgaacagcttaccattgtctgacacaatcttttggggatgcccgaatcgacatattatgttcttcaatctgaatggcatgactttataataatacagtcctatatttttcacgaagcttatatgctcttaatttgggacatgcatttttatctggttataactagagtatgcatccatgaaactcattagttcatgtcctacttttgcatctaccaattggtcgatcctcaataatagaaagtagtctttagggcaagctttatttaattcagagaaatttatacaagttctccatgtcccattttgtttcagaacaagaactgggttagatatccacgagggataaaatgcttctcgtatgaagttattagtcaacagtttgtcaacctcttcttttagtgcattttgtctttcaggatctaaaggtcatcatttctggcattttgaaggataagctgggccaatgttgaggtgatgtcatatcacattcgggttaattccaaccatgtttgaatggctctaagcaaattgatcttggtttacctttagaaaagtgattagtggctattttagttcttcctccaaacccttcctaatgtttaaacatttagtaggattgtttggatctaaattcacctcttccaattcttcaataggcttgagttggttgttttcatcaggcattttaggatccagatcttccatctctttcttgttttcttctattaaaatcaccatcaattgatgattttcccttctatttttcaattccacactatagcactgacaagctaataattggtcgcctttaacaatccctactccataattggtgtggaatttcagagacaaatgtttaattgagcttatttcccccattcctgttaaggttgggcgacctattagtatgttgtaagccaaagggatatcgacaactatacattcttgcatttgagttgtgggcattggtggttctcccatggtgaatgggagatcgattctgcctaagctcgcgacactatcgcctgtgaacctgcataggttaaccatgaatagtttccaccttgcttcctctaagcccatcttctttaaagtctctttgtaaagaatattgatggaactcctattatctatgagaaccctctttatcctcttatgagtgagttgcaccattattactagaggatctgtgtgatgaaatcgtaccatgcaatgcatctttatcagtaaagatgatgggaggttcatcagatttgcctctttttagaggttctggagtgaaggatgatttctcgtttttcacttcatttatataccctttttgtgcattgttgatgtttcctgtgaggtgtggccctccagaattgaccaagatatcctttcccttaatggggggaggttttaatctttgattattcaggttattgggtagattctgttcattttcttggggcctcacatactgcctcaagtaaccccgcgagatgagattttcaatctcgtattatagctaaaggcattcttaagtggtatgcccaatgtctttatgaaaacggaaatatttattaggatctcacttttttcttgcatgtctcattggatctggtctgtgaaatgcgacccagttttcattggcgatatagatatttttgcgagttttattcaactccgtatacacttagtatattggaacatatttgtcatacttcttttgtttctttttatcctttaatgagtctcttgactcatcctttctcttagcatttgagccagtaggatttgaatttttggctttggttatcacagtactcgttgctgtagtgcttgtgctggatttctctccttagccagaatttagtagttttatttcattacgttcttcttccttctgcacaaaaatgtatgctctttcattgaactcgttaatgtttctaacatgacaaccttgcaaatcatcccataaatctcccgttgtagttgacaagtcagttattattccagcttgaagagctgttaactgaatactaacattcaaattcctaactttggctgcggccatagtgaaatggcttaagtatgcttttacggattctcttggttgcttaacattggttcgcgaagatgttttcggtcttcaatctcttacagcttggaattactttttgaagtcctttgataattgctccctagaagttatggaatggttggtaaatttgtcaaaccaactacttgcagcttctgttagggaagttggcaataatatgcatcgcaagttatttgaaatattacttgctcgcattatggtattgaagttgttcaagtgagccacatgattagttgtaccatcattaggggtgttcatcaaaccgcccaaaccgctcaaaccgcccgcaccgcaccgcaccgtaaaaaaaatgtggtttgaaattctttgcggtgcggtcgcggtttgaatttttcctaaattgcgctgtaataccctagatttaagaaatggattaggaaaaccctgactagataattatgtataattgaggaaattaaagcggcgcttgattatcggtccagtactaacccttcctttagataaggaaaagtttgttgtttattgtgatgcctcgagacagggtctcggctgtgtgcttatgcaagctggaaaggtaataacctatgcttctcggtagttaagggagtacgagcatgttggaaattattttaccaggatcttagatctactcaaaagtatgttgatta

SEQ ID NO: 306390 - DNA, 3050 bp, Cannabis indica
aataaaaattttattattaataattattttattattttttagccactaagaaacttctacttctaggttatttggtcaactttaagtacctcaaaatacctcaatatttctaaaattaacttatcctaataatcccaacaatatttttaactaataacgttgtgacatttttggcctccaatcggatctccaggatcgccgaacttgaaaaatatttttatttcacaaataacttatattatatccacatatttcaaataaatctccgcaattatcaaattctgcttattcatccacttatggaaaaatttacaatttatgttaaattaggttagtaggatcataatcctactcattactacctaattaatccataatatataataaatcttaattattcataattaagtttctgggatattacagaattagttgacgatccttctcgatatacttggacttacatgttacatgctaaatcagatgctcctgctgtcatttaatttttttgtactcttatcagcatacaacaccatctcaacataaagtatgttcattcagacaatgcaaagaaactaaatccaacaatttgttttttgcacaaaaaggtatcatccaacacaattcttgtgttggtagaccccaacaaagctttgttgtggagtgcaaacaccagcacctctttaatgtagctcgatcgctggccatacaatccaatctgccattagtctactcgagctacatgatcaaaacagtagcttatttgctcaacataacaccatctattctattcaaagatgagacttcatgcaccttgttgtacaaaaaagcctcaaggtatgaccatcttagaaattatggttgtcttacttatgcatcaaacatacataatgcacacaaattttccctaagatcaagggcatgtaaagtcactagctatcctaaaaaatatgaaagcatatacattgctggacatttaaagaaaccaaatatttcattccggggatgtaatttttaatgaaaatgttttctctctcaaaaaacaagatacaaaacattaatgttatcagtgtttccagcaagggacacatcgacgtcaggtcagcatttaaagtccatcagtgggcccaaagaaaataacttgggtcaagtccaagtcagatatgaccttccaggaattattttagctccataattagacaagcttctaccaaggatagcccgcacccggaagcagttctaccaccgtgatcccagggggccaaataacatgttcttagaagactagtctggtttccttttttatccaagcgcatagattaaggaatttatttttccttaaatctcggatagaagatcgtatcaagttaaaaagaaaaactacctaaaatgaagatcaatcaattaattcataattaattgatcataggacatagtattgataacttaatcgtatcctatatacctagttagcatgtcgaccccttcgtgagttaggcctcaagaagataacccaatcttatgtattttcatgtaaactccccattagagggaaagaaaaactaagtataattctcataatactataaatactcaacaaacccttcagattaggagttgaattcttttacaatatttactcatgcaaaaacaaagaacatgtactcatcttattcccaaaggctcttctagccaaaactacataataatatcgacttgtggactaagacttgttaacgtcccaaccacgtaaaaactttgtgtgtgttcttatttctttttctaaatcatttgttcctttagctctaatttattaaaattggttttctgaaaatccgataaatattttagtgctttcactgagagttaaaggaagtagtgataccatctgaagattacgttcaacaaccatggtagtcacccaaactaaatgtagtcttcactttactggtcctagtactaaggcaggggacacaaaagatctgaatgaagtgactagtcatcacaagggtgaaggccgaaatcgagacgatcctataattaaagatggagaatcaagagagaacatttatggtgatgttgaagatgatccccaggacacacctaaagatgatcatcatcaagacaaggctgtggtggtgctagaggaaagaataaactcaacgagtcagatcccgtggttattatatatggccagaaaggttcaattaattgaaaataagttatctcgacaaaatcaatttaatgtgaaactgctcaagaaaatgacgagaatataagctgtgatgatagccctgaccaaaggaaaccaaactgcacaaactactccaacaaatgatgcttttaagaaggctgatcctaaagatcctggaacctcaaatcctcgtaaggataaaggaaaagggaaaataggtgaaacttcaaagaaggcttctcagaccaaacaacgaaagaaatctaaaattaccaaccaacctccacagaaaaagaaaggaaaccatgcttcagggcaaggtaactagactaattttggaggcagagttgcacaatgatgctaatagtcaaagtgatgatgtcgatgaaatacattcagtttcaggtagtgacaacagaagtctctccataaacgatcttggaaggagattaaatgaaaagaaataaagagctagaacaaaaaaagctagacctcgcgggataatttgaggaatcatatcattgatcaaatctaggaaacagagtcttcaagtgataaaagtaaacgcttagaatgcaaagtcaaagagttaataaagctcatagagaaaatctccaaaagcaaaacagattgaatcgtgtccgattcataagaagaagacacaaaatcctgtgtgaaaagaattatagatgcaccgcttctggagcgcttcagaatgtcccaaatgaaattgtataaaggaaatatggacctcagggacctaaggctattaaatttatttttattaaaatatattactaaaaaataaaagtatttaaaataaattatttttattaaatacataatattttttttt

SEQ ID NO: 306391 - DNA, 1767 bp, Cannabis indica
gtactatggtggcttcacgatcaccttccaaagaggattatcaattatgggcttctcgttgttgcaagagaattcttgtttccaggttcccaagcccttggacattacaaataaggcaatcattgctctcggcgacccggacccacctgagttcgccgcttccaatttcatcgcaaggtcaaatcagaaacaactgaaatatcctttgcatcatccttcttccctgccatagtagagtccatcgagagtgccccattagaactatttccccttttattcttgcttcttttagggaccaccttcctccttttggattgtccttcaatctttttaagagaatcacagctattttcgtagtttatagggacatccaagagattcccagtatcaaatagaggtgtgtcaatcaatgacccctgtagaaaagaattgggcaggctagcagataaattatgctcataattagagatattcagcccctcatctctccaagaaccacttcttttagcagtacagagcctctcactcatcccttccataccaaatcgaccatcaggattgaaattccccttcttaacctgtttctcaacagttagcatacaagagggattggtcaaatcaattgccttacccttattcacggattcgagtcccgaaatcgtaggatttacaacaaagttcaccatattccttggaagcaattcagggttatcaatagaagaggagctacctgctgtaatcttctccggattaatggacaaaagatcaaattgggaggctcttttcacaggaaaaccagggggagtggctgtctgaactcgacaataggacccctaagatggtgaagcagataaacctcttctctcgtcaactttcaaccaagcaccatatcccagcagtgcgttccccaatccatcctcaatcaatttaattggctctgcacaaactcgagtatcatgtcccacaaaaccacatttaaaacacataaagggtagacgatcatacctgaatgggagccaaatcttccgaccctcgctcggaaaaagaaagcctgggcaaattggatcgaaaatatcgcaccaaagcttaaaggtgaaaaattccttagtcacgatcttggttacatcagctttttgaacttcaataacttcccctgcgaatcccgccagtcgctccaaatttccctgagttatcgaacgggtaggtaattgaaggattcgcccactgagagggaatcgagtaagaactttatcccaaataagagggataccttccagcctttccacaatcagaagtccattgttaagaaactaagggttcttggtcaaaatcctatccaaatcttgagaagatttgaaggagaagaccaagaaacttgattctttagtggtatgtttaatctctactccccaatccttttcggcaattccccaaacacgtcccataatcgttttcaatagagaacgactaatcggacggttggagcaaaatctccccatcgcacagagtgaggccacttcagtccctccggccgaatcaatttcccatccttcttcatctaaaactgttaggttattcgttttagcaagcaggtcatccatggaggtatcaggcttttccagtatagagaaggctcttctcgagagagagagagcatgaactttcttggagcgatttgttttttcttatgtattataaattagtttttatgactatagattagcggaagcgtaccagagtccatagaatcgattttgtaataacctt

SEQ ID NO: 306392 - DNA, 1088 bp, Cannabis indica
ataaaagtataatttttttttaaaatttaatatttttataaaaactcataaaatatatatatatatatagagagagagagagagaatatgtgggctcatttttggctaaaatattttcacacattatttttgtccaaatggattttagtttagaaaaacaaaaatatatttttaaattttgagtaaaaaaattgagagaagaagaaggagaacttacttaaaaagcagacaaataataccacttggcatgagcaggaacattgatgggtgggagagttggaagaagctgtaaagaaacaatcttggtttgtttatcaactccaagaataacagcagccgataagcaaaacacaaaccccaaaaccctaagaagcccttcacaacctcctgctcccctcttgttagccaccttaacttctctccctacttctactccctcatacatattacttttgccctccattataaacttaatttccccagaaacaatcagattattttctctctctactctcccaaacaactacacttaaactgacctcctggcctttagattgatggtatatcatatggaatggacatatatatttatatatatataaatatatacagagatagatagatagatagatagataggtgtaggagtagtgtgaaagggcgtattgctactattattattatatgacacaaaagtttaacttattaattaatgtaggccgcctgagatggtgggtatgtatggaaggggtccactcctatccacacatatatacgttgcgcttggcgctggagtaactaataattcttgggtattgttattagccatgagtggtatctttatatgtcgttttacgattggtttagaatagttttatttggactaatagcaatattgacacataagagaatactatacaccattaatgctccttaacatttctcataattcttataccctcccatcataattaattaccgttttatttggctattatcaattaattaatatgtaagaatagggattattttataaatacttaaacaattaaaaatgtacaattttatgaaatttaattttttttatat

SEQ ID NO: 306393 - DNA, 1107 bp, Cannabis indica
cccatcacgaaagaactccacaattaagcgtgcttgactttgagtaatttcaggatgagtgacctcctgggaagttttcccaggatgtgtgcgagtgaggataaagcacgctggaaacactcgtgttggttcgtagggtcagtcatcagtccaggaagcagccaaggtgatgtactcgtgtataagagccattatttcgtaggtgtaaggacctaattgaggcttgaagcggggacgttacagttcttcccatctctttttggttagatccaatccctctcatccttgtgatgattaacccaaatctcccttctgcctctctactccttgcaccaaacatctcagatcatgtttgagagcttcaattgtgaacagaggattgcaaggatgtctatttccaagtggggagcctcaactcccctatttgataaatcccaagccctcctagctactctcatttggtgctcagcaatcaaaattatttctctcagctgtattgagactgattacttgcagttagtcactaagatttagagcacttggaaggacaactcggctttgtctaactttattcaactaattaattcgaggatccctatctcttcttcctaatacatctctctaccacatctcaagaagtattaatgaagcagcccaccacaacgccagggatgcattaagacatgatttgaattcggtttggagaatatagcttctcctctttgttttgtacgtaactgtatttgtctttatttcctctgatacagttacttaaaaaaaagttaatttttgtagcgctataatattttatttgatggagcaatatttttcattattatctttcactcattgctaaataatttaactactagttattttaagagcattactataataaacattagtatgggccaaataccactataaagtaatactttaaaaatgattaacagtatttaatagtattagagctcgtttggaatatcgtattaggttgtattgtattgtattgtattgtattgtattatattgaattgtattttatgtaatatttttacgtaaaactatatgtggtattaacttttatagacacctaaatatataata

SEQ ID NO: 306394 - DNA, 1072 bp, Cannabis indica
aatagaagagtagaagagaaaaaacaggattttaatcttatcaacttctattctattcttgatgatgagaaatgaaataaaaacttcctccctcttatttttttttttttttttgtgaatactttccgtttttggattgagaattgagaattgagatttgttgttgcttcaagcttttatttcttttttcttaatttttctaatttttttttttttttgtttggtggaggatgtaataatatgagtcctttcaaggatttaacattcgtttcttgagaggaccgtttggatccgataaggaagaaaataaaaataaaaatttattaaaaatatttaaaaacaattaaatttgaaacatatgagctgggactaacataagtggaacacttggttataacctgacaagtagagaggtgtgtgcattggacaaaagtggcgttttatgtgattagcactcatattttcagcaaattacaagtttggtattctaaatttaaatttatactgaaattccttttctacccttttgaagaaaatgtaataaatctcttttattttattattacagcctttgcatttttcatgatgatagagaaacaaacaaaggacaaaattataataaatatttgttgtatgttatgaattggcttaaatttatttgaatccaacaaaaccctccttaaaattattttgcttgtaattgcattgagtggtacaacgttttgccaccctagctacagatacgcaatttatattgttttgttttaagggaaaaaaaagttgttcatatggttaatgctgtgtaatctaacttcaacactcattaagtcaaaggggatatatgcatagcaaagtgataattaaatagacattaagttcattctgacctatttctcaaaacatgttagtaaattaattaatgatttaatctttaaacattgaatgtatatatttataggagtatacacaaagtcatttaatctaattagaatcgactgattcaatagaatcgaatattcaattataatttttttttgaggtaaaatggtgacattttattagcaaattgaat

SEQ ID NO: 306395 - DNA, 3655 bp, Cannabis indica
ttagttgtcttgaaattataactatacctgtctcccttaacaatcaatactggctttgtgtccccctcaataacgggggtttcgcacgtttatggaaaaaagttcgcatagaaagaaactaattaatattaaataatagtgaaagttatataccataaaaaattggcattatttcaccacagcagaaaaactcattccaatcttgaaaatctttaatgcctatattgacaaagtagggaaaatgtacagggagaattgttgttgctagagctatggacattcaattacagttcagcaaataaataaataagacgctctattatctcatcaaaaagaaattgttgctgctagagctatggacattcacttacagttcagaaagaaagatagaaaaaagaaaagaagacattctatctcatcaaaaaattggccagcaagtctcacctcccttgaaaatttccttacactgccaaatatatatcaatatttattaatattcaaaatcttcactgactatcaaattagctctagtctgcagactcatgtcctctggatcatgcattattgccctttctgcctttcccggatctgtaagtaaaaaataacaactaatatatgcataggtaggtagagaatgaaaccaaatattattcctcgaacaagtgaagaaacaccaattacaaaacttcaaaattcaaatggcatcagagaagaaaattaaacatgtgacataaagctattgatacgcttacttatcgtcgccactatcacaatggtaagatttccagtactcctcttcagcctcacctgtatagagcagagcaagggaggctttgtgtaattagtataaggggtatgtggtttgcattttaatattggagataaaatgataataaggagtcaatgaaataattacttaaaaccccgccagaatgagagaagtattaaaattgtggcttaccagtaactgcttctatgaacataataaagttttttgaaataacaccaccttcgacaaatgctgcagttgcacgggctcttatagctgattctggttcttgaaaacatatgtaacccgaatctgctccagaatcaaggtcaacatactgcaaggaaaagattccagatgaaggatagttgagccgattaataagcaataactcggataaatatatgtatatataaatttccaaaagactgcagctatccactacagttcacttatccaatcacctacataataatatcaagtgaacacagttgcaaattgtgccatggcaccaaggaaatcttagtgaccgtaacaaagcttggatcttaatccaattcagataatagacatgcaagtgaagtgatatacggtttagaaagacgcaagctaactaaaaacagaacgtatattcttttcctaacacataaaatattttcatagagaaataaaggagtttaattaagttgtggaaacaaccttaacagtgccaaatctttgaaaggtgctcttaacttccgcacacaggagagaatcattttctttttgggcagcagcttgtcttgttttttcatcaacagagcttttttgttcactttgatctgtactttcgcatgttttttgtccgttactcactccatctaactttctctccaattttaatgcaagaactaaacctttctggtacctgaattcattacattagaaatgagtcaggctgcaagcacatggtgatattgggtccaaaaaataaaaaaccactattgaagccaaagacaaactaacattagtttcgttccaccatccttcacgtcgccagcactcaatgaattagactttagagcatcactggttaatgattctctctcagaatcaaactcttttctgaatcaaaagccatgttagaataactaaaagagttagtaagaagacaatagaaaaagtacacttttgaaaaactaaagatggttaataatgcctgcatcaacagattgactgtatccaactgaagaaatatttgtgaaagagcaatttaactgaattacatgttgagtagaaggactatcatcagcagtaagcacaaatattactgagaaatcgactatccacgttaaagatagatttaaaattattataagtttttattttattttgacttactttggctttaactttaactcggtaccagcataaatcaaagtttgcttcagaacattatcagcatctccagctattgagaattcaattaatgcagtgccacaaaagcattttttgtcagctacatgactaggtagcctcacactattaacctatatatgaaagagaaaccaaatatcccacaaataagaaaaaagaaacagaaaccagataagaataatcaataatcacaaatatacaactacattttaccaagaaaaaaaaggtaccaccttgccataattagaaaagaaaacttccaaatcttcaatcttgacatcataccccaaaggtgaggctgcaatggttcttgtatctacttgctttataacctcttcaggtttattaagctctctagctcgaccaacctcttgccctttacgaacccaaaataacaaaaacagaacgagtcaaactaaacagactaacatacacatctatagacccaaaaatctctaagtagccaaagtacaagttgtgaaaatcccaccatcatcagaaactttcaagcaattggagtttcgcaaaattttagccacggatttcacaattcgatcaggaacatcatcgcgcttagtgttacgactcaaaccaagcaaacttctcatacgagagaatgtacatatcagagccaagctgaccacttaaccctcgtatagtcaaagatcatgaaacaaccacaaagcaatatttccgaaaacataatatacacacattatcataagcaaatatatacacagacggtaatcgagtaatcgaaatataaggatacagccattagggctttgagaaacagatttcctgagaaaatcgtctctaggaagattgctatcgctaaagtaaaactcaacctgaaaacaaaggtattttcatatatggagtagattataatataaagaattaaaatcatatttacaatagagattaaattttagtacctgacgaagaactttgttcttagtgtcttcgtcccatgaagccattttcattgaagcggaccttcttctcttcttttctttcctataataaatctctctcttttgccgctctgagggttttatttatttatttattcagttagaagtctgagggttttatgtgacactgaatattaaattaaattaaagtattaatatataaatgtaatatacatatcaccaaatcagagtggcgcagcggaagcgtggtgggcccataacccacaggtcccaggatcgaaacctggctctgatatatagagaaaggcttcccaacactttttttttcatgtcgttttggacttaccctaacaaatatgaacataaaacgacatgccgtttcacttacagccacagaaaacgccgttagatttcaagttaaattctccgttagtcggtagaaaaactcgtgagtggagcgtcacatcacgtgtcatttttgaatatcagaatttttattaaacggtatttttttttttttttgaaaacatta

SEQ ID NO: 306396 - DNA, 2633 bp, Cannabis indica
gttaacgctaaatggaaccaaccacaagcagtgggttgaatccctcatgctaaatttgactcttatgagagtggacttaacattgagaataggtgcaccgcttgaactcgctgatgatgccactgaaaaggaaatcatcgtttgacttttatgtccagatagaagctatggattccgtatctatgattagcgctcccactcaattgaactaccatgtccttaatccatatgtcacgagaagatccattggtcgacattaacgaatagattgaagaacataaataatgcaactgagctagaacctaatcatctcaggattgagatcatttgatctaagatcaactaggtgatattgaactgaatagatattacggtaagtttattatatcttatccaagttcaatatcggtcccttccgatgcatactcgatacattcaacccaagcttactttaaccaatgtcctcgaaaggacatagccttatccaaggtgcaagtaaactacattgtagattatcctatcagttaaatcttgtgtactgataaattataataatacatttaatcacacaatcttgatcacttttcactgtgttgacaacacaataaacaagaatatcaatgtgataagaatttggataaatttataaatcaaataaataaataaatgatcacatgaactaataacacattaaataagtaatacaaataaatttgtttccttattgataattgaatataaaagattacattgaaatagagttctatatagggcataaagcccaacacattatacccttacttggcttctaattaaactctagtgttaggggtaatttggtcataatcaatcacccgaaacatcccgacaacaccaatatccaactaaactttccagtttaaccaaatctcatactattagcatcgtgatatctttggccaatcaatcgagtttccacgattgtcaaatctgaaaatatttttatttcataaatggcatatacaatgcctatatattttattaaaatttccgtaattgataaaatgcacttattattcattcttgtaataatccctaatttcaaataattagcttaataaaattataatcttattgattatgccctaaatattcatgtaattccatatttaataaaatatgcataattatacataatcacatattaaggatattacaatatatgtctcgctgagttatcaagaacaagaagtagcagtcgaatccaaaccatctgtccagttctacacgtgggtctggtggtaaacccatctaggcttagtgaatgggcccccagattgaataggccgatgtaaatatccacctgttacctatccagaaatgccaataacaaaagtcatctaaggttttttccaattttaagtccatgttgaccaaataacaaaccatgttggccaaaatttttagttcatgtttgactgaataacaaaccaatcaccaagtgattgggctcattgaattttcaaatttattttaatgggatatttgcggtaataatactcaattctttttaattgttgcaatttattttcttataggttttatatgtttatttgtagtttttaattttttttttttattgtttaggtgtttgatgtctgattaatttcttagttggttgtattagataatcggttttcgtgtttaattgttgctttgttgttttaagtaattgaagtttaagttttttctttcttttgttaatttaggaaacttgtttcactatgcgaaaattttagctagctgataaatgtaattgttgtgagttattccaacctctaactctagtgacgccgacagcttcgacgactttttagtgactttttttggtaattctgacgacttctctggtatcgtcaacaattcaggtgactttttcggtcttgacgccaactctggcgacttttttagtgccggtggcagctccattgactttttcgacaatcactgtatattgatttgtttctaaattttttttttagaaaaaataagggaatttaatgtttttttttatagtaatacaagtgacatgtcttatatctgttaagttttttttttttatcttaaatatagtattttttcttagtaagttttatcatatttatgtaaaatatattttctttcaccatatttatgtaaatagtctttgggggtaattattttttaatttaggtatctttcaatatctacactaggggtgggcatccgatccaatccaacattttttccctcatctgatccaatccaattagtaattggatttggaaaataatcatccgatccaattcaattagacctcaaaattcaatccaatccaatccaattactaggggtgttcattggatcacatccaatggatttggacccatccgatccaatccaattatttattggatattggatttttccatccgatccaatccaattgaattgagtcatccgatccgatccgatccaatggatgtattggattggatcggttccatccattggatgctttaactggttttttattagattggattggatccatccaatgaatcccatggatgaatccaatccattttaaccactatttaggctaatttcattaa

SEQ ID NO: 306397 - DNA, 1367 bp, Cannabis indica
tttaggacttattcacgtcggtcaatgctatgaatagtagcgttgaccgacgtgagtagtgtaattggtagtagtgcttaagtggtcaaagtaacaataatctaccttgctttgatcacttgtaacaaaggtagagaatgctcagcagaagaactttttgtcaatagtttaaaaagttataagatcagcagtgattacattcaataggtctagactgtgagtgatacacttagttagcaaatccgcaggattgtgagcactgctaattttcttcacgagaacctctttgcttgccacaacctctctaatgaaatggagttttatatcaatgtgttttgatctctcattaaatataaattttctcatgaaaagtaatgccctttgggtatcacaatacacagcgatatactttgagttaaaccccaatacattggtgaatcctttcaaccaaatgacttccttgatggcttttatgggtgccatatattttgtctctgaggtggacagcgaaacaatctttttgagattggatttctagctaacataccctccaagaacagtaaacgtataacttgttaaagatattttggtgtcaatgttgtcggcataatctgtgtctacaaaaccagattcttcctcctgtgtagatgacttatttccaaaagtgagtcttatgtcaagtgaacctttgacatacctcatgatccgttttagagcagaccagtgttctcgaccaagatcaacactaaatctactaaatacctcagtgcataagctaggtcaggcctggtgtaaaccgttgcatacactaggcttccaacaccattagcatacgatatagtatttatgtaggctttctcatcatttgttgtagatggttgatccttggtcagtttgaagtgaggttgaagaggtgtttgaattggtttgaaagtaatcaatccatacttttgaaggtactcgatctgagacaaggtaatggttccagcctttgcctttgaatgtcagtgcccagaattttcttagcatgccccaagatctttcatgtcaatttctgtactgagttttaactttatattatcaatatttgacctgttcttgcgaacaatcaatatatcatctacaggaaataacaaatatagatgattatttaagtaaacacaagggtataggcataccccaatttctatgtagtttcatcgaacctcaagttccattgtctaggagccactacagtaaaattggattttctcgattgtttaatacagtcgggtaaagtattccctatcggtctctaagactgtcgggaaaactggatgaaataagcaacgatgcaaaccgttgggaaatttttttcccaactgtgc

SEQ ID NO: 306398 - DNA, 2297 bp, Cannabis indica
tcaagatctcattggaactagtgccacagctgttatattttcctggaaagaactcgtactccattaatactcctccactagctggatttacctttctgtgaacagccacaatctccaatccctataatatattttaacacataatcagaacagtgcaaatttatataccaaggtttatcgacaatcacagttataataaacatttaatatgtgtataaactcgtaatactaacatacctcatcatcatgacttgtacttctcactcctctggttcccaaaccaagggttagttctccaatattctcacaattgaatctggtcttctgtacaccaaccataagaagaataaggaaaaaaacatatcaaaacgtttaaaaaaaatacagaaatcaatcaatgtaacagtgtatacattgaaactataaaatgcaaatatttatttttatttgggagtcgagccttatttattgaggaataagaaccttagggcaaaaagcagaacggtcatggtgtggcgaagagtggatgaatggtgagtgcatttttggaattgaagagagctctttggagttctcatgatgagggttatgatcatacacatcggcacccacaggaaacatctgatccggactcggacctaggcttccattagtactattaaccatcccataacaatgatgatacgaatgatattgaagatgagggttagggtactgagggcgatgagggtcagcaaaacggtattgccccaatatcccagctggggaagaagacccaccatcgcaactagaactcatcaaaccaggatgagcagccgccccgtgtcccggttgatgatgatgaacaacggcgctaagaaacctagcagaacccacaccgcagctccctcctgcgccgtactgcaccggaacactgtgaagtggttcagtcatgggcgcgatgaggggattttgaaccatctggaactcatggaaacagttgtggtcaacaactgcagccggaactgggaagttgagagcccccgccgtcgccgtcggggtccctggatggagtatttcattggatttcttccattcttgtagtctgaggcgctcgagttgagctaccccaagtcctctttgaggttgctttttagcgtttgatggacccttgttgctgggttttcttcctcggccgctactagtcttggctcctcctcctcctcctccaacttcacgcttagcttcttgagacccattaaagctaggcatagtccttagttcctgatgagaggggcttatctcgtctgtagccataacactgaaccgtagtgaggtagacatgtatatatatatatatatatgtttgtttatgtattggccggtcaaagaaatgagtaagaatatataagatgagttaggaggatttgtttgaagattttaagatggtcttctgggaatatatatatatatatagctgtatgtatatatgatgtgtttaaacatagccaaaaactagcagtgtgcgcagtatattgactaaaaagaatatttggtcctttggtttttatatatgtgtttgtgcttcgtttcctgtctattttaataactccaagcctataccaattttcctgtctttatttccaaaaacgatttaaatctaaatatgtacgtattaatttatggtttttaaacaaaattaatgtacccaatacataaatccttttgatatatccacaaacaaattaggttagttactcagcaatgcacgcgctaaacgcgtgtgatgtatcgatgtatacataatatattggatgtgtatgtatatgtatatatgtatggtgggtatacatagtatattatatgtatatggtgcccacagaaaatgtcgatcgagaacatggcatgcatctgagtactatactagtgcacacagcggcaacaggtgccagaagagtagcgaaagaagggcctcatggtacaactagctttcagttttggcaaatttgtagcaataaaaagaagctataagttaaattatatatatttttttattttgtaagatcagaagaagaactatctacttttgcctttttgatgcaatatgtctatttagttgtgtacacattgtattataataattaatgaacgatcatgatggacattggatctgatgatcatatttatatagatcatcatggctctactgattgatcatgatagtgatcagatggattgatatatatgtatttgaatgtgactaacacatagttaattttatgcatgggatatggaatatatatatatatggccgtgtt

SEQ ID NO: 306399 - DNA, 1460 bp, Cannabis indica
tttcttttttaatgtttttatactattattttttagtttgattggttagataatgtcatatttagtggtatttactttttatgccatatttatcataaccttaataatttttctcatatttttgaaaatagccctaatttttagaaaatatcgctagctaattataaagcaacatgtctagaaatactaaacaccactaatatccaatagcaatgctctattaattaacataattttttagttggtgtgtatcatatattcaaattcaaatatgtgtgatgtgatattcatttgtgaatcacttctcaattatacaatattgaacgattaagctatcaaaaaaaaattattcaatgattaaagagataagaacactttaaaattttgaggtgtttgagacacttttcaactctctatcgaagaacttttattattttattttttgaatccgtatccaaaaccctttcattacaatgatgaatatacttttcacttatatcaatagtaataatatatgtacaccaatactactactaggttgaggttcgggtctggtgcctgggttcgagatttgggatttggagtcgagtctgggtctagggtttaagttcggagacagggtccgactacgggtttaggtccgagtcaagggtcgagtttgggatttggagttcaggatcaggtcaagattgggtctcgggtccaggtttgggatttggggtcggccaagccggcttcaagatgtaggttccaagttctgggtctaggtattggtcgtggttcagggctgaggttcgggtcttgggtcaggtctgagttttaggccagggtccatatctaggtttgaggctatggtttgagtctagggtcgggtccaaggttcaaagttaagtctaggtctggagccgagttcaggtctgagtctgggatttggggttcggagtttgggtctgagtccaaggtctagggctggattcgaggtcatggttgggtctaatgtctaagtctggggtctggggctaggtctaggtccagggtccaagttcgaaagccaagtccagcatccagggtccggggctgagtctagcgtccgagtttgggttctgggctcaaggaatcccatattttttctaaatattataatacaagttaatacagatcaattgttatgtattaggtaatacgatttacattgttttaaattttatagtcgtaataattaatacaatataagtgttgtttgttgtttaatataatctatatatgcaaaaggatagatggaaagtgtaaaataaaattcattgattaaaattttaaatatgtggtgtatgaggaaatcagattatttgtattgaatgaattaagcattctagacttattaattctccaaatatattgtcatccattttcataatacgaaagaggcaaacaagcctaataatgaaatataccaagaatta

SEQ ID NO: 306400 - DNA, 1822 bp, Cannabis indica
atgtggtattaacttttatggacacttaaatatataatattttagtataaattaaaatttaacatagtattatataaaaatatgatatataatccaattcaatataatacaatacaatacaatacgacctaatacgacgttccaaacgagccattaaagaattagtatcttccatcgcaactctttggcaataagatcttgaccccataaaatgttacaccaaacaaagaagcaataaccaccaagttttgcgtctaaaagggagttgtttacaaagtaatattcttttaaaacacaattaagcatagagtgaggctgatcaataattttccaccttgttttacaagaagggtttgattgaatttagcaagatccttaaaaaccatgccacccttctgtttcggtttacaaattttatcccaactcccccaagtcacttttgctttttggtttttggtaaaagaatcctactaaaattgagctatcattgcgtggatatccttaatcgtctttttcactaattgaaaacaactcatcacataacaggagattgcttggataacaacctttagaagaattttcctaccagcttgggaaaatagactagccttccacaacctttcaatttatcctgaattttcgcttcgataaatcatttgtatagatttttgtaatattataatattctcaaaatgaaaaaaaatataatttgtcctataatacgattctctaaaaaattatactagacaaaattggtaaatacatgaataatctcattctctaaacatagaatcacaaaagaccattgttaacataatttaattacaaagttacatatttacaatatatatgcccaattatgaaattaacattaggcttggaaagccaaactacacaattctggaattacattgaaaacaatatgtacagtttcaaagatgcaacaatatattattaattaaggtccaccatgcactagttatctctcgagtatagccaagttcattataatttcctcaatactactccaataccacctcacaaattagttattgctgactaaattacaaaatgtatataacaaacatatcttagatcaagagtacatagtcaaaataggataaaaaaatctactaaagagtaaacaacaataaacaataataatatctatgttagacccgatattattattaattacatgtcattatttgtcatattataagcttgacaccaaatagcgattagcgacactctttcaaaacttgtaaaattatcataaaataataatagacgcttccatcagctctgtagaagatttaacatttgagaaattggccatgtgcttaaaagatgtaatttcatggcgcataacattgcaaaaatgggcaagggaggccggggtcacaagaattactcagtgtagtgaggtggatcatgaggtgctgaatgactataccaagtggaagaagcatgctggctaaggagtttttggaagacttgttttctatctcgatgtgctagtttcatttgtttagtttcagttattgtagttttctttcccttggttttaatgcttaggccttcactgctgtttttagtttgctctttgctatgtagacattgttttattttgatatttaatgcactggtttcgggtgtcttaacaccctcttctttatcaaaaaaaaaaaaaacaaaaaatagacgcatcattacataggagtgttcactaagtatctcaattcaatcagcacgattcaatccaattcaatctgcaaaatgcggatatctgcactttcgcagattggattgaattgaaaaa

SEQ ID NO: 306401 - DNA, 1568 bp, Cannabis indica
catttaatcctttacatgcaatctttaacttttctgtacaattattctttgtaaattatcatgagaatggagaaaattactttcatttctagccatccatagctgatacaccaatgcagtaatactgctaaaaatacttcctcctaaagtgtgttattttttcccttccaatctgtcaaaccagatcagctaggtgactagaggatgttctcatagcaggcactgttttacctgctatagacaatcataggagaaggagcacttaaaaaataaatgataaattgtttcatcccatatagtaaaactgacagcaagtgtagagataatgttgaaaatcgaaacaatctttccttagtcttcaatctatcttgaattgtaagccaaaatataaagctatacttcagagtatttaatcttctccacacttttttactccaattaactcgaagcggacaaagcaatacctgtatccttccgctattttatacttgctttgagtgaaggaagatgaatttataagtgttctaagtatgtctttgattgttactatcttccttcaatactaagtactttgtttggggggtcgtgtaactccaccaatcaacacgacttcaaatttaattatattgaattttttttgacctaaattgagttgaatatatcaatttgattatttttataaaacacaaaattcaaaaaaaaaaaaacaataaaaaaaatataaggatcaatttcgtattctcgcaaaacataggggctaattaatatttttataaaaaaacattatatcgtttgataaaaaaatttgatggttgcaacaacaataattaataatataatttaaaattaatatatcgagacaaaaaaaagtaagatcatgcgaatgcacatgatcccactcaaattttaataaattaatttattacataattttttttatttatatattttcatatatgtctccaaaaagtaatattttatttttcatttttatcattgtatatttgtatttttatccttgtaaatttatagttttcatttttatttatcaccaaaaaagtttatatataaacaccttccaccactttgaaggccatgaaaaaggaggatgctttggcccatatgcctttcatataaacccgttgccaatagtcacttgcaccctaaatattgaccagattggtcatgatgccatacaagatattgtttaacttgaattgaaagaatggccttaactttctagaaaattcaaattttgtcaatcaattggaacattccatttacccattaggaagcattattaagtgaatccaccttaacataaattaccacccctcacaatccacttatccttataataaatggaaatattagcacttgaaccctcttgccattgagaatcttcaacaagtaattattagactatatatataatgtatgtaatatagcatatacaaatgatatgaaatgcggaaaataaactgtaatcatatcaataatatatgcaatgaaaggatcgatgtacctccagccattgatctttaagcttcaatccctgcgatagcttc

SEQ ID NO: 306402 - DNA, 2923 bp, Cannabis indica
tgctaaaattttgctagaaaattactacagcaggtaaacttctccaaatcaacgacaaaagcctattatttatgcctgattttattgtagcaaaattcaataaaaaacatagcaaaaactttaaaccttcaaatcacatccaaaactccaatacaaaataaaataacataaaaataaagcagggaagagagaaaaaatgtgtttttaaaaattttaaaagcatcaaagttatgttttcaattttgattttaaattaaaaaaatagaaaataaaattcagttgccaaacacactttcaaaagtcatttccataattttgattaaaaaataaaaatttaattttaaaaattctaatataactaatagtatatatgtttatatgtgtattaactcattttaattggatgcacttttaatatttaaccaattaaaatacaaaaaaaaaaaaaaaaactacttaaaaagtgagagcaaaagtgatgttctcacttagagcatctccaatggttgcatcttttgagatgctaaaaattcacacattatctaaaaatataatattttattttatctctcttccatattatttttggcactcttacttctaaaaatacttcaatagataacactttttaaaaatactataattataattttactcattattatttaatattatatcttaatttttagttacaataactttttagctttaattttttattaaaaaaataaatagcaaccatgcaaatttgtagactgacatttttttctctccaataatataacatctcattctcaatattttaatacattatatatccacctcactaagcattctaaaaaatggtatcattggatgctatgagttttcataatttttaaattgcaacccaatcaattcaaattaatttctcaaaagtcaaagcaaagaattagcatctcccacgtccaccactaagcaacattatgggttgcagacccaataatgcttggtcctcacacaatgcggccaactcattctccggcaacgtcaccgtcaccaccctacccagaccaccttccgacgaaggcatcaccatgatcaacccttcaccttccacattcccaatgtgatacgacacgtggacgggctctgctccctcatcaaacgcagtatcgtacatcaacggcccaacaacgctaccattcggcccacatgagctgcccaagtgatcaaccttaacacaagtcaattcaggcccatacatcctaaaaggtgggccgtaactattttcctcctctccctctctcttccttctcgactccagccaatcaatcgctgacctaacctcatcatcgtcgacgctcgccacgtggtggtgcagttctctcaccacgtgtcctaaatcggagccactactgagctctcgaacttgtaaagaaagcatcgaaaaatgcaaagcgttgccgtaatacccaagaggaagcggagttttcttcaataacttcctgaagtccgtacatattgagagggagtatgtggagttattttttaggaccttcaattgtgcgacacgtgtccaaaagagtgcccctagataatcgaagggagtggcgttttggcaactttcggagatacctgagaggcactgcttgagtattgcatttgagaatttgaaggttgccgtggccattttcactaagggcgccgcacgtgcgatggacttggcgtgatagtaagttacagaattcttcttgggatttgtatcgggtcgggtacagagatcggaccctgaatttacgagtgggtgggctatggcccgaccacggtgagtgtcaatccatgatttgaagagtagggttgccgatgttggatctgcatgcatgtgagtgcagctcagcccaacggctactcctcccccttcaaattcatttatctggataagataagaaagaaaaaaagttatcatatatattttttttactagaaaaaaaagtagttatatttgtgagaatgtatctcacattaaagaaatgttttttgctttgatttttgattaataaagtttcccaactacccagaagaatatcatgtacgtgtttatgaagtggtccttgaaaaattagttttatacaggctcataaagaaagaagaataactgcataaggcaggtagagattttcctgctatttttgacttatcattgcacttaattggtcctttgatatttttttaaaaaagaacaccaaccccaaaatggaatcaatctgaccaaagagacattacgtgtcaccttgtgaaatcgtccaaaaatatgtctcaacttcctgtctaatataatgaatataaatgtgacgtatagtaacggagaaagcattatttgttacaactatctcttgtcattctctctcctcaaacaaaaaacatattttattttttgaatggattgactaattagaaatatttgccctcgaaagctttcaattttagatgcagttaaagatttttaaacttttgaaatggttgaatttaaagatttctaactctgatcaattttattaatatagctattatttatgtattaaattatgtccaaaattgtaatgtgttgtgtatgatattatgtttcccaatttaatatatattaattaaattgtatttatatctatttgtaaaattcaataaaaaaatttaaatttaataattttaataattcaataaaaaaaaattaacggccccaaattaaaaaatacaatttaatacattagttgctaaaaattctaataagtctatttttttctttttgaaaatctaataagccattatttttttttttttttaactaactaataagtcctatttaaaatcaagtaaaagatatattctgacctttcaaaaaatatatattctgataagaagataaaatgaaagtaaataaatttgg

SEQ ID NO: 306403 - DNA, 1937 bp, Cannabis indica
agttcttaagaatagatactttccgaataatacttttcttgaagccactttggtcactccccttctttaacttggcaagaaatacattggggaggagagcttcttttaaaaggcctacgctggaaaattggcgatggaagaacagtaaaatcaggttttgacctgtggataccaggccacaatattttcttcccttttcactacacatgaccatctaatggtgttgttacaaacttgattacggacgaaaggcaatggaatgtgcctgttctactacaattttttactcccttggatgtggatagaattttgacaatacctctaagttttttcaacagcagcgacactgttatatggcataagaacaactcaagatactacacagtcaaaaccaggtaccacttagcagtagccttagacaaaattgatcaaagttcaagttccaacactgcttcatcttggtgaaaatttttttgggctctgcaactacccctaaagtgaaaatttttgcttggcgggcaatccatgatgcacttccggttgctacatccttggtgaaaaggaaaataataatagagtctacttgctctatttgtaagcaagtccgggaatcggttggacatgccttttttaactacaaatatgcctgagtagtttggcaaaactcggatatggttttgtattggcatctatcatcttcaatgcataaaggtgattatttatttcatctgtcctcaatctactccaaagctgaaatggaataaattttttacacactttgggaaatatggaatgaacggaatcgtgttgcccatggacaacaagcaaaaccagcaaaagatctcacctcctatgccataacatatttaacaagtttcatattagctcaacaaaagtaccataatgctgcaactgcatctgtgacgagacagtagccacaacaatcactttctgcacctactactcaatcgtggaggcctcctgctacagatcatttcaaaatgaacatggatgttgttgttgatgtctcacggaatgttgttggcgtgggtgtcatcctaagagactctaacggcaaatttgttgctgcactctccaagcagctaattggcaattttagctcacatgaaatggaggccaaaactcttttccatagtttaaattgggccattcaacaacagctgccaacattataggtctgaaattgatgctcttatggtcgcctctgctctacgagctcccttcaattcaatttcaccttttaatgatttgcttgttgacatctcttatcttttatcctttctccttaatgtaactgtctcacatgtcaaacatactgccaatatggctactcacggtttggcaaagtttgcgttaggggtggatgagacttgttactggttcgaggatattcctccacctatttactatgttattgtaaatgaattctatgtttaatttatgataacaagtattttcactcaaaaaaaaggtagtgtatttagtgttatcaaatatttgttaagggttaaatttgcattattttttaaaacactatgagagtattttttttgctaataaactgtaattttagtattatatcacttatttacatctctattgaaattactcttggtgcgtttggaaagccatatgtaattagatttgtgtgtaattggaggtaattacacaattgggcatgtttgtgtgaccatgtaattacactataactgtgtaattggaaataattgaggggttccagttacactctccaattctcatggccccctatgagaattgaatgtaattacacagtgtaattactaaaaactttccatattaaacattagctactaaaaaatgttagtttcctacgtaattactaactattttgctaaacaaaatattaggaattcatatgtaattaccacctcata

SEQ ID NO: 306404 - DNA, 2101 bp, Cannabis indica
gttgcctggtggatcatactcgcagtagactagaacgccgccattgtgacacttcatccgtgcgcagcccacacggaggctgctacgccacaccacctgccgtgtagtgtcccacacatctcaccatagaggcactggttggtcatggggcgtagaactggttctctctcgcccaagactcaacggcatcggtcgcggtccagtgatcctgcccaccccagaatatgttctccccgtagggaccaaaagagtgcatcatcttgcattcatccagctgcttcgtggcccagcgtcgagcatagcgtgccaagttcctgtcccacgtaagcggtggctcgttcaattgtcgtctgatcacgttgtgcgcttccacgaactggcgggagagcgggatgtggtggtggtggtggcggcggtggccgtggtgcttcttgtgcttcttgtgattatgatcatgattttgagtggtttcgttctcgtttatgccgaggaagttgtgggcccgcctcgggtggtgattgaattgttcagcggagatggttatgagaagttgggagaatatgacaatgagaatgggaataaaaataagaataaacggagtttgccaagctggtgacggcattggtggctgggtgcagttgcagcggcggtagtgacgagaggtattgtgggtggctttgtgtgattatgattggctgctctcatcatccgagagagcagcagcaaatggggttcggatttcgtttggaattagaccctaaaattaatggtctatttggttattaattaggacatagctaaaataaggccagttgcctatgcatggttctattatcaacccttctttctcggacaattcatgaccaaatattttatatactatattttgccatttagaaagtgctggacagatgtacattaatttgttaattattattagaattaaagtaagtaattaacatagagtatgagttctaattttcgttatgttagttgcgatgcaatcaaatcaatagttttgtatcttattatgtggttgtgaataaaaatagctaataacggtcaatggtcaatttttcacttgtgtagatacgtgtatgtatgtaattttttatggagaaatgtgaaaaggcagcctcggactttatagctattggttcaattaagtatcgggatttaggggtatcgctagtcaatgacaaagcgatatatttaaaggtgctaggtactactaatgcctactaacaatgcttttttttatgtaccaaaccttttttgaagggaaactactccaatgcaacttaaataatattatatgtgagttgagggcatatattccgattcatgagcaatcgttatctaatcccaattatttaagttgctttggagtagtttttctttaaaaaaaatgtatactcaagtttgttcccgtaaaatttagtttttacaaattaaatttttaatattaaaatgaatttttaagaaaaaataaatacattttaaaatcgcttaattagttttaaaatttttaatttttttaatcattcaacataattgtttcttaagatctaaattcatttttcaagatttactaaaaaaaaagtgttaaatctttctcaggtttattttcaggcagtacgatttgatagttctcaaagtttagtggcatagttggtaatttacaaagacatgtcatcatttaaacaggaataatgggacagaaccaaacagaagatttttagcaagttgtatattttaaggggcaaaatcaatattgctaaaagtttaagggtaaaatttattaattattcttaaattaattatgtataaataaggaattatattattatatagtcaattacgtaaaattatttgagatttatcgcatttaagacttcatttatatgtgttaagggtatgttagtaattttagtctgacaagggaaaaatcgtaatttttttatatattatgctaatagattatattataatatagtatgttcattttttcttattgcgtgttatttttgataagttagcccggtatagtcataatcgagtatttttgctcgaattgtgttcagagtccaaaatttatgaa

SEQ ID NO: 306405 - DNA, 1604 bp, Cannabis indica
agcgtaggggtcctcgtcttcctgctcaggctgactaatagtctaataagaagaacttcaatattactaaatttcgtatagtattgcttccttagagtgtgcttgcctacctttgcatttgatagaataaagaaaatacatttattattatatttttgttgtttgacatttacagagtaacatgcaaattaagataagaataactagattaatatatatatagggggtcttcgaaaatgccaagtcaaaatctgaatactctatcttatttatatatataatattgattgttacatataatatatagacagtatgtgaaaggaaaatgggtaagagatgatgaagaaaggtcaaataaaagcaaagggaattaacacaagcagctcggataagccttctgtcgattgtacggcagagttacaacaacataatatgatcacacccaaaattattggcgaggaagaggacgtttctaacaagcttaattaattatttgattgttttaccagattaaaggccctcctcctcctacacctatatatgtctattctttcctctagcttctcctaattgtttcttgatgttatccgaattagtttctcttaatgtaatcatatatatctttttgattaattataatcaataacgaataattttcagcagatgttatttaaatagacatttttttaaaagttagataagtaaataaaagtagtcttaccgatcgaagaggcaaaaatagaagcaaatcacgtgaaattttgttgaaatctgctgtatatatatatttatatatattgaaattttgcattgagatgttaggtgtgtgcctattgttttattgaattttatttcaaatatatatggatcatgaattgtactacaatattactcatctttgctcattttaattattaggaaataaggcaagggagctgctatgctgaacaagatctcaataatttgaagtcttctccaagtactggaaaatttttatctattaaacaggtaataataatcaggtccatagaatcaagttgcatataaaagagtgtacatcgaatgtcaattaattttagaggtgaatttaagcttaattaatcctaaaacaaattatagtttataaataactttattaatttcaaattcaatggtatttataaatatcgcaaagacggtgtaggagatacaaactaatatacagtaaaataaaagaaaactaagaaagagagatacggatttaaagaacatatatgtatatttcgaacgagagaaatataaatctatactatatataatatattgtaataactatataaactgtaagatcccattcaaaccattacataataataagcttgctagaatattattatcattcagaactagtaaacgtacgactcatgaatatgtaattggccaatgatagagaagcacatctgtaggacagggatcgatatactcaaatctagtgagatgtgtatatatatatttccgtctagagataactccaatatatatatacatacatatatacataaatgcctatctaaccatttttgttgtgcatttaacagatttttatattttctaacagaatattc

SEQ ID NO: 306406 - DNA, 966 bp, Cannabis indica
aacaccctcaaactttttcttgcattagatgccttaaacatctggtccatttaccaaatggacataaataatacctttttacatggtgacctaaaagagaaaatttacatgtcgattcctaaaggctatgtacatgatggggaacttcctccaaatgttgtttgcaagctaatcaagggtctatatggcttaaagcaatctcctagagaatggttttgctaagctaagcacaactctacttagtaatggctttacccaatcccttaatgaccattctttattcatcaaatcatccaataatgtttttcctgctcttctagtctatgtcaatgacatagttattgaaactaagaatgagtcagatgcatctgccttcaaaatcttcttaaattcaaaattccaacttaaagatcttggtccacaataatttgttcttggcttaggctttttcttcagctcttctgtctcaacaaaagactgtactttccaactacaagccttcttgaatgctgattgaggaacttgtccatatacaagatgatccattactggtttctacatttttcttggcccttccctcatatcatggaagtccaagaaataaataatcgttttcaaatcctttgcagaagccaaatatagaatacaacatgtgaacttctttggttctttaacatccttaatgactttggtatctcacattctacacatgctactctctattgtgacacttaagatgcactccacatatccgagaatgttgtgtttcatgagcatacaaaacatttcagcattgactgtcatatggtttgtgatcaagtcaccaagaaacgcataaagctcatatacgtcccttcttgacacaacatagcagatattatgactaaagcactctttcaaactcaattcaattttctattgtccaagatgagtgtcattaatctctacacctcatcttgaggggga

SEQ ID NO: 306407 - DNA, 1315 bp, Cannabis indica
tctgcacgtccgtctagttacgatgattcgcagtcgcagtcgtcagtgggtggtggagagggtggtgtttgggtcgtgggttgtggtcatggtggtggttgggtcacgtgaagagggtagagagatagtggttgtttgaaagagaatggtattttgagaaaaagaaaaatgttgacctatttggctaatattgatatatataggtttaagaaattaattttaaggtaatatatgcataaaaaaaaattcaaatttcctaaattatagctataaattataaatgtgagctgtctttttcaagcattgaagtacaatattcaattccaactaaagtaaaaacaccacaaaatgcaataatggaatatggatggacattaaatttaggtatacatattgaagcatttgtagataaaaataaaactcagattagttccaataacaaagtataaacacgagtaaggaaatgaataagaaaaggttattatttccgaaaatggtttaggtacactaatgtgctatgtaatttactataccatttattttacttttcagtttttaaaggtcgttgtcataatttggcaaatgtaaaatagaaaagtagcatatttgaaaaagcttctatttgatactttaatgtccacaaaggcacaaaatctcactttaatttgtgatatgggctcaagactcataaggtccaattcagctactcaggccttgctgttgctgtacttttcgaaacagtataatttataggttataataatggggttctaacaaaagtgttaaattttgagtaaaaatttataattttactgtcacactattttttttacaaaaatactatctttttataaaataacgtaaaataacaaaacagaacaattaatacaaccgcagaacaacttaacacagtacacagtataaaatttacacagcatttttgaaaaaaaattaaatattttttaaaaaaatttcattccacggttaaaaaataaaaagttgagaatttcaatatgtggtgtaaaactcctataataaataaatattttttaagtcagtttgagtaaacaaaaaacttcaaaattgaaaataatttttcttttttatttttttatcaataagaaaagaatatttttattgatccccaacaactactatagagtacagaagcaagacaacataaaaaacctcattacaaataattaataataaagtctagaataactaaatctcccttattcatttttatattgattgtaacgttctcgcttcaagcttttattgggcccttacgcccacggaataatggctctta

SEQ ID NO: 306408 - DNA, 1413 bp, Cannabis indica
aatattcaaggacaagaaattattcccgtttcccatttagagtggaaatatctactccattagagacaagtcctcaaaggccattctcatgcaaaaaatgtgtttcatgtatgtgaggttattttgattttttttaataataataaataaacaaataaataaatgaaactcgttaacaaaaatatattaggagatggtgatttcatttttttaatataattattgcatagttatttaaatttaaatatatatacttataatactatatgttattccgtttttttttaaaaaacataacttcattcgaggttaagaatggggccaaagccctacacattcggcgagcgaaccacactaaaagatggcacaaatatcgacttacaccgatgatggaatgaagaggaggccgcccaaaacgcaaagaactctcccaaaacgcagaggaggccgcccgaaagcataaaacaagcagaccaaaataaagggccgctgccctacaaaaaagtccacactcagtctctcattgcggttatgaacagtgaaagtgctaagacaagggaaacacatccctttgggtaagactcaagtccatcccccctctatatgttattccttaaaacatattgaatgaggcatatctaggatgagagcttgaaacattttgttcgaaaacctaaaaaacacgtgttagaagcgaatttgaatcgcacaacatcatatagtaaaagccgaaatacctctagttagggttttgagcttgtgtatgtttaaacttggaagttttctttggggatccaaaaaaatttaaatacattgtcagctctttatttgtagcttgagaaaaatgagaaatgctaagagacaccataaagagtaatatattattattggtgcaaattaatattgattctcacataatttaatttaataaataatataaaaaatactaataaattgtaatatgtcacatcgatatagtattgagcaccgtattagcctaacaccatcacttgtttatttgatcaactaatagaaaattggaattggagagaaagagtcacttttcacatcaccacaaataaggagaaaacccatattacttaactcgtaagaaagtctcatcgacttttccttatgccgattgagaatatataattattgtattaagctaagtaattaagttgattaaaacaatatctaaatattttactacacttgacatgtgttaattatgttagaatactgtaaactcagaatatagccctaattaattcatgagaatcaaacaatagaatatagattagcggaagcgtaccggagtctatagaatcgatctttgattggtatgatcttccaattttgcatcaaaacctttgaaaccttattttcctgatgatggggattcaagaactc

SEQ ID NO: 306409 - DNA, 843 bp, Cannabis indica
ttatctatgtgaggacaatgtgtgataagatattgtattatatgtgtatgagcatagcatgcattgagttatattgtggtatgatgttttattgtatgtgaggataagttcaatttgtgatgttgatatatgtgagtatagtaggtattgaattcatattatgatatggttatatgatgttcattgttatgttatttagttaggagggttatgtctaacatagctctttttactgggtgttagttattgggtactctgtgtgcatataaatgtaaaactaaatagtgaaattggtgatagcacgatgcgtgaattacatgttaggagatagtcgcagtgttttgttttaaatattttattaaagattatgacacgttagttttgtaaaattttatgtattaaagattataaataaattaaatattttgtttttaaaataattagatctcatgctttgtttatgtttaataaatgaatttattatatttatcataaatgattttataatgactatcgagtgtaacgtctcaaaatatcagagtgttatacacccaaattttgtacttgatagaacctacaaattactttttgggaaattaccctttgtacggtttttttttaactttttgtttcaaatttacagtttgggtttttaaagtggttgcagcgctagttgtaataggggtttctatacgattttttgttgcgatttaggttgcagcgctagttgcaataggggtttctgtatagaattccgtacaaatacaaaaaaaaaaattattttgaagtgtaaaaataaaaaaacccattactttttttattcaaattaactaattttttttt

SEQ ID NO: 306410 - DNA, 1425 bp, Cannabis indica
tcttctttatgtctccaaagcatggccacccctccactgtgtccccttgcatccaccgaaaaagcaccctcaaaactgacagcaacacgcaaacgctctactacatctttacgggcaaaagtttcacaaagaaagacatagttgggcttcttttggaccacaaggttcgtaaggaattgaaaagtccttgggttcccaagcccacggcaattccagctcaagatactcataatgagtggtgggcctggaaaccagaacccaccaaggacccattttttgagcccacgtttgtttcattaacttctccagagacatcctcaacaaaattggccatgtcctcatcaatattattagagtcaatgggcccactagtagacattcttctacgtttactttccataatggatattccttcctcatttagatcaatatcatgatgcccatgcaaatcccccacgttacctcccaagttaatagctggctcttctgtaatattcatagatgccatattaggaatggccatcctccccactaatgttgctatcccttgattagtggacttgggatcaatcatctttgatttagcttgattctcaatcccatgataagcgccctgcccattcaatgctctagatccgcctggttgttgttcacacatgccattgtcgttgtgtgttgccggagtagcttcacaccggtttacgaactccgaatcatcgattccgttgcgtaaccacttagcaccaatgagcttagtctgtcttctgaggggagccttcatgaaaacaccgtatggcttgactattttgtccgccggagtatcaaacaatctcatacagaatcggtctgagtgtcccaaaagaccacaaataaaacagaacgtgggtacattctcatatttaaatgtaatccaaataaactcagtcttggttttccacagtttcatcttacgtttcagaggcttgttgagatccaaggttactcgaatacgcatatagtcccgccataatcccagaaaattcttcgggtccgtttcagccagctttccaatatagttccccacattcttcaaattcctctccgtcatgtaacccgtttgaagatcatgaacttgaacccataaatcaatggtgtctaacggtaccgttcgaggattttcgcctgccttgagtctcttcatgattagcgctttgcgattgaaagtccatgggctgccttccatgactcggctaatatcgatttcatggtaaaactgaaacaaataccttacccaccatccagttctttgatatacacacccatacctggtttccacagagcagctagcgtttgttgcatagatgggaaatcaacaactccatcattgaggaagcgccctaacaaacaccaacgagcatcaaacgcaacaatctcttcttcctgtat

SEQ ID NO: 306411 - DNA, 1706 bp, Cannabis indica
aaaagctcattaaagacaaaattgttgcccacaccttataaagatatgtttgtaaataaagtgtcaatttgtatttttcatgtaaaaatttcagtaaataatgtaaaaacacatatgttgtccaaatttttgtaagcatgacacgtggatttgatccaagaaggagagataattctcgactgactagtacctttggctcaaattcccataagaggttgccagggctctcacaaaggacttctgggaggggtattcctacacaagataaggacgtagggagtctccgagtttggtgatatctccccgggagcctaagcatgatgctctgcagaagtcaggggcttccctagaaatacctaggcagaccgttaaaggacttaaggtaaggtgtaactccattttgtatcacaaggaagctctgcccgtatgtgttagactgcaggtgcggcaacctggctttttcaagtacggtgctaggatttgtcccccatgttatgtcataggatagagcatgcgcacccagtcgtacttgcttgagtgttccaacagccatcgacatgggaaattcaaaaatggaagaccctatggcgacacgtgtatgatgtccaaactgtacttgctggcctaattaaatgccatgtgataaaaggacacctaccaaatcaatggtcagatttcctctaaatgtgatcggcccatccagcgtgcgaggggaggttagccgataaatactcctgcattccataagataggggcaactttttgaagacaaaaaatactatatactactgtgtaaaaactttataagaaaaaattcctacaaggcttcttcttctttaagagaaacaagaggaataaagagttttagtccattgtatacgtatttgtattattattcaccgaccaaagttcctaataaaatgaactcgtggaataaggatagttaatgcctgaaccatgtaaaaatctcgtatctgttatttaatatgttatttctttcctaagctctaaacatttggtttctaaaaatctcggtaaatattttggtactttcattgagagttgaggaaagatggaaatatgcacgacgtttgtcatcgtgaatcacaagttacgaaaagaagatcctgtccaacaaaaagaagaaagatgccgcatgactacccaccgagatctgttcggaagttagaggcttgctggctaaggctgctttcaaaagtaaaggcttacgcccgtgtccaagcaagaaaaatgaagaaggtggatgcaaatagtcttggagttctcatggcgcccaagcatgtttggaaaagctcatatccaaccggtcaatgtcttgaaaatacggctaaccaccagtcccctcagacttgaatcccatattgttcaccaagacacgtccatacaaaaaaaacgagatatgagaagtgatgaggtctgatggtgaagttaggaccagtcccgccagtgacaagtaacttagaaagggctaccgaatataatggccttgtatagctcccaactccgatccctcaaccttcaatcccgctgacggtgctgatgctggtgctaaatcctttgtcgacgactacttccactactttttcgtcgagccgtgaagtgttgggttttatgccctaaataaaactcatttcaatataatcagatttgcctattaatatagatcagaaataacatttaatgtt

SEQ ID NO: 306412 - DNA, 1462 bp, Cannabis indica
ctttagcttcaccttcatcaaagggctctttaactaaaagaaaattccataatccaatctccaatttcaaatcactaacatattgaagctctggaccacccctaaatgagtaagctcgaccaacatggtctttaggaacccaagcatcttcctaaattttgaaccatatcccccttcccaattaaccaaggaactcctttcgtccgtaagtcacaaccctaaggaatactttttaaaaaatagaaggctctcttagtttcaaccatctttagcaaagagttatttgtatagtataatcctttcattaccttggcagccaaagaatcaagatagttatataaatgggcttcctacttagccaacaacaattgattaaatagaaacatgtcttgaaagcccattcttccatccgccttctactagcacaacctagacaatgtaaaccagtgtaaatttttcctattaggatctctaatcccctagaatcgagcatagagtctatgaatttcatctacaatacccacaggaagatagaacaatcccacaacatatgtttaaattaaatgaatcactgattttaagaggacttcctaaaaaatggctttcccctccccttggcaggctataggtatctacgagcaggtacttcttcagggtccctgatgagaacaggttcctcagtaggcaaaggtctaattctattggccttagtatttttcttattctttcaagcaacagatggattggttggctcagaaggattctcagggaacgaactattgacttttggataaaacccataattagccaaattctcagtagatgttagtaagacaatatatcgagtaaactccgacaagactaagatgacttaggccctatccctaagaccaaacataaaaggaagctgaacatacatctttgctcgatgaaaagcagtgaagttggttgacatctctatgaccatagaatagtctcaaagaaagccactaatcttcttgacacattactcattagtgtcgattagccacaagcattggtactgtgaaaagtagaagtacctcaagcgaccactatgtagagaaggctttaattcaaaaaaccagttaatgtcatgtgtaggagactctcgcacccttgctttgtcgtataagatgtacatggtagccaagtacttgattccctttggtgtgaattgcatcagagagattttataatagttctccatgtttagcatgagggcgggaccacgcacacatacctttgccttggtcgttagcaagttattcctcaaatggttgaaagatgtgcatgtccccaacgaagaccttccttgtccatgttttgtaaggcacctcttaataagctcggacagtggaggaaatccacattgggtcgtttgggtcgtcctgatgtttagtacgacttggcctagttaaactcttgatccatgtaatcaatg

SEQ ID NO: 306413 - DNA, 2254 bp, Cannabis indica
aaaatgacctcaaggctcatttgcgtttttttaaacattgaccccatgaatcccaccctctcatccaatcaaatgccagaaaaaatgctcctactagtgagagctaaagtgatgctctcacttaagaattttatcagaatgatgataatttggaattatggagtttcagcatttcagaacaaggataactctctacactatttggtaatggataaaaaatttgggttttgaattggcttaaaagtgtgaaagatgagaagttcttttctgatctattgcgaataggatgttggatgcaaattcataacttaccttgagatgcttaaattcaggttgcattttttatgtgtgtttttgttctcacaaactctcgtagacattaatgttgcgtttggttggaagtaatgaaatggaatagaatggaaaagaattaattttcattccattcttttgtttggatcaatttaaagtattggaatgtcatcccaatggaatgactttttcaccattttggtgaaatgactattccattttgaaatgggaaaagatcattccgatacaattatcaaattttctttttttctttttaaattttaaatttgttatgatagaaaaaaaataataaaagaagattacaaagttctttagtaatttaatacctcatacatgcacaagtctgacattcctccaagattctttatcctccaccgagaacacatgcaagagtttgatctgaagtcatcttttatgactgtatgattagttagctatctgcacttatgctttctacagcagaaaagagcagaaataattaaatgaaaaaaaatgactgaagaaaacaaagaaaaagataataagaagacataaattggtcatagttagaaatgcaataagctaactatgtaaaatgttgtaagaaggacaaataaatcaaaattaataaaatctcattactttaattttatttaaaatgtctgatatgttctatcacctgcacatgctttttgttttgcattaaatttttctttcctttaaaattgcaaatctcacacgacctttgacagatcagtgtgcaccatatatgtatactcacttacttagagatgggactcctaggcctgccactgttcacctcttgttcctccaacaacccttaattttacatttgcgttgattgttatcctaattgaatctgaatcgtgcaattcattgtataccttccaatcttacaaataatgacgctggaaagctaaccacttttctgaacaattgacttccagtaaacgaaaagattttctcatgggttgttttcaaggccaagaaactgccctgttgtcggcttgtgcctgtgcctctaaactagtgctttgctatccaatggttcaaaccctatttattatagcacaaaagagccaaagtgcttgacatcattatgagcttttcttacaaagacttcattaaaaacacacacacacacacaaaaaagttatctagttcccattaatttacttaattattctttgtattcttgcttttttcatatttttatttaaaaaattgtttctgaaaaatgagatgaattcagtttaaatggaaagctgttccatgattcttctctccttaatcttattgtgtaaagcgggtttcttttagacattaattccactgaaagtctttcaccttctgtctgatacagtttgaagttcaaaataaaatatatctgatctttcctccactaccgtttgcagtgaaaaagaaggttgtgctaaatcctaatggtgttgtctgcttaatggggatggtgctaacttggctaaagtagtcttaataatattttagaaggctagaaattgcaaattgatctattaaaagttcatcaaaccattaatagttacttcctacagtaaacattttgctatttaactagtttagagtctacttttatctattgtttttacttttctgctgtaaaatgttttaggtattttcagtcagtttgaaatatacaattccactaattaactaagccaagaaacaactcaatctaaacaagtaaaacaagaaacactccaagccttgatttaaaaggaaaagaagctaatcttacccacatttctaaaagtaattacataagcaattacccaggtgggtagctcaaatgttcagacatgtagtttcctcaacagagtcacaggttcgtgtccctcccaagtacctacatagcaattgctaccgttttatcgtgttaggaggg

SEQ ID NO: 306414 - DNA, 521 bp, Cannabis indica
ctcggctttggaggaagaagaaggaagagttgcttagatcaagaattgctgtttgtttagttggcggcgctaggaggttcgagctaacaggaccttcaatcatggagaatattctagaagagtatccgaattctgatctttttcttcacagtccgttggatcaaaacgccttcaaattctcgcttcttaagaacgctccaaacctggcttctgttcgaatctttgagcccaaacccataccggagactgagacccaggctcgggttctcaccgctcagaactcccctaatggaatccaggttaattattttccattttttaattttaattattaactagttaatgaaagacatacagaattatttacgtataatatctatatatagtcgttttactcgtattgatttgccaattgccgttaatggattattagtctttgattttacatttttaaaaacatgagatttttttttgttgtttatttctagctttcacctactaaataagcaaaaaaaaaaaaa

SEQ ID NO: 306415 - DNA, 2014 bp, Cannabis indica
caaccaattcggcgtggcattcatagttcgtttcgttgggatgggtagggagtttactaagtggctagattttaggtatgaaagattgtcagacttttgtttctattgtggcaagcttgatcatactaaaaaatactgtcatgcttatttgcaaaagtgtgatgagtctcttgtgccaccaccttgtccttatgatcttcttattcgtggtaaagagaagttgtctgagaaaccgttgccattccagtatcctcatgccccagctattactattgtcgatgttgatatctctgattttcctcaagggggtcaagttgtgaatccttatttcacttactctatggaattcacacctcttcttaattctcatctggcttctgtttcttgcttaagtgctctaaggagctttgcaagtgctatgatccctactccagtaaatcctaaccagggtctagttggtggttcttttaaccctgtgactgttactactccttctgctgttgtcaccactaatccctccatgactagtggtggtttgatgagtcaggatggtcctagctctcttcctcagatgtatactcagagtttcaattctgtttctactaactctatcattgtgcgtgacaacctatcttcccctaatcctaatcttgttaaagctgcccgttctcttgctgatgctttgccctcattggtccttggtcgtactgcagctgctacttctgtttttcaagcagaagctcctggacaggactccactgtcaaaggtaagggccttgcttgtgcttcaggtgttaaacgaccttgtttcaagccttctcaagccgctgtgggaggttccatgaggtctatgctcaagcgtgctcgagcgggggatgctgagtttgttgaatctctgtcttcggatgctgctgaacaggcgggtgatgctgagcacacccgcctagaaaaatgagtttgatgagctggaatgctcgggggctagggaaccctcgagcattcaattgactctccctccttgttaagaaccataggcctacattactttttttgatggaaaccaggttgaagcccacctctgttgataggtttaaacaggttttaggttttgttaatggttttgaagtccctcggaagtattttgggaggggggggggacttcttcttttgtggggggatgatgttaacgtaaatattattgactattctaccaatcatatagactgtattattaatttctctagtaattatatatagcaccttacttttttctatggttcccctgttactcaacaaaagcatatcacctggaagcttttacataatatttattataatgctgctaatcttccttggttagttattggtgattttaatagctatctttctaatactgataaggtcaggggtagttctcctaatcaggctcctatggactgctttcataattttcttcacaagtttaccatggcccctctcatttatcatgggaataaatttacctggaccaataagactattcgtgaaaggcttgattgggttgtggcttctaattcttggtgtgatctttttcctgatcattccttgcatcatttaggcttctatgggtcaggtcatcaagttcttgagttagttttaacctctgctaacctagaactaatcctgatccaacccatagacgttttaggtttgagaatatttggttagaagatcctagttcctacaccactgttgatactgcatggaaggagtggcataacatgttgggttttatgccctaaataaaactccaattcaatgtaatccattttattcattatcaataaagaaacagaagtatttttcattcatttgtgtatgttttggttcatgttatcaatttcttgtctatttgatttataaattcatctgaaacccttttcacatacttgatcctgtttattgtagtgtcaacacattggaaagtaaacatgactatctgaataaagattcctagatttatcagaacacaggg

SEQ ID NO: 306416 - DNA, 1301 bp, Cannabis indica
gagattccaaacacaagaagtagaatcaacaacaacggatggagagaaagagatctaggttcagatcttggtgatgctctgctacagaaaggaatctagggctagagatctgaacggaaggagtcattatattctgctgcaactaatgtaaggtttccttaaacccttatgtgtttatttcattgttttagaattcatattagggtgttaatgaaacacacatggtagtaaatctagatcctggtaaaatatttccaacactttttagaatcaagattttagaacatgaaagaaagacaataggccaatagcaaaaaatgaggagtgaagcaccattacctactatcagtttgcatttccctttgtaatcgactttgtcagtcagaacatcagcatttgcagtgacatggtgggaagcaccactgtccaggtaccactgtggatcattgacagttgaagcagtggtcaacatagcctgtggttccttaggaggtgattcttgagactttgagctaccttctctctgatagctcaaatcaaaacgatggtagcactttaggattgtgtggctagatcaatcacagacttgcaaataggacgattgttggaatttcgaccgccacgtcctctagcagagccaagaccacgaatattattgctgtgattatgtggttgtggaggtcctctcttgtttattacaacatagtttgcagtaggattttatagatccaaggcagcagtggatgacatttgttcgatccgtagttcttccatttggagcaagaactgaacttcttgaagtatgatggtttctttagtagtgagagtgactatggcagaatcatattcaccgcctaagccactaagaatagacaagatcagctcatcatcggagattgtgtggccagcagccattaaagcatcactaagacacctcattttgaggatgtattcatcaataggtgtcgatcctttctttgttgattaaagcaggcctcagagttgcaaaactcgtgcacaagaagtgtttgagagaagttgacgaagaacttcccaaggttctgccaaagattcatatcgtgcaacatgaccaaacatgccttcagatatcgagttgaaaaacctacttagtagaaactgatccagatgcaaccaatcaactaactcaggatttggaagaaatcttgttgcatcaaaaggatcgactatggtagccgtgttggaatatgttttaccaggatctagatttactaccatgtatgtatttaacatcttaagtatgaatctctaaaacaatgtaa

SEQ ID NO: 306417 - DNA, 4177 bp, Cannabis indica
aaaaataaaggtaaaaattagaacaaataaaataaaattggtatataatgtaatttctaccctcaacttattcccaattctttcagtaatttgggcccaaaatcattataaagggctgactctaaggcccaaaatcaaatttagaggaatgagccccatgtagtcattctcatcactctcgagtctccattgttttcaaattgtggagcttggattctaggaagccagttctgcaaaggtatgcaaaaaaatctctacttttttttttgaatgataagaatgaaagtggtttgatttagatagagaccacacaagtaagcagaaaaattctcaatatcaatgggaaatgcaacaattcaaaatcaatgtttggattctaaaaaagataagatagaacttgaaatgttggttttcatttgattacaagtgttcttcgttagtctcctgattttttttggaattgggttcttgcagagtgtttcttcacttaagattagaaaagaatgttaatttggaattttgagtgtttttccatgttcttattttatttattctgaattaatataacccatttggaagaacactaggctgattagaccaatacttagaaagaaaattagggtgtttaagaagtggttgttttcttcatctattttttttggcatatagtcctgaaggtgtgtttctattgcaattgggttcttgcagaatccttacatatctactgtgactcaaatttaattcatggttttaatttcgacccaatttcaattgattctttacttgatttgggtatttttttttatcaactgtaatgcttggatttcagtagaagataacaacttgaattttgggcttttttttgatttgaagtgtgtttttttgttagtctcctgatttttttttgcaattggtgtttttgcagaatccttacatatctactgtgactcaaatttagctgatggttttaatttcaacccatttcaattgattctttacttgatttgggcattttttttaatcaactgtaatgcttggatttcagtaaaagataacaacttgaattctgggctttcttttgatttaaagtgttttttgttggtctcctgattgttttttgcaattggggattttgtagaatctttagattcttggacattgttcatggctttaatttcaaccaccccaacatacccatttccatcatcatcaaggttaaattgtcgaccgcctacaaaactcgctgcccaatttcaagaatccacacccaaacctgaacccgatcccaaacccgaatcactacctttaccttcttttaaaagctccataaccactcagccaagccgaggcagcatactgaatattgataagcttaaagagcaggaagctaaggagaggaaggaggaggtgaacaggaagatagcttcgaggaaagccatttcggtgatactgagaagggaggcaactaaggcggttatagagaagaagagtggccctaaacaatccaagagacttcttcccagaactgtacttgagtcccttcatgagagaatttctgctttgcgttgggaatcagctcttaaggttttcattctcttttcatctttttcagtttttatccatgaatattttagtttctcttagatgatgggtttgctgattttgtgaattttatggatatagtctgtgaaattaggattcttggtctgtcatggctactttatatataattttagttttgggtaagattttttgtgcataatataataatattaagagaagtttatggagcataacaatatgttggcaaataacaaaagtttgaaacattggcaaaccaatatcactggtttgtttgtagtcagttgtttttgatattgaaacagtttttctgtattcccagacaatgagttttgatgtattgggagtatttgtatttacagaagctttagtaatagcctaatagggatcatcatgactattgaagtcatgtgcggtgtcaataccaaacaaaatactacgagtagcaggatcttgagctaagctttggctaactctttgaaattgtaattgccataatgccacctttatagcgtttgttttgttttaaaaactttgtaatgcctttacaacacccattctcatttctattacaaaactgagaaacatcctaataccatttctattacattctattggtggcgtatgagattgagcagtgtattaataaaaatatccttactttaagttattttggtgatagaatagtataagttgaggttggaagagtaattttgtttttacacaaatggtgtaatggttacataggtgtagaatcatatgaatggtataatggtgattacattgtaaatacattacaattttttcataaccaaaccaaacaatagaattgtaatggtgatatcaatacgattacgattttgccaaaccaaacatgacttagctttaccattaccattctcattacattacacagagccaaaacacttaagctccttcacaataacaatgttttccctctaatgattactgaatgtaatgttgggtctaggtgtttgaactactacgccagcagctatggtataagccaaactctagtgtgtacatcaagctgattgtcatgcttgggaaatgcaagcaacccgaaaaggcccactgaactcttcaagctatgattgatgaagttgtctgtcagccatgaatcctatactgctcttttatctgcatatagcaggagcggtcgctttgatgaagcgttttcctcttggagcggatgaagaatactcgagagtttcaacctgatgtccaaacttattcagttctaatcaaatcatgtcttaatgtttttgcctatgataaagttgaggctcttctttctgatatggcagctcaagggatcaaaccgaatattgttacatacaataccctcattgacgcctatgggaaagcaagaaagtaagttgccaacttattcttctcattatgagttatctaatcccattaacaactatgatcttagatgttgtttccctttaaagatatgcagagatggaatctatactagtcgagatgcttcaagaagaggaatgcgaacctgatgtttggacaatgaattcaacgctgagagccttcggtggaagcaagcaggtagaaatgatggaaaagtgttacgaaaagtttcagaaagctgggatcgaaccaaacattaaaaccttcaacatcctcttggattcttatggcaaagccggaaagtatgagaaaatgagtgctgtgatggagtacatgcaaaaataccattactcatggacaatagttacatataatgtggttatagatgcatttgggagagctggggatctaaaacaaatggagtacttatttaggctaatgcgttcagagaggatcaaaccgagttgtgtcacgctatgttccctcgtgagggcttatgctcaagagggcaaggctgaaaagattggtagtgttttgcgctacatcgaaaattcagatgtaacattggatacaattttcttcaactccttagtcgacgcttatggcaagttgggatgttttaaagagatgaaggaggtgttgacaatgatggagcagaaaggatgtaagcctgataaggttacatacaaaaccatgatcaaagcttattcgttgaatggaatgagtagtcaagcggcggagcttcgtggctttatcgggtcagcagaaggaagaaaactaactataatgcaaaaggagaaacctgacttttgattttgaagaaatttcaggttattgtatatcccttaaagctctgtacattatcatttcatatagtagtttcattctttcatgtaaatactctttaagggttatgattcatctagtacaaatagtgttcttattgatgaattgaataaaggaggtaattacaaagtaaattaagacagtataagtatgtgtgtattttataatcctctacaagttcagtgagttgattctaatttgtaagagggtgtaataccactaagttataactatgacaataactaattaatttgggtaaatagtggcataagtacctaaagttttaagtttgtaagcggtatactcaatgattttttttagtggcataagtacccaatgtttataaaactataattttctt

SEQ ID NO: 306418 - DNA, 1797 bp, Cannabis indica
cagtaaatacttaaaaagcaccacattaagtccgtgaaggagccaaaaacaatgctcatcacaattttatataaattggacacagaataagacacaaatatgggaaacagatccagttttctaataattctatatttaattactattattattaattacataaaattattttacaaaaaagagaatttgtttattatttattttaattatcttcgtacctagcattgttatattagacacaatatttgtccaaaaaaaaaccatggtaaggttgtaaagtagctagtttaaattaaattatagcatgcgtatcacatttcattgctattctttattgtttccaatgtttgaagatatagaataaaataattaatataaattaaaacacacagtgggggtaagtgattatatatatatatatatatatatatatagttattacttgattgtatgcccgtcaagcttgaatccagggccattcggagactctgaagcgacggcactgagtcggggaccgaaaggtgggcgttgctttgacatttgatactcagtcccttcggccttgggcaccggaaccctaatcctatcctgataatcaacaatcttgatattatcaaggtcaaccaccattgttataccctcaataggtctcaagtacaagttagtggttttttcagtgtaaaaacactgaaccttaatctctctagggctcatacctttctcgtcctctccaaaccaccccacagaaagagtggaacaaacaacatgtgacatgttaagccctctcttcttaatggactctataaatgggttgtacgacattggcaaatcactcgctttggtttgctcgtcaaaggaatacactgggtagccatgtccgacgtggacttgttgggagactagggaacgagttgacaagtcaactatgagctctaatgtttgtttgttgtaccgggcgtgaaccagggcacgtctagggatacgaaccgttttcggcctcgattgccatttcaaaacggtgcgtttttctggctcgtctaaacctacgtaatggaatgttaagttgttgtgactggtagtagtagtagtagtagtggtggtggtgggataagcttttttaactatggtttgaactaaggtgatctcagacatagttaaggggtctagtgggtggagcttttgggaggtgattggtgataacgataaggttatgaaaatggagaagattagtactaagagcgccatgtttgtgtggagaaagcttacgtttattttcttctttatatagaaggctttcaccaactattttgtagaatattaatttatatgttccacatgttacaccaaatattaatactaatttattagacatgtgttaagactggttaaaagtatttttttaaaattattacacatgtaggatatgtttaattttatatagatatgtgagtcatttatattttgttaaagcactcagaccatgctagctccttcaaaataactcaaaggttaatatatagctcaaagtttatttaaatttaaaagtgtagtgtaactgagaaaattattcacttctctattaatattttattattctatatccctatacatataaaataattacaagcgcagactaaaaaaatcttaattttggtcaacaaaaattgtaactaaaagtgaaaaaattgtgactaagtataaatcatgatttctatgttgtgactaaaagatccgtggctaaaagtattagtcacaaaaattacaattagttgtgactaaatgtatttttagtcacaa

SEQ ID NO: 306419 - DNA, 1311 bp, Cannabis indica
tgcctaatagcaatgctcgagttttataaatatatgaagtttgaagagcttgactatgcctcgaagttagggagctccaacttttgtgtcatataatatggattatggaatgaatgattggggttctggtggaccccacttttctttatatgtctttctctttcttaatgcctaagaagattttagaaccaatatttccctcaaaagtcttgaaattttaagtttgtaagaccatttttaatgaaaattacaaaaccaaaaaaatgtttgtgatgtattttcattatcttttagccttgttacaaaacttatacaaaatttaatgtttgattagtatatttttattctttttttggtttaaattaaagtaaaacatccactaaaaaagtgaaagaagttcctcaatctaaaaaaaaaaaaattgtctatcttaaattgttaacaagttcacgcgtaaacacatttatttgtcaacaactaatctcagtatcactcatttcacaaaaaaaaatgaatagagtgtaataaatggactatgttaatgtaaaattttattttgaaaggtattactaataaatcgtatagtaaaatttaatattgtaaaaaatttaggggtaaaaattaacttttattatgtgataaatttgaatcaatttttgcatattattagaacaaatttttttacaaaaaaagtaatattttaataataaatcacaaattttttactacaagatattataatgactaatttagctatttaaatgaagttacttaccatttttcaaaaaaaaaaaaaatccaacgaaaaaaacttattgaaaatgtaattttgtttacttaatttttgttggatgtaaaattaaaagacacgtggcatcacttaattatgtcacataaataattagtttttaaaaatatttatgagttagactaattaaatagtgacacatgttattttaggtaccatctaataaattttttattaagatttagactaaagcatctttaaacaagcaacattccaagttcatataagggactcactataattctttagccaatctcaaatggccataaatggtacacgtggagtggcggactcagaatttaaagtgaggggggcataatttttttttttttttgtaaaaggagagagggcataaataaatttaaaaagaaaaatataaagtgtagttagtgaaatttgaacctttaccctctaccatatttgtatctaccttaactgttacaccaagcttacttttatgtctataaatatcattttttttatacaaatatatgttgtaacta

SEQ ID NO: 306420 - DNA, 1526 bp, Cannabis indica
tttttttttcttctcttttgtaaattgaagaaaagctaataaaaattttaaccttttttctttttaatcttctctatgagcttagtataaactacagcaacatgccatgccagcgtgcaattctaaagagaagacgcccacgtgcttatcctgcacccacttctatccttctctctcatcattgccactctctaaaatatatatataaatatatttatatatgtataggggtgataaaaattgaatatttctttttttttctttgttaattagagtacattgatagtgattattttagtcaaacactattttatacgcaacatcgtacgtctcacaattccataataagggaatattagcttaaaactaaaattaataataataagaaaataaactaaagaaaagtattatatagaatggtaattataattggtacttttgtgaaaaacaaagcatacccaaaaaataaaaacaaaaaagtaagagaaggaataggatatgtgtatcactttcaaaatgcctttaactatcctccacctacagccaccagaatccacactaaatattattattattaatatcattagaggtttatataaataaaagtgaaatatcaaaactaccctttgtcttttttggtaatagctaaaacacccttgttattcattaatggcatatatggcccatgaacatgaaacgtttgtatattattggtgtgtaatgaagaaaaaccagactaaaataatttgcctatgcatgcatggttgccagaatattactatcgtcttttttaaaaaataaataaattcattaacaactctagcaatgatattataatttctaaatctatatttaaaaaaaaaaagaataataagatgtatgagattttatctcaaaatcatcaattaataataattaataatgaaagaaataatcttgcgttattaatatgaaactctctaacaatacaaaattaaaatttctataattaggaataacactatgggtggagtattaatttatttagctagctagagcggcaaaaagttttaattaattaaaaaaaatcagaaaatttcttggcagttgaaggcttgaaggtcatgttcatggacacatttcacatcatattattttagacttattccatgttttttttttcttcacatatagacttttttataatcctagcattgattatattaacaatgactccatttttttcttttggtctgggtccactctatatcaatcgttaaacaaattaataaatacacatatgagttatgatattatccatgtgtgatcgatcgatgttatagtttagtatcatataatatatgtgtgtatatgagtgatcccttaggtactacttttaatacttgcattaatctcataaagtatatttattgatctatctatattgaaataatattgatcgacattgcctttaatttgctatcaaaagaaatgaatgtttaataaattagagactttaattaagaaataatttatatatatatatg

SEQ ID NO: 306421 - DNA, 2304 bp, Cannabis indica
aacatacttgtgagtagatctaagatcctggtaaaataaattccaacaaaaagctcagcctcctgggcctttagctgctcctggagagtgcccaaggaccccttggagttgtcatgtcaaaggttgagttgaagaaggaccaaaaacaaaacaacgccaagattagttctagaagacgacactggccggccagccgctctatggtgctaccagggtcagccaacctctcaataacactacactagccagcaagccttgaaaacaaactccttatggctggcaagctttaaacaatagtgcaaagtcagaaaagttagatgtgcaacttaccaaggccaactctaggagaccattcgaagatagcctctcttcctccttatcactgaacttttgaagctcatgactgacggtggttaagactctatccatatgcctacaagccacctccatggctttgtgctctatcgatgaatccacccatcgattgggcctttcggcacccttgcttgaaggttgagtcctccttaatggatggtcaacgatcatgggctacccaacaggtgcaggcccaagaggaagagtaagaagaaaaggtcctgcagcattaccgaaataggtggtctgagccaccttagccctatggtgacctcaagtcttttttgaaagccttctgacaagacctctgagtctagaagccatatctacaaatgaaagtaacaatgttagaatacaagtcacgaataatcaatacaagacaaacatagaattgatggtccaatcaactatcaactaccatcatccttaggagaggagtcatctgaatcattagcaaccatcttgcccttgcctctagatgtgagggagaggtgagtgggcctcacaaaactttggcctctaggcttgttcaacaaagtggcatcatcaataatgcccttgcgagtgaagcgctgaaagagggccctttgtcttttctccaaatttctggctattcgtgatagaagaacatcgtcatccatatcgaagtacgcctgcctcctgggctagccttcttagcaattagggctccatctataacacatgatagcccccgtaactttagactcggggagacacaagtcgtatctctagaagttggccacacaggccaacctaggtatcttcctcctctctacttggaaggacaatatgttgtttgatctatccctcatctgaagggtaggaatggagcgtttgtaaattggtactctctgaaaaggatgatgtcaaacttgctagatatcctaggcaataatgtagttctgggcatatctccataacttcgacaaaggtgtatttttggtatcacccaaccactgatagccaatttagctaaagtagaagcaccccgtccgattctgctttggagtaaacttcaagtcaaaataacatcaatctcataaggagtagtaccttttggggtgatttatgatgggcacattctgaagtatgctgcgatgtctctaaagtacgggtgcaaggtagtactgcccctgctaaatgtggttcttttaccatgtaatctagttgagggcaaaccggtgtactcgttggtccctcgacgacaactcacactggatgcctctcactagtccactctctctaatcatttcgagagtctcagcattgataatagatggaggagagacccaatggtctccctacgctctctgatcaagaacctggagctcagcagcctatattagaacatggtctacgccaatcaacgaaggttggccaaccctattcaagggttgcctatcaccatcatacgagcctagaaaggccattggagagaatagaataagtcctatactgcctccttctagcaggtacaacctcctcaacctcaaactcactgtctaggctctccaaacaatactcggccataggcacctctgcctggccagcctctagatctctactatctaaagtttacgtggcctcccccattataccaaacctacctattattgctaacctggaaatgtgagggttaaaaggtggagctctatgctaagactgcttagttcttggcataatgtaatagtatgaacctcgagatcactcaaaaagtttcaagaaaatggactggatgctagtccacaaaggcaagactgattgaacctatgacaccatggttgtcactgttgggttttgtgccctaaataaaacccattacaatctgatagttatcaatttaagagttttgaagtgattatgttaacatgtattttacatgcttatggtttaatatacatatttaat

SEQ ID NO: 306422 - DNA, 3208 bp, Cannabis indica
  modified_base (37)..(37): a, c, t, g, unknown or other
  modified_base (46)..(46): a, c, t, g, unknown or other
  modified_base (52)..(52): a, c, t, g, unknown or other
  modified_base (57)..(57): a, c, t, g, unknown or other
  modified_base (67)..(67): a, c, t, g, unknown or other
  modified_base (97)..(97): a, c, t, g, unknown or other
tctgatattaactttataaatatctaaatatattaanatttttaanattaanattanattaaaaaanataatatataatctaatcatcgaataaaanacaaatacaatacatctaatacaaacttgaaactagcactctatattatatgttgtacgatttcattaattgaagtgtaaacttgggatacacataaaacactagtatttaagttctaaagtctcctcatcatcgacctttctgacgagtcttctctgattataattagacttcttccataaccataagtattctctcttcttggttttcacattgttctcaataataactccaacaataactcctacagcaaacccaacaaccacagttctccaactaaagtcaataaatgaagaagaatcatcttcttccaaatccggttcactcaaattatcctttgaactagttccacacttcaaagtcaatggatccccacacaagcccaagtttcccatgtacgaactgttctcaaacgtgttgagttgattccctcgcggtatacgtcccgtaagattgttacgagagacattaaagaaagctagaaaagtgagctgaacaaggctttgagggattgttcctgaaagttggttttgtgacaaatccagagattcgacccttgctatgttccccaaagacgaaggaatttctccccagagaacgttgtttgaaaggttgagaactctaagcccttgtaagcttccaattgcctcactaatctttccttcaaatctattgctagacaagtctatcaccacaagtacttcttggatcttcccataaggtacttcgctacctttcattgttatgctggtggagtacgtgtactccaacatccatgtccgtctaacagcttcaaaactcgattctgttttcatgtacgacgtgcttgactcgattactttcatggcgttccagttttccaagtacttggatggaaactggcctgtgaaattgttgtgagaaagatcaataacgcgaagattttggaattcgaagcttgaaactggattggttatgatcccatgaaggcgattggatcgtagtatgagtagtcttaagtttggtagagtccctagccatgatgggaaaacatcaaagagttggttgtctcccatgttaagactttcaagtcttaaacatttggccattgatcttgggatcggtccctcgaattgattgtagcttatatcaaccattttgaacgagtttcttccctcgtttgagcatagttgaggaatagtgccgtggaagtggttgtttttgatgttgagtactgccagcaagttgtttggattctccatacattttggaagtgttaacccactgaacaagttgttcgaaagatcaagaagttgaagggacttgaggttacaaaacaagggaaattccttgtcatcactttgtggtgatgatgatgcgttgttcatgttgttgttgtctgctacttcaaggctcgttaagaagttatcattaagagccaaatacgccatcgtttcaacgcttgaattccatatccacttgggtattgagccatgaatattgtttcctccaagatccaaataccttagtctatcttggtacctcaagaaatttggaaaatggtttaaattgcacatgttcaatcccaagatctcaaacttattagtcatattcatgtcctccgtttctctggtggtcaccgtcaaattattatcatcaagtcgtagttcgaccagataagtcatgttaagaaacaagctgaaatccacagtaccattcaattcattctcgaaaagattcagagttcggagatttgttaatctagacagtgatggcggtaaaggaccggacagcttattttttgcgaagcttaaaacatttaagcttgtaagatttccaatccaagatgggatttgacctgttagctggttccctcccaaccataatattgtcaacttggttagattttggagaaacgtagggaattcaccgctaaattggttgtaggaaaaatctaaataggtaagattttttagtttagagattgaagtaggaagagtaccagtaaacttggtttttgtaacgctaagaaattctaatgaaacaaggttacctattgaataaggtatagtaccagagaaactagtacgactaaaccatattgttttaagaggactacctgatcgaaactccgggaatttaccactgagattttgattgtggagaggtgcaagaaactcgagtttcggaagatggaagattttttctggaaattctccatagactccacaatttcttaaatgaagataacttagagaagagaagttggctaaaaaactaggtactgtagaggacaaattcagaaaactaagatcaagagacgacaaattggtgagtttggacatttctgatgggatttgtccagtgaaaaaggaggaagagagattgagatgtgtcaactttgggaaacgacccaacccagatggaattggagaataattgaagtgattatcagccaagttaagcttctctagataagggaaatggaaaagagtgctggttgagttgatagagccataaaggaaactactattgagattcaatactatgacattacctgtgttttcattacactctactccttgccaagagcaacaatcggtttcttgcttccatgatgaaagttttggataggccaaaggatcctcagaaactgacttatttatgataacactctctttgaattgcaacaaggcgtttctctcatcttcatggcattgtggcttcacacaattagggaggaagaaacacaagcctagaaacagtaatgagaacgtgtatgactccatgatctttaaatttaagaattgtttaacagcaagatatataggcgtgtagaatattgttcttgtatataaatatttgatcgatatatctgtttacattattgtttaatttgtatactgatttgagaaacaaaatcgtttgaccaaatgaaatctcttacatgtgacagaagtaaactatcattttcaatcgctccgcagcctattttgaaattccagtatatgatatagggttatttgcggcaaaatcccctaaagtaggcaggtttttgcaactaaccccctaatctaaaattttggtggtaaaactacctaaaccactagtccgttagcaaatacactcccc

SEQ ID NO: 306423 - DNA, 1543 bp, Cannabis indica
aaaagtgcggattggatcggatgaacactcctagttcccaagcccacggcaattccaactaatggtactcataattcttggtgggcctggaaaccagaacccaccttcttcatgttttttgtcacattaacaacattttgagcataattgttttttgaagtgacgtcagtatccattggttcttttgtagtaagccccagcccattaagagaatcagatccaagccttttcctttttgaatcatttatttcaagcgtagtgtcagtagtaaaatcagaaatattgtcattgaccacaatagtatggtcatgaatgccatgcaattgttgtccctgtttatgtgtgtgaacagcttcaatattgggatttgatgggctaattaaatcaatctttgctgattctgtggcctgatttggtggcgagacattatcatcacgagggtcaacagccgcatcctcctcttaacgccgtttctccatcggacttccacggagccatggtgatgcagtgaggaacgtttgtcttctggacggagctttcatatcaatactgtatggcttgacaatatcttcaataggagtatcatagattttagcacagaaccgttcagtgtgtcccatgacaccacaaataaaacagaatgtaggtactctttcatatttgaagtttgcataggagggatcaccacctctgcgacgaaacttcattcttctcttaagtggtagatcaacattaattcttactcgaactcgtaggtagtcacggaaattcctcgaaagttattaggatcggtatcaacaaattccccaatgtaagggacagcttcaggtattgcccaatcagttttgaatcttgcttgcaaatcatgaatctaaacccacatatccaacgtgttcataacagtcagctttggatcctcaccacgtttcagtcgttggatgataagttgtttgcgatcatatgtccagggactgcctgaaataactctttggatatctatctcatgatagaattgaagtagaaatcggttttgctcaaggatcttaacatacatacctttccctggtttccataagtcagcaataatattttgaaatatctgaaaatcagagatttttccagttaacattcggccaacaagacaccacctatcatcaaaatctgggtcactttcctctatattgccatcatcgaataaagcttcctggtcttcttcttcttccaaacagatatttgcccatcttttgtttattggatcaaccgaactactgcttgaagccataataaaaatagtttgacaacaaaagacaaaacagaacaaaagttagaattttcaagagacaacactccaaaaacgagagactaaacactctccaaaacgagagacgtatttgaatgagttaaaagttatttgtaatatcattctttgtttaactaatcaaaatgcatatattaatttatatttaaaaatatcaatgacttatatatttatgatatatattttttttaaaatacaatttactaaaatggtagcttactggat

SEQ ID NO: 306424 - DNA, 2084 bp, Cannabis indica
ctctggttgggctttgaaggactcctgccagagccagtcctgtcattaccaccagaagtatctctcctttgtggcgttttactagaatcattttcacgcatagagagagaaattcgtccagtctccatgtttgcttcaactaatttcaccttcacttcttgcccaacagagacaacacttccaacatctttgacatagctatcactcaacatggaaacatgtaccagtccatctgtgaaagctccaaaatctataaatgcaccgaatggctggattgatctgactttcccagtaaaagttgcaccagcaactagttcctctttgcttactggtggcatgtcacttttcttaacaggtcttgaacgttttgattgagctgattgagctggcgttggactggcatcagatttcacttcagcttcatcagacaaaactttcgaggctccagcatcctcatctactactggagattcttgttcctccacagctacatcagtttctgtagctgataatatatgaattctagaccgattatgtaatgaacatcctcttccatatgatggaagcaatctaaaagaagctgagcgaggtagcaaaaaattctgtggggaacacgtttttatggtgcatttctttgagaagctgaatcttgttgagcaataagtctttcttgttctgaagaccgtcccgggaataagtgaaacactgcttatagagtatggaattacaggcgtcatattgaatcaaattacagaaactttccaatactataggtccttcatcccttgcttcacctgcacaaacgaaaatttgactataagttcatcagttaccaaatagtcaagatagattatgtaattacaatttaggaacttgctactacactgattgagctaccaaattttttgcaactaggtgaattgagatgtaagtgatatattgattcaacttgttcatataaacaaagaatataagttttatgagcaaatgaataaataatgtcatccgctaaaacttaactacttaactactgtcaatctattgtttatcattattctcagcacgataaaaagaataaattcattgattacaacgattcactcaactcaattatgaaacctgtaaacccaaccataacccccttttaccaagaaaaatgttcacgaaatattttggtacttgcttaaaacgcataaatacagcacagaaacccctgttcaaccctatcattatcatctaaccataaaaatataaaagctttagtgcaaaccaaaactgtaccccttagcataaaactttgaaacaccaaaactgaacaccgtttaaacatatatcctcagtcgtcacactgtagaatccacttaaaaaggcattcaattctacaatttcataaacaatgcatttcgctaaattagaaaacttaaactctccctaattatttgatggcattaaagagtgaaacaataaaacaagtaaagcatatcaagaaccatagtagtttccagccctgaacacccaaatagttcaaaacccacatgtaaaagctgaagagaaagcatgcggacatgttaattagttgactcaaacacaagaaacaatggaaaacccaatgagcccattataatagaaagcagaaatattaccttgtttaaacaaacaaaacagaaaagaggttttgaattgggatagataggtagttcagttcactgtagtctaactggtggtactggtagtctggtactttgataaaagattattaatgagcgctttgaggagagggaaatgaaaggtgaggctttatatatccttatctttgtggtactgttttcttgtttctggatggataggcagagctatggtgaaggtgaggttaggagaggaacagagaccagttcttccggcccattttaatgggccagctctaaccaattataattatgggcccataattgtgaattcaaggataaggcccaaataacaatggaggtgtagatgaccaatggttcaccgttttattttcacaaatacataaaaacaacaaaaaaattacaaaatacagtttcacaaaattttaaatattttta

SEQ ID NO: 306425 - DNA, 1445 bp, Cannabis indica
ataacaatattaacacataggagggactagacaccactagtgccctttagcatttctctattagaaatgataatataataatgattaaaatatttttatagggcccgaagttcattttactttaggaccgaccctaacactactaaatattaaatttctcagtattaaggcacatttgattgggtaatagaatggcaagaattaaatattatcatatatatatatatatatatgtattgaatgaaatttctactataagccatttaattgtaaaataaaaataaactcttttttttttatgtataataaatttagaaaaattatcctatatactattatttttattttttttattttttcgatttgagttgttctgataatttgtatgtgtgttaattaatatgtgaatttaagttgatctgttgctatgtacaatatttctgtaaaaatataaaaataaaaaatcgctaaattttattctattctatattttaatttctcccataaagctaattatattttaatatttttatgttgtatatttaatctaattagaaagggaaacataaatccttcatgtttgtttacataattattaattaattaatttttttatagaaaattattaattaattgaatgtccatttttataagaaaatatagaatagtattttaatatgaatgaatacttttttaagaacaaatcatgatcaataaacagtgctttgattgtttcatcactcttcatatttaaaaggatatcaaatatttatagattgtatattatatagatatatgtaatgaatgcaggtgtacttaattaacctaaaatttaattaatatatcatgattttaattatttttgcatggatcatgattcatgacaaaaacataaattatacacgtatgatgatgaagacactttaatttctagtcacttattaagaagaaaatatcaaaaatagacaaaattccaatatttaaaagagcttaatatttacattttatatatttttggagatattgtttgatatttttatggactataaatatgtttggttggcaattgaagaaggcaacagtgacattaaatttgtgtttctcgtgacaaaaaaagaattttattaaatgcaataataaaatatttttttgggaaggtataaaaattaatagatattttagtatacgcacatatatagctaactaatcaattttactaaatgtaaaatatagtttacattattaaaagtatactctaatggtgtgttaaatgataatgtaaaaatttacacacaatcaaaagtcatctaaatttatatatcaatataaatatagcatgatgcaaaatttgcatcacaataaaatgctatgcatgcttttatattatttcatttttaatattttattattttagtctaacatactcatttgcattaaatgacttg

SEQ ID NO: 306426 - DNA, 1863 bp, Cannabis indica
attaattagtggtttaatttgtgatttgtgttaattaatcagacattatgatcccacacgtgcgtatgcgctttcgaaacttgctaatgttctacacacgaaggaactcgcaaggagactaaaggtaattatttgatcaatcattttaaagacaaatttaattaattaattattattattatagaaaaaaaaaaagtgttatttgtttgtttcattaaaaaaaataataattgatacagaaaatggaagctaatgtgactgtaaactgtgtacacccgggaatcgtgaggacaagactcaccagagaacgtgagggtcttattacaggtactaattattattaattaattactaattaattagctttatccagatgattagattggatcatttttaattaatttgttattattgttattatatttctatagatttggtgttcttcttggcttctaaactcttaaagactattcctcaggtaaaaaaataattaaatagataaattgtatttttatttttttatttgtaatattatttatttatttatttatttaataataaataggcagcagcaacgacatgttatgttgcaacaaatccaaaggtgaaaaatgtgagtgggaagtattttgcggattgtaatgaaacgacgtcgtgtaagagagcttctaatttaaaagaagcgaataggttatggtgtgcttctgaaatcatggtttctaatatggacaacaaatcatctcttgccacgtttacaaatttaatataataatacatagaaaaatatatatatagatattattaatatttgactatgaagaaagacaaaaaaaaataagagagaaggaatatgtaactgggagaatatacgatttagacagctagaatatatattattataattaaggtggacttgcttgtattgtatgattgtgtgtacgtatgatatatatatatatattatatatctacctatatatatattgttctaaagtagtattaattttatccttaatgggtagttgtacttgtaagctctctattatatatataagcaagttgttcttcttttttatttttgttatatatatatacacacacataatgatggtgatattggtagatttttatatattggcataataatgttacaaataataatcagatcatataaagatgatgaatatattgaaagaaaaaagtaaagctggtacttgcaaaccctagttgggtacgttcttgatgattataaaatatatattttcataatattaattctataattattaataattaattaattaagaaaaatgggaccagttagtagcatgtggcaggttgatttttagaagagtatctttgatggtttttattgaggtgatgatacgagaccctactaacatgccccagactgttatatatatatacacacacatatatatatatatattttttatatatttgtatctatgtacatgcgtttaaggaaagataacttcaaagcattaattattgataatttattagtttattatatatatcgttttcctttttctctcttctctgctatacagtttgatcatatcacttcctttattttttattttctacacacaacattatataatatagattgtacttaatcatatatatttgacgtacctcatattttatatggtgggacttgggagccccatataaacattttaattttgtaaagcaaacaaattaagaataaagtgtaaaaacaaatatatagaattatcttaatagatcatcttaagtaaacagacaagtaccacaataattgtctgtattttttttttaatgttttgggttatgtatttttattaattaaataaa

SEQ ID NO: 306427 - DNA, 3725 bp, Cannabis indica
acctatactcctataaatagggaaaaattcaatgagaaaagggacggtaaaatttaagagagaattattattattcaaaattagatattgtattctgtactctaaaaatatctgtaataagaaggactcgaagagtatgtagattttaactacaaaatcacataaaaatatttgaagttattatttcttttattaattattaatttctgtagaatatttattactgaaaggctatttaattttggttaacaaaaatctgcattaacaataaatattggttaatatttattactgatatttttccaccgtcgcctattctaccaagtatctgagatgctcgtataagcaacagttttataaaccgtcgagaattctttactcgatagtttaaaatttttgggaattcaagtttttagtagtgaatttgaacatgatttcatccttaatgaaatttgatcctctagcgatggttttgacaagaagatctgcatcaactgaaccacacaatttgatggcaacatatccaaaagtccaaaatccctttgagttctgtgttgaaaaccccaaagcacgatcgccaccttgggtaatccacccacagttccttctaatgtaaatcccataaaaactagggttacaaactccctcattgcagtgacactgggtgtccgaatttaggtgtgccagtcaactttagtggaaactgctgcaagacgatttacatgcccctaagtcacaacctatgtaaaactagtaagtgatacgctaaattgcttttcggggacttaaactcaaaactaaaactttttatatgataaatagcgtgtgtggcaatactctaaagatcaagaacaaactgaaaaatgtgactttaggaaaaacaccacaaaaaaaatttccttgtccctatctgctaaaaacagtttgccgtttttagctgcagatttgcagaaaatctcatttctccctcaaaactaacccaaacaacctacaaagctctggaaacatcaatttaagctataaccaacataatccaatagaaaaaaaccatcatcaaaccacaaaacacaaattcaccattgaaggttcaagcttgagcttaaaaaataaactcaagcttaaacgctactaaaacccacaaaaccttctcaaaataacttaattaacgttaaagtaacaacagaagatattcgcaaacaaccaaaactcaaacaacaactcaaaacctaaaattgtttgtaaaaacatagtatttaactaaacaaaacaaagggtacacatcttaccttggtttagctatgaaaacccttagcttcctactgaactctccttgaatttggtctaaattggtgaatgagtttagggttccttggatctttgttgtggttgaacaaagatagagaaagagagacttggattttttttttctttctattttgtgaaaaaaagatcaagtgtactaaagcattatcctcgtattcagtctattatctaattaataaattaaacataggattaacttaaaatctacccaaaaatgaataataaataactagggtaaaatattaattttacccttacttaagcatgaagttatctaaccacttagcggtaaaatagtcctaattcataaccccaaaaactttagcatttcaaatatttaactatatttccccactaattctaagatactaccatatcaaagtgactctataggccaaagcgttgcattccaatgttactgggcataaaatatgtaaaatataaaatttcatatataacataattaatacactaagaattcaaatatatctccataattgagaaaataataattcaaagcctatttctgacaataagtcctaataatctattaattcccataataaagctaagcggcattacaattatccccttatgaaaatgattttgtcctcgaaatctaaccttaataactctggatactgagcccttatattagtctctaattcccatgtggcttcttccaccttactatttctctagagtactttcaccaatgttatggtcttattctgaaggactttatcctttttgtcaaggatctacactggttgctcctcatacgacaaatttggttggagctctaggatttaataactcagaagatcgattggatccaagacgtgtttccttaacatagagacatgaaatacgttatgtactactgataatgtttgaggtaaggctagacgataggctacaaatccaacattctcgagaatctaaaaaggccctataaatctagagcataacttgccctttttcccgaaacatttaacccttttcattgaaggtactcataggaagacatgatctcatacctgaaattctatatttctgcgttttggatctgcataacttttctgcctgctctgagaggcaagtattttggccttgatcttctctatagcctaattggaccgttgaacttattcctagacctgggatttcctttctctggtctcatcctaatgaacttgagatctacatttcttaccacacaatatctcatagggagtcatccctattatactttgataactattgttgtataaaaactctattagtggcaaatacttactctaggagccttcaaaacccattaacaggctcgtaatatatcctctaaaatctgaattgtcctctcagactgattatctgtgtgaggatggaaagatgtactgaacttcagctttgtacccatggctcgttaaagactttcccagaacatagaggtgaattttagatccctatctgaaataatggacttcgaagcccgatgaagtcgtactatttcttttacataaagatctgcatattgatcgattgaatatgttgtttttactggtagaaagtgtgccgacttgctaaatgttccaccttaatcagcagactagtcaagcatctagtcacatattccaccacatcgttttttcatactgcaacaccaatagtaaggttttaaatcttagtacatcttggtggtatcaggatgtaatgaataagaagtggtatgagcttcatcaagaatctcctttctaaccacaatactacttggaacacaattttgagttttataaagtaacattctgttaccgaacactgtaaaatatttagccatgctagctaagaattcttctcaaatcttcaccgattctacatctaccaactgagcacttttagtcctctccaacaagtctgattgtagtgttaaattactaagttttccaaccccaaactcaatacctgatttgaccatgtcatcttcaaattgaggtgagatcataatcgtgcagaaaacctgcttaggaacttttttgcttaaagcatctgcaactacattggccttcgtaggatgatagaaaatttcacagtcatattcgttaactaaatctgttgacctcgcttttagttaatgacagtgagtcaattatgaagcgattaagaatataataaaaaaaaagcaaaaactaataaagtgataaaaacaaccagattttaaagaggttcgaccctttagtacggtaatagcctactccccttagattgtataactcgagaacaaagaacacagtgtttctctctaagctcttacaatgaaatctctgagtatttctcttagatctctttctatagcaattctttcgtatccctttttcttagtgaagctagatcactattta

SEQ ID NO: 306428 - DNA, 1385 bp, Cannabis indica
atgttgaacatgttatggatgtaagcaagagggagtttgttccttgcccgaaagtcgattcttctgttgtcattatccgtccgaaagctcaagttccggatgttaacatggaagaatggttggctttcacaagaacttgttttggtaaaaagaacaagacacttggagctacctttaagcaaaagaagaaggtggcagagctgttaaacttttctgatatggctgcctcaaatgcagagtataatgatggtggtgatgatgatgaaagtgctgacagtgatggtgaagaagattgctcttcttcttcgggctcctccgaaatgggggtgagccctttcaaggagaagatcatgaaggttttaaaatcaggttgctttgatggtaagaggccttctaagatgtcaaacgaggaactactgcgtttgctagcaatgtttaatgatgcaggtgtttatttccatgataaatcaaataccaagtgtgaagacattaattgtgaataagcataatcatcatttgatgcatcataatttcacaaatacattttcatgatttgattacattcatcatttttctccacatatgtaagttcggtcacaacaatcagtggctgagaaagaaaatttgaaggatagaaatgacagtattatcatactgtttttatattgtctttatagatctaaacaattttacttcttatttaatttgtatttgggggattatctatgttaatatgtttttcaggaagtaaaaaaacgtattgtattttatatagttcgtcaactgatttaattcaattaatatttagttgtaattgaaaatttagtttttagcaaatacattagtttgcattggtttaatttttaactcactcctaaaggtcggtatttgaacttttgtacttactgcaaattggtggattattatcaaaccagaatcattttcaacaattccataagtaatcacatttttaaattgagttttggggacagagggtaatgaagaagaaaaacaatactgatggtaaaattcttagtagaaaacgagaagtgtgttgttaaatttaatcaataagtcagaatatttatatatatttttctatggaaataagtcatagaatattacattttaatatttttgaaaaaaaaataatgttgtgcaaaaatttgtgataaatttgagatatgttaaaaatttaactaaatttagtacaagataaaacatagtattaatactaaattttatattgtattattgttaacagatatttaaatttttatgcatttttttttatatgtattacattttctttatgctaaatataatatttacttatttttgtaccaaattatatttttagagaattttttatttttatggttttt

SEQ ID NO: 306429 - DNA, 2575 bp, Cannabis indica
tttttaaaaaaaaaaataggataataataataataaaaaataatcagttgtacgtgatacttgaaataatatttcaattattttttaccacgtttaaattctcattaaaatattaattaatttttaacaaaaatctactttgcgtcttttttttttaaatgataactttaatgtctagtatcacataattataactaaagagcattgctactatatatcagcttgttatgggtaaaaaaaaaaagaatacacaacccagtcttttgctctctctagagtataacttccgttggaagagtatgggagctagagtgcttattcattagctcaccattgtcccagtattctgctatggttttttagctctctatttcattagttgtgtgcagtccgacttgttaggagttcaagagaatggctgacccctctctaaacgaactttttgaagattcagtccaggttagtgtaaatgacatcacattggatctccatcctggtgaggttgaccccccaaatgaaccatgcaagattattttggggaaattattttgtcacaccagacttgggaagaaggcaatacaaggctccctgaagaatgcttgggcatccatctcaggctggagctggaaggaacgtgacgacggacttcgttcagttctcttttcagaactgttttgatgctgaaaatgtcctactgcgaaggccatggctggtgtgtggatacttactggttcttatgccatggccttcatggctcacacctgaggaggtctcatttgaccataccccaatctgggttcgtctgaagagtattcccccattttactggaacaaaacaaacctccaagagttggctggaaaagtttcatcggtttatgagcttccccggtttattgaaaaaaactttgaaagaggatccttcggtatgggcactctacgattcagagccacggtagatttatccaaacctctattctcgggattcttcctaagacgtccaggcatcaaagatctgtggttacaataccaatacgaaaagctacccaaaatttgttacaagtgtggtctcatgacacatgaacataggttttgttttaagaaaccaacagtgataaaagatgataaaggaagcttctttcctatgtttgggaattggatggctgaagaggcaaaggaaaaatcgcctttccaccccctattcctaactggttcaatgagtggatagttaatcagcaggcagcgaaggatgagaaagtgagacatctcctacagaatcaaaaaataagtttgcagattgaagccgcggatatgcgagaactccggaatcaatatccaggcaaaaggcgtcaagtggagacggtggtggaaaccagagtcgacgccgaagaagtagtgctgaaccggttcccagcgattcatctgccggggataggtgaagttactccttttgagaacactacaaacctggtagtggaaaagatacttcctgaatttccttctttggagttaaaggagacaatgcagcataaagatgtaccaacctgcagtagtccagaggccatgcctgtcaacaacggaagcatgcggtctggctcaacctcccgttttgcacaaaagcaaagggctctggtgaagacacacaaatgagaaaaaatagatgagtcaactaaactagccgttggagaacagatatctactgttggcaagtccatttgtcatgggccaaagaaggtggaggcccaaaacatttctggtccgagtgtgaaaagcccaagagtgataattaaaaaagcaaattcaactaaattgggccctgaccaacaaaaccttttaggaacccaggcccatctcattgattggccttccaaagaatgttgggaaattgcctttgatcaattgttgggagcaaaaacaattgacaagtaccaccgtgaacctactttgttcaaccccatactcgacatcgaagaaataaggtgctatgaggctgagcatggtccgaggaaaagaaattcaactgatggtttccttatgttacctgagaagcgtgagtatgaggctttctctccaaacaaacatgatgtcatccacaactgtgaagaaaaagtggactcgcctatgcttgagattgagggagacttctcgccaggatcatatgaaattaaacagagtcataggaaaagaggacggccaagaaaaggtacaagcccagttccaaagcctcaagagcctactactacaaggaaacgaggaagaccggtgaaggacccatctccactcgcagcaagaacgattcgtctcaaaagggaaggcagcaaccgaaagcagaaaaaggttggtaaacactactctaacccatggaacactgcctctgtggagctagcaattgatcttcaaaatcattttgtggttattgagaaaaacataaacgctcccagtaattgtgtgatcgaagagatatctgaacttgataatcaacaccctcagttaagtgctacctgtgacaatgaccaaaaggaaacaacgcagcaggttttttgctttggggctacggagacttgccctcaaaagtctc

SEQ ID NO: 306430 - DNA, 1656 bp, Cannabis indica
aaatgtatttttagtcacaatacttattgtgactaaaattaaattagtgacaacttgtatctaaatactatgttttagttataagtaattttttttgtgattaaatatttagtcacaaaaaaatttatattgtgattaaaaaattatcactaaaaataattattttttgtagtgtttcttagggtaataacttttcaaaactcttacaatattacattttacaattaatttattttatgtattctgttttctattttccatttgacaactagtggttttatatgttagcaattgttgaatctaataaaaataggtatatatatgttaaaatacaaaacttgcaaaaccttaagtagctaaactcttcaagaaattgataagccccaaagaaaatgccttcatatattctcctttattaagcagctatataaatattattaataatatcaattgtaagtttcaagattaaattccaccaatagaaaacaataagtataaagacaaaaattagtacttactagatctatttgtttaataaaaagtgcacttggaacaccatacataaaatattaataaagatttattaaacatatataaaataaagatttcctgtcccaaaaaatatatatctttataaaaaaaagtgattgtttttttttttgttggtaaagaagtcaaaacctaataaggagtttaaataaataggcatatagaactcatgtaaaagtagtagtggtgttctttaaagtgaatgatacatgctaccacatatcgaagaaaattaggtgctcatttcttcatactttataaaggaaaaacataaagaaattgctttccatgaaagaagtaattaaataagttaataataaaattgatgatattttttatataatttatattagttatatagtggtgtaatatatgacagtggaaaccaactcaaattccaccatttatagaacactttccatacacatgcttttatctgttcaccacgtcttcatgcccattttcagtggtaaccctagactctgtatataatccacttgctacaaatataaattaaagtgaatacagttaccatatgtattgagttaaaaagtaaaaaacctttaacatatatattggtggtaaatttatattcgcatatatccactggcaattttgaatttaaaaacaatcttttcaaggaaaaactatgaactaattaataatattttgatattaaatcaattcttgtttaccacaacatcccatttcttctctgcgcgcattggctcataggttagaaatttatttatttagggctacaagtgttttataaaatatgtattgagttattatataaatgagttaaaattatgtggtctattttaaaataagagtaaatatcattttggactttgggttttgtaaaagttatcaattggacaatttattttgttaaatgacaaaatgaactttatatttttcaaaatggtaaaaataagacactgagctcgattttcaacaattttattttttaaataactaactttaagacaatttctaacacgaacagatacagaaaatgtaactagttttgtcataatatctctatagatcagattattattaagttttattttgacaaaaaatcagttcagggtactattt

SEQ ID NO: 306431 - DNA, 716 bp, Cannabis indica
aattaattaataaaagtggtatttttcaacttaccccaaataattaagtatcgatttgtggagagcatggaggagaagattatagggcccgcgtaatgggcccaagaagttttatggtaacttcgtaatatttatatacaaaaacagtatattatttataggaccctaaggtcatttagttagggtaataaaatgaataaaaaataattaatgttcattctactcttttatttaattatatttcaaaataaattttctatgattttgatggaataactcttttattttaaaatgtatgaacgatcattccaaagcaaaattatttagttattatttttattttaataattttttttatcaattttttaatgcatttaaaatttaatttcattctattctattcttaatattattcatatttctattcctattattatttatatatttttatttattttaatcaaacgtgacttaagtataaactgaagatactctgtactaattgaaaattgagattaagattggctaagattttaaaagttactatttgatttttgaaatttcaaaaatacttttgcttttaggtttttgggccctttgattcattgggtaactagtatattttttttgggaaatttacatgatatactaactttgtcattttcttataaaaatactgtcagacggtattttttacttctttactgtgttttttt

SEQ ID NO: 306432 - DNA, 1486 bp, Cannabis indica
tttgtaattacaactttttagttcacttttgtttatttccttttttagggccataaatgtaaatttcatctatttttggtctataatagaaaaaatctcatgatttaaagaagagaacaaccaagattttacgtggttcaggcgtaaatgagccttagtcaacaattcaatattgttgagctaaaaaagcttcatagtaactttacacaaatgtttttgtcatagcagatgaaccctaattcttaacctttttctcagaattgatttcccaaccaatcactttacgttaagggatcgtgttctatttataagctagatccgagtatgggtaaatccagacccagtaggattttgaggtgtcaattaggcctactgatggggtaaaataaaatatatattgatgttgggccaattgggtgaggcccaattcacgagataacagtcgtttgtatgagtgtggactgactatgatgccacgtgtcatgcactgctatgtgttggtaacgagaatgtcagagaatatgacgttagatgaaaaggtggttgccttttcgttgtgcgtgcactccatgggcctgatgtaggagacaaactcctaacattgtgggaccctatgtttggaggacaccacgtagaatgatattcagaggcttttggatgtctcttcaattgctcgtgtctggattaccctatgagggaatccgggtagatcttgatggacccttcgccttctaaactaaacaccctttctcgtactaaagtggtctaaccttgtagtgtctgccagctggacttacatccggatccagagcccgtagcctgactttgtaagtgggttgacttattgacttgattgggcctagaatgggcctgctttggctaatgttgggctttggaaaatgcacacatcattaatctagaaatgcgaataatagttactccccaagccttcgggggtcaagagtcatggaggcttgcaacctactcccagattcattgttggatgcagaactatgaacgaaagcaacctcttgggattccaaagcagtaagtggcagaggcttgcaatccttttgtcttcttggaatagagaacaaagtacatgtgtcatgaatcttttactccatgcacactacgtgccttgaaaaagcgtgtgaagcctggagatgtgaaatgacgacgattcatgtcagtgggattgatttctgagttaaaaatttccaaagaggaaaaatagctaaagagagaagaaatccccaaactttactggtgaatgttcgatatcataaacgaaattctttgtgttctgcttcgcattcgattaaggctgcaactagacacaccacccaagccctcaccattgcttcttcaaggccaccgaggttgctgggttttgaggcaggcatcgatgaacttctaggatgtgcttgaggcttttgttaggttatttttagtattaattttagattaagtttagtattttttt

SEQ ID NO: 306433 - DNA, 3082 bp, Cannabis indica
aagaaaactcacaacaaaaataacacattgggtacttaataaaaactattttcagtccattaattaattccctcctctcataataattatagaataatactaaagtgagcattataatctagttgtgaattaagaattggtttaagatagcttgacccattccatgagcatttataaaaaaatgaccagcaccaggcaactcatggtagtgaatccatggaagcttatcaacaatgtaacgttgaagctccaatgggacaagcttatcttcctctccttgccatagatggactcttccttcattgttgggaaaagggttcttcaaatccattggatcgaactcccacttcccaaatccaaccatcattgctcgatgaaacgactcgaattgtccttgttgtgccacttgttgctgtaaaaaacaacaaaatgtttagtaaagtttattagtttaggagattatataataataattaactaattaccttgtgcttttccttttctggagtcatttttgagagtgagttgttcaagatttggtgatcttgagcagagatattgataggatttccacttataactgtggaagaagggaaccaagtttgagtgttccaccaataggttagccatgggatgtagtaagcaactcttagtgcccattgatcttcttttggctgtcttgaatagcactctttccataacttagcagggaatgatggccatcgatagtttataacaggggcaattagtcctgctcctgcaagtctatattcatacaaaatatataaatatgtatataatttgggtatgtatgcgttaatattattttgaaccctatattttttatatgttatataagttaatgatggactttttattttattaaataaccatgtattttttaaaataatataaataaaatcttaaatttataagttttaactttatttttaatataattaacttgctcacaatttctagtacgaacaaaagtagaaaacataaccacttttgtcatagctcttctatatatcgtattattattaagttaattttaaaaaaaaaaaaaaagtctaatttaacattttataaaacaaaaagtctaatttaacattttataaaacaaaaagtccaatcaataattttgcaaaataaagagtataaaatgttatttactctaatttttttgttacctattagggatgtacttgaggcaaccccaaacagcttggccacccatggaatttccaagcacatagaatttggatccaagtcccaaatggtcagcaagctcttctatatccaaagccaaactcttcactgtttggttaggatctgggtcactttctccataccctggtttgtcaaatcccactatgtgaacacctagttcttcaataatatcctgaccacatgcattgtaaacacgccactaaattaaaaatatatacacaatgttatttcccttgcacaaataattattgcacttttgtaattctgacatcatttctgtaaaattaatgcttaacatgcataaaattgcactacgtaccacaagtacaattatcaacacatctaccccccacccacccacattctctaatttattttgttcttctctttactatgttttagccttgtacttagagtgtttgtataccttagattaagagaatataaaactcgagtattggaaaaatttatcaataccatcaattaaacttaaaaataatagaactgctttgaaacataaatccttaattagtaccaaactatgtatgtatagggttaagtaatgatttcccacgaacggttatcatatttcataaaaattatcacatcaatggtgatatgacacactgaatggtgctaaacactatacttttcagcatttctttttagtatgtgacaagaaaatcaatggagaagttagagggttggagctatatagtgccaactttttcttcataaaaaacactaatatatacaactatacatgattattatatatacatattcaaccttattttgttacctaaatgagaagctaatttaaatatgaaaaagcattatataccggaggagaaagatcagtggaaagaattgatggtccatgtctggaggaagagaagccatgaatgaatatgatgttatagttggcttgttgtttagggactccaaattcctcgtaagccaaataccttccatcccttagcttaactcttggagcagtaatcggtggtccctctaacgacccacatattttgggtggcggtggtctcactactgatattactgccttgtacccccatgacaccaccaaccccatccccaataccaatactggagccacaattccctttaacaactccataatatattctctttccatcgatcccctgaaataaaatacatacacatatatatatatatatatatatcattatatatataatacactatataggcaataaaatcaaatcatcgaagattataccaaagagggaagatactataaaatttggggtaggcaggcaggagctttctgtgttcttttggtgcttcaatgcgttgtggcactgtacttactatatcttatagtttgtgttttttgcttttcctaaagctgtttaattatatttatagatagatattgtcgacagagaaccactttgacagcaatggcatcaacaaaaataattgtttcaattgttccccacctaatatatttagccaattattaaaatttgaaagagcactgtgctcattttggaaacattttatcatctttttcttctctctcatatgccgcataatacatatgaccactatatgggcaactttcattggagttggccttacgctcccaaatatatatttttttttctaatttcttttagttataactagataatataatggcttttcgtacagctatcataattttttcatataataataaaaaaatcattatttatcaatataataaataataacgagtgaatttacagtacacccccttaaaaggaatatgtaacgtccccgcttcaagcctccattaggcccttacacccacggacta

SEQ ID NO: 306434 - DNA, 2968 bp, Cannabis indica
tttataaaaatatggcatatcaaataccataaaaaacttaaatgtgaaaaaatgccatagaaaagtggcaaacctaaaaatgccatatttttctaactttgttataaaatcccatatttcatgtaattttcactttttatattgtctccttttatttttacattcttttttaaagtctatcatttttacttctttctttaaatattgtaccaattttgcccatgtcacttcaagatactctccatgtggctctcttatgtcagggtattttaggtacaatacatataaaaagaggtatgtttcaattaaatataaaattagaggtaaatttgatcaattgattaataaaagtagtatttttcaacttaccccgaaattattagtgtaaaattttgaccaacatcacaaataaaaagataatctaattcaataaggaactacatagaaagattagaatggggtaagaatacaaaaatattcaaagcatgatttttatttctcctgcctaactagtttttaatattattattgaatgaaaatttatcatattcaaatattaaaataaaagataacaactcaactgggacatcttaaattgaaagtacaaccatgaaataaaaaataaagctcttgcaaacttatgagctaccaaattagttgatcgcttaataaaagaaagggatacattttgaaatataataagaatttttttacacaaacatatgtttggtaggagggagaagtggagtgatggagaggagaggtgggaagagataacaaatctctttgtttggcaagagggattgaagaagagaaaggagaggtgagaggatagcaaatccactcaaatctctaatttgtattccctctaataatggagggattagaactctccttcttcaattattgtaaattacataaataccctcaataaatattattaaaaaataattataaggataaaatagtaattttataatttaataattatctatccttcaatcactccatccttcctaccaaacaatataaaaggattattactctcctctcccttctttatattctccatccttcatcaactctccatccatccaactctctctccttcctactaaacatagcctaagtgaccaaacaaaaccaagagaccctactgacattacttcaaagagcttgaacagcaaccaaacatatagtcaacaagtaaacaacaagccatggtttacctttagtccaatttagcttctcaaacctccattgctttagccaattgatgttcattttgtccatgaattcgtttagtgcaaccaccaaccaagtcacccctatcatctcgggccacaatcccataaccaaaacaatgatcctccataaataacattgcatcaacattcaccttaacactatttaaccgtggcaaactccaacgctctactccatcatccatctgaaggtcagaccgtgatgcttccaaattggactcctgggcgattctcaattagttaggatatcttgtcgctgaagcaatgatatcaaaaggccctgctattttttgcttccaaaccagctcattatgagtcccccaaatagcttaacacagggttaccaccaaatattttgcctcattatccaactgcttaaacacccccacaacccagtcaaaaaaatttcaactagcccctatgaaagtgtcaattcctaccatgttccaggacagttgcaccagattgcatgtcaccaaactatgtaaagtcgtttcctcacccaaaccataaactggacacatagctgaaacttcgacctttttagagagtaaacgaaccgtggttggaagacatccagtactagccctccacaccaagttcttcacttttggaagaactttcaacttccaaaacttttccaaaaatcagaaaactcatcctctacccatctctcatgaatttgttgtaagcactcgtaataaagtataaccttgagacctctttatcccacagataatgattgatccaatgaataatattaatagacatattgagaatcatattattgtccctcaaacaaagcatcaatcaatttctcatcccatccttccccatccatcatcaacaagttatttacagtaacattcataaagtcgggatgattagagatgacataaggattatccatatccaacaaccaaggctcttctagagcgggcaatggtctgatgtaaattctttcaaatttacatgtttagcattagggaagctatggatccaggaagtacttactagagcacgaccaagacgagtctccacctaagcctcagttcctcttctcctttcctaggtgaaagggtaaccctctaactccatgtcatacaaatcgcacaccaagagaacgccttggatcgactatatgtcaatcccggaaaccttagccatggtgcgcccagatcgactatatgtcaaccccagtgcccattagggcatcctggtgcccgagtgccgtttcgtatagatttatctccaaagtctgaaacttggttggggtatgtctctcatttatctgaggatagtggctaagcagttttcccataagagttgaaaggaactaaaactgatgcgagacaacgcacaagttgtcaacctgggcacctaacattgatgttggacctaggttgacatcctcaacatcatagttcattgtttagggtcacatggacctgttcactgaactctgtcgaagggtgacacctagaaatgtctttgttggatctcagtgcctacctaggcacccactattgtcaaccagggcatcgacacagtttccaatgcccaagtctaccacctttaatcccggtggttggccccagagttgtttacttcttgccacgtgtaaaaagtgttctccatgggtcaaatttccaggtaaacatatgtttattagtttaaatataaaaggcccaatttttattttt

SEQ ID NO: 306435 - DNA, 1628 bp, Cannabis indica
gaccgtaactgttcaaggcaatactcatgcttattccactactcatttgatcgtagaacgttggggtcaaacgacctgcgttgtgcatgtcccgctccctgaaacttggcaaacatagctccccacaccttaaaaaggaaaattgttatgttagctgtactagtttagccttatattcatgattatttatgttagttaagactcgttttaaatttcattcccattcctattccaatggcttcattcctccctaccaaacagacaactcattaagttgtgcttggttttaggttttacctgagtagcgttattcaagtccacttcaccagcggtacaagttcgatcagagaggtcatgatggaaggggttgcagaggagtggcaccaatggaccagactggttgaagtaaaggggaacaaagtttggcgcgaagtttatgttcgacacattggtgaggacctcgttgatcaaatcgacgagttgacaagtgacttctttgcttttcagtgatgtttcttgagctgttgccttgtccacacagggcaagatttcatctaaggcagtgtgagctgtggggttcactgcccattcattcatagcaacacatgtatctgcagccacactagtatgcattgcaagcaaccatatttattatgttatttgtcatgaaaggagataaaatatgataattaaatcaaaatttcttatgttaaattttccaaaaaaaaaacttacttgtggaggactaggaatgttccacacagaatgaaggttccagtaactagtatccacccagtaatcacaaggctgcaatatatggtagtgtgaatcaatcaataccatgagaatggaggtgaatatagaaaggaatgtaagagtaatgggaatcgcacatgtacaccagaagttgcatcccaaaaattgaaaacactggaggaaaaaacaaaaacacaaaaatactataaatgagaaaatagtgtcataatgttaatagtaagatgaaactcaatgatatcaaatcaaaaggttcttacagagtcctaaaaatgtcaagattagcatgattgcagcgacaacaatgagcgccaatctcctgaatgagtaaacaaacatatcggtttagttgtcaacacgaggtaaaactttgcaaaaagaaataagtactgatagaagcttcataatctgttttcacatacacagaatctaagagatcctttatgtcttctgaatttttttcttgtgatgtctgcaaggttggtcgccgaagaattgatctttgtttcgatttggtcaatgtcggattgtacattagaaggcagaaaacttgatccactcctagttgcttagctgcagcaaaataatcagacacattccttagtttcccaactgtaaatcagcctgatttccaacatactccaatgtactagttgtactgtgatgaaacttctcttggccagtgtataacacaacacatcctatgctgaaatgacacatgaaacacatcatcaacagatcaaccagagaaacagtgaaactcagaaatcggagagagagagagagggagagagagagagagagagagagagagagagagagagagagagagagagagagagagagagagagag

SEQ ID NO: 306436 - DNA, 535 bp, Cannabis indica
tagttttttattttgctcttgtattcaggctatgaacacaaaccagagcagcatgctgattctgcaggagacttgcatagacgaggcgggatcgcttgtagtgtacgcgcctgttgatattcccgccatgcacgtggtgatgaacggtggtgattctgcctacgtggcacttcttccatcgggcttcgctattgtccctgatgggccgggctctcgtgggcccaatttggggtcgacgcctaacggtgggtgtagtaataataataataataatggtggtagcggaagcaatggtaacggcggtggtgatgggtcccacagagcgagtgggtctctcttaactgtggcgtttcagatcctggtcaacagcttaccgacggcaaagctcacggttgagtcggtggaaactgtcaacaacctaatatcgtgtacggttcagaaaatcaaggctgctcttcagtgcgagagttgataccgtgtcacgtgagatctcacgtgattggacctccactagtcatatatataatatatatat

SEQ ID NO: 306437 - DNA, 1248 bp, Cannabis indica
ttaaagataaaaatccaagaaaatgacaaatgagaatacattactaataataacaacagaaatagtacaaaaagctttgaactttattgaatttattgagattgtttctgataattacggttccaattaacaagaatcaatatttaaattaaatggtattattttaaacacaaaagtaaaccaatacggttcctcataaaacaaatgtgtaatacgtaatgagagaaattagaaatggagaatagcttaagaaccttagggatgaaagaggggagttggagcagaggtgatgaggatgaagtagaagggtttgagaaagaagcggaaacagttgttgaggttgagcacaaagcccttggaagctgaatcatcgccattattgattacagtttcatagtagaagagaaatgaatcaaataatgatgatgactgtaatctgcatgggaagggtttttggttggaaaagggttttggccgttttcacaaattctatttttaggcctacttttatggttttatttttaatttacaaaaattgtttatttctaccacaagtaactaaagtcttttttttttttttttttttagtgtagcctaatggtattttacaatcatttaatagcttaatagcttcaagccctaggttggaacctatgatctctccctttttcccatcgctccctcactactaaactagccttgcaacagcaagttaggttcttaaattttatttaaaaaaaaaaattaatacattctcttgtcaatatttatgtttgaaattatatgttatttttaaaaaaaaaatgatagtagtatttgttattaattttttaaaaaatttaaatagtttactagagaaaataaagttcttaatattttaatttatttgtgttttaaaaaattcatctttaactatttgaaaatttttaaaaatttacaggcacaaggttgtaagtataataaatactctataaaaaaatattttaacaagtgttttagatacatatattaactaaaaaatcataataagagatatcacttaaacaaaaaagtgatctttgaattatgtcgtttttggtttcctaactatttttttttgtaaattagtcccgaaagttttttttgggtaatattgagtggtaaagtgtcaggactgactagggttgttcagtggatcacatccaatgtttttaggcctattcagatctgatccaatcatatattagatgttagattttaccatccgat

SEQ ID NO: 306438 - DNA, 1439 bp, Cannabis indica
caattatagttatataaagcatatcttataattaatttataattttcaatatttacagtgaaattgaactgtctctttttaattaattttattataaatttaatgaaatattaatacactacaaaacactttatcctttcataaaataatgaataactacttcagtcggggcatttgttaaaatgcgctggcaaacatgatctttatcggtggtgaaaatcgatctgttatggtcggtttttaaatttataacctaccggtcgttacggttttattttacgaaaaccgtaaccgaccgtttagaaattataaccgtataaaaccgaccgtacggtttttggcggttttcgatttggcggttttaggcggttttgggcaatttttggcggttttaggcggttattggcggtttttaaactattttttatttcaaaaaccgaaaccgaccgccaaatttggtgatgacgtggaaccgaaaattcagttacggtctggtcggtttgatggtcggtttcagtttttcggtttttatgaacacccctatcggtgaccttgtatgagttttgccaataaaaattgattagatttcattattggccatgtattttcggtgacaaaaatatattggaccgacaataaattttatttatggcgccacataaccaaagcattggtaaagaaagaatcgtcatgtaaaagacccgggagatatgttttggtggaaatcttaacttttatgggaaaaatatgatgtcgacaaaataaattttgttagcgatgtgatcttaaacatgctagttgaaattctatttttataattgccaactaaatttaacaaacaatttaaataatacgaaactattataatttttttttatcataatcaaaatatgttttatcagaaccaaaatttgaagattagaataataatacagaaagtaaagtcacaaacaagatttttataattggtatcaatatcttttagatattactagttcacgacaccacgtctaaaaaataaaatctattagtaaagtctcaaacaattacaaaagtatttgacttatatatacaatataagaattcctcttaatatattgtaataatatcttttgtaatccactcttctaattagatttcttgagacgttgatgtattaaaatctcgtcaaacaaacaacggatgctctcctcctggtgagagactttaaaacaagacttctcccaaagcttgtatcaacgtctaatgaataatacaacttgtaaacattcaaaacagaaagaaaatagagtggcaaaatcaaaaaaacatgaagataagattggaacaacaattaggtttccatgagagatggaagatgtaacattttgcttctggtttaagtgctatttatagagtataatggatactccaaatcagagctcaaaagatttgaacac

SEQ ID NO: 306439 - DNA, 1507 bp, Cannabis indica
ttgcttatgcacttattttaccaaccattttattacaattttaactcacttgatgtttgttttgtgtattttttatagctagaacaataatgaagttgggtgtcgttttttaaaataaatagaccctccaccaccaaagagtaaatttgatttggttagaaagatggaggagctttaagagaaagtaaagattttatttaacattattcagagaagggatgatgaagttgatagcttgatgaagtttaggaaagtgttcaatctggctctatttgttttggttttaatggtggcaatattattgttctattatgtgtcagtttagttgtataagtttggggccacatttgattttttaagcttcattttgtgtaaattcaatatcaaatatgaatgaaaatgttgtaatgaatttaggtatgtaaaaactcactgatagccacattttattcatgaattttggtatgtaaaaactcagtaatgagttgaaagcttgatgaagtttaggaaaatgttgtaatgaatttggatatgtaaaaatgttgttaagaaaattaactaaaaactttcataaaatgcttaattatgtttgacattattataacactcactgaaatggtgaattatgtttgacattattcgaattagtaagttaatttgggcctcttgctttgtactattgtgtttggtttttagtttttggtttttgcttgatgagtcaagccaagtgaagcaaacaaagaacacatatatccagataagtaaatatatagcatataactaaaagcaccagtatgctaaactagacaatacttaaccaagtttcaaatttgaacattattaaagcatttgtttcaacccttgttagtaacacaccaaaatcaagatcatataaagtcattacaaaatagggcgttccaaaagtttgccaacagtgatagcataaatgacattatatgaaacaatatataattctaatactcaaaacagttaccaaatgcattacaaatagcattcattacagattcaaaataccaactcagtgatatcagtaaaagtgtccaaattcaatttcaaacttcaacaacttaacactaaaatactatgctttgtaaatagaagttgttaaatatcaacaactatttaaaatccagctgtttaaagtcaaaatactgtcaaaagttatctaacagcatcaaaatggtagtccttctattctattactgaggaggtggcatgaattctgaagatggtctgaatgttgtttgctgccaaaattaacaatatattagtgatcagtaagaactgcaggcatgagagtagtatgttagactatatatatagtgtatgaaatatagcatatacaatgatatgaaatgcggaaaataaactgtaatcatatctataatatatgcaatgaaaggatcgatgtacctccagccattgatctttgagcttcaatccctgcgataacttcagtattggagttcgggcttcctcgctctct

SEQ ID NO: 306440 - DNA, 1409 bp, Cannabis indica
attattcaaatctctctaaattaaatattatttattttttattcatttatttccttccgaactcataatataatacttaatataaaatattgcatacatgcatcgcacgtaacaatatactaatatatatatatataataatttcaaacgaaaactaagatctagtaatttgatttagagtattttacattaagtgttgaaaacaatttttatatatatacattttatttacaagattttaaacattttgtatggagtatgattaatttttaggatttttttataaaaattttagttacattttctatgcctcataaaataatatgaaaacatcgcaaaaaactatatagtataaatattttatgaaaataacgatctatatttttgcagaataacttattatccataaaaatatttataatataaattcgtgtttatgtaacattttagtatttttttattagttatgaaataaattattttaatctatttgtaaaacataaatttaaattgccattaaccaaaaaaagaaaatgaaagaaaattgcctatttattaaattaattgataattttttatttattaaaagaaaaaagcaagtaaaaatagagcatgttacagggcactagtggtgtctagcacctgtagacatgttgtcttgtgattagctagcgatactctttaaaagctattatattaaacgacctgatatttagttagaccaataataatattgatatgttactaattaagatgagattaaggtaaaattgagtagagagattaactaattaaggctctcgtgctgcccactttggaaagtaatcaactaattaattagttaattaaatacgcaattaaatatatatacataattaatcctagtttagcagtaaagtgaagcactaatattatgaccaaaacatattccaacatcatgttgatcatgtgtggctgattatataatattgttacttttttttaattaaaatattaattttaagttatttgaatttcaactaactaatatgtcatcacattagtttgaaacttttgaaagttacaataaataattctaattagataatattatcccttaatttaaattgtaaatttaaatattgttattggtgatgttgaaaattaattcaataacaaatttgcattatgatttttgaattctttacattaggattgatctaatcaaatttatgaattatgctagtttacataatttctcttaattattggcaattctctttttaggccttccgtctttcgtactgaaagtagtttggactagggctgtacatcggtcggtttagtcggtttatactatatattttccaacccaacataaagatcgggttataaaattctgcatgcaaactgcccaatttaaaaaaaaa

SEQ ID NO: 306441 - DNA, 1702 bp, Cannabis indica
taattagaaggtctactctacacagctttttggattgtaaatgatatatcctatagtagtatcaaggacttctacaaacaacatgatcgttaccggtaagaagcatatataaatattatatatgatatatatttataataattcattaaatgtatgcattattactaaattataaataataaattaacaaaaaaaattaggagaattatttcattaagttatttttttaattttttttttaaatttaccgtttgggaataattgtttaagtagtttttatgtggatttttatgtgatttatattattttgttgttgctatgtaggttattatatagactttcgtaaaaaagtaaaaaaaaaaaaatagaataaattaaaaaaaaatcaaagaaaaaaaacaatatataatgacaaattaatactaattagaatcctgtgtctctaagtgttaatttatggttgttagtaatcttattatttattaaattaaaacgtaaaacatctcatgctataatgcattataacctcattcagaattaaaaatgataagaataatatatgtgtccacataataaatcacacaaacttgactaattttaactcattccatttttaacaaagtgacaagccagatatttatcctagttaattaattgcttgaatttaatgtatcaataatacccccaataattaatcaagcatcataaacaaaacactataatatatatattgaagaaaagaaaaatgcaaaaagaattttctttacagaaaattagagcaaaccagaagcaatgaaaaaaatgctggcacattatagaacgtggttgtcaaacgattcatagttcatacacatacttttgaaaatagcatataatacgtctgcgtaatgtatacatatatagagaagagaaattttacatgcatcttttttaagggattaagctctgaaagtggtccaaaataatagttatcatcaattcatatgtagtaactgaattcgaattagagaatgggaatggagcaaaaaatatataatataaatataaatacgcaccttattactttcaatcccaaattgaaaaagtcgaattccattagacttaaggaactccatgtttatatcagggtacggctccggacacaggcatctaataatcaattaaaatcaatcaaacacgcataagaaaagccctaattaaattcatcaatctaaatcttttcttttcttttcaatgaataaataaaacaaaagaattgataaaacaaagcttaattacatgatggagcgaaggccaagagtttggaggaatgagaagttggcagaatcaggaaatccagacctgaaaatgccattatctaccatggaaaagttgagagggggaatgaaaaggcctccccttcgactaattctccgctatcgcagtcgtcctcttcagcggtaggaacggcggagatcggtttctcgggaagagtcaagtggcggcaatcgaatgcgggcggtggcggagttgcaggagagggcgaaggatcgacctcgatggttctgcacatctcgtagtcgccatgagcggattccttctgatgttccaatttcattactaatcaacagtaaagtccagctcaagaccaaagaccaagaacagggcttgggatcgctgaggatattctctcaagagtttttctttttctttttttttttta

SEQ ID NO: 306442 - DNA, 1031 bp, Cannabis indica
tgtaagtggtatttatgtaattttttttagttgagatgtatatttgtttatttggccaactgaaagtatttttataatattgttatttttttttttcagttaaaactaaaaaaatctctttttaaaaactggatgtggagttatataatcttaatttctaactttaaccataatataatcctatcctataggaagtagtgtagtcgtgtagtagtggctactagttgaaaagtgagttgtttaattagtcaacctaatttttgacttatcagttggataatattaatagctctattatataaagaacttgggttctaacgttgggtgtgtgaagtgtagcaataaaagggatgagtttatttctctctctatatatatatatatacacactaaatatctaagaaggacgatgcatgatcactcaataatcaatatggaccaattgaatcttttgttttcatgtaatggatgaacttggcatgtttagagtgcaattatgagttatatttaagatcatcatcagataggtatgtggaacgttacccccaaaattatgtgtactatagtatatatataatgcacacagcgtacacaggcgtggtgcttgtatatttctatgtcggattcgtacatatatttggaaacacgccaaggatgaatcattgtccatttcgtaaactaagtgggagtcacgtgcacttctgataaataagtctaacatatcaaaatagtccattaataatgcatcttctgataagactctctctctctatagctatttgtgtggtttcatggtgtgtaggccgaactctcaaaaaggccagttatttagagatgtgttcatattaagatgcatattctagcaatacttttaatgatttttatattctccttgtctacttgttagaaattagtggaattaattaatattggaaaatatatattgtctcacatagattaaatgtaaaaatattgagccatatataagaacatgggctactccactcatcaccaattagttttgagatgga

SEQ ID NO: 306443 - DNA, 1377 bp, Cannabis indica
atctatatacattatattgagatctatgggcttatggttcatattagattaattttttttaattaaatttgtttgtacttttttaactctgatattgaccataaaaaccaataatggtatcaaggatatctttataattgtattgattaaatggactcctgttgtatggtggcggttcaacagccccaatcatagctttattttatggctatcaatgttgcagaaattgaagaccaaagaaagagtaaagaaattcaaaccagacactgaatgcagctgtctgttatgcaataatgaagaggagagcattgatcatctattctttgcctgtccgtttgctcaagaatatgcgtgaagttggtcaaaaactaattgtgttggatgactagtgcgatttctatggtgcatgctatcacttggataggaaaaacaaagattagtaggtttaaaaaatatgtgtcggttgcttctcttacagctctggtttatactctatggtgtaatcagaatgtcaagctggggagggtaaagatgacaactgtattgctgtgtttcaataggtacaaaatgtaactaaaagtcaggtgtcttgtatatggccaaggaatgtatttagtagtgacaaagcatggtttgattcattgtaaatagtatagagtgtgaggtcctctctttttatttaaggatgctctttgcttgtacaaattgaatattagagtaatgaaacatcatcttatccataaaaaagaattgtatagattaaatactgtgttgggtatttatgcatttatatatttgatgatatattatgaatgaatgaatttaattttttatgcatgaatgtaaatcattaattatggtaaaatttgtttagcattttacaatttttattaaaaaaagttgcacaccataattgtgctatatgatttttgttgtagttttttattaaatttatttgtacattttttttaaatcatgtaaatctaatattccacaaatctttcatcgatgagtgagcttggatttatggagtgaaccccgacctcctcaaaatgatattttacaccctgaaacaactaaccacgaacccaaaagggtgcatcttcaatccgtgaggcttgaaagtgagtcacgtgacaaatttcacaagtgcatgcgccatacattgctgccatgcatgtgaacttgacgtgaagaggaggagcaacccaattttaggtgcggcgtggtcgacaaggaaggatcggcgtggtccaggagccacttccgtgctcctccaattgggttaagacaacccgtatgcttcgtgtggagctttgctctgcccaacctcagcgtggtgaccaaagtggctactattgttggaattattttacc

SEQ ID NO: 306444 - DNA, 5995 bp, Cannabis indica
aattacagagatatatttaaatgttaggtgcattatttatgttatatgtaaaattttataattttcatggcttgtgcctagtaatagcagaatgcgatgatttggctaatagagttacttagatatgtttgaatatcttagaattagcggggctacatagttagatatttggaatgtcaagattattaagggctttatttttggaccatattacccttagcttttgaggttactttctaatgaagtaaagggaagaagtgtcatttggtttatattttggtgattggattttctagataaatcattaatcttttttattattaagtggatggatgatataaggttattttcttagttgattaacattaaaaacatgaaaataaaagaaaaccaaaaatcatcaaccttttcaccccctttttccttctagtgtcggccaagaaagaacccaaggaaaactaggttttgcaccaccaatttcataccaattttggttcttttcagctaggttggtggaggggaagatctaaggtaagtgtagtaacttttcttccttgattttcatagttaaaagtttaggttttcatgcaatttatgagttttctagctctgctcgttttgggattttagagaatggttattgaattgcatatgttgttttatgcttatttgaatggttatggtagagattgaactaggtttaggcttttaagttcaagtttagctctttaatggtgattttgcttcttgggggttaaggatgcttttagctgttgaaataggtttgttttagccttatttaaagttttggaaagtttggaaaagattggaatcattttggttgagtttcgaggtttgggaaaaaacttgctacgaaaacagtaggccgtttctaggtgtttctcaagcaaaaaacccagaaaacggcttgtcgttttcacagaaatggcctgccattttttagggtacttttcctaaaatcccattatcgagagagaaacttttagtttcaagtttcaacttttagcggatcacttaccaattttatgtgaattgtgattttgggccttaaatcatcgagcagaagattccactcaaagttaccagcacacttgcattcataattaaggtaagagtagtataatagttgcatatatgtatacataattagtgtgcatgttaattaccgtcagaataacatatcagggcattagtgaagtgtttgtaaagttgcattgagatgccaacatatgttaggcaaatcagtagctatcaaattagcatatcagagtatcaatgaggtgtacatagaggttccaacagatatatgctaggctttcagatagtatgaaataactgctaccacatcagtacgactagagtactgagtatagactggattcacaattagtcatactttgtcgagaatgttcctgatccaattatcagattatgattaggtgtattggcacctagttatggtcagaatatatgtttatgtttacgattatgtttttcttactgagtcagtcgactcacaattattatgtgtatgtgcaactaagagttagaaacgaatcaggattagtctaaagctaagggtgaagattatacatatcaagacggttagatctgaagtgttcaggatcttcgtgacactttaagctcatttttggatatcactagacaaaaaattttgtagtacaagtattttgtaaacttatgtaacttttaatgggatcctagacatatgtaaatcatatttaattattaaagtttaagttattcaagaaaattttaattatccatattttttaataaaccctttaattagtaaaggcatgcacagtaattaagaaaatatgataacacgcctaatctagtagggtgttacaatttagtatcagagatgccaggttgttcgttgaagattgtcaagatatgtacaatcatcatctaagataagtttaacttagcattccgtaagcttttatgtgtttagtagttttgattgatatacatgatctgaaaaggtatgatagggaacatgttaacagattaatagttgaataggtgtatactaagtttccatgtaaacggtaagtagattacaatttcgatcactgcttgatcaagcgactcttgattgtaggcttatcctacaaaaggatgcctggcaaaagacaaggagttcggatgatgtagatgaaaatggtggcggttggaaagattgagatcccccttattctcaaggccaagttattggtcgaggaagaacttatgaaactggttatgaaagtccaccgtaggctctgctatattttgagcaaaggttcaccaagatggaagctaagattcaaaatgagaggaggagattaagagattgaggcaacgtggatctcttgttgcgccttcacctcaagtaccggctactttagttctagaatttccagcaaaaaaattatgtccgatacccaaattgggaaatattggatgcatgatcctttggatttcgggatattaagatatgatgaacactcctcgagccgcgagcactacagagcttcgtcaggaatcttgaggaacttttgttattggtaaaaatactactcctcttgcttctaatcttgtcggaggtggtgctagttccttggacagtcagaagaggaaagatctatctacattagtgggcttgagccataagaagaggtttcgtagaaaaccaggtcagggtggccttggaggtcactctaagaagcatcatctaggagagtgtaattgtaagacatgtttccagtgcagtttggtaaggcactgtaagagagactacccacatctgcagaaggtggaactagaacaatagacaaaacccacttcatgtttggatgttgatcactaccaaaaccaatactgaagatagttcttcaatggtgtcatatcagtttctagccaactattttacttttctctatgttaattgattttggagctatgaattaatatgtggtagtctggataattgataaattgggtaggccttaagatagatatggaaaaagggtttggaaccctattacctagcagggaattacttatctccaaaaggttgtttaggtctatgctaattggagttgaggacataaagttgaacactgatctcgtagctttaggtatagtacagtttaagatattgtatggaatggaagtagtgtccaagtaagcttctagtattgaatgcaaagaggaaatggtaattttttttcaattaaagaagaaggatcgttcgtgttatggtattggctcgaggtacttaaactccaagtaccatgatgataaagttagagacctattgcagcatggaagcagagaatcccttgtagtggtattagataccacctagccaaggtagttcgccctatggatattagagtggtacaagagttcttggatgtatttccagaagaacttttaggattactgccacattaaagatagactttgctgttattttggtaattggagcagaggtgggttctagggcacccaacaaaatggctccaacagaatttaaggaattaaagttatgatttcaggggatgctcaatatagggtttattgccatggaaagttctggtattgttcattaagaagaaatatggttcacttcatatgtgcatttgttatcaagaactaaataagttgaaaatcaagagtaagtaccctctattaggattgacggttgggttgatcatttcaaagaaatatagtcttctccaagaccgatcttctccagggctatcattcgttaagaatgcgagtacaggaaatcttaagggctacctatcatattaggttgatcattatgaatttctagttatgtctttagggactaactaatgttctagtagctcttgaggatttgatattcaaagtattcaaggatttcctcgataggtgtgttatagtaaatatcgatgatatcactgtgtactttaaattagaagcaaactatgagcaacatttatagatggtcttgtagcggttatgggagcatggattgtatatatcaaaattaagaagtacgaattttttttacttcgagtgtctttcctagggcaagttattaataaagatgggattaaggtttatttgggaaagaattaatctgataggaattggccaaggtcaaagacaatcatcaaggttagaactttcaaggttcaactattactaccattgcccgtgaaagcatttcaaagatctatatgcccacatcagagctaaccaagaagaatcaacagttagcatgggtagatggatgtgaattagatttgagagctaaagcaatgattgattacgattctagtgttatcataggcatcaaatcaagaaaattcatggtctattgtgaggcatccaaactggatctggggtgtgttctgatgcaagttgatagtgttcttgctaattcttctcattatttgaagaagtataagtgatcttacccaatttattacgtagaacttgtgacagttagttttattcttaagatttaggtaaaactatctctacagagaaaagtgtgaaatatttattatctgaagagactggaatatgagataaaggtgaaggtcaaagttagccaaagattaagattgtgaagctttctattaccccgaagagaccaatctagtggaagaaaccctaggtaggagatgtcctgggtgggtctcagtacaaccatgatttctcctcagccagtgattgtcatgatcaggttaagtttggagtttgtaatgggtgaacagaaaaagttaacacttcaaactagatttatcaaataaaaataaaagtgcttagttggtgtagaatgcgaaaggatgtggtagattatgtatttagatgcttaattgacagtacattaagattaaccatcagagacttgaaaggtgttatgatttactaaatttaccgaatgaaataggaagaggttattagaaattttgtaattagagtactttaaactgcaagcatgttttcttttgtatgattaaatatgaattagagtactattttggtacaagaactaataaggaaaagtatttcagggagatagtatgaccttatgtgactctaaagtctatttttttggataggaaacgaaagttcacttctaatttttaatagtctatagagggttatgagtacgaagtttaagtttagtacaactttctacccttagacagatggtcaatatgaaagttatgttgcaagattacgtgatgaatttcaagaattcatggaacaagtatctacttttgttaagtttatatgcatgcaaaagcagttatcaaagtatgatagagatggttccttataagatgtggaatagtatgaaatgtcatttttgaaactcaagacagaaaatacctagtttttagagttagttcagtagataagtaaggctttagagaagattatggccaaggtgcttgcttctacaaaacaaatagtaaaagatatatagatctgaagttcagaaatgctgagatcccaagcagaggataaatcatgtcctcctatgaatatcatcaatgaaagtagtaaaatatttctgaggcaaggggaagatatgccctaggttgctaaaactttaagagcttctcgagaaattagaataataatttctcgtctagctttatgatttgcattcctaacacacatgatgttgtatgttgttgttgggttttgtgccctaaataaaactctatttcaatgtaatcttctatattcatttatcaataaagaaatagatttattttattacttgtttaatgtgctatttggttcacatgtttatttcatgatcatttttttgatttataaattcatccaaatccttatcacattgatattcttcttgtaaagactgcttagctttaatttgaaaattagcagataataaaggtttaattatgaaacttgcatattagtt

SEQ ID NO: 306445 - DNA, 1052 bp, Cannabis indica
tggatgttgtttgacaaaaaagtgcggattggatcggatgaacacccctatcagtaataacccaacaattagtggcggacacagcctgccggtaattttttcggcttctaataataacaaaatttctagtagtgacatatacttctactaatggaaacattaattaatacatataaaacgacactaattaatttatagtaaatattaattaacacttgttataatatttaatttatgaaaaatataataataagcttcatattaaacccccgctataaggcacacccgtttgaggtaaccaaacatcacccagcaaaaaagtggagaccgtgaaattagcggcgtcggtggcgttgatgaggtgataacccgtccaattgactcgtttggatgtattcgacccaggacccgagttaccatactctgcataatacagagtactcaatgcgaaatcaccactccactcacgccagccagcgggatcaagaaagccatcgatgaaggactgcatgaaaacagttcgagaatattccttccacggccttcccaggtaagtctttgtgaacgatccattcccggctgcagctgcggcgttggcagcagccaagtcagcagtgggactaatggtgcagttttggatggaagttcctgtgttctggttggggtcgattcggccttgcgcggttatggcattgaactggcccttattaggaagccttgggaatatgttgcagttctgaagtacgacggctgcgttgccaaatataaagtctacggttccgtaaatgtcgcattctctgtagaattgtctttgggaatgagtgtataaagtgtcctgataagcttcaaagctacagcggtagaatgtggaaagatctgcgccgcttcggagcgccactgcctgatgtttgctcggtcctgctgtgtttcggatcgtcaaatcagctgcaatgaagcctaccgcagtaacagctgcaatttaaggtatatatacaaaatagatcagttcaattatatagcatcgtcagatccatcattgtctaaatttatat

SEQ ID NO: 306446 - DNA, 1708 bp, Cannabis indica
aaaaaaaaaaaacaaacaacacacacacacacaaatgaagcaaaaagaagaataaaaaattaattaaagaaacaaaaaagaaatagaaaaaataaaaaatatgtttatttctccactattcattgagctatatgtagagagtttctttgagtttggaaatatgtataatagctaaaagtttaaagtatttgatggagctcaattttaaactcttagctattttattttaccttttagctattatacctcacttgttgtgagtgcttaacatatagaatcacaaaaattacaaatatatgtgttatagtactgctattgatttagttattgcatctattaaaatcagtcacatacaaaatgtgtggaaataaaatactatatataagatgaatagattacttgtcccaatcctaattaagtttgagatggaaccaatgtactttaaccacacaattcacaaatttctctacactcacaaattattcccaattctaacaatatcctacctaaatttgtaagaacttgcaatgcatgttgttaaatagtggttagaacttttccactcgtaggggtgtcactaaaacttaatttttaagaactactgtgtgaattcttaaaacttgatttaagagtacacaatacaagtgattaaaattgtctataaggacaacttacatatgttcttaaagtgtgtggtgcttattagcttcaaacatctttaagaactcattaagacgtctttaaaaatggtatttctaattttttttaaaaatattgtaattgtattaaattaaaattaccctacttgagaatttatcaatatatgataaattctttaaaaattatgtaatcttaacttaaaattacatatttacacttgtttaacaaaattacatattttgtatcactacaaaaactaattttaataagatcgaaaaaatgttatcgaaacatactataacactttttgacatgttaagactagctatcaacatgtcaatatggggtaaaagaaaactatcatttgggcaagatttatttagatcaatgaaatctatacaaactcatagttttctattcttcttggggaccataatgggatttgacagctaggtgaagtataggatttccatgagggtgttgttttttagcatcttctaaattttgtcgattactgttttgttttcgtatgccttgatctttcttctttttctgtcttacggggattcaattgaaatttacattcaattgtgagtgatgacgttaggatctatactggtcatgtcagagtgatcccaggcaaagacttcataaaatactttcattaagttgttagttgcttcgccctttcccgggtgaggctggttcctacaaaggtcgttttgtttggatctgtagggtggattgatacttctcacaactcttcaaccaccaaactttgtacttctatgacatttgaagagttgattaatttatataatttctttttgcatctgagggatgaagtataacacactcgggcacttaattggtccccccttatttccatgacttctcccttggtacaaaaaaaaggaatgaccctcatggcatgaatccatggatgacctaagattgcattgtacatggaggggcggtctaacaccaagaactttaccaacttattgacaccattagcatataatgttggaaatattttaccagaatc

SEQ ID NO: 306447 - DNA, 1403 bp, Cannabis indica
atccataacatgttcaacatcagcaacaagagtcacatttacagccaagcgattgaactctgaatctccaggcttggctaatacctcttgcaaatcccttcagaggagaagtgtggcgctcctgaattggatcggtccaaacaccaatttagccaccagaggtgaagatatattatatggaatgttagcaacaacaagatcaaataatggaaactcagccttcagtgcatccttacgtataacctgcaaaaaccccatttgaaaaaaaaaaacttattttggtcactataacaactagccggggtgttcttggtgtgggtgaaaatgctgttttaggccaattttagaccgcaccacatatatagttgaagtaattttttaaactgcacccaatagacctcaaaaccactccaagtaatcgccaactaaaagtacagtctggtgcggtacaggttacaatcacaaatcgcaaactaattttggtaaatatataaacagtaataaaattacatcaaatattcaaataaaagtagaatttttattgaaaaaaatattattttctaaaggtggatgcagtgcagtttaaatcgcaattataaaactcctagtttagaaaaaattcatggttgactctaaacaatataatttagcatggtgtggtgcgggccatttcactctagttctgacatttaatcaaacacatagtgagcaattcacttacagtcaaccgatcttgcaacccactttccaatgcccttttatcaagaatctcgaccatccgactatcgatttcaatagcgaaaaccttacttgccgcttccataagtttcacagtaagattcccagttccgggtccaatctccaggactgtatcagtgggttcaatagcagattttcggacaatggtatccaaaattctttggttagtaagaagatgctgacctttactcttatataaatgcaaatgggttcccttgtcgtttttatcatcgtcgtcgttgtcgtttttggaataacgacgccgtctagaccccgcgtggagtcgccggaacggtgaatattggccggggattaataggcgtaataaaggtttcgaagctcgaatcatgccggtttgtccggcgagtaaattgtgtgtattggtttcgaagaaaatgaccgttgagatttgaaattcagttgccacttgccgatcaacgtcgaaacctatagaccagtccaactcaacagttcagcgcgggaagcctgaaatccaccacatgggccttcttgggctttttttttttgtgaaaattacatgaaatatgggatttcataacaaagttagaaaaatatggcatttttaggtttgccacttttctatggtattttttcacatttaagttttttatggtatttgatat

SEQ ID NO: 306448 - DNA, 3751 bp, Cannabis indica
ctctctctctctctctcttctggaaaacattatacattttacaatctcttctcaattacccacttaaacaaaaaatttactcacaaacatttcgcaacaaagggaagagaagtaggaaatggattcattgtaggcttcaataagtggctataaatttttaaacatgcttaagcttaaataggtaaactatgtacaataaagataaaggtaggcttgaaaatgctcaaacagtccaaagaaaattgcttacattatattccacacaagcattgtcaacgatttccccttaagaaaataattaatgcaagttgtattgaaaatttgcaacgatacaaaattttcaaaaggcatccaaattaatcgaaagagcatacgagtcaagctcacagtttattctttttaattcatccaacaagggatagtgtagtaattattcaatcatatcatcggcttaattcacacacgaaaaaaaaacaattgctaaacaaaaacaaacacacaagctaaaaataaaagaaaataaatcccttccctaaactaattttcacattgtccccaatgtgacaaaaaagtaaaaaaatgagaaacttacctaagaaccatgccacatcaacaagcggtttaacacccaaaataagtatcatgctagacaacttgaaagttgttgttttaaatgccctcaagcttggcataatatgaatttgatccaaaagcaacaacaacaactcaagactttggatgatgagcttggggagaaacctttgatagctcgtagaggaaataatatagcaaatgcagtattgatggaaaataagggtccattggtggttcaaaatatagtagcattgatgacctaaaattaacaactacaattaattcttcagaaactaatgacatatctttcacacttttctcaaataatttctcaattggtggttcattttccacatgatgatccacaaccttgaatgtgatttgatcttcaataacttcatcattgaggattgaagtttcttcattcaccaagttaagatcatcattggtcgagcaagcatccaatgtacacagcttttcagccactttaaaaggttcttgctcttcaataataggcacaatctcttttatgtattcaactaattgcatttcttcattattcaaacaactctcataacttttattatttgagttattgtcctaaaaacactcagaatcatgcaccattaagttatcacataaagatcttaccatgtctgccaagtgattaatttcttttgcaagcgaaggttgatactcctcttctttgattaattggggtgagttagggcaataaggaaggtatcggtgattccaaccctgaagtgatggattccaatatcattggtaattaaattttgctttgtcattcaatagattcattatatcatcatggattctcctataaaaatgctccagatatctctgctctaaaattcacctagcttcttgttcatcatcagtccattataaatgaacagagaaaaccacccaaataagaaattttgataacatctcgctacgagctgattaaatctccccaaagcataatagattggctcattgtgttattgggtagaactcacaaggtaatcttgatgtagcattttgatttaccatgcaggtcaaacacaattaaaagaaaccaaattagaatagaattcaaccatcttgatattaactaaaacagtccctgacaacggtgccaaaaacattttgtgataaatccaacatgcgagtatatgtatcgtgttaacaagtaatactcaggtaagtgagattgttcccacaaggactatagctaagtaccaatcaaattgaattcttgtttctatttgacaatcaaataaaaggattttaaaactaaatataatttaagcaaaaattaaataacaaaataagcaaataaaaagagatgtaacaatggatgtcaaattagggaactgatttcagtttctttaataacaaaattgttaatactaattaactaatcttcttcctcctatgtgatgacagattataaattaacttaaagtcttttcagatcataaaattcctaaattgcatgtcaacgactgcatctctcagataatacaacaaagaatttacatgaagcaataatctaaaagtcacataagctataataatactctcgttgcacatcaaaacctatgttaattcatttagagcattcctaacattcactttttcaaatttcacattaggatcatagatcatggataaggtggacaatcaaatacatgcaataatcacaaatatgaataaatcacacaatcaaggaagaaagaataattaactactattaactcatgaaataatcttagacaatatccatcaaattcctaaatagggagtttagctcataattaaatccataatcaaactaaatatcatcataaacatagaaaataaaagagaatgagaagaaaactagattgggattgtcacgaatcgccaacttctttctccaatcatattcttcttcttttctagggttttgtttctgtctcctttgactcccccttattttcgaagccctctctcacgtttaaaataagaattttagccaaaaagtacaaaatgaggaaacttctcgaattgcatatgaaggcggcgacgtggtgacaccacgcctcgctacggcgattggagcttcacgaaaatttttttgattcttaaattgtcgtcgtggtgaccatgaacctcactgtggcgctaggcacatttttttgctttgacctctctcaataaaatatgcataactttcacatacaaactccaaatgagttgataaaatatgcgttggaaagctaaaaggagatctaaaacttctatgttttggtttcttctaaaatctgatcaaaacatagtctaatttatacttgatgtttcagctttattttctttgaaaaatcttttctattttataaactgtatttccgatatttgaccaatttattgatttcaagtgtcgaaaccttaaattaaagaaaacaagcgtaaatctactccaaaattataataaagaagaaaataaatgctaaagatgatctgaacgataggctaaaaatagtctaacacctgatatggtagaatttggtgtcagcggatcgccacgtcagcttcagctatgcttttggggcgtctcttggaaagtccttccaaatgtatcccaaacgcatattcggaggatccttactacttcttcttatttgggtgagacacccttttgaacctagaaatatcctgttctggatgtaactatcttatatttcagatggtcttgagtctcatccttctgagttgtcttggcccattaccttgttagggctactgagtaggccgtagttgattaacttcgaactagacatgccatgtgcactacaacaaatatgggttttaaagatgattaaagttgcccctaaaagtattaaaaattgcctctaccaactactagtggaaactttattcgtccttaaaaattcatgcctaaaagtattattaggggtgaaaaaatagtcgcccgtaaaaatatcattagaatcgacttttttcgcccctaaaaataatagctatattctggcataattattataatgtgataaatattttatatgttttataattaacaattagagtgataccacatgtaatatactagcaaacatattaatatgtaacataatataaatttgat

SEQ ID NO: 306449 - DNA, 2166 bp, Cannabis indica
tttccagtccatcaaagagtctgttatttctctcagattagttgaatgtcttcgtatgtgtttccttgcatctaatactaaaccagcatagaactgcatgtcatggtaggataggaagctgcactatgtcaaaggaaatgaaactcactcgtccctgctcaacatgacaaaacttcaaaggaactcctccacattttctctccatgcgttgaagttcgggtttggatggcggatagccactggtaaagcagagcacaaagcttggagcaccaggtgaagactttctaaacttggtatttgggagataaacatcaaatactggtttaacttggtcaacctgcaacctactaaacattcctagaacagagatttcgtcttcggatttcaaatccactacagtttctgaaaagcactgtgaaggaaaagattcagcattgctcttaacatgtttaagagaccgggggataccatatcgccccaaaatgtaaccaagtgatttcagctgtttgtaggcctgaaaaagctcccaagaacatccattcttttcatttgaaagattcatatatatctcctccatagaaatacttgcaccagcatcatccatcagaaggaaagaccccagttcggccataaacaaaacttcttcaattgagcaatagattttgccacaacggactatgcctgttgtcctccacattgtacctttatgaacttcaatctcagccattcccatctttttaatccaacgaccctttgataaaactttcctaggctgtaacttagacactggtacagaagcatagcaatattcctcatcatcatcctcagaatctttactatatctttcatcattactttcctcttctaagtaaatttcctttgtagttccttccatcttcaaagtagcttcaaaatcaaatcatagatcttgccaagtccagtccagtcaacactctttagctattgaattagagagagatttcacactatgttatgaatattcccacaccgaaatctccaataaaccttcacagattcctcagatttagatgaaacttgttgagcaacttttcttgagccttttgcaccagcttcctagcttgcaaaatcagcaacgagagagagggcactgcagcctgccctgagctgctgagtgttcgttgtcgtcgaggttgggtgggccgttgcagccggcggtgtcagagaaactgagagagagggatatcgagagagtaagagtgagggactgagtgacggagagagacagactaggggctgttttacctaatctaaagtatacatgataaacataaaacaacagtgttctactttacaccttataaaatgtcaatatgatataccaacaaaaattcagcaaaaatgagtctttcctgtattcaaatcaatccacagttaaattttcatacattctttaacttccccttcaatgataacaacaaatagcttgtgtagttttcagctcacaatttataattaactactacaatcaattatatatcaaactttgtttccatttcaaatttgaatgtaacctaacgctattaaaatacattagcaggacttcccttgaaacacagtcagttgagcaaagtggcccttaaatgttatcctgggatcatgatttcccaatcatttcacaagaaatgtctcagaaaatgtttcagagatatatttacaaacatatactgagcaatagcatcatattaagtaaattttctatcaagaaatgtctcagagaatgtttcagagatatatttacacaaaatttcgagtactattcatataaaatgtattcaagctcaaaaacatatacacagtaaagaataaaaagaaaattcagaggagacgaaggaaaagaaatggccttacccgattgaaaatcaggtgccggcggtcaaggtggcggaggagtacagcggcggatctgggattggaggcagccgagaatcccgttttctcaaaccgttggaaatctgtggcggcacaaaacttgggactaagtttaactgcttacccgcaccgcatatatagtcgacccgatccgacccgattcgacccgacccataaagaaggatttcttttgggaaatttgattttctatgcttaaaaaatcctaaaattatatccctaaacctaaatgttata

SEQ ID NO: 306450 - DNA, 3645 bp, Cannabis indica
ttatttgttattatttaggtttatttttttatttttacttattaaacagtttgtttactgtcttatattatttctactcatattttgtctaattttttttgtaataaatttctttgttttatgttatttttatgttttatggttggtctttgactaatttttaacatatattatagtttgattattaattatattctagttgtatctctttattttttacaatttgatttgctcattacacttttttctttggttggatttgaggaaatacaaattcccattatttgttcatattataagtctaaaattgcatcaacttagtattgaaaatcttattggtatatcaaattaatattttatatatggacaaaattaatattggtatatcatcattatgtaaattatgtaaattaatttcataattgattgtgaaaatattctaacaattaattgtgtcagaaattttgatgtaaaggttcacatatataaatatagggtctcaatctccgaactcactacttattttatgaaacacaagaaataaagagcttggaattacccacactaattaatttcattttcttttgcatatccaatactcctttgaaattgaagttcaaagaatcaattggaagtatttggtttctttagttatgttatgtatatgttggatttaattttacttttatacacgatcatataggcttcatatcatttatataatatccatatacaatcttttcaaaatttatatatacataaagaacagctggattccagattccagattccaagattccagattccaaattcagattctaattctgataagtcttcattttttgaatacgtaccacaattttctccaaaaacaaacaaatcatatttaataattaattatttatttattttaaaaaaagtcatgaaaactataataacaaaccaaaaccaaatagagtcagaaatttcatacgtttactcccactccttccttcactataaatatatcttatatatacacagagagagaaaaaagagtacataccaaagcggaccacgctaacgtactgtagtccttcttctctctaatcattaaccatggcggcggctttgaactgtacagccgaccagctcagccaactggctcagtttctcggctcaaacacaacaaacgccgccggagccgctgctttgatctgcgatcaatttagcgtcgtatcttctaaatactctgacgctactttcgccattgatactacttaccttctcttctctgcttatctagttttttctatgcaactcggcttcgctatgctctgtgccggctcagtacgagccaagaacaccatgaacatcatgcttactaacgttcttgacgccgctgccggaggactattttattacctgtttggttttgctttcgcctttggaactccttctaatggcttcatcggtcgtcaattcttcggtcttgaccagatcccttcgcaaaacttcgattacagtctttttctataccagtgggcttttgcaatcgctgcagcaggaatcaccagtggttcaatcgctgaaaggactcaattcgtcgcttacttgatatattcctcttttttgactggattcgtttatcctgttgtttctcactggttttggtcaggcgatggttgggccgccgcggcgaaaaccgacggagacctcctgtttggctctggagtcatcgatttcgctggatctggcgttgttcatatggttggaggaatcgccggactctggggagccttaatcgaaggtccgagaatcggaagattcggaaatggtggtcgaacagtcgcactccgtggtcacagcgcgagtctcgtcgttctcggtacattcatgctctggttcggatggtacggattcaaccctggctcattcacaaaaatcctaagctcatacaactccggtaattactacggccaatggagcgccgtaggaagaacagccgtaacaaccacactcgccggatgtacggccgctctaacaacactcttcggaaaaagaatcctctccggtcactggaacgtcaccgacgtatgcaacggacttctcggaggattcgccgccataaccgcgggttgttccgtagtcgagccatgggcggcgatcatctgtggattcgtggcggcggtggttctaatctcgtgtaacaaactggctgagaaggttaaatacgacgatccattagaggcggcgcaattacacggcggttgtggcgcgtgggggataatattcacggcgttattcgcgactgagaagtacgtgaacgaagtttatccaggtaaaccgggccggccttatgggcttttcatgggcggaggagggagactattgggggcccacgtaatccagatattggttattgttgggtgggtcagtgccacgatgggcccacttttcttcatattgcataagcttaaattgcttcggatctcagctgaagatgaaatggcgggtatggatctgacccgacatggaggctttgcttacgcatatgatgatcaagatgattctcagaagcatacttttcaacttagaaaaattgaacctaataacacaactccaccaaattaattagtgttttttcttctttggatattgatattattaggactttgtattatatttttgatcatttcttgtggtttggtagtgatttggtacatgtttcaactcttttttttgtttttaatgtgaatttcttggaatttggaatgttatattattgatcaactatagttgaagttttgaccgagtttcattgaccataatcaaggtaatgaatggttaagatttaaactagtgtgaattttgaggtatttgtttttttctaaaaaaaatacaataaaatattaatatgaaactagctcaaattagactaggtaaggatctttagtttcattccatcattctttagtagaaaatactaatataaaaagggtaattgtaaattttaggtattatttgaaaatagtaaatataaaaatatgactaatatagaacacaaaggcagatttggtttttcaattatatgcaaatttctaagaatttgaaaagattttttttttatatatagttctaaaattatgttaaaaagatatcatacattattttctttatttactatttaaataataatttttttatgtcccaatttttattaagaaattattgactgtatttttattgaatttttaattaagattattgttagaatttttttccattttatcgtaaatggtttataaatctattctccataattttactctttaaactttactataactttgtcaaatttaaaatattttattctctctcataaaatatatatattatcatatacccttataataattcctttccacaatttttgaggtatgtaattaaaatttgaggttaatgcttatcacttattgagaatatcttcccataattcttatttgtttttttacttaaaatatgtatataaaaaagggtacttggacaattggcacgtggggtatactttgaatattattggtataatatagtcaatactcaatagatatgaaaagagtggtctccaaaaaagattgcaggtaatctttattttacaatttaaat

SEQ ID NO: 306451 - DNA, 2914 bp, Cannabis indica
taaaaatatataaaacaataaataattcccaccaaaatataaaaaagaataataaaaataattaaactataaaataaaataatatatatcataaatatataataaaataatttatcatatttatatttaataaataattacaatagtaaaataaaaatatttgaataataaaaaattacttatgttaaataatagtttaaccactaatttaatacaaatattagttttctaaattaatgatataaatttactaataatttaagaggaatatttaattttattatattgtttctcttaaaaataatttaagtaattattgtttaattaatatttttaaattttaaaagcttagatatttcaaaattttatattttcactaattttaatgaatacgtttttgataaaaaaaactataaataaatttgtaataattattttattaaaatccttattaaagtaaaatatattaacaaaattaaaataaaaaaacgataaaaaaatatcacatgtatgaaattatttattctaccctattggatggaataaataattctaaatagatgggataaatattcccagataaatgagattagttagattagttattcaaacttccatcatgtgtccaaacacaagattgaaaaaattagctgtctaatctaatccagtcttctatactaaatggaccgtacatatatgacattaaaaaactaaaaagaaaaaagaaaaactacattcaactgcaattactttcaaatttctagatcaatctaagatctatatcactatttcacttaaattttgtatatttatatatagaaactttataataataaaaaaatgtggatgaacttttgattagctaggccctaggtgtaatttgttgtcttaaaactaaaaccatggtcccccttttttttttctttctaagggaggttgtattgtgaatccctaatgttgatatggttagttatttgttatccaaagcaaacatttttactactttagtggattttgtcccctctttttaaacaaatctatactcttcaattcttaatgtatattactactttattattgttgctacctactaattcacatgaaaaatggaaaatgattagccgtgatgatatccagctatcaaaagtttttgtttgtaaagaaatgaattttttttaaaaaaaaaaataccttaacacaattttatttttatttttaggttttaaactttttatttataaaaatatgtaattaaataaaaaaaattataaattattattttattattttgtaattatattataattgtcattaaattattttatagtttatttatatatagttgatttgtagttatcatgcgattgatttattattatcttttagttattttttaatttttattgagaaaaatgtgcttttataatttaaactttaaaagcatattattataaatgaaaattttaagttataaaattataaataaaacataaaaaaatatatttttaaaaattcccctatcataaattaattattctaaattaatacaaagaaatcatcgtaaaaaattgactctagaacaattcctctacatttaccacatttgatttgaaaaaaattaagaactttgaaatggaatgaaatttctatacttttgttttgtttggtcaaaaactttgttttgtttgtacttttgaccatagtaaggcaagtttactataattattattcacgtgtttagtggaacttatgcaataatagaaacaaaataattctagttttatgtcaaaaaaataataattctagttttaatgttcattaaaaaaaattaattaaaaaatatatattgtaacactatttccaattattatttcatttcattaccattcttcttatttatttatttatttttacaaaaaaaaaaaatgaaattttttattaaggatgtgttttgaaacaactatgaaattaataattatattgtatttgaatttctattatcatgtttgacaataaaatttgtaattacagaataattaatattgtataatatttaatataataataattagggttatcattttataacagatatttaaaataaattttatctattaataacttaaatttcataacaattttgtaacaaatatttaaaataatttttatcattatttaattgctcttgcattccatatgtcttgaattattccatttgtggtatgattttccagctttagaagtttgagtatttgtcatttctataatgattaaaaattaataataaaaaaattaagtatttcatcaatcaaaatttatgataaatcatgaataaatttattaaatatataattcaaaagaggactcaaaaaataatgttaaaaaaaatcatatatcatatattagtttttttatttatttacaaataacagggtcgaccatgagggtaggtgagctaggcgtgcgcctcgggcccccgaccactcatggaccccaaaattttaaaaaaaatatattaatagatagataaaatattaaataagaagaaaaaataacaattttttttttttgaatggaacaaatattatttagtttagtggtaaaatgtataactttaagctaagaggctatttagtggtaaaagatataactttaagctaatggatcaattcttaatctttacttttttattttttttaaaaaaaattattgtgtagctatgaaggattgaaccttggagcttttaagatttttttaaagttttaccattacactaaagcattaaaactatcattttgacaataattaaattatatataggggccccagaatttaattttgcctgacaaataattcaagaaaaactacactgaaaaattataaaatagcatcatacacagaacaaaaaataaaa

SEQ ID NO: 306452 - DNA, 1440 bp, Cannabis indica
ctctttttgttttaaaagtaaaagaaaaaaaaagatataaaacacatttttatttttattttaaaataaaaaaaaataaatgtagatgtaaaatacacttttgtttttattttaaaaattttaaaataaaactagttgcaaaaacatgttatctttttaaaaacaaaaatgaaaataaaaaataaaaaaaagaattctatttttattttttaattttaaaatttaaaaaatagaaatattaccatacatcacctacatatttcacattactcatttgagagaggccgcatgactataggagccatatggggtcatgtgctcaatttttcataaattatatttcgtatataaaatttttgccacaacataattatttttgctttcattttcgtccttatatacttatattttggtccttataatatctatattttttttcacttcgtcctctcaaattttcaatttcatccttataaagtttacatatttttctcataaaaattacatttttcaatacttttttttaaaaaaataaattatttgcttttggccccctaagataagaatgttgacatgataaatctcatcgtgaaggataattggtgaacaataacactgcaatcctaaataattgtatgtatgctacgttctacactacacttcacatggtccaataattcatacaattgcatcatcttcattatactcaagattcatacaaaaaaacttatcgtttggtgacaaacgattaaaactgattaacaataatcttatctcgattaaaattaacaagcttcaatggctactgatgtacacagcaagccttgcttcttgttctaattctcctactccctttattacttttaatcataaacaacaaaattgttcttaaacgattcaacaagaaccttccaccaagccctcccaagctttcatttataggtcacttacacaattaccatgacttagttttttgaccttatggtgagtattggagagagatgaggaaaacatgtgatgttgggcttttgtatgtgaagagagctgagtcatatagatcaattagggaagaagaagttaataagatgattgagtactcaatatcaaaacattgctcattatcttctcctggtgtagctcctgttgatcttactgagaagttgtttggtcttactgctactataatatttggttgcttttaggacaactttccaaagagtaattttgattttgttgggattaaactcacttaacctatcaagtcagtatgtccatctatttgctcatcaaatgaatatgaaaaaagctgctgatatttataacagttggctttaacaccaacttaaagggaacccaccaacaactatatatagaggttccttcagagttctaatctccaaaagctcatactttagattcaattgagagagagagagagag

SEQ ID NO: 306453 - DNA, 1433 bp, Cannabis indica
aaaaactcaccattgtcataattgtatgagtattacttgcacaattttctaaatttagacaataagcatgtctgcctattttgtttatcacgtagacttgccttaggtgtttggagagatacacttttagcttctactgatgatttgactgttcattatccagctgtcataagagatattggatagtatgaaatcagagaatgatgggcttaaatctctgacatgtcttttcaaggtaatttgtagacgtttcctttatactgtatttaatgcatctatattgacgtaggttcggactcgcgacgtccggacccattcccttttcctaccacatctctgatggacttgactctcagagctggggtagtgcagcttgctcttccagagggacttcctggttgcggctaagaactttccttatagtttttggaagatttgacataattattcctagagcataggtctcatcgccacgtagccaattccattgccacgtattaattatggacaataaggtcaaagattctaacaccagaaactgacgcacatttgctgaaatgtcttacattaaggttaaaggtggagacagcaaaaatgttattttttattctaataccgtgttagaattctgaatataaaagtaagtttatgataatattttatttttacattttaacaatatgagactaataattccaataataaatgatggtatttttaataaaataaatttaagattgggtctcatcacatatatatcaacacgactacctaattattccaaattaattagaagaaaactgtctaagatagaagtataaataagtgaacatgactattaggtacataccagcatgttcaacatcattacgaaatactaaatatgcatagcactacacaacactcgtcttatacacaaacacaaacaaaaagctcttttaagtttaaacatctcttccccagtcaaaaagtatttgtaatttattgaataatttttataaattagaaatgtatttacaatataaaaataaatgttgaactaattattatcaaatattaattatatatatattatattctcaaaactcaaataatataaatattgctacataatggtattggacagaatttttttttcttctttaaattacatttttaagttacattgctgaaattcaatgccatcacctctactcacgcagattttaaagaaccaatttatattgagataggtattaagaagaaaatttaaagtaaaataacaaaattaaaaaaatgagaaaatttaggagagaatagatagcaatatatatgtcaaataattttaaactctcattactgctttatatacctcaattatttatatataaaatataaattgataaataattttgtgcgactaaatctactcaattattactctacttgcactt

SEQ ID NO: 306454 - DNA, 952 bp, Cannabis indica
acaatttgatggcgagacatcgacaaacaaaaagacaaaccaataataaaataaaatataataaaatcatgtcacagagacaaaactaatcccagtaacctaaacaaaaaacactcaaaactataccataaaaacaagactaattgtatgtagtagcaaaaccacagattccaaataagccacaattaagctttgggaggatcggcgggcctatacggagaaaaaaacaacctcgcgggtggctaaaaatttagaaaaataagagaaaccctaacaaacaatataaaatattttagtagtgtcttggttttagaatataaagctaaagccgtatttatatataattttaattagttctaattaaagtgtattattcttttcactacacttggaattaacatatatttatggaaacaattaaggaaactactcattatatctacttttcgccttgctttcctaataagaatctcttatccgtttctccttccattaatatataaataaaatatatgtattaataatatttgtatataatcaattaattaaatatagctataaatatataaaaaagaaaataagggataattaattagctagggtttatagagtgacaaaataaaattatattaaagaataatagaatttcattcttcctcgaaccaaccccccaaagccttaataatggtcaactcaatgagtgtacaaatgtaataaataagagaaattaatgctaacactcatggtgcttatgattctggtgagatataatattattattggtgcaatttaatataaaattttacttattacattttaataaaattatagaaaattattaataaaatatatatgacgatatcttatagtagtgttaggtatcttgttgtctataaatatttaatatatatacataaagggctcgtttggaacgccgtattaggtcgtattg

SEQ ID NO: 306455 - DNA, 3900 bp, Cannabis indica
cacatacaaatctacttttataagttattttttaaacatatctttaccataactagagcatctccaatcaattaaaaatagaagtattaaaatagtgttgtgatatggaaccttattcaaagtgatgtacctgcaatttaaaattttattctttatagaaatacaaagtgactaaaagttgtcaccaatacctagtttttttattggttgttttattatttatgatcatggatccattttggcctttttttagtgttttttttttttttgtgggtgatgctcaaatgtagcgtaccagtaaaataaataagaattaaattttaaaaaaaaaagatacaaattaaagaaccaacaagtctaagagtaaaacacaaaattcataccagagatcaaatagaaaatacagtacaatataatttgattaattaatatatctaaactataatatgtatgaataaaataagtttaagttggtactgtgattatatcatgagatatctcttgtatgtgaaaattaaatcaataaaaaaacctcaaaaattaaagttattaaacttcaccaaatccaccattactgcttctactgctatgaaaatctccaccatcacagcttccagtccaataatggcctcctcctcttaaaagcttcatcttcaaatgctctggcaatctcagagtatacctattctcttcttcttctgataatattctataattattacctctaactatcgaatgtcctgttgaatgtgaccttgaaaatctcccaatcaccacattatcatctccttctccttttcgatgatcgtgatcacgatcattattattgacattgttattattatcaccctgttgcgggttgttaataataccaatgtcaattctcacactgtcccggtcatgattttcatggacccgggacagaataggaagaggaggaggaggaattggatcaggactctgctctgtaggttttacagctagcggagcagagtccagttcccgacgacaaacaggacaagttttgtgtgattcgagccagagatcaacacattcttggtgaaagacatggtaacaaaccgtcaggagacgaagcaagctatcgttttcgaattcaactagacaaatggcgcattccaggccgtacctgtcgtcttcttcttggacatctttaacggttgagtaagtgaaagtagggaaggtttttattatggcgaggtcaaggccattgtgggcggcgattgtgtctgaggaagtggctccagtggtgcctgagaggtttccagagcgagttcttcgaaaatgccacgtgttgaaaattatgtccatgaaacatcgacagaagtagatggagaagaatccaagaaggaagaagattagaaggactattgttaaaactatggtaatgggtggagattcaaagttttgcggcggtggtggggtgtaagggtttgtcctcgtcgacatggaaaaagatttaattaattaattaattaattaagattataagataatctcttgtgcataagtacatgcatgagagattattagaaaggagtaatgagaaaaagaaaagaagacaagacaagataagtggtgtttctcttgtattattttttttattattttttactagaaagagaggaagaaggagagtgtgaccatgtgtaaagtaatttggaatgagaggctcttattttgggatggtttttagttatatgaagtggacataatttggtttagagtttggtttggtttggggtatggtgtctctattttgtcttttcttttgggtaagttaaggttgaaaagggttgttagttatagttgagcgagtcattgtgagaataatgaggatagaatagatagaatatgtcttctaaggctttattttgtgtttagttatttctatttttggttgtatagactaatagttagttgatagtgatgaaactgccacatccacatgtattgggatttgttttaattcgagatgccaaccaactaattattcttatttattttatatcttaaaaatagtaaaataataataaaaaaaaaaccttaaatggaatcactttagtatgataattttctcatctttttgtaagacgcttaagcttaataagtttaattgagttaatgtccaatgtgatttctatttttttagttaatgtatagtttaaagtttaagcaacacttaaattggaaatttaatatagccaatacgtttggtgtaaaaccacgctccaatcacaaattatatttcatggaaaaataatgacttggattttaatttattaaaaaaaaaattcaataacatggtagcatttatttaaaaatattgttattgaatattagtagtagctagtaattgtctaaaagtattgttttatgattggttaacgatatttcttaaaaattaatttaagttatatcaaattcaatacttaattgtaccaatagcacgatatgacatcgaagaaagtgctagacactactaatacattttaacatttctctttattcaattaccaccaattcacaagtactaatttttttttaagcattgctattgagtacagtgtccaacaccttccataggtaatactataattaattagtaatactctctaaaaattaatttcttaaacccattacttaattaataatatcaatgagagtgctaagcactaataatatattttagcacttctatttttttattattattttataccctatcatgaacttgaattttaatggttaatatataaaagtccatcattctccatttaacatcacactatggaatatccatcattttctatatcttctttaaaaatattttatttagagagaaaaaaattgaattaaaactctaattcctaatccttaattacaaataaataaatctaaaataagaataggctttgtttggagtgtatatatgaagtctagatataagtaaaagtcaaaacaaataataaaagttaaaaggatatatatatatacaatctactcattggtaacttcatactcaaatgtataggtcacaagtaaaattcttccatatcaattaaaaactaaaaagaaaagaactacaaaattaagaatggtgattgcttaaattacttttcctcccatcatctgttagaataagactctaaaatggagaatcaagtgtatttacaacttagaagcaaagccgcatttgaagatgagtggaatgagattctaacccaacgaagaaaacgcctacaactaagtcactggaagaaaacggcgagctagctcttgcaatcaacagaaaaacccttcacccttcaactaagtactactctataattattgcttcaagacatcatcagaaattcaaaaggacattcctgatgaaagccactagtaaacatcatcatctgcaacaaaagaaatcaatcaatgtaagaacgtggaatgtttcgaaagttccaatcttgatggcattagcataacagatgcagacattagaaagaatgctcattacctccaccatcatcttccacgttaaaatcatcttcatcgtcgtcgaaatctacattctgcaagattttacagcaagttcagtaacaaaatcattaagaggaaaatgctgttggttgaaactcaagaataataaagctcatcgatgaaaactttaagatattgaaaatgtaatacccggaattaagaaatggattagcaaaaccctaactagataattatgtataattgaggaaattatattattatataatttaatatatgtgattttatatgaattttaatatattaaagaccccgttggtgagccaggggcattttggtaattatgacccgagaagggtaaattgttgagattaaattaattacgtgcttaat

SEQ ID NO: 306456 - DNA, 2508 bp, Cannabis indica
taaaaaaaataaataaaatataagaaaataaaaataattaagaaaaagaaacaaactccaattgggaaaagttctctcctacttcatttctcattcctggtttgtacggaaaccaaactcttcacgtaagaaagagctcgacaaccaattccatccaaaccttcaacctttatattcctaagattttgggttcgaacattataacacactacctccctaaagttggctgatctcataacaaattcttcttcattacaaaagcccaatgggcaatcaatcccttcaaaaggcccaattgtcaaacctttcttccaagaatcaggcccattaacacattcttcattcatgacccaaatatcaacagtgaccggagttcctttctctccgggacagaaaaacagcgcaacggaatcattccaaaccccgaggctcatccactgcgacttcgccgtttgaagactttccggtaacgtaacatcacggaacacctcatcggacatgtcgaaatattggatcatgaacctggggcccgacatgagccagtagaaagctccattaaagtaagtgtcgatgtggagactcggaaagtaatcggtcccggaatcgattccgatctctttccatgaatcggaattcaagctgtaaacctcagctctggggtaaatagattggtcacgaccaaacctgacgactttatagtcattgtttctggaatcgtacccgaacccgactccttgcaacacgaatcgacccatgagaccgggttcgggcagaacccgggagtttttcatagccggattggataagataatgttgtggtagtaatcggctacacaaacgactccgttgcagtgacttatggtttggctactcatatctttctcccccggaatgattgggaggttcatatcttcataaacggcgtcgttttgattggaattcggaaccgagatcaaagcgaaaagctctttgtaggtgtaaacaggggtatcgtatatgcgcagacaactcacggcaatgcttggagagaagaagatgttgttgctgtcgttttggtttcggagatgtttgacgacgaaagatggatcgttgagaaggaaagtcacgagtttgtaccagtacttgccaacgcatttgaattggatcagagactcaggggaaagccatgacataatctctatgatcaattcttccggaagattaatggagcttgccatattgttttcttcttgattagaaatttgttgtttcaaaagcaatttgaattgaaaaatatttgtgatggagtggttgtgtaattatatatatatagatactagtatagtagagaaaaagaatgagagagcgagaaagttgattaaaaagtggataaatagtagtatagtaggtttgattgatcagtttttaaagctaccgacttggagcttttaatataagaagattagagaaacatttaaaagtgatagacaacttggccttgcgacgtgggggtggcggtaccttagctttattttgtggtaaattctccaaaactagttcctttctttctttcttattttcttgtgatgtaattattcaaaagaaatgcaagataaggagataatttacaaatatattttagttgcgtacacggtacacgctttggatggcaaaggcaagtctattgtccaccgcacatggatttggggacctggggtttcggtagtcaattgattgttttgacgtttaaaaacaaagacagcgccgagaatctaaaattaaacaaatagacaattgatttagaggagactagactaagaatttggacattgaggcgcagatgaatatgattttttaatgggtacttatcaagtccctcacttgcaattgcaaatgaggtttcagatctctcaaataagacaaaataaattatactctcttacttttttaacatgatacttcttataattaagtttttttttagcggatagtacattttatacatgttaaagaaattgttgtttaattggtttttttattcttttaatatgtttttttagggtattaatgtaattttcttttttgaaaagttgcgtcaatagataagaaaaattagatttcatggttgttacaaataatgtctttagaaatagtagatatctctatcataacagttaagttatgagaaaagcccaattattacattgtgggctgtaaaattacacagtctcagatcaaaagaaacattacaatccacaaacaaagaatagagcttattacaatggtgtacgtaattatcaattcgccagacagaggaagtcccctttagggaattaataacaacctcaaagtcgctttctataattacataatgatacttcaaaaggtctcccgtcttaagggcaattaggcacgttgtaacttcaccgatagagagatcagtaaattctagaatatcagtagcaatccacaaaacttttttcaaaaagtctctcgccacagccaccacacacatagtcccagtcctta

SEQ ID NO: 306457 - DNA, 1187 bp, Cannabis indica
ctatggcgtcagttatttataataatcaatgctatagggtcctatgccatcagtatttctaccccctaaagcatcgcctgaaacaacatcgatagcaaattttgccaaaaattgatgtgtaaaccgctaaaaaaaaaaaaaaacctctaaagcccatttttctaaatgctacaaaactcaacttgagtggctaaagattttctcaacagtattgtggactttgaggaaacttttgctcttattgcaagaatgactacttttcatactcttatatcaattgcatttgtttgtaattacgtggactatatctctagtggatgttaagaatgtctttctaaatgggaacacacatgagaatgtgtacatggttcctcctctcagttttcttgatacaaatagagaagtttgtaaggtaaaaaacaactttatatggtcttaaacaagctccacaagcatatttttagaagtttcttactatcattttatcccttgattttctctcaagtgatcatgattgaactttttttgtcaagtgtacatttgcaggtcatattctacttttcttatatgctaatgatatattattatagaaaataattttcaaaagattgagttgttaaagtaagaattagcttcttagtttatcatgaaggattttgattttttgttgtattttctaggtattgaagttgaattttttccaaaagttgatcttctttctccatcaaagtacactaccaacattattgagtgttctcatcaccttattgatactagaattggttatactccatctaagttgaatgttcaatattctcctaatgatggctctccttcggtaagatcatattttgtatcaactaatttttggcagtttgagatttatctcactattactcatctagatccattgcatatgatgatcatatcgttagttagtttgttgcttcacctactattgttcagtcggatcctattctttgcattttaggataccttcgaggtactatcttttagagctttctaccttctaattgttctatggagctatgtacatattgtgatgttgatcaaggtcatacttaaattatgtctctaagttctatatttgtttagcggattctcttatttcttggaagaataacaaataatttgttgtttctcaatcttctacagaagctaagtat

SEQ ID NO: 306458 - DNA, 935 bp, Cannabis indica
agagagagagagtggccaaaatcgtaattcgtacagaaatggatgctccctcgtcatgatcttgtggacgtggcgatatgggagtacgttcaaaatgacagcctggtggcccactccgccattggtcctctcctcttcttgcttttcaatatttaccattttatccttccttttctctcaattttactaataccacactaaactttctattttgtaataatccaatattaatttatttaaagaaataaataaaacaaatctgctatttctgactttctacttgaatattaaaaaatggttttttattttaatagaaaggatttttgtatagggtataggacaatttggagtaggtcacgtccacatctctcgttttaattaaactaaagaccaacttactattgttgtgtataaggaaggtatttattggcattgaccaaaattattaaaatattatatatttcatatttctttagtattatttaaatttcagttatcgaatacgaaatgtccatatcacattcagataaaagaagtatataagtatactaatatgattttaaaaaaataaaaaagtatacataaataagatcaattgattatataagttatatgaataaaataaattgattgtgtatccttgtaaagaagtagtaaaaaatgaacaggggagaacattagatgaaagaaacacatttaatacattgtcattggaatatctggaaataaattacactttatagtaatacttttattattttcccgccgcaaacacataaaaattgatttctttctttagattttttaggaatagataatgataattatacaacattttatttacaaaatgaaatcttaaaaatgccccttcctagtgtcttaattttctactcttgttaccttttgattccttattagtctctctctctctctct

SEQ ID NO: 306459 - DNA, 3798 bp, Cannabis indica
tacacgattgctctctgatcaaaacttatattaagggtgatctatatgtctttgtaatgttcaactaatcatctaatctattgatttgatctaagtactggacaatcaagttcaaataaaaggtagctgcaaagacaaatacagctcttctcacctacagttccttgaaatatatagataagtctagataataaaaataataccaaacagctccaatttatttataaatgatgactaatatttagattgaaccttaaaaaattagagattagtttggcaggaccccctctctccaaattctgactaacttgttcaaaaaactaaaaactacctgtctttcccttgtaactagctactaatatactctcccatctaactcagctacctcagcaaaaaccaataaccgatataacaaataagccgtccatttagtacacaataccacatcatttagattttctttcttctaacattagtgaaaggcttatcgtaactattctggcaccaccaagatttagaagagataaaaacttcatgtccttgaattagtataatttcatcgtcatgttaatgattttgtttcaattatctaaattctatatatcatgttctccaccattcagctttgctttaatgatatacaagccaatagttaggagactcagattcatctaagaattaatttgataatagccattacaccttatgaaactgtgtctatcactaacaagtgtgcacttgctgtgacatttatagttgtaaatggaagttattccatggtaaaattatgggtttctatgggtgctgggacaagtgaacaaaaaaaaaacttgcttgaattagattgacagataaggtaggtgggtttccaattatgatttcactgttaacatcaattcaacacgtgagcaaaaccttggaaagagagtaaaatgctgacttgatttgcttcactctgcaaaaacagcacaagacatcttgtaaggaacactatgacaaatgtcagactcataaaattaatgataccaaaggatataacaagcagaagctacagagagaaacagtctatttctttctaaaatgactaatgtaaatatattttagttaacatgttcccaaagaactataaaaatctccgcaacaaggaaaaaacttagaacatctgatatctaagagatattttaattagaaaagataatgttattttattgaatcaagagttttttttatcaaataacacaacattggcaatcagaatttacctagaaagcagtgcatgattattcacaagtctacatttcagaaagaaacaccctattttgtgttgtcaagttaagattcttacagaactactaaaacaaatgggcacagttttatagactgcatttttacaaggcttaaagaactcctctaaattatttgatcagtgtgttctcactttatctcagaacatgcttcttagactagttcaaaatgatgtgagaggaactataatatataggctcatttttcagaaataataggatgaacaaaccatgatttctcattcaaaattgattatatacttctttaaaagtagcacaatttcttttcttttctttttttaaataacatgatataagactagttcaacattcattatgtcgtaataaagtacaagcttgattataacattacatacccatgagcacacataagcggatcctcgaatgaagcatttggggcataaatttcaaagtcttgtggcgtagctttggatgcatatctgaaacaattgaaaacaaataattcttacaactttacagagactactacaattttttacttggtttatatgccatcttatacatgataactaactttcacataatgagctgtgcaatcaatcttcgatctgcttaatcctaaaccattgaaattgacttctattttccaactctggcataagatccataacaagattatgagggctcaagaaataaaccatgtttacttaatcgtaatagaccatgataaaaagaaaaacaatgaattttccttttttacacttttacggtacaagttaatgaaaagtcacatataattattcaaatgaggaagttacaattttgtatcccttcttaatcatctctaaattatttccctctatatatcttttcttcatggattaataacttcaagctagagtatcattagtattaatggtaaccatttcttcttcagttttggaaatctctctacaaaattaaatactgattaccaatcacaatatggacatattatcaagtggtctcagttaagttcattgtgcacatgacaacaaatctaacatgattaagattataataaacataaacatatacatgattaagattagacatacagattcaatatgtgggggattatttcatcagataagcgctttcttgagatgaaatcacatgtctccttggtacaaacttccctcatttgatcaatttcagcttctttacctttcaataaaaatgagaacccatgttgagattaagaattcaaaggagaaaaaacaaaacaaaacaaaacagaaaagggaaagggaaaacaaaaaccaacatccaaaatgcagagtagtaggtggatgagagagtaaagaatagaaaagataggaaaaagagaataatgcagccaaagcatgggagattgcagtacccattgtggattctgagacttgatcggaaaacaaacggtttgcaaagggatactgaaggttgaaagaaggagacgatgagagcttcagaagatgaagggggagtgtcaacgtacggagatgaagggaaagaatagtcatggcttcatggcgcgctacgtgtacactgctcgtccattcttcgcttcttgttctatacgcaactataaccgaacctcaacccaatcaaattttgacttcttctccttaatattaattttctaaaaaagaaaatatatttaatattaaatttctgttttcataagctaaattccctatatattttttgtatttaattatgtcaaaagaaaatggtaaatatattcatttaatacgatgtattgtattatattttattgtattatgttaaattttattgtattgtaatatattatattagtactatttaatacaatattatgtttggtattatattgtattgtattgtattaatagattgtgtaaagttctaatatattttcaatacactcaaccccaacaccaactgcgggtctaggtccgagcccggggtctaggtctcgggtccggattcgggttccagtccaggtctgggtccgagcctcgagtccgggtcccgagtcctgggtcccagtccgggttcaggtcctgggtctaggtttgagtttgggtccgggtccgggtctaggtctgggtcccgagtccgagtccaagtccgggtctggatctcgggtctgggtgccgggtccgagtccgggtccttaatctcgagtccaagttcgggttcgggtcatgagtctcgagttcgagttcgggttcaagtctcgagtccaggtccgggtctgcgttcgggtctaagttcggggtccaggtcttgggtccggatctaggtctggtccaggtctaggacctgggtccaatctgggtcctgggtttgggttcgggttcgggtcgaaaattgatgttgatctcgaatcctttgtaaatattataatacaaggaccatttgttatgtattaaataataccacatacattatattaaaaaatttagtcgtaatacattgttttatctaaacatagtgttatttatta

SEQ ID NO: 306460 - DNA, 4689 bp, Cannabis indica
tcctcttctaactgagtttatcccgagacagatatatatctcgtcaataccagtttaatagttattattcttgtcttgcataagactaagcatccaacgagtttaaacattatctatcaaacttatatcgaattgggacgagttatttatatcgcatttaatgatagaccattattatattattagtgttgattcacgttccttctgtaggacacgtgtcagcttctggtacataattttgggcataacaattgcccctaagaagtacatttttaattaaaaagaactttttggatgattacaagggtataatcgtattaacccatttttgaaaaattgcatgcttttatttttggcagttcagaacttcgaggcacatcattagcatttaatactctgaccgttcccgtttgaaatgttcccatccgttagatcagatttcttttgatctaacaatgatcagtaattgggtataaaattggaagtgaaatttcatttcgccatttttgtgtttcaaaccttcaaagctttctgtagaaaaattttccgattgccctttctcaaccttccatgccctcgttttcccttacatttttcttgcgtattacatctaaccaatcttccagttctagaactcaccaggacccagcttctcaatcttcgagacttcgtctgcaaagatctttgttgcccagaattcttcaacaagacactaagtggcacactctcttttctttgtgatgatttttctattttgtcttcataattaggttagttttcccttatttgcattgttttgctgttttaggtaattttgatttcgtttgtctgaatatctttagggctgggaatatttttaggttattcgattcgtagattttctgggttgagtttgtgttctgtttttctagaaattatcatattgttatttataaatatatcctaattcgttccacaaatcacaatcccaaaatttttagaatcagattgtcctcaaatttctgccattaaattcaaacccaaaaccattcttgaattaatatgaaaagatttgggatcatctcgttaaaactagtcaagaagaaacctcaggccgatataggcgatatttacaagaaataattaaggttaaacgccactttttacgagaagctgcttggcttgagcctcaaaatttatttgtcattcccttagcgaggcttttgtttttacctctagtcactattgctttttcaccaggtaacttagaatttgaaatcatgacttcaaaagctcaaaaatccaagaccccccaagatcccacagttactttcgaggtagagctcatcgaatccaaagttacatctataggagcttatgttagcgaggtactgaagtcttgtggtatcaagtatgaacaaggatcccgagttaggtccgtcactctgggggaattcagttgttttccccatgaacgtgtaattcgagaagaaggctgcagtactagcgagccatctaggataggcgcttgtagtcttaaacatataagagctagagcagtacaccctcttaaggattaatacaaggaattctacaactacctcgggattgctccctttcaactaattccaaattcttaaagaattttggctagcctaaaagttgtataccaaattttgaagtgggagtgcccaaccccactacaaattttatacttttattctgtaaaggcctgtcccacaagaagagaggagcaggtggcttctattacctcgggacccacacaaatgatcaaaggatcattgtgcggtttcctaacaaaaccgagttcaaggacgactttttttgggtagtaggcctcgctcctatcaacacaactaccttttaaataatacataagttttttgcctcatctcaaaaacttggttttgagtttttaactttttaattgtaggcacttattttgtttatgttgtattgacagcggttacgaggaggcctattgggactctagaaatttaaaaaaagacataaaatccttctcagtcttccctttagtttgcgatcagttgatttcttactccatgaagataatttcaagacttgaaatcttcttaacattgaccaagccacccgtgacttcaaagttctgaagtatgctgatcggtataaggttccagtccctgctgatgaggaagacattgattatgtggctcgcacccagttcttgaagaacttaacccctcgaaaaactaaagaagatgcctaccaaggtaataattttagtatttatggttggtctcctaccgtacttagggccaaacgcacaaccttagttaaatttagggatagccagtacaacttttatatctggaactgcgtagatcgaatagctcataggtttgatagttggtatcccaaatatcatgtccagttaagttgtgatagctcctacttcaaaattgtcgaatagtatggtacaaacttggatagggcaagccatctggattgggatttgtctcccctaaacacctttgatttattcatgatcactggttctagggagtttagtaattattgtagatcttcctcatcatcagatgattatggtaattttttgagtgggagattatctttccacatttactttatttattttatgcaagtgttgaccctgtattttgcctcgcagatatggattttgagaacctccttaccagctcaggcaaaaaaggaaaaaatcgaattgctgctttagagacttcttcaggggcgaatctagtgccattaaagagaccaaggaaaaccacggccaataagaaacatgcctcgagttaaatggttatcgaactagcagatcatcaagtaacatccccagctctagctgaagcacaagtcttaggatttgttcaacaggttaaattctcaggttctcaacccgggatggtgcttctggaaccctcttgcccctgccaagtcctacaggcattgctgggtcacaagcttgctcagagtttgctacttcctgctggcgccattacaaatccttccaacaggatgactgggacttgattaacaatggcaactttgaaaatttattaaagagaagtctaaatcttactctctcgattagtctttttcttcatctcatattttcactttattttcttcctttgtcatccttctcctgacatatctttactgcatgcatctcatttgtctcacttggcacaccaaagaagccttcagagaattgaaatattggaattcaagcttcacaagtccattgaacaacatgaagttgttgcgaggcaatagaatgattcttaagtagaaaacacccggttgatgaaggaagtagaggagcagaagaggaatcataaggctgagtttgaaagttctcaaaaagatgccaaggatcaccgcaaagctcaccaaaaagtctatgaagaacttaacaaggccaacaaaaaacttgagggtgtcgaggccaatgccaaagataggtgcaatattgttgccaaacgctctatctatggagcttggttggccaatcccaatatggacttaagtttcctagagagtggtgctgaggagatgctggcttattgcgagcagaccaatggggatgaagatgttttcgaggaagaagtcgaagaagaagaagatgaagctactaaatctccaactatttagatttattttttaaccatgaccctttggcctagataatagtttgccccttgtggcatttttgtaaaacttttgctttgttggatggccaacatagctaatttaaatatattaacttttatgcctttatcctgcttctttcaagttatatatatttgtttattgcatttcaattcacaatctaaacattttttctctcaatttagcttagaacactctttgggttacacgtattttaatgccatcttctttgagtttcacgagtagttaataatctaccacgtttttcacgagcagtttacaatctatcatgttatacgcgagcagtttataatctgctattttatatgcaagaaaactttaaatatattgaatagttttttctatatctactttgaatatttttttattgctaatatgaacagttaatcctctattcacattctatcttaagtattgtttttcaagacacatgtgtacctcgtttacaatacgtgctataattatgcgagccattatttactcacctcgaacataactttttgtgttttattagaaataatctcacttataacttttattttaattctttgtttctaagaaaaggttttttgactttatactatccaatagatagttttaaccaattatcctttccttcatgaaaaaattttaatttttagatttttggtattacagtatataattctaggtgaaatctagttatcatacacatatatatgccccccaagtaattttaaaggaaagaagctttgtaattacttgaaaaaattcaattttattcataatgattaatcattacagaaataaatacagcatttatatattactggtaatacgatcgtaaatgttcactgttctaataattctttattagcgagccgttaagaaaagctaatttataaaccccggttcctacgaaagcttcaatgacatatggaccttcccagtttgggttaaacactcttgcagttggatctcgcgtatttgcaaata

SEQ ID NO: 306461 - DNA, 1915 bp, Cannabis indica
ctatttaaaaaggaatgaaaaaccattccaatgtaacaagacaaaatttaatgattttttcatcaatttttttatgcatttaaattttatttcattccatttttatttctattcttattcctattcatattcttatatttgcacttctctcaactaaatgccaccttagttttacaaatttaattaatgttttcaaatctaatatatatttttttaaaatataattccaatttaatttaattatgaagaggaaatgaggaagaagagcggaagcttcctaaaaaaatgatgtgtgtgcgctattgagagtcattaatttgtttttattgatatagtacttataataatatgatgtaaaagtcacaaaaataattttcattcctaagataatgaaagcaagatactgaaccaatatcattatatatgataattactaaaaaagtattatgagtgcttaatatttcttcgatgttataccgttattagtgtaattaagtagcgggtctcatataacttaagaaaataacttttagaaaaatattggtaaccaacgggcgccacctataaaatgtattaggcactattgatacccaataacaatgctcgttatatattttattttttgccatgataattttaaatatttagaaaaaataagtcaataaaacttattgtttatttgaaagttatatggaaaatttttacaatgcatccttatttattttggtatctaaaataattttttagttaaacattttcttatagccatgtatgttatagttatttaagatattttgtaaaattttaagaaatttagataaatttaacataccgaaaaataaaattcaaatagtatgttgcatgtttcaaaaaaaaaaaaaaatagtatgttgcacgaatgactagtttattacatacgtgtgtgaaatagactatttaaatgttttctatattataaattattttgaatttttaaaattataacgttaaaattggacttaaattttttttacatgatgaaagagataaaagatgtatgagtgcatcatttttaggaaatgcattataaaatcatctaaaaactttattgtcttaatataaattacgacgaatgaaaaagaaagcctagagaattaaattttaaaaaagttaaaaaaccagcaatttgagtaaaaaaaaaaaaagaacgagacaatataaaactttttactaatacaattaatttatatgttattttaattagtgatttagtatgaaaataaaaataagaatgtagaatacaaaattcacatttaaaccgatatacagcctgcataattccatttccaaaaaaaaaaaaaagaagcatgcataataaaccacgtatacatacatatttgaaatttgtgcaagtgtgctacgtgtaattattttgaaaacaaaaataagaaagatattattgaaattaggtaaaaaggttagacggcttttctgatatatagaagggtatatcgatattaattagcaaatttaataatgttaagtgatgaagaaacttggttgatgatttcagttcacatgcctgatgatgcatctctattctctaattctatccataagttagatgccttatcaccaccaacgctgctctttcaaccttctcatcaagcccattttctgtacggtctctgatcatcttaatcctcactcaattaatgacttaaacgcgttttttggttacttttttcaaacacatttaaaacaaataaagtacgtactttacagtacacaataaatttatgtatatatatcatgacctctatatcatatcattgtacttccacttcactctcctcatctccatctcatctcatctccactactatactaaacttaaaactatttctcttttctttctttctttcaagaaaaaaaa

SEQ ID NO: 306462 - DNA, 2563 bp, Cannabis indica
atctcaatgcgttggaaatcaaaggggatacaatagctgcccctatcaaggaaacaaccactgagggaactcacgcaaaagttcttgcaggggaacctaacttggatgctgcccttgagacaatcctagaggtcactctgtctgggacacccaaaagtcaaagggaaagggaaggccaaagttttgcctccgacttagaaatcaacaactccttctagaagatggaccaaaaggaaaagtgcttctattcatacgggatgctaggaacgtattccaccaaagttggactgctcatcataccaggattgatgtggcataggttggctatcccagaggagtcatcatccacaaggtcggatgggtacattgcctggagctggtcccatatctcatgcggggcacatctccctctaagaacctgttttgcagagtttattgcgtgcattgggattgctcgtttcaacttatacctccatcttataatctcttagacgtatggtacatttttttgcaaggttcataaattcaaggtgccctctttggaggagattttgttcttttacggggtgaagcctcaaccaatgaggaccaaatggaaaaagttggggttttacaatcttgagagatattctgatgctcactgccccaccagcaagactaagcgtttcatgacctcagagagtattggttcttctctaatagtttccctgtgaagagggtttccactctccaactcagcttccaaatcctaggtaacaattcttacactttcttttttgatctctctctttcaaactcttctatgatttgattcaaatgatgcggcgtacccggatgagggtgctctaggagcaagctcttccaaaagaggtgacagacatttctgcgtacttcgtacacctagccttcatcgcctatcctagatggatcaaaggggattcaaaaattacttcttgaagttagagcacactaagtaccccatgattgactttatagatagggtagatgagatcattaaaaattctagcaatctagagttgtctccagatactattagggtgaatccttttccaaccatgtccttcccactcttcaaagaacatggcagcttcgttggctgggaggacatgactttctttgctcatggagaaccttatagttgttcactaaacggttgcacccacatgcacacttcttagaatgtgttgttatatgctaattgtgcttttgattttgttgtttagggttggcttgctaattatgtggttattatgtttgcagatactcttgaagccaagatgttgaagtccttgagtgaaaaggttactaagagccttgccaaggcgaagggctccaaaggaaaggagaaaagtaagaccaaagaccataggctctataagtcgacgagtccatctacctcttcctcatcgaacgtctgagaagttccttctctcgtgaaggtgagcaccaaagcttctaactcctaagctcccgctagagcatatacaaatcttgccaccactaaggaggcttcgaaggacttggcgatgtctgggagtggcatagtttagacaagccatctcgaaccatagctctggtcgaggctttgcaaactttggccgtggaagggactgtccaggatgacttggttggcgtcaatgcctccgatgagagtctagacagacttgtcttcccccaaaaggacatttcctcaaatcccaaatgcaagactccaccccaccatccataaggatgcaaaaaagaccaagtatactttagacatgcatcgctctccaagaggagaaggggatcttcaaagatccaccactttactctcaaatccatcatcattaaacacaaccaacctatagcaacaacaacagaactagtagcaaaaccaacaacaacaaaaactccaaaatcaacacatcaaccaccatcaaaacaacacctatcatagcaacaacaatagcaactctaatagaaacaacaccaactctaatagcaacaataacaacaacaactccaattaggatccatcattcctttgaggggtcaaaattctacttccagccaaaatattgtgcttgtcacttccttgcctaggaacccatctttaagcttcaagttcctgttgaagcctactcgcctcgaccatgcaatcctgaagaaagtaggggagggtgacaacattttgaagaagtgtcatgagaaggaaaagaactttctttaaaagagagcttacaacctttcatcactgaagagggttgagatttttgagggcatccgcaccaccattcaaggagggccaatgatagacactgagaccttagagaagtgattggtgcccaaggttgggagggaagtaaagccctttgctgcaaaacttttggatcaagtagtaagcagtgctactgagctaaacttaaataagtgggccatctatagtagcaggaatgcattttcctttgctcactcctccaaacagtaaatcgtaggggtaagtctctgttggaaatattttaccaggaccttgatttagtaacaagtatgtttcattaac

SEQ ID NO: 306463 - DNA, 1242 bp, Cannabis indica
ctggtcaatccagtggtccgatgtatttttgatgtatttttgtaatttttttaaaaattttggtgtattatctaaaaatttcttatatataaatatatgtaatgaatatcatactacctccatttctaaaaaaaaaaaatatccataccacctgcaataatagtctcaccaaaatcgaatctttctattttacgctagctaacctaacttaagtgcgtactgagctatcagtcagaaacattatttccgtggaacatattagcggagagaaagaaaggattataccaataaaccaatacaaagaaaggattgtcttttatataggctaaggaaaggagttgagttatttaggaaataactaatcttaccagttgtatataccaaaatataactacttatcctaataaaccctttcaagatggagtaaattttttttcacccatcttgaaaataagctctttgaaatgagctggaaaaagagatttggtgaaaagattagttaggttcatcttggaagacacatgattcatcttgaaggtgctagtggtgatcttctctcaggctataggctatataataatgtatttctacatgcttggtgcgttcatagaatactaaattctcagatatgtgcagagcaaccctgttgtcagagaataatattgcagggagagagatgtttaacacatgaaaatccttaaagatggagatgaccatgtgagttcaaaggtcacattggctaatgctctatactcggcttcagcaaaagatcgataaactatttattgtttttttgacttctagaaaatgagagaattatcaagataaacatgcaaaggcttgtaaagttagtgtggatggagcaacaacatgaaagaataagccttgcccaggggagcctttcaggtattgaagaatgcgataagaaacatctaagtgtggttgtctaggagatttaatgtacttgatgagcttgttgacaacaaagttgatgtcaagacgagtgatggttaggtaagtgagtttgccaatgagacttttatattgagtagggtctgtcaagagagtattcgagtttttattgagctttaagtttggttccatcggtgtagaagttggtttgctgccaaatcctgattcttggagaagttgaattgcaaaagcttgatgggagatagaaatgtctttgttgcatcgagctacttcaagatctttttgttgggaattattttaccaggatct

SEQ ID NO: 306464 - DNA, 963 bp, Cannabis indica
tatatatatatttttgaatttgtgttgtatagagttgttttaggtgttttggtgcaggtttggtagagagcttcaagcttgcttgagctctaatggtggattttgataggtgatgtttttgagttgtttgagctaagatatttattatattgatgtttttagattgttttgggaagtttgattgaaatttgttgagtttggaaaggtttgagaagtgtaaaatgcgaagtgtttgtttcctatactatttttttagaaaaccgtctgccatttttcctagcagtaacccaaaaaaacagtttatactgtttttaccgaaacagtctatcattttttagggatttttttaactaaaatatcatttttggtattatgtcaatagcagtacttcaggttttgaatttaaaacctagaacgagttagaccaagtgttaaccgatttaccatatagcatgttgagataagatatgattattatcgttggtgactcaattattatcaattataagatacgataattagcgttttacgaaaaagagtcatcattgtaaattgagacctttattatgtttcttagttatcgattacctcattaggtaacgatagtgacattgaatgtctggttggacttctcagggtttgttgtgatattttgcacaaacaatagtgtacgtatcgttacaagtagtaaactcgccaggagtgagatcgatcccagagagattgtagttaagtacgttaaaattaaacttttacttctatttggttaaatacaaattaaggaagaaatttaaaataagaaaactaataagaagcaaataattaaagaaaattgacagttaataaaaactagtgcttcgatttcaattgtttctattgattatggcctaatatgattatcttcctattattaatttatatgcaatagcaggtttactaaggtaatttatagtcttctcagat

SEQ ID NO: 306465 - DNA, 714 bp, Cannabis indica
tatttattttaatattattaattgataaattaattttaaatatttgttacaaaataataataattattatattaaatattatttgtcttgccaaacatgacaataaaaattcatatgtaattactataatgacatctaaatacacttaatattttaaaatacaacatagttactatgtagtattacactcaatactaattataaagttactttcaaataaaccctaaatttttcttcaacaagttttgacccaaatacatatccctaaaactaacaatattaaaaattcacaaaacttatttgtacttaaaataaaattacaaatagtgaagcgtatatcactatatattttttttcttcccaaaatgagacctatttttttaataaaaaaaaaatgagtcttaatttaaacaaatatgattaattttaaaaaagctattaattagtcaaagaagtttttttgtgtttaattagggtttgtttataggtaaggaaactcaaatggacacaagtctcttcgagtaataaagtaataagattggccaatccattcactaagaaataatgaatgtggtttgtttgtccaaccttatcccaactgatgcaatagctgtttttcttaaatataatatttcgtgttcttttaggaacgattttacaaaatataaacagtcgaattagaatgattgttgtcgtatagtaatgtgtgtgaag

SEQ ID NO: 306466 - DNA, 2618 bp, Cannabis indica
tttcacttttggaggaacacttaacttctaaagagtattccaaaagacgaaattatcttcctgtgcacccaactctttgctcaattgtaagaacttataaactgattttactgagaaatggcctgagctctcccaactccaataccaaacatcacataaacgacttgaagacaagaaaatactaagaatcaagttagcatccttttattattattattgtattgtaagcattaaaaaataaataaaggggaaacatggcatgaaattgttagacttattcaaacactaattatattactagaagtgttttaatttaataatatttgttaattttatttttcacatatttaattgatatattcaattgagttatatattaatttctatgtatatattttttatttatcaaaattttttctatagttgctcacctacaagtaaacaggtaagtaaaagctgtaaacaaaaccctcaaagacacactgaaaaagtatcttgaagagataaagcctcgaataacttgctaataattgactttctaaagttaatattttgtctaacatgcatgtaaataggtccgcccaagaaactagacagacaagggctcatacacttggttaattgtaagtgaccaagagactataaatcttcttaatcacttgggggcacctacacccgcacagcataagacaagcacaatgaaaatacttaagcaaaaaaacttaagtaaagataataaaaaaaaattaaaggctaagtgtgtgaaaatatggttttgttaaacataaaaggtaagctgtccacgattaaagattggctggccaaccatatgtcttaataaaaaataaagtcaggattaaaagccgactggccagctatatgtctcaaatgtaatggcctttttggttgtgcagaaaataaagagaaagaaaaacaaaaaaaaaagctttaaagctcaagtatatcaaaaggggtcggcgggttcatgttatcattggattgctcctgggtgacagattcagaaggtgtctcgataggagggtctaagggagtagcaagctacccaacagcatcagcaagctgcccaacagcatcaccaggctggccggcatgatcttgggaaaaattattctccctagggggtttggatgcctctattctatctcctaacctttggctatcagcgcttcaagcaagtcaggcttcatgtaactgtagtcacccttggggttccgtttctagaactcgtagaaggtttcaatgtctaaattaccatactcttccttctctacagctcaggtctgctctgattatgccaatttttcctccaagttggtcttcttagcttcgaactccttgattcttgcaaactcctcatcctaagcaaacaatagtcgacccagagcctctttctcgccagtcatctcactcactcgcctgtcagcatcctccaaaccctcctcttgctttgcaatagagggcatatcttcgatttgcctcttgagctctgttatctcattgttggtggaaaatagttttttgttcacctcaccaagttgggcctctaaatgcttaatcttcttattggtagcaacacctgtccctttgagacggccataggcgtgcacaaacttcaaagacatcttagcattaaaaatggcaagttagagtaaaagttacatgattagtaatgataaagcttcagaagagggaagataacttaccaaagcctgacccttcaaaaggccagatacctatctgtctcttgcagctgcttgtctacctggactaagcacatgtctaggtagttgtggacaacctccttgacttttttcgcctaggctggggtaccttcccaactagatttctgacattctttgctggacctcccaggagcaagaggacgtccgtctaaacatcccaccatgggttgggtggccagaggggcatagggaggaggcagaggaaaagaagaggtggtagagctagacccctccttccaaacagctttagaaggggactcttccccagggacgcctgtaggttttgttttgacaaactgccctaacttgaaagttgttatcctattttttgcactatgatgtggcagttagctggatgacatgtgtctcatgttttcctacctgggcaaaaggttacacacctagctgcccccgaaggctggtaaagaggtccattcatctatacgtagacggatgtccgagcagagtcaccaagtaatgtccgaccaaagcatgattgtgtgatgaactctcatgcattgtacaggatatgtgagttggcaatttcagagatggaattattgtttccaagacacaaagataatccctacattcgtagtattagttcagataataaagacaaagagcctaggtttcccattctttgtattgtaattatagaatcaacttagtttcttattttatttattatagatgaagggaaatcattcttcacgtaataagcccctataaatagtggtgcaatctcactagtaatgggcacaaaatggattcaaaaagaacacttaacagacaaagagcgatctaagagagaattacatagagatccattgtaagagctttagagagagaata

SEQ ID NO: 306467 - DNA, 1031 bp, Cannabis indica
aagcatataacacacaaacatacaatactactagtctactgcaacaacataaaaattcagagctaataacaaagagggtacttattaaagtggccacatgaacaaccatactttcctctgcagggacacgtggcataatagtagggcggtggcattggacaaggccttcgagtctcagcagatgagagccaatgcaccatggctaacagcaacaatggtgtgattattagagcccaattgatctggacttttggggtttcaacctctatcactggctcttgtgagaccacccatggtatagccaataaaattgccaccactgataagaataccacaactgggtataagggtgggctttcatttcttctacatgcacagtaacccattatagatcagagattttttcttgggacaattttcaaagaatagtttgatttatattatagataggaatatttattgttgaggatgatattgtatcaaagtctaccacaaactgttatgtccacttttttcttactattattaatattttttaaaaaattaattttagtgctattgtttggtttggtcatagagctatcaatcaaattcaaagccataatgtcatttatcaataaagttaagccattgatagcctttaggtgaggaggagacaaaagtggaggggacaaggccattagcttgaaagataatcaaccctatctatatatgatttttgtttgtcctgttatttaaaatttctttaagctttttattattatttttttttttactttttagagagtaatatgaatcacactatgataactgtcgatgcaaatgaactttgagtaaacaagttaattatctagtcaaagatatataaagtcagaatatgagttactacaaacaaaacgatttttataagactaaattatttcgaaaatttagacaaaataacttaagaccactttcaagagacattcgatgtacagagacaaaatttccccaatgtcgtatccagatagtttccctaattcccctacttg

SEQ ID NO: 306468 - DNA, 2055 bp, Cannabis indica
tttttttattattttgtgtttttttaattatctctaaaaaattaattgatgattctataaattttatttttatttttatttgtttggttttatttaagtgagggataagaaatcgaggtgagagaaaataggtcggggtctagcactgaggtttaggaccaagattgggggtcgagtttgggttcgggatctaagtccaaggtttggggtctgggtctagggtccacagtctagggtcaaggttcggggtcaagatgtgggttttggtctacgtctgggtctaggtagttatgggtttgaggtcgaagtctaaatcctaattcaggtcttgggtctaggtcggagtccgagtccaagtcaaggtttggggttcggatcccaaagtcaaggattggggtcggggtccaaaatattagttaaagaaaatattgacacgaattataatcgtttagaatcgtaaaaaaataaacacataataaaattaggtcaaactctaatgacatgataattatttaggttggatcatgatcaatatttaagttggatcgctgaaaaaaaaaatttaggttagataattatgattaacttgatgatacaaaattaacacatagtgactcgtttatatttaatacacaattaattaatttattgataattgttagttatttttaacaaaaaaaaaaacaaataaaaagaaagcttataaaatataagataacatgtgtactttatatcaaaaaaattattaattgtattgataatttacaaaaaataataataataataattaattgaacattttattacctatatctatagaatgagaaagagattgtaaaagaggtcaacacatgtgttgaattcctaccctaacatatgttaatattagaaagttaattcaatatgtgctctcaaataccaaaacataccgttaaaaatggaactttttagttttacaacacaacaccatgaataaatagcataaaaactcttacccaaaaaaagagccacaaaaatctccaaattctaaaaacttcccctctatttttatcccaactctttccaaccattaattaacatcttttacaccaagaaaaagagaagagaagaatcccaaatgttgttttctttttggtgtaacaaaacacaataatggaagtggtagggaagctaagcttggtttttcttatggtggctttagccatcgcaaccgatagggcatattcgttcagcatggtggaaaaaagccatggcctaaatcacttccaacgctcggtgttgggtggtggtggtgcagttggtgactatattggcgttaataatgaaatgttgatggattcagaagcgagtcgccgcacgctagcacaaggtaggtctcacattagttaccaagcattgaaggccaattctgttccgtgtgggcgtcgcggtcaatcctactacgattgccaaaagaggaaaagggctaatccatataggcgtggttgcagtgccattactcattgtgctagagtcaccggttgatctcaaaagtaataaagttaaaaattataatatctcttataatatatatttatttattttttttgttatatacttattatttttgaatttgtattacaaaggaaaaaatggttggaaaatgtttgttttagcaaagtctaatgaaggattggtttgcattgtatggcaattatttatatatttatatgtactatatcttaatagatgtgtatgcatggaggatggtagatgctattggagttgaattcaattgcaaacacatattgtgcacattttaataaaatatgaaaatctcacattttttaagttgttgctcacacttctttttttaaaaaataatataattttattaataacaatcagctaaaataataatagtttgtaatccaattagaataattttccgttaaaggtataactaggattagaattaaaaaaacgaattaaataattaaccgcctaattcttatatcgtttgacaaaaaaattaaaataaaatcagataaaaaaaattgcagcatcacaattaac

SEQ ID NO: 306469 - DNA, 2009 bp, Cannabis indica
aacggttgttaggaagtcattaagtcctccatcagcagccatggggtggtgctaactgtatcaccaatgcgttgcaataattgccaagtatgagtgcgatgagaatgattaggagaccataaaaaccagtaaaagtaaaagaataattattagaaaacttgttgtaacagtgagaattacttatattgaacgaaagcaaggttacatcgatatcattagtctaaaaaaaaacaaagccacgactaaggccaactctagggacttcaagatcattaggaaacataagcttattaataaacctatttacagcacctatggggagtttagtctccataatatacaaaagggttggtttatattgcttcactaacaatgagagatttcaaaatgctcggccgctccctaaaccccaagcattccaactaatgaaactcatgggtcccagcaggtgcgttgggcatcactcgcctcaatagagctagcttcgtcaagagaatgagcgatgttgcggttgtgcttcagtatctttctaaattcaacttcattgatgctagatggatgattaaaagtaaacttcgtatttgtttgagcttgaggaacattgtgcgcaggctgtggagaggctcctatcgtgaactgaagtggttgagaaccaactaaatcactaagtatggtggaaaagacccaagaaatgagaacactatgccagtcaggaaaaataacagtggaaaaaggaggcccgaacgaaggttgataagtgggaatgggagctaagagttgctccgcagtggtgatcatggggaagtgagacttggatgggattggcagcctcgataacaggaggttgcccatgagcaaaagctatggaattgggccaagtactcaggggattggagagaggctgctgtacagaaacagtcgttgtgggaggagtagtataaaagggtcccatagcaaaggcaccaacagtaatcgtgtgtggttgacccaggtattgaaccccataggcaaacgtaggggcattgaaatttcccaaggaattgaaaagagagttatcagctcgagccagaggcatatttgacaaaggaataggatgataaatgtgtgggtaaagagtagtgggggtattcgctatctagacgagatttgatgtgattggaaccatggcaccaagtgtatgatcataccgcaataagggcaaaatagaagaggcatcacattggctaaaaacttgctgcaatgattcactatatggctgagacatccacaatagtgatagaatcagggagattttttaagcaaaactcaagccagacaagagatgccatacccatggaattgaaagtataggcctcttcgaagtggttgagtgacattaatttcaattctgacccaaaggtaagggccccaagattccttcaaagaagcagtgtcaacttcaatgaacctacccaaaatgaccctaagtttataggtcatcgccttagaatgatgaagaaatgcaatcccatagacttggataccaaaaggtggtaaaggttaacatgtctgcagtgacaataaaacctgattcgagaggggtcatgacataagtttataatcaaagtgccacggttggccaatcaagacgcacctttcatcaccaaagcaactgaattcaacagtgtaaagctaggagttttttccaagattaaactattaccgttgagtcaaattttagtcaacatgagccaaaaataggacaatatttgtgaattaataaaataaaataaagcaagaagcaacatcatagatttatagaggttcgatctcaaattatttggtaataacttacttcttttcttagtattatttgtgaaataactaagatcaactgaactagagccaacagagtttcttgattatccattaagaattacaataagatattttagtgatatttatactctttagaaagtttgaaattcagatccccaaaacagcgaatgagctgttggaaattattttac

SEQ ID NO: 306470 - DNA, 1698 bp, Cannabis indica
ttttaaaaattaaaaataaaaaggttcaagttaggatttggacctttaacatctatgtgcatgaggtaccttaaccattgaaccaaagctaaaacttaaaactttgttaataaatacagcatttaattttaaaaatatgttgtaactaattaaaatatatatatattttttttattttttttttcagcgtggacgatctatgtaggtgtgtcataaattctaaataatttataatgtgaaaaaataaaatttaaaatagttagttgcacacgtataaaataaaaaaaaaaaaaatatccaaaacaatcagaaatttacctttttatgaaattttgagtttttttgttatatttttttagattttatttgtatcgttatttacacattattaaaaaaaaaacagttgttttcacgttacaaaagtatagtacacagtagtgagaatataaaaataacacaaaatcgtaaaaatagaaataaaaaaaattataaaaatttaaaaataaataattttttctaaaataaaaaaattgccagtacaactaattatttgaatcccattagtaataactaataagacttcgttggacatcttcgtatgaaatttgtattggtacttgtgtgcgtacctgacatgcattgagcgttgtccatttaagaaattattgtttcccttaaaataaactaaaagtagaaaagagcataactgtacagcttgtgagttgtgggataaggccttttaaagaaaccattcagtattggtagctttttttctccatctaaaagtggaaatgtaaagaataaaaaaaaaaaaaaaaaaactgttttaaaatgtaaatatataaaaattctaataaaaaatgtcctttaatttattattagttatgtgaaaagaaatattttttaataaatattaaataatttaatattaaaaaataattaatttaaaataattgatccaatttatatttttgtagattaaatttgaattactatgtagattaaatttaaaatataaaattttcacttatagtgaattgaatatacggtaaataaaataatacgaattaaatggcatcaacttcaatagtttgaatcaaaatttcaatatatacggtcatacaaaaaatattggtgtttattatatatcaattacaatatatactgtcataaataaaatattggattcacaataataatcttatttaaaaataaaaaatctccgttttaacggaactaccataaaattccctaaatatttttaattaggaccaaatcaccatatcataataatataaatgaaggattttatgataaattatatccaatcaaatgcaagatattgtatttcctgtcgaatatctagtatagtctaatcaaatacattcaatagttaaacgaaatagactaaaagttcgattttagttcctattcgtttgtacggtgaattgggtaagataaagttttacgacatacaaattagggctgaacattgggcgggtttaccgggtttcgggttggcgggtttcgggttcacgggtttcgggttcaaaaaattgaaaccgaacccgggcccgaatagggcatgggttggcgggttggcgggttggcgggtcacgggttggcgggtttcggttggtcgggtttagcgggttggcgggttgacccggtcaactcagtcaactcggtcaactcttt

SEQ ID NO: 306471 - DNA, 2218 bp, Cannabis indica
ctgaatgaaattttatattgctttaaagaaatttagtttcttttcttgcagagcctcagtgactcacgggatgtaagagtacgtgtttatagggatgtaaaattagagtgctttacaaggcacagaaaatatgtgattatgtattgaatgaatatttgattagtgtaatgataaagctattcacggtaagatgctatgatatttttatattatgtaatatatgattcgaatagacgttatactatatatgtaggttgaatagataatgaattacgagtatgtatgttatgttatgataagaatacttgcatttttattgcttttgattttatagcttttcttgctgagtcattgtgactcacgagtgcttcatggtgcaggtaaaaaggttaaaagttgtgttcagccatgagcttgaggtcttccggcagtgtacatatcatccgtggtgtcttggcttttgggaagcaggatcaacctattttctatgtttggaaatgtaaccttatttttgtaatagtaatttagtaacctactataaaagaattttataaacaggggatccccgtattatggtatttagtatggaagttttattttaacttaatcaaaagtttttaattaaaccacactttgttttctaaactaatagattacgagaaataactttgtaaaagcacacacgtggcgtccctgagggtcagggcgttacactcttggtaaagaccttagcagtgccatcttggatgttttcaataatcactctaacttttcccaaatcaatgataccattttgaccttaatccccaagaacaaaaacgcctccacaatctgtgactataggcctattagccttcgttcaacactttataagatcctatccaagctctggctaataggatgaaaaccatccttcactctatcttttccccaaactagtgtgctttcctctctgactgacttagttttgataatatcttcattgccaatgagcttatcaatgcaatccactataggaaagctggaaaacaaggcagggctgctatcaaacttaacatggagaaggcctttgacaaagtttaatggagttttgtaaaagttattcttaaccatgttggtttcccaccctcttttacctcgctggttatgcaatgcctctcaactactgtgtaccgtatatctattaatggcactctattcacaagtatttctcctactagaggtataagacaaggtgatcctctatcaccttaccttttcatacttgttgatgagggtctcactgccactattcgggctaaggagcaaatcaaacactagactggcattaaaatttgtagagatgcccccattagctctcacctcctgtttgctgatgacaatattctcttcactcttgttacccgtgattccaatactttcataaaagatatgttgctttcttaccacaaagccactggccaaactatcaatcctgctaaatcttcaatcatgttctcccctaacacctcccatgaatcccaatatttttttagaacctcccttggtttaggcagtgaaggtttcataagcaaatatcttggagttctccattgtactggcagaatttccaactctcatatccattacttggttcaaaaagtggcctcaaaattaaacatttggaatggaaaaattttctctagagctggcaaagaaactctcatcaaagctgtaattcatgctataccctcatacgctatgtcctgtttcaaactacccacttctacctgccttactattcaaaaagccatatctgaattctggtggggttcttgcactaataagagtaaaattcattggaaaaaatggccctccttatgcacatcaaaattccacggtggactaggttttaggtctcttcacaatcccaatcaagcacttattgccaagcaagcttggagaatctggtctaacccctcatcactcctatacactctccttaaagctaggtatttcaaaaatagcgacttcctcactgccccaaaaggccattgcccctcaaatacctagaaaagcccctcaaatacacaaccatggagctgccaaagtgccacctacatgggaatatcatggaaatcagtttttcaacgaaatatcttttgaaagaggagaatcaggaactcgttttagaaactaaaagcgattaagagaactaaaaatgccaacatttgacgag

SEQ ID NO: 306472 - DNA, 1831 bp, Cannabis indica
tttcttatactttatatgtgttaatttcatatcgttttagaagttcatatttaggttgttaaataacatacttgtgagtagatctaagatcctggtaaaataattccaacacctcttactgaggagaatcctagagatctcattccagatgaggggccttccaaaccagttcaacctaaacgatgccgtaaggccaagggcaaagctcgcatagtatctccagttcctttggccctcaacaactctatctggagatagaccaaagaccaaacttattgaggaattattgtctttggaagcgtactctaatgacggaggagtacaaaatgttctgggactcatgtggcaccgcatgtctatccttggggagtcttcttcccaaagtgtggacagttttggatcgtggagttggtcccatatctcttgtggagcccatcttccacttagaacttacttcatggaatttgcattaaagctagaatcactcccttccagcttctaccggcggcatacaagttgctcgtgagatggtttatattctacaaatctcggggaatgtctgctccagccctagaagaggttttgtatttttataagttaaattcccaatccatgtgaggacatcctactaaagttgggttttatcgtctctagaaatacaaaaatgcccgacgtcccatgagcacttcctctcatagtctgaactgtcgtgagtacagatttttcacaacttgctttcccatgaggcgagttctagcactctcgttggacttcaaaattctaggtataatcttttattcttttcttttactgctttaacggtttgtaatatggttatgtttcaaaacttaatttcaattcttcgattgccttccttccttgcagaatatgttcccagaactgagctcacaaagtaattgagtcaaagaattgccttttacgagccctttcctaaggaagagttgagagttgaggggctggttaccatccaattattgtgccagtatggtctcattgccaccttctagcgtattcacggagttaatggtaggggacaaccctagactcccagcaatcttaaggagcaaacaaccaaggcggccaaggatgaggaacttcttgctgctgcttgggacagctaccatcccgaacccctcacataaaaagaagaagaagagatcaaggccaagttcagggctacgtacccagaagcaaatacttccggagctagtacttcgagaagagttaatcagccctttcgtgtaatttgtacccctagcctttctcagatgccactggcagaccaagagagttttgacaactctttcttaaatctagaccctcgtagatttccaatgaaagataaccttgatacgtagaccaactagttaggcacaacaacaatcgagaacttcctccaaacactattatagtgggccctttcctcactatgttcttcccaggtttcaaggaacataagagcttcatcaaccaggaagaagtaaacgtgtttgcaagaggggaaccatatagttacacgttttatggctgcacttacatgatgtatttttgcttttgaaactatgtgatttaggttgttactttctgtcttttaaccgaccttctagtttatggtgttttaattcatccagatacacttgagttcaagatgcttagtgatcttatgaaaaccatcaagaaacttaatgttgtggtcgacgagaaggggaaacagaagaaatcccaagccaagaaatccaaataagtgtcagatcctctggcacccccactcaaaattaaatatgttggaattatatttatccaggatctt

SEQ ID NO: 306473 - DNA, 1998 bp, Cannabis indica
gtaaaaaatgtataaattttagtgtatcccaatcatttctcataaaaaaaaaactactaaaatacattttaaaaaaattgttcttttatattattttttgtttacgatgaaaaactaacatatatttaaaattaaaaccaataaagcaaagttctacatttatttaaacatgctagctagtaaaaagaaaatacattaataataatggcggttatttttgtcctataaggcatttttacgtgtgactttatggggtttgtctcttgtatttttctcaacggctcttgagttttgcttttcttgttaattggtgtggtttaccgtttgcgtggtcttgtttctttggtaagatttgtgcaattttatttctgcgtgacctagtaaggcgttgttctttttttttaacctgaatgaatcattttttcaaaaaaaaaaagtaataagaaataactatttatttagtaattagttgtcttttcaaaaaaaaaaagttcataattatatatagtaattatgttttattatataaaaatacaatatatatatatttttgacgcgaatacaatatatatttagatagtagtgattacaaaaaagaaataatttgtctctggtatagtttctccaaatgaaaaaagttttcgaaagttttttcatcttccttgaaagttagttgtctcctggaagagcttttccagaaaactaacttgtctattcggaagaagtctcctggaatgatagttatcgtctggaaagatattcatggatgtctatcatatccacctggaacgagtcttctccggatgactagctttttccctcatggaagagagtctcggatagtcaactccaactggctctttttctatccaggatgtcccttctagtatacactttggtcctctgtccaagaagcatatgactcacccgaaagcactttatcttgtgctcacgtggagattctgctactaggagtttattaagttcgttaaatcgtaactaacttaacaaattaacagttgtagccatcaacttaggatctttatcctgagcctataaataccaccaatacttatcatttcgaggatgttgaataaattgagttttgagatggagagagaaagattgagaggtagagagaaaagagagagattgggtttggattttgtatgaagaatcttctatagatgaagaagattcttgggtaagagtgtgagaattgaaacactttgagagaatctaacaaagaatcgatctcggctatattgttccatgttcttgcttaatcaataaagaggatttggtggtgttcaagaactggagtagagccatagatcatatcgatctataggatttgaactagtgtatatctcagtgttgattttattattttaccgcttttatagtttttggtttttaaataactctgttcatccctatttttcttcaattattgttcatgaattattaatcgtatcgttgctaattgtttgttgattaaatttttagttattttgattccgcacatttgtcttaatttttcgacaaattagagcttggaaaacgattaagaatgcataatcaagattctttctgatgtaattcttgaagaaatagtttctgtcatcaatggcgagattcgaattgaagaaattcgatagaacatatgactttgtgctatggagagaaacattgaaaggggtcttagtgcactagaaagtctctaaagttcttaaagatgaaaagttattagctaaaatgaaaccaaaagagaaagcagaatagaggagatggtgtattacacaatcatatgcatctgtcaaacagtgtttaaagaaaactcatctcatagaagacggcgaaaggagtctagaacaagttggaaaaattatacttaaaatcatcaatttctagcaagattaatttgccagaaaagttgtacgattttagaatgattttatttatttatttagatgataatattgatagatttaatga

SEQ ID NO: 306474 - DNA, 1971 bp, Cannabis indica
caaattagcccccacggaaaaataaactcaaaaaataaaatggcgaaccttggttgcagaagatcagtaaacgtcagattgagtagaggtagcatatggaacctgatacttgattatactaatagtagtataatgccaaaaagaaaaaatattaaacactattaatactttttaacagttctctaaaatatatataagtgaatatttaattacactattcaaataaagaaatactaaagggcaccagtagtgcctagaatccttttatatgtcaatattattattgatctaactaaatatcgagtctcatataatttaatataatagcttttagggagtatcgctaaccaatcacaataagatatgatgagaaagtactagaccccgctgatgactaatagcagtgctcattcaaataacagtagtaataatgttgaacaacacactattaatgtgttttagtataataaattaagagttattacttccacaagttccaaaagaaaacaagaagctagctaaacagtatagatgagtgtagagtactgtaagctatagtatagtattagtaataggtaggcatagctgtaaagtggtaacaagtaataatcccatcttcttattctatactttaccagctacccctttttgccatttttgatatacttgttcaaatttgtacaaaaatgaatatcactttttttggttatttagatattgaaatgaatgaatgaatgagacatgcatggagtgtaagtgagtaaatctataatatttataattataactcacctttatggtacaccatgccaccactactactactaccactaccactatctaatctctcaaaagcatttcttaatttgttatcaaagaaaatcttataattgcaacatatatttgaaaatgttctttcaaatattacttttggtgaagttcaaatatgttaatgtgaaatagaaattaatagtcttgttttctccaacatttccttagagaagggttatattgtatattgtttgtttaatttggtattaatattcgatcatttttaatgtaagatttaaaatttgtgttaaatttagtataaaagataaatttatatgatatttagtttattatttacaattgtatttcaatgctaaggtgtaaaataattaattatattgatagttattttatattttgttgaaaatatattaaaattattatgtttttatctttttattgaataaataatggtaatatactaaataaaaaatataaaatttagtaaaagtggatcataataattaataatattataataaataaaatggcagtatttattggaggttaaatttatcacaacacttatatcttgtgttaaatttagtataatttttaacatgtgttaaatttaactatacaatatttttttaacactctattgaagatacacttttagagtaattgattttgtcacgatcttgtaaaataaacaaagtgagattagatataagttcttacttgttatgaaacgagatgcatcttttttagcgaaaaactatactcaatatcaaatcggaacagaaacatgtcgcaatttattttgttattttttagattcaacaatctcgaatccaagttagatttgtaaaaaaaaattaagcatcatgttcacccctaagtccttgtgatgtctaccttagcaagctttatatattaatttagtttaaactcatgataaacattaccattttcacctaccttttaaaagcaccaacttttcttaaagaagtaaaagtagtaggactactaggatgtatttgtgtggggctaaattactattttttaaaattatatttatttattttaactaactatttatgttagattcaaaatggatagggattgtgtggtaagaaacaaaacccttgaaacattttccaattttatatctctctcagtactagaaatttaatttag

SEQ ID NO: 306475 - DNA, 1482 bp, Cannabis indica
aaaacttttacctttaatttgaatattcccatcttctttaatctgaccttcaaatgctcgaaccttttgggtagaacactttgaatgcctgcacatgtctacaggtttttcacttagaacatgaaaaatagcatgaatattctcgttattcctagaactttatttttacttgctttattattttcaatttatgcgtgtggggacacttttcttgaaatttcatgcataacacgctaaaaaagacaatctatctttcatatgagcaatctctcagttagccagatcttcgagtttgacaaaggagcattcgtggatgaaccgcgaaaacatgatagctttattccaacatcgttgttagaagacgaggttctagtgagaccgaattcacaagcttcatggtctattggcgagatagctcgcatggttaaagaactaagaatcagtagttattgaagtgcggggaagttaatccacttatctgctcatggaagctttatccatcccagggctgctccatatgaggaagtcgaggaaatggagcgagactttgaatttcctgctcgcggggatgaaggtgaagatgatgaggatgttgcaatttttacagaagacacactactagacgatccattttcttgcgatgatctagtctcatgtgtacgaaagtttgaccttacgacattctagaggctaaagttgatcaacgccagttgtacaaaatctgtgtcaatacaatgtccacatcttcctttcaccaacttagcgattacgccgactgatgtcgcggtgatatctattcccattcttcgctttggagttgcagttcctttccatttgttttgtaaaagcaattttaacatattatcacatttctcccttctagcttacccctaataactatagaatcatcattgggttctatgtgatgtatatggagtacacgcaaggggaatctaccattgaggacttctgctacttctatgacattaagaatgttggccacgataacggcttctactattttagtaagtgggctaagtcagaggtcaatgaaatgaaaggtgtggttttcattatgggagattggaaattgaagtggttttacccatttacactgcccgagattaggatagatttaactgccaacctcgtacatcgcatacttttatacttgtattatttttattctaattttgaggattttattaccttttatttgtattcacagggaggctagctcaatcaaaactcactgaagattgtttggaaattgcagaggtcctatgcagtctaccaatcaaagaacatgtttggtgcattttttgtacgacgaaaaagttgcgagaacatggattgattagaaacgacgctggactccaacgagcgcttatgtacaaggagccttccgagaaataaaaggtgaagattgaaaagcgtttctccaaacaaaacccgaggtagctcatgttggaaatattttac

SEQ ID NO: 306476 - DNA, 2541 bp, Cannabis indica
tttgttagccatctaagtttgattttacaaatattaaattaaatatttggctgagccaatattgacagtgggtctttgcctttgtgtgtgtctgaaaggttttgtgtgagtgagaatgacaaaggatactaagaatcgaggagaagggacgagtatggagagggctgaaggggacccaagtaatatgactgagagttcgtcgattgtgacgggaaagggtactgccttgatggaaggaagcgctgaggaaaaaatggctttgatgagacaaaagttcctgaaagaatcgactttggagctgatttctgaactggatatttcagaggaagtagggagaaaagtagcactggctaagtgcttcggaaagctaccattgccaaagaacagagttaagcaaatcttgaacggtatatgggtgctacgagggaaatggtggatggaaactcttgaaccgggactatggggtatcttctttgaacatgaggaggacttgaagcaggtttttgaacggagaccatggattttgggaggtcaaatcttaaagaatggccggagtgtggaaggtggcaaggagtggatatgaacttggcgagggtttgggttgaaattcatggcctcccaacgccctatcttgcggtacagaacgctccggtgattggagccaaggttggaacctatgtgaagttcgacaaatctgaccctagaatcatagcccggagggagtatctgaaactgatggtggagattgatttaacccagaggataccggcgggatttcacctaagcatcaataggggaagaaaggagtgggtgcagttcaagtattgtaaaattcctctcttatgctttaactgtggttacttgttccatgaagaaaaagaatgctggagacaaaaggaacttgcgtttccccccattggtgaagctgtccaactttatggagtttggattaaggcaggatcatcggaagaagctgttttgacacgagaaatatggcaactgggaacagaggagctctttgtcctgaatctatgactttgaaactgaagaacttgtccctgaacggagaaaacgcaggcggagatgggtttttcggtggggctgcgaaagatgcaagggggcccgagaaaggacaatgttcatgaggggaggattccactcaaaatcgtacaatccatacgaggaatcgtggtgacaacatggaatgtcagacggaaatcggaatggtgcaacgttcttgtacgcctgatggggaccacccaatggcccatgtggagaaaaaccctagagatgatggggtgatattatctcttatgcccaatgttgggccatcatcggcccaaatgcttgaacatcctcaccaaaaaatttgcaaatgaagaacaccacaccaatatccagagcccattcccgtggaagtggaattgaatgtgggtattgaaacaacagtggcccatatgctgggtaacgaagtggacctgaagaaaggagaaacaattgctataattaatgagggagatgggctccaagcccatatcacttctgggccaggacaaaagaagagaaaggcctccataccaattatccctgttgattcatcaggaaaggtgatccatgaagatggctcgacaaatcaaagtaacattactcttcctttctcccctgccagttcaccgtcttttgcagtgggaaagcatgacgaagacttatcttcggggaaaaggacgaatgttggaggttctcatggcaagaagaagggtaggccaaggaaggatagtaaaacaaaggagaacccaacgaaaggtggaaccaggaagggagacattaatcaaatggctcaagtggaagatggaaagggacgtactctggtggatgttgaaattcagcaggattttcatgtgggcgaggaggcggcccttaccatgtcccccaacctcaatgattatcctatcgtggaattgccgaggtctggccagggccgaggcaacagaagccttaagggcttggacaagtaagtataatgttgactgtatctttttgatggaaactaagattggtagagaacaaatggataatgtgagagaagaattgggatatgataatggggattatatccctgctgatggtctggcggggggtttatgtttgatatggaagaatgaggtcaatgtaagtattgagcgaatccataactctgctttttaatgtcgagtttcggaaccacaaagtcaagagttttggaggatgttcgctgtttatggaactccctatgaagaagaaaaaagatggttttagaggaactcacgagctatatgatagcgtgtgatgatccgtgggcgataataggggatcttaatgtgattcgttgttcagaagacaaggctggagggaggcagttcagggccaaagacggggaattgctacaatccttcttggatgatacaggggggtggacttggggttctgtggtaataagtgttggaaattattttaccaggatcgtagatctactcacaagtgtgttgattaacaccctaaata

SEQ ID NO: 306477 - DNA, 1776 bp, Cannabis indica
ttcagctatgagtagaaggattaccaatcgtaatatggtatcaaagcttaatttcccccttgaatgctaacatggcgactattggagctcaaaaccatgctaatccgtcgaatctgggaaatacagcaaactcataccctacttctcgaggaaattgcaatcatgcgacaaagagttctctcctgtgtgtttctcccataatctttcggttaaacttaacgatcacaacttcttactttggtaacagcaggttcttccagcaattcgtggaaatcgcttgctcaaatttattcaggatattgctccacctctgcagttcttgtctgatgaagatcatgcatcacaaatgtacaatcccaagtttcttgattgggatgttcaagatcagttgctggtttcgtggatcttatcatcaatgtctaaaagtctgttgacacgaatggttgcctgtcacacagctcaccaaatctggtccacccttgagaaacacttcacatcgcaagtatcatcgaagattcttgaattcagaacgaagctgcaacatctcaagaaaggcactcaatccctcaatgattacttactcaaggtgaagcaacatgttgacttgcttgcctctgttggtgaagtcctaagtgactgtgatcagattgcaaccattttcaaaggacttccgaaagcattgcttcttacttgagaatcaagagtcgaaaagactgatcaagaacctgaaattaatgctaaccttgctgtttttgatactcactagcagcctaaagccaatgttgcttatcaaaatcgattcaaagctagttttcctcccagaaatccattttagtttggtacttatgcaccaaattttcctaatccaagaggcagttctccttctcgaggagctcaatactactatcccaatggctttgttccaagaggatatcactaccaaatgcctcagtacaactcttcccaacctccttaagctaatcgcagaagtgctaacagaggaggcagagttactactccctcaggctgcccacaatgccagctttgtcacaaaatagggcacacgattgttgattgtttttacgaattcgacaagagttttactgatgttcaaccaaacaatgttgccctttctccccaagccaatctgatgcacacttcgaatcacaatgacattaattggttatccgattctggggccaccaatcattgtacctctaatgctcaaaatctggcctcaagttccacttatgaagggtctgaacaattgtttgttggagatggtacaattttttctattaagcacattggtcattcctttctctctaattcatccattacttctcctctcatattgagtaatttacttcatgttcatgcactaaccaaaaatttgttaagtgtgtctaaattcactagagataacaatgtgtttttcaaatttcaccctgatatttgctttgtcaaggatcaggttcatcacaaggtgctacagtatattgagttatctaaattagtaattttaattaaatatatatatatatatattaaaataagtatcaaatatacaactctttaaaataatgagctttagttataaggatattcgatctccattgttggtcctacatggttaattgttttcaatataacttcaagatgctagactttgtcccccttatggatggttattcgttgaagtatttaacattgtaacgatctcttatgataagtattttgtaagtttttgtctctattagactctcccctacggtg

SEQ ID NO: 306478 - DNA, 1962 bp, Cannabis indica
tatataagaacatgagctactcacttatcaacatttggttttaagatggaactccatgattctcaacatggtatcagaaccatatctattaccggcatgtgatcctattcgatctgcacctatacggataatgaccatgtctactctcatatggttcaagtttggtaagcaaaaaatagctacattttaagagagaatattgtggacattgtcccacataaaatcaatggtagaatattattgcaaatcatatataagaacatagactatattacttattaccaattaattttgagatataactctataattattaacacctagatatgctaccacaatgcttagacaaccggaaatacaataaatgaatcaattaggagtgaagagtgatcagtaagtcactaaatacaatacaaacacaaatatagtgctataaaaatatattataatttatacacacacaatacaatatattgtaaacatgtacactgatatagacagtacaaaatagttgctacaataaaacattacaacgtagcccattacattaattacattaacatgatggttaaattaataacgtaaattttatcactttttaatattcttaactttgagatgttgataatgttggattataaggactccaaccatttgacaaagttattaaaattctttgaagattgaccatcctctgctatatttttcattgccaattctttgaattgcattgacctttttctaatttccacatcatttaaaagtttatcaactttatctttcacctcttcctttgttatgatgcctttttcatccgctacaaactccattccaaccttccaaaaatcacatatatagtccttgttcataaattggtcagaaaaataaggccaacacagaaaaggcactccattactcaaaccttccatggttgaattccaaccacaatgagttacaaaacaagcaatagcaggatgactcaaaacctcttgttgaggtgcccaactaacaatctttccaaccatattttcaattcccaaaaatgtatgtaatgggtcaaacatagtacttatttttgccttttcacttgagatgaatcctggacgaacaacccaaaggaatggcctacgagtgagcttaagtccatgagccaactcataaaattggtgttgctcgtgtatagtgaagctaccaaatgcgatgtatatgactgagcaatccttttgttgattaagccaacttatgcaagaagagtcattagcccaaaattgtgattgggaaatatctaaaagcctattagctctgtttgctattaatggccctattgggagaaattttggaaacaaagaaagcgcaaccgattcgatgtcacaagttgtattaaagagacaccaatgtgcagtttttgcacattcataggctttaaaatgaacttggaacccatacttttgcccaactaagtcctgatccttccatggtaactttgatgtgtttgcactaggcatgcctgaagacaattgaattatttgattttggttgggactatttcctggaaaataatgtgaatcaattaataaacaattcacgtattttaagtacttacaagttacaagtatatataaaataattaaataattctactgataaaattgattctaatcaaacaatgtttttaaatgtaatttagggaaagttttaatgaagagcatgaaaagagaatcatcagcatgtttttttgtgtttttggcaggtgaagagctataaatttaattttttttatatatgatggttttgtatagtttaattgtaaatccttcagcgtcatcaaaatgtttcattttatttcagtcttgtctacttcttctatacgttgtgtgcaacaaatcatgtttaaatactcactacaaaaaaaaaaattacttttatttttagtaacaatattttagttataatataattttt

SEQ ID NO: 306479 - DNA, 1195 bp, Cannabis indica
ttttttattttttattttttgcccctaaaaaattaaaagggtgtgcttatctagttatctatatccattgctcatttattttaacaacaacaacaataataataataattaatatctgaaagtttaagcaaatggtttttttttccatatagaaatccatgcatagagtgctgccaaagtcactttatgccatgtttgcatgtattatacctaactttgagttgccactatgatcaatctattcaccttaccctaatcacgtttttgattaggttcgattattaaagtctataaactatgcatattattctattttattattcgagagtacttgttttttttatttaattatttttcctgaaataaaaagattttatggtgtgatactgtacatgcacataatctgtcacctatttttttttttttttcaagaatctaataatattatctcacaagtggaatggatcgaaatagaagaatgattcttcatgactaaagaaatgtatttataatatgtcacccccattgatagtaataaagcctttgtagatgacccctaatatagaataatggttgaagataaaattattttaatgtttattaaatggcttacttttatcatattttacaaaattactttaagttgagtataataaaatattgaatgtgttagacaggatatcgaatgtgtctatagaataatattttataaaataataattatacataaaaaatttaatttattatttgttgccaaatacctctcaactaataatataatgccaaaaaaaatatgtgtatatatataaacttgagagataacctgatcccaactaatttctaaagatccatccattactttatactgtttatagcttaagaaaaatgtatacgacaccccctaaaagaattttcaaggattttatttatttaatgaaaattgtgtatgttgaccttatttaacattagttgtaattttttttttttaataattaataagtttaaatagttatttatgtgtatattagaagaataatcaatataaatattaagggtaaatggtgttaaaacccctaaaatttttgttttggtctcacttaacttctaaaatctaaatttgtccaggataacccttaaaactactatactgttagcaaaaacacacctttgtccccctgaccccgttatttgccta

SEQ ID NO: 306480 - DNA, 1274 bp, Cannabis indica
gagttagttacaatttcggttgtaattaactactagatcttgatccactagaggcgaagccacataggatctggtctgttttatttgtatttttcttctcttctgtaaagctgtaataataagtgtgacaggggggatctaatttaacattcctcttactcaattctcttgaatttagagttccttgaacttctacaagggtcaaggaatcctccatactacaatgtctatttgaaatgattgtaagatcttggtaaagatcataataaaaacaaagtttgatcttcatcactaatagatacatctatattaattctccaaattaagacttagttagttaaagatatctaacttttttttagacgcctatcttcttgaatttaaatgaatataaggcttgctttagatagaggcgatttaccagagactttgtcatgtagaggctctcaagcttcgactaaattcgtgatattgcagatttctctttggaggctagtctgaacatttatctccaacactcaatataattgcactatgagccttatcaagaatcatcttcttgtccttatcttcaagcttcacgtcgagaccttcatctccttttagaacatcttccaggctctgctgacaagaagagccttcatctttaatcaccataatccaaagtcgacgttttgtccagtaaatttctccacttcataatttgtcgatcccattgttttgagtccatgctcaccgcaccaatttgttgtggaatcgatccaaaaatcactacaaatcacgaacaagatcacttaatcccagggtgatcttatactagtgatgagatcaaattacacacaaagaagacagatgaatctcatacacattcaaattgatctacaaacaccactttattttgtttcatgaaattcctcccaaagtgtcacaattctctcattcattccctctttactactacaaaaataggctttttatcccggtttttaggggcattttatctcaatttttgttataatgaaaaccggaatatatgctagtgggataaaaggtcttataaaaatcgagataaaaaaccacttttaatctcgattattataaaaaaactaggctaaaaaaccatttttaatcccgattttcctttaaaaactgggataaagagtgattttttatcccaattttcctataataaccaggattaaaggtaaaaaaaaataacaaaaaaaatttactaaaactaataagcaacaaaccacactacagagaaatttttt

SEQ ID NO: 306481 - DNA, 3741 bp, Cannabis indica
tttgactgatgtgattcttcacagagtagccgtcattagactttattggtcatagccttgtaggtgcagatcgggggttgtgtcgtcagactttattgcgtgtggcagttccaacacgcctcctcccatgcgacattaaatgcgagatgactgctcagaggaagcctgacaccacccggagatactttgatgctaccttgctctccgggagcatgtaaaacattgcataccttctccaggaggcatatccaagataatgcctttctttacaaagacttagctattaatttaagtgctaaatcctttgtgtccacgtgtccttgtctggttggtccacgtacattgggcaaaatcaggggcaacaattgtatttatggcaaggcctgcaaattgaaatttagttatggacagcaaaggacaaagggacctcttgattatgtccatgctaatctgtggggaccttctaggacatgctctcattttggtgcaaggtattttgtgtccattgtagatgactactccaaaaaactatggttgttcatttagaaaaccaaggatgaatcctttgaaaatttcaaaaattggagaactctaatggagactcaaactagaaggaaggttaagagattcaaaattgataatgggttagagttttactctgatattttcactcagttctgcacaaagattggaatagctagacacaagacagttttcaagaatccccaacaaaatggtttgtctaaaagatttagtagaaccattttggaaagggtgagatgtatgttattgagtgtaaacttgtctaagattttttgggtagaagcagtagttacagctatgtatttgataaatagatgtcccttcactgccattggaatgaagacactagaggaagtctggtttgaacatccactagatctgtcaaggctgagagtcttcagttatcttgcttatgctcatataaggaaaaacaagttggaacctagagcactaaagtgcatgattttgggatatctagagggtgtgaaaggatacaggttatggtgtttggaacctagacacaagaaatgcttgataagtagagatgctgtgttcaatgaggttaaaatggcctacaaagagaggacaaatctaacagactcagaaccagctcagacagctgcctttgaaccagatgagttgaattttgaggtggagtttgatgacaagcctcaagcagatcatgatgatgatgagccataagaagaaactcatgtacatggtaagaatggatatcttctagctagagaaagaactagaagacaaactagagctccaaagaggtatggatatgcaaatttattgtctttctcctttgttgcagcaagtgaagtcttagaagaagagcctttaggctataaggttgtactaaaaaccagatacgagaaaaaaatggctcagagccatggatgaggagaagaagtctttgcatgataaccatacatgggttctgattaagaggcctaaaggatctagagtggtaagttgcaaatgggtactcaaggtgaaagagggtattccaagtgttgagccaaccaaactcaaagctaggattatagctcgaggcttaactcaaagagagggagtagactacagtgatgtattctcaccaattgtcaagcatagatcaatcacaattttattggccatggtagttgagcataatcttgaactaaaatagatggatgtgaaaactgtcttcttgtatgatgaacttgaggagatagttttgatggcacaaccagaaggattcattgagaaggctagagaagactatgtgtgcaagctaaacaagtctatttatggcttgaaccaatcacctaggtaatggattaggagatttgatgttttcatggacaagatcaagttcacaagaagtaagtttaataattgcgtgtactttacgttcctacctaacagtgatattgttatattactattgtatgtttatgacatcctaataactagcaatactaagttagaagtggaaaatgtcaagaaggaacttagtgttatcccaatttttgcactctgacgtggcatcacacgatggtgacacgtcgaatcaactttatgtacctgctcgcaagaaataagccgaacagggcaccacatatattttctcggacgaagccttcttaactgggtagtgaataatccgtgcaacatgccaacacttagcaaattcaactttcgcatcgtgagtcatcgaagaaatacctataactttgggattagatcacagagatatggcaagctgtctgaatcccttaattagtgtattctgtatttaatatgcaatctttccacttatatcaattgtaatcagaagggaaattcttccctcccaagattaaagccctataaatagtgattcatactcactgggcaaatggtcgatgaacttatctaagaattcatattcagagatactattgtaagagctctaagaaaacggaccattttccttattcttaagtcaatacaaactaagaggattaggctattaccgaactgctcggggctggacctctataaaattcctgtgtctttatttgatttattatattatattttcattgtactacttgtcgcttacaagttagactcactgtcattggctaaaagcaaggtcaacattttggtgctttcattgagagacaaatcaaggatcgctctttatctcaaatctagccgcaaatacaatggtggtacagactcgtagaggcgtggttgatccaacaaatccgcacgtggtggatcctgcactgcagaacccagggaatacgagggtttcgccaaccacaaatcccaaacaacccttgatcgtaggtcacagtgtgacgactcctgcgagtggaatcgcgcctggtgtgcaagagactaggataccagttcagcagccaactaaggcattcctagaactgtctttccgcccataaccaattcgtgctgctctcagagtcatgcaaggtcataccaacaccttgcatcatgatcaggaagaactccatgctgcagtaaatctcgcattcgaagagcaaaggcgcatgttcactgaatggagagacaagaagatggaaacgttaagggctcaacaagcaaccattgacgaccgaacccggcaggccactgtgttgatacgaaaagcctatcaggcttccggacaacagcctacaactgtcatccccctgggtgagacagacgaagatccagcggtgaacacctctcagactataaattgtcagccgtccaatcccttgtcacaggtcccacctgtgggccaagcggtagggggtagaccttgtcttgcaattcgttaggagaggtgatacctaatacttccactcaggttaatggtggcggccagctgatgggccaaaccaaccagtccctgagacagccgtgtgttttcgtatttaatcgtttagggacagttcatgatcttcaggatgatctgaatagaaggagaggggcggacgaccagcataacgcaccagtcattcagcccagaatccacgctcaaagagatgctgacgcgattctggtcggccaagaggctgaacaagttagtccagttgtgcaggcacagttggatgaacttaaaaaaatgttccaaggcttggacgatcagaggaacaatgatctcgagttggatcgagcacgtggatcccccttctccccagagattaatgtctt

SEQ ID NO: 306482 - DNA, 1188 bp, Cannabis indica
atttaaactccttttcaaattattactaagtcggggatcctcttttattacaaacattactaaaagaccactgtgttatttattttattactaggtattcaaaatactagccagatcctgtcaactgatcacaaaagacgtcgatgttaatatgtacattcgtcagaagatgtctaactcatggctgatccatctttcattttctcttacttgcatgacaaagcacttgtgagtcataaagactcaacgagagaagcgggaaacaaaatacaaatttcatgattaaataaaccgataatcattaaaagtttcatacttaaaacatatattcacacaaaacataacggtttatcaaaatactaattatccaattacttatctaataagacaagctatccctgatactataaagtatccatcgaccctcgtttccaacgagtcaactaatgtcactatcgttgcctaatgaggcaactgataagtaataaacctaacaacgattttagaatagagttatagctctttcatattgacggtcattattgtatctcaattagccatgtaatgtggtacaattaacttttcttacctcgaattcaaatttaggtgtgcgggccaacctgagtggaacaatgctcgacgatcactacaacatttcaccctattagcggtggaccactccgctactaataggcccacattcggtcgcaatagggtattagcggcagaagtcccccactaaaggttcgtcgctaataagtggccgctaatagtactattagcggcggaatagcagcggaattgggcttcgccgctaataatactattagcgacggaccattagtggcagaccatttgcagcggggtcccgccactaatgaactctgtcagttttgaactttgaaactgtagagagcattagcggcgagaccccgccgctaataacaatttaaaataaacaaaataataattttatacataatattatttatatatatataaataattatttataaataattaattataaatatataaataataatttaaatataataaatcatattacaaataatataatttaaatccaataaaatttattaatagtttaaaaaatgtactcaaaatttactacttttcactattaattctattacaatattgtctcaaaattaaacaaattttttt

SEQ ID NO: 306483 - DNA, 2773 bp, Cannabis indica
tttccagctttatcaacctgctggaacacctccgtacaccaaaccagaaaactaaaattctggtgcaaaaccgtgcctatacccgttctttcccagcatattgcaggagtcgggcactccaccaaggcatgaagaattgtctcatctgcactagaacaaacaggacacaaagttgcaacctccacatgcttagaccggagctgaaccatcgtgggaagacagtccatacaagctctccaaaccagatttttcatcttaggagggacttttaagcaccagaaaattttccagaacttgctcaccacattctcttcaatatcagcaactccattgaggatttgaagttgcttataggcactcctcactgtatacatacctgaattttccaaagaccaagtcaaacaatccattgttgatgacggctgaagagggatttttgaaatgagctctcgatctctcagctcaaataaatcatttagaacctcaaatcccactccctaccatcaatcgtcaaaagattctccaccttagcattcaccagacctggatgtgaagatataaccattggatttacattattgggcaaccacggctctcctaacacccaaatatttcttccatttccaacagtccatctaacgccacttacaaccagtttttgagcttccaaaatgctgcgccaaacatagctcgggttagagccgagagatgcagtaaggaaagaaccattaggataatatctagctttgaagacccgcgcaactaacgaattcgtgttaacacataaccgccagccttgtttccctaaaagagcaatattaaaatcccttaaattccgaaatcccatgcctccctttattttgtgatggcaaaggcgtttccaagacatccaatgaatacccgaattagatgatgcagatgacttccaccaatatttagccattaaactctccatttcagttgttatttttgtaggaatcatgaagacgttcatagcataacttggtaaagattgagccactgctttaattagcacttccttgcccgctctagaaatgaatttggcactccagccttgcaacttctttctaatcttttccttcaaataacccaaagcagcagtcttgtttcggctcattgaactaggaaggcctaaataaaggcttcccgctggtgcaattaccatagccaaactcgtgcaaagaacattccgtaagttatcctctacattggaactgaaaaatatagaggattttgcaaagtttaccttctgtcccgaaaccaggtcaaacttagtgtcaatgtatgttataaattgatcgttgttatccacgtttttggctaaggacacgtgtaattcaaataataaatacaactggtacattcaaagcccattagtgggcccaatcaacaaaaatgggtcgaacccataacttatcaatccttctggttaagtagcctatgactcgtctaaatgagattaccttccagcatcgtcatcatccggaaagcatatatccgtgtagttggaggaagccttaatgtgtattcagaaggccattatagttttctatttctaccgaatcgcacaagattaagaattactttcacagaatctcgaatagagaataatatctctgtaaataaggaaactaaataattggcaatcaagtaattaatatgtcattaattccccacaaggtagcacggttttgacagctatactcgtgatgtggcctccactacgtcagcacacaaatatcgctccatgggtcgggcttcactaaaaaagctcaaagtcaatgtattatttgtaaactcttcatcagaaggaaaagggtaattagtatgatatctatgcactataaataatatacgaatccttcctacttaaattattggtagagtaaggctcattaactctccaaccacgtaaaaatccttgagtgttcttattttgttctctctgaattatatttctttggctttcatatttaaattattagtttctaaaaattcagtaaatattttggtattttcattcagtgctaaagaaagcagttatatgatcgatgattacatacggtaattatggcactcacccgaaccaaatctcgtcttcactttcacaacactctgatggatgatcctgatcctaatgccaagacaaggaccaatgaagatcccactgaagtgaccagtcgccaaaaagaaaaagatcaacatgatgagccagtgatgatcccatcgatgtaggcaatgaagaagacgagtctgatcctacgaatctcgaagatgacaatgctaataagaaaagtgagcctgacaagacagatcttgtggtcatcatggccagaaaattgagactaattgaactaaagttagcagctcaagaagacttttctctactgatgcatgagaaagtagcaggattggaagcatgaattgcagcagcaagaaatatgtttcctgacgataacattcctaacaatactaattcgcgggataataatgcagggaaaagtgatcctaaaaatcatagaactgatgatcctcacaaggaaccaatgccttagagcaaggtaatatactgattctagaggcagaggtacatagaaagacaaatctcacactcgaccacgaaagtctaccaccaaaaaaggaaattctgacgattctactagccagagtgatgatgttgatcagcctttcaacaaactaccactatttcgctttggtttgtgtaaccgatgctatagccatagacgcaaat

SEQ ID NO: 306484 - DNA, 2988 bp, Cannabis indica
ttgaagctctgttaaaaggagccaataagcagatgttcctatatatgctgcctgagtgtagaagagcatccataaaacaactattaaatacataacttgaaacaagctatacagatgaaaggatagtcacaaaccaagaaaagaaaaacatagaataaacctcagtaatttgttatgggcatatagtttttgtaataacagcccagtaccaaatgaaatatgtaaatattctcttataaaccagtagcttacctagccagtcacttcctttgacagtgtcatacatgtgccacctccagtcatcttcagtcatatttcctaatgcagcattgataccaccctaaaagagaatccaacaacagcaatgaattgtataaaacaaatgaaggaacccatttatacagagtcaaattgagtcggtgaagcaggataaaataatacaaaacatcacactgcaccacttctatgcatgaactcaaaaaccaataaactatttaaacttttcaacaaaagggtcagcaatgagggaatttgacaccgtaataagaaagaggtattcatccatgcataaacagtggattaaaacaagatcaatgagcaaaattcggtacaaatagaacgcacataagctgatatgtctcatacctgagctgcaacagtatgtgaacgagttggaaaaagcttggtaatacaagcagtgttaaatccatgctctgagagcccaatagcagctctcaacccagcaccaccagcgcctacgaccacagcatcataagtatggtcaaccacggtgtatgaggatcgccctgtactctgccataatcgaaaaataaatcatatcaactcctactcgatcaattcaacatttttaataattaaaaacaattttttcctttcaaaaaaaaatccaaactaaatttcaaatagcttcatcgagcacagcttgacagcattttattccctaataaattttacaacaagcaacataccaaaaaaaaaaaagaacaaatcacataaataaataaagaaatttaaaaccctagtactgagaaagcgccaaagaggaaaagtattcgtaccgattctgaggagaagaatcgagaaatgtgagatcttagggtatcattgacgaccgatctcttggaagaagaagaagaagatggtactcggagaccacgagaaacgcaccgccacatctcttcggaatttgtagctgtgaagatgatcggagtcggaataagattggatttttgggcgaagcagtgtggaggcgaatttgatggaacgaaaatgaaaacccgaaaaagatagttttatttttaaaaaaagaattaatattattactcttttgtattacgatatttactcaattgccatcgtcattttgggctgttaccattgtgtttttcgagacaatagcagggttatattcgtaattttaagtaaacctacaaatcgaatatatataaaacaaaaagaattgagattagtattgggctgaattttttaatagcaccagggtaaaactatgacactaaatttcttacttcatttcaacaaaaatgtttttggtacatttttatttgtttaatattctcaaaaaaatttagtttaattttttttatataatatgaaattaaaaattcgctaattaagatttttacccttgaactttgacatgtaccaaatcatgccccatgaacttttaagtacattgcccttgaactattgagattgttggatttaaggacttttgtctaattttattcaattttactatttcagtgattctttatgtactaaatcatgttccccagactttgatatctatcaaatcatgcctttcgaactttgacatgcactaaattatgccccctgaacttttattcatgttagacttttttactaaaattagaaaaaagtccttaaattcaacaatctaaatagtttatgggcattttcaataactttaaaagttaaggacatgatttggtatatatcaaagtttagggacaaaaatcctaattagccttaaaaatttaccacatatactatcataaaattctcttaatacaggatgtcaaaacaaataaaaatatataaaatgacatttttgaaaggtacaccttagatttctcccataataatcaaccaattttattttcttgggttaaatttagtggtttgattggttgattagtctgtgtagttaaaaaattcaaacatgaagcctccaatcgatcaacgtaagaaatattttctgtcgacgtgtactgtcagtagattgccacgtggcagagcttgaattcatggctttttttagtagcaaagtttaggacgctttccttgttctttctttagagttttttgttataagtgcatacgtggatcgaatttggactgaagtggtgcttaataagccacgacgatacaaggaagacattgcttacgtggcatttgattctaccactagaagaagacaaatcttttttcttatttgagaagaattataatagtaaacacgttaagtcgttaatgtccatgaatatgtaatgtatggctaattctagagacagtaggcatgaagattgtctgtaataaattgggacttttacactgaatatttttctaccgttggatagaattttttttcaaaatttgtggaagttttatatgaagtttttattattatttgatgggtcttttttagttgttttactatatattttattaaagtatacttatttttatagatagattgtccaatatattttcattttatacttaaatttagcatataatttacattacatcaatctaagtgtctaatagaaatattaactataaaaatggctatatcttaatgaacataagataaaaattaggggtaagttgaaaaatgcctcttttattaatcatttaatcaaatttacctctaattttatatttatttgaaacatacctctttttatatgtattgtacccaaa

SEQ ID NO: 306485 - DNA, 1401 bp, Cannabis indica
atttgttggaaaattttaattgaaagtcccagataaggatgactttaaggttacagtagaataggaatagaaatgataaaataaatagtaatggaatagaatagaataaaaaatgacaaagggattgttatctagttacagacttacagttatggaatcaatgccataatagctacaaaaatatcccttaacataaaattttatttaataaatttaaataataataataataataaaatacactttttcaacagcaaaattagcatggacatttagaatttataatttttattttcatatattcttttttaaacatacttaactatttaattaaatgtttaattgatattgataaaataatttttggttaaaattttacaaaataattatttcactatcacataaaagtacgtgactagaacaattttttcaatagtacaattttgcaaaattagataggtgcaagaaagagaataggtgcaattctacaaaataagtgtgacttgagcttgaagaaatagcattaataaaaagtttctccaacatatatttgctctaaaaaacttgtctaaatttgaaccaactagcaaccatattagaaaaccagtcatgtctcattcatgagcccattttcagcacacaaaagattcatataagaagttaacttgaaaccaaatttcagcttcacatataatacaaatagtagattgtgcttatttctaatgacatcgaaatgaacatcatcaaaaaataaaatgatatcaaaaagaacaagcaagcagcaacacacattgtgtgtgagttgaaagtcccaatccaatttaacaaagttaattcattgaggcattttcccaaacagacaacagactatttgcattttataatattaaccaaataaacactccaaaacatacaccatcataaatatatacccattaatagacaagaaatcagagcttctgttccaatagtttaagtacctttttttagtccactcacagaaaaaagttagcacttgttcttatttaagattaaaattacatataatcatctaaatatgatttgactccatttttttagttcctttaccaaaagaccatacaagaaatcaacaatgataaaaattgaccaaaaataagactaaagctcctccattaatcattttctggattctgatgataaacattaaatacattaaaaatgaaataaaaaaaaatattcttcttcccgcattttccgttaagttgaccaaaaacatcaaaaaaaaaggaagaactaaaaatcagctgaaatcaaacaagagacattaatcgatagcaacaaaaaaaacccaaaacagagagaaaatacacagcaagatgaagatgatcagccctaaaaaaaacgagagagagagagaga

SEQ ID NO: 306486 - DNA, 2941 bp, Cannabis indica
gttaggggtttttatcccatttgtgagacgggtatccgggtttgggattgggtaaagttcatctgggacctaaacagtagaggcgtgcttgtgaaggatgcattcttgtatgcctccataatcgtggacacaatttggagggtacggaatgacaaagttcacaataatcgccttgttgatgtgaaaaaatttgtcgccagaaaccatctcggagcagtgattgaagttcgtacggcgcgggtggacttctctgacgctctttgtggtgaagctgaggcttgctgcctagcgatctcgacggccttagagatgggttacaagtttatcataattgagaatgactcgagggtggtgatcaatgctctcaatggtttggaacctcgttgggcgattgaaaattacgtctcattttgtactaagtcttctcaatcttttattagctgtaatttttcttttattaagcgaacatgtaactttgccgctcacaatgtggctagatgggcctttgctcatcatatatttggatctatcccggtttccatgttaccggagaacctgttatgtaatgaccgagaggtctaatttatgttttatctaatgacatcacgctagtttcaaaaaaaaaaaaaaggggctttattttattcattttttacggggcatgacatgaaggtaaataatacacatctttatagttacatagcaatgcccaacccaattttggcatgaaattagtaataattaagaaaatggtgaaatggaattaagttaaaaagggacatgatcataattattgattatggggagaaggagaggcagtagtaaaatggtctctgtaggagaataaacgtatcgcattttgatagcttacttcagcaacttcctctctgctcatctctatcaaagatgcaacgtaagtaagcacctgaaaaaaaaaagttatacaaaaaacaatacgcatcaataacaaactctacttcaaaatatttggtgtttgcaattgtatttactttcaactaaaaataaaaagtacaggaacaatcttaaactaaatcaataatgaaaagttttaaaagattagagtttgttctctttttctatcttaaataaatattaggggtgttgaaaatcatagggttccatctcaaaactaccttaattctctatcattgaaccgtatcataggtgcggatcggataggatcagttgtccgcaaaggatatggatctgataccatgttgagaatcatgggttctatctcaaaaccaattgacaatgagtgaagtagcccatgttcttatatatgactcaattccttactatatttattctatgtgggacaatatgcacaataacgggaaacaaaaggtgtagataaagaagaaaacactaacttacatggagtatgtttgcagggtgattaagtgttgatacatctgtttcagcagtagcactggaaatggaagaagattctccttcaacaagatacaatggttctgaggcagggataggtttcggaagtgcatcgggtgcatcagtctccagcaaaatcctctcataaggcacctgtggaataggtaaaactaaagataggaaaaaaaagaaaagcaacccaaaaaggagtaatcaattacaatgattgaaaagctgagtgatcaccttcttgagcatcttctttgcctttttctcttgcaaagacataagaaatccagagaatgaaaaataagcaccgagcttggcgaattccgggaccatctcagctgaacctaagtaggaatgaagaataacaccagcagggaaagggcccatacgcctaagaattcaacaacaacaaaaatcatcagctcagagcattattattacattagtcatcagatcatttccaaagtggaaaggaataagaagccattaagaagcatacatactgcattatcggaagaaggtcaccaaaagccctgacacaatggactgaagcaggcctattcaagtctttggcaagttgaagctgctgctcaaatacttgaacctgaatacaaattctaaattggaaaatcaaattcttaaaataagaaaaatgttcttccttttcaagcaaacatgaatccaaacccgaacctgatcgacaaaatcaattagctttccttttgaacctttgtccaatccaatctccccaacagcagcatcaggagtggaatcaaacatttgtttcaatgtgtcaaaccaattgggagtcctttctttaacaaacctaatataccaccaaatcaacaacacaaatgatatatacataaatatatgaagaacaataataaattgaaccaaaatacaaagaaagaaagaaagaaaacacaccagggatggacaccaaaggaaggaataatagaagggtaagattgagaaagttgtttaaccaaaggccaatcattctcagagaccccattaacagcaaaagcatcaactccaacttcatgggctttggctattaactgaggaagcttgctcaatattctggggtcttgcaagtgacagtgagcatcaaacaccttcattctctatatccgaatcccaaatttcagaaggataatatgtattatcgttctgcaaatcatacatatatatatatatatataatatactgcatcaaaactcaatcaagcccaaaattatataatgacgaaaggagagataaggaaataaacatcggaaacttcacaactcaaaaggaaagaagggaaaagcaccgcttcagtcctgaaatttaaaataaaaaatgagatttaattttggataaataccattttagactatgtgttttgtaaaagttactaattggaccatctgttttgttaaataataaaattgatcatgtattttttaatggtataaatagaaccctgaattaattttttgtcaaaataaaatttaataataatccaatcta

SEQ ID NO: 306487 - DNA, 1465 bp, Cannabis indica
aatttgatggtcggttttgatttttcggtttttatgaacacccctagttctttcgaatgatgagtagaagactcgtctaggccagatacccatccagtatggcatacatctagaagatattagacagtgcatctagaataagaagttagcgagcattatgatgtcaagcatcgttccctatttattaattaccaaatcccacaatatcaggaattaactctcgaggatctcgtccaaagatcatatcttccaaaatatggaaagggagtaattagatttcaagcatttaatgtgtctttattctccacgaagatagaccacaattttcagcaactgtcaatgtgatgtggcatccacatcgacatacatcatgtgccccatgggccaggcttcactagataaggccaagttaatatgttacttgtaatcacccatctgtgggtaaaggctaataagcaagaaccctaaacactataaatataaaaagaacccttcatgcaaaggggttagaaatcattcctcaatttctcaagcaaggtttagagttcacacatttttttaaatcttaagacttttctagtttaaagtagtaatattgactcggggactaagactcgttaacgtccctaccacgtaaaaattctcattgttattttatttatctttaaattatttctttagctttcacatataataaattggtaaatattttgagactttcattgagagctgaagaaagtagcaataccatcaaaggttgtatactatagctatggtactcacctaaaatataactggtggccgtgatggagatactactatggatgacatagatcttgtagcccaagcaaagacaagagtcgatggagattcaacagaggcaaccagccgacttgctaaaaagattcaatgtactaagcgacacgttgataaaaaatcccatcaattaggatttagagaaatatcctaaagatggagatcctgaaaatgatgggaaaaaaaaagatgaaaatatgattattattacgagccagatcctatagttgttgaaatggccacagaactcgctgagactaagctaaaattggcaacacaagaagatttctcccgctaaatgcaagcaacctttaacctactggaggctatacttgaactacaaaatgttgctcacgatgaaaaaattcttgacgatcctattcccctggataataatactacaaaagaatggaccctaaagacactagaacttctgatcccaacatggacaaaagaaaaggtgtcatgggagaccctaaaaactaatatattataggataatgttttaatagaagtattaaaaataactttatgtagagtcatttttttaataggtgtcattgtttcattttatctccatatttaattttatttccttatttattctttttataattatttgtcaaaaatacttatatccaccaaaaaa

SEQ ID NO: 306488 - DNA, 1718 bp, Cannabis indica
actgtcttgctgggcttggctcacgggtgctctactgtgcaggaaagggtaagactgttgttgatcagccatgagtgcaggagctggacgaagaatgtacatgtccgggccctatcagaccaagcgggttggggtctactagtgttgtgtttttgagactatgttttgccgcttaggccggctgaaaggaaaagacttgtaaaatattttgtaaatgtttttgggatcccaacttctgtaacttttagtttataaatttaaaagtattataagtttgttttcattcctattgttattaaaacttaaattatgcgctaattttattagtaatcccatttaggggattagggtttcgtaagtatcttgggtagcgtgcctaattatttagggcgttacaatagtacttggtgaatttcaagtttttaagagaccataagtttgctcgattacttggggggcacccacaccgtataacatcgaacaaacactgctaaacttaagcaaaatttaaagcttttagaagcaaaaatttgaaagctaagtaagtgtgaatgacatactttagattagacataaaaagcgtaagtttgaacacctatatgtttaacaaaagaagtaaagtcaggattaaagactgtctagtcggccatctgtataaaagtaaaaggccctaaggccatacacgaacattgttcaaaaataaaaggcctataggtcatacaagaacaaaaaaaaaaataaagtatgtgaaataaaagcatgaaaacaaaaaaaacaagtctctaacatccttaggaataatcacagaagtaggcgggttcaagtcaactaagtccttgaaggttggagcttttgaggtaggctctatagtctagtcggtggaaggttggctgagttgtacgacatccataagtttgttggctagtgctcttgcaggctggcgagcagatgcctcaggggtctggccagctaacaccttctcaccctagtcggcatggtctatctgttatctactctcatagaactccctctctctagcaagccatctctcacaaatgggaaagtccatgtacttcagattgaccttagggttgtgcagaaatacctcataaaagacctccatggataagtatccatactcgtctctaattgcctgttgcccatcaaggtactcctgcttctcttggagagctacctgcttctcatggtactccttctccagttccttcttcagcatagagttattaactgccagatttgtcacctcttggttacgaataccaagtagttgacccataccctcatgctgatcctagacctccctcatacgagtcgatgtcatgtctagatcatcctgcacctctgcaagctcagtctcctttgccttgagtttagcatccttgctctcaagtttcttcttgaaagctttagtagggcccttatccctggcatggatatggctaaactccagcaaggcctaaaataaaaaagaaacaaagttagagaagttgtacataaaggttatatacacaaagttagacaggtaaacaacttacggaggtaacattttttagagtgttggctatcaagtaatctagggtgtcagcgtccaactcctggagttacttatcaacacttggcatgtaacgtccccgcttcaagcctccattgggtccttacacccacgaaatgaatggctcttatacacgagtacgtca

SEQ ID NO: 306489 - DNA, 999 bp, Cannabis indica
aagtagaaataaaaataaatgactcattttatagttaattaaaaaatatatatttttttactatctaattaacaaatggatatatatagacttagggggggatgaaaataccttagataaccattgcaaactataagaagaatgaattaagtgcatggaattattagggaaaagcctttgatagaaactcccaggcatggccatgacaaagcataaaggatgatcatcaaacttctcatttaacctctcatacaagcttggaagagattgttgaaaaatattgttgaaatcatttccaggaagatcattaaggaacagttggaatgtcatcaatggcttcttaatattctctttcatttggttggagctataataagacataataacatccaaagtgtaagaagcagcagtgagtgcagttgggcctgaagaacagcccaattcagcgattctcatacaatctgggatatgcttacaataaatctccaaggctttctcttctattatgccttttactttggatatcacatttttctgtgtaaacaaattaatttaattaattaattcacaccatcacatatatatatatatataaacaaattaatgaataatattataagctatatatatattgtaattgtgtttgtgtacatacttgaagtgatgagttatttgcatagctagctttgcccacaccactattcattgggaaaacttgttctgcttccattgtttttttttcctctttctataattgtgacttgtggagatattgaagagataattatatagagcagataagattagggactatttataaaggagcaaaatgactgattaatcattattgttcattcacatgcttaagttcatagtacaaaacattatattcagatttgacaatttttaatggcattatttcacaaaaatataaaaacaacaaaaaaattacaaaaatacggtttcacagaattttaaataatttttacgatttttttg

SEQ ID NO: 306490 - DNA, 3553 bp, Cannabis indica
aattaataagggttattaatgaattgatgatatgttaatagatttcacttattgtttattattgaattttaattaatattataatgaattgatgatttgttaatatatttcacttattgtttattattgaattttaattaatattatcagtaaaaaatttaaagaagggcgacatattttttagttattattataaaataaataagatagttgtattgcattaaagaacaaataggataggctaaccctcaatcaaatatctatacaagtttaaaagctaaaactgatatttcacttgtacattaattaaatattaaaatttttctatggagtttttataagtttacaaagtataatactaatcaaatacattttatttatattttgtgtaaaatttggacaataaattaactaatgcatcacattatatgttactttagtctcttaattatcagttcagtttgaaaagaaaaaagcattttctttggtagacaaaaaatgaaaaaagagaaaattaagaaaaatatgaatggaaagaatttactaatagtactgtattaactaatagtgtttcaattttttaattacatttgatcatttgtattcttactaaaataaaaaactaaaccatgtgtttatcttctttctacattttcttgaacagattaattaggtctcctatatatgttgagttatgatcaattgcttttgcttttgatttgtggtttgggttgcctttatggttgttttagtacttatgttttatgggtaaagaagaacaatttaatagatacaacatgtgtttcttgtctatttaaattatgtatttggctttattgtagttaaatacctattttttttttttattcatagatttatattgtattctgttaattagtaatcaaattagtctctcttaattttgaactatattcacacattataaataataaaatttttagtctccaacaattatttttaataactatcatccattcactttcaaacacaattattagaatattttactaattaagagcaagatatataatttggagagtagaattacgcaagtttatgattatcatttctaagaatttgtaatattgatcattttctaatatagcatgctatatctatatatgctactattttttgtcacacttaattatttagtataaatattatattatataaaatattcttaattaatttctactgccttatggacgacttctggttgttgtagtctttaattaggactgttagttagactttaattagtaggaaaacctgttgacatttttagttaactttgtaccaatgttcaagaaaattgtaaacaatgtgaaaataagtatttgctgtcaaatccacacacttattacaaatgtcacttatatataacacctaattaaaagtctaattcccaactcattttttttttttttaaaaaaaaaataagtctttctttaacatattcttttacttccaataatgaaattatttgtcatgatttagatatcttgatatgattgttaactaactaaagcctaagtaaaagaacaaatacaattaagttataatttcacatgaattacctgatcttctttgcctaatattgttcattattttgtatttccattaattatatatgttcactttctgttactacaagtaaagaattttacttttctttttaatttgtgttttattcttgtttagagttcatattctttttctattcttacacaatgaatataattaatatgcaaacaaggaatttctattaattgaaagcctaaagaagagaagtatatgtatttcaaaagaaaaacccaagcatgttctagtaatactttaaactttaaactaaagtatgttcaggtaatacttaaaaactttaaatgtgagaaggcaaaaataaactatcttattattatttgaaatttaaagttattttattttattttttttaaataaagtaaaaaattatcggttataatgaattgataacataaaatcaatgcaactgataaattaaaacttagcgtccttttaatcctggctaaaatttctcttataaaatatataaagtaagtctatagtaaactatttaaagtgatattttggtacacgcactatttgcatcggcatttaagataattttttagtttaattttatttttattttcatgtacattgcagttaattagtaccacctatttaaatttattggtaaaaaagttcaaatttatgttgcacgtatatatattttccacaactcctctcgagacacagcatcattgtgagcatagattaaaatagattcaaaactattaacatgcttaggatgaattacagaataaatatagtgactagacatatttttagtgtcaacatcaaaactattagggttccaagctgggacaattcttctttaggatgataggaagagttagtagtaaaataccacccactaaacaaatttagatataaaactcttatattgaaatgttttaaccctcgtttcaaggaggcaaaccattccgaaattagactcaaggattcttctcttaacttctttagtattcttagacctatttattcccctgacattccaataaagaattttatccatcaaaagtgggaggatcttcccctccctcacttgattaccccaactcactcaaaatattgcccacttgtaactcctcttccacttctacatcatcttctaaaacttgaaaagaattctgcatcttaattaccttcatgttttcatcttttctaccccttgccttagctacccaaaacccttgtttattttcacgacaccaatataacctttttccactggtttctcatactcttgccttagggatccattttgcaccaacggattccctttcctgtaatgttcttgagtatgccccaattttttatattctatacagtaacgtccccgtttgaagcctccattgggccttaccccacagattcatggttcttatacatgagtacgtcaccctggctacttcctggactgacgactaaccctactaaccaaataaataaaattgtaaatatttattgtaacgccctaataattaggcacgtcacgacaattgattatgaaaccctaatcccttaaatttgggattactaggaagataagcgctcaaaaattaaactttaatctaaaataggatgaaaataaaacttgtaataacattaaatcttacaatcaaaagcgacttatttcgggatcccaaaaatcttttacaaaatattacaagtcttttcactagccgacctaagcggtaaaattcagagttacaaaagtacatcagtggtagaccccaacctgcttggtctagtgtggcctaaacatacaagcaccgccaagctctcgcactcatggttgaccagagatttaccttttcctacacagtagagcacccgtgagcgaaacccaacaagactgtaaaataccaataatcataaccatcatatcatatatacaataatgccattcatatttgtctattta

SEQ ID NO: 306491 - DNA, 1881 bp, Cannabis indica
ttaaaaccgaaaagttttttaatagaaagatgtgtctaaaaagagaagttgtgagacattaaactccatctatatgaactagaggtggtgcttcctcttatgagaattgagagttattctttagatagtccatgaagtggatgttgcacatgagcattaatggtgcacaagcaagatatattgaggtctcaagtgaattctaacaaatgtgtgtattattactagtttgtattaaatgaataatattttaatgctactaaaatcaaaattttaacaaactttgttaaacactaaggttaaattcaatagttgaaagatattttactttatacattaaagtaaggtctctataagtgtttgatttattcaattaaagtagaggtatatatgtgatatttgattgattaaataatgttactgtgataaatttttatctagttattatttaatataatataatattgattaaaatagtgtatgtggagatatatatgtgtatatgctattttatggttaatatatgtgatatatttgataattatagtttaatcatgaaaaaaaaaagtaacataaaagggctacaaatcttaaataaaatctgtaactcataaacgtgattaattgtgtaaatatatgagttattacacaaagatattaattatgggattgataatggtgataatatagttgttataaacgttcataattcatttatataattaaaccgagtgtttgaaacattttttgaggaattggcgtgaagaagagttacaaaacacattaaaaatgtgtgctggaaaaccaccatgagtgacgatatatcgcttgaacatgcaaatggggaaatcacgaagcaacgttacgagttttcgaaactggaatgcagaaatcatcccaggcaacatgttttctggaatacttttttctgaaatacattgcaaaacgttcacctctttatcttgtctactgcctttatttcggctggtaacatcttttggatgtgagtttcaaatgtggtttacttatactatataatggattcattttatgatatactagagtttctattaaagagagaatcttgttagaaatttatagacttgataaatctaaaaaactatttttatttttcttttttaagcgcttgtggtaagcaaaaataaatttttagacaaagtgtaaaatcttgttcaaattttagtgattctcctgcttattatttgtggttgtggtgttgttgtggcgttaaaatattgttctcacatcatatatatatatattatttattatcttgcggtttatacatcatatatattgttcttttcattttcatatattctttattttatgtatatttatgctatagaattgtaactattttgtcaatgttattatccttatatctcttgtctgtatttcttattttattaagatcagtatggcgtttaacatttaacaatgctcaataataaaacttgtccagttcaactgaaccagtcaaccttatctagctcagaaagaaaaagaaaaaacaaaaaaaaaaagaaccagtcaacctgattcatatatattcatttcaatattctagtctatagccccccatccctctcctactactactacctaacccctcagtaaaaattattacaccaccatctaccccaaaatatatatacataataatataatatatatatacacatgcattatgcatgagagaaattaaacatacatttcatgtcttaattaaatttgtcatgcattaattatatacatctgatatatataatatataagggaaatttgattttctatacttacatatacttaatattttttttaaaacacataacatttaatatttgtgggatatgacacatt

SEQ ID NO: 306492 - DNA, 1826 bp, Cannabis indica
ttttttttttgagttgcaagtactttagcgtaacctgaacgaatttattatatatgaagcaccttcctaaataagtcttatagtaatagagtatgtgaagacttatatataagataaatatttttatctattatttttcatatgcgggacttgaattactaacattttaaactatatatacgtactaacataaaagtgtgacaaaagatatgcactaattaattaataaataatgtaagtatatacttaaaactaacttattaacttaattatgctcttgcattattatgaaagagctgtaacataagataagagattgatcttatccaaatatattttacatgtattgcatgcatgcatgaatttcaaagtggtcactttttttctttatgctctaatattggatttaagagacaattaaactcatctctgatttaatataataagcaaaattattcgctttgaagtcctttcaaactttacatcacaaattgaatttttagggtctatagatatatacataattaattctaataatcaaactttgttgaccataattatatatcaaaaagattaattaattaaatattattaatttttttctatcacgttggaatgtttttctttcacaacacagttgtatagatcctgacccttttggctttactcaattgattttctcttattaattggagtcactaccttgccaaatggttgtaaaatctgaccccttttgggggctatataatcaaatatatatatatatatataaatatatacttttattatatatatattaacgtttaatgttaagttatattcaatagattgtcgttatttagaaaaaaatccaagaaggaaggcttgcattttctttagtagctgcctaattattaataaagctttgtcttattacactattacaaattctattattggtgatatctatcatcatgaaatacaaacgtgttatatacgtacatatatatacacataattttatgtatgtgtgtaagaccttttttagaccctttatacacttctatttatatgtacttgtctagtttttgtttgggttattgtttgtgaggttgttatttatacaataataatactaataaactcacaaatattaattaagcacatagaaaagcttggcctacttttgaataacatataaaggacaaagaggaatagtacgaaactcaacttgttcgacagctaagcttaattggcaaatggtcccaaatttcatttattattaacacacttcaaatgtgtatatatactatcatgaaaatagacctttgtgtgaacaattaaatttctttcaaaagaaataattaatttagatgcatgaaagcataaatgagatgatgaaatggaatgatgaccatgagaatctgtatataaataaataaatttatatacaatatttctataatattcaaaccaaattcaaattgcatgcaatttacattattttgcttttttatatgtgtcacgctacattatagtcgtagttttgtagggtccattaaatgattgctttatttatttatttttttctttattattttttttatattatttttcatatttgttagatattaaatgattagtttaaggcttacatccattcgtgcatatacgtgtatgtatatctctctctcagaatttattacacaaatcgtaatgtcgggtaagagcaatgatattgtgtgaattaaaattttaaaatgaaaaaaatatcttctcacattttaaaaaattttacaatattatcaatatataaaaaattgttataaaataatataaagtagatg

SEQ ID NO: 306493 - DNA, 1792 bp, Cannabis indica
acaaattataatttttgtgagtaatacatttagccacggaccttttagtcacaacataggaatgataattaataataattagtcacaaattttgttgtgactaaaagtaagattttttatagtggtgcctagccttgtcaacacctccacgccaacattccctatactcatggtgcctagccttggcaccattttataacctctgctgcccaaggcatgcattgtgctttccattccatgtttcatgttatttctaatatatatataccacatattaattccaagacaacactatgaaatattcaaaaacaccttttcactgaatatgagctttaaatccacccatgcatcttcgggtagttttgcattaatgccaaagtgcatatatgcataaaatcatcgatcgatcgtagatagttgggattagtttgcactttgcatgagctatcttctaaacgaagtgcttcaccaagtaaccacatggctacatatcatcaattgttgtacctctttatacgtaaatccactgctattttatattcacttttttgttgtgtgagtaaatttgatgaagagtttttgaaacatatttttttgcaacatatccaatttgttggcgcgatatataaagccaacgacgaaattttacatgacgatcgagattactaaatgataaaatatttttcttatcatataattttatcgtcattattgatagcaatttatgtataattttgtctttgtcatcacaaatattttttattaacgatgatgaaattttgtcgacgatgatctttcttgacgcaaaacacgacatctgaaagatttttggcattgaaaacaaaattaattctgatcattttttagtgaaaagatcatcactttaattaatattaatcatttgattgatgcaacatctgaagaattatgtgttatatatataattatttgtaaagggagataaaataccaaccatataattattagtagcaaagggatgataataaagacacgacaaaattcttcataagatcttaagaaagatacaaaggaagaataataaagagagaatggctccaaaatattgcaacattattaatagtaagaacatctttatatctacacatataacatcaattaaaatcatgtaataagttaggagacattatgtttatttatttatcaatttaatttaagaaaaattactaacatgtgacattatttggacaaattataataaaaatactatatataatttgtcaggtacaatatgaattacagttctttattcaattattgttttataacttttacacaaatctactcaaaatcttttagtaaagaaagatgtctacatcatttgatcagaatcttgggaaactttagttgttgttgaattgccctatctatcatttgtttgagaattttaagattatataaaactattaattaattaataaattaagctcattagtgttaattatcaaatatattggaaaactttttaataaatattattattaaaattatttaattataaatattactttcaaaagtattaaactattaaattttcattcaataacaaataataacaaatgataaaagaaaaatttaaatttttatacttaatttaactgcttattaattaattaaaaaatataaaaatatatatttttagactatattaaaaatatatttacactttatatacaaaatacttaagtccttttttttattattttgtattatttttttctagctgatataatataaaataagagattttttt

SEQ ID NO: 306494 - DNA, 2851 bp, Cannabis indica
tttttaaataatttttttacgtggacgaataaaattgtgccacgtgtatattgtgtccacgtggacaagccaacctgacacttaacagctaaatttggacggaaagggtaaattactaacagtttcgtggttttgggggtttacccgcagaaatttggattgtggggggtttaatgaaaccaaaatgaaagtattgggggttttgccgccatttacccttttttttatttgtagaaagtagaattagtcaaaggagctagttccatatttgcatattcaaggaacctagttcaatatttgagaatatatcatatgggagcaaatttagtaccttttaaggaacgcatctggttcattccccttaatggttgggttcatccaatggttgtcaatcattgaaagccaaagcaaattaaactaactttagagtacatttgaccttgatttaagtacttaaaacaaagtttgtaggatataacagaaatgcattctcttaagaaatggtataccatcatgtaagaaatagaaaattgctatgtattcgtgtattaaaatattaaggccttggttggttaggctttaagaagcacttttgggctttagaattttgaaagtcattttaaaagcttggttggatttacatgcactttagtttttagtacaaaaagctcttccccatgaaactactcgttgtagattggcaaagcccaaagaaaaagtgttgccaaccaaagcctaaaagtacatataggtagtgattgaaaacaatcactatccaacaattttatatttatatattgatatgtattgtatacatatttatatctatatagatcaagagatatgcctttgtgtaagttttagtatcaatgacgagctatcatgagagtgtattttatgaccaaatatgtgatctcaattatagggatgtggtctctgggattgttcatctgcatgaacttggcattatacatcgagacttgaaaccccagaatgttttgatcaacaaagatagatttttaactgcaaaactttctgatatgggaattagtaaaagactcccaggagatcaatcttccataacacagcatgctactggtaagaatcttatttgttaaaatttaggcaggttacgttatggagttcaaatctaataattttttttaaccataggaaatggaagttcaggctggcaagctccggaacaacttcttcataagcgccaaacacgggccgtagatttatttagcttaggatgtgttctcttcttttgtgttactgggggtaaacacccgtatggtgacaatatcgagcgtgatgtaaatattgttaacgaccgtaaggacctgttcttggtggagaatatgccagaagccatggatctttttactcgtctcttggatcccaatcctgacttgaggtaaggttctatctcattcgtagtatattataggagaaagttcggataaattaactaaagtttatgctatgaggtatacacatgtttttgtggaaaaaagcagtccttttttctctttaacgatttttgtatgcatatgtatttgatgataggtactttttgaatatatgccgggtatcatatatgtatatatatcagagattttacttctataattaatttttttttatttttttgtagtaaggaaaaagacttgtagatagtaaaaggttaaaaggtttatacaagaagttattttagaaaaataatctcttcagtttgttcattttgataagtgcaacaatttgtaggccaaaagccatggatgtactgcatcatcctttcttttggagttctgagatgagactctcgtttctacgagacgctagcgatcgcgttgaactagaagatagagagaatgaatctgagctgttgaatgcgttagaaagtacagcagctgtcgcgttgaatgggaaatgggatgaaaagttggaagctgctttcatcaataacattggccgataccggcggtacaagtatggcagcgttcgagacttgttacgtgtcattcggaacaagttgaatcactaccgcgaacttccccaagaaattcaagaattgttagggtctgttcctgagggattcgatggttatttctcaagtcgatttccaacactccttattgaggtttataaagtgatgcacaagcattgtgtagacgaagaattctttgtcaagtacaccacaaccaatctcatgtaatttaaatattttctttgtttgattgtaactatgtaaaagaaactgtataatataatttaacactaaaatagtaaactgtaactgaatatactaatattggaagtgttgtcttcacttcactatagtttagattactaaagagccaaacaatagtcacttttgcgcatattcttaagagatgagtttcgcatatcatgaaaatttgatgtattcttaagagtttcgcatatcattatctattacaaaattagaaacacatgtcttaactttaaaacaaaagtaattatgtcatgttttttttacgatgaatgtgctgtgcggattctaatatacagatttggtttcttcattattaagtttagtttttgacttgtactaactaaatccgtatatcacaacatttaatctctctatttgaaaatatatatataggaatgtatttgttttaattacaatatcatctttataaattttttataaaaatttgtaaataattttagagtattgaaaataaaatttgaatgacttttgaactacgtatagtaaactaatctactaagggtccgtttggcagaacttttggaaaagttaaagttgctttttgaaaaagctgtgataaaattgtgtttg

SEQ ID NO: 306495 - DNA, 1269 bp, Cannabis indica
caaacaaaggaatggaatgaaaaatcgtttcctttccattccattccatttcattaactccaaccaaacgccacctaaaagttaaaatccaaaactcaaacccacacaatcttcaaaatttgaccaaagttaggccaaatttaacatttttttttattattttatattgtcatttaatattaatgagagactttaatacacgtttttaattacaatattattatttttaaaatatatatatgatttattaattatcattatactcattctttttatattaatttgtatatgttattatgtattaaaacacaattgaaaaaaatatgtcaaataaaatatttacttaggacaaacccctaataatttgattcggaagaaaatatctaggacgtttttgaaaagcgaaaagggaattggaatttagaattaggtgtaattaaaggtaattacatatttttacatatttatgatcacgtaatatcattttaattatataattaaaagtaattgagaagcctcaattatagtctctaattctcatattcttataagaattagatgtaattagagtgtataattattcaaaaaaattcattttaatattaagtactaaaaattattacttttctataattgttaaatattttatcaagatattacaaatttataaataaatatcatctcatattcaaacatattttatactttaaaatatattagtaagtattatgttatacaattagtattgttataattataaaattacttctgaatacaactttaaaatatgatccatgctgttatattcaataagcataaaatttttagattgatccaataatattgaaaggaaaggaaagatgcattttggattttcttctcagaacagctcatgaataacgtcttgatacattattgttactatacctcaaaaggcagatataattctaccctgataaagtaatacatgctctttagttttattttgaaggggcatgttcattatatatttatgggaacccttttaaaaacctgttttgttattgagaagaattttttagtctaactgtattttatatttgtctatgttataattatttaagatattttacaaaatgttaggaaattcgaaataatttacaatatagaaagcaatattcaaacagactattttacacgcgtataaaataaaatagtcacgtgtgcaatacaatgtttgaatcctattttcggcgtgttaaatttttttgaatttcttaaaattttaca

SEQ ID NO: 306496 - DNA, 685 bp, Cannabis indica
ataattatagtaattttaaaaggtattgtattattggagtgtttttagaagtaaaggtgtcatgtgaaagaaaagtaaaataaaataatatatatttggataatgcgtagatatatactatatagtattttcaaaaaattttactgttctaataaattaatgtttttgaagaaaaaaaaatatgtatagttacactaaatgtatttctgcagccggatgtaccacaaccatcagatttctacgtagaaattacattatccaatgttatttaatatatggatcactaaatttattaattaggtaagtaaatgtctttttctaaaaaaagttaaataaaatggtaaatataataaattagttaaaaagaatcataaaatacttttattacaccaattttattttttaaaaaattatataatcataagatttaagttatataaatttgcttctttaaaaattatataaatttgttagtattcacattaatatgtgaaactatattaaaatggttgtaataaaagtatataatttattagtttataatttaatgatctaaattcaatcaaaacaatgagaaatgttgagcaactatgtgttatatggtgatatctggttatgggagaatctatgagaaaggaggagaacagctttgtgtgagtgaaagttttatttggtttattgatta

SEQ ID NO: 306497 - DNA, 1315 bp, Cannabis indica
catagtttttcattaaccacacctcaatatccatatcttcatgaacagccacaatacagagacatccatctaaaaacccccaaatccagaagaaacaaattcttgaatgactcgggcaaaggtacttccttgtaacactctcccacaacatcaagagccacaaccagttcattttcgtccatttctagcttccgaagcactacccagtgcaagaaaccattgacatgaacacccatcttcttggtatagcgaagtgcataaggcatatcttgaatgcccttccattcattcgttctcaaactatatatcttcacctcagattcaaaagacaggttattcaatccaatatactgcgaaaccctcacaagcttataatcgtcaagagctgcgtcgtaacctaacccataaactctcgggccacgcagacacagagccgggtcacgaacacgctccgcggtcaaatagggcaaaagccgatgagttttaattgatggattccaaagagctatatcctcagccacattacagatacagagcaagccgttgcagagacccaatatcttgatttcattgctgtaacacattaacgggtgaggaagctcgacggcctcgtttgggttatcgaggtcgacggtgaagagctgaaaaccctttctgagaattaggcgtagattggatttggtttctacggatttcaaaatatgaaaatgagtgaaatccaggctgtcgattaaggaccgccatggtttgcaaacgcaccttagacagaggagggacttgacaggaagacgagcgagtatgtcggttattacctccagcggtagataggccatgggagggcgattgaggatagagaaatcgagctcaggttgtgcatctaaccaagatttggttttgtggcattcgtttatcttggtttcgtgctagggtttgagaaatgattcgacaagtgtctcgaacacgaagaccacgcactctagcagactatagactactgactatagtaaccaactaaacttgaggctgagacttgagaatcagtgaggttagttcgtggttgttgccttttctgaaaaacacatctcattattcacgcgcttagtgggacaacgtgtacccattgggctcattatttcactcctatgtccaagtagaggcccaatctttattccttgatccagtgtgaatttgcatttgagaaattaaaaatatgggaaaaattattaaggttatgataaatatggcattatctaacaaatcaaactaaaaatatagtttttttactaaaaaaaccatacaaaacattaaaaagaaa

SEQ ID NO: 306498 - DNA, 3452 bp, Cannabis indica
tgcaaatcatttataaatcaactacgaataaattaaaaaacatacaaaaaaaatactacttttaatataatcatgtaaaagaaaaaaagatatatgggtgcttttaattttttcctaagagagaaaaaatgtgttaaaacatacatgagaaaaatataaaagtaagagaattttattttagtaaaggctaaaagaaattaattaattttttatatatataaaatgtgatttattaaaaaaatatagtatggagttgtttgagtgtgaatagtaagaaaatgtaaaagagagaataagaaataaaattagtgtttgtatatttttaaaaaaaataaagcaaaattttatgagagagtaaaaaagtgttaagaaatagatataaaaatgtatacttattattatatgtgtattatatataaagataaaaaaaaatagtgcgattatagagagaagagaaagaaaaaaatcattttatagaagttttaataaataaaaataataaaaaaaatagatagggatagtataaataaaaaaaaaaaaaaaattatcacaatatatataaattttttttaaaaaaaattaatatttgaaataaattttcctaaatttaattatagagaaattttgcatctctcaatagattgaaaattaaagtagtttaagtgaaaagttgattttatgacataaatagaaactgtggcgtttggttggaggtaatgaaatagaatggaaagaaaataatttttattccattcttttgttttgttgcatttaaaactattggaatatcattccgataaaatgacctttccattattttatggtggaatgactattcaattttgaaatagaaggaaagatcattacaacgcaaagtttgaaaaaatttatatattttttattatttttttttactcattttaaattttatttcgttctattcttattccaattcccattcgtattcctttattttcattcctcccaaccaaacgccacgtaccatataatttctagtaaattattttaacggcaataatattataaattatgaagaaaaaaaatgttattaatgtgttgaccaaaaactgtttttcattgataaaaaattaattaatatatatttttggggaactctttacccttgttcattcttgatttcttctctgcttcctgaggacctccattttccctctctacttcctcttttacccttaggtgtcaatcctataagaattttctttgacatgtgtctattattattatgaaatatcattacatatcttgacaagtatccattattaactatgagtcattccattagagatatgtgagtcatcctttctgagatatgtgagtcatcctatctgagatatgagagttatctcgaccgagatatgagagtcatcccgtccaatatgtgagagtcatcccaatcgagatatgagagtcatcccgaccgtgatatgtgagtcatcctattccagatatgagagtcatctcgaccgagatatgtaagactcatcccgtctgacatatgagagttcaaactgatcgagataggccatttctcgaaatgaccatgataggtcatatcttagactggtctaagataagatagatttcatattgagttgagataagaagagtccaggaccaaaccgagatagatacctttcgatctgagataatatcctcctcgacacaatctgagatggaaattatcttagattgatttgaattagacattacttcgactcttcctacgtggttaccctcttagttatatttccatatctcgattcgtgatcttgatcttctagaaattttttattatatctttccagtcttcatgttttttttacctgtattcatttattgggtctttcttagttttttatcaccatgggcctctcgttagcccattgagatttccccaagatactactctcccactttcttataaaagtattttataagaaactttcaagagtattttgtagtctgaacactagataatgtactcaagtgatgaggatgttgttataccttacttgacttgattcaaagggtttaaccaatgtaggttgtgtaaaatatgagtctgatgagcttacttgattcaaagaatttgccttatcttataaaggtatttgggattttgcaactaccctcttttggtttgctcctttgggatttagtcagccataccaagatatgtagtatctcaggttgaacaacccgagatatgtaatatcttgttttgaccgacatattatttctcagacatgatctttatcaatttatcgcagattttgagatgcactagctttaaatgctagatgcaactttatgtgcttttgatgaagaatttatatattattttaatttactttggatgtgactgatgtgtctttaagaaaggtttgatatatcattttaatcttttattgaagcaatttgttcgcattttaagaaggtctttcgatatgttagcttaatcctctatggaggtgactcattatgaatttaagaaggttttttcgttggaggtaactcattgtgcctttaaaaaggtcttttggtatgtcgacttaatccactatggaggcgacttattgtacctttaagaaggtctttcatcatgtcaacttaatctattacagagatgactcatcgtgccttataagaaggaattttggaatgtcaacttaatccgctatggaggccactcgttgtgcctttaagaaggtcttttgttatgtcaacttaatttgctattgaggcgactcgttgtgcctttaagatggtcttttgttatgtaggctttatccattatgaaggtgactcattgtgcctttaacaaggtctttcggtatgtcgtcttactctgttatggaggcaactcgttgtactggtgaaattatgtgacaagaataatagcaacatacaaattcaaatttatatattttaaattatgataaggttatgatatcttttctactgtatatattggtccagttcgatggatcaccaatacatccgatactagtatactttgccaatatcctaaaaaagacactccacatatatacgtgaaagtaaacttcttcgtcgattataacatcaatataaatccactgtactgataaattatgggactgaatattttgacacattgtgctgcatatgcaacccattgattcagatctgatctttcaccactccacatcatccttgctcatagatatccgctccgccaccgaaaaggctgcattttcaacaatgatatcgatcactggggttcaaacagtgcccacggcggacgaacagccgcaggttgatgaggagagagacaacaaaaggaaaagaatagcggtggctgaggctgccagaactagcaccgataccgtgatcactatgcccttcgccggtagagagagagagagaga

SEQ ID NO: 306499 - DNA, 2551 bp, Cannabis indica
tatacctgagtatgaatggtatgagaagcaggaggaatagaccactttcctttaatccagtctcgatgaggccgcaaatatgagaagatgagaatgtaatctcttcccttgtgtgtttgaagtatacattataactcgagaaaggtaaaacctttgaaatttcaccctcccaccagccatcattgtaccatgcatccactttctctgaaaacttaaattggtattctggtggaaccaaaggaggctcaggcctaatatgtcttcgctctgctttttctctcaatggttggggaacttcatcttcggttacgaggtctttgtattcgacccaaaagttgtcatcagctaaagactcaattattttagccttgaaccatgaaccctcgtagcctttctcatcgttgctgacttccacaacagccccatttttaaatatttcctccttcacaatctgtagtttggacctctccaatgagttcatgtaaattggggtacccttgattttcatacttttctccttgaccttcaatggaaacttgtgaattgggatcttggatttcatacatctctccctgacctcggagctcctctgaacaaagagacacaaatgaatattcaacaataacagaaaaggaaacaacagcatataattcaataaatcaatattggatgcacaagagaaaacacatcaccaccctttaataaagagaccctggtgaatattcaacaaatatataacatttaaagtagaaaaggcaaccatacaataagaaaaacacataaatattcatcataaatatcagattcagatcccaaatttctctgcaaaaaaacatacatatctgaaaagacttaaaaataccattgtaataacagccttctagacctaaaatattctcctccaaatcctaatcaacttattcagttatttctgttatgattccagctgtcataacagccttctaggcttaagcttccattatttcttaagtctataaacagagctatgctcatggtcacttgtaaagttaagttaaagtttgataattgagtgaattctttgtgaacttgtacacaactgtatgaaagtgttagctcgggtgagagtgtttgcaagtgaaaacacttgaaagtccgagagagtttcgaaaaacctcaagtgtaataatattctcgttcttcaactgaataaagaagcaagagatagtgattcctaaactggattacgcaaatgtaatttgtctattgtccataaacaaaggaaccctttttgttattgtttaaactttgtgattagttttgtctgtagctactatatataagaccagattcaattaaaattaaatcaatggtatctgatgacttatgtactgttcttctctatcatacttccatcaaaataactgatattatcataatcttattcatagccaataaaatctacccaatatcatatattagccttctacagtatagtatgagtttagatcacatcatgaaaagaaagaaattctaagtagcagagcagcctctggcttactaagatctaaaagataaaaatacaacacaaattcaatactgtttggaatcatccaagaattattacaatactgtttggcataacagtatcatcaaccctttaattaagagacccaggtgaatattcaacaaatatatgacactaaaagtaggaaaggcaacaatacaacaagaacaacacataaatattcattataaattaagttccatgtctgtcaccctagaattattataatacccaaaaattgaaactttttttttttttttgaaaagggaaaagaaattgataaaggtgggtacctgagatggaggaagaggtgggttccaagccccattattccattccctgtgaaccctcagattgtagagtggacacacaattttccgagctgaatcgtgaaaagtaacaatatacctcgctttctcttcaaagatactctcaaccacaccacgagaccacctattccgaaagaaaaaatcgacatcatcgccgaccttgaaaacaacctgctcgaacgaaaacaatggcggcaccggcctaacgttgaccgaactgaccacttcactagagggaggtgtggggtgaatttcctgggcgttgggtgtatgggttccgtactcaacgtagaggatgacattatcaatgttgatattgaccggagaacggataacggtggccggaaagtagggaccgttggatgcatggccgggtttgtaaacctctataagatcgcccagtttgatcgaaaaggagggggccattgaagacccaaatgggaagaattttgaagttttaggaattaggaattagggatttgaaatgaaattaataaagagcgggattgtgttgtgagtgtggagtagtacgagtagtagtagtagtgtagtaattagaaggagaagaaggaaggttctattgtatccgttgaaatcaaaatattctctatttgctttttttttttctaaatggttttttttagggctgaacatcgggcgggtttaccgggtttcg

SEQ ID NO: 306500 - DNA, 2343 bp, Cannabis indica
ataaatttaaattaaagagctgacaaattcaagatatctagagtgtaatgtcgttggtgcgatagagactcttgcactatcaaataaagtgtttggaaaatcaatttttcaacattttgaataccaataataatagattggacgaatatgcattaattacttcaatagatttttatttaaattatgtaaacgcaaagactagtttatctattctttaatttaataaaaacatatatcatcatcaattcatgatcatgataaccatatatatatatttttatttcattacagaattgatttctacgtttgacttttgcctatttatcctgattttaaaataccaccaaatacacacattatttttccccctttgatttcaaaataggtctgaaaattatcaagtatggaggaatgtttttaccttttttgaccagagcacaaaataataagagtacgtaggtgtcacgcaagttttatcggcgggggtaatatggtaaaagagaatgaaagtggaatttagagacgacgacgtttgatctttcatttcattccctttgctctggtgtggtgttcatattcatacaaaagaacagtcttcttcttccaaaaatataattctcattcaatgcaattcttcagtcaaattcctaatcccacgagattttcgttatcgtaataacgcgttatttttctccaacctaccaaatcatatatattaatattattcaccaaaccaatttcttttcctttttagtttaaataaaataaagtatttttttatttatatttgtaattacttttatctttaattcaaattaattctcttattcaaacaaacaaaccatttgtgttctctctctctctctctaaacccttctcttccacactgtaactatctttctttcttcatcatttgtcaaaatcttatctctaattacttgttttcatatatataataaatatatttttctaggaagagtattcctacaattttccagctcgttcttcgattttctatacaattatccaagcaggtttgctcttgttcctggtgtatttctgctatatatgttcaatctttgatccttgtttgtttcctgagaaagtttgggatttttaagttttccatgcttttgtttacattttggaacatgagttgaatttttgtgtggttaattaggtgtaagattagaacagtatttgaattcggagcattcaggaagaggaacaatgggaggggtttgttcaggaggtactactaagcgaagcataaagcccgaaggaaataatactatgggattctccgggaaactgaagaaaacaaacagcgtcgttaaatcgaaagagaagtcgtattcttactctgatgcatacaattccgataaaacacagcagacatacgataccaacgatctgcgattatcgttttcaagcgaattgaagccgtcgacgccggccagaacgggagttaccaaggtatgttactgttacgggtagaattggtcaaaattatggcaataatttaaattcaaattgtacgaagcagcggataattttgcttgaatttgtatgagtatttatctgttttgatcacgaactttaccaatggaatggagctattttgatgagaagaaacaccttattgaaggttcttgtgttcttctttatgaagagatgagtgatctgactaagttgaaactagttgctttccatgttaagttttctgtcaagtgaagacttctcaagtgctttcgatctgcatacatgatcatcaaaataaacaagggtggaacagaactatatttcctagctagtgttagaatgtaatacgattcaaatcttttagactgacacttgccatatgatttgagtctaataatggaaatttgatctagaaaacaaaggttctataaattttgttgtgactattgttacttgttttctctggtgttttcattgtcataccatcttaatgttgcatttcttgtttaggtagcacaaaaaaactcagtcataggaagagctgggattgttggattggagagggcagtagaagtattagatacacttggaagtagcatgtcgaatttgaatgccagtgctggatttatcagtggcacagcaagagggaatagaatatcgattttggcatttgaagtggctaatacaattgccaagggtgcaaacttatttcaatcactttcagaagaaagtgtccagttactgaagaaagatattttaaattctcaaggagttcaaatattagtttccacagatatgaaagagttgctaagtatcgccgcatctgataaaaggtggttatttgttctagagagtgattta

SEQ ID NO: 306501 - DNA, 695 bp, Cannabis indica
tattatcaatatggttatagtttttccgcattacatattgtttatatatatgctatatattatatactatattatagtctagcaatataagctcttaattgtagacaattaaaatactgtatatatgagctggtccccttgtactaatataatttacaaaattatttaaaaattttgtgaagtacgtacgcctctcttgtactaaactttatttttttttttgacctttttttttcataaattacttttccctttcttttttattttcttctgcaataaattttgatttattctcggctttgaaactccctagcttaaaaatgtggctttaaaatatatatctttcttcttcctcctcctacatcccagtcactctatcatgcatgaaaaatgaagcttgatttttgttaaattgaatttaaaacaataaaactaaaatgaaagatcgatagaagattctgactgagttgtagactatgtctctttctatgttttgcgattttacccaaagtgtgcacgacagtctagcaattacggcgtccccaagataaaatagcctttgtatacgtacgatatgttctgcatcgaatgatatatatcgctcgattacaccctaaattattcctctgagaaaaattgtaaggaagaagataatttttttttttgttattgaaatgatgtattcttttgttgtt

SEQ ID NO: 306502 - DNA, 1184 bp, Cannabis indica
gtaacaaatacaaactcaattattaactattgcattaggctgattgcaacatgcttaagcaaccaatttactggtctcacgctcaacagctttcttgaggaagctgtgttcttccaacaccatctgaacaggcaagaatcccatcccattagccatggcaagcatcattctcttggtctcttcctcgaactcttccagatcgattgagccgctcgagtcgtgatcaaacagctcaaacagtgagtcgtaaacctgagaaagctcacctggctcgggttttatgtcgatcccaaaatgagtttcgaacacccttaaagatttgagctccttcaacatctcagcataggaaagaatgccatcatggttggtatcgaggtcagcaaaacgatcacagatgaacatgtggaatgcttcttcatcttccacaaagttcacaatggttgtggcatccaatacttctacactcatttttttttttctgttataataaatattgttaccaaaaagaaaagaaggttataaagaattagagaaactagaaagtagtgaagcaggaaactagtagtgtttgttttgatggtttaggatgaaaataaagctagcatttcaatcctatatataatatccatatgatgatatgtataaatgcgcgtttagaggcactaattagtaccctgaatcacaagttattgtatattacaatataaattaataatgttagagagccggtagttttttattcgaaggtttgcggtcctaaaagactgaccaaatttaatggtttgggttttcatgatattgaggtcaggtaatcatgcatgacaatgacattgactcaagtggctttcggtttagaagtcagtgggtaatatttggtttcaatgggcttaacagggtgagatgagagttaaaattataaagtgggtatcaaaagaaaagtcaaacttctaggacattggaaatcttgaggggcatcctcggacttaactaactaccaaatcttgctttaaattactcgttttcttccaaggtatattctagtcgcctacaagggaatttattttccatctttttcacagaaagtaaggacgcaataaatttgcgttgcaatattaaccaggctaattaggatttttgtttctgaaatttgatatgtactaaatcatgctccctgaacttttaag

SEQ ID NO: 306503 - DNA, 1388 bp, Cannabis indica
gccaatgagcaaaattagaagaggagaccaaattatcaatatggcctattaaaaaattaagcaaagtaacatctacattgtccatccaaatcaaacaaaggctgccacttctacccactctttcaacaaccaattttctaaaaaagaaaaaaaacaaacgaacacaaaacaattccatctgagcaagagaaccaatagtttttgacaaaaataaaatgtctgtttgtcactctagacattggtgtggagagcttggaacgtcatttcatttcccacaatctagacgttccacgccaacacattcataatgagagacaaaagtaggcaccaccaagctatcaaaaatgaccccatcaacaatgttcacctttttgggtatctcaaaggaactagatacatcacaaccaccttgagacaatatttgaattgaagaagtatgagtagatgaatctaagacttctaccgaaatcgaattataaccaaaatccacaaaatcaccttgaagcattactgtttcgatcaaagaattagaatcaaaagtatgatgcttagatactgaatgcgagatagaagatggggcgaagaaatcaaatccaagtgacttacgccccttactaccttttcttttagcaatgcatgaagggataaatacaaggagaactcttttcttaatgcctacctttgaactcccatcaactattcccacagaaaaaccaaaaatcccgtcaatctggttcaacacagatccaacgtgagccaagttagccccatgcaagcaatacactaatgaattatcaatcaaatgctcacgtaaaattgcatccaaagtggatgacccagaaataattgggggctcattactacctccaagtccagtatctaaaggcaaaaaattagtcacgccaacaagcatctcattatcattaattggtcactttaaaattagtaatgtacaacatgtacttaactccctaaaattagataataaattaccattattcttaggttgacttacctcttttgtaggagctccaatattcaaattagtatctaaattgtcaactttcatattacaagaaactcgccatttattattaattgccttagaaatattataaatattgtcactatccacaaaaattgactttctctttttatgctcaattgttggcttgattcccgtgataaccaataagcatgtgttagttttattggttagtttaggttgttatttcagttgctttcttgtaactatttctgttattactcagaattctcttgctttgtacgaatcttagtacagtagaacctctatccaagaatacacttgggaccaagtaaattatattctaattgggaggttataactaaatagagttacactagaa

SEQ ID NO: 306504 - DNA, 1231 bp, Cannabis indica
gatactactagatgagaagatgagttggaatatatatgggtatgagcttggatacgtacattaagaaaattaatatggcttttttatagacttttatagtaatagttttttcgctattttcgaaatatttggtcaaaaaagagtctctttttaaacccaatttacacttcagataagtgaaataatactatcgaaatagaaaacaaaagagggccacacgtcaggaaaagaaagtacgtacaggttatatatatttgatgacaaagattctacacacacacattggatacttatgaacaataaaaatgagagtgtatattagtgtacattaaattttcagtttttccccatatgtaaggtaagccagacactttgttcattgagttgaactttttatatcgaaaatgtacccaacaaattcctactataacttgagttttattggtctatattgtaactcatggatttcgttttatcaaactaaaatcaattccaataatttattaaaattatagattttgtcaaaaagcaactaaatacataagaaattatttatgtatctacaaataaaaggtttacgtaaaatataaaaaaaaaaaaatcaagagttacaataaaatgaacccaggcggagcaaaatgcactccataaacacgatctgaagtaactataacaaaatgctcttgcaatacaaagatgaaccttatcaacggaccgatttacaccaatgtcaaaaaaacatgaggcaacaaaaaaataagcaataaatacacaacctaaaaaaattgtacatttgtgattaaaagtgaaaaaaattgtaattaaacaaaagccatcattctaatattattactaattctaatattattactaaactctttgtggctaaatatattaaaaaaaaatagtaatttattgtcattaaagccataactaaaatcaaactagtaataatttgtatttaaatactattttttaataacaaataatattatgttaggactaaaagtgatatttaatcacaaaaacaattatgttgcgaataaaaaattatcctaactttttcgatggtgcaatatcaatattttattaatcatctcatctaagtttcatataaattcaaattcaaaattcagaaactaatgtggaatcaaaatataggaatatgaatgaaaatgaaaataagaataggaatggaatacaatttaaaatgcataaaaaattgataaaa

SEQ ID NO: 306505 - DNA, 1688 bp, Cannabis indica
ttttttttttaattttttgggtcgtttacttccattcatctcagttgtcacatgcatacacagtaaaaaaagagaaaaaaaaaaggttatgcactgctccattgatcctctactgtatcactcaacctacaatttatataagcaaatgaaacaataaacaaataaacaagcatgcatgatgaggcagaggaacataaaatgaaggcgaaaaaaaggcttggatggacgagccacggccacgcatgcattgaaaaagtactactttctcttaaacaccaagttctccattactatattcacaaaatattcatatccgaatcttaacaaaagaccagaaaataaaacccaccaaaaataacaaaataataataatgaaataaaagaagaaaaacccctatcggtcagaggatggccgagtcaccatgaaggagaagtacacggagagcctgaggatgaagacgagcgaccattgttactattggaatcacttgctgaagtgccgagagatctagcgtccctaagcgaaacagagcaagcctctgccggaagctttttcattggtgtcaatggtggggttgatgggctagagtgtagtggctgagcaacctcttcatcatcttcacctgaagaagaactagaacccgacatttccaatctcgacggagacgtgtctggtgtctcaaatggggtagtattcgctccgctttctctgctttcgctattgtcgtaaatgggattggaaatgtacacaaaatgctctcgaacatcacaaccatcagtagtagcagcagcagtacaagtagttccattctcacttactgttttgtcttcttgagttggtactggtgaaactgccaatgaaatcgatggggaagggcttgagtttggttcacactttgggatgtcaatgactttgtgatgaagctgagaaagttgtatttttgtttggagagtagtgctttcatctttgattgagatagctggaaagagtaggcttcttggagctttgagaacaccctgtgagtgaaagctactgagaggaggatgaggagttgatgatgggggaggaggaggatctgacgatgactggtcttgaggctgcaatgtggagttgccacttgagatttcagtgacggcggagtcagtcactgtggcggtgttagtagctattctgagctgacggcggcggaatagaagagagcagtagagctcagcaagcaagactagaattagacccaacaccagggcaaggctcaccaccattaccagggttgctcccataatcacctttgatgtccccttcatctctctctatctcactgagtggaatagaatgtaagtagtaggtagtcaaagtagttcggtaatataagggagggagatgtttaatttggcgggaaacagtacttcacctatctatgacaaagaaatgacatgggaaaaacttcttgaaatgtagtaaagaaagcctggggaatgtgaagcttttttttttacatattttgatgagctggcaaagggattttctgacagttaagggcatattggtcattttagtgagatcaataagtagtagtacactactatttattttttacttatttactgtgtttgttgctttttctagcttcagtataaaacttaccattatcctcaccaatgacaccaatcatcagggaacaaagaaa

SEQ ID NO: 306506 - DNA, 1413 bp, Cannabis indica
aactagggaattaactctatcattgtggattttagtccaaaaagagccccaaaacccactttatttattttacaaagatcaagaacctcacgctgcttctcaacattattcagccccctcacattccaacctaagatattaagactatccattaggttgagttgaagaatctgtgaccactcctccctcagcatccaccaatgcatcataaccattactagtcaaagcttttggttgtggcttaagacccggcttgaaccctttctttttaggagtaacccatgtttcatccttgttgggaatggaagaggcgactgtatccattgctgtctcttcattaatcaattttccctcagtaatgacaccctccacatctcgagtcaattctaaagattcatcccgaaccccttcttgctgaaccatactatcagcaactttcccatctggtttagacttactgccttgctgatttttcttccaagctataggtttccctttgttacagttggcaagcgtattaccaagcatatcacaagccgcacatttggttggtaaccactcgtattccacatgctgttcaataaactgcttcttctcattaacaaacgtaattgttcttggcggctcatctttgatttccacatctaccaatactcttgcatatttgaccatggttctctcaagagtaactttgtcagccattataggctttcctattgtgctaacaagagcactcaagttcctctttccccaatattgcaatcctaatccattcaatctcaccaaaactgggaccgatttaaccatgcgagcagtatccatatcttccgcccaaggcctaagtataactggccttttatcaaactgaattaccccagtttccagaatgatattcctagtgacttcatccttaaaactaacaagagtaaacccagaatgcattcttacaatcctatccacacccaaacttccccagatcctgttaatgaagccctcaaaaaatttgaaaggggggtttgccctaaacactatacacacaatcgaatttctccagtaggatgcttcaatttcagcttcctcttcatctatcttagccaccacctgatcccctatttttgatcgttctgtaaagataattgcgaggatggagttctcacctggttcacattgaacttgctccaagcaattttggcagtttcctggtaatcctccgcctcagcttcatctgcccaactcttcagattgggggtcgacttcaagggttccgtgctctgctccttctcgggttccaactcttcacaggggtccatgaataatatctgatcttataattaaataatatataaatattacagaaattaacaaattttaaatctgaccataatttaaaaaattaaataatcaatttttaaa

SEQ ID NO: 306507 - DNA, 970 bp, Cannabis indica
cggaataatactttggagggttttcccaccaatatatgaggttgaatggttttttgcaatcaaattgatagatcaaattgatagttgggggggggttttgccgcaaattactcttttatttaaggtctgtattatgaggcttaagagttatttatcattacttttttcgtcattatgatttttgctgcacttctggtggttattaagtggggtagtaaaatcagaactctgatagtgtttaagatcctgtcaaacagtatttttcttttctgcttaggatatctttggaaggtcaccttcttaattgatttttaagcttagtttatcattctcatttttttattaagctcctgggagtatcctttttttgccttcttaatttcttcatctgcatcacggtttgatattttcttccaatgccttttttgattccagggtcatggtgctggcttatttaatttgggaaatacctgctacatgaattctactgtacaatgtctgcattctgttccagaattgaagtctgctttaataaagtgagttttttttctcttttccctactaaatgatgttttacctttgagagcatttcagtgacgaagatgtaaaattatctttgctcagctattcacagtctggtaaaagcaacgatgtggatcagagttctcacatgttgaccatagcgacacatgatttatttaatgaactggataaaagtggcaaggctgtagcaccaatgcaattttggatggtttgttattttgtctcactttgttacttaagatactgtactggcatttatctcaagctcctacttctatcatatcatcaagatttaatttgtatgacgcccaaagcaaattgaaattcattataagttaatggtaaactttttatgtatcataagtaaactattccaggtagaaagctacactcttcagggttggcattttgttgtcttagaaaagac

SEQ ID NO: 306508 - DNA, 2123 bp, Cannabis indica
taaccactctttacacacttaattagtgatcatgtggaagttacaaaatatgagtaactccacctcttatgttacaactattacatatatataactcccaatcatattatattgtgattattacatatatataactctcaatcatattatatattatatttataatattatatataatatgtcacaattttaatcttaaatattatattatttaataaataatataacaatacatcatttcccaactcatctagtaaatatcattaccttaggaataagaagttttctaccaaaacttactcatcaatttttgtaagtcgtcacacattccttaaggcaataaaaaaacactcatagcctaatttggcaaggcttgtacaactatctttagaagaatttctttactagcttttgaaagacatcgccatcccaactcttgatacgcttacaaatctgctctttgaaaaaactaagaacaacatctttattatgacccatagtactaggaagacccaaatatattgtattctcaccaacttcaagaattcttgataaagaacacactaaatctccagtctcagatgccatgttattgctaaagaaaatagatgacttctgaaagtttattttttggcctaaagcaacctcaaaacaatgaaccgaattcaaaatggaattcaaaattcgatgcgcttcttgcacagtaagccaacctcttgcctcatacttacgaatcaaacctgacaagccctcagcacaaataatgaataagtatggagaaaacagatcaccttaacgaataccacagtaaggaacaataggatcgaactctttaccattacttacaatagtatactttattgaattcacacactcaagtaccaaatagatccatttatcaacaaacaccgtacgacaaagagtagctgctaagaaaggtcattcaattcatatctagtttcaaagccattaaatcctttttttcccaactctcttacatttcaagtagtgcatcacctcaaaagagatcattatgttatcactaatctatctatcaggcacaaaattaaagtacttttagtataagaaataatttgtgaaaggacacttttcatacgattagccattaccttggctaccactttataagaaatattacaaagcgcaattcgtctcaaatccctcgtcgtatatggattcttcttcttcggaattaagacaatattaggctcattaataccatcaggtaaccaaccatttgcaaagaaatttcttaccatagttgatatatcttggcccaccacatcccaacacttttggtaaaaactagaagtcataccgtcaggtccagaagacttttcagatgcatatgaaacaaagatttttttcacctcatcatctttaataggatgcaataattccatattttgagcatctgtaatggatagttgaacacaattaaacacttcctcccattcaataccctgaaaaatattagtgaaatagctagtgatcaattggggtaaaccatagtcccacccaagaacattgccaaactcatttttttactgagaaatttgatctctaacccttgatcctttcagttgcagactatgatcaagatatgaacctagattctccttcagataacaaaaaactacacagtcttctacactatcttgagtattaccttaaaatgtgtgggcaattactcattcacataaaagtttgaaattaacaacaacaagaagaagaagaagaagagagttcaattataataagagctctgtattgttgtggtattttgcaacacgaaaatatacgtatcattttaacaagtattactcacaaagagtgaggtcgatcccacgaggattatagttaagtacattaaagttaaactcttacttctatttggttgaataaaatttgggataaaattaaactagaaaataataagaacaataaaaattaggaagcaagtaaattaataggaaaattaacaatgagtaaaagttaaggctttcaatttcaattgtatctactgattattgcctaatatgattatcttcctattaccaatttatatgtaatagcaagtttactaaggtaatttatagtct

SEQ ID NO: 306509 - DNA, 1165 bp, Cannabis indica
aaaaaaaatattatttttatagatattaaataatttaatattaaaaaataactgatccaattcgcacttttgcgaattggattggattggatttgagctattgtgcggattggattggatcccaaaaataaaattcgcacttagtgcggatcggatgcactatgagaaaaataatgcgaattggattggatgaatacccctactaaaaattaatatatacaattgttggacatagtttttttttactaaaatacgacacgcatatacgcatatgaagtaccacgtggcaaaaggatccacctgctcatgtgattactaattactgctatacaaattctttgaccaagtttgcaaagtatgagacacgttcgtgaggagtcgtgcactcttagaagagtagtcaaggcgttatggactttaaccatcgaggaggctacaccctcctagatcgtataccatccgagattcaattatgtgaataacacagaatttattatattattttatataatataataattagattaaataataaagttacaactaattaagtgtaataaattattaattttgtccaatagtaacatacaatagcaagttacatagtttgaacataaatcataaaaaagagttggaaattcttgaaagataataaagacaaactttgtaactcctctccatattatccctcttaataaattagtaaaaaatgttactaattgtgtttggatgtgaatgaatgaccactattgaaaatataattgttggagacttgatttattcatttgtaaggtgtataaatcgttcaaaatcaagtgggagtagtttggaatactttggagaagcattgatcaaagctgaaataatggtaactaattatacaatggcatacatttttgaacgtttgggagcttttctaattgctcaaaacacctcaaaatcacccaattaaaatcataaacactcactctatgactagtaacatctaagggctttatggtggtcattcatgttcatatgggagtgataactctacaaatagtcaccatttgttcacttctgatatatgttgttgaatacactttgttgtggttgaaccttgtgaggatatgctcattcttagacactaggctaagcatgagggcttgaaaatccttaagagtat

SEQ ID NO: 306510 - DNA, 2541 bp, Cannabis indica
atttttcgtaacagcaataactaaaaaatattctttttttttttaacaaaaaaaaaacaacactctatgtgtgtgtacagtcttgtctttgacatggtgagagtattcctttcaatttgttgagttttggttatcggtttaaagattgttatggcgtctagtagtgcatcgtatcgggaggtggaagatcaatatgcgattatttcaatcgagggagagaatgatggggcgctgggtattgctttttttgttccagatgatcaagttttgaatgatgtactatgtattgtgggtcagtttttaactggaagagccactgacttcgaagctatgcgatatgttatggcctctttgtggcagccaagtaaggaggtttatgtcaatgagattgacaccaacagttatctatttcaatttttccatgaaattaatttagaaagggtggtggaaggaagcccttggacattcaatagaattcagtttgttttttcagaggttaaggggagatgatccgaagagagtagtgcttaatcatctcgacatatgggtgcaaatccatggtctccaaccagggtttaaatctgatagtgttgtggaaaatttgggtaactttattggtacgtacgttaaggcgaaccctaagaattttcagaatgtgtggagagactatatgcgagttcgggttactttggatatcactgtacctttgaaaaggcgtaggaagctttgtaggactgcaatagaggatggtttctgggtagagttcaaatatgaatacattcctacgttttgttttatctgtggtataataggtcactctgagaaattttgtccaacactttttgatacaccagccgagaagatagtgaagccttatggtgtttggatgagggctcaaccacgaagaaaaaataacttggtgggctgtcagtggctgcgtgatggtaatgagacagatgatatgtttgccggccgattcactggtggtgctgcgactgctctggtggtgttacagcagcaaccgttaattgaggaggttgttggaggaaatcgtaataattcagtcctgaataagggggaaaatcttttcagtataattctcctaatgttgtggaaaaaaaatgggatatcatgttcctgttgaccatagtgggaatgagattaatgcccacgatactgatattgacgatccaaatgatgctatcatcatgttggattctaaaaggcggcgtacaagggatggggtgttgactggtcaacatgtcttggaccaatatttggtgggtcatttatattctattgggccatgtaaagacccaattgataaggataatagtaatatgaaggttcatgtggcaaaaattaatcaagaattgggctaaaaaatgggcctttggtgggtgttgggatccaggcccaccgcccattatgagtattattagatggacttgccgtgggtttgggaacccatgggtttatcaatttcttgtggatcttattatccaaaagaggcccaattttctatttttgtgtgaaactctttatcgaaaaggtaagttggaaaagctacgggttgctgtggggtttgatggtttgtattctgttgatgcgagaggacacggtggtggggtggccatgctttggcataataacgaggatgtgcagcttcttagctattcttttcatcacattgatattcagatttcagaagttgcttcttctccttggagattaacgggtctttatggagagcctaatagagctgttcggcataaaacatgggacttattgagatcgttaaagccggaatcttctcttccttggtgtatcattggagacttaaacaacactactagccatgccgataaaagaggaggaaataaatacccacagttgttggtggacggattcaatcaagctctgtctgactgtgatcttgttgatatggagctaatcgggtatccttacacttgggagcgtgggagaggcattgattcatggattgaaattcgtcttgaccgagctcttgtttgctccaattagttccagaggtttcgtatggctcaactttgtaatctggaagtctctactttagatcattgctcgttgcttcttgaaccgactgtgcgtactgtcacggtgctattttgccaattccattttgaaaatgcatggcttcgtgaaccgttgtgccgccaagttgttaaagatagttgggacctttgtgaaggtcgacatgttatgaagaaaatctcttactgtggggaatctcttcaagcgtgggggcgagattttacaggcaactttaagcaaagaattaaccattgcaagcgaaaaatccagtattagaagaaggggcgtgatgctatctccataagagagaggggacattaataatgaattggaaattttgttttatcctataagatactgaaataaatagacaattaagcttaataagtttaacttttattttattgtattgaaagataataataaaaaaatagctatatatagtatatacattactttttcattgac

SEQ ID NO: 306511 - DNA, 1776 bp, Cannabis indica
aaatgagttgactgctgaagttcaccttgtttccaaaaactgcgaccttgagatgaagcattatgtcctcaagcgcagcatcgacaaggcttacagaaagacatggaaatgctcccgtgtgctaataaggtcattgttgctatgttcctggctaggcataccagaacggtacgatttaatacacgtccatattgacccagtaaaagtgcacatatcacagctgtgtgattttcaaatattaatcacatttattttacgtggtatgtaatcaaatcccacggcttcaggagataattattataaaatatcagtcaagtatgtaattaactaccctcctatgttattataaataggggcaagttacactttaaaggggacgaaaaaataattacagaaaaggcttgagaattgtatcaaaaatctaataagattgactcgtggacgagtgcaaaattttaacagcaaagcaatgtaaaaacctttatcttcttatcttttctttgttgtttttaattttctgtgcaagtttatcacaacttaggctcaaatatagttaacgaaaatctgtgttaacaagattcaagctgggacttagattcactaaaccctcatgacatatttcagattacaggatctagggagtttagtgaatactgtaatgaagaatctgttcttatcttccacattcttattcatttcaacttagtgataatgaggttttcttgcttcgcagatatggacatggacttggagaatctgtttaaaggtcctcctcaagccgataagagatccaagaatagggtagtttaagcggatgagacctcagattccatcaaggaacccaaaaggacgaagaccaaggcctacaagaaaaaatccttgagccagcttacaatcgaggctgctaagtctcccgaggcaaggaatgaggtctttcctttagggattgaggttgctactacagggaatgtcgaggaacaacccactaggtcggtgcaccaagtgaaattctctggttctcgtccggaggtggttctcgtcaagccttcttgccttctacccctcgaagtgttggaatatattttaccaggctctaaatttactaacaagtatgtttttaaaatcctaaacatgaacttctaaaacaatataaaataaacacataaaaggtatgagaaaccttatagtggttgcaacaaaattaaatggctccttccgctcagatctctaacccttgtatcctttctgtagcagagtatcacaaagatctgagcccaattctcctttccttgaatttggattcttcacagccttacacactatagttgggtaccacttgatgtgtgtaggaacttactctaatcactatagggtacgaattgaagagagaaagagagagagagagtaggattcgaaattggtatagagaagatgactgaaattttttgactaaaggaaagtgttagcatcttctttttctttgaggccatcactacctatatataggaatccacctagggttaggttagaattatttggcattaaaataattaaaaaataaatggtaaattgcttattaagtggtcggccgttgatatgggccccactttgcaattttgtcattttttcaactatttatcttattttctcaaaaatgtcattttctgaattcaacaacttaaatgccaaaactaattatttaataattaaaattaattattaaataaaattgccatttaaaatatttattaattagacttaataaagtctcttaat

SEQ ID NO: 306512 - DNA, 2719 bp, Cannabis indica
aaaaaaaaaaaaaaaattaaaatgatctggactaatcacatagtgacacgtggacactaacctatcacataacgaccaggtacctacggaagttccacactagtgacgaaaggtattcttaccgccaaaaatacgacttaggtatttatctgctactcggcataaaacttaagtatttatgccgcaatttactcaaaatagataatgctttgcaacccattttacagttgtcatccaactacatttatctttgtggagaaaacattcaaacgaaaccacaaaataaaatgtcaaaacttcataaacaatagttaaaatatatatattttttttttatgaatcagaaagctttccattactccaaaaaaataaatttacaaacaaatagcgccttcaattgaagacctataaacaaaagccattgtacacaactaattacaacttggagaaccaacttgtatctataacttttactttcttaggccatacacaactaattctaactttaacatcatttttagtcttatttacaatctgaattttcctgttgttacccgaattccatactatctcatttctagctccccaaagttggtaaaccaaagctgccattgcagcaggaaaaatctgcttgcgaaacctgctacatttagcttttgtaatctaccgtgttagattgtgcagctggttcgattcggccctccaaggtagccatgttttcacctattgaagacagctagatgataaagaacattgaaaaaaaaatgtgctcagctgtttcaacatgtgtattgcagaaaacacattttgcatcagcaataatgttaaatttcagcaatctatcctttgttcttaatctattttgtattgctatccacagtacaaaactatgcttcagaacattaagtcttccccacacctcctggctccaacgaactttgatttggcttggacatagtagtttatatcctttagcaatctaatatttctctcccaaaagatgttgtgtttcaacaagattcttgaattgatctttgacagcaacaattttttccaataccaactaccatgggaaggagattgataattccaccaatcttcgtctttgatatatacactatgtacccaacgaacccatagattttccttcttattagccactacccaaacataattaaaaagggctgctatattccactccgcaatcttcttaaaaccagcccctctgtccatcttagattggcacattgagtcccaagaaataagtcccgatccttgaaacatatattgacctttccaaagataagcacgaaaaatagcttctattttattaattactttctttggcaaaatcaaattttgactctagtaagaatgaatagaaagcaataccgaattaataaggacaacttgacccgcaaatgataaattcctagtgctccaagctttgattctagctgtcattttctcttctaatatcgaacactccttgcttgatatccttttggaacaaataagaatccctagataccgaaaggcatttctttcttgctcaatgctgatgcatcaacgatgcgttgtacctctctattttacataccacaataatagattgcttattttgcaggatttggttgcaactcggaagtgcaagagaaaagcttcaaaccttaaaaaaggtaataaatgcttttgtaatccccatgacaaaataaaataacatcatctgcgaagcacaaatgattaattttcaaatctgcacacctgtcatgaaacttgaagtctggctttgtaaattcttgagagatactccattccgagaacaaatataagtaaagacattgggtcctcttgtcgcagacctctttgcgattcaaaataaccatgtaatgaacaattgaacatgagtgagaacctaggagtccgaacacaactcattatcaactttacaaacttgtcaggaaacttaaactcccgaagtatttcttccaaaaaaatctcactctatagtatcataagctttttgtaaatcaagcttaataatcaaccttgtttttgttgatttcctcccataatgtttcactagatcctcgcagatcataatgttatgaactatgaacctgcctatgataaatccaccctaatttggagcaactaaatgaggtagaagatgttttagtcttgagcaaatcagtttataagtagctactttgtatatcacattacaacatccaatatgcctaaaatatttctttttattgaagaagaaaaaaagtttaaatagtctttaaaaaataattgcatcatcaatcatattcagtttataaaatgaaaaactgttattttttttatttttttatttttaaaatacaactaattcgactatttttttatattagtcacaatatcaccatctatctatatattttaaaaataacaaattatgcttctaatttcaataatattattttgtttataatacaaacgtcaaaattttatattttagattatataattgaataagtaaaaatatatataaaaagaatacagaagttggccaacaccacatgaagcgtggcttagttccctagttattcataattttggatcctatacccggttcgagccaaaatacttgtttatgactataccgcgctaacttgttgaaattcacctgtaacacatcaaagcaaacatactatataataatattgtccat

SEQ ID NO: 306513 - DNA, 2371 bp, Cannabis indica
attattttgggtccgcttttttttttttcttgataaaagaaattttgggtctgcttatccttaaaaaagaaaaggaaaaaaaagtgttgctcacagtaaattctccagttttctatataatcctaaatgcgggaaaattattatcggcggttgtattgtatcctggttctttcatgtgaagatatgaaaattctatttaaatacaaggcagctgacacttgcctttcacaattacattcattcattcttcctttttttttttattaaattctttctacaatcactttcatatgaaaaatatgtctagaaataaataaatgaactttggtcgaataattacattagcattgaaaagacgcatagtagcatactattagagttatcacatgatataaaaagacaaacattacactttccagacattatcacacagaatcaaatccaacccccaaatgactgcaaacaacgagtactaccgtcgtaattgtttctctaattaatcatacaaactgtagtttcaattttaaataaatggatattgcacatagaacgcatacaatatcttcatacatgtacatggtattacgtacgtccattaacggactacccaaacatatccaaaatctatgtaactatgagacttataagctgattaaactatcactctttggaactacgtggctgaaatctcggataaatagaaaaacaaactgtaagggtcattcacataccgatcaaaacatcaagatatgtcgcaagaaagattccattcaccacaactgacaactaacttccccgtaactatcctattttcaaactccaaatgtcatgtcatggaagtcttcaagagattggacctgggaaaatctctcaaaaggtccaacgatctagttgttgcttggcttcagccatgtctttttgtgccttctttcttcgataaaatataggacaatctcgactgagattgaaacatgtaatcagcaatacagcaaataatggcaaaacgccagttacacgatgacaaattgaaaaaaagtactctttttatgttaaagtttgatctactgagcctggtctagtactgaaccgtacatacaattagaaagcaagggagtgtttctcttaagtctgattgtaaaaacaacacttgactttttattcctttctattcattttccgtctacgattcaattcattatagataaagcacacgtcactaaagtaccataatgtttaaatgttcacatcccaattctatcaaaacatgtatatgtaaatgtaggactcatactaaacttaaatattaattaatatactgtaccaaaccttacaaagaaaagataaatacctcgtgcagagcacatcctgatgcaatgagccttggcactcttggcattgtgtccaaagtctcccaaaaagcgtctctagctcagaaactacaagcatcacacgagcccagcaatttagttaaggaaacagtttgattcaagcacacaggaatgttaatgacctgagaagacataaatttacaggagaaacctaccatttgacactgatttgcaatatagttcagcctcccttcccttacagtgcgagcagagagtttgatctgtcttactgttagaaacaaaaattaacttgtatcagaatttttaaaaattcaaaagtaaagacaaggtgtaatccacacacaacagtgcctacatatttgctcgctacaattaacctcatattactcagatacaagaatttcctaaattccttcatagttccaagttgaaaaatttaataaaagcacgtagtgtataatgtactcatacaagacaatggcacaaagaagctttttcacggtctgagaagatgcataaaccataaatgctcagagtgctagatgagatggaaaaaaaaaaaagtatataactcgagtgttcttcagtaggttcccacaatccacatgctcacaaagcatgatacaatataagaccatcaacaaaacctatctataaagagaccttgggaaaaaggaatagctatgatggagaattttacagacaattatacatgcttcagcatgccataagtggattttatgaaaaaccatgagtaattttcaccagattataaactcaattccggaggaatgtaaatttatacatttgtgcttcactagaacaattttgtcaccagattattaagtacatttgcagaaaataatgatctccattgttgttgcatttagaaacctttttggtgtaacttgcagagttggcaatggccatcaacaaatagctcagaaagttcaaaaccaaaggtgtcgtttgataacacttttttaatcagttttctgttttaaaaattgaaaaattgaaaa

SEQ ID NO: 306514 - DNA, 1323 bp, Cannabis indica
tgttgaaggtatttttataaatatatagtgcgtaactttttctgcagctagtaaaatgcgggagaaaataatttgccatatatttatattactttgattctatcttattttgaaatttttggtaaacgataatttatgaaagctaatcaattacgaggatataaaagatttatgttattttgatttcttcccctccaactccaaccccgttactaatgattggaagtattgtttagttactatgtacctattgcatgcgtggattgggacaatatacactctcaaaattgaataaattgcaaattatctgtctatctattgaaaatactaaagtgcctataataaaattaatagggagtagaaatcaccacccaaattcttttttctacataaaattatattaattatgaattagccaaataacaagtgatcaaagtatttctacctcttgaaaaagatgaagagcaaagcaaatatatataaaatcattgactgaataattttcacatgctcattgctaaatttgctataataatatgcagacttaggaaatgactagacctttttattgaaaattataacaagaataagtatatttagatagcccacttgtatctttcttttgttgactagagaatctatatccatatatatataaatatatcctagagtcccactagctagttttggatgcttttagaaattaagttctaaataatatatagaacacttgaggagtacgactaatatataaaagtattacatatataccgtgcctgcttccatgtgcttctaaaatttacaaactaaagcacactatacgtacgtgccatgcataatcatcattttacttttgcatgttttaagaagaataatatatatatatatatatatatttatatatataaatatatatatattgcatgcagaagtaaaaattaattaagttcgcatatataacttacggcttcctaataaactcatactttgatgcgcatgtatattgttatatatgtcaatatatacactttaccttcatatataaatgtttatctaacaatttttgttctacatgatttaacttttattgtgtgttttcacagaataaacctataacaaaactgttaactctaataaaataataaaaatagaacagttgtattcattcacatttttatatataaaaaaaacttagaacaattgcatccactttaaacagcacctcatttttgaacaggcacctaaattacatttaacggacataaaaaatatagggaaatttacatggtatactaacttttgtcattttcttacaaaaatact

SEQ ID NO: 306515 - DNA, 1645 bp, Cannabis indica
tttagaagattacaaaaaccgtatgtgcaattttgtttgaaaaattacctaaaaatcaacctgcaccgcgaatataaatctagagtttggagacttagattggaggtgtccaatctcaagacatggacttagtttggagcacacatggttttgttcaagtacttctaaaagttgtaaccttattaatcttatttagactattgttataatacttttaagacaccagaaaaaatatatacacccaatattgtttgcaataaaactttggagcaacaaattgaaatattcaagaaaccagattgacgacgacgtcctctctacatggaactatatgtgaggcctcctaaatccgaattctttttcggcttgatatagaaacccttcgaaatgaagtatggtattagtatcaaaaatctcttcatttcccttcaatgtccaacataaacagctaaaatcctgttaatataagaagaaaagagaaaaagaaatcaagcaaaagtttgcaagtgaagaaaaaagtttatatatagtcagtcattgatagagtatgcaaaatgtgaaataattctattagttgtatcatcaagtattgaaactcatctaacaattaaataaaattaacatgaagttaaaaacactaatggtatagggtaccaataaaaaacaattctgatttaccaaacagaattagaattattcacttcaagaattttgttaaaatgtcttcactagaggctctattgaatattatgggcaaacataacaacataagtaaaatgtatctcaagaattcaaaacccagacaaatggaaatcaacatcataaatgatcagtatatttctaagaaaattaaaaagtaatggtaataaggaaacttacctagataattatttgagatgatttattgaattgctagtattatacctaaaaaagaaagataaaaatgaataaaattctctatattctcatatagctaacataaaaccaaaagtgatcaaagctatactttataattcgtacagtaattatgtttccattgtagttaaaaatatattttacaattatatacatgtacaaaaagaaaaaaagaagatatttttaagatacaaatataagaattctagtgaaacattatagaaagtatcctcgacaccatccttgtactcttcttttaagaagagactcaatttctccattgatggactagagaaacttgaaccagaagcttcgatgtaacaatggcttcctgttctaaaaaatagactatttagcaataactcacctaatatatagcactacttttcacaagggttactaagttcaagtatgaagaacaaactattagacatgatttgacaatattgacttaaaagaactatcacaaatgacatacttttctagttcaaatctacaatatgggtactaaaattgacagcaattacactaacattatggtattcatgctctacaatatttcatctatgttactgagattgtaaagtgatttacaagcaaaatggcaccgaaaaaacaaaattacagagttttcattgaaactttcaccttgttatgaaaaaggaaagcactgagaaagcgtttggttggaaagaatgaaaatataggaatgggaatgaaatggaataaa

SEQ ID NO: 306516 - DNA, 3570 bp, Cannabis indica
tcttttttacatgaaccctggcaattagtggcgaggtaactaccaaatagataacgacctacctcctattctttacgaaaacctaccccaagcttcgacgagtgggaagtcacgagtgactcatcagagtccccatagcccgtggtacatcaccactattgccctagccaaattagttgagaaggataccactggttcatttggaaattgaacagaggctaaagacattatctgccttctactttgacgtacaaggtctaagttgacgtctcagacccacaaccagaagactgactatagcctttgaagaaaaactccacactagcagaaattgttgtcattgtcaatgaagcataccacaaaaccaaatcctctgcctaggcataagttgatgttgaaaaccaaacaaacttataggacgacttcggataaggacccacactttgcccagctttttgtgatggctagtgtagaacaatctagacctcttagggaggatgttataatttccattggggatgttaaagtccaagaggttaaggactagggcgaagtctgtgcagccatttctcctaatggtgaaggagaagaagtattggaagaagaagacgaataagaggatcttcaagttcctctgtttgggggtacaatgaggccagagaacctatttcttcgtctaaggatgtctttgttctggacaaagattacgtcaaagtggagtatgaggaagcccgtcccctaaggactaatgaggaaaatggtcctcgatgggtttctcctacatctattcttacctacaagaggttgaagaatctttatgacaaaggtcttcttggtggagtggaagcctttctgcctacccctcggcagttggctgctaaccatgcaaaagggctctgtgcatcatccagatctcacactgaacgaggcatgatctttcctttgcatcaataatttaagaagattacaaattactacaaaaatattcccaatccaatttactctaaagggcatcaattatttagccgcacggttcgtgttgtacacaaaaaaaatggtggggcgagccttccaacaattatattaactggtcatttaatttgaagtctagtaaaaaatagaacctgttgggctacttttacgtctcccaaatcgtgtatcagtggttgagcagcacaacaccaaaggatgtctcaaagattggtggattctacaggattgttacattatgaaggacatggatgtcgatgatttttcatttgagttggctccaagatactgttgtccccctttcacctttggattgagagtaaggttgccaaaaattttacaactttcagaatctactcggaacatttctctcctagctactactgaaaactttctcaagtaaagactttatttgtccaaaggagaaaaaaaaattagcaagtaacaaaggatcccacccctgagcaagagattcagaagaagaagaacaagaagaaagaccccaaacgacaaagttaggagccaacaaagctgcctattcaaatcaaagatgtttatgaagttgcagctcatccttctgcccaagtggttgcttgaaaggggaaggcagtagtcaggtgcctgacataggagactccttcaatgaggatgctccatctctgcttttttgagagggtgctcctctggatgtttagggtagctcttttagtatttagccttatttggtcttttgtttggcataagtacttctcaagtattttcttttgtgtagctatgtccaccgggttgaaaagcatgttgaataggaatgccagagatagcactagccggaaatctcttatcaagcaactaagaatgggcaacaaccttctggtcagtttggccctgagctctaaaactccttgttccaatgctaatgagacttctgctgcactgacttctaggaaaggggaagtaacagctataaatattttaaactcccctcttctagccaaaaagccttccaaggcttgcctgccagctgccccattaaaaaattccaagtcttctaaaggcacagttggggccgatgttgccaatgttgagtggcataacttgcccaaactgacttctaccgtaactaacatttagcttaaaacttagaaggccaaggagatgcttggtttccaccaagaccatgtaatggccgaggtgaatgaataaatgtttggtattgaggccttgtcagtggaacttctagtcaaaggcattttaaaagaggcaacaagggtacatatatcattgttgtctttgtatcctttgtacagtttactacttcaacttttctaacttattttattgctcttagtctaatctgaagtttctgtacacttattctcgagctaagtctacaactctttaaactagcattgttactagtgaattgaagaaggctttggatgagggcaaaaatgatgctgaacagaagggcgctcagcttggtgaagtgaataagtaactcattgctacaaacaagtccattaatgacttaacgtagcaaatagaagatatgtcgtccactgccaagcaagaagaagacttggagcaagagtcaaagagtgttcgagagctcaccgatgagagggaaggacttcgagcacttctttagatgcacaagaccaagatccaagagttggttgaggcttttaaataaaaagaagtggcccttcagcagaaagaagaatcctctttgaataagaagtccgctcttgagaaagaacttcctaccaaacgagaggctcatgttaaggatgttgagtatcatgaaacaaatgttgtggaggttttttatgaatttttcaaggctaaccttaaggctaacttttgttatcttgaagaagacatacatgattccatactttgatattgcgagatgaggaaggctaaggatgtggaaaaaggcagtttccatacttatgagaacacgaaaacctactcatcctgcctctaccgtccaaaatctaagaactttgatcgctaagtatcaagagcctaggactcccatgcagtaaagttaaaaaactttttttcatatttgttcgccctgtaagccttttatttaattttggttacgttgggactatagtatatatggtatatatgtgtcctatgaagtttaaaatgatttggataggttttggtagtgttttagagagtgcaaaatttgggattttcatgctacaaaatgatctaccatttaaagaaattcttgggagatgagaagtatttttttcataactttttatttgggtgtccgttttggatattctatataatgtttcgaatgttacaatgagctctaattattgtgtatgttttagagccaaaatataagatttattttagtgtatttatacaacgagattttgtagaaaaccctagattgtgttatgtgaatattaagtagtgttttgagatagacacttattggtttaccgttgtttttacataggtcctaggatcgttgattgttcttcaagaaggtcagccaacatacctaaaccgaaacttgaggtacaaaaattatagggctcgtttgga

SEQ ID NO: 306517 - DNA, 3120 bp, Cannabis indica
ctcgttctgctactagtgcggtgatagaagcaatgcaacaatgtcgagatggagtggtgcaacctgccttagagtacctccaatggtagcattttggggaatgctttgatgatatgaaaagcttaggtggaaaaatatagggatgttataccattggagataaaagaatgatattcttaaaatttaaattgatgtcacacaatggcagtgatgctatatttttttacaaaaaaaattaaaggtgcaatataaataatagcttaataaaggaaaaaaattatatatacaataatttgtgagatcataattatagaattcttaaaatattctatactattgaagtatttttagaagtaagggtgtcaaaaataatgtggaagaaagataaaataaaatattatatctttagatgatgtggaaatatataacacctttaaagaatactaccattggaaatgctcttagctgaagcaattgatctcaaagaagcattcagttggattaaacacaagggtggttagaggttgttttgagtttggattgtcttactcttgttagtaatttaaattgttttaaacatatggcctctccttatggctatatattttatgattgtatggaattacttgagaatttatgttttgttttactttgttttgtaaaacgatcagtaaataaaattgcgcattgaagaaaactaagaatagttagttttgacagaaaaggagagaagaggaaaatagaaatgtgctgaatggaaagaatgaaaatagcagctcaatcttttcttttcattattgtaaacaatttatacatacaagaccagtacaaagaacacgtgtaaccaacagaagttagttaaaatggaaaagtaatcctaactgaatgaaactaactttccagctcagcatctaatccttctacttcagtaattccaacatcccccctcaagttgcacgggtgaacaccaagtgtcaacttgtacctgaagtagttgaaagaagaagctgaaagaggtttagtaaatatgtctacaatttggtgaatactgtcgacatatcagacatcaagttggttggctaatactcgatcattaacgaagtgaagatctactactatatgtttggttctaacgtggaagactgggtttaaggctaaggaactagctcccatgttgaatttgaaatagcttgatggacaatttagctagcagagattggagccacataattttagaagtggctagagctaaggccctgtactctgattcaatgctggacctagcaactacatgttgtttctttgaacgccagctgatgaggtttccacccaggaagatgctgtaacctgaagtggatttcttgtcaatgctgcagccagcctaatcagcatccatgaagccttggagatcgagagcaattgctagtttgaatgtgaggccaagatgtttggttccagccagataacaaagtattcatttacaagctctgcaatgttcatttgttggtctactcatgaattggcttagcctattgacagcataggctatatcaggccttgtatggcacaagtattgaagggctcctaggatgcttctgtattctgtagggttttgtaaaacagagcatgtatcatgagttaacttcgatgttgagcacattggagtagactgaggtttagcatctgccatctttgttcaaaggactaggccgttgatgtatttctattgagtgagaaataatgtgcctgattgtcttcgcacttcaaagcctagaaagtaatgaactggaccaagttgtttcaaggaaaactgttggtgtaatatgtgaattaactgttgaatctgatatgagtcacctccagtaattaggatgtcatcgacatagaccaataaaagcaataactgaccatttttgatggtgtgaaacaagctgttgttggacttaaattgttgaaaaccccatgaaactagaaattgttttaatttgtcataccaagctcgaggggcttgtttgagtccataaatttctttgttcagattgcaaatgtggttggggtattaaggatctatgaagccttctggttgagccatgtaaacaatttcttgaagttcaccatttaagaatgcattgttgatgtctatttgttgaacctcccaattatatgtgacagcaagtgtgaacattactcttatggtgcaaggctttattacatggctatatatctcaaagaagtcaatgccaggagattgttgaaaccctttagcaaccaatcgggctttgtatgtggctatggagctgtctgcattatatttaattttaaagatccatttgttcctgatgacctgagcttcaggtggtttaggaatgagtgtccaagtatcatttcttttgaaagcattattttcattattcatggctttggaccatttgggatgagcaagggcttcttttactgaggtaggtttcgagtcaaggtcaatggtggaaaggtaaacttttggtttgtatatcccaagtttggatcgagtgatcatggggtgttgattttgattaactgtgttattggaggaatttgagctttgagatgaaggagatgatgtggtggagtggataaatgatgattgttgttaggtgaagcactgttactataggtttaggatgaagagtcaaatgagggttgtggtggaggaggaggaggaggtaagggttggggacaggtaaagttgggattctgtatgtgtttgaatctgtgtagataggttgagtttcttttgacaatgcctaagaagtgaaacagtgtgtttaagggttcaaattctttccctatattagtttgaacacttttgatttttgaattgaaaaacctcttaacataggcattgaattgagaaaatagtttggtgacttcagactttgtttgcataggaaatatggttgtacatcggttggtttggacggttatcttatatattttctaacccaatttaaagtccgggttgctaaaatttaagtgcaacccgccctgtaaaccaaccaacggtttgggcagtttggtcgagttaacccgcccaaactggccaattttttttttttttggtttcaaagtcaaagtcaataa

SEQ ID NO: 306518 - DNA, 1113 bp, Cannabis indica
aagatccaattctgaacatatcactacgaaaatcctccagcaattgtaacctaataagttctatcttactaactctactcatgagttgttacagggttgacctccaagttgcatagatatacccgagacttgtaagcatggatttccaagattaatgatccttaggtcgtattcgttgactaatctcgcaaattaactcttccaatttttgggactaacatcgcataagagtcgtattgtattaaataataaataataatatgtttggataaagtaatatattgtattaattattacgacaaaaaattaatagcaatgtaagttgcatcatttaatacataacaaatagtttgtattagctttacaaagcgtttggacccaaccgcaatattcgacttggatcccaagacctgtacccagacccatactaagatcgggacccaggagcgaacttggactcgaaccagaccagggacccagagtcaaacccgagcctagtgtaccaaacgagccctaagtcactaattgtctactaattctcatgtttaaactatgcggtcatcacagactttgtcgtcaaaaaatagcatgttgttactacctttcaaacaagattgtgtcagacaatgagaaaccattcgacaatgatcactttactgacttatgtgtcagacagggtatcataaagagtttcctattattttggataacaatattcattgtctcttttatataaatagtggagtcattccattatttatggatccaattttgaactctctagagagccattacgataataaaattattgtacatttttatcacgattttataagaaactaacttggtcgactccttgtgatcttgacaatttttaaagtaatacagcaaaaatgagagtatgctattaccactataatagtgctggacctttaaaaatattttgtgttcgtattgctattttataattattattattcataatttcatccctttaaagattcagtgtcgttggctaaaagcaatgtcaatatttacctatattgaaatgtatacattaatgctaacaaaatatataccaccattatacataacaaaataaaaaataaatat

SEQ ID NO: 306519 - DNA, 2931 bp, Cannabis indica
tcataaataataataaattaatagtaaaaaaaaaatgcaaacaagaagattaagaggaaagaggtgaaaaaaaaaagaaaaaaaaaagaaaagcactttcgtagggcccatctcatgtcctctcagtagacccaaagatgtgattttcatctttctccttctgcacttaaccaactcacctcttttcttccaccttctccagttctacctcctctcgatctctttctcttgtcaagaaaattacgcaaattaaaattcgctaatgatgtctggtgacagaccaaaagaatccgtggatgagggctcctcgtcgcgatcggttgcaacaacggccgatcatcatcctcagtactctcaacaccaacaacaagttgtaccagttgcagcagccgctccactaagccggtacgagtctcagaaaagaagggattggaacactttcggtcagtacttaaagaaccaaacccctccagtttccctctctcaatgcaattgtaaccacgtgcttgacttccttcgctacctcgatcagtttgggaagactaaggttcacttgcacggctgtgtgttctttggccagaccgaccctcctgccccgtgcacttgcccactcaggcaggcctgggggagtcttgacgctctgatcggacggcttcgagctgcctttgaggaacacggaggttcccctgagaccaacccttttggaaacggagctattcgagtttacttacgtgaagtcaaggagtgtcaagctaaggccagaggaatcccttacaagaagaagaagaagaaaagaaatagtaatttacacaaggcaatcagctctcatgaggagcccaaggttttgaagcagtcttcttagggattctcctctcaggctacgtttcccgcggggatcaatataaggtaattatatatatatataactggaattttatactaaaattatatcatattgttgttattgttaatgaaattgtcttacccatctgcagatcttgattttacggtttaacgaaaaattaattaagatgtgtaaatggaatatataaatatatttagagaaataaatatttcttcaagtactaataaattaatttcagaataggtcaattgactgggtaaagaacgaaacgaagtatatcattttatagtcttattatttggggataatttttttagttattgtacagttaaaccctagtctttggacacaaaaaccctaattttgataagtatatatatatatatgaatgatactgtaagtaaacaataatccaaaaccttaggtaggtatttttattattggatctttcaaccacacagagtattagatgccataattagagtgggaaggcctatataggctttctttcttttttttctctctctaaactgtttgtctctccctctctctctcaaatcaggcaaaaacactgtttgtgatgtcttaattaaatctctttttttttttgaaagaaaattaaatctcattacttgtttacttttcgtttgtttcctgggccttttctgattctcttcgattttttgctccctatggttggcatgtgatatatcatacacgttgcatgtgaattttatactcttcgacgtaagaattaacacacaaattgtgtaaatatacatgctttttttagtagcaattatatatatacacataaaattattcagtatgcatatttgtttaattttgtaaaatggaaaccgattacatttctttatctttatttaattttagttttatttttcacaaaaactgttacttatcccacatattagtttttaagttgtatatttatttgtgcatgatgattctagctataagatacttttgttgtggtggaaccatgataattagaatatgtttacattattagttgagagaacatttaataagttttcaaaataaaaattagcgcccctttttattaaattactaaaaaaatatatcacaaataatgcgttttgaagattttccaatatggggttcacattatctttgactacaatcctaatttattagtataatgttctgccacattgccttgataagaattcatgattgttacttaattctactcaaatcacatgcacactacactactagtattttcaggagcgtttggtacgtagagtttaaaataatttatttaatttgaatattaaataaaagattaattcgtatctgtgtttggtttcattgtgtatgaaaatattttgttggattaatattaattgaattatatatatatatttttttttttgatttaagggtttatatattataaacatattttacctgggactcgaactcgggacttccaacacacatacctatttatggccacttgagctaacatcaagtggttgaattatatttttcgattacatgtagatctgataaattgctcgagagataggttttaaaattattaatatatttacatctattttaacattgaaggtaatatttaaaatctgcttttttaacattattctattataaagtaacattatttacacagtaataattttttcaacttaaaacataattgaaagtttaattatacaaaatgctcataaaaatatttctaactaaccaaacaactctctcaatcaaaagtatatactaaaaacaatttatctctctctcctaagacaaagtaattcgaattatatagcaacaaaataaattaaatgtgtattcttctaacatatatataatggagatttatattatataaggttatggtaagatttgatatatgatagtaattgattatatcatataatttcaatatattacaaaaaattttacttttagtcacaataaaatttgtaactaaaaagtaaaaaaaaattgtaactaattattaattatcattcttatgttgtaactaaaaggtccgt

SEQ ID NO: 306520 - DNA, 1472 bp, Cannabis indica
aaaatttatggcttagttgagagctaaggaaacaatatggggtttttgtcagttgagtgctgacctaaaaatttgcgagatccctcaacacacctatgcccagtactggtacatatgcgtcagtcgatagctgcacaaacattcaagttttgcgttagctcccaactaatgtgaatcaacaagttttttcgtcaactctcaacgcaagaactctcaaaagttgagatacatgaatttgcattacatgaacaagtgatgcaaaccacgagtttacatgatcagtatacttttttgtatattattaatgtagtgcattaaaaaaacaaaaaaatgtagtgaaattttcccacggtaatacgtcttttaaggccgaacgtatataaggatttttccagatgtgcttatacaaaaaatatgttaatgtctagaagatctaagcaactgtacttctcaaatatatcccaaaaatgtattgtagacgtaactcaataatagtttagtgatgaaaaatagtacctaaattgatgaagcttaccagcactgtgatagtatacgaactaagaaaacttaatcaaagaagtacgtatgtacgtactttaaagccaaaaatttgtatgtaattgcaactcattttcagtatttccttatggagaacttatacgaactggcttttgaactgaagcatatgtaatagaaattgctgtttgaaaaaaagtataattgataataaagatataagatctacttattattttttattttttttgagggaaatatataattgaaagaacaacatatgtgtgtctccaaaactaaatggaaagtgttaagtcatccgtaaggtgtaatcacacttatatagagaggccatgcggatttcaaagttgggtgagactatgatcgattgagaatctatggttcaaaaggggaacacgcgtttgaagatttcatcagataaaatattattaagcgagaaaaacacatagatacaatttttaaaaaaatatatactcataaaggaaaatgaataaggtggttgtctaagcacaaaatatcaaattatagtataatttaatactatgtctcacacttttaaatttaataaataatataagaaacgattagctatttataacgtgccacttaatatcgagcactttaaaacatctaataacaatgctcgaatataaatatgcaaattaagattaaaatttgagatatatttacaaaaatataggaaaataaatagaaattttgatgtatataacatgtaaagttaatgccactaaatatatcatttataatgaaactaactaaatatatgctatttaaatagaaaataccataaaaaaatattaaaaaagataatcaatttttcaaaatatgatcacgctctctccggccacacaagattttttctctctcctgcgattcaaattgtttagtttctcatgcaaaaaaaaaaaaaaaaa

SEQ ID NO: 306521 - DNA, 1057 bp, Cannabis indica
aacaaataaatgccaaacaaatagaatgcacaggaaaaatataagtacaaaaccaactcggaaaagctccagtttcctaactattaaagcataaaacagagattcagtaaaagccgtaaccaaaaattccctgcattactgctttgagaatcttatgtaaagcgtatccttttacatgtcaactcacataaatgggattcctttaacatactgtgacctagattttgagaatcctaatacaaatttgatattgaaattgtcctaaaagctcaacaccactgatgaacatctttgctgcataagctaattaacttttctgacaatttgggttgaaaagcttgagagataaacacacgacaccataacctttatagaggaaaacgtaatagtccgtaagacaagaaaaaacgcaagagcttgctaccaaaacaattacaaattctatgtgccacactactcttctgttgcctcactactgcaacgatttatactactgaagcaaaagcaatagatagcagcaatttactctaagaagctaaaaaccaattaggatatactaacagtggacaaataaaaagaactcagctctaactttgctaaattcacaaagtacggacgaacccaaaaaaaaaaccaataataattaagactcgaaaactcaaacccaaactccaaaatcacctaatacaaagaattacccgcatcgactcaaattttagggcaaggtttcagaagctatccaatcaaagtaacaccacactaacctgcatcgaactagcgtttgcctgtgatttctccggcgcgcccattccagctctcgcgtaccggattcgaattcgaatagattgaaatcaagggatacaaaagcgtttacacgaattagggtttcgagagggaagacgagagagagaaaaatggccaaaaaaaaaggaggaggagattacagtataaggtactaatagaaaaccctaaccgccattaacgtagcagtgtgaaccttcgcttttctctctctctctctctctctctttcttttaattcttctgtgcaagtgtct

SEQ ID NO: 306522 - DNA, 2466 bp, Cannabis indica
agaggtatgtttcaaataaatataaaattagaggcaaatttggttaattgattaataaaagagacatttttcaacttaccccaatttataatggtccaaagtccaaaagcacaaactagtagtatgaagaaaagaacgaaaaaaattatttactataagatagttgtgcttcgaatataagttctaaactatttcttcactttttatatgagtaaattacatgaatgttgagtaagaaaaatactaacattaggataatagttggccaatttttacccttattaactgaaatttaggttgaaaaatgaagaacaaaggtaaagttgctctaaaaccacgactttagaacagtcacaaaacaattacctagtaaagaacaagatgggccttgtagtttgaacttgaagaaacattttattaaattttgagtttttttctttagtgattatacatgataatattatgacatccagggccgtcacgaatttcagtgagccttaggaaaaataattcttttggaccgttatctaaaaaaatatggtatttaaaattaataaaaatttatgtgtatttttgaaaagaaaaatatttttttggctctaggcatgagcctagcctgccttaatctagggattgccctgatgacatcttatgtgtattgattattgttgactcctaaaaaattgctaagtataattttggagatcttaagattaaacataaagaaaatctcataatacacacttttaaaggtaagtaaatcatgtatgggtcaaccccatcaaaataaacgaagagccccttgacacgaggagcaactggccgtggagaagctccccgcacgcttcccttgtgcgcccgcaccagcgagagtttcctcctattctctctactgccatacgccaagcagggacatcttgcttcccttcgtgcctactcatctcctatgctcgacatctaagtggaaagattcacatgggctaggctaaacacttaaatgaattttctaagtgccattctcgtatcttgaacacgagatgtaaaaagagaaactccaaaatgacacacaataagggaaatgactgataaagcatgcacgccactgaaggaagagtggaagtacgacaagtactagtggtggagacatagcttgtctcattcggggtacaggctgacacattaccaccattttttcactacccatctgatacgctgatttttatggtataaaagaaattttgtgccctaacatttggaactacatgtatttaaaagactcagtagctcaagtataaatagctcattttaaaaattgtaaagagataggaaaatttttgtaagaagaattttgagtatcaatagaacaacacaatttcatattattggatcaagatttcaaagagttttcataatcatcttatttctaagtttcttatatttaagtttttctaattatttaattgatgagttcttatcgtcaataattatttttaatttaaaatatgtagtatttaaaattaaattattctaataatatcacgacatgttatgtagtcttggacataattaatgctaattgcaaattcctattataatttcttagttaactcttaagctaatttcgcatgtaagaatatttttttgaagaattacttcatatactatttttttttaacttttttttcaaatttacagtttggatttctaaagtggttgcagcgctagttgtaatatggatttccatgtagaattacataaaaataaaaaaaaaaaaaaaaaaaactattttaaaatgtaaaagtaaaaaataccctattttttttagtgatattcgttttagttatagtattacttttataaatttttaaataatttataatactaaaaacaaaatttctattattctaatttaccatacatattcaaaacactttaaacttatttttattgttgtaaattattataaagttttcaataaaatttcctcctctatataatttaaggcttcttttttttttcttttcttttaaattacatcttatacacacaatatatatatatagtagctagattatagaagagtacttaatacttctttattaccctttggagatgtcgaaatagtaagccacagcccaaagattaaggtcccctacatacacatatacacaccaacttgccaactgctaccaattcacttatgtgggtcccactcacatatcattattacaattatttatttatttatttattaaattatttattatttattgtggttctccttacccctttgggaagtggaaaaaataaaactcaaaatccaagtgcatgtttggcatcataactaaaaaacagttttttgtttttaaaaacagaaaattgtttttaaaaacaatttggcttgtttggccttattttttaaaaacagctttcagaaaacaaagttacaaaaaacaagaattttga

SEQ ID NO: 306523 - DNA, 4522 bp, Cannabis indica
gtaatcatgatggtacaataaaatataatcattaaacttcttccatatatatatatatatatgtgcataaggtcctcattgtaattgttgagcagagtaaattcaaaacagatgaaattcttatatcctttccctttttatatttcaactgaattaggtgacgtttggttggaggtaatgaaatggaaaagaaacaaatttcatttttttgtttggttgcatttaaaaccattggaatactattccgatggaatcgactttcgatcattttggtagagtgactattacattttgaaatgaaaggaaagaccattccaatgcaagattaaaaaaaaattaataatttttttattaacttttttatgcattttaaattctattccattccaattctcattcccattcttaattctatattttcattccttctaattaaatgctacctaagttattaaggctagaaatatgggcagaggcaggtctatcaattaggatggataaaaatacctaaaaacaaattaagaggggccgtaatgtaattttttcaaaatattaagtataattttataaataatattagaaaataaaaaaatgggaagagccaaataattgcacttggctccgatccggactagagacacactcagtattgcttataatttttactcgtaatcacgatcattctatttctaccatatttaattttaagtgggaaagcgtatcaatttcatttttaagactgagattaattacatattatatatttggtgtaaaatatatgggtaatttaagatatgtgtaatttaagtgtaacacaatcattactgaatatatatatagtcaatgaggaacttaacataaacatgtgctaatacaagcatcaaattctcaaaactatgggtgaaaaattatatatttatgttgacatgcctaataatgtccagctcgattactaaataaccatgtttacactatatatatatatatatcaaataattattacgtgagtgttattaattgattattacataaattttatattccaaaccgttgactcatatttgtattaataataataatatatatacgctttgtcaactaactgctaattagtgtgctgctcatgaatacgtacagtttatctgtaatgtatatatataggatttgtaattaatgaagaggcatattcttaattatgtacagatatacattaatttaatataatggaagattattaggaaaagtggagtgagtgcaatatacaggtgtgattcaaaaggtgcaaggactcttggatcgtgattatagtggatttattaacgtcatatatataaaatcttgtaatgggtggatgttcatgtcaatctctaaatgttggactgtttctaatttatttttaaattctacagctaattacaaatgtgcattcgtacacatcaaatagtactagaaaaaaagatctttattttcggtttttgtttcagttttaaagtattctcccacttgtagtcatcacttctagcctccaatgttcggaaaaatcgaatggccccttttgacctagccccaattcgtaattttatcgaaattggaatgttaaaaatagtcaagtgtcgtgacctttgatagagaatcgcggctcttgactatgcttacagaggtgtgatttttcaatttttccaaacaatgcaaccttacttatcgagaattgcagcacttgactattctttctgaaaactgtttttcgtaacgattggagagttgttacctttgtgagaggttgcaatctttgatactgaatcttgaaaacttgaatttttaaatcattcagaatgcaccaagtcaaaaaattcaatcttgaggttccttttcacataatagttgatccttttatcaccaaagaattcgagaaataccatattttcaacaaaaagtaaactttcttcatctcacacctaaaatcaatataaaagcaaaaataagtgtaaactcgaacaataaaacattaaaaataaacttaatgctagactttaaaataacttaaaaattaatagaccaagcagaagatttacctcttcaagttatatattttataataacaagacatagataattttcatttttagttattatgtaataaccgaagttatatttttttttcttttcttttttattatttaattttgaatattatttttaattttaattattatatattaattctgttagtgattatgtattaactttttaaaaaataattataacttaaataataataatgatttaatttgaagtagaaataaatttaattatattttaacaaaattaaagcactttacaacatgcatgctaagttcttacagtctaagcattaacaaaatttatacagaatagaaaataggcattttctaaataatagcattaatgtatctttgattttttattttctctatgtaagaaccgaaaataaaagtgttaattgtagtagtttctatgtactcacatattaattcagcaatatatataattaatatatatatatatatttgtaccaatatattaattaaagagtagattagatattaaagaagattagaatagattagataagagcattgctattaggcactagtgatgcctagtaccgtctcgacatgttgcgttgcaattggctagcgatactccctaaaagcttttatattaaattatatgggacccgatacttagttggaccaataatgatattgacatgtaagagggtactaaacaccactagtaccctttagcatttctcattagataatgaagagaaatttttgtgatagtaccgagatatctctcaattatgaagaaaagtaaagtaaaaaataagaagcggcaacaggttgatgaaagaatagtgataacatatatacacgtgatactcaaatcaatattggccttgtgtggcttgtacatataatgctctttgtcactgttccactcatataataaaagacggatacaaaagtagaacactatactatcttttggttgttttcatttatatttcattatatatatatatataaagactacatcaaaccctagaaagttcaaagtagtttaaattaaacctctttaatttatcacataattcgtatgatatgatattgtatcgatatcatgtgtattatttttttttttttggatatttatcatgaaaatactgatgtacgtaattgagttttgttttcttcgtgaaagtctgttttaattagtgtaataatctattctgttattcattgcgcctggatgatgctaaatatacttacaaactaagtactttatatctcttttattgagtgttatacgtgtcgcaaaacgtaggaacaaatggtcataccaataatgcagccaaaaccttttttttctgaaaataatgcaaccaaaacttgaattgatactttgatcaccaaataaatacttgatttttttcttaaggaacagactttgataatatcattgtaaatgtaagataaacctctctacttatactaatatcctttcattaagtctttacaacgaaaaatatatacacaaaatcactgatgttcagtcttctacatcttaatccctaatagaaattagttagaatagattatgacaggtcatcaatccacacctaactaatttctgtaactaacaaactaaaaaagaaaagacctaaggctatatatatacctactactcagtctcatcgagttaaggttgaggagattcttcaagatccaagaacttgatctttgtacaaggaaagagactcgtatatgcataggaacaaaacttgagttagtaaacagagtaagaaatcaaacacattgtatgtaattaaatctatagactaccagtcaatacatacctgtgacttgcaatctcatccttgtaactcagaacaagttgattgatagtaaaatcggatccatgacttgatagagcatttaaatagcttattttcgtaactttcttgggataaaatttgaggtcaatagcttcaaaattttgattaaagtttgagacatgacttgatagagcatttaaatagtttcgaattacaagtttaatcatgtcagtcggatcaatattgagtgagttatggaagttttgataaaagtaattcatgacccaacgcccagagtgacatccaggacccaagttcatatcccagtgcccatgttgacatatgatgtcaatctggacgctgggtaagtgaaaaaacttccaatggatgtattttaagattcttaagtgatattttgacatcacttagtatgtttaagtgttctggcaaagctcatcaccagttctcaaagatgttgtgtgcggaaatgagagactcaaagctcttcattttcgagtgagtttcccatgctacaaatgagaaataagaagttgtgaatttgacatcactgacttcatggatcttacttattgtgaaaaactagacaagcggtcaaagtgaaatcaaaattagataagcaga

SEQ ID NO: 306524 - DNA, 4486 bp, Cannabis indica
attgataaggtgaaccaaaacatacacaaatgaatgaaaaataattatgttactttattgatattgaataatctagattacattgaaatagagttttatttaggccataaaacccaacaaatacaactaatgttccttgacaaaaagtgacaatacctcattgtagtgggaggatttctaggagcccacctcattatgacttggatgatactagtgattacattgtataaataagcaactaagactcaaaattatgagaactatttttcagctattcacatggatcaaccaaaagttttcaaatacaaggacaagaagggaaaaccctgctagttaaatatgtctattcaaaggacttatacaaacttctcattcctagtatcatggatttgatgagatcatcataacctacggcttctggtatacctagtaattaacatagataaaatcataatcataggaaataatgttgaggaactctcaagagcaaaagaacaaatcatttttctcttgcaagcagcttactttagtaaagttctagaattgctaactctgaaggaggtcgcatgacttcttaatatggagttcatttatataaggagtagttttctaaccattcgagaaaacatagaggccaagagaagaattccttaagcatcaatagtatgaggtcttatgtacgctctagtgtgcactagacaagacatctacttttgagtaagagttgtgagtaggcatgagtctaatgcatgacacaaaaattgtataaatattaaatatatcttgaaataagtaaagaggacctaattgttaatctatgtggatggcgttttgaactctttaggctagactgactcaaatttctaaacttgcatcatttctagaaaggtggagcaattatttttgagaagtgtaaaaatctatttgaaatctctaactctaccagtgagacggaatattaagttgccccaaaggctactagagaatcctctaggctcaagaaagttttatacagacattggcatcattcgagacatggattaactgctagtgtgactttgtgataacatagatgtggttgccaaatagtaaagaatctatgaccctaaaaggagtaaacatatatgatagagttattaataaaatcgtggatttgatgaatatggagaatatatataatagttgaaaaggttgatactaattaaaacctgttaaatcccatcaaaatgaaaatgtcatacactacacgtgatctggacatgaagaacatgagattaattgaaatacactttaattttatattagtgcaagtgagagtttgttggatttttatgccctaaataaaacctaattttaatatatagttatttactaattaataaaagagtaaaaattattttatgttgcttgcttcacatgttactttcatgattatatatttaatatataaattttgctaaatccctaacatatgaatattcatgatcataatgttgtcaacaaagtagaaaataatcatgatcgtgtgccttaaactatttagtctagtaatttgtcagtgctcttaatttatactgacatgataatcaatgatgtgatttgctagaacttggataagtggaatatcttttcaaagatattagcaaagtaaacttatattagatgtattggctatacatcacactggatcgatattaaagtggaaaagatatgataaaattattgttatatctttctaagtcaacgatacttagttaatattagatcaattgatctcaaacctgatatgggtaagctttaaccaaattgtagtatttgagttgtttgacatgtttgttactagcttacccgtcaaaaaagcccatagttacaacttggaaacacaagtggtgcaattgagtggggagcattagtcatatatatgaaatctatagcctataagtttttagaagtgaaacaatagttttcttaaaacttggctaaatgagataaatacaagagctcttatttcaataattatattagtttgctaaaaatatcatttataaggagctaattgctttaaggataaaatatattgaatgataaactggtaaatttatcccctcaattgaaactatataccaaggataatttaatatttacgttgaaataatagataattcatagtatatctatattagatatatagaacattttatatattaaggagtgcaatactaactctatagtggagtcaagatgaattaataagttaggaaatttacttggtaaattttagatctacatatgaggggcttgatttcattagtgataaatgagatctatgtccatttattagggtagtttattacatgtttaagagttatttaagaaaattttgttcgaattgatagttgttttctttagtttgaggaaaaatataataaaaatataaaaagagtttgacaaacaagctaaatttgtgtaaaagtgtgattgaatggagctaattttcatcttggtgagtttggcaatgttcgggggacaaaaaacgggccaaaaaagaaaaatttggtaaaacaaggcagttagggccatggccatagaggtggaaattgagcaaaaaagggctaaggtctagggttccaccacagggagctatgactcttgaagcaaaattaatcattttatgagatttaaactaacatgataatcagtgatgtggtctatttacgctaaggcaacctggtatgtctttttcaaggcattggataaacagactttaattggatatattgatttatatcagattagattaatattgatagaagaagagatatcataatcatgccattatatctattcttattcaatatcacttattttatcgtagatcaattggatctatatactgacatgattaagctttaaggtaattatgttatttaagttctttgacttgtttcttaagagcttaccctattggctagcccatacttacatcttgggaacatgataccataattgagtggaagtgttattcataaatatggacatctagagattttaagatttacttaaaacgacagtttcctttgagcttggtcgaagtatttaataataaagctctcatttgaatgattatattagtttactgaaatatcattatgtcgactaagtgtgttaaggttaaaatataattaaagggtaaaatagtaattttattccctatttattgtgggctatctatagaggataactaatcaatatgatgaaaattgtaggttgtatagaggttgtacctctattaaaaacattcttaattcatttgaagccttgtaggtaggtgtatgggtgcctatgtttatatgttcaatgcttttgttatagagtttgataactcacaaatattgtttcatgagtaggtaaaggaaaggcaaaggctaagcaacaatgagttcagagcttgtgggttattgtacattttaggatttttaggcctagagtgcttgattttgtgatgacatggacttttatttggtagtcactaggtgatacttttgtcataaaacatatttggtgtattgttgcaatcttttaaacgggattgtgaaaattgtgtaaagttatgtatttattaaagataaagtttaattcaaaatttttaatttatcatatttttcaagaaatcctttaattgcacagtatctagcaaaatcactgtagtccatccaaaaaagtgggatgttataatttggtatcaaagccttggcccagcctaagtgtggttaatgtggtggtgattgtgacagtcaatgtcttgtgatcgggaaggcaaaagaccaagagctgtgcaatcccacatccactggaggagggttaagtgtgatgattctaagagtgtgtaggtatgggactacgaagttaaagatgacttaaatggattgattagtactacctttatcaagaagatgtatcttcttttcggtagcccatcatgaaagaactccaaagctaagagttatggacctagggtaatttcagaatgggcgacctcctagcaagttttcccaggaagtgggcgagtgagagaaaaccttgctagaaagactcgtgttggtctgtaagttcagtcatctttccatgaagcaaccaagagtgttgtaccagtgtataagactcattagtttgtgggggaaggcccaatgtaggcttgaagtggtcatgctacaaaatgtgtcagaggcaaggttgtctacgaaagatcatcgagatatgtacattcatcattagaggcaagctcgtaaccaacaaggaactttcctaggcacgaggttatgtcattcatggatgcatattattgatataactagataaaaaatgcatgtctcagatcaggaacataagagctttgtaaccaacatgggactttaatgttacaaagtcatgtcgtttgggttgaagaatgttgggcaacatatcaacaattggtgaatgagatgtt

SEQ ID NO: 306525 - DNA, 1704 bp, Cannabis indica
atgtgtttgacaaaatgtctcaaacattgataatgttatattgttacttttttttaggttgattacattttgggagacaatcctagagctacaagctacatggttgggtatggaaacaactaccctcgtcaagttcaccacaggggttcttccattgtttcctacaaggctaatcctaagtttgttgcttgccgagagggttatgctacttggtttagccgtaaagctagtgaccccaatctacttactggtgccattgttggtggccctgatgcttatgacaactttgctgatgagagagataactatgagcagactgagcctgctacttacaacaatgctcctcttcttggtattttggctagactcagcagtggtagcagaggttataaccaactccttccaggtaactattttcttatctcattggtaaatctgatcttatgtctcttgtttttaagtattagttttgctaatttctgttttgttgttttatagttgttgttccagctccaaaggttgttaccccacaaaagccaattgcagttaacccacaaaaacctgttccaaggcctaaaacaagcccagcagcaactccaggtaatgtattgaatggtatttgtttgttgtgtcattagaataataagatgatcaaaatctgactaaggaacttgttttgcagtttcaacaacttctggcccaatttcagttcaacaaaagatgacaacatcatggatttcaaatgggaaaacttactacagatactcaactgtggtgaccaacaagtccactaaggatgtcaaatccatcaagatttcgatatccaaactctacggcccaatctggggtctgaccaagagtggagatttctacacattgccatcatggctcaacaatataccagctgggaagagccttgagtttgtatacattcactcagcttcaccagcagatgttgcagtctcaagctacacattgtcttaattaggaaagacaaagatttgtgcagctatacaaatgcagtccagaattggggtcttatttttttctttaaaagtttcaatctttacttgtgttttggtatttgaatagggttttttatatagggatgatggtattattattattattagcttaagataagcttgaagaactgggggaagaaaggagtgaagagacagtttatgaaaagtgctcatcctctttcacctctagtacactatttatatagacagagagagaaagagaaagaaagatagagagaaagaaatgtgagaagtgatattagtaatgacttctcaaatgacaccaagaagaagtctatttgttgtacttcacagcaagctttgaatgtctttgcttttttgtgattgtaatgttgtaacctttgcaacattttgcttttttcttttcaatttccaatatgaatatagtttgtgcagttcaatcttgtctacttaatttctattatgttatttttttccatattttgttcccaaatatatgtttcataaactttggaaccaagtacacttgatatgacaaaggataccatatgttctcaacatgaaacaatgactttgtacttaagattatttatcaccattgacacttaaattatattttttttaaatgaaatatcaacttcattaaaatatattagcataatacaaaagatgttaaagatcaagtgaaattgaaata

SEQ ID NO: 306526 - DNA, 1163 bp, Cannabis indica
tagagtaggatacaaaacgcaaaaaaaacataaacaactcctaaaaccttcatataatcaagaactataagaattaagaatgaatgagagtaatgaattttgacttaaattgacatgaatgaccctaaaaatgtgaaagtacccagctccagacccagaaccaatttgaaagaaaattcaaatgctatcatattaaggacctgtgcagtcactaaattaactaccaaatcaataaaattacaattcagaaggatacggggatttccataaacattggaagagagatctttaaagattgcttccatttgcaactcagagtacaaagtagctccagcatgatccaaatatacaagacctagcattccaaaaaaaaaaaaaaaacaccaattaaacaaaagaaatcaattaaaaaaactaaatttactttccaatttaatcataagtaagaagaagaaaatgtaatcatgaaaaagtagatgaggagtgagtgaccatctaatcgtttgaagtgggtagctcggatttcgtcaatggtattgggagagttggggtaaccatagaggtccttgaagtctttgagaaaggaatccttgtgggaatccataggtgtagttgtacaacaaattcagagtgagaagagataagaggagaaatgggaacttagcagagtgagtttggttacgtgaaataaattacatatccaaaccaaagtgttatataaatattagaagaagaagatgatgatgacaggacatgacacgtgtgttttgtttacatagccacgtgtatcatatcaatttttaagagaagtgtataattcctcctctctaaaaattttgactttggataaaatgatttttttttttcacactcaattacctacttacttacatttcattttctaaattaattgttagtggtaaaatcctctaaattattagactattaacaaatttaaattttcaactattttcacacccaattaccaacatagagtccgggctgaccttagacatagacagactaagctcacacttagaactcactcattttaagggtccaaataaagaaaaaattactttttaaaatatatgtatttttttaataattttcaaaaatactatttataagggtctaatttttttttttatctatagcccatt

SEQ ID NO: 306527 - DNA, 808 bp, Cannabis indica
taaacgcttaaattaaaaaaaaaatagtgcttcttcatttcctttttttccccttttatcttccatccattaatatgtataaataatgaataatgtatgtatataaatattatatttctatatatatttaatatttaactcaagtgaaatacatgatacctaactttggcagtcttatcaaagaagtcaagtgaaaaagagaacattaatatgtgtaaacactaaacatataaagacctttagtttgaaatttcttccctcctacttagatataagatctcccatattgtaagaaaaaacaacttaaaagaacaaagaaaaaagttatttatcagttattatttttattttttttattattattatttaatgagttttttcaaacaatttaccggtcttttgcttattattttctttttcacatataagaaagttgaatgggagaaaggagttttgtaagtactacaccgaccattttggtcacattcaaaaggttgatttattatcacttacccaaagaaattaataacaactataataataaaagaaaaccaaaaaaaaaaaaaaaatgactgctttcattttgagatgtgaaaaatatgattgttagtgatctacaatattacataaatatacaaatatatacagtagaacttctatttaagaatacacttgtgacagtcagtagtcccgtgatccgtaaggagaaacaccgggtaagctgtgcaattccacaccgcctggggaaagttaagtgggatgattctgagactgtgtaggtatgggactacacagttgaagagggctt

SEQ ID NO: 306528 - DNA, 1907 bp, Cannabis indica
tattaattatctagcctcatttaatattaatgaaattctgagttaatagtttggtactttcgttgagagcttttgataattaaactttaaaaaacacatcttctcatctaaaaaataatatttatatatactgtaaaaaatttctctatggataatacttccctagacgttcatgtcgaacagacaaaaacattacatcaccctagaaaagagccttaatggactcaacccaccgaggactaaaacacaggaagaggtcctaatgtgtgggactttaaaaaaaaatgacattgaaaaaacatatcagagagaagagattagggggcgtatgaacccacttaatatgtgcctttggtagaactggaaaatcacaaacttcgacaaagactggctgagtctaaccgtagaaatgaaaaattggagcgcgaggttgcagctacaagagcaaccacgaatgacgcatcaccaacacagattaggcctttagtaaggcgtccacgtggaagacctcatggaacaagaaccaggaaggcagaaaatatccttgttgaagaaaaaatccaaataacccctcacattcccaggaataacaactaggcaagactagggaatttccactacaagaattgcatcttttgctggtatatttggccaaaagctttgaaaaaatatgtcggcaaaagacagaccaatcaaaccaaaaagcatccaactaaaacttttacccgtacaaatttatgctggtaaaagaaatcattatcggggcaattcacaaaaagcgctcgtaaaagtgtaaaacgaaactgtgttttggtgtaaaaatatctaccgcatttataagcttttttcgacgccaatctgtgccgctaaaaggtcaaagaaatttggaagaaaaattttcccttttaaaactttttttacggggcaataaagttttgtcagtgcaaatatgtgccgataaaagtaataaaaaagtttgtagaaaaattcctccatgaatttttgttatggagggataacttttatcgatataaaatttgtcctgataaaagttaaataaaacgttgcgtttcatttctaggtttttaatttcttttgtcggcggtttttttacttttatcggtgcattgaattgcgcgggtaaaattttctaaataaaatgaaaaggggtggaccttcttccttatttttttggttttgcaaattcccactatcgattctctctttacctctctgcgatcatcggtcttccaaccagcgttgtccacccaccacggtcgtcccctaccaccgtcgttcccccactattgctctctctcccatcttctctccccctctctctctctttatgttagaaaaattaaaaaggaccaaaaaaatccaccatcgtaccttcggccaccgctacttaagcccattatgatagccgcctctccctctctctgtcaaggtaaggtttgatttttagttttaattagtgtattttttggatgtgggtataattttttgtgtatatatatgtgtagataattgtatatatatttatattattttaatttttataatcttattactttaaatatgtgtatttatatataaggataattatatgagacacaatttttgtaaaaaaattacaattttacgttcaaataattttttttatatttttacgattttctattgaaacaacatgaaaataacaagaaaactacataaaagtaacatgaaaataacatttagataacattaaaataagaacaaaatataacatacagataaaaaaaaattaataagagtacaacataaaaagattgtattttttgtaaataaaatcaaaaaaatagtaaaaatatttaaaattccgtaaaatcttatttttgcaatttttttttgttgtttttgtg

SEQ ID NO: 306529 - DNA, 2064 bp, Cannabis indica
gaagcaataacaaacaaaccagaaagggaaaaaaattaaaaaattaaaaaaaaaatcccagaaaggatataaaattctttgaatcagttcccacctctaacaagtcatttcagaaagggaaaaagaaaaactgcaaatcactttgtgcccaattagcaatttttttgtagctaaaccccacttaatgaaaaggaaagtaaacaaaggaccacaaagatagaaacttgagaagagtccataaacaagtagtacattccataatcaaagaagcaaagaaaaaacatcaagtaccagagtgaaggcgagcagacaagtgtttagcagagtgaacccttgaagcccagaagtcaacatccatgatgaggtgagtcaactaaccggcgaccaaagacggtgtgttttgagagagaagaaagttttgggaaatgggtttgtggaaaaatgaggtttagatcagagagcctatgggggaagaagtttctttcacatcagttttggggtttggaatctaagaagagagatgaagttatgaacattatattgctctgaagctgaaagctttttctgacacacaaaaagctacttggtggataactgacacgtggaattaattattgaattctatattaaatgacttttctttctttttaaatataataattattctataaaaagaaaaaaattaagttaaattgaactgtcctcactcacttaataacaaacaacacccatgattttattgtcctaggtcattattttttatcattattttcgtgttataagaacttaagaatgaagaatcatcaaataatcttttggtgaaaacataagaattattgggaaattgaatttccaatgctgaaaatattctatgttttggggctacctaacttaattttataagcctatatttttccttctccttggcttactttactttgaatctcaaaaccataattttatataagacagtatcaagaaagatatcttgttgggactatgaatttcaatgatgggtttttctttgcctttttgggaaagaaattttaggaaccatataagaaaagtactatgattatattaagaagaggggaagaagaaataccaggatgattccacaccacaatttggcataatctttattagtttatgatatcatttaattcaactcatttcattctattatcttctttccaataaaacttttgttcccatccacaaaataaaataaaataataatattcatttttttcttttgaataaattaatattagagcttttgtgtttccctatatatacgaatgaatgtccgagcaagcttaaaaaatgctatggaaaagttgggatctggttaatgctttcaattaattcagtcaattttttaagggaatttattcataagcataaaaaatttctttcgatcatctagtcttatttaacaattaataatctaactgaataacacaaactaatcaataagagatttgctaaataacatcataggataactctaataggatacaatatcggggtgaactcttcagtacccaatttaactcctaattatcattcattttattgaaaattcatttgtaaaatgaattacatatttataggtattttgatagtgtattagtgtttaaggttttttttgatgggacaaaaaatagtagagtttagacacaaaattgttctaatgaaatactaaatgctattctatatatgtgagagtctaaatagtgtcttacaatttttagtgaaacactatagactacaccaaatttttttttttttttttgatattaaaataatatgtttacgattaaattttaggctaattaggattttttttcccccgaactttgacatgtaccaaatcatgccccctaaacttttaagatcgttaaaaatgcccccttaactattgaaattgttaaatttaaggacttttgtcaaattttagtgaaaaaaaaattctaacatggatgaaagttcagggggcatgatttagtacatatcaaagttcgagggacatgatttgatagatatcaaagtccggagagc

SEQ ID NO: 306530 - DNA, 3022 bp, Cannabis indica
cgattccgaccatgtcctcatgtgaccatgcaaaaatgtctaggtttgctctcaaaaattttatcaatgctgattttactttgagcagcaaaccttttccaattttgagtttcatggtcggaacatttaggtcgattccgatttcttttagttcttccactagactaacattggtatttggttccctaagctggggatccacatcttcatccccgtcttgggcagttccctatttggcaatgtcttttcccttgtccgacctctaactggtggatacttcctttttagccttggttagggcaaggttgtaacattctcgtgcaacttgttgatttcctctcaggggcatttatgtctgattaaccggaattcatctagaaatacattgtataatgcaaaaataatgaaagatgtgttatggtcgacaatccaggtactaagtctaattttaaatgttgtttataatttatttttgttactcataaataaaaactcaaatttaatcaaacaagatataagatggataaagattggcaaagagactggtgtatgaaagaaatgggagatttgagagcctcaaagtcaaggctagttactcagcttaatgatctaccaaatgaacaagagcgactcaaattaaagcctgataacataagtctgaaactgaatggagggtatttgttcgcgaaaaaaccagcaaggaatttcgggtacagtttaatttgtaattttatttcataaacttgagattatgtggataatttgctaagctatataaggattcaatagtccaatttggtgttaatagttcctaatgtattgtttggtttcagttttcactaattacaagtatattcttgtgcaatataaatttgttgttaatatgtggattgctgtttattttataatctatttacgataataagtaacaagtttaaagaaattcaaaagaaacaactcccacatacatgcagccgtagaggatatgctcgaacaatggatgacatggtagtttttttattattaaatatgtatttctcctaaatcttaaaattattggatgttatctaaaaaattcacttgaatacagaataggaaaagctcaaaacctgtaacaagagttgaagcttttctaaagacacacactaagaagaatggtgagccggtcaatgcacaagctgctgaggttattgtaagtaatcagcttatatatatttacaatatccactcaaatttgtatatagtactcaacattaaatgatttataggagaagctccaagttcttgcaaatgaaaatccagaatcatgcacaacgcacaatacattacaagatgctttgactattatatttagtcctgacaagcctggtagatcattagctaatgggagaggaataactagtacaaagctagctattttaagagctagggatgaccatatttcacagttggaaatagatcaatgtgagatgaagaataaaatagctgaaatgatgagtcttcttacaaacattgcaaaaaagtcaaatattctggtaaattttattatcttgttctcggtagcttcaatttaatttaaaattataaatgcctatattattttaatggatgcaggggttcactccaccaagtgaaggagactcatacattccaacaccttctcctacggtaactaacctttaagtattatcgcattcactttgaaatttgtagggaacttaattaaattttatttttcaaaaaagtaattactgctaatcattaaacagagtgttaatctaaagtttacacctgaaaataacgcttgcaatttacttgattggtatggaggtggggaaattgtcgcagaaggtagatgggcttctagtgatcctaattgtgaggtgcatcatctacatattggaccgaatgcaatgaaagtttgggttgatgttgttaagaaacctgatgcatatttgtggagaccaacatcagcaatgagtactattaaagaagcagttggctccattattgcatggcctgccaacaaagttataatgaggtgaaattctaatataattgaaaatagattcttaattaatacgatagcaatcataaactagctctgactaacttatcttattatcaaaatttataggaaataaaatgaatggatctctttcaaatatcgtggtacatatctttacatgaaattatttaactatatatcttgtttctaactattttttctttgctatttctattattataaagaattattttgttgttgtttagagttgtacatatttttatttttataggtgctcaacagatgaatgaataacattattttggatggacaatcatgatgaagtattttgtaataattagtttgtttcaattctattacttaattagtgtcttcaaaacaagttaatacttggaatattgttgttttagctttaactagctatattattactactagacaatatgtttgaacataatttgaatttatgcaaatgtggattgattttcgtattgaacttttatttatattattgttgcgattatgagtatgtatatatgtatattactgtgtagttgaataaatatataaatgttaaaaaaactagagaaaactaatttaaaattgctataccgtaaaattatatgagaaataacgtgttataaattgtatgaacattgcatttaaaaaaatatcattaaaagagtaaaagataacaattaaaaacgttgcttttgtggtctctctataagaacacatgacagttaaaaaatgtttcatattataatattgataaaacactagaatacacatttctataacaagaatgcataacaattttaaaatgttatgaaaaaggtgggacttttaataacatgggatgacatagcattagttttaacgctatctattgccaatgatagcattttagaaacgctattgaaaggtctttttcttgagatggcaccatttctaattttttttttaaattcaaaggttctcgactaaacctct

SEQ ID NO: 306531 - DNA, 1013 bp, Cannabis indica
aattgacatatatctcattgtcatttctattagtattaatcaagtcaatgaactgaaggacctaattaatttataagaatgaataatgttaaaagtataaaacacttttcttttttaatcttttaattatacataaaataaaaatgctacaagttacaacaccgcccgaattagggttatccaaatagtagaactaaaaaatcaaatccttaacttttatgtttttaagtcaaccatttgtgtccttctcaatctcattagtactcatcactggttgttataaccaacgacataaattaaggacaattaataaaaatataaagctatatataatataaactacaaataaaagtgcatgctgtatatatcggctatatattaagatacgtacgcagatacaatataccaacttattatatgtatatatatatgcttaaattaaaatatatctatttgcattttgcatgtatatacaaagagagaaaatgacatttcaccaacgtacgatatttaatatggactataataatatttcaatgtacattattgttttttctaatgactaaatggcacaaggacgtgtatagttgttgaatacgaaactacgtatgtaatcttcatagctcatttaaaaaaacaatatatatgtctttccaattaattaaatcatgaaatcaatagtgttattgtgaaaaatgtgtctccgcgtaccaaacaatgaatttcatgcataatttcattttcatggttcatgacgttataattaagtagtaactagtatacgaagtttcctatggtactcatgtaatatataatatagcttcaatatattttaattatactaagataatattaagtgtaatccacctacaattagttattataaaaataaaagagatatataaatgtagtaaaagtttaatttgaattgtaatattttttttaaaaaaaaaaattaacggtaattaaattaaaattataattaaccatagattataaaaataattttattt

SEQ ID NO: 306532 - DNA, 1693 bp, Cannabis indica
atttttagttttttttttttttaggaaaaaacttgttattataaattagagggagtcatttacaacaacaaagcagatggtagagggaatttcctcaaaccagatacaatcatcatccaacaccaaagcttgtttagccaagccatgagcagcttggttagcatctcgcttaacatgagatacacaaacagaggagagataggataaatgatttttaatatctctaaaactaaatcaccaaaatatgaaatagcagcagatctactgttaattgagttaactaaaaccagggaatcagattcaaagtgattgatagacaaattgtgaagagtagcccaatctaatcccgttagtaattattttgcttccatttcttgcggattgtatctacctgtgagaggctttgagtaagctgcaacaacttggcgagaagaatttcgaatgataatgccaacaccaatcttgttacgggaaacatcacaagctgcatcaacattcatcttaaaatcgtgcaaaggtgggtgttgccatttaggatttgcagccgcacctgtggaagccttgattgagttatgtggaggagatgaatgctcctgataattgcagaaataagctgctgattttgcccagatctgtgatggagaaaggactggtttgccatgtatgaagttgttcctatcgttccataaaaaccacatagtacatagcatttgttccatttcagagtggttttaagggtagatagcaaaactaaacagtcattggatttcatttttgaaaccatatcgtaatcaaaagaaatgcctgcggattgccaaacttttttggcatgtttgcagagaaacatggcatgttctacaaactcataggcattcgagcatagactacatgctgcagaatctatgatttttcgattgcacaaagaagcagcagtaggaatcgcctgatgaaaagccttccaagcaaagattttaactttggatggaagtttcaagttccaaaagtatttccaccatgtgtgctggttagtggaaggagtagaaagctcagagtcttcaagatcagtagcaaagtgatatcttgtttgaacactgtactcacttgtaccagtgaaatgccatatccaacggcctgtaacatttgatgtagatagagggattgaaagaatataatcaatgtctacagctgagaaatctcatgtgagtagttgaaggttccattctttatcatcagtaatgtaaaaagaaaccaaattctagggatctcctgaatatcgtagaggtgtgaactcagaatgtcgaggaatccatggatctgaaatgcatttgataccaaaaccatcaccaatttttaaccttaagcccttcacaagaagatcgtgaccccaacaaataccttgcctagttaatgatgaacaaccagttttttgagcttgcaaaaagtcattatgtgaaaagtacctgccctttaagacacggccgagaagagaattgggaaattgaatgatcctccaagcttatttagctagtaaagcttggttgaaatgtataaaagatcgaaaccccattcctccgtccattttggttttgcaaagaagtttctattttctccagtgagtctttttcttatctttgtctgaaccccaccaaaagttagccatcatttgctctagttggtgactgaaagtagaggg

SEQ ID NO: 306533 - DNA, 1396 bp, Cannabis indica
aaccatgcaacataaaatgttatttttgatctttattaatatgtaaatctgattatatgaaatgagttttatttagggcataaaacccaacagactctatggtctcttagaagtccaagaaacaaaacactgtctctcaatcttctgccaaagtagaataccgagacatggccacaccacttacaaatttccatggatacttgccttactcaaagattttggagtcaatcattcacatctaacccttatgtattgcgacaacaaagttgtcattcatatttatgagaatattgtatttcgtgaatgcaccaaacatattgacattgactaccacgttgtccttaaacgggtacaaagtggccagctgaagcttcttcatgtcaacactaaatacaaccttattgatctccttaccaagcctctttttccatctcatttcaaggatttagtttctaaggtgaatgctacgaatttgtacacttcatcttgagatggcatattaaacattagattatctcatctagtatttgggtatagagattaggttatccttgtttggtttatattcttaggctgaattactttccccatatatatattttatatttattatagattaactaatttcactttatttaataaaggagatattattctaatagagaccacatcaaatttaattttataattaaaattaataacacatcactatatataaagatatatatgttatataatataccacgatcattatttatttgtagttatttttgtatacttctaaggcatgagaccaaatatttgaaactctaaaaatgttgttttgtgcccaaaaaaagaagtaaacgtaaatacattacaaataaaataaaattagttaattttatagtaaactatttataagagttattttggtacactcttatctcttttggtatccaagataattttttagtctaattttctagctcgacatgcttgatttacttgaagagtgcaaagttcggaatctaccggcatggtgattgctaaaggttatgacttaactaatttggctttgactcaagctggacggaactataagtaggcatactctgtccaagtccaactatgtacgaaacatgtcaactaactaagtgccacattaccttatacgagattcgggataacattcgacctccaagtccacgtggaaacttttgctcgtacagggactcctatgggttacacatcgcacagaatggttacacgcgtttgtattcacgtgtcgtcctagatgtgatgtgaatttttcgtgaggtgtgcatattgttgggttttatgccctaaataaaactcatttcatataatcagatttacttattgataaagatcagaaataacattttatgttgca

SEQ ID NO: 306534 - DNA, 2428 bp, Cannabis indica
accttttgacggattggattaggattcctccgttgtacaggacatcccctacccaaatatttttaaatcatgccaaagtattcacggctataagaaggaggagttgaatgtgggtgatttggtgacaagtgccaattgtcgcagggctaagctaatcatggactgtcaatgaattgaagaattcaacttttctaaggtatcttctcccaacacctagaatatggggactaaaaagaagctccaaactccaattattaactgccgaagataaatataacaagtacaagtacaaaaaagagaaaaacattgttatgcctgccttcaaagcgcttctgggaggcttagccatgagaagattagaaatagggctactttggccacaccaaaatttcgttttctagttcttaactttgggacccttagagctagtacctctagtgcccgtaagtcccctttgaacattcattttgtttccttggctcaagagtattctcgctcacggccagtttgttttgaaatgaggccgtattgattttaaatgccccatgcacggtggggtcttgtggaaaatgatttttatttttctaacatgagtggcttcttgggccagtcttaaatgggttctagtccttcaattcctattcttctagatcattctttctacataacctcgagttggtttctcccttcaattagttatttaggagatgatgacaccagctctttaatttatgaattttctagggcaaaattaaggcatcagggtaggattaaccttcctcgtttgctgcctcatgcttgtgcttgtgtttcatgtatttatttatttttttaacttttcctttgttttcttttaacaagaaaacctatggatgatctattggccatgctggttgttacacatagcccagaactggaggtggtaactcccaaagccccaaacgaggaggtgcttggaaaccaggaggtagtgctaatagaggatgaagaagaagaggttcctcgacttgactggaaacagaagggtgtggtttctaaccctgaaaccttcaagaagctaagacgttcaaaaactcttggtccaagcaccgacattaggataccatttgaggttgaagactctctcgtctctcttactatcctcctaaccctgacccatcctaacgaagagcgggtgcaactttctattgccaaacataactacgttgttgatgagtgtatgaagggcgaggaagacgctaaggccttaaaaaggtggctgagggaggctcatgatggccctttctaaggtgagtacactaatgaattctaggaattgaaccttgatcccatgactgactggttaagtgctatctaggtccttctctagcacctttcacctcagagatggtgagtcatttcgctgttgacttgactcagctttctaccaagagaatcgcggtctgtgcctcttctaaccctgtctatcaaatctaggacatgagtgtggcccttacctccataagtacacaacatttttcaagtttcttttttcctttctctagagatctgacccaaccacagttattatttattattgccaattgatgtggaggctgatcgtctttccaagacttttattgacaaagggttcactatctcaaaacggggtggcatggacagagtgttgaggaagctcaagggggcagagagcccgatggagactctctggaacgacacactggcggagaaggccctcaaggaatgggacccgaagctttgaagcccaaggatgagattattgctttgacctgaacttagttgaccaaggcgaagacgattctgctaaatgtccaagaagaggtccagggactgacgtccaaatataagactcttgatgatttataaaaggctgacatggaaactgcagcgaatttattagtagagtttaaggagttgcgtgagttccaggaccgaaccaataaggaggccgcaaaagctacgagagatgccctcctaactctagtgacatgtaagcattgtataaaatgcttcgaggacagattctttatgtgttggaaattgaacgtatttgaacctcgcctaactttcatgtcgaatcctgaggctactgcgagtcgtttttgggataagaacatgaaacttgagaagtcactggctgaatgggtgggtcctcaccttcctctatggcggattaattaacaacctctattgcactgccttttactactactcccaccagaacaatattttaattttttaattatatgtctatttttttctcctttttttttctttttgggagacatttcttatagcgtttccctgggctttctttatccctttcttggatgacatgcttttttaagcgtttattttaattactaattatgtaacaccctaactaacataggcgtattacgtgatt

SEQ ID NO: 306535 - DNA, 1961 bp, Cannabis indica
ttcaccatccatactccttattcctatccataccgatggtgatttgatgggggtccgattgtggccccatgctacttttttttcttcatatttttatacataaaaaatggtagcaacagaccaccatcggattatgttctatatttatagatgttaagtttaatttattaagctcgttaggaagacatcaagccactattggaccactatcaaactactactatcagaccatattctatatttataggtagcatcgggccagcataggactttcatcttcaacttttactcattttaacaacggaaagacatcagaccaccatcgagcctggcaaaaaaattagttttctgcccgaaatttagatccgatcattttcaaatctaacatcaactcacagttaactgacattaatcatacaattcattcatttgataacattgacgatggagaaatcgttgttgaaggagaagtcgttggatccatgaattgttgggtccgcgatggtcattaggtctatgagttgttagatttgtggttgcggtggtcgtggagagaaagaaccgaggttgtgggtggtatcatatgttatgggtagattccttaggtgagtttagagagggagagagaagggaagaagagggagggtcatgtgtctaaaataaaagaagtaaaattgagttttataaaatattaggctattttactcaaataagttaaataattttaatccaataaatatattaaatttcccttttgtttaaaatagttataaaaagagggtaatctaacgtatgtgtgagatttggaaccatttgattcttctgttttcgtaaatttattctatttatccatttccctccctctctccctctgctctcgggctctggcgaacctccaccaccaatgacttcataaaccaaacatgtcatttttcaaatccttcgctactacctctcccgccttcaaacctagggaggcttcaatggcggtcctctatgcctctccttctcgggtacgataacttcactcactcacttacttcctaaattcgttcttcgtttcacggtttcggctcatgagaaagtctcgaggaatgttttattattaagctttagtttatgattgataagctcaaatgtcgattaataaacttttcttcggtaactgagcgatgtcgtgtgttgaactcgtttgttttgtatacttttgagtgttgattgagaatttattttatgatggagaagtaaattgaaacttgtaggtttgaaattttaatcggattgatggctttatcttatgtatttctgagttctggcgagcttttacttttgctaacaaagtgcttgatgaaatgccaaagaaggattattattttgtgtaaaaaaataaaaatgctaagagcttagcgctactgtgtagtcgtaactatggtcctttttatctttattttatttttcagaatattagaatgtggacaagagtttttttgaggcgttttcaattagttgaacttcacaatatgatgtcctccttcacatttacatatgtagtttttcgttttttgttttcccgaataatttttattggagtccgttgaaaatgtttgtgtaatctgtaagtcctttgttcaaaacaataataaaaaatctgtaagtcttcattccatttttttgtagtattgaaattcaaattgtgatgtctttcctgattagagcagttagagcaacagataccattactttaatctcctagtcgtagtactaggaggtgaaagttatgacttggaggacaagtctgaattttataacgagcaaaatgaaatgtacaaatcagtaaaactcaaataaaataatgaaactattaatttgaaaaatagaataaatggtataattagagacagaagaataagtgatcttacatgagtttcatctaaaaaattcaacatgcaattttttttttt

SEQ ID NO: 306536 - DNA, 3082 bp, Cannabis indica
agcaagatcttttttagaagctcgaagtctcaggtgttatagcattcagcattctggagcagagacacagaaaaaaaaatgctatgctaaagcattgctataactcctgggagcacattattttggaaaattttggggcaataaataatggcaatattaatactcaaattttttgtgggatattctttgaggaagtaagtgtgaggtctcgttttggtcttagaaaaattaaggtgtttttaggtgatttgagccaaaaatgacttctcttaaccaccttcacctaagccttacattacaagcttgaaaaagtccttttgatctttggtttgtgtttgtctacattagtggagagagagatgaaaaataaacttatgagactttgtcactttagagattttgtgcttaattcatatttacataaattgatctaaattgcaagtaatattttgatcccgtacaccattttgccaattatctgtactgggtgttgtattccgagcctgaactgaaacaaaaccatttggacaggggtcctcatccttcaaccaggatccatattttggaactaaattcccagcctcatcctcctccttcagcatctcaccagtacaatccttgtgttcatgtccccaaatcccacaattgtgacaaagcatcggtaggtgttcaaatttgaattggacccaatgctttttcccaccatacggaatggatctcccgacaaagatattcttacgcaattgaaacccaatccgcaatcgcacatagccattaaggaacatacggttctcatcaccccaacgaatctccgccacttcccctgccatttcgcccaatcttgtgacatttttctttgtgaacagcttaatcggcagacccttcaatttaacccaacagaacaccttatccaactcagcatcccttcattgacccgacaatggccacttctccagaatcagtaggccaccattaaacatccatggttgcttccccagcacactcttagcattctccacactcttgaacgtaactcggacaagcttctcctcaccagcatcttcattcattttagccatccaatccgttatacctttccacattctactgaatatagtggtaaacaggttctctttaacatctctcaaagaaattagtttcccaactagggattttgctccaaaaagtagagcagcatcctcattttcctcccattcctcctcaggattaactcccaatttactagtcatattgacaatatcatccacattaaccggccgttcgcctgtcatcatcagactaaccaagattaaaatttcaaacattcgtaccagtccttactcgactatcgcacaccagagagggtcactcagagaccatttttccttgacgaagtttttatttaattaactctaattttttgttctatacaagaggatatattatgatggatacattagcatcataacggttaaatgatatttaaaactgcaaatgtattatttttgtaaggtaaaatataatttttaatgattataaaaagacttttctaattatttaaaattgtatcattattaatatttggctcattaaaaaattatatttttaatctattttaccaagttcaaaacaagaaaaatcgaagagttatttaattactataaataattactaatgcaagagaatgttttttattgttgtattaataattatctttcttaattctaatttatatctatataattaaaaaaattaaagaatactatattcataattaaataaaaatcctaatttatttatttttttgttgactttatatatactgcttagtttatttatatttagagattattgaggcttcttatatcttttctctatttataaatagagtccaaatattaatcacatcagtggtgattaaactaagagaaactatagcatcccaccactctttaatcgtttgtttgtgatttgtgtcggattattaacttttaaaattatttgagcttagttttcgactaataaatggttgtagcactgaagacgtacgacggctgagcgttgcatcggtgtatggtggagttaattgagccatttatggttgagtaagtctctgtatttgattttggtatttatttcatatatttaagttttttcaaatcacattaatttttaatatattttattaccatttttaactattttaattttattatatgtgtatatatgctttaaatctttggtaattttatactaaatttttatatatattttttgaaataaagtaattcattagatagcaatatccgctattacaatagactgaagagcagagggaacattgctctcagtaaaaagacgatcagaccaaaaacaagcaccgcgagcaacacaatgtgcggccttgttagcagatcgtttaacatgacaaacagaaacattatgtaaaatagaaataagtgattgacattcttgaataaacaaaccaaaaacagatggaagtgcaactgagctattaatagcttgaacaacagcgatgcagtctgtctcgattagcacattcgacaagttcctcctcttcaaccaactgagagcctccttgacactctcgattagcttcccatgacaatctctaatgaccatacccgtaccatactgagtcgttgcagcaaaaatcgccccatcagtattgattttcaacatcccaccaggcagcttctcccaacacacactgctaccagcaacagtagcatcaaataacaacgattcaaacctactttcctgagccaacaaccaattataaagtgtagacctagccattcgaaccacatccgcagcctgagaagaacgaccctgccaaagaagctcatctcgggttttccagataccccatgccaccatcaatagctcatccaccaaggccactctaccccctaccaaaaacgccttaaccaatcagcaaaggtagcttctgcagaaaactgtagccccacaccagacctattccaacaagattatgcaaaatgacatccaaccaaaacaaggacaatggtttcttcatcagagttgcagaacacacagc

SEQ ID NO: 306537 - DNA, 2207 bp, Cannabis indica
aattttctaaaaatttataattcctaaatagctataacgtacagaaaaaaaaaactaatataacaaactttctaaataccaaaatagacaagaaaatctaccaaaacttccttaaggcgatgtactacgaaaattttgtatattttgtaggtgctttttcttttgttttctcactctctctaatattctctaatttttagtggggcattaatttaatattaaaagttctaaattgaatatgtatattcatgatatttgagtgacacgatctctcttatctgcaacttggaaaatatttaatccactgtcaagtgtcaaataatatacgatatcaagagtaaatttttttttttttatttcaagtttttcattaaaaattattaccggaagaatttaaataacaccaaaagtcgtgcgaatatttaatgctattaagaatactcaaataaaatttgtgagtaatcacttacggtagcgagtactcaaaaaattagctactaacaaactgaacaaaagacaaaaaataacaagaacacaaaaaagtatagtgatttagtcagagctcaatctacttagtccacaattacaaagattccagtttaatttatttgattcggatcactcctttatatgaaaagcaagtaaccttcaggatatacataactaatcggttttagaatcattttacaataaatgacagtattaaatcagaataaacgttaaagaataaatgaagatctgtttaatatgttcttgtattaagtgtggcaacgtatgcgactttcttaacatgagttgcatgtttatattctcgcacaagctctcaaacttttggtacgtttagtatttgttaggtggaccatgggcctgtcgtttggatgtctgtgctcacctaagattgcatagacggataatctcgcttattgaaaatgtggaacacatgagttcctgacgagtcatcgaacacgatcagtcattcaaacccatctttatgtaaagaagcaatctttactagtcacgagggaagtctacctagtcttcatacatattgtgatatatacactacttatattaaatcctctcggtactgcttgtctttaactatacaagacatagtatgcgactagacctgttaaggtcgcatcatctcgtgagttcaaatcaagcgaggttaactctttgaaagtcattaattaacaggtcatccttttcttaagaatttgatccacatgtcaaatttataggagactgctctcatatttctaggtaaaaattcgcactataacacatgtcactaattttgcgattgacaactgtgtcatataggaaaactattaaagagaggtaggcaagttatcatcatgatatggtgacttttagttatcttactgggggtttcaaaaagacgactgtattaattgtttttattttcccaagataccacgtcatcaaaatccttcggggtgtgtgtaagcatgctcgttggtgatcattggatgaggtgacctttggtttcttttttgccacgtgttcatatcctaacgaataggaattatttgtatttaaccccctcaaatacaaatcgatcgcacttcatttccctttcattcccaatttctcatttttggcgttcttctcctttgaaaatttcaaacttcaaaaatctttcaaagtttttggattttcattttctaaaaacgattttgtgaaggatgaagaacttttagagtgattctcaaatttaggagaacatatcctcatacaaaaggttggtatttctttctcgattcttttataaattcattctttttgaatgttcacataccttttgggtttttagggatagaaattgcatgagatcaataggacttatcgaggaatcaaaatttataacaaaacaaggtaaaatatagaattttttctgaaaaattcttgcctgaaacttgaatacttgcatatttaatgatgaactttgaatattcacatattaatagtagaaccctttgcatattcacatatttaggttcatctgtctccaagtcgaaaattgacagtggttgggcgtttcaaatagatttaatgcttatttctctaagtaacccttaggtcattgtaaaatacacaaccactctattttattttggagatggttcttttatatgtttatatctttatatattaaaagtgcctatctaacggcatttctt

SEQ ID NO: 306538 - DNA, 1860 bp, Cannabis indica
aaaattataaataaaacattaaaaatagatatttttgaaaattctctctaaattattatgttaaattgtgtaagacgaaattacaataatattacaaattgactgatgttaagtactacttgtgttgggacggatccattaatattaatgtggggttataatcctactaataaaaatatatttttaaaaaaattaaatgtaaatttttcaatttgataattgtagactaaaataataaaaaaatattcctacaaaattaaataaatctaatatacgtataaatattactttttatgttaaataagtcccataaaataaaacttattatggtccgtcacttcgttgcattcctcataaaagtatgagaaatgctaaaaggcaccagtggtgattagcatcatcctatgtgtgagtatcgttattggtctaactaactatcgggtcccacatagtttaatataataacttttagaatatatcgctagccaattacaacgtgacatgtcgagaaagtgttagtaaccacttgtggctaatagcaatgctctaaaaatatagcatattagaaataatgttgacaggtgttagcatttctatgggcttaagaagaaacctaggtctataatcaattacctaattttcctaacccttgagctggctgggcttaaaatagtaagtcgtgccaaaccaaacaaatctaattaccaaatatagatggaaaaatggaaatgacaagaaaaagatacatctactatttataaggctgttgaattttgtgacatttgagttgtggctgcccatagttcgtgacatttacaatattattttttatttgcatgtgcatgtattcattaatccatcatattttttaagagatatatctctgtactaattcaatgcatgtattttttttttgacaataattcaatgcatgtatgagttagccaaaaaaaaaaaaaatcaatgcatgtatgggttctttagccactataaatgaattatgaatagatgaaatttgtttctatgaaataaagcaccctataataaacatatcttacgtacattatttctcaatctcaaaaatattcatcttctacccataatacacatctctctctccttcgaacttatttatgagtttatattcaaaaactatgatctaatattttttttttaaatatctatggatattattttctaaaggacaaatctccacaaataactttatagagaaaaaaataggggaaagagagagggggaagcgaagaggaaagagagaaaaagagaagatcgaaaaactataaagaaaaattaatgacatctaggtgggtatggtggttgtcatcccatcctccatatgacaagatggagagagaaaattgggtgaaaaggagtgaatagttgtaagttgaatactttggtagaaggtaatattagactttttatttaagcttcattaattttattacttctattaaaatttgagttgattagttaatttttttactattgttaatctcaaaaagtgatcaaccgatagtagaattgtatagatctgatacttaccacgtgttacacggataaaatggaaaagtataacacacagatttattataaaggttcggctcccttgtgatagcgggtaatgactgtaaagaccgcttaattttaatataaaaattagtagatgattagggttttaattcagaaattagacgaagtataatgtttcgcatttcgagaaacatttgctgctaggctgtagatggattaacattagggcattttacaattttgtatacattatattaattaattacaaaatatgtgcaaacatattatcattttctcatatatttt

SEQ ID NO: 306539 - DNA, 2279 bp, Cannabis indica
tatctcataattattatagtactatatttgtagtttattaattaaataaattattttcattttcttatataaatatatatatgtatgaattactctctttctctttcacggtcccattgtgtgttgttgtttcttggattagtgggaattaagatggatctcaactttaatctccttgaaaccagttctcttgccatagctataattgtcacagcttttactctacaagtaattaattaattaattatatttctctttttttctcagtcatgtatatataatattagtgttactaataatatatattaatattactttttatattataggatggaacttctcactacttgaagggccttgttcttttgctatgctatgttgtcattggagcctgtcttttttgtatcccgaaaccccagcaagcagtaagtactcctttacaaaaaaaaaaagaaactttattcaaattaaaaatgtgtatatataaataaaaaaattatattattttttttttgggatgtatagacaatggagttaatcacatcaacttggaactcttcagatcagcttaaaaagtgagtctatctactatctctatattattaatgtattaaaacaaaaaatcatattaatatataatataactaataaaatgtaactattgtaatttggattttgtgtaggaataacttttgggatgaaaaaaaaatggtgactagtgatgaggaaaaaaatcaaagctcaaaggttcatgattggaatttggaatgatgaaaacatatggatttgaaaaattgtgttgatattctttcattttgattaattcgtctctgcatatgtatggttccaatcgatatatatatatcacttgccggagagcaacacttgaagttctgaaaaatcatttcaaggggtgaagcttgatgagggactggtgtggctacttatatatatatatatatatatatatcacaatatatctcatatgtatacaagaataataatcatctttttcatcatttgtgtttgagtgtttaataataataactcataccatgagttaaagttgtttctttttttttggctaggtttcttcttgtagtgtcagaagtacttttttgttttgtttttatatatataatttaatatcatattattattctgtatggagaataaatgttctttattcgatatcttgtagtgcgaaatgtgttaataatggaatataatattggtgttgtgtttggcttttgatcagtctattaatttatgtaaattaacataatataatatatttttctaattataatgccatacacatttcctcactcactaaagaaaagattagaagattatataaagtactttgaaacatctaagaatttctgatttataatttatatatattaaaaaaaataagtgaataattgatatataatggaaaatagcataattttgaaaagttgtggtacctctaattatatctaattaattatatagttatttaataataacaacaacatctttcctaattagcattaattatgccattaaccccattgtatatcataccccccaaattaattaatatttttattattattataaatagtaattttttgagtttaaggttccgatcatcaaaaatattcctgtaatatacatcttggtattttctggtcgtcgtttcggtatggaatctgttcttaccgatttgttggttaataatatcacattttaattaaaaaaaaagtaatataagtatatatatgagtatgaaaattatttggcacaaaataattgtatgtggggacaaaaattacaagcttctattcagcctatatagaaagaacaaaaatatgaacagaatgtctgtcgatctaagattttaattatttattcaatggatattaaaataaattacattactttacataagataatgcttaataataatacaatatataaactgcccatccttacaaaatataatttttatcctccgacaaatttcacaccattttaaagtaataatatttttgtatactatatccgagttacattttctctatccaaattaatataaaagacactttcttttattgaagggttacacctttaaaataacatagaaacacccttttggtaaatatcttttcattctatatagataattgcaattaaattctctatattaagctttttattattattattatggaagttagtttatatattatttttaatttttttaaaaaaaatttacggtttggattttt

SEQ ID NO: 306540 - DNA, 1347 bp, Cannabis indica
gttcaaaaaacttcaaatatatttttggctttgtaaactatttaaaaatttttggcgcaaaagttaactaagaggttctagttactctattctcaaatttgctaaattaaccagaaataaccaatttttctattttgaaagatgactatctttttttggtaaaattacaaaaatggtagaagaaaaagtagacctttccagtgagaattataactccaatggaactatcgtcccttgcatcatcaaaagcacgaatgagctcttttactgtcaatggccggaacgcgttccttttctccggccgattaatcgtaatctaagcaaacaaaaaaaattatcatcaaactcaactaaaaataagataatgaaacattaatgttaaagtcaatgttgtaacctttgcgattccttcgtcaacggctttctcgtagataatgtcaacaaagtccttaccggaatcatcagaagcggttttccaaacgacagggtgagtcgaaacttcaccgtgtatcttatgataacggtcgttcatggatgtagtggataacccgatagagttcgggttcggatgatccgaatgacccgagaggagatggttggctacacaagccattctccttctcatagtgttgagctccttctctgaaactttctccattgattgatttatgagcagagaggtaataatgactattgactaatgattggtgatattgattatatatatatatatatatgttttgaaatttcaatgtaagaatacttgaaattattatattggatttttttaagaaaccattgataagattttggataaggcgcgacatgctctgctctgctgtgtttattatcaaaacggtgcgttttcgcaactatttaccattaattagatattatgttaaatttaaattatccaatcagattatatcgaaatttatttaagagagaagaagcgagctccgtcgacactctgcctctcctctccggtggttactttttttttttttttttaaataattaatatttcattgataaacatgagaattaagtatataggaaagaaaagatagaaattatccatccaaactagctcactattcactttggatgtgcacaaccattctcttaatactacatattttagtttaggctcaataatttaaaatttgaactttatttattttaataatcgagtatgtatagataaaaattaaaaaaaatacagtttcataaatatttaatatgccactgttgactggatttttagccaaccgacgcggagtcgtaataaatgagatttaaaccaaaattacaataataaatgcaattaataaacaccggaattcg

SEQ ID NO: 306541 - DNA, 1413 bp, Cannabis indica
taaatttttagaaaattctaaattgtttacagtattaaaaataaagtacacatattctgttatatgtgtggttgatttttcttgtatattatatctgatagtcaattatttgaaatttatttttgaaactataaattattaagaatttttaaaaaatttacaaataatcttaaataaatacaacatatattattataaaaaaaaaattagactaaaattttattctaaatatcaaaataaataaagaatatacccaaacaatctataaatttaccctaaataatatatgtatcacccttaacacaaattattacttgaccccttctatccttgtatgctggttccgccacaatgtaaactatactacataaataataataataataataataataataataataataataataataatttttcacatgaaaaaataaattcagatgtctaaataattttatatatgtatatatctaaataatagtaaaacaacataaatacctaacttgatttcgactggccatgatgctacttgacgtatgttactagcgttttttcgcaagcatatgatattctatatataatatttatagttatgtattcttgtacttctcaatatatttacatattatattattatatattataaatgagtgattagttaggtttttgatacatctttttataatttattatatattttttgaaagagtagtatagaacgtattaattcatgaacctatatataacattgcgcaggcattgatgaaaggtagctaaactatctttatcttaaggcaccatagagaatatattataattaagataattaatattttttttaatcatgaagataaataaagataattaatattggaccaacgttgttaatcaattaattattacttaatttctttgctgaaatgacacttatttaccacagaaaaccccaactaactgtacttgtccccatagaaaacatatatataatattaataataatatagttaattgataactagggtttaattagtgtttgttgaatatatatacatagttacacaagaaacgtttgagcagaagtgaataattcttatgggttactttactaattaaatctctttgtgtttgataacacgtcattgtaatatattctaatatgcactgcaaattaattgactgatttttgctttgtcatgatgatatcgatataatataataacgttagtgctgaaagatttgatcaagtattcaagtggcgaaaatggcttggccctttctttagaatttaaagaaaatgattgtcaactaataaaaaatgtcctatatacatatattgatcagattgaaataacaattcgatattaattaatatctttatatattaaagtgtttatctaacggcaattcttg

SEQ ID NO: 306542 - DNA, 881 bp, Cannabis indica
cattaatttcataaaaatattatttaaaatttaatttactttgaactttacatattttggcatttaacaatgatagtatctccttaatcaatgttccatatagatgaagctcctctagatacttcaacttacaaatattggtcggaataaacacaagatttttgcatttatccaagtaaagcctttgaagaacaacaaatttctctattgatgatggtatctccttaataaatattccatctagatgaagctcctctagattctccataggctctatgattttcggaaagctttccaatcgcaaaacaatatgtaaaagataatctaataagagacttcaagtgacaaatgttgggtgaattgaacacaagatattcgcagtagtccaagtacaacgtttgaagcataggtagtttctctattgaagatggtatcttttcaatccctgttccagttaaattaatctccattggttcccgaaattcaggaaagcttttcaattgcgagcaattttcaggaaacaatttcgtaagatcaactcacaaaagttggatgagattttttcgagcctcttgcaatgcctcatgtatagaatttcaagagatggcaaattctcaaaggatgatgaatcaatttgttgtattgatgttctactcagatctaatccttttatactttccggaagctttggaaacttgtcaatggatatgcatcgatacatatctacatattccaatgactttgagttacaaatactgctcagaagattctcaagaaatttacaattataatgagttacatatctgaataacatgacctgggaagccttccgggccttgttttatgagaagtattataataagtctattcgggcggcaaag

SEQ ID NO: 306543 - DNA, 1993 bp, Cannabis indica
ttataacataatgtttaacataaaaaaaaaaaattaggcttcttttgaacagaaagttcttttaggaattgaatagctcgtcggtttcaaagccaatgacagttctacgacaatcaataatctagaaaagccctaccttgaaggcccacctctaatgcatgttttgaattttcaattgtacagtgaagtgaaacctcctcttcatagcctaataaactttccatacccccatcatcctgattgttgggcctacctcttttttatctttaattacaaaacccttttgttttacaaaacaaacatgcccactccttccttttctctagaagtataaaatgaatttcattaacttcctaacttgacaccccccacaaattacttgttcctcaaattctatcttgactctttcccataatgagatcatgatcaccttgatttgtaccaattcttcattcataattttattaccattagaatctcatcaatttacgatatttgtatgatccatgtctggcaaataactgacctactctaactaaacacatattttcgtccgcaaatatttttttttctgattaaatgattctacctgtgaggttacactttaatccaggagccataaggattcacaatcttcttaattggattttcaaataaacttggtaaaaactttcgtcaggccccattaatccactcatataaatgaatgtcagaatattctgatatttcaaataagcctagaactcgtcacttctttcttgttgtatatatcttcattctccttcagaaaggtttatggatattaagtgtaacacaaatcctaaaaaatccctccaaatactaataaaattatttttattagtttcagcaaaaacaccaagttaattaccaatatttgttattaccctttcagacatgaatccttgttgtagttcaaaaatttgtaccaaaatatccaacatatcaataacaacaggtcgtgaattcttacctccttttaatcgtttgatcaaaaactatttccaattatagatccatggactatctacaatgactatcctaatatcaatttcatagcaaaactgaaataagtatcgatgatgttctaacatctttataaaagcctcctttagctagtttccataaagaagtcaattggtgtttcttagtgttgaagtcaatatcaccattcgtcaaaatctaccccactaaacacattctcatatccacaccctcagaccactgaaatgattgataagaaactacatcctctacttcatctttaaaatgaatattatcatattgtgattctaaatttgatacccctcgattattagaaactacattattaaaagaagaatcaaaggatacaacactaaaaaaacttatttaagaaaaaaactatatcaaaagacaagactttatatttagcattttattaagaaaaaattctaattattttttcattggtgtcatatatttaacaaatatttaattggatatttattaatacatctaaagaaatatatttaaataatttatgaacatatatagctagcaagtaaggattgtaatgaataaagtcatcgagtaagcactatacattaaataatagtaaaatgaaattattttcattaatttattttgcagaatgagcatatgattgatgaattttctcatcttcgagggcaggtacatgtattttttattctttgtgtatatatatatatatatataaatgctatgttaattttccttaattttaaaattttcattgtaaaacattgtacttctcatattcctcattgtcattgtaggtttttttttttttttttttgggaaacttcattgttattgattaagtttgaaaagaaatgtagataaagattgagtttattgtttgctttaaatcctatattctatttttttaattaactttttttaaaaaatttacggtttaggtttctaaaatagttgcagcgctagttgcaat

SEQ ID NO: 306544 - DNA, 1555 bp, Cannabis indica
tacagcgctatgctatcaacgaggctctggagctatttgaggaagccagaagtgttttggaacaagagtgtggaccatatcaccctgacacactcggggtatatagcaatcttgctggaacttatgatgcagttgggaggtatgcctactctttatctaaattcgtccattactgcatcatcatattcatacatgctagtttgatataatttagctgtacatgcacacaaagctacttgttaaccatattttacttggccatttaacttgaacataatgagggttgaaagaaacacaaagtcagaaatgaagattcaaatgcggaaatgaaaatgttcaaagtcattgattcatttttgtttcggtttgctgctttcttatttcttacttaggttggatgacgcaattgaaatcttggagcatgttgttagcatgagggaggagaaactgggaacagcaaatcctgatgtggacgatgagaaaagaaggttagcggagttactaaaagaagcaggccgagttcgaagcagaaaaggcagatctctagagaaccttcttgatacaaactcacatggggtaaaagataatggcgttcatgtgtgatatataagatcttcatgaacaaatgtttttgtattatattaacatattcatggaccaaagaagataaccaaaaagaaaaaacaagcaaagataacacgacccaaaagaatgaagaaacagtttatgctcatcattcatgttatggaagatggaaacaaaataacccaagatgaagctgggttttgtccgtacaattatttatactagatacaaaatcattttgttaggtcatcaagtgattgtactaaacttggttaccttttattttcccactatcattttgtattttttgactgttgaagaatcatagatttgttgatactgtttatcaatttgaagattgttttgtatttatatcaaaccatatttgttgaaatatcaatttgtttcattgcattggtttgacattattatatatatgacaactatgttatcatattttgaatgaatatttatgaaacttaaaagtagtggtggtgaccatgttacataccaataattgaataataagaattataaagattgtaggttttgttggtcagttgttgtcctagtctgtacaagattttctctgattttaattatttatattctcactctgtcaaccttctgacttctaagaaattaatggtggagagatttagaaaactatgttggagacatattaaaatcccaacaaatgacaaaacctccaacaaccatactcgtactcatctttcttcctatattctcggaaaaaactgattctgaatcttgtttgtcctttagattcatctaaagtagaacagtgcaccatgtttggtaaaggaattttcggaaagaaggggatttttcctagagaattttattaaggtaatgtttggtaatttgattaatgctatctgtgattaaaagggaaatttacacagtttactgtgttttcccattttctttcttttatactgttacactc

SEQ ID NO: 306545 - DNA, 2008 bp, Cannabis indica
cataactgacactaaaaaacttttggtctcaattataaatcgacacttaaaagtatacccataatacccataaaaaaaaaaaaaaataaaaaaaagtcccataaacttttttttttatcgttaaaaacctcttttaaatgtcgtttcataaacgagaccaaagacactcaaaatttggctattttcgtttcccgccatttaacccctgaaccctctcattttcatctttgcgcgcaaacctcgaagctacctcaaaccccagtgctctatctccctccgcctcctctcctggcgacccaacctcctctcactcaccccctcctcccttagtgtctctcatccctgaattggcccggacactatctcgtccccaaactggccttgcctgtgctcctctctccccaactgtgtctccgttgccaccgaaatcggcagctaaaggccaagctgccaatttgtttacttgaatcgtcttttacaggctagctcattttttattatgatgattatttttttaatggagttttttagtttcccagatctcgttttctatgggtgctattgatgattatgtagattaatttttctggttttgtttaatatgtttgttaaattttgtattaactttttttttttgctatttataaaatgataaaatgttcactattttgaatgttattatttcgttgccttgtagttgagcttcctccaatggctcaaggatggaagctctgctaatgacaattgaaaagttgatacttttcctaggtaaactttcaaatatccactattgtagtagctccttttattattatttttctaaatcagtactttgcaagagatgtgtcctaaatgctgtaggtttctgatttgatttttatttctaagatgatttttgttattgcgacatcttccaactaatcataagttttaattagcctaaaatttcatatattagggtatcgggagctatgataataaatcaagtctttattttctcttctctcattttctatggttcgttcttcacttcaaatcgaaggatttcaatttatttttttctctttcaaatttgcatcctaaacaaaataatacaggagagctcaaggagaggtttaatgggtttctgatttattgggtcgttagattattccctctttcaactctcaggtaaattctatatatgtttctctaagcccaaaatttcataaactaattattgttgttggtattatttattttttgaggagaagaggttttgtatatgagcggcctggttagaaaaggagcaaacatcttttagacataattaacagaataattgtaattgctgtaaacaatatgatttgatttcccatactgagataaaaggcttaatgtttacttagaatttctaagagagattctgtagtttcaaaattactatctggtcaaacctttcaaatgaccaaaaatataaagaaattaaaaagagtgacctaacaaagctagccttcatttcaatagacaaatgctttaaacaatctttgtgggctttggttaagaatgcttgggtgaggactaacactagggttattctatttcacagctttctagtcttgtgtttgtgtgtgttttgttcagtttcacaagctaattctatttcagaattatgctttagtattatatatgtctgctataacatccattaatgttatttatatgggttgactaatctttcattgaagaagttttcatgttgatatgtgatgctaagtattagttacgattgtttgcttcagttgtgctatgcatattatgctttgcatagagttttcattaatataatatttttattttctttttgttttttgtgtgaatgttagtgtgagtgtaagtgtgagtgagtgttagaagtaatagtcttagcaagctaggagagtggagtgtgagcaaactacaagttgtcttctagttggttattgttgaccgaggttttcggcaactaataaaatatgattatactatt

SEQ ID NO: 306546 - DNA, 4764 bp, Cannabis indica
gcttatcatttgtcatgttaggattgtgtaaaaacttcagaatatggattattattttgggctaggtaattctatttagtatatttttatctggccattttataattttaagtgcttttattttatttcctcatgccttttttctttaagggtcagtctttctggtttgcaatggaaaccaatcttacatatgaaccttattttgttaggttttacatcatgaacttggcccaataatctcattcaatttgaaaaggccagatggttcttggtatggataccgtgaagttgaaaaactagcatctttgtcaggaatccaattacgggtacgagtcagaaattctaacttgctttcttccatagttatcaattcttaaattcatatattagatacatatttatttgttttcccctcttgcctttgcatacaaaattgattccaagtattgctttatttagtctagtggaaaacgcctttgcgaacaacaatttataggcatggtactctgatattgcataactgatatggctgccattatgagtcaatatatgttacataattcccttgcagtacttattactattgaagtgcttttgttgtttgtcgttctctaagattttgaggtttgggtctctagatatatttcgcattgttttattaacgatgcaaattattacccttttgtttaatactatttcaatctcacgtttttaacagaagattctgtatgcaatcacctttgttattgttactctaaaagtaagcagtatgactctatttgaatgacagtggcggtgcgctaaccccactcttctatagacaggttgtttttgcaaccctggtgcatgtgcaaaatatcttggattatctcacacggatcttctctcaaatattgaggtaactcagagtcttcatcagtaactttcatcattgctgtattttgtgtatgtttctaatgcttatattagtatccgaatggcatacattgttgatagttgtattggttttttaggctggccatgtttgctgggatgattatgacatagttcatgggaagccaactggagcagtgagagtgtcctttggctatatgtcaacatacgaagatgccaaggtaaactactacacttcagtttcatatatttaaacttaagttgtgaattgaggtcaatatataaacatattagaaactgtgatttcatctagtaggacacttgctaattatgcttttgtaggatgcaatgaatacatatcaaaagaagttcatcttggccgttagtattctttccatctaatggtccttttgttctctttgtatttgcagaaatttgttgatttcattaaagattcctttgtagcattaccaaagcaaactgcaagattgtacaagaaaggttcattatatgctctacctcattatcttctattgatgagtgttggtaatataagttggaagtgtgcaagtgtagcacatagaggccatggagctgcttttttgttctattgttttatttttaacttagcagtatgaattatataatctaagtgaagtggtaaacatgaatgcttaaatgcttgctgtgttttgtgatatataattgtatttgacatctaattctcccatagatgatgaagccagactcccaattgctaaaattggcctcagatctattattatctacccaatcaaatcatgtgcaggatttagcgcagaaagttggcctctaagcaataatggtaggtagtccttctctactttcttttaaccatggtacatatcttgcctgccattgtgacttgaatcaaatgtgataaagtctgaaaatttgtacttttggcagtagtaagaataaaggattagaaaaatggaaaagaaagatgtacacacacttgagaattcagtcaaaaatgattttcttgctaagtgacagaggttgatcgttttatttgtattcaacttcttaaaatgtgagggaaacaaatacatacatacataaccgtttactccacttcctgtgtcaataaatttcgagaaacgcaagtggtatattctttatcgaggacatttctacacctactttgtcttttgttgaagcattatgcatcttacgaccgtgattgtgtgcaggtctacggtacgaccgtgaatggcttcttacaagccttactggtgaagttcttacacaaaagaaggtaaagtttacgttcttctgtgcacacacagttttggatctatgaatcgtattgtgtacttggaaacttatttaatatattgctagggtcactttattttgtttataagtcccatttacctcatggtgatatccgtgttttaattcattgaaattaatttctaggtcccagaaatgtgctttgtaagtacttttgtcgacctcaatcttggaatattgtatgtagagtccccacgctgtaaagtgaggctggctatcaaacttatttcagattcagataatggtgtgagaaatgaaattaatgtccacgggcagaggtaaggtacaatgtgttatataacaagtgatttttgcttaaagcatatgatccttatacatgattttcataagaaatgagttgcagagtttaaaacattcagatatctagtaattaagagtatcctgacaaactatgactgactctgatatgctaaagaactctgtctttatgtgattatctccatgaaacttgttgagctgaaccgtttggatttatgtaatatcatcgaaaattcattaacgattggtgtgctttaaattcatgctgtttgagaatgaattcccaattttctctttcacatgatgactggaaagagtgttgaatgcaatatatttcatgtttaaaatcagtcctcatctcaatttatattacaagtcccctttcatagctgaacttacattttttctcattagatgtgaagttcaaggttacgacaatgaagtcaatagttggttcagcactgcccttgaccgaccatgcactttatcccgctgttttagttccaattacaatttttgtatgaataagaacaaaaacattggcatgtgcatagctgagcaaagtatatcaaattttgcaaatgaagctcagttcttattaatatcagaagaaagcatatttgatctcaacaacagaataagtacaagtatgtatattactacactctttctctctcacatgatagtcaataaatacattttccaatgtgcattgatttgtctatatgacttgatgtatagggatatctggagttatctggtgatattattattagtagttgtttctttttctttctccccctgcttgctaactgaattttggttcaagatctactctcccgactcggaaatgaaccacattgcagggctctcaaaggaagtacttctgtggttctataaatttgaacttgttttctagccattggccactattcctaccatgcacacaccttttgatgcattctcatgataccgaaacatcaaaatttcagacatggtcctggtttatttgactactaaatctaaaacttttgcctcttgttaattgattacaggagatgtgcaaaagggtactgaaggagcttcattcaaagtcaatccaatgagatttcggcctaacctagtcatatctggaggggaaccatatgctgaagatgggtggagaaatctcagaatccggaacaaatatttcagtgtaagttaccagataaattgcttaaatgttatatttgcataacaactagtaccaactttcatatttgtgtatataagccaaacattttttagaaattaaagagctttttgttttctagtctttaggtggatgcaatcgttgtcaaatgatcaacattgttcatagagatggacaagtacaaaaatcaaatgaacctttggctactttagcatcatataggagggacaaggttagtagtcatgatatgatagacttaataataatttctagtgttgtaatttttgtttttgtttctcattagtatgtatataattacaatattattattgcagggaaagatcttgtttgggatacttttgagatatgagaatagtgatggagatcaagtacaagacaatgatatatgggttcaaattggtgatgaagtacatccaaattgcatttaggatttgacttttgagaatagtcaataagtaaatgaaggcggctcaactcaagtactaaaaaacaaattataggtctatttttagctctaataaaatcataacaaaaaatgttctttattgttgtatatctctacagaaacaaaacgagaaataaagtatatatttatatatttatatatagacaaatttaagtgttataatcatcataagataaaggtttttatagttttgttttattttttaagttgataatatataaagatgcaatggtaactgtgagcttgttacagaatatatttctttttaaagaacaaattctttcctgatgagagatgtgaaataaagtaaaatttggtgaaatttttatcttagagcatctctaatctgtaatagtacactattttttttttcaaatttaatgtgaaatttgcacacaatttcattccaaagtataaatcaaattgtgcactaaattttacttaattaatgtcgatgttatactattttacattgttaatgcgtgagccatgttattagcagggaaatttgattttctatgcttagaaaatcaaaaaatttgatttttaaaccaataattaaaaccctaaaaaa

SEQ ID NO: 306547 - DNA, 1029 bp, Cannabis indica
taatcttcttagattaagttgataaaaaattgcatcaacaacaataccacgtataaccttaaatttaaaaaatagaaagttgtcttccatctatcaaaattatttggaatttgtaaatgttccacatttagcctccacatgtccacctgtactgcctgaagtaagcctccgatatccacaatattctggaaacttggggtaaatattatctgtgtttctgataagtgacacatggattccaaataaaaggttaaggcccattagtgagcccatataacataaactgggtcgggcccaggatccattttgccatttcggagaacgataacataactcgcctaggtgaggttccatcaagcctagtcagcattcagaaggtctatcttcgtgtatctggaagaggacttcagcgtgtatctagaagcctagtataatttcccattttttgtctcgcacaagattagtaattatttttccaaaatatcggatagagaataatatcttgctaaaaaagaaactggataattacaaatcaggtaattaatatatcattaattacccatgaatataggacatggtattaacaactagcttcgtgataaggccacatcaacatacacaaagtgcctcataggctggcttcacaaataagcccaaagtcaatgtattatttgtaaactccctattagaggaaaaatggtaactagtatgacatttataacattataaatactcaatgttattgaatccttcatgcaaagggtttgagattcttagtttactttgtcaggcaaagcatggagcgcttatacttaatgtaattcttaggcttttctagccaaatacttaataatattgactcgtagaccttaacgccccaactatgtaaaaaactctgtgtgtctacttcatatatttcttgttgaattatattttctttagcctttatatttaataattagtttttcaaaaaaaactcaataaactattatttatttagtttcccatattttaaactttgtttatttt

SEQ ID NO: 306548 - DNA, 1825 bp, Cannabis indica
attaacataaataactgctaatttccaaattaactaagcgggctttacacatatggtattgaatctaataattatcaattcgaggtacttaaaaagtacttgagaaaagacgtgaccatcaaagaggtgtgttataggattaaaggcaaaagaaaaaaataatatagtcaaagtcagccagtcatgtgcgcatccttcaccttctaataaaatgtacaacactatgacatatatatttacgactatatgtgacacattagagagtagtctaaaacctaaacaacatgtcaatttatataacccacgataaactttatctaaatgtatggtcaatcacaaattcttggtagattgtcttttcaaaattatgtcgctcctccacagcaaaaacatcaaccttctccgcaacagcaacatcagccttctccgtattagcagcaccagtctagtccgcagcagagaaatcagttcgtatacatggaaccccttcatagtctccttcgctcggttcaaattttgctgatttcggtttgggagttctttgcaggcacaacaatttttttctactccaatactcatcaaccaagcacaataagaggaacttacacttttttactgtcagatcaaccatatgttccttctcagccacaaccaccggcacatcccaattaaccccaataatgcgaattcaaacttttttctctgagaccttaataatgattttatgaaataattaatttaagtatatatgttaataactcagacattacacaatatattttatttattattagttagtttaatatgagatattataatagtaatgaatattgtatttatttggtgttaaattataatatttagaatttgttaaattatatttaatttttatataatttataatatgaattttatttttttaaaaaaattagcgatggggccaccgctattaatggttattagcatcagattcaatagcgactaattaatagcaactaataaccattaatatcaactaattattagtggaagattattaatccactgctaataaccaatagcgatatgcaagggttattagcagcggggtactccgccgctaataactataaatattgtagtgtagggtggtctgtgatgtggtggggctgcatcaatggatgacccgtgggggagaagagtcatacgctttttattttatcattatttatgtttaatttattttgtttttttagttattttaataattgtgttgatacactactttactattgttattattgttatcgtagtagtgctttttttattcatgacattgggttgtcttgtttctttttaggacgatgagggtatattcattggctcaatgcacatttattttagtagttgtccatgttcatatatgggggattctcaaatttttattggccctatagtttatgatgtgattatttgttacgagtattatcgctatggttggtcgtttgattatttttatttattttagattgaataatggggttgttattatatccgaatttctactggaagatcattggttaataatcattgataggtgaattttgtcagatatgtatagtttggaagtctagtatacttcacacttctttgatgcttgaccgttggtagtttattggatttctagttaaagttgttgttaagattttattctatgttattcaaaacgacttagtaagttttattttcataattttgctctttgagttatattttcatgtaatggactttgccttattaattactatggatatttttattttctaaacaaaaaaaaaaaacaaaa

SEQ ID NO: 306549 - DNA, 1090 bp, Cannabis indica
tcttgccatcaacctcatatttcttcaaaagggcgagaaaatcctcatcacaaagaatgaagagatacggaggagatatatgatccccttcacgaatgccacaggtaggaagaactggacccattttacgaccaacatggacaaaagtataagatatcaattccatacagtgcataattagatttacccatcttccatcaaagcccatacgcaataacaccgtcctaagataacctcactccattctatcataagccttgctcatatcgagttttagagccataagactttttctcccttaagtccttctttttaagtaatgcataattttaaaagaaaccatgatattatcagaaataaaccggccttggagaaaagcactctaggtatcagatattacaaaaggcagaaaaacctttaaccttttcacaaggacttttgttatgacttttaagagcacattacaaagcgaaataggtcttaaatcactcatatagctaggatattttcttggggataagagccacatttgtagcattgagaccatcaggttggacccctgtcaagaagaaattttgaacctgtgtaaccacatcccctccaaccacgtcccaacacttctggtaaaaacctggtgtcatactatccggacctggagacctgtcaagatgcatttacttcatccgcttcaataggtctaagcaattcctcaatctatgcagccaagatacaaggagaaatgcagtcggtaacatgagataaatcagcttcagtagaagaaaacagatctaaaaaataattcatcattaacttagctagacccgtgtcccaatcatgccacatcccagtcgaatctttgagtatagaaattaaattgttacgacgatggaagagggcgatatattgaaaaatttactattattgtaacgtccccgcttcaagcctccattgggcccttacacccaccaaatgatggctcttatacacgagtacatcactctggttgtatcatagactgatgactaactctacaaaccaacacgagtgtttccagcgtgctttgtcttcactcgcacacttcctaagaaaa

SEQ ID NO: 306550 - DNA, 1828 bp, Cannabis indica
tacagaaggaatcaagggctagaaatctgaatggaaagagtcatattattctgttgcacccaatggtaggtttcgtaaactttatatgtgtttatttcatcgttttagaaagttcatatttagggtgttaatcaacgtacttgtgagtagatctaagatcctggtaaaataatttccaacagagcacaccttgaggcgatgccataagaaggagcgaatagtgctccaaaatagagcttaaacccttttttttaatgaagagcgcaaaaatatcttgagggaattcgaacttctgctctagtaggatcattgatcgacactgaagacctaggaaaatggatggtgcactagatgaggagagagcttgcaccttttgatgtagagcttctagaccaagtggcaggtagcatgagtgagctgacttcaaagaagtgggcaatttgtagcagcaatgatgccttcattttggctaaagcagccaagcagtaggcagcaggggtaaggcttgacgttctatctttatttttgttgtcatatactatcatcttatgttgacttgaaaggaagtggtggccttgatcatagagcttgatcaatttcaaaccaagaaccaaactttgcacggtgagaacagagctttacttgctaaacttgagaaagtcaagtcttaggccactgttaaagtgagtcaggtcaaatcaaaagtagaggcatgggtaaattaggttcaaactaagtgcggctgaagttgatgaggcagaccgattggccagtctaaaatattacaaattgtaccgagaatacaaggccaaggttgaccaagacaataaggtagagctggaccaacttaaatctcaagtgtcttccctttctaacgatctttaacaaacgaaaaaggagaaatacaaactggatgctcaaatataaatccacggtattgccctgagttccaagctccaagagatcaacactataaacaatgagacctagaagaaagatttggtaatctaaggtttccagggtaacattgaggatttgaagaataaaatcaaggatttaatgaaagaagttgagttgtggaaaggcaagtacattgctcaaatatatgtccttcgaagtgttcacacacttagtaatagttatgtcaacaccataaagtagttgcagagagaagttgcacatcagccagctaatggcaggaaagcctttattgccctggctgctatgcaaaggaccaggaaaattgctggacaatctgtcaaagatgttgctgcgcacattgccaaagtagaggcttaggctgagaggttccatcttcgatcattggagatgtcctactcaatgatccttcgaaccttatcgaaaaatgatcccaccatactcaagtatctttgaccaaataagatattatttacctggagggtgaatgccatcgacgaagtcacttatctcatgaaatatgaccttcaagatgatggtgttgaatctactgaggaatcaactggaaacctataacttgagcattcaatcaaagttgtggtttctttatggaatgcctctcagaaccttcaagacctcccccaggaaaaacttgaagacccttcaattctagcccaagatgcgactcaagatgcacctccaatttagccccaagaccaaatctaggatacttcttcagttctggatcaagacataacccaggatccgaccaagtcataaatttatctcttagttttcttttattactataaaaaattttgcaaggacaatttaatcatgccttaaccgcgtggccttatcaaataacttagaaaacaatttttttttt

SEQ ID NO: 306551 - DNA, 1741 bp, Cannabis indica
atctgtttaaaccgatactaaaggaaaaaatatatatgtacattttaagtgtcagttttaaaatgacacaaaagctcatttgtcttagtttataactctgacacttaaattttgactttttgtgactgtagaataggtgttgattctatgaaccgacactaaaagtatgagtgacagttttaaactgacaccaaaaatacatattgtagtatatttctttttaaatctcataatgttaactaaaaattaaaaaaaaaataataatacggaagaaaatgaatgaaaccatgcaataaaatgctattgaaattctttggttttctcttttgaatttttatttattttcattcacatcgttggtggtgtttttattctcacaaaaaatacatacaatatatatgtgtttttttagtttgcatcttattatcgttctttgaaggaaaaagcaaaagttgacacaaaattttaattgtctctcgtggtaggcatgtggttttgacttcatcttcttagtcaatggtcggacacgtggtgattattaattggccgagaccttggacggcgaaaaaggattaaacatgaacgagtatattcattgttgaattcaatatagtcccaaattataaagcaaacaacaatatctcaatctcagatgatttttctcacgcggttagtttccgacaaaaataatataggaacaccaatctctcttaatatatatatatatacacacactgacaaagatcagtattcagtatatatagttaaagaagatttatcaaaactcaaaaaaaatcagtatcaataatggagtctcttaataagctgatcacccaagctctttggttcgccatattattattattaggtacttttggagcttttctcttgttgttcttgagagtaatatattgttggtggatatctccaattcgggtttaccgtaatcttagaaaaaacgggttcggaggtccgactccgagtttcccactaggcaatacaagtgagatgaggagtgttggtagtagtacaagccataataataataataataataataataataatgtgagccatgacttacactctattgtattccctcactttgcacggtggcgtaagatctatggtaagtaatgataataagaatataactaataatgtgtgattaaatgaatatgggatgttaattatttgctgatgaattttccgttatatgcagggaaagtattcgtgtactggcttgggacagagccttttgtgtacgtaggagatggtgaatttttaagtagaatatcaagtggagtagctggaaagagttgggaaaagcccaatgtatttagaaaagatagagaacccatgtttgggattaatagtttggctatggttgaaggtgaacattgggttcgtcatcgacgtgctattactcctgctttttccaaaacaaatttgaaggtacttacgctttaatcatgcacgtgcatgcttcttttatttttatttttattattatatgcaagacaactttattatatatatatatattattagtatatatatacacacaaatgcatttgggtccccattttggacgtaattattaaatccacctacccaccttagggtggcttctgtggtgaggctctaattatttaccgattactatcatggataagttgaaaaatgtatattttctttttttataacgattaattaaaaatattcttatattatattttat

SEQ ID NO: 306552 - DNA, 1344 bp, Cannabis indica
cgtggacattccaacctggcacttaacagctaaaaatggacggaaagggctaagtgctaacagaacttgagtttagggagttttaccgcaaaaattttagaattgggggttagttacaaaaacctccctactttaaagagttttgccgcaaataacccttcttataatgttatatgttataattaagtttttcatatatgatcatatatacctggtctaagacaacatctataatggtctgtcgcccattataggtggaaataggatttaatacactacctaaagccaaactcctgcttacttgtataaaaccagggcattcaagattatagcaacctgtgcttctatagccatcactctgatcgtaaaaatcgaaagtattatataatataaatgcaataggtatacagagagaataggagagaaaagagagagaaatctaaaacttactgtccaataaatgaagaattgtgtttttatgtcatttggacgaacctgtgaatttcaatgtcttaaaagttaatttaatatttggctgcaggggccataatatactttcacattaaagaaaagaaggtgaaattaaaaagtatagttattagtatggatcgaagaacatacaatccaaccagcttctacagtattaagttggtcaaatacttttgtagatgagacaacccaaattttgagcaacactgattgttccgtgtgatactggagtccatacgttgatttttgcttttgcaccatagtatggaccaccagacacaattgcttcagcatactataagaagacataaatgcacgaaaaccacacccaatgaaaaaaaaaaaaattacaatttgatcaacatacatatatataaatatgttgtaaaatatatacttaatttttaaacacaatagacataattaatttaataattgtacctcatgaccatcacttgcaaaagcgaggctctcattattagtctgtgtgtatataacgagatttattaaaatgtggttttggaccatattttggtgtcctaagtatgggaactgttccctttggacattctcccttcttacgccatccttgtaactcttttagtgcatcatcgttttcactttttacttgatttatttgaattgaactgggctgttatgtaaaagtagacacacatatatagttatgtatgtatgcacaatcatgtcacatgagtttttagattttaacaaaaactcatgaaaatacatgataatattttatatattgacaaaaatacatgttaatggtatgatatataagtgagaaaagtgaaaacctgtatggtgtggttcttgagaagcggatgatcaaat

SEQ ID NO: 306553 - DNA, 3257 bp, Cannabis indica
taaaaatcatgattaattaacactttacttaatttccctttgattgaaaataaacattctttgtgtaaatcgggattctatatttcaaatgtttacaaccgtgttacaaaatattaaatacaaaagtttttgcctagtgactatttaaaatacagcctgttgtcctaaagatcgtatgctccaagtttaaccaccctgatatgtacaatctttatctgctcgcacttactattgttcaaccttaactttgtccttacctacacaagtaaacagtaactgtgagtcaacagactcaataagaaaagcataatcatatcataaatataaaccagattataacaaggtacacatacacctaatcataatcttatctcgtatcctaaatgtaatgagtctaaaatgttcgtacgatagtgttattgaccataatatcagcctatactcagtactctagttgtactgatgtgatagtatcgatatctaatataagtctatgtatactgataccgctatatcaatgtaatgtaacaagcattcataaacatgaacactaaaaatgtaatcacatatgtatatcattatactaatcttaccttgatcccaaattcaagtatattgatcaacctgaatggaattgctgcttgacgatttacaggcccctaagtcacaacatacttaaaactgatgagtgatacggtaaatcaatttttggggactttaatcaaaattaaaagttttcctattgctacaacatgaaaatctaggttgcccaaaatttccacaatcggtaaactggatcccaaccggaaaaccagtttctatgggttttgcctggggggaactggtagaccggttctatagggtaaaactgaaccggtcgacttatttagtgcaggaaccacaagaaacctcacacacaacacaattcaactccaaatcgtttctaactctccagaccacctattcaagtcataaagaacatatttcaaggagtaaaaatagataatatcctctgaaacaggattcaccattaaagatcaaaacttgagctctaaatctcaaactttgtccaaagttaaccacaagcaacaattcacacataaaataactcaagtaaccctagatcaacaccagaaacaaatttttaacacttctcaaacatagtgaaaaactaaagttgcatgaaagcctaacttaattcaagaaaaattctaagggaaaaggaagcttaccatattcaaagactatctcaaccttcaattcagccaacaacttcccaatttagtcagaattgaacgagatatctcttgttttggtgagggtttcctaggacctaactaagagagagaaaggaaagagtatgttttcaaattttctaatttttaaaataaataaggataatcttaaaaataattatctaaaaatataaaaagaaatcagattaaaaataactaaagagtaatcaattaactcactaaaaataaagtccaacttaagacaaaagactattttgtccttgtttcatcaagaagtaacattgccacctatgggtattttggtcaaatttttaaccacaaatacttttgacattctcaatgtctatctaaattactgcactatttctaaaatactaaaccataagaaaaagtgactctaccagctaaacgtcgcattccactattaccggacataaaatatgaaaaaccttgaatttcacatataacataattagcacacctagaatttaaatatatctctataattatgtaaataataattaaaagtctaattttgaattaaacccttattatctactaattctcatatttaagcagcagtcattacattaagattttgaattattttaaaatattaactatcctcatattattatttataaactgtttgcacataaaagtttcaatgtattcaaacatgggtctttttgttgtgacaaaaccgcacagaaaactaaagaaagtagaatatgtcgtgaggtaactaattattttcattttctttttttcttaatagattttggtatttgaagaggaataatatgacatttagctttcatcttctcatacacagactagtatttataatttttttagaaagaatggttgcccaacatcgtttaccacaaatggcatggaatcatttaaaaggtatgtatatacaaaaaagaataatctataaaattaatgttgtgagaaactaatagatgtactgtaattaataataaatgttttgaaatcagtcacacacaagatcagctgaggaatgtcttattctattttatttgtcagtgttggtaaaacaactttaattatctaacattaaattttactattaattgtatgcttcttgtgttaagtaagcactattatttcttaaattttgttttctgattggtacttaatgtgttgttaagcaagacatgttgtatgagttacaactttaaggagtgttcaagtttggattgagtttcgcattcatgaattgtttgctgaatttgaaagaagaggagggtaatgaagttaaaggtgttagaaaataagttaatttttttcaaaagaagctttgttgtctagtatcacttgaatttttttcagttggatcagaattaatgttgtattattttgccaatagcctgatcattggatatttgggtaattatctttatttgttgaggtagctatgtctgtttcttctgttttctctagttttagctaaagtagattatgaacaatcaattttttttagccaaaaaatactaataaaagacattgccgatgtatttattaaattgggtttatatattatacctaaaaaagtaattgatatgtgtatatcttactataaagcttcttttgggtagtgataatgagtttctagtaaaagaatattaatcacaacaaaaaattgtgaataaataagaaccagtgataaacttttgttgtgacttaaaaagaattagtgataataaaaattgtgactaaaattaagtaagttgtggttaaagaagtactagtgacaacaaaatttgtcactaaataattattagtgacaataaaaattgtcactaaagataaatgaattgtaactaaagagtggttgtgattaaatgtaataacatcttaacaaccattagtcacaaaaactagttgtgaccaaaagtgactttaagtgataatgatatttttattgtgactaaaatcactacaagaaaatgcatttttaccggcgcaattcgt

SEQ ID NO: 306554 - DNA, 1474 bp, Cannabis indica
gttgtaagaatcatcttctgtgataaactttaatgagtgaatcaaagaaccaataacatgaatatgagttcatgattactcaagatttaggccgatctactattgatcatctttatgatatgaattaggtctttatagtaaataataagtttgataaagacaactttattcatatcagtcattatcatatataatctctattatatacaacagcttcacttaaatatcatgctacatcagtaatccgaatcgagattatttgtatcgaataacgggtatcaatgaattcaactgacaactattgattaaagattcttaaactttaatatgttggtgactattttattcatggctaagtgatcttaattctccatacaactactagtccatttttcaatatttatatataaatttttcaatattaatattaataatttaacattcatgcatatatcataatattcaactgttattaataatgagaaatgtctttacaattgacaatcgaataatcagatatatcaatctgatagaaccacactagcttcacatccactcatctagcaaagagaagtcacgaggagaaaggcatgtgcttcagcttcaagcagagacaaggtctaaacctttgccgacaaatcttccacaatttgatcatcttgattcaaggctaggacaacagcaaaagccacgaaacctctcacagcagcatctgcaagcacattcataccatttccacgagaatgagtcaccaattgtttgggagaagagggatcattcgaaataatagacttgattcgacgaaactcttcaatatcactcaaagtcctacagataataattttaggtgggccaatactcccctcatggaaggtagaatttctcaccttccataagtccatgcataaaccaacagccacctgagtaatcttcttcctctcccccacaacaatcgcaccagaaaaggggtttaaaatccaagaaaccatctcaagagtagactcaaaccgcaagggctcacttcgaatgcctcactgagttgagaaccaacattttctagccaaaggacacttgaagaatacatgagatagagactcatcaccatagtcacataaaacacaacgcatattattaaagccttaccatattgaggattttaatccaacataataataacatggcgattaaatttagaaggaacaagctatgtcagatgagattattactccttctaatgtggttcactattgctagaaaagaaaatgacaatgatgatgcttgagtaaattatcaatggttcttctatcttgaatcaccattaataatttactcaaacattttaacaagaagtagtactatactgttctcctagcttcacttatccatgtatgtcatgtgtgttgggttttgtgccctaaataaaaccctttacaatctgattagttatcaatataagaaatttgaagtgatttat

SEQ ID NO: 306555 - DNA, 1306 bp, Cannabis indica
tctatgcatttttacctgatgctattttacctgaaatacgtggtttcaggctgttaatttgaagatgagtcaacctcttcggcttaatccccaggtaattattgtgattgttggacttttctgtttatcccattgaccagaaacgacacacatattaatattgacgtgtgtaatgtgtaaaagaaatctatttcatgccatgagtctttattgagatatttcacacttctcactttgcaaaatattatttgcagtgcctctcaaagaaccaaaaggatgcattagctgagataattgatgtcttaagggcagtatgtcatgcacatagattgccccttgctttaacttggattccttgtaatagcgaaggaacttctaatgaagtggcaggggtatgtgtcggagatggcaaaacaagttcaactgagaaatgtattttgtgtgttgagaaagcagcatgttatgttaacgacagattgatgcaaggttttgcaagtgcatgtgtagaacaccatcttgaagtaggacaaggtttagctggaaaagcacttcaatcaaatcttccctttttctttccagatgtgaagacatatgatataagtgactacccgttagttcaccatgctcgaaagtttggtttaaatgcagctgttgcaattaggcttagaagcacttatactggtgattgtgactacatattggagttctttcttccagttaatatgaagggagcatcagaacaacaacttttgttaaacaacctctctggtactatgcaaagaatctgcaagagtttgagaacagtttcagatgtagaaattggaattgcctctcatgatacatttaaggaggactcagtcccaaactttatacctttgccaggagagagttctaatatggtacaattagatggtgacttgaattcaactaatgaagttcccttgaagctggctgagagaagaaatgaggcacacaaagtagataatgtccatgaacaggtagtatttcaaactgtctctcttgtttgtttgcatgcttcattttttcccctctagaaacaaatcagttatatacttggtattttttgcgagggggatatttctggcaaaactactccttatgcattgaggaagtgaaaatggaaattgatttttttttttcaagaaaaaagtattttttgattcactataatacatcataaggttaattttatttgtaaattgaattgaatgatatatttttgctatcaacagtaattttatggatatgtttgaaagttggatttttattaaaaaaaaaaaaacgt

SEQ ID NO: 306556 - DNA, 929 bp, Cannabis indica
gatacgtatacttgcgtgtaaaaaatcaacaatactcttgcaacatatttcgatactgattgggccagttgcattgatgatagaagatcaacaggaggatatgcagtatttcttggctcaaatttaatatcttggtctgcaaagaaacaataagtggtagctcgatcttcaactgaattcgagtttagaactttggcaaatgctgcaacagaactcaagtagattatctcactgtccactgaacttcaacttcagcttgctgatgtttctgtgatttgggtggacaatcaaggagtagctgcttttgctactaaccctgactttcatgccaggtgtaatagatcaacatttgtgagggatcagatcttaaataatgaaatttcagtgaaaagtaattgatatactcactaaatcttttcgaaaagacaagttttattatctcaatgccaaactcaaagttgtaaacatatcttttcgtttgagaaggaatgataatcaataccaaatagttagttaatagttagttggttaatggttaaatttttttatttttaatcttgtaattttctgttagtaacataatactctatttatattattttggtctataaatatttgtttccctctcattttgatgctatgatttcttagcatcaaaaagaggctttctttttttattctctttgtgttaaacttttctgatagaaagaaagcaaaaaattaaactaaaaaaaaaaatctttcaacatttttagtgtaaataataataataatagttttatcaagatggtatttctttcattcttcttggtttcttcagactgttagaatgtaaaagtgtatgcttaaggtagtagaatatgtgagtgtatggtaaggtacatgaggttccatctcaaaaccaattggcaatgagaggagtagcctat

SEQ ID NO: 306557 - DNA, 1697 bp, Cannabis indica
taattaatacaccaaaaaatatatcattaataaaaaatgtaagatgctcaaattttatttattatgtactagcactgcatatgatgtcttgtaaatagttcgtaatactaattattaatttaaattatgttgatctaatacttaattatattattgtaatacggttactacttacttcttcttttttttttgttgatttctaattactactaaatactaccatcttttaacctttagaaaaaatctgcatacgtgttggggcttatctgctttatttttaaagttaatttgctaatatgaataaacatattgcgcacatatatgtacatacgaatcgacatatcatttgtactttttttttaaatggatatatcatatgtactatttttttattttttgaaatgggtgtatcatatgtactttagattatttagatacattaatgacaaatgtaaaattattaatatttggtggtattgaattttaaataccttctttggaataaggtgctggaatctgtaaaataaactactccagtttgggtgtcaatatccaaagcatttgcaaatccaaagggtgagccatcagcagaagtggcaactggctgggccaaacctccactgggcccaaccaaagcccaaagtaagcatctgcgatgtacagattacaagtgttcttgtcaaacttcaggcccaatggccttccacaggttggctcgttctcttggttcgttgacccatcacagatactcctcggcctaatcaaacaaagtagatttaaaactgtcataaattcgttgatataatcaagtagtatacattgcttcaagaaagaaatctatacaatacatctgactagaatatggtatataatatagtatatatataatatatgaacttactactttaatgaaaagaaaaggtaatatattatatatattagtatattaccgattaggtgaggtgaaggcaaactctttccaacccatgtttggtccatgccattttaggattgtaccgtctgaaaggctgacgtagggtccatttccatggcaatcgaaagcaatgctttctggaccagaagcccttgaaacctctatctgctcataattttttagggtacacaaatgaagcagctacagctgatgataaactcaaaatataaccaaaactaaacaaaccatcataataaaaactggtgcctttagtatcatcattctcatcatatatattctctcttgtggtttctggatgctgctgcaatatataatatatgtatgtattatgtagatatacatatatatatattatgtatgtagatataaaaattcatgtatatatataatactattccaactacctgtgttaatgctcagtactcttaattatgtttgtaacacatatttcaataggggaaattagtactttgtttttcttttaattgaaaccttagaagttataaatgatgtgtcagttttttttctaagtcaagttgttaagttggttctttttgagggacaatttgttgtaaattatatacgagggtattttagtcacaaagatttaatgataggggacttttattttcaccccaccaaattataaatacactccattattaaaaaaaaatataaatttaaataatttttaaaaattactcttgatatttttttttaaatttttttctcacattatttt

SEQ ID NO: 306558 - DNA, 2746 bp, Cannabis indica
ttttttaaacatatttttttctttctcaaatcaatattttagactccgactttattttggaccttggacccgaactctggcccaaaccctacatttgaactcgaaaccacggcctcagtcccaaatgcggacctggacctaatcgacttaatttaaataaagaaataaaaatgaaagttatagaacacacttttatattcattttttaaacttataaaataaaaaatagttataaaacacatttttatttttaaaaataaaattttaaaaatacaaattttacttttatttttgtaattaataaattaaaaaataaaagtgttatgaaacactagaatagtaaattaagagaattgctaaaaggcattattggtgcctagtacattccttagtataataccgctattggtgtaattaagtattgagtcgtatataatttaagaaaataacttttagacaatatcattaactaattgtggggcaacactaataaaaagtgttaaacactactgatactcaataacaatgctttaaattaaatattaacttcatagaagagtttaagagaagcccctatattgtgtaccatagtacaaattaatgatgaaatattctgttgtagccagccatacatgagaaaattattcacaaaatgttaaatattaatattgttattggtttaatttattatgagattttatatagtttaatgtaataatttttagagagtattattaagcaattgcaaaagtatatatgtaaatgtgctaatcacagtgatatcatagtaatgctctgattaactgtatgattaccatatgttgcatatatgagatatatatatagagagagagagagtgagagtgagagagagaacatatattcggtacatgcagcatttacggcctatctataatagttgcttatttttttctcttatttcatcatgtgaaaactcatcttgctgtatataaaatatatatatatatatatatatatttatagtggggtcttaacaattatcaacatatagctttaatatataccctcatatatattccaaactgataatcaaaaagctttagtccgcgtttggatagccatgagagatcttagaattgggtataataaggttattgtaccattttgcttatttgtctaactgattaattaaaactaattgagagaactcaattacactctctaaattcttatgttttttgattgtgtaattattcagaactttctattttaaatactactaattttttaagttatacattattttgccaaataaaatattaaaaattcataaatagttactactatatatttagataccgtttataatttaaattatagagtataattactatgttgtgtaattattgtgctagcaattacatattttttttctaaacgtacgtacttcagagagagagagatagagagaatatgtatatttgggcatagctttcaagaccagagatataaatagttccattatagcaaaatgaatgaaaaaaaaaaaacacatggttcctgcaatgaatcagaccctcattagtctacttgagaagccattaattaaataaaagaagaatatataaatgggaaataaaaatagggatcagcactttttccagatgaatcctaacaatagagcaaaaaggccatcacattaattattatttcaaaaagcaacattaaatctaccgcccacgatccttaccaacctcatctgtactacattatatgtgtacaaatgaattatataataataaattattatgtatgatgactctaactagagagcaaaagaaaaaaggtcgtaagaaccacactcccaatcatactactcttctcaaggctttggtatcatctgaaagtgatgagaagttctttttgctttcctatgaggcatataattatatatatatatatatatatatctacgaggtatcattattcacaaggcttattagttgattgcaattgtgttttattcttttcccacagtaaaatttacatgtgaccaacaaaattactctcaacatcgatctatcactggttggtataccaaatctcacttcacaaaatgccaaagttgtttgctgtagtagtatacatgataaattagaagggatccatttaaatcaataattaattaattttttaatacaaaatttactattcttaataacatactaattaattttacaatcaaggcttctatagcctagtgaatagatatatctctttacaaatggagatcgtctcgacattaataagttcgacatgctatcacattatggataaggaaagacattattttattaatgagaaacccaaattagttagattcatcaaacgtcatagtctatataatgggctcatgccctcacaagaaaaaaataatgggctcatactatcatcaattttcgaaaatttacactagtggatctctcatttttattatatttttactgttatgtatcaatttttacttttttactatcttaatatatattatctattaaatttgttataagaaaaagaggaattacctcgtatactattttttaaaatttttttctttcaaatttatggtttgggtttctaaaatggttgcagcgctagttgcaataggggtttctatacgattttttgttgcaatttaggttgcagcattagttgcaataagaatttctatatagaattctttaaaaatgcaaaaaaaaaaaaa

SEQ ID NO: 306559 - DNA, 1237 bp, Cannabis indica
aatattttcactttttcaattttaaaaacagaaaactgattaaaagagtgttaccaaacgacacctaaattaatgtcttaatgtttaagccattttcatttgtatgtatattaatttgtttggataaataaatattgtggtcgtacgtacttggatttttaaattatttcttttagataattgcttctttggctctgaattttgtgtctcaataatggtttcttattataaataagacaatatttatatatttggtatgattacatccactgaactcaaagtaatttttcacgagctatatatgtaaaaatttgggtaatgatggtgttggttgaatttagatcataaaaatacaatcattttgttggatccaatggtacattcatataatcatcatgatcattcccactatatgagaattggtatggtactccaactttcctatattgtattttatgtcaccaaagaataataaaataaaataaacaaactttagtgaacctctccaattatttcttatactcagccacacatattttatgcagtgccagtgccacaatcatattttgctttacaaaatgatattttataagttgtacatgtttatgtatatattatgaatttttcaagtacattaatatttttcttttatatatataaaaatacacacgtgtataataattaatacactatatatatataaactgttgatttttgattttcaattattattgataataatttgtttgctttgacgctgtgctgcatacaggcaggctggcagggtatactaatttattattattcatagctctattatagcctaacaaacatttagtctaatcatactatatacattgttttcagaatatggtgaaatatatattttatatattatgtataccacatgcatggtctcagttcttggtctaaaatgttgtcatatatatagaaaatgagatatatgaatttatgagatatgttaataaatgtaaaaattatatgtatactattattttttttaagaagatataatcgtgcatactcaaatatgtaggtacgcaggaaatcaaaatataaaaataaggaattgattctgtatcagacgagtattacaatctttttgtcaaccacatgctgtaatttttttttttatggtagtgtttgttatagttataacatcattcttgtaaatttttaaaaatttacagtgcctaagtttgaaattttttgaaca

SEQ ID NO: 306560 - DNA, 1649 bp, Cannabis indica
aatactaaaacagataaagaagtattcatataatcttttaaaaaaaatgtactatatatagattttttatataataataaccaaaatttattaaaaggtaccaatatcataatattattattgatataatcacgtaatttaaaaaaccatactaagaatattaaacaaaaccggtagctaataattagaagaatgctctacaataaaatatatagatataaaacaacaaaatactaatatacatacatatggcattatttaaagtaatatgcaatgattgtagtttttgttggcctaagatgtgacaacttagccgaatttgaagggaaaataaaccttccccataggcccataccaccatcacatgctctccactttgaactttgtcccccttttttcttattctcattactttttccctttttgtgtgtatatataaagagagtgtttgagccataagatagaaaaaccaagaaaaacccttctctcaaaattgctaaaactaaaccaaatatggctatcaacaagcttagtgttagatccataagcctcccaacaaggcctcatccaagcacaacaagaatagaacaacaactacacaaaatccaagctttggaatttgaggttgccacctcatcatcatcatcatttttcaaaggcttattatttgagctagaagagttatatgaatgtgttgatgatcttctccaaatggggtcaacccaacaagtcctttctcaaaatcaacatgaaaaaagcttagaagatttgttggaagcctcactaaggctcttggacttatgtggtattacaagagatgttttgcttcaaactaaacaacatgttggagctcttcaatccactcttaggagaagaaaaggggaccccattatggagattaacatcacaacctacaattgttttagaaagaagatgaaaaaagaggtcaaaaagttgacttttgcaatgaagcaagtgagtaagaaatttgagtcatcacaaacacaaatattgagtgaagaaaatgatcacttgtgtgctgtgatgagagcacttagacaagtgtgtgctatgaatagctctattttccaatctcttttcatgtacttaattatgactcctaataaggtctcaaaatggtctttggtgtcaaaattggtcaacaagagtagtgcagttgcttgtgaagaaaagttattagagtgtgggaatgaattggagagtgttgatattgctttgtcatctttgttatgttgtaattatgatgatttgaagctaaaaatagctcaaaagagaagtgaggatttggagatgagcattgatgggcttgaaaatggtttggaaagtttgtttaggaagttgattagaacaagaacctctcttttgaacattatctctcaatagagaaaaagttttaaaagagaagagttctatatatagtttgcaaagcattttaccaaaattttttaaggatttgctttggaattttctagttttttcatatgagaaatcaatatcaaactatgtaaattattgttggtactgtattgctattgtacaatgtaaagaaaaagactactcttgcatatattttaatacaagttttttggctatcgttttctttctcaatggaaatctctctctctctc

SEQ ID NO: 306561 - DNA, 2423 bp, Cannabis indica
cgtgtcaccatcatgtgatgtcagagtgaaaaaattgggataatagtacgagatcttgtgggttgttctagccttggaggaatggcgggatcaataagattagtaggattggcaggatttgcaagattggtggagttggtaggattgatggtattagctagattagtacgaccttctgtggtgggaggaacatgagcatcaggatctaccatcataagatcctaaggaggatttgaggtagcagttcttctgcttagaaccatggtgattgattagaacaagatgaagaaacttacaaaaaccttattaagtgctgacttgaaatttaaccaactgacaacaaaccttattaattgctgattatcagcacgtgtaaataagaataataaatagtaaaaataacacacaaatttatagaggttcatcccccttgatgaatgggtaatgacctacttccattttagttatattcactctttagataataccatgcagattacaggcctagacctcgtaacttctacctatggcactcttaagtagtacaattgtgagaataatgtgttccaaataaagaactcgtaggattttatgtagaacttacgaagaaaatagacttagagtctaggaagccttaggcgcgtgtggagctttagagagagagctttgggtgtgtggcttagatttagtccctttttcatgtgatataatgtcctttatatagtataggtcttacaaaagattctaattcaaataggtaaagatatccctttttgatgaggaaaattacatcttttttatcctatatttgaattacaaaataggatcattaaatcccttacagataagactaatatcttgagggaatatctctatcttcattggttgttggaactatcccgtaattttaggtcagcttgttaggagctttttgaacattttggccggcaagccttgctgaaggctatctagcctggctggccagccttgctgatggttgtccagcctggccggctagccttgctgaaggttatccagcctgaccatctagccttcctaaaggctatctagcttggccttggagccttgccaaaggctatctagcttggcctgccagccttaccaaaggctgtccagcttggttagcctgccttttcgaaggctgtctagctttgccaaccaaggctttactagcaggtatatgcatctgtctttgcttgtgtccgctgtgcaaccatggaatatggcaggttgaaagcttcacacactaacctagtagcttgaaggctgcatgctttaacttggtaggttgaaggctaaacacactaacctgataagttggtaggttgtaggcattaagcatggaggtttgcaggccggaagcactaagctataggttggcagggtgtaggcactaacctagctagtaggcaagtggcatgcacaaacttgggaggttagatacaagctattctctacgtgtcttataacaaacgaaaaagcgacatatttgagaactgatgaacaaccgtactagagtaaagaatgtaactaagtgatgtcattatatcccttatgctcaaaaaatacatgtttgggaaatttctttcacttagccattgtctaggttaatgccaggatgttaacttgtgcactaaatatcaacgtgggcactaagagttgagcaacattcagtaaaacagccataactccatcaatatttatttgattgctgcgattaaccttaagtatcaaagctatttcaaatgtctattaagtcatgtctcatacccatattgcaattctgaaatttgtgccgatgatagtaacgattttttccacaaatctccgaaaaacgatttgacgaatgaaattcaaactccaaaaattaacattttcatctagagtcaattttcagtgttagatcatcatcaatggccaagaccaacatatagtgatttttcatattttttatgttattctatgaatatttctgttacccgtgtttttgtgcaagtgacatgtggcatgtaacacaagagaataaattcataatcccactaattaaaatcccccacagaaggcctagtcatggagaagcctcacagatacaacaagaagtcaagattaagagataatcagaaatccaccctgccttatcttagcttcctagactgttgcgatattttgcacacgcaagtgtacgtatcgttataagtagtaaactcaccaggagtgaggtcgatcccacaaggagtgtagttaagtacgttaaaattaaacgtttacttctatttggttaaataaaaataaagaaagaattaaaaataagaaactagtaagaaacaattattccagagaattaaaagttaataaaaactagggcttggatttcaattgtttatggtctaataggattattt

SEQ ID NO: 306562 - DNA, 534 bp, Cannabis indica
gaactgtggggctgataaaccagctgactcaacaaagactccttctcctacaccagatgaaaatgatcaggttcgttgtgtcgaacatcttctatgtatatcctcatctatattgaaaccgctatggctctttgttaatttcacgaacagcacaattttttatattctattcaagctactcacactcaggttaagggatcaactaaggttacacatttttgttctttttagatctctgtatatctttttcctgatggcttttgaattaatttattttcttttcctatctgtcccttgcatcctttaatttaaaaattgtctactgttccagtgagttctagaacatgtttgagggttgagaaggtccagagtcgtccagcattgctcattgtgggtgtctgaaagtcagtcttgtcgtcctcatgttgcagcggttgtcaagttactctaccttctcatgatatgtgtcaagttgttgtattaactgcaatggtatttgtgatctttgtggatcatacaatgcatcttgtgtca

SEQ ID NO: 306563 - DNA, 1042 bp, Cannabis indica
tttgagcatctccattttttcccatctgttcttctgcatcttccaggctcagggtctacttttcggccaaagcccatttcaaaacatccccacccagctgcaaatccaaggtcatgatattatagatcccaagttttgattttttgtcttaaaagtttttaaaaaacaagattactcttttgttgaaaaccaaggaataaaacattaattagttaaagtataggtagtcgcataaaatgagacttgtagtagtgtttattattattatgcttactaggatgttgggagaaaagtcttgaagagaatgtggagtccaagcttcttttgactgagtatatgagatcagatggaatgggtactcctgaaaccatgtacttgaagataagggcttggtgttcaagctcttgccactgtgttgctgtgaaaggagacctatttcttgctgctgcacttgagtttggacttatcattttctgaagtgtggaagaaaagaaacaaaggatacaggatactaatattcaaacaaataaaagaaatataaaagaaaaaactaataaagaagaagaggaaaagtaagaagaaagaagaaagaagaaagatgagctttataaatatctcagagacgacagagtgagtaagcggctttgttattcattgttttgttattgaggggtatttttgcaaaaacaaatgtttgcagattcttctttgaataaataaaaacttatagccctgatgacaccgctgccacaacctctctctatttctctctcacactcactctctttctctttctctctcttcttctgagtactgctcttattatgactgcatctctgatgctactgcttcttttctgcagaggcctgtgttgctgcctttgtctctgaaaattttacgaaaattcataaacaaatgtggaaagcaagaataaagattttaaatctcaaatatgggtacttctatgcaccccttaatattttgatgtatacacatcaaaatcaaatagtcccacaaaaacaaaaacaaatatatatatata

SEQ ID NO: 306564 - DNA, 1998 bp, Cannabis indica
tatttttctagctataccagccactacaattcttaatttcgacattcttcttctatttgctattcgatcatccatatcccttatggctgtaagtaataatattaatcatattgtcatgatctattttctagtgttaatttgatcatttgattggtttcttatcatttcatatttttagggaacttcgatctctttcagtctttcgtttataattttaatcaaaactgatcgactttaattagataattagcttattaatttggtattagtctatctatgcagattttatatatatatatatataagtatataggatcgtcagtaattctttgatttatgtgttctcaatatatttgtttggtcatggaaattaatttacatatatgtatatcatcaataatatagcagttggtactgttttgttcaaattagctatagagatcatgctcaaagaataatcaaacaaatcttacattgtttaatttttacctacttatctaaaatataagatttttatattaggcttacctgatttggtagagttactagctactagtcctagttttttacccatatatttatgtatattttgtgataataaagattattaaaagaattatatcactaatattatacatattattacaaatttatatgaacatgaaagacatcacatgtcccaaagtttggcaactgggaaaacgacgacgtaccatacacagcctactttgaccacgcacgcaaagagaaacccaaaggaggccatgccaggttcaacccgaacgaccccgaagagaatcccgaggccttcattggagctacgaatagggtagtgcaccataagcctctggaaagcgaagcacccaatcaataccatcatagcaattcatcatcatcccatgcaaacgaaccagcacggcggagccacggccaccgcacacgtcatcacagaagcggttcaggagctagcgcgggtcatatgacaacatcagaatctggaggcagtggtagttataagagtaacaataataataataatagttatactgagaaaaagcagtactctgatcagcatcaccagtctcgtcaaagatcatcacgtgcgaatattaattggtatctgatcatcataagaagaagactactactctaattctcttcttctctattcggctcaagtgtaatagtcatgacagtagctctgttcagtctcggacattattaaagggcaggggcgacacacagctagtactgctcatgatcatcatcacgtaagttagtatacatataaatattgaaattcattatcatgtatgtgtgatttatagtatgtaattttgtatatatgacagcatagaacaacatcaataccaaaatttggggcttgggatgtgaatgatccgaggtcaggagatggatttactgtcatattcgagaagctgaaggaagaaaagaccaacgtcacttctagtaagatcccaaatatttcgcctccaccgcatcacttttcgaaactagaccacagtaaacgtactaataataacacatcttctatatcaaaggtatttatatttaatttcgttttattttattatttatttacatgaatttccctttcaaaatttcataattttaatttgttgattagaaagaaaaaaaaaaaaccataattgttagagattttataacaatggaagaaaatcaagacattacaacactattgcaatataatacaaggatcaacaaagagattaaataaatgttacaatacataatatacaatatatagatattatatatatatgaaaggtagaagagaagatagattacacaatattatataacacatacatatatataatatgaagaagaaaaagaagatcactcactcacaaccttgagtgtagattagtggggatcaccatggcttgaacaaggtattacacctttgtccaaaagcttatttcccctatctctaagcactaagggaactctcta

SEQ ID NO: 306565 - DNA, 2580 bp, Cannabis indica
ttttttgttttgaaatcaagtagttcgaacattaattccacctatatttattatattataattatattttttcgtatagaattaactcgatcaatattatgtttattagttattgtagagactgaataatatctcctcggatcctatttgttcgaatcaaaaacaaaaacaaaatcatgagcttaaatcatacctgttggaccagtgtaataagctatttgtctgaaaaaaaaaataaagaaataaacaatagatgagtttttgatttattattatttcagatcatataataatttaagcaaaactaaaaaaaataatatcaatacaaaaaattcatgaatatatatttatatatatatatatatagcttactctgtgaggaagctgacacgttcagccaatggagttagtccaagcaagctcaaagcaaagacccatggctgtaatttaaattcaaacaaaccccaaaaaccgttacaatttatttatttatgagcttataagaaaaagtaacgtatttatatttatatttatattatattatatatacgtactcttccaaatccaaaagagtgagcagcaatggctaaaggaatggcaggaaagagaatagaaagctttgttcccaaaatgacctcttgaagattagccaagaaggttctaagaagggcacaagggactttagacacaagtttaatgtcagatttctttctaagagaagaagatgacatgttgtgtgctgttcttccatgtcttccttctctgcttagtccctttggttgaccattttctaattgccatggctcttgttggttaattgatgaagccattattattattattattaattaaatcaaaattaataataataataatgatgatgataatatagttgagagtagtagtagtgtctatgtgtgtgtgtgagaagttagagagagtgaatacactgttatatagatgcaaagtgagtgatcttccacgaagtttctctatttattttaattataatatattgaaaaaaagagatatatataactgttgtttgtaaacttaaaaaggagaaaataattaagagagataataaggtaaaaaaaataacatgataagtttggtaagttattaacttattatttttattaatggtttggatagtaacgtataccaggtagtgtatcttattagtgattagggatatatagcagtgaaaatgttgttggaatttactaattaatagcggtttgttatgactttgtagaagtgttgaacaatttaacatgccctttagtattaatcattgagtaatatatgaatagagattttatttagtatacaattgtattgtattgtgttagattgtattgttttgtgttgtctaaaattaaactatttttaccataaagccgaccccaccctgcatcctctgaccctacaccctggacaccgactttagactcgaaaccctaagccccaaccttggatctcaacctcaatttgaaactcggatctggacccgagacaccgatcttggaccctttaccccgacctcagacgcagaacctaatctaagatgcggaccctaatcccgtctcagacccaattcggaccttaacctcaaccctacacttggatatcagaactggaactcgatccgtacctgtacccagacccagacctggactgggcatcggcccccactccgacacgactccctacctcaaaccatttctaaatagggaaactatcatgtatactgcatttttcatttttacatttttttcagattttttttttcatttttataaaagttgttattttgaggttgtgctgattccattttaaggttatgctgtttctattctataaaagttattttcattttcaggttatgttgtttccatttttataaatgaataaaaaatcaattataaaaatataaatgaaaaaactacttctaaatattataatacaagctaatacgaaactatattttatgtattaaataatatgatttgtattgtattaaaatttataattataataattaatacaacaaaaaattctatttaagtgtaatattctttttatttaataaagtacaatttcttatattgttgaacagattgttgggagtatattatttaatacgatattaacttaaggtatcaaacaacaattagatgatatttattgtattagtatgttgtttattaaattaaaatatgttagactcaatcaaaaactaaattatattaataaaaatataatatatactttgtacattgttattagggtactattatgtttttttcttttataatatatataagtaaactttgatatattgctcaaaccaactttataaacgaaatactattgtcaatcaaagtaacctgcaaaaaactaaacacttcacaaattacactaaaaagatgttttgaaatcatattacatcattttgactagcttctttttctacactagtataccaaatcatattgtaaagcctcataaaaacatttatttacaattgttatagtgagatttctctcacctagaaactcgagaccagactcctat

SEQ ID NO: 306566 - DNA, 2766 bp, Cannabis indica
taataaatattatgcatttttgagttgggcaactcaagtctctctgtccagttttggtgtctttacttttctgtttatggttacccatttgtgatatatgtcgctgttatatacatgtttttagatcggacgctcgtcatagtttggtagttggcttgaaaaattgagacaacaagaagtgatttattggcttaaaattacatgtgaagcactttttagagtattgtaatggggaagtgtatggttaagatagtagaataggtgagtgtatagtaaggtgcatgaggtttcattttaaaaccaattagcaatgagaagagtagctaatgcatcttatatataatgtttagttttaacacattatcaatatggaactctctaacatagataagtgtttgcaattatttctacttgtaaatgatctagtgtggttgatttgtataagttgtttgttgattaataaagttttttcttttttatgaaaagaaatatatatgccaagtacatattattccaagtcaatttgattttttatccaaatttgcttcagagatataaaagaggaaatgacattatgcaatatggatcccttacaaaaaaaaatggtatgtttgtcatagtttttgcttattattatacagctactcacaaatgtctcaaaataaaataaataagtatcttgatttaatacagcaaaaatattttttaattttaaaagctaaaaataacttaaaataagctcatcaaagttagaaaaaggaagattggaacaggacttgaattccattttgtcttcttctaacttgcgatcataaactgttgcctttttagtctgaaactgggttgataaaagaattcccaaaaattaggtcgaactcttacgaccacccagtgccatatttaaaatatctgcaaaaatatttttattcttttcaattttgtttttttgtttacaaaactaaatattttataatatgttctgtctgtgactgtgagatttaatttagaaactaaatacacttaattattgaaaaaaatcagtcgtctataatttttttgtcacattataattattctttaaagctaaacaatttttattctaaattatttttgacgtcgtattttggtatttagttttaacttatttttcgtttggggctaaattgataaaaattcagtttttagggtatattgtacaatttttaaaaatgaaagatgagagtaaaaacatttcttagggaagagaaacatatcgtagtttctcggttctgcaatagaacggaagaacaaaatccattatctttctcgctctgcaactctgctcattagggttcatcatggcatttccttatatggaagcggttgttggtaatactttttcctctacttccttttcgcttcccatataattataatctgtatatacaatagaaggcatatgtgaaaatattcatgaaatctttatctttttaagattttcggcggcatttgagagtaacagctacgttttcatcttcttcctcttcttattagttattcgattatgcgatttttttatcgatttctttcctgacaaattttgtttcggtatcgattgcgagtgtgtttttgcgcgtttttctttctttggattaagatacttaccttttaatatgaagaagctagggtttcttttgaaggtcctaaatttatattgtgtgttgatcgtatgggcgttgcatcagaaaatcttcgattggttgcttgggtaatgaggaaaaacatcaactttataaatattttagcgtcttttattatcctcaaaggcaatgatggactaataacattctctctctctttttggtgaagttttaattttagggatctaggctgtattatttgtcagctgaaataacatgtttctatttccgttagtattttgatcaatcttatggtcgtatcaagtacattgcgtaaggatcttcgcttctcataatgttaattggagttttttttaggaggatcgtataacttacaagtacttgctcatgttttaattttgggacagttttggtcgctaccttgtttccttttgttgttttgtattccacttattttgaaatgggccaaatggcaattacttttatgctaattagaagttttttgttttttctttcctatatttcttatcatttttttttctttcctgtttctcctattttatttttcagggtttatgatattgatgtatttcttcgaatcatatttggatttgcggcaacatgcagcactaaaacggccagttcttccaaaaacattggaaggcttaatcagccaagagaaatttgaaaaatctcgagcctatagtcttgataaaaggtatgatatgcttttgtttttaattcacagcgtgagtgtgtggtatatggccccatatggctatacgtgtgtgtgtgtgcatgttcacatttctgatggatgttattaactttcagccacttccattttgtccatgagtttgtgaccatactaatggattctgcaattttgttctttggggtattgccttggttttggaaggttagtgatggaattttggtaatgtctcttcctttgctgttgtgttatggatgtttaatcctacttttcaactgcagaaatcaggggattttgtggtgttagctggtctcaatgcagagaatgagatactacacactctggcatttttagctggtgttatgttttggtcacaggtgggacatgatttctccaaacattgaattgcat

SEQ ID NO: 306567 - DNA, 840 bp, Cannabis indica
atttatttttctttctttgtctgtcttcgtttttttttttttttttttaaattgtgtagtgttgttattaacattttatgaatttgatgagattatgttaatattaggaaaaatatgcatttgacaatcgaacttggaggttttttcttttcttccttaatgtcatatttgaagtatttgaaagtatagtgtttcttctgacagggaacagcaggagttgccatcgctggacttttaggagctgtaagagcacaaggaaggccaatgattgatttcccaaaacagaagattgttgttgctggtgctgggaggttagtggcttagtatctagcaaaatttgagaagttttgcttaagtcgattaatttggtgcaacacgacttattaattcattattcagcctcttttatttatatgtgtgattgctgtttggattagtaagtcaaatgatgccattcacgagttattaagctaaaaggtgaactaatcagttcgatatagagtagaatgctgagtttttaacctatgttgcttatgtttgatcgactataactgtgctggattttttgctattgtatatacttccaagtttgggactctactttattatgttcaattagagtttaatcattattaatatctaaagaatgtgtatagttatatactttgatttagtaagcatctatatgatgtggaatgattcccagggacatgcatgtttagcatctatatataattttttttgttttaaatttttgtaccgatgcagtgcaggaataggggttctaaatgctgcaagaaaaacaatggcaaggatgttgggaaacaatgaatctgcttt

SEQ ID NO: 306568 - DNA, 1938 bp, Cannabis indica
acttgtgaaatcgagtctaaactcttttacctgttattgctctctgaattctaattgtgatgttatgtttttctttctatgctttgaatggaccattggaaattttttatatgccctataacattatcaactacacttagaatacagttatttaatctgttcttctgggatttgactgaaaacacttataatttcacttccaatttcaggagaatgtgttcgaactcttatccaaggggaagagatcattcgagctgttagacttatttgtcgattgaagttaagggacatgtttccaccactccaacttttgattaaatttttggaagatattgagcgttctacacaaaaatcatatgaggaaaggaaattttacaaagcaaaggtatgaaatgagaaccccttaataatttagatcccaatataggtttgtttttctagtaaagcttttagtttagctgtatatatgtaatataccttttatcatattagattgttttaaaataccaaaatccataaatattgttgttattttttgctctaaaaaattatcttgtacttgtaggttatatttatttgatattttataatattgtttattttagtagttttatatttatgcatcgatattttacaagctgattgtaccataagctacaaataagtgaagctgaattatcatgtgtcatgtgtattgtgtgtatttgcagaaacaatccattgacaaagaagtagctgctctgaaaggtgtgtcggaatgcatgaaattttgcaatcttgagtctgagatcctatccaacaaaatctcaaaacgctttggcattttggaaaatatgagccagtcattaggccgggaggttgatccatcacccaagaagaaacaaagaaagattggttctaatccaaaggaaaattttgctaggtgttccctgacaactaagttgggcgaaactgttggagctggtagtaggagttcaggttcacgtttgccacaatcatcgtcacccctaaagatcggcacaactacacctccattagcgcctaaggttgccaattcaattgttggctcttataggagtccaggttctgcttcttggaccaaacctcccaaaggttctgtcaagttgaattttagtcatacagcacgaccggagtgtagcttcttaagcgtggtggcgcgtagccataatgaagtcttggcaatcaagtgtcggaagattggtcagtctaatccattgactgctgaagctttagctgctctgggtgctttgactctggcatcttctgaaaaatgggataccatctttttggaaggagagtcattgctgcttatgaataatcttcaaggaatttctgaaccaatgaagtccatttccagtgtggtctctgactcaattgctaaaatgaaaactttcaaacaagtcattgcaagttggataccggctgaggctaacactatggctcgtaatgtagctaggtgggctgcagataacaatgttaatggctcatcttggatatcagttcctagtgacttggtttataagttttacaaagtataatgctttttgactttactagtttttgtaagtgtaagtttagaggtatataacataaatatttttggtatagaaaccgaagctttacatatatacattactttaaatttattttatagttttataaagaggaatttactattttatagtttcattaactgttttatagttttatataagactttctcttctttattttattttattttttttaattagtgaactaattaacgtttcgctcaattattctttttgggcattttacaaaaatactggatttggggtaataattttcaattttactgccacacggcagaatttacatttatactgtcttccctttttttttttttttctttttatactgtcaataccaaaacaa

SEQ ID NO: 306569 - DNA, 2086 bp, Cannabis indica
atattcttttatttttaagtatattctgttaaacaaaaaatgttaaaccaagaaatgccgttagataggcacttttaatatataaagatataagaaagaaattaatattccaacacaaaatgtagtaatgttatcatacacttatgttggatttttgtaattgttctgggttgatggactcatggacaaataacctagttataatgttttgggccttgagtgtaggtggagtgggcctaaacacgaggttagtctgtcttagtcaccacaatgatagacttttaaaccgcaatcaatgctagtttggaaaaaagaaataataatttgccattgaatattttgctaattggtattgtgcagcgattcttgcaatgttaacagtttgatagaaacctagaacaatttgaccaagagtttgaaacactgctcaacaggattcaaacaagaggcgaataattcgattaattttcttgataataatgatttattctatatatctctacatattcactcaaaaaaaataatttgaagttatataaaaaaaataaataataattatttgaagaaatataaatcttaatattctaaaaaaaaatctaattttgcaatgacagtaaaacagggatattttgtttatataaaactctaaaagcatcgagatattttttggggatggtggccgaacacacagcacaccaaatggcaaatgcattaaagaatcaaagagaaaaaatgtggacacaacaacacagcagccatacaaagctaatcaaacactaacagacagactaactgtggtctgtccaagcctgatcgagaccatttgcccgattcacaacacagcatcaaaaatatataggaataaatacgcattttgctattgcaactttgagcaattgttatatttattgtacctcatttaattctaaaatagacttgaacaccaaaaataaaatcttaaaatgaccaatcaatatcttaagataacaaattatctaccactaaattgtacaagtaaccaaaatatatatgaagtgatatatatagtcgaaaattaaagttgtttatgataaagtaactaagtatcacttattatcatattgatattataagtaaccaaaatattacttagaaaaacaaaaagtttgagattccataattatttccattcaactaaaaacacaaaaaacaaaagtagaagtctaacattttttatgacaaagttgtaaattaagtttattaaggtaatttatatatttagttttttttttttcattttagacttataatataaagccctattgtgtttggtttcaatgttaaagacattgatgaaagaaaaccctgatttaactaacgttaatgttttaaatatatttgataaattaaattatttataacaccgatgaaaaaatgaaagcaaaaaattggctaaaataattttttatgtaaaaaaaataattggatatgtaattgaaaaatcgatccaatttaattagaaattgaattataccactaattgaatatgatcagttttctaaatccaattactaattagattatattagactaataaaaaaatattagattagatgggatgtccaatcctaaatattagactcaaaatttcaacaataatattttacttttttgttttttatttgaacaataatattttacttgtttcactcaaatctcaataatgtattttacttttattttcatatattaaaactatgagttttgaattttgtactttttgaaaaataatttaaaggatagtccactcctcaaaatgataaatacactacaatatttgaaaaaattaagattaaaatattttttaaaaaattactttttaatatctcttttaaaaaaaaaattctcatattatgttaatttcaatactattttgattttatttttatattttttttcttctaaatcatgtatattttattttagtttttctaaaaaaaatttcatataatttttattcttttgtcataatatttaaaatataattatttttatttaataggtatatttttaaaaatataatttggaagaaaaaaataaaaaaaaa

SEQ ID NO: 306570 - DNA, 826 bp, Cannabis indica
ctcgaagagtgcgtttgtatcagtctgattttctagaataaactatatgacaacaagatttaaaaataaaaaagaatataaagtttggatcagaatagaaagaatctttaatttaataaaataaaaatctgaatatgttttgttttgtttgcatgaactatataatatatttattttttcatcaaaatattatatatatattatatgtatttatttattgtgtaaatgagtgatagtgtggtgtggcagcgccacaaacggtgagaaaactcacgtgtgtcacccataattaaaataaatatatatatattttttattttattttttcataaatttaatttgaataaatattgaaataaatgtaaagatttttcgctcataaatgagtgggacttactttgactttcattacagtttcatgtgcttctaaaattatgatctgaccaacacatctcagattttgtagtacaatttatatgaaaaatttatagtacatcaagaaaaattggtattaatttatggtattttctatgtgttttggcatgtaaaagggttatttaatgtaatatttttttttttaaaatatggtatttttaaaaattactaaataatgtattttgtaaataagttttttatttttgggccctgtattgggtgggctcagtctgctttagccaaggcccagtcctgcaaaatacatataattttgagtgcgaaaaagagagaaaatcaagaaaagaaaagaattttcattgattgaattgaagagtgaattacagaggtaagtaaaaaaaacttgttactgaaaacagttacaaaatagtaa

SEQ ID NO: 306571 - DNA, 1350 bp, Cannabis indica
attttgaattttttaaaattttacaatatattttaaataaattatgtacttgaaaaaaaattgaactaatttttttatttatgaatgagatacttgtattgctcaacaaaaccaaccatttacaaactaaacatcatctccatttgagacctgaaaataaactaatcaattacaagctaatcactttcaatgaattaaaccacaccttttcctctattgacattgtttttccatccaaacttttgattctatactttacattttctttgacttgatgaacacaatttttaattgtttgcatcttgtcattccaaaggcaatcattttgatttatccatatctgatacaccaagctcgctatctctgcaattatcactttcttcttaaacttagagagcttaacccgataaatttttctgagcagtgtttttaatgggtaaattcttccatagcatttcatccatgagaacacctcttttaagcacctgctactaaaagaacattcaaaataaatgtgatcaattgtctctatagcagctccacataatagacaggactcatcttgacaaactttaaatctgatcaatctatttctagcttacaatatctatcttgaatagtcaccacatagtaaaacttgtattttcggtatattgcatctattccagacttctctatgtcatttaactctattttgatctccacaaaggtgcttataagtttgatggataatataattacctcccagaagaggctacaaggtttgaaggcttttatatgtctctttaatcttcacaatctgtctccaataccagttgccatctgtagttgattgatagtcccaccaatttgcattctttatatatacgctatgaactcatcgcacccacaaattttcttgtttggacaataccctaaatgtattttctaagagctgcttcattcatatcaaggtgttcctgaaactaagtcctccctctatttttgatttgcaaagtttagaccaagagacatatcctggactgcttgtttcaacagtacctttccacaagaatactctacaaatatcatttatcttctttaggacagccttagggagaaccataatctatatgcccattatgtatgaatagcattaatgagtattgtggacattgtcccacatggaataaatggtagataattgagccatatataagaacatgggctactccactcattgccaattggttttgagatggaaccccatgattctcaacatggtatcagagccatatcccttgcgggcaagtgatcctatccgatccgcacctatacagatagtgaccatgtccactctgatacggttca

SEQ ID NO: 306572 - DNA, 1565 bp, Cannabis indica
ggtcagggtccgagtttgggtcccaggtcaaggtccgggtctgggtcccaagtgagggtcagggtcccgggtttgggtcccaggtctcggtccgagtctgggttcgggtccaggtcccaatggattcgagtctagggtccgagtcttgaattaaatttttcttaaataaattgaaattggttcggatcagagccaatccagaaacagttatgcgacgcggagcggatctgatccaagatccaataagtatccgaatgtttcggattataggcgatccgtcggatcagaactccaactccctccaactaaatggatctttttaacaagcctatccatccacgagtgttagagccatgttgataggactgatagccacatcctcctctgagaaaattagagtatgactgagaagagtttccatgagaaaaactatgatttgatagaggatgcctcatattgcgattaaattgagcaagatgagtttcaaagatgatcagacttgacttttgcaagattcacaatgagatcaatttcttgatctattttctcaattcttgatttagaagctagcaataatgcttcaaatatttcagcaacggtgtagcctttagctcttgtattggaggagattataaacatactctctaggaattcttttgaagatggtagagatgtgatcacgaacactgagtatttctccaacatttgcaagcaagaagatcaatgggcttcttgactttgagcaagtattcatttaaagacatggaaccttttcagcttggtgcaaaattctaatttttttttgaagaaacgagtagtataaagtatttttttcaagacattctaaatatatttagttgtgtgacatcccactattattgttaataggcattttattattgatgagagaagccatgaaaccattagctggtcttgtacaatcccattcaacaaacatagggttcaagacattgttagcctatttgcatcgttcaagaaccacaaaggaggaacaacatcttgaatgaacttcaccaatagatttagtcctcgtatgacagctagaaatatgtttcttcccaagaagaaaattgggatttattgagtactactgtaggatttttacccttttaccctacaccaacaagacaatttaatatcagtatcaaggtcaaaatcgacctttcttagtctaattaaactttagactaaaacgacaacgtttaaccaacacgacaccaatttctgtgtcgtttggatcccagggttaaagactctcaagaagagtctaaaaaccctaaactcaaacagatcacacactcaacctatcaaactcgaaaccctagcagagtaagttcttcacacaagaacttgcttgatcccagtagaaaaccctaggatctcaatccacacacacaaatttaggttttgaaaaatgaaaaacaaagtaagggagagaaaacaccaagaaatatttcagagttcacccaaaaatctgggctacatctctgtcaagctcatctcagagatcgaagcttgatatccactatcaacaatgtcgattt

SEQ ID NO: 306573 - DNA, 1078 bp, Cannabis indica
tttgtgaaagttggaaattttgtagctatttcagtctcaaattattgttttgtttggaaatttcttctggttttgcttccattttctaaacacgtgagcttctgtagggggaatttgatgttctggtgcagttttccagctagggtttctcggtgctccctgaattgtgcttaattattagtaattaaacttattggatacttctttttttaacatttccgggaataaaaatttccattacgtaatttcatgctcaagtgtttaggcttccgttaattgttcaaatttttgcattgttcaaatttatttattcttaacttcgggattgaagaagtttcaaataattaaagggctttgcttcttagttttttgcggtttattgcatttgtattttttttttttttgtaattgcatgtgaaattttggttctggaaagaggtgcattcctttgttcttagtgggttttctatatttatggatttagatttaattgcattatgtcattttaagatatcttggtacttacctgaagtcactaaaggaataattttgcactttaatgagtgtaatcgccatcatatgcatgataacattcccttcttttattctttgattttgttagacttccatagatttttaccctgcacaaagttgacaagattagcttctctttcaacttttgcaggcaaaattacatttattttatccattgttatgtatgcattagaggaagatattatatgattaggaacttgtcacaatctatccagtccatgtccaaagaatcggtaatcaatcattattgtccatgctcttccaagtaatcaatgtcagagtaattcatgtttattcctgagagaaaataataaacaaaggacgttaaatgatattttacaagatgagtttatgtcaagccaaatgtaaaatatttggcattctataacgtaaatttctataaaaactgatttcttttgttcgtagtctgcttatgttattgtaaattacaataatttattgcatggtgtcatgatctggtttgtttttgacaggtttttgccaaagcaagatggaaccccta

SEQ ID NO: 306574 - DNA, 1917 bp, Cannabis indica
aactcaggtctgtcattattctgttctttttgcaaaaactgccgaagaaaccttgttgcccaataagaaaataatgagaaatagatttgaggaacaccattagtgaaaccaatttgtcaaatagaaaacatctgaccttctacattagacattaatgttttcttatttctggagtatatttattgaaatgtaaccatataataatattgcatttataaccagtcatactcactaacgacaataacatattcataactgaatcaaataaaagcaagcagaacagaaaatggaatttttgggaggtagatgataaatttagtagccttaaattgtctttcacccttaatctaaacaaaattctccaatcattgctgaaatgctactattaagaaatacatgattcaagtaaaaaaagagatgaaaaaactaaagaatatccattggattatctggcctctatcatcaaatgtttcgtcatcataagcaacattataaaacagatatcaaatagagaataaaaaaaatacttactgttaagagaatggaaattcatatttctttgcacattgcagatatggtccctatatatacataacaccaatgatgataagtaaagtcaagttcacgaagaaatagaataaatgaaagataacataggaaattaactgtccagcagaaagagacaaaaaaacaaagaattccttttgataaccgggaaagaacaaagaattatagctaccatatgtaagcacagcctgttgtctcctgaaagcttagtgctaactctgaagaaaattctgggtctctccatgagataattgtatcttccaaacaaaagagaaaataacatagagtttagtacaaatccatgtcaacacaatctcagctatgacaaaggatagaaaacagtgaccagcacacaaataccttcttgttttctataaatatcatctgcactaatacgatgcaaaagcaatgtctcatgatcttcctcatcgaaaacaaataaaccaagctcttccgatcgctgtgttataatgatattctcattcagtcattatacaaacaatttaaagcaatcaccaaagatgccaatttcaaagggctgtgcaattctttaatactaaatatgcatagacatgcttaaacacagatcaaggaaaagaaccaacctccaaatagtcaacagtgacatgcccagttccttgatcatcccactttccatcatcattcaaacggtacaccttaacacgctgaaatttatgtccaaaaactgggttagatagtcacttatatttaatagtatcactgtagtagaaaatatcaagagaaaaggatttaaacacaaatatttgcacaagcaaataaagtattgggaacaaaatatacatacaagaaaaagagttaacctgtcacaaaatatacatagtataaagataaatattagtgccatttaattcaactgcgataacgttacaacaagtagaatgaacaaggaaattttaatttgtccacttggcatattaaaattatgtcaacattttaaacaacaaatagcagagaagaagcgtaatataatcaagctcaagcacaatgaaatccatacgatgaatataagtaaaccaactcagattaaagtgagttattctatgagattgccttctactaatggtaatggatcacataaccaactaatcaacaaacttcgtggaatgaacttcacacaaggtgacattagtgccaaaatatatataagtgaacaaataaaatgccaaaacaaatagaatgcaacaggaaaaaatataagtacaaaaccaactcggaaaagctccagtttcctaactattaaaagcataaaaacagagattcagtaaaaagccgtaaccaaaaattccctgcattactgctttgagaatc

SEQ ID NO: 306575 - DNA, 1784 bp, Cannabis indica
tttttctacatagggcccaaattttttttccctttggtccactttgtttcagggccgaccctgctcaacatgcctcaagcatgcatcttaacaccaccccttcgtgaccatctcagcaccaacaagttgtaaaaacttggatgccttaaacatgcatctcgacaccaccctttggtgaccatctcgacagaccaagagaagcaccatctcgacatggtgcaagtggtgacaaacttggcaacaacaaagtggtgaccaactcagcatgcctcaagcatgcatctcggcaccacactattggtcacaatctcgacatgaataagcggtagcaaactcgacacacctcaagcatgaatcatagcaatacactgttcgtgaccatgttggcaccaacaagtggggaccaattcagcatgcctcaaacccaatctcaagcaagtgcttggaagtgcatgtcagcatcatctcagccaagtaattaaaagcatcctctcaacaaatttctcaaggagcttctcgaccacgtcactctgagaatacctcaactagcaattcaacccacatttaaagaattcccatgaattctagaaaggaaaccactagaagaagaatttaagggataatacaaacatgaagacaagtacagatcacgatacggccactttacctgcaagacatgaagcaattagcctatcgtgtgataaggcatctctagtacaagtagtggaggcaccttgcctgcacgtcctgacatcccaacaaagggcctactaaaaatactaaccctacatattaggaccacttgacacccgaaaggcattacttaggaccactagggtatcaaaatatcacctcttgcaacctttcacctgcgagagtacaatgtcctacctatcgccttaggaccactagggtatcaaaatataaataagagccaattgatctcacctttaaatacccattttttagattgtaaaggggttaaaagatcattacaatcagagacacgtaaaacaaacacgacattcatttttgcttctccattaaagttctgaaacttattctttgttctttgagttttgctttttttttttcatcgtctttggtttgctaaccataactttgttgatgaattctcattgtcaataattttgcaccatctgtgaaatgacaagctttagctacattatttcctacactactcactattgtcaaaaaattccaaggtgttcccatcaatctgagatgttgagattcgtttggacaacaaccaattggttgtctaaaggagagagcctccatggaaatcatcgaagaagataatgatggaaaccctcaaagatgtcactgcaacgagcataaccatgtacccccaatgatggttggagacaaccacagtggtaaagattgaaccaatgtgtagagagatggagtcaccgcttccattgctggttgatctttctaagtcaatatcactggttgatcttagattaaaagatcttaatcttgacatggttaggtttgatctcaagagtattatttgtgttcttagagttgttaattagtcaaatcttaccatttggtttgggtaacacatacaacttgggaacatgatagtacaattaagtgggagcgttaatcatagatatggaatctatagcttctatttggatataaaagttaaatgatgattttctccgaccttagcttaatagagataaatggatgagctcttattttagtaattatatagtttacttaaatatcatttaaaggaagtctaa

SEQ ID NO: 306576 - DNA, 1443 bp, Cannabis indica
tttttggtaatttattttattaagtataaatttattttattaagtaaaaaagtacaaattttttttctttttttaaaaaaaaaaatctgaaactcttttttagtatttttttattacatacaaaaaaaattattaagcaaaaaaaatctatttttatatactaaaacaaaatagaatactaagtattcccaacattttataaaccgttggcatttactgtttttttttttaaaaaaaaaaaatccatttagtattgcatacggttctccaccgttgccatttatttttctcaacgatttctttacttcggttctaaaccgttggaaaaaaatctttgcttaccttttctaacggtttttcataattaactccccttattaactgttaggaaaagttaattttgtagtaggggactttttgggatgagcactttacacaattttgcaacagatcactcttttatttattaaacatcaacaaaccaagttcatctatactactggtttatgttaatgatgtgattgttgcaagtaatgacttgaggtagagagattcaaaagatgactcaatgacaagttcaagttagaagatttggatactaaggtactttctgaggatagaagtagcaagatctagagaagggttgctcatatctcaaagatattatgctttgcaggtctttgaagaatctggctatttggggtggaaaccagtaagcaatcccatggaacctaatctgaaactactaagtcaagtacaaggggatacaattacaaatgtatacaaggatcattgggaagcttcaacatcttaccataaccagaccaattgtatcttttgtaaacaagcttagcctgtttttagcaacacctcaggtactctactttacaagttgttcaaaggatacttcagtatataaaatctcatcctagtttagggggttgctatttcctaaaaactctgaagttaaactctaaacttacactgattcagactcaagatcttgtcaagacacaaggagatcaacatttggtttatgcatactcgaaaaatctctagtttcttggaaatagaaaaaagcaacacacggtgtcacattcatcagctgaagtcgagtatcatgatatggctaacattatgaaattgtttggttagtctctatactaaaggaacttaaacaagatcatgtcggccaattgagtaattttgtgactatgcatcaatccacattgtaaccaattcaatcttttacgaatgcacaaagatatcgaaatatatagactatcaccaggtcaagaaataggttcaaacaagactcgtcaagaccacttggctaacatattgttcaccaaggcttttttttcatatacaattcatatattttgtaagaaccattattttctgtagtgacaaattatgtccagttgcattccagttgcgtct

SEQ ID NO: 306577 - DNA, 1135 bp, Cannabis indica
cctaagacttttaatattttactaaattatgcctctcgaactttgacatgtgttaaattacacttctgaacttttattcatgttattgttatacttttattactaaaattagacaaaagtcttaaatccaaccatctcatagttcgggagaatttttaacgctcttcaaagtttagaggacataatttattagtatatgtcaaagttcaaatgacaaaaatgtaaattagtatagtgttaaataccttaacaatgttgctatattatattatgattttaattggatctttatagttcacatatcttgataatataataatgttaatggaaaaagtatataatcgacatagtttatgaatttagaataattgtatataatattttataaaataaatcttgtttttaaagggtataaccatgcatgattagtattaaattctaatcaccagacaaaattttcattattcaatataaatctagtggatgataatctattgtggaagaaaaaaaaagcaagtcaaattgcacaagaaaactataattaaaaataatgaaataataataaaaagcaatgtgtatgcaaaatattaggagtcatacgtggattgagagagatgttacgttaatatgtcgtataatgtacaagataatataatatttgttaagcaaatcacaattaataccctaccaaaaatatcaaaattatttaaaaaaactagattttttcttttctcaatagaatagtagttaaaaacaaaataataataataataacaaataaagagttcattaaattaggaccgctgatataaaaagtgtgtcccttaaaaattgcataaaaatttgcaacatattatgcgtcaccttacaaagtgataattattatcacatacggtaacgaccattatcaaaaccattaaacactccacaaatagattgccacgtcatcaactttgtaaacgaacaaaaaattagagctttaaccaattctgacattttctaaaacaaaaacactttattcctttctcttcttaaaatagtgccgttgttaaaaataaaataaaataaaaagattaaatagtagtataaatataataattttttatagtagtataagtataaatataaatataat

SEQ ID NO: 306578 - DNA, 987 bp, Cannabis indica
gccaatttcaatattttggaaagcaaccagcagttgattcaaaattgtttaaggataaacaatacaattctcatacctaatgagaaaagacaacattcaaaagcgctttaaacttatcaaagatctaacaaaatagtcgtttattaagtaaatttttaaagtaacaaaagttcatgtaatatttgagaaagcaactagcaacagatttcaaaaaaaacaactatgctttgctgttcagaacttttttaagaacaaacgatgcaaatcacacaaacagtggcatttgaaggtattttttacttttaaagagggaactgtctaacaagtaaactttcacatcaacaaaacccaactttattgtttgaaaatgcaactagcaaaaaattccaaaataataattgtgcttcctataaagagaaggaaatcgtttaaatttttaaaacatcaaaagtcaatttcaatatttcataaagaaaccagcaaaatagattccaaattagcaattatattttgtactactcagccatgtttgaaggcaaatgacatatatataacattaccataaggtaccatttgaaggtacattttatttttgaacaatctgaggaagcattcgtctatcaagaaacttctaaggcaacacacgtcaattttaatacttgagaatagaaccatgagcagatttcaaaatagcaccaatatatttctattcggaaccgttttaagggcaaacaatacaaatctcacacctagtagcaaaaggcaacattaaaaagttctttaaactttccaaaatttgagaaaacagccgtctatgaaactttatttcttgttttttatataacctatcaagtaactttagaggcaacaaaagttcactttaatctttgagcaagcaaccatcaacaaatttcaaaacaataatttgttttgttgtttctaactatttgaggacaaacgttaagatctcaaaaattatagcgatag

SEQ ID NO: 306579 - DNA, 1198 bp, Cannabis indica
aagtacattattttacaagtcatctttttttagttgttaagtgtctattaaatccattaagtataaagtaataattcaaaaacattgggcgacatatttctttaacttatttaatatgtagttcaatctgtattttttgaaggtgatttgtgtaacaattattaggaaatttcgtctcaaatatccctatttatatataccctttcgttattggagtttataaatatactcaaattaaacctgagtgaaaaagagatgagagtaaaatggaagggacagaataaaggaaaaatttaaagaattgaaataaacatattaaaaatactaaataatttcacattttcaatctattaagcaaacatatagtgcttaaattcaagctaaaagttgtgatgtcatagaaataacccaccttagttccaccatatatattagtgcaactacacacaattatgatgtgaccaaaggttcaataataaattgatgtcatatttagtgtatatagttacttacaccacatgttgtcattagatgaatctattcataagcaccactactaaattcttatatattatttgatggtaattatgatcacaataatcaaacaaagtaggatttattagttagaatgtgtgttggggattgtttgtgcaaaaaaagttaaatgttagaataatttgcttttttgaataattggtttctttggtcatgagagcatttactaaagcgacttgggcataaagttttgcactgcaaaagacattgatcctatcatctatggacccttctttcggcactatgacaaaataagtattgggtatttagtaataagtaatgggtagtatataaaataatatatatatttatatgtataaattaacaccaaaataagatttgttttactttttgagtatatttaatttaacatagtgataggtcctcctagaaatattgattttcttcttgtcgataaagtggatttagtctagtggatataaaagcactcattctctttgtgtcttatacctatatcattttgtttcaacataaaagtttaaaaatatattaataaataaactttatcatactagtagtaatttgtgttatgttctcttctgtgaatgtgtttttaaatttattgttactttctcttaaggaattattattattattttctattttcttttcccaacttatg

SEQ ID NO: 306580 - DNA, 3745 bp, Cannabis indica
gagaagcgtggtggtttggtaggtcgacagtgtattgaggggttgtccatatgggtagaaagactagtctgtccctttgttcactgtcaaaagttgaccaccatacgcttgatagattatttctactaaccccattattctgatcagttgacttactcaagcctgcatcaatcgtttttgcaggcacttcatggtctaacatggtgaacttaaggaaggaagttggtccttcaaatgctggtggcgatagcagtcctcgcgggaagaggaagaggcatggcactactctttatactggggccttcaatccatcttcctttgctccatattcccgtgaggaccacccccaccgacataataaattgtcaccaggaggctaacttcatccgtgccatccatcttctcttccaaagattcccctcgtgggcttcatatttcccacaaaaattgtacctcttgatcccaccgctatgcagacagcgggggagatcaaaagagctttggaggaacatcttgaagaagagaagggatttttatgcaggcaggccatcatacttttgaccgtgagaagggctgaaatctcagagcgcctccatgcctcaatgtcggtcagaccaatagttgatgtagaggctctggataaatgtttggcacaaaaagtggggagtgagactggtttgcagcaggatttctagataaagtggttgtaacacatccaacctacccttggaaaccttggccacctgtagcagctttgatgccttttccctagctcacgctgccaagcagcaagtggttgggttgaggctcttatctttgcacttttgtttggccactacactaggctttctcaaattttctctattgcagcaggtagctttactggcagaaagggccatggaagaggctggtacattggtcatggagcttgtgccagacaatgctgataaccgcgagttgtgcgctgccaacaaggctctcattgataaactcatagaagttgaggcttagattgaaagcttcaagataaaaaataggttgttggaggacaactacgcccaacaaacctttctcatgtggggtatgcagttaatcagcgaccttcatagggagaccactgagacgatgcaaagagcacactcctatgaattatccaatagtacctaaatatataaagactgagcggctggctgagggagtgtcccactccaggaccctgacctgtattttctttcagtttactcttccacattttccctttctcattttgtggaaacaatctgattaagccttagccgcgaggccatttgtaacgactttatacttttacagtttttcctttgagcattagtacacacccactagcttgttagacttttttaagggttgttatgcaaggtcattttaaactttgtggttccaacgaccaacacttcagacgtgttatccaattatttacccctcagctgatttacaaagttcctgaagacccttgtctactatttttaggtggggttactattgccataaccctttttagtcagtgcaagcttcgattcattaaatatatagacgtcacagagtggcctttagctagttcctagacatctagatagtcgtagagtcttagcattctttggacatctttgatagttacttacttttttaggatgttgctcacaaagtgctagactgggatggtttttttcgcaaaagggtgagattctgagttctaagcgttccctgactcttactctttgtgaagtttagtatcgggagaaatggttaaaaaatgcttcagattccaagcgttgtcccttgtgaagagatttgtggttgaaactgtgataacactcaagtaggttttctcctcccagaccttcccagtaaatatctctagccccccgaggtcatgcacaaacctggtggtaattgtttacacatcatggattttaggcggtgtcttgcaatcaagatagggctaaagacgcatagaggcgcaaacagggaccttaccgcacaaacgaattaaaccttaggcaatccaccaaaactcttgagaaggaatccaagcaaatttttcctttcaagaaatttggctgaaggtgtatctatcatcgatgttttacactaatttcttaatttcaaaaaggggtttaagcatatctttccttgggaagtttggttgaaaatatatctcgattttggtttaacatgcaaggttcaataagactcctcaccaaataggtgagtacgacacaacgttgtgagaagtttgaacgtctcccaattcttagtaatttacttaaacatttcttgtggtaatgacgcattattcaagtcaatgaggggaagatttggttgtgcattgaagtcctattcgagctccttttagggaggcatagctgaacttgtgttgacagcttaatcacgccctctccatctaaagtgatcagtgacgggcctttcttgaccagtggcgagagagcataaaaaaaacacaaacttccaagcctgcttcttttctcacatttatagggaatttgccaatcgcggtagatggatctaagggatggggacaattgttcaaacaatgttccttgtctaagggcaatgttgaagatacgttgtccatgcttcatgtgtgggccaggttgaataataaagtggatttttggcatccatggaggaaggctgaaaccacactgaaattcaagcacgggcttcccttctaagaaataaaggtgaaaaccatgtttggcgtttaataaacctcaagcgattcaggcttctatgagaaagggttgaagacgtattgaacctcaacaatcttccacacaaggtagaaatacacgtgcttgtgagatgaactgtgtggcgggctttggcttccgcgtaggaagactgaagtcacaacaattcaagcaatggtctcactttcaagattaaaggtgaaaaccatagtgggcgtttgatggacttcaagcaattcttccctctagaaatgaaggttaagacgtattaaactgccagtgatattttacacacggtataaatacacgtgcctatgagaaccatgttgaattgtgcaacaaactttggctttcgtgaaagaaggctgaattcgcactacaattcaagcaatggcttcactttcaagactagaagtgaaaaccatagtgaacgttcaataaacttcaagcaattcttccctccgggaaggaagattgaagacgaaccctcaacgatatttcaggtatggtagaaatacacgtgcctatgagaaccatgttgaattgtacagcggactttggcttccgtgtaggaaggctgaaattgcacagcaattcaagtaatgatatcaatttcaagattaaaggttaaaactgttatgccctaaataaaacccattacaatctaatctgattagttatcaatttaagaaatttgaaatgatttatgttaacatgtatttttcatgcttatggtttaatatatgtacaaaatcagttaagtccacaacaaatatttattcacaattacagtaatgtcaacacagtgaaatgcgattgtgattatatgattcaaaagaccaagtccctgtttcatcagtgttttggatttacactgatgtggtaatcagcgatgaagtatacttacacttggagtaagtgttatgttctttccattggtaagtattctagttttgaatgtatggagtatgcattagactggaccaatattg

SEQ ID NO: 306581 - DNA, 1543 bp, Cannabis indica
aaccaagaaatgccgttagataggcacttttaatatataaagatatatataaatatattctatataaaatgtgtctatataactgaaattcttatcattgggccaggaccatcaaaatgcagtgaagtggacttaaaggcgacagaggcggacttaatgaatggaattcacaatcaaactacccagagtatcgattgtaagttaacttctccgtctgtaatcgctgaaggcccgaatttctccccaggttcggtggaagaagccacgatcaaaaggaagagaggcagaccagtatccaggaagaatggaaaggttatgattgagagtccagagccaatccaagctcagcggagaaggggaagaccctcaaaagcaaactctaacgttagtatcaaacccacctctttcaaaaggagtaaaaaaaatagagcgaacaaatagagacaatcaattacagctcactgggataatgagctctttgacttgaaagtggatctcgacaaacatttcgtacttatcgatcggagctcacagaaaaagtctacgtgcaccattcaggagatcaatggggagactgaagctattgttggggaaacaagccaggtttttcattttggggctgtggagacttgcccgaaaatgtctcccaatgccccatgagagctttggcttggaactgtcgtggtctcgggaatgcagcgacagttcgacaactgaaggagttaatccggaagtcgaatcccaaattactaatcctctctgaagctaggctttcacaagataagttcaattgccttatgaataaacttcatttccctgggatatgctatgtcccgcctcttggtacggcaggtggattttctctctgttggcggttaggagtggattggacaattcagaatgcggataaaaatatgatcactggaattatcgcctctgatcctattgaccgtccctggatgattgttagaacctatgggcctctggcttatggggaaaaggaagctttttggaagaatgtgggggatttcattgatcagtgcaacctccctataatccttatgggtgatcttaatggaactctaaaagatagggaatgcctgaactatgtaaattcttctagctcaacacgctactcttttgatttgagacgaatggtccatcgcactggactaattgatttgggctatcttggggtcacatacacttggtttaagaaaagtgtcgacccttcggggggatcttctctcaagagagcgcggcttgatcgtgcactggcttcaacggattggagaatagcgtggccgaatgcaatcttatcgcaccttacaaccgccttttcagaccataaccccattctcttggatactctaggaggaaaacgctgcacaaagccccagttcaaatacaaaatgatgtgggaaagagaccatcgcttgctctgggtggttaaaagagcatggttagtgtgacagtcagtagttccgggatccgtaagggaaaacaccgggtaagctgtgcaatcccacatcgcctggggaag

SEQ ID NO: 306582 - DNA, 1178 bp, Cannabis indica
aaatgtttaaaattccgtaaaaccgtatttttgttgtttttttggttgtttttgtgcatttgtgaaattaacccttaaaaatttacataaaacttaagtaatttcggccatcaaattaaatcttgtattatcaagaagaagaaataagtttaacaaagttatgagttataaagttagtagagttatcacaaaataaaaatttaaaaatattaaattaaagaagcttaaatatctctattttatttatttataattaactattattagaaagtaatagtatatatatatttatagaaattcaaagtaaataagtagtaccgattatggggatggacttgaaatcggtggccatttcttctcaagtaattatgtatagaatggtttttattttgtaaacaatgatacaaaaatatggtatttatactaaattcccagcattaaaaaaataataatagtaagattagaattacaccatgtgacttctataattaatgataagataattaaagtgaaactcttctttcaaaagctaaaccatgtgactatagttgactattaaaaaaattcaacaacatgtcacttattaaagtgaaaatctcaacattattattgttattaaaacattaaagatgccacgtggttttaaagaatgtataattttggttaattattgaattttattcattggttattgattaataattttgattagagttaattagattggatctactattatctattagttaagatccagttgagaagggcgtactttatttattttcttgcatgatataattacgtgatgttattctatattaaatacaagtcttattagtagtaatttaaaaaataaatctttaataaaaatttaagtatactttaattggaatttaaattcttatttatattattatataaaagttaatattatattaataaatatcacctttaattataacaaataaataaaaagattctaaaaatatactaatgtagtgtagcacatgtgtgtggtttttttttaattaaaatttcatttaattaaaataactcggccttaacaatgacagcaatatcacaatgaagattatacttcgaaaaaaacataatcgtcatgcaatcaagacgctttagccacaatgtgagcgacttaattagcatatcatttaacaaaa

SEQ ID NO: 306583 - DNA, 652 bp, Cannabis indica
ttatatataaaatcgtttttaaaaaaaaaacacaaaagttacaatcaaggcagccaaaaatagttgaataataattttcctgattcataataaagcaagaataaaatataataatatattatgtataatttagattttgcagttatttactttatatatatagcaattaattccaacgaccagtttaaattatctgacagcataatatatatactatatatttttattattcagttattaagagaacataactaattatatagtatggtaggtgtattataattaataataccaaaataaatagatgtgaataaaagaaaatatggtacgtacgtaggagccacgaagccaatattcatgtcttcgccatgcatataaatacgttaacgttatattatatataaatatatataatataatgtatactcttttttatataatgtcttgagttttctctaagttaagtattacgtagtcaataccaaatactaataaatataaggtgagcatgcatggccccaaattaatttgttttaataaatttcgatgcattaataattctagaacttttttctagtgttacatatgttatataaactaacaattaacccaagatctatttgtatataacatagaacacaataataagata

SEQ ID NO: 306584 - DNA, 2561 bp, Cannabis indica
tatgagtgaattgcctaatatatttattttttaattacttaagtctatcacataatttttaatttatattagcttaagggatataatgagaacatcatctgtaaaagtaagtatattctaaagaatataaaaataaaattaaaaattaaaacatacaaaataaaataggtatacaatataatttttttaaagttaaatggactacatttaaaaaaaatgttgttatgggaatttttatatatatttttatattatttttctgacacaatttttttcacttgtattattattattattatatctatgaaataatgttgtttttgcattgttttcactgttttcacgtggtagcaatatgatcatattctatattttaaaaaaaaactgtaaaattcataaaaatattaaaaaaaaacttgtatattcatattttttttttggaatatttatgaaaatattcaatttttttattatgcaactttcatgtgagttttgcttggagtttaaagaaaatcatgtaaggtctaaaagtaagcttggaagatgttcaaattttatgctataagcatgaaaattttatttgtggggggttgaactcgcctttgtgtcccttatgtggaagttattaaagaagcagtcttctgttttcaccctcttaaagtcctgggactagacaggatgtcaggttttgtttttttcaaaaatattgggacatagtgggagattctttttgtgttgctgtcgagaaagttttttatacaggggtaatcaatcccagattgaattacaccttcatatgttttattccaaagctttaaaactttgaaaaatataacagtttagaccaattagtctttgtaacttcctttataaggtggtggctaagatcatctctaataggttacgccctattatggatgacttggtttcctctttacaagcggcttttgttccaggtagatggatcgcggaattctcaattttgacccaagaaatcattcacaagattcaaaagaagaaagggaagggaggtcttatggcaatcaagctagatatgttcaaggcctatgataggccggaatggttttttatccatagagttctcttggctaatgggtttaatgagagaagttgcaaccttattatggcttgtataagaagtgtctccaactcggtgttacttaatggaagtccgctcaagaaatttgtccatcaaagagggcttcgacaaggggatatgttatctccctttatctttcttttatgtcgggaagttctgtcaaaacccatccaaagagctgaagttagagggttgttacatgggattaaaatctgctccctctattccttatcttatgtttgtcgatgacactatcatgtttggtcgggccaacgaaaaggaagctgaagcttttattcaatgtttaactctttacgagaagtggtcagagcaggaatgcagctagtcgaagtctaatgttctcttctccaaaaatttaagtcatgctcggaaacaatctttattgcattgttcggagatcaagcagtcaaatggtgaagaacaacatttgggcaatccttttatttttaaaagaagaataaaacaagattataaaaaacttaaggataatttaactaaacgcctggaaggttggaaactgaagtgttgtcttatgctggtagactcactcttataaagtctatggtaccctctatgccaatttacgctatgtctaccaatatggtttcgctttcaatttatcgcagtttggatgccatgatgagaaaattctagtggataggaggcatggacaaggccaggttcatgtcttctaaatcttgggattgtatttctcaacctaaatctcatggggggttgggatttaggaggtttgaagacatgaataaagctattctttccaagcttgcgtggagtttagccaatgatgttccaaaaccttgggttcaatgcatgttgaggaagtattgccgttcacaaaacttctggaatgtggaggtcaagtctaatgattatgatatttagaagggcatcattaactcaagagatattattctcgaagggtctatttcttggctgcctgtggagataccattgacttttggaagtaaccttggatcccgtggttgaagattatggattctcaagagttaatgaggggtctaagaagtagtggttttataatgaaaacagtggcaaatatttcaattaataatggctagaataaggatatggtcttacaaatttttgaaccttcaatgtccacaaagttcttgaaatttcaagaattccatcgtaattcgaggactaattggtttggaagcataggaagaatgggcaattttctatctaggatgcttgttttgtgaatcaaatctcgagatttagaccgaagcttgagatttggaaatggttattcacttcatcctaaggtggcggttatgttgtggagaattttgaatgaagcactgcctactaggtccaggctccctttcttaacagaaaaaagagtgtcttttgtgtggtgatatcagaacatgga

SEQ ID NO: 306585 - DNA, 3242 bp, Cannabis indica
  modified_base (48)..(48): a, c, t, g, unknown or other
tgggtctcttcaataatcttcagtttagcacgagcctcattgatttgngtagtcaatctacctaaatgtgattttattccattatatttgtatatcttaatatcaattaggcagtgattattcttctcgtatctcgaaacatcttaggcaatagtaatctagtggagagagttatttagccaaacaagaagagtctagtggagtttttcatatatgaataatatattgattttctttatggttttagaatgaaattcatcagggaatattagacaaaccaatcaaccacatataatttatgttatgcaacgtgtttgattaggttaagaaactatagattttcatggtgatttgtccacttccattaatctcatataatatatgttttttttccctgtcaataaaaaataaaaatgtaatatatagtataatattagagtagcatggagatttcctaatgaggttcttgtctagttcctattagtctttttattatttaatcccaaagggctgcttattttactttgtgattggaatgaaattatttatttatttaattattatacaaaatgcaactaatcaataattttggtgtagacgtataccataagagtagtgcaataaattacccccacaaaacttgattattaacaaagtagtctgtatgtatggtcataaatgacacaatttcagactttcagtagtactgcaagcacttataaagatgcagcaaagttatatatggctattatgagtatgtctaaaatggttgtatagcaatataataattgtacttaaaatagtgaaaatattctcaagtttattacagttgacttataaaacttagagccccaattctttaattgtataccatatctacaaacatttatcagaccatttaatttctttaatgtctaaatgcttttttgtatttggcctacaaattgtttgttataaatgtaataatagttctggcacatgcagtaaaaagcagatttataataataatatacatcacatgcattatattatgatgttcctttgaacacactatatatactctccatgtttgaaaacaaagtgggattattatatttgattactactttatcataataaactataatgaaaaataaacagaacaaattctgttctttcacacatatgccttaaaaaatctgaatgtgaattcaaattgaaaaaatgcaaaatcgctaagacattaatttggtggagtttttatcttttttcttagtactttccattttttatgtgccactaaaaaatgagtcacacaaaaacacaagtgcataatagtattttcttttaaaagattttcatatgtgaaaccctttggtatgatcagtgtgaatataaaattcattgaatatcctagagcaccaatgatgattcccactaaccccttgacctaaattagtgaaggagctaaattttttgccacaacaaccatcattcttgtgtcactctccacttgaatagtgagttccatctttttcttattatttcataattaatattataacgtatgatatttttttggacaaaccccacttaccaatttaatttctttctgtactgcattttttttttctttctttatctaaaaatctatggtcacactacgagtggagcgaaagattgaaacgcgttaagcccttactattggatggtgtcttatatgtcaaccttttcaactttagtaattaatttatatctcaatacttttttttattatttcttaagtttatttatttaattattttcctatactttacgtaaatgtataaatatgagggttaccctcttattttagaggaagcaaaacattttgtattagttttctctaagaagactttttgtattgctacatacataaatacatataaggaatattaattaactatggctgcagcaagaactctcatttctctacttgttattcttcttggtttttctcacctgttatgctctaatgctatcccacttacaagtaacttaacaattctcaccagcacttcttgtttcctttttcctcatatatatatatatatatatcatttaaaataatcctaaaatattgtaaacttgtttcagggaatgaaagattgatgatgcaaaatggagttcaagctcatcttcctacagcaacaaataatctggtacgatcttaattataagtgtttgtaggactaaatctgaaaaatctctgaaaccaattataaatctattatatattatagaaggaaagttgcagttaataattctaaattgaacaattactatattacaggcaaaagctgagaatattgtttgggaggctgatgaaactattattccagaaagaatgggtgtggagcttcatgactatcctggttctggtgccaataatcgccacactccaaagccccaagggaaatgtgctgagtgttagtttagtcttctctatataatatataaatatatagtattggaatactgtgttatggtcagcaatttattgtaacaagatttttcttctttgtcactcaattaagttgattaagaagatgcatggcgcatagtaatatagtatggtatgagtgagagtagagatatatatagtaggtgaataatagtagccaaatatttagtagtatatataatggatacacatatacagctaggtatattggttactattattctttatacatatataaatattaatagtacgaaattaatatgtagttttatggctaattatatggctaatgaaggagagatggaaaacagttcccttggtgggacatttaatggttttaatcacttccttggacttaattaatgttgttctatatatatatgatcagtacgtatgagagctctatattcaaatatatacttaatttatccatattaatgcacgtttatatactatgtattaataagatgcatgttttgttcgaattgctattaatacttaattattaataataaaactaaatttaatacaattctttacatcaaaaatctaatttactcaatttattacaaaaaaatccatatacgcttacatcatcatttttacctttcctcttttttttattacaattataccacttacacatcaattccatgcatgcagccacgtcattgattgatgacttatatcaatcacaccttacatcattcacttatctttttctcttcttccttttttttaattattttcaatttctttt

SEQ ID NO: 306586 - DNA, 2305 bp, Cannabis indica
ttttttgtttggttttattttaaagtattaaaatagtcattctaaaaggattttcccatcattttagtagaataactatttaattttctgatagaaaaaaagaacatttcaacaagatgaaaaaagttgaatccctttcattcctatgcctattctaatttttattttcatttttattcttatagttttattcctctcaattaaacgtcacctaatagtatgccattatcgaaacaaattgacaaaaatcaattcaagtactcacaattaaagatattcaagttcatcaacgaaaaatagaatgaaaagaaaagaaaactcaattataataaaataaaatgcatgcattatactaaagagttcaattaaaaaaaattaattagtagagtaagaggtgataaaattcatagaaatgataaaagagcttgatttactaaactaaactaaattagtaaatgataatttttatacaataaattcttaggtaagtgatcaagaaataagaaagacagaaagaaaatgatgaattaaatctaattattattatcattattgagattgagaagctgatgacatagaattagtaccgcatgttgaaacccagtaagataaatggcaagagtgcattggtgttttccaggacaaagtgcagagaaaataatatcaggaataattggaattgtcatgaaggatgagaaattataaagaaacattgtcaaaaacagctcctttaaccctgatgataccgtaagcttttccatttaatattatatatatgtgtgtgtatttttcagactaataaatattgtaatctacaacggaataagaaccgatcaataatactaaagatcagcagagaagatggagaaagaaagcgttacaagtgaagatgtatatatatatatatttatatatataattgaaaagaaggagaaagagctttttagatacttccaattttgctttcgttgataaaaattgaaatgttacactattaccgtaccaattaattaagagagtggccaatacctttatgagatataatatcgttattaatataatttaatatttaattctatttattttaatttaataaaaattatagagaatcgttaactaattataattataatatgttatatcataagtgttaaccaacttagtttgttactttgttgcatgtcacttatatggggaaggagatgaaaaaaagtataatacaaacagaagtggttgagttggcgaaatcagatgaaggtgagttcaatattaataatccactctattttattaccacagaataattaaaagttaattattgaaataagttgtaacccttcttaagtagtgatggaatggaacaccaagtgatagctgcacccgcatatgcagcaaagcaatttaataaaacagagtaacgatgttttttaatttaagactatttataaatttttagaaaattttaaataattcataatgctaaaaataagatttatatattttattgtacgcgcgattatttttcttataataaataaccgtttaaactttatttccgttactgtaaattatatagaagtttttaaaaaatttacaaatagttttaaatagctataacgtttgttatgcgatcaagatttgtttgttatgaaatgtactctctctgtttttttttatttatttattaatttcttttataaccattaaacattgacttaccgttgtgcaaacaattaatactcatctttgagtaacagtgaaaaagaaaaagaagaagaaaagaaaagaaacacacactaaaagattaattttatagtttagctagtatgtaattggaatacaaaattcgttagttttaattttattaagtgcctttttgatagccaaattaaaatcgtagatcatgaatataaaatttcttcttgaccgtatgtatgacaaagtacaaagatgaaattttacgtttattgtaatatttattatttttttcacaagaatattataaagctttaaatatttgttgagttattaattattaattttattaaaaaattgtcttcccactgaaaataaaaatgggatcggccactgcttggtgacaggttcttatacttgaccagcttagcattgcaatttacatctaaaaaaaagtgtacttttttgtttttttacaatgtgaccaaatttcaattattttatttactttgtatcttcaatttttacccaaaaaactatcttaaacaaccttactaatttaattaaggatattttttcatttttacacttcaaaaagtttttttttttt

SEQ ID NO: 306587 - DNA, 1205 bp, Cannabis indica
ttaattgataaatgcttttttttttttttataatcaaaataccaaatataacctcacataacttattaaaattaaagtttctaatacacataattagaatatgatttacaaaactgggtataaattaaagaataataaaatgaaggtaaatattaaaaaaataaataaaaaatggctatagagtgtaatttctttaatttttttctgttgtaaaaattttctctaaactataaaaatcgatacaaatatcccttgtaactgcaaatgcattttgcgtatttccttaaacaatttgctgcatatttcctataataatttgctgatatagcattagtacataacattaatctaatctaatttaataaatgcataaataacaatctaacaatgaattatgaggatatttgcaacgagagttttcacgatgatttgtatagtttaaggagaatttttacaataaaagggataaaactctaaaaataccatagttcagaaaaaaaaaatcttatttattattttataatttagcataatatatctgaaaaagagactaacaaagttgatattgtgtttagaaaaaaagatgtattttgtttagttttcttgtatcttagtctctaaaattttctatttagttacatgtgttaaactatagcctatatgtaggtatacttttttcctcctcttttgaccttttctttataattatttgaaaggattttaggcttgtttggactttggattaatttatcaagaaaaaatatgagaaaaaaaaacttatactatagcttgagatattttttatgcatgaattggctttgagttaaggcgggctaaatttatgcctaagacctaccaagtttaaaggctcaataatttaaaaaataccacgtatttttctttaataaatgacccaataataatttttttattcaagattcatccaatctcaaaactaagataatacttaaaaaaagatatttttagtacattattggtaaattatgttgagctcacatcacatgcatgtttcaaatcactaaatcataaacacgttatcatacttttttttttccatcaaaaaatagtaataaaaagagtaataccaatgaatatttaatcttttgaggagactttttacctttcttatctttttttttttttgttaaccttattcaatggatcttatttattacttttttttt

SEQ ID NO: 306588 - DNA, 4590 bp, Cannabis indica
tttaaatttttcaatctaatacacagtggatattcacagtttgtgaattgaattagattgaattgtgtagattagattagatcaactattttataaatacccctaattatacccaattgcactgtgttaaaacttgcaataaatgttaaccgaagcaccaaaatgtgtcagctaactatacatagcatcattacgtatccagagaagcaaaatttatgatttataagttttctgtgagaaaagagcaaagtgaaattatgattagaaataatttcatttcttttgagatgatttagttctgccacttctttctcatactcagtgggaattaaatatatgctttgcatggtattgtgaatgaatctgttaaaaacttttggaataaatattcacaactgatttagaggttcatgagtttgtctcgcttccctttctattccacttttgctttttaatcaactaaataagaatattggcatcaaattcttgtgggggtatgaccaataaatactatttcgaaactacctaaaaatgcttcattaatcattactactcatcactgcctaaccacgtttagttcaccaaaaaaagtacaaaagctaaaaagttttttttttttgtcataaacttaaaaagatacgtgttgctttataaaccaaatcatcgatcctacatcctaaaccaaatctcttccaaatctaagttgcttacaacacaactttcagaagcctcttcgattgctttaatgctaaagcaattaacatttattgaattcattgcctaagtccttcagttcagagagatatttatgaaattcatagcattgatatataccaacttctgcagtacataagccgaaaaagaaggctcatctcaaacaagcgttggcttttactcaggagaactaattaacaagatcattacacaaggctcactcatatatatctttacattttaaatctctctctagtctctaccacaatacagcactgccaaaatttgaatttgatcagatcagaacagaacaagatgagaaaagcaatagacctcatttattgtggcgctaaaaaataataataattacaaaatgtatatacaagtagatatggaacaaggaaacattatgcacctcacatctctgataaaagattgcttatttttcgaagttccttgagagcagccattgctgttacttgtcctttgcctactagaatgtttttcgagaaattctccaatgaccctgcttgagtcgccctatcttgttggaataccgactcgattacctgttttacaaattgttagccttgtggtaatgccacagaaaatgaatgtaatgttttagtaatttttcaaaaccaatttttatcattatttcccatcatcttatcacaagactagaatcaactagaaacaaaaacggttacaattggtggaaaactcgggagtgctatcatgcattgaccagctaaaatatacaccataatttgtcgggggaaatttgaaatcaagataaatgatttgtttggcactgatggaaatcatttcccatttctgaaaatattcatgtctttaaaaatctaactatttgagcttccatgtaacattatgtagaggtggcaatgataaaattattcctagaagatatactaagtttaaaaatgaaataatgatggaagttactgcaagggaacagacatatcctgccataaaatctaaaattgatcagattggatatttcagaaataagaatgttacctgaatatgttcaagcatagaatgcccaagattctttaaagtacccatcacattctgatcaacgacatctcctttgccagactttgtagactcacaattaccagacccatcatcctcagaaacagttgaagttttctgatgactttcttcattggcagactttgtagcctcagaattgcctcctttctcagacatcccttcaatagtaggattccttccaaacttccaaaaccattgaaatttacctgaaagaggttttttctcctttaactctgtcactgaatttcccagtgaatcatttttgcattcagatttttgagagacaacctcggggggatgagaaattggaagtggtgaatcctccgaaatattctgggcatgttcatcattctcgtcaagagataaattagatgcaacactacttttctctgaatcattttcatgatcattagtttcactatgaggacttgttggatctgagaaaatagatgaattttcttcactcccagcatttccgctcgaacatctatcctcagaaatgcagacaatctcctgacaaaaaccatcttctctactatgttctacttctgctgaaataatatctgtattgcctgaaacttcatgactacctacattgcccatatcatcttccaaaccaagttcccgggaaagatcttccagcaatcgtcgcctaacagatggcttagggttctttttgcttttcacaaaattgcttggacatgggtctgactccgttctagacagtcttaattttactttatcggtccatcctttcttctgtgttggaacatttttcttcaagctatcttttctgagctcttcttctctatggtgaactctccacttctcttcccagtaacttacagataccaaatttaatggagacgttggagaagaatcaattgattcactggaacctctcacaaccatagatttagagtggttaaaagttccattataagaggatgaagatgagatattactgttcaatgcaagagtctgcagagacttggctttctccaacaattttttcaaatccacattctcagggaaattcaataacctctgaagacatgaagtagcgtgctcagtgccaagtaaggaagatctcaaatgaagtaacatagaaactgctacagctgaaataaatgctcctcgagaagaacaaaggaccccatatgagcctccatcatcttctccacttttctccaattttttattttctgatgcgaatatctcatcccaaattgtcaacagacctcctagcgaaaattcacgtccaaataggactcgcaaccagcggagtgcaaaatactgtggctcaacaccaagctccactagatggctatgtagagatgggtcaacaaacaacaacagatgatacaatgcagcagaagcttcaatcacaggggtaagccagattgggattcacgagcaggagatggagagaagaactctgccatggcaactgcaccattggctccattcatcaaagcatcaaacaggcaataagcatcatgctccataaatttctctgaaataacaatacccaattcaccttcagcaccataagggtcacttagtaatattattgtctgtatctcaggatcaagctcattaagacttctcgcttttgacacattttcatgggagtcaatgttatcttcagtataatcagaagatcttctgtaatcaaaattatatgtatcattgtcttgaaatgatagaccatcaaatttgtccatgaaatggtcttcatagactgttcgcacatgtgaaagacgctctacatcaacatgaagaacatatagaagaggagccaagagttcatgcattcctacaaaagaaagtttacgttaaaaaatcaagaataataaaaaaaaactattacaaaccacgtgtcaggaaacaagttgacaaaaaccacatagaggtaataatatttttaaatgtaaattatataaatctatataatataagaaacaaagtcggtacttggatataattaattaatctaatcacaagaaagcaatataaattagaaagaaatgacaatgaagtgtgtccaaccgttgaagactaaaagagctatactacataatatacaaattaatcttgcaagtgatttccttcatgtaattatgtaatttaccttgtctgtaaccaaactcagaatgtctaaggcaccacaataacaatattcttcttaacatgccctggcatcctggtgtctggaagtagctcccatgttctgggtataacctggataaatcttggtcaaccattttctccagttccgcatttcgaaagaagcgaccccaagtgctatctgcatgtagcatttacaacaggttcaacatcagttcgtacattgtgtacttgttagccacctaggagttgtgaagagactaactactatcacatgcacttcttttcttcaaatttatactaaacaaagagtaatatactagccttggctcatgaggagacatcaagttaaccagtagttgactaagtgtgttctacagaatgggataaaacaatgagcccatgtgacaacctttggaacattttctttttaatcatcagtatttcgttccattttctcatttatcaccttgtcttcagattaataagacaaagctatttaaatttgcagatgatataaagcctaatctagaccatattcttcaaatgcaacatcacaagttcaaactcaaattctaacaatagtaatccccatcctccttccacaacacaagaagggaaagagaaacaaaaaaacccaaacgaaaaaaaaaagaagaaaagtaa

SEQ ID NO: 306589 - DNA, 1193 bp, Cannabis indica
aaaaaaaaaaattaaaagggttttgtcaaaaaaaaaaaatgtataaaaattaaaacataactctggctaaaataattaatccatatatacataagggtttaattaagttaatgagtgatgatgatgagactcaccatatgtgataggttgtaggatgatatcaagaaaagggttgtaaaaatctatataaaccattgtggaatgaggaagttgttgagtgagtagagttaaatgagaagagagtttatggttgaacattttcactgcttcattgtactcattcgcacaatctcttacaatgtctccacctattgttcttgaaaatggcaaacatcccagtggtgatgtattaagaacaacgaattttcttgcacccaaatcgtataattcctgtatatatatgataataataattaattaattaatttaaaagataataataattatgacattataattaattattattatagtaatatgcatggggtacgtactctgaaaaactgtgaagcaaagttaaccaaaaggtcagtgtaggaaggaacatcatagtggaatcgtctaagatttgtggagaaatagctgaataagatatcattattaccagatgatattagaaacacactgttatcgattatgttttttgctcttctttctccaacacctcttttcagctttctcttataatctttgaagagctttatttgatctgacaaagggataacttgctgtatatatacaatatcataaccaataattaattaatatttaaataaactataattaaattaaagaaaaaagttatattaggtttacaatatcatatatttacattaattttggatgataaaggatcatatccggagccacctgaggcaaaacataaacctgtttcaagatccttcatttgcaactctttgtcatggtatgaaggcaaaagttccttcactcccaatgcttccgctacaaaaaaataaataaattatgtatatatgtacttacaaattattattaaaattaattaatcatatatatatatatatattctggcatggttaattaattcattatcattcactttgtacaatacatatgcatgcattccatgcatcttataatatttagaacttggttttattttttcaataagatttttatttttaaattaaattagtgataatttgtaactaaat

SEQ ID NO: 306590 - DNA, 1001 bp, Cannabis indica
aatgataaagtacattacatacacatagttcatttttttttttttgaaaaattatgtgcagatagttcgttttaaagattgacaacctacccatcattcagggcgcatttgaaaagtcattgtgtaattgaaattgagtgtaattcgaagtaattacgatgtttgatgtgtttgtttaactatgtaattatacaatttttatgtaattagagataattgagtagtttcaattatatgacctccatgagaatttagtataattatattgtgtaattacacaatattaccatttttagataattaatattgttaaactttataattactatttactaactcatttgccaaatataaaaataataatacaattactacttaacatccaaatacacattgtattttaaaataaaatgtaattattctcatagtaattacactactaactactaagtaattacacatttgctttcaaacgcaaccttaataattttggtgttagatattcttaaattaggtactatcgaatcgagtgaattcaataatacagagatgttggcattccaacttccattatcctttcaagatttattcgaaagagattattgatcgtaaatatttaaataaaatgaatcgttttgtagatatttttaacttcggaataaataattttataaattatttcaacattatggacaattctctaacaaatgatataagaaaattctcatttaaagatcaattaacgaggattaaatttgtgacaaaaagcatcacattttgatttatatatttgaaattcagtttttgttgtagtttttgaaaatgaaatcaaatattaattttgccctcactgttagattaaaaatcttttgtgggcacatatgtataatgtatatgctattataaagtgtgatacaaaattaagtgaccaattatgttatgggtatcaaaagggtattaaattgtcatggaattaatgtgtagataccataagttaattt

SEQ ID NO: 306591 - DNA, 2040 bp, Cannabis indica
gttgcactaaaaaataaaagattatacactaattagtaaattcgacgggagattaatgctaaattaatgtaaccatggtcttaataatagatcgaccgcagtcctttcagtttcaatgcaataaaattgtaaagaaagaaaaagaaaatgttgttattaaattcaaacatgaaaaggactaattaaatacagataggctaggaggctcaaactcgaatgacctactaactcccaagagaaatgataaaataatagcactgcaatttgcagacaatgacaccctaaacgagttattagtgcctttttgtaacttagctcactctaactcattcagaataaagctcaaactcttagacattgtgaatagtgcatcttagctaacccaaattttaatactaatttattactattattatctaatctcactcaatcagtacatgtttttggcaaagaatctttctgtattaatgttattaaaaaactccaatttttatttatttatttatttttatcaaaccaataagaacatgtgatgtaagaccctctctaatgaagatttaacttttgtgcaaaagttgccaaaaaaacaaaattgtgctatatgaattaagtttctacgtttacttccaaaaaaaaaaaagtttagtagctcaactaactggatgcattttcttttcgaacaagtttaagatatatatatttataaaacattaaattaatgtcaacctatcaaacatttaagttttattattattattatcattagcacattttgtgcttaattgaaactaagagagaccgggttcatttgagtgtctaacaaacacccccccaccactgaaccaaatctattggcttataaactaacctctccgtgaggggaattattttatataatattttttaatttgtttttaaaatttacagttcggattacttcagcagtttctatataaatttttaagtttctctattagttgctatgtggattgctacataggtaacccacattgagatgagaggaggccgtcgttttccctgaaaataaaaataaaaatcgagaaaaaaatatatatgtattttagttagttacaaatacaatatatatttgtaagtaaatgtaataaatataaacataatagtaactttggcatgttagttagactatttcacacattatggaagttaagagttcaaatccttgtaaaaacatatgtttttaatgtttagtttattttttgcccttttactaaaaaaaaaagtaaaagtatgtctactttaattttaattctagatttgtcacttaatatatatataaaaaaaaattgtgttaaagtgttaaaaaaatgtaaaaattaaagattaaagtttttctttgatttactattcaagtaaagatagtcatatgtatacagtatactcatcgttagtaaagatatgaacaccatattggatgcatgcttggatgatacaatatattttagagttaatctacttattattaatttgacttcatctttcgaaatatatacaccaaacatgataattacataatccaatagaaaattaaaagtaatacaaatatattttagaaataatattacatagataaataaaagggcacatcaagcaacatcaattgacttacacgaatgagcatgcataaccactttgatttgacctcttgtttattattatcatcccttcacttagctcatctcatcaaatccttgtataaggtatattttcagtttgattttgatatgaaatatcttgacaaagacaacattaagaattcattgaaagtcacaacaagcctaagccttctttcctcatggaccttttcattagaatgactgtgatatttatgtaggcagaggcagtgaggcccatcaaggttattttgacttgggctatttacaaaaatatgggaaaataaagataagttttgatatatatggcataaaaacttaattacactaaatatgacattttttaaaaaaacttacaaatatgggaaaaaatcatgagaaatgccat

SEQ ID NO: 306592 - DNA, 1149 bp, Cannabis indica
aaataataaaatacaaaagataaaaaaatttactaactaattacttagtatcatatcgatatgacatcaaataagttaaagtatcaacaacaagctgtaagaaattatttaccaaaaaataatacataaaaaaaaacaaaaaaagcaaaaaagtatatataagaaaaaaattatttgacaaggacaaactgtttgtatttgttttattataacatcaatctatatattgatgttctatatattgatgttataatcttctaattctagtgtattctcaatttattattaattagtactgttactatagttttcatctataattatactccatattctctttctaaaataaaaataagaaatcaaatcatacaaataatatgatcaagtcaataatgtattatactaaaaagaagacgaagtaaaatttgctatttaaagtgaaatttgatatttaaaaaataagtattgatattaggtaccttaattatttaatacataataatatatggtgatgaacctaaaatttttattttatgggactaattgttataaaaacatatttatccctatattaaaaaaaaattaagtactttaatatatttaattaatttgacaatgacttaattaattatcaaatataattgtgggacttttttacttttttagttttaattatctaataataaaataaaataaaaaattaactttttatgtataatttgttttttgaggctatagccccatagtagtcatatactgatccgtctatcttgaattaggatatgttgtattgtattttagtaattcttaatattatttatcaaattaaagagaaatattaaaacacaccaattaaattgtgtgaagttcgatattaaaatacacaaataaaaatacatcgacttagttgtagtgcttgaggtatcccgttaacatttttcttaacccacaaccacaagccaatgtattgcgccatacataattattaggggcaaataattattttattattagtaatgtgaaacaattataattagagttaattagagtgtgtttggtaactgttttttaatcagttttttattttataaattagatcaaaagtgaaaatattttcaaaaaaaatgttctataaaattgttttcactt

SEQ ID NO: 306593 - DNA, 1340 bp, Cannabis indica
ttctagaaatataacttaggtattattggtgctaaaattaaacttaaaaatttatttgcaactgagagttaaatttaaatattcatggtgcaaattactcctaaaaaaacattaattcttactaatgaacaaaaacaaaaatcaccattaataactcttttaacattatataatatatataaatatatatatgaaggaataggtcactgcaaaatttcttcaagaatattatctatgatgatatctataatatatacgaatatacaaatatatattatcactacttcatgtgcaaaattattctcatatatagagattctctaattgttataaagagtaaatttgtaacatgtgttatatgcccactcataagaaaacaaataaataaataaataaaaattcctagctcttatattttctgcttttttatttttttttaatgtatggtaattaattggtaatatcatgtaaatggtagacgtttttatcaaattagaaatataattaattggtatgattaattactttcaatagaatgattcctaacactaagaatccttctagattggccaaaaaatagcaatattattattttagtcaaaatgtaataattaatatttgtacatccagtaataaaaatttgagaatatataagaaaaaatatcactataagaccatcctaatcatctttaaaattttgattaatcatatgtattaaaaaagcaataaattattgagttatatataattatagctaaacctttttttagagtcacaaatattttattttctggtcaaagcttaaaagtgacaattaattaattaaaaaatatttatttattaaaaaattattaatatctcctccacataaataaaaattataattttttatgttcttggtaacaaagcacccagacgattacaacaatttctttttccaagataattgagaattgatagacaatgacatttatgaagctataaccttttttttgccaacttttaaaagaaatcaattcaattgtattgacacttgtttctaaaattaagtatccaaatacacttagtgattatcgtcctatcgcctgctccaatattttttataaagctgctacaaagttaatctgctcgaggctcaaaacaatcctcccaaatttagttgctcaaaaccaaggagaatttgtacaaggaacgttcataggccacaatataataatatatcaagatcttattcaacattatggaaggaaaataagcaaaaccaattgtatgattaaactggatctacaaaaagcatacgacaccatcgagtgggacttcatagaagagatgctatatgc

SEQ ID NO: 306594 - DNA, 1891 bp, Cannabis indica
ggtaacttatcaacaggattcacctccctaatctctcatcttgaataatcttcgtttattttctctttaattttctgagtaactttccaattgcaaacttattattttaccaaatagaatcataagtatagtttagtattacttaatccaattccatgtggttcgacctcacttgcgtgagatactacttgattgcgtacacttgcgtaataaacataaaattcgtaacaccaagattgtggcgactttcacaagactttcaaaaggcatgttgaccctgataacttcagaagtgttcttaaaaggtgtcgaagtaacaaaaaagagagcccgattgttgatgatcttcttccacagcatgtttctggttttccaacagattcggctgatgtgaattcatcttttccagtgaaggttgcgcaacagcagccctgctcacagccatgaaaataatcagttggaatgccaagggcttgagaaacccttcgacattcagacatcttaagtttctgatcaaagagcagcgtcctgatttgctttctattatagaaactaagttaaaatgtaactccttagattgtgttcgctttatccttaaattcagtaatggacttaaagtcccaagggttggattaaaggggggtttattgctggtatggagggctaatgtatgttgatgtaactctaaattcttattcaatgaatcactttgatgtttttgtttcgtatgataacggctgtcattttcatttcactgctttttatggagcgcctaaaactcatttaaggattcacacttggaatcttttgagaagtcttgcttcaccttctagcaatgatccttggttggttcttggtgatttcaatgagttattaagtaatgaggataaagaaggtggccctccaagaggtgaaaatcttatggatgagttttgaaaggctattgatttttgtaatcttgtggcaattccatacactggtgatcaatttacatggactaataaaaatcatactgggactttaattcgagaacgtcttgatcgagggttcattaatggtatatggcctgaggtttgtgttgaagcccaaccctctcatcttgacttctacctctcggaccatcgcgctattgaatatattgtatccttaccacaacagatattggctacaaataaaagacatcatagatttcgatttgagcaattttggcttaaagattctgactgtcgagacattatttaatccacctagaagactaattgttttggtcaatcggttactcttctactgcataatattgtagtatgctctaatgcacttcaagaataacacatttcgaaatatggccaaatgggccgtgatattacagatgctcacagaatctctgctcagttgcataacagtagagatatttcttctcaacatatccaaaatgtggaaaatgctgataaaattcttgatgacttgttagaaaaagaggaggtttactggcatcaacgtgctagagtcgactagttagaaagtggggattccaataccgaattctttcacgctagggccaaattgaggaatgccatttataagatcaaagctcttcatactagaagtggtggcattgtccatgcagaggaagacattgtcttagaaatttacaattattttttgaatctgttctcttctaatggaattaatcatgaagctttgcaagtttttttatctactattaatactgctattactcctaagatgaactcatttttgtgttgggttttgtgccctaaataaaacacatttcaatataaccagatttacttattaataaagatcagaaataacatttttatgttgcatggttcacatgatttatttcatgattatatatataatgtat

SEQ ID NO: 306595 - DNA, 1356 bp, Cannabis indica
ttggaccaggaccacttttatgtgacatgaggcaacctctcaaccaatcagctgttaacgttgtgattcaacatgtttaaaagaacaaactctctctgtttaggtggagaaattttgaaagctgaagagttccttgagaccataatcaaatttaaaggtctgcaatctgtctatgaaaaatacagtgttaatattaggacaagcaacctgttgctatatcactgaccggtgattaagtgtgattagtgttaacttaacattccatattgttgggtattttaatgtcaatgattgtagacacttgtcaattgaataatggcttatgccaattctgtaatgagtataaaatatcaatacaatcactcatgctcattgagctgagaattcactcattgcctctgctatcgtttatctgttttacctttttttcttcacttggtatcagagaagaaatcggccaacgccatggcatctcacactccagcaagggccacaggccaaggaacaccagaagcaggaggttcagctcactccggcattcatacagttgggaactaaccctttactttgaagttagatcgaaagaactgatcatttttttaatatggatatttagctttgaccactggtatgtgacatgaggcaacctgctaaccgattagccgttaatgttttagttataatttcgttttgacttttttgattgttttttaattcaacatgcttaaaagaacaaacctctctgtttatgtggggaaattttgaccttaaaattattagttttggatctatctcaggaaagtggttcataccaacagaggatgcttaccgagtatgtcaaacacatacaatcaagaaccaaggagattgttgaagtatagtagttagtgcctatgaaaatgaatgattcataaattatttttggatgtgaaattctaatatgggcattgctgtttattattttcaaactgaagaagaaaagagtatcttggagtattagaattccatgtatttatctttctgtagagatctcttgttattcttaatggaactattatttatatcctttgtatatatattgtatataaaggatggaagtacccttttggttttgtgttggtttggtatagtcccacattagttacaaacaaaactgaggggagctcttaaatacagctataaaatgagagttgctttggcagaacaatagtcccacattggttaaaaaaatatttagctacaactattagaaaagaaataattatgctaatttaagtagttatattttttaaaaatatattctataaaactggttttattttttaattttataattaaaaataaaaattttttttt

SEQ ID NO: 306596 - DNA, 1714 bp, Cannabis indica
tttcttatagtgcaattgaataatctagctaaatattgttaggtataactcagtaataccatattctctgttttaatattccaattaatcatattgttttttaactcttcataccaaataatatattagatctataagcatattctggacaagaaataatatcaggacacaagactaaaagctttagattgtctactatatcaatatggaattataatctcacgcgaatttatactagaaaatgaataaaaaattcatgtctttgagttgaaattctacacaagttgttgcgagaagaaagaaaaaaaaaagcaaatatttctaactctgtaactggagataactcaagaacataatacagcatggcaaaaattttgcagagcctcatagcactacagacacctaaattaaatccttcttgacctctaacttacttcctattaccataaggattgattctgctgaatccatttcggcttccttcaaccctgcgtgtagtctttctgaatttcgaagcattgctgtctatgttcaggttcaccttaggtgggttagaaaagcagaacgaagcagcaaccgcctgtataaaatcaaaaaaaataaatgcattaactaatgcagagcacgaccataaaatacatgcacagcagatggtttttaagtggaataaaaactcagggatctcataagatgacaggcttaatcaactaagcaatattaaggctgagagtgaaggccagagacaactgtagtaaaatagttctgtttgcttttccacaacagattatgtttgaagagttttagagaattatagccttgacctgacgaatgccataggagggagaaaaattggttgattgggtatgatgtatcacaagaaatagtgatggacaatttttatgcactcgatgtagtgtgcaagcaaaaattctacaccctaacattatttatcaattcttgttaatattttaggactagccatccaagcattacaaaagcagtgtctgtaatagtgaaaccttaatgaaactaccacagataaatagattaaataaaactaatatctggtacctgcatgtcaaggcggtgaacattgaaaatgtccttcatggagtgggaattataggccaatatatatgatctatatgcttcttttgcagacttgttcaaatagtagttattacccaccaacttctcctgcatcagtccaagtaatattattcagtttcacttgatttttagtctcaaaataatacaacaatccaacattgaggaatgagtaagttaccaggtgagactgcacattagaaagcttcttttcactaaattcatactctttaacagggacttttgcttcctgaaaattaatataacttgtaaatatcacatatggcaaataagaatgaagagaatacacaataatatacaagtgtaactataaatatatatacagggagcttattagggcatcactttttccctaccgtagggacgtggtatattttcactacttaagtagaaattatctcatttttttcgttattagcattgtatattgaaattataacactcacctgttatcagaaaattatgaataatttataataaaactcaaaatagtcacttgcccgcacatatatttatattttcttaaaaaaaaagtacaactaattgtttgaatcttattttcggtataatagattatgtaaaattt

SEQ ID NO: 306597 - DNA, 1093 bp, Cannabis indica
tcattgaaactgatagtcttactgtggtgcaagcgttacgtagctctattcctatggtttcagtactttgggagtattatttctgattgtaagatgttaaatgacttgcgagatgtttatgtcaattttattagatgttctacaaatagtattgctcatttcttagcacgagcatcctatttagttgatgatcgtgttatcaggattagtgatgttactctagattttaatcatgtaattactatggattgcaattaataaagatgatgaatttttttcaaaaaaacaaaattaaaacaaatcttgatctactcctcgaaaccctagtatgactgaaactatcacaattaaatctaaaacctaaattcaaatctaaaatttgaaatagcggctcattgactatggaggtgacgataaaggctgcaaggtggggcgagcttgaccccatcaatggtgaggtgatgcttttctcgtcagtgcttttgggctctcgatggacagagagaggggaaaagacgatgtggtgacagaagaacttagggcttcggggttctggtggtggtaaagggaaacaaagatcaagggtttcgagggttctcttcagatcttcagtaagagaatgagagatagagagaaatatttttgaattgaaagtggtagaatgagtatgttaatataagctaagtatagattggtataaaattatttggagaaatttattagatattgagtaaaattttaagcatggtatatgaaatttcactttagtaatctaactatagtgttcttgatagtaatgtgaagatgaagttgtattagatttacaagattattaaggtctttatttgaataaccaactagtggcatccaaaattttttgcaagagaaaaattgttaatattaatctcataaggatatattgtatacctcgaagagaaaaaaaaaatacacaaattcttcaaaagattatacattacatctcgatggtaaaacaattttttcattgaattcttttaaatattaataacaatttaccctaacaagttatacatataatttttttttttaaatataaatttgttactatcttaga

SEQ ID NO: 306598 - DNA, 800 bp, Cannabis indica
gtctaaattcttggaacaataagcttttctcttatggcaggaaagaggttttattaaaagtagttatttaatctattcctacctatgtgatgtcctgttttcagttaccattgaaaacctgtgaagagctggaagggttaatggcaagatattggtggactaattcaatgaacaaacagaaggtacattagttggcatggtataaattatgttttccaaagcaaaagggggtttagggtttcgttcttttgtctttcacaatcaagccatgttagcagctcaagcttggaggattcttacttgcccgagtactttaccagctcaaattataaagccaaatattaccaccatactatctttttggatgcttcaagtttgtgatttatttctttaattttagcttttagcaaaaaaaactaattctaaggtaatatttttactctaatgggtttacgtcgggtcggcctaaaatcttttatctatccaaaatattagtgttattagatcaaatcttatctttacacttagtgctctcacgttgaccttttatttcatcaaaaattgcaaatataaggaagggtttggttattgtagtagtctttattttcttcatttgtctatatggttaactaatactattttttttgtatagttggtcactttatttttatcaatgtaatttgtgaggttctttattactactttatttaaattatggtcattttgaatcactactataaattaggcctttagtgacactatttagtgacactcataaaagtgtgtgtcactaaaaaatt

SEQ ID NO: 306599 - DNA, 2916 bp, Cannabis indica
ttaaatttatataacatagatagattttttttatatatttgtgattataattaactagattaaaatattatcgttattataatagaatcttaacaagtcgcagcactttaaaaattataatttaccaaacacttagcttagcttttttccacagctctgctacagctgctttttctcgcagcacagctacagctgctttttcccacagcacagctgtgccaaactgggcctgaatctcaaaaagccgttaaagctgaggtggcagttgtctcgcgcgcgattgacccaatgcgaaactacgagacgattcaagctgtgaattgcacgcgcctcatacatattgcttttcgacagaagaatactatcgcgcctaaccgctcactctgtatgtgtatatatacacaagtgtgtagtgatgagatagctcattaattcatttcatttcatctataaacattcattctaatatcaccatcttctactggtgttacttcgtacggtcgtttctgctacaccattatcatctccgatattgaaccattttcatctagctattagctttggatatcgtcaggtatatatatatataaatgtaaatattacacattgttattttattagtgaattcgtacatactttagtgttggatcaatcaaagaatttcaatgtactttttggtgtatatatgtatgtatgcagaacagactacgtacagagatcggtcgaacgatatggagagatatttgagaacagattggggtgtgaagaacgtaattgtcatgatggctgtaatcggatcggttttctttaggtgtaatgtcttcgctgcgaacatcacagtcggcggctcttctggttgggatcttacttcagatcttcaagcttggactgcagaaactccatttcatgttggcgactcactaggttcgtacattatatacatatgtcaaaaattcaattcatatacatgaacattatttgtttttcttaattaccttctttaatttttaacaatattcgactcttcagattttgtaaattcatagtgtttaatcttaattaccttctttaacattcattatttcctattggtcatatatatacaattttagaaagaaagaaaaaagaaatgcaattttcaatctctcctgcaacattgttatatttggtgcaagaaatggagttagttattattgattagttatgcgtgcgtgcatattatatggcagtgttctcctacagtggggcccacgatgtgatagaagtgcaggaacaggattacgaatcgtgtaacgtctcacacccaatcaaaacctacaacgacggtgagacggtggtcccactgaaccagcaaggaaccaggtacttcgtctgcggtcgccaaggtcactgcctcatgggccaaaaactccaagtcaatgtacttccctcccctaccaccagcgaaggcggcgccgataaccctgatcgtcgcgttggcggacggcaacatgctagaccacctcctccttctcctcataataataataataataataataataataataattcatcatcaaataataataataataataataatcctcatgatcagcacgaattgccttcgttggatcctcaggtttgtgtttgtagcggtggtaatccggagaaggtggtggctgtggctgattctgcgctcggttggttgatgccgttggttactgcgttgatgattaatcttgttggtggtttggattatctcgttggtgttttccatctcgtcatgatctgatgagtagtgacgatgatgatgatgatgatgactgtaataatgataataataataatctgttttggtgtgattgctgatccccccactacgaactattactattttaggtctaattttcgttggtttaatgtgtcattttggcttctgaaaaaactgtaattgtagtgggagctatatactcaaaattagctagaattactacttttgtctattatacaaattcattgagtctcatttgatcagtttgatcattatcatcacacatatagatatatatacctgttaaatttaatacacatgtgcatttcatttcattcaacagtaatcaacacaaaaaatgctcattaatattcaagatgatcaaagcatctatttagagcattgattctacaataaaacatatgttcaatattggacataatatctccatgagccatatgttgaaaccttttgaatttccaagaaaatcacaagaaagtagagattgtgtaaacaaccatattttcacagtaccattagtcccaataaagggctcataattattaataattttatatgatggattatttaatgtgtcacttatagtcgtcattaggctatcgagaaatgttaaagggcaccagtggtgcctaacaccttcctatgtgtcaatatcgctattggtacaactaagtatcgagtcccatataatttaatataataatttttagggagtatcgctagccaatcgcaacgcgacatgtcgcaaaggtgctaggcaccactggtgcctaatagcaatgctcttaggctatcatattcctcaaaaataattagtgactattaaccatctctttacaggttaattaatatatagttgtgattataatattatccttatgattatatattagtctttataataattgaaaacaatatttacatatgctaaatcattataatttcagcacgattagtaaggtactattataagttgaacgcgagtgataacagcaaccaggaaaagagaattttatgtaaatataattatatctattctatataaaatgtacctaaaattattgggtgaacttttttttaaaaaaaaaaaaaaaaatctattaaaaaataacagtgtttttttggctgagaaccgaaat

SEQ ID NO: 306600 - DNA, 1058 bp, Cannabis indica
taatctgtatttctagtctcttttaatgctaagtttgtacacgtgccaggtcttttgaatatctctatttttactaatcctagatttgttttttttattaatttatataatgtatattttacatcttttggaagaacttccctcctttgtatttgacatgtaataatatttgttttacttaatgtgtaaacagattaaaaaagctttgcgtggagtcaaggttgaagttacccatcgtggaaatatgcgtagaaagtatcgtatttctggtttgacatcacaagcaacaggagagttaacgtgagtatgactttaattattttgggctgttgttagacatttcaatgctctgtagtttgtttatgctatgatgcacacaaaattatcttgaccaatcctctattttcttttgatttttcagtttcccagtggatgatagaggcactatgaaatctgttgttgagtatttctacgaaacttatggtttcgttattcagcatactcaatggccttgtctacaagtagggaaccagcagaggcctaattatctacccatggaggtaaacaacttgattactggtagtcgtcctacttgggatgtagtatgtggacattattctaataaacagtttggatacaggtttgtaaaattgtggagggtcagcgatactctaagaggttgaatgagaagcagattactgctttgctaaaggttacctgtcagcgtccctatgatagggagaaagatattttgcaggtcagttgtcatggaattgtggaaagccttttggccttttatttgataatgtttgtggttttatgtttttgttatagttatagtatatcttatacactcagtaacgtgagcctgtatacaaatgttgcttttagaaatcctttgctgttaaacaagttttccttttcccatgattcactaaaagaaaagttgatttatacgataagcttcaatttgttacaagtttcttaccttgttgtaggaatttttgaaactaatatgtagaagaatattgattaattctgtttttgtgttatttttt

SEQ ID NO: 306601 - DNA, 5063 bp, Cannabis indica
gctcatgctagattttatttggaagctaattaaggtaattttataatcttgggtatgtaaactcaaggttaagatttcataaatatatataatatatatactattataatgtgttttaattaataaatataaatttagtctttacgtacaattattggctcgaaaatcactcttgcaatcaagttagatttttcacattcgagataaaaaaattaattaaaaaaataagttttttataggtaataacattcataggaataataaaagaaaagtcaactaagatcgatcttgactttttattatttggtatttaatatactgtataatatatacttaaataacatatttataatattcatgttatttgtatatgtttataggagcatagccattactaaagctatatatttaaataatatatttataagatttatgttattgaagtatgtatgcaaatagtgtgtttataagattcacgttatttagttatgattattatgttatttaaataatgtatagtaatttagtattatttaaattaggtagaatttaatttacgtgacgtggtttgaccgaaaaaataatggttgaatacttgactgttgggtatatggtaaatagggggccatttagtagtgggtacgattttactgaatccaacccttcgccatgtagttcaatagtgcgagtttatttatcaacgttggactcgggcataatcatttatatgtgattcaacttaaaaattagttattagtgctcaaattaattttatatattgttatttgtctaaatatatgcatcgaagttttagttgtatttttttatatgactacttgtcacatattttcttactgagtttggttgctctccactatcaaattaccatgtggagaccaagataaacaaaaatctagatggtcggtggcgagtggagctttggatgcttgtgtgtgtattcgttgaaagtcatataacttcgaacggttctgttttatttatttattttattaaaataaatgtcacaattatttttatttattatttatattatgtttttttaatttaagaaaactggcaatagacgttacagtttggtattaggaccacagttatatcaatcctgaacattctctcgaatttcacacatcaattaaaaagattctgctcgctaccaagtaagtctcatattatatgtttgcttttttatgtgtatatgaatttaaataaaatcaacgtttatgtcaaaaaccttagtaccaaatacttgagtttatgtacctttagagatgaaaatattattacttcatattgttattattctaaaaaaattacaactgatcaagatagattaaggagtcctaatggtatttctttttccaaattttatataaatatcattatattaacattttatttattttccatgatttagtgatctacttagttatttatttattttatttagaaataaaataaaaattagttgtgaactagtaatacaaaaacggacatttattttcttaaaaaaagtgataattatatcttatttaacaaggaacattaggaaatcatgcctcaaagaagatcaatttgaatcaatggtaacgaaaataaccacgtggatgcaactctaacaccctcatgggacggaggccaaggtgatggtcgacgtggaggccaaagtggccagagaggtagatatggaccatcggtagcactaataaacgaggtagcactcgaacaacaataaggacctcccaacgcacaagttgaaatactctgagaaaacactcatatacacgagcaactagctaaagaaaatgcaaggctatgagctccaaatgagaaattacgcaggaatcaaaatccacccataggaaacctaactcttcagtcagccacaagaaatttaggaaacagtagccgccaatattcaatggggactcagactcacttgaagctgaggagtggttgtgctcagtggaatccatattggaatatgtggacctcgatgataagggacgagtgtcctgtgctaccaacctacttaaaaaggacgcacaaatctggtgggaagtagtaagacaaatgcgtaacatagcaactatgacctagttggactttgtataagtgtttaataggaagtactataatgcttccatagtgactgcaaaggaagacgaatttatgaattgaagtagaacaacctcactgtcatggagtatgtaaggcaattggaccgtttggcaaaattcgcacaagagatcataccaaccgaggccctctgggttaaaaggttcttgaaggggatgaaccctatgattgataaggatgtaaaaatcatggttgggaccaacatggtatatgctgaagtgttggaaaaagctctcaaagttgagttactcaaaaatgatataaagaaggacaatattgcaaagtaagaaggtcgaagaaacaatggaggaaactatgagaataagagaaatcacaataatgatcgtgataaaaaggagaaaacagtggtgcaaaataacaacaatgcgatgaaaaagccctatgtagaattctcaatttgttctacatgcatggtttgattttgggcagtatggttccccttcttttgtccctttgggcagtttttctttggatgtcctagctgcctacaattgtagcacatccctaacttcatcttacactcatcgaggtgtttcttattgcacgtgagcgaattgagaattattaattaagctttttcacattattttctcctttttatcacgatcattattgtaatttctcttatattttctcttattctcttggttttctccattatttctttgggcttcccaccttgcaacattgtccttctttatatcatttttgagcaactcaacccgagagctttttccaaaacctccgcatacaccgtgttggtcccaaacaatgattttcacatcttttttaatcatggtgttcatctccgtcaagaatattttgactcagagggtctcggttggtacgatctcttgtgtgaactttgtcaaacggtcaaattgccttgcatactccatgacagtgaggttgttttactttagatttataaactcatcttcctatgcagctagtatggcgacactatagtacttcctattgaatacttccacaaaatttaactaggtcatagttgttatgttacggctctatattactacttcccaccagatccgtgcatcatttttaaataggctggcagcacaggacactcattccctatcattgaggtccatatattccaatatggactccactgagcgcaaccactccttagcttcaagtgagttcgagtccccattgaatattggcggttgttatttcctgaatcgctcgtacacaggttccaaatgttgtattggttctggattcaatgtggttggctgaagagctaggtttcctacgggttgattttgattccagcgtaattcctcattatgagctcatagccttgcattttcttgagctagttgcttgcgtatatgagcattttcttggagtatttcagcttgtgcgttgggaggtccttattgttgttcgagtgctacctcctctatcactgctactgatggtccatgtctacctcccttgctactttggcctccacgtggaccatcacctcgaccttcgccccttgcgagtgctggagctacatccacgtggtatttctatagccgttgattcgaactgatcatctttgaggtacaatttcttaatgttccctgttgttttctaagaattttgtaaaagagtataaacttaaataagatgtatttatcactatatttaagaaaataaatgtctatatttacataattatttcacaaataatttttattttatttctaaatagaataaataaataaataaacaagtagatcactaaatcatggaaaataaacaaatttttaatataatgataattatttataaaattattatgactctttaatctatcttgatcagttgtattttttttagactaacaataatacgaactactaataattttttctctataggtatctaaattcgaatattgatactaaggtttttgaagtaaatgttgatctttttatactcaaatacacataaaaataatgcaaacatataatacgagatttacttggtagcaggcagaatctttgcagtcaatgtatataacttgtgagaacgtttaggaccgatataattgtagctttgatactaaactataatgctcgaactttttgtaaaaatactaactttatttatagacgttaaatacgaaaaatcataatactgcctttttattttatacttaaaaatattcataattggcaaatttttgtacaaaagatataataaacaataaaaaaataattgccacatttattttaatagcataaataaataaaacaaagcgtcctagacctcccgcagttatatggtcttcaccaaatacacacacaagtatccaaaactccactcgccaccaaccacatagacttttagttacttgcatggtaatttgataaggatgctactaaactcaataaggaaatgtgtgtcaagtagtcacataaataaaaaaataaatacaactaaaacttagctgtacatatttagacaaatagcaataaataaaattaatattatcacttactagtttctaagctaaattacacaaaaaatgattatgcctgagttcgattagcaaataaacctgcactattggactacatggtagaggactgggttcagtaaaatcgtactcactactaaatgaccccctatataccatatagacccaacaataagtattcaactataatgttttcaatcaaaccatgtcacgtaactatattctacctaatttaaataatgctaaacttatatacattatttaaatagaatacaatcataactaaatcatgtgaatcttataaacacactatttacatacatacttaaataacatgtaatcttataagattattaatttaataatatacctttagcaatgg

SEQ ID NO: 306602 - DNA, 2401 bp, Cannabis indica
  modified_base (109)..(109): a, c, t, g, unknown or other
gtggaaatctctgattaccattcaaggctctccttgccacattccaatgtgaaggagacagatgacgtgttttggatgatcaaccttggcattttgacaaatgccttanggttttcacgaaacctgagggtcttgacactctatctcctaatcgattccgctttgtcccattctaggtccaagctcattatatctcttttggacagaagtcccttcagcttgctcagtttattgctgatgaacttggcgatcttttggaaagtcacccattatctctcctggaaagtttcggcccttaccttcgtctccgtgtccttctcgatgtcaccaaacctctccgtagaggtatgaatatttgttttagaagaattaccaagactaaatggattgcgttcaaatatgagggctccaaacttttgctatttctgtggcactatggaccatacatataacaaatgtggtcgatatcttatgagatgtgataattttgctgtccccccggttcttggttgcaaggaagagcttcgtgcttcttccaaaactctgttaaaaaaacccctttgatatgtccaactccattcccattgaggaatttgtgaaccgtagttgcagctctaaacaggagatgcaacaagctattgattagttttcaaaccttggctctaactttgttcccctacccttgcctcagatcatgaccctgtctcatcccctatcccaactaccactaccaactccaccatggccatttctgcaatcccttccccctatcatggtcacttcagtgatcacccatacggataaagggaagggcatcactattaatgagccatccagtattcctgttgctaccactgcgggggtcaagcgaccttttactcgccaacatgctcaagttggtggctcgatatgaagtatccttaagagggtgcgtgctgcgaatgaggaggatgttgtggttccttctttctcaaactctgataggaaaatgaatctgatcagctggaatgctcgaggtttagggagcccttgagcatttcgttatctttccctgttggtgaggcaacaccgacctgttttattttttgtgatggaaaccaagctcttggcagtccacggaatgcgtatcaagactagtctaggttttgataatatttttaaagtgccttggagtggtttagggggaggtcttttactcttttagaacaatattattaatgttaatgtttttactttctcctttaatcatatcaactgtattgtaaatattagtaatgacaatgtctggcattttactagtttctatggctctccttaccctgtttctaaaaattgcacttggacacttcttaatcgtatttttgattctgctcctaatttgccttggtgtatcaatgacgactttaatgattacttgtctattaatgatcgtaacactgcaaccagaccccccacttatgctatgaatgactttaaatctttcttaaaaaagtttaattttttgctacttcctcatagtggcaataaatatacttgaaaacatggcaacctcttccaacgccttgactagtgtgttgttagcagctcatggcaaacgctttttccttctaccactctaattcacatggggttttttggttcggaccaccgggctatcaaaaccatccttgaggataataccaccaatctgataaatcctagtcatttcttcattgaaaatcactggttttccgatgaacattttttttcagagtggttaattcctcttggaatactttcaatcatccttctaccactctttcttttactgatttcttaaaaaaatcaaaatacttgtgttgctaatattaaagagtggaaatctggtcaaaactctcttaaacatcaaatctcctccacacaagcttcccttgagaagttttatcaaaagaatttgcctagtagggatgacctctcgtagattagagctttggaatcctctcttcatgctttgttgcataaaaacaaaatttattggaaacaaagatccaagattgattggattaagtccggggataaaaacacccaaagtttttctatcagaaagcctcggccaagaagaaaaacaattccattcgttctatcaccctggaggatggtgctattgttaggggaaccaattctataatccctcttttcactagattttattctaacttgttttctacacagggtgagaatcatgcttctatcgatgacatcttgtctgggatcaatagccatctttctcctagccaatactctcaccttgctactcctttcacggttgatgaaattcaaaaggccctttttgctctttctggtgataaagcacctgagtctgatgggctgaatgctcatttttataaaaaaaaaaaactag

SEQ ID NO: 306603 - DNA, 1347 bp, Cannabis indica
aaattctttgaacgtaaaaatataattattttacaaaaaataatgttttatgtaattattccttaaaagaatgattagagaaatcttatatttcttcaaatcttcatagaaagcctttctttataggagttgtttgaacatctcaaaaaattaactagttgtccaataagtttcactaaccttactctacacaattaaaaaaataaaaatcatagtttatcttctaatttccccgaattatcattattccataatcttttaatattagttgtgcgtacatttaatattatcattatcatagtttcattatttttgcattatctaattattattatttttttgaaataaaggaatattaatttctattaaaaggcacaaagtcagcagatcaaaagatcaatacaaaattcaaaactaaagaccaagaggagactcggtcacgaaattttagcattatctaaaaaaagaacaatgtatacgagtaaaagaatgggctaattcattgaaggatttctcttcttataatgagagagaaatattagagaaagaggacacaggtctaaggtgggttaggcacgtttctagggtccactcattttagggacctaaataaaaaagtattttctaaaatatatatcacttttataataatttttaaaaatatcatttatttttattataagggctgaaaattatttttttcctcagacccatttcaactcagggtcggtcctgagaggacaaaacatttctaatattcttaatataagggaaatttacatgatatattaacttttgctattttttttacaaaaatactgccaggcggtattttttactttttcactgtgtttttttataactttcatactgcaatatactgtgttaagttttcgatggtgttctaatggtattttttagttgttttactggtgttttgagttgttttgttttgtgttctactaatgttttataaaaatacagtatttttgaaaacctttccgtgtaacagtatttttgtaaaagttaatccaaattcttaatatttttgtaaatttcctagcaccaaatttagtggaacgaatttcttctactcaaagtagcttgcacgaagacaatcgtaaaatactgtcggacttgtactctccaattattatttcaatgaaatgtttcctactctacacaattaaaaataaaattaaagaaaaaaacatgtagggtgacaggtgccttgtgatcctaatttaacactctattaccatcttattgttattgttgagaggaaattacactctatactctttttatattgtctttttttatttttaccttcttttttaaagtcta

SEQ ID NO: 306604 - DNA, 2111 bp, Cannabis indica
aaattacttgtaaatttttttaaaaaaactgaataatttataaattacttgtaaatttttttaaaaaaactgaataatttatactatcgaaataaaaatttaaatattttattacatgcatacttattttttcttatacacgtgataaacaaatatttttttcattataaattatttaaaattttataaatatttacaattgaactaaaaacttcttcaaactacaaatttcaataaataacaaaattctcataatatttattaaatgaaaatgcacacgacacacaatactcaaatgagaaatacaaagtaccaacacaacacttgtctaagttttacttaatcatgacttttcatggtgaccggcaaaaatgtccaaataccataaaaaatgtcaaaaaccatttgattcccatcaacatggccggctttgcatttgtcaccattcattcattcattcatgttcttttctattctattatgtcccttcaacccttcattcttcttcctaatccctttcctttccaacaatggaaatcaccattccattcccattcctttacatatttttactactaccaactctcatcttggctctctcacaatcatcatcaccaatatgcagttccaattccggacatgtaaaccccacaacccctttactcaactttcttcaaaccctccaagaaacagctttcctcactttcaaaaaccccaaatttgacccaaagctctatgtggatttatccctaaagtacaatttgtcttattcccaaaagggttttgataagcttgtgaaatactcaaatgggtcagtttctgttaaggatttgagtgagtatatagagagttattttgagggtgcaggggaggatttggtgggtagtaaaccagaggattttgtgtctgagccaaaggggtttcttccaaaggtgaagaatggagaagttaggagttgggcattgaaaattcattccctttggaagaatttgagtagagaagtttctgatgaggtgaggaaacagcctcagttccatactttgattcctcttcctaaacctgtaatcattcctgggtcaaggtttagagaggtctattattgggattcttattgggtaatcaggttagtttcattcttttttatttcatgaaaattcacacttagatattgttagtttaacaaatgacactaaaaattgtgacttttcttcgattggtgtgtaaaaaagtttactttcttctttgttaagttagttaattattaggattcttattaggtaatcagagtcagatgaaatgagtagttattttggaaaaagttcacactttctagtatttgtgtgtaaaaagattacttttttttttcttttatggagtaaatattatgaaagcatggctcttttacatttgtttgaagcacttaaacaagctcataatagattaaaaatgggatcttttttaactatttatgtagaatagatcctactcttaatataggtttcactgtttcatgaaaaagaaaaaaaattattgctttaggactctttctctctacaacatctcataagtgtttaacattaatcattttttttttcaaaattggatatgaggaatcaatttataatttggaataagaagaattatatataattaaacaattttttgttattcacaggggattagtagcaagtaaaatgtatgatacagcaaaagcaattgtgaataatctcatttcacttctacaagaatatggtcatgttcttaatggtgccagaacatattacattaatagaaggtatatatatatacactaaaataatcctttatttttatgagtaatacatattttttcttttggggtctgaaaaagtttgaatttttgttcaatgtagtcagcctcctctccttagtgcaatggttactgaaatatacaagaggactggagatttagaatttgctaaaaactctctccctgcactaatcaaagaacataagttctggacttcaggtactatatatatatataatataataaataaataatgtattttatacctgaaagatcatgtaccaaactatactgatgctaaatattccctctgaaactatta

SEQ ID NO: 306605 - DNA, 1550 bp, Cannabis indica
attataatatttacaaaggatcctgggtcaaccccaatctttgactcgatatccggacctggccccaagacctagacccaaacaagggaacagactcgggaccggacccggcacctggacccagcacctaagacccgacccgggacctagacctggacccggatcccgggacctagactcatgacagggacccgggacccggactcgtaataggtgtttgggttgagtttattgaaaatatataactttacacaatatattaatacaagtcaataccaaacatattattatatttaataatactaatacaatacaatatgacataccagatgagcccttatagaccacttaatcattgattaagggataagttgaggaatatctctttttgcattcattaataaaaaaataccctcatattatatttcataaaaaagtacccacttttgtgagtagattgcccaatatatccttactctccacttaagtctagcacataatttatattaatctaatgggtataatgaggacatcatctataaaagtgggtatatcttaaagaatatagaaataaaggtaaaaattaaaataagtaaagtaaagtgggtatacaatgtaattttattattgattaatctaacacatgtcctcgccatcccaaccctaaactccatagtgagttttaattaaaaaaaaaaaacaaaataacaaaagtaaattcaaagctccacaccaaatttggcacacaaaccatgaaatctccaaatatgagatattgaatgagcttagaagaaatgagtaagcacttgaagcaaaatctgggggtctaagtttgtgaaggtctagttattgatgatttggattcgcgaggatttgggttctcgatggtcgatggtttagattcgcagggatctaggttcgtgatggtttggggccacatcaattgatgtttgtagggatttgggttcgtgtgggtcattgtttgcagggttttgggtccatgtgtgcctatgtaactttgcagattcaacttgccttttgtaactttgcaaattcaacttgcctcttgaaagttgaaactgtgtagtgtcctacttgtgcatggccagaggagagccacaaacactcttattttttgactgccttctctcagcgaggtgagtcgaatttttagttggttgggattcatagcttggcctttgaactttttgagcttaaaagcttggatgtcaaaccgaataacaagtttactagctggtgttgtcaatgctctgctagctgctactgtctactatgatggatggtttgcagtgtatttacccatactgatttgtaaataaatagaaaagagattattaaccacagtttctaagttgtttaatcttctattggagggtgttttggtgagagttttgtgtagtttgtgaaaggtttggtttaacttaggggtgttcactaagtatccgatccaatccaatccgcacgatccaatccaatccaatccgcaaaatgcggatatctgcacttgcgcggattggattggattgaaa

SEQ ID NO: 306606 - DNA, 881 bp, Cannabis indica
aaaatttaaattttatactgaaatagattagtaagatcataatcctactaattacctgattaacccatagtataaatgtaagctctaattatttaccattaggcttatcgggatattacactttatatgtgtttatttcatcgttttagaaagttcacatttagggtgttaatcaacatacttgtgagtagatctaagatcctggtaaaataatatccaacaccacttcagtggtcagctatatgcttcagatttctgtaacacttatcataatggctagttggtgtacatcgtttagggagtttttgttggagagtaaagcatgtgtacttctcctccttctccctttgattttatggtgtaagggaatcgtttaatttcccttttttccattatttcagccggagccattgtttctgcgtttgcctccattatttttaatgttggagggatggctgatattgcatgtactagctggtgtgttgaacaatacttggggctttatgacaccttgtgtctgtccaacactgccttgtcatcttttttgggcttgctggacaacttcttccaattttatgaagccatcagctcattggaggaattctttcatgttgtttgttgagatctttctgatatcattccagaatttactcaacggcaagatgcctcaaagtatggtcgtatgttggccttcttttgataggcctttgacattggtggcctcgaccacgaacctttgatgtagtatttcaaaggctaaccttgcttttgctttattttggcaaggtcatctagttgtgaaggtcatcaagaatacaatacagttacattttcacaagtgtttaataaccgttttctatcattggtttcaaactgtatgg

SEQ ID NO: 306607 - DNA, 1410 bp, Cannabis indica
ttaagaaaatatgaaaaaaaaaatcaagaacaataagatagattccaccatagtcataaaccagttcaaacaacaaaacataatattgaaaaaataaaaaacaagaacatcaactcgaaaaactacaattaacataatcacaaactcacatgagaaaaaaataagaaaaatagaagctactagattaggaaccagttacaaaaaaaaaaaggaaggacagaagaataaatttacaatcaaacaaatataaataaataaaaacttagcacgaccaaaaaaggaaaatgacaatgataggttaaaagtctttgctagcttcatacaaaatatatagaacaccaacaatttttacaagaaaagaaaatgaaaatataagttctataagctgaaattatagagtgcgaatgaagaagaaagtgaaaaaaaaaatggaagaatgtggttgaagagccataagcttgaataatgaaagaaaaaacagctattgcaaagatgtaacataggctaaaccataaaaatataaagattggtaaaagttcataacaaatgaattaaaaaaaaaaattatatactataaaaatgtaaacctttaaaattttctcacaatttgtgtaattttcataaaaaaatatcgttatcttactcttttctaaaaaattaccatgactaattaagatttatgttcttgtactttgacaaataatcattcctttaaacttttcatattattaaatttttttatataccaaattgtgccttcaaattttaatatgtattaaatcgtgtcttctaaactttcatttatatcagacttttgttagtaaaattagataaaaattattaaatttaacaatctcaattgttcagaagaatttctagtagcctgaaaaattcaagtacatgatttgataaaacaaagaatatacttgtctgaaaacttataactgtatttgattatgcataaaaatatctagttagattattgttaaataaattatattatttggtccgataaaaaaatacattactcagttaaatgcaggatttttataatttgttgtaaaaaattatgtaaaaatgttaatatatttaattcattattaaaaataaactttagaaactacttttttaaaaatatttaaaattaacctctaatcttatttttataaggataaatactattttgtactttgtgttttgtaaaagttactgattgaaccttctattttattaaatgataaaatgaaccatgtattttctaaaaatatgaaaaatataaccttgagctcaatttttaacaatttttttaatataaccaacttaaagataatccctaatacaagcagacacaaaaatataatcagttttgtcataacacctttagatcgaattattattaaattttatttt

SEQ ID NO: 306608 - DNA, 3078 bp, Cannabis indica
caagttttgaatcataatgataatcatatgggttatattctctcaccttgaagttcttattcgaatcataatatccagaaacaatcatgagaagcctaagtttctccaactctgaaatttaaatcaatttgaaacaattattacagggacaaccaaacataatcatgaaaaacaaattccaaaggttcataacttgcttttggactgaggattatgaaatgctaagtagaaatattgatggatatcatgtggtcatgaattagtatagaacattgaaaaggtaacatggctatgaaaatcactgatcaggccgatgagtttgaacacttacgctgaaagtacttaatttgttgtggtgcagcactctcatgggagagaagttgtccaatagaaattccaatagaactcagcccattgttagacaatcttgaaccataagtgtcttgtttacctgcttttataattttattgtttacaaaatttcatgacaagtaaaaagtgttacataccggagaggaataaatgagctttaaggatggcatggcatgaatatttttattgattattgaatagttattcaaaggttgtgaaaagtacaaacctactcttgtccatctcttgaaatctttgcgcaatatgtcaaccactttaagctctgatacatcatgcttcttgtatttcactacagaccatagataacacctccaaaaggtgagtcatgcatataaataaatagcatggttacattattagctttcattaaaaacagaggagtgaacaatgaaagaaagagagaatagagagtgaatgaactgaacttgatcgaaatggaagtgttgaattgttgaagagaatacaacacattaataatgcgctaaaaataagaataagactaataggctcataacaaaccataacagatccatcagctacccttaactaatttccaacttgtttaatcagccaactaactcacttccttctgttaataaagattgcattcatattagatggtagaatacatacataattgatagaggccattgtacccaagccgacctgcaccgtggattagaagtgaagccatgtacttatctttggaagaacaaagaggtttggttaggttctcagtgtctgacaggattccggctaactgcgagtataaaagaaagctaaagataagtccatgaagaaaaagatagctgtaaaataactagtattccatagtaaactaaacattaagtccttgaatttttaggaaggaagaacaaatatagtaagatttacacatatggataggaaaaatatttgctagtatagcttacaaatttataatatgcttagtagctcaatgcaccctatgcatgcttaaacaaagttaaatagaagagaaattgtgtcaaagatgaatatgagctcataaacatagttaagaattctttctttggttgaaagaactgaaggaagttaccaatagcctactgaatcctttcccaaccaaagtttcaggtgaagtcagggcaaacttctcagcaacaattgtgcaacatgagcaatcctgttccattcattgagatatcagcaaagtttgacatctatatgcttttattgtagacattatcccacatggaataaatggtagagaagtgagccatatataagaacacgggctactctactcattgccaattggttttgatatggaacaccatgattctcaacatggtatcagagccatatccctatcttttcaggtataaaatatacagaggcataaactatctcagtatacttacaaacataagtatatattatatataatgattgactagttcaagaaacaaaactatgtacaaaagaagtgaagagtatcacaatgtcttcaatactaagcggaagtatccctataaactcaaattcgcattcgaagttcacaagagagttttccttcagattttaaaatgttattgttttttgtatttgccatcatttcaacttcttagaaatatataaattcttggaattcatttgctaaaaggtgattagtatgagagtatagagtcaatcatgcacaaatgtgaatatctgtgatcctgaatgaaaatcatacagagcaaagaagaaaattccaaatcaaaaataaaacttaacagttccagttaagttgtataatttggctcatgaaaaagaaaattttttggtcatcagtttgcccacaaaataatcaaatgaatctacctatatttatgaaataaacagaaagtaaacacagcatgacatatgctctataccacaatgttgtacctcagtttcagtaacaacttcaaccgaaggatatgcaggttcaccctgtcaagaaaaaatatatcatctttcaataggttctaattcagataaatctagacgcaactcaaaattttagtgaattattgttaaatagatcacctttctgcaagttaaaatttcaactgttgcatccttcagtgcctgttttaggaacaaagacagacaagtttatcattttctacaactacctgcaagtaattttttttttttcaaaatgggctaatacctcttgtttagcaggaagcttctggccatttaacaaaactagcttcaggctcccaaatagatcataataggacaggtcaacctgatcacaagtccataattacataacagtatatagttggaaagtcatgttcaaattttgtgcatgtatgtaatgtaggggtgtacatgaatgtatacactacactacactacagataataatagctatttctcagtggaaacaaggatggaaagggagcagttggctaatatgataattggcataattttcagattgaagaccaaaatggctaacttgatttcataccaggactagaagaactatcatattagccattttggtcaaagaaaactataccatcaacaatgatctaaaaattaagtgcatgtttgacatcataactaaaaaactgttttttgtttttaaaaacaatttggcttgtttggccttattttttaaaaacagttttcagaaaacaaagttacaaaaaacaagaattttga

SEQ ID NO: 306609 - DNA, 1522 bp, Cannabis indica
tttaaaaaaacatagattctgaactgtcatttaaacaaatagtctaattggtaaatttacccttataatattcgacaactcacttaaaataagtgctactcgaaattgacgtatcatcttaccaattaatcgataacttacaaaaagtaactattcgacaattcttataagtttccgaccaattagatggtgacactatcttttcaaatagagacttttaaaatattttttaaaaaaattataaactaaatacaacctacatatcacactaggactagtatagaccttataataaggctacttaatttacaaattaagcccaccaccacaactcttatgactagtctagtagtgtatatatgaaagcccatctatacactttgcttttatacattttttttttatctttctttttctttccaaacactcaaaaaagtgaagaacaactcactatagaacaacaaaatagtccttccctagtcttgatcttcacccaagaaagaaaaaaaagcctatagacaaaattcaaaaagttggtccatcgaatctacttttatttcactctcaaaatttaaaatttatttatttatttattaaaaaataaaaaacactttatttttcaaaatatattaatattttttttggcatgcttgaattaaatgtggtacaaaaatttgtacactagctatgcatactttttccgaaattttgaaaattgcaaaaaattttggttttcatattcacctaattaataaatacacacactctcatgaaccctaattttgcatgcatgcacataattactatagatagtactcctctcttgtagtggtccaaaagtttggttatagacagagaaaaaaaatcatcaatatttaataattgaatttaaatattcctactaaagtctataaaagaaaatgtggtccaaattttttttaaaaaaatttaccttatgattgagtttggagattgaaggttcctccccacgttggtcggtggaaacgattgaacccatttcgaagcacttgttaaatcctagaaaacatccgccactagctgattgtggctggatggcggcggttgtgtcagattgagaggaattctctaattcgtcgtggtggtggaagaaggacttcttgaacatgacttttttgatcatatgaagaggattggggaaaaattaatgaagtgataatattggggattatatataataaataatagttttgttacttattaggtcaaataaaatacattttttgggcgttatttttaatattaattgttagggtttgatggattcaaggggttcatatatatatatgattataatatttattgttctataatcgtaaaatatatataggcgatattgtcaatgaaagatttttttgttactttgggatttgtatttattatttgagaaataagtgaaataattatatatctattctatataaagtgtgcctatataactaaaattcttggtttttgagaaatttatgggtgacttttaatt

SEQ ID NO: 306610 - DNA, 3091 bp, Cannabis indica
aataattgagaaacaaatacaaaattcaacagcaacattgttaagagttttgaataattaattaaggctgagcagcacagcatttgcaaatatgaaattcgctcaagataaacaaaaatgtatattatgtgtgtgtgtgtgtgtgtgttttcattcatataatagatcctgaaatttattgatgtaacacatgcaatacggtacaaatagaaaataaggtaaaatccaaagaagtaactatcataatgttatttaaaaagttcaaaacacacaaaactaagaaagtaagtcacactcaggattcaattacagcaaatgatttaactagctaaaacccctaaaaaacctgcttttctgggtaaaattaaccactgttaagtgttagctatttccaaaatttacatacataatcaaccaatataaaatacaaaaagaggagtgagcagtactaaattacaatgtttcaaagcaacaggtatattattgtgggagttttttagtaacttggtgtactgttagtctcatctagaagcctgttagttaaaacaggtatgtctagtcagctctcgaggtagttaagttagttaactactcgggtaccctcatattgatttgcctatataaggctttgtgtattacttctctaggtgacgatttagagagtggatttagatgaaaaacaaattgtattgtgtgaggagggatgctaaagagctagggtgtgtttgatcactatactctcaaatgtgagttgatttgtaaagtggatgacatcaatgttccttccgggaattagtcaccacaaaaaagggtgatgtcgttaaaccttgtctcaaattcatttagttttaactgattaaattctggttttatgttcattacttgatcattgcattttagtactacaatttttgttttattatgattcttgataggtgttaattcaccacaattacaaatgaagaaattaaaaagtgaaaggtggaaaacaaaatctgggatcttacttgaactatctttgggaccatagcagcaatatgttgctgtatcaaaggaggtgaaatgacctgggttacattactacagctagccataagtgggttcatcaatagagcagatgaaacaggagttgcaccaggaactgtaatcccaccacccagagatccaattacacccaatggcacaatcccaggaactgtaaacccagctgaaaccaatgactctgcaggctgatcccatttccttttctttctgtaaaattattgctaaatattaaaattttgtggcaaaaatcataaatcaacttcaaacccttaaagatgaaacatttccacgcaaatactaatccccaataatgaatattgacaaataaatgaaattgagacacttccataaactctaaaacttagggtttgaaaattgaaaggggattaagggtagggtacatacctttgccttgtttgtgatgattcgtccgaagtaactgtggggactttctcctctgccattgttgataacaaataattggtttgttttctggaattttgttgttggatactgagaaagtactagtgaaattatttttggtatttttgggaaaaataaaaatatttaatatttaatgtgttcttattatcgactgtttttaaaaagaagtctggggcattccgagaattgaactcgggacctctcgcaccctaagcgagaatcataccactagaccaaatgccctttaatgagaagacttgctttgtttattaaaatgtactaaaagcatatttggtttgttatcattgtaatgaaatcatgattgcaattcagttttttttttacttttctcttgtgatggtattttatattatttgtatgaaaatgattacatttttatatttgaatccttatgacaattacttaacatattatatagttatattactcttattttatacttttttttactaagaagaataattttgtcaatttaccatctattcaaatgttcattggaataacaaactaaatataataatcaatttttattacaacttttattccattatgcaatctatattttcgaagatggccatgtgtactttcataatccaaactaatcgacacaggcctaactatgggctaagcttgtaaaaggagttgagtcacagctccagatctaaggcaactccaattatcataagaattgagtttcctaaattttggaagggcattttacccagataaagatagaaaacctaacatggacagcatccgaaatctctaagtggtacttctgaaagagcaattaaataggtgtccagaagatggctgatatggcgctccattaatttttcatcccttgatattaggaccatgttccctacgatagaccctaagattgcaagtaccataaaagtaaacatgccttttgtccaatagccattactttaggggtgttcaataaaatttacaaaccgctcaactcgaataaaaccgcccaaaccaaatcaaataaaccaacaaaaaagtcaacccgaaataataaaaaataagaagacctaaaggcgatacccttgagggattaattggtacgaggcaaagtcctacaaaaactaaaaaatctataaaataattttgcgacggagcatcgctatagacattaggtgagtctggctccacaccccaaatcctccataattatggttgggggttttggtttctcgggccaagcgatgaaaaaccccaagctctcggggcacgattccattctcatctacgatagtgcccaagtgatggagacatcccattgacgagtgcaattcttatgcttcccaaccagtggctcgatgcatatagttcgtgattgggaatggatgctatatcaccactgataatggcaccacagggtatcgtggggaccacagcctcagaagaggaagtgtcttgagcttcaagattcgatattttggtctcagagtaaagttctaatatttctttgtcgaatgcgtgaaactatgtttatgaagatccctcaaaatgtcactcatttgaaaagcaagaattcatccagtagttagcccctatatcaaaccctaat

SEQ ID NO: 306611 - DNA, 1911 bp, Cannabis indica
ttactacataacttagctttcatcttctattatattttgagttgtattttcattgcagggactctttaggaacaaactcacaatatgtatttcatttcccttgggagtagcttctaccaattagaaccgaaattaattagtttaacgagacatggggtcaaaaatgagcttgcaataaattttattaccagagactaatcctcatctcaaaactctatcatggggttagaaagtggtaccaacataaataaaaacgattcactggagaaaagcttttgtgggacattttcatttcattcccaaaggaaaaatattcacatggtgaatgtgatggcatctttgccatacaaaattttaacaattaatcactgttgtcagtagttatcatatatctataacgatccaaaagcagtagagtaagttcataaagataaaagagaagctaaaaagtctcaaactttcttaggctacttgagttgcatcaagctgaattgaatggaacctgcacaccctgattattaaaaagaaatagcttttctctgcttaaattgcataagcttttttcttagtgcagggtcttaaaggcaagttctcttatcaggtttttagtcataccatcaattttcctgccttaaacttagactaactcctagcaattctcaagtttaacaaaaaaaaaaccaattggcttgagggttctagaaagaaacggtcttataattttcactaaggcctaacggctaggaatgttcgtggtgctccgttttttgaccattttttcaaatcagctagcgtgattttttcaatttctcaaaagtgcaatgcagatgatttgagcaatttgatatgttcgtggtgctctaattttgaccattttttcaaaccaattatgtaaatacgcctactaaggaaattttgcattgtgaactaaaattatagaggcttctaatgaagaaacctctccaaaaataggcgtatgccactaatagcggcgaacacacggtattctttagtaaaaggcgaaagaatagttcgctttgtgttcaccgcgtggctgcgtgaattttacagattaaagacttgtgttcttatagttgttgatttacttggtttctattctctgtttccgatgtgggatattttcacaataatgtctcttgtagctcatatgcacccactcattgcgctagtctcctgggaaaatatatgtattggaatagaacaaccaaatatatatattatttttttgcaatgggctacaaacatatattattgtttgttttggcttcaaaatttttttatttataataatataatgagggggtgaagattaatgtagctagctaatggacaaaaatttaagtacacaatatcaaaacagtgaaaatgaagattacaaacattccaaaatattactctacaatcaatgttgacagagatcaaacaagtcttacttactaccttatgttggtgaagtgttcagatatgaaaattatagataaggtgaaattacaattctttgcagattgatatctcaactctcagaattaattggtgggatattagttggtaggtataaatatatacatatttcttcattcaaatgagtagtgcatgttagtttctatatcactcataaaatatgcaacaacaaaattcaattctatagataaacatattacatataattataagtgtataactatagatctaaagaatacctttgttgattcaaagagaagaattcaaatggcggaagcgtaccttaattcatagatagtgatgatcttaatccatcttgtagagataatctttgtggtgattttgggtaataatcttccaagaaaacaagacttaggttttctaattttctctcttgatgggagaagatgagaatagaaattggctctt

SEQ ID NO: 306612 - DNA, 2342 bp, Cannabis indica
taatcacgatttccataaacctcgttgattagcaacgagctgcacagtacgtttaaaaatcacgtaatacgcctaagctagttagggtgttacacaatgtatactccatacatccgaaactagtaaactttaccaatgtcctgaaaagaacataacacctatccaaggtgtaagtataccttatcgcagattatcatgccaatctaaatccagtgaactgacaaatcatgagaattaaacttttgaacatataatcatgattatattctactgtgttgacgacactataatcatgaacaaatatatacatatttatatatgttctggacttaatagaatttatacattaaacataatcatgaaataaatcatgtaaaccatgcaacataaaatgcgatttttgatcttatattaattagtaaatttgattatattgaaaggggttttatttagggcacaaaatccaaaacttcctccacttttctttcttttttgtttgtttgtattgccttcattttgatactttggcctctcgaacatggcctattctggcaggtggctttactggcggagagggttgttgcagaggctggcgtgatggtgacggagctggagtgggtcaaggcagacaaccgcgacttccttgccaccaatgagacccttcgggttgaacttactaatgtcaggttccaaattgggggtttgcattaggagaaccaacagctggaggaggagaatgcccaccaagcccgcttcataaggagtatgaaagctgctcatgatcttaacatggagaccgtggcgtggatgtctggtgcaaggtcttcctcccggttaggcggcgcccagccttgaacctctaacaggcctccttgaattattgttgttgttttgttgattttttttttgtatatgcccccttttgctatactttttcaatcgcgaagacaattataatttgccctggctgcgggggctactataatagtaactaggattttctccaccatttttctttggagatttatttgatagacttcatagggactggttgtgtcaccaaaatagctggttccaagtgtttcaaccttttccgttagtcttaatcatctttcaattgatccaagaatggtttctcaattttagcctttcgttcctagggtgtgacgcttcttggcccaccactcaaaattttacttggaagaaattactcgcttagagttaacccaaaaatggcttctttttacggaaagagatcctttgtaatttcacatcctcttcaggccttagttcctttcacaaagttgaattccgggaataatgtccaggattgccttagacttaggcatttttcttactttggtacttgccaacttaacattttagccaattatgaaaactgatgggctgaacttatgtgaagtctacagagatgtgtaagaaggaattcgagcgtatttttcttttctaagaatttgggcctaatgcgcatcttatctctaaaatcgtgcttaagtttagtttttgaggaaagaattcaagcacatttctcttggggagacttagttgacaatgtttcttgcttttggttgcgtgtgtatacttgggctagtcaactttggcaaagggaaacaaggagttgcagctgtcagcaatctggcgtaccataacccccaaataagctgggaatttaggtcttaaattcttggtcatttgcttatagtcaaacttgtttccttttccaatttttgaggagaagagtttagtgttgttcttccttacttcaggaagcatactattcttccagatcgtgtcctccccctacatgatttcttggaggggagcgtcttgggagtacatcgaccacttctaggcttccatgagaaaaggccacagggttttcggtgagtacccaattgtattgttggtcccaaatgatcctttcgtgacataaacctcgtgggtgaagcataggttgcttgcagcgtatgaggcttgttagtttcccagagggagagttggacctgcatcctcatacaaaaaatcttctttatgctgacgtccatttcagtaagcgaaactcatgtggaattccatgattacaaacttttggctttcactagaaaggctaaaagtggacaaggaatttagatactagcttttcttgccaacgccgaagggcaagacattgtagggtgcgtgagagtcatgttgaatttttatgaagcaagctttggctcccatgaaggaaggctgaatttgcataaaaattgaagcttagacttcgcgtgaaaggaccaaagggaaagcatcatggggagtaagatagacttcaagcagtc

SEQ ID NO: 306613 - DNA, 3343 bp, Cannabis indica
tacataagtatatatatatatatatatatatatatatatatatatgataaggaaaattgtaatcatattgcaatcaacctagcaaccgtgcataggtgtcaaagtaatcaatttctttcttttgcctaaaccctttggctaccaacctatacttaaaagcttgcaaagtgcaattgctgtgttattttcttctaaatatctacttgcactcaattgcttttgagccttgtggaagtttcacatatacccaagtgcgattggatatagttgaatgcatttcatcatttattgctgcattccaaaaaaaaaaaaattgggatcatcctcaatttgaagattcataagaagcttccatatgatttcttcaaggttttcctctattaagtaaagagtactctccacttgagaaaacttcccatttgatctcaaatctttaacaccaccaagtctaataacatatagactttgctatttgaggcatagccaacaaatacacatctcaaagcctttggacccaacttgggccttttaggttctgggtacttggaataagaaagactcccatgctcatcaaaaaaatatatcaaaatcatttaaaaaatattcaccacctctatcacttctaagatctttaaatttctttctaattgatttttaacttctgctttatagattttaaacatgttaaatgcttcatctttactcttaagcaaatagatatatgtaaatttagagcaatcatcaacgaaagttatgaaatatctatgtcacctctagtgatcatgtcattcaattcacataaatcactatgtattaactctaggatcttgagatttcactcagcaataggaaaaagtttatttaccattttagatttaacacataattcacatcatatttaatcaaatcaaatttaataattcttttggtagtactaaaactaatatgagcaagtctattatgccacataacataagaattagaattgttcacattacaagtactagaagccacaaaattattatcattcttaagagtcctcaatttaatcatcccatcacatgtatagccctgtccaacaaaggtgcctaatctagtcaggatgagcttattggtatcaaactctattttaatacccaatttgctcaaaagacaaccactaactatgtttagaaatatatctagaacatagtaaacattagtaagggtcactttgtttccagtagtgaattgtaaattaatacaacccctaccaaggatttcagaactcttttcattttctattttgacctcaagtccaacctttgcattttcaaaagttttaaagagagttctatcataggttgcatggatggtagcacaagtatcacaccatcattcttttaccttttcttgggttatattgacttcacataagggtgcaatgatctcattatcaattgcattacccttaataaattcactttggtagtttgcaatgatctcatcatcaactgcatatacatgttttattccaattgataatatattcaatctcaattgaaaatgaaagaaagtaacttgtattcacattattgaaattcacatactcaatattaaaaaatttaaggttacccgtaaccattaggttatagtttctttgagaagtctcattctttgatgtagactttgaaaccatatctacatccatgattttagctaaacccttgttcaacattgcatccataatcgtcctcaaactcgttttcaatctcgcattgaaaatcgaagttagcatctaactcgtttcttttaaagaatcgtgtaatcttagacctagtcaaagtaaaactagcgtaattggagctgtagaaatcgaatttggacaaagtttgtactgtgggaaagatctttcgaagatctacaaatatatgaagagaaaatcttcaaatttgtgttccataagcatcgaaatggactcgaagttattggtcctaggagttgcgaaaaaccaaaattttccatttattgattatacaaaaccaaaaacaagtggttaggattagagattttaattgttggggatataggattttacacaatcaatttacagtgatttagagatgttttctttaaaaattaagaaccaagatgatgatgaagattcacatttatcggataaacatgaatcttgataatcaaaaaataagatatggaacacaagatggattaaatgatataaatcaaaccaatataatataatgtgacaataatatgaatcaaaacagtaggagatgcaacatataaacacaattataaaaggtaaaaacaaagattaaggttagagagatataacccaaattagtaaccaaaaggcttgacacattttataaatgttgtccgaaatctctattcctaagccttcattaatgcttgaagcttcttccataggaaggagaagtgggatacacaagccttatgaagtttatgcaagtcaagcacttcttcataaacttggagagaacaagtaaccttgggtgctagactgagagagagagagagagttagaaaatatgtacatcaaattttaactctcataaccttatatatagtgtagaagtcgtcatgtgtctcagccaattggatcgtgactcctggaattaaatttggagccaaaaatacaataaaacaaaaagctaaaaattagtttttatgtcacatgtgacatgtcgcccattacaacatgttgcttggagcattttgatgatgctttatttatttatttattatgttttttgtaattccatcttagctcccaagcgacatgtcatccactagtaggtaacatgtcgcttagagcagtttgacagatttcttgttatgtaaatgtatgccctatgccccatgtagtgtgttctaggagacataacgcatggtcagggcgatatgtcacctgggtacacactaactgtgtaaatgtccttttaaatatctccaaacgattccaaacttcttgagtaaccttatacactttataaggtcaatttaaaggtaaaaccataattagtgattatgttttacactatattaaatttcacatactcatattgtgaaaactttgaaatgtgtgaaacaccgcaatgtgtttgacctttattattacacttaaccaatctcaacattatgagttagagtctaggtgttagttagttttgttattccagttcttgttgtaataactaggtagtttgttacatctaaatattgctctattattatactctatcaagggtctgttagattctatatcactcataaaatatgcaacaacaaacttcaattctatagataaacatattacata

SEQ ID NO: 306614 - DNA, 1341 bp, Cannabis indica
aggtaaaaatattagaggttttgatgcaatttactcttcaattttttttgaatgaaaattcagctttattaaactttcacctctgctagcaattttagtaacaactcagttgagacatatctcaagctgaaaacacaattaggatataaatgggaagctctagcaaactctgagccacatcatttgctggtcgcttaacaaaacaaacaaaaatatacttcaagtaaattttacaatcccgaaccacaaaaccaaaaaaaaaaacaatacttattgagcttcgtaaagcttagaccactgcaaaacaaccagtttcaattgttaccaattgccacagttttgttttgatctaacttaaagcttcacgaactctcattaattacttttctattaaagttgtttaactaaaatgattctggtttttttcctaattttttaactcgtaaatatcatatgtactgaagatataattcaaacatttagttgcatatgtgcaataattattttgaattttatttttgatacggtaaagtactatttaaatttttttgaaaacgaacaattttttattatagttataatatacaatgccatatataaaaaattgggatattattttttaaaatatgaaagtaaaaaacaccaatataataaaagtaaaagtgatacactacctaacaagttccgtaagagttaaaaaaaaaaatatagaacaaaagtcttgttaatttatttttatttttgggtaagtgtcacatccaatgattttaataaataattttatcaaaataatttttctgagatcttattatatatattttctttgaacaaatttaataagcacatgcataactctaacaatcattttcaagtttgtttggatacatttctttattattttattaattctctcttgtcattattttgcaaataaattaattttattattgtttgcaagttacaaccatattaactaatcaaatatattgaaattaattaatacacccttaagtgatgtaatatgtttgaccaaaataataaaaatacatatattttaacttgttatttgttaatacataaatttacaagtcctacaaaaatgctaaaatatcataataaaattaaattttatacttaaactttgacaaattaacattttgttttctcccatgtttatttaactacgtacttatatgcatacatttttttaattcattatatttaatagctaattaaaaaatgggctttttaatttttacatttcaaaactgttttttttttttttgtatttttacagaattctacataaaaactcctattgcaactagcgctgcaacctta

SEQ ID NO: 306615 - DNA, 1711 bp, Cannabis indica
acaaaaaacgaattgaattatctttctatatatgacatgactgtgttgaagccatacaaaatatttaagtcatatagaatagtgtttaacaaaatgaaaatgaatggagaaaatctaaaaccaaacaaaaaattaggagtgtttctcaaaatatatatctatatattactaattaggagtggctacaacatcggtagatgacagattggccttcaagctcactatgccgagttatcttgacaacttgtccacgccttaacccatagtatcttgcaattggatcagtagttcttatccatggaagctgagatcatcatcaccaattcattttaattaccccggccgcccactatacatatataataactaattaagtaataaactatatatgtacctgtgaatctgaaatgttgtaaaactccaacaaagccttcttctcctcctctgttagaacctcatgcttaggaacaagagcatgctctgttacgttaactaacaattcttcttcctgtgtaatgagaaaccgagtgtaatattgagaataaaaaacaaggggtactgtgttacatatatataaatatatatatatataagattttacctggaaaatttcagcgccacactgtctacgtaatttattaatattaggcagtttttctttaaaaactacgattgctttcatagatggcctaagcatattgtccacgccactactatccttttcagcggagaaaaaaacacaaatcttcttgtaccaaaaaaaaaaacaaaaacaggtaagtaatttcatagaaagagattgaagaggtaaatccctctattatatgtgtacctgatcagagtcatcattcctttttgccgcagtgaagtataaggtggtaggatattgcctcatttttcgggcatgattggcgtcgatgaattgttgtttagtcatgttgatttcacaatcttcaactaaatagtttcgatccctaagcatttgcatcagtgttcttcttatacagaatagccatgttatctcttcatcatctatacccatattcttcgatcgatatcgatttctaatcatcatataataatacaccaaattttgttaattaataattactactattcactaacttactctacaagaaaaaccaatatatagtaattaattaaagtagttattttacttaattagcacccaaactagaatggattattattattgttgttgttgttgttgttgttattattattatggattaaaggaattaaagaaccaaagttgttagaatatacatagtacgaaagaaagaataaagaaaaaataccaaaatatgataggcatcgtaatgaagaagagtacaaaatagtatatacattaaaaaaaaagtgtaaatttttaaataggaaagaggaattaaagtattttaattatttactgattaacttgctgagttgacgagcctgatttacttgctcccttcttgattcttaatcgaaaaagagtgaagaattttaagacgaggaatcaagaggatgaagatacgaatgaagatttattttatagaaagagagagcaaaagaggaaacttcccaaatgccgtccatccaaaagtttcttgtagccgaagaatacccatttactctattgggccatcaaaaaccttcttttcttatggcccaacatacacgtgaagtcccaaaacttaaaaaaaaaaaa

SEQ ID NO: 306616 - DNA, 3303 bp, Cannabis indica
agagagaggaagagaggaggggggctgggtggtcctcggtggtcgtcggaggtcgtggaggtcgtcggagccgtgctctttggttgagccgtggaggttgtgggacggtttgggtggggcggcgaagagatgccgagatagagagagaaagagagatgcatagagagtttgagggaaggagagagaaagggtttgagttttagagaggggtatttttggggttttgaaaaagtagtcatatattttcaatgtagaaaagtattagtttagggaaaaaattatcccctaatgcatgcatagaaattcaaatttccctttactttttacctcatacaccttttttcctctttttttttttttaattttttatttaagcatttatatattacaatcatgcataacctgggactcgaacccaggacctccaacacacacgcactctcctatagccacttgagctagcctcaagtggttacacattttttttctttttatttatcttttataggtgtatatctttcttcatatatttttttattattatttttctcctctttttctctcattttctttctttgtatttttttttcttttcatttttttttgcttgttctatttcttattattattattatgtctagtttacaactcgcgcttcgcggcggatatttaaattttttaaaattatatatataaaataaattatatcttttattagtgacagctaagtaataaaattatattaaattctaattttactaatttttatataattatctttgaataatatgataagccaaatatataaatgggtcgactctttctaaatttacaaaattttatatttctaatggaaccacggcttagcccatgtttagagggtcctagaatggcctataaagcttagtgtgtcctttttatctcaaaaaatatacgttaataatttcttttaatgaccaaagtaaaaataaatgtaaaataaatttggtctcttcctcccaattttaactattttatgtttttagagactatatatatctatagatgctatagatatatatttcataaatttcagtcaaactcatattattgatcaaattaccaaaatttgaccatgtatatatcttttaatgtctgttacttgtcatttataaaaaatgcttagttgtattcttttaataaagttttaagaattattttttatatataaaagagttgttttttccattttgaattgatatttacttatttgaatactgatcttttgtaagccctaaaactatataaagggtcttatacacttaggaaaggtacctgaattctgatctcttaagccacatagctctctcactccctctcactcacgccacttcctatacattggaaacttagtctattttctcatctcactcgttcagaatctgtaatacatcagttctcaccattttaacattcaaagagagtcatagctagaaattacaaggtttaagcctgtaatatgcatggtattatctctagaatcaataaaactaaaaggggattaggtcattacccgccaaataaaagggctcgaacctctgtaaattgatgtgtcaatttgttatttgctattaaaatttacacatggtgattatcagtaataaataaggctttattgtcagttagccaaaattcaaggtcaatattttggtgctttcattgagagcattgtttattgttttgatcaatcacatggttgtaattaggagaaccactacctctacttcctcaggatcctatgaaggctgatcccaatgttcgtgttctgcccaccatggaaggtcccattattctgactaacaccgtcaatcttgccaaccctataaaccctacaaattcagccaataccattaatcctattaatcctgctatcctagtaaatcttaatgatcagcctttgccacccagaatagatccaccaatagcacctcgtacagaaggtcctatcagcacaaaaaaccctccacagagcacaactgggacttttcattagtattatgcaggagaaataggaacaggaattagcaaaccagctattagcaaacctaatgtggacctgggagagtgtaggccaggtcacctagataaaagaaccatgtgttgctggttgcaattcttttgcctaacagagatgtgaattcctaaggtggatggatgaccaagaggtcatcctctaggcccatcaagcagagctaaagcgccacaatagggaggccagtgacttgataaggcggttgaatgagagaaccgcaataagaggccagggtctaataagagaccctttgcaaggaaggctcatcgacgttcagtcagggcctacaggcaggttgacaatggatatactgtccaactaggtccctcaagcacgaggacaaaccttcccctgcttaaagacggttaaatctttccagatagaccgtatggcaggaatagccaattcctgacatctggaagccttggagggcggacaaacaacttcggataggagacattacctatcatccagaccttggcagtcaacacagtgttgctctccctagaatattcaagaacaagtcattctaaggcctatttttgatagaccaggtcctaggacaaacagaaaatgcacaggacaacaataacttgaggagcgagatctgaagtgactttgttccaccactaagcaataattttaggcagatggacccaccaaacccaagaaattagtacaatcaacctcccattaacccacagaccgacctggctgaccaaaggagtatggctagtctgatcggccaagggagaacaacctaaggctggccggtcaaagccagctacctagccttgggctggtcggcaaaaacaaattacctagccaaggccactcgtctggctaagaaagacaattggaaaagtatccactaaagcagatccatctgtgcaagcacatttggatcaaattagagacatgataaaaggcatgtccaacccaaagctgtcagatcttgaactagacaggtcaagggggtctccattctcagcatatattaatgtgctacccatacctcagttcaagatactaatttggaagatgtacaacgaaaaggaagatgccttagcacacataaagtactttgagatgcaaacagatctccattctcagcatatattaatgtgctacccatacctcaggtctagtggataaatctatagaagcttcttgaatactagatatagaatttatttatctaaggagaagtctcaactattccagaaaagata

SEQ ID NO: 306617 - DNA, 1723 bp, Cannabis indica
tgaaaactactgaatgacatagaaatgcatctctgaattcaataataactgtataataaattatttaaatagctataaataatttcataattaaacgtgattaactgctaatttccaaattaaactaagccgtctttacaggcatcgctgtggaggccagggaaaggaatgtacgtcaaggaattggaaactaataagtatctcttccaattcttccatgaagtggatattggtagagtccttgacggtaccccatggacgtttaataagagtcctttgattgttgaacgtttgaaggaaggcgagaatcctaggaacaaagcactgaatactatggagatttgggttcaagtttataatctggaagtggggtttcgatcggatagagtcctgcagggggtgggcgcttatattgggcaatatgtttcctcttgtccaaagaattttgccggtatatggcgagattacttccgtgttcgggttttgattaatgtggagaagccccttaaacgaagaatgcaaatttacaagaacaaggtggagtggttctgggctaacttcaaatatgaaagggttcccacgttttttttatttgcggtattatcggacactccgaacgattctgtgataggtttttcgaggaatcagcaaacaccattgccaaaccttatggtttgttcatgaaagcgcctgaccggaggcaatctaaacaaatcggggctcggtggctgcgtgataatatggggcagccagtggagggggttgccgaacatagtacgatggagaaaagtgatgagagggcattgaatactgaccatgattcagaggatatgatgatgatggagggagtgattggtggagtgactggtggaaggtattttggtgttaataacaaatctgttactagcactattagcatggacagtaatgaggagagggagaagaatggggaggtaggaagaaataaggaaattcaaaatgagggtatatttaatatggatttaaagaggagacgtgtgaatggggaggaggtgcttggtcaatcaagtgaagatattgtggggccggtgttgaatggtgatgaagtggacgtgggtatatttcaggaaggaataaatagagaaagtggcattattgaaaatggggtttatgaaaaagatagtggggtaatacaagtagaaaagcccaatggtggaaatggatttttaagaaagaaatctgaagctaatattggtagttttccaaaaaaacgattctttggcgggtactcagtttggggcccgccaatcgttatgagtttgttaagttggaattgccgagggcttgggaacctgagggtggatcaattccttaaggaaattgttttccaaaagaaacccgcaattatttttctttgtgagactatttgtaaaagtgatagagttaattatgttaaaagaatgttgggctttgagggtagttatgtggtggaggcccgtggtcatagtggtgggcttgctatgttatggaagaaagtgttggaaattattttaccaggatcttagatctactcacaagcatgttgtttaacaccctaaatatgaactttctagaacgataaaataaagacatataaagttaagaaaacgttacattgatgcagcggaattaatttctccttccactcagatctctaacccttgtatcctttctgtcgcagaatattatcaagatctgagcccga

SEQ ID NO: 306618 - DNA, 534 bp, Cannabis indica
aataataatactaaaaaaaataacttataagaggaatacctcaaatgattattcatgtctatttgagtatctaatcaaaaaattattttaagacaaagaaagagccaaaattgatgaagaaatgccttcatgtagagctactttatacatagccaaagaaattaataaatggtaccaaaaaaaattctctaacaaaaattacttgcactccaaggcaaagaaaccctagcttagtgaagtagtactatcctcaaatatcctcttccttgccatttttgcctgcaaatgtaataatccattttgagagtgagagaaatttttttggtaaataagatgacaaaatctccaattaataattcttgtaatcacctaagaaataaaatcttgaaagttcgataaggtggttaagatggacacttgttctcgctgttaatcagtggtgatggtgaacttagatggagacaagtgggaaatttaccctacttattttttttaagttaattgggatttttgtctctcgaactttgacatata

SEQ ID NO: 306619 - DNA, 1378 bp, Cannabis indica
ataaaaatttaaaaaaatggacacaccttcatcttcgattattattattatgtaataatcgaagatataaggcatgcccttcgcaatttcgacaattgggttcacctatcttcaattattttgtactaaccgaagacatagttccccttacattttcggtgttttcgaaacatacatcttcgcttcaattgtttttagcagcgagtattttaaaaaccgataataaatgagcttaaaaatccaaaatttaaagcctaaataaatttgtagtaatgttgctctaaacaaaattataataagtgagaactttcgtttgtcacattatttaatttaagatttatatttgtaaccattacaaattgaataaagacatgcatgattgaaatcactacaattgtgggggcataacatgatttaacatccaaaaataaaatacagaaatctaaatatgtacaattgaatagtgtggggcaaatttgcaaggttggcaaatcgtaattggtagggctgtaacacattaatgatatacatgtagaacaaattttggtttatatagtatccaaatttatatatagagaacatcatataatatccacaataatactaaaaatttaacaagtagaagtagccagtgacatttcattttcatcttatatatatacatatatataaatatttattgtacaagtctccataggattctactttgtacacgatcgagtcaaccccagtagaagtaattaactgaatagagttaatttaattaattgaatattattgggagagaagttgtattgtaatctgggagacaaaaagctagctagaatgcctgaagaagccaattagctttaatcgagtgttttttgatctcctcaaaatgtttttgaagagcgttcctttttttttttattgagtgggagaagattaggaaggcttgctatctccttctcgtaatcctcagtttaatcattgatatttggtaccgtttctttcactctttttaatatttttattatctctttttggttatatataattgcctttatttattactttcctagttgggtttcttctactttgaatctttcattgatataaattatgggttctcttttctccacattggtgcaagagaaagccttattaaagaaagaccaaagaaaccatgtactctcccaccctttttcttttcttaattctctcaatatcttttgttttcctaatttaaatagttatctctcttataaaataatataaaattatataaagtagatgaaaaaaaataagaagaaaaaaatagaagagagaaaaaaaaagtgtaaaaatttctcagttgtttattctaatgcggtaaactcctatttatacaaatacaaga

SEQ ID NO: 306620 - DNA, 1597 bp, Cannabis indica
atttcattccaaaaaaaaaaaaatcgttaatttgtaattattgtattaaacaatgtgggcggtgcctttacctctacttggaatgggcttttgacttggacacatgcctttagtgggtctttgaattgggttggtttggtaggtttccaacccatttcaaaccatggtctcaatcaattgagagaattgtgtaagaaagtaaaaatatcataagtccatcgtatatgaattcataaatattgagaatggtattttgaagatataatgttattcaatcttaattgttacaaaagtatttcaagtatcacgtttttttttttttaaatatctagtggatattattatattattttcatatatgagaacacaatcggacttcaatacaagttgacaaacaaattggcttgactaataaccttagcccctacacaggaatgatatcataaaaataagtttgtatgtatattcttttcaaagtatctgattctctctctttcaagttcaaaaataaattatttgtatataaagaataccagtactccaaaataggccatcaatcaataatcaataaaagaaagccaagtatgtcatgctataaacagtaaaataaatttaaattgatcaatgcagcctctaattaaatataaatattaatataaatgagctcatattattaaacaaataacaaaagttgtctcttaaatgtagtttgcttatttttaaggtgactgtatatatgacaatatatatacttttcttatagataaaatgacaatgtatatacttgaacacgttactacaaatatatattcagataataataataataatgccgacaaaaaaaccaattatagtaataataatattagggagttcccttctgaatatattaatttatttttgaacaccatgcatgctaatatataaaagtgataaataatatatatatcgtacttgaattcttaaatgaagaaactaataaagccagctagctagcaacaaataagaggtttcgaaggtcaaatctcagttgcaccaaaaagagagtaataattttcagattgggacccttaacttgggtcaattcaaagaggggagtactcggttttatatgtttcaatatggactttttctatatatcttatcatataatacatgaatgaatttaaatatatttggagagcaagtttacctaaacataaagttttattaaaacctatagttatttcaaactgcacggtggcggaaattgactaccttaccaacaaattgccacttttgattttccgggtttgtttgagaaaggaaggaaataaaaagcctaattactttatatgaaaaaataaaaaattaattatgagttttgctatttagagtttaacatgtaccaaattatattttttgaattttttatgccgttaaaaattctctcccaactattgagatgattggattcaataattttttgtttaatttatctaatggaagtgtggcatagacgaaagctcaaggagcgcgatttggtatatgtcaaagttcagggccgactctgaaatgtagtgggccataggaaaaaaaatatttttgagccctcatt

SEQ ID NO: 306621 - DNA, 2072 bp, Cannabis indica
tgttataaaatctctaacaatcaaaaagcttatcccttttcaatggaagatgtgataaatcaagattgtgatgcccctgacagggcagaccgcggaggtcgaagccttggagaaacggctggccttcaagctggggcgtgaggccgcaccttttgttgcatagctcttagaccaagtggctgggagcgcctctaaattgcccaccgagacctgggcatcttctagttgcacggatgcttttatgctggcccactctgcaaagcggcatgccattgggtaaggcttcgagatgtgtccctttatctttccttctgtttgcgtctatttgccctgtcccctgttctggcacttcaaccttctaacttggcctatttttgataggcatccatgttggctgaaagggctaccaaggaagtgggcacgctggtgacagtgttggaacaggtcagggtggcaaatcgtgacctatgcgccgccaacgaggctctttgggccgagcttacaggtgccaagttttagattgggggcctgcagcaggccaaccagtatttggaggaggaaagtgcctgtcaagcctgcttcatccagagtatgaaggccgttcacgacctttatacagagactgtggggcaattatccgacgcaagtttatcctctccgtcaggtggcgtccaactgtgaacttccggcagaccctttttattttatttgttttttttttgtatatatctcctttttaatcacacttttctatccgcggagacaattaatatttttccctagccgtggggggattttagtagtgaaataggatctttctttttgttgttcctttcttggagatttgttgggatagactttctaggggctggttgcattactgaagcacctagttccaacgaccagtgttttaacctcttccctttagtcttaattatctcttggtcaattcaggagttgctcttcgatttgaccctttctttccctgtgccatgatgcttttcgattggccacccagaaggttgtttgtttggctagaagatggcccctctccgtgaaacaaggttcttcgtgatttctcacatcctcttcggggtctagttccttcacaaggtcaagtcccgggagtgatttctgcaactaccttagacttagatattttccttactttggtccccgtcagcctttcattccaacctattgtgtaattcggtgggctaagcttacgtgaagtccgtggagacgtgcacgaagggattcgggcgtgtcttttctttttcaaaagttttggctgaacgtgcttcttatctctgggttcacttcttgagtttagcttttaaggaagaactcaagtgtatttctctaagggaggctttggttgagaacatttcctttttgttgcacgtatacttttgggctggatgactttggcaaatggatgtaagatgttgtagccataagcaattggatatatcataccccccaaatgagctgggaatttcggacttaaattctcgatcatttgctcagagtctgacttgtgtctctatttcagaggaggagagttgagtgtagttttgccttgctttaggaggtatattgtccttctgagggagtgcacaaccacttttaggcttccaggaggagaaaacatggggttctgggcaagaataaggttgtatgtcccaacaatatcttcatggcgtaaaccccataagggagattctaggcttctcgtggcataggaggccgttggtttcctggagggaaaactgggcctgcacccccatgcaaacgatcgttcttatgcaggggtttgtaagcaaaagtcatgctagaatcccatagcagcaaactgttggcttttcactaagaaagacgaaaagtgtgcaaggagttcaaacattaaatttgcttgtaaacaccaaagggtacaatatcattgggtttgtgagagtatggtagactttaagcattctttccaattcaggaaggagggttgaagacgtaccgaccccagtgatctttctcgcacgaaagacaacgtgcatgcgagagtcatgttgaatttt

SEQ ID NO: 306622 - DNA, 3030 bp, Cannabis indica
taaaggagagtggttccctcaaagtttatcagaaagcagcatgaaaagtctaaatggttacaaggtcaaaagatttgagttcattagtttaaattaattagctaaataattatcttttcaatgaaatttttctgaaaaattattttctttactcaactacaggttttcatctccatcgctttgatacttggagatgggctttataactttctcaagataattgttttcacttccacaagcatccataccaaaatgaagaacaataccctcaaaacatgtaattaacaatacacatgtgttcattcaaccacttactagtaatacacttcatgccattgtccatatataataaaaagtaaaaagggttttgtgtcttccttaaatattgtccatatagagaaagaaaattttgaatagtttgcattgcagtccttttgaaagagtttaaatagtagtaacttttactgatgtaactatctttcattgcagcttccgacaatcaagatgagaccattgatgatcttaacagaaatgagttgtttgtaagagatggcattcctctttggatagcatgcgttggatatggtttctttaccctcatttccgtcattattgtcccaataatgttccctcagctaaaatggtactacgtagttgttgcctatatgcttgctccttctctgagcttctgcaatgcttatggctctggtttaacagacatgaacatggcatataattatggtaaagttgctctatttattcttgctagtttggctggaaaagaaaatggtgtggttgcagggcttgttggttgtggtttgatcaagtccattgtatccatatcttctgatttgatgcacgatttcaagactggccatctcactctcacttcgcctcggtcaatgcttgtgagccaagctattggaacagcattaggctgtgtagtggcacccgtcacattcttcctcttctacaaggcctttgatatagggaaccctgacggtgaatacaaagcgccatatgctatagtctacaggaacatggcaattctaggtgttgaaggattttccgccttgcctcagcattgcttgcaactctgttatggcttctttgctttcgctatagcagccaaccttgtgagagatctttcacccaagcatatcggtaaatgggtgcctcttccaatggctatggctgttcctttcttggtcggtgcttacttcgccattgacatgtgtgtgggaagtttagttgtttttgtgtggcataagatgaatggtaagaacgccacattgatgattcctgctgttgcttctggtttgatctgtggagatggtttatggattcttccctcgtcagtacttgcgttggcaaagattcgaccacccatatgcatgagcttcttcagctcagagtaatggtttggcattggttggtttatatacaaggtcccatgtatgagtctctcgaatatatccacacagtttttaatttgtaaagtttaaaattggcaatgttgatgttagtgacaatttctgttcaataatgatgtatcagatgtgcatttatagattactattctgatgttttcaaataaatgtgctcaaaatattagaaaacatcataatagtcttcgatgaaatatattctaataaatgatacgtattttgcgtgagatacgatttttgaatatgtctaatctaataaatgtagtgaaaatattttattaatgaaatatatctatgggataaatctcatgtcacatggaaaatacataaaacaagttacaaggaaaaataaagtaagattttttataagggtcaatagaccattataactcttggagtaatcggttctgttttcataggcttaaatcttttagctctatactagactgttttcataggcttaaatctcaagacaacaaactttcagcaacacaaagaaaaatcaataacagttttctaactgttttctcagctcaaaatacaacacatcacagttagtaataacattataaataaaggggtcaacctgcccatttcgtgtgacattttttagattagccaaagagtgttgcagcagccatttcatgaagaaataaccttagaaaataagagagaaaaacagagagagttagaaagttttattttgcaataaaaccagaaaaaataaaagaagaaaagagagaaaaagcttgagattacctactgaaattgtggctaggaatctccaactccttgtactcgattttgacattgatagtgaagattcaagcaactttgagggtcgcttgacggagacgtacctctgatttagagggaactccgaaatcatttctttgtgttttttttttctgctggtttctttcgggtctctctttaattactaacaaagatcattttagatctttgttgttactgtttttggttgtttatttggttgtacaggttcgggtaaggatggctttgtttgaagctagaagaagtcaagaagagaaagagggctaggctgcggtttgaagagaagaagtaggcttgggttcggctgttgctgcagcaaaaagaaagggagacgaagaagacttggctgcgattgaagtgctgttactgcagcaagaagaagaggagaaggaggagtgatatgcggctgctaaggttagagaagagaaaaaaaaggggttattgggttatcttttgaaacataaaaatgatgcctttgctaaatttcaagaatggaaaatttcaatagaaaaattgactaataaaaaggttaagactcttaggaccgataacggtctagagttctgcaacaatttgggcatgctttatttcctacagtggtatcagagctcggggaagcaagaagattcaacaacacctggaaacaaagtcaagaaacaagacagatcatcaaaacattgaagaagccaaatctgaagaagccaaatctgaagttatcaagaaattgataaacaagaaaactctaacctaaactttatcttgttacattcttgcttttattatcttg

SEQ ID NO: 306623 - DNA, 1300 bp, Cannabis indica
ttcaccgtttttgacggaagttgcagtcggttctctcgcagttcatcattttcagcatgttgcagggctttatggatcttgaactggtttcgaagggtcgggtcctttcctagttgtttttgcagtacccaatcttggaaccactttgctaggggtgccgtgaaggtggatttttcttttgcatcattcttaagccaaactccatacattgggtagaagtttccttgggcatctttgactatagttggtgctttaaagcacatgctctggtcatgattaagaatgccacatttgaagcaaagcttggggagcttttcgtatctgtattgtatccataggtccttggtttctgtcgacgaagaaagaagcctgagaacatgggtgaattcagatcaatcgtagctctaaatctcaatgtgctcattcccacgacatcctctatacccatgggaagctcataaactggtgaggcctttgcagccatctccttgaggtttgacaagttccaatagaatggtgggatactttccacattcacccacatgggagttttatcaaacttgatttcagcaggtgtcagccatgctggccatggcatgataactaaaagagaaccacagacgaaccatggtcttctggccagaacgttcaaagcatcatcccgattcgcaaaactgaattggatgagtccttcctctaactccttccatttccaccctttaatggcattccatgacattttgagcgatccttggatagcagccttcccatatctgtgtttactgaagattttccctaataatactctgtttgcctcctgaggttcatcgacctcacagggattaagtctaaacgaaagttcttcttgggagatttgcactgaatcctcgaagaggtcactgacaccagtcgggtccatagcaaactctggtagagatttgaaaaaacaagaacaaagccacaaaaaaaccaaataaaccaaagaagagcaattgaagaacaattctcttatcaacttcgcgaagttaagctcctagagagcattttactgcattccttttgtcttggattagtttgcaagactaaatgtatgaatattacacttaataatattattattagttaataatatcaacactgttcccataatgtgtgttctacctacatgttagttatatatgtattatgtagagtatagacaaatgttgtaacaaggaatagtacatggtggtacataacatatatagttatgtcttaaaaagggtaacttacaaaaatactggattttgacataatcttt

SEQ ID NO: 306624 - DNA, 1401 bp, Cannabis indica
agcttcctctgttctgctaactccgtctgagtagcttctaaatctttggtcactcgcaacaagtatgggttgtggtcacagtaatgaccatccttgtagtacctgtcttttacgtagtcatcaccatcaccttctttatccccaccttcaaggttctggtcatcgttgaggccgttgaacaggttctcggcatcttcccctcagttcttgacgtgggtcatgccttcttctctaacaccgcccgtctggggccggaggcaagggaatctgcttccttcaaaacagtgtccaatagagttttgttgcttgtattcttttgggtattcaccatgatcgaagtgatgcaacaaccagtaaaatttcctcaactctcaatgaaagcaccgaaatattaccgagatttcggaaaactgattatttagagcttaaggaaaatgcaaaataataaataatagacaaataatttttacgttgtttgggcgttaataatccctagtccacaagtttattgtattagccttgtcggcgagtgtttgagtattacaagtgttcacaatattaactttgtattccttttgtttctcttgaggaagaaaaaagctttttagaaattttggcaaaagttttctaagtaaaaaatgttcaccctctgtacatgaaaaataggagtatttataggcatacatgcgggtaagggcatttcctttacccacttagggtttcgtacttagcatgtttctctagctagtgattataacttggtgatctggctgttggtggctaggaaacctcctaatcgtgagatagacaactgtggcatcccaatttgtaggactaacgacacatgttcccaaggtttcaccttgcaaaattggtgtataaacaaactgttggcaaaaatgagctaaagagcatgtacgtgcactaccaaggtctgatgcgggggacaagatctgatttggtattagaagatatgcaactgttgggtttagctccagattaggcattatggagttctaaaaagatctggctaaggtcttcctggaccaactaatttgctaccatctcggagcatgtgcgactttcgttcacttccagtagcaataggattgatgagaatttcagagtccttttcgcctttgctggcagggagagcttctgggtattacagcaccttctgtaaccctgataagtggaagatataagataacaatattcaattcgacgtggcactcttctataattaccacatacaattcatccataaacagggataacactaacatatagtaaatagaaaaaggtatttgagtctttgtttgggaaggtagttttgagtgcaaaatctttatatatatatatatataaaggagaggtatgaagcggtgatgtggcactcta

SEQ ID NO: 306625 - DNA, 700 bp, Cannabis indica
atagtagtatgtttaaagccgtggttttattgtagttcttgttggtaatttaattgttgtttttaatgatgatcaaagttttgacagttttatatatgttgttttgggttagctctaatttttaaaatctatttttggacttattagaggtcccatcttaaatacaaagaggttaagtttgtgcttagggcaaaaaataaaataaaatattcttttaaaattatgtatttttttactaattttaaaagatatgacaattattttctaaatgagggctctagaaatttttcttttcctataacatactatatttcaaggccggcctacataattattagcatgttttgacatgaatgtagaaatttttataactttgtcattcttcaaagtttgttgtcgtttcatacgtgttttgcatgggattatgagttgaatgttttttgtttttttaagcaaaaaagttaaatgttttttattgattatttattttgttttagagtataaaaaatgagtaaatcttttttgaaaaatataaatttgcttaaattagtatattatctgccattgataaactatcaatatactatcgataaaccatcgataatatagtacatcaataatatcgatagtaggctgtaggagtgtatatcaattggtttagtcgggttattgtaatgaccgctttagtaatttggattag

SEQ ID NO: 306626 - DNA, 1903 bp, Cannabis indica
ctgttaaacctctgttccgcgtagagaggccacgccaccattggaacaccagcacacactgcttccagcaccgagttccaaccgcagtgactcacaaacccgcctaccgagtcatgactcagaacctccacttgttctacccaattcttcaccaccattcccttctccttagttcgatccaagaacccgtacggtagcaacgagtctaaatccgggtcgggtagacccgaattagccacgctgaccggactcctcaccacccacaagaacctctgcccgctcttctccaatccaacggctatttctctcaattgatcaacagtaaacgaccccagacttccgaaacagaggaagacgacgcttcgactcggttgtgagtcgagccaagtaagtgactcggaccgtacatttcgttttccttctttggtaaggatcaacggtccgatgcaatggatcggaggagtacggccttcagggacgcaagagccgtctaacatggctttgatggctctaggctcaagtgagtcaaacgtgttcacaatgattcctgtagattcacataaataattagcgcatgcaagaaactgatcataggccttgtcacgacggtcgagcaaaggcttccccatgtcagaagacggcataggaggaactccaggaatatcgaggaggatattttggtctttgaagctcttcatggtatttccgtgaagggtgggcaaataaagaaaggcagctaagttagaagccgctgaggtgtagaaaatgaaacaggggattttgagttgagcagagacagtgagtgtttcagcacagaagaagtcgatgatgaaagcgtgaacggtgtagttttgggacatggagctgagagcttggtgtacggctgatttgttaaaggtggtgagttcgaagaggatgttctcatggtggagcgaagaggctgagatggatggagggaaagaggtgggttgtgggaggtgatggaaggtgatagaaggaatggtggcggtgacggtggcgatgtagggagcagtgtcaccggagttgtaaggagcagtggtgatgatgatgtgaatggagagtgatggtttgaaggtgagtattagctttcaaagctcaaccatggagattaggtgtcctatggctggtgctggatacaacactattgcagggtccatattgatcagaatcagatgattttggttggactaacaaacaaagcttttaatttctatcaattcacctcttttttacgtagagctgcacagtgatgctcttctcaaggtgtctgacatggaaaaaaggatgaaaattataaaaatccaaacttgaattattttaactgtttccaaagactagtacgtacagggcgcattgataaaattttagccgttcaaagcactaccagtagattctcttatctatccttcaatattcgttactaaattctttaggatgaaaaaataagaatatgaatgataaaaaaaattattttgtagtattatattagaatgatcttttctttcatttgaaaatagaataattatttcactaaaatagttaaaagggcatttctttaaaatattgttctaataatactatgaaatgcaactaaacaaattaataaaatgaaaattagttccttttcattccatttgattgcctccaaccaaacgccacattgttagctcaaaaatatacaattaaacacttagggtgtgtttggaaagccacaatgtaattgaatttgtgtgaaattagaggtaattacacaatttggcatgtttgtctgaccatgtaattacactgtaactgtgtaattgaaagtaattgaggggttccaattacactctccaattctcatgaccccccatgagaattgaatgtaattacactgtgtaat

SEQ ID NO: 306627 - DNA, 2406 bp, Cannabis indica
atactatatcataatagaaatattttaaagtaaatataatttcatacatgaattataatttaaaataaaattattaattttacatagatgaatttacaaaatacatgtatatattttattaagatgtaattattcttatataaaggtatactttattaatacgggacttagaaaatatataactaattacaatttaaagattattcttatttataactagcccaaatcgggacttgattattttataacaaattagagtttattcttgaatagagtattcttaaataaaggtcctactgtacttagtgtccaagaaatgattacagctttgagataatatctcaattttaagttcaaactaaatgatcttcattattcaaaattttccatctttaactttttacctaaatggttttgaaaccattgaaatgaattcttgaaatcatcaaaatttctaattcatttggtaaacaaatgagtaacatgaataatgtcaacaaaatgacaggtattcatagcaaccctcgctataacatctatctgcctaatgacttcagaatttactcactttcatgattctttggcccttttctcatatttagagaacgaagaattagttaattttaacttttcagataaatttcacagatttgtaatcattgaaatttatctaagctaatataagtaaggcaaataccaaaggcacttcataattatgttattataaatcttttgttattttaatggctctaggtacaactaattatttactaaatcgagatatctaattagtcataaaactatagctcttttctcaataatatcaacattaatttacatctatttgaaaaaaaaaaatacctgtgaaagtaactaaaactcgatgttgatatatttagaaatttaaaatgaagaaaataatttctcaaaaaaacaattcatttcaaatttatagatactaatcccattcgctgggtccataaaggtcaattggccaatccgtcaaagataggcagaacgggactcacaacttggaacctcaataactgtttctcaacaatgaatttggatgccatagtgccagattaacaatcaacaattaacatgaggattgacgtgaactaaagaacgatgtccctaggggtcgtctaggaacaaaatacgaaagggcatccaggattagatagtgtctcgaaggctgacccacatggcacttttttgacacgatcttgagaaattaggtggcttgtcccctgtatcagaccttgaaaaggctcacaacaaaaaggaaatcatcgttttggacaaacacccactattttggcattccttattctccacgatggcttatgcccacatgccactgtcaacggtacaaccatttacagacatcagctcaatcaacgttgggtctcacctactcggggcaatagctcaaaatatattatattttaccccatcagtggatttcttacacaaaacaataccttgacccatcaaaaaatttcctataatatggttttaactcttcatgcaaagggttgggaattttaagagtcaaaagactagaaatacaattgtatactccatagccaagagctcaataatagttgctcatggagtaaggctcattaatgccccaatcacataaaaatcttgtcttattttctctctaatcttgctttctttaggttaaatactattgaattcaatttttgaaaatcttggcaaaaaaaataatgaatgatattgttatttatagattaattattgttagactatgtttagcctacgtttcaggttaatatttagagttggttttagtcattaataatgtttttaggacagaattatgcttattttctgtactttcaggttctcgtggtttgtacaagcaagtgcataaagatttaaaaaaggatcgaggcgagacaaatgaggcttaaacacctatttttcttggcattcttgccgcagcgaccacaaattatggtcgcggagagatcactacagaatgggtatttttttacttttgttcagtggttgtggtgaggaagacaaaggctgcaggcagacattattgccgcgcaacgaccatgacttgtggtcatggcgagatggttggtagaaacaaggaatatttttgactttatgaagtcaccgcggtgaggccattcttggccgcggcgacggaggccgtacgactcgagggcatacaaagttgtattttttgatattttgagtttaaattggctctatttaaatggacttcgaagttgaaaagagagagagactcaaaaattgaaccatagaagcagaaaggacgatggctagctaggtcgagagtggcaacccgaagccatttcacaatcagtttctttcttctccttttatttcttttatgtt

SEQ ID NO: 306628 - DNA, 1071 bp, Cannabis indica
atttttacataaaagactatacagtgtgtttgatatttcttatagatgatatttaaacatttgaagcaatgttaaattagaatcatcatattagagaagagatcaaaacatcttttctatatgcatattactttgtaaaatgctaaaaagtaattttaatggtaaaccctaaggaaatcatttgatctccaggattatagtttttgtatggaatagttgataccattccaagtatgacgataaacaataaaagtaactcttaaaagagatcaatagtaagaggtattaaatataatttggcatactctgttagaatttgaggataagatgaatgaggttccatcccaaaaccaattggcaatgggaggagtagccctttcatcttatatatcacaatttatttccacacattagcaatgtgggactaactctaatatactcataccaaagatctactgttgagtgggaagaataaggagtaaaagaattttattcaggattaaataacgacataaccaaataattttagctacgacctgttttaaacttagatttatagatttacatgtgtttcaagataatctaaaaactaagaaagaccttatttttgggtggagcagttattcaagattagtgtaaaaattatctttaaaagttttaaactccatcaatttgtctaaataatagtgttcctcgaaacaaccagaaaattattaaaatttataaagattgaaatacagattttggatttgttctagtgatggaacaattactattgtcaccgaaaggtagcacagatatagtaaccaaatagtagctaaaatgaacaaaactctttgtaagtattggaaaaaaagaagtttgatgttgaacacaaactttaggctctattgacaaagataaagacatacactacacttgatgtaatgaccgctttagtaatttatattagtaaaggcagttagtactaatttttaatattttcataattatttatgaatttaattagttgtgagtcccattgttagaaatgggcattagtgtaatgaccgctttagtaaattggattag

SEQ ID NO: 306629 - DNA, 2171 bp, Cannabis indica
aataatatatgttaacaataagaagttaacaaaaaaaataatgaaaataatatatagatgttctttaaatttaattgtatggcttgtgctttgtaaatatatgagttgttcataaataaaaaaagagaaattatagtgtaaaaattgcaattttttataatatataatgcagcgcgattttaaccgctttattgaattcaaaatcgcaatcggcattgcatcacacagtttggtaaaaatgtaaaccgtaactgcactgcaaaaaattttaaactgtattttttgtgcggtgtggtgtggtgcgggcagtttgtgcaatgtaggtggtttgatgaacacccctaaattatatttatagggagattttaaaataacagtactacaaagggtctttggcatcagttaactcgtaaatcaacacacagaactaatgcaattgattggctaggaatagagacatcaatacaccataaggggaacacattttccctattgttatctgtgtttctaaacgaatgacacgtggcataaaaagggaaatacaatctcaagactctgctaatgaaatcccctcagtaaaacctagtcacgaagaagcttcatagattcaggaataagtcaagaccaagaggtatgtggagatccaccttgccttattttagcttccttgacatggaagatttattaccactttgggaccaggagtggcccaagctcaaagtctgtccaagtgatacttggacaggtactcgaagggctactacagatgttgaccgtccaaaaggaacacggatttctaccttggatataaaccaggatcgcccagcgatggttatgattttttttggcataggattagatcttgtctcttatgccaggacatggtagtgcgtgcacctcatacacctgtttgccagatggttattctagttatttacttttcaaggttaaactatttggtgacatgcgtccagtacgtacagtggtctcctattgtccagctgctgcaatgtacgagcacaaatccttccaaggggccccacaatcatctctctttgcatgtactttacctgggctctttcccgatatcctaggcgggtcatgagcatgtccatacccatcctttatcctataaatacccttctattccatatgatgggggatcacaacctaggtaaccaaagccctgctaatattactccaagattttctcttattcaagataaacacagagtatagagatagggtttcttgcatatacactataaaaacattaaatacgccctttgaggctaatagactgactcgtggactaaggttaattaacatctgaactacataaaaatctccatctcatttattattgcattttattatttcttaagatctcaaatatttagtttccaaaaactttggcaaacattttggtgctttaattgagagctgaagaaagacctaaacctatagtgctagtgtagccatggtgtttacccaaaaatagttaccaaaaagactctttaaggcaacctcgatgctgtaatagaggatgtaaaccctctcttgctaaagcacgctcaactgagtgatgcgagtggaggaaatgcatccaactctgacaaccgaaaagctggcctgaacaaccaggacaatcacatcgatgaagaccgagatgctaagaaatgaggaggaagacaatgaggagaatacgttaaagatgggtattacaaagatggctatctctatgagtaggacccctaagtgatttgagtatccaaagagttgctagagactaaaaagaagctagcccatcaggagaaattttctcagagaatgatgactcacctccgagataaatttgcagatcttgaagaaggagattataatgatgacccttaagtggaatgtgttaatggaaacaataggaaaaatcttgatgatgttggaatctctgctcctttgacaagggaaaggcaaaagtaggtgaccctcaaaacctgacagctcccgtacttctttcaaaaaataaaaattgagttaatagacctagtcaggcgtacaaggccactgacgccttcgggcttggacgctattttgctttgaaagaccataatacgcaaaaagggactggtacaaatgtaatgaccgctctagtaatgtggattagaaaaggc

SEQ ID NO: 306630 - DNA, 1348 bp, Cannabis indica
tatattccactgtgttgacaataatataatcatggaataaatatataatctgaagaattaatagtaaatttgattatattgaaataagttttatttatagcagaaaacccaacaaggagtggtttttagacgtgaaatattgtctaaagacagaaagaagaaatcctagtaagatgtttaaataaaagattgaaagaaatctaggaaggaaaaatatggcatcacttccttgcgacactgaaatctaatgatagggttagaaccctctttaacgggaagtcaatggtgaagaaccagtaatcttgaaagtcgtgcatgtactttacagtgttggttggacaaatcagcccctatttcatttttcaagccgatagaagccaatttcgctcctattcttctgcatggggtttgacttcacttggtagaagtaaagaatctcctctggggacgggatctccaactttttggttctgcaaagaacgaaccaaccttccaacaacttataaacttaggggattagctggaagggggaaatacctacttttacacagaagtgcatgaagtaacatctaagtggaagaggagcccccatctctgtatgagcctaactctaaacgatgaagctatgtgtccatctacatggggactccctcaaaatagaaagcatgttcaagaatatgccaaaaatattcttgaggctttgatcttcctcgtatgctcaaagcacctcataattttttatatttatttgtgtacttatccatctcccatggatatgaattatacaccactcttggagcttaaacttcctcttgctccaaaatctccacctcatcggtttgagcagcttcagccatgatagaagctagaaaagaataaaagaaaagccaaacaattaaatactcaaactaaagaagataacaagggtgtgggagattcttcccctaacactgcttggagaggtccccaatggaccctacatttagaagcaaaatcctcaagaaaattgctccacgatgatcatatcaggaacacagagggataattgaagatttatgacatatcattgttggaattattttaccaggatctagatttactaccatgtatgtttttaacatactgaatatgaattctctaaaacaataaaataaacacatataaagtttaagaaaccttacagtgggtgcagcggaattaaatgactccttccgcttagatctctattccttgtatcctttctgtagcagagtatcaccaagatctgagcccgattctccttcttattgattggattcttcacagtcttacatactatgattgaggaccaacttgatgtatgtgggca

SEQ ID NO: 306631 - DNA, 823 bp, Cannabis indica
gatttccaagagatgagagattgtccaaggaagacacagtaccccgagatagatctcctagtgtccaaacatgccccctaatctacatcagcaaatgcttgtagctatattaggttaggtgttgaacgataaaagaaaaggccttgaccatgggtgccttttaagtattgtaagattcgagtggctgcttggagatgtggttctctttggagatattgacttagtttattgactgaaaaagcaatatcagaccgtgttattgtgagatagattagtttgccaattaagctcctgtattgagttgggttgtctaggagttttccagtttcattgttgagctttgtgttaggttccattagggtagtgactggtttagtgcctaggcagccaatttcttggagtaattgttacgaaaattatgaacaatacgcaagtgcacgtaatcaagtagtaaactcacgcaggtgaggtcgaaccacagggaattgaactgaataccactaaattagacttatgattctatttggtagataaataattttgatagattttgaaataaagaaaaacaagaaaattaaagaaagcaataaaggtgtttaatcaaggatgagaaattagggaaaagaatcctgttgatttaattacccaattgttaatgctaattactattctctttctcaatgtgaatgacagattataaaaataaacctaactcttttcagatcttttaggtcctaaatcacatgttatctaatcatctctgagatagattaacatatatcagcattaagcaataatctaaatgtcacaaaggctatgcaaa

SEQ ID NO: 306632 - DNA, 2246 bp, Cannabis indica
cgatccccgacatcaaaaggatgaatttcgacagaaattgatatcagagttcgccctaaattaggggtacatctccgtcaagcttccctcaaagacacttgatcatccatatcaatgttaagattagttacaagaattttcgagattccaagccacaaaccagcaggtaatctcgaatactctctcaattttctctatttttctagtttgattttacagcatatctctctaagactttctttggtttttctctctcttattgcttggtttaactctctgcaacaatgagttgttgcatctcccaagggctggactgaagctctcttcaaatgggcaggttgatactccttttatagtgttgttattgtatgtgatttgttgtgttgagctgagatgagttagttgagaaacagttttaaaactattattttattttcttgagttgtgacaagttgttggagtcttgaatgttgttatttaactttcttgtattgtaaatagatgtagctggagctgtaagattttagcttatgaaacagaaccactactctaagagttataatggtctgttgaggtatttccttatggacagttagtatggagatttatccaacaatttccacctaaatattcatactaacagtccaaaaagtatctttgcctttactgtgtttatttgttgttgactttgagggttatagcttgattaagtttccattcaccatcttgtgtcaactctcaacaagttcatataatgtttgaacttatttaaagtcaccaccttagttcccatatcagctgtgttatcctctatgagagctttttccacttgtatctctccctgtgttaccttatcccttataaactgatatttaatctctatgtgattagtcctgtcgtggaacacagggtttctatacaggtgtacacaactttaactgttagagtaaactcttggaaactctttaagtagcttgatctctggtaagagtcctttcatccatatgccttctttaatagcttctgtagttgttatgtactcggattctgttgttgaaagtgcaaccactggttggagttgggctttccaattcacacagtttcctcctaataaaaattaagtagtttaattatgaccattgttattgaacattagtagtattcagagtacttttataggtagcgcctcacgattgcatattaatatttcataaaaaaaatatttaagttatacaccaataacaatataacaccaaagggagtactagacactaataatatattttttagcaattttgtttacttatatacttgctactaaaaaagttgatccatatgattatttttacatacatacatgttcttcacatcttaaattttctcataaaaggcttatgtgagttcgggttgtaacttctgctatgtatatatataccatataaatattatatgaatgatcagtacaaacaaattatattaataattggaaagtgtgtttggaaaaccacgaggaaattagactcaggtgtaattaaaggtaaatatatataattttacgtatttgtcagactacgtaattatactgaaattggctaattatgtaattagaagtaattaagaggtctcaattctcatgccgtcaatataaatttaatataattacactgtgtaattacttcaaattttcaattttaaaatatgcatacaatctttagtgtgaatattattaattaagtctcattaattttaaaaagggaggagatagtcaatggctcatatgaacacacacatgcggtccgacggagctaagttggtgggtgtggatcgacttctctactaatatacggttagaaagatatagataaagttttatctcaaaattaattgaaaattaaaaaagttgtcaataaatcttatatatcctataatatttaatacattaataatctgatattttttaacgtctttgctcatcaaccttaaaataattcatgtcaaccccattgactttgactcaagtttggtcaaaaaatgatttgtttttctttatcaaatggttgtaacttgtaaggttgttcacttttttctagagataaaaggaaagggaatgtattgtcaacattgaaattattattattattattattattattattattattattattattattattatttgaattaaaagataatttacattataaaaaaaagtttgccattataaattataatacagtagaacc

SEQ ID NO: 306633 - DNA, 1133 bp, Cannabis indica
aactttatatgtgtttatttcatcgttttagaaagttcatatttagggtgttaatcaacatacttgtgagtagatctaagatcctggtaaaataatttccaacaacatgttgcattgtccacgtatacatagtttacacgtgacatacttttattggttcatgtaattatttaaaaaaaaaacaattattttccatttttttctttttattttctttcctcagatcgtgtcttttcatttttggtccaacctcttccacattccaccaccacaaccattggaaccaccaccacccagtgttatttcttcttcttcttctgtccctgacatcctcctcctccacaaccagcgttgaacccgaacctcctctagcatcctccttttcactaactctgaagccccaaaacacacaaacgccaactccaactcctccatctcagatctaccttctaacgataaggatggagcttcgatatgggtggacgttgattttccaaattgacaacgaggcagaggttcccgatatgccattaaagttggagaacaagaataagagagagtaggggccttttattcaaaatctcaagctttttcctctagttccagatctgaagcctctttattccgtgcaaatagatgtcaatttttgtattttccatatttgttcatacgcaaatttgatttattaatgtatttgaaatcttagattgttgaaattttgtgtttgagatttagatttgagttagggtttgataagtttgagtttgagtttcaaacctgaattaaattgaagataaaattgatttttaaattttattgtttgtgtttgaatataagataatttatgtgttgattttagatttaaaatgggttgttaagagggggttgtaatggtcgtagcatttattaacattattgagaatgatagtagctcagaagaagaaggaaaaggaaatttaggtgtatctcaatattttattgttggggagaaaaaggaaaatatataaagattggaaaattaatgaaaaatactagatttgtgagaaagagaataaagaaaaaagaaaaaattaaagaaattaaaaaatatatattttttcaaattatttgttttaattttaaaatgttttttt

SEQ ID NO: 306634 - DNA, 3414 bp, Cannabis indica
tcttgaggtacacagttagtttttactttgtcacttacttattgatagaattcattatattctcaaaatggtgggtgcgtttcagtaccttaattttcatgtagtgatatgaccattatgttactgagatacacccagccatttctcgagatgtctagtaagttcttttatgtcttccattttttgaattttatgcgggtgagggaaccttgttaaattcgcactttcaccacactgaaaggatcttctatctttcagaggagcgacttgtcagatagccaaaaacttgattctagaggaggggccttcactgacgagatagaaagaagcaacagcttcatacccatctcgaaatctgaggaggaagcccctactgccaggatctgtcagggctcactatctactgatgagatagataggatggttcaagaactcactgaaccagtgacaatcgaaatacgctacaatgagtccacggtgtcagcccaggactatctcattcactcgagagatgcccatgacattgaggttgaagaaatgggagaggacttcgaggtacctgatcgcggttttgaggaagagggggatgctgaaggaagtgagacggattcagtcgataacacccaactaaatgaaccattttcatgcgaggatctggtctcacgagttacaaaatcagacctacatacattttcgtggttgaatttagttcgcatagggaccttaagaccttctgcgtcctagcgacctcaccttcccttcacaaatcctgcgatcatccctacacaagacgtagtggtctcaattcctatcctgcgatgtggggtgacgctgccttttcacccttttatgaaggccatccttagacattaggatgtctctcccttccaactaactccaaatagttatcgcataatactagcattttatacgatgtacatggagtatgttcaaggggaaccaacgatggaggactttagctatttttatgacataaagagcgtcggccatgaaaatggtttttattactttagtaaatgggctaactctgaaattaacggggtagaaggtacggtttccaatatgggagattggaaatccaaatggttctacgcgtttaaagtgttaggagttagaactgacttcaatcgacgacctagtatgttgcatgtcctgacccttagcatatatttttattaccttgtatagttgttgatgtctatttttattaatcgcagatagaccggctcgacctgtactggaccctgcccgtagggagatcgctgaagttttaggtggcctacctgttcaagatctcgactggcgactactgtgtatatccgcaaaattgcgagaacacaagctcatccctaagaacgccagtctttagtgagaaccagtatacaaggagccttctgagaaataagaggaaagaatagacaagcgtctatctaaatagacttcgaggccaacgtcaagtaacgcgcttgacaaataggctttcttttatgtttagaataagttcttatctataatcttcttgtagaaatgactttcctgaagaaaggtccaactttcaatgaaagcctaagttggtctgcgacgacttctctagttattccgcagaagaggaaaagtgacgttgttcctatgcaggtggttgatttgtcgaagaaacagcacaaagctttccaagataagaggaagaaagttatgatcgatcccgctgtcagggcccgcaatttcatagctcttcaggacaagtttgtgagcaatgagtttgtctctaaggtcgagggggttcccgctgaggacttgatctcacgctccgcaaaattggcatctcaatttataactatgttctcacgggcctctgttgcaggttctaaagagctcaatcttttgaggaagcaaaactcgcttctccaagacaacgagaagaaactaaagctagaagaggctacgaaggacaaagagattgaggatcttggaaaagctaaagagcaggcggaggaagaagtcaaagtcttggaatcatgagttgatgaactcggtcgcgatcttgagaatgagaaggaaatcgagaagaagcaatgtgatcatgctatctccaattatatctatactaccttgaccaaggtgcctgacttcgactttgtagttctcggagtagaggcagttgaaatggttgatgcattttgcgccgtgtcgcctactgagacctagggacttgggggaaatcttttccctaaggatgcagaaaatgtgaatgcaggggaagtcacagatggtgctgctagcaaggtcgcagatgatctcagcactccgtccccttagtttttccttaatttctttttgtattgtcgaactttcctttttagcggtacatgggtactcacgttttgtactttgaagaacttatttagcttccattatcaaacatcatatccttttgaggatatttcttttgcatacttatttagcggtacacgggtactcgcgttgttaagttgcatttttaattagtactaattttatttttgcaaaagttctcattggtacattcacagcttggtgtgatgatttcggggcgtttgagatcgtgccctaaaaacttcattgagatgatagcaaagatcacccctatgaacatggtatctccctcctcgtagtgtctccatagatccagacatggtacatacactaggagaacaactatgggaggaagaggaatgattcaacatcatttacctcattttgtggctgggctcaacttcgagggttacgtcgctcggtatcctcttcctgcaatatttcacgatcaatgctttgtgtgacttgttccttatgtgtaggttgtgtaggttggttcgagtcaagtcccttctattcattttgatgttccttgcgagtacaattattagtttgtcgcccgttggttgttacttgagggttgtctaaacgcgtgtttggtactcaaggaggacgtcgggtcctgacccttccatcgaccttggccttcaaagcctgcatttgttcctgtagtgtcgtatactgggccgattagttgaataattctttcagacaccacacctggtgtgataggcgggaagcgtcccacaatggctcccggtgttaaagtttcaccaggatgactggtggtttttagaaacaagttgaggggagtgacagtggtacatcccaatcttctattgatcgtgtcaataggtgtcgttccattacctgggagtggaacgttcattgttccgacattgaaagaacctatgttgttatctccatttgtctggtttccaactattatgatttttctctgaaatcaacagtaaaattctttcccacagatggcgctaaatgttgttggaggaattttgacaacaccaaataaaatattaa

SEQ ID NO: 306635 - DNA, 3555 bp, Cannabis indica
tatactccttctttgaccaataatggaggtcgtaggttccattgacatctcctccttctcccactcactatttttggttaatgtgtctattttattaattcctagaatttatacatattaatcactttaataattatgattaatttatttataataaaagcctcaaattataaataaatttctcatcataatcattaaatttgaattaattatttaattcataataaaagtattttaaacaaataggctaattttgaattgccaagttaactctaaattaatctaacaatatttacatgctttcggtttcaaaaatagtaaacacataaacatataagataattttaatatatcatgcttctactatgagatgcatgataatataattgtgtgagatttctatgaaggacatgttattcactaatacatgagcatattattaatcaactattaatgaataattattaaaaaaataataaataaatagtgatgatgaaagagtaataattgagtatattgaattttacaacctttgaaaaaattagaaaataaattacaaaactaatctccatcactgcaaggacatttttataattttgtaggattatcgtaagcctcaaaattaattaaaatatttttaattaattattcttaaataaaatttttatttatgacatcgtttaagccctttcaattaaataaaacaattttaattagtttattcttaaatagaccctttatttaaggtaactttattatcatataaattttttcttaaaataataacatttattattttattttgggttaagacaacttttgtcttaatatagttatagataggattgagtttaaatttcaaacctaaaatcaattatatttatttaatttgaaattaaattttaaaaaataaatttccctcaaaagtttattattttgtcttaattattaaaaataataaaactcttttattatataataataaataattaagatagttattcatttgaattaggaattcaaataaaataactaatatgttaatttagaatttaaattcaaataaatattttaaaataatatttaattatttacagtaaataattaaattataatgtatagtgtgtatatactatatatacactatgtatttacaatatatatacatagtatgtatccataacagaataaataaatatatataaagtatatgggttcgagtcataagggatagggccaatcacctccatgcaccactatcactggcgcctttgacactcaccgtggctttggtagttcatgggacaaatacatacattagcattatgggtgggctcctccagttcttcctcccttgggtaccaattggactcattagcattggcatcttgctttgcttgagctgtgagttcttgtaggtacttaatcacagactcgaaattggaatgataagcgtgcataaattataataattaaggggaaaataaaatagcctttcatgtgaaaactcacataaaaatcatatgagaagcaagaaactggtatccttttcccaatacacgaacctataagccatataactgcattaacccagaaaatgatgaaaaacaaacattaaaatttacttaattttcaaatctacaagacattttaatgaagcaaatcgatgaacttcatactagcagagaaagatttccctgtttatcaggccctggtttctagaatcaagttttgcatctcatctcatcaaataaaaagaattaggtcagcattttgtaatactgtatttataagtgcccctactaattcttctgatgtgaaatatcattaatctaagcaaattgtggaggacagaaagaatcaatttcacatatctagtattagtgtgtcaattcatccaaccgatgaatgaacaaagcatcacttaaagaagagaaaatcacaattaataaggatctcctcacctactctgcgattagtcagggcatcagatagccgcaagggatgttgacgttcttccttcttaaatttcaaattcacttgttctcgtgtttgatttggaaaaagtttttgtataatggtataatctgtccaaatttgtccagaaacctgaaccacgagaaactcaggccgcacacacaacacatacagtcaagtcaatcagcccaagacctagttgggtctttatcccatttgaacaatagacatccaatgtccaatgtattcattgcatgtaggctttgacggtgttgcagggaccgagggacccttaaatgtacaagggatgcaagtacaacattgactcaaagtcgatttgcatggctgggtcgtcgacggtatggaggaggggatgttacccttagcccattgtggcttccatcttgtgcatggctggagaaaaatccttgagctcacatgcaactgacatcaaactgtgtaatttttcagtaaaataaaattacataaaaaatttcgatgtcccataatgacatacattatttattaggaaaaatattacaaaaccttcacccaactatataattaaaaattcatcacctctcatacattctgttaactctaaaattaaatgctcttatttttgggattattcacctaaaggaaaaaaaaatacacgcgagcaagcccccgtgagggtttcggggcaaattgagcctgaagtgcataaaggtggcacaaaagtgtgaaggctcgcatgcgagcccattgtgagcttgcatgcgagccatatgtgcaatgcatggttggttgcgtggtgtgtgagcatgggggctcgcatgcgagccgtgtgtgcaactgtcaggattttatgccataaataatatcaattttaatataatctgatttgttatcaataaaagattagaaaacatttatgtttacatgtagtttttatgtttatggtttaatgtatacaatttctgtttaatccagaacagatagttattcacaattacagtgatgtcaatacagtggaaggtatttgtgattatatgcttcaaaagatagtgtcccatgattcattactgcactggatttatactgatgtgatagttagcaataaatcttacttacacattggataagttttatattctttcaagaacattggcaagatatgttagtatcgaatgtttggagtatacattggactggggccgatattgttcttggtaaagatcttataattttactattatatctgtctaagtcaatatcattggttgatcttagatcaaaagatcttaatcctgacatggttagattcgatctaaagagtgttatttgtgttcttaaagttgtaagttaaagcctaccatttggttcgagtcatacgtatggattgggaacatgatagtacaattgagttggagcgttaatcataaatatggaatctatagcttctatatggacatagaagagaaataatgatttcctttgagcttggcttaatagagataaatggatgaactcttatttcagtgactattttagtttactggaatatcatttataggagctaagtgttttaaggat

SEQ ID NO: 306636 - DNA, 3871 bp, Cannabis indica
atatatgtagattgagcatgaattaagtcttccatggatggcccgattggaccacctcgaacataggttttggatagaagaaactaaaaaccatgttctatggcttggaaagaatcattttcgaaggtatgtaatatgtatataaatatatatattatttatatatatatatattcttgatttcttttaataatagttaaagggtttatacaattttaacattatactacttcgtaaattatttgtttggaaaattaatttatgaatcttgtatgtttagtaggtattaatgttaatataaaaatcactcttacatgatatcggtgaaaatattattagatctaataagctagtaaaaaaaagttgagaagctctaaatttaataataaaaaaaaaaaaatagcaattatattcataaattaatataatgtcaaaaattaggtccaattatagggtggttattaattttattaatatttttatttaatattaataattttcaaacaaaatataacaattgattttgataagtgaaaacaggttgttaagcattcataatgacaaattaattcgtctagccatcttaaattaccacttcaaacaatctatcttcaaggctgaactcgaacacttaacaaggtatttattcattcaaaataaatatttacttatttatttattttatatgtataaatatataatagttttgttttaattttttataatgtgataaattaatatatatatatttatatgtatgtataggtggtgtaaagattggggacttagtgaaatgggatttggtagagaaaaaagtatgtattgttatttcgcaatagcttcaacttgtagttctttgccttatgattctccaattcgattggcggttgcaaagggtgctataataataacggttgcagatgatttttttgatatgaaagattccttaatcactgagttagaaacctttactaaggcaattcaaaggtatattattaatatttatttatttgttttattattattattatttgattacatatatattgatttttaatcataaataaatttaataactcttaaacaataatttaagcaggtgggatggtgaaggattgagtggtgttagtaagaaaatatttgatgccctacataattttgtgaaggaaatggcaattatttaccttgatcaacaagaaacaagtgacataacaaatttcttaagagaaatagtaagttatagtttaataaaaagagtaatttgcggtgtaaatacttaagtttaatttgcagtacgttgcagataaatatttaagtttaatttttgcatgacggtaataatacctaagttatatttctgaaaccgttatgtgttaagttaatatcaacgtgcatgtcattttcttatacgtatatttaaatttattttttaataaaaaataaaaatttaatgacgtggaccactatgtgatttgacttgacacttaacagtcaagtacctacggaagttccagaaatataacttagatattattatcgtcaaaaattaaacataaatatttatttgcaaccgagagttaaatttaagtatttgtaccacaaattacgtacataaacaataaataatatattcattcaatttatttatttatttaattaatattttgttatcttcaatgtgtgtagtggtatgaaacaattgtttcatggcttactgaatctaagtggagtaaaaatggaattataccaaccatggatgaatatcttaaagttggaatgacttccatagcaactcacaccttgcttcttccagcctcatattttctaaaaccaagcttaaaaatatcacaattacaatcgacagagtatgatattgttactaaattggttatgattatttgtcgtttgttgaatgacctacaaagttatgaggtaagtgaaattagagtaattgatgaaaataaatagattttgtttaaaaaatatatattttacataaattcttaaattacaacacttttcaaacaagagttattgatttatttatgtgtgtttatttaaataatattaatacagaaagaaaaggatgagggcaaaccaaactcaattacagtgtacttgaagaacaatcccaaggtagagattgaagaagcaattgagtacttgcaagaggtactaaataaaaagaagaaagaattacttgagcatgttttgattgacaacggcgacgatgatgatgatgacatcaataataatcttcctagagatgttagggttttgcacctctcttgcttaaaagtatttcaaatgttcttcaactcttcgaatcgatttgattcagaggttgaattgcttgatgatattggcaaagcgatctatattcctttgaagttagatggattagcatctaataaaaagaatttgatcatgagaagacttccaaaggcgccaccacatgattttcctcatttaaaatcaacgggcgcaaattgttcactgaatatgtgtcactttagtcgtcgagaacgtccctccaaacattttatcatgaatgagctttctctttatgctcataacaaagttggaaattggaaaaggattcacattatgccaccaaaaactcaaatctctcattcatataaatatctcttgttatcgtttgagtttagctagccttatgttggcccctctcgtattagaaaatatgtaatatatattgagtaaaataaagttacacacagtgatgtatgtgtgtatgtattttgtgtaactgattaaataaagtgatttttacaccacatattgaaattttgtattttgtgtattttgtgtgtatgtgttttgtgtatcagataaaataaagagatttttacacttagatattgaattttcacacttttttctcttctactgtggagcggaatatttttaaaaaatactgtgtgttgtgttaagttttcactgttgctctacttttgttttttagttgttttcacacggtaattttaaattttttttggtttaattgttttacggttattttataaaaatatagaatttttgaaaaaaatttatgtgtggtaatattttgtaaacgttaaactaaattttagtaattttataaattctcctaaattaatatgattagttggaaaaattaattaatatagttaatattttactatgtgtaatatttaaatgcatattacattattaactattattaaattataataaagtttgtatataccaatatatatatatggtaattacacaatgtaacgttcctgctttaaacacatttacgaaatgatgactcttatacgcgagtacgtcattttgactgcttcatggaatgatgactgaccctacaaatcaacacaagtatttccagcctgctttgtcctcactcgcacacttctatggaaaaacttcttaggaggtcacctatcctaatactgcaataaatgtcacttttgccagcatatttttgtactggcaaaagttggtattgcgctggtaaaatagaatttacttgtgatgtgttggcaaaaggggttggtaaattaatgttggtattaaaacttttgccagcataaaatgaaaagcgctagcaaaaataaattttctcagcgcgtaaatgcgctggtcaaagttagattttagccactgcaaatgtacgttggtaaaagttggacctctttgccagcacagtttgcagaatgcgctggtaaaagttactttttccagtgcagtagcgaactgtgctggtaaaagtgacatttcttgtagtgtaaaattaccacaggtcaagcacgcttaatagtggagttctttcgtgaccgaaaaacaagatgcaccttgttgatat

SEQ ID NO: 306637 - DNA, 774 bp, Cannabis indica
gattgtcacgtgtacttagcgttaaacaaggcatacacgtgtatgttttatgcagccgattagagaagaaggttatattccattttttctctatcatatcttctcaatatataattatttgagtatagatatatatatataaatatatatatatcattcattaaaatggaattaggtctctctataatttcttatttgaggaagattcctgtgaaagagacacaagagtgaaatccaacaaaagtgtagttgtaattaaaaattaatgaaaggagatatacactcaattttggctaactaattaacaaaaaatataacaaatcagatggtaattatagtttaaatgacaaaaactaattattaaatgttattattaattttttatctggtgaaatagtaactagtttttaagaatgaattatatattttaatttagggatctatgattattctttttcttttccgttcagttttgacatattaagaatataatatgttgatttaagattaatataggggaggactttaagccttattgatgtaatggcatgtttactaataagtaatgggaatcaatagtaaggtaatcattcccttacatttgtttacttgcattattaaaattaggaaagggagaagttgattaaataagggagaaaagaaagggagaacttctcccaccaattttgtaaggaatgccattaagggtaatggatttttattatttttattttatttttttaatattaaatatataatgacaattttgtcctt

SEQ ID NO: 306638 - DNA, 2779 bp, Cannabis indica
aatttttatttgatatttatttttttattgcattaataagttataataaattatttctataaaagttaaatatgccataccaattatgttgatcaatatgtattgtaacataaattaaagtcgatacacaaacacgacaagtcgacatgagaacacgataagtcatgttaggattgaaatttctgacacgaaatatatatatatcgaggtagagatgaccaattaaatatgtcaatttacataatgaatatgacacgacaacacgaattaccatccctaattagaatactctaaaagaaattcaatgacacatttgtaaattaattaaagattcattagtatacatctgagttctaaatttcttttaattattttaaataattaagaattcaattcaaaacttaaaactcagtgaaaatattcactcaaattattaattaatttatatatttcgaacacatttgtgtatatatgatattcggccaaattgtttcttctacaaaagaaaaagtgtaatttgatacaaaatttctctgtttttttttattattatttttcttgaagaaatacataataagagttattaaattttacctattttaatttaataattacaataaaaaaaattgataactaaagctagtattttttttttttttggcaattacagttttcaatcaataaaaaaaaatccaaaaaagtgtaataaaaaagaaaaagagaatcctatgaaatttctaacaaccccaattcttgactattaatttatacttaaaaattaacaaaacgacaaaacaaaacaaaataacataatcatataaaacaaaacaagaattacacaaataaataaataaataacaacactaaacaaaacatttttttaatttttaatttcattaattaaaaaaaacaaaaattacaagatatattatagagtgtaagctatgcatgcctggtaatatttgaccacgtatgcatctcttacatcccattcccatgtattaaaataaaaaggggcataaacttaataaaaatacaaagacgaggttaaaagagtaataaaagcaaaattaaaggactaaaatgttaataataataataataatatgatcggaccggttaccctcaattcccctggcgatgcaataattccaaaattaaaggacgaaattgcaaagcctgttttagctttgggtttgtgttttgttgtttgccataatctcaagtatttacaaaaggggttctgtctccgtcgccgtcgccgtcgccgtcgccgttgccgtctttgtcgtcttcttggttgggttgttggggtttggtttttatggtgaggatgatcatgattgtgttggagggtaagtgtttgtgaaaatgtcaaagagagaaaattaaataaagaaaggagaaagggagtaagtgatatgaaagggtttttaaagagtagtaagtagtaaagagtagtagttagctagctttagatataataggatttaagggtatatgagtgtagggggggctaagactaagagggagacatgatgggtactcatatataaagacataaaattgtaaccttttttctattttttttggaaattattatattattattattttatatatatatatggttgcttctataacacacacttttaaaaggtgtctaccgatgtacttcttatctgtttcgatatttggaagtaattttttagtttaatttttttttcataagtgtctatgctatagttatttaagatatgttgtaaaattttaaaaattttggaataatttataatatagaaaataatattcaaataatttatttttagcgtataacataatgtttaaaccttatttttagggtgttaaattttttcaaatttcttaaaattttacaagatgtcttaaataactataaaatatatccctattaaaatggtgtatattatagaattttcttatatgtatttataaaaatttacactattattgaaaataagatttacataatcaattgcacatgtagatttaaaaataaaattacatatgcgtgcaactaattatttaaattctatttttaacgatgtggatttttgaattgtaatttctctatatataaaaccaaaaacactttatttataatagagataattaatgtcgtaaatttttctaatatcaaaatagaatcaagaaatagtaaagggtatgagtacctagtatttttatgaggtgtaatattattattggtaaaatttaatattgaatctcatataatttaataaaaattatagaggtattaggcacgttattgcctatagcaatgcatatcaaattattattaatgtaattaagtatcagatctcatataactcaaaaaaaaaataatttttaatacataacgttaactaattataaaacgttacctataaaaaatactgcacactaatgctgaatatagcaatgctcttattttattaccaagaaatgcgaaaggacaccagtagtgtttaacactctcttatgtgttagtattgctattggtccaactaagtatcaggtcccatatagtttaatataataacttttagagaatattgttagccaatcgcaacgcgacatgtagagaaagtattaaacactactggtacctaataacaatcctttttattaccccatataaagagttgatttttgttttggttaaaaagtgaagtgttgaaaattgttggtccaaggtgagagagagagagagagagagagagagaggtagtagtaggca

SEQ ID NO: 306639 - DNA, 1662 bp, Cannabis indica
tacatgtgtatatatgtgatgagagaagtgggaatccaggaatctttatatatatataaaatatatatatttgtatgccactttctgaaaccaatggaaggacagttgccatgaccacacatatttcaaactaaatattttaagctataagcttatgctatcctagtttacatatagataaacctaaactgatctggaatattatagggatattaatcgcatctctctatatattatacaactctgatattataatttcgaaaacatgtaaagttgtccttatatctctgtactactttttgtgtatttgaatgataggctaatcataccttattttgattgtatcattatgtcgatttgattgattactcagatgctgtttgcctacaattattagatctatctaataattattaattataatatgcatcacaccctcatgttactaataaaaacgtttccccatatatatacattttttcatcaatatatacatgatcagagcgtataaatatatattaatcacagaagaagattaagtaaaaatatgaacaatgtatatacagctatatatataattagaaatattcaaaaatatatatagttttattttttttggtgcaaagatttaaaatgatccatcctcgagattgaatcccccacttgcacccatgataggtgtcaaaaggtatccctttatttattgttttccaataaaaaccaatatatatttcttagaaaaaaaactaaattacttgctcacattttacgaatctttcaataattaagagaatccaatgcttttgtattccaatcaaacgtacttttctataatattcatctacctctatcgatctagtatatctactaatactttttcaatatatatatacagcatgaaatatcaattctttacttatgccatcgtatattcaaagctagttactttagaattttcacatttccaataaatttgattgaaaaaatagggcctaataatattaaatgttaattttcagtgttaccatcatcttttaaaattatttcgttgctcttttcacagttttcaaagtgttccaattggaccacagctatatttttattgggataacaagctcatgatcttttaatttttctctttaatgaaaagaaaatcctactttatgtagcaaatttaaagggcagaaatgaagtcaacctattaaggaaatttttgttttacagtaacgaaaatgccttaagaaaaatttaaaaaaagaagaagaagaaattggggtcaattcatgtatagttgtcatgacttttcttttgggctgtatgatttgatttctatatatagcgaaaaagtagtgagtcaagtgtatgtagttcactttttttgctcgaaatatgttgttattatttcaatagtgtaaaatatctgtatatataaaaatctatatgcttacgcatgcatgggagtaccagattggcattatatgtatgtatatatcagaaaatcggcctggttataatttatttatttattttaatttctatcattttctataaaatatatatactatttcaatatctatatatatatatatgttaccaggggcggacccacattgtgactgccccctgaaaaaaaaaaatcgagaaaaaaatgtatatgtattt

SEQ ID NO: 306640 - DNA, 1024 bp, Cannabis indica
tgacttaggtacttatctgttacacaacataaaacttaagtatttacgccgcaaattactcttattattattgtaaagttttggctctttaatatattagaaaagtttaaacatgtttatgttccactgatcagtgttttgcatggtataagtatatatattattaattttgagcaagctggtcatttggtgaaaaagcagtaaacttgagattctttcttaacagcttcctgcactaatatagtaatgcattgttaaaattaacttaaaaaaaaaaacagaatttatgcgtataattaaatgcatttgtacaaatttattcaaaaaaccgtaattttaataagctagagacataaaaccacacattagtggctgtacgttgatgatatttgagaatttgatttacttttgtaagggttcatctcttcatctataaccttaataaaaggcaaatatagtttagtcctttcttaattaaattaccttaatatttagttatacaattttaaagaaaatatcattctcttacatagatatatatttattacatttataaaaaagtataaaaaagtgggttgggatatagaagttagttgacttattttatctgagagagaagggaatgaaaaaaaaaaaagagttgaaatgacaaaatgataataaattgctcttcccaattatgttaatgtttctgttgttacagattcacttatttacctttaagctgaattaacaccactcacagggtttgacaaatatacccttacatcagatacaacaaatatcaagactaaagaacatagagacagttacaaagacagttacaactgaagcagttacaaaatcagttacaaatattactctagggctctgccctagatcagaatcacagatcagtataaaaggaggtatttttctcagatacaagcaataatatacagagcaaaaatagagagtcatagccagagagaacaacaacagaaaataacaacagagaaaaagagagccttttggctaagagttg

SEQ ID NO: 306641 - DNA, 788 bp, Cannabis indica
atttttatactaattcacacatgatcataaatattacttttttttttttatactaatcttcatgtctgattacgcgactattacataatttgatcctagtaaccattttctcaaccaaattagtttacctctagagttaataggaatgccaatgtatttaaatgggagcttgctctccacaaatcgagatgcatctagaatctcttgtatgtcttgttcttccattccaccacaataaattattattttttcttgattcgcttctaaccctgataaaatataaaatagagaacctcttaaaacttttcagcaacagaaagatagaaagagagataataacaatttcttttttaatatattaatttgtttgaatcaattttttaatttaatatatattttattcctgatcaaattcgacttatatttagtgtgattatactatcgataattttttttcttttgataaagtgctgtataagttagcacctgtagatttgggtttattcagagtcaatggtcttgatctccactttcccatttaaacaaaaaggaattgtatggcttcccgttcccccaacacattgcaaaacaaattaatttgaaaacaaaacataataaaaataaataaataataatgataagaaaaaagttttactcttagctgccttttaacactaatgcggttcaattaaagggactcatatgattaaagacgcagagattctgtactataaaagtaaggaggttgtttaatgaattacaataaatgagccatctcttgttcaaaa

SEQ ID NO: 306642 - DNA, 2431 bp, Cannabis indica
taataatatattttagcaattctacttaaaaaaaaaaaaatcaaagagatcaaatgttaattgtatacaaacattgggaatttgccacaaattaccctaattaaattcatagctatattactaaattatgaaatatgaaagcaagtaacattacattacataaataaataaatacctgtttaacaacagtaacagctgtggaaccactgcaaaagctatcaatggaggaatcaagaccaagatcttcatccatttccttaaaagatttaatcaaacaagcttcccaagaagaaagtggcaaaacgacattagagttattgtcgttttccacatctttggagtctatgttgtcatcatctctagtagtattattactattattactcaagtctctaatgtccacgtcatcatacttggtgctattgacctttgactgttcaatggcttttgagagctttgtaggcaaattatcacgaacatgacgtgccaccttgtgaccatagggaccatgcccatcaaatacaccgcacaacaccatatctttctcaccagtaaagttctgataatattaatattataagctctcctaatgtataaattataatagttgttgtggtacaataaatatttcacagattgggatatcatttatatatctttctctctcttcatttcattttcaacaaagtcaatttcaatttttaaaattatatatatttatatattaaaaaaagaaaaaacgtaaacacgtttatcttaaattttaattaaaactacattaattggctaaattataccttaagtattatcaaaaaaagtaaaacttgattggacagagtaaaaattacaattaatactaattattgctaatgaaaacatatgtggaccaatttttccttttctttttctcaaaatattgaaaaaaaactcatgatgaaacaaagaagaagaaaacaatgaaagagattgtaactatgaaatcaaatagaattataattataaaaaaaaaaaatacctcccaaatggtcatggcatcttgattgatcccttttcttccttgttgtgtatacattgatgtaaatttagaagagcctctaagccttatacgagcaccttttttcaccatatctcatatcatcttcttcatcataatcttcatatggtttctcttcaaaaaaatcatccccaaaataccctccacgcctacgattatgcttacttgtactacaacatcctcccatctttcaaatttttttcccaaacccaaaaatttataacaaaaaattaatcaaaacccagaatttattttgggagaaaaaaatgacaaggtgagaaaaatttgtagaagtaacatttaagcttaaaaggagagaaaataaataaaaattaattatgatggtgatgatgatgatgatgaggcttataggataagattcttctccttcattatagagatacccagaaatggaaatgatttttggaacggaaaagataaacacccatcaaaaaatttagcaatgacccagatattttctcgagaaaatcagcgggaaaatgtaggaaaaattgaaacttgatgatgatagaacagaggaatgagagatttgattttgaagcagcataaagaatgtgaaataaatatatatatttgacaaaattatgaatcgaaattcaaagagtaattattgatttgagtcaagaagaaatggtgtggaaaaatgggtttttggattaggattgaaagaagaagaagaagaagaaaagaaaagcgttgaaatttatgagaccttgctttatgagttcgtagatattcatattattattatttatatatgtgggtcttattctctggattctcgacgtgtaaatctcaacccatattttctaagtcaaaacttagcttgtgaaaatatatagataaaataaattaaatatttttatggataaataattggatttatagttatgtaattactataatacccttaccaagaaaaatgattagagttattggaattatttttgttatttttgccgtaatcggttatggttagcgtaatttgtgaatcttatgaaaatataccatcaaaattaaaatgaaaattactctattttgttaattaggcatttgagtttttttaacattctttcaaagttaataattaatattatatttgttaaaataaataagaattaattaactatttttggtgctgatgcattttattttgggaacaataatttttaaatttttctttcaaaaacaattaatttagaaattttgatttgggattttataatttaaaaatattgatgtatgaacttataatatatgattattataattgttttgaaaggaaaatcaacttataatattggttgttttgtaaattttttatatttttaacttaattttttcttttatattttt

SEQ ID NO: 306643 - DNA, 1095 bp, Cannabis indica
tataaaataatagtttgacacattataaaaaaaaaaaatatctatatgtagagacattttttgtgactctacttaaacattattctatatataagtatatagcttgaaaaagatgaagaggttaatatacattaccaaaaatattattttagtgataagtttaacaacaatgacatgaaaagcaacaacaataaaggacaacaataaaagtcaatgacatgaaattaaattaacaacaataaaagtgtttgatggttgagattaaaaaaggaataaaagacacaaaaaatttaagaggttcgacccaattattttgtaatgatctagctactctatatatcaagatagtaagaacctggatctagtgagtttctcaatatctttgtagaattacagatattatttttggaacataatagctctcttgaaagattaaaatttagtcccttaaacagtgaaatgactcactatttataaggttacaagtgataagaatgatattatattgtttacaaaattacacactaaaggccgtcttatttaaattcacgattctctcaaccccataattctctcaatcctaccattctaggtactcataatgacctagtcttcagaatttgtggagttaatgtcacaaaatttggaatcagttcatgctacattccaatcctggtcgaatgttccaaccagaatgtacgtagccctcttttgatgttcgggaagaattgagtcgctctcctctggtcggccaagctatctactatgctagttggaagtttagaagatatatttcccaactttttcaactagcatttggcttcatggatctatcatgtgtcgactaaccttttttttatcgccacatgccaattttttcgcgacacgtcactcgagcaattctttgataacaaatataaaatttttgaaattaaatatcaatcacttttagccgcaacaaaaattatttacactacaaaaatttttacttttagtcaaaataaaattagtgattaaaagttaaaaaaatagtgactaattataaatcatgattcttatgttgtgactaaaaggtccgtggctaaaagtattagt

SEQ ID NO: 306644 - DNA, 1631 bp, Cannabis indica
tttatatatatatatattatacaacgaacccctacccccccccccccccctaaaaattgtaaaaaaaaaaaggtgatatttaaaaaaatgtaaaaacaaagtgaaattatgtgtagtttttatgataaatgtaaacaaatgtgattttttttttttcaaaaaacaaaggcccagcccaactcaaaacccggtcccaacccacactcgacccacctgatactcgaaaacccgctccatcacacgagcggattcgattcctacaaaacgcaaacccaaaacctgacacccaaaaactcgaaacctgataaaattcaccaaatgttcacctgtataatgacaatgaaattacataccacatcatgtgcaattagccataatgatcaatttttttaattcacttcttatgtacattcacttatgctttactagagtttcattcctttgaagatgattacatgtgatctaaaattggttgaatcaaatttgttactaacccctcaagtgaagtggtttttatctaaaagtaatctatgaaaactagtaagtaattacatatcatatacaatatctaatatttggaataataccatgttaaattcactttaatatgtatccatatatcgtaaaattggttaaaattaatcttatgatttggattttgatcattttgtaaagaatttgataattatttttacataaaatttggagggtgaacatattattattattattattattatcttttttgatattgaaagaagagattctaattttagactttctctatgagaaattctaatatttcaattataacattcaaattataattattttttaaataagaaagtcaaaaatagcataaaagaggtcaatccccatcctcaatcaccataaactttttttttatatacatataactaaaagagattacgtggtgcagatctttttctcactctttcgattattttgacaatcttggagaccacgtgtcagttatatgagtctgataccttaaactcttttaattgaatttttatcacacagatgataccattaccacctatatcagataattattaagctttttttaatcccttcaaaagaaattatagtaaatttggaacttttcatctaaataaaaaaaaatgttagtaaaacaatctttatcattacaccactcaacatggttcttttactataagcttaaaacaccaaacccaaccactaaactaacataatgtcaaaataagtatttaacaagaacataaaatcaaaatgagattatatcataaaagtcatccaaataaataatgtgatatattgattaagtagatctaataagaggcatacataacatagtgtgctcagaaagtccaataaaaacattattattatttatttattatttttatataaaaaaaaaaagtgggtcccaaaaggttgtgggctccacaatagttgcatgtgccacacgtgcaatgaccaaagttgtgtgtgtgagagcctttttccatagccatgtgaaggcccatctatggtactaaatgggaaatttgattttctatacttagaaaatcaaaaaatttgatttctaaaccaataatttaaaccctaaaaaaactatacttttt

SEQ ID NO: 306645 - DNA, 1082 bp, Cannabis indica
aaaattcttaaattcaacaatttcaatagttcagtgggaatttttaacggcaaaaaattcacaggacatgatttgatacatgtcaaaatttaagaaataaaaatcttaattaacttataataattatggttgttactttcacgggtgatcttttcatttataaaatatgtatttaataaaatatataatattgcatattattcattatttaataaaagtatacatagtagtgatagtactaagataattcaacctagtccaatctaatctatccaatattaactaataatcgaattcaatccaatctaattttatataccaaaagaacccataattctctcttttcttttctttgtcataaaacttcataattgttttttaagaatttttttttttttttgtctataaaggtttgatcttgagcttcacattattcacttaagttctagtggagagatagctgttgttgcaattacttatgagtatggccgaccagacccttttcttacaaaggtaataaagataatttgcctttttatctttgtatttgtatgaaaataggtataattagaagttaagttattcaattttgggttaacttcttagccaagtctcaccaatattcaaatgacttcattgaaagaattgtagctttagcaatgataatgattttagaggtttaaatgggttaaaatcataattaattttactgcatcaagattaagttgatataattggtgaaatttaaagtgaatcaaaccttagattacatttcaccttaatcaaatacataaaacaaagtacaaaatagaatattttctttttattatatgtataaaaaagacaaattgatgtcaaagttaatattatgtttataattatcacctttaattataaatatacgttataactaactacggtctacggaccctgaaattttactttatggggcttatttatttattattaaaaaatattaatacctatattataatcacttaactagatttatttaattttgtaagagttattctactattttggtctataattattaaattaaaaaattacatttaattttt

SEQ ID NO: 306646 - DNA, 1830 bp, Cannabis indica
gctaaagagctcttatatacaatatgataagttagttacaatcaagacggaagctaatataaacagttagatcagtaacaagaaaataccagaacataattaacttaggtgaataaagcacgtgggacaatgcttatctaacaccccccctcaaactaagctaggacaaaggaaccagacttagtttgtctctaagcaactgaaatttaggtgtagaaaaagcttttgtgagtatgtcagcaattcgattaacagcaagagtatgcttgacttgaagttgattgtgaagtattctttcccgaacaaaataaaggtccagttctatatgcttggtttgaaagtgccgtactagattagtagacagtagaaccgtggactgattgtcacacgaaatggtaggaataggctgagtaggtaacccaacttcagtcagcaaagattgaagccataccatttctgcagtagcatttgcaaggcttctgtactttgcctttgtgctagaacgagacatagttctttgtttcttggaactccaacatgaatccagatttgaaccaaggaaaatacagaagcctgatgtagatcttcgatcatcaggatcaaatacccaatctgcatcacaaaatcctgttagaaccagtttggaacatggtttgaggtgcagtcctatatcaagtgtccctttgaggtaccttataatttttttgaccactttgagatgagactcaaggggattatacataaactgagatatcttgtttactgaataggcaatttcgggtcgagtaatgacaggatactgtaaggcacctactaagcttctgtagttcttaggatctacaataggatcactgttgtaggcagagagtttttcatcacctgtcataggtgaaggtagtgagtttgcaaattccattttttctctagacagtagatccatgatgtactttttttgacataagtgcattccagattcaaggtgctgcacttgaattccgatgaagtaatcaatttcacctagaccttttaaggcaaaggactcatttaaagctgtgattaagcttgtgatagcagtgatggagctcctagtgatcagtatatcatccacatagacaaagcacatatgtggtgtgatatttggtgatccttatgaatagagattggtcagctttggcagaggtgaaaagtcaatacttttgagagctgatttgagcttgtcaaactaagccctaggagcttgtcttaaacaatagattgccttgtttagtttgcagacaagtttaggagagtttttttcaacaaaacctggtggttgagtcatataaccatagatagcccgtctgcgcacaaggtaaataagtaagaccaaagtggatcgtcttgctgaatgcctcacactggaataataggaccccatctccctactactatgaacaatggtataagagagtgaactcacgcattgcatcaacaaattaatccaacaaccatcaaaatccatttattcaagaactgctcgaaggtaaccccgctctatcttgtcaaaaccatatagtttttccaagggaaattttatttacaccccaaaaatttctaagtacaccccattttaataatttttatttaatataaaatttatatctttaattttactaagtatttttaacttttttctttcaatttatattcttaaaaaatatacctatcaaacaaaattaaattacattttaaaaattatgacaaaaaaattaaaaataaaaaattatatgaaattttcttaaaaaaaaattaaaaaaaaataaatacatgagttagaaaaaattaataaaa

SEQ ID NO: 306647 - DNA, 699 bp, Cannabis indica
ccatctcacagagagtgtttgactagtaagttcgcaaaaggaaaatagcatgttccaacaatgcactttctgtaaggtgaacgagcttcctgatcagatcatccgatcacgtagaacaatatgcttaataaaggctccaaacctcacactactccaagtggattaggcttgccagacagatgttactttccaaacagaagaatactccgtccagggtgaatggcaccatccgaccagtgtccaatgcacaactgtttgcatatcctgaccaaaggtcacgagtttgatatcttcaaagatatatcctatatatcttcaagcttgcaagttgttaggacttaattagtcctatttttagttaggattttaaaatatttttagttgtgttttgtgtaattttacttattaatatttttcaagtttagcattgaaaaagaatagaacaaattcaaggaaaaaaaaaatgtgcaaaaataattaattaaatgaaatgttgttaatagaacaccaaggaaataattagagaaagaaatctaaaagattcagtgtgattaaagtctttaatgttgaacaattggattttgtgggtagtggtagtgtggtgtaaattgaagtaaattgtctctagtttagttaattaaataaagtcttcaacattctagccaatacccattatttttttctagtaatttttttttt

SEQ ID NO: 306648 - DNA, 1438 bp, Cannabis indica
tgatgtagattctacaccaaattgatataattaaatagctaaatgatctaaataaccaattccattttgtttacattttttttccaggtcagtctatgaaactaaattagttaccatcacaatttttctttttttttcagtgttgaattgtttgtaatgagatcattcaattaccaccctattattattattgattacccatatttgtataagtattatttagcatatattaaatagctacataaaataattgagcttttttatttttcaacttgaaaacagtattttttttatttttacggaattctatatagaaacctcaactgcaattaatgttgcaacctaaattgcaataacaatcgtatagaaactcctattgcaactagcactgcaaccactttagaaactcaaactgtaaattttaaaaaaagttaaaaaatagtacacaaggtaatttccctaaaataatactagctgttacccatatatcgtaattcatataaatattacatatacggacaatggttgtataaaatcaaactacaaaaaataattacgtaaattaaataactaattaattataaactgacatataaaaattacttacgtaaaataattaaattaaaaacaaccacacaaaaactaattacttaaataataaaaaaagaaacttaaacttaaaaactaattacataaaacaataaaaccgacaattaaatacaaaaatcaattactaaatataaccaactaaaaaattgaaagaaaaatataatacacctaaaataatcaattaattttgttaaaaaaaaactaagctacaccagagagtaattcttaacaaataacttataaaaataaatcacaaaaattaactacaataaacaaacaattaacaaatttttttttaaaaaaacttcaataaaaaatctaacacagaaaaatcaattatgtgaaacaaccaaattaaaagctaacatacaaaaattagctacacaaagtaattcttaacaaatgacttataaaattaaatcacaaaaaataactacaataaacaaataactacaataaacaaacaattaacaatttttttttttttaaaaaaaaacctcaatagaaaatctaacacgggaaaatcaattatgcgaaacaactaaattaaaagctaacatacaaaaattagctacagccaaatcaaacactgaaactggccaattgcattaaacaacaaatccaacaaataaacacaaaaataaactacctaatacaactaattacaaaactgaaacaaagacatactacacttaaaacaattaaattgaaacaccaaaagtaattacctaatacaaccaactcaaaaagggaaacaaatactacacaataaaactaaacaatcaaaacacatatataataaattgaaaaactttttttttttttaaaa

SEQ ID NO: 306649 - DNA, 1419 bp, Cannabis indica
cttcacagctctcaaactccttttcctctcccacaacgacttctccggccactttccggcctctgcaacttctctcgctcgactctaccgtcttgatctctcccacaacaacttatccggcgagattccaaccacaatcaaccgtttgactcatctgttgactcttcgtttagaagagaatcgattctccggttccatctccggcttagtccttccaaatctccaagacttaaacatcaccggaaacagtttcgccggcgaaatccccaaatcattctcaactttccccaaatccgcttttactcaaaaccctaacctctgtggatctccaatggagaattgcaagacagcccaaactaatccgaccaaaccaggctcaggcggagccaccgcgtcgtcagtaataccttccggtaatcaaacggtggtttcatcatcgccgagttctctcccgattattaactcaaatcccaataactcggcaaacactcacccaaacaaaacagctaaaataaccccactagcattaatcgccataatactcggcgatattttagtactaatcgtcatatcactattcctctactgttacttttggcgtaattactcggctaaatgagcaaggaacacacaacacaacaaggtctaacaaaactaatagacagcgaaaaatcgtctactcttcaagcccatacccggcccaacccgggttcgaaaggggtcaaatggtgttcttcgaaggtgtcaagcgattcgagctcgaagatttgcttagagcctcggcggaaatgttgggaaaaggcggtttcgggacggcttacaaggcggttctcgacgatggcaatgtggtggctgtgaagagacttaaggatgctcaaattggtgggaagagagagtttgaacaacacatggaagttcttgggagacttaggcattccaatgtggtttgtttgagggcttattattttgctagtgaagagaagttgttggtgtatgattacatgcctaatgggagcttgttttggttgttacacggtaagtttttgttgttcaaactcacttattattataattatttggttttgtactttaatatttgctttgtgtttgtttggttgattgttgttttgtgtgtttttttcatgatgaattttggtagtttttctaagtttctaagaaaagttcactatcatagtatcacttgataattacttacttacatatccaaactaataatccaatgttgatggggtagttgaattaggatataggtccccccacggtagtggtttgatttttctttaataataatggaaaaatttatattatatactacctcttatctttttatgaagctataagagaaaatagtaacttatttttacactctaaaatatttataattttctaaaaaattta

SEQ ID NO: 306650 - DNA, 1689 bp, Cannabis indica
atttcacgtttgtcaatgttcattctttttttaagaccatttttattttctgtggtttatctatttttttcctaatagtatttggaattcttttgaaataaaaaaacagggttcccaacacttttatactaattcaaagactaaatatgtttacagcataatctattctatatattaagcaatgctcacacgttctttttattttatactacttaaaaaaaaaaatacattgtgcattttaaagtaaaatttaataagtttgatttgactatttttgtttagcaagccatacattgctaaaggtctaacactacattgatattgatgtagcatgagtagataatgatttttaatattatttattaaataaaaatgtataagatgtaatagtaaattactaatataataataatatgactgattataaagttttctgtttatatatattcaactgaataactcataatacattagtataaatgtccaggaaaataatgtctccatataatttatagattattaaaaataacgagttctatttgtttgcgattttaatgtcaggtcagtgagtcatatacaattttagggtttttttatccttaatttagttatttatttttatttttgaaaacgaaaagaccagaggcttgctaagttgctctccctcaacaagaaaatatataatttggggaaaagtttacttggtaacggtccatttcttcaagttagatcaaatataatgttattttgctctttggttttattcatgtgaaaatgagaatcagctgataccgacatttgttaccaattcttgttaaaagtgatctgatggaatggaatagagaaaactgacttcatgtttatttaatctaggacaattcttcaagtcttgcttctcgggttaaaaaaacagatgcaagggaaattgagagcttctatcaacaatactatgaacactacatcagagctcttgaccagggagaacaggcagataggttagtcacgttgtttaaaaaagacaaaaacaattaaaaaggaacagtctttcccaagttttctttctgcgtgttcaaagaaataccagtttttacactactttcgttgaaactataactattcccaattctgtaacagagcccaactcgccaaggcttaccagactgctggagttctttttgaagtgctatgtgccgttaacaagagtgagaaggttgaagaagttgctcctgaggttagtctaactctttctcatcattatcttatttgtgtttgtctgcgtacataaaattggatggtgttattcatcaatatcccgttaacagattatagcggctgcaagagatgtccaagaaaaaacggagatttatacaccatataacattctccctctggattcagctggggcttctcaatctatcatgcagcttgatgaggtattccttctgctattttagattttctcttgcattatgttttttagtacttgcaatttacctattcctgtttttaacaggtcaaggctgccgtagctgccttgtggaacactcgaggcttgaattggcctcatgcattcgagcagcaccggcagaaagctggggatttagacctccttgattggcttagagctatgttcggattccaggcatgtgtgtttgagtattagaagaaaaaaaaatagcattattagtt

SEQ ID NO: 306651 - DNA, 1824 bp, Cannabis indica
ctgatctagcggggcgggacggggcagatctttacatgatctggatcaggtcggaacatagccggatcagatttgatccgacccatttacactcctaattatccaccttcgagtaaaagaaaatgtatatacatcatatatttatttgttgaaattgaagataacaagaaaatgtataactttgggcacgatatgacacgacacgaaaaaaataggcttaagcacgatacaacacgataaatccaaaggcatgacacgtaagcacaaataaactagctcaaaaatacaactgttagatagtctcatatcgctaatttgtggaaagataatagaatacataagaggaatgtgctactcttctcattgccaattggttttgagatggaactccattcacttcatccaatattctaacatggtatcaaagcaaaaacacaaaaaaaaacccaactatccaatcccaacaaaattaaaccgatcgaagtagagccaaaaaaaaaagagccaccaaaaatttataaaaaaattgatccaagagttaaaaaaagctacttgtgattcgggaatagtgagccaaaaaataaaaagagccataaaaaaataccgattcaaaaagtagagcaaaaagagccacttgtgattaagaatagtgagcgcaaaaagagtcgcttatgatagagttgtctaagatggtgagcaaataaaaatagctaccatccttatgggggatgttcgatagtcccacatcgctaatatgtggaaagataatagaatacataagaagaataaactactccttccattgccaattaattttgagatagaattccattcaccctatttaaaattttattaacaacacataataataataataataataataataatacatatgtattatttactaacaaatattcaaactataatcattctaattactttattttataattatatttatagtattgatgaaaaattatataaaattaattaaaactataaaacattacatacagtatgataattaactcattaattataaaataatatagtaaaaaaatagaatttgaattggagctcgttaagaaaataagctgacctatttattaaaaatgaataagctaaaattaaatatgatacaagtttgaacatgacaaaaaaagatcaattcacgaactgtgtcaggcttaccttacaaaatattgacacgataccgtccacatttatttttagattgacataccacaacttatattattgctggtttttcaaaataaacctgacactcatatttatagttatactcatgtctcatagtttttctttctaaaaaaagagagtcatagttttctttattaaaagaaaaagagtatcatggttcaaattgatatacataggaaagagagagcaaacctagtccaaattctctagccaaacatcacatcatgctgtcacattttcctcttccaactccaatttttcccaatcacttgatatgaatccacggcgaatcccacagcctctgtcaaatcataaaacataagagcatcaccaataccatcaaactaaacgttgccaaatattccaatctttcaaaaataattaattaaaactaaacggcaccataattttttatatttctctctcattcacattattttagcaacttttattctaaaaataattcaaatgctcagcaattctaaaatcattatttttgttctctactttattatttaatatattatatataaaataattaagatttttattcctcaaattttaacatatactaaattatactctttcaactttgaagac

SEQ ID NO: 306652 - DNA, 4793 bp, Cannabis indica
ttacaatgcaaagagtcactaagaaaatctaaatatttattagacaaatgtcctaatcttttatgccaaatttcagcagatgcgactgcattgatagaaccggttgtggtgtccaaaaaatagagaccattagccgattcacttttgccaatcatcttcttggtgtgtgtttcctgtatgagaaattcattagcaaaaaatttgagagcaaaatcattgtcttgtgttagacaactaacagaacaaatattgtattgaaaggaagggacataaagaacatgttttagaataagattattaccaatgtgcacattacctcctttgtgaactaaaacatgattgttatttggtaaaattaacttagttggattaatatataggatgaatactttgaaaaagtttcagatcctaacagatatgtgtagtggcactagaatccactatccaagacttatctttaggtaacaaggtactattggacaagataatacctgaattatttgttgaggttccaggatcggcagcaggctgattcgttgtttgagcagcaaggagattgaggagttgctggtactggtttggtgtcagctgaggcagcaatggtgttgttattgctggtactggtttcatctgaagtttgaaactggttagcagccgcctcttcggattttccattcttgttgtatccaggaggatacccatatatcttgtagcacttctcaattgtgtgtccatgcatattgcaatgcgtgcaaaagggcctgccacatttttgtcctggattcttggaaggttctggttttcccgagcttctttctccttgaaatgcaaaggccatgttggagttgggatccatggtgacactttgtccacttctttgattttcttcctgtgtaactaaatgaaataccctattaatctcaggcaaaggatccataacaagtatattacctctcacttgcgaatatagatcggatagacccatgaggaaagacatgatgtattccatattgtgatgttcttgcaatttctttactcccccacatgtgcatccattacatgtgcaacttggcctgaaattagatagttgttcccacacagttttgagtttggtgaagtacatacttacagtttgagtttcttgcttgagattcatcaaaatctttctgaggttgtaaatatgagcaccatttctctgctggaatctaactctaagatcgttccaaattgccgctgcagactcgtcatacaagatgctaggggaaatctcctttgaaaccgaattgatgatccaagaaataactatgttattgttgcgaacccaggcattgtagagaatgtgatcagaaacagaaggtttgggtatggtgccattcaagaaccctaatttgtttttgacagagattgccaattccattgcacgactccaagcaatataattttcctgtccagtgagcaattgggaaacaagaatatttccaaggttgtctccgtgatgcaaataatagggatcggatgggtcttcgataggatttctcgatctcattatctgtccatttattctgacttcaggaacttgaacttggttattgccatggttgaactgagctggtggaccatcttcatgctctgtttcttgattgttagacatggtgcgatcgaaatgtatgaaaacagggatttaaaggagcctcagaaagaaaaaaaaatagaagagcaatagaagtgtcgattgaagagatgaattctctagatcctgacatcaatcgtcgccgaagaagaaggactgaaacacagcgaggaagaatcgagaaaaatcaaggacaaaaggaagcatatcttccttgctctaataccatattgcggatgaaatgaaaagtgattttattgatataaaattgaatgaattacaattaagaaaagaggctttatagaagcagccaagaaaggaaaaacaaatcccacaaagtcagggattgtatcccaaaaaaatagggactgcaataaccaacaacctaaactaaaatacaaacagaacaaataaaaggaaagaagcagagaattagcagcattcttgttaatttgttttgtattgaatttgacacccaaaactcttaagttttaatagaagttttgtttcacatcgattttgtttaaaattatatgctaattatttgagatttacacttagagttgaaagaatatgaataaagcagaagtgtttggtaagtgtgtgtttacgatatatggagttttcaaaactaattagcaatgagagatgttataaaatattaaggtgtttaatcttaccgttagtgtgctaatgacacattatatcacggcttgtaattgtggtcttcccacttttttgttttcgttattgggaaatggtttttttcacacttgttgcactccttagtgttgaggcaacagatttgaacaatttccctttagtgctttgtaagtgctgaccactaccatctccttgtggcagtgttcttcaaaagttatagctagagcactgccaattctatatggcagtgggcgcataggctctattcaatggaaattttatgccattttgactttatgcacaaatttaagccttttcatgcccaaatgagtcaaattttaattggtttttttggtagattgcagtctctagagtgaaaatgcttgtgcgggcccataaaccctaatttgggcacacttgggtgtgtgagtctcagtaccaaatgattagttaatatttttgagtcctctagagaggtgccatgggccctcaagaaggatgtcttaattcatttgacatttataaatcttgatcgaaatcctgaggtttgtttttttttttttcataaaatgggtacaacagctgacatttcatttttctttttgcagatctctcttgaaacattaagttgttgtaatctgaaagattatttcatttttcattttgttgcttgtgatgtaaaattaaagaatttggttttatgataatggtgtaattgatgttttctccctatttggattttattattatttttttttggactctatattatttttttggactgtactattttgtacgttggttaatgtaaaccaaaaagaaattagttcttattggttattattttcaatgaaagttcattgttcaaaaaaataaaaaatagttcctaaaaataaaatgatagtaattcatcaaaattataaaatctaaattagaaaagaattaaatattattattttttttaaaaaaaaactaatatagtggcttttttttatggatcactatatctacaaatcaaaataacaaaaaaatagaaaaaaaaaataatattgtgacgcttttgggaaattgctgtcacttttttagtcacgcaaatcctgactctgaacgcctatagtgatgcaaaatgagtgactgtaaaagggtttagtgacacgcgctgaagggtcactaaaaacttgctttccagtcaccctcaataatgatgtgcattgaagggtcactaaacagttttagagttactcaacgtaggtcactgaaatatgtttttttagtagtgtttggagctgaaaagtacatactgcccattcggtaaaataggcataactctatcaatttttatccaaataacttatttcaacttgcattggaaagatcttttcaagatggatctaagtgagtctcatagtcatatctcaattatgaggttatcaggctcacaattggctcacaagatagactagcacactttacacgagaattgattagtgttattaagtgtgaactataataggatgttggagagctatggcacagctcatgtagcatcatgatcgagaagtgccatcccaaaacacttctttccaacacttctctctaattttgttaattcctaactaagaggtgtcattgcttgtcactcctctctaattttgtgtatttctagccgagaggtgacatcccttgtcactcctctccaatgtttcaaagcgcaacgacacacaagaatattcaagataaggagaataaccaacatcaacaacaatcccaatgtttattggatatgcctaggaataagagatattttttatggatatttatttgttcctattttctaatcattattgtgaataacttacgggatttgaaagtgagacatcccaacatgtgggagatcacttgtaaagaccgcttagttttaatttggaaattagcagataattaggatttaattatggaaattatttattaattttgaattattaatttacgatgatttatttaaattcagaatgccttttatatgtcatatatagcatttcataattttacatgttcggtgcccggcaacattggaacacagtgattggctattagaatcacatcctagtattttagtatagcgggacaataaagttagatattagaatatcgggaatatttcggattttaaaatttcccaaaatacccctaagtggccttttatgacttttacactatgtttggtaagatggatggagaggataaaggatggagagttgagggaggatacaaaatataagggagggagagtatggtagttatcctttcaagttgtttggaaagaaggatggagaggtggagggatatattactatatacttataaaattattttattatttatttatttatttattttataatttttttatgatagtgtatttgtaatttaaaataaattagaaaaaagagtataaatccttccatttgaggaaggatttaaaatggtgggcccaaat

SEQ ID NO: 306653 - DNA, 2107 bp, Cannabis indica
ttcaaattaaaagaccttggcccccttcgttttttccttggactcgagatagctcgttgttctaaaggagtatcagtctcacagagacccttcactatacaattcttataggattcaggttaccttggctcaaaaccaggaacccaataccaaactcagtagtgattcaagggagcttcttcccaacccaacacaatataggagtctcatagtgaaactcctttacttgacaatcacacgacctgacatcaattttgccgtgaacaaactcattgagtacctccaatccccatgactcccgcacatgcaagctgcaactagaatcccacattacctaaagaactctccaggacagggtctcttcttctatgcttccccaacaaaaacaatcaagctacaagccttcgcaaacgctgataggggagcatgccttgacacaagacgatccataacaagctatcgtgtcttcctcggctaatccctcatctcctgaaagtcaaagaaacaacaaatcatatctcgatcctcggctgaagcaaagcatcaagcaatggctcatgccacttgcgaactcacttggctcacttctcttataagcgatttcaacatcaatatgactatgccttcaactctctactgtgacaacaatactgctatacatatatctaaaaattcagtatatcatgagagaacaaaacatgttgagatagattgtcatactgtccgaaaaaaagtcaatcaaggaatccttcgaatgagtcatgttgcatcaaaagccaacttagcagacatactgacaaaaccactatttcctactcatttcaaagacattctatccaagttgggcgttcgaaacttctacgctccaacttgaaggggcctgtcaagagttagttaggaaaaattagttaattttcaccgtttttctgttatttcagttagcaagttttcattggcttttgcctatatatatatattttttctattatgtaaaaacagaatgttcaattcaataaaactctttctctctaaaagtgctttgttcctaatactatataaacaaaattgttcgtttaatacggggatcgcttgttatagagtttgtaaaaataaaattttaaataaatgtatattttatttatattaattattaaattttatttaaacacaatttttaatagtataaagttagacttattattataagcttatttataaagcatacacatgtgatgttcctagaagttagagcattaattagaagcacaatactaagagatggtcttattaattaatagaaaactattacatgtaaggcatatgtatgtatatattaataaaacagaaactaaatcataaatagacattaagtataaacaaataaaaagtagagataatgcttattttataatagagaatgcatttgtataatataattattaatattacgtgatgataataaggaatgatggtgattagtattaataattagctaaaactttttaaagaaatgataaatgtggttgctgatctcagtaggtctttcttcattgatgaagtgtccaacaccttccatgacaatgacctcttcaagaagaggaacatcttttttgaatccacctttgtgtatgtaatctttggctcccaatgaattgtatgtaaggtctacatcccctacaataaacttcactgctacttttactttatctccactccatggtgctgtcaattcccagtttctgcagtaattgaaaaacacaacatcatcatcatcgtcgtgataaaaattatgggattccatctcaaaactaattgatattgagtttagcaactcataaaagtaaccgctcattaaaataacggttaaagtaaaatatattatatgataatgatattaataaagacctgtttatgtttcggtaatagttgattccaccagtgaagcctttgttgtggaatttagttgtgtagtaatcaaggtcttgttgagttaaccaagaaggcaagttagctggagttgggctatcttttgagtgtggaaacccttttccttttggcagcataagtgggccaggatttctatatgtaaagaattcccttaacactt

SEQ ID NO: 306654 - DNA, 1850 bp, Cannabis indica
tcgatgtgttttgttcgagcgtgtaaaataggattctgagtgagcataattgtgcttaggttgtcacaccacacagtaggtggatgaggaagcttgatgtgaagctcagagaacagatagtgcagccatgtgatttctacagtgacattcgcaacactcctgtattcagcctctgtgctcgagcgtgaaatggtctgctgcttcttacttttccaagctactagatttgagccaaagaatattacatagccagaggtggactttctatcatccggatcagacacccaatccgcatcacaaaaggccacaagttcatgagattcaggtttagtgaagtgaaggccgtggctcaaggtaccactgatatatctaagaatgcgcttcactacctgccaatgtgtagacaaaggtctttgcatgaattgacaaactttgttcacgctataggacaattctggccgtgtaatagtaagatattgcaaggcacctacaattgacctatattgttgaacatcctcaagaggttccccctggtgagttgataagcgaagtccacttgtcataggtgtaggtgatggcttagcacctagcatttgagctttaactagaagatcatgagcatacttggcttgacaaaggtgcattccagtttcggtataattgacttctatgcccagaaaataattgagtggaccaagatccttgagagagaattgagtgttcagtttgtggatgagatcagtaaccgtggctgagtcactccctgtaatcaatatgtcatcaacatacactaagacaagtgttgttgagtgagaggaatgattgataaacagggagtgatcagatttagaagaaaaaaaatccaagagagcacaagcaatgttgtaacttgtcaaaccaagctcgaggagcttgtttaaggccatagagagctttgttgagcttacacacaagatgttcttgtccaggaatctcaaaacctggtggttgtgtcatgtagacctcttcttgtaaattaccattcaaaaaggcattgttgacatccagttgtcttacctcccatccattagacaaagctagagttaacacaactctgattgtgacaggtttgaccaccgggctaaaggtttctgtaaaatcgaaaccagcttgctgatgaaaccctttagcaaccaatctagccttatatttgagaacactaccatcaggattttcctttttcttgtaaacccatttgcaaccaattgcttgtctcccttcaggaagtctaacaagaatccacgttttatttctggccaaagcaagaatctcatcactcatggcattattccaatgctcttgttgaagggcctccttgagagatgagggttctctagaagccaaataggctttaggtttgaacacacctagcttggatcttgtagtcatctggtgtatactatttttgccattttaattaagacaaccagccagcagaggcaatgcagcaggtgaagaacaagctggtggaggtctgctgtcagttgcaggtgagtttctcaactggggagatgaagattgagcacaatcagtgtgttctgcaggctgctggtgtagttcagtagcagcagtatgttcaacagattgctggtgcaggtctatagcagaaacatgaggaatacaagtgtgtgtagtatcacctgcaataacagaagctggaatttctagagaacaatcattagtgtgatcatcacagtgagtattaggagaagttggtgagtcaaataaagcattatggtcaatatctactataggatcagtagtagtagggacatcaaacacctggagaaaccgtgttgggttttatgccc

SEQ ID NO: 306655 - DNA, 2041 bp, Cannabis indica
ggggaactccacaaatttctaacattccatctagtaacttccgatgattcaattttatctgtgatcattaagaaagcaataacaaacattctaagtaaaaatgtaattaaaaattccatgtaacaagtcagagaatttcttttgacagaaatgcacaagtatagcagttaaaattgatactttaccaagataaggagattattaatggattgggactaatattccattttacattacaccagaattattaaatatgtagaaatgaaattaattcatcactatcatgactaaagataggtaatgatattccatcactaacaacatattatggtaacatctactataaaacctaccttgacatgtttgggtataagatttttttttatgttgaatatagaaaaagcacttttggaagtgttttggtgaaaaataaaaagacctttttgataaactacgccaaacagaaccatcatttatggttcaaaccctgggacaagaaccttgagtaagaatagatagcaaaattcacgcgtttaaatatcaagtagtgcaatccatagagagcacaaaattgctgatagcgcgtactgatcaaaagtggatagaagaacaggaagataggaaagagaagttacctcatattttccgatttccagttcatccagtaattcagtcaaaatcttaataatttcaaaatctggccccattctttcatattgaccagcaatatcaaaatcgcattgataaaattcacgatatcttcccttagatgggttgtctcttctgtaaacctttgctatttgataccttttgaaggatgttatgccattcatagccacaaatctagcaaaaggaacagttaagtcgtagcgcaaagaacagagctccccaccctgtcaaccaattagaccattacaaaaccttagttgtgacaaattagaagcaattaattcatattaagtgtaataaatgcagaggcaaaagacttcatgggaataaaaatttagtaaacagttagaaagttaatgtcataaatcagtgcaaacctggtcagcaagatcaaatatcaacttcgagtcttccccatattttcccataagagtctctcttagttcaaatactggagtatccaaggctgtagcaccatgcctctcaaaaacatcctctataattgaaaatgctttttttcttatagccatttgttcttttgcgaaatcacgagtaccctgaaatgtaacagatatccaagtcagaaatgtcattcgatcaaatgacaccatttttttttctttctgttaactaaaattgtacaatatatagtctaagaagcatcttttttttttcttttcttgaagaactaaaacagaactgcccattaaatgatgaagagtcaaataactcaaaagtgtagatccatacaaactttatatatacatatatatatatatttatatattaggcaacatcaccaaatatcaatgactacaaaatagtagaaatttacaaaggaatataaaaataattagtttaaaaaccaaacaatacaattgaagaacctctaacatttataccaaaatagaacacagaatagaataaaaataatcagtggcatttataataaggatgtaaagtttatcgatagacacaaaaatatagatggaagtacgttctaaataacattgaaactctagctttccaaatagagagaggaaagcaataaaaaaatttagtctaaaaggtcaaaaccaaatggaattaggtaaattaatctttttttttttaaatctagtatggaatatcactgatgctaccagcttcatgttttcaactttcagcagggaggtatttagtcgtaggttattttgggttagaatattttcaataattagatagtctagatactcataatgatgtcaagttgaactattttgaatttgtttttaagtaaatacttggcttagtttttgtttgcaattttgagttgatacaagtatggaattaatctctacgtgcaataggtgtagagatggaaattggtcgg

SEQ ID NO: 306656 - DNA, 3918 bp, Cannabis indica
cattctcccattgattattctgaattctgttgccaagatcaaatgaaactcaacctgaagggatatgttatgttggagcttcagtgttgtctctaatttcttttacctagttaggaaattagaacactttgcaaacactctcttgtcctttaagtcgccaatgcttgtcatacatagtctaaacatactttctgcaaaaatataggtgagactttgcagagaaaaatctactggccatgtctatgccatgaaaaagctcaagaaatctgagatgctacggagaggtcaggtactttttatagcttttagtctcgattactgttggttggccatttctatataattttatcaaaagccacattcagttgattttcaaatttaaagaaaatgatgtaagtaattatttattatcatacttgttttttcacctgacttaccatctcatgccattagaattcctttcagaaaagactcacttgtctttggtaaatttatgttttggaatatccttcaattattgcagttttctatcaacctttgtttataaggtaatacatacagttcttatttttactattttttcccttctattgcatatgaaaggtggaacatgtcaaagctgaaagaaatcttctcgccgaggttgatagtgcatacattgtcaagctctactgctcctttcaagatgatgaatttttatatcttataatggaatacctttctgggggtgacatgatgacattattaatgcgtaaagatactttgaatgaagatgaagcaaggttttatgtaggggagacagttcttgccattgagtccattcacaagcacagctacattcacaggttttatttaattttgcattgtttaataatatcttcttacccagctctggattaccaaacttgtttgcgaacataacatcctatggcataacagtgtagtaaaacacatcttatcaatatctttaggctgtaatgaatcgccatctagttaacttatgatctagtgttccagatatcattaatatcttttgtaacattagtctttcaacttaaatttcactaagttcatccattttgtagtcttatctggtattcttttttatgagtgggctttcactttgcgttcataattttttcttctttaccgtgtcttgtgttttaaactagaaatatttgcatggacttatttgagaaaccacaatttgatttttctcctttatagggatataaaacctgacaatttgcttcttgaccgttacggccacatgaagctttcagattttggattgtgtaagccattgcattgtagtagttttccaaatctcagtgagaatgatcaaggagttgggaggggaaaatctgtatcgaacaatgataattattctaagatgcctacaacaccaaaacgaactcagcaagaacagttattacactggcaaaaaaacaggcgtatgctggtatgtttgttttttcaacttaactagatttttttaattcagaaatgatagactgaatattgatagaagatgataaggtattatctaagaaagacaaccatttctccctcgtaattatttcttgcaaatcagctataatagcattatgagaacaggcaagtaaatcatctattcttagagaggttatagtttctttttaataactttatgcatgaaagaatttctttgagtaaaaacggcataatcatttcatgagtaaagctttgttttgattcataatatttacgttacccctccaaactccttatggagcccaccaaacattttaggcttacaaacaacctcccatttaccattacgatcacttccttctccaaaaaggttcctcatactcttcatctccttctctacattcttaagaatccaaaaatgggaaaggaaatatgttggaagggctgactaaatcaattgtattagggttaattgctgacaataagaaacttatgccgtcatctatcgttccagtttcagaatcaaggaatctaacattggatcctagaagtgtgatcaatgtaggttactttctagtggagccaagccccaatattttatgggccaactctccactgaaacatccaaacaaattttccagactgtaatgatactcatcaagattactacctagatgattaacacttttgccccatatttatcttcatgctcgaaattttcgagtagattctcagtctattatttaaggaatcgagcatacacttcttccaatttctattgtataatctcagaattgaataaagatatatggtggttctatgaaggagttgctaacttactgatatgctcttacttgatctgatgttgaatcgtttagtaccagcacactgctcaataattttgagtttaatgctttttaaaattttacgtcttccccaggctttagtacccaactgtacaaactccatagattttggattttttgaaaaaatgtgtatttgattcagttatacatttttattgtgcatacataatttttgactcaggttttgttagattaaaagttccacaatagatttacaataaagctattttaaagctagtatagatacttctacttgtatttaaaatggatctttctgcagcagtgttggtttactattaaagagacaaagcctctgtcgtttttttgcttttataatcttggataatttagtaaggagtttacttttatcaatgtaattatctgtttattctatttccaaaattcattgtgattattcagctgttaataatagactcccatatgcttatgtaggcctactcgactgttggaactcctgattacattgccccagaagtactactaaagagaggatatgggatggagtgcgactggtagttatttctttttcctttttatggaatatagttttgtcttgtgttacatatatgtaaaaagatatgtatctcaggtggtctcttggagcaatcatgtatgagatgcttgtaggattcccacctttttattctgaagaaccgatgtcaacatgcaggaaggtaaacatgaatgtttactgttttttatatataaaatgtggtatataagtactgcaaaaaagttccataatatacatgtaaagagttttgtttttcatcaccttaagcactatcatggggtctctcatgctaacatctgctttgtatattcttatcaaacaaatggtcagttcgtgctatgcagattgtaaactggagaactcatttgaaattcccagaagaagtaaagctgtctgcagaggctaaagatttaatttgcaagctcctttgcaacgttgagcataggctggggaccaaaggagctcatgaaattaaagttggccaccatggactatcattgttttcttatattcatgtaagcattggtttattcatctgaacaaagctgagaagaatctctttatgttataggcacacccatggtttgaaggattgcagtgggatagagtgtatcagatggaagctgcttttataccagaggtcaaaggcgagttagatactcaaaactttgagaagtttgaagaggtttggaaataatggtttctttatactgaaatttcttaacatgcgagttagataccatctttatatttattgctcttttctgctgttaatgttatctttgatcttaaccatatgcagtcgggcaatcccgcacaacctccatcaaaatcaggtccatggagaaaggcaagtctttagttttaatatgctctattgatactccttgtcagaaaaatgttagcttttcagcctgaatgtctctttcggtgtcagggttctcctctgtctagccacctttgttatatatttctggcttacaactatttgtgtgagtgtgcttatatctggatatgtcctaaatttgctgtttttagacatac

SEQ ID NO: 306657 - DNA, 2217 bp, Cannabis indica
aaaaataaataaaaatactatttattcttataataagggtctaaaaaaattattttttctttgacccatttcaacttagagtcgaccctgaacactactagtgtctagtagcaatgcttttagagccttttctaaaaccacatgtaaatacattcacataattattattattttataattaaattaaaatattttattttattggtttattattggagaataattcatataaatattttttaagaaaaggttatattaacatacaaaaaatgttaaaaaaaatacacaaattatttatatattagtattaaagtcataatgcctcaaaattacaataataaaatgataaagattgcaattgttaaaagatttttccttttaaaaacagaaaacattatatttaaattcaaactatatgtatgatagttgcgaatatacatatatattgaacaagaaatcaagagttagggtaattaaacagaatgagtcatatatttcgttgttattattgtaaggtttcctaattctatatgtgttatttgttattttttttatgattttatattttagaatattagattatttatgggatattgaacatacatgttagtaaattaaaatcatagtaaaacaagttccaacaagaatctctaaagacactttatttccacttcacgcagtttttaaggtcgcagatttatgcactgtatgttgtgctctaatgtactaaaaaatatgagggttaagacgagctagtagtcttcgagtttgtttctgaagacccatttctcacctcgagagatttgtttcagtttagcttaagcaaagatatttccaaagttgaaaatagaaatgaaacttcgacagacaagcaaaattttcttaagtttcgaatttgagaaggaaatacttttggaatttcgtcgattctattgaaattatcgtttagtcgtgttcttcgagaaacaaaaaaaatgaaattacctgtgaaaatgaaaatctcgaagcaagttgaagcaagccctaacaaagcactctaactgctataggcatgtggagctgaaaagagaagaggtatattcctaatgcaattaggaaattactgaaaaattatctttttttttaaaaaaaaattaaaaactcccagatcataaagaatctcagcagaaggccaaaaatgaaggtaacataccaaaaagcgataccaaactagtgttttgtatgaaacggacttagtacgttcatatcgaaaagttagcatgacacttgtgtcatactaattttgagggcaaatatttacccaaaaatttgatttgatgacattaacaacacttttaacttgtggcaagaaggaaataatcttggggcccaaccactgggactaaagtggttaatttacgcattggaaactgtgtcagtgccctaattgacattagcgggtgcctaggtaagtactaagatcctgtgaagacgtttctagtgccatccttcaacaaaattttagcaaacaggttgcagtgatcctaaaacgattatatttatttaattaaatttcatttcatttttttgatagtgataagttacttttcacacttggattttgaaaaaggaatccaagtcatgttatatgaactgatttttgttgttagattttcttgtattcttatagaaattttgatgcattgattaaaattaatgctttttttttttttgtaaacaaaaggttaatatgagatagggaaaatactaaagacacgacaaaatacagaacattacattgttaaccaaatgaagattatgtactgggaaatcttaggtaaaagagttgaaattacattgttgcagttggtgatctttgtagatgctaaaatctacaattgaaaatgaaatgtatgtagggagggcatgaagaacattgtgaaggtcttggaatggatacaatgaatttgttatatactaatggtcccaacgtaactaaaggctcgtgggtccataatccattggaggcccaacttattaatgggctcataggctcattgaagatggtggacatatttgacccatgaaacactatttgaagtgattcaagatagtatgatatcaaaaaagaaaggggtaagttgaaaaatgtctcttttattaatcaattaatcaaatttacctctaattttatatttatttgaaacatacttctttttatatgtattgtacccaaaa

SEQ ID NO: 306658 - DNA, 1162 bp, Cannabis indica
attgatgaaaaaaattgtaattataaatagtggatttgtctttttaaataggttggagggagatgtagtttaacatacatgtttgaaattattagacctgtcataattatatattatttggtgagcttggtgggtgtttctcaaggtgaatattccaatcatttatttaatttaattagttgatgatatccacatatattttattttttaaaaaaagaaaagatttaattaattaataatgatgagcatgattataggttgtttgtgtacgtggcgtgtaaatgaacagcaacgtaaaactatgcatgtcggtgaagtaggagtacgtactactctccaaccaaactatgcatgttttctaatcttaaaccaaatatatatttattacaaacctcgtagcaagggattatggaaaattaaattaaataataataaaagattaattattatgaggaacactaatgatcaccgcgtacaggtacagccatcaaattttaaagtacaccatcattgaagtgtggccactggctgtggctgtggccagtgtggtcctagatcgtcctcccaaaatgccaccacaccacacgcacataccataataataataaatcaataataataataataatagggctttgctttgcgttgactgtcttctatgcattttttttcactttattttaaaacaaataacaatttacacattttttttaagggacaacttacatttttaaaagcttcttttagttcatttttcatttttaagggataacaatatatttttccaataacatttattaaacagtaaatattcaagagttggacttttatgtagtaccttaattattactgtcctataaagttgttgggttgtctgatatttataatatataggagtgttctaattcagtccacattattatttattactaagtatgaattttatatattaaatttaatttaatttgcatataataactcaaatttgatctaattggatttgcaaaaatgtaaatttaattagttattttagattaattattttttaatattaaattatttaatatttataaaaaatatttttttttccacataaatacgtaacaacaaaataaaataaattaattgttgtttatatgtctgtaacaacaaattaaaataa

SEQ ID NO: 306659 - DNA, 1188 bp, Cannabis indica
tttaacaaaacacagggtccaatctgtaacttttgcaaaatacaggatccaaaatggtatttacccaattttaaaacatgtttgtcaataattagcgtcccacctaattgtgagaggcaacaactccaaaaaaaaataaaaagaaataaatgattaataacttctacaataatatttgtcaaagtagataaagatgcagatgaagacaaattcacttctctagaaactatgatgagagcataagttttcatttccactatgactaactgtaatttagaagcacacaagagactatgaaagtaggcctctcattagatttataacacccaggaagtgtttgggaaagagcagctaccagccagatgcatcttggactagggggcgaacccacattgaagtgagagggacagtcggcccctaaaaaaaatgtatatattttagttagttgcaacatatatttgtaataaaagatgatatttataaaaataaaattaactttaatgtaatggttaagctatattgcatctcggacgatagttttcacctacaagcgatttactgggtatttgtgcaacatgggcttgagtggagaaagcaacatattgcagcaaacatagaaagggagagcaatggctagcctaacttgatgaccatgtccactccattcttttcagtccaaatataccacatcatacagaaaataaattccaactcaacttttggaaatatagaaggcacatgtattaaatagtcaacaagaatattgttggacttaggagtgcacatgggggtgggttagctgggttagaggtattttaatatgccaacccaatgattgcggtttggataaactataaaccattcaatttttttttattgtacaacctaataggggtgggttgggttgggttcattgggttaagatgaatattttaaactttaatatttatgttacaaacaggataaaattattcaacctggtgcatacacaaaaaaacgatacatatatatgtgtgtgcgcgtgtacaggggcggaggcaggacttgaatgtaaggggggcaaattttaaaatttagtataaaataaaatttttacatatcatttaaattaaaaatattaatatacttgtaattaaagcatatgttaaagttaaattttaaatttgattaatattttataaaataaaa

SEQ ID NO: 306660 - DNA, 1750 bp, Cannabis indica
gtcatgcattccacctacgtaagacatggttgatatagtgcatcctcactgacaccaaggctacccacaacattgaagggatctcggggttgtcaccccgagatggccaccgacacccttctcatgttgggtcttaggggtgtcacccctaagtattagctgaaagggcttaacggtcataccacaccttggggagaccctcatcattagtggctagttcaaatattcaaatcccgtaagaagtttgatgatgattataaacccacaaaaatagcaggatactatcataagaattagacttctaccacctccaaaaaccaaggaggtggttgagatgactccacattggtcgtgtctcctaaagcgagaagcatcgaccttttcccatatataaagggtcacccatgacctgggaaagggatccaaaaatttgagtacttagagagaaaagactctgccattgttattttttgcatttaagagcgtgttcttgattttgtaactctgatcaataaaacacaaggggagtaggttattaccgacatttggggtcgaacctctttaaatctagtgtctttatttacatttattgctaattctagtgtcattattcatatttactggtagtttttggtttaaatctcatttattttgactccgcattggttggctaaaaatccagtcaacagtcgacaacaaagttggtggaagacgacaagagtttcgagctcaaaaaattgaactgcccctgtattcaagggatgacccagatgactggacgtatagggttgatcgttattttggcctacaacagttgtcggtagcacaacaacttgaagtcgttgtgttgtgtttgtaaggagcaactctgcactagttttgatgggagaactcgcgaaagcttatacaaactttggaagagttaaaagccttgctcctttgacaatttcatccaatgcacgaggggattgtttacaatcgtttcgttcatctttgacaatattcaagcatacccactacacctttcaacacatatatatatatatataacactcacacactcaccaagccaaatcaaaagtcaacaataaatacacaataaatactaaagaccttttacttcttcagattaatagtgagactaattatatgggtaagttagttccttcaacatccaaatctaattttccccatcttctatagtgacttcttctggaaaaattgtagggtatcgtaagatatctgagacggagatgaaagaagagaaaaatcagggagtatatttcaagtgcgatgagaagtggcatcgtgatcacgagtgtaaagccattgagttacaagttattcttatccaagaggagcctgaatctctttaagaaaatcccatcaaagaagttttgggtatttgcccttcgacccatgacaaaagcacaattagttgaggtctccttgaattcagttgtggggttgacttctcttaaaactatgaagttattaagcagcatccaagatcaagaagtagtggtgttgattgattgtggtgccacccataaatttatcactacacaacttatttctaaattggctattcccttttcaaccgctgaatcctatgggttccagatggggccggaacaagaaatcaagggagaaggtatatgtcatggtgtgctcttagtgctgcaaggtttagagcatctccaatggttaaaaaaaaagaggatgcttgcttaggtggatagatgatgtg

SEQ ID NO: 306661 - DNA, 3482 bp, Cannabis indica
aataattgccccttaaaaagttcatttttaataagaagagcttttaaaatgattacaagggtattttgtcttaatcttaatttgaaaaattgcatgctttgagttttggcagttcatgatttcaaggcacatcattagcattaattacccaatttttccaattctctcttattcacatctgttagatctttattcttttaatctaacggtgatctctctcaaggtataagacttaagaaaaacaaccatttttgccatttttgcttttcaaaactctcaagcttttctgcgaaaaacaattctcgactttccaaaccctggcatggcctctttatcgttaacctactttctatgaatttcttctgatttaatcttccaactcaggagttctcagaatacatcaagtcactcgtcgcatccccagttacagagcttttctttgtgcgaaaattcatctttgaacagtaagaggtttactccttttttggtatttctctttcgtgagttattgttcttattttgtaattaattgcatcattattcactacgtttggtttaagtgattttgatttagttttttgggtaatttctagggtttaatagggaaaaactttaggattattgtattcataagcttttggtataaattaatttcttctaaaaattgggatttttttttttttgtataaatgtcctaatctggttttcaaattttaactccagaattcttaggaaatagaatgtcctaaggaattggcccttccattcaaacccaaaatccagaagcctcaatcaaaacttgagataaatagtgctaaaattagggaccatttaataaaaccaatcaggatgaaattgctagtcactataggcattttctacaagagataactgagggtacacatcattacttgcaagatgcagcctggcctgaacctttgtctttatcgtctattactttggctaaacccttgtttttatccagagtcactgttgctttttcattaggtgaccttgattttgaaatcatgtatactaagcctcgtaaatcaaagactcctcaggattccaatgtcacctttgaggtcgagctcattgaatcgaaagtaagggccattggagaatacgttggtggtgttttaaagtcctacgacattaagcaaaggcgaggatgctgcattaaatctgttgctcctagagaattcatctcttaccttccagaaagagttatccgccaggaatgcgatggtgccagtactagtggctcatttgggattggcgcttggagcctcgagcacatcaatgcttgagtagttctccccttgaaagagtacaacagggaattctgtaattatcttggaattgccccctttcagctgattccaagttcttacaggattctggcaagtttaaaagttctttaccatatcttaggatgggagtgtcccactccccttgaaatagtttatttttattctgtcaaagcagtccccgcgaggaagcattgttcagggggtttttattatctcgatacccacacaaatgatcgcaggatcattgtgaggtttctaaataaaactgagttcaaggacaatttcttctgaactactggtctctcccccatcaacacgactgcatttttcattttatgtaagtaattcttatctcaaaatttttgttttgagttattttcatattttaggctttgaggtcactgacttattatattattgtgttgacagcggtctcttgaagaccgattccaccctcgagatggctgagcaccacaaaatccagctaggtctcccattcagactgcaatcaacaaactttcttttgaataaagccaatgtgaggactattggccttcttggctcagacgagttcacttgtgactataagtttgcaaagtactctttgtgggagaaggtcccagttccagctaaagtagagagccaagattcgtgtacattatctccagaaagtaacccctcgggatgctgaagaagaagcatcccatggtaatcaatataacttctaccgtacgtagggcagagtttacctcattagtaactttctaggatagccaatataacttctacataggtttgatagttggtatcctaggttccacatctagcttagttgcactagctcatactatgggattgccgagcagtttatgaccaacttggatagggcgagccacccagattcaaattgggatttagatccaataaacccttataatatattcatgatgacacggcctagggagattagtatttactatagtcctcccttttcatcatttgatgattattgtaactgtctttaagtgggagtttattcccaattttttcttctaactatctttgaataaatgttgacgtatttatttgcctcgcagatatggatctagaaaaccttttcaacacctctggaaaaaagggaaagaagaggattgcagcctcgaaaacctcatcgagagtaaatacaaatcctctcaagaggtcacgaaaaatagctgccaataagaaacgtgcctcgcaacccataaatctcgagcctatagaagatcaggttcaagtcaacactctagccattgtacatgttgaggaacaagctcagggctcaactcatcaggctacatctttgagtaaagggcctgaaatggttatgctcgaatcttcttgccccttgcccaacaaagcagggaacactggctccaggtattgcacgcaatttgccacctctttctagcgccaattcaaatccttccagtctgacgactgggactcggtcaataatggtagctcgaaggaattgtttgagaggagtctcaatttaaacctctcggttagttcccttctttttctctttgttctttcttatcattctttgaaatctatatgtaaaagaaaatcatacatatatttatcctttgtagtcatcctttttatcttatgtggcacaacaacgaggtcttcaaaaggtccaacaactggaagctgaccttcgtaaatccattgaacaatgcaaagtcgttgccaagcaatggaatgatgcccagaaggagaacacacgattgactaaggatgctgaagagttaaagaggagccacaaggcagaacttgaggtagctcacaagatgccaaaagcaagtccgaggcctatcaaaagcttgaggaagaactcaacgcagccaaagtgaagcttgtaacatcccgatttcccgagatatcacataggatagtccgtataaaacaatttaataagataaagacaataaaatacttttttattgaaaaatatctaagcatgagatctcactatttaaaacaaaatacttttagtaccgtaaacttaaataagaattagttaaatcaaaataacggttccacaatgtttagcatttaaaaaaaacattaaaaaaaacaaaatactgtgccagccccctaacatgcagtccacgcctcgag

SEQ ID NO: 306662 - DNA, 1316 bp, Cannabis indica
tttaattgggcgggttgcacttagaatttagtaatccgatcttcacattgggttgaataaaatgtaacataaattgactaaaccgatcgacgtacactcctaattgtaacgttgccggaggagtcttgtactacaacccaaatacgtgtgattattctgtctgtatccactgctgcatctacgttcaacttgaggttctcaaccattggaggtgcccatggatttggtttagcaactgaggatgatggttgttcggtgttattttttgggcagtatttggtctgagcattttgaaaattttgctagtaatttgtagcaaaaaagcaaggtctttagctgatttagcttatttccatgaaagactcgattcctctctgttcatatcgaccaaagaatgcacaaaatttgttcaatctcaatatgtgagtacattgtcaccaaatgaactaggtaatcccccttgcgaattgtcgatgagttggtccagtctagaacgtgattggaatgtcgtcagaccgctcgtgcatacttgtagccaaaaagagcatggccaatagattcccacgcttggttacaaatagagcaggtagattccgtaatgatctttctcttgaccaaagtcgtagctacaggaagagcgtcgtcgtagacatgccaaacaaaaatcttaatttttttgtggtaactcaagcaaccaaaagaacttccaccatgtggctgtcaaagctggagttgtcatcaatgtcttcaagagacgctagaaaatgataacctgtttggatagaatatattctagatgtgtggtgatgccagataagagtatcatcattctggaaaaagctcagaggcattgttaaaatacgatcaatatcaagcagatagaatcattgattgagcagtgccatataccattgtctctcatttgttatgaggttagaaacaaccctatcttgaggtcttgaatagtagaaaggtaggaaagttgagtgtcccgggatccaagggtcaaaaccacatttaactcggcaaccttcattaattttccattgtaaaccagcagagaaaaaatctttaacaaaaaatattgaggcataaatataaaaagaaccgatttcataacaaagtaaataaatgcaaataataacacacaataactcaaatataatataaagaagctgattatatttatcaactagttaaaaatttgagataaaaaactagttccataaagcaactaagataaaaactcacacacaaaaaccagttaaataaaacaactcaaacaaaatatcgattcaacatgctccaacctacca

SEQ ID NO: 306663 - DNA, 1091 bp, Cannabis indica
actaacttcctaactaaataattacaaaatttatcttgatatatacatatataaatatataattctttcgagactatgctctaggccaaatgttgagtgtatacataaaaatgctatacttacaaataattatatatataaagttaaatattgtgcaaaaggaccaaaaaaaaaaacaaaatattttatcgaacacccaactttttactaccaatgatctaatacatggttctaaaatttgaattgccctctttcaaagggcataagtatatcctcaatttttttttatttaaaaaaaaacagactagttttacctttgacttgcactaataagattcctgcaaaacttctcttctttctaaccccatttggaaagaaggcttctatttgtccggacttgtatattataatagttatatgcaataaaaaaacatcatattgtaataaaaacaattacattatttatgcccctaattcaacacatttatgctattaaagatagtgtttgaaggattaatttttaacattgtaatcgttctagaaataatgttgcccataatttgtggctaaacttactaattttcttgatgtggttataatttggtggtcgagtttactaaattttatttgagtcttgttgtttaatgaaaatctcattttaattaaaaaaaaaaaaaaacatatacatacatcatataggattagaatattcaacattatgtatattatattgtaaggagttataattaatcttatcaacttaagaggacttcaaagttcaaattcatggtgaattgaatttcaatttcttttaataataaattagaacaaacaaaagtgtgttggttgcacatgcatatgaaaaagaatgaaggtatagtttgggggcaaaatagtaatgagaatagcaaaaaaaagagtaaaaaaaaaagggaaaattttagtattatacctataatataatcaattaacagaaataaccttaattaaaaaaatgtaccctaataacgtgacacgtaggcttctcctacctgaattgaaaaaaaaaaataacgcaaacaaaaaaaacacgatcgaccatacgcgccaaa

SEQ ID NO: 306664 - DNA, 2574 bp, Cannabis indica
cgatggaatagcttacaaaattttacggtttcatatttcattttcatctaaagttaataatatgcatttatattaacacaatccttcattacatattgcagagataaaaaaaaaggtaaaaacttttatgtacatgacatagatcaacagtcgttacatttacatttctctttcaacgatcctttgacaaaaaatggaaaagaaatttatgtagagatagattttttgttaattattattcagtgatatatcaaatattttggttgagttcaaagattttaattttactttgaaagatcggaaactctagaaaaaatatttctggtaggttccgtgagcattcgagccccaaaactattaagtttgttgtttgatgcgttttcttcgtgtgtgattgaaggttccacaacggtgaaatataccgaatctgatgggctagctgaaaaatctgctaagagaaagaggaagaaccaatatcgtggaattcgtcagcgtccatggggtaagtgggctgcggaaatcagagacccaaggaaaggggtccgtgtttggctcggaactttcaacactgctgaagaagctgcaagagcttacgatgctgaagctcgaagaatccgtggcagtaaagctaaggttaatttcccggatgaaactcctcgtgcttcccctaaacgttcagctaaggataatcttaagagatcactaccaaaggctaacgctgttctgtcgttcgagtcgaatatgaacacaagttttgatcttgggcataactcagatcaggattactacagtgcaatggggtttcttgaagagaaaccacttaccaatcactatgattatgtggagtctcttcctgcaaatcaagaggttgggcttaaacccactccagctacgtctaccacacccttgtattttagctctgatcagggtagcaattcctttgagtgctctgactttggttggggagaacgtggctcgaagactccagaaatctcctctgttctttcggccactttagaaagtgatgactccctgtttctagaggatgctaacccgatgaagaagctgaaaagtgactcagagaatgtggtccctcaagctgaagaaaacaattcaaagacactttctgaggagctttccagctttgagtctcagatgaagtactttcagatgccgtatcttgatggaaactgggatgctacttcttttgaatctttactcgctggtgacacaactcaggacggcgggaacacaatggatctttggagttttgatgactttaccatgtctggggaagcattctgagcaagttccccaccttcgctagtttatgtaaataaggctacatgttagtgagtgtcaaactgtcatccccctttttcagtatgtttcttcgatttaactaaggacagaaataagatttattgccttatttttatggaaatcaaaatcagttttggtacttgcaggaattgttcgtctggaagtggagtacacacaaaacagttaaacatgcataagcctttgtgtggaagagtggttgaaggtagctatcattgtatcgcgagtatatatagatattagcttttacttcttaccttcaagacattgaactcgtgttgctctattttatgtctgtatcaattaaactgtgatttgtgatgaatatactaagacctgataattgtcaaatctgttttttctttcttctgtattcgatgtgctccgtattgttttattattggaggccattgtttgttctttctcttccttttaagagttacttgatgataagagaaatgttcactactttttgatttgatgataatggaaattcagtaatatttatgagaaattaacatgaaatggacatgtatatattaatgtttgtatttaggtttttcttttggtcgtaaataataagcagaatgatgatgatatgaagagctctctactttggggtgtctgtgtctagagttcatcctagggtttgtattcaatttggtgggtatgttactgaggttagaggttcatgtgatgatgttacaagttacaacatgaataaaatataaagggcagatacgacgatacatagatgagtcagccatgtgaagtgttttgtcatctagcagcaacttgcattatgaacaataaatatgtaaataaatgtggtctttgaggccaaacctttgacttccacgaggcaaggaccgaggagagggggccaaagcagaagacaattttgggggtcaaattttttaacctcaaaggcacctcaccttacctgccatcaccacattacatctccaaaatgtgaaggtgggccacgttgttgggtattaatcactctttcaatctttcactatggctccttccttgcgtgtctctttttcttcccaaagaactataaaaatggctttaacgtttttctaatttaaataataactttaagtcattttactaacgctatagacatggcaagcggttcaaaataagtgtgtgacttactggatcatataataaaaataaaaaagaataaattagggatacatgatgggaaatttgattttttat

SEQ ID NO: 306665 - DNA, 2595 bp, Cannabis indica
aacataaactgaccaaaccgaccgacatacacccctagcagagattaccgaggcatttgtgaggtactataaagagctgctgaggagtatgatggaatataggagaacagttttagctagtgtgatgacaatgggacctctggtggatgaacaacaagttgcaatactactgggaaagttcacaaaggacgaggttaaaaaagcagtgtttgaaatacctagtatcaagtcccttggactagatggattctctagttatatctttcagaataactgagaattggtggggaacgatgtatatgaagttgtggagtcattcctacaaactgggagaatcttaagggagataaatttgactgtcattactcttgtccctaaggttatatattgtcctaatatagccaaggatttaacctattgcatgttgtaatgtaatatacaaagtagctaccaagtttatttgttcaaggctcaagcagattttgcctagtcttctgaatcaaagccaaggaggtttcattaaggggaggtatatagcacacaatgtaatgatctgcgaaaaccttattagccattatggaaggaaatctacaaaagctaactgtatgataaagctagatttacaaaaagcatatgacaatattgcctgggattttatagaagaaatgctgatagcttatagatttctaagtgaattcataaaactggtaatgaactacatcaaaacacctagattctctcttttgttcaatgcaacaatgcatggtttctttgaatcaaaaagaagattaagacacggtgatcccatgtatcctttgatttttgtgcttagtatggaatacatgtcaagatttgaaaaaaaataggaactaaaatagatttcattttcatgaaagatgtggagaattgaagctcaatcgtttgtgatttacagatgatgtgctactgttttgcaagggagaattcaagagtgtgtattacttgttgcagggacttaaactcttctccaactcttctggtttgcagccaaagtggctatatattgtggtatgcaggaagaggaagtatagtgaatacttaatgcatatgggttttgcagacagaaagttcctttcaaatattcaggaatttctatatgtgctaagagtatttcaagacaagaatgcaatgtgtcgagaaagaaaatgacatctagaattaagacatggagcactaagaacatgtcttttgcagggagaacagtcatccccaattcagttctgatgactattcatgcatattggggccaaatattgattcttccaaagaaggtgataaaggagattgaagcaatatgtagagcatttctgtggcagggtcaacactttcttcaagggtctggtttggtggcctgggctttggtttgtcaaactaaaacagttggaggaattggcatcaaaagagtagcagaatggaataaggcagccatgttcaagtatatttgggcagtggataggaaggaagagaacttatggttaaatggatccattgtatacataaaagataaagactagtggagctatagagccccagattagggaagctggtttcggaagtagattgttgctcttaaaaactaggtgaaaaatctggtggacttggtgcaacaatctaagtaccaggtttcctatggttgtaaactgctgagttctaagctggacatagtaaaatggtgcaatgaggtttgggttagactgaatactccaaaacatagttttataatgtggattgtaatgtagaggaaactaagagcaagggagagattgcatcaatatggaattgttgaggatcgatgcaagctacctgttctgcattcagcttaatttgaggtgctagcatctatttttttcttgcttattctctcatttgtgcttagcaaaagtgaaggaatgctcaactggacagtgcaaactacatcagtcacaaggttgttgagatggattgaaagatcctaaatgtggcaagtttagaaagaaagtattagctgcaataatggccagcgtagtataccatttgtggaaggctaggaatgacaaactatgcaattttgcaaatgaagatgtggacagactagtatgtagggttaatgaggttgtaaaataaaaaatttttgtatgtggcctaaaaaagttaatgtcatagagtcggagtggttttactcattataaggtatacaaaattggatagagataaatattagcttgcacactttggtgaggctattagattgtacaaattgatttggagtaatgaaattcatagctgattcataaaaaaaatgcatctacatagtcaattttcttgttagttttgtgatactaaatcaggtatgcggcggaatcatttataacaattttcatcatactacacccaagaatcttcatatgtacgtatattaaatctgaatcaaaagatgaaataatatatttacctcttgaagtgaatcagggtattctcgaatagttgtatcctataaaggtaatgacgaactcacaccgtgatcttccacgacacacaaagattagtgtggggtaattaggataaaactatataatg

SEQ ID NO: 306666 - DNA, 2710 bp, Cannabis indica
aatatcagaaactaaatgctacttgttttaataaaaaaaaccagttctcataacagtttttacatggtattagcttttcaattgataactatgttccatatactgtactggttcacttagtattgcatctctctcatttttttgaaacaagtatcatttagtttccgatattaagaatattaaaatttaaaataaaataaataaatgtaatgcatctggaccctccacgtgtccatatttatgtgttaacagaagtagtagtaacgaatataagagaattgtaatattggatatttttgccttcaaaaataaaaataaagtatttaagtatataaaatctaaaacattaaatatttataccacaatttactcttaaataaaagacagatactttattagttaaattcatgttttactttgcttattacctagttatttatttaaaagttgcacaagtatgctaaaactttaaaaatagtcatgtttttttttttttgaaaagactgaatttttaaatttaatttcttatttgtcaccgtttaaatcttaaaagtgttaaattctttgttttatcttcaattatatctatgagaaattattttatcaatctatatatatttattataaatttattatattttgttccattcttatttttatatattttgagactaattatatagattcttaatttttgttagagttttagatagaagaatggaaagtgaatgtggaacaaaaggtatggtaagaaataatggtggaatcttaaactaattaataatgaatgagcaatttatgtttttacaaacgtatacacaagctttctatgtgggatagttggtgaaagaaattaaataaagagataaatgtaataaaagaaagacacaataatctacataaaattttacaatgcaccctaaaaaataggtgtatcgatgcatcaccattatatatatttttgatatcttcatagtaatagtttcatttttttatatggtaattagatatactatacattatagttatttacaattctacaattttttttttaagaaatttagaataatttattgtacaaatataagattcaaatagtctcttacacacgtatatattttatttgtactcatataaaatagactctttgaaccatattttttttattataaattattttaattttttttgaaattttataaaatatcttaaataattataatttacactattatatatatatatatattaatgagattataattattctaatattaaaaatataaagaatgtgcattagtgcattcatttttgagatgcaccataaagaactctaatttatgtgtttaaaaaattaatagctacttaagatttttgcattctaaattatgatatatacattattgtgctcttaaactttcagtctgttacaaatagtctttgaacttttgagagtattgtaaattggtcattttatcaagttttatcacatgtgacaaataaaatgatgacataactgcttagttaattgtcacatcagtgtcacatatataatttaacattaaaaaaaataaaaatgatgtatttttaaaaaaaatattaaactaaaaattaattaatgattaagaaaattatgtaaaaataaattaaattatttttttttcaaattaattatacatgtactgttgatataatactaatgtggcaactcactaagcacctatgccattattttatttgtcacgtgtgacaaaatttgatagaaaaactaatttacaacactgtgaatatttcaaggaatatttttaacgggatgaaaagtttaagggacataataatacatagatgatagttcggaggataaaaattttaaatacccaaaattaattatcctaccaatgttatacaagaccaagtagtcttttttataagaagcttgtaagcatttttttttctcaataatgttgcccaataaaataagacaactatgttgtttttgcactttcttctaagatggtgactattgtgtttttcttttgttcgcacttattagaataaataggatttatctctaaaactatgactattctagagccctcaatttttctttgttgtaaaaattcattttaaattataaaaattgttgcaaatgtttctatatagttgcaatttggtcatttattttaacagtttgttgatatatcactaatttaacgttaatttagcccaatttaagaatccaaacaaaaaataaatatataattaacaatttaataataaattatgagagtatatatgtacattcttagagctaatgtttaatattaataaactgaattttagatagtttaaagttattaaataagccttactataattatacctgtaactcatagccacataaataaattattataaaaataaatagaatgtaacagaaaatatttacaacaatttaaataattcaagaagaatttttgcaatagaaaaaaatttaaagaaacaaaattactactaatgtaatagttgaagaagtaaaaaattctattattctacttattatattggtcacaagtttacgtgtgccttttttttcgctttatatatatttgggtcatgcttaaaggtgactatattttagtcggataactattttagtcttgtattttacaaaattatcaatttggaccttctgttttgttaaatgata

SEQ ID NO: 306667 - DNA, 1490 bp, Cannabis indica
tacaattataactatctaattttgttactgtgactagttagtacacaaataagttggaactttttgtgaatataatatttttaaccagtgtaagtatatatataattttcttagtcacaaattgtcggacatataaagctaacatatttttgattatatgaagagaaaaacaatcatgaattatgagatacacattgatatattaattaattgaacaaaaggggctgatgaacataatcacattcaagagagaaaaaaaacaagggcttagattataagttagatattaattatcaaatagaattatattataattaataaaaaacttatcagattagctagaagacgaaaatgcacgtagtagtgtttttgttagttgaagttgtctttactaggacagaaatggcattccataatagcatgtattgttatacgttgcccttctcaccaactatatatcatagaaaaatatatatattcttatataggatcatttaatgaattaatggcgtatttatatatacttagtcaagtacattccaatcaattcttttcaaagtgtatatattatatttgatgaatcttaatttatgcataatattttgtatatacatacatattattattcataaattaatttaatttatatgtgatagttggtatctaggtcaactgttatactcatgattatttggagtcatttataatacgtgtatacatactccagatatgtttccttgcgcttcatgccatgagataaggaggagattaagacagtatctatattttaaatcattttaattacaaacatatatattagtttgcaaactataataaattaaacacgactagagaataaataagataacaaataaatttcttatattaatttccagctaaaactttacttatcatgaatattattaaatcattatagggatgcgtgagacactcaactctttcatcctagtttttctacgaatttgtcaaaatacacatttgccagaaaagtcaaccttattaatattcgttattgttttatagtaaattaatacttgattatccaccgtccaattatagaaatgatcattagataattaatgttgcataataaactttctttttctttaaattagaaattctatatgccgtcctaaatgccgacctgatcaactttaacacatcgcatgcaacacctaatttaaacacacacacatatataaaatatacatataactatgtatagacaatgattaaccttataaatgggtacgaaaagggtcgattggttggttccttataattatggaaatatataatattcatatactacaaaaaaaatttcttaatttagcgtaaatctaggagtcctcttttattatatatagtcctgttgttttttattatgattaatttggtgtcaaattagcatatgtttcggctttattactaatgtttgtgttacatacttattattttttttatatata

SEQ ID NO: 306668 - DNA, 1925 bp, Cannabis indica
cccatcacagaaatatcctctatgggaaacagagatgttaaaccttgtttggccatcagggatctgagcatatggataagtaatggaagaatttagaaacatatagcattatgcttaagggtagcaaaatgtgaaagacagttaggagaaagcagagaaataaaaatatttagtccaatgatgatcacatcttaccctccaacaccagaaaatctgatgggaagtggagagagcttctttagggatgccataagtcttgaagcaattgtatccccagaaacctctccagaaactataaaaaccctcacttctccatcttttgttgccttgtctatcacagttctgctggaaacagataaatgtctactcagaagccttaagaagcctctgtgcttttcactcttaacattccatattgctttcaacaacatttcaaatatcaccctaaccatataagacatgaaacaagttagaaattcagcatgaaaatatttgataaggcatttgaatcacaaattaaataattaactaacattctgaattgtttaaggagctgattatttcacgattgtaagaatatattctgagaaggtgattagttacatttgtctttcagctgattttttagtctaaatactgacctttgtgatttaataacaatctgaagataaaaaaaaaacataatatgtgattgataaagctgaattttaacaaactattttacaaggacattattctacacaaaaagaaagttgaattttgaacagcaagatatatatttgtattagaagtttttaatatagcaagaaacaacaaatgaaattcttttatttaaatacataaaaatcaaactttcaaagtcaagctaggtgtaagtttattttttttttcttttcttttacaaattcttactattagacaacaaaatcaataattatcaccatgaaaagctatgcttcactatggataggaatggtactgagtaagatttcatttccatggatgaaaagagagtaatgaaagcaacacagaaagaaaatttaacatgaaaataatatcataagtttaacatgaaaatggtatcaaatacctcagcacacttctgcccaacactaaaaaaaacgcgtatttatacatatagaacaagtttctagaaaagtgagtctccttaaatcttgaaacaactgaccgactttctgtataaaatgttgggtaatttataacattgaaaggactaacaagtataattattgttgttagaaaaaatgaagtataatatgggacaaagaaaattaaagtgagtttaccgtataggttgtttaggaaggtggagtgagggagtaaggatagaagagtagtagcagagaagagagactattggaatatagtcgtctcgtcgttcccagcccacgtatcaggggttgttttgcttttgagcttttgctcttcttttcgcattttctgggcgaaaatatatgaacatgtcatctctaattttagcaaaatcaatatacaataaaaatgacactgcaattttggcaaaacataattttctttctttttttttttttttagtagaaaaagaccattatattaattggaataaattacatgaaattcctctaactaaaaatagtcagtatccacaacttttccggtcattgatagtaaagggtcttgtcttttgacatgtatggtatgtgagttaagaaagtgagttgtgagttattctggtggttggtgttatggctaggggtgaaaatcggtcggttatgatcggtttttacaattttataaccgaccggtcggttacgattttattttacgaaaaccgtaacccaccgtttgaaaattataaccgtataaaaccgaccgtacggtttttggcactttttagtggtttttttggtttggcggttttggac

SEQ ID NO: 306669 - DNA, 1472 bp, Cannabis indica
acttttttagttctccttccatagtgacggatgaggtcttgacagatcataatgttgcgacgaatgaatctgccatgaacaagtcctccttggttttgggcaattaaatccggaagaacagatttgagccttgcacaaatcagcttggtagtcaccttgtaaagtacattacaacatgcaataggtcgataatcattcactaggttaggacacttaattttgcggataactttcaaaaccatagtgttgacttccttcaaaagctgacctgtgtgaaggaaagaactaatagcatcatatatgtcacccccaataagatcaattatcttgaaaaaaagaagctactgaagccatccagccccgcagctttattccctagaattgagaatatagctggttttacttcatccaaggaaaatgcagaaagtaaggatttagcttgtatacttgtgattatatgaccttgatttatgacagaaagcaaaaatgactttccattagttatcttgctaccaagcaaggtcatataataatcaaggaatgcatttgatacctgttgaggttcatccactcttattcccatagtattagtaatggagagttttctattttgtgctcttcggaccctaatgaaattatggaaaaaagctgattttgaatctccatcttttagccaactcaaattagctttttgttggagaaaagagagatactccttctaaatttttgcataatcctctctaacttctttttcctggtgctaaagtacaccatttaatgggtcaagttgcatttcatactggtacgaatccaaggctttcttggctttaataacagcagtagcgagatttgcaaaagcctgctggtttagttctttgaaaactggcttaaatttcttcatcttagtcactatttggaacatatttgcacctagtacatgctgttttcagattttagcaacaagattagaatatttaggatgagaagaccatatccgaaagtacttgaatggcttttttccacctgggatagagtcataaactgttagaatcgctggtgaatggccgaacaatccttcattgagaaaaacaacttcaatagctgaatgaagatcaagccttttttagtttgcaaggactctatctattttggaatagattctatcatctcccatttgcttgttactccatgtaaagaaattcctcataaactttacatcttcaagttgtcacgtttctacacaatccttgaactcactcgagttattgaatctagcatgcctgccaatcctttcatctttattaagaatctcattaaaataaccaagtactatccatggttccaaaccgaaaagatccataaggtctctccacaaaatcctccttccaacatcatcattgaaacgatagacaaatgaaataaagaaacttgtttttctatctatactttctattggaaattattttactagg

SEQ ID NO: 306670 - DNA, 1453 bp, Cannabis indica
tcagaaatctgagatccaaaatgaagtgttatgtcactaatcacaccatatgggaataataataattcttttggacttgaaattattatgtcattgtttaactcccttgcttttagatatgaatcttggtaccataactgttgatcctcagccatggatagtatggtttcaacactttcagaatctgtgaattgaaccttagcatgtcctcttgatttgatcttgtattcaccaacttcaacagtatatacagttccttctcctgtgtattgctcaagaaatgtcttcacttcttcaccattttcaattgaagaaaatccatacaactgaattgtctttcccattctctaaaaaaaaggtcaaattacaataattagttacttgggaatcaagaaatatcaactctgtttttatcattgaacggaaatacttaaatttaacagtctcaataattcactgcataaataaataagacaaagaaagaaacagaaacccattgtttcaaaatatgaaatttaatgagaatttacagtaattgagataattaagcatgtttaattaaatttagagtaactatattgattgatcagaatttttccatatagtttaataaaatacactaatatttactccatttgattgtgcacaaaatgaaaacatgtttaaatttgaacaattcatcaatacataaaaagtaaataacattggagtgtctaaaccaaaactgaattaagattaagaggaatgaaatgtaataatttgaaagaagaagaatctaacctgaaacaaaaagtgattgttgattatgtatttgtgttatggttatgaagttatgagtgtgtgaagaaagaagataaaatcgtgagtatttatagtgatgagtgagtgagtagaaacagagtaaagcatatatagtttctttatcgtgggtcaatttcaggtcttcctattggtggaccccaattcatggaattttatttgcttacgtggcatcatatgattggatgtgtcatgtggctttgtcttgcatccccttgtgtagcaagggaaggggatgttttctccactttctcaagtttccaatagtgaatataaaaaaataattattttctttgttcaatttaatatctaaatttatatgaaatatataataaagattgtagaaaagagatgatatgtgcacaccataaatgacataccttatgtgataaatttctttaatatatgggattcttcttaaatataaataattacttgaatttacttattatataaacagtggcggacccagaatttaattgaagggtaggcgtaaattttttttatatataaaaatattccaaaaaaaacaattaaatataaagaaaaacataattcaatatttcaattctcaactaaaaagatattaaatatcaagtactaaaaatcttctaatgaaaaaaaaaaaaaaaaa

SEQ ID NO: 306671 - DNA, 1341 bp, Cannabis indica
agagagagagagataaaattgttgggagagaagttaatcttgtaactctcagttggcttttggaatattcttgtaaccttgtaaacaatgatcaatggaagaaaagtaaatgctcttccaaccgagatattaagcattgcacttagatcgactggttaaaatcctggtgttctcttctcctattctctgtacttaattcattgttttgttttttgattcttggatagtttggttattgaaagtgtgtttgtttgtttagaaatgttcttcgcatcataagccttgattaattctcaataaactggtatcagagagggttttagaagtcatggctgccgcaaaatatgatgttgaaaagttcactggttcaaatgactttgggctatggagaatgaagatgaaggccctactggttcaccaaggcttgtatgaggctttgcttggggaaagggctcttcctaagatattgtccgacaaagacaacaaagagattcttgcaaaggctcatagtacaataaccttgaaccttcgagataagaatctgaggaagatcatcgaagaaaccacagctattgggattcggttgaagcttgaaggatatatatgacaaaatctttcgtgaatagattgtatttgaagcagaccctatattcattcaagatgatagaagacaaatctattagagaataaattgatgagtttaacaaattgatcctcaatcttgagaaaattgggattaccattaaagatgaagatcgagcattgttgttactcagttacttgctaaaatattttggacatttcaaggatataatagtatatgggagggaatccattactcttgatcatgttcaattagccttgaatttaagaaaattgaattaaaggagtgagttaaagaactctggaaatagtgatggattgtatataagaggcagaagtaagaagagaggaagaaataaaagaacaaagggaaaattaagatcgaaatcataatctggtgaccagaacaacatcagatgatatcactgcaagaaagaaggacatgtaagaaggctttgtccgaaaaaggcagaagtcagttgatacaagatctaaaggagatgcagttgtgatgagtgatggttatgactcagctcgtgctttacctgttacctttgagaattcatattctgaatgtatctaggattctaggtgttcatttcatataacaccaaacaaatcatggttcaaggaattcagaccaggggactttggtattgcgtatctcggtgataataagtcttgtaagatggtatgaatctgaactgtgaggctgaaacttcatgatggcatggaaag

SEQ ID NO: 306672 - DNA, 1027 bp, Cannabis indica
gacaaaagtccttaaatttaacaatctcaatagtttaagggaaatttttaacggccaaaaaagttcagaggacattatttgatatatgtcaaagtttgagggaaaaaattgctaattagccttttctttaaagctcttttgcgggcctatccactaaacattccaaaagtcttatctctattactattatcaccctattaattctattttatttattttcacatattcttaaagagaacaaaagaaaaaaaacacaattaaatttgttattaattagaccctttgtaaaatctagttgccattatgaagttgaactggttagcactataatgcaattttacaattctctcatttggggccattttttattataataaaatttgaaaaattttctcattaattttcacataaaaattattaattgtccccttagtgcggatcttaagtcctttaggtcttaataaacacaaaacgacaatgcgcattgatgaagactaggccttgtgacatcaattttcacaaaataagcacttttcacaaaaaatattatgtgggttttgcttatattaatggaatttgtatatattatatcatatatatatatttatatgagtgtacatggctactttcccactaagtcttatttattatatatgagttggttatattataggtaacgtgtgtgagggtgcaaattaatttattcaaactaatttagattagtgcttttttgtttttaattatatggatagacttggtttaaaagtgatgatatacccaacacaccattcattttatgtttctatcaaaattggtaaaagagtgtatgaaaaatttcaaatattcttacccactttatgtatatcttataaaaggcttttcacacaaaatataagacctagcttacctcttattatttattaggactctaataacttacaaattgacaacattattgtgttatgttaaccacttattgagtatttttttttttgtaaggaaaatggtaactttattaataagaaga

SEQ ID NO: 306673 - DNA, 502 bp, Cannabis indica
caaatacacacccttaaaatacatatgcataccgccaacaaccacactgacaattgaatatttactcaaaacatataaatactcctaaatcttaatcaaggtttcctcagttatattatatatatgttagaaaataatattaaagacaattacacagcaaagtctgtggtattggtacgagcacatacacgccaacctataaaaaaaacaataaataaataaaaataaagataacagaaaatgaaaataaaaaataaaataaaagaagataacacagtacagacctgtttcagtggatcacaacagaagaggttcttccacgaaatggagacccatcatcatccatgacatgcccatccatccaagatgccctgccctgccctgccctaacctgccctgacctgcccggcaaccattacgggtaggtagacacagtattatataatgggaataattttacaaatacataaaaacaataaaaaaattacaaaaatatagttat

SEQ ID NO: 306674 - DNA, 1115 bp, Cannabis indica
accaacggggtcttaatatattaaatttcatataatttcacatatattgaactatataataatataattcctcaattattcataattatttaattagggctttgctaattcttttctttatctcgggtattacataccaaaacagataaattagactaaaatacaatgttgaaaattttattataatgctctaaggcgacatgtcaccgggaacatatgacagagaataatttatgcattttccatgccccatgcattgtgttccaggcgataggcgacatgtcgcttggacatacattctgtgtttaaatgtcttttttaacttctccaattgatttcaaattttttgggtaaccttatacactctataaggtcatttcaacctaggaacacaattattaattatgttctatgctatgtcaaagttcacactcttttaatgtggaactatcaaagatataaaccaccataattgtgcttacccttctattatatttaaccaatacacaataatttcccacttgattaaatataatcccctcttttctaacttaacaatattggttcataaagtaaaattccatcaaactactatgatgctaagaaaaaattgaagaaattagggttggggtatgagtcaattcatgtttgcgagcataattgctgtttatgttacactggacatgcaaataaagattcatgtccaatttgtggcagtagtagatggataaattcagaaaattcaagagcaaaaaaggtgcctcataaatgatgcgttactttctgttaatttcgcgattgaagagactatatagttcaaggcatacggtaaaatacatggtatgacaccacactggtaaatcaaaagatgatgcgtcgatgcaacacctggtggatggtgcaacgtggaaggactttaatgcaaaatatcctaattttgctagtggacctcgaaatgtttgtctaggtttagttgtcgatggctttaatccatttagtaacatcagccaagcgtacagtatgtggcctcttgatcgcgcaactcgtgaacagacggagtggtatatattgaacaattcacctgaaattcaagcttacttagagtaagtttctct

SEQ ID NO: 306675 - DNA, 2029 bp, Cannabis indica
ttaatttcaagacaaaaactcaatcttaattccagaaacagtggcaattccgaccttgggaaccaaagtcacgaccacagtctcatcatcttcagcctccaaatcctcaagcaaatcagttaagcccaacctcagagaagtcttagccttcttcacacccacatgtttgtgtggcacgttaacgaagcttccagcgaactcagatatctcaggtccactcggcgacttatcatcctcgtcgttcacgtaaacatccaacttcaacactaaattctggtcatactcaataccttcaatcaccaacacctcctcttcctcttccttctccttcttgctcctcttactcttcttaggtcttctcacaactgtactcatcaccttatctaccgtgatcggaaaagtaaccgtctccgccgcaagagccgctccgaaagctctaccacttgctctacggctcgccactttggttgacttcgctcgacgtggggttggctttgtgttaagccagggaatgtcaacatcttggtacacgtacccgagctttcttgtgtcgagacagtctcggaccttgacccgaaccagttgggcattctcgtcgtagaataaaaacgcggagttgagccaatccgggtcggtgaaatctcttctttttcctccaagagttttccacacactccacaatcggtcaatatttgagtggtgggaaaagaaaatgggatcacgagcagccgagtagaaatttcccatattctcgaagttgggctgggtgctgtcaccggtccacaagtggaccggcccatgaggaatggactccagagaacccggtccaggttcggcctgatctccggccctataaggctcacccagaaacaactgagcatttttaccgtttgataccatttctctgtacataacagtaagattgatctttaactgctcttcgttactggtggtgggaataccagcatctgcagggctgtagtcaaggtcaaccattgtcggtggctggtgaaaacggtctcggagcgggtcataaaggggcgagttaactttcgcgtaaagcgccggcaactgcatcccggggagggagtcccagttccagaaaggcaaagcgaaagtggggtcatctataagtttggctagaattctctcgtgaaagtacaagtaataacggtgaaagggaaagaaaagccatgagttgtgaacttgtagctccaagtttgggaaaccaacttggtcgtatgagttgtcacaataggcgcagtgaacatcggcttgttgtgagaagctacgaggatcgctatccgggagagctttcatgagctgtacggctttgttgtacttggcaatataagcttcgtccactgcatgagctgctggcctcgtgcgcaatctgttcaccgaaggtagtttgaagtcaatgatctttgtagatactggtggacagcaatcggttggtgtcaccccttctgggaagtcggccggcccacatttcgataagtcgggtggcgcaattggatcagcaatggctgagggattggagctcagccctgtcatggtggttccatatagccctcctaggcctatgagcacgtttctcctatcaaactttggatgctctttgttattatgactttggtcatggtcttgatcttttgtggcattgcgcacaaagctttttctacggtaattgggaattaagtggttattatgtgatttgttacgagagacgactgagctgggtgagaagaatgaagtagtgttgattgaaactggtggattaaaagtaagagaagccatgggtatgaagtactatttggctatttggcttgtggaagatatatatgaaggaaaagggttaaccattgtgcttttataatgaaaccaggacctattctcgacttttgtttctactgcataatgcaaaaccaaaatagaattttctttctttctaaagaaatttccaattaatgtacggcatttaagaaaattttcaaaaacaataataaaataatagagcattattacc

SEQ ID NO: 306676 - DNA, 1828 bp, Cannabis indica
ctctctctctctcaaaataaaattctagatctcaaataattcttacacgttcatccttgtccctatccatagcgacgctgaggtccctcactccatcatccatgtcttcagcgtcgcctaagttcgaaacccaaacctcagatctctctcttcctcgctccccgtccccaactctaacgaggtccgaaaccccaaccctactcgctccatcatttgtgtccctcacttgaaagctgaatgtgttgcttctgagggtaagtttttgaggaatttgagtatatattgtatttgtaccacgtataattctcttgtgtcaagtttttatattttgcactattaattttgttttgttattgaaaatctgtattttgcagcaacaagtatcgattcagttactgtagatcgtaacagttgtcattttaattaatatattgtcatttgtaaaaacacgattttttttgaataaaaataaacttcattaactcaagagcagacgctcaaaagtacaactttaagttccgaagggatatcatccttcgtgaacatacgatcagcaaataatcgagactgatgtgcaaccacatgtgtagctcgattagcagaacgtttaacaaaatcttaacgaaacattattcatagagtctaacaaagacttacaatcttgaacaattaaaccaaatgccaaatacatcaccaccgaactattaatagcttgcagagagactaagctatcactctccacacacacttgatgaaacggcttgtccttcaaccagctcaaagcctcctgtgtccccattgcttcggcatcagcaagatcttgtttcctcggccgagacaaccccactaccatcaatagctttgccttacaatccctcaccacgaacccgatcccaaaccggctgtagctgtcaaatattgcagacattaagcttgatcccattagtcacaggtttagtccaaagctcatcccctttattgaaaaattcaggattcaacgaagggtaattctcactcgattgagcttttctccattgatcaagtgatcttaaagcaaactgaacaacatcatccacattccgattcttttgatcccaaaccaactcattcctagctttccatattgcccaacacaaggtccccgcctaagcaaccttaaccacatagcaacacacatagtaaacaacagatcaatctaaattgtaactaaaattcacatagcaacctacataaaaattactgaaaccaccgaaactgtaaatttaaaaaataaaattcccctataatttgttatttgttttattattttgtttttgaaaaaaatgagtagatatattaaaactaaaaaacgttagacctcatggtcattatataataatttatctggtatagaggacggatcgactataccagttatatactggcaaaaacccacttaactatattatgggctgcaaattatacaatctagaaatgaacgaaaaactacaactaatcaaaaggtttaaaagatttttacattgaaccacattaatttagttaggctcctcctatttatagccaaaactaatggaactgccgggcttgaatttaagataaaagtctataaatgcagtaactaacaagaatgtatattataactctccttttctgttttttttgacagaattataacttatatctttagctaccattacctactactacacactactcactagtagtagtgcattatgcatttatatttacattacgtatacaacattttttaagctaagaaattaattggacttacattaaataaaaatacttttacaaaaaaaaaaaa

SEQ ID NO: 306677 - DNA, 1156 bp, Cannabis indica
aaagtaattgtaaataacccaacacaattatcagtaatagcaacaatcactcatttctattctaaagattttggggttaatgtcacaagaagagaggacaagagcataaagagtattatttggagaagataaaactccaatgggaggaagatttgaaagtacataaatttccttttcggcatcagttagggtcatagtagaattcatgtttgctaatagatgatccattgaaaagatgagagggtagaagtcaagatagggggtaggaggagtaactgtagaaaggacatagaagatggaaggaggagcagttgagaaagaaacgcaaagaaggtgaaaatttaggaagttaaaagacgattgaagactgttaaaatgaaaagaaaatacaactgccacaaagctttttaagggcacacatgctcaatttttttttgtaagatcactgaatttaaatgaaacacaataaaaatttaatacttggtatttcattttgggttcttccttcaccaaaaaaaatatatcatgagtgtttttcataattttttttactgggaactcatatcacaaatctatttcatctttgcaaacttcaccacattaaagttttgcgacaacattagttctttaatttttcttataacctaacattaaagttttttagatgaactctccacccggaaaaataaaatttttcttctcacaatcagctctccattgaagtattgtctttttgcaaaagtgagaatttaacgaatagagtaataaagattggaaactaattagcaccttagaaaaaaatttatcactgatcttcccacccttggcaactggaggaggtggatctaacgacgcagtccaaaaggtaatcgtagggagaagcaatgcggccggtggatgagaaaatcgtgggagctccgataaaaaatttgaacaataatttgcatgtagatgatatatttgagatttgagactaagccatgtaaggatggcaattatactcgcgggttcgagtactcgcggatacccgcccctaatggggtcggtacgggagttgagtttagggggcgagggtgggagcagagacgaatatggcttagctgttagactataatatagtatataaaatacagcatataaataaacgatatgtaat

SEQ ID NO: 306678 - DNA, 1804 bp, Cannabis indica
aaaagctaattcataatttcttccattcataaatacaaatataattgctcactctcattctttactgtaatggattaattgtaatttttaattgtgaaaactgaaaagtatctttttggttatattaaaaagagaaaaaaataaatatttcattaatactgaggagatatttatttcttagttttctgagttattaatgcacgaattctttctttaccataacatgaaaaaggataaatttggtaattttgattagaaaaataaaataaaatataagttaattacaatcttttttttccaaatatacaaaatcatgtttttaaatttttgagggccttaaaaatttctctcaactagttgtttgatttatagaattttattcaattttaataaaaaaaaaaatataacataattttatacatgtcaaaattcgagggacataattttgagacatcaaaatttaaggagtattatttaatattgggtaatttacggtataaatatctaagtttaactctcggttgtaaataaatagttaagtttaattttttatggtaataatatttaagttatattttttggaactctataagtacctaaaaattaaattaaggtatttatttaaaaccgagaattaaacctaaatatttatgacgtaaattatcctaaataatcacatcataagtaaaattaaatgaaaatttgataaatttttttacattaatattctcaatagttttttttttttttaatttaagttgattataattttaatatatattagaattttaggggaccaaaatttttaaattcaccttaaatatacaaccaagtatatttttactaaattagttaaaaaaagtaattgagatacgattttggtattttgttcatttctttcttctttttctctttctatatagatttattcattttctctctctagaatcagagtctaaagccaccccaccaaagtcactctctcttcaaaaacgtttcttcttccaaaccgctttcccattttctcagctctctctctcttctttctctctccatgaagaacttgcagtactattcacactctcctcgctctctactccacaaacctatttagcccacaaccttaaaaacccgtcattttcattccctcttctacttctgactactttctctggccggagaacagcacgcggcggccggagaattacttactagggcaaccattatctttcttttttcccttttttgtcttttttcattatggagaagaaacagggtttctttgctgctctgaaagatgaggtggttcggggtctttctccgtcgaggtctcgaggaaacagtccgtcgaggtcttcttctcccaccatatctggtttgctaaggaggaagaagcacagtagtagcagtagcaacaacaacaaccacaacagcaacctttatggacaacccgatgcattgatcgcgagatcgggtagtctgaggccaatgggtgaggcgcttacgccgttgatggagggtcctgatccagacggcggagaagtaggggactcaaagcgtgttgggtctggtttagggcagtggatgaagggacaactctcgagggctccttcgatcacttcaatggcgtataagaggtctgatctgagactattattgggagtgatgggagctcctcttgctcctgttcatgttagctccaatgatcctttgccacatcttagcatcaaggacactcccattgtgagcttcttcttctctctgtcttcttcaaatggcttttgtttttgctaagtatgactta

SEQ ID NO: 306679 - DNA, 1116 bp, Cannabis indica
gagcatgcacagagaagtggtggtggcagcttcagttccaagtatgggacttgggagacctgcttgagtgcaacttgatcatttgcttatctaaaggaaaaggtcgttgatgccaagggtaaatggctctaatagttgttatgtatacttgtctaatttttttcttttgtatattctcacttggtaagctttgtgtaagctttgtacatgtttgccattagaattcttttataagacctcatgaaattttgtgtaagttgacttttgtacatttccaatgctacaacttatgataggagggaaagcgaccattaggaatgttataacgttgagtactaaaaaaatttgttatttgttttttattggaaaattaggaaactgatcgtcctttgcctgcagtgtaaaattatatatataaaaattatattttttgtttaatgatagttgagtaataaagttgtatcaaattttaattttgtatttgttgggaaacgtaactgttcaagacaaaactcaacaaagaaatcaaatcataaacaagtaaacaagttcagaaatataaatgtgcaatcaaaaaacagaaaataaaagaagaacaaacacaaacaaaagtggccagaaacaatcacaagggcttgagatttatattgagttggatgaattggagagaacataatacacaatgtacacagtttcttgtacaagacacttgagaagtaaagcttctttacaacatgaattcacttgtaacaatggtgatcagacacacaccatgtcgttaacatccctcctcttctctctaaacaactctctttgtttctctcactaatttgtaggattgtattctaaatgactcttaggcttgactataaatagcctttggttcagttctgttagtgtgtattgttgcttgtgttagtttcagtttgttagtttcagttataggttagttggtagttagttagctgttattttacagctgtcatttatcaactgatttgtaaccgattctgttattcatgttcagagtgtaagcttgtatataagtcatgttcaatgactgtgtaaatcaatgaaggatttcattctctttgttcatctttctcatcatctttc

SEQ ID NO: 306680 - DNA, 849 bp, Cannabis indica
acagcaattcctgactcaacaatagatttcgccgcattgattcttgatggtgaagcaccttccaattttatggcgtccattcctccttccttcaatatcctcaccgccgtatcaacggcctaatcaaaacaacatacaaaaatccttaacagccaaacagccagaagtgaaaaaaaaggaaaattggtacctgactggagctagactcgtaagacccaaaaggaaggtctccaaccaaaagcgggcgcttagctccgcgagcgacagctcgacagtgaacaagcatttcgtcgagggaaatagggagagtggtgtcgtatccatggacgaccatggcggctgagtctcctacgagggagatgtcaattccggccatgtccaagtggacagcggaagggtagtcgtatgccgtgacgacagtaatgggctcaccctttttgtgcttctgccgtagatgagtgagggttactctgtcgttggaggtttgggcagcggggccgccatagacggtgttctcgggaacattactcataaaacgtttgaacagagaggtggccctgtggctacgagttaggtgcgaagctctagcggtcaggaaagccatagtgtgagagagagacgttgtgttcgttctaagagctgtacatttttgttttatatgcatatatactagtaaaaattacactattacatgactgaaatcagtatagataattgtagttaaaaaattgtagttatgtgatacataaacaatcaaaattaaaatattcagtaaaacatcaggaaaacaaaaataagtcaaagcttggattagtgtagtggtggctttttcatttttacacctcaaaa

SEQ ID NO: 306681 - DNA, 2577 bp, Cannabis indica
caaactgtacatgttgtaatattgtgcaaaatagtgaaaaacccaccaaagtgtgttgatttcaaggtggttgaaagagattgtgcacaggaattgtgggagtcattttggtggttggtgcagggctctctttcttttttgtgtttaatggaagagggaatattttcttaaccagcagccacagacagccatgtaaaaatttagtaatattctattaatttccttagaaaagctgagtcaaactaatatgtttatttgtttattttattcattcattgtggttattgagatttgagagtgttcttttccaatttttttggagcatatcaaattcaattcaactgtgtcaccaatggacacattagtgaaattatatgagtttgaactcaagacaagacaagatggccaccttagaagaacatgttagaaaacaaagaagctgtgttaatttgttagttttaagtaatgatatgtgtatcaaaatatatactaaagtattggttaaaaaatttgtcacattattactctgataaaattaaaatatattaatagcgcttagcattactacgaagtattatattattattaatgtaattaagtattatattttataaattgtagtgtaataactattatagaatattgctaatgtttagagaatggacaacttgttttatattttggattttttagttcttgtagtttattaagttgttttaatattggtttattaattgaatgatgtattcattgcttataaaaaatgctaagttgacattttcttttgtttaaaaacataagtaaattttctttttaataaattatacaattttattgataagaattagctaaaataataacctgaaattcaattgggatatctcttttattggagacatgaccaagattatatttataaaaacgagtcgtttaattcccagattgtttaacaaaaaaattcaaaaaatcagatgaaaaagattacaacatcacagttaactttaagaatacctatattcagtttcatttaccacttagaagatacaacaatagaaattattgtagcaggtttcttcaatctcgtaacttgagcacttaactattgtgcaaggtacgtaactgcacagtctgcactactaacaactcctttagtcatagagaacttgttattggcgagccatcgaagaacaaagaagaaccaacaacaaaataaaatcaaagtcacatagacaagacacataaaacaatatcatagagataaatattaaaccctaaaaactatgtcacaaagacaagactaatcacggtagtaaaaattgaatcgcaatagcaaaatacaacctcgaccaagttgcacatatgcccaaaaaagacaaataagtcttatcagagagaaaagacaacttcctataattataaatttaggaaggagaatctcttatttttttttttttttaatttagttgatgttaaaacataaataaattgatcataactattgtataaataagttatgattagaaaatacatgactatctaaaaatagttattaatataattattgtatattaatatatgtgaaaggttaacataaaaggaaatataaaaaagttcttcaacatagaaaatacaatctatggagtagtaagaacattcataaccactcttaccttcatataattcatatgtattattgaaaaacacaaatattgtataataatttattcttatttcttcttaggttaggctttaatctttatcatgaataaaacgatactcagcaaactcagcaagcttaagtgtatcaggtacatgaggagagacaagagggtgttgctcgaacctctcagcccaatgggctaacaatggtgcagttattgggtcaaataactgcagcccatgtcgaagttgtgaaaccttaatccagcccaataagcttccaaatacaatgtcaataaacccaatttcatttccaccaaagaaagcctttcctttttctttgctacgttcattgaaagttctttctagtagcattatccctctcttgaattgctcaattgtggcttcttttccatccttacctggttttattgcaagacctccaatgattgaactcatctgcatgaactcatttttaattagaaattatttcataaatatttaaaaatggtaaaaactttacgtttagttatttttttaaaaaatatattattttcatattgctgcaatattatactatgttttcatggcaagaaaacaaatttccggaaaaaagaatgaaagacaacaattcataaaaatatttggttagttgtgaaaaaattaattaacaaatcatatatacatgacatcaattcaatactattattttttacaatttatttgttacaaaatatttgacaattaatttgaaaattaccacttttattaatcaattaatcaaatttaccattaattttatatttaattgaaatatacctatttttatatgtattgtacccaaaatatcctgacgtaagagagtcacatggagagtatcttgaagtgatagggacaaaattaatacaatatttaaaa

SEQ ID NO: 306682 - DNA, 3021 bp, Cannabis indica
tttggatgatgtggagatctataaatcttcaaagaatgctatcattggagatgctattatcagcgttggaggtggcctactgaaaaatgtaatctaatagcgattatcgtggcctaatgattgtcaaatatctttcattagaaattagaatgggcgtgacaaatacgacaaatttctttttaaaaaagtgaccaattgacaatcatagtgaacttttcagcaaaagctactacaacaatagctagtggctgtctttgggttcgtgttgagaacacgtggacaacaatccttagcagaacataccacatcaaacacatttcttccttagttttcgagtaattcaaccctgaaaaatattgtcgtgtctctttctttgccattcccactcctttaagcctagcctactctatcttcaattcaatcaactctctttcacttctcttattatctatctactttttgtgagctcaatcaaaaatggctatggttgtgactgcttctactactgctcttcttcatcagcattctctccatcttcccaagctctcacttttctccagaaaccatgccaacccctcctccgccacctgtcttaaattggactctcatgtaattgaaacgacaaggagaagtcctcttctttcccctctattagtcaaaaacgacacactttgtgaggttgtacttgattctaataaggataatgaagaagaaatggaagagctcaatgacacccacgagacccttttgtattcttttagtcctttgcctctcttgtttgtggctgctttacctggaggtattctttctttttagtctctcaattcatgtatgattttttaatgtataaatatttagtatttacatttataatgtgaatttggataacagctggggctataaggtctgtatttggaccttttgttgagctagtaaagtcatggaatcttccagactggcttgttcactggggtcatcctggaaatatggtaatttgcaatgctctttttcaccattaatatcatggtttcactgtaatgtaatgtaattaggaaccatttgcttcattaaacaggcagttgtgctgtttgccatgggtggctatggaacctatttgggcttcagaatacgtttctctgatgatttggtaagagaaataaagaacactaatgtaatctactttaacatcgaactatatgggtaacaatggccttgtacttattaataaatgatttgttatgataatttaatttttaggaagaaaaagcaaaggccaaagatttgcatccaaagcttttggctgggatgtttttcttctttgctcttggagcaactggtggagtaacatctcttctcacttcagacaaacccatcttggagaggtaattgctgttatagcataacacccccacttagccaaaatcacatttttgtgtggttgaatttagatttaacttgtacacatatcatatatctagtgaaagttattagttacatagaaagagtgtcctaatttttattcagttcagaatcaccaagtaaaagacctagaatcatcatttacaaaagggtaaatagatgtgttttgtaaaagttaatgaatggaccatctgttaagtaaaatgacgatttggattctgtattttttaaaatggtataaaatagtactttgaactgattttttgttgaaataaaatttactaataattcgatatagagttacaaaatcagatacattttcaacatctgttcgtattaaaattgtcttaaagttaattatattaaaaaaaaaaattatccaaaactaaacacaaaacactattttgtacgattttaagaaatagaagatcccatttatcaaaggtttaattaataacttttacaaaataatattaaccatttatagaacaaccaagagaatgatcagattaaactataaaactaaatcccttttcattcatatatttataatcctaacacatcatagctcatcttattgtttgcagtccacatgctgttactggtttaattggcctgtctctccttgctattcaaaccatattacctacattatttgaggtactttctactgtgtgatagttttacccttgtcaaatatgagtacgaccaccaatatttttcattttttcttcacacttctttgttttttactctaattttgtgcagggaaatcctggattacgaaatgttcatggaattttagggagtgggatcatgactctgtttcttgttcatgctgcccttggacttcaacttggcctaagttactaaccatagttttgagctttgttacaatatttttcaatgttctttttttctattagatttaaattgacagcaactacattgaaataaacttgtcaccgcctggttcattaaagccaaaatataaagaagaaaaagagtgtgaaagtataaagagcaacatagcagcacattccctgtatttactatatagcaggctgtcaagtattgagggaaaccccatcaaagtgttcatctaaaggtttctcaatgttcttggatctgcccttttggtccccactcgtatatgagatttaattgtgtgttccaatgtattaatatgttatataatccaaaaaatctcgactgtcggtgggaagtttgacccataaattgcagtaaaaagcaaaacagatcttttttaaaaaaaaacaaaaaaagcaaaaagaaaaaaagaaatgctgtttttgttaagggaaattgattgccctcattaacctcacaaaactagcaaaatttgatcacttatggctaacaaaaaagtcattgaaagctctcttgtactccgtccaatctgtaaattcaattgaatttaatctacagactacaaatgcaattaattaagatataaaggtaaccgatgcaatctaatttatacgtatttttataaaattttaaaaaattatgtatacaattactatttttatgtaaaaaaattaataatttaaaattttaatatatataatataaatatat

SEQ ID NO: 306683 - DNA, 1246 bp, Cannabis indica
tatataaatatatataattagttatcacagacaaaataaaaaaagctacacgcacctgtgcatgaagaattattttaacctatatatactaaagggcgacttaagattaattctagtcattgaacctataattgaatatcaaccgagtgactaatattgtagcctattatatatatacataaaaatatataaatttttaacattacatttttcatgagaatctgctgtattctttgtcacaagataatatgtaggggctttcttgtctttccaaagttggttgaattatggaaatcccaatgattacttcatccaactattctttataccgttagaatagatttcattaattattcccttttagaaaatatctttgctacgtgtaagcttctagcagattgtatcctctaatgtaaatcataatttttgagtataaatatagaagcaattcatcaacctctaatatttgagtcaattttattcatttaatacactatctatttatatatttttgacttggtatcatagtggttttaggttgaagccatgtcgactccttaggaccaaacatcaccaaatcactcaacaagcaatcctaaaaattaggatcaacaaacagctcctagacatactcaatttgcactaatgattgcggtggttcaaacttcttcaactccacacacatctctgattactagccctttcaacaatatgttgagccaaccatttttctctaaagcttgatagaaataacttccccttgtggaagaaaatggtcaccaccattatccaaggtcatatgttggaaggctatttaaacggtctgcaacaagctcgaccacagttcctgccaataaacatttcaattgatggaaccttaggatcagatttcaatgttaatctagaatatgagaactggttagtctacgaccaacttcttatggggtggccgtatggatacatgacagaacgaatcgtagtagaagtcatggggtgtcaatctgctgcagcattttgtaatgcccttaagaactctatggtgcttattcttgagcaaacatggataacatatgaactaagatccaaacaacacgcaaaggaaataaatctatggcagatatgtaatacccagaattaagaaaaggattagcaaaaccctaattagataattatgagttaattgaggaattatattattatatagttcattatatgtgaaattatatgaaatttaacatgttaaaga

SEQ ID NO: 306684 - DNA, 1871 bp, Cannabis indica
ttttttaaaaaaaaattaatatcaatgtttaatataaatacattatctaaaattaaaatattttcattcacatatctaaataatgagataaaaattaactccataaatgaacaactatatatctttaaataaaatggcataattattgatagtttatataaaatattatatgttttgtaaagatattaatttcttttgataattaaagatataaaattattaatttgcattaaaaataaaaatgaaaataaataatattttaattatcatatcccataccaaatgaatttttgaaatggacaatgaaattaataacaaattctaaaagattgagggaagtattcttcttacttgcatgaagagagatcattagacataaatagaattattcgaattttatagatatttaaaattataagtaatatgtttaatcatcaatatttttcaaattatttagtatccacttttttttataccttgacaataaaatttataatagaataaataggtattttgctatttttttttaatcatgtccttaaattattatcaacattaaatatcgccacagactataatcgttaataaaatataagacttcattaaataatttataattgttaatttttgataaactaaattattatcatattttgtccttcaaattttatgaatgtcaaaccgtacctttaatagaaggaagcacaatttgacaataataaatgttcaagggccaaaatatgatagtgattatactttgggggtaaacttatactaattatttaataaaaatctactgaagtttcaaaaaaatctcatatttcactaaggttaaaagttaatgaaaatatttaacattactagtaatttaggggacacaatcttattagtgaaaaaaatctaaggttaattgcctatttattctttataataatattttgaacttactcatcaatcaataacactcttaccgttccttttccaatcaaataatgaatagttgtctcaactttttttcatgtcaacacgaccagataagtaaagatacttattgagaagatcaccatgcctattctcctcagcactccaaccccttgcccatatggcccaaggggtctcatccacacccgtacgatcgtggaagaaatcgatgccattgattcgcgcgtggtacgatggcaatgcttcttctgtgatcatattcccaaccaacacaacaaagtagtcatttggaacttcctttgttctctctctcaactccttcacttgctccgcaaattcctccgatgtcggttctggtaaaaaatcttgtggttgccaactttgctcaactggcttcaacaaaggtaaaacgttttctctcccccattcttccattgacttgaagatttctactttttttgcacttggcgtcatcaacaatgccctacgtttggtgttgacttgtatttatataaaaattgtaatatttttatacaaaaatatatattatgttaaaatatacaatactatataatataatatgatataaaaagacatactaaacacattttgaatgcattttttaacatctctataattgatctattcacttttaatgcttaatgtaaaacaactaaaactacaaataaaataaaataaaataaaataaaaatctctaaaatagattgaaaaatcgaaatggaagaaaaataaattctcatatcttatgcagtgtaacttctatttaagaatactctattcaagaataacatctaatttattataaaaaaaatcaagtctcaatttgggtcagttataaataacaataagggattatttcataaaaacataaaaataacaaaaaaaaaattgcaaaaatacggtttcac

SEQ ID NO: 306685 - DNA, 1547 bp, Cannabis indica
ttattattactttttagttattatattaataataaaatcaaactcaaaatttcatgcaattgcaaacccatttaaagtactaaaaggaatacaaatcaaactcaaaatctgaaaaacaaaatccagtcggacccaagatatagtgagtcacatcaattactgtccacctttcccgtgagccacatcctcaacgacagacacaacacagaaaagcagagaaaaaccagccgagacagcactgagcctcccatccgcatgacccctcaacagtgagatcatccctgccaaacaaaataaacatagtttttgtgtgtgtgagagacagagcaataattaagagacagatcagagatcagagatcagagacgaacaggagaaagagcttcccatgcatggccggtctctaccccttgccacgtactgaatttctagagaacacttctagctcactaatatactaatattgaacacaaaaagaaaaaagaacacactcgcatatacgtttataattgatttgtataatatatatattaatctaggtcattcttaactaaggtaggaatacaactagagctcctagcaagaactccagcacttttcctttgagaagaattaatccctttataatccctaggactgagagacctagccctaccacttattgaactcttcttcaaaatttgcttgacagcttcggcttggtagagaagaggatgagtcctgccaagcttgttaaacctggaacaagcgctcatgtgctctttcaacgcctcttctcttgtcactcctttcttctccatctcttcgttcaccgcctccgcgcaaatcccacacactagcttccccgagtacttgcggcgtaggcggcttatgtagtcagccgtgcactcttcggccatgccgcagcattcgcatttggccagctcctcatcctccgttatggccgggaggtccttgttatttttgtgatgatcatcatcgtctttgtcggtaccttcaatgttagaggctagttctttggtcatgagctcgagtgagatgtcagatattgttctttgaagactttccattgagagttttgcgggcgcctcacaactacttgtcaagttattttcttgtttattattctctctcgaggatgagccaaccattattaggttttctctgttgggcgccataataatttttatgatagtacatagatctctttctctcttgcctgattggaaaattattattgaatgagtagtttaaagagatgagaatatatactaagcagtaatccatatctgatatctttatatattaaaagtgtctatctaacgacatttcttggtttaacagaatatactttaaaaataaaagaatattctgttaaatttaacgatgttagtaggtttgatcctcccgttaactttcaaaaatatataaataattaaacccaaaaaattaaacaatcttttttaaacgtttaaactcaataattaaaccaaaaaataatataatattgttacacgattagctaaggcttacacgtattttttttt

SEQ ID NO: 306686 - DNA, 3187 bp, Cannabis indica
tttagggcataaaacctaacacgcccatcatggctcctgtggaggagatttgacattctcctccacaggggtataagagagcgcgagccaaagtcttcaatcacaaaagtcccaaccagatggttttttaatatgccataagaacaactagcagaatccgagatgtcctcagagggttcttcagaagccacttttgtctccaggtcttgatcctttgatacccacggaaaagtgcatattacaccgagatgcctacgaagcatcttatgaggtctagagacacaagaagtagaggcttcatataactttgttttcttgaaaggagtagttctaacatttattttagaagtaggcttaacaccaatatcactccccaaggcccaaatctcatacaagtcaaggctcccaaactattttaattcttgtaatgtagtttcttgagcttgaaaaaaaaattctaaagctctcctcattttgactaactttaacttcctgcccacaaacagaagagtccatgagcgacaaactcaaaaaatgttgattcggcccattattaataaaattgttggcagccctaaaccattaagtaacggaccctctacctcacaaccaaggccgacatcaccattaaaagcccctgaagtcatgtgcttcacttgattaacttccaaaagcccaatatcctccaacctaacacccttcggcccgatagctaatggagttggtccatgcacaacaggcccctttcctgaatttaaatccccatcacatatcaaattcccataatcgctcttcgcgcgactaatataattatttttagtgttataataaaaaaaaaataactatttattaatataaaaaaataaattataattagtaataataataaaatcatattatttaattttcatattatgacttatgatttggaattatttattaaaaagttttaattttttactattaatgtatacatatagaattttaaattattttgttaaaaaaaaattttttttcaaataaataaataagaatggtgtaggaaaaacttgaagtattgtcatcaccgtatctcacccgtaatctcatcgtctcaccgtatctcactcgttgtctttagcatatctcactcgttgtctcaccgtatctcacacattgtcatctcatctattgttgtcactgtaactcacttgtagttgctattattgtcctttcaaaatctcgatctcaattttagatttcattctaaattttaaatattattctttacacacattttaaagatatacaaatgactataatattagtttcttaatcatataccatcagaaagaaaaattcaaacttattatacttgatgtgtttaataattagttttaattacttaatagttttccaatcatacatcatcaaatacaagtatgtcgattttttttttaaatataaactaactctaaccttaattgagccttgtttcttttaacttgagcctagactctattgaactttctaaagaactttagaattaatttttaatattttaaataattttaaaatatcaaaattatgaaaacatcaatttggaattataatttatgataatatactgaaattttaaagaataacttagttttacattatggtatggttaggaattataacttaatttatcaatctattcataattataattttttaaataatgagactaataatttagaaatattatatcatttacaactattaatttaaataagtaaaagtataaattttatttagaattatacttagatatacatgtatttttgtatagtttttttttttggcagttatagctgataactttagtaattttctaaagtaaatttaagaaacatacataaaaactacaatgcaatttctattcatagtttacaaataaagatttgaatgtttcataaaggaagttgataaaatacatattttttatttgagcaatgataaaatacatattaattaaatggtgtaagacaatataagataataaaacatacggaaaaaaaaagaaaatatattaataaaataattattttaattaaatatctaactaaatttaaattcaaatgattcttgaaaataaaaacataaaatccttaataaaattagaatcaatataatgaaaatgtgaaaaatttagagtaactatagtgaattaatggatcatgaaaacaaagagtataatgtagtagaattagattaatctaaactgtaggaaatgttcattactcgaaatgcccttacaccaacaccccaaagtacaaaaaaccaaggtcaaaaaggaccttccctcttgtgcggatcaagagtgattttccccctcaaaatcctgcctttttatggcagtataaagtttcttttttcagcaaaaaccctagcagctcacttcactccttcctctaaccctagcagtcaaagcccactattttcttctcctcttcttgcatgaaacgctaacagccaaaccattctctctcaacttctattcttcttcttcttcaaagaaacaacttcagtcgattcttcttcaccttctacccttcttcctttgatctagacgcagctccttcttcaagctctgtgagagctttcaaaatccgaaccaactgctgctccttcgaacctgcaacacaaacaacagcccgaacagtaacaacaaacatctaaaatgatctttgttggttattgaagaatgaccccaaaaaaacccaacagaagaataagagcaataaaacacaaagattgatttcggagttccttctaaatcagaggtgcgtctccgtcaagcggccctcaaagttgcttgagtcttcactatcaaaatcaatatcgagttacaaggaatttggagattccaagctacaaagtgagctggtaatctctatgtttcttcctctattttcttccttttatttttctggtttgtattacaatatatatctctaactctctctctatttttctctcttgactgaggttatatctccatgaaaaaggtttgttgctatctcctctatttgagccgaaaaccacaccattttaaaagggcaggttgaaccccttatatatattgttgttgttgactgtgatgttgtgttattagctgagaaaaattgttattgttttttcttgagttgctgaaagtttgttg

SEQ ID NO: 306687 - DNA, 3010 bp, Cannabis indica
accctaaacaaaaagaattttaattttcaaagtttcaattcttcatcttcttctacttctttcgatataacctttgcaactcaaataagagttcgtaaccctaatttcgggccctatagattcgaaaacaccaccgccaccttctccaaccgcggggccaccgtgggacatgttatcattcccaaggctaaggttaaaggtataacaaccaaaaagattgatgtgattgtgagtttgagttcgtctcaattgccaaataatgttgatcgtactaaagagttgactgcagggtcgttgactttagttgctagggcaacaatgagtgggaaacttaaagttatgggattggtgaagaggaagagagtgagtaatttgaattgcaatcttgttattgatatcaataaaaagaagatcaaatctttaaaatgtaaaatcccatttagagataggagatataggtcccatgtctaggacattaattttatgatgattttagtggctcaatagtatactgagatatgtataagtgatcaaaactatttgttttttatttatttatttatttttcatgagtgatttggtggttcattattatttattaagcttatgtatttagagtgggtgtgaagctatagctttagctttgttattttttttttttttttttaattttgtaatataatcatttgtattttttatgtatttataattttaaatcttcaatttttcattcattttcttttatttttatgtggatttatttgtataaatataactttgtaatatttatcttcaatcgtcatatttatatttatttgtataaagttatgttactttacattataactagtggtggattaataaattaataaataggtttatgattaaattaaacgacgttatgaaatgttctagctatttattttgcagatacaataatttgtggtgtaaataaatatatgtgaataagaaaacactgaatactatattatatagcatgagagtcttttttttttttatttttttaaagaatgtcgattagctaatttaatttagatttttttttcttcttaattgaataattatagaaaaaatcatgcaatttgtatatttaaataatataatatattatatagccgcccttgatgatgtggtgttagtcttaatatagtacacaatttattttcttttatatctgtttttagtattttttttttgttgctattttattcaaattatttgtagtaaataggtttatttcaatattaatatttattatatgttaaatttatagtaccagagatacctgaagacatatcgttagaaaagcttctttaaatgataatgtggcacgaaatagatagggccacttatttcccctagcaaagttttgcattctcacatgatacaaagatagcggagattggacacaagtttacatatttggtctcgaacaagatatgtcgggacaaaggctacaaacctagtaaatgaagctccttgccaagaatgctcttgaatttctctacataggactttaccctccaggacagccaagaggttggggtaacgctttgatttctttgacttacgaaaagtggaagcaacacgtttggacagtacattaggcgtgggtcctcacatttgcctaaaatggaaggacactgtagcttgccctcgcgattggacaatagttgtgagtttgtggtcatgaatggtcaaaaccaacaataacaacaacaaaacccaacactttaattagtagccctaggggatgctattgttaaggataagagttagttatggttgttaagtttgttattctctgttagttagttttgctgagctgtaataacaacttcctcttcttgctttgctgttctaactgtgtatataaactcactgttgtactcagttcattctaatggttgaataacagaattcgttccttgagtttctttctctttctctctgttattttaccttgtcatggtatcagagcttttttcgttcttcttcttcttcgtcttcactcagttgcaatgactaccttcttcaccagcaacaatggaggttcgtctcagaccggtggtcttacaactaatctccccagatctactcctgttaccttctctcattccctctccgttcgacttgacgaacacaattatcttccatggaagcatcaagtatttgcagcaatcaaaggaagtcgacttcagcgattcctcgatcctctgtccactcctccaaaattcctctccgaagcagatcggcactccggtactgttagccctgaatacgaagattgggagcagcaagatagtattctcgtttcctggttactatcatcgatgtctgagaaaattctcactcgtatggtcggctgtgatacagcatctcagatctggattacactaaaggagtactacacagctctgaacagagctaatattggacagtaccgcactctgcttcgaaatgccaagatgcaaggctcctgggtgattatcttctcaaaattaaaagattggttgatcttttagcatccattggccatgtgatctctccctctgaacacatcgaagctatcttcaacggcctgaccagcgattacaatgtgtttatcacatctgtaaatacacgaactgatcaatacagtgttgctgaaattgaagccttactcatggcacaagaagttcgcctggaaaaatcagctcaagaaatggatatctccaaaccagaagcaaatcttgcacacactaaaccattcactggtggaagaggtaccttttcttcaccttatctttccaattcttctaacacgggcttcaattatgtctagaggaaatcagatgcaaaacatcaacctgcagtactcggcctactttccccctcctggttttggccaacaaacttctgcatctcgtggaggtcaatctcgtggtactcaccaatctaacagaggctcattttctcaaaacaaaaatcaatactcaccttggggcca

SEQ ID NO: 306688 - DNA, 2001 bp, Cannabis indica
ccgatccgatccaaaaaaaaaaatgttaggtctaaaatattgaataaatccaaattaaaataataaatatatatatatgaaacacatccaacggatagaaccgattcaatccaattaatattcaatggatgttggatcaaatggataactgaaattaattagattagatcgaatagtaaaatctaacatccaatatataattggatcgaatctggataggcctaaaaatattagatattgtccaatgaacactcctacatatatgcataggaacgttgatatttgttgttgttgatttaagattcaccttaaatgtttgaaacaccattcttaaatggtagcttttggacgaaattcacgttgagaagttctgaatttttgtagtgctaaggtctgttgatcacattaaagtacttttttatgtaataaaatatcattcttaaatgatgtcttctgggcagaatatccgattgaaagttttaaagttttaatcaggtctgacgactacttattattttaaataaatataagttacttatgtaactacacattatgaccaataaataattaaaaaagattttatatcattcaaattgtctctttatttatatataatatcttgcaaatacttagtggttttttaaattacggatagctaaacatgtgtacaaaaaagtctacccaggaatttaggtcgaacagatttctatggtatactctagttaataaatttgcaagtgacgaagagtctaaaatttgctcgctcacttggggaccacctacacctggtacaacataggaaaataacacatgaaaatatttaagcaaaaattaagaattaagtatgtgcaaaagaaagattttatcaaatgtatatatcgtaagtctgggattaaagattgcccaatcaactgtatgtttgcatagagaaaataaaaccaagattaaaagccccttggtcagctaaattgtatcaaaaataaggccacatgccaaaatgcgtacaatgataaataaaagagttttttttttcataaatccatgggggtcgacaggttcaaatcctcaactgctagaccgttgtcgtgatgctcctggacggagaagttggggtcgacaacctcaccctcagcattgtcaagatgcggcctccctttcagctttctcccgaacagcttcgactttacagaaggccaattattcagccaaatcatcctcgatcacatatataatatttttttggattatccttacagaactcgtagaagaccatgttgcctatggactcttacttccttttgtccttctaatgagcctctactcagctttaaggtccttagttagctctctcacctgctcggtaagtgagtggtttaaacaaccaaagccctctcgttcgtcctcaagatccttgatctttttagactccttctcggttacgcctccagctcttcgatttttgcttggctgaccaactttttctctaagtcgaccactttttggttctcagcactcaagagcttgttctccttgtttatttgctcttctttcttcttgagctcttcccttgcatcttgagcaaacttatggagttccttggaagaactctcgacttgagaggccgaagatttagcacgagagtaacaatgtctgagcttgagattcacctcaaaaagaagcaaagttaagaatcaccgatcgacgtgtgctgagcagaaataaaacttgtgaaaagcaagaagaatatttgcttctggtaggtatgacgcccaggctggacggaccgttttggcaaagacacgcatcacataactgtgcaaaagagacaagccaaaaagtccccgtacgaccaaaagccccacacagacttgggggtaaatgttatcccaaaaatcatcttggggatgtggaatgatgtgatacatggcaaacatgaaactgttggaaattatttcattggctgtaacggaataatatgactccttccgttcagatctgtaa

SEQ ID NO: 306689 - DNA, 1149 bp, Cannabis indica
tttaatttttgttaataatttgctttaaattttgcaaaacttatatctttgttccactaaatattctataagtaaataatatatattattttgttatgacttatatatacacaattatattttactaaccaaatataatagtagtacaaatattactttaatataataaatcatttgcataatcatacctttagttatagaaatctaaataaaaataaagaattaaacttcaaataaaactaatatttacgtgcctcggcacgtaacttcaaactagtatatttaaatggcacttataactgacacataaaaccaacaccaccaaaagtatcttttgtaatagtgtaagtaactaagtaattctaagctagcttcgggcccttttccgagttaaaagaaaaagtaataaatcaatccagaatgaaaaacaataatgtattgtaaacgaaagaataaattacttagatggaatagtatagagcgggatttccattgaagctataagagtcagcatattgcttagttatggggaacttaatcccttcgtggtcctttcattgtctttcaaggttatgagactcgagtgttgaggatcgggttcccaaccttctattatgtttttagaatgcccattatagtaggatggtaatttccatatatagtaagactgtttatggttttaaaaatacaatagtggctaagtgaaagagtaacaagatatataaatgactaaaggtgttagtttcaagaagatacacatgtgacataatctacaggtaatcaccacttaaagttaggcctaagcattcccgctctcggaaggccagtccaaacctagaacaaacccaagcccgacgaagtccctaaacttctcctcgggaacataatgctcttccaaggcccagaagcctccctagccttccggtacatggaaagaacgaagacattcaaatgaagataagggcgcacccacaagcgaaccacgcaaagaactcttggacatctaccacaggttgacaaccagatgtcttttgtttcaattaatttaactaaatattagatatctttaataaattctaaactaaaatttgaatttaattgttactgtattattattattataattaaaattattatatattttaataa

SEQ ID NO: 306690 - DNA, 1530 bp, Cannabis indica
tttgtgggggcttatttatcataaaaatatatttatagctacattataatcactcttactaaatttatctaatttagtgggggcttttctactattttggcctataattattaaattaaaaaaatttacatttaattttttaaaaggcaatatttttgttcgtgggggctatagcccccacatcactcttaatgggtccgtccctgccaataatatatattaattttataatacacattctaaaaagatgatttaagtttatgttttctctgtttcggtatttaaaaaaataatttaatctaattcttttaataatatacattgtaattatttaaaatcacttattattttataaatgtccaataaaatttgtatagtttttttaaataaaaaaattattgttaacttagattttcgttaacaataaatgaagctttgtaaaaaaaattaagtattcataatttgtaaatatatatgaaacactaagaatttttatgtaattttaaagttaaaatctacattatcctcaagtcattatttatttttgaatatttcttggtaatgtatttagattacagaggagtaactatgaaaatttactcaatctcacaagattttttcttctccaaattatcgatccttttctccttagcttttgtccctatttatagggttttttttcttctatgaagatagttagttataatactgttggagtttgttgtggtaattgtgtattcgtttacacctgtcttgattcttattgttagttcaattagactagttgactctttgagttatgtatatatattgtactagctctctttgattcaaacaagagtttcttttcagtctttatcttctccaatctttctcttttttgttttcattgcttctctgttcttggtgtcctattataatggtaactgaattgagaagcatctttggtaaccaaattggcaactttcctctttggggttcggttgacagtgactcagcctcccatttcttctccttttgtccgatcactcaaggtctttggtttctagcaaatagagtattcgtatcgacaaaatccctctgcactctggtgtcgagatggtaaagtggattttcaattctttttctactcagggaattggttcttagatcgatagggaagagatctctctttttgcggctattttttatcacaaactttggtttttcaagaacttcaattttcataatagtggacagtggcgtttcgatgacatgaagaaaaagatcaatgaagatttaacagtcgttggaaggtgtttttaagcagtagacatgctattttcgatggtcaccattctcagttggctcgttcgttgaacccttcctaggcttgggagaatctgggtaaatgtgaaatttacgaataaagggatctggtgaatcctcaccctcaaaacaagttgttacaatagtaacaatgtttgagaaacacaattcaaaactaaaaccaatcacaaaatcaaaacttgaacttaattgaaaaataga

SEQ ID NO: 306691 - DNA, 2229 bp, Cannabis indica
taatgcaagctcttgcttcttctaatcatgaatctcctccacttgagcttctaaggatcacttctatagggactacttcgaaagatctcatcgaggaaacaggtgaaaggttgttgagttttgccaagaccattaacatacctttgtctttcaagatagttatggtatcagatatgtctcatctaaaagaagaccttttcgagttagagtctgacgaaacagtagctgtctactcttcatatttacttaggagctttctttcagagccagatcaactggagtctttagtgaaagtagtaaggaacttaaatccatgtgtgatggttgttactgagattgaagcaaaccacaactcaccagtttttgtgaaccgtttcattgaagctcttttcttttatggggcctatttcgattgccttgagaatttcatgaaaagagaagatgaaaataggatggtttgtgagtcattatactttggaacaggaataaaaaacatggtggcatctgagggaaaacaaaggaagatcagacatgtcacaattgatgtatggaaggcgttttttactcggtatggattcaaagatgttgaactcagctcttcatcattataccaagccaagctcatactcaaaaagttttcttgtgaaaattcttgcactcttgatgtgaatggaaaatgcttaattgtaagatggaagggtacacccattctatctctttctgtttggaaaatcatctaattttagtactatttatcttaaaagattctgttatgtttctaaaatttctgaatgtaatttgctagtctagtggtgattatagtaagctgaaaattagtaataagaaaaataactacaaatgataaaatattcataactttaaacatgctcataatatatggtaacaaggaactacatcctcttgagtattgaaactcaacacaagaaaaggaaagaaaagaaaaagtactatgagttgcccaagagagtggctcaattattatgctttaaatataaggtttgacattaggccttcttaaactaaccaatggattagtatcacttctcatcaatggtaagttcttcaatcaaatttccatggtttagagtattcaaaccatgaatctcatagcatttgctagagcaaagcccttgattcagtgagattaaaggcatggattttttacgagcaacaataatcgaattgataacatcatctgtgggatgaaaaactgagagaacttcaaattcttgaagatcacaaggatcaatgacaggatagaggaatactctagctccatgtgcactccttagaaggagaatagctcccggtgccatgttcttagctaaatgatcgataactcgagttttttcctccttgttcattcccactagagctgccaagaaaactacttgatattcctttaacacatctgagacattcatgatatctgatgtgtggaagaacattcttttggacaagtcagaatctgatgagaccaagtcacaagcttgggaattcgccattgagtcaatgtcatagttatgaaatgttgttgttttcatgtgatatgaagctaagacaatagaggtgagaggaaggggaccagatcccacaaaggccactttgttagggagttgagaacagttttggcttagcatagtgaactctaattggctgagtttaaggtaattggaatagtaaggaaaaagactaatatgcttaagtggattctcatatgatcctataagactagaataatgactctctagaagtccctcagctttcccacaaagggtaattagtttagacctcatttccttgaccctattggaaaatttggtaacatcaatgggacaagtgggaatacatgatagaacaagttgagtgaagagaaaattcacttggttagatgggttgagactatctaattttgaaatcttttcatagatttcactcacttttaccactaaagactcttgttcatattccatgaccaaaaaatattgcttaaagagaacacacacctctaagacacttcacttctatatgaaacaaccccatgtgggcaatttatacttgctcttaaaatgaccctttggccttaaaaacaggtaagataaaaacacagcctattacattatcttaataggacaagaaaagagttgatttttttggttcaagttgcagttatatattagttataaaaaaaatgaaagttagtagcaa

SEQ ID NO: 306692 - DNA, 1546 bp, Cannabis indica
tttttcagagatttacccccaaaaaacagaaagcttctgttcctcattttttttaattttttactataacagtagcagaaaaatcaattttagcagaggttataattaactaactaacacttttaaaatatttttactatattttttgttttgtattttttgtattttaaataatgctcaataacatgaaaagaatcccaggttggcagtggtgagattctgactaggcccattgaatcaaaaagctttgttatatataatctcacctactaataaaaattatatttttcaatgaaaaaaaaaattaaagggtaatatgtagtggagttcaggtttggaaaagatacttttttttaaaaaaaaaaatagacaaatatttctatgtgagagaggtggttagtgaaataattttggtttttttttagttttttaaaataataatccattttttggggttcaacaaaagatttctggatttgcagccttaatgaaatattatattgaggtgtgtattattggtgtctgcagattagtgtaatttaattacaaagaaagatgctttgaatgtggtgctgttttgaagagaatagttacaaaagctttataatttattttattagtaatgataagaaaatgagataaaaatattggtagacaattttattgtgacagtcttgtctccatgaattttaattaaaaggtccaattattatgcgacgtgtctagaatcaattgttttttgtttttcctgctctttctcatgattaattcattaatattcttcttcttcttcatctttttttattttaattctttaaaaaatatttatttatttatttatttgttgagaaataaatacaagatgttaagatactacaccttgacatagtctgtcatttgcttcgctggtgtacacaattaaattgttcttttctttctaagcattaattcttataataacactttttataaaccaacccaagtgaacaagatgctctcttttttgtgattaataataaatataattcacataaactaattttagctatgtgagaaacaagactttttagagacactagattagactatctttttactattttttcaaactacaattttggctcattatatgactactaccaaatctaccctagagtgaaaattcttaacaatttcattcccaaaccctagaaagatgtcttttctacccacctatatcaaatgatgctaattttgttaagctacattataattgtacaagagaatttttttttgtgggtcaattgtcaaatcattaaccctaaaatctatgtccttaatggaaggaaaaagcttttcattttcctacattaaactttcccttctttttttttttatttttttttttttattttttatgttttattttcattttgttgggatatgaagaaggtactactaatatcccatatggagggtcctaataaaggactagaaaattgagatcttacctagcaagaatgtttggagagacttaaagggacaatatggtagtttttagggtatt

SEQ ID NO: 306693 - DNA, 3302 bp, Cannabis indica
aacttttttcaacatggattgaataaaaccccattcaacgcggtcataagccttactcatatccattttcactaccataaagccatcctttcccgaccccttcctcttcaaataatgcataatctcaaaggagattaagatattatccgttattaagtgcccaggcagaaaagcactttgagtctccgatataacattcaggagtaccccttttaacctattggccataactttggaaacaattttataaatgacattacacaaagctataggccttaagtcactcatagtttcaggagaagacttcttaaggatcaaaacaatattcgtatcttttaaaaaattagggaattcaccaaacataaaaaaatgttgaactaaccataccacatccgttacgactacctcccaaagtttttggtagaaccctggattaagaccatctggccctgacgacttgttaggatgcatttggaacaccgcttttcgcacctcatttgcctccactggagctgtcaaccccacattctgatcctccgagacaacaccatcaacataggcattgacccttttccaattcagattagaagcactgaacaactcgcgaaagtaatcttccattacatcttttaagccattgtcccatccaacccaaaccccttctctattcttcaagcaaacaatgtgattattccattttcgagaagtagcacaagcatggaagtactttgtattcagattgcccgcttggagccataactgctttgaacgttgtcgccaaaacacttctttctgacttagtacctcatacaattgagtctgtgtctccttgtacttctttatagactccacatcccttctattctttagacttttcaacactttattgcacttattcagcctttctttgaagtttcctgttatatttttcccccattcggctagagctgtgctgcaacacttgattttttgctggaaggagtggccctcgatagttgcccaattatctttgacaatttggtggcacgttggctcccgagcccatgcattctcaaactgaaacctgggaggagcaatcaccaccggagtttgaacaagctgcaaacaagaggggactgtgatcagataccgaaacctccatgttaaaaagccttgcagtaggaaaaagatcattccaagcatgggacaccagtgccctatcaagtcgaatctccacccaattagtagtccctctaccacgttcccaagtatacggatggccaaacagagccatatcaataagtctacaatccgacaccacatcttgaaaccccttcaacaaagtgttcgggtagagtctccctcctcttttatcactttgattaaggacattattcaagtctccaatgagacaccaaggaagcattgatcattgaactaactctcttatcaatctccacgtattacttctccgatttctactaggctccccataaaaccctgtcacacgaaccaccgtcaaaccattaagatttagctcaatatcaatgtgattttggctaaagctcaataatttcccatcattttcctgacgccacaacataattaaccccccactgtgcccccgagcctccacaataaagcttccttcaaactccaacatcttcttcaaaacctcaattttatcccttttacaaatagtctcacataagaaaataaggtggggtctctttcggaaagtaatttccttaaataattgcatcacccgcgggttcccaagcccccaacaattccaacttaacaaactcataatgattggcgggacccaaaatgagtacccgccaaaaaaatgttttttttgaacaataccaacttgagatgtacctcctagtatctcgggaaccgtgctctttccaacctcttgtgacatagacttatcattttcaacaccaatatgttctttttccttttgtggtccactaacctcatccccacttacttccatatcattctggcccacattcttaccaatattctcctgacccgtattactaccatcatctaaaggcccaccctcaactaccacgtgggtccttcttctcttattatcaattatcaccaaatcatcaagttgaccctcttccacattttcctccatctcagaattaaatgcatgtcccatattccttcccataatatcacccagcccaatatttgactttccaatggaattattatttacaattatacctccatgatttcctccattaccattagacaccaccttccctttaggtccatgattttctccttgagaatcttcttgatccgccggagatcttccccttgtctcctcaccggctgtcccatgctatccctaagccaccgtgcaccaatttgccgatttggtcgacgatccggaactttcatgaacataccatacggtttcacaattgtatccaggggttcatcaaacaatcgatggcagaacttttccgaatgtccgatcaagccacatatgaaacaaaacgatggcaccctctcgtacttgaagttagcccagaaccattcctccttactcttgtaaactcgcattcgtcttttgagtggcttttcaatgtttatcagtacccgcactcgataataatccctccaaattccattgaaattcttaggacacgatgacacatatgtcccaatataacctcctgctactttcagaactttatccgaccggaatcccacctctagatcatacacttgaacctagatctccatcgtgttaaaaggcatggctcgcgtattatctccttcacgcactcgttgtataataaaaggtgaccgattaaatgtccactacgtcccctccaaaactccactgatgtcaacctcgtggaagaattgaaacgaaaatctatttgtttctaattccttaacgtacatccccttacccggcctccacagtgatgccatcacattttttaaagaatcagaatcagcatgcctatcagttaacaatcttcccactagacaccaacgcgagtcaaagtcatcccccaaatcctcagattgatcgaaccatacacctgtatcttcttcatcttccaactgcaaatctgtccacctcctacccacatcctcgctgtcctgactactggatgccatcagaacaatctacaaaactttgatactcacaaactcacaaactcagttacagcaaacgacataaagaacatacatgtcagatgacaagacgatagatgtttttaattaaattttaatttccaatattttggttgctacacctgttggaaattatttta

SEQ ID NO: 306694 - DNA, 2183 bp, Cannabis indica
aatggaaataaaacaagacattgttaaggcttctaagtactatatatctcaatttgatgatgaatttttctttgttgtggattgatatatatttggggagagagtcaatgttcgagacctaaggaaacatagtgtgtcttcgaaatgatagattattccgcctttaggagcttataaaataaatgtcataatgttgatgctactaaaaatatgcttgggtcatgtttatgcaaaacaacaaatacttacttggtatggttttattaacagtaatgtttctttctcatgtgtagtccttatgtatgccttggatcaatttttggttaacttaatttatgatggtgatgaggtatgaatgtcttttgattatggtgttatttttactagttttggggagttgttgctgtcctcatcttttgagggtagtaattattatttatgttagacaattttaaagacaaataattcaggtgtggttgctctcacaatgtaagttgatctttaagtttttatagtttctgtcctttttttttagtttaggtattcttatatctagtgattgataccttacacttttcttatgacattgaatgtcaaaacctatctggttttgttgctaaacgatttacaccagttaggattttggggtattatgctttcttgtaagtttaattattactagtaggtagtttatttttacaaattgcttgcttgcaaaagttttatatggagttggttcatcattttaacatgaagaatttacactcaatattttaaaacattatttgaaaaatatagcagtttttaatatgcctatttttttatgagattagactaatttttacttttttattgtgtttttatgctatatttttgttatattttcttttaaataccatatttgattttttttattaaacaaatctaagacactagaaattagtttttttgatcttgatgaaaattattttgggtaatgaattgataatcgagtcttggagcttatgagaagtttgtgattggttttagttttggtattgtgttaaatttgttcaatattaattccatacaataaactagaatacaaaacatataaaatttatctgagttttagtatttgtaactagtttcttcattaaaaaactaattttgattacatattgccttaacaaattatttataacttactaggaaactagtattttcatcaacaaattaagaaactggttttgattatataaaagtaaaatgtatatatatgagtttttaaagtttttatgatgttccttccttatctatgatgatttatctcatgtttttaagtttttttttttaaaatgtcatatttagtgcaattaagttactatttaaccttctattttattaaatgataaaataaactatgtattttttacaatagtataaataggaccccaattttaatttttaacaatttttttaatataaccaacttgaaaaaaattcctgatacaaaaatatgcagtaaacataactaattttttcataacatctctagatcagattattattaagttttattttgataaaaaattagtttgggatattatttagtgctattttaagaagtacatggtctactttgtcctttattaaaatagagagactaataacttttacaaaacacatggtttaaaatagtatttaccctatgttttattactgtccttttctttaatcacaatttcttttttatcaacttattcttagctttcaagcaaaagcattagcattaatggtagcgttggattggtctctcagtattggccttcctctttgttttgtggagtctgattgtttagtttttgtttttgctttttttgaagcgttcatccttttgtagtcagctaggttctttgttagataatttgctagtttgctttttaagttttcctttggtgtccttagttaatgtttggcgtacaaccaataagattgcttatgaattaagtgtgtgcatacactttaaggtggaaagtaaataagcttggattgaaaattattcatatttttttttatgtattaaactccgatggttgttaataagagtttaattttttaaatatatatatatatttttaaaacaagcgcatcttaacattataaaaaattttatttgtactcacaacaaaacttgtgactaa

SEQ ID NO: 306695 - DNA, 3604 bp, Cannabis indica
aaagcaggtctctttttcttcttatgattactgttattatattttgaatttgaatttgattgaatgatttagattccgatagagatggagatggtgagaggatggttaggtcagtgaagagagagtgagattcagattcagattgagagtgagagtcagagtgggagggagagtgagagggatgttcggagattgggttgaaaagcaccattccttcgaagagggaatccatatctccgtctccatccatctccatggatgcttagctaagcttctcgaaccaaagggctatgctaactgctaagagctgatgatcttttttagtgtgaattttttagtgagaaattaattgaagaaaaattgacctaagtttttttttttagttttttttttttgagatgggcacttaggaattgaagcatttcagctcaatttctcagttttaagggtcggtttagtcgggttatattgtatttttatcaactcaatataaatatcagattataaatatataattgtaatctgtctaataaaaaataaaacaagtattactagtccaaaaattttcgtcagtttgattggattaagttgtttaaactgatttttaatgtttgttttttttttaattattgttagatttttagtatttaaataattgatttgaataaatagatgtatagtataagtttcaagattaaaatagttattcaaaaaataaaacatactcaaatgtaaattttaaattttaactttaatatttaaatataatcaagattatcaattataaattttaaattttaaattacatattataaaatacaaacttaaatataaaataatttaactgttaaacttaatttatatattatattgtagataattttaataaaaatatataaatcggtttattctttttattcgagttatttgaacaggttagaataatattcaacctgcccaatatatttattgggcggtttgaatttttcgtaaaattattagggttgtattttttgttagtttattcagtttagtttgagcggttaattcagattggacggtttgtaaatttttttgaatagtcctacttctaattggatttaggagttcaataacacttgtgtgtaattagaatgtgtaattagagaaaaaaaaaattaaggtggcgtttagtaggaagaaataaaaatataggaataggaatagaatggaagaaaatttaaaatattttaaaaaaatgaataaaaaaaattaaatttttctcattatgcattagaatggtcttttttctatttcaaaatggaatagtcattctactaaaatggtggaaaggtcattccattggaatgacattctaatactttaatatgcaaccaaacaaatgaatagaataaaatttttcatttccattccatttcattatatccaactaaacgctatgtaagagtttttggcggctaaactttttcaactatcgtttcacttgcatttaactttttagatcaaattttagaggtaaaaccttccaaactactcaaccttccaaatgacatgacatgtttatactggtatacctaatatttttatttcaaaattaaattaaatcataaaaatgaaaaataaaatatttaaaaaataaaaaatattataaatttagaaataatttcttataactttttaataataatattaagtgtactaatataaacgtgacatgtgtataagagtatacacataaacagtctatgttagcagttaactatgaaaaataaatgacaccttaaatttgctattaattcaatatataaataagatttgtcccccctcccaaactatgactcttgaagagattttcctctaaacttttctctgttataaaaatttcccttgaggcttgaactataaaaatcgttggaattacatccttgcggttgcattctactcgtttatttaaataatttgttgcttccaagattgacgactgaccctgtaaaccaacacgagtattttcagcgtgctttgtcctcactcgcacgcttcctataaaaactttcctgaaggtcacctatcccaagattgcatttcgtcccgaaatttcaatcttgccatcccaaaatttgaaattcgagcattgtagtactcatcaagaagaacattgtgaggctttatgccacaatggatgatcttagtggtaagtaaaatagtcattcaccaatcccaacagcaatttgagtccttaggatccaaatttttttaagacagtcaaacagatagcttgctaaagcgccattactcatgaactcaagcacaaacagcatgtcattattctcatcacaaaatccgatcagccaacaagattatattcttttgatgagtttggtgtataacaatcacttcaactcagaattctttatctgatcacaatgtgaaatgattctactatacctcccactaccacaccactacaactatcattcaatttaaaatgtaaattaatttatataaagaaaaacaaaagcacatgtgaatctaagaaaatcaaatatatttaatcttttgatgatgatctggtcccaatgtgaaattattttactacctcccactaccacacaactacatttaattacataatataatattgaagttagtaatattgtataatatataataacatatgaacacataacatttaataaaattgaaaaggcatactgaatctgagcaagatcatcataatggcagatgctgttgtttcgtttgtgattgaaaggcttggagacttggtgatttctgaagctcaattcttgtatggagtcaaaggccaagtggggaatgcaaaaatcaagcttcaatgtatgagtgctttcttaaaagatgctgatgcttgggttagaaatggtgatgagagagttcgccttttggttgtccagatcagagaaaattcttatgccttggaagatgttattgagacttatgtcctcaaagtggcttctagtcatggaactatcaaacgtgcattaaaatggtgtgttcgcattattgatgtccacaaagttggatcagagattgagaggatctcatccaacattgatacttggacttcacagttagaagcacttggagtacaaagatcaatagacaatgcagctgaagcttcttcaagtaatgtccagaagcaaaaagagttgagaaaagcttattcttatgttgaagacaattatattgttggatttggaaaagatatagaagatttggtagcccttttgactgaaaaagagaaccctcttaagcataaggcgatttcgatatgtgggatgggaggtttggggaagactactcttgcaagaaaggtttatcaacatcctcaagtcaggactcactttgattgtcatgcttgggcctccatatctcaacaatgtaatagacgtgaagtcttagaaggaattctatttggtttcacttctcccaacaaagaaagaagggaagaaatcaaaatgacaagcgatgatgaattggccaaggagctttacaaccttcagaaacagaaaaaatgtttggtggttcttgatgatatatggaccactacaacatgggatcttctaaa

SEQ ID NO: 306696 - DNA, 1402 bp, Cannabis indica
ggtaaaaatgatagattttaaaaaagaaggtaaaaataaaagaggacaatataaaaaaggtatagagtgtaatttcttcaaaataaaaagcctctctagaattcaaaattttctacttttttttcttctaatttttgaaccctatagtgaattgagtatttgcctactcatttcaagccaatactcaaatacaatgtagaagatatactgtgaagaattctatcacctaaggagatccaagtttagattttggtaatactttgcgactgaaaagaacaatagttagagatctcaacggaaagagccattatattttgcttccactcatgtaaggttttctataactttatatgtatttatataattgttttagaaaattcatatttaagatgttagatcatagttctataattaacatacatgttagtaaatctagatcctaataaaataagttacaacacccgttacctccatattactaaccttaacaagatgtctgtacaaaatctatactgtacaccttgagggggtaataaaatttccctattttcgattatttgtatcagttgtaatattagttataatggttatttgtattcattcaatttacacaatcaaattatttctctattttatttaattccacaatagatatatgagtaaaaaaaaaattaattaagaatggttatcttagtatcgcgcttttctttgagatataaaatttcgacatttgtttaaggtacactattcctaaattactaccactttctttggagggaaccactttttgaagattttatttgggtgaaatggctctgtatgaggaattggttgagggattcagtgaataaatccaacaaggcaatgtaaaacgaatccaaaaataattgtggagagtttcatcccttagggggaatcattgaacaagctagttgaaaaaatggatgagagaataatttttttagttgtttgggaaatcattgtattttggaggaatcgttgaagaaatcaatagaacaaatcgaaaaaaaataaagttgagcttcatcttttagaatggaggctttcgtttgagtcatgtgagtttttgagaatgaatatcatagttgtggaaatctatataatcaagggcattttaggtattaacatttatataaggccatttatttcattttttttttaaaaaaaaaatgaacatgaacctttatcagtgttaagtttatagccatttgctacaatttccctttataaaaatacgatgaatataagaagtacaatttagtaattttagatataataactagggtaaaaaagttaataaaattagtaatataccatagattcaattgtcaattaattgatgatgtgtttggtaatactattttaattagttttttatttt

SEQ ID NO: 306697 - DNA, 2089 bp, Cannabis indica
tatttttaaaaaaaattccacccaacagtaaaaaaaattacacccgattagccccttagaaatgttcttacaattattaacataatgattaatctcccatataatattgatactttttagagcattgatcaccactttaaaatcgttcccaagaataatgaaacaattatcattaattattgcgttcaacatagcagattcgtaggctacaacctccaatgagggggtccttaaaactcaattttttagtagccacccaaaaaattttagattgatcattcatagcagttgcaatcgtcattgaaggtagacccaccgccacatcacaattaacttttcgacagtctattaggagggggattccatccatcaggttgaggatggatttgtcgaggtagaataatagactcatattctacaaaagtaaacatgatatatcaatgagaagtaaaatcaatattatggttatcacgtaccttttcattccttgccttccaaataaaatacaccataatggatgcaaaaataaaaacctcccttacattgatgcctcgcttgtaaagactccacgggaatttcagccattcctaatacttgccccactttcctgaactaggataagtccccaaggagaagatctccaaatgtaggaggccagcaaagttacaatacaaaaaaagatgttccatacttaccttgactaccacacataggacaaattaagtcctcaaacccaagtcttttgacaacgattttcctcacaagaagtgcatttgataagatacaccaccaatcttgaatcttagaattccataacttattccaaagcgttggggccacctcacaactccctaatctttccaaagcttgagtgagataagtggattttataaggagtttaccacttggatctttcacccacatccacccatcactacctatgcctgaaatccttctaagtttcgaaatttgagcagtagtatcatcatcatagagttattttagtttttggatgtcccactcactatttgtgccaagcaaatcacccatagtttcgtacccctcccttggctcaccacacggaggaggacagaagttaccaccataaggaattcaaggatccttccaaaagtttacggagttccctgatcctatggttctacatgcccccttccaaaggatgtcttttgctttaacaacactcttccaaaaacacaaatctgtgtttcgataattacaatcccagaaagattatctttttagatatttattcctcaacaccaacgaatttcaataacactctttggtctttcctattgtatgataaagtctattttcacaaggtccatggtgataccatcttgagaaattacatgccctaagaatttgacctcagtcatctagaagtcacacttctctttcttagcatataattgatgatccctgaaggtctataatactattgtcaagtgcgaacataatcctaatgtgtcttagaatacactaagatatcatcaatgaataccaccacaagcttatccaagtaaagtctaaagattcttttcataagatccataaatacagctagttcattcgttagttcaaatggcatcaccaaaaactcaaagtgttcatagcatgtcttgaaagtagccttagggatattttcttccctaatcctatgttgatggtagcctgacctcaagtcaatctttaaaagaactttcaaccaccaagttgatcaaataattcatcaatcctcgacaaaggatacttatttttaattgctatctaattcaactttctataatcgacagaaagtgataaagttccatcagctttcttagcaaacaagactgaagctccccatggagaagtactatgtctaatgtaactcttatcaattaactctcctatttgctttcttaattcggccaactctgcaagggccatgcgatatggcgcaataataactggttgagctttggaaatcaaatcaatgcaaaattcaatctccctataaggtggtagccctagtaaatgttggaatttattttaccaggatcttagatctactcacaagtatgtt

SEQ ID NO: 306698 - DNA, 1844 bp, Cannabis indica
acttcgttcaagcatttcatcgaacacgtaccgggcatcctcaatcttcctacaagagccataaaagtgaatcaaagtgttgttaacatacacatccccatccaaaccaaacttaaaggtatccacatgggcctgcttcccttcttttagcgcagtaatggaagtgcaagctttgaaaatgaaaggaaaggtatgattgttgggtgtgattccccttactctcatttcacggaacacccagatggcttctctgggtgaatggctggaagcgtaggctctgataaggaaattccatgaagaagggcgtgatatttgggtacgaaagagaagggttcgagcataggcgaagtatttggaagaagagattgcgcagaatcggacaagctctgaaaggatgtatgagtcgcggtgaaggccgaagaaatggagtcgagcttgaatctgagagagttgttttagggaagaacaacggttgagtagagaaaggcaatgttgctccataaacagaaaacttgaatcgccatttgagatttgggttggaagatgaaccatatgtaagaataaaactctcaactaactgtgtttctgttaatagtaacattaagaaaaaagagtttgacgaaaaatgcactctcaacataatttttgtgtacttcttttactaatttgaagcacaatctattattattcacaagaatcgcaaccaaatatgatactaaattcatgtacaaccaaatatgataataaaattacacttaatcttttaagtcataactctataataaaattttggtaatcggataatagattatacttggtgtgattttatcaaaaaataatgataataaaaaaaattactcttaaaggatcttatattttatgttatttacattaataattaataacaactaatttatctaccaagttataattttatgatagaatttttagtaagtgcaattcaaaaattattataagtgtgactcagaaatatgggttcatataatcttaaattgttgatttttcaatggataatataagtgttattgctcaggagcactaatgcccatattttaatttaatatttaaaaaaataaaaatgggccctactagtactaacattgctaatgttagaaatgccctaattaaataaatgttatgttcatttggtgtgattttatctagttttataacataattatgtatattgccaacaaataatttatgtttattttaaaaccatttttttaaaaataaaaattagaatgaaaagaaaaaattatgtactaattttggataggatcaaaatcagacattataaacaataaaatttagtacacactaatttagtgtattcttagaataaaatggtgtaaagattacaaatcaattcaaaataatagtgcacatactcttattcatactcatgtcatgctttacatatgagttaggaaatttgttaaactaacaacatcatgaaattgtaaaatttctaaaataaccacattaaatttgtgctccataaatttatggcgcacaatataatttttgattgcttgtgctacaaaacgtgattatttttactaataaaattttgttgttagatgtatattctgttgtgctagcaggaactttatatggaatatgaagaaccgtaatctttgtgtctttgcgggcaaatgttgtagtgttatagtgttgtaacttgttgagttattaattcgccgatttgattaataaaaatatatttcaaaaaaattgaagttattttgctataataattttaataaagattatttttacaagacactcggttcctaaattttagatgttatatagcctaa

SEQ ID NO: 306699 - DNA, 1349 bp, Cannabis indica
agatacaaatctaaacacgtcacgaaaaaattaaacttacaagccttgccgatactactctataaaatattggtactatccataatttttatagtctagcacaacaagatgtatatttttgtagacttgtaggtcggcctggccaaatttaaagctaaatttatatatacacacaagaaacttgaaatgaataaaaataagttgatacactccttttaatgtgatcgtaactccatctatctttctctctagctaggtgctaaaaatacataaattctgttaagaaaggagaggcataagtcaaaaaggagaaactatatggctatagctaggtatagtggttttgtcctttatgatcttcatcatatcttacccatcaaaagtgatctttcttttggctacgatctcccatcaatggtgacatttcatcttttatttaatgacaaaactcatgtttatctaacaaacaaaatactttgttacttaaacaacttgaaaagtgatatcaattttgcaaccttcaaaaagctatacattactataaatatatatatttaaaatataagaaaaaagaaagaagagtattctaattatttttattgcccttgtattgtcaagaagcaatatatgtatgtacatatgaactattcacatgattaggcggctaactaaaagactcataaataaataataaattatacaaatatatctttatatagtgacatcgaagcagcagaaagagaatttaaaagttggccagctaagatcagtgctacttgacactccttattttattataacattcacatgtatgatgaataatatgatcaatttttctatatatatatatattgcgcttttttttattgttacactaagaagctatggcaagtatccagaatataagaaaaagtatatgatgtatacacgttattcttgcatgaatgtggtaattataattattaaaatggtgataattaataaagaatgaatataatattttacataaattcattaaagggtatgtgtgtgataatatcactttgctaaatatacaaatttatgtgtaaaaaaagtgaagtttggatccataaaagaagggtagttagagagagagagtgtggggggcttttgcttggctttccgtttaatatttttgtcagttatatgaaaaagacagtcgacagagcaacacagctttaagctttcttgtaaaccaaacaagagaacctaatccaccacactttcggtttctgctatccatcatatagatgttgccaaaactcatcccattaattaacctattttctcacatgttatgcttatgtatgtatatatttataatatgt

SEQ ID NO: 306700 - DNA, 2004 bp, Cannabis indica
ctgtggaatcgacatactaataagcaaacagttcgaccaatgtgctcataccatgacataacagctgacccaaacaacaatggtggccataattcccttttcgcaagctcttcaagtacccttttagctccaaatttcgaaggaaaaattggctgattaatacaaaaaatataatcaaatatatagttcaagatataagcgagtcctgcatttagtacatataactaattttaaacgtaattaagtatcataaccacttttttaatgatcgattgaatgaacttaccggagctactagagtgattgactttacggattttgaatgctttgcagccaatgctagggcaatgttacaccccatggaatgtgcaaccaagtggaatgaatccaattgatatggaatgattatagatttctcaatcatttccaagtgatcttttatagtgtagaaacaatctcttggctttgggctccttccaaatcccaatagatcaacaccaaacaatttatagttaacattacaatttgttacttgttttgaattattggttatattttgaaacacattttctgtccataatgaagatgaggaaagaaagccatgtaagaatatcacattctcttctacactcttttcatcattttcttcattggctgtcaaataagaaaatggcaaataaatatttagttttacatcttaagtgtttataatagtaatattagcaattcgattcgtctaaccctataatattttggaactaaacgagtaaggactcgatcaaggacaataattctacttgatatcgatttagaactatatatctcgtaatctttcttttatgaaattaggcattaattttgtctaaccctatagtatttggagaacaaaaaactataacagttgctatataaatacttaaaatgtactcgaacttcaagcctttcaaggccaatagttctacttgatattgaattcgaactataacaattttaaatacctaaaaagtacttgaactagtttaaattagacattttaactaacgaatttaacatatcaaacaaactcaaattttatcataaaataatagtagattaaaaaaattaccttgttgagaagattgtgtaatagaaacatgaagaacaccattactattcatccatgaaagacaagactcacatccacaatcagaccatctttgtttactacattctattttctctaaatcattattctcacataattttttcgaaaaaccaagaaatcccatttcccgaaaaatgtttttccttccaaacagcgtctcagagagctcaccaccatcaccatcaccatcaccatcaccgccatcatcatcattatcaatcctttgtttttggcagtaacatgttgagacttttccttctaaaaactcatcaatgaatctataaactaaacataaaacagtatcaagaaaatcaaggactagaaagacaagaaaagtgaccatattttcccgagaaaatgttatgtgagaaaatatggggtgttgttggttgataagaagattaatggctaggatttgttgttggggtttgaaaatcatgtgatggaaaattgagtaacgttgaagaattttgattgagattctttgttctagtatgctccactacgttccaaaccatttaataataaaaatataataagtgttatattattgagaatcaatagcaatgtcattttcaatagtgttttaaattataataaagtttctttattttcttaaatatttttttgatgatgtaaaactaattcatgattaatttaccataattgataaaatttaagattgtatagttataatattagagttaataattgattatttaatactcttatatttgtttatagttaacttaagctaattaaataaatcatcttattgtagttatatgcatggttagtaactacttcaatataacctcaaaaaaaaaaaaaaaacaaaaaaaaaaaaactaaaactacta

SEQ ID NO: 306701 - DNA, 3533 bp, Cannabis indica
agagagagagggatagagttttttttacagaaaatgagtgtataaagtctctccttaagctctctatttatagccaaatgtcttataaggaaaaggaaactgaaaaggaaactccaaagcaattttcttaaaaattagttacataaataaaaagagaaacaagaaagtcaatgcttggtcacaagagtttgggctctctttgtgctcttcataagagtttgggctctctttgtgctcttcattatttccaagctcaatgaactaaaataatgcattcttttttattgatgccataattaatttattccatgcatttaaatactaattttcatcaaataattatatcaagataattatttttcatagaacattatttaaatgcttactattaattcctaacaaaataatgtctaattaataataaaatctttattatctcgttcctttttattttcaccaatttggtggaatattctcaaaattgataaaacaaataatgtgaatgttaattgattaaataatcaattattgtaagctactgttaaatattattctagatactgcggggaccataggctcatacaatctaatctacaaataggatagatataaaatttaacaaataaatattctagcttattaatttctcatgactccactatagactttgaattgcactcctggttttatggaacgctctatatatcaagtacggatatgttataatattattcatatagtttctatcatatcaatcaatgatcctctatagtcaatttataataataaggactcaaatcatggttttgccctttaattatatttttttctttaaaacacttagttgacttaatgatatttcagtgaacaatcaatgaaatgagcgctctatcattaaatacttcaacttagctcaaaggaaattatcatttaacttgtaatatagaagctatagatttctatatctataattaatacttccactcaattatgctattgagttccatgatgcaagcatgggctagaccttagagtaagtcggtaacgaacaagtcaaataactcgaataataaaattaacctaaagcttaatcaatttaggattaagatcaaatgatctatgataaactaagtgatataatgataagatccattcttctatcaatatcaatcctgtctaatatatattactgtcattttgtagaagggtttttcaagatttctacacccttgatagacttgactagaaagaatcaaaagtttgtatggataggaaagtgtgagacaaattttcaaaaattaaaccaatgattgattacagctccagtgttagcctttccatcaaattaagaaaagtttgtggtacattgtgatgcctccagacagggtcttgggtgtcttctgatgcatgctgttaactatagatttagccaaccgacgcagagtctgactaggattagatttcacttattattatcaagtgcgaaacaataattaatgtagagagacaaagatttgcagaggttcgacccctttgttcaagtaatgacctactcccattttagttgtattcactcttgagataataccaagtagattacaggctgaagccttgtaatttctagctttggctctcttcagtattacaatgagaatgtgttttgcaaatgagaagtatgagaaaaagagaattctatgcttagtgcttctaagcgtatttgcatgaacaatttagcttgagctcttgagtgtatgcaccttgccctctatatagtactagggttacaagctgctacgtctaacaagtaggaaaatatccctttaaaatagggaatttatatcgtatatttgaaatgcaatataaataattaataatttctaaagaatagggttgttatttgtaatgaagattccctagatcgtgggcagtttgagttgctctgaagtcgtaggagtgctggggatgaattggaaggcttgtggggaaaacacaagtgttggggtattcatgtatgcttgtccggccaaccttattataaggttgcccaatttatggagcctatccaccctggctagctagctataagtcgagctaggatctgccaattcttgtacatttctatctttgcttgtgtctaccgtgcaaccataagatcttgcaagttggagggctacacggcactaacctagctggttagtgctgacctatcatcaatgtattttccgctttttgtcatgtggaagtgccaggtcaggtgaacaaaaattgggttagcatttatccccaaagttcctatctgaacgtctagtcgggtagggactttatactctatctggtattgtaatgcaactttcccatgcagatatgcatggcccgatattggactcttcatctgatgtgattttatggcagttattaattttacatcgatcaatgtgggaaatcgtgtgacagttgcacattttcccatgttaaaacaattggcattctctttcccatgcatgcaaatttttgtggcattaaatccccattaaattttttggggggaaatgttttctagaaactatataagtgcctcattcttttttcttttcattctttctcttttacattctctgagcacaaaatctctccaagactccacagagccaaaaccttgtgagcttaagttattcgtgaattcgcaagcatctgacgcccacactcattgtgcagactagatcgagcctccttgcatcttctcagtcaaaaagtttgaagctttctctctcttttttgtcctttgaatttttgccattaatgaattttttgagcttttatgaacttcttgattgtcatgtcttaagaaagttcttatgcactataatctattcaatagctttaggatgcataatgtataactctttgatgaaaaagattgaatcttgcgctttattttgagattttgatctttcgggtgcaaagaatagtaagaatgttttgaaattagaaaagtaggattttttatttgtataggactctgctcggtgttttgggtttgttagagaccctgctgagtgcttaatgttggtgattattttattaggatctagatttactaacatgtatgttgattaacaccctaaatataaattatctaaaacaatggaatttaaacacatatgaagttcaagaaatcttacattgattgcagcagaattatatgtctccttccactgagatctctaacccttgttcctttctgtcgcagagtattatcaagatctgaagccaattctcctttaggtgttggattcttcacaatcttacacactataattgagtactagaattgctatgggtgggcatgtactctgtcactataaggctcgaaattatgaaggaaaataggagagattcaaattctataggaggttctcaagttttctagttgtttgataaagaatgaaaactaggtaaacttaaatctgatagaatgagaaccatcttattcattttataggatttctcttaggattagatttaaattatat

SEQ ID NO: 306702 - DNA, 3849 bp, Cannabis indica
aaaaattgtaacaggaggttaacagtagcactcctctaataataataataataataataataataataataataataataataataataaaagagtattgtgatgccataagaagatgggcagtcacagctgagagcaaacgttacatctcttgtttaaaggtacccctctctctctctcggctgtagtttttggttacaaatgaaccaattactacccaaaaaccaaaaatgaacaatagaaaacaagaaccaaaaacaaaaaacaatactacaaatatatatagaacaatatgctctagatgttaggattgacttagaaataagaaatatacatatatgtgctatttttatataataaagtataaaaaaatatcagcaccaggcagacatataatatcagattcatctagaccaaacaaattggtaaaagaaaagtacaatatacatttatataacatttatatatcagcagttgtagtagaaacttcagtgaattttttcaaaaaaaactaaaatcttctcttctgaaaatgccaaaaagaaaatttaaaatgatgggacaattccatatccattgtcagccattagagctgtggagaacatctggtcaacttcaacttctacatcagttctcttagcaaaccttcctttgatccttggtctggtctctgcataggccttccttgacgcataccttattgtcttctcaaacttccttgtcttctttttctctctgtaccttaggactcttgcttccctgtccattggggtgagctgtgttggcatttgaatgggtggccctgagaaaaggtcaattgttcctttgggtggtcttgggttggagattgaaatatcgctcatggttgagtctggtacaacgctcacatccattgatgaaacagagacctgaagattaggatgaaacgacatgtcgttagaaagctaacaccatacattaatagttgaacaaattaagtaaagtaaacacttttgatgagaattgatcggattataaggaaacgtgtaaaagggaaaaagggataaaagcgtaggagctttatatagttcgatattccaatccttttagggagaaaggtttaaaaagataaaagagaaaatggaataaagtgcagattaaaatatcataagataccctttcagatttaacatacagaaaccacatatgtaaatgtctaaaacgtgattatgtaagcaataggattaaaaaaatgatattcatgttatgcataataaatatgaaataagaaaataaaatcatagaaacttacactgtgactaattgaaccgttatagctgtaaccagattttgaagattcaaagtccaaacccaattgaaaaccagtctggctctgctgcaattggctttttccataaccacactgaactggaaccacactatccccaccaccaccgccatagcttttctgttgagaaacaccgtaactctgctgcatctgattattgctctggctgtactgatgatgattattattattattatgatcaccaaactggttatcaacaccggaattgtactccaccagatccaaatactcatccatccccaccaaacaagtacccatttccctgattctgaccgttcttaacaggattcagcaaaagccacgaagcagcttcactctcatcgtcctcctcctcatcaggctcctgaatatcatccatcccctcgtttccctcaagctgagagaagaacccatcaccgcccgaaccgacccggtcaaccgacggaggacctgatataggaagtaccgggacacggtggtggcgcctggcgagcggattggccgagtggatgtccgcatcgcaagtggcgcagagcgaagcagcatcggccttgcagatgaaggccgccggggctcgctcgcaagcctcgcagacccaaacccgctcgtgccgcgatgccacgcggttggctgcgtggatccgagcatcgcagcctgagcagaggtatgcagagtcagctcggcagtagacagtgcaggctgctgctctgcaagtgtcgcacactcgcgcccatgccttggtccctcctccggggccggagccggtggtctcgtccttcatcatcataatcagcagaataagattatggtaattaaatactatgatgtaaaagtagtgaagagtgtgtagttttgagagaaaaagagtagagagtttttctctttgattttggtaaaatgaaaataagtaatggttttagcttaagcataaggcttgggtttagttttgtgttggtaagttttcccgggtgattgggaagagatccagggctcaccacgtggcaataaattagtggtgtggttgagttgttgcgttatcttgtggctggctttagtttgtgaaatggggtccagtgctgagtcagtgctttatgggacccacctcttttcccattggttggaccatgaggagaatcattctcaagagagagtcgacattagagagtataggaaatagaacaacaacgctcgctctcgtcgaccgaaccgtgttaagtttgcggagtgtgtggtgggtccgacaaatggaaaggaaaagcacaatataattttctgccaaaatctaggaaaggaacacaattaaacgtttttcatccaaataaaaaattgttacaacatgttgttggaactttgtatgaaatatgtaaaaatagaaaagtaaagtgtgtgagtaggagtcccacatggaatagaaacactacattttaagtgtatatctaatgtaagtttgagatatgggtttgggccccaacggggtacccaattttgcgcgcatgggtgaggactcacacactggaccaccacacgcgcgccgccgccgccgtccgaccgatccgggttggcgggtgaggtgtcactttattttttgaagaaaaaattatttaattaaataaagatttatttttatttatttatttattaattaattttaacacgtgatcagaagaggtaaaacgcgatcagtcaatgatcccccatttcttccaccaaccaactcctcccacaaacgataatattaccgttttcttaccgtttttttcttggatcgacttctatataagtcgtatcagaacaacgtaagaatacatctttttaatattaaaaaattcttttctttctttacgatttttctgagagcaaacagtagggtgttacagagcgatacagttcggtgcagaacgtatcgtacttatacagaggctgttttatcctggggacgccgtggttgctagactgccgtgcacacttcgggcagagccgcgaaacgtcttaaagagagcgacattgtccgcgactcagccagattattctgtcggtaattcgttccaattttactgtatttaatttcggtataacaattttaagacgttcagttctgctatggctgctaccgatgaattttctggttctgcttctaacgatattaacaagcctttccgttttgagggattacattttaagcgatggaaacagaagatgttgttctacctaacgatgaagaatgctttcgttctcactgctctgaagccagtcgtctctgaagcttctaccgacaaggacaaagaggctgaacgcgagaagcaacaaaaggatttggactcctgggtcgaaaatgacttcctctgtaagaattttattcttaacggtttatctgacgatctgtatgactattataattcagataaatcggcaaacgaaatatgggatgctctgcaaaagaaatacgatactgaagaagctgaaactaaaaagtatgttgtcagtcgctacctcaagtatcaaatggtggatgacaaacttgt

SEQ ID NO: 306703 - DNA, 1284 bp, Cannabis indica
gtagcattttgattttcatcaagtgaagttggcattacaagatttctatttcgagaaccaggagcctcatgcacaggaggggtatcacttgctgaacctgtgggaattgataatgagggtgcagcgggtggcactggaaactcaataatagctgctggtgcaatgttgctggaactggaaccctgcacatgcatagaataacttgccagatttggcacaattgagttagtggttataggtctgatatgagtgtcaacagatgaaggctgagatgttgtaggaatgacagaagaggtgtaaaattcaaaatatgagtaagaatcagtggtttgtttgggtaatgtggaaaatggaaaagatgtttcatcaaagataacaatgtaaacctaattactaaaaattaacaactcataggtgcacgtgtctatcatagcattaaaatatgataacacaaacatgcatgcaatgagcgtacaatataaataaagtaagggattgaggaagcattataaacttaaagagggaaaacctacaaaaaaatattaattaggtcatttgatcagaaaataaaaattactgatcaaaacagtaaccacctctaaagagttcaaccctacctcattggaaagtcgtacttgggaagtaaccccaagcattaacttccgagaatgctacatttttttatatggtttcaaggatctcctacatatgcatgtctattacctttaacaatactcgagccgcccaagataggtgagcaaaaattagccaccatctcgaggagatgttagagtctcacattgctaatgtgtataaatataactgttgggaataaattcacttaatttattaagttagtattttcatcttgacacttatcagttgaaatagaagaagttgttgttagttataacagttggcttcgatacaaacttaaataaagcatcaccaacacctataaatacttgtgcctcaactctctctcgaggggacaccaatgctcatacttttgatttcagaatcaagtctagagaggcattgtctaaaatcacagtgtgtgtgtgtggatggatgtaatgatagtacttttgaagtaatttccctcagtgtgagatataatttgtaattgtaggctgtgttgagtggtgttcttatacgtatttgattgtgtactactcactattcttataaataaagattcacaattcattcattctcgagctaagtttattcctgcttaatttcatctaagttcagttttgattttgtgattggttctagttt

SEQ ID NO: 306704 - DNA, 1226 bp, Cannabis indica
acctcaatcatagattggaagactgtgaaggatcacatccaactgaaggaccttcaggctcagatcttgattatactctgcgacagaaaggaatcaagggttagagatctgagtggaaggagacacattattccgctgcacccactgtaaggtttcttgactttatatgtgttttatttattatcgttttagaagttcatatttaggttgttaaatcaacatacttgtgagtagatctaagatcctggtaaaataattccaacaagatacaccaagtaatcatcacatgaaatcgcagtggaaaatttacttttaaccaagtataatagaggaacattacctgcgagctatctcggtatttacctagaaagacgatttttaatctttacttttttatttctcagaaggttacttgtatactgcgagctatctcggtatttcagtctgtgttctcgcaatttagtaaaagtacaaagaaggcgccaatctcgatccctgattgaaagactactcaagacttctataattttcacgtgatccctatctagtttagattgagttagtctacctgcgagtacaaataaaggttagtattcgtaagataaaaggaagaaaaaaaatactaagtataaaaatctgcaacatacgagaatggtgattaaagtctatcctaactccaggcaatgaaaacgcataaaaccacttcgatttctaatctctcatattagaaatcatgccttctactctgttaacctgagagttggcccatttactaaagcagtaaaagttgttgtcatggccaacgttcttgatgtcgtagaagtaacaaaaatcctcgatggtagattcccttgcgtgtattccatataaattgcatagaatttgaggacgattctataactgttgggggtgtgctggaaaggagaaacgtcgtaatatatcaaaattgctttgacaaagggatggaaaggaagagcaacaccacaacgaatgatggggactgaaaccacagcgatgctagttaaaataattacagggttggtgaaaggttggtgaggatgttgtgttgacacaggtttcgtacaaccagaaccagtattgatcaaattcatttcttggaacgtcatcaaatcagactttcttactcgcaaaactaaatcctcgcaagaaaatggttcatccaaaggagcatctgttaggttataattagcctatgtttcgggtct

SEQ ID NO: 306705 - DNA, 588 bp, Cannabis indica
atatatatatatatacatggtgagttgcaaatagtcggttaggtgatttacatgaggaagattttcctctagtttcttatgatcgatcaaatactaccgacgttcctacgaaaaataaaaggaataaataatactacacacgtttactttgaatgattcaaattcaaaaaacgagacggacgtgcattacacactatgacactaatgactaatgtggatgctttttataggtgctaacaaaatccctttttaaaagatggtgtcccactgttaaatcaatttaattccaagagagaattataaatgcggtgtattgtcatttttaaaaatattttattaaaatttaaatttaatggtaatgtaaaatatacgttaaattttgcccaagctaaaaattatgtccaaatttagcataaaaaatagcacgagacaaatgttagaacacaataaatactacatttttaattatctttttgccaactattaatattatttattaactttgaataaatatttataaggagcattcctattaggcactagtggtgactagcactttcttgaaatgtcgcgttgtgattggctagc

SEQ ID NO: 306706 - DNA, 819 bp, Cannabis indica
tcctagacagaggatccgcttcctatattgttgtgtcgtgtacacaaaaccgtaggctgttatggagctcattgatctgatctaggtctagatggaaaaaaaatattatttattcttctgttttaaaaatatatgtattagtctacattcaaattattttccttctatatctagttaattaatagaaatttaaataataattctctcgttgttttaagtacatgatgactttctatatggcacaacaatatgcaatgtatgcagcatctgttagggaaatttgataaaccatggtctcttagtatgtcaattcatttcaaaatttatacttcatacttctaataatatcttttaattcaaatatatatacttttaacattttcaaataaattttctctctccaactctctaactccctcccctctcaaactcactatctccctcactccggcgacacaccaccagcctcttaccctcttaaactctctctctcttccactccagtgaactcacaacaccgtctctctctcattctctcactctctaactctccatcgccccttggttccccacgacattcccgacaacccacaagaagatcaccgaagccctaaattgacacctagcccttttggccacctacatttctactattgtttacgttaataacaagacccaagctacctacccatgattctcacaaaatttggtaagtttttattttttaatttttttttttgagtgatttttctatttattaggttttgaattaaaattttagattggttttgttgattatggttgagattaaggaaattt

SEQ ID NO: 306707 - DNA, 2995 bp, Cannabis indica
gtgatatagtgagatatttacgctactttttaaaaaataatttttttttttaaaacatgtggaaagaaagtttttaaaattttttctaaaaaaaagttaaaaattttattaaataaaaaatatgtaacttaatattattttgaattaaaatattgtaactataagaatatgtatctttactgccagcatttattctccaagtacacttaattaatttactgatactgttgtactttccctgaatagtcaatttcatggacccactttttctttttcttcatggaagtggattgtcgcttagatcgttttttcctaaaatagaagttctacaattccatgaaactctcatttcaaatctaaccatgaagattgaaatgatacttttccatccaatttctgatttaataacacagaattttaggtaccaattttaatttagcttgctccttaatcgctgcactttcttctaagtttcttggaaagtccaaggaaagaaaaatgaaaattccacaaaccaagaagtatgacgaggtcatttttatttatttatttatttatttttttgaagattgaattgacttgacttgagtaaacgtaagcagccggagactgaagacactatctttttcaaaggaagaagcaccattattaccaataccatacataaatgctagctccacttaaataataaagcaactctatcattgagagatacttagtatatatctgtcaaattttaataattgaacatgtggatcgtaccttattggggtctgagtatgattacttttttttattagacatcttgctaagcagaacactagtgattgaaaaccgccctctaattaatagatagattatactgattttattttaattttaattaatttctgtagtttgtaagacttttaacaatgtcatatacattacagttcatatttgtgatacatgtggaaggaactgacggagccacattgtaacacaggcccccaattttttttttattttatgttattttaatatacaattactatggaaaaagaaaattatatatagttattctattttatccaccctaaattaattctcatacattttgcccccaaattttattttctccttccttaatagaagaaagttatatcttactacttactagtactactattaaatactaaataactataaaatttactatagttataatatatatgataataaaaaaattgaaactaaaattctctcctagatactaaaatagataaaaggtctattgaaatactgatttaaaattctttatatatattcagaaaatatattttttttttaaagatattcatacactttataaaatcccacaattcactcacatattttatgtaattataaatgtaatacaaattctacaaattaatatcgcaaatcaagtcttatacaataaaatcttttaaattacatattatgagtgtatctattttaaatatttatttaccacttgcatccttttaaattattgtttttaaaaaaacaaataattttgaagactactattcaacgaagcaagaaataattaatcatggattatatatataatttgttgctttcactatacacatacattagttttttatttatttatttattattcttaacatactgaaaacatattataattataggagtttcaagaaccattcagaaggtcatgttattttatctatatataccacaacaaccacaaatttggaacaaaactgatttcattattaataaattaatagcatggttccaaaaattaagggtaataataaagacaatcgtgattcacgaatgagcatatttctaactttttttccttgttaagttaagatgtagttagttaggacactgtaaaggttttgaaaaattctaaaaggaaacatttgcaagcataaatctcaaaaatttcagcttgatacaaaaaaatttccaacagtttattaagatagaagagctaagatggttatgctttgttgagcaatttaggggtcacaatttgttgatttggaagcgaatcaatagtaagctcagcaacacgaccggaagaggatggggcagccacaattttagaggccctaaaaattaaaatttatatattatatatacatatataaataaaatatgatatataaatcttagttcaattgcataaaagagttgtaatataattaataagttggaatgtatattggtgataaaaaaactataatgataataataataaatcaaatagttcaaaaaaataacttataagaatattataacttaaaaggttaaatgaaaataaaaaattattatatgggaataaaaaagttgaaattaatattgtgtcaacatttaaacaatatttattttaaatttttataaaagaaaaaggccctcaaatttcgctttagaataccaccttgtcagcaagttataatgatagtaacaattactcttgaccaatggataaaagctcaagatcgacatgttatctctatgaactcctttgtgtcgagtgaaatatggtcttgagaagtaaatgctactagttgaagaaaccttcaaagtaaatattaatattgtgttatttgctaaatttgagagacaattttactttcgttatcaaagattctttggggcagttagttgaggttcagataggatgtaagcatggagttgttagattaaaacttttgaaaagtaccattaggtttaaggaagctttgagttggattaagtagaagctaccaaaaagaatgattgtcgagatggacttgtaacgtccccgcttcaagcctccattgggcccttacacccacggactaatggctcttatacacgagttcatcactctggctgcttcatggactaatgactgaccctacagaccaacacgagtattttcagtgtgctttgtcctcactcacacacatcctgggaaaacttcccaggaggtcacccatccttgaaa

SEQ ID NO: 306708 - DNA, 858 bp, Cannabis indica
aaaaacaacattccttgatataatgaactgcttgttgttaatatcatacaattggtatcccttcaccccttgaggataccccatgaaaacacaggtgcgtgtttgaggttcaaatttagtacgatgtgcagtaagagtagaagcaaataccaaacagcaaaattccttagatggtcatagtaaggggctttgtcaaatgataattcataaggagaagagttagctaagtttggtgtaggtgttcaatttattagatatgcaacagtcatagcacattcagtccaaaattcgattggcaaatgacattgaagaagtaaggcacgagcaacatttaaacggtgctgatgttttctttcagcaacaacattttgttcaggagtttccacacaagtaaaatcacgcaaaataccaaatttagcaaacaaatctttgaaaagtaactcggaggcattgtcagacctgaagcatttggatatacaattaaattgtgtttgaacataagaaagaaattgatgtataatataggaaacatcagatttctgtttcattaagtaaagccaagtaaatctggttttgtcatcaactaaagtgagaaagtacttgtggttggaatgagatgggatgtgataaggtccctaaacatcacaatgaatccaatcaaatttatttttcagcaaaattattgtgtttaacaaaaggatgtttcttttgtttagccttagtacaaatataacatggagagtttttatgaattttgtctatattacactgaaatttattgcagagaagagctaatcttttgttggaaggatgtcccaatcttgattgccaaacatcagcagtgttgggttttatgcc

SEQ ID NO: 306709 - DNA, 1080 bp, Cannabis indica
aatcttaccataaaaaggaaaaattattttgtcacctaacttgccaaaaaaggactttacaaggtggaacaatagactccattgcagatgtcttacgtacttataatgctagagcattttcacgatatattattaaagtgaacaactatttcttctgaaaaaaaaaagtgaaaaactatttctattcaaatttggtgtgtagaatgtctgattatcgatcttatttgaattaaattacttttttttctttcttaaaatcaactaattaaatatgtttaaaatctttttcttgttttggtattgccaggctggactttgacttgccctttcaatttggctgcgttagtgaagatataactttcaattctacgcaaaggttagatcattgtataaattttcaagttatttcattaaattgtgtttcatttataaatttgactctcacaataataatgaagaaaataacaaaataatattgttatataatttcatttatatcatatatagaaggagagtgcacataacttgaaaataaacttcttatgcaaaccatatatgtatataatgctaaataaaagcaatacttataacataagcattaaaagttatgcagcagattagaatggtgagctatatggggataacctctaagctaagaaactctcaactttactattcattgtattcaatatttgcaatgtgtggggtgtgtttttcagctattttgttaaaaccaaatgacacatacagtttttacaatttcacaaatgcaccacaaaattgaaatttcgtattttaatagtatcagtttattatttaattaaattcttaattaaatatagaataataaaactggtactgaaacagttttatagtaactataaaagacagctttgtagcttcaaaataaaccagaaaaacaaatagtgtagaaaagtaaaaacacacaaagtttttgtacgttgtttcaacaattctttcagattgttactagtcatagagccacgcccagaaataagattcattaggtagatcttaaaaatacaaaataattaacttatgcataaatagactccctct

SEQ ID NO: 306710 - DNA, 1074 bp, Cannabis indica
tatagtgcgtgtcactgaatatattaagaaccagacaacaaaggctgcagaaatcttagtggcaaagttaaagacaaattaataagaatattttctataaagaaataccatttaattatatatatatataaatatatattatcataaacttacttttattttttgttttgaaaaggagattaacttactttttaaaagcctctttatttcatcaaggggcaaagaatacattacttacttaacccaccacaccactaaatctacatctaaatcttgttaatattttctcaatattttatatcaaattttgttatcagaaattaaaaaataatttttattatattacagtctacataatagttcaaagattttatttaaataatatttatcaattaaattaaattttaaatagttaaatatacgcgtaatttttattttgttattatgtataattaattattttaaacttagtaaaataatggttataaatataatatacattgtcataaaaaaattattagattataaattctctaataattatctaagaaatttcctaatattttttttaatttagatgagaaaaatatcattaaatttcataattacatctttttaaaagtgttaacccatacgtgtatgtatacatacataaaaaaaaaggctagtatatattgggctcttctttttattattttctgtttttattttattacttttaattttgtggataagagggggatctctctttttcagaaattaattatagtaataatacaatatacatattattattttttctagtatagttaaaaaagatagacactatgatacaaaaattttgcactatttaaggcaaagtgttacaaaatagattcctaaggcacatgtgaaaagaattatagtgattcattggatactaattttgaccttattatatatttatatatgaatctattaaaaaaattatcaacttgtatttacttaaattaattaaaagataaagttcaatgatatattatgagaatgtgagaatgtattaccaataagtatagtttttttcttttttttttt

SEQ ID NO: 306711 - DNA, 3534 bp, Cannabis indica
tttccactactaacatcaagcctttcgattcgagaccactactaagcagtaaggtcagactaagattacctggacttcattaaggttcactccgtttctttgagaattgataagaaggtgtccaaacgatcatctggttggccgatagtggccactatatgcagaaatggactgaaaagtcaaagcaattgttgattagacaccataaatcagaacaataagaactttgattcggtattgctaatatgtctagtttgtataaagagatagaaggttacaaaaaactaaataagggtaacggttcaatttaaacaggtcaaatataaataatgcattactcagcacaagcgaattaatttcatgcataataaaattcttctaatgtataccttcagcgtcccaagctctgcttctagtctccctgcagctaaggtagcccccccagccaagaagctagaatgatgaaatacccctttctttttctgaaaaatatgaaaaaggaatcagtgtttcaggaaagacaattcaagctctgaaaactgaacaaattttctttaaaatgaaaaatataagtcatctcatgagtcatttcgttttcttttttctttttttttttttgtattctcacctcgccagcatacagttgcttaaaggtgctcataacaaatatccacttggccccttcctgtccttcttttgtatcaaggagctctccagtttgtttgtgaataatctttccctccacaacaatgtattcgtaatgttctctctcttgctaaaatcagaacaagccaaaaagataaaaaggagtaagtataactcagtacagcaggaactggggttataagctcataaactatgcataagatcaatctgatcctctttagaacttacaggtccaagatatttgatgcattgttgcctaagctttgatctaggacatttttcgaggtcaatctctttaccatctcctatgtccaacctaccagacaaataacaatataatttacaagatgaatccgagtactgctaaatccattacacaactatagagataatatatgaaatggtaaatcttctcaccagtaaaagaatggctgaccagcatctgctttacaccactccttgtagtacagatgcaagctatgaccatacctatgccttggatcaatctacataaattattgacaagtataaatacaaatccaaagtcataaatacagtaataatatggttgaaattgaaagcttcaaattaagcgaaaaaccagatcattcgacacatcaaaaaggccaaaacaataaaaaataatataagaaagtcattacagcttcaatccaatgttggaaagccagtttttgtgctttggcgtctttagacaaaccctttcccacctggacaaaaaagtcaaagatttcataactattaatcacggcaaaacgcattcatagccgacttcttgtaaaaataatagtagccaaacgacaagaaaaattcaaaacccacaaatatattccctcatattgttctgtataatcaatccaaacccaatatagctttaacaaaataaatagaccataccttagaagcatttaagctaacacgattccacctttcagcagcggtttcaggttttgagaaattgaagaacgaaatcgtactgtgattcagtctaacgtagtccaaagcttgccacctacagaagaatttaacatttctcttcaattaatttccctaaaaagaaaagctaaaataatcgttatcgtactatttgaactgaaaacagagaaaaagagagtgagatttcacgaactttaccagagctcttccgccacaacggcagtgtccgctaacctacgccgtatgcgataacccctataaaccttctgaagtttcaccgcagcactagctgactcctcacgcgtcgtcgaatcaccgtcgactacaggagcctcgctgccatttgaagtaacatgctgatcatggacagtcaaaggagattctgaggcagacattctagggctgagaaagcctagggaacgagagtcggaggaggaaatgctcaagtccccgagtgagtatgggaatggaggagaagactttgactggagctcgaagctcgagagcgactgagcttgttgaacaacttccattgaataagaatcggtcaaagaaacgactgagtgaaattattcgtaactcagtccgagtcaccgaggattctagagagagaaagtccacggccggaaaaataaaataaacgaatggtgtttatagagagagaaagctcttcttctgttttctggactagattttcgagggttatttaaccgggaaaaaaataattaataaaattaaaaaaaaattgaaaacgatagggccttgtgtcggtgtgagagccacgcgctgagctcagagaaaagaattggcaattggggtgctgagctggttaaataaataataatgagatagaaaaggaaaggcatttattataatggtagtaagtaagtagttagaatgaaaaataaaaataataaggaaattctagtattttttttggcttattgagtgagacacttttttttctttcttcatttcgtttattttttctaagaagaacaaaatgggttatctttaaaagtagggaaagatattgacataattgactgtgaatcacgtggtgggattatgagagtggaaaaagctacgaaattgtttgtgaagtcaatatgagtatgtagagcaaataagttaccaaatcattcatggtcttcatgaatttcagaataataataataataataaattgtatgaattttcgacgtaggtgaagtaattttaacaaaatttggggaaaaaaacgtgattttattttaaataataatgaaatttcgtacgagtcttcctaactcggttggtgtatgtaggaggagtaggagtagagagttttaaggttataaagcttgagttagcaagagcagtacatatggatggtccggcccccatatatataaactccacttatataaactccatttgatttttacaaaaatactaaattttggatgaaagtttacataaatgtgtttattcaattcaatttgtactattttgctcatggtgcatccgatttgcactaagtgcagatttaatattttagatccaatctaatttgcacaatagctcgaatccaatattaaattagttattctgaatttgttatttttcaatattaaattatttaatatttataaaaaaaaaatattttttttcacataattaacaataaaataaacaaattattgttattttatgtatccaacaacaaattagaataaataaaacaacaaataacaaatttaaaggaagaaaaaaaattatatgtataaagaaatgtttaattttgttttaaattgtatgtaaaaaaattatatataagaataaaatatacatgatctattaagttttgaaatatatttgttgtaacgtcctcgcttcaagccaacattgggcccttacacccacggaatgaat

SEQ ID NO: 306712 - DNA, 1657 bp, Cannabis indica
tcagattgtaaagtattaagggcacaaaacccaacacgaacgacttccacatttgtggtatttttgaggttttttgggtcatcattttaaagaatgtcttttgaaggtgagttcggttggtggtaaggatcattaaaatatggagattggattcaggttccttttctggacaagattactagacagatctctaaaagctctcagggccatgccttgagcgcttctacgactggtgctgtggttcacgtggtaaaggtgagtgaacccttgactattcggccactggacggtggtaatgctaaaggtggggctgtgctgcagtcggttcctagtgatggttttgggaaaggcaagggtattatgttggaagattcagttaattggcatcccgtctcggatgcattcattgttcaggatccgaattccctacctattttgaaaaatccaaacgtgcacttatcctttaacaggggtggtgacaattctttatccaaaactaaagatgattgtcatgttttggatcatggaattgaggtggatgaaagtggtagcgacattggttcgattaataatgcgactagtgtggtgatggtggataaaggagataaggatattttacatgtggctcccaggcaatatttgcatggtgctacgtccatttcttctgatgcaaggaagaaagctaaaaaagtttctttgatggataagtatggtgttttaaaggtgaaatccaagagccccaaaaaagttgtcaaacggggtttaaaggatgaatgctttcttgcaaatgttgatccttctgggttacacgaggtgcaagttgacataattaaggatgtcagtgacgttaccctgagtaaggtaatgtgttctcttttacctgctgtggttgggagagatgttgtggttggtttggattcggtggaccctgtggaccagggccactgagcattatgaattatatatttggcttggaattttcagggtcttgggaatgaccggaccttccaaattcttaattcccatgtgaaagagttttcgctagatatcatttttttgtcggaaacacttgtgactcactcggttcttgaagtgatgagggttagattaggctttgtgttggaatatgttttaccaggatctagatttgctaccatgtatgtttttaacatcctaatatgaatttctaaaacaatgtaaataaacacatataaagtttgagaaaccttacagtcagtgaagcggaattaaatgactccttccgctcagatctctaacccttgtatcctttctgtagcagagtacctccaagatctgagctcgaaactccttccttgtgtttggattcttcagagtcttacacactatgattgaggaccaacttgatgtgtgtgggcaattactcaatcactaatggctaaataatattttgtgaagaaaggcttcgtgtttcgaaaattcaagaggaagatgagaaaggaagaggtctcatcagaaagctaggtttttaactttggaggcattagttggataatgagaccatagccttccttttatactatcttcaatagggttatggttgaattattaggaaaaaaaaaatgataaaaatagggtaaaattaaacttgatggccagccacttaatgagccccact

SEQ ID NO: 306713 - DNA, 1412 bp, Cannabis indica
ataacacaaaacaacactaccacaaatatgggattcagtgaccctttttaaaggactctaaaaaaatttagtgacacttcaatgtggatcaccaatgtaggtacgtcaagaaaagtaattactgactctttggggcaagtgactaaaatattttggactctctcattgcgtgtcattatagccttttaaaatctcatgttgttagactctaaagattagaactacactcatagcgtgtcactgtagttaatttttattttttttaattatattctgataacacccacacataaaaagcgtcactatatcatgatttaatttttttaaaaaaaattaatatgcaatatactatatatatatttttttaatttttattttattagaaaaataaacttaaaactacaacacaataaatgtatatatacatttatattcatcaaatttacagaaaaaatacagataagtacactgcaatataagtgtatatacatgcatttaacaaaattacagaaaaaagaaataagcggataccatatgtatagaacaaaaaatatttctttaaatcaatataagacatgtacacttcaatacaaagtcagaagagaatggtgggtgttgattagatttttagccaactaacgcggagtcggaataaatgagatttaaataaaaaactatcaataaatatgaagaatgacaccagaatttgcaataaatgtaaagaaagacactggaatttaaagagattcggccccagatgttataatagcctacttcccttgtattttattgatcagagttgtaaaatcaagaacaagctcttgaatgcaaaaagtaacaatgtcagagtctcttttctctaagtactcaacttttcgaatccctttcccaagtcatggctgaccctttatgtaggggaacaggtcagtacttctctcttcaagagacgcgaccaatgctaagccatctcaactgcctccttggttttcggaggtggttgaaatatgattcttatggtaatatcccactatttttgtgggtttgtaaccgtctttgagcttcttgcgagatttaaatttttgagctagccactgaagatagttaacccccttcaaggatagaagctaatacttaggggtgacacccctaagacccaacttaaggagggtgttagtggccgtctcggggtgacacccctgagacctcttcaatgttgtgggtagccttggtgtcatgaggatgtactcatcaatcactaagaatgtcgctacatttgtggtgggagaagtggcatctaccccctaggctaatttaagtcgtaggtgtggtggtgattgtttattctacctacaagggtgtcagtccactattttttccttggaggcaaccaccttgctcaagctaggggtaaa

SEQ ID NO: 306714 - DNA, 3245 bp, Cannabis indica
gctctcataggttctcttctaccatttggtgtttttcacattgaaggtgttggtgtcttagcaacaatggagaatagcaatatgggaggtatgtgtttttacatttgtgatgctctaaataaaatataaatcttggttaatgattatgagtaatgaagattagcatttaatgtgtttttggtttagctcataatcatagaaaattaacactcatcacactgttcaggttgaaaacataagaaattagtggagaggtcttttttttctgtggggagattaaaaataaaaaataataattagaaataggtatataaatacaaaaattactattaaaatagggatggaagtataaaaatttatttaaaatggactaattataaacactgtaattaaaatatatatatcattattaattatctaactaatcattattaattaaggtttaattatatattactttaagtaataggctgatagcctaattaatttttttccacatgtctaatttctcatggagccaaaacaattgaattattatacagaatagtagtatggccaatattattgagaaataattaatttattgatgttgtattttattgtgcgcctagtttttgttctttgaacaaatcattataggttttaccctaatgagaacctagagaaagccaagacataaaaatagaactctaaatgaatggttggcaatattagacgtttgatatataataatatatgccatttgaaacctaattatcaaaacattgaactgacattttattttgtttttttcttcaattgtgacatcaatctaaatatatagtcaatctcatcgacaataattccgaaattctctctctccgtaaattaaaatataattaattatgaataataatattaattagtatgacaaaaataattttatagaattatatcttaaaaccaattagtaatatatagttgaaaattaacttgtattttaataattagttattattttagttatctctttctgtaattaaggttattaattttgaaatgaatacatgccctaataaatatatgtatatatatatatatattttttatttctgctggatgcatgtatgtaggaaaattaaaactgtcaaaccacgttaaattttatgttattttgtaatatttaatttgttttctagtacgtttaaataaattgcagtaaaaaaaataacacaaataaataaagctatctattcataataataattacaaaataattagactaataactcgattatatatttatatttattatatattccactattacttataattaagcacttcaatctataattaacctatagtacgtaatatatatatatatattcatttaaaatcaaggtttcttgtacgtaagaaaaaatgaaaaattaagaaagttaattaactagcaacattaattttaaataattatctaataattattacaaaaggccaatatatatatatggaagagaaataagtataccttcaagatggttttggaaaagctgactttataataaactccaaataattgatgatcaagctagctagtgttgaatatatattagaaaccaattaaaaaccaatatacatttagatctcgatcgatctacatgagtatatgtataatattatatgatatatagttgcatgcatgcatgtcttgaagtttaatttaactatagatatatatatatatttaagttggtcgaggggtacatttctccacattcgtttaattattctctgtacttatttttattttttcttttccaaatctttggattcttacacaagaataatacagtgtgtgtattatacaggtatatagaccatatgtgtctttgtatcttaacaaacactctttctcttatagtatatataatgtaatttgtatatatatacatattattccctttagttattttattaccaataacttgcaaagattttttatcataataatatcaaagagagtaaaaaaaaaatcatgatcttgtcatatttgtcatctagttaaaacaacccaatagttaaagaagaagaaaaagaaaaatgttatatataacaaagacattagaatttggaccagggaacttattataagctaatgtattggaccaaatggaccaggaattaagtacttgagcttttatacatatatatacatatacatatataaggaccaaatataatattataaggaaaatatatatatatatatatatttacatgagagacacaccaatgtatttttttttttcaaatttttgttaacaagctggtccaaccatagaaagttggagtggaaaaaagcatattgatcgataaaggttgcatgtgatgaggggtacaatagtctatatatatataattatgtgttatcatgacagagcactaattgcttatatatatatttatgtaaatatatatattatatagtaaatatattgaacctgaaaaaaacttgcaatttgaatggaccatactgttaatataaggaagatatagcactattgactataccccttctataccaattctttttgcatctcttaaaaacaatattgagaaaagttcttttaatggttaattttctgactttttatttattttatttttttaagaaaacaaaattaaagttaaagtgatggatcgagtgaaattgtttaggttttttctgaatgattatcatgatcaatcttatcacggaatctcttatttgttctccattgaaatatattgctaaaataaagagattgactaataaaacaaaaggagcattttcaactatttaactattattttattattacataattaatatttccatattcacacgtattattttgcatgtttgaatatcaattcaatacgtacacttacgagtcacttaatcaatcgaatcaagatcttaattaattaatcgagtcacgtacgagtcacttttttatcggagatcttaattctaattaatcatatatatatatatatatataaataattaataggacgattataaatccttaacgaaaaataggacgcttataataaataatttagattattaacttaggcatgaaattaattaatttatcatgattacactttgatccaatttgtttccaaagtagtaaaagtagtgataaatactaaaagaaagcatcaactaccgttgatgtatgcatataagaatgaattgaattaaatttaaaata

SEQ ID NO: 306715 - DNA, 4304 bp, Cannabis indica
ttctattaagcacgtaattaaattaatttcatcattttacccttctcgggtcaaaattattaaaatgcccctggctcaccaacggggtcttaacatataattaatcaaataaattctcatatattgaactatataataatataattcctcaattattcataattatctaattagggtttcgctaatccatttcttatttctagggtattacagcttctctctttgctccatccttcttcggtgtattaccatctaaaaaatcagaaagaaacttgctgcaccattcaacaatagcagcagcctgaggtttgtgtcccccatggttaaccgaatttcgaatataccaaagattccaagacaagaccagaaaaaactcaaagtcctcctttgccaaactacctaccattctcatcaaaaaagcaagaacatcctctttgccttgtcttttaattttgccataaaacccggttgttttccaaacatcacagtttactttacaatcccataatgcatggaaaacattttcatatgcactactagaacaccaagtacaaaaaggctctacttgaattttccgatgagcaagggccgaattggttggtatccaagaatgagccatcttccaaacaaaatgtttcacctttggtgggattttgagcttccaaagttgtctccaccacttctcagtaacctctgtatcggattggatgtcccggacctgtagagccgccaccatacgatagccacttcgaactgaatattccccatccttgctataatgccatagaaccttgtcttcaatatcacactccgaagtggccatttgaaggattaactcgacatccgttggattgaagacaactctaaaaaactccccatcccattccccattccctttcttcaaatcaataacatgaagttgatccggtagcgaaggcttgtcataaattttgaaggtaaccggcctaggcagccatgggtcttcaagaacccgcactgaatttccattcccaattcgccatcgataccctgcttgaatgatcttttttccccacaccaaacttctccaaacaaaggacgcatgattcccacatttagcctccaacaccccaacattaggatagtaacttgccttcaacactttgctccataaagaattcgggtaccgtatatatctccatatttgcttagcaagaagggcttgattaaagaggcccaaatcccggaacccaaggccaccttgctccttatgtttacaaagagtagaccacttacaccaatgaatctttgcatccttttccaatgatccccaccaaaatcgagctgccatgctatgaatactattaatagttttctttggaaggcgaaagcagctcattgtgtacgtagggatagcttgaacaattgcctttatgagaacctcttttccagcaactgaaaagaaagaccctttccacccctttagtttattccacaccttattcttaatgaactcaaagtgttgcttctttgttcgcccaacaaaagatggcagccccaaatacttcccataattatctaccactttcactcccatcaaagtatccaagtgagtcttaaccgaagcagaaacagtatgaccaaaacacatctcagacttatggaacttaacaagttgaccggatgcaatggagtacttttccaacaacttttgaaccaccgacattcattttctgttgcttcaagaaacagaagactatcatccgcaaagaagaggtgcgacaccgttactctctgccttccaaacacaatcccatgaagcctaccttgttgttcagcatgttgaataagacatgaaaaagcttcagcacatagcgaaaacaagaatggtgaaagtgggtcaccttgtcggagaccccgttgtggaagaactcgcccctgaatttcaccattaatgagaaaagaaaactatacagaagtaagacaattcataatcttctcaacccatagcagactgtaccccaacttcaccatcatggcttctaaaaacctccattccacctgatcatatgccttctccatgtccaacttcaaagcaacttttgagccattacggaatctattctttcgcatcacatgtaaactctcataccccacaatggcattgtcatggatgagccgacccttcaagaaagcactttgcgaatcagaaaccacacttccaagagaaagtcgtagcctatttgccagacattttgagacaatcttatagatcacattacatagactaataggccgaaactcttctattctttgtggtttatcaactttaggtatcaaggccaccaccgtatcgttaatgcacttcagatctgcccccttattcagcacatttagacacacagctataacatccgcttttagttttgaccaaaatttttggtataaaagtgctggaagtccatctgcaccaggtgctttggttggattcatctctttcactgctcggaccacttcctcttccctaaactcagccaccaaattgtcattcatagctaaggaaaccttcggttgaaccacactaagcacctcatctagagcagcctcatttatatctgaacctgtaaacaactttccataatagtcttccacaatcttacacactaagaccttatcatcttgccaaatacccatgtgatcttgtagtcctttaatttcattcttctttcgtcgggaagaggctttatgatgaaaatatttagtgttccgatcccccaattgcaaccatagagctctactcctttgcctccaatattgttcatccttttcaagcaatccattcaacttatcttccatttgtcgtatagtctcccacaccctcggttgttgcatcatagttaactcatggagcgcttttttagtcttctcaatttcattgtttagtctatgcttctttttccgattacaattctgtagagccttcccacacttattaatcttacatctaaatgaacccggtcggccgctgccacttctctcttgctacacccggtccacaatctcagcacactcctcctcatgacaccatgcttcctcaaaatggaaatgacttttccgtttagacttcccacatttaactccatccactctaaccggtatatccacaaccaacgcccgatgatccgactcccaccagtcaagcaacgtaatatcaaccccttcgaattggtccaaccactcctctgtacataaccctctatccaaccactccattatcggtgaattactatgttcattgcaccatgtcaactcatgtttcgtagaaatgaaatcaataaatcgacaatcatctaacacttctttaaacccatccataacccctgggagacgatctctaccacccactttctcagaaactggcgatttccttaaagtccctgatatagagccatggcccttgcacttccttcctcaaatcccgtaaaagctgccaggaaaaccgacgttggcaagcttcaggattaccataaaatctagtgaaaaaccatggcgaaaacccgctccctgcaacagtagcaagtatatgtccaggtgaactggacaaatcttgcacctgaatatcaactttccacattaacaacaacccaccacttaatccgactctatctactgtccacaaattctcatattgaagaacactacacaccctttcagcttgagcccggtttaacttactttcagctaagaaaattagactcggaccaatatcacgcacatgggattgcaacgtccaggggttcccaatcccctgaacattccaacttaaaagtttcatttcactcggcggccttgattaacaaggctcgccacttcaatttcagtaaaagaggaagataaatccaaaaaattagaaacacctacctccgagttagtatcacaaactctgtctccttcattcccatctacaaaaccagcttcggatagtccaaccgcacctgcctccatcttcttcttctcagggacaagacaacccgcttgcgatccacccattttagcttttgcccgagccttatttttaatcgaaactctcttccgagactccttactgtggtgcccgtccccttgcacttcccttccataacccagcataaatcgccctgtatccaccatctccaccaacgtgtccccttcaaccgaagctgcacctccatcattaatagctccctttcgaccacacttccatttccttccctccctctcatcctcaatatcgaactcaaccctgttgggttttatgccctaaataaaactcattacaatctgat

SEQ ID NO: 306716 - DNA, 1250 bp, Cannabis indica
ttttttgttttgatttaatatttgagttagtttgtgtttagtttcattagttatgtttgccaccctttcatcacataatgagtgtactaacttttactatttttgtattagtctttattcggatcatctctctttagatttgtattagctttttctgcttttcaagcatatggtagacatactatgtattaactattaattatgtgtcatttaaaaaagaaaaataaaatatttacaaagtacaaatgttgattctaattttaaataattatcctaatatatacattactataatcagagtcgtttatattcccaatttttttaaaaaaaaaaaaattgattttttaacatcatatcgataaggtccccaaaaaaatttgctacaacaattatttaaacacttattaaaattttgttccaaactccataaaaaatagagaccaccctaactaaaatagacattacatttttgataagtttattttaagatgcatgcttttaactttaatttagcattaaaaaaacatttttgtgagcattaattatagaaaaaaaaaattaaaaaatagcatttgttttttcaatgataatcttcattaatcataaaacaatcacattcttttttgaaaaatatggatcatatagtatatattttaaagcatatatacacgtgtgattccaacaaaaaaaaaaaatatatatgatacatactagcattaaattattctccatccaatgataagaaaacatgaaatattatttattgattagtaatatatgtttgagaattaataatatataaatttgtgtatggagaattaattaagggtagtgtgacattattatatataataatttatagttatttaatttgttgcccacaatggtaacaaagtggtccacttcctatttccacaattaatttgcctaattattttggttgatgatgactagctacttatatattctctctctcttatttcatcttcaaatgcttttttttaatggaattaataaattggcttcatatatatgtcaatatattttactaaatatatatagagcaatccatataagttttattaataaattttgatagtttattgcaactcattaataatttctcaaatatgattgcgtgtaacataatggttgctaaaaaaaaagtgagatttatttttcttgtttccttcttttttggtaataattaatttaaatttaaattaatatataatattttgaatatttaa

SEQ ID NO: 306717 - DNA, 3310 bp, Cannabis indica
ggtgaattgtgattcaccacaaaaaatatatacaaatagtttggattactctaaaacctttttcgtaagctttttgtaaaatacttcaccgatttgaaatctggaagacaccgagaaattaaatcctttcaattcttggtatgtgtttacttcctctcaaaatgagacttgagaaaattctccctcgaaaattcttttgcctcttgtatatgttaagagaatatttaataacacaaaattatagttacgacattcctgtaaatgtttaaaattttttgaataatttatagtgccaaaaataggtttaaagttttttaaacacacgtagtaaactagaattaatatcaaaaattctattttcaatactgtaaattaagagttataatagaaggttgtaattaagagttataatatataagtgtggaaatagaaagtatatatggatggatttgatgtgtctatagaagttgtttagtatgtattttacattttttacaatctctacacaatccatcatattcaattcttccctcaatgaataccttgggtcgtgttttaaataagatgttaattagttttcggtgcgaccggcctggccaataaaaagacgagttaaagtgtttgctttgaaaaattggcgtttagattgttgttttgcgcctaaggtggctgaggctgaggcttttttttttttttttatagagtctataatatgctcaaagttgttaattttgtagatctgttgatagtttttatgtgcgtttttatatgaattttgactacaatttaaattccattagttgctaaagtaatttttacgtaaaaatacaaaaaaaaaaagaaaaaactattttaaaaaacctctttattttatcaaatgtaattaaatgtagcaatttcttgaaaataataaaattactatatttatatatatatttatgatatacctcttacgttttttcattaaaataaaaaaaaaaaaaaaagaagaaaacacatgattaaaaagattcaaaaatatagaaccaaattattaatcataattccagaaattatcaaaacatcaattccaagtagaacaataaaaacaacaattgaagtcaaacaagaaaatgttcatcaaattttgaaaaaaaaaaaaaacagtttatttttttctcaaatttaattgtcgcctttggaagttgctgcatctgttcctctaaggcggccagtccttctggccgcagttagaccaaccttttgacccggtacagcatctctggcgacggtactagcatgaccaatatgctggtggttaccgccaccatgaggatgctctactggattcatagcaacaccccgaacaatcggccaagaattcctcttggctttgtacttgtggtatgcatttcccgcctttaacaacggcttctcggtccttcctccacccgcaacttgaccgatcatagcccggcatccacttggcaaaaccttcttggcaccagatggaagcttaactctacatgaaatatcaatatatataacaaattaatgaataagattgataattaattctcaaattacaaaaacaattaatgcaaatgatatatcatatcacaattaagatcttctaaatcatatctcaatgcaagaataattatgaatttatgtatatatgacaaatatgttaattttaggcagacatttataaacttaccttttataataaaaaccaaattttattaatttttaaaatatattaatgatcatcaattagaaaaatataaaccagaagtcagaaaaattctattaatgatcatcaattcgaaaaatatcatcaaattagaaaagaaaaccatatatatataaatatatatatatatatcatattattagatcactactgtcaattatatcaaaatcgaagcttgaactacatcaaaggaattaacctaatatcaaaattatatatatatatatatgaccagatctcatcaaaccaaaaaatgtcaaaaaaacaattgatttacatataccacaaatatcaaaatcgaaacataattaaatatacaaaagaaacttcttataatcgatcaatatactatatatagatataaatatcaaacaattatatatactaaaaatcatgtccatgaatatagatataaaataaaaacctggtagtgccattatcagggttatgagaaataacgacagcataatcaccagaagccctagcaagagcgccacgatcaccgacatgtcgttcgacattacaaacgacagttccttcaggaagagacattagaggaagtacattaccaaccacaagatttgctttcttaccacaatagatgaattgtccactatacaacccttctgcagctatgaaaagctccttttggtgcttgtaccgaaaggggtggcgaaatgtcacacgagccaacggggccccacgtcccgggtcgtggatgatgtcattcaccacccctttcaggtaaccgttgcgctcaccaaagtctagggatctaaatttagctggacccttgcggtggtgcgtgtgggacttgaacaccgagcccgccgcacccttacgttgtgccctaatcactcgtcccatttttttgctcaaaaattagggttagggtttatggtggtgacgagtagaaaatgagagagaggggcaaggattttatatatataagagatagcggattagggttacgtttttttttttttacaattatttatttatttatttattattgtttttttttttttgaaacgatatatatttagtttcttaaatgagcgattttattaatttgggtaacttcataatataatattgtaaggaggagaagattgatgattttgttacgattttcctaaatatttgctataaatgggttaaaatattatttgtttattattttaaaactgttttaggattttgtttttatttttatttggagtagctggcagaggattacttgcaaagaaagtcgaaaacctatatattacttgtcctccaattaataaaggtaataaattttttaagggtcctccaattatagtaattattcacacacgaaatctaatggggtactgtttagggtttcagttgtaaatttagtacgaaatttaatgaggaaattacaccctataccttttttatattgtcctattttatttttacattatttttacctcttttttaaaattgtaccaattttactcttgtcacttcaagatactctttatgtgactctcttatgtgagagttatttttttttttgaaagaattatgtgagagtattttgggtac

SEQ ID NO: 306718 - DNA, 3484 bp, Cannabis indica
tttatgtattttcatgtaaactacctcattagaataggaaaaaggaaaactaagtataattcatataaacactataaatacccacaaatcctccgaattaagggttgaattctcttgaaacatttgctcaggcaaaaataaagagcttacactcattgtattcccaaaagctttctagtgaaaaatacataataatattgaatcgtagactaaaactcgttaacacccccaaccacgtaaaaactatgtgtgttgttctattttttttctttggattatttatatcttcagttctactctcttataattagtttttcaaaaatctcggtaaacacatatcatccaaagtgtagtgtagttggtgctacttttggaaaaaactcatgtcatgctaagcttgaaggcatttacaatgacaaatttcaagctatcttgtatgatgcttattatgagtgtcaactgcttattgatgtggtatggacctcatataagtttttttctctttaaatttttgtgtcacattggggataatgtgtcagataatttggggaagggaacttatgtttatttgtttaatttttgtgtctagtttttgtttattttgtgtttttgcgttgcaacttaaacctttgaaataaataaatgccatttgttgtttcatcttgagactaaattataatgttatcccaattttcacactctgacgtgacatttcatgctggtgacacgtgtaagtgattctccatatctgcccgaaggagatgttcccagcagaacaccacatatacctgcacggacgaagtcctcccagccgagcagtggacaatccgaacagcatatcaccacttagcaacttcagcatttgcatcgtgaagcacaaaagcaatccctatgaatctgggatcgtatcacagagatatggcaagctgtccaaatccctcaatcagtgtattccatatatgtaatgtgtaatcttaccaattatagacattgtaaacaaaagggaaatcttccctcaagcacatagccctataaatagtgatctattctcattgggcaagggtcgactaaaaattatctaagagagcatattcagagatgtcattgtaagagctttaagagaagaatctatgtaatctttgttcttaattaagtcaatacaaatcaaggggagtaggctattactgaactgctcggggtcgaacctctttaaaaactatgtgttctttatttatcttttcatattatatctaaattatatcacttatcgcttacaattaagactcattgtcgttagctaaaagtgaggtcaacagttaataaccgtgtgcttggtctaattgttcttttgctaagctttggcgcttgttggaaaattgagtataatttataaatgtgactattttgactttgttatacatgcttgactagggttagaggtttgatgatttgaattagataaagttgcattgtttggcctttgaactaaatcgatgatgatgtgtgctttgataaataatttaaacaatttttggaatgtttacgtctttcaagtcatccttgtattatttatcctagttagccatttttgtgcattcacttgtttatcttttattttaaaataaattatgagctagaaatgattccattattatattttcttgtccctatttatattgtaatcttagcataagtttggggaaatttttatttagaaaatttagcggtataatgtgaaaaataaaggatattgatgagagaatttcaagaaaaggagttactagtgactaatcgaaaaaaaaaattgaaagaaaaataaaatagatatataaatgtgcgaattgcagttttattaaaaaagaaaaagaaaatagaaagagtgttgttgtaagtctatcaagaaaggttctctcatgtgcttcaaaagaaagggggttttagaataatatttgattgtaatgggtgagttgattggaaaatttatggtatgggtgagcctaaatgtcactttccatctaccttgacctaagcttaaaatattaaaactcgttaaagtccttttcacttcaaagcatatgttgttgatattagtggagaatattaaatggtgcaagcttattgataattagtacgtgaaattgtttgaattgagttgagtaagtatagtgatttctaattatttattttcaactatgaatcatatacttttttcaaatttgagtgttaaggttagttgttggagaaattggattgaaaatctgcatgttttgcaatagttgagtcttgcaagtgatggtggtgtggtgtgaataaaagttaaggcttaatttgtttgtcgttgttcattaattttcagtttagtgtcgatctttactcgagggcgagtaaatgttaagtttgggggagtttgataagctagtttaggtacatttaataaagtattttagaagtaggtttatttaataaagtattttagaagtatgtgtcaattgattatatttattttgtgcataattacgcttgttttctacttgtttcaggtttgaatggtaaaatttatagtatgtattgaagtaaaaagaaacgtgttaaatgagatgaatacgatgaatttatcatggaatttagagttctaagatataatggatgaaaatttttaagttttggatgttcaatacgctctatttatgatcgaaaatcaagtctaaaactttaagtaaatttttgactatgatgcattaacttttaagaaaaatattgtgaatgaaaattctagatctctcttgcatcttttcaaaacatcttgaatcatctaatttcgaacactatcaaaagagttatggccaatacattattagtcgtcacactaggaagcttgctgcccaaaaaccaagtacctgggatgcggcaatgaaagggctatgtcgcgacccgcctgcttttaaaggcccattagggtttttaaaccttgattttgaaaattcaagggcgttttcattaggtaacttgggaggcatgaaaatgggagagaaaaatgagatttttcaaggcaatcatcattcattagttattttcttctatcttttgtttgatgtttctaattttttatttgtaattttttttagaatgatgattatgagctaaagtcctatttaggctttttaatggatattgtatgatacttttttatggtttaatgcatttttagttttttttctcagtttcttatgtgaatctacttcattcgtatttaatgttgataattaattcgtcagtaattatttttttatgatttcaatgcaaaatttaaaaaatgagttttgattatgtgttagaatataatgtagattaaaatatttaaatgtgacatattatatattaatatgagattaatatatattatgtgttggatgttgtattatatcatatatagtataataatacacataaaagttgtaacatatgaggagttacaaatctgaaa

SEQ ID NO: 306719 - DNA, 6345 bp, Cannabis indica
tctctctctctcctctctctctctctctctcactctccatttttcaagaaccagcaagggtttgagattctttcagctcaatttacggattttctagcaagattatagtgttccaatccaaggtataacccccttagctctctctctctttgatttcttatgttcaaagataagttttatgcatgctttgaaaactaggttgttgtagtgattgtttgttggtgtttgagtattttgtagtttaattgaaggtatttaggcagaattagagttattttgtcgcttggttttgtgtttggataaggtttgagctttagaactcaaactttagtctttaatggtgaattgtgttttgtgggtatttcttgattttattgcatggattatgtctattatgatgtaaataggtgttttggaagttagtgtgaattttgggattgaattgagttgtttgggaggtgtttggtgttttctacactgaactggtcgaccagttcagtgggacctgtaggaaccaaaattctggttggtccccaagaaaccccacagaattggtcttctggttagggaaccggtctgccggttggagcagttttggaaaccctagtttttcccatttttgcgatatttagggtattgccatgttatccattgtagggaaacttagggaaacttttagtttcaattttaagtccccaaaaagtgatttagcgtgtcaatcaccagttttatgaataatgtgatttaggggcctgtaaatcgtcgagcaatagttccacttaggtttatcgacacatttaaattcagaaataaggtaagattagtataatgatatgcatatgtgtttacatgtttagcatgcatatttatggagcatattagattagattgatagcggtatcagtatacatagagttgtactggataccgatagatgtatgtttggctcaagtacgagattgaagctatcacatcagtacgactagagtatgactagagtattagtataggctgataatatggttgatagtactgccgtaggaatgttctagacttagtaccatgttggacactgggatagggttatggttgggtgtatgggtgcatgattataatccgttatagttatgttattgattatacttttcttactgagtctgtcgactcacatatattgtttacatgtgtaggtaagggcaaggctaaggttgagcagccatgagagcgagcaaataaagattgtacatgacgaagcagttaggcctagagcatacggtctttatgacagttggacatattttgtatagtcgctaggcgacaacttttgtagtacatgctttgtaacgattgtaagcaaccaatctactaatgacttcaaagttccaaagttttttagactggcagcaaatttcagttcctgccaacgaggaggacagagactatgtggctcgcagccattatctgaataacacaacccctcgggaagctaaagatgaggcctccagaggtaataattttggtgtttgtggatggtctccaactgttcttaaagatgagcgaacaaccttaggtaaatttagggatagtcagtacaacttttacatttggaattgtggaggagcttttccaagagcaaatttctagtgagagaaagtaaaagtgaataaagggctgcccccaaaactcacttaggtagtacatgtgggccccccttcttcttatttacttcacgaacccatcacgatggcaactaaagcagttatttctctacttcaatgagatcaaatagtcaagataaagtgcttcaataaacacatcacttttattcagcaaaggtgacaacagtcctaacaatatagttggtaaagtccctatctgtgcaggcatctgtacaaggactttgtacacatgatcccaattacacacatatatgttattttggtatttataagtatttaaacaaagttttaattaatcagaattttcaataaacttgttgattagcaatgcgccgcacaattggtataaaatcatgataacatgcctaaactagtagggtgttacattttggtattagagccatcaggttgtcatccgaagatcatcacggcttgtacaatcatgatcagcgattagcttgacccgcagtttagtaagcctttattgccttagtagtttatcttattagtatgttataggaaaagcgtgataggatgaatgttagtagcctgatagctgaataggtgcatgttttaatttccaaaataggcgataattagtaaattattcttgattttgatctgaccaggccagcttttagtttcataggctattctaatagaatggaagccaagcaaaacacgaggagttagggtaattcggtcggatccagtggtagttagggagttcagattcctcagaatatacgaggccgaggcagaggccttagaggcagggcatgcggtcagggagatgtcaacccgccacaggctgtccaggagtggaaaataggtttgtagtaatgcaagcttgaatcaatgaacaagatgaagaaatcagacacctgaggcagcagggtgcttctgcaatgcattctctagagatgcaggtggctcttgcccctactatgcaggcagggccgattgctgcagtgaactagatggaaccactgtacgaaaggttccgtaaataggcacctccagtctttctaggaggtcctaatgtgatgaaagctgagcagtggctgaaagttattactcaaatcttgaacttcatgggagtcaccagtaatgacaaagtggcatgtgccacattccaattccaggaagatgccttagtttagtgggacatgctggccctgacttgagatgttactaccattacctgggaagagttctaggaattgtttaatgccaagtactacaatgaggcagtcagaagtgcaaagaggaaagaaattacctagctaactcagaaagagaatataactagagtacacaacttagtttgattgattggctaggttagcctcgagaattatgccaatcaattttagtaagaaagagaagtactttgatggattgaatccaaagataaaacacgatcttatgattaccactgatgacaacaccacctatgctgatatggtgggaaaggcattgcaagctaagggtgcagttgagtgcaaggggtggtagtgactcgaccgctaacctgaaaagaaaggcaccatctgcatctagtggctcaagtcataacaagaggttctaagggaaccagggtcaaggcaactgtcagggtggttctgacacccgatacacctacccagaatgtccaagttataagaagcatcatttgggtgagtgtagagggcgaggatgtttgcagtgtgggttgctttgacactttaagagagactttccgcaactcaagaaatatgaacagaaggcagtagcaaagcccgctccatcaagggtgtttgctcttacctaagatgatgcagaagctagcccctcagttgttacagttcagctctcgttcaacaattcttacttctctgtattgtttgactttggagccactcattcctatgtggtggccataattttttgataaattgggtagaccatatgatatttatgataaagggtttgtaaccctactacatggaggagaattagttttctccaaaaggtgggttaggtctacgccgatcaaaattgagaatagggaggaagcaaaaagggctcaaatggacaaattagtgcaaacaagccttttaggctctcaaacatcatttgggcaaaccttaaatcctttcaaaacttatagatggcaaagaattattcatctatttagttatcaacgagcatgctgctagttctcctctggtgcatgaggatgaaaggacagaatctttggtgtgttacgtgaacaagcgtcatattgaggttgagtcaaggtatcccccattgaaaagctagcttgctgcttagtactggactatagaaagcttaggccgtaccttcaagcccattcaatcaaagtgttgactaaccaaccactcaggcaagtcctggtgaagccacaacaatcaaaggccaagcattagcttatttcaccgtggaatgcactgacatcgaaacaagacaaccttatgctctatgaagaccaaagtcccacacctaagactgcaactcaaaaggactctagacccttttggaagctttatgtggatggatcctccaacaagcacggctctggcacaggactcatcctcataattctcaaaggatttcgcactcattatgcattatggttcaaattctctgcaacaaaaaatgaactagagtatgatgcactcctagcaggaattttattggcattggccattaaattttaatcactagatatctacagtgactctcagctagttgccaatcaaatcctaggcaaatattaagtctgcgggctcaaaatgatagtgtacttaaggaaagctaaaaatcttctagccctactaaaacactacttcattcaaaaagtaccacacgaatagaatgcatatacaaatttcctagctaaactagctagtacaacgaactttgacaccctaagcatagttcttgtcgaataccttactcatcccagcatcactgaggactcggagcccattctcatgatcgacaatagtctgtcatgggtgactctgatagctcaatacttagagcaaggtattcttttaacagacaggaataatgccaaaaagttgatgagaaaatcaacttgttttatcattatggatggaataatgtatagaaaaaactactcaatgcatcttctaagttgtgccacgcaaaatgaagcaagttgctcatgatcaaagtacatgaaggtttttgtggcaaccatgctaggggcaaaggctctcaaagaaaatattgagccaagggtatttttggccaacaacaattgaaaacttgatggagtatgtcaaaagatgtgacaagtgccaaagattctccaaaatacctagagcttccccaaaaaatcttagaatcatgtaaaatcaatggtcatttccggtttagggtatctatctcacaggctcattgcctaaaggaaaaggctgagtctaatacgcagtagtggcagtggattacttcactaagtgggtcaaagcagagccctagccatatttacatcaataaaagttcttgattttttagttaaaaacatcattttttgctacaaacttccataaaaaatagtgtcaaataacgaaacacatcttgacaatgacctttttaccgacatctacgaaaggcgtggaatcgttagagtttttcagcagttactcacccacaagccaatgggaagtcaaagttgtagaccaaactcttagagatatgcttaaaaaattcatggagccagccaaaggaaactttccaaaagaattatccaaagtgttgttgtttactgcactatagaaaaaatagtaactggccatactcctttcgctttgacctatgggcacaaagtaatgatacccatggaaatcacacctttatcccattagagactcacatatgatcaacacgccaaccaccagttattggttgagtctctggacaaaatagaagagattacagaaatctaatctctgcaaggttgcgtatcaactaagggttgcccgacactacaactctcagttttaagatagaaaatgtaagcttggagatatggtgttgcgatgagtattcctagatacaaatgatgcaacaacaggagtactcgacccctcctatgaagggccatataacgtcataaaagcactagaacctggaacatacaagatggcttgttatgactaccacttgaatctagtgccaataccaaggtactggaatggggagcatctaagataatattactaataaagcaactgtcttcaaacaactcgcttcacaagattcactttaccatgtgcaagtgaattgatcgactctcgaggaaaaaagatgcgatgaagtccatctataggttgagaggtccatcgccaagttacgtcccctacacggttagtccaacagggcatcagtgtaatggggatcaacttagattttttgataaaaatgtatatttgtaaatgcaatttctttcttattcaaataagctacgtatgtaattgtatgtaatttctaatgaataaaaacattgagtaaagtttttttggtacttcattgttattaatcaactataactcacaaacatgacaatgctctcaagcgctgagtaaaacttctagggttggtcttgaggtaactttggttatttctttagtga

SEQ ID NO: 306720 - DNA, 935 bp, Cannabis indica
taaggttatgtgagggcggtcttgaattttagtgggacataggaccaaaaaaattgggctctcttattttaaaaaatatgtcatttttaaaattagtaaaaataatatgtatatttttgaaaagagtattttttttggggaccttagacttggtggaccccaagcacaggtcttcctttaacatagctctaattatgccggtcctgagggtgtttggattctagaaaaataaaaatattattgatcctttattctaaagatacgtggtatttttaaaaattattaaaaaaattatttatttctaaaaatgaattttgttttgtttttcgaacttatcgtctggtacttaaatttatatatttttgttcgtgcggtaccaattcgcaatatttttttttgttatagcataatgctcttgtgtgtctcctgtcaaaaaaaaaccattccatatttacagcacattcattgagcttgatgtagctttatgacccaaaaatcagtcaaaagaatttaagaattgcgtattgggcggtgaatatttattgattcagtttctaatttctttgcttttcgtgctctattaatctcttttcaaagtttttgctttctaaattaatacagcttttgactagtgtaatctatacagccttcagtcttgagtcttgacacacacattttcgttgggtttaggatttattttgtcaaatttatttgtttcattaactgtgcttggaaaaattcatttgtttcattaactgtgtttggaaaaaaaaaaaaccaaataaattatgttatagttttctcaaattacttgaaaagattaatctagtctaatataattgaaatacacaatgttgaccaccatctttcgagtcctatttttcttaccaactttattcaaaaaaaacaaaattatcagttaccaacttaccact

SEQ ID NO: 306721 - DNA, 1476 bp, Cannabis indica
aaaagttaaaaatttaagtatgtagcttaaaattaaaaatttctattaataatgatgatttaagtgatagggaaagacaattaataactcaatttatgtattttttttctaatgaaatttgttatttaattcaagataagaagaagaagaagaagaattagaggctttttggtatggtacttttaaaaattgtgtttaggtaaattttcaaaaacaaaaaagaatgtactatatgtatatgtaagtagagcgatctcagttttaaaattgtgtttagaggattccaatacatactggttttttttagatgaacaacaattgatgaatttctcatttagaacctacgatatataagaatctggtatgtactctcattccgaaaaaaatgatggcgatgagtcgaagaaaatagaacaaaagtaatgagggcatacaataaacctaaagaaaattcggtaaggccacaataattttctttttgggtaagggctttgattaagaaagagaatgaagtaaataaaataaaaaataaaacctccttataaaggacagtatattctctgaggtaatgagtaaaaagtccttcctatgtatcaatatcgctattggtacaactaagtatcgggtcccatataatttaatataatagtttttagggagtatcgctagccaatcgcaacgcgacatgtcgcaaaggtgctaggcaccactggtgcctaatagcaatgctctttaataaattaaaagtacttttcgaacaataaataatgagtttaattgcataacacatatattaaattccacaattaatgagctaatggttccactggctcattgaaaaatctggatctaatgtatacatttaggagaatgctggttaagcgaaataccgctacggttaaagcgaccagcaatagagtaaaatactcaaagatcatctcaaataaaagagtaatattttttcttcataaaaaaaggagtgataaaagcacaacctaggagagatcatctcgcatgatacacccagttaactagaagaagaatttatatgttttgcataagcccaaaatggtaaatattaatttgattacgtgaaacaactaaaataacttataatgaacagctcataagattcaagatgtaaattgaaggcactaaacttgttaaggcactcaagaacatttctagtgtagatatcgttaacaaggagagacaagattcatcttaagcttattgacgagtgcacatttgtatattcattcctagtcaattattagatgaatcaatatttgtgtatttctgtactctttatatttgtgtctaacacttatttagcatgattttttcttgttagttttcttataaaaatatttttaatcaaaatgtcaaatggcaaaactgttaattttacttttagtatattttataaataaaaatattttatattatattcggttgtatatatatatatatata

SEQ ID NO: 306722 - DNA, 2715 bp, Cannabis indica
tttttttttttttttttgaggggacaaatagttgaatatcaataacttctttaatagtacaacatgactaattaacaagattaaagtaaactaaaattttataaataaataataacattagaatagatagttgtgatttttgcaagctaagctaaaacccatgatatatatttcatagggttatgaatttaagaacaagatgacatatctttatcaatgtcctcctcaatctatagttgcccttttgctttcatacatttttacttgtgggtccaacctttcttctcattaaatttccaatagtctctacaatcaaatctattttccaaaatgggattctttttttttcttaaggggagtatttgtatttccattaagggttttcttaaaataaacataaaaattatgaagtggtccaatattattacatatattaagtaacaacttttaggccaagcaaagcaagtgtaataataatgatcccaattgctcaaatatatctcattttaatttttcaattaacaacttaattaatggcaaggtcaacttcccttaacaatttattagttgttattcttaagcagttattttgttccatcaaacttataattaatcaacttctgttgcctctattcaacaacccttttatttcattttcaagagaaaaataaaataaataattagattgttactgaccatccaaggtcaacacagtaaaagtcaagaaattaaggtaaatgaaattggatatgagtatcttcagcttcaagtagtctctatattaaatgtatgtgctttggaaaagaagatatatatatatatatatatatatatatattttagcttaatatgtagtattaaaatagcttgaagttacttttgttttgttccttaaaaagttgaagaataaaatataatgccactcaaaaattattgactttgaatttgtaaatatatatatatatatatatgaggttaattagcacttaacataagcacattttataatgaaattatataaaattataaaagagtattcttaaaaaatggtggagacatagaattggaagttgaaaagagtcatttattatattgatggttaaaatttactttcgattttatgaaatgtttctattatttttgtttaaacgatgaactaatatagtagttcaaattttgttaaaatttcttatattatattctggtcgtcaattcaatgtggaggatgttctaactgacttgctattttatttgatagcagaatttgttggttaattttaatgcaagaattttctatttaaaaaaaatatatttttttaatttaaacatttatatattacaactattttttacttgggactcgaacccagaacctccaagacacacacccatctatgggaactatctagcatacaaaaccaaatgaggcaaagaggatgtcaatttttttttattttttttttaaactttaaactattcaatatatataatatacacatatgtgtatatgtgggacatgtttgatggtctttttacatatattgaacttgatatagacacaaaagaagttaacatacaacccattctatttttatttttattttttttaacagacaaaagattaatgaaagtattattaaattagtgatcctctgatgaaaatcagataagaaggtgatcatgtgtattaaaaatagaaaagtttgatcaacagtacacacatatgtttttgtcagataaacttgaagaatttcctctatattttctgttctgtgtcattagttataatttgagaaattatctatttatacacatattatataagtacatattttatggtatatcaaattgcaagtggtggaacaaacaagagacatataattttagagatattaataattaatggtaattaaaattgtaaatgtagtagttaaattaaatcccagtttggatattgaggacaatcaaaacaatgacataacaactatgaaattgtatatagttaaagtgagagatcagacaaattattttataaatcattacattactaaccgataataattatgaaaatctgttaagaactcacctttcttacttaacaaaaaaaattagcattaagtgcataaatagtagtaaatacaaattaaattaaatggattaggcagataattgggtagtttagtggtttttaattatgtagctaataataaaaatgatgatatgtttggaatgtttgagaggagcatgtgacttgagctttactccaaattatttattggtttaaaagtaacatacccacttagtgtgatatttatttaattgggggcatgacttagtttgctttgaaagttgataataaaaacttttacaaactatgataatattattattaattattattgcatacatattaattatatatatatattataatataatataagccatagctttccaacgttgcttctcctttccacttcaaccccacaaataaaacaaatgtgactatttatttaccgaaacaaaaatgtggctataatttggttggaatttatattactttattaaatttcttcgaatcgaagattccaaagttgagaataataataataataataagattggtttattagggtatgtttggaaagtaatattaggcatgtttgtctgactatgtaattacataactgtgtaattggaagtaattgaggggtt

SEQ ID NO: 306723 - DNA, 2523 bp, Cannabis indica
gagcatgttatttagtttttttttttttttgtaagtgtaatagtcactcttttagtggagtacatatatcaagcaattaagattgaaggataaagatgagaaatggagtttgttaattcacccctaatcttctctatagagtataatattataaataaccactaaaattctaatttctggggttatgaatagggtaatattcagagcttgactgctactgatctggacagatatggagctcatgcatggcttctttcgcctccttgtcagccatacactcgacaaggttacacatttcttcttcaatcttcaactctttctttctgttacatataaactattttgtagaagtgtactgtaattaatacatgtttttagtaatgacttttgagctacttcttcttaggtctccaaaaacaatccaatgatcctcgtgcattttcattcctcaatattctcgaattgattcgagatacttcacaacctccaaccatgttatttgtagagaatgttgttgggtttgaggtttgctcataaaagtttgctcagctcaattctaataagacttatggagtcatcttttaatggaaaaattctttttctgattgcagacatctgatacacattcgaaaatgatagagatattggtaaaagctgattttgtcacacaagagtttatattgactcctttgcaattcggtgtgccttattcgaggccacgctatttttgtctggtatcttcttttctcagaggttcctagtcattttgaaaagttaaaactacaagacttgtctcgtaaatcatctcaacttgtatgaatttccaatataggcaaagaggaaacctttatcctttcaaagcccacattttgataatcaacttcttcattctccgagcccactatttgggcgtggcaaacttgatcaaacacaagagagcttggataagttgatccaatcttgtaagccaatagaaagctttcttgagttcaagaacccttcccagcaacctctatcgggttctatggaaagtgcaaatgcagtggatgattatgaagctccagaaatagacgataaaggagatgatcacgatattagctctttagaacagtattttgttcctttaaatttgatagagagatggggaagtgctatgggtatccttattcttctttatgatggataatactttgtagtgtctaatttctaatgaatacttctgtgctagacctctttatcaagtcatcagtatgttccgaaattctaactatgattagatattgtctatcctgattcgcagcgctgttgttgctttacaaaagttattatcggtatgttaaaggtactggctcccttttagcaactgtcctggtaagatttcattccagtcaattaatagaatcatgtctgaatttccattccacagttcagtaaatcatcttttactaactcatacttactgaattcatgtcattgtttacattttccattcatttacataataatggttttgcagcctgagaaaaaaggtaaaacatctccattgaaggaacaaggtctaagatattttacccctagggaggtatattcatacatagaatctctcaccttttcagattcatttgtttgtctcttgttttcttttcaatcaagttttggtcaaaccattctctgtttctttcccggacatatcaggttgctaatttgcattcttttcctgaagatttccactttccgcaacacataagccttagacaacggtttgtcctttataactaattgctccttcatccaaacatttttttttgtttcagtaatcaaaacatttactaatttgttgttctccatgtttcagttatgcattgcttggtaacggtttaagcatagcagtggtgtctcctctactgcaatatttatttgctgaatcgtcatgattatcggttacatgcctttcgccttttagtgggcttaaaccgaatctcagcttctctaccatggcgcgagtcttctctcgattgaaatcaaagagtcaaagggcatctaacttgtactcaaggtcaattttcgatggatttattgaggtgcaaggcactatactcctatcacccgaaaaccgtagctgtggaacagagatgaacttgagatgttttgtgggactctctaacagtagtgaaataagtagccagatgtaatttagaagcagcttaagcagagagatttcactctggcctccaagttgcattttgttgctctattagcctttcttttataggagtgaaagactttgcattttaagtataaaacttctcctacatcttttacatttttcagcaagttgtgcttgtcccacatccatatattctaacaagttgtctatgtcccaggtataccaagttgaatgctatatttgtaattagtatttagtacataaaaaagaagaggaaaatccaaaatttatggctttttatatatatattttttgggaaaattgaggaaaaagtaaaaaaaaataatgagaaaatc

SEQ ID NO: 306724 - DNA, 2193 bp, Cannabis indica
ttttattttatacatataaatgtctaacaatcacacgtaatattaaactaatatatatatatacattaattcttaattaaaaatagtcatgtcatatagtaaacatgtacgtataaatacaattttttacatataaattatataaacttacatgttggcaattgcttgtacagattttacattttgattaacaccctttgagtcgtgtttttaaatttttaaatcatggaatactctgcacttggacacattactctgttttaattgcattattaatatatattattgatgttatatctactacactgcacaatattatctaaaaatatttatagttaatttatttcatttgtaatataatattataaattatttttggataaaataatacagaatcatattttatttgagttacgtacaaagcattgactgggaccagacaatactgttagcaggtctattattatatatgtatgtataatgtaaatataaaatattataaaaactgaaacatatcactcattttgatggatgtgtttattattattgttattatttatttgaggaaactgatagctattattcgtattttccatgcatgtatataattatatattaaggagagagtgaaagagagagcttctactaactatattatttatggtggaccaagaaaacaaattgaacttgagaaaaataaatattatatacaacgttcgtatacatttatactagtcattagtttaagtcacatcaattaattaaatttataaacagtgtaaattactaaaatgtatttgatttgattaattaattctagagtcgtttatttgtattattattaacaagaactttttgtttcggcagtctctttagaaaattagtatcctaataattatgttctataattttattcatagtaatacaaatataattaaaacagttataaataaatataaggatttttcttttttttttccaaaaaaaaaaaaaaacttaagtcctcgttaaaactttaattgggagaaagagtacgaaaaaaatgtcgcatggaaccgttgcctcaagcattgcagcaatcttaggaactgggatatcatccacactccaagagcctgcaatttcatagctcataatgttgccaaatgggcaaaaatcacgaatacttttgggaacattaatcctctggatctggggtcaccaattctggatgattatgtggagtggagtggagtcatgagaatagtttaagatagaatggtttctatgtttgtagttgtttgttctgtgttttgttgttgctttagatttctagttgttgttttgttggttcattgttttgtgtgggttggaccatcgcgccccctccccctccggcttttatatacggttgtgttaagtaatgaatacattcaataagagcaacaaaatgagggtagccaaattagtatgcacaccttatgctcatcctccaccaacactagcttaacttaagagggagcaactccatatattagtctacttagaacaatgtacaaactgaattttagaaaaatcattacaaattaaaatgacatttttaacaatagatgatcctaaatagaaatcatgacaacgcttagctttcaaagcactgaaatcaattcgactagttgagattacaattgagagagaaatagagagaaagcttatgaagtaaacctctttattcaatgaatcaaagtatgtacagagaagtgtttatatagtacagtacagaaaaagattaaaggagctaacacactaactaacctagcaaaaattaatagactttaactaccaataacagacagtacatctagtgttgagtatcctcaacatcccccctcaagctggaaggaggatactctaatgacatcttgtgacatagaaagttaaattttggtagtgtgagaggttttgtgagtaagtctgcaggttgttcttctgttggaatatatgaaatttagacattatttttggtgattagctctctgacatagtgaacatcaacctctatatgcttggttcttgagtgaaaacagggttagaggctaactgttgagctccttgattgtcacaccagatggtaagagttttagataaggtgatgccaatttctttgagtactgatgtgatccatgttggaattaactttaccaggatcttagatct

SEQ ID NO: 306725 - DNA, 1582 bp, Cannabis indica
cgccgttgccggggatcgaacccgggtcacccgggtgacaggcgggaattaccactatactacaacgactttgttgtttacgctttgaacatttttgttgttaaacaatataaacatatctcgtataaaagttaacctgcaacgttaccagcatacattcatatgaaatgaattataattatagaaaatttactagtttgaactatttgagttagtgttaaagtctaaatgcattcttttagaaagtgtgaattataattgtaattcatttcactcattggttatccatatgtaaaatgactttacatatttatattaataactagataataataacaatttattaattagtccctatacaagacctacaagctacaaataataaatatattatgagacttcagctatagcctcccaacaatcggtacaaagcttcttgtatattaagtggctcttgcaacttttcttttcattttgattctccaatgtacaccttttgtttatatatcccagatttatctcttgttatcattagatgtgttggagccacttgagtaggtgcttgtaactcaatctttggctgctgttatggttcttcaaaggacttatttggttcttgatcttgcatagcattctcatcatcaacaatttcaaaattaacaacagaacttgtattcacttacttgactattgtcaatttgtggacttcgctaatgagatggtattgtagggtcgacttctaatagtgagtttttgggtctgaagctttgtatttcaccttgttgacccaaaggagaatttggaggaatgtttatgttggctgaccaagagggtacactaacctgaactgtctgttcttctctatgcgtatttagaaaatttgttttgaaatggaactcggtctcgttaaagataacatttctcaaaatatagagtcgccatatactattcaagcatttgtagtccttgtggctatcactatagcaaaagttgacacacttagttgaatgaaactaaaatttgtgtgtttgataggacctaaggcattgatatcaagctgaaccaaaggccttaaggaatttgtaatcaagttttctagagtacaacatttcatagggagacaagatgtttaaaacaggtttagggagaggatttataagatacacagcagtttggaaagcattccactaatattttatggcatgctagcttgggcgagaagtgtgagacccattttgacaatatgttgatgttttctttcagttctaccgttttgagctgaagtatgtggacaagaatgagtgaattcgatgccattttgaatgacaaattctaataggggttggtattctcctctccaatctgtttgtaatcttttaattttcttattgaattgattttcaactaaggctttaaactagacaaaggcattagttgcatcaaaattttcttttattggataaatccatgtgaaccgtgtgtgatcatcaatgaagtggatgtaaaacctgtaattgatgttagacataattggagatggaccccaaacatcagaatgaattaagtcaagagggaaagtcgc

SEQ ID NO: 306726 - DNA, 1381 bp, Cannabis indica
gagagagaaagaaagagagtgaatgaaaaagtgcggctgaaaagttagagttaattagggtttctctttttttttagtcagtctttaggcctatctcgacgggcctagcttggaccgccaagattggtaccaatctcgggagtccaagctgggcccgtcgagataggtttcaaaattcataattttttttttaaaaaaatacattcttgtgatcaattatggcggttctttaagagcccgccgagatagagaccaactcggcacacacacgcgggcccgtcaagattggtgtgtcgaaattgcctatttttcttatagtgcatgcatatgggataagaagattcatcctagacaagtcatgatgctctagagggcaacttctcatgttcttcctactattgacaaatttgattttgttggcaaggaaaacagtccttttcgtaattttgctactgaaagtttgttttgcctttttgttagatgtcccttggtttggaggggattttcctattcgcattgatcatatcttggagataatttaatggattttatcattaatgtgttcctctcggatgaacgaaaatgctaggtttgattttcttattttgctggcctttactataaaaattatttggatttggagaaatatggtcctcaggttaggattggttctaaggtatctccctttgtctcgaaagtgattcttgcagatggttctttcaaagacaattgatttggtggagctattttggtgattgattttgacaaggggatctagctagtttgtgtgtatggtccatggccttcaaaccagtgcgacttctcctgagcttgaagcagttattttggctcttcaatgggtgtttgaaaactagtggtatggcttttctattctctcgaatgcgcaacatgttatttacgccttaggtgttgaaagacccttctgattggagactatgacctctattttcctctatttggcacctggagaaaaaagttagttgatgtttcctttaattatgttaagcatgatgttttgttgtttgttgataagttgtccaaagatgccagggcgtctacccatgactctttgaactttcaaggagagggatctccccagtggactccagtttggttggtgatccgagttcgagttcgggtccatgtccaagtttggggttttggttcttgttcaaggttctggtctagttctaaggttcatgttcggggtttgtggttcgggtctgggtccaggttatggtatgggttcaagtttggggtctgtgttaggatatttttagtatttaatttaggttaattttagcacatttttcggtttaatttaaattatggttggagcatttttacgcttttatctttt

SEQ ID NO: 306727 - DNA, 1236 bp, Cannabis indica
aaaaaaaaagttataaaagttgtgtatgtagatatatatgtttatgattattagagccaaattgatatgttgaaaaagatttccactaattcaggaatatgactagactatacagtaacaaagttgtcatcgcacacaatagatttttgtttttcagttatgaaacaaaaaatccaagttcaactgaaccaatcatagacattagacaatattaatttagcagttcaccaaaaaaatatatattaattattgtagggttttaattaccaaaaatacctaaaccaacaattaataaattaatattaccaaattcaaaactgaccttatacttcttttgacttcctagagtcaaacaccccaaaacgattacgtttcaaagtttgaaactctagcagagaagaaactcaatctcaaacctagattaacacccagaagcacaatcaaacaatacattacaaatctagattgatctcaaactaagcacacacatacacaaataagtatagtaaagcaaagagtagaagacactaagattcttttccgaggttcacccaaaaaatctcaggctacgtccccgttgagctgttcctcagatggtagcttgattctctactataaatgtaatatctcaagaattcaattaagattaattaagaatatttttttttgaaatattgagtaatatgtgtattaaaagaataaatgagtagaattataattttactaaattaattatgtgagaagtaaagttattattagaaatgtgaaaaacaagtatagtttttacagagattttattagaatatatgctatttatgaaataaaatattttaaagttcggcaattgtagaaacctgattaattggctagaaatatcacggtggtattaatatgtgtgattgttatgcccaaaatttagttagttttagaattatgatcaggttattgcgggataattaattatgaccattttaaccatagatttggagatttcttaggaagcaagcaaggattttttagtcattgtggtatttaagtttatcgttagttttgtcctttgtgggttttctagagtgttagcttgagctgatcctattgctattaggattatgttaggatttgttttgaaagttactcttaatattttttttaatttttttttttacattatttatgttaatttaatacttattttgattttattttcatatttttttttttaaattatgtatatat
